United States Patent Application Publication US 2007/0054278 A1 - sequence listing, part 135

SEQ ID NO: 391955 - DNA, 201 bp, Homo sapiens
gtaaaagcctgcaggatttgttccataggatattactacttcctcttattcatagttgttaagtaattacatttttcttatttattgtgttaaatattaayataactttttctctcatctctgtcacattacctcaatgaattttcttgaatatttctttcagcctcttaatgaatgacctattaaattcattattatgat

SEQ ID NO: 391956 - DNA, 201 bp, Homo sapiens
tgagaatcgcttgagcccaggaggcagaggttgcagtgagcccagatcgtgccactgcactccagcctgggcaacagagcaagactccatctaaaaaaaaataaataaataataataataatactatttaagtaaatactagcatattaatgctatttaagtaaatactatactatcatattaatactatttatactacta

SEQ ID NO: 391957 - DNA, 201 bp, Homo sapiens
taaatgcttatcgaagtgttttttaagtgaagggaataaaacagatgtcacactgttcaaatatccagcagtcaatttggtagcacatgtttttttttttycccccaaatgttttaattgaaaagtattgtaattaacacttctaaaatcaaagctgatcactgacaggattgtatcaaaagtcaagagggacacagataa

SEQ ID NO: 391958 - DNA, 201 bp, Homo sapiens
aaagtaggaataaaaggaaattacctcaacgtaataaaagccatatatgaaaaaccccacaagtaacctcattcttcatggtaaaaacctgaaaacttgcstgaggaacaaggcaaggactcccactgtgatcatttctattcaacattgtactggaagtactagccatagcagttaggcaagaaaaaaaaaaagacatcc

SEQ ID NO: 391959 - DNA, 201 bp, Homo sapiens
tttcttattccaggtcattaatgaggatgacctggattctatctaacaccaatgcatgcaattctgctcaggacagtgtctctcactgaatgagtttagartgcagaaatttttcattatacagtttacatgtcttttttcaatgtgcatttttttatttgataatttagttgctaattattgatgggcaacaactaagaa

SEQ ID NO: 391960 - DNA, 201 bp, Homo sapiens
acagattggtctattctgctgttaatactttcaactatattatgaaattcttgcagcgagtttttcagctctatcagatcagtttggttctttcttaaaayggctgttttatcttttggatcctgtattgttttgttgtattccttagagtttttggattcagtttctactttcttttgaatctcaatgatcttcattcct

SEQ ID NO: 391961 - DNA, 201 bp, Homo sapiens
tttctactttcttttgaatctcaatgatcttcattcctatccatattctgaattctacgcctgttatttcagctatttcagcctggttaagaaccatttcyggaaaactacttcagtcgttttgaggtaagagggcactggttttttgagttatcagagtttgtgcactcgttctttctcatctgtgtgagctgatgatca

SEQ ID NO: 391962 - DNA, 201 bp, Homo sapiens
cattggacttatgtcctcttaaatccagttgtttctccgatttaggtgcagagcactgataactaataggctatcgcagataatttgacttgcaccatggrgtttattcaaattgcatatctaaacagtagtggctgatttagcatgaaaatctgagaaagtattttcttgatattcaattaatttttgtcttgcttgggt

SEQ ID NO: 391963 - DNA, 201 bp, Homo sapiens
caatttaatagtgttttcaatacatgagtttttacagttaatatggacttagtaacttgaatacataatcccaaaatcaagtcttcttgcaaagaataccmtaaaatcctttcttaaactaaatggaaattcaatttttagtaaatgtacttaatcgatgtgtaactcaatttcctcaccagtataatgaaataaatataa

SEQ ID NO: 391964 - DNA, 201 bp, Homo sapiens
tctttgcatgaaatctgcttggtgttctgtaaccttcttgtacttggatactgatatctttctctaggtttaggaagctctctgttattatccctttgaawaaagtttctatgcatatctctttctctacatactctttaaagccaataactcttagatttgcccttttgaggctattttctagatcctgtaggcatgctt

SEQ ID NO: 391965 - DNA, 201 bp, Homo sapiens
gcaaaagactttcatttccatatttagcactcctttaaggacttctttttttattattatactttaagttctagggtacatgtacaccacgtgcaggttasttacatatctatacctgtgccatgttggtttgctgcacccattaactcatcatttacattaggtatttctcttaatgctatcccttccccatccccccac

SEQ ID NO: 391966 - DNA, 201 bp, Homo sapiens
tttgttaactgagtgtatttcctgatgctgaagtttggggttcaaatgatcccatcaaccaggtactgagaataggacccaacagctagtttttcaactcytgcctctctcccttcctcccctctctggcagtccccagtgtctactgctgccatctttatgaccatgagtatccaacgtttagcttccacttataagtga

SEQ ID NO: 391967 - DNA, 201 bp, Homo sapiens
acctggtgttctattgtactgtggctaagctggcactcaaaccacaagacgcagcgcttcccatgcttccctcccctttccaaatgcagcgagcctcaccycatggccacggccacctcaggcccacagggagtactgccagactaccaccatgttccctttaggctcaagggctcttcagtcagcttgtgttgaatgctg

SEQ ID NO: 391968 - DNA, 201 bp, Homo sapiens
ttttgttgaggatttttgcttctgtgttcatcctggatattggccttaagttttcttttttactgtatctctgccaggttttggtatcagaatgatgctgrtctcataagataagttaaggaggagtccctcctcaattttttggaatggtttcagtaggaatggtaccagttcttctttctatgtctggtagaattcagc

SEQ ID NO: 391969 - DNA, 201 bp, Homo sapiens
ttgactattccaggtacctcacttaagtggaaccaaacagtatttttcttattgttactggcttatttcacttagcataatatcctcaaggttcattgatrttatcgcatgtgtcagaattttcttcctttttaagactgagtaatattccattgtatgtatatatcacatttggtgtattcattcattcattgatgaaca

SEQ ID NO: 391970 - DNA, 201 bp, Homo sapiens
aatttgaaacaaatttcccagcctgtggttcttatcaaatccgtcatctatgtgttcaaccctcaattctgtagacctcaaccattcttttttttttttttgtacactttaagttctagggtacatgtgcacaatgtgcaggtttgttacatatgtatacatgtgccatgatgctgtgctgcacccattaacttgtcattt

SEQ ID NO: 391971 - DNA, 201 bp, Homo sapiens
actcagtagtgtcaagcacattcacattgttgtgacacaggtctccaaaacattttcatattgcaaatctgcatctctatatccatcaaacagcaattccrtattcctcctgccccgaatccttagcaactactattctgttttatgtctctataaacttgactattccaggtacctcacttaagtggaaccaaacagtat

SEQ ID NO: 391972 - DNA, 201 bp, Homo sapiens
agaacagctgttgtctggcctctaactaactgcaatggggtctttcagaataatacagaaagaacattagaacagcatgagcaagatacacaattcaaaaktaatcgaaaattggtgatctgagaactggagatgttctcatgacatgtaaatatttgttcagcagctaaagtaatagcaatgcattaaaccaatagaatt

SEQ ID NO: 391973 - DNA, 201 bp, Homo sapiens
acttgttagtattgcctagtaagaggacactggataattttgacaaagtaatgaaaggtacattgcttctgtgatctttcaggaacctgtgcatcagatcagtcagaagaaagattccagcagagaaggttatgatcaggaggtgtaagagttaggatagagaaatgggaattgttttcctaaaggggaaggaacagagag

SEQ ID NO: 391974 - DNA, 201 bp, Homo sapiens
gatgtgcctgtgtcaaggagtccccttgaggaactccttctcttccctcaggcttgcccacatcccagaagagggcttagtgagaaacttcagaaggcaaygactcaaagcccctcacttttatggaccccttccacagcttgtttgggaccactgtttctttccattccactttcccttgtatcaaacatccccttagga

SEQ ID NO: 391975 - DNA, 201 bp, Homo sapiens
ttttctgggccaggcgtggtggctcatgcctgtaatcccagcactttgggagaccaaggcgggtggatcacctgaggtcaggagttcgacaccaccctgamcaatatggtgaaaacccgtcactactaaaaatacaaaaactagccaggcgtggtggcgtgcacctgtagtcccaggtactcaggaggctgagacaggaga

SEQ ID NO: 391976 - DNA, 201 bp, Homo sapiens
gacttgttagtattgcctagtaagaggacactggataattttgacaaagtaatgaaaggtacattgcttctgtgatctttcaggaacctgtgcatcagatcagtcagaagaaagattccagcagagaaggttatgatcaggaggtgtaagagttaggatagagaaatgggaattgttttcctaaaggggaaggaacagaga

SEQ ID NO: 391977 - DNA, 201 bp, Homo sapiens
aatgtaatttttgtgtctaagtgctcccaaccaccatttccaagacaagaagactcatgagcattcagaaaacatttggcactgtttcattttaattttttacttctccttgactctttgagcctagaaagaattttctctgtagttgctcacccaggtacaagtgtccttgagttaatcttcggtagctcattttagaat

SEQ ID NO: 391978 - DNA, 201 bp, Homo sapiens
ttgaacacatccccatatctctaatgactaaaccatattaaaggatctctgagaagagttcagaactgacatctgccttctgaaccacgaggtacaccaamagccaacagccactgaatgtggacagctttcaaaagtattaattggggattaatatgggggaaagcatttcatgggaaaatcactgagcttcttaagata

SEQ ID NO: 391979 - DNA, 201 bp, Homo sapiens
ctactttgtgccaggcaatgtgctacatgctttcataaatgaccttatttaatcctcacaacaactctatgaggcatatatatgtgtgtgtgtgtgtgtgkatatatatatatgataaaataagatatatacacatcttattttaccctagcagcaattctgttagatgaggaaactgaaaattctaatagatgaagaaac

SEQ ID NO: 391980 - DNA, 201 bp, Homo sapiens
tgacttgttagtattgcctagtaagaggacactggataattttgacaaagtaatgaaaggtacattgcttctgtgatctttcaggaacctgtgcatcagatcagtcagaagaaagattccagcagagaaggttatgatcaggaggtgtaagagttaggatagagaaatgggaattgttttcctaaaggggaaggaacagag

SEQ ID NO: 391981 - DNA, 201 bp, Homo sapiens
cagattaaatgcaaacctcatcaaaatcccagtggcattttttaccgaaatagaaaaaacaatcctaaaattcacatggaaccacaaagggccccaaaaakccaaaacaattttgagacaggagaacaaagctggaagcatcctacttcctgatttgaaaatatattacaaagatatagtaattaaagcagtatggtgatg

SEQ ID NO: 391982 - DNA, 201 bp, Homo sapiens
atgacttgttagtattgcctagtaagaggacactggataattttgacaaagtaatgaaaggtacattgcttctgtgatctttcaggaacctgtgcatcagatcagtcagaagaaagattccagcagagaaggttatgatcaggaggtgtaagagttaggatagagaaatgggaattgttttcctaaaggggaaggaacaga

SEQ ID NO: 391983 - DNA, 201 bp, Homo sapiens
aatgcaattgtcacttctattgacactttccatctcattggaatctacaagtataataaaaataatttattttgatcaattttccatctaaaaaaaaaaaacaaaaataaaacctcagtcctgaagcactcttaaaattgtaaaagtatcatctttaggaaaagactaatatctgcttctcctgaactagcagccttttca

SEQ ID NO: 391984 - DNA, 201 bp, Homo sapiens
ggaatgcaacaaaagcagtattatgagggaagtttatagtgataaatgtctacatttttaaaaacagaaagaattaaaataaatagtttaattctacctcrgggaaactcaagaaactagaaaaaaaagagcaaactaaactcaaaattagtagaaaggaaacaataaagattagagcaaaaataaatgaaatagaaaata

SEQ ID NO: 391985 - DNA, 201 bp, Homo sapiens
gcagagagccaaatcatgaatgaactcccattcacaattgctacaaagagaataaaatacctaggaatacaacttacaacaaaggaccctcttcaaggagwactacaaaccactactcaaggaaatcagaggggacaccagcaaatggaaaaacattccatcctcatggataggaagaatcaatatcattaaaatggccat

SEQ ID NO: 391986 - DNA, 201 bp, Homo sapiens
ctaccatttgatccagcaatcccattactagatacatacccaaaggaatataaattgttctatcataaacacacatgcatatgtttgttgcagcactattyacaatagcagacatggaaccagcctaaatgcccatcagtggtaggctggataaagaaaatgtggtacatatacaccatggaatacaatgcagccatagaa

SEQ ID NO: 391987 - DNA, 201 bp, Homo sapiens
aataatttatacataatttataatatatacttttttatataaatcctatatataagatttttaaatatgaaaacaattcagaatttttttcttttttgacattttctgttttttaccttgactgtataatttttaaaagcaaaaagatcacttatgatatagacttcaattcaacaaatacttttcagtagcctattatgt

SEQ ID NO: 391988 - DNA, 201 bp, Homo sapiens
tatacaccatggaatactatgcagccataaaaaatgatgagttcatgtcctttgtagggacatggatgaaattggaaatcatcattctcagtaaactatcrcaagaacaaaaaaccaaacaccgcatattctcactcataggtgggaactgaacaatgagaacacatggacacaggaaggggaacattacactctggggac

SEQ ID NO: 391989 - DNA, 201 bp, Homo sapiens
tctaaaaaccaagtcctgaaatcaggtaccgtgagagcctacttggttttctacccagctgtagggcctaccttatataaactttttatccaggatagctktcttttttgtctttggggcagtattgtaactaagcaaaaagataagcggatttaatttttcttattagtcatttaagatttttatttgccttttataagg

SEQ ID NO: 391990 - DNA, 201 bp, Homo sapiens
gcaggtaaaattaattaaataattgatataaccagttaattccaggaacataattctgtgagatatcccaaatttgaaaagtgaaggcacctgaaaaaacytgcattttggaaatgttagtaaatttgagaaactactccttcctaaactgtagttgtatatcattgctacatattgcacccaattccctgttcccttgca

SEQ ID NO: 391991 - DNA, 201 bp, Homo sapiens
cttgatggatcccaatgtggttttttaggtgatcagcttgtagggtcagtgttcactagtcagtgaaaatgacacacgtgaactgcttctagtctgccatrctgacccaaactccccaacttccacatttttatagactgaaaggcttctcatcatttcatctttctgattatttacattttctagccagttgcataggtg

SEQ ID NO: 391992 - DNA, 201 bp, Homo sapiens
tcctttgaatagcaactttacatatattgggccactctgccaacatccataccatttcttactttcttccagtgattgcggctactacaggactccttccrcaggtgccagaggttccacaggttcttataagctgaattgtggtgtagcccatcagtgtcaccttaggaaaacaaatcgtcattagaagcttgaaaatgc

SEQ ID NO: 391993 - DNA, 201 bp, Homo sapiens
attctcccagcagattgtgcttggactcaaactgcaactcttctctgtgtctccagccctgcaaatctggggcttaccaagtctctatagtcacaagccarttcctcaaaataaatctctgtctgtctgtctctcattttctctctgtctccctttgtctctctctctctctctacacacacacacacacacacacacaca

SEQ ID NO: 391994 - DNA, 201 bp, Homo sapiens
tttctgtgcaggtatttctttagatgagataacatttaaatcagtagcctatgagtaaagcagattaccctccataatgtgggtgggcctcatccaaatayttaaaagccttaatagaaaaagactgacctccccagaagaggaaattctcccagcagattgtgcttggactcaaactgcaactcttctctgtgtctccag

SEQ ID NO: 391995 - DNA, 201 bp, Homo sapiens
ccctcaaacacagatgcatcaacataaggactggtgaaatggctaacaggcttcatgacgtctagaggtgttaatacttatatcactttaattttaccacrcaattaagtaatgatgcatttaaatatatatatttacagtacatttgaaaatcttactgtaaaaataggatcaagataaatctttacacgctccaattaa

SEQ ID NO: 391996 - DNA, 201 bp, Homo sapiens
ttgtaattgaatgtctctaaggagcaaagttattacttaattaaaactaatccttctggtcacttacatatgacatagtcaacagcttatacttgatctcyttttttttttttttttttttttgaggcagagtctcaccatgttgcccaggctgaacttgaactcccgggctcaagctcagccttccaagtagttaaaacc

SEQ ID NO: 391997 - DNA, 201 bp, Homo sapiens
agtctcttccttttagctaaacagaaattaataaagaagctgtatttaagtttccattaagtctttgtacttacttttgaaaatatagctaaattaaaacyaagctggtagtttaagcatttattaggtgtttgaagattacaagcaatatataattcttccattttttttccatttcaaatgattttggtgagaaatgtt

SEQ ID NO: 391998 - DNA, 201 bp, Homo sapiens
cccctccaatcactggctttatgcctgcatttcttttcttgggtgttctggtccagagaggtccctcaggcagggaccacgtttggcagacaggtaatatmcttgcccagctggcccttcggagggaggtacaccccatgcctccactggcctgtggcatctcatctctctcagtgatccaagagtgagggctccttcctg

SEQ ID NO: 391999 - DNA, 201 bp, Homo sapiens
aggctgaggcaggaaaatagcttgaacccgggaggtggaggttgcagtgagccgagatctcaccattgcactccagccccggcaacaagagtgaaactccrtttaaaaaaaaaaaaaaaaggtctgatgcaatgaatccaacccacgcatgatacaggagggctgtcataaatggtaccaaagctcaaccagacaatgatg

SEQ ID NO: 392000 - DNA, 201 bp, Homo sapiens
gaggtggtcagatgacctgaggtcaggagttcaagaccagcttgaccaacatggagaaaccccatctctactaaaaatacaaaattagccaggagtggtgrcacactcctgtagtcccagctactccggaggctgaggcaggaaaatagcttgaacccgggaggtggaggttgcagtgagccgagatctcaccattgcact

SEQ ID NO: 392001 - DNA, 201 bp, Homo sapiens
gtttttagcaatacccactagctcaggttttcacaaaagagatttgctagttgtttgatatctacagaaaaatggacaagtttttcttgatttctattgasaaatttcctccactaagtttttgttcttattttattaacttaatcaattaatttaataaaatgtattaatgcaataaaagaaactaaattaaaatataac

SEQ ID NO: 392002 - DNA, 201 bp, Homo sapiens
agggatctagaactagaaataccatttgacccagccatcccattactgggtatatacccaaaggactataaatcatgctgctataaagacacatgcacacrtatgtttactgtggctctgttcacaatagcaaagacttggaaccaacccaaatgtccaataatgatagactggattaagaaaatgtggcacatatacacc

SEQ ID NO: 392003 - DNA, 201 bp, Homo sapiens
aatagccatagtgtgctagcaactatacaactgtacagttattttaaggaaataattttataatttaacatggggaaatcataaaatagattagcaaagggaaaaaacatttcatattcataatctatttacttttaatatattgtattaaatttgttgttacattgtgaaatggaatgtttctctactattaaggagtga

SEQ ID NO: 392004 - DNA, 201 bp, Homo sapiens
ttgatgcaaagcacagtgaatatcatgaaattttctgttagcccaaagtcttttttttactaggaatagagggctcaatggaccccttttcctctttctaycagtcccatgtcctcacacagatctgggagaagaaaagggagggcttcgaatttactatacaccagttcatctgccaaatactctgccacttatgctagt

SEQ ID NO: 392005 - DNA, 201 bp, Homo sapiens
gtgatcagaatgttttaaaacttcccagttgatttgtatatatcataaaccttttgaacctatggtcacccagaagcatactaaagcaaaacaaaactggwtggctgagagaaagagtttgctgtaaactctcttctaccttctgaattctgactcttttcatgaacaaaacttaaaagaatgagcagcatatttatattt

SEQ ID NO: 392006 - DNA, 201 bp, Homo sapiens
ggaaacaacaggtgctggagaggatgtggagaaattggaacacttctacactgttggtgggactgtaaactagttcaaccattgtggaagtcaatgtggcrattcctcagggatctagaactagaaataccatttgacccagccatcccattactgggtatatacccaaaggactataaatcatgctgctataaagacaca

SEQ ID NO: 392007 - DNA, 201 bp, Homo sapiens
tttttcttatgtggaatagaaaatgtgcttccttatttaatgggaagatttgaatagcaatgcaatatcagctttacccacctagatgttgaataatatgrgtatattttaaagatcctcaaagccacagaagaaactgtgacatggcacaaagtgtttcattctttgtgccacaaaaagacaaaaaaaaaaaaaaaacag

SEQ ID NO: 392008 - DNA, 201 bp, Homo sapiens
ttttcacaacctactcatctgacaaagggctaatatccagaatctacaatgaactcaaacaaatttacaagaaaaaaacaaacaaccccatcaaaaagtgrgcaaaggacatgaacagacacttctcaaaagaagacatttatgcagccaaaaaacacatgaaaaaatgctcaccatcactggccatcagagaaatgcaaa

SEQ ID NO: 392009 - DNA, 201 bp, Homo sapiens
aaaaatcatgaggtctaaaaaaatcataaattttgtgattaagagtatataattagtataaatgtttaaatcaattattttatttaattattaccaatattatattttccctatttgaagtattgggaaaatttaaaagaatgtgagaaaatcaaaagttacataaactgttatgtacaaaattggaaggagagtgcaaga

SEQ ID NO: 392010 - DNA, 201 bp, Homo sapiens
cagagccctcagaaataatgctgcatatctacaactatctgatctttgaaaaacctgagaaaaacaagcaatggggaaaggattccttatttaataaatgstgctgggaaaactggctagccatatgtagaaagctgaaactggatcccttccttacaccttatacaaaaatcaattcaagatggattaaagacttaaaca

SEQ ID NO: 392011 - DNA, 201 bp, Homo sapiens
tgctgcctttatcctggccttcctaaccttgattagttccagttgcttccatatcccctaatgtgcccttcaggtacctgaaaaccatctggactgtctayctttctatttcctatttccctatggctgaagcacactcactccaaccaaaccccataatagtattgctgttaccatgcctgtgtcattctttccaccttg

SEQ ID NO: 392012 - DNA, 201 bp, Homo sapiens
tcaaaaatcatgaggtctaaaaaaatcataaattttgtgattaagagtatataattagtataaatgtttaaatcaattattttatttaattattaccaatvttatattttccctatttgaagtattgggaaaatttaaaagaatgtgagaaaatcaaaagttacataaactgttatgtacaaaattggaaggagagtgcaa

SEQ ID NO: 392013 - DNA, 201 bp, Homo sapiens
ctatactacaaggctacagtaaccaaaacagcatggtactggtaccaaaacacagatatagatcaatggaacagaacagagccctcagaaataatgctgcrtatctacaactatctgatctttgaaaaacctgagaaaaacaagcaatggggaaaggattccttatttaataaatggtgctgggaaaactggctagccata

SEQ ID NO: 392014 - DNA, 201 bp, Homo sapiens
ccttcagccaagacctgatggaaaccagcactctctactctaatctctggttgttgaatatgactctctggaaagaaccagtatattagtccattctcacrttgctatgagtaaatacccaagactgggtaatttataaaggaaagaggtttaatggactcatagttcagcatggctggggagacctcaagaaacttacaa

SEQ ID NO: 392015 - DNA, 201 bp, Homo sapiens
taacatttgcttggtcttaggagcacggcattccaacggacatgggctacgctgtggcccctcaccattcgggcgtctaccctgtacatgttcagctttaygaggcctggaagaaggtctggaatattaaaatcaccagcactgaagaatatccacatctgaagccagctagataccggaggggttttatccacaaaaaca

SEQ ID NO: 392016 - DNA, 201 bp, Homo sapiens
ttagggtgggagtgacctgattttccaggtgccatctgtcaaccctttctttgactaggaaagggaactccctgatcccttgagcttcccgagtgaggcartgcttcaccctgcttctgctcacacacggtgcactgcacccactgtcctgcgcccactgtctggcactccctagtgagatgaacccggtacctcagatga

SEQ ID NO: 392017 - DNA, 201 bp, Homo sapiens
gaattaaatgaaattgagatgccaaaatccatataaaagaccaatgaaaccaagagttgtttcttagaaaaaaataaacaagaccgatagaccactagctrgaataacaaagaaaaataaagagaatatccaaaaaagaacaatcaaaaatgacaaagataacattacaactaatcccacagaaatagaaatatccttaaa

SEQ ID NO: 392018 - DNA, 201 bp, Homo sapiens
ctttgctagcaatcagcgagactccatgggtgtaggaccctccgagccatgtgagggatataatctcctggtgtgccgttttttaagcccgtcggaaaagygcagtattagggtgggagtgacctgattttccaggtgccatctgtcaaccctttctttgactaggaaagggaactccctgatcccttgagcttcccgagt

SEQ ID NO: 392019 - DNA, 201 bp, Homo sapiens
agggcaatacataacaataaagagtacaatccgacaacaagacttaactatcctaaatatatatacacccaacattggagcacctagattcatgaaacaarttcttcttcacccacaacaaaacttagacaactatacaataataatgggagatgtcaacaccccactcacaatgttagacagatactcaaggcagaaaac

SEQ ID NO: 392020 - DNA, 201 bp, Homo sapiens
gcctccttgagctgtggtgggctccacccagttcgagtttcccagatgctttgtttacctaagcaagcctgggcgatggtgggcgcctatcccccagcctygctgccgccttgcagtttgatctcagactgctttgctagcaatcagcgagactccatgggtgtaggaccctccgagccatgtgagggatataatctcctg

SEQ ID NO: 392021 - DNA, 201 bp, Homo sapiens
ggagtctacagaggcaagcaggcctccttgagctgtggtgggctccacccagttcgagtttcccagatgctttgtttacctaagcaagcctgggcgatggygggcgcctatcccccagcctcgctgccgccttgcagtttgatctcagactgctttgctagcaatcagcgagactccatgggtgtaggaccctccgagcca

SEQ ID NO: 392022 - DNA, 201 bp, Homo sapiens
tagagcagtgaggtcccttctggcctaaggcaagtccagaaatgccatctaaaaaccaagtcctgaaatcaggtaccgtgagagcctacttggttttctayccagctgtagggcctaccttatataaactttttatccaggatagctttcttttttgtctttggggcagtattgtaactaagcaaaaagataagcggattt

SEQ ID NO: 392023 - DNA, 201 bp, Homo sapiens
catttggtttctttttcatctgcagttcattattgattgcaagctaaatcgtcaaagctaacacaatttccaaataatgcttcccagccagcaagaatcaygcaaaatgaaaagcagtgatttgacatgaagaggacaatttttctcacagctcgaacataaattgtcaccattcatgaactccagtagactgctcttcct

SEQ ID NO: 392024 - DNA, 201 bp, Homo sapiens
aagctgtcagacagggacatttaagtctgcagaggttactgctgtctttttgtttgtctgtgccctgcccccagaggtggagtctacagaggcaagcaggyctccttgagctgtggtgggctccacccagttcgagtttcccagatgctttgtttacctaagcaagcctgggcgatggtgggcgcctatcccccagcctcg

SEQ ID NO: 392025 - DNA, 201 bp, Homo sapiens
gtgaacaggaataaagcccagggcactgagccagtgtgctgaacccaagacaggtggcacaataagatactagcctttaaaatatgcattcggttggaacytgcaatttcatccacttctaaaaatttttcccaggaatatagtcagataccaactaagatgtatcaatgatgatgaccaatccagtgttgtttacaacaa

SEQ ID NO: 392026 - DNA, 201 bp, Homo sapiens
aaatacttttcagtagcctattatgtaattaaattaagtttaacaaacatttctttaatgaaccatacacatgactgtagatataataaagagtacaaccygatccctgctcttgatgagctcacagtttagcaagaggaacgtataacaagtcaaaacaactaatcctaatagttgttatgaaagagcagtggagataca

SEQ ID NO: 392027 - DNA, 201 bp, Homo sapiens
aaaatcatcaggtcttgtgagaactcactcgctatcacaagaacagcatgtgggaaactgtccccatgattcagttacctccacctggtctctcccttgayatatgagtattatggggattacaatttaaaatgagatttgagtgaggacacaaaccctaaccatatcagccagagacctctaaaaaattagactacacat

SEQ ID NO: 392028 - DNA, 201 bp, Homo sapiens
ttactatagcctgcagtagtcctttcagacgagaacagatactgtgatttgtgtctcaaatattcattctaatttaaaatgtcattccctaagaagcacaytgagttgataactgacttcattttctaatgcatggcagaatttggcagaaaatattttcttaaaattattgcctattaagattacagtatagcacagaca

SEQ ID NO: 392029 - DNA, 201 bp, Homo sapiens
aagcacccaggaattccagagggggaaggcaagatggccaactagatgcagcaaagaagtgctactcccacggagaaaaaccaagggtttgagtaaatcarcataatttggacagatctctagaaagaaaatgcttaaagtagatggagatgcaatgcagatgctgaggctgagaagggagaaggcaggcacagggtactg

SEQ ID NO: 392030 - DNA, 201 bp, Homo sapiens
ccagagactgaagttggcatggcaaagtgagatgtgcaattgaaaaaggtttgcagaaaacaggagaattttaatgtatgcatttaaatatgttagaccamttcctcagggacgtgcactggaattttttctttagcttcagaaggaaacttgaagagcttaatagaaaagaaatgtccttcagcattttataatggctta

SEQ ID NO: 392031 - DNA, 201 bp, Homo sapiens
tccacctcccaggctcaagcgatccaaccacttcagcctcccaagtagctgggaccacctgccaccatgtccaactaatttatatatatatttatatatttatatatatatatatttatatatatatatatttatatatatataaaattttgtatattttttgtagagatggggtttcgctgtgttgcccaggctggtctc

SEQ ID NO: 392032 - DNA, 201 bp, Homo sapiens
tacccggccgtgtgaggtgtcagtctgcccctactgggggatgcctcccagttaggctgctcgggggtcagggtcagggacccacttgaggaggcagtctrcccattctcagatatccagctgtgtgctgggagaaccactgctctcttcaaagctgtcagacagggacatttaagtctgcagaggttactgctgtctttt

SEQ ID NO: 392033 - DNA, 201 bp, Homo sapiens
catcagtgaataatacaaaatttaacttggtgataagtactattgtctagatttctgctaagtagagatgttacagtttttactcatagaatagttacctkgtaccaggcactgttctactttacatattaatttttagctcatataatcttcacaaagattatttaaggtaaatattattcctgtttcacaaatgaggaa

SEQ ID NO: 392034 - DNA, 201 bp, Homo sapiens
agcacttctctgtattggttactctagttatacattcgtctaaatttttttcaaagtttttaacttctttgcctttggtttgaatttcctcctgtagctcrgagtagtttgatcgtctgaagccttcttctctcaactcgtcaaagtcattctccgtccagctttgttccattgctggtgaggaactgcgttcctttggag

SEQ ID NO: 392035 - DNA, 201 bp, Homo sapiens
atgtgtttcccatgacttcccatgactacatacatactatctttggaatttgaaagaaatttggttgccttggaagtacctcaccacagaattcacttgaktacagagggtttgagtaactggtttttattgtctcccaacatggcattttattgaagtcattgagtttatgagaatatgctcagtttcactcataataag

SEQ ID NO: 392036 - DNA, 201 bp, Homo sapiens
cccatttttatcttgaatcttagctttaattctcagatcctcttaatcaacttagccaataattttttcctacctcagcacacaagaaaaacaaaggaggwagaacacaaaaatccctataaatttccaaaaccaaagtttgcatcccctgaaatattgccattttctactggtttctgtctgaaccattcagacataaga

SEQ ID NO: 392037 - DNA, 201 bp, Homo sapiens
ctagttttttattttgcatatatttgttaaggaaaagaaattaacttttctaatgaactgatttaaaaagaaaaatgaatctattcataaaaggaaatccragtcctcgtaagaaaattctcaaatcaaaagcataaggaaaacctgtttcctgaattcactggggctgaattatgtatcgttgtgttctgttctttacac

SEQ ID NO: 392038 - DNA, 201 bp, Homo sapiens
ttcctacctcagcacacaagaaaaacaaaggaggtagaacacaaaaatccctataaatttccaaaaccaaagtttgcatcccctgaaatattgccattttmtactggtttctgtctgaaccattcagacataagaggcctgtaactagatccaagccagttaattatcagattctggacccaattcagtttttttgtgact

SEQ ID NO: 392039 - DNA, 201 bp, Homo sapiens
attttaaaatagtgtttactgctgttcatcccaaaaacttagtgtaggggtcaccttcctcaggaaactttttctactctgatttagaggcccctcctgcrtttctatagcatcctctgcagactctttcaaagtatttattatcctgcatcataattgtgggttgtattagcctgtacgcttgtggttgtagagaatgtg

SEQ ID NO: 392040 - DNA, 201 bp, Homo sapiens
gattttaaaatagtgtttactgctgttcatcccaaaaacttagtgtaggggtcaccttcctcaggaaactttttctactctgatttagaggcccctcctgygtttctatagcatcctctgcagactctttcaaagtatttattatcctgcatcataattgtgggttgtattagcctgtacgcttgtggttgtagagaatgt

SEQ ID NO: 392041 - DNA, 201 bp, Homo sapiens
gccgaggaagaaaatggagaagtaattttggtaatcaaagattaccaaaaactgttatagaaattgtaaacctagaatcaaggtttcagaatggaaaatgrctccaaatctgcaatagaactttaaaaaacagtaagaattaatgttttcctaagtgaccagagaactctaccttaaactggattttaaaatagtgtttac

SEQ ID NO: 392042 - DNA, 201 bp, Homo sapiens
acctaatgctagatgacgagttagtgggtgcagcgcaccagcatggtacatgtatacatatgtaactaacctgcatattgtgcacatgtaccctaaaactkaaagtataataataataaaaaaaagaaatattaaaaaacaacaacaacaacaaaaataaaataaaataaaagtaattcctgaacatgcctaatagtgagt

SEQ ID NO: 392043 - DNA, 201 bp, Homo sapiens
aaagacttggaaccaacccaaatgtccaacaatgatagactggattaagaaaatgtggcacatatacaccatggaatactatgcagccataaaaaatgatsagttcatgtcctttgtagggacatgcatgaaattggaaatcatcattctcagtaaactatcgcaagaacaaaaaaccaaacaccgcatattctcactcat

SEQ ID NO: 392044 - DNA, 201 bp, Homo sapiens
atgcagcattatttctgagggctctgttctgttccattgatctatatctgtgttttggtaccagtaccatgctgttttggttactgtagccttgtagtatwgtttgaagtcaggcagcgtggttcctccagctttgttcttttggcttaggattgacttggcgatgcgggctcttttttggttccatatgaactttaaagt

SEQ ID NO: 392045 - DNA, 201 bp, Homo sapiens
ggacatatgttcatgtgcaatgggggaagggaagagggggtgacaccacctaaaatgattccccacctcaatctcccagcctactcctttcccccttcccyctaaagccaccatccaaccagatagaaaaataaaggtctaattcactcaaaattcttcagtttttacaaaactaacagggcagagtagggagacgggggg

SEQ ID NO: 392046 - DNA, 201 bp, Homo sapiens
ggtagaataaaaaacatctaccaatgtatgctgtcatgcacactggaatggaaagtaaaagcaagtaagtgggaaaatatgaagatgaagaagaaggtagsggcattatcatgatggactcttgaagcattaaggtacagactctacagctgcaccagccacatgtgaattgaattcttgaaatgtggctaatcctaattg

SEQ ID NO: 392047 - DNA, 201 bp, Homo sapiens
cagtgtattaaaatttttttaactttacatttaattgtaatgacaaccctgtgaggtaattactattattatatcctttttgttttcttttaaacaagtamattaaagtactgagagtttaaataacttgctaagactgtagagccagtaggtggtggagccctctttcttaatcactgtacaggccaaaggcaaagacat

SEQ ID NO: 392048 - DNA, 201 bp, Homo sapiens
tgtagagccagtaggtggtggagccctctttcttaatcactgtacaggccaaaggcaaagacataaagatatagtttatttaaaaaggagtaaggtttcayggaaaacagagggaaatggacagtaagaaaataagtggagactagagaagcagagttcagaaagaagagtacacagtgaatggagataaagttagaggag

SEQ ID NO: 392049 - DNA, 201 bp, Homo sapiens
gagatttcacttgcaaactaacaagtcaccctgacatagtttcatggttgctggcagaaggtgcaacactcttagatcaaagagaaaaggactttattackcacagcattagcgttagccagagtagcagcatgtactccaagttctaattcctacagggtgatgtgaagagtgccagatgatacctgcacatacagtggg

SEQ ID NO: 392050 - DNA, 201 bp, Homo sapiens
ctctagagggacagaactaataagatagatgcatataaaaagggaagtttattaagcagtattaatgcacacgatcacaaggtctcacaataggccgtctkcaagccaaggagcaaggaagccagtttgagtcccaaagctgaaggacttggagtctaatgttcgaggacaggaggcgtccagcacagaaaaaaatgtagg

SEQ ID NO: 392051 - DNA, 201 bp, Homo sapiens
tttccaactgacactttttgctgatttattgcaagctaaaggataaataaatgtatgtgtttcatgtaaactcaaaagtatctctctagttttaaagtgawaaagaaactattttccaccatttaattctcacatgtataaggaactggttttatcctctgaatgcaaaaaggatatatcttttggaaactttttaatgcc

SEQ ID NO: 392052 - DNA, 201 bp, Homo sapiens
attgatttttgtataaggtgtaaggaagggatccagtttcagctttctacatatggctagccagttttcccagcaccatttattaaatagggaatcctttycccattgcttgtttttctcaggtttgtcaaagatcagatagttgtagatatgcagcattatttctgagggctctgttctgttccattgatctatatctgt

SEQ ID NO: 392053 - DNA, 201 bp, Homo sapiens
cggatcctcctttgcattgcaaagtgatcagaagctttcatggggaataaaatttttcacctgtaaaactctcctatttccacggggaaccatttttttttccatttagacaacagttacctctattattatttttattttactatttaaagttaacgtagaagcaaaatagtagaggaattaggtaagcaaatctagtta

SEQ ID NO: 392054 - DNA, 201 bp, Homo sapiens
ctgcgattgcttacctgattttttgttcttctgatggtgcttttctgtatgcagatagttgttaaaatttggccttcctgcagggggtacaaatggtatasggttctattctgccattttgctctgccctcataatttttaactgcagtctaaaaattgctttcaagtattatttacatagatattaaaatttccctgata

SEQ ID NO: 392055 - DNA, 201 bp, Homo sapiens
aatgggccctgcaggtacctcgcttggtcacttgatgctcctgggggtcactgaaagctctaattcggatcccacttctgacaccatctgtttaaaaaaawaaaaagccttagacaaattaaacttcacagagtttaactgagcaaagaatgatctgtgaatctggcatctggcagcctccttagccagagtaagctcaga

SEQ ID NO: 392056 - DNA, 201 bp, Homo sapiens
attttcaaataggctgtcttcaagttcactgattctttcttctgcttgatcaattctgctattaagtgactctgatgcattcttcagtatgtcaattgcawttttcaactctagaatttctgcttgattctttctcattatttcaatctctttgtaaaattaatctgatagaattctgaattccttatctctgttaatctt

SEQ ID NO: 392057 - DNA, 201 bp, Homo sapiens
gtcttccagatcttagaggaaagcctttcagtttttcccaattcagtatgacaccagctttgggtctgtcatagatggattttattatggtgaggtatgtrccttctataccaagtttgttgagggttttttatcatgaagggatgttcaattttatcaaatgctttttcagcatgaattgaaatgattgtatgatttttg

SEQ ID NO: 392058 - DNA, 201 bp, Homo sapiens
cccattctgtgggttgtctcttcactttgttgaatgttttgtttgctgtgtagaagcattttaactcgatgtgatcccatctgtccattttttgttggttkcctgtgcttgtggggtattacccaagacatttttgccaagaccaatgtcttggagagtttcccccatgttttcttatagtagtttcatagtttgaggtct

SEQ ID NO: 392059 - DNA, 201 bp, Homo sapiens
aggatggcctctttcaccactgctattcaacatagtattggaagttcggcccaaggcaatcagccaatagaaagaaataaagggtattcagataggaagasaggaagtcaaattgtctctgtttgtagatggcatgattctatacttagaaaaccccatcgtctcagctccaaactcgttaagctgataagtaacttcagc

SEQ ID NO: 392060 - DNA, 201 bp, Homo sapiens
atcagggaaagattttgagtagacagtcacataatcatatttgtatcttttaaatattactttgcagggaatgtattggaaggaagcaagagagggaatgmgattctatgccaaaaggcaatgggataagatggtagattcgactagggtgatgataatgatagaattgaagaaaagtagctaaatttaagatatatacca

SEQ ID NO: 392061 - DNA, 201 bp, Homo sapiens
taattactgattcaatttcagaagtcgatagtggtctattcaggttttcaatctcttcctgattcagtcttggaagattgtgtccttccaggaatttaccyacttcctctagattttctaatttgtgtgcatagggttgtgagccctcattttcaactgcacttcttcaagtgcagtgttgtttctttggaatgttccatt

SEQ ID NO: 392062 - DNA, 201 bp, Homo sapiens
tacctctcaaagaccccaaaggtccacataaacttcaaactctgagaaagctgaattaaaccaaactttcaattcctccattatgaatccagataattttmttttcagttattttgctacagcataaaaagtaaggcttcatacattcattttttttacatttctataaaccttttcttgtgtttacttgaatacacccca

SEQ ID NO: 392063 - DNA, 201 bp, Homo sapiens
aaatcaaaaccataatgagataccatctcacactggtgaggttgtggagaaataggaacacttttacactgttggtaggaatgtaaattagttcaaccatwgtggaagacagtgtggcaattcctcaaagatctagaaccagaaataccaatgggattgctgggtatatacccacaggagtataaatcattctactataaa

SEQ ID NO: 392064 - DNA, 201 bp, Homo sapiens
ttctgcttatgtagtgaatcacatttattcatttgcatatgttgaaccagccttgcattccaggaataaagcttacttgatcatgttttactaacttttcmatatgctgctggatttgattttctagtattttgttgaggattttcaggtctatattcatgagagatattggtctaaagtttcctttattaattgtgtctc

SEQ ID NO: 392065 - DNA, 201 bp, Homo sapiens
gctgattaactccaaaagtgttacggctcaatttaaaaatatagtttaaaattttaggcatatgcctgatgttttcatgtgagtaacagaaagtaatggarcatggaattttctgacaggacaataaggaccttttaaagttggcagaattacaaaggatttcattcacaaagctaaaactcaacttctgtgtattaggaa

SEQ ID NO: 392066 - DNA, 201 bp, Homo sapiens
actggtgaggttgtggagaaataggaacacttttacactgttggtaggaatgtaaattagttcaaccattgtggaagacagtgtggcaattcctcaaagayctagaaccagaaataccaatgggattgctgggtatatacccacaggagtataaatcattctactataaagacaaatgaacacgtatgtttactgcagcac

SEQ ID NO: 392067 - DNA, 201 bp, Homo sapiens
gtttaaatactgttgcaaaaactgactgggtattatgcttcccactagcttacctatctttcctgcattctttcttatttccctgctgaatgtcaattgtrtaggtaggtcaaatagtaaagttgatcctggccttattatttattttcctctaagggtatctttcctctaattgttcctgaggccctactctaatattaa

SEQ ID NO: 392068 - DNA, 201 bp, Homo sapiens
tctctactaaatacaaaaattagttgggcgtggtggcggatgcctgtaatcccagctactcaggaagctgaagcaggagaatcgtttgaacctgagaggcrggggttgcagtgagccaagactgcaccattgcactccagcctggccaacagagccagactctgaaaaaaaaaaaaaaaatcagtgtgggtccaaatctca

SEQ ID NO: 392069 - DNA, 201 bp, Homo sapiens
gaaatattctctccaggagctagggcctggaatgggggcctcatgactgcctggtgccctctcctactgtagctgagctggtatccaagatgcaagacaaygtcctctttactctttgctctcctcgccttaaacagaaggaaggacgcactttcattgctgtgagttgcacttcctgggattgggggaggagtggcgcaa

SEQ ID NO: 392070 - DNA, 201 bp, Homo sapiens
gaacccatatcttttatggcataaattggatactcacatattagtttccttatctctcctaaaaaatacactatatttttatgcaaggtttttgcacttatgaattcattatgctcaggacatagctcacaattatgtgcatataaaactcagtttattttttaaatgatgcatacaatgcaagtgattgtgtgtgtgtgc

SEQ ID NO: 392071 - DNA, 201 bp, Homo sapiens
tttactctttgctctcctcgccttaaacagaaggaaggacgcactttcattgctgtgagttgcacttcctgggattgggggaggagtggcgcaagcaatcstttagctgctctggctagtgtctccctaggtcacatgccaccctagtccactggctctaatcccaatccagcactaggagttgcctaggaattgaagtcc

SEQ ID NO: 392072 - DNA, 201 bp, Homo sapiens
tcctgggattgggggaggagtggcgcaagcaatcctttagctgctctggctagtgtctccctaggtcacatgccaccctagtccactggctctaatcccartccagcactaggagttgcctaggaattgaagtccttgtgtgctagactgtctttcaagtttaccaaggaccttagagcatgttggcccatggtggcaaga

SEQ ID NO: 392073 - DNA, 201 bp, Homo sapiens
ggaggccgaggtgggtggatcatgaggtcacgagatcgagaccatcctggctaacatggtgaaaccccgtctctactaaaaatacaaaaacaaaattagcygggcatggtggcaggcacctgtagtcccaggtactccggaggctgaggcagggaattgcttgaacccaggaggcagaggttgcagtgagctgagatcacg

SEQ ID NO: 392074 - DNA, 201 bp, Homo sapiens
ttcagtccccaatcatgggcatctctgtacctgtgccctctctcgatgaccttcagcatgccttcctcctgtttgggcgaatgtccactccctccatgggmagaggcgccaactgtgtcccattctcagtctccttcatctcctcaactgtcatctccacgcagcgcaccctttctgggagctggcaccggcaccagcata

SEQ ID NO: 392075 - DNA, 201 bp, Homo sapiens
cagtgacagattcaatgaatataacgtcttcaatcaggagtgagagataaatctacaggttgcaataggctggaagagtagaagatggtaaacaggtcgtytgttagacaggtagcctttgaacacatccccatatctctaatgactaaaccatattaaaggatctctgagaagagttcagaactgacatctgccttctga

SEQ ID NO: 392076 - DNA, 201 bp, Homo sapiens
tacctgtgccctctctcgatgaccttcagcatgccttcctcctgtttgggcgaatgtccactccctccatgggaagaggcgccaactgtgtcccattctcrgtctccttcatctcctcaactgtcatctccacgcagcgcaccctttctgggagctggcaccggcaccagcatactctgagccaaaggcaggggtgctacc

SEQ ID NO: 392077 - DNA, 201 bp, Homo sapiens
gtgagatggaacaagttacttcacctctccaaatgtcaattcccttatctgtaaaatgaagttagcagcagcactcacctcatgaggttgttttgagaatwaagtgaaatgatgtttgtaaagtactcaacacagtgcttgacataacaacacaacataaactctcaatcaatgatgattttaaatataatatcagaatag

SEQ ID NO: 392078 - DNA, 201 bp, Homo sapiens
gccttcctcctgtttgggcgaatgtccactccctccatgggaagaggcgccaactgtgtcccattctcagtctccttcatctcctcaactgtcatctccaygcagcgcaccctttctgggagctggcaccggcaccagcatactctgagccaaaggcaggggtgctaccttcagggtgtgcaggaggccaggtgctgtggt

SEQ ID NO: 392079 - DNA, 201 bp, Homo sapiens
tgttaaggtatgctccttctatacgcagttttttgagggtttttcatgaagggatgttgaattgtatcaaatgcttttttaacatctactgacatgatcayacggatttgtccatcattctactgatatgatgtatcacattgattgatttgtgtatgttggaacatccttgcaagccagagataaatcccacttggtcat

SEQ ID NO: 392080 - DNA, 201 bp, Homo sapiens
tcccaccaccctctatccacgggagaacagaggggtcatcgcctgctctgctgctcagctgagctctggcttgagggtcactgagaccatcagagagcttragaggtgtttcctgcaggagggggacacagtaggttgttgtctgccttacaactaataaatccaaagtatgagagagagattggctaaagtggtatcaga

SEQ ID NO: 392081 - DNA, 201 bp, Homo sapiens
cattcggtgccactgcatttatggagcaaggcagtggaatatgacccttatcacactcctgatcatctccttagcctcctgtagtggtccactgactcccsctagggctctctatggggttcataccctcagcaggagtagtgctcctgcagttgcagggtaaagcctgccacttcctcttcactgcattgaaattcaaat

SEQ ID NO: 392082 - DNA, 201 bp, Homo sapiens
attttcatccatttggccactctgtgtcttttgatcagagagtttagttcacttatatttaatgtgattatttacgtgtagaaacttactcctgccacttygttatttgttttctggttgttttggggtcgtctctcttttcttttcttccttcctgtcttcctttcagtgaagataattttctcttgtgctttaacttct

SEQ ID NO: 392083 - DNA, 201 bp, Homo sapiens
acagtccagctttaatctcacattttgtttttaacacataacacaaacctttttttggaagggggtgggttgctgaacatttaattactgtggttttttttaagtatttagcattttcatgtcttgagcagaacagatgcgctacttaaggagtttcatacctctgcaactaaaaggaaatctatttgttctgcaataaca

SEQ ID NO: 392084 - DNA, 201 bp, Homo sapiens
ggaagcaagagagggaatgcgattctatgccaaaaggcaatgggataagatggtagattcgactagggtgatgataatgatagaattgaagaaaagtagcwaaatttaagatatataccagagatagtactgataggacatgacagtggactaaatttagaaaagaggaaagaggaggtgtcaaaactatctatctttcaa

SEQ ID NO: 392085 - DNA, 201 bp, Homo sapiens
ttagaaaagaggaaagaggaggtgtcaaaactatctatctttcaacacagcaacttgttggttgatggtgtcatttaatgacatggagaaaccctgcagaragagaatatctggtagggctgagatgtggaaatcatgagttcaactattaagactattaattccacttgtgatccaaatacttcatttacgttttatagt

SEQ ID NO: 392086 - DNA, 201 bp, Homo sapiens
cccatactgaacaaattttaaagggacagtgggaaaaagaagtaagattgctttagtaataatatcccatgaatcctaattatttaacatatgagctacayaattatttttaagattatttcattcattttatattcagatttttataccatgaatatacatagaaatataaaatttctaagaatgaaataaaaagatttt

SEQ ID NO: 392087 - DNA, 201 bp, Homo sapiens
gattctgtttcactagagaaccccaatacatactccattatggctagagtagatagatagatagatagatagatagatagatagatagatagatagatagdcagttaggcagatgtattataaggaattggcttatgaggttatggaggctgagaagtctcaagatatgcaggcagcaagctggagatccagcagagctaa

SEQ ID NO: 392088 - DNA, 201 bp, Homo sapiens
tttgccacatattgatattttgtcaagaaagcaagaatagtgctcctccatgctgatactgtgaaaatgttttgatggtatatgcaaactgctgtgagaaggagagtcatcttttttcctaaaaaaataaacaaataataagcagcatgtaaaattggtaaaacggccccagaatttgtaatagaaagtgctaaaactcat

SEQ ID NO: 392089 - DNA, 201 bp, Homo sapiens
catgagatttctacacaaacatgtaatatacctagatacaaacattcttgatcaatttacaattatacagagtactcatatatattttcaaaaattgtgakattctatttactttagatacttatataaaataaaatgcagaagggtactaagaactgaaacttatgaagataacaaaaaggattaattggcaatgactgc

SEQ ID NO: 392090 - DNA, 201 bp, Homo sapiens
ctttgccacatattgatattttgtcaagaaagcaagaatagtgctcctccatgctgatactgtgaaaatgttttgatggtatatgcaaactgctgtgagaaggagagtcatcttttttcctaaaaaaataaacaaataataagcagcatgtaaaattggtaaaacggccccagaatttgtaatagaaagtgctaaaactca

SEQ ID NO: 392091 - DNA, 201 bp, Homo sapiens
cctttgccacatattgatattttgtcaagaaagcaagaatagtgctcctccatgctgatactgtgaaaatgttttgatggtatatgcaaactgctgtgagaaggagagtcatcttttttcctaaaaaaataaacaaataataagcagcatgtaaaattggtaaaacggccccagaatttgtaatagaaagtgctaaaactc

SEQ ID NO: 392092 - DNA, 201 bp, Homo sapiens
atttgcaccctgagaatgaagcagagcatctggcaaatagcagaataatcagaaaaatatttgtggatttaaactgagcagcgtggtcatgaaaggcatastttataataaataacatactttttttcacatccacatttcctctcctcttcccagccttctctaaagaaagagaatacttactgcattgtcaacagcgtt

SEQ ID NO: 392093 - DNA, 201 bp, Homo sapiens
cagccacatcgagagatggcttgtttatttccccccatttcaggtatggagtaataaggatttacatcatgttagaatctcattaagttgatgactttgcyttaaggttaagaaaattttcaattgttaaactattactagtttttcctctttagttgtaaataatgaggctatggcaaagagaaataggcagaagtagaa

SEQ ID NO: 392094 - DNA, 201 bp, Homo sapiens
ttcattcttctgcatacggctaactagttatctcagcaacatttattgaatgggaagtgctttccccatggcttgtttttctcagccttgttgaagatcarattgtggtaggtgtgcatctttatttctgagttttctattctcttccatttgtctttgtctgtttctgtaccagtactaagttgttttggttactgtagc

SEQ ID NO: 392095 - DNA, 201 bp, Homo sapiens
gtgtggaattgttcttccatgtttacaattgtttgtgtgtctttttctctgtgccaaatttcaggtgactggagactgattagctggtctgtgctatcctyactccactttagccaacacattgcacattcttacctccaaagtggcaaaaaatgcaaatgtgtatcattatgctttattagctttagtaaaaagtttgcc

SEQ ID NO: 392096 - DNA, 201 bp, Homo sapiens
gtttgcaccaggacctgtattttgctttttattcttggtaatgagccatgcatcccccatacctagagcttagtggattcacagggttgatgctagaaagyatagataaagcttcccacacttttctcttagttacactttgacaaacagtatctgtttcctctctcataaagactaatgtatgtggtatttgacatttac

SEQ ID NO: 392097 - DNA, 201 bp, Homo sapiens
caggagatgactgccattgaaaagatcagtttgttattcccagttaccaagagagggagtgtgccacaaggatgcagggccacaggggaagcaccagggtygctcaggaggcagagggagcaggggggaaaggtgggcaagagcctttactgtggtttctgcgggaaaggtaaggcaagacagggtaagcaggctcaggat

SEQ ID NO: 392098 - DNA, 201 bp, Homo sapiens
ttgctttttattcttggtaatgagccatgcatcccccatacctagagcttagtggattcacagggttgatgctagaaagtatagataaagcttcccacacktttctcttagttacactttgacaaacagtatctgtttcctctctcataaagactaatgtatgtggtatttgacatttaccttttccctttttacagaaaa

SEQ ID NO: 392099 - DNA, 201 bp, Homo sapiens
tctagctcttaagattctatcattactgtattaaaatgtaggttttattattatacaggtatgatgagtccagtagatcaggagatgactgccattgaaargatcagtttgttattcccagttaccaagagagggagtgtgccacaaggatgcagggccacaggggaagcaccagggtcgctcaggaggcagagggagcag

SEQ ID NO: 392100 - DNA, 201 bp, Homo sapiens
agtaaatgtttgctaaataaaaataaaagtaaacgtttcttctagctcttaagattctatcattactgtattaaaatgtaggttttattattatacaggtrtgatgagtccagtagatcaggagatgactgccattgaaaagatcagtttgttattcccagttaccaagagagggagtgtgccacaaggatgcagggccac

SEQ ID NO: 392101 - DNA, 201 bp, Homo sapiens
atggaaaaaatttttagttaccaaatataggataattcaggggttaaactgcaatttcaacaggggatttttttttggaaaggtacaaattctgagacaargattaaatgtatcattaataatgacctaccacaaaatttaaaatatcaactgtacagtgtgtaaaatagaataacatatcattagaaaggtaaaatagta

SEQ ID NO: 392102 - DNA, 201 bp, Homo sapiens
atggatggaacatttgtttggctgaagcaaggtacaccatgtaatactgaagggtttatattcaggacagggaaatttatagtaaaagtttaaataagcayattatgaagaaaaatgtgcttgtgatcagagagagtaccgaggtacacttacatggaatggttttctacaccaactgttagaactaagaagtttcagttg

SEQ ID NO: 392103 - DNA, 201 bp, Homo sapiens
ctaatttgatttgattatcccagcaactgacacaagacatgatgcatagtaagcactcaataaatgtatatggaattaattagttgatgtattaattctgyggcacaatttctaatttttcacctttaccatgttcattattattgaacatcagtgatgggactataattcagtgaagcttcagaagctataaagatttat

SEQ ID NO: 392104 - DNA, 201 bp, Homo sapiens
aaatcaggtaccgtgagagcctacttggttttctacccagctgtagggcctaccttatataaactttttatccaggatagctttcttttttgtctttgggrcagtattgtaactaagcaaaaagataagcggatttaatttttcttattagtcatttaagatttttatttgccttttataaggagtctttaatttaaaata

SEQ ID NO: 392105 - DNA, 201 bp, Homo sapiens
aagaccctgcagctctgaagtttagcttctacgaagtgatctcagcagggccccgtgcaccctcggagctcagagccttgcagaagagatgtttggtcccrgggtggtatgccagccacatcgagagatggcttgtttatttccccccatttcaggtatggagtaataaggatttacatcatgttagaatctcattaagtt

SEQ ID NO: 392106 - DNA, 201 bp, Homo sapiens
ctccaagcaaacattttcttcctttactaatttcaaaatagataactctccagcagtgaggcacttctttctttagctttgagacttgtcacaaagattgrtttttaattatttatgcctacggttcagattagtttaattatccaccttttcatcatagcatcagcgatcacatgaagaccctgcagctctgaagtttag

SEQ ID NO: 392107 - DNA, 201 bp, Homo sapiens
tgagctatctttttagccaggatggtcttgatctcctgacctcttgatctgcccgcctcagcctcccaaagtgctgggattacaggcatgagccaccatgyccggcccataatttttaaagtaataagcaacagacatttgttttcaatgtaattctaatgtaaaacattctcaaagtaggattaaaagaaatcagataag

SEQ ID NO: 392108 - DNA, 201 bp, Homo sapiens
ctaaaactgcattactagatggagcaaaactatttggcagaggtagtagggtgcttctctattatagatattcactggacactataaatggtttgcttatsagctggaaagagggcattaacacagctttcaaaagtttactttcacaataaaatacatacactaaggaaacaactcagtaatgctggtgaaggaatccta

SEQ ID NO: 392109 - DNA, 201 bp, Homo sapiens
tgctttcctactgttcatgtgtttatccgttcatcaagtaattttaatgactaccatgtgcaaagttttgttctaagtgtgatttgaaaaataaatttgawgctatacttgaaattgctttcagcctaattggagaaatatgtataaacaagcatataaattagaaagtaataagcgactgacatacagactccttcggaa

SEQ ID NO: 392110 - DNA, 201 bp, Homo sapiens
gaaagaaagaaagaaagaaaaagaaagaagaaaaaaagaaagaaaattctacatccctgagagcctaacatgtctaaatgtttcttgtatactcattgccwttgttttctgatgttggttagaaccttgcacaaaaacgatcactttgaaataatttaacaaactctagtaataatatatatgtcaaatacacttttaata

SEQ ID NO: 392111 - DNA, 201 bp, Homo sapiens
agctttccaaaaataatgtaccaaagcagctttgataaaagacatgtcattcactgttacatctgctgaaaactagaatagtatctagaaattacttgaaygaatcaatgaatgccaatattatgtttatgtttaaaacatttgcagatatttggaagtacatatcctaagaatatacttaggctgggtgcagtggctcat

SEQ ID NO: 392112 - DNA, 201 bp, Homo sapiens
cagtccctccccagccataacaatatgaaagagcacatataaataaggcatttgggaacagcaattagcatataacactcaatagatggcagctgctgttwttatcattatatctagtatcacaaaattgccatctttaatttttgcccaggctcctgaggtgtttggactgacaggtaagagggacaaaaatccttaagt

SEQ ID NO: 392113 - DNA, 201 bp, Homo sapiens
tttattaacttaatcaattaatttaataaaatgtattaatgcaataaaagaaactaaattaaaatataacaaaatattatgtacttttttatatctatgcytctatatatctgcattttaaggtaataatttaaaatcattattttttcatctaatacttgtgtactctataaagagtcagattgcaacaagttcagacat

SEQ ID NO: 392114 - DNA, 201 bp, Homo sapiens
caagactccatctaaaaaaaaataaataaataataataataatactatttaagtaaatactagcatattaatgctatttaagtaaatactatactatcatmttaatactatttatactactattatttaattagtactattaataataccatattaataccatttaagtaaataaataataaagaaagcttacctgaaaaa

SEQ ID NO: 392115 - DNA, 201 bp, Homo sapiens
aaaaagtatttttctggataattttgcagatttctagttatctggatattcaagtatttttcagtgttgaggctgacaaaaatataaaaccgaagatttayagatggttatttaaatgtgtgtctatgattatgtagttgagttaccactgacaaaatatatatgcaggacagtttattcagacccaagaatatgtacagg

SEQ ID NO: 392116 - DNA, 201 bp, Homo sapiens
aggactcacagttccacatggctggggaggcctcacaatcatggcggaagatgaaggaagagcaaaggggtgtcttacatggcagcaggcaagagggcttsgtaacttaatgcagggtaactcccatttataaaaccataaaatctcgtgagacttctcattcactatcatgagaacagtatgggggaacctcccccatga

SEQ ID NO: 392117 - DNA, 201 bp, Homo sapiens
tgaatataaaatcatttctaaaaccacaaagattatgtcaaagaaacacagaattataaacctggactttagtgactacttgtacaacccctttattttayaattttttagaaaatgaaaaatcagattcctgtgcttaaggtaattaattctttcaagatttttcatttcaaaccataccagaaatattatcatttatca

SEQ ID NO: 392118 - DNA, 201 bp, Homo sapiens
tgtaataatcattgagataactgaagggagaaatagacaataacacaataatagtagaagatagcatcctactttcaacaatagaacacttagaccaaaawtcaataagaaaacaatacttgaacaacactatagacccaattgacctggccaactgatacagaacattttactcaacagcagcagaatgcacatgcttct

SEQ ID NO: 392119 - DNA, 201 bp, Homo sapiens
atttgtctttgtctgtttctgtaccagtactaagttgttttggttactgtagccttatagtagtagtgtagtagtaggagtagtagtgtagccttatatartgtagccttgaagttgggtaatgtgatacctctggcttcattcttttgcttaggatagctttggctattggggctctttttcagttccatatttatttta

SEQ ID NO: 392120 - DNA, 201 bp, Homo sapiens
aaaaatcagattcctgtgcttaaggtaattaattctttcaagatttttcatttcaaaccataccagaaatattatcatttatcacaggaacatagtctaayatttaataatctttgcatgtagtaccaaatctaaattccctaatctaatgatcctgacttgccttattttgttgtaggctaagaagacagtcagcttcct

SEQ ID NO: 392121 - DNA, 201 bp, Homo sapiens
aaccaggaagatataacaattataaatataaacgcatgcaaattcaaagcacccaaatatgtgtaataatcattgagataactgaagggagaaatagacartaacacaataatagtagaagatagcatcctactttcaacaatagaacacttagaccaaaaatcaataagaaaacaatacttgaacaacactatagaccca

SEQ ID NO: 392122 - DNA, 201 bp, Homo sapiens
tgatgaagcagatgaggtccctgctctcctggagcttacttacactctattacaagcacataaagagctcaatttagccatgtttaaagtgagatggctayggcacattcagataaaaatgtcaactagacatttaagtataaaatttaggagaaagataggaatggtagtttgagatctggggatcattgtggtgattcc

SEQ ID NO: 392123 - DNA, 201 bp, Homo sapiens
tggggaggcctcacaatcatggcggaagatgaaggaagagcaaaggggtgtcttacatggcagcaggcaagagggcttggtaacttaatgcagggtaactyccatttataaaaccataaaatctcgtgagacttctcattcactatcatgagaacagtatgggggaacctcccccatgattcaattatctccaaccagccc

SEQ ID NO: 392124 - DNA, 201 bp, Homo sapiens
ttattatttagctggttaggtgctaggaaactagcagtgatgaagcagatgaggtccctgctctcctggagcttacttacactctattacaagcacataawgagctcaatttagccatgtttaaagtgagatggctatggcacattcagataaaaatgtcaactagacatttaagtataaaatttaggagaaagataggaa

SEQ ID NO: 392125 - DNA, 201 bp, Homo sapiens
tatcccccttaggatgcttaatgctcagcttcaatcttacctccagggcatatgatattgtatcatatctgagatttagattgctgaggcatttcctatcmtaactcagtaggttcttaagattttactttgcagagtttaatccactggggtttttttgtctggttgcttaggctaatgctgcttggtgttctgagcgac

SEQ ID NO: 392126 - DNA, 201 bp, Homo sapiens
aagtaatagcaatgcattaaaccaatagaattacttttgacacctaacagaaatgttaattgatcatcaatctttagctcgtaataaaagggctgaacttscagttctgaaagtatagccagaaaaattatgtgagagacataaatgttataaaaaagacaaactgctccaagctaaattgctttaaattacattgacctc

SEQ ID NO: 392127 - DNA, 201 bp, Homo sapiens
gatacacaattcaaaattaatcgaaaattggtgatctgagaactggagatgttctcatgacatgtaaatatttgttcagcagctaaagtaatagcaatgcrttaaaccaatagaattacttttgacacctaacagaaatgttaattgatcatcaatctttagctcgtaataaaagggctgaacttgcagttctgaaagtat

SEQ ID NO: 392128 - DNA, 201 bp, Homo sapiens
gtgacctgttgcagatgttagtaatttcctatcttgggtggaggccctcacagaagctttatttgcatatgagtgtatttgcccctgatgttttggtcttrgatgtcagcggaattgtccgtccttctgaaggtcatacaataccgctttccagggaggtattataacacagataattgaataattgggccctctctgttt

SEQ ID NO: 392129 - DNA, 201 bp, Homo sapiens
tgtaaataggacaaacaccagggaggcttggccaggtgtcttttgtagtaaaattgggattctgagattgctgttttccaacttggcaacagccttaaacrtcttggtatcctttaatgttatgattccacttctagggatgtctcctaaggaaagagtgctaaatagagaaaaagtgtaaattgtaatggcgacagaaaa

SEQ ID NO: 392130 - DNA, 201 bp, Homo sapiens
tgcagagttcaaatttattttattataaaaagtttcctgcactttctgtgattgtctttcaatgcatggattcaatctaggtcaggtgcttccataggaaragtcaattttatctagccaagcattaaagatttttcttaaaggagatgttttatattgggaataatggaactaaggaatgtgaaaaagggcttgagaaat

SEQ ID NO: 392131 - DNA, 201 bp, Homo sapiens
catgtggagccatatgcagccccacctcttccacaatgagtcatctttggtggagcagatgattctcaacaaaaaatttgccttagtaagtaactcacttygttgcattgaagtagtgtacactgattggagaaatgaaaagattcttacattgtggcatagttgcgcttttcagtggcttttccatatgatcatttggaa

SEQ ID NO: 392132 - DNA, 201 bp, Homo sapiens
gtggagaggaagttccttcatatcagtagagtacttaagcatgtgaaagtgaaactgaagactgcccttgttgaatgattatgctattccactcactctayagcacttaatctttgtttcttctgtatacatttgaatgaccatgaaatctcatagtatgcctttatctctagtaaaggttttcaatgcccaccaaatcac

SEQ ID NO: 392133 - DNA, 201 bp, Homo sapiens
aaaataaatgaaatagaaaatataaaaataagagaaaaaatcaatgaaattggttttttgaaatgattaacatcattggcaaacctttagttactaacaaraaaggaagaagactcaaataaataaaattggaaatgaaagagaagacattacaactgatcactggaataaagatgatcataatagtctataatgtacaat

SEQ ID NO: 392134 - DNA, 201 bp, Homo sapiens
gaagaaaaaaataaagaaaataaaacattagatttaaatatgtaatctttgtacgtagtggagaggaagttccttcatatcagtagagtacttaagcatgygaaagtgaaactgaagactgcccttgttgaatgattatgctattccactcactctatagcacttaatctttgtttcttctgtatacatttgaatgaccat

SEQ ID NO: 392135 - DNA, 201 bp, Homo sapiens
aagtgggccgggcacagtggctcacgcctgtaatcctagcactttgtgaggctgaggcaggcggatcacctgaggtcaggagtttgaaactagcctggccmacatggcaaaaccccgtctttactaaaaataaaagaattagcctggcatggtggctggtgcctgtaatcccagctactcaggaggctgaggcacaagaat

SEQ ID NO: 392136 - DNA, 201 bp, Homo sapiens
ctgaggcaggcggatcacctgaggtcaggagtttgaaactagcctggccaacatggcaaaaccccgtctttactaaaaataaaagaattagcctggcatgrtggctggtgcctgtaatcccagctactcaggaggctgaggcacaagaatcgcttgaacccaggaggcggaggttgcagtcagccaagatcaggccactgc

SEQ ID NO: 392137 - DNA, 201 bp, Homo sapiens
accagttaaagtatgtaacagaagtaactcaagattgctctataactcttttctctgctttcacacaaacctttgtccttactctgttattacaatagaamcaataaaatacataagcattcaggtgaagaatgaaaattcactaatgtcatttagaaaaaataccaagaagggtttatatgaaggatataaagccctgtg

SEQ ID NO: 392138 - DNA, 201 bp, Homo sapiens
agaaagtaatggaacatggaattttctgacaggacaataaggaccttttaaagttggcagaattacaaaggatttcattcacaaagctaaaactcaacttctgtgtattaggaaaggatttaagaccatatatccatttctcatttgatcttcatacaaaacctgggagttacatattgttattcttgttttccaaggggg

SEQ ID NO: 392139 - DNA, 201 bp, Homo sapiens
cttaaaatgaagggtgttctaaataggacttgtgcagtggatgttggtgttaaatattatagaccaaaagcagaatccctaaggtagtaattcaccctcaytattcccttttgctaaaacttaggactttctagcatcatagtctataaagttacatttttagatatacatttatcaacctttgacggcagctgagacgta

SEQ ID NO: 392140 - DNA, 201 bp, Homo sapiens
tgacatgtgttaactcatttaatcctcacaactaccttaagtggtaggtacagttatgatttgcattttacagatgaagaaactgaagcacagaaaggctragtcaattaagcaaggtcacacagctagtgtgttgcagagcaggaatcagttgtaggccatctggttccaaaagctgtacttcttaatcactgttctaaa

SEQ ID NO: 392141 - DNA, 201 bp, Homo sapiens
tctcattcactatcatgagaacagtatgggggaacctcccccatgattcaattatctccaaccagccccagccttgacacatggggattattacaactcarggtgagatttgggtggggacacagagccaaaccatctcagtgaagaagagaatttgagaatcaaacaagagagatgaaaagaagagttactttttactaa

SEQ ID NO: 392142 - DNA, 201 bp, Homo sapiens
gatctctgagaagagttcagaactgacatctgccttctgaaccacgaggtacaccaacagccaacagccactgaatgtggacagctttcaaaagtattaaytggggattaatatgggggaaagcatttcatgggaaaatcactgagcttcttaagataaataccacatgaatacagcatattcagatgactctgggggtaa

SEQ ID NO: 392143 - DNA, 201 bp, Homo sapiens
tcagaacttccatgatgccacttcagggctttcatttttttaaaagagtctattttttatcccagcgtttcctggtatacttttaaagaacacaagttggraaagctggcacacaatggacacattcatgaaaaaaaatacatctctatgttcttctcccatttagaatccttgcgatgacaaacgccacagagacatttg

SEQ ID NO: 392144 - DNA, 201 bp, Homo sapiens
atgactagacaatgagatcttgtcacaataagttcgtaaacttcccataactgctaatgaatgaataacatgtttttctctgacataattttcatttagcycagtaatatacctaaatgcttatcgaagtgttttttaagtgaagggaataaaacagatgtcacactgttcaaatatccagcagtcaatttggtagcacat

SEQ ID NO: 392145 - DNA, 201 bp, Homo sapiens
aaatctgtttggatcattctaatatttattcatgactttaaagtgttgatcataggaaattgtgttttcatttaattaatttctgaacctctattgtcttyctaggtaccactgctttgtatttgttcctggttatgcatccttccatccttagtaactcccccagcccaaaaacctttgaggaggtacagttctttaata

SEQ ID NO: 392146 - DNA, 201 bp, Homo sapiens
gatttttactttgggatgatggtgggtgttagtggaagagaaaagataggttacattgacaagcaggcacttccccttgcagatattgcaatactttgcaraatatatgtttgtatatattgagttctttcactatgttatggaattgtctgtgattccaaaaactaattgcttcttctgccttttgttaatggtaaataa

SEQ ID NO: 392147 - DNA, 201 bp, Homo sapiens
aatatatgtttgtatatattgagttctttcactatgttatggaattgtctgtgattccaaaaactaattgcttcttctgccttttgttaatggtaaataaytaatggttaatatttgcttggtggagtctttttaaaaacagatgcattgcaaagcaactctattcatgctgaattctgaaaaatctcagaatggaaaaaa

SEQ ID NO: 392148 - DNA, 201 bp, Homo sapiens
tagctaatgtatatggggcttaaaacctagatgatgggttgataggcagcaaaccaccatggcaaacgtatacctaggtaacaaacctacacgttctgcayttgtatcccggaacttaaagtaaaattaaaaaaataaaataaacaggattgaagggaattaggagccaaattcacatgtctgtatgaaccagttctcttt

SEQ ID NO: 392149 - DNA, 201 bp, Homo sapiens
gctgtgtaaagaacaggcagatcaagaaagagaacacttccaaaatctccacttcttgtgcccctcacaataactaacttctctcaaagaaaagtagtatyctgacttctaatatcatgaattagttttgcttggctttgagtggtatgtaaaaggaatcatatagtaaagattcatctgtatccagctcattttgtacaa

SEQ ID NO: 392150 - DNA, 201 bp, Homo sapiens
tatagtgaccttctttgtctcttctcacagtgtttgttttcaaatctattttgtttgatataaggataactactcctgttcattttttgtttcaattggcrtggaatatcttttcacatccctttattttcagtctatgtgtatctttataagtgaagtgtgtttcttgtgggcaacagatcatagagtcttgtattttca

SEQ ID NO: 392151 - DNA, 201 bp, Homo sapiens
aaatctggtttacaaaaacaacataaaagatgacaaatatcactgtttatcttaagtatataaaatatcatctagaaataattttcccctctttaccatayataggcataattagtatctgccatctgtttcaatgtatcttttatgtgtttagtgtttatttctagaatatcaaataaataggtaaaatggaaattcaaa

SEQ ID NO: 392152 - DNA, 201 bp, Homo sapiens
ggtagtcaatgaataaaaaactctatctgcttatgatccaaaaaagttgggaccataaacatgatgaggcagaccttccagatgtcagctttataattaasaaaataagatttagttgtgggcccaactgtattaaggaaagggagaaagaagataaggtgtgatagagtagaaggaatgcctaatttggatctatatccg

SEQ ID NO: 392153 - DNA, 201 bp, Homo sapiens
gtttcaaatatttgttcttgatatgcctcttgatggaacagaggtaatccatataccactccaacaatttccatcacttcccttacatatgaaatactcaytcattcacccaggaggtatttactaagcatctacttttgcaccaggcataaaggagtccacaggacaattaaatgtggtgccttccctagctaagtatat

SEQ ID NO: 392154 - DNA, 201 bp, Homo sapiens
cataatcatatttgtatcttttaaatattactttgcagggaatgtattggaaggaagcaagagagggaatgcgattctatgccaaaaggcaatgggataagatggtagattcgactagggtgatgataatgatagaattgaagaaaagtagctaaatttaagatatataccagagatagtactgataggacatgacagtgg

SEQ ID NO: 392155 - DNA, 201 bp, Homo sapiens
ctagctgtgacatcatgggcaggttacttcacctctaaagggtccaacacaatttcagtacctatgtaaatgtttattaatattagctgcattactattgktattctatatcttcccatatcatattatttccttcagggtgccttataggaaatcttgatgatgtgttgacatttataactgatccaactttgtaacttt

SEQ ID NO: 392156 - DNA, 201 bp, Homo sapiens
tttatacacaaaatgtgtgtgtattataattgtcagcagtacaaatatacagacacttgtatatgtatactatatatcttacacctaggtatatccttccycacaccagggtccagcatctgacctagaagtcccatttgtaacttcatcatgtccagctggctggattcctcctcccccatccaaaccgtgccccacctt

SEQ ID NO: 392157 - DNA, 201 bp, Homo sapiens
agaacaaagccagaagcatcagactacctgacttcaaactatactacaaagctacagtaacccaaacagcatggtactggtacaaaagcagacacatagaycaatggaacacaatagaaaactcagaaataaagccacacacctacaatcatctgatctttggcaaggccaacaaaagcaagcaataggtaaagcactccc

SEQ ID NO: 392158 - DNA, 201 bp, Homo sapiens
agaatatcttgtcaaagaagaagcccatgtcaagcttactccatcatggagataaatgtcagccctgcttttgctcaaagagcacacctaagaggaaaagscacaaagggttagagtgccaatagaaaaagaccacctgccacttaccacaaatgaataaaacaaatatatatccatagtccatggggcaaccatagcaaa

SEQ ID NO: 392159 - DNA, 201 bp, Homo sapiens
gcacattcctgctgacagagcttggaaggcattgagcagttctgcatttgatcctacttttttcacaaagaggtgaatatcaaatattttaaacagcaaaytaaagtttcagagcaaatataatttaaaatttggttctgctttgggaaatctgtttaggaggcatttgtaaacagttgaaaggctcattctaaactggaa

SEQ ID NO: 392160 - DNA, 201 bp, Homo sapiens
acaaagtctagtagagtttgtagtccagtgatttgaatctcaattgcagaaaatttgctattcaactagatgaggtaaacatccacaaactcaccactaagcctgaatatttattggccaatttaaagaaaaggtgatttcctcaaacccatgggcctaagcctgagcaatcctgttggattgctgctttctgcattttct

SEQ ID NO: 392161 - DNA, 201 bp, Homo sapiens
tcacaaagaccatgtatacccactggtcttaccaagtttgaaaagtcagagaaggcaccacagggcaattgtggcgaggagcttaattttccatattcatscatctgcatgatgcctcacaagtgaagggctcaggtgaagtctgtaactttgcctttgcctactgctacggtgccaccttccacaggaggagtgacagca

SEQ ID NO: 392162 - DNA, 201 bp, Homo sapiens
caaggggatctgattggagagtagataaagacagagcttcatccagaatggaacaggagcctttgtacatggtgcagctctggcagaacatggtaataggygtccataacccaggtctctccatctccctccaaaaagctctagccacagctgaccactaggccagaagaaagtagagctgacttccctgtggaactggat

SEQ ID NO: 392163 - DNA, 201 bp, Homo sapiens
agtttgtcattattatgagttgattgtgttacataaacagctgattgtttactattaaaaaattttaaaattaaagttatctacatttgtcttagtttccmattcgaaatgtcataggattctatctctgttatactatgtattgatttctcataaaagtgagacttttgatacatagtttttattctacagttttgacct

SEQ ID NO: 392164 - DNA, 201 bp, Homo sapiens
ctggaagatactgagttggattgggtcatggacctgactcacaccgtaagttggtttttttttaattacatggactgagccttaaaaaaaaactgaaaaagactatcatggaatttttccattgtgtttttcagtataaaactcagttccacagatcgagtagttttccctttttttgtactctttaatatcaatttagaa

SEQ ID NO: 392165 - DNA, 201 bp, Homo sapiens
ttctttggtgaagtgtctgttccaatcttttttttttttttgagatggagttttgctcttgttgcccaggctggagtgcaatggcacaaactcggctcacygcaacctctgccccccaggttcaagtgattctcctgcctcagcctcctgagtagctgggattacaggcatgcagcaccatgcccggctaattttgtatct

SEQ ID NO: 392166 - DNA, 201 bp, Homo sapiens
aagtacacagatcaacttaggagacaattcagtagcctgttcaaaataacccactaaatgccaggaagtaacagtttggagacaaatttggttagataggygacttttcaatttagctttggtttaatcttgagtcttctcagagcctagataaaagcctaagaagaaagcaccacaggattgggtcatgtagtgcatcta

SEQ ID NO: 392167 - DNA, 201 bp, Homo sapiens
ggtgtccctctttgagtggtacaaagaagtacacagatcaacttaggagacaattcagtagcctgttcaaaataacccactaaatgccaggaagtaacagyttggagacaaatttggttagataggtgacttttcaatttagctttggtttaatcttgagtcttctcagagcctagataaaagcctaagaagaaagcacca

SEQ ID NO: 392168 - DNA, 201 bp, Homo sapiens
tctctggcagtccccagtgtctactgctgccatctttatgaccatgagtatccaacgtttagcttccacttataagtgagaatatgtggtatttggttttytgttcctgcattaattcacgtaggataatagcctccagctgcatctatgttgctgcaaaggatatgatttcattgctttccatggctgtgtaatattctg

SEQ ID NO: 392169 - DNA, 201 bp, Homo sapiens
ggaggaagaggagaggtaagagccaaagacaaagaaatagggtttgtttgtttttttaacctttattttagattcaggggatatatgtacaagtttgttarctgagtgtatttcctgatgctgaagtttggggttcaaatgatcccatcaaccaggtactgagaataggacccaacagctagtttttcaactcttgcctct

SEQ ID NO: 392170 - DNA, 201 bp, Homo sapiens
acaaatgttagcactgtctggggaagagaaaactttggtcatctctaaatgagcttttccaatgtcacaggcctggacaactctcacgtaagctggatgcrggggttttgattaatagactttgaagtttagatccatttgggggaggtggacctagcaggctatctgagcctggaaccattgagatttccatttttctaa

SEQ ID NO: 392171 - DNA, 201 bp, Homo sapiens
atagagggggagtggaggaagaggagaggtaagagccaaagacaaagaaatagggtttgtttgtttttttaacctttattttagattcaggggatatatgyacaagtttgttaactgagtgtatttcctgatgctgaagtttggggttcaaatgatcccatcaaccaggtactgagaataggacccaacagctagtttttc

SEQ ID NO: 392172 - DNA, 201 bp, Homo sapiens
tcttttttttactaggaatagagggctcaatggaccccttttcctctttctatcagtcccatgtcctcacacagatctgggagaagaaaagggagggcttygaatttactatacaccagttcatctgccaaatactctgccacttatgctagtcaacaagataaaaacttgcttattttaatgctgcaaactgactgtttt

SEQ ID NO: 392173 - DNA, 201 bp, Homo sapiens
cagtcttgcttggggctgactgtgggaagctctaattggaatgtaaaggtgcgctctgtgctgcttgacttcaccacgaatattcaccaccccagctaagcggaagccagaggcttcataaaatcactaaaaaataacaacataccaaatattgggaggaggaggaaaacacaactgcaatcaattattctgtcataagta

SEQ ID NO: 392174 - DNA, 201 bp, Homo sapiens
tgtcaatatttgtcttttaattaacaagatcaatctacatatagttaattggattatcaatgtatatggatttatttcagctactttattttgtgctttayatttgccccacttgttatatttcttctcttctttctctctcttcctttttaccttcatttgaattgtcagtttctttcttttttctatccattcctggtt

SEQ ID NO: 392175 - DNA, 201 bp, Homo sapiens
atctgagcttttccacctcatgtgcttcacagttatgagcttaacacaactggtgttaggtggtgtccataaaaatttcttcctaccaagctccaccttayggtaaattacatcctatcagattctgttatagtttgatgggttgtatctaaagctttgccctagatttaccgataagtctggaacaaaaattagtattag

SEQ ID NO: 392176 - DNA, 201 bp, Homo sapiens
gatttaactaatagtttcctagagatactatatagcaaaaaataatgaactatttttaacacttattttcttttaaaaagtacattagtattttgactaakcatgtcaaccataagctaaatagcatatgcataacaatttcaagtgaatacttcgtgatggtagcacttacttaatagttttctcttttccccactaacc

SEQ ID NO: 392177 - DNA, 201 bp, Homo sapiens
gtaatcaagtagcagagccagagtcctaagtcactcggatttcaatctgctgctgttctgccatggtcatgtatgttggtgaggccaagcacaagaactgsgcattcagcagatggtggccttggcctaaggcaatttaacaagagcgaagataatctctaagactcctcactgtacttagcaaattcctaggtgaaagct

SEQ ID NO: 392178 - DNA, 201 bp, Homo sapiens
taggaaagcacattgtgctgagcatctatccgttcagttcttgatatggctatatcccattccaggcatagaggcaggctttagggatacaatgataaagygggggtgataaataggtaaatagcttgcaacatggtaagcacaatagcaaacatatcgacacagtttcatataaattatgctgtgggaaacactacagtg

SEQ ID NO: 392179 - DNA, 201 bp, Homo sapiens
tagggatacaatgataaagcgggggtgataaataggtaaatagcttgcaacatggtaagcacaatagcaaacatatcgacacagtttcatataaattatgytgtgggaaacactacagtgtgtgctgtgtacctgtaacttaagtatgtacttaagtatgtacttaagcatgtaggacagagttcaaaggcaagactagat

SEQ ID NO: 392180 - DNA, 201 bp, Homo sapiens
ttactgtcaatattattatcacattcaaatagccatagtgtgctagcaactatacaactgtacagttattttaaggaaataattttataatttaacatggsgaaatcataaaatagattagcaaagggaaaaaacatttcatattcataatctatttacttttaatatattgtattaaatttgttgttacattgtgaaatg

SEQ ID NO: 392181 - DNA, 201 bp, Homo sapiens
caccacccctcaaacacagatgcatcaacataaggactggtgaaatggctaacaggcttcatgacgtctagaggtgttaatacttatatcactttaatttyaccacacaattaagtaatgatgcatttaaatatatatatttacagtacatttgaaaatcttactgtaaaaataggatcaagataaatctttacacgctcc

SEQ ID NO: 392182 - DNA, 201 bp, Homo sapiens
tatgtaattttgcctattttttagtccttcaatttgaaatgtttaaataacttcaaactagataaaaaaaattttaaatacacattttatgtctttattastttcctcatcaaaagcatatcttgcttttgtttatacattctgtatacagaattgtttcatatctagtagtagtaatataattatatataaactctaatt

SEQ ID NO: 392183 - DNA, 201 bp, Homo sapiens
agactaacaagcttgtattaaacaggacagaaatcagctaaaagtgctcttgatatgagataattttagcatcaaaaaaatggaggttatagacatactcraagtatgaaaaaagaaggagagttcttctgtagagaagacaccagtgccagctgatgaattcaggtagaatgatggaattcaaagatcatcattttgcag

SEQ ID NO: 392184 - DNA, 201 bp, Homo sapiens
tttgccctagatttaccgataagtctggaacaaaaattagtattagtcacttcttgaaatgtcttgggctgaaataaattttggatgaattagagtggcakagtgacagcatagtgacaggcccttctggcgctcaatcaattaaagaaccaaaattgcccataattctgataatctcactttttctatctgtatgtactc

SEQ ID NO: 392185 - DNA, 201 bp, Homo sapiens
aaattagccgggcgtggtggtgcatgcctgtaatcccagctacttgggaggctgaggcaggagaattgcttgaacccgggaggcggaggttgcagtgagcygaaatcgcaccactgcactccagcctgggcgacagagagagactccatctaaaataataataataataataattttaatgacgtgaaatattcatgatct

SEQ ID NO: 392186 - DNA, 201 bp, Homo sapiens
gtgtctttatagcagcatgatttataatcgttgacctcaaccattcttaccttgactttcatattttcttataacttttatttcagcttcaagggtacatrtgcaagtttgttatatggtatagtgcatgtcacaggggtttggtgtacagattatttcaccactcaggaaataagcataatacccaatagttagtttttt

SEQ ID NO: 392187 - DNA, 201 bp, Homo sapiens
agctaaaagtgctcttgatatgagataattttagcatcaaaaaaatggaggttatagacatactcaaagtatgaaaaaagaaggagagttcttctgtagaraagacaccagtgccagctgatgaattcaggtagaatgatggaattcaaagatcatcattttgcagacaccaatgaaaacaattgattgaaaaaagaaaca

SEQ ID NO: 392188 - DNA, 201 bp, Homo sapiens
ttctgagaatgccaagtgaggttatcgtttactacaaaaagatagatgtgtattggaaacatggcacttaaatacattcacatacatttgagctgaaaacraaaatataaacaggactttaattaatgagggttttaagtttttcccatatgtcaacataatatcaaggtgctatactaacttaccagtactggggtgaga

SEQ ID NO: 392189 - DNA, 201 bp, Homo sapiens
tttatctgctaaaataggccaaaatataatctaagaagcataaataagaaacaaaaaaattatcaagacattccaccaagaatgccacacgtgtcatcaayactaacataaatcttcatgtaaaacttctttgcaattacttttaatttcaatttctgcctcttcatctatttgatttattctgctaacaaaagttagaga

SEQ ID NO: 392190 - DNA, 201 bp, Homo sapiens
gctcgtgtattcaaaaatggggatagtttggaggaatgtgatatttggacttttgaaagtttatcaaccttcagatcccaaaaatacaaataagtctggtytgaacatcagaaatataataactcttctaacttacctattttcacaaatggaagtattttgagtctccttatacagctttcttctcttttttctcaattc

SEQ ID NO: 392191 - DNA, 201 bp, Homo sapiens
taagtttaacaaacatttctttaatgaaccatacacatgactgtagatataataaagagtacaacctgatccctgctcttgatgagctcacagtttagcargaggaacgtataacaagtcaaaacaactaatcctaatagttgttatgaaagagcagtggagatacaaagaggaagtagtcacctcaaactggaaaagcaa

SEQ ID NO: 392192 - DNA, 201 bp, Homo sapiens
gcattactttctgcctagttgaagtgaacactcaactaccgtgtgtgtgtatgtgtatgtgagagagagacagagacagagaaggagacagagagagggartataagaatcagacttaaagattgagaaagaaaaaagaagaaagaaaagtacattaaatactcagcatggtaaatattttataggatataacaattaaaa

SEQ ID NO: 392193 - DNA, 201 bp, Homo sapiens
tgcttcacagttatgagcttaacacaactggtgttaggtggtgtccataaaaatttcttcctaccaagctccaccttacggtaaattacatcctatcagaytctgttatagtttgatgggttgtatctaaagctttgccctagatttaccgataagtctggaacaaaaattagtattagtcacttcttgaaatgtcttggg

SEQ ID NO: 392194 - DNA, 201 bp, Homo sapiens
tcataatctatttacttttaatatattgtattaaatttgttgttacattgtgaaatggaatgtttctctactattaaggagtgatttgttatgcaatgacrttctaaaagaatgagttataaattatttaaagaaagcaaaatgctgttactgaacacatgaatatgtaaacaggatacttggtgactgattacatttttt

SEQ ID NO: 392195 - DNA, 201 bp, Homo sapiens
tctcagaatggaaaaaataagtaattgagtaaatttcagtgaaaagcacattctggatatgcctgatttatggctctgatcaaggtggtcactgctattcrcaatgtttatattattgccttgactgtttgaggccagtgtgactgatgaaggtagctgttcatagaagatggtttgacttaaatactgccctagtttgtg

SEQ ID NO: 392196 - DNA, 201 bp, Homo sapiens
ttaacatctttcttcgcaatcagtttatgtatattcctaacttatcgtatctaatctgctatattcttggaaaccagatcacaggcctgttagacctataygtatgtaaaataaagtgacttttaagtgagagcatgaaaccctttcttaaagaataaatttgccttagttcatttgtactgctacaacaaaatgccacag

SEQ ID NO: 392197 - DNA, 201 bp, Homo sapiens
catatgatttttagagttttttttctaattctgtgaagaatgtcattgatagtttgatagaaatagcactgaatctgtaaattgctttgggcaatatggcmattttaacaatattgattcttcctattcatgagcacggaatgctattcctttctttgtgttgtttttggtttctttcaacagtgttgtacaactctcctt

SEQ ID NO: 392198 - DNA, 201 bp, Homo sapiens
ctccagaggggacaaacactgtattttcacatggcagaagggatgggaagaagcaagcccacttcctcaagcctttttataaggtcattgatcccaatcaygagagctccactgtcatgatttaatcacctcctgaaggcctcacttcttaatactaccacactggcaattaagtttcaacatatgtattgtggggaacac

SEQ ID NO: 392199 - DNA, 201 bp, Homo sapiens
atgtattgtggggaacacattcagaccatagcaaaattcactaactttactacttgcttcctaacagctgttctgatctcataggcattttgcttattttygcatctgcaatgtaattctagtggattaaagttgttaggcacagtatacaattgtgcctttcccccaacttgcatccaaagaaaattataacgcatttca

SEQ ID NO: 392200 - DNA, 201 bp, Homo sapiens
acatgttaattagcttaatttcaccatttcacaagtacatttattaaaacatcaccttgtacactataaatacatgcaatttttatttgtcaattataccktaacagagctgggtgaaattttaaaaaaaagaaaaaagagtggtcaaggaaagcctcaccaaagaggttatgtgtaagtggagacctgaaagagtaagga

SEQ ID NO: 392201 - DNA, 201 bp, Homo sapiens
gatatatcttttggaaactttttaatgccattctttacctgatacattttttaaattatgtatttcaggccctgcttgatactcagaatcttttgcgtgcwcaaatcacaaattttacattcaacctgggattttcagggaaattttaccatacaggtaagaaaaagggattaactgttctcattaaggcttctctgatca

SEQ ID NO: 392202 - DNA, 201 bp, Homo sapiens; identical to SEQ ID NO: 85897

SEQ ID NO: 392203 - DNA, 201 bp, Homo sapiens
ttctaagaatcagtattaaaatgaagcatcatggaagctttaaactaccagacattcatgctatatcctgcatgataaattatttggggcccttggttacwggcttcacagaaaacagcctttacaatcatattgcttgctaaggagaatacattccctctcctcattgatccagaaataactgaggaaaattctgtgcaa

SEQ ID NO: 392204 - DNA, 201 bp, Homo sapiens
tgcttatgtagtgaatcacatttattcatttgcatatgttgaaccagccttgcattccaggaataaagcttacttgatcatgttttactaacttttcaatrtgctgctggatttgattttctagtattttgttgaggattttcaggtctatattcatgagagatattggtctaaagtttcctttattaattgtgtctctgc

SEQ ID NO: 392205 - DNA, 201 bp, Homo sapiens
cagccataaaaaggaatgagatcatgtccttggcaaggacatgaagctggaagccatcatcttcagcaaactaacacaggaagagaaaaccaaacaccgcrtgttctcactcataagaggtagttgaacaatgagaacacatggacacagggaggggaacaacacactgaggccagttaggggatggggggctaggggagg

SEQ ID NO: 392206 - DNA, 201 bp, Homo sapiens
attttgatttgtaaattttttttagatctcagaaattaaaatatgatttgggatttttcccccacaattaatacattacattaactgagaaccctaagatrgtctgaggatcctaaggtgggctaaacttattagaatactttaacaaaaccttgaggactactttttgtgccttgcctgatagatgcagggtctgtcctc

SEQ ID NO: 392207 - DNA, 201 bp, Homo sapiens
ttgtgctgagcatctatccgttcagttcttgatatggctatatcccattccaggcatagaggcaggctttagggatacaatgataaagcgggggtgataartaggtaaatagcttgcaacatggtaagcacaatagcaaacatatcgacacagtttcatataaattatgctgtgggaaacactacagtgtgtgctgtgtac

SEQ ID NO: 392208 - DNA, 201 bp, Homo sapiens
attccagagaagaggggcaggggagagtagagtcataggaaagcacattgtgctgagcatctatccgttcagttcttgatatggctatatcccattccagrcatagaggcaggctttagggatacaatgataaagcgggggtgataaataggtaaatagcttgcaacatggtaagcacaatagcaaacatatcgacacagt

SEQ ID NO: 392209 - DNA, 201 bp, Homo sapiens
tcatatttagatagaaatatattttctaaactaactaaatgcttttttaaaaaatgtgttttgaataatctgggttttttaattacttctaaattgcatcygtgattgtgtctcaaaacactaatttactacagtcaattgccctgagagtataaacagtcattcatgtattcattctgtaactagttattaagcgtgtac

SEQ ID NO: 392210 - DNA, 201 bp, Homo sapiens
ggctactacaggactccttccgcaggtgccagaggttccacaggttcttataagctgaattgtggtgtagcccatcagtgtcaccttaggaaaacaaatcrtcattagaagcttgaaaatgcttcacaaattcaaataattatataattttgactataatcatcctgttgtgctatcaaatagtacatattattcatgctt

SEQ ID NO: 392211 - DNA, 201 bp, Homo sapiens
gtatgaaaaattagaggcttattgaacacattaaagaaaaatttggcatgtctactttatgaactgctcatatttagatagaaatatattttctaaactamctaaatgcttttttaaaaaatgtgttttgaataatctgggttttttaattacttctaaattgcatccgtgattgtgtctcaaaacactaatttactacag

SEQ ID NO: 392212 - DNA, 201 bp, Homo sapiens
aagatggattcttctggaaataagattttagatacgtcctgaaataagaataaatcttcgggatcaggattaattgaaatgaaatgaggctgagggaaaakagcaggtaggagaccataatgactgtatgaggtaataaagactcaatctaaacagttaaaagcattgcaaacatatatgctgtatggatggaacatttgt

SEQ ID NO: 392213 - DNA, 201 bp, Homo sapiens; identical to SEQ ID NO: 85900

SEQ ID NO: 392214 - DNA, 201 bp, Homo sapiens
gagacttgtcacaaagattggtttttaattatttatgcctacggttcagattagtttaattatccaccttttcatcatagcatcagcgatcacatgaagaycctgcagctctgaagtttagcttctacgaagtgatctcagcagggccccgtgcaccctcggagctcagagccttgcagaagagatgtttggtcccggggt

SEQ ID NO: 392215 - DNA, 201 bp, Homo sapiens
tttcaggtatggagtaataaggatttacatcatgttagaatctcattaagttgatgactttgccttaaggttaagaaaattttcaattgttaaactattastagtttttcctctttagttgtaaataatgaggctatggcaaagagaaataggcagaagtagaaaaactttaattttctaagagtatttcagaataattct

SEQ ID NO: 392216 - DNA, 201 bp, Homo sapiens
aactattactagtttttcctctttagttgtaaataatgaggctatggcaaagagaaataggcagaagtagaaaaactttaattttctaagagtatttcagrataattctccctgctctatttgctgtgcgtacctttcctgattgtaaaaagctttgaaagctttagatacgattcttatcctgagaataaagtttgaaag

SEQ ID NO: 392217 - DNA, 201 bp, Homo sapiens
ctttactaatttcaaaatagataactctccagcagtgaggcacttctttctttagctttgagacttgtcacaaagattggtttttaattatttatgcctayggttcagattagtttaattatccaccttttcatcatagcatcagcgatcacatgaagaccctgcagctctgaagtttagcttctacgaagtgatctcagc

SEQ ID NO: 392218 - DNA, 201 bp, Homo sapiens
cattttttagaacctgcttctattaaactgccgattatctattcaatttatttccagcagtagttgtaataaatctgtttggatcattctaatatttattmatgactttaaagtgttgatcataggaaattgtgttttcatttaattaatttctgaacctctattgtctttctaggtaccactgctttgtatttgttcctg

SEQ ID NO: 392219 - DNA, 201 bp, Homo sapiens
ttgagctgagattgaaagccagttctctcaatccctgcaacaggcctcttttcacaccacactatctccattttttagaacctgcttctattaaactgccrattatctattcaatttatttccagcagtagttgtaataaatctgtttggatcattctaatatttattcatgactttaaagtgttgatcataggaaattgt

SEQ ID NO: 392220 - DNA, 201 bp, Homo sapiens
cagaaggcagaggttgcagtaagctgaggtcgtgccactgcactccagcctaggtgacagagtgagaccctgtctcaacaacaaaaaagcttgtgcttaawttttatcatattgcccctgacgtttagattcaagaggtccaaattttgctaatcagagttagactgatgatccatgataccaatatattaatttgggcca

SEQ ID NO: 392221 - DNA, 201 bp, Homo sapiens
atgcaggaggtggcacagctcagccagtttgatgaagaactttataaggtgagtagcctgggtcaggtgacagaatgacttcttaagttatgtagcttaamttcagtgatgcagagtggtgctgtccaataggactttctgcgatgatggaaacgttctctctctgtgactcttgagcacttaaaatgtgggtggtgcaat

SEQ ID NO: 392222 - DNA, 201 bp, Homo sapiens
gaccagttagtgcctgtcttcccccaaaggaaaccaaattataagagactaaattattctcaaggctgctagatgagcattatatcaaagtaaaagggtawcattagccatttctagcatggagaggtagcaatcatgactgcactctctatagattcctgtgcatagcacctagtttccttaaatgagttttaagataat

SEQ ID NO: 392223 - DNA, 201 bp, Homo sapiens; identical to SEQ ID NO: 85907

SEQ ID NO: 392224 - DNA, 201 bp, Homo sapiens
tcagcctcccgagtagctgggattacaggcgtcgccaccacacctggctaatttttttttttttttttttttttttttgagacggtatctcactctttcayccaggctaaagtgaagtggcatgatctcggctcattgcaacctctacgcaccgagttcaagggattatcctgcctcagcctgttgagtagctgggactac

SEQ ID NO: 392225 - DNA, 201 bp, Homo sapiens
tctttattcctaggtagatttcgggcagacaacttgaacaagctgaagaacctatgcagcaagacaatcggagagaaaatgaaggtaagagaactgaatawcaaacagccatgagaacttgagcggagatatttgatcttgctcttagctaatgttcacagaagttctaactcagtgtttaagtctacaagatgttcaatt

SEQ ID NO: 392226 - DNA, 201 bp, Homo sapiens
gccccgaaattatattttcaacacataatcagtatttttaaattactgaaactagcccggtgcggtgactcactcctgtaatcccagcactttgggaggcygaggcaggcagatcacaaggtcaggagatcgagaccatcctggctaacacggtgaaaccccatctctactaaaaatacaaaaataattagccgggcatgg

SEQ ID NO: 392227 - DNA, 201 bp, Homo sapiens
ggtattaaaagctactatattggacagtacagccttaaagcataaaaatccaaattcctgaacacaatttacaaagtcccccatgccttcctggcctcgcygtctaccacttcccgcatagggcctcccgctctttgctctagcttattgctactcctagactctttcacacttctgtgactgttgcctcttcctggaatg

SEQ ID NO: 392228 - DNA, 201 bp, Homo sapiens
tatattggacagtacagccttaaagcataaaaatccaaattcctgaacacaatttacaaagtcccccatgccttcctggcctcgccgtctaccacttcccrcatagggcctcccgctctttgctctagcttattgctactcctagactctttcacacttctgtgactgttgcctcttcctggaatgctccttatcagggtg

SEQ ID NO: 392229 - DNA, 201 bp, Homo sapiens
agtgagctgagatcgtgccattgcactccagcctgggggacaaggtgagacttcatctgaaaaaaaaaaaaaaattactgaaactactgagatattttactttttttttttttttttttggtacaagtcctcaaactccaaagtatgttttacacttaaagcaccactctgttcaggtgctcatttcaaatttcaaatgct

SEQ ID NO: 392230 - DNA, 201 bp, Homo sapiens
aggcgcatgccaccacggccagctactttctgtattttttgtagagacagagttttgccatgttggccaggctggtctcaaactcctgacctcaagtgatycacctgccttggccttccaatttgctgggattacaggcatgagccaccatgcctggcccatgtattcattttttgaccaatattttccacgtgcctactg

SEQ ID NO: 392231 - DNA, 201 bp, Homo sapiens
aggtgcgtgccaccacgcccagctaatttttgtatttttagtagaaacaggatttcaccatgttggccaggatggtctcgatctcttgatctcatgatccrcccgcctcggcctcccaaagtgctggtattacaggtgtgagccactgcgtccggccacatttttcttaatgatgaaatatcgaatgctttcccccttgag

SEQ ID NO: 392232 - DNA, 201 bp, Homo sapiens
ctttctagaatgcaaatctgatcattttacttgaaggcttaagttttgcagtgacatactttagagcagcactgtctgataggaatagaatgttagcttcrtgtatacagatgctccttgacttaggatgggtttatgtcccaataaatccaccataagttgaaaatattgtaagtaaaaaatgcatgaaatacacatacc

SEQ ID NO: 392233 - DNA, 201 bp, Homo sapiens
gcagaatctgaactattacaattaaataactttaacaaaataactggatacaatacacagaatcaaaggtacttctatatacaagtaacagtttagaagcmccaggtgcatagagatatacctaataaataacatttaagactcatatactgaaaactacaaaacattgctgagagaaattaaaaacaatgaagggatata

SEQ ID NO: 392234 - DNA, 201 bp, Homo sapiens
ccaagcctaccttaaatgtgctcagaacactgatgttaacctacagttgggaaaaatcatcttacacaaaccctattttataataaagtgtgaatatctcrtgtaatttattactattgatcataaagtttaagcattataagttggcgatagtctgtaattgttaatttgtttgtatccaatataaaaaatataaagaga

SEQ ID NO: 392235 - DNA, 201 bp, Homo sapiens
gatagagtcttgttctgtcacctagcctggagtgcagtggaatgatcttggctcactgcagtctctgcctcccaagtagctgggagtacaggcacacaccmccatgctcagctaatttttttttttgtgtgcatatatatatatatatatatatatatatatattttttttttttttttttttttttttttttgtagagac

SEQ ID NO: 392236 - DNA, 201 bp, Homo sapiens
tagtctgtaattgttaatttgtttgtatccaatataaaaaatataaagagaaacagatgaaattaattttagtaatacattttatttaacctagtcttgtrtacccaaaagttatatatatataaatatatatataattattattattatttttagacagcgtcttgttctgttgcctaggctggaatgcagtggcatgat

SEQ ID NO: 392237 - DNA, 201 bp, Homo sapiens
tcccaagtagctgggagtacaggcacacaccaccatgctcagctaatttttttttttgtgtgcatatatatatatatatatatatatatatatattttttwtttttttttttttttttttttttgtagagacagggttttgccacgttgcccaggctggtctcgaattcctgggctcaagcgacccacccacttcagcctc

SEQ ID NO: 392238 - DNA, 201 bp, Homo sapiens
gaggtccaaattttgctaatcagagttagactgatgatccatgataccaatatattaatttgggccaatatgttgaccagttagtgcctgtcttcccccaraggaaaccaaattataagagactaaattattctcaaggctgctagatgagcattatatcaaagtaaaagggtaacattagccatttctagcatggagagg

SEQ ID NO: 392239 - DNA, 201 bp, Homo sapiens
tgagatggagtctccctgtgttgctactgcacctggccagatttttccaactttttaagatgattttgctctgagtcactgaagggtgtgagtggagttayggttagaattttgattgtatgagaatgtgtaatgaacctaaaggatttccatgctttacatttaggagatttagtccttttgttctttcttttttttttt

SEQ ID NO: 392240 - DNA, 201 bp, Homo sapiens
aaatatgcttcagacaaatctcttactcctaataaatttataatcttcctagagaacagttgaatgcagcacatcaatggagtgctaaattggttcagtcmagaaaatcagaaagtgcaaattaagggaaagttctcataagagagcggcagtacttaaatttctgcaatgtatgggaacaatagatagtggccagaacta

SEQ ID NO: 392241 - DNA, 201 bp, Homo sapiens
tagcctggagtgcagtggaatgatcttggctcactgcagtctctgcctcccaagtagctgggagtacaggcacacaccaccatgctcagctaatttttttktttgtgtgcatatatatatatatatatatatatatatatattttttttttttttttttttttttttttttgtagagacagggttttgccacgttgcccag

SEQ ID NO: 392242 - DNA, 201 bp, Homo sapiens
ggggccgtggtggctgggagtcgagggtacttcttgaaggtaagagctgggaaccagtgaggataggattatgaaaaagaaacaaaatatatatatatatwtttttttttttttgtagagaaacataatctgtttaaagaggcccacagatctaccagttgtacttgcctttctgcaaatgtattggcaattagatgcaat

SEQ ID NO: 392243 - DNA, 201 bp, Homo sapiens
cactgggaaacaaagtgctctccctaaaccctgagcatcagtataaccttgacctcctctcttctttcttttaatgaagggaggaatgtgttcctttactsgctaaaacctgttttaccttttctttctttttctaatttcaacccctaagattagataatcactaacagaacattagaaatatccgctgcaggtaacagt

SEQ ID NO: 392244 - DNA, 201 bp, Homo sapiens
  misc_feature (1)...(201): n = A,T,C or G
tctctgtgactcttgagcacttaaaatgtgggtggtgcaatggaggaagcacattttttattttaattaattttaacttaaacatgtagctaatgactgcnatattagacagtgcagctgcagagcctcttttacctttccctgggtaatctgtatgatgtatctaaatcaagcatacttgaacaccatgagcttagaaaa

SEQ ID NO: 392245 - DNA, 201 bp, Homo sapiens
tctaaacactgatccaggggaacctttcttccttacttttttttttttttaattaaaatgctgctacataacaaaatttagaaatggcagagggaattatytgctttcccattgacctaatataacaattgtcatcttaaaatattcatgttgggatttttttcatatatatgttgttttcacatacttataattgccatg

SEQ ID NO: 392246 - DNA, 201 bp, Homo sapiens
ccactacccgtaccatctgcgccatcctggagaactaccagacagagaagggcatcactgtgcctgagaaattgaaggagttcatgccgccaggtaaaacycccagctcatctcatcgttctcctcttttctgtcttcacactcttctaaatagcagtcccctttcaggatataccaggtttttttgttcagacacagccc

SEQ ID NO: 392247 - DNA, 201 bp, Homo sapiens
  misc_feature (1)...(201): n = A,T,C or G
ccttcctgcagaaaaaagagccagtgggagatgatgagtctgtcccagagaatgtgctgagtttcgatgaccttactgcagacgctttagctgtaagttanagttcttttctaagttaggatctctgctattttgtcttaattttattcctagacagcaagtgctctcactctgctccacacagcattgtgacatcctttc

SEQ ID NO: 392248 - DNA, 201 bp, Homo sapiens
tctttgatctctgtcagggaccccattttggactgacccattcctttatctttttagtattctctccccactcccaggcagggattaaaggaaatttttcytgcactattattgatctctttcttgtggtttcttattctagccaaggtcctccccacttcctcttaactggtatagctccttccttccacaggtgattgg

SEQ ID NO: 392249 - DNA, 201 bp, Homo sapiens
aatagatagtggccagaactatctatctctgcctcaagcacccccaaagaaaaatgccgatggatttgtagggcaagactgtgtatatctgtgtgtgaagkaaatctcagttcttaaaagtcttcgtttccagtttttaaaatgctaccacaagggctatctttagagcacaacagggttagggcaaccgaatcatattcc

SEQ ID NO: 392250 - DNA, 201 bp, Homo sapiens
cttctggcttccagtgtactaatttttttcctacatgttgtatcttttagaaaaatttatgtaagaagttctgtgattcatttatataatacgttaatttrgtgtacactttataaaacaatgccagagattttcttttatttatttgtgttgggtttttttccttcctgcagaaaaaagagccagtgggagatgatgagt

SEQ ID NO: 392251 - DNA, 201 bp, Homo sapiens
tgcaggaggtggcacagctcagccagtttgatgaagaactttataaggtgagtagcctgggtcaggtgacagaatgacttcttaagttatgtagcttaacwtcagtgatgcagagtggtgctgtccaataggactttctgcgatgatggaaacgttctctctctgtgactcttgagcacttaaaatgtgggtggtgcaatg

SEQ ID NO: 392252 - DNA, 201 bp, Homo sapiens
tctgcaccccaggcaatgtcgattgtctgggaagggttgtccttgtgcaggatttgaggggtaatttaaaagggtaaaaaaaagaaataaacaaaaaaaamccccgagagaatgctatagacctcttggaaaatcatcactcccagtttcatggctagaattacttctcaaactttgtaagttactacttctccattgagt

SEQ ID NO: 392253 - DNA, 201 bp, Homo sapiens
ttctctgacccagacagattaattgattttaggatcaaaaagctattaagtggcagcatagggaggggcttgacactttgacttctggcttccagtgtackaatttttttcctacatgttgtatcttttagaaaaatttatgtaagaagttctgtgattcatttatataatacgttaatttggtgtacactttataaaaca

SEQ ID NO: 392254 - DNA, 201 bp, Homo sapiens
tccttgtgcaggatttgaggggtaatttaaaagggtaaaaaaaagaaataaacaaaaaaaaaccccgagagaatgctatagacctcttggaaaatcatcaytcccagtttcatggctagaattacttctcaaactttgtaagttactacttctccattgagtagcaagttgccttctctagttatgagacacagtagtgtt

SEQ ID NO: 392255 - DNA, 201 bp, Homo sapiens
agctcagtataattggacagtcagacaagtaacaaagaatcaaaatccactgtcataagctctgtggtttgtgtaggcccaaagtgctttgagaacatcargataattctcttaacggtgtgcctggatgatttgctgggcttcagtgttcagaacgaatctcaaggttcagaatgtcagttgctgggatctgtggtcttt

SEQ ID NO: 392256 - DNA, 201 bp, Homo sapiens
  misc_feature (1)...(201): n = A,T,C or G
ggcccagacttgcctgcctcccagtggtgtggaaacaggtcttcatggcaaggatgtctcccacttcagtcctttattcaccctataccgctgtcaccgtntccttgggtccctctctgcagattgaacagtttgtgtactcatcaccccatgacaacaagtcatgggagatgtttgaagagatgattaccaccgcagagg

SEQ ID NO: 392257 - DNA, 201 bp, Homo sapiens
gaacaagttggaggcttccctcttctcacccaagaaggtctgggttgtaagctgctctcttcaaacccaattttcaggccctactcttttccaagtcaggwgcttgaaaggggtgaaaaggaaaggccacaatagtagtttcttccttccctcaaagggcccaactcctcagaataccagaagctaccacttgtcactcat

SEQ ID NO: 392258 - DNA, 201 bp, Homo sapiens
acgcgaggggagtgaggaggcgagcaaaagattgtaatgactgaagctgtttaattgtgatttgtggacgttttcctttaaagacattggcagagttgggytagaacctggaactgccggatcttggagtcatatcgggcatctatcatgaagccgaataaaaccatagaaccatctgcccataaatctctgcctgtatta

SEQ ID NO: 392259 - DNA, 201 bp, Homo sapiens
caccctattgtagtcaccattgtatgccaactacatttggggctctaaagctctaagattaggccgggcacagtggctcacgcctgtaatcccagcacttwgggagggcgaggtcaggagttcaagaccagcctggccaacatggcgaaaccccgtctcttccaaaaacacaaaaattagccgagtgtggtggcgggcacc

SEQ ID NO: 392260 - DNA, 201 bp, Homo sapiens
gcccatcctggctccagcttttcctctcattgcttacctctgtgtttctggggaagtgcatggtggagtggcgtggattatggaccctgaaaccaggctgyggctttaccactcaccagctgtgtaacattgggcataatgcataagcccccagtgctccatttctgcctttgtatgaggaggataacagtaacagtgcct

SEQ ID NO: 392261 - DNA, 201 bp, Homo sapiens
tgggccatagcccattgccccagctctgggataacaaagccgggacaaggggacaaagagcaagctgctcccatttgtaattcagaaggaccagaaactcrcatttcctgtggcctcaactatttggtttgaagaaaggcagcgtacacagtgtgcaggaggctagttttgccccaccccctataccattccagaagccca

SEQ ID NO: 392262 - DNA, 201 bp, Homo sapiens
cgctactgagctccatccagcctgggtttccagtgaaaccctgtctccaaaataaataaattaattaattaaatgcactttacaatctagataacttttamattgtaaacctcaaaactaaacaacaacaacaaaaaattatagaactttggaactgcaccagtaaagagcataaaaagatgacctcgggattctagcacc

SEQ ID NO: 392263 - DNA, 201 bp, Homo sapiens
atgctggggacaccctattgtagtcaccattgtatgccaactacatttggggctctaaagctctaagattaggccgggcacagtggctcacgcctgtaatyccagcactttgggagggcgaggtcaggagttcaagaccagcctggccaacatggcgaaaccccgtctcttccaaaaacacaaaaattagccgagtgtggt

SEQ ID NO: 392264 - DNA, 201 bp, Homo sapiens
taaagctctaagattaggccgggcacagtggctcacgcctgtaatcccagcactttgggagggcgaggtcaggagttcaagaccagcctggccaacatggygaaaccccgtctcttccaaaaacacaaaaattagccgagtgtggtggcgggcacctataatcccagctactcgggaggttgtggcaggagaaccgcttga

SEQ ID NO: 392265 - DNA, 201 bp, Homo sapiens
gtagctgagactacaggtgtactccactatgcctggctaatttaaaaaaaaaaaaaaatatatatatatatatatatacacatatatatatatatatatayacacacacacacacacacacacacatatatatatatatttatttatttatttatatttagatatggggtctcactctgctgcccaggctggtcttgaact

SEQ ID NO: 392266 - DNA, 201 bp, Homo sapiens
cactatgcctggctaatttaaaaaaaaaaaaaaatatatatatatatatatatacacatatatatatatatatatacacacacacacacacacacacacayatatatatatatatttatttatttatttatatttagatatggggtctcactctgctgcccaggctggtcttgaactcctgggctaaagtgatctgcccac

SEQ ID NO: 392267 - DNA, 201 bp, Homo sapiens
gctaatttaaaaaaaaaaaaaaatatatatatatatatatatacacatatatatatatatatatacacacacacacacacacacacacacatatatatatwtatttatttatttatttatatttagatatggggtctcactctgctgcccaggctggtcttgaactcctgggctaaagtgatctgcccacctcagcctacc

SEQ ID NO: 392268 - DNA, 201 bp, Homo sapiens
atttaaaaaaaaaaaaaaatatatatatatatatatatacacatatatatatatatatatacacacacacacacacacacacacacatatatatatatatwtatttatttatttatatttagatatggggtctcactctgctgcccaggctggtcttgaactcctgggctaaagtgatctgcccacctcagcctaccatgt

SEQ ID NO: 392269 - DNA, 201 bp, Homo sapiens
agtgtgacgcggagcggataaagttggaagcagagcggtttgagaacctccgagagattgggaaccttctgcacccttctgtacccatcagtaacgatgargtaggtggctgtgccgcagcaggaggctgccttaggtcgctgctgtctctgcaggggcggggacgggaggagatctgtggaacactggcattgtctgtca

SEQ ID NO: 392270 - DNA, 201 bp, Homo sapiens
tgcagtggaatgatcttggctcactgcagtctctgcctcccaagtagctgggagtacaggcacacaccaccatgctcagctaatttttttttttgtgtgcrtatatatatatatatatatatatatatatattttttttttttttttttttttttttttttgtagagacagggttttgccacgttgcccaggctggtctcg

SEQ ID NO: 392271 - DNA, 201 bp, Homo sapiens
gtcggagcctgtgccgggatgaggggcctgccccgctctcccagttacctcccaacatggggttccccagcagctcttcccaggtgcaaaaggggagtgcwtccttgcagcctggacttggccaggtcctggtggggctgatgcctcggcctctgacattgcccttttaagagccctctccggcggggccaacctgtaatc

SEQ ID NO: 392272 - DNA, 201 bp, Homo sapiens
gttagcctggctggctgttttccagtcagggcttcttgagcacttcagtcctcagaggcagtgcccaagagcattcttggtagtaagggttaacacatatycaaaggtggcagggcttcacaccatcactccataacgaaagtttttatgttgatttgtttttgcgttagcttctggcaggagttacttggtgcagtaaca

SEQ ID NO: 392273 - DNA, 201 bp, Homo sapiens
atcacttgagtccagaaggcagaggttgcagtaagctgaggtcgtgccactgcactccagcctaggtgacagagtgagaccctgtctcaacaacaaaaaascttgtgcttaaattttatcatattgcccctgacgtttagattcaagaggtccaaattttgctaatcagagttagactgatgatccatgataccaatatat

SEQ ID NO: 392274 - DNA, 201 bp, Homo sapiens
aggtccattctattggtctgcatgtctggcataaggatgtcattaccacactgtgctgactactgtagctttgtagaaggttttgaaattgagagtacaartcagtcctccaactttgttctttttcatgattgttttggctcctcagagccccttgcaatttcatatgaatttgaggattggctttccatttctgcaaaa

SEQ ID NO: 392275 - DNA, 201 bp, Homo sapiens
aggtaggttcccctgctttttaaggggcaagtggcagataagggcttacattacaacagatgagattttatttttaaactcagcaagaaaaaacaaaaaamaaaaacgctaatacgcataatcatagtttcatgtcttaattttagataatagaatggaggattatgctaaatcaggtgctcttgtaatttctcacatctt

SEQ ID NO: 392276 - DNA, 201 bp, Homo sapiens
  misc_feature (1)...(201): n = A,T,C or G
cagggaatggaatccatctgtgaaaatgaaaaaaaaaaatctgatttcattgtaatgggaattttttttttatttggaagttttccaaaatcaactttttnggggggcagagggtggcagggcctggggggtccattttacattttaaagtgttaaatgtctattttaatactacctaccagaaaaagcaacagagaatgt

SEQ ID NO: 392277 - DNA, 201 bp, Homo sapiens
tctccactggcctttcagtcatcctcccaggggaagacctgcttccctcctttctgtacagtctgaaaagtccctgattcttaaacaaacaaacaaaaacyacttttagaaatatatattttttctcaaagcagtcctcctgcctcagcctccccaaacactgggattacatgagtgagctaccgtgcccagcgagaggtc

SEQ ID NO: 392278 - DNA, 201 bp, Homo sapiens
tgggattacatgagtgagctaccgtgcccagcgagaggtctttttaatatggtagcactttatattagtcttacaagtgaattagacttttgctcgttagyttttattatttatttatctatttgagatggagtctcagtctgtcacccaggctggagtgcagtagcatgatcacgactcatggcagcctcgaccttctgg

SEQ ID NO: 392279 - DNA, 201 bp, Homo sapiens
gctcaaaatcactaatcatcagggaaatacagatcaaaaccacggtgagatatcacctcacacgttaggatggctattatcaaaagaaaaaaaggtaaatwttggcaagcatatagggaaattggaatgcttgtacacatttggtggagattaaaaatggtgctgccactatggaagacagtatggaagttcctcaagaaa

SEQ ID NO: 392280 - DNA, 201 bp, Homo sapiens
attctctcaacctttaaactgccactgaagtaggatttttagatggaaaaattggaatggtattttaaaagaataatggtaatacaggaacagaaattcamattttcagcattattgctaatgtatggaaacaagaagatattgagttcttgcacttttgaatgtgcattgcttttttacttctcacaaaacaacaccacg

SEQ ID NO: 392281 - DNA, 201 bp, Homo sapiens
ttgaatccaggaagtggaggttgcagtgagccaagatcacaccactgcactctatctagcctgggtgacagagcaaaactccgtttcaaaaaaataaaaawaaaaaaaagcactcaaaatagctgcttctagagaaagcatgagtttcaaattagactgagctaccatgattttttaaacctgattaatttttatagtctc

SEQ ID NO: 392282 - DNA, 201 bp, Homo sapiens
ggtcttgaactcctgacctcgtgatccacccgcctcggcctcccaaagtgctgggattacaggtgtgagccactgcaccccgcctcttttacagtattctyattcgaacttccaattttttattttctcccatttatacagtgtcatattgcttattcagtcagtatttttaaaaataaagagaaaatggcgggtacggtg

SEQ ID NO: 392283 - DNA, 201 bp, Homo sapiens
tgattcactcaagcaagttatcaagatatttaaaggcatgttcttaacccttgaaaaaagtaatgctggctggacgtggtggctcacaactgtgatcacarcactttgggaggctgaagcggatggatcacttgaagttgggagttcaagaccagcctggccagcatggtaaaaccctgtctctactaaaaatacaaaatt

SEQ ID NO: 392284 - DNA, 201 bp, Homo sapiens
gggcgcatgcctgtaatcccagctactcagcaggctgaggcaggagaatcgcttgaacatgggaggcggaggttgccgtgagccgagatcgtgccattgtrctccagcctgggcaacaagagcgaaactctcgaaaaaaaaaatttttttaatttaaaaaaagattatataaacaaaaaatttctgcacaatgaaataaac

SEQ ID NO: 392285 - DNA, 201 bp, Homo sapiens
gccaaggtgggcagatcatctgaggtcaggagttcaagagcagcctggccaacaaagcgaaaaacctgtctctactaaaaatacaaaaattagccaggcayggtggcaggcacctataatcccagctactcaggaggctgcggcaggagaatcacttgaatccaggaagtggaggttgcagtgagccaagatcacaccact

SEQ ID NO: 392286 - DNA, 201 bp, Homo sapiens
aggaagtctactaagaactgagctactcttctccttcagagtgccttgccagggtttctttatcctctctgggtttgtcccttaacaggttcagcagtccrtttctgaagcctgtgtcagaaaggcaggccccagggtacaaggatgtggtgaaaaggtcagtgaaaaaggggtcaagaaaggttggttgcttttatatct

SEQ ID NO: 392287 - DNA, 201 bp, Homo sapiens
acagggtctctccatgtcactccagatggaatgcaatggtgcaatcatagctcactacaaccttaaactcttgtcctcaagcaatcctcctacctcagccycttgagtagctgggactacaggtgtgtaccaccatgctcggctaattttttaatttttttgtagagatggggtctcactacattacccaggctggtctct

SEQ ID NO: 392288 - DNA, 201 bp, Homo sapiens
tactatttgccataaatgcaaagctgaataagaagatatccctgctatcaaaatgattatatttgaaaataaatatacagtctgggtgtggtggctcacasccgtgattccaacactttgtgaggctgaggcgggagaatcacttgagtccaggagttggagaccagcctgggcaacatagcaagatctcatctctacaaa

SEQ ID NO: 392289 - DNA, 201 bp, Homo sapiens
cactacaaccttaaactcttgtcctcaagcaatcctcctacctcagccccttgagtagctgggactacaggtgtgtaccaccatgctcggctaattttttratttttttgtagagatggggtctcactacattacccaggctggtctcttttcccttttaatataaatggctaattcaaagttttgctatattccatttct

SEQ ID NO: 392290 - DNA, 201 bp, Homo sapiens
ttagccaggcgtgggggcgcatgcctgtaatcccagctactcagcaggctgaggcaggagaatcgcttgaacatgggaggcggaggttgccgtgagccgaratcgtgccattgtgctccagcctgggcaacaagagcgaaactctcgaaaaaaaaaatttttttaatttaaaaaaagattatataaacaaaaaatttctgc

SEQ ID NO: 392291 - DNA, 201 bp, Homo sapiens
tagcaacaagttgtaccatatgaggacggccgctgaggtgagtacttagagagggtcaaattcagaatttgcaggtgcaacccggaaagtccccgcggacytagaggccctgcttttcaattagcctgaccctatgcacagagaggtccctgcgggacagggtcgcttcacagaggcagctggccgaggccgctcacccgc

SEQ ID NO: 392292 - DNA, 201 bp, Homo sapiens
ctatttgccataaatgcaaagctgaataagaagatatccctgctatcaaaatgattatatttgaaaataaatatacagtctgggtgtggtggctcacaccygtgattccaacactttgtgaggctgaggcgggagaatcacttgagtccaggagttggagaccagcctgggcaacatagcaagatctcatctctacaaaaa

SEQ ID NO: 392293 - DNA, 201 bp, Homo sapiens
tctggccattatcaaaccagatattgttgacaaagaggaggagatacaagatattattcttagatccggattcaccattgttcaggtaacttctgggtatratgattcatgcttttttcctctctgcccttaaaaaaaaaatgcttatgtaaatgtgcctacccatttaaacccttagtgttcagcattaaatttaagttt

SEQ ID NO: 392294 - DNA, 201 bp, Homo sapiens
aatcccaacactttgggaggcagaggcaggaggattgcttgagcccagaagtttgagagcagcctgggcaatatggcaagaccctgtctctaccaaaaatwaaaaaattagctgggggtggtggtgtacacctgtggtcccagctacttgggaggctgaggtgggagattcacttgagcccagcaggtcgaggccgcagtg

SEQ ID NO: 392295 - DNA, 201 bp, Homo sapiens
aagtccatgcatacttttacgtagacattgacaagctgagtttaaaatttagcaaaattgcaaataattcaattttagaaaagaagaacaaagttggaagrcttccactatctgattttgaaacttactgcaaagccacaattataagacggtatgacagtgatataaagatacacatatagattattggaacagaattga

SEQ ID NO: 392296 - DNA, 201 bp, Homo sapiens
caacaccacgtttttatccagagaactcctattttctcagtgtattcctcctgcagacgtaaatatatttgatccttatctagatagataagcttaaattkaagcttaaatttgacataaattgtgaagctttcatatgtaagaagtggcaatgcttttgtaaaattcttaagtggaatgcatgcatataaagtaaggaat

SEQ ID NO: 392297 - DNA, 201 bp, Homo sapiens
ctgaatttattagctgtagtggcttccttgtaaattccttagggttttccacatgtaggtttatgccatctgtgaaaagagatagttttacttctttcttkccagtttggatctattcttgacaatcttgcataatgtaaatccaaatgtttccatttttaatggtcattttcttaaagtgattttgaaaactgtttaagt

SEQ ID NO: 392298 - DNA, 201 bp, Homo sapiens
ctgaggcaggagaatggcgtgaacccaggaggcggagcttgcagtgagccaagatcgcggcactgcactccagcctggcgacagagaaagactctgtctcaaaaaaaaaaaaaaaaaaaaaagagctgggagcagtggtttgcacctgtaaatccagctattcaggaggctgaggtgggaggattgcttgaggccaggagt

SEQ ID NO: 392299 - DNA, 201 bp, Homo sapiens
tgaggcaggagaatggcgtgaacccaggaggcggagcttgcagtgagccaagatcgcggcactgcactccagcctggcgacagagaaagactctgtctcaaaaaaaaaaaaaaaaaaaaaagagctgggagcagtggtttgcacctgtaaatccagctattcaggaggctgaggtgggaggattgcttgaggccaggagtt

SEQ ID NO: 392300 - DNA, 201 bp, Homo sapiens
acccaggaggcggagcttgcagtgagccaagatcgcggcactgcactccagcctggcgacagagaaagactctgtctcaaaaaaaaaaaaaaaaaaaaaagagctgggagcagtggtttgcacctgtaaatccagctattcaggaggctgaggtgggaggattgcttgaggccaggagtttgagaccagcgtgagtgacac

SEQ ID NO: 392301 - DNA, 201 bp, Homo sapiens
ccaggaggcggagcttgcagtgagccaagatcgcggcactgcactccagcctggcgacagagaaagactctgtctcaaaaaaaaaaaaaaaaaaaaaagagctgggagcagtggtttgcacctgtaaatccagctattcaggaggctgaggtgggaggattgcttgaggccaggagtttgagaccagcgtgagtgacaccc

SEQ ID NO: 392302 - DNA, 201 bp, Homo sapiens
tgaggcaggagaattgcttcaacctgggagacggggttgcagtgaactgagattgtgctgctgcactccagcctgggtgacaagagtgaaactctgtctcaaaaaaaaaaaataaagaaaagaaaagaaaaagaaaacaggctggttgcagtggctcatgcctgtaatctcagcactttggcaggctgaggcaggcagatt

SEQ ID NO: 392303 - DNA, 201 bp, Homo sapiens
catggtgaaaccccgtctctactaaaaatacaaaaattagctgggcgtggtggcatgtgcctgtaatcccagctactcaggaggctgaggcaggagaatcrcttgaacccagaggcagaggttgcagtgagccgagattgtgccactgcactccagcctgggtgacagagcaagactccatctcaaaaaaaaaattttttt

SEQ ID NO: 392304 - DNA, 201 bp, Homo sapiens
ggcaagcatatagggaaattggaatgcttgtacacatttggtggagattaaaaatggtgctgccactatggaagacagtatggaagttcctcaagaaactraaaataaaactgttacatgatctaacaatcccactgctggatatatatatctgaaagaattgaatcaggatcttgaagagatacctgcaccaatgaacca

SEQ ID NO: 392305 - DNA, 201 bp, Homo sapiens
atggcccaattcctgcgagacctgatgctgatgttccaaaatgctgtaatgtacaatgactctgatcatcatgtataccatatggctgtggagatgcggcragaagtcctggagcagattcaggtactgtatgcagatacctgtagcctctggaatcttgatttcagaacgcctatgagaataaaggtgatttcgaggtga

SEQ ID NO: 392306 - DNA, 201 bp, Homo sapiens; identical to SEQ ID NO: 85916

SEQ ID NO: 392307 - DNA, 201 bp, Homo sapiens
agttgatacctgttaagaaactcttaatttgtgccctgaaaagccataatggagatatcaatgcctccacctcagatatatgtagaaaaaactctggccawtatcaaaccagatattgttgacaaagaggaggagatacaagatattattcttagatccggattcaccattgttcaggtaacttctgggtatgatgattca

SEQ ID NO: 392308 - DNA, 201 bp, Homo sapiens; identical to SEQ ID NO: 85918

SEQ ID NO: 392309 - DNA, 201 bp, Homo sapiens
ctaatttcaacacgtaggtgttctgtgggtctggtttttttgttttgttttgtttttgagatggggtctcactctgtcacccaggctgagtgcaatggtgygatctcagctcactgcaacctccacctcccaggctcaagcgattctcctgcctcagcctcctgcgtagctgggattacaggcacccaccagcacacctgg

SEQ ID NO: 392310 - DNA, 201 bp, Homo sapiens
gcgtgaacccaggaggcggagcttgcagtgagccgagatcaccccactgcactccagcctgggcgagagagcaagactcagtctcaaaaaaaaaaaaaaaagaaaagatgctcagcatcactaatcattagggaaatgcaaatcaaaactaactccctaccccagtaactcccgactttgcctgcccaatccccaggtgat

SEQ ID NO: 392311 - DNA, 201 bp, Homo sapiens; identical to SEQ ID NO: 85925

SEQ ID NO: 392312 - DNA, 201 bp, Homo sapiens
ccaggctcaagcgattctcctgcctcagcctcctgcgtagctgggattacaggcacccaccagcacacctggctaacttttgttatttgtagtggagaccrggtttcaccatgttggccaggctggtttcgaactctccacctgaagtgattcgtcctccttggcttcccaaagtgttgggattacaggcatgagccacca

SEQ ID NO: 392313 - DNA, 201 bp, Homo sapiens
gggcgagagagcaagactcagtctcaaaaaaaaaaaaaaaagaaaagatgctcagcatcactaatcattagggaaatgcaaatcaaaactaactccctacyccagtaactcccgactttgcctgcccaatccccaggtgatgttccctgttttcctgggtgagccagtatctccccagacactggcagccaccctggcaga

SEQ ID NO: 392314 - DNA, 201 bp, Homo sapiens
tccagcctgagcgacagagcgagactccgtatcaaaaaaaaaaaaaagcgactatgtatgaaatacccagcacagtgcccttcccttacccatcatgaccyccacacccacagtgtggccatcctgctctacctgacgcgcaaatataaggtccctgactactggtaccctcaggacctgcaggcccgtgcccgtgtggat

SEQ ID NO: 392315 - DNA, 201 bp, Homo sapiens
tcccctaacaagaacctggagtttgtgctttaaagctcatctctgaaatctcaggatggacgcacctccgatgaattcctctgacattctgccagggcccktcttcctccctggtgccccaggtgtcctgagtccttgtgtcactcagcgttgtgacccccaggtaccagccagagtcaatgtgcaatctctgcctctgtc

SEQ ID NO: 392316 - DNA, 201 bp, Homo sapiens
cccataaaagtatatcctgggggcctgaggacagacgtgggcccagcgacagatgtgggtccaggtatcagaacgtgatatgcctacttgtccctatctcrttgtccacacatagggcttggaagatggccatgttttatatcatgtgacctccaaccaatgagctgattggcttcttcaacaagagcccaggtagagatt

SEQ ID NO: 392317 - DNA, 201 bp, Homo sapiens
aacggagtcgttaagctgggacacgtgtgtagccccagcttaaaagagaatataggcccgtggcagatacagaggttttctgcccttttggcctgcatgcycaacctttgggaaaccccaagttcctgaaagcttttctgtgtctccaaatggacacatcctgtgtccttccaggtccatgctcatctcatcaccatggcg

SEQ ID NO: 392318 - DNA, 201 bp, Homo sapiens
atatctactttacttccacaccagtgctttggttgctggtgagtggtgagagtatccttgagacagggtaggccagaggacgatggcagctttgcccaccrtggggcaggcctctggccaagcttgtgtggcgatggctcagtggcatctgggctgcccggtggctccatctctgggctgcagcttcccaggatgggtctt

SEQ ID NO: 392319 - DNA, 201 bp, Homo sapiens
caccctggcagagttggatgtgaccctgcagttgctcgaggacaagttcctccagaacaaggccttccttactggtcctcacatctccttagctgacctcrtagccatcacggagctgatgcatgtgagtgctgtgggcaggtgaacccactaggcagggggccctggctagttgctgaagtcctgcttatgctgccacac

SEQ ID NO: 392320 - DNA, 201 bp, Homo sapiens
agaggagatgggtagggtgcatgcaaaggtccaggaaccacaccctgcacagtgagctctgttgcagaggggcagcctgtgggaggaggctgtgcctacakgacttagcaaggggtgttgtctattttgtaccagccggtggagtggtctcctcctcctcccgcaggggcccttccagtctttgccaaccaggagtgcaga

SEQ ID NO: 392321 - DNA, 201 bp, Homo sapiens
gactccctctggtttccggtcaggtcggtcggtccccactatgggcctggagctgtacctggacctgctgtcccagccctgccgcgctgtttacatctttrccaagaagaacgacattcccttcgagctgcgcatcgtggatctgattaaaggtaggtccagcctcgggtttggggaaccgaaaagtcaggaaggggacag

SEQ ID NO: 392322 - DNA, 201 bp, Homo sapiens
tagggaacttctcccagcgccaccttcttcctggggccattgctggtctggtttggagaccgaacagagaaaggtgagccagcagggagatccaagagtcrgggctccccaaaactctgctcggtctcacggaatagaccacggggttcccctgaggccgaataaaggggtggggatcatgaagagaagccagacaggagg

SEQ ID NO: 392323 - DNA, 201 bp, Homo sapiens
cccctcaagaaggtgccagccttgaaggacggggacttcaccttgacggagaggtaactgggaccctaggactgctgccaggcctgctggaaccatcctgktctaaccctctatttcatagacaaggaaactaaagtcttcagaggcagagagtctctgtgccccgcatcctgcagagagtcagtactggaccccaggccc

SEQ ID NO: 392324 - DNA, 201 bp, Homo sapiens
aaagaaaagatgctcagcatcactaatcattagggaaatgcaaatcaaaactaactccctaccccagtaactcccgactttgcctgcccaatccccaggtratgttccctgttttcctgggtgagccagtatctccccagacactggcagccaccctggcagagttggatgtgaccctgcagttgctcgaggacaagttcc

SEQ ID NO: 392325 - DNA, 201 bp, Homo sapiens
taactcccgactttgcctgcccaatccccaggtgatgttccctgttttcctgggtgagccagtatctccccagacactggcagccaccctggcagagttgratgtgaccctgcagttgctcgaggacaagttcctccagaacaaggccttccttactggtcctcacatctccttagctgacctcgtagccatcacggagct

SEQ ID NO: 392326 - DNA, 201 bp, Homo sapiens
gttggatgtgaccctgcagttgctcgaggacaagttcctccagaacaaggccttccttactggtcctcacatctccttagctgacctcgtagccatcacgragctgatgcatgtgagtgctgtgggcaggtgaacccactaggcagggggccctggctagttgctgaagtcctgcttatgctgccacaccgggctatggca

SEQ ID NO: 392327 - DNA, 201 bp, Homo sapiens
ttaagatatttatatcttaaattatactgaatatctcccattatactgaatgggagagttcacattttctcccttaagacctaaactatctatattaggatttttttggattgttttgttttgttttgttttgtttttgagatggactcttgctctgtttcccaggctggagtgtagtggcacaacctcggctcactgcaa

SEQ ID NO: 392328 - DNA, 201 bp, Homo sapiens
attctccccctgccccttcatcctattgttagcactttggtcctactgttagcatcattaaaccaaaagggaacaacccgacttctctggtgatatatttsgagacttagtgaaatattctgttttttcttttttaacaactcccaatacggattcccataattgaccccagatcactatattatttttttctttttactt

SEQ ID NO: 392329 - DNA, 201 bp, Homo sapiens
aaagaagaatatattcttatttggaagagacttaatataatcaactcatggttacttttactgatgcttgagtcttttaaatgtagtaattgatcaaattktattaagccataagggactttctggaattcagttaaggcaactaggtgagtgttactactgcaggtgaggtttcaggattcatttggtcagactgaagac

SEQ ID NO: 392330 - DNA, 201 bp, Homo sapiens
gatcattagtactagtgtctctaagtcaggaaaatactcgaagaaatgttgaagtattttagttgccttcaagaactttgcttccactaagtgatttggtaaaaaaaaaaaaaaaaagagagattgaaattatggggtaagagattatgtaacagattatatcctacttttctgttacaatagataactgagagaagatta

SEQ ID NO: 392331 - DNA, 201 bp, Homo sapiens
cacaaatcattagagatatagtagaacaacagggaggtggattgattccagtggaagacctccagtactaaactagttctaggatggggatcaaggagtgmgagcaggttcaaggatagttcagccactaatagtcatttatggaacaccacagagtatatcaggtaatgtgttcccctgtaatactttttcttggcctct

SEQ ID NO: 392332 - DNA, 201 bp, Homo sapiens
aggagagactaggtgaccactaaactccttcagactcttaaaattacgattcttttctcaaaggggaagaacgtcagtgcagcgatcccttcacctttagytaaagaattggactgtgctgctcaaaataaagatcagttggaggtaggatgtccaagactgaaggtaaaggactagtgcaaactgaaagtgatggggaaa

SEQ ID NO: 392333 - DNA, 201 bp, Homo sapiens
  misc_feature (1)...(201): n = A,T,C or G
tttgcatgacacagcattcataggtccggcacttttgtttctggaccagtattttaacagctttattgatgaatatattgtactttggattgccctggtangtattgtactaagtcttatttcatggtttgagggtttgaaggttgcttgttttcttattttgatgacccagtcatgaaagatcgttcatataattgtaat

SEQ ID NO: 392334 - DNA, 201 bp, Homo sapiens
ttacttttatcactagtaaactaatccaatgtagtagagtattataatgctggtgtggaattagggaagagaaagaggaaaaaggaaaacttctggactaragattatcaggaaataggataaggagatggccaatttgatttttgctctaaccatatccaaatagaagttactcttgattagattctttcccacttaccc

SEQ ID NO: 392335 - DNA, 201 bp, Homo sapiens
cttttagaaagatcagtctggcagtaaggcagagggtaaattgtagtaggctgtgacagaagcaaggagacccgttagaggaagcatcagcataattaatstgaatgatgaagcatgcactaacacaatggcagtgctattgcagagcaaggaataaattggagagagacttttgaggtagaaactataggacacaatgtg

SEQ ID NO: 392336 - DNA, 201 bp, Homo sapiens
gcaggagataaggctggagaagatccagaaaatcaaggtcctgtgctctgccaagaaatatgagcttttaccctgaatctgcagggaacttttgcaggacstaaagcagggaaatgacaaaagtgccttttagaaagatcagtctggcagtaaggcagagggtaaattgtagtaggctgtgacagaagcaaggagacccgt

SEQ ID NO: 392337 - DNA, 201 bp, Homo sapiens
ttttgtaaaggtaagtgatttgcatctattacatatggattacccattctttcccaaattttttccccaaagagatgaatttttaccaaagattatagttrttgttgttgttgtggttttccttttttttttttccaaaggaaagcagttgtcttcatgcataaaagtcagtgcttgttttatacattgcaagaaacaaaa

SEQ ID NO: 392338 - DNA, 201 bp, Homo sapiens
aagagaagctattccttgaaaacgtgactgtggatttgaaaaatagtattctgaacactctatgcactggatatcatttcctagtgttatttaatggcccrttgaagagatgtttaaaaatgttacaaactcaaataaatttggaaaatggcaggacattatgtccccctcttgaatattcacaggatgtattagcaatat

SEQ ID NO: 392339 - DNA, 201 bp, Homo sapiens
ggttcattactgaatatgctgttttgaattgcattctgttaatacaggaacaaatactacatattgagctctcacatttttgtgtgccaaatggagaaaakatatttacttagggttcaggtatgaaatttacatctcttctgagattgaggccataaaatggaaattgccttccaaatcctcattaagttagaaggcttt

SEQ ID NO: 392340 - DNA, 201 bp, Homo sapiens
ctggtctaggactactgaatgagttcattttagttctggaagggaatgattgagaagcatgcccttgcactgcctggagagacccaaaataagagtaaggwcttactctttaactcattgatcccctgaccaagagagtctaagatgtcatcctgaagcttcggtggcaggatgtctttttcatcaccaacctagaagagg

SEQ ID NO: 392341 - DNA, 201 bp, Homo sapiens
ataatctacacatgtacatagtagatataattttttcttttataaagatcaaatgttttgtcctgtcttgtaattaatataaacatcctttttaaattatrtgttttatctgaggaactctcagattcacatctgaaatggagttcccagacccagtaaactagcaatctaatttcaggattcatgaggtgaggttgcaac

SEQ ID NO: 392342 - DNA, 201 bp, Homo sapiens
atttattcctgaattaggctttcatcttaaaatacctctgagaagtataaaataatgtgcacaaggaagaagtatataaatattagtgtatcattgtgcarattcacaggaagaaaggaaaatccaaagtcaaggaaactttttatgtctgtgattgttattttactatttcctaggattgtgtatatactagttatcttt

SEQ ID NO: 392343 - DNA, 201 bp, Homo sapiens
ttacctgagttgactcatataacatctctgcaagattttacaagttggttaattgctacattgtgataagattatttgtttatgtcagttctttcccatamacttatcaggacataatgagttctgaatgatgcatgagttccttcattcattcagtatctcccccagggtcttacggcaactgggatcatatttattcct

SEQ ID NO: 392344 - DNA, 201 bp, Homo sapiens
gggtgtctaatcttttggcttccctgaaccatgttggaagaagaattgtcttgggccacacataaaacactaacgatagctgatgagcggggaaaaaaaamtcttataatgttttaagaaagtttacaaattgatgttgggctgcattcagagctgtccttggctgcatgcagtgcagcccacgtgccacagcttggacga

SEQ ID NO: 392345 - DNA, 201 bp, Homo sapiens
ggtttggtccaaatcacacaaatcattagagatatagtagaacaacagggaggtggattgattccagtggaagacctccagtactaaactagttctaggayggggatcaaggagtgagagcaggttcaaggatagttcagccactaatagtcatttatggaacaccacagagtatatcaggtaatgtgttcccctgtaata

SEQ ID NO: 392346 - DNA, 201 bp, Homo sapiens
taaaatgtgtaaccccagctattttctagcttagcactttgttttcctcattgtgcctatcacagtgtgtaatctttttatttgcttgtttactagttttwatttcttttcccactggacataggagctgggatcatgtcagcctcattcactgcatttatatgttggctgaatgcattggaaactggtaatctattttct

SEQ ID NO: 392347 - DNA, 201 bp, Homo sapiens
agtgaatggctattgagggtcacctttaccccagaacatgtgatttctgttattttccaggttttcatttcccatcacccttaattcctcttctactattrcaaatacagtccatacagattttatagatgtaaaatctggtttctcctcttttttttttttttgagacagggtctgcctttgtcacccaggctggagtgc

SEQ ID NO: 392348 - DNA, 201 bp, Homo sapiens
ccatacctgggtaattttgtatttttagttgagatggggttggtcagcctgacctcagataatccacctgcctcagcctcccagagtgcttggattacagrtgtgagccaccacgccctgctgtctctactttagtttttcttgcctgtgcttttgagatcttagccataaaatctttgcgtagaccaatgtactgaagca

SEQ ID NO: 392349 - DNA, 201 bp, Homo sapiens
gttttcttattttgatgacccagtcatgaaagatcgttcatataattgtaatgatttggaatgtcagaaatccacataaatggggctgtgtgagagttctrtggctttatatttgagccttttattttttgcattaatcttactagtcctgcctacatcgggcagggctcataaattgcaaatttctgactgagtagaaaa

SEQ ID NO: 392350 - DNA, 201 bp, Homo sapiens
cagtggtgggagactagttaggtaatttgtggtcttcatatatttaaatgaatgttatgtagacattcagaattatgttaatggacttggattataactaygtcataagaagctcagagaaagactatgacaaattaggagtatcgttaatattgcattgtgtactggaaatttgctaagagagtacattttagatgcttt

SEQ ID NO: 392351 - DNA, 201 bp, Homo sapiens
actgagagaagattatgcatttacagcatatctttttgtctcatctaaaatcatttccagctcagttgtttgctattcatattatttggttttcatcgtgrtctttcttctgcagtttttgtggttcttggaacttgtattgcagtgcagctggggacaaaccctgattggatgtttttttgttgttttgcggggacattt

SEQ ID NO: 392352 - DNA, 201 bp, Homo sapiens
ttgtggtatgatgatcatacattcagggtacctagcatataatgttcaaaatagtagatggttattgtttcattgatcaaaaagattaggtatataatctrttcttccacagcccccttcccattcgtgatttcctctaatgatacataatatttccagttacaaattcatctaagtccttatttcttttatatttttctt

SEQ ID NO: 392353 - DNA, 201 bp, Homo sapiens
gattgctttgggtagtatggccattttgacaatattaattcatggacatgggatgacttttcattttgtgtgtatgtcctcctcagtttcttttattagtkctttgtagttttcattgtggagatctttcaactccttggttaaatttattcccaagtattttattttattttattttattttattttattttattttatt

SEQ ID NO: 392354 - DNA, 201 bp, Homo sapiens
ttgaccatttccccattcagtatgatgttagctgttggtatgtcatatatggtccttgttgtgttgaggtatgtttcttgtatgcataatttgtggtgacrttttatcttgaagagatgttgaattttatcaaatgctttttctgagcctattgagatgatcataggatcttagttcttcgttctgttgatgtgatgtgtc

SEQ ID NO: 392355 - DNA, 201 bp, Homo sapiens
tattgtactttggattgccctggtaggtattgtactaagtcttatttcatggtttgagggtttgaaggttgcttgttttcttattttgatgacccagtcakgaaagatcgttcatataattgtaatgatttggaatgtcagaaatccacataaatggggctgtgtgagagttctatggctttatatttgagccttttattt

SEQ ID NO: 392356 - DNA, 201 bp, Homo sapiens
atccttaccaaaacatgaactaagctagttaggtagatgagagaattacaagcatttgttctgcctaaataagttagactgatcagtttctggtaattcargacagtagaaggtaattctaactaaacatttcagagtgattctgagctaaatgagatggtaatggccacaacattccttaccttgttttaagcttgaagt

SEQ ID NO: 392357 - DNA, 201 bp, Homo sapiens
ttgcctgggctggagtacagtggcgtgatcatggctcactgcagcctcaacctcccgggctcaagcaatcctcccaactcagcctcccaagtagctgggamtgcatgacaggccagcatgctaagctaatttttttgtatagatgtggttttgctatgtttcctaggctggtcttaaactcctgagctcaggtgatccacc

SEQ ID NO: 392358 - DNA, 201 bp, Homo sapiens
gtactgctaaaagtaatgtatctttttccttttttttttttttaattgagatagagtctcattttgtcacccaggcaggaatgcagtggcacagtcatagstcactgcagccttgaaactcctgaactgaagtgctcctctcacctcacctttctgcactgtcacacctggctaattttaaaatttttttttgtagagaca

SEQ ID NO: 392359 - DNA, 201 bp, Homo sapiens
gagccaaatatcagtgactatggcctgtgacacagccctcaggaggtcctgagaacacgtgcccaaggtagtcagagcactgcttgtttttttttgtttgtttttttttttttttgagacggagtctcgctctgttgccaggctggagtgcagtggcgcagtctcggttcactgcaacctccacctccctggttcaagcga

SEQ ID NO: 392360 - DNA, 201 bp, Homo sapiens
gcagtggcacagtcatagctcactgcagccttgaaactcctgaactgaagtgctcctctcacctcacctttctgcactgtcacacctggctaattttaaawtttttttttgtagagacaggtcttgctgtgttgcctaggatggtcttgaacttctggcctcaagtagtcctcccgcctcagccttccaaagcactggaac

SEQ ID NO: 392361 - DNA, 201 bp, Homo sapiens
gcctcacctgggaggcgatcctcctgcctcagcctcccgagtagctggaattacaggcatgcgccaccacacccggctaattttgtgtttttagtagagayggggtttcatcacgttgaccatgctggtctcaaactcccgacctcaggtgatctgcccgccttggcctcccaaagtactgggattacaggcgtaagccac

SEQ ID NO: 392362 - DNA, 201 bp, Homo sapiens
gaatctcttgaacccaggaggcggaggttgcagtaagccaagactgcaccactgcactcccagcctgggtgacagagcaagactccatctcaaataaataaattaattaattaattaatttaataccagcagttcaatttctgtttgggaaaagagaagctattccttgaaaacgtgactgtggatttgaaaaatagtatt

SEQ ID NO: 392363 - DNA, 201 bp, Homo sapiens
aatctcttgaacccaggaggcggaggttgcagtaagccaagactgcaccactgcactcccagcctgggtgacagagcaagactccatctcaaataaataaattaattaattaattaatttaataccagcagttcaatttctgtttgggaaaagagaagctattccttgaaaacgtgactgtggatttgaaaaatagtattc

SEQ ID NO: 392364 - DNA, 201 bp, Homo sapiens
cattaaaatcttaagcttggaccccaagaaacccctagatttcttgtcccctaaagcagaggtattcagcagaattttctatgaagatgggcatgttctakgtctgtgaggtccaatatagtagccatagctacatatggctattgagcattcaaaatctacctagtgtaactgaggaactgaatttttaattttatttaa

SEQ ID NO: 392365 - DNA, 201 bp, Homo sapiens
gatttcagatgttttcaagttctacaatatttgcatatacatgatgagatatcttggtatcttgagataccaagtccaaatatgaaatttattttcatatwcaccttatacacattgcccaaaggtaattttatacaatatttttaataattttgtggatgaaacaaagtgtgtgtattgaaccatcagaaagcaaaagtg

SEQ ID NO: 392366 - DNA, 201 bp, Homo sapiens
atctcttgaacccaggaggcggaggttgcagtaagccaagactgcaccactgcactcccagcctgggtgacagagcaagactccatctcaaataaataaattaattaattaattaatttaataccagcagttcaatttctgtttgggaaaagagaagctattccttgaaaacgtgactgtggatttgaaaaatagtattct

SEQ ID NO: 392367 - DNA, 201 bp, Homo sapiens
aaggaaataatagtttttgttttcctgaaagcagatcataaagcctaaagcttacccccattcctaaagtttttatatcccttgactatggtgattattawttttataagccttgtataccaaagttttccccccaaaattatttgtaatatgttgtacataaagtttcagcataccaatatccaaaaagtgggatttctg

SEQ ID NO: 392368 - DNA, 201 bp, Homo sapiens
tctcttgaacccaggaggcggaggttgcagtaagccaagactgcaccactgcactcccagcctgggtgacagagcaagactccatctcaaataaataaatwaattaattaattaatttaataccagcagttcaatttctgtttgggaaaagagaagctattccttgaaaacgtgactgtggatttgaaaaatagtattctg

SEQ ID NO: 392369 - DNA, 201 bp, Homo sapiens
gggagaattcttttttgtcttttgacgacctatattaaaatgaagtagaaataggaaattatttatttatttatttttgagacagagttttgctcttgttrcccaggctggagtgcaatggcacagtctcagctcaccacaacctctgcctacctggttcaagtgattctcccgcctcagcctcctgagtagttggaatta

SEQ ID NO: 392370 - DNA, 201 bp, Homo sapiens
ggaactctcagattcacatctgaaatggagttcccagacccagtaaactagcaatctaatttcaggattcatgaggtgaggttgcaacgggaaaacagattctccccctgccccttcatcctattgttagcactttggtcctactgttagcatcattaaaccaaaagggaacaacccgacttctctggtgatatatttgga

SEQ ID NO: 392371 - DNA, 201 bp, Homo sapiens
tgtatatatatattctatttcatttagctctgatctttatttcttctaattttggatttgatttgttcttgcttttctggttctttgaggtgcattattaygttgtttatttgaaatctttctacttttcagatgtgggcatttattttgctttattctttcctcttagtacttcttttgctgtatcttgtaggttttggt

SEQ ID NO: 392372 - DNA, 201 bp, Homo sapiens
aaaataatgaaaagtgatacaatatactcttccacattcttaaggataaatcaaataagacctcttctttttgaatatacatttaaattcaataccaggcygggtgcgttggctcacgcctgtaatcccaacactttgggaggccgaggtgggcggatcacttgaggtgaagagttcgacaccagcctgaccaacatagca

SEQ ID NO: 392373 - DNA, 201 bp, Homo sapiens
ttatttaatattatataaacattactttaaaacagttttaatcagtacctttgtgatacagttgtgtgaaagaattcctcaaaatgtaagaaattagcttkgatttctctccttgatttgaaatattaattttttttttttttaagacagagtctcgctttgtcactcaggctggaatgcagtggtgcgatctcggctcac

SEQ ID NO: 392374 - DNA, 201 bp, Homo sapiens
cactcatctttttttctttacagtaagagaatagaatactgcaacagtaaaatacaaatggaattgactgaatttttaattcccatttcaagtggaattcygtaagagctatcatttaccaaatacgaaaatatatcattgctcgactatagaaaatttggctactatgaagctaagtgtattcgtggttattggtctctc

SEQ ID NO: 392375 - DNA, 201 bp, Homo sapiens
ttgatgggaaacaggcaagaagaaccaatagtagttctcctctgggagaactttttgatcatggctgtgattcactatcaacaggtattgttgattttttwaatgttattgattattaacaatggttaaaccagtgtgctaagcagtgttagaatacatgtttagtcatgagaataagtaattttgtattaaattttagta

SEQ ID NO: 392376 - DNA, 201 bp, Homo sapiens
attggaaactggtaatctattttcttataactgttaagactggtggctaggtttctaagccagcaataattttaatttcttacttttttttttctttttgktacttgtactgtggtaagaaaaggacattttctgctcatccttttggtcataggcctgattccatataaaaatttcaggtggctacaataacttttgggt

SEQ ID NO: 392377 - DNA, 201 bp, Homo sapiens
aaccagaggaattaattagaccgctgattttctccggaagcgcgaagcactaggccgtttgaggatctccgctccgctttgcctgggaccaggaaaagacscgagagacggaactcggcatcaggcactgcttggggcaggaggagagtaggggaaaccaaggaagagaacagaaaggtagggcacggggagctgagccca

SEQ ID NO: 392378 - DNA, 201 bp, Homo sapiens
ctgaggaactctcagattcacatctgaaatggagttcccagacccagtaaactagcaatctaatttcaggattcatgaggtgaggttgcaacgggaaaacmgattctccccctgccccttcatcctattgttagcactttggtcctactgttagcatcattaaaccaaaagggaacaacccgacttctctggtgatatatt

SEQ ID NO: 392379 - DNA, 201 bp, Homo sapiens
agtattagaaattgatcaaatcactaagttagtttaataaattaaaaaatttatgcttcattattatagctatttcctaatagtctctgcatatgtccctstattatacttttttaaaaggagatatcagaacctcccagccagtattttaaaagcaatacaaaaagcagtagcccctcatctttgtctttcccacagaaa

SEQ ID NO: 392380 - DNA, 201 bp, Homo sapiens
tgaggaactctcagattcacatctgaaatggagttcccagacccagtaaactagcaatctaatttcaggattcatgaggtgaggttgcaacgggaaaacakattctccccctgccccttcatcctattgttagcactttggtcctactgttagcatcattaaaccaaaagggaacaacccgacttctctggtgatatattt

SEQ ID NO: 392381 - DNA, 201 bp, Homo sapiens
tgccctggtaggtattgtactaagtcttatttcatggtttgagggtttgaaggttgcttgttttcttattttgatgacccagtcatgaaagatcgttcatrtaattgtaatgatttggaatgtcagaaatccacataaatggggctgtgtgagagttctatggctttatatttgagccttttattttttgcattaatctta

SEQ ID NO: 392382 - DNA, 201 bp, Homo sapiens
gaggaactctcagattcacatctgaaatggagttcccagacccagtaaactagcaatctaatttcaggattcatgaggtgaggttgcaacgggaaaacagmttctccccctgccccttcatcctattgttagcactttggtcctactgttagcatcattaaaccaaaagggaacaacccgacttctctggtgatatatttg

SEQ ID NO: 392383 - DNA, 201 bp, Homo sapiens
aggaactctcagattcacatctgaaatggagttcccagacccagtaaactagcaatctaatttcaggattcatgaggtgaggttgcaacgggaaaacagaytctccccctgccccttcatcctattgttagcactttggtcctactgttagcatcattaaaccaaaagggaacaacccgacttctctggtgatatatttgg

SEQ ID NO: 392384 - DNA, 201 bp, Homo sapiens
agagctgtgtcttcacaaacttcttcacaaatcggcggttggtcttggaggtcagagccttacagaaggatctttcttggaagtggccttgcccatttgcytcccgcttgatataggaagcataatggcccacaatcttgacaaagaactgcacaaaggggcctgaaacatgctcgttgatttgttctgcagctgcaggag

SEQ ID NO: 392385 - DNA, 201 bp, Homo sapiens
tttggttttcatcgtgatctttcttctgcagtttttgtggttcttggaacttgtattgcagtgcagctggggacaaaccctgattggatgtttttttgttkttttgcggggacatttatgttctattgtgcgcactggcaaacgtatgtttctggaacattgcgatttggaatgtaagtaatacttaatggtaatttttgt

SEQ ID NO: 392386 - DNA, 201 bp, Homo sapiens
tctatcatatcactctttaaaaaaaacaaagaagaatatattcttatttggaagagacttaatataatcaactcatggttacttttactgatgcttgagtyttttaaatgtagtaattgatcaaattgtattaagccataagggactttctggaattcagttaaggcaactaggtgagtgttactactgcaggtgaggttt

SEQ ID NO: 392387 - DNA, 201 bp, Homo sapiens; identical to SEQ ID NO: 85967

SEQ ID NO: 392388 - DNA, 201 bp, Homo sapiens
acaactgaggaatttaaatgcatggactaggtgaggaagactaattgtcaatgtgtttttgcctttgaaacctgaaagcattgctgagtaattgccaaacmaacaaaattagaatttcaatgattcataattcaaaaagcctttcaaaataattgagagtatgcaggaataaatttcacagggcagtaagaatgtttataa

SEQ ID NO: 392389 - DNA, 201 bp, Homo sapiens
ctcttgtatttcctcatgctacttgattacttataattgttatctctaatcttttctaaatgaaatacaaatacttcagggattaaactcaaggtcctttrttagcagtcatcacttaacccacttttactttttttccttctacttcctcagttcatcaggacactctgctaatacatatatactgtcttaaagttaatt

SEQ ID NO: 392390 - DNA, 201 bp, Homo sapiens; identical to SEQ ID NO: 85965

SEQ ID NO: 392391 - DNA, 201 bp, Homo sapiens; identical to SEQ ID NO: 85966

SEQ ID NO: 392392 - DNA, 201 bp, Homo sapiens
gggagagcctaaacgggtgctgagaatgtctcttttctttccaggttttctctttctttgatttgatccgctactgtgtcagtgtttgcaatcagattgcrtctcacctgcacatacatgtcttcagaatcaaggtctctacagctcattctaatcatcattaatgatgtaattggtatataggaacatcatgttttctgc

SEQ ID NO: 392393 - DNA, 201 bp, Homo sapiens
tcagacgcatttcatattgttgggtttttagttttgggaattcaacagctattcctaaataattattggaagttgatatctgagcacaatatgatttactrtgtagttcacaattgtcctcttatgaaaatgcctacgttattctgttttattcataggttgcacacatgacgaaaagtgaaatgcatttgcatgacacag

SEQ ID NO: 392394 - DNA, 201 bp, Homo sapiens
tccccagtggttggcaaattttgtattgtgccagttagagaggaagaataagttcatgatccctttatttaactcagagattgtgagaggattctcctttygggtcttattgttttcaaaggtgataaagatagactgccctttaaatttaagacctatactctacttctttttatattagagggcttgttctattctagc

SEQ ID NO: 392395 - DNA, 201 bp, Homo sapiens
actgcagttttgaccttatgacttttaaaaacattgttaggaaatgttttcccagtaagatagtccagaatcattcacactttagcataagaaaaaatagsgcttagattcagtttatttggcagttcagagaatgttggagaactgttcaaatgaaaacctgacagatcattatatcaatgcaagggtttattaagtttc

SEQ ID NO: 392396 - DNA, 201 bp, Homo sapiens
tctgagagcagcgccctaatccaatattaatttttagtgtttctactattttcaaaaatggcagaatttataatatctggatttcacatagtttatgtttygttggttattatctcacagttcactttcaatacctattttgaaagcttatttatctgtcagccctaatgtattctctttccctttcaaataatacatcac

SEQ ID NO: 392397 - DNA, 201 bp, Homo sapiens
aaaaataacctataaaataccaagcttttgctgatttttatgttgtgtgtgtgtgtttttttaagggggaagaaagtgatttcctcttttaaggagtgcartatttcacttcagcaaaacgctaaatctaagttgtgttacacagccctgtttttgcttccaagtctgctgaaaaggcttttgtttttgtaaacttgctct

SEQ ID NO: 392398 - DNA, 201 bp, Homo sapiens
gaagctacttgaagacttcaccctgtttaaaatgtgtaaccccagctattttctagcttagcactttgttttcctcattgtgcctatcacagtgtgtaatytttttatttgcttgtttactagtttttatttcttttcccactggacataggagctgggatcatgtcagcctcattcactgcatttatatgttggctgaat

SEQ ID NO: 392399 - DNA, 201 bp, Homo sapiens
agaactaggttgacctagttaattttagaaaatttaacactgctacagtacaatttaaacttgaacatttgatttcaattttttttagagctgcatttttkcaagaggtaacagagttatctcaacaaagtgagttcttgagagttttgaagaaataaagtatccaaccattaagatttatgtcttccagtcttaactgag

SEQ ID NO: 392400 - DNA, 201 bp, Homo sapiens
catgtaaaatgttccttttaaagtcactaaatctcaattttttacaaaaaagtttttcatttttttaaatggtagaataaagtcttagcaaaaaaaaaaamaacagtgagaaaactctctggtatttagtatggcatgactgtaaactagccttatcaaaaggttttttttccattctagtgagaagtgttaaatttccct

SEQ ID NO: 392401 - DNA, 201 bp, Homo sapiens
atagtttaacaaaaatacttacaaaataactgcaagtgtatctttgaaatgcatatgtcacatgtagaagaacaatagattgtttctgattttagaggggraagacattaaaaatttgtgggagagatgattaatgtgcttagctttcatagaatgccatttaaatcccttcacatccctcaattaaaactgagttctggt

SEQ ID NO: 392402 - DNA, 201 bp, Homo sapiens
ctactcctgggtattgagctcctggtgctgggagaggcatataagaaggtgggagagttttggaaatctgccttcctttcctccagccacatctgccaggyccaccacagggaaccaagcttgcaaggggccttgtaggaggttgtgattctgtggatagagttctttgccttacccctggtctccctacagattcaccac

SEQ ID NO: 392403 - DNA, 201 bp, Homo sapiens; identical to SEQ ID NO: 86002

SEQ ID NO: 392404 - DNA, 201 bp, Homo sapiens; identical to SEQ ID NO: 86007

SEQ ID NO: 392405 - DNA, 201 bp, Homo sapiens
ccctgtgctctattcccaacccagcagccaaactttagtctcataatgttcctttgcaatggcccctgctttcactcagggtgaaagacagtgttaaaaayggcctaggagactctcccggatcaggcctctctcctcacaccatgctgcagttctgcccatctccttgttttcttgaacacccagacacggttctgcctc

SEQ ID NO: 392406 - DNA, 201 bp, Homo sapiens; identical to SEQ ID NO: 86010

SEQ ID NO: 392407 - DNA, 201 bp, Homo sapiens
gttaaatggtagttctgcttttagctctttgaggaatagccatactgttttccacattggttgaactaatttacactcccatcaacagtgtataagtgtgttcccttttctctgcaacctcgccagcatctgttatttgttgacagatactgactgtcaacaaatagccattctgactggtgtgagatggtatctcattct

SEQ ID NO: 392408 - DNA, 201 bp, Homo sapiens
ggttaaatggtagttctgcttttagctctttgaggaatagccatactgttttccacattggttgaactaatttacactcccatcaacagtgtataagtgtgttcccttttctctgcaacctcgccagcatctgttatttgttgacagatactgactgtcaacaaatagccattctgactggtgtgagatggtatctcattc

SEQ ID NO: 392409 - DNA, 201 bp, Homo sapiens; identical to SEQ ID NO: 86012

SEQ ID NO: 392410 - DNA, 201 bp, Homo sapiens
cctgagccctggagattgaggctgcattgagccacgatggtgccactgcactccagcctgggtgacaaagcaagaccctgtctcaaaataaataaataaawaaatatttttgatgaatctgagttgtttttctgtcccatcttctgcatgcactttattcaagggcaacttgccttccagtttctaatttatctatttttt

SEQ ID NO: 392411 - DNA, 201 bp, Homo sapiens
tagtgtcttcacgcttcatccatatcgtatgtaatatgtgcatgtaagaatcttttgggtctaaacatgttggacatgttattatcctcttttttttttttcacaaatgaggcagttaagacacataagggttacataacttcttcaggatcccatagctaataaacagtaaaagctagattcaaatgctggctacactcc

SEQ ID NO: 392412 - DNA, 201 bp, Homo sapiens; identical to SEQ ID NO: 86016

SEQ ID NO: 392413 - DNA, 201 bp, Homo sapiens
aggggattgatcccttgtgttgggtgaggccctgggatgagcagcagagggtggtcttgctttgaggtgcagttactgtaacttgcagaactaggtgaggrgacatgaagccaggttggggatggttaagggattttgacatagaatatcagagctaaaagagaccttggggattattgttgggagataattataccctgg

SEQ ID NO: 392414 - DNA, 201 bp, Homo sapiens
ctgtgatgctctgacttgaaaatctggctagcccagtctttatatctcttcctcctgccccttacagactcctggatttcatcaatgtcttgtcttatgayttacatggaagttgggaaaggttcacaggacataatagccccctcttctctctgcctgaagaccccaaatcttcggtaaggaaaggaaagatctcaggtg

SEQ ID NO: 392415 - DNA, 201 bp, Homo sapiens; identical to SEQ ID NO: 86023

SEQ ID NO: 392416 - DNA, 201 bp, Homo sapiens
gttctgaggtgtacttcagggccagggagagaggatgtgaaaatgtggcctggtctcttgggctgcgttcacattgctttctggaagctgagctccatccsctcccttggtttttgccaactaatgtgtgctctcccttaccaggtgctgcccataaactcgtgtgttatttcaccaactgggcacacagtcggccaggcc

SEQ ID NO: 392417 - DNA, 201 bp, Homo sapiens
  misc_feature (1)...(201): n = A,T,C or G
cttcagggccagggagagaggatgtgaaaatgtggcctggtctcttgggctgcgttcacattgctttctggaagctgagctccatcccctcccttggtttntgccaactaatgtgtgctctcccttaccaggtgctgcccataaactcgtgtgttatttcaccaactgggcacacagtcggccaggccctgcctcgatctt

SEQ ID NO: 392418 - DNA, 201 bp, Homo sapiens; identical to SEQ ID NO: 85998

SEQ ID NO: 392419 - DNA, 201 bp, Homo sapiens
agagcgacacgacacactgattttcaacataatccccattcagcattttactattcatcatctctgaacatataggggcatagttgccagctctttggcayggtcatccctgcattatgcagaggtcattcctgggcatccattgttatatcttggcattctgagcatcatcagtcatttttgcaaggaacagaggggtca

SEQ ID NO: 392420 - DNA, 201 bp, Homo sapiens
tgctattgggtggcggaaagagacatgtttccaagggaatgtaaccaccagaggtggcaatacgagccacataactgtgtggctgtagtgacctggaaagrtcttatggagcaggtagagtttgagcagagtttgaagcacaggaaaatcctgatggacaggaatgactagacgggaaggacttcccaggtagaggacagc

SEQ ID NO: 392421 - DNA, 201 bp, Homo sapiens
catctgccaggcccaccacagggaaccaagcttgcaaggggccttgtaggaggttgtgattctgtggatagagttctttgccttacccctggtctccctayagattcaccactatgttgtccacatttgccaaccgtgaaaagtttattgcttcagttatatcccttctgaggacacatgactttgatggtcttgaccttt

SEQ ID NO: 392422 - DNA, 201 bp, Homo sapiens
ggctgagaagtcctccacattgagtgtcccctgcagcccaccttgccctggcttctctgacagggattattgatccaacacagtttctcagaggatttttkgtcacctgctgtttgtgtcgctgactgtgtgccttggtccagacttgagaatctgttctgaccaggatttcacaaggcattgttttcttcctgagacctc

SEQ ID NO: 392423 - DNA, 201 bp, Homo sapiens
gcaaatccactgagtgcctgtgggtgtctgggacctgtgaacatggcggggtctggagcaaggcttctatgtggtgggatttcatctatgtcctcaagtasgtatagtatgaaatcttacacttctgaatttttggagcaggtacttcagccctggattggttctagttctgccagtaattaataggatgagaatgaagtg

SEQ ID NO: 392424 - DNA, 201 bp, Homo sapiens
gtgagtggcctctccattctctctttggtttaccttcttctcattcgctggttagggattcttggattctttatccttgggcaaggaacaactgtctcttkgtgcttatctccatggcacttcccagaactaacctggtggtcctcttggcagatttgttcctttgtctggggagcgaagaagcactggattgattaccag

SEQ ID NO: 392425 - DNA, 201 bp, Homo sapiens
ctctctccttctatcaccttcccccttttcctttccttacctcccatctctcctgtttcctgttttcttccaatgagcaaaataaaagaatgtggcagcasctgcccaccggagtgaagaacccagctcatcaaccctctctctcacatcataggaacagagagctgaaaacactactgtccatcggcgggtggaactttg

SEQ ID NO: 392426 - DNA, 201 bp, Homo sapiens
  misc_feature (1)...(201): n = A,T,C or G
gccatcagcttcagttacaaggtgagaccctggctctttcatgctccagcacatggtttcctaccggtttctatggggtccttatttgtacaatgcatgtntgtgtattgggtggagagtgaaaggtgaggatgattagaccaggggtttcaggcatgcctacattttagttctaactggggctttataatcccatctgtt

SEQ ID NO: 392427 - DNA, 201 bp, Homo sapiens
gattaccagtatgtcccgtatgccaacaaggggaaagagtgggttggctatgacaatgccatcagcttcagttacaaggtgagaccctggctctttcatgytccagcacatggtttcctaccggtttctatggggtccttatttgtacaatgcatgtatgtgtattgggtggagagtgaaaggtgaggatgattagaccag

SEQ ID NO: 392428 - DNA, 201 bp, Homo sapiens
ttgccagtgggcataccatgttttgggggcagagctggactgagccatttctccacaccccaggctgcatgcttggttctgtgcctgctgttccctgtgcygtctggccttggggcagtacatggttttcaacttcttttagctgcctgaattccctactcctgggtattgagctcctggtgctgggagaggcatataaga

SEQ ID NO: 392429 - DNA, 201 bp, Homo sapiens
taacttctgcagcacagcttgcgtacctctacttttttgcagcatatagtttttagcacaatgctgggcactcagtggacactcaaatgcttaattatttrtagcaacctagttctccctgccttcaagaactttaaatctactagaagttcaggtgctagtttgagaaccacctatatggggcagtctgtgctgggatct

SEQ ID NO: 392430 - DNA, 201 bp, Homo sapiens
agcctgcttgccacccctcaattgattaaatcattaaccacatcagccctcatctgcctgtctcatgagcctgtggcatggcccatgtccaactcaccttygtgtcccagagcctggctcaggagctcagtaaatgcttcctagatgacactccccccaggccccgcctctctgtttgtccagttctctgtgtctttctgt

SEQ ID NO: 392431 - DNA, 201 bp, Homo sapiens
cagagcctggctcaggagctcagtaaatgcttcctagatgacactccccccaggccccgcctctctgtttgtccagttctctgtgtctttctgtctttccwcttaggagctcctgtttgccttccggaaggaggcactgctcaccatgcgcccgaggctgctgctgtctgctgctgtttctggggtcccacacatcgtcca

SEQ ID NO: 392432 - DNA, 201 bp, Homo sapiens
ggtgtgtgtgtgtgtgtgtgtgtgtgtgtgtgtgtgtgtgtgtgtgtgtgtatgtgtagctgggctgtcccagcgctatccacagggaagctcctataaarggctgcatctctggactcacagctatcagaccattgagatgtggaagctgttgctgtgggttggtgagtgtggcaggtcccagcagtgtcactcagtcca

SEQ ID NO: 392433 - DNA, 201 bp, Homo sapiens
tctgaccaggatttcacaaggcattgttttcttcctgagacctcagcagtgggggaggaatagaacctcagtgtagttctgaggtgtacttcagggccagrgagagaggatgtgaaaatgtggcctggtctcttgggctgcgttcacattgctttctggaagctgagctccatcccctcccttggtttttgccaactaatg

SEQ ID NO: 392434 - DNA, 201 bp, Homo sapiens; identical to SEQ ID NO: 86018

SEQ ID NO: 392435 - DNA, 201 bp, Homo sapiens; identical to SEQ ID NO: 86022

SEQ ID NO: 392436 - DNA, 201 bp, Homo sapiens; identical to SEQ ID NO: 85996

SEQ ID NO: 392437 - DNA, 201 bp, Homo sapiens; identical to SEQ ID NO: 85994

SEQ ID NO: 392438 - DNA, 201 bp, Homo sapiens
ctggtaagtagctgtgacctagaagctggggttggaagttgcataaccaagcactgggtaaggcccttctgctagatctaaatgccttggtgaggcaacawgacattgaggggagagaaaaagctttgccaggccaatatgttttccagtctttgttgggatacttggcccttatttgacctctttgagcttcctttgttc

SEQ ID NO: 392439 - DNA, 201 bp, Homo sapiens; identical to SEQ ID NO: 85999

SEQ ID NO: 392440 - DNA, 201 bp, Homo sapiens
aagcttagtgctgggacatagtacatgttcagtatgtagcagctgctcttgttagcacttcaatctccatgagacaacgtggagattacaaactgccttcrtattttctgaagaaacatttcccctatttcatggctgaggcctgggttagaggccgtacttgccttgttgccttaaaggcatgagatacacgagagggag

SEQ ID NO: 392441 - DNA, 201 bp, Homo sapiens; identical to SEQ ID NO: 86001

SEQ ID NO: 392442 - DNA, 201 bp, Homo sapiens
gcctggaatgtgcttctctctcttctctgcctggcaaaacccaactcagcctttgaacctagttgtgaggattttagttattaatgctgttaaagtgggcytacacatcccaaatgctcaacaaatgctcatgtttttattaccgtttgttaccggtgagctactccagggaaggggcagtgtctgctgtgttgttgtatc

SEQ ID NO: 392443 - DNA, 201 bp, Homo sapiens
gcaaaacccaactcagcctttgaacctagttgtgaggattttagttattaatgctgttaaagtgggcttacacatcccaaatgctcaacaaatgctcatgyttttattaccgtttgttaccggtgagctactccagggaaggggcagtgtctgctgtgttgttgtatccccagtggctaggtcagtgtctcacacagggtt

SEQ ID NO: 392444 - DNA, 201 bp, Homo sapiens
acattttcctctctccggaactcctgggatctctctgtgcccaaaggaaggcttgttactgcattaatggttatagatgggcagagtaaaagttctatgcyactagattataaactccctgaaagtggggagcttatctgtgttgttctttgttctaaagtgcctaaagcagtaaatggcacatagacattgctcaataaa

SEQ ID NO: 392445 - DNA, 201 bp, Homo sapiens
tgcctaaagcagtaaatggcacatagacattgctcaataaatatttgttgaataggaaaaagagaaacattttagactgctctttttttggaagcatcatrgggacatgcgcgagtttggcagactttgtgcagccttggagttgttgggctgtgatggcccttgggttgattgttctctctgtctttcctcctctctcct

SEQ ID NO: 392446 - DNA, 201 bp, Homo sapiens; identical to SEQ ID NO: 86003

SEQ ID NO: 392447 - DNA, 201 bp, Homo sapiens
ggtcttgaccttttcttcttatatcctggactaagaggcagccccatgcatgaccggtggacttttctcttcttaattgaagtaagtctggtctagaagcrccagaatccagaaatgattctacttttatatatctaggcttatggcaggagaagagcataagtccagggccaggggcagaagagggtgacagaatgttct

SEQ ID NO: 392448 - DNA, 201 bp, Homo sapiens
gtaaatggcacatagacattgctcaataaatatttgttgaataggaaaaagagaaacattttagactgctctttttttggaagcatcatagggacatgcgygagtttggcagactttgtgcagccttggagttgttgggctgtgatggcccttgggttgattgttctctctgtctttcctcctctctcctgtgctcatcat

SEQ ID NO: 392449 - DNA, 201 bp, Homo sapiens
cttgtaggaggttgtgattctgtggatagagttctttgccttacccctggtctccctacagattcaccactatgttgtccacatttgccaaccgtgaaaartttattgcttcagttatatcccttctgaggacacatgactttgatggtcttgaccttttcttcttatatcctggactaagaggcagccccatgcatgacc

SEQ ID NO: 392450 - DNA, 201 bp, Homo sapiens
cttggcagatttgttcctttgtctggggagcgaagaagcactggattgattaccagtatgtcccgtatgccaacaaggggaaagagtgggttggctatgamaatgccatcagcttcagttacaaggtgagaccctggctctttcatgctccagcacatggtttcctaccggtttctatggggtccttatttgtacaatgca

SEQ ID NO: 392451 - DNA, 201 bp, Homo sapiens
gctctgcccagcccaggattcacctcttcccatctctgaacactccctgtgctccagatgctgggctagggctgtacacgcattatcccgtgaacacttgsaggaagctttacaaagtggttgtattcaaaattggtagagcagaaagcacaagtcacagttattaaggaacttgccagatttgtcacaggtattcctcag

SEQ ID NO: 392452 - DNA, 201 bp, Homo sapiens
aaggttcacaggacataatagccccctcttctctctgcctgaagaccccaaatcttcggtaaggaaaggaaagatctcaggtggtccagacatctgccccsctgagctcaggccattggctcttagtaacaaggaggagtctggattcttcttacctgcaggcatatgctatgaattattggagaaagcttggggcaccct

SEQ ID NO: 392453 - DNA, 201 bp, Homo sapiens
  misc_feature (1)...(201): n = A,T,C or G
catcatctctctccttctatcaccttcccccttttcctttccttacctcccatctctcctgtttcctgttttcttccaatgagcaaaataaaagaatgtgncagcagctgcccaccggagtgaagaacccagctcatcaaccctctctctcacatcataggaacagagagctgaaaacactactgtccatcggcgggtgga

SEQ ID NO: 392454 - DNA, 201 bp, Homo sapiens
gctccctccctccctactactagatgattttgaagcaattccaagacattatctactacaggttctttctctccactccagctctaccctcttcatcttcrtctcaaccaagcttgctattgggtggcggaaagagacatgtttccaagggaatgtaaccaccagaggtggcaatacgagccacataactgtgtggctgta

SEQ ID NO: 392455 - DNA, 201 bp, Homo sapiens
ctcttcatcttcgtctcaaccaagcttgctattgggtggcggaaagagacatgtttccaagggaatgtaaccaccagaggtggcaatacgagccacataastgtgtggctgtagtgacctggaaaggtcttatggagcaggtagagtttgagcagagtttgaagcacaggaaaatcctgatggacaggaatgactagacgg

SEQ ID NO: 392456 - DNA, 201 bp, Homo sapiens
taacccaatgaagcatttttatgagtgctggcatagttgaaacaatgttcttgaagggcaaagaagctttgatagacagaccctttgaagcaccaaaggaraaaaggaatggcttagacattaacttctgcagcacagcttgcgtacctctacttttttgcagcatatagtttttagcacaatgctgggcactcagtggac

SEQ ID NO: 392457 - DNA, 201 bp, Homo sapiens; identical to SEQ ID NO: 86015

SEQ ID NO: 392458 - DNA, 201 bp, Homo sapiens
caacacagtttctcagaggatttttggtcacctgctgtttgtgtcgctgactgtgtgccttggtccagacttgagaatctgttctgaccaggatttcacarggcattgttttcttcctgagacctcagcagtgggggaggaatagaacctcagtgtagttctgaggtgtacttcagggccagggagagaggatgtgaaaat

SEQ ID NO: 392459 - DNA, 201 bp, Homo sapiens
tgctgtttgtgtcgctgactgtgtgccttggtccagacttgagaatctgttctgaccaggatttcacaaggcattgttttcttcctgagacctcagcagtsggggaggaatagaacctcagtgtagttctgaggtgtacttcagggccagggagagaggatgtgaaaatgtggcctggtctcttgggctgcgttcacattg

SEQ ID NO: 392460 - DNA, 201 bp, Homo sapiens
cccccttgtctacgtattgaatgatatcctggtgcgggctggtaagtagctgtgacctagaagctggggttggaagttgcataaccaagcactgggtaagkcccttctgctagatctaaatgccttggtgaggcaacatgacattgaggggagagaaaaagctttgccaggccaatatgttttccagtctttgttgggata

SEQ ID NO: 392461 - DNA, 201 bp, Homo sapiens; identical to SEQ ID NO: 85995

SEQ ID NO: 392462 - DNA, 201 bp, Homo sapiens; identical to SEQ ID NO: 86020

SEQ ID NO: 392463 - DNA, 201 bp, Homo sapiens; identical to SEQ ID NO: 86000

SEQ ID NO: 392464 - DNA, 201 bp, Homo sapiens
gagagaggaaagggtaacagtaggaatttattcaaaatagagaggaactcatttgtgagtggcctctccattctctctttggtttaccttcttctcattcrctggttagggattcttggattctttatccttgggcaaggaacaactgtctcttggtgcttatctccatggcacttcccagaactaacctggtggtcctct

SEQ ID NO: 392465 - DNA, 201 bp, Homo sapiens
acagctatttggacctgatagattctgtcttttccatcagacttgacagagagcactggcaaggtaataataaaacctggacttgaatctaagctctgccrtttagttgtagtggaggttttaaaaagtgtggatgaaagcctttattttctcatctgtgagaagcatataatattttgtgctctactgtattttatagca

SEQ ID NO: 392466 - DNA, 201 bp, Homo sapiens; identical to SEQ ID NO: 85992

SEQ ID NO: 392467 - DNA, 201 bp, Homo sapiens
aggtggtgtgttggtgggcacccttgctaatcagagggtgtgctgtgccataccactctggtgagggtatgaatctctgtgtgactccttcctttgtttcycacagggctggttcttgtgctgaaacaccacgatggtaaggaaactgtgttttcccttccagagccagggagagtctctggctgagaagtcctccacatt

SEQ ID NO: 392468 - DNA, 201 bp, Homo sapiens; identical to SEQ ID NO: 86009

SEQ ID NO: 392469 - DNA, 201 bp, Homo sapiens; identical to SEQ ID NO: 86008

SEQ ID NO: 392470 - DNA, 201 bp, Homo sapiens
tcatcaaccctctctctcacatcataggaacagagagctgaaaacactactgtccatcggcgggtggaactttggcacctcaaggtgagactttgctgttwttctcttctccctgggagggtggagcaggctggttagacgtgaagacagagggggaaggcagcttggccatgcggacagcaaagctagcgcaaatacttc

SEQ ID NO: 392471 - DNA, 201 bp, Homo sapiens; identical to SEQ ID NO: 86011

SEQ ID NO: 392472 - DNA, 201 bp, Homo sapiens
tgattttctctagagttcagttcaacttctttaccacaattttggctgtcatctgctgtgaattcttcaagcactgaccctgaaaggctggctgtgaccayggcatggaccactgatagtaagattttgcccccaggaggagaggctggggtcactgagatccacggaaagtgtgaaaatatgactataacccctagaggt

SEQ ID NO: 392473 - DNA, 201 bp, Homo sapiens
agcattgaatctgtaaattgctttgggcagtatggccattttaatgatattgattcttcctatccacgagcatgggatattattccatttgtttgtgtctwctctgatatctttgagcagtgttttgtaattctcattgtagagatctttcaccttcctggttagctgtatccctaagtattctaacctttttgtggcaat

SEQ ID NO: 392474 - DNA, 201 bp, Homo sapiens
tgcctagtctctggtaatatgttttgatggcaccactaaaatcaagttaggtgggttttcttctttggtttttgttgttgttgttgttgttgttgttgttkttttttgagacagggtattactctatcacccaggatggagtgatagatcacagctcactgcagcctccacctccccaggctcaggtcatcctcccacctc

SEQ ID NO: 392475 - DNA, 201 bp, Homo sapiens
tttcgttgaccatgctgtcccgggtggtactttccgccgccgccacagcgggtaaggggtatagaccctgctctggactatcagagtgattggaaagaagygaatctaggggtgacagggaggggagaagggcgcagcgacacgggcctgagaggcgagtggtcagtgcagttcggaagggagcgtggggtcttgagggac

SEQ ID NO: 392476 - DNA, 201 bp, Homo sapiens
cctccacctccccaggctcaggtcatcctcccacctcagcctcccgagtagctgggacttggcgtgcacccggctcatttttctatttttttgtagagacrggctttcaccatgtagcccaggctggtctccaactcctgggcttgtgggatccacccatcttggcctcccaaagtgctgggattacaggcttgagccacc

SEQ ID NO: 392477 - DNA, 201 bp, Homo sapiens
ttctgatgttgtactggtatctcttaacaagtatctgctgatgttttgttaaggtaggaatagctggcaaggagtctttagcctagaagtagcagtgtaaycccggtttgtttttctggatagtgataagcaggaagatgctgcatacctgtcaggatggcttttctctttccttaaatttgggtaacattaactgatata

SEQ ID NO: 392478 - DNA, 201 bp, Homo sapiens
ttttgcctagtctctggtaatatgttttgatggcaccactaaaatcaagttaggtgggttttcttctttggtttttgttgttgttgttgttgttgttgttkttgttttttgagacagggtattactctatcacccaggatggagtgatagatcacagctcactgcagcctccacctccccaggctcaggtcatcctcccac

SEQ ID NO: 392479 - DNA, 201 bp, Homo sapiens
taaggggtatagaccctgctctggactatcagagtgattggaaagaagcgaatctaggggtgacagggaggggagaagggcgcagcgacacgggcctgagmggcgagtggtcagtgcagttcggaagggagcgtggggtcttgagggacgggaaagaggggtacataggcttagtgatagagcctggcgggggtaaggaaa

SEQ ID NO: 392480 - DNA, 201 bp, Homo sapiens; identical to SEQ ID NO: 86029

SEQ ID NO: 392481 - DNA, 201 bp, Homo sapiens
tcctatcggggtcacagggacgctaagattgctacctggactttcgttgaccatgctgtcccgggtggtactttccgccgccgccacagcgggtaaggggyatagaccctgctctggactatcagagtgattggaaagaagcgaatctaggggtgacagggaggggagaagggcgcagcgacacgggcctgagaggcgagt

SEQ ID NO: 392482 - DNA, 201 bp, Homo sapiens
aggaagagtacaaaattttcatctcgcgagacttgtgagcggccatcttggtcctgccctgacagattctcctatcggggtcacagggacgctaagattgstacctggactttcgttgaccatgctgtcccgggtggtactttccgccgccgccacagcgggtaaggggtatagaccctgctctggactatcagagtgatt

SEQ ID NO: 392483 - DNA, 201 bp, Homo sapiens
gccagacattctacaatgcacagaacaacctcttacaacaaagaaatatccagttcaaacgtcggtagtgctgaattgagaaaccttgatgtaaatgaagraatctcaagcatgattctcagatttcaaaacctggtggggtagctaatatatttggaggcagaaataatattcaaaagataagcattgtaccaaaataaa

SEQ ID NO: 392484 - DNA, 201 bp, Homo sapiens
ataagaacacaaccccagccaatacctggattacagcctggtgagaccttgaagcagagaaccttgataaaacatgtccaagcttttaacccatagaaackataagataaatgtgtattgttttaagcctctaaatgtgtgatatgttaggcagcaatagaaaactaatacagcaaaggtctccaccatctctatctgtgg

SEQ ID NO: 392485 - DNA, 201 bp, Homo sapiens
gataatttataaagaaaatacaattaatttttcacaattctgggagctggaaagtccaagatcaaggtggcagccagattggtatctggcgaggactgctytctgcttctgagatggcaccttgcttctataccttctgctgggaaggcatactgtgtcctcacgtggcagaagggacagaagggcaagagaggactcttt

SEQ ID NO: 392486 - DNA, 201 bp, Homo sapiens
tgactaatttaattccaattgtttttttctctaatagtttgagttactctatttctgttataatgatcactctagaaattttaatattttaatctctcttytatgttttatattgttgtctgtgttatatttcttgtccactatttttctcttcaaatgttttaaacttgttatttatccccactattgaatttctatctt

SEQ ID NO: 392487 - DNA, 201 bp, Homo sapiens
ttcaacctttatggctgtttaagttctagatacatattttcaaacagtatatagcagattttttattcaatctggcaatctttgacttttaactaaagagwatagtccattttcatttattgtaattagcaattgctgttctattctgattcattcccactaatatattttatattttctgttttgtggcctattctggtt

SEQ ID NO: 392488 - DNA, 201 bp, Homo sapiens
aagcaacgtaatgcagtgatcatacagagataaaagtccttacctcggagttaaatatctactaggaagacagcaagaatatgtgataatacaaacttgakcacagggtgctctgagagtgtggcaagcaccattttaggtagtctcaccagcctcttgtttccctcatatacatcatccaggtcaaggttcagtcagaga

SEQ ID NO: 392489 - DNA, 201 bp, Homo sapiens
ctttcacactccatgtccagtacctcagcaaggctcttcctctagaaatttggactctgactgctgcttccactaccgctaaagtaggaaccactataaaytttcacctaggtattttagtagtctcttaattagtcttgcatctctattcttgtcccattacagcccattctcataatagccaggaggattatgtcaatc

SEQ ID NO: 392490 - DNA, 201 bp, Homo sapiens
agacatgtccattttcctagagatttctctttttacttccaaacttagttctaaagcttgcaaaatacggtaactcaaattgaaaaaaaatggacttgaaraagtggtcttatctataattaagtctcatgtatgcaaaaagtaaggctataattgactgcttccaacttagaagaaaaaggaccccatacagactggtaa

SEQ ID NO: 392491 - DNA, 201 bp, Homo sapiens
tcaatttcctcatctataaaatggcgataatagtgcattgtggcttttgagaattaagagacaattgctgtgaaactcaaaaacagttcttggtacatagygtgtgcttagtaaatttagcagctgttaccgttaaaattgttccataagacatgtccattttcctagagatttctctttttacttccaaacttagttcta

SEQ ID NO: 392492 - DNA, 201 bp, Homo sapiens
ctatggaattaaaaaatatggtccctttgttgcagactttgctgataaactcaatgaggtaagaaccataaactttatttcctattttagactagcagaawcatgaaggtcatctagtgatatttttgatatgagtgttaggggagcaacatatagaaatgaatctaatgcttcaaataagtgttaacgttagttactaat

SEQ ID NO: 392493 - DNA, 201 bp, Homo sapiens
agaaattggttttgctgtcttctatacccgccctactcctttgtgaccttcccttgggaccttatgacatgtagcttccacagcctgaatccgagtagatkacatacccaagaataaattttgttcaataaaacagtaaagcatgttgtttacagtcggtttcccagatacctagtttttgctgccatatgataacaatca

SEQ ID NO: 392494 - DNA, 201 bp, Homo sapiens
cttaccgggaacgactgtatagagtatataaggaagtaaagaatcgcctggactatcatatatctgtgcagaacatgatgcgtcgaaaggaacaagaacayatgataaattgggtggagaagcacgtggtgcaaagcatctccacacagcaggtacacaacatttttgtaggttctgatgttgtactggtatctcttaaca

SEQ ID NO: 392495 - DNA, 201 bp, Homo sapiens
agcaggcttccatccaacacatccagaatgcaattgatacggagaagtcacaacaggcactggttcagaagcgccattacctttttgatgtgcaaagggtrggtttcagaagtttctaggaagaatgaagttacttgttgtgtgcatttttttaattcagaattttttatgaagaatggttaaatagattgaacgtatttt

SEQ ID NO: 392496 - DNA, 201 bp, Homo sapiens; identical to SEQ ID NO: 86027

SEQ ID NO: 392497 - DNA, 201 bp, Homo sapiens
ttacaggaatatctggcctcaaattctatacaggtttcacccataaaggctgtgagccagggaattttaactaaccccctggatttgcttaaaataaattrtatctcctctgtgttaattaattttacttctaaacctgtctagtagctgtatagtgttaagccagtaatcatcttgaggttctggtctggtaggaggtgt

SEQ ID NO: 392498 - DNA, 201 bp, Homo sapiens
gccttcagctaatcaaatatagaagtacctttctatcttccctcttttaggcatagcatatcccttcataaaataactctttcttcttttaggaccctatrtactcggaactgggcttatcttgtacgctttatccaaagaaatatatgtgattagcgcagagaccttcactgccctatcagtactaggtgtaatggtcta

SEQ ID NO: 392499 - DNA, 201 bp, Homo sapiens
taactagaagcaaataagtttagaattgttatctcttctcactgagttaagcttttatcagcatgtaatgatgatctctttttttaacgaatagtgtctaygttaaggtatattttgcctgatatgaatataccagctatcttgttaacattttcctggtgtaacttttcatccttctttcaacctttatggctgtttaag

SEQ ID NO: 392500 - DNA, 201 bp, Homo sapiens
gtaaaatacaaaagaagtgggcattctcactggcagaatcttcagagtagaagtattccttcaagtatacaaacaatatttatcatttcttaattttgccycagaataacattgctatggctttggaagttacttaccgggaacgactgtatagagtatataaggaagtaaagaatcgcctggactatcatatatctgtgc

SEQ ID NO: 392501 - DNA, 201 bp, Homo sapiens
tcccgggccgccgggggcactagggggggtggggtttccttccgcatctccacggttccaactccaacctagactcaaactggacgccggccggagactcmgctccggcagcaaaccccacgtggtgcacctctgagcctccgcccctctcccgagggaaccgcaactctacttctcgcgagaattgcttctatggctcca

SEQ ID NO: 392502 - DNA, 201 bp, Homo sapiens; identical to SEQ ID NO: 86024

SEQ ID NO: 392503 - DNA, 201 bp, Homo sapiens
ccaggctcaggtcatcctcccacctcagcctcccgagtagctgggacttggcgtgcacccggctcatttttctatttttttgtagagacgggctttcaccrtgtagcccaggctggtctccaactcctgggcttgtgggatccacccatcttggcctcccaaagtgctgggattacaggcttgagccacccgcctgcagcc

SEQ ID NO: 392504 - DNA, 201 bp, Homo sapiens
gatttcatttgactttgctgaccttcgccttgtctatctgcagccccctctctgaagaatgcagccttcctaggtccagggtaagtgtgaggataatgctycctttcgtctttgttttcactaccttttatttcccgattcctgcccccacccccttagctttaggtcagaaatttctttccgataattttgggacactta

SEQ ID NO: 392505 - DNA, 201 bp, Homo sapiens
ctgggcaacatagaccccctttctacaaaattgcaggaggagggagtcactgtttttatagggcattcaagaaatgtctctaatatgatatttgagcagasacctgaaagaactaatagtgcaaagtatgtggatttttggggaaataagttccaggctgagggaagaacagttgcaaatgccctaaacctggaagtttgc

SEQ ID NO: 392506 - DNA, 201 bp, Homo sapiens
cagctaatcaaatatagaagtacctttctatcttccctcttttaggcatagcatatcccttcataaaataactctttcttcttttaggaccctatgtactyggaactgggcttatcttgtacgctttatccaaagaaatatatgtgattagcgcagagaccttcactgccctatcagtactaggtgtaatggtctatggaa

SEQ ID NO: 392507 - DNA, 201 bp, Homo sapiens
tagaaaagagaagatttgtgtaggagttggcattcacggctattcaaacatttaagaactgtcaagtggaaaaatagttcaaattattataaaattagaawctatagaagctattaaaaaaaattttggatccacacaaaatgaaatagtcattaagttaaagctgatttaaaaatggcatgcactgtgtaaggaagacta

SEQ ID NO: 392508 - DNA, 201 bp, Homo sapiens
agtgttttgtctttgaatctaattaagtcattactttgccttcagctaatcaaatatagaagtacctttctatcttccctcttttaggcatagcatatccmttcataaaataactctttcttcttttaggaccctatgtactcggaactgggcttatcttgtacgctttatccaaagaaatatatgtgattagcgcagaga

SEQ ID NO: 392509 - DNA, 201 bp, Homo sapiens
atctttctacttgctcttctctcttttccccagatgattgggtcaaatgtcatctgactccctaccaaaaaactcttccccattttgttgctccctatccscttaccttgctcagtttttctccatagcacttagagctgcctgaaattttgtatggagatacacactcacccttcccatacccccactagaatgttgaag

SEQ ID NO: 392510 - DNA, 201 bp, Homo sapiens
ctttttagctcattctccaaccttggtgttcctctgaaaactaccaagcgcattcttgcctcaatatctttctacttgctcttctctcttttccccagatsattgggtcaaatgtcatctgactccctaccaaaaaactcttccccattttgttgctccctatccgcttaccttgctcagtttttctccatagcacttaga

SEQ ID NO: 392511 - DNA, 201 bp, Homo sapiens
cactgatctttgttgttgctatcacaattgtagcaaaaacttgcccaactagaagaggcgaagcaggcttccatccaacacatccagaatgcaattgatayggagaagtcacaacaggcactggttcagaagcgccattacctttttgatgtgcaaagggtaggtttcagaagtttctaggaagaatgaagttacttgttg

SEQ ID NO: 392512 - DNA, 201 bp, Homo sapiens
ctgcctcagtttcctcactgcaaaatggatacaattataataactatgccatggtttggttacaaggtttaattgaatctaaacacaagagtgtttagagygtagtcagtactctacaaatgttaactattatttgatccagcaagtattatgacataaacacaaagacaaatctacaatgtatgcaccattatttgtagt

SEQ ID NO: 392513 - DNA, 201 bp, Homo sapiens
ttaatttattttaacattacagaggctaaaaatgtaattaagctcaagcaacatttaccattttatctgatagaatagaatattatattagctattcatgytttttaaacttacacaatcaaagatactgccaacacacaatattttttaaagcccagtttcaaaatttagatttccctagggaaccctgagtgcattcat

SEQ ID NO: 392514 - DNA, 201 bp, Homo sapiens
acctcaagctcaatttataaaacaatcagagtagaagaattgctttgtagaagtcagggaaaggtatctggagtctcaccccatagttcctagctcttctytcctcatataaggcctcctgaaagtcattccaaaaaaccactaaaggccagaagatactgaattctctgatttagcagatgccttatctgttggaaggct

SEQ ID NO: 392515 - DNA, 201 bp, Homo sapiens
ttgcctcaaaatcatgtgaggtacctgagtaagtgttagtccctactgcaatccaaccgaattggaatctcaggggaaggggcgataaacccagatttttmatgttgtcctcccacaacccttgcacttaattattatgtatgttaatgtttgggaatctctattcaagagaatgtgtataatttcaagccaattaattta

SEQ ID NO: 392516 - DNA, 201 bp, Homo sapiens
agcaaatggtagaccaggagattatatcccgcacctggctcagtgggtcccatgctcatggagccttgctcactgctagcgcagcagtctgagattgacckgtgaggcagcagcctggcaggaggaggggcatccaccattgctgaggcttcagtaggtatacaaagaggctgggaagctcaaacatgacggagcccatca

SEQ ID NO: 392517 - DNA, 201 bp, Homo sapiens
actatcagtaatggtattatcgtgaatacagctactagaatttaagttacaatgactaagagtaaataaactcctttacggcagtgtttcttgaagtgtgstccattgactacttgcctcaaaatcatgtgaggtacctgagtaagtgttagtccctactgcaatccaaccgaattggaatctcaggggaaggggcgataa

SEQ ID NO: 392518 - DNA, 201 bp, Homo sapiens
tgagattgacctgtgaggcagcagcctggcaggaggaggggcatccaccattgctgaggcttcagtaggtatacaaagaggctgggaagctcaaacatgayggagcccatcacagctcagcaaggctggctgcctctatagactccacctctgggggcagggcatagctgaacaaaaggcagcagaaacttccgcagactt

SEQ ID NO: 392519 - DNA, 201 bp, Homo sapiens
tcataaatttagatctttaatccattctgagttgactttgttcagtttagtcatatttaagagaaggaaagctacaggtgattgctactatcagtaatggyattatcgtgaatacagctactagaatttaagttacaatgactaagagtaaataaactcctttacggcagtgtttcttgaagtgtgctccattgactactt

SEQ ID NO: 392520 - DNA, 201 bp, Homo sapiens
catttgattttgatatgtatttctctgatgattagtgatgttgagcattttttatacacttgttgaccattggtatgtcttcttttgagaaatgtcttttsaagtccttggcccattttttaatcaggttatttggtttcttactactgagttgtataaatttcctatatatttttgatactaactaactccttacttgac

SEQ ID NO: 392521 - DNA, 201 bp, Homo sapiens
  misc_feature (1)...(201): n = A,T,C or G
gaagttttcagtaggggaggaaaattgttctacaaaaggcaaaacaaaaatatctgaccagatccaatactaaagcaatgtattttaaatggagggagtcntgacttttgaagtttatctgtttctatcctttgttttacaggaacagccagctgaaaactctcctggccattggaggctggaacttcgggactgccccgt

SEQ ID NO: 392522 - DNA, 201 bp, Homo sapiens
tttgatgccagacacaaaatgtccacaatagaaaatctgaccacagtatctaaacagttgcttatcagcccttggaactgccaaaaaagctattaaactgrtgttttccatggtgatggtctccaccaccctgttaggagccatgacattgttctgtccttgttgggcagagaaggtggtgatgctggtggtgggagggtg

SEQ ID NO: 392523 - DNA, 201 bp, Homo sapiens
gcaccagctgagaagctcatcgttggattccctacctatggacacaacttcatcctgagcaacccctccaacactggaattggtgcccccacctctggtgytggtcctgctgggccctatgccaaggagtctgggatctgggcttactacgaggtatgtagattggactgaaaagtgctctgtgaattccgtgcactgtgc

SEQ ID NO: 392524 - DNA, 201 bp, Homo sapiens
gttattttgctgaattcattttttagctctgacaaaatttttggtgtggaatctttagggtttttcctatataagaccacatctgcagggacaattttacyacttccttcccaaattggatgccttttatgtcttatttttgcccaaatgttctggttaagactatgttgaatagaagtggcaaaagaagcattcttatct

SEQ ID NO: 392525 - DNA, 201 bp, Homo sapiens
gtgttataatgcttccctctatttatcttctggtggggggaggaatgagaaaatcacacaaataaacaagaggacttcttggagggtacatgtttggggarggaacacagtgtgctgggtttgccaggtatccaaagaaacaagggcaacttgggagaaagagcagagttggggggataacagaataaagggaatgttaag

SEQ ID NO: 392526 - DNA, 201 bp, Homo sapiens
ataagagatatcaagaggatagaatcaataggatttggagatcaactggaaataggaaatggagaggacctccaattttctgactttgaggatgggtttgrttttaatgctattaactaagatggtaaatacaggaagaagtgtagatttgaaagaagaagaattgaccttgaacttgatgagtatgaggtatctgtagag

SEQ ID NO: 392527 - DNA, 201 bp, Homo sapiens
atcatttgggtagtatagacattttaacaatattgagtcttccaactcatgaacatggggcatgtttccatttattcatattttctttatttgaacagcakgctatagttttcattgtacaagtctttcacttcattaagttaatttctaagtattttattctttttgatgctattgtaaatgaaattatttttataattt

SEQ ID NO: 392528 - DNA, 201 bp, Homo sapiens
gatgtatataagagatatcaagaggatagaatcaataggatttggagatcaactggaaataggaaatggagaggacctccaattttctgactttgaggatkggtttgattttaatgctattaactaagatggtaaatacaggaagaagtgtagatttgaaagaagaagaattgaccttgaacttgatgagtatgaggtatc

SEQ ID NO: 392529 - DNA, 201 bp, Homo sapiens
tatgatcatgccactgcactcgagcctgggtgacagagtgagaccctgtctcaaaaaacaatgacaacaaagaaaacatcactgggatttcgatagggatwgcattgaatctgtacatcatttgggtagtatagacattttaacaatattgagtcttccaactcatgaacatggggcatgtttccatttattcatattttc

SEQ ID NO: 392530 - DNA, 201 bp, Homo sapiens
tttcaggttgcacggctccagctcagcccattgagccaataactgctgctcccagtggcagcgggaacgggagcgggagtagcagctctggaggcagctcrggaggcagtggattctgtgctggcagagccaacggcctctaccccgtggcaaataacagaaatgccttctggcactgcgtgaatggagtcacgtaccagc

SEQ ID NO: 392531 - DNA, 201 bp, Homo sapiens
ttataacagaactgaagtcctatatttaaatcaatgcaatattcatcccctatacttacactacagcttatccaatattcatttctttaattatcttgttgtttgttttgtttttgtttgccaagaaggacttggagtatcttccattttcttgcatgtatgaaagtgcctgactgttgcctttatacttgattggtaact

SEQ ID NO: 392532 - DNA, 201 bp, Homo sapiens
atgatatttgctgtgggtttttcaaacatagcttttattatattgaggtagtttgcttctatttctagtttgtttttattatgagagggtattaacttttrgcaaatactttttctgcatcaattgagatgattatgccatttttttcttcattcttttaatgtggtgtattacattcattggttttcataagttaaatca

SEQ ID NO: 392533 - DNA, 201 bp, Homo sapiens
tataacagaactgaagtcctatatttaaatcaatgcaatattcatcccctatacttacactacagcttatccaatattcatttctttaattatcttgttgtttgttttgtttttgtttgccaagaaggacttggagtatcttccattttcttgcatgtatgaaagtgcctgactgttgcctttatacttgattggtaactt

SEQ ID NO: 392534 - DNA, 201 bp, Homo sapiens
gcatgttctcactcataagatggagttggaacaatgagaacacatggacaccgggaagggaacaagaaacactggagccagctgaggggttgggggcaagsgggggagagcattaggacaaatacctaatgcatgtggggattaaaacctagatgacgggttgataggtgcagcaaaccatcatggcacacgtatacctat

SEQ ID NO: 392535 - DNA, 201 bp, Homo sapiens
tctttcaccattgagtatgatatttgctgtgggtttttcaaacatagcttttattatattgaggtagtttgcttctatttctagtttgtttttattatgasagggtattaacttttggcaaatactttttctgcatcaattgagatgattatgccatttttttcttcattcttttaatgtggtgtattacattcattggtt

SEQ ID NO: 392536 - DNA, 201 bp, Homo sapiens
catgttctcactcataagatggagttggaacaatgagaacacatggacaccgggaagggaacaagaaacactggagccagctgaggggttgggggcaaggsggggagagcattaggacaaatacctaatgcatgtggggattaaaacctagatgacgggttgataggtgcagcaaaccatcatggcacacgtatacctatg

SEQ ID NO: 392537 - DNA, 201 bp, Homo sapiens
tagtattttatttaaacatctatattttaaaaataattgtaataatgagaatacatagacacagggaggggagcaacacacactggggcctgtcggggggsggtgggggtagggaaagcatcaggataaagagctaaagcatgtggggcttcatacctaggtgatgggttgataggtgcagcaagccaccatggcacatgt

SEQ ID NO: 392538 - DNA, 201 bp, Homo sapiens
tttatcttctggtggggggaggaatgagaaaatcacacaaataaacaagaggacttcttggagggtacatgtttggggagggaacacagtgtgctgggttkgccaggtatccaaagaaacaagggcaacttgggagaaagagcagagttggggggataacagaataaagggaatgttaagataccatggctgggaagagta

SEQ ID NO: 392539 - DNA, 201 bp, Homo sapiens
cttaaaaatagtaattgtaataaatttatatttgaaacatgtaaggtatttaattcacacacaatgttttgtgtgcaaactcccctttcccctataattaytcctcagctatccaaggacttgaggtcttcagattgggaaaaataacattaactaaaatttattaaataactaacatgtgctaggcccagtgctaggtag

SEQ ID NO: 392540 - DNA, 201 bp, Homo sapiens
tttgaacccatcacaaggaagctaacaattttgaaaaaaggttagacgaatggctaaccagaataaacagtgtagagaagaacttaaatgaactgacagarcggaaaaccatggcacgagaacttcgtgatgcatgcacaagcttcagtagctgatttgatcaaatggaagaaagggtatccgtgattgaagatcaaatta

SEQ ID NO: 392541 - DNA, 201 bp, Homo sapiens
atccatatgtaatacatgaggaaattgaggttcacaggtgaaataacttgtctaatgtcacatatctagaaagaaggagaacaaaaattgaaatataagtyagcgattctagagaccatgctgatattctgttctgtcatatggcaacctttgtgctggacaggtgtgggagaatgctctctgcaattgactggcattggt

SEQ ID NO: 392542 - DNA, 201 bp, Homo sapiens
ctaactgccccaattaaaagacacagactggcaaattggataaagagtcaaggtccatcagtgtgctgtaatcaggagacccatctcatgtacaaagacayacataggctcaaaataaagagatggaggaagatctaccaagcaaatggaaagcaaaaaaaaaaaaaaaaaaaaacaagcaggggttgtaatcctagtctc

SEQ ID NO: 392543 - DNA, 201 bp, Homo sapiens
atctagaaagaaggagaacaaaaattgaaatataagtcagcgattctagagaccatgctgatattctgttctgtcatatggcaacctttgtgctggacagrtgtgggagaatgctctctgcaattgactggcattggttattctaacagtcttaccctctttgtatgtgaataaactggcattctcacttacattgactgc

SEQ ID NO: 392544 - DNA, 201 bp, Homo sapiens
acaataataatgggagactttaacaacccactgccaatattagacatatcaatgagacagaaggttaacaaggatatccaggacttgaactcagctctgcrctaagcagacctaatagacatctgcagaactctccaccccaaatcaacagaatatacattcttctcagcaccacatcacacttattccaaaattgaccac

SEQ ID NO: 392545 - DNA, 201 bp, Homo sapiens
aaaagaacagaaatcacaacaaactgtctctaagaccacagcgcaatcaaattagaactcaggattaagaaactcactcaaaaccgcaccactacatggaragtgaacaacctgctcctgaatgactactgggtaaataacgagatgaaggcagatataaagatgttctttgaaaccagtaagaacagagacacaacgtgc

SEQ ID NO: 392546 - DNA, 201 bp, Homo sapiens
aaaatcaacaccctaacatcacaattaaaagaactagagaagcaagagaaaacgcattcaaaagctagcagaaggtgagaaataactaagatcagagcagmactgaaagagacagagacacaaaaaacccctcaaaaaatcagtgaatccaagagatgcttttttgaaaagatcaacaaaattgatagactgctagcaaga

SEQ ID NO: 392547 - DNA, 201 bp, Homo sapiens
cttaggatgcatttgcaagagtgttcatactaattacctccacacagagatcaggcatctgaggcacagggagggaaacagaggcaaggccaaaactcacmgcacacttcagtggatcctaaaccaggccattgtccctcctgctgactacacacaggctctgcctaccagctgacatgctacttcaccaactgggcccag

SEQ ID NO: 392548 - DNA, 201 bp, Homo sapiens
tatttaaaaaatggtgctgggataactggctagccatatgtaggaagctgaacctggatcccttccttacaccttacacaaaaatttattcaagacagatkaaagacgtaaatattagacttaaaaccataaaaaccctagaggaaaacctaggcaataccattcaggacataggcatgggcaaggacttcatgactaaaa

SEQ ID NO: 392549 - DNA, 201 bp, Homo sapiens
taaacaggctcaatggcttaagcacaacaaatctggaggcgccatggtctgggccattgatctggatgacttcactggcactttctgcaaccagggcaagyttcccctaatctccaccctgaagaaggccctcggcctgcagagtgcaagtaagtgactgagggggaatgcccaggtgtataaataccccttctccaactc

SEQ ID NO: 392550 - DNA, 201 bp, Homo sapiens
ctgctgactacacacaggctctgcctaccagctgacatgctacttcaccaactgggcccagtaccggccaggcctggggcgcttcatgcctgacaacatcracccctgcctctgtacccacctgatctacgcctttgctgggaggcagaacaacgagatcaccaccatcgaatggaatgatgtgactctctaccaagcttt

SEQ ID NO: 392551 - DNA, 201 bp, Homo sapiens
atgaacagactgcctcctcaagtgggtccctgacccctgtgtagcctaactcggagacacatcccagtaggggctgactgacacctcatacaggtgggacsaagcttccagaggaaggatcaggcagcaatatttgctgttctataatatttgctgttccgcagcctccactggtgatacccaggcaaacagggtctggag

SEQ ID NO: 392552 - DNA, 201 bp, Homo sapiens
aatctcttgacttttgaaagatctgtaccttcctgaaaaatggagccactcagggatgggatgcccctcaggaagtgccttatgcctatcagggcaatgtrtgggttggctatgacaacgtcaagagcttcgatattaaggtaagatcagtcccttaaatgtgctgaggtcccagccctgagtcccaggaaagcaagtgat

SEQ ID NO: 392553 - DNA, 201 bp, Homo sapiens
catcgtactgttaccaaaacagatatatagaccaatggaacagaatagaggcctcagaaataacaccacacatctacaaccatctgatctttgacaaacckgacaaaaacaagaaatggtgaaaggattccctatttaaaaaatggtgctgggataactggctagccatatgtaggaagctgaacctggatcccttcctta

SEQ ID NO: 392554 - DNA, 201 bp, Homo sapiens
aggcgccatggtctgggccattgatctggatgacttcactggcactttctgcaaccagggcaagtttcccctaatctccaccctgaagaaggccctcggcytgcagagtgcaagtaagtgactgagggggaatgcccaggtgtataaataccccttctccaactcaaaaagcaaccctgatgtcttcccacctcccccttg

SEQ ID NO: 392555 - DNA, 201 bp, Homo sapiens
atatcgtgcgttcattaaacaaacatttaatggcaacaacaaagcaacatgtgagctctgtgccaggcactgctctacatgttgttttaagaaccataacycatttcatcttcatatttactctatggcatacatactataagtgttataatctttattttacagatgaggaaactaaagtacagagaggatttaagcaac

SEQ ID NO: 392556 - DNA, 201 bp, Homo sapiens
cctgacttttgaagtttatctgtttctatcctttgttttacaggaacagccagctgaaaactctcctggccattggaggctggaacttcgggactgccccrtaagtcttctatggagagcatgttgttcgtttgctatggaaaacaagttagccccatgtgatcactgtccctttagacttcacaatctaagacagggtat

SEQ ID NO: 392557 - DNA, 201 bp, Homo sapiens
tcattataaggcaccataaagagagtgaaaaaataacccataaagttggaaaagatatgttcaatgcacgtaactgaaaaataattacaatccagaatatrtaaagcatggctataaaaattaataaacttgtgggcagcacaatagaaaaatgggcaaaagatacaagcaggcatttcacagaaaaggaaacaaaaacag

SEQ ID NO: 392558 - DNA, 201 bp, Homo sapiens
gaagatactgaattctctgatttagcagatgccttatctgttggaaggctgtgttctatcactcaggtaggggaagaacgaatggatgtgtcatcattgastacagtgatcagttggtgatttcagtaagtacatcttccatagatagtaaacttcggactcagcattcaggaacatttatttgtgacaaggaaggtgtga

SEQ ID NO: 392559 - DNA, 201 bp, Homo sapiens
aaggttgagcattactgtacaatcgcttctgcttctttactgtaggatcttagatgtaattgatccctatttcccaatgatatacagttgctccaccagcmcccaagcctgcagcatgcactgctagtcctggatgttgggtagcggaagcagggggattaaaggaaaatacatggtcccttcattctcaaaacatgtatt

SEQ ID NO: 392560 - DNA, 201 bp, Homo sapiens
gagtgtgttgtttagtttccacaaattggtggcttctacagtttcacttctattatcaatttctaacttcacgtcctttgtggttggagaagatactttgyatgatctctatatttttaaatctgttgagacttaatttgtgacctaatatatagtctatactgaaaaatgtcccgtgtgcgcttgggaagaatgtaaatg

SEQ ID NO: 392561 - DNA, 201 bp, Homo sapiens
caagagaaaacgcattcaaaagctagcagaaggtgagaaataactaagatcagagcagaactgaaagagacagagacacaaaaaacccctcaaaaaatcartgaatccaagagatgcttttttgaaaagatcaacaaaattgatagactgctagcaagacttacaaagaagaaaagaaagaagaatcaaatagatgcaata

SEQ ID NO: 392562 - DNA, 201 bp, Homo sapiens
ttttcttgtttttcagtgtgaatatttagagttataaagttctcacttagtagtgccttcacagtatcccataagttttgctatgttatgtttttattttyattcatttctaagtatttttaaatttcccttatgactacttctttaatctattattaagagtgtgttgtttagtttccacaaattggtggcttctacagt

SEQ ID NO: 392563 - DNA, 201 bp, Homo sapiens
acgcattcaaaagctagcagaaggtgagaaataactaagatcagagcagaactgaaagagacagagacacaaaaaacccctcaaaaaatcagtgaatccargagatgcttttttgaaaagatcaacaaaattgatagactgctagcaagacttacaaagaagaaaagaaagaagaatcaaatagatgcaataaaaaatgat

SEQ ID NO: 392564 - DNA, 201 bp, Homo sapiens
tccctaactcattttatggggccaacatcatcctgataccaaagcctggcagacacaccacaaaaaaagagaattttagaccaatatccctgatgaccatygatgcaaaaatcctcaataaaatactggcaaaccaaatctggcagcatatcaaaaagcttatccaccacgatcaagttggcttcatccctgggatgcaag

SEQ ID NO: 392565 - DNA, 201 bp, Homo sapiens
aaactactttaaagttcatatggaaccaaaaaagagcccacattgccaagacaatcctaaggaaaaagaagaaagctggaggcatcatgctacttgacttmaaactatactacaaggctacagtaaccaaaacagcatcgtactgttaccaaaacagatatatagaccaatggaacagaatagaggcctcagaaataacac

SEQ ID NO: 392566 - DNA, 201 bp, Homo sapiens
cacattgccaagacaatcctaaggaaaaagaagaaagctggaggcatcatgctacttgacttcaaactatactacaaggctacagtaaccaaaacagcatsgtactgttaccaaaacagatatatagaccaatggaacagaatagaggcctcagaaataacaccacacatctacaaccatctgatctttgacaaacctgac

SEQ ID NO: 392567 - DNA, 201 bp, Homo sapiens
accaccaaggtctcaccctgccttctttgggtctccctcagtttcactgccatggtttctactcctgagaaccgccagactttcatcacctcagtcatcarattcctgcgccagtatgagtttgacgggctggactttgactgggagtaccctggctctcgtgggagccctcctcaggacaagcatctcttcactgtcctg

SEQ ID NO: 392568 - DNA, 201 bp, Homo sapiens
gggaatatcacacaccagggcctgttgcggggtgggggattgggggagggatagcatcaggagaaatacctaatgtaaatgacaagttattgggtgcagcmaaccaacatggcatatgtatagctatgtaacaaacctgcacgttgtgcacatgtaccctagaacttaaagtaaaatttaaaaaaaagcctcataatcctt

SEQ ID NO: 392569 - DNA, 201 bp, Homo sapiens
tgttgcggggtgggggattgggggagggatagcatcaggagaaatacctaatgtaaatgacaagttattgggtgcagcaaaccaacatggcatatgtatasctatgtaacaaacctgcacgttgtgcacatgtaccctagaacttaaagtaaaatttaaaaaaaagcctcataatcctttttattttttatagtcagtagt

SEQ ID NO: 392570 - DNA, 201 bp, Homo sapiens
ttctgagttagaatcttaggatgcatttgcaagagtgttcatactaattacctccacacagagatcaggcatctgaggcacagggagggaaacagaggcarggccaaaactcaccgcacacttcagtggatcctaaaccaggccattgtccctcctgctgactacacacaggctctgcctaccagctgacatgctacttca

SEQ ID NO: 392571 - DNA, 201 bp, Homo sapiens
ttatgataaaactaaaatgaaagcgtaaaaggccaagaaaactaaggcattcctgaagatgataaacagtgtgtgtgagttggagggtgggataccattasctatgacaggtctgaggagtggtagaaatggcatttcaaattagcgtggaaaagatgggttattaaaattatgctggggcaagtagttacccacatggaa

SEQ ID NO: 392572 - DNA, 201 bp, Homo sapiens
aattaaagaaactaaaaataatacaaggttattgaaaacaataatgtaaaaggatacacatggtcacagtttaaaactattcattctatgactcataaacrcagtaattctttccaataaccaagtgctcagatgggatgcaagtttgctggggctcttaaggagctattaaaaagaaatgtttaatctgtaggtcatgtc

SEQ ID NO: 392573 - DNA, 201 bp, Homo sapiens
gaatttaagttacaatgactaagagtaaataaactcctttacggcagtgtttcttgaagtgtgctccattgactacttgcctcaaaatcatgtgaggtacytgagtaagtgttagtccctactgcaatccaaccgaattggaatctcaggggaaggggcgataaacccagatttttcatgttgtcctcccacaacccttgc

SEQ ID NO: 392574 - DNA, 201 bp, Homo sapiens
tagttacacccttcattttcttggttaaagtccccatgtgagagtggcaactcatggaaataatacatgagagatccaggcttactggaagttcccctgasgacctgttcttgcccagaacgactgaggaatccagaaggtccatgctatcttctctacctgggagcttgagaggcaacaaaaccatatcatggatcagac

SEQ ID NO: 392575 - DNA, 201 bp, Homo sapiens
ttctaagcattacactaggctgcccgttattactgagtacgtattctgtggcagacattgtcaggctctgaagaacttcttctgaggtggaagactgaaakaatatgaacaatgtcaatgcattgtgataaatgccatgttagaggtctgcagagtacaaaagtaacaaggaaagagggtaactaattctgctctggggca

SEQ ID NO: 392576 - DNA, 201 bp, Homo sapiens
ctttctcagcccacctggggagatttaagaaaccctcaccaatgctcacatatctctaatcagtgattcaggggatgtatcaattctctaaattttttccrgatttttcctagaatttatttgttcaccatttatgcccagattctagaaaagtgttttgcatacatttggtggttagtaaatttttttttgaatgattta

SEQ ID NO: 392577 - DNA, 201 bp, Homo sapiens
agaagctcatcgttggattccctacctatggacacaacttcatcctgagcaacccctccaacactggaattggtgcccccacctctggtgctggtcctgckgggccctatgccaaggagtctgggatctgggcttactacgaggtatgtagattggactgaaaagtgctctgtgaattccgtgcactgtgccttagggcta

SEQ ID NO: 392578 - DNA, 201 bp, Homo sapiens
ccttaaatgtgctgaggtcccagccctgagtcccaggaaagcaagtgattcctgttatcctctttctttaaacaggctcaatggcttaagcacaacaaatytggaggcgccatggtctgggccattgatctggatgacttcactggcactttctgcaaccagggcaagtttcccctaatctccaccctgaagaaggccctc

SEQ ID NO: 392579 - DNA, 201 bp, Homo sapiens
gatctgtaccttcctgaaaaatggagccactcagggatgggatgcccctcaggaagtgccttatgcctatcagggcaatgtgtgggttggctatgacaacrtcaagagcttcgatattaaggtaagatcagtcccttaaatgtgctgaggtcccagccctgagtcccaggaaagcaagtgattcctgttatcctctttctt

SEQ ID NO: 392580 - DNA, 201 bp, Homo sapiens
catttttgataaaggtggggaaaggtagatctactgttgtattcactgaaaagcctttggaatcaccaccaaatctcactgaggctgtaacaatttatggyaaattggaaggcaatcaatccttcagaattagattctacggggtacagacaatcggttcaaagtacatgctttttctttctatccaggtcttgtccttat

SEQ ID NO: 392581 - DNA, 201 bp, Homo sapiens
acgaaggtaccacggtcatttttgataaaggtggggaaaggtagatctactgttgtattcactgaaaagcctttggaatcaccaccaaatctcactgaggytgtaacaatttatggtaaattggaaggcaatcaatccttcagaattagattctacggggtacagacaatcggttcaaagtacatgctttttctttctatc

SEQ ID NO: 392582 - DNA, 201 bp, Homo sapiens
tgtagatttgataggcatttccttaatgattaatggcattaagcatctttttatgtgtttattggccatttcaatatcttctttgaagaaatagatattcwagtcctttgtccattttgaatcaagttgtttggttgtgtgtgtgtgtgtcattgaattttagaagttctctctatattctgaatatctcttatcagataa

SEQ ID NO: 392583 - DNA, 201 bp, Homo sapiens
tgtgtcattgaattttagaagttctctctatattctgaatatctcttatcagataaactctttgcaaatattttctaccattccgtgagttgcacttttaytctgtttgcattgtcttttgatatacaaacatttaaaatattcatgaagtccaatttgtgcattgtattcttttgttgtctgtgatttaggtgtcatatc

SEQ ID NO: 392584 - DNA, 201 bp, Homo sapiens
agagcagaccagagatgatgatgaaaatcacatagagattcaggcacaaaaggcatcataagtttagtggttttctcaaatgggaaattaggctgccatarttaattaaatattctcatttaatttcacacagagactgggacacaaagtaaacataaattctgcaagtgtctcacttaaacaactgtcctcaagttgatc

SEQ ID NO: 392585 - DNA, 201 bp, Homo sapiens
cttacatttaggccattgatctattttgagttaattttgcctatgatgttagaaaatggcccaaaaacatcaatggggccagatgtggtggctcatgcttrtaactccagtgctttgagaggccaaggtgggcagatttcttgagctcaggagtttgagaccagcttgggcaacatggcaaaaccctgttcctataaaaaa

SEQ ID NO: 392586 - DNA, 201 bp, Homo sapiens
caggagtttgagaccagcttgggcaacatggcaaaaccctgttcctataaaaaatacaaaaaaattagccaggcatggtggcacatgactgtggtcccagstaatcaggaggctgaggtgggaggattgctcgagcccaggaagtcaaggatgcagtgagctatgatcatgccactgcactcgagcctgggtgacagagtg

SEQ ID NO: 392587 - DNA, 201 bp, Homo sapiens
agatccaaacattcttagataaaattatcatttagtcatgacttgaagccattccaaagaacatgtgtgagtagaatattgagagagtagcacctaaagarggaagatttcttaggcactgattgtacaaattacatatgaataattccatgaggaaaaaaaggtttaagaacagctaataacttccaaagtttcttttta

SEQ ID NO: 392588 - DNA, 201 bp, Homo sapiens; identical to SEQ ID NO: 86075

SEQ ID NO: 392589 - DNA, 201 bp, Homo sapiens
cacttcagtggatcctaaaccaggccattgtccctcctgctgactacacacaggctctgcctaccagctgacatgctacttcaccaactgggcccagtacyggccaggcctggggcgcttcatgcctgacaacatcgacccctgcctctgtacccacctgatctacgcctttgctgggaggcagaacaacgagatcaccac

SEQ ID NO: 392590 - DNA, 201 bp, Homo sapiens
aataggggctatgcatgggggtggagtggtggagtagagtgtgagaggaagtggtggagctaacagcgccacagtcttctatctgcctgtgttcatctgcmtgaaggttggaagctgtaaggaggaaatgtctgaatgtttggtgcatgggagggatgaggatatgaagaggataggtctgtcaccaggcaattttcctca

SEQ ID NO: 392591 - DNA, 201 bp, Homo sapiens
ttctactttctgtctccatgattttgactattctaagtatctcacataaacagaaaaatcatatattatctgtctttttggactggcttttttcattgagwataatgtctcaagattcatccatgttgtagcaagtcagaatttccttttaaaggctgaataatactttattgtatgtatatataacagttttgttatcca

SEQ ID NO: 392592 - DNA, 201 bp, Homo sapiens
ttctttttatttatttttccataaagacttgctttgatgccagacacaaaatgtccacaatagaaaatctgaccacagtatctaaacagttgcttatcagyccttggaactgccaaaaaagctattaaactggtgttttccatggtgatggtctccaccaccctgttaggagccatgacattgttctgtccttgttgggca

SEQ ID NO: 392593 - DNA, 201 bp, Homo sapiens
tgatttgggtggaaacctcttccagatatgaaaataggggctatgcatgggggtggagtggtggagtagagtgtgagaggaagtggtggagctaacagcgycacagtcttctatctgcctgtgttcatctgcatgaaggttggaagctgtaaggaggaaatgtctgaatgtttggtgcatgggagggatgaggatatgaag

SEQ ID NO: 392594 - DNA, 201 bp, Homo sapiens
taatagctgattaattttctcatcagcaaaattggtgtgatagtaataatcctctttatagggtaaaagaaacaataaagtcaagccctctgatgatagtyattttttttagtcactcagctttactttttattcttttagaatttcattttgtgaccagtccttgtgaaaatgtaaatccaagtgccctgccctttccct

SEQ ID NO: 392595 - DNA, 201 bp, Homo sapiens
ccttggactagcttttctggggaagaaaatcagtaggaactgagatagagttatgcaagttgtctttgttctgctgttttcagaattatttctctatttaytcccctattatcctactgagttgatgatgtaccataaacatgttagaaattaaattattcaaagaggttgattcagtaagttgtttagagacaagtcata

SEQ ID NO: 392596 - DNA, 201 bp, Homo sapiens
ttcaccaactgggcccagtaccggccaggcctggggcgcttcatgcctgacaacatcgacccctgcctctgtacccacctgatctacgcctttgctgggakgcagaacaacgagatcaccaccatcgaatggaatgatgtgactctctaccaagctttcaatggcctgaaaaataagtaggatgagggagatatttaattt

SEQ ID NO: 392597 - DNA, 201 bp, Homo sapiens
agaaccttttccaaatgaaacctcaagctcaatttataaaacaatcagagtagaagaattgctttgtagaagtcagggaaaggtatctggagtctcacccmatagttcctagctcttctctcctcatataaggcctcctgaaagtcattccaaaaaaccactaaaggccagaagatactgaattctctgatttagcagatg

SEQ ID NO: 392598 - DNA, 201 bp, Homo sapiens
ctccatagtctggtgagtgtaaatatatatatatcttttcccttctccctttcccattgcaatttgattgttatatcaatttgcttattatatcaagttgyttattatatcgtttgcttattacatctgcattgccatttatgtgagataaaggttgtttacccttaaaggtattgtgtgtgtgtcttttctcctcccctc

SEQ ID NO: 392599 - DNA, 201 bp, Homo sapiens
tccctcctgctgactacacacaggctctgcctaccagctgacatgctacttcaccaactgggcccagtaccggccaggcctggggcgcttcatgcctgacracatcgacccctgcctctgtacccacctgatctacgcctttgctgggaggcagaacaacgagatcaccaccatcgaatggaatgatgtgactctctacca

SEQ ID NO: 392600 - DNA, 201 bp, Homo sapiens
ggaacacaatttatttcatacatttaatttggtggacatttgggggccctatccacagaggtttacttactgaggttcccaaacaacctcttcttaaagtmtttcaagagtacaaaccctgaggacagtgttataatgcttccctctatttatcttctggtggggggaggaatgagaaaatcacacaaataaacaagagga

SEQ ID NO: 392601 - DNA, 201 bp, Homo sapiens
tgaaaaaaatagacagtctcaaaaaacaagctgacctttttatgttccttgaacctagttgtgaagggcccttgttactgggcctcatgccaaacaactcrttacaaaaacagctagagtcccagacggtgccaaagcttcatgaaacctctcctcgtctgtgcacgaacaggtggccaactctggagcccaggctgttgc

SEQ ID NO: 392602 - DNA, 201 bp, Homo sapiens
acttcttggagggtacatgtttggggagggaacacagtgtgctgggtttgccaggtatccaaagaaacaagggcaacttgggagaaagagcagagttgggsggataacagaataaagggaatgttaagataccatggctgggaagagtagtgattacaaaggaaggagaggagaaaaccaagaacatgctttactctgggc

SEQ ID NO: 392603 - DNA, 201 bp, Homo sapiens
atacagttgttttttaatgtcctagtgtttgatgtctggcttccaaatgttggaaagagaaaaataaaggaaagataagaatggtgccaaccctttacatygcccaaatgttacttcatccagaggggaagtagcttgcaacaatggggggaggtgcaagaacaatgactgcctacctctttgtctgcacctttgtaatca

SEQ ID NO: 392604 - DNA, 201 bp, Homo sapiens
cctaccagctgacatgctacttcaccaactgggcccagtaccggccaggcctggggcgcttcatgcctgacaacatcgacccctgcctctgtacccacctsatctacgcctttgctgggaggcagaacaacgagatcaccaccatcgaatggaatgatgtgactctctaccaagctttcaatggcctgaaaaataagtagg

SEQ ID NO: 392605 - DNA, 201 bp, Homo sapiens
tagactccacctctgggggcagggcatagctgaacaaaaggcagcagaaacttccgcagacttaaacattcctgtctgacagctctgaagagagcagtggwtctcccagcacagtgtttgagcactgagaatgaacagactgcctcctcaagtgggtccctgacccctgtgtagcctaactcggagacacatcccagtagg

SEQ ID NO: 392606 - DNA, 201 bp, Homo sapiens
ccatattcccgccaactgcattcctggtattgtcacaagacagcatcatataagcaatacagaaaatatgtgctagagtacataaagtaaatcaaaagaasgagagagcattaagatagaaaagatctgagttggactttgaagaactgctaagattgggataggcagtgaggataaggagacactgcaggcaagacatta

SEQ ID NO: 392607 - DNA, 201 bp, Homo sapiens
gactgacacctcatacaggtgggacgaagcttccagaggaaggatcaggcagcaatatttgctgttctataatatttgctgttccgcagcctccactggtratacccaggcaaacagggtctggagtggacctccagcaaactccaacagacctgcagctgagggacctgactgttagaaggaaaactaacaaacaaaagg

SEQ ID NO: 392608 - DNA, 201 bp, Homo sapiens
catcattgagtacagtgatcagttggtgatttcagtaagtacatcttccatagatagtaaacttcggactcagcattcaggaacatttatttgtgacaagraaggtgtgagacgaaggtaccacggtcatttttgataaaggtggggaaaggtagatctactgttgtattcactgaaaagcctttggaatcaccaccaaat

SEQ ID NO: 392609 - DNA, 201 bp, Homo sapiens
aaataaaaacctgtaactagaaattgagcaaaaccccaactggagacatgaaagaagaaaaatttgaaacatgtttttctttaatgggagtaacatttaawagatttgaatctcttgacttttgaaagatctgtaccttcctgaaaaatggagccactcagggatgggatgcccctcaggaagtgccttatgcctatcagg

SEQ ID NO: 392610 - DNA, 201 bp, Homo sapiens
taaacacagctgcttaaagtgtttaaatagcattcatttacataatccaaatgaatagcatttaacaatgcataatatcccttcacacaacagactacctyttaaatgtaatttatattagcacacaggtaataaaataaatatacctctcatattactgtgggttcccaaaatcatttgacaagcaacttgatcctcttt

SEQ ID NO: 392611 - DNA, 201 bp, Homo sapiens
acagatacaggtggattaatctctagtattgaatgggaacctatcatctagctgttaccaccttccttattggccaatacaccattttatttgatgggatktcagtcctataaagtagttcatctactttatgaaacaaatttctatactgctggatgtagggtatcactgcaactagagcttcaaagtatagagatacaa

SEQ ID NO: 392612 - DNA, 201 bp, Homo sapiens
gaacatactctggcgcaccctaatagtgcaattataagaactaaacccagtactccaaatgagattacagtcgcacagatacaggtggattaatctctagkattgaatgggaacctatcatctagctgttaccaccttccttattggccaatacaccattttatttgatgggatgtcagtcctataaagtagttcatctac

SEQ ID NO: 392613 - DNA, 201 bp, Homo sapiens
gaggatgtacataaacaaatatatgaattaaatatattgctacaccagaacctcattattaagtggaacacaatttatttcatacatttaatttggtggayatttgggggccctatccacagaggtttacttactgaggttcccaaacaacctcttcttaaagtatttcaagagtacaaaccctgaggacagtgttataat

SEQ ID NO: 392614 - DNA, 201 bp, Homo sapiens
gcaaccagggcaagtttcccctaatctccaccctgaagaaggccctcggcctgcagagtgcaagtaagtgactgagggggaatgcccaggtgtataaataycccttctccaactcaaaaagcaaccctgatgtcttcccacctcccccttgcccagggatcctctttccacttcacctcaccgctcttgcccagatgagag

SEQ ID NO: 392615 - DNA, 201 bp, Homo sapiens
ctggagttcaggacaaaaaagcttgatatacttggtttttagacttactgtctcccaagacagattgtttgctattccattctatgtaacagatcgtcacycagcctctgaatagtttcaatgttaagtaataggtgaaaagtcaatttacttacttgttgaattgccctaatgatcataaaggaatatctctttcttggc

SEQ ID NO: 392616 - DNA, 201 bp, Homo sapiens
gtaaatacaggaagaagtgtagatttgaaagaagaagaattgaccttgaacttgatgagtatgaggtatctgtagagcatcctaacagagtgcccagtagscatcagataaatatcaatctggagttcaggacaaaaaagcttgatatacttggtttttagacttactgtctcccaagacagattgtttgctattccattc

SEQ ID NO: 392617 - DNA, 201 bp, Homo sapiens
tattaactaagatggtaaatacaggaagaagtgtagatttgaaagaagaagaattgaccttgaacttgatgagtatgaggtatctgtagagcatcctaacrgagtgcccagtaggcatcagataaatatcaatctggagttcaggacaaaaaagcttgatatacttggtttttagacttactgtctcccaagacagattgt

SEQ ID NO: 392618 - DNA, 201 bp, Homo sapiens; identical to SEQ ID NO: 86059

SEQ ID NO: 392619 - DNA, 201 bp, Homo sapiens
aataatatgaacaatgtcaatgcattgtgataaatgccatgttagaggtctgcagagtacaaaagtaacaaggaaagagggtaactaattctgctctgggkcaggatcagaaagtgtttcctagagaaagtgatgcttgggctcagtcttgaaagaaactggtgttaaccaattaagtgaggatgggaatggcacaaatga

SEQ ID NO: 392620 - DNA, 201 bp, Homo sapiens
ctggaggcgccatggtctgggccattgatctggatgacttcactggcactttctgcaaccagggcaagtttcccctaatctccaccctgaagaaggccctyggcctgcagagtgcaagtaagtgactgagggggaatgcccaggtgtataaataccccttctccaactcaaaaagcaaccctgatgtcttcccacctcccc

SEQ ID NO: 392621 - DNA, 201 bp, Homo sapiens
aaactctcctggccattggaggctggaacttcgggactgccccgtaagtcttctatggagagcatgttgttcgtttgctatggaaaacaagttagccccaygtgatcactgtccctttagacttcacaatctaagacagggtattgaggatgtacataaacaaatatatgaattaaatatattgctacaccagaacctcat

SEQ ID NO: 392622 - DNA, 201 bp, Homo sapiens
atggagggagtcctgacttttgaagtttatctgtttctatcctttgttttacaggaacagccagctgaaaactctcctggccattggaggctggaacttcrggactgccccgtaagtcttctatggagagcatgttgttcgtttgctatggaaaacaagttagccccatgtgatcactgtccctttagacttcacaatcta

SEQ ID NO: 392623 - DNA, 201 bp, Homo sapiens
aacactgcatgttctcactcataagatggagttggaacaatgagaacacatggacaccgggaagggaacaagaaacactggagccagctgaggggttgggrgcaagggggggagagcattaggacaaatacctaatgcatgtggggattaaaacctagatgacgggttgataggtgcagcaaaccatcatggcacacgtat

SEQ ID NO: 392624 - DNA, 201 bp, Homo sapiens
atctaccaagcaaatggaaagcaaaaaaaaaaaaaaaaaaaaacaagcaggggttgtaatcctagtctctgatgaaacagactttaaaccagcaaaaatcraaagagacaaagaaggccattacataatggtaaagggatcaattcaacaggaagagctaactatcctaaatatatatgcacccaatacagaagcactcag

SEQ ID NO: 392625 - DNA, 201 bp, Homo sapiens
cagaaaactaaacactgcatgttctcactcataagatggagttggaacaatgagaacacatggacaccgggaagggaacaagaaacactggagccagctgrggggttgggggcaagggggggagagcattaggacaaatacctaatgcatgtggggattaaaacctagatgacgggttgataggtgcagcaaaccatcatg

SEQ ID NO: 392626 - DNA, 201 bp, Homo sapiens
gagggctaatattcaacattcttaaataaaagaattttcaacccagaatttcatatccagtcaaactaagcttcataagtgaaggagaaataaaatccttyacagacaagcaaatgctgagagattttgtcaccaccaggcctgccttacaagagctcctgaaggaagcactaaacatagaaaggaacaactggtaccagc

SEQ ID NO: 392627 - DNA, 201 bp, Homo sapiens
tggttattgcagcactatttacaatagcaaagacatggaaccaactcaaatgcccatcaatgatagactggataaagaaaatgtggtacatatacatcacrgaatactatgcagccataaacaggaatgagatcatgtctttgcagggacatggatgaagctggaagctatcatcctcagcaaactaacacagaaacagaa

SEQ ID NO: 392628 - DNA, 201 bp, Homo sapiens
attgtgtgtgtgtcttttctcctcccctcacacatctctcacacagatcattttatacccaaagggatataaatcattctactataaagacacatgcacaygtatggttattgcagcactatttacaatagcaaagacatggaaccaactcaaatgcccatcaatgatagactggataaagaaaatgtggtacatatacat

SEQ ID NO: 392629 - DNA, 201 bp, Homo sapiens
aatttttataaaggaagttttcagtaggggaggaaaattgttctacaaaaggcaaaacaaaaatatctgaccagatccaatactaaagcaatgtattttaratggagggagtcctgacttttgaagtttatctgtttctatcctttgttttacaggaacagccagctgaaaactctcctggccattggaggctggaacttc

SEQ ID NO: 392630 - DNA, 201 bp, Homo sapiens
ttttataacagaactgaagtcctatatttaaatcaatgcaatattcatcccctatacttacactacagcttatccaatattcatttctttaattatcttgttgtttgttttgtttttgtttgccaagaaggacttggagtatcttccattttcttgcatgtatgaaagtgcctgactgttgcctttatacttgattggtaa

SEQ ID NO: 392631 - DNA, 201 bp, Homo sapiens
tttataacagaactgaagtcctatatttaaatcaatgcaatattcatcccctatacttacactacagcttatccaatattcatttctttaattatcttgttgtttgttttgtttttgtttgccaagaaggacttggagtatcttccattttcttgcatgtatgaaagtgcctgactgttgcctttatacttgattggtaac

SEQ ID NO: 392632 - DNA, 201 bp, Homo sapiens
ctcccgggttccagcaattctcctgccttagcctcccaagtagctgagattacaggcacctgccaccacacccagctaatttttgtatttttagtagagayggggtttcaccatgttgacccagctggtctcaaactcctgacctcaggtgatccacccgccttggcctcccaaagtgctgggattacaggtgtgagccac

SEQ ID NO: 392633 - DNA, 201 bp, Homo sapiens
tcagtgcaaatctgcccttgaacctttctagtaagttttccatttcagttatattactttttagctccagaatttattttctgtttttgtccaaatttttwaaaatcttattattgaaatttacattttgttcatacatcattttcttcattctctacatcctttttttagagcatattcaagacagttgttctaaagtct

SEQ ID NO: 392634 - DNA, 201 bp, Homo sapiens
agtttctgatgagagatctgctgataattttattgaagatcccttgtatgtggccagttgcttctcttttgatgatttcaagactctctttgcctttgtcytttaaaatttgattatattgtgtcttgcgtggatttctttgagttcatcttacttggagttcgctgagttcttggatgtctatatacatgtctttcatca

SEQ ID NO: 392635 - DNA, 201 bp, Homo sapiens
ttcatcctataggactcccttgagtatttcctgcaggacaggtctattggtaacaaactacatcagcttttgtttatctagaaatgtctcatgttatcccytgttttgaaggatagttttgccagaaaaaagatttttggttgacactttttttcttttagaactttgaatctatctgccaactgccttctggcctctaaa

SEQ ID NO: 392636 - DNA, 201 bp, Homo sapiens
  misc_feature (1)...(201): n = A,T,C or G
aaaggcaaaacaaaaatatctgaccagatccaatactaaagcaatgtattttaaatggagggagtcctgacttttgaagtttatctgtttctatcctttgntttacaggaacagccagctgaaaactctcctggccattggaggctggaacttcgggactgccccgtaagtcttctatggagagcatgttgttcgtttgct

SEQ ID NO: 392637 - DNA, 201 bp, Homo sapiens
tggatcatgtgttttaattgattctgccaatctcagtattttgattgaagcattaatatatttatatttagagtaattactgataaagagggaattatttmtgtcattttaattatttgtttcctatatgccttttagcttttttgtcactcatttctggcattattgtctttctttgtggttagttgattgttcgtagtg

SEQ ID NO: 392638 - DNA, 201 bp, Homo sapiens
  misc_feature (1)...(201): n = A,T,C or G
atgacaggaacaacacaaagaatttttataaaggaagttttcagtaggggaggaaaattgttctacaaaaggcaaaacaaaaatatctgaccagatccaanactaaagcaatgtattttaaatggagggagtcctgacttttgaagtttatctgtttctatcctttgttttacaggaacagccagctgaaaactctcctgg

SEQ ID NO: 392639 - DNA, 201 bp, Homo sapiens
gcggcggcggaaagtaccacccgggacagcatggtcaacgaaagtccaggtagcaatcttagcgtccctgtgaccccgataggagaatctgtcagggcagraccaagatggccgctcacaagtctcgcgagatgaaaattttgtactcttccttcaactttccttgggagatttttaaaaaaaattatcgcgagaagagtc

SEQ ID NO: 392640 - DNA, 201 bp, Homo sapiens
aatggtcatacagcctaagtatcatggccatcttttcccaccatccattcgacgttgggttcccctcaccctctgagaacccctcgtccaggttcccctcrccctctgagaacattggtgagatgaccaaacctgagtgcggggtctgagttcttagtgatttgctctttattgggtttctgcagctttccgtcatgggaa

SEQ ID NO: 392641 - DNA, 201 bp, Homo sapiens
atgtgggaggaaatagaatgggtaggtacaatcacttaagttctgcctctcgaagataaaactttaattttgtggacacttagagaaagtaaggggtgggrgagcttgaggtgagtaggaatttgcatagcccttttcttcctggacttaagaatgatggagaaaaaactcagtgaaagagataaggaagcaaatgtgtgg

SEQ ID NO: 392642 - DNA, 201 bp, Homo sapiens
atcccattatccacccccacccccgggtggaacggtagaatggagacttggggtaccgtagggttgagctcaatatctaacgtcctatactcagtgcttgraggagcctgagagtgttggccccgaatgcaaactcttgtgtaggtgggaaataccttttctaaaattctaaattgtctggtgagatttcctagaaaaatc

SEQ ID NO: 392643 - DNA, 201 bp, Homo sapiens
aagacatctggtgggtccctgttctcattgctcctgtctctaagcctcctgtgggtgcctttcctatcctgttaacctcattaggtaacattttgggcttrttctaagaatccagtgacttattttagcatgtctataaggtttccttagggattttgcagtccatcgtaagtagaccatagcagcagtccaagaggcaaa

SEQ ID NO: 392644 - DNA, 201 bp, Homo sapiens
ccagttcctgggtgggtgatttactttattagatggtaggacaaaggggccagaattgttatcgtcatgattcgtgcctgaaacttgcctgtgactcgtgyccagaaagggcaggaggctgctgggataaatggttatgaggctcaaggatgaggacactgctgccttagcagggtttgggaaatcaaataaaggtgctcc

SEQ ID NO: 392645 - DNA, 201 bp, Homo sapiens
aatggagacttggggtaccgtagggttgagctcaatatctaacgtcctatactcagtgcttggaggagcctgagagtgttggccccgaatgcaaactcttktgtaggtgggaaataccttttctaaaattctaaattgtctggtgagatttcctagaaaaatccgtaacaaaattaagcaacggattggaaccatttttct

SEQ ID NO: 392646 - DNA, 201 bp, Homo sapiens
gtctcgcgagatgaaaattttgtactcttccttcaactttccttgggagatttttaaaaaaaattatcgcgagaagagtcaagtaacgctgagagcctatygcatgagggcgacagccggaaagcaggatggagccatagaagcaattctcgcgagaagtagagttgcggttccctcgggagaggggcggaggctcagagg

SEQ ID NO: 392647 - DNA, 201 bp, Homo sapiens
ctgaactctccaatgatgtggactttgcttttacaggaataactaacttactttgttaatttagtgacaatggctctttgaatcctagaagtgaattactrccttggtataatccaagctcatgttttccttaccctacccccaacaggtgctgttgaattgtgggaactagatgagaatgagacacttattgtcagcaag

SEQ ID NO: 392648 - DNA, 201 bp, Homo sapiens
tgatttactttattagatggtaggacaaaggggccagaattgttatcgtcatgattcgtgcctgaaacttgcctgtgactcgtgtccagaaagggcaggakgctgctgggataaatggttatgaggctcaaggatgaggacactgctgccttagcagggtttgggaaatcaaataaaggtgctcccaggatttagagtgat

SEQ ID NO: 392649 - DNA, 201 bp, Homo sapiens; identical to SEQ ID NO: 86085

SEQ ID NO: 392650 - DNA, 201 bp, Homo sapiens; identical to SEQ ID NO: 86086

SEQ ID NO: 392651 - DNA, 201 bp, Homo sapiens; identical to SEQ ID NO: 86087

SEQ ID NO: 392652 - DNA, 201 bp, Homo sapiens
  misc_feature (1)...(201): n = A,T,C or G
tcaaagactcagaaattagctgaactctccaatgatgtggactttgcttttacaggaataactaacttactttgttaatttagtgacaatggctctttgantcctagaagtgaattactgccttggtataatccaagctcatgttttccttaccctacccccaacaggtgctgttgaattgtgggaactagatgagaatga

SEQ ID NO: 392653 - DNA, 201 bp, Homo sapiens; identical to SEQ ID NO: 86088

SEQ ID NO: 392654 - DNA, 201 bp, Homo sapiens
  misc_feature (1)...(201): n = A,T,C or G
tgagctcagctgtacactcccagtgtgtcactgggctggtgttctccccacacaggtactgttctttgtcatcaggggcctgatgggtataaatgggaacngtgagggtgtgtgtgtatgttttcaaagcattagctgatgaagtagttccttaaagcagacagtgttctagctgaggtttcggaacatcgaagatctctt

SEQ ID NO: 392655 - DNA, 201 bp, Homo sapiens; identical to SEQ ID NO: 86089

SEQ ID NO: 392656 - DNA, 201 bp, Homo sapiens
ataaatgtatatgtttcagtgaacaaagaagatagtttaaaataaaagatgaccacagaataattagaaatggtactgtcacatatggagtgatttgctasgtccttcacttgaggatagttctagtagagtgagtgcagagctgatgacaagttgaaatgagatcaatctatttgtttaaaaatatacaaatattttgca

SEQ ID NO: 392657 - DNA, 201 bp, Homo sapiens; identical to SEQ ID NO: 86091

SEQ ID NO: 392658 - DNA, 201 bp, Homo sapiens
cgataggagaatctgtcagggcaggaccaagatggccgctcacaagtctcgcgagatgaaaattttgtactcttccttcaactttccttgggagatttttwaaaaaaattatcgcgagaagagtcaagtaacgctgagagcctatcgcatgagggcgacagccggaaagcaggatggagccatagaagcaattctcgcgag

SEQ ID NO: 392659 - DNA, 201 bp, Homo sapiens
gtaattcacatctatcagtgaccaccaccaagatatttataaaccttatcaaatacagtaggaagagcaaccagcacaattttggataaatgtatatgttkcagtgaacaaagaagatagtttaaaataaaagatgaccacagaataattagaaatggtactgtcacatatggagtgatttgctaggtccttcacttgagg

SEQ ID NO: 392660 - DNA, 201 bp, Homo sapiens; identical to SEQ ID NO: 86092

SEQ ID NO: 392661 - DNA, 201 bp, Homo sapiens; identical to SEQ ID NO: 86099

SEQ ID NO: 392662 - DNA, 201 bp, Homo sapiens
gtctcttcccatttcttaccgctttcttgtcttcattctgctttctttttgttgactgttaggcttagcgatgcaggctttggctttttttttttttaaaatcagaatttggaagttggccggcattgcatggaagtttaaagtcccagtttttgatagatttaacctctctgacagttgagcttgaacactacataatca

SEQ ID NO: 392663 - DNA, 201 bp, Homo sapiens
cttcaacattctagtgggggtatgggaagggtgagtgtgtatctccatacaaaatttcaggcagctctaagtgctatggagaaaaactgagcaaggtaagsggatagggagcaacaaaatggggaagagttttttggtagggagtcagatgacatttgacccaatcatctggggaaaagagagaagagcaagtagaaagat

SEQ ID NO: 392664 - DNA, 201 bp, Homo sapiens
cgatgcaggctttggctttttttttttttaaaatcagaatttggaagttggccggcattgcatggaagtttaaagtcccagtttttgatagatttaacctytctgacagttgagcttgaacactacataatcaagacaacttttggcggattctctatacttaaccagtcactgtgcaagacgttcaattattcaacatat

SEQ ID NO: 392665 - DNA, 201 bp, Homo sapiens
tgttctataaactggcagcatttgcatatcttggaacttgcttgaaatacagaatgtccagatctactgagtcagaatttacattttcaaaagcttcctasgtgactcatgcatattaaagtttgggaagcactgacttagattaccttttgagaattccagatgggtcagaaaccagacagaaatactcagtagtgagaa

SEQ ID NO: 392666 - DNA, 201 bp, Homo sapiens
tctaagtgctatggagaaaaactgagcaaggtaagcggatagggagcaacaaaatggggaagagttttttggtagggagtcagatgacatttgacccaatsatctggggaaaagagagaagagcaagtagaaagatattgaggcaagaatgcgcttggtagttttcagaggaacaccaaggttggagaatgagctaaaaag

SEQ ID NO: 392667 - DNA, 201 bp, Homo sapiens
aaagggaggaaagaatagaacaaggagtttaatctgtaactgactgaacaatcaactgagataactcactaccttcagaccagccagtttccctgtttctrttgatggcctcaccaccttggcaacacagggctcaaactcggtccttttccacctcttctgttttcccaccatcggttggccactaagttctttttagtc

SEQ ID NO: 392668 - DNA, 201 bp, Homo sapiens; identical to SEQ ID NO: 86094

SEQ ID NO: 392669 - DNA, 201 bp, Homo sapiens
aaactttaattttgtggacacttagagaaagtaaggggtgggggagcttgaggtgagtaggaatttgcatagcccttttcttcctggacttaagaatgatrgagaaaaaactcagtgaaagagataaggaagcaaatgtgtggaaatgtgtgataaggaaggaaatgtgtcaaggtggttacaatatggaagggaagcata

SEQ ID NO: 392670 - DNA, 201 bp, Homo sapiens
ggatcaattactgattatattgaaagtaaatataatcaattatgtacttttgagctttgcaggttcaatttaggtaaaaatcacattatgaaactgggaawgtctgaaggaatatgggcaaaatatttctcagtaaagcttccatgcttcacccttgacatgattacccttgagtaaaacatgggaatttgtagttgtgtg

SEQ ID NO: 392671 - DNA, 201 bp, Homo sapiens
aggcagttcaattttaagaaagagaacattagagaaattggctctcttaatactattagcgcccagaactccctcaaaagtttttgtatactacttggagktgtgtgtactccagtatgaagactgctattctagaattatttagccctcacgtctaggatgcctaaactggaaattcctttgttattcttactaagcccc

SEQ ID NO: 392672 - DNA, 201 bp, Homo sapiens; identical to SEQ ID NO: 86096

SEQ ID NO: 392673 - DNA, 201 bp, Homo sapiens
catgtctcttcccatttcttaccgctttcttgtcttcattctgctttctttttgttgactgttaggcttagcgatgcaggctttggctttttttttttttwaaatcagaatttggaagttggccggcattgcatggaagtttaaagtcccagtttttgatagatttaacctctctgacagttgagcttgaacactacataa

SEQ ID NO: 392674 - DNA, 201 bp, Homo sapiens
ctattagcgcccagaactccctcaaaagtttttgtatactacttggaggtgtgtgtactccagtatgaagactgctattctagaattatttagccctcacrtctaggatgcctaaactggaaattcctttgttattcttactaagcccctaatttctcattcattatcttcactaatacgttttttttttacaaggctttt

SEQ ID NO: 392675 - DNA, 201 bp, Homo sapiens
tccttgccgtgatttgctgcctgttactgcccctcatcactgtcttgttctatccagcatttcttcatctatgaaaatagaagactggattggatgactgrtgacatccactgtggatagctacactgctatcctggcgatgaggccatacagttggtgaaatgtgtgtaacacacccaaaaaatgtgccccagatgtgtt

SEQ ID NO: 392676 - DNA, 201 bp, Homo sapiens; identical to SEQ ID NO: 86097

SEQ ID NO: 392677 - DNA, 201 bp, Homo sapiens
gagatcgagtggttcagggccggcagtgccctctacagaacgaaggagcagcagcaatgagtgcggcgcctccccagcaaccccccctccccctcttcccscctcccccagctggtgtcatgttcaagttcggctctacatgcatcataagcggatccgatccatccagccatggcttcttattccaagatggcataacca

SEQ ID NO: 392678 - DNA, 201 bp, Homo sapiens; identical to SEQ ID NO: 86104

SEQ ID NO: 392679 - DNA, 201 bp, Homo sapiens; identical to SEQ ID NO: 86110

SEQ ID NO: 392680 - DNA, 201 bp, Homo sapiens; identical to SEQ ID NO: 86107

SEQ ID NO: 392681 - DNA, 201 bp, Homo sapiens
ggttacatctgacataaattgtgaagaagaagagaatctcccctatcagcccattattttctgtaagaacaagcctagttaaacccccctccccaaaaggrccagggttctcttcaggtactcctgctgtgagacaagaatggcagaatgactcccatgccctgacagttggaagagatcaagctcccaaggcgccgtctg

SEQ ID NO: 392682 - DNA, 201 bp, Homo sapiens; identical to SEQ ID NO: 86108

SEQ ID NO: 392683 - DNA, 201 bp, Homo sapiens
cctagttaaacccccctccccaaaagggccagggttctcttcaggtactcctgctgtgagacaagaatggcagaatgactcccatgccctgacagttggamgagatcaagctcccaaggcgccgtctgctttcatgggtttggcctgccagggaagagctcagcaaatccagctgaaagaggtgatgaagtcagagtgagt

SEQ ID NO: 392684 - DNA, 201 bp, Homo sapiens
tatgatctagaatttctcctcccaggtatttccctaataaaaagaaacaaaacatatgttcatagaaacatttgtataaaaacacttatagctttatcgaycagaacttgaaatagtcaagatgtccatcaataagaggataaacacattgcagtatattgatataatggaatactattcaacaataaaaagaatgaaata

SEQ ID NO: 392685 - DNA, 201 bp, Homo sapiens; identical to SEQ ID NO: 86111

SEQ ID NO: 392686 - DNA, 201 bp, Homo sapiens
ggccatactacctcccttaggattcttttattcatctgaaagataaagataagggtgtatggttataatacacacccaataaatatctattgaattaggamtattggactatatatttctaagaaacatttcaggatggttttttcttttcttgttgccataaaggtatctagaattgatatgagagggaaaaatgccctc

SEQ ID NO: 392687 - DNA, 201 bp, Homo sapiens
atgtatcaaaaaataaggtagatgaatagaagatggataaatgcatagaaatataataaagcagggaaggaaaatcttaatgatagagtctaggttaggawtctactgtaaaatttttttaacttttctgtatgtctgaaaaattacataataaaatgttggaaacaattatgctgaccctatgaagctggacacaaaaga

SEQ ID NO: 392688 - DNA, 201 bp, Homo sapiens
taaacaattgcttccaatttatagcctagatgagattgaaattcttttggaaatgtgtaaattaataaaagtaactaaagagaaaatagaaaacctcaaargcctatatctaccgagaatattgaatgaataatttaaaaccttcccccaaagaaaactccaggcctagagggcttcaatggtaaattctaatacatattt

SEQ ID NO: 392689 - DNA, 201 bp, Homo sapiens; identical to SEQ ID NO: 86106

SEQ ID NO: 392690 - DNA, 201 bp, Homo sapiens
tatcatggtatattgggtctgctggaaccaccttaagaacaagatattaaataatataaatattataaacaattgcttccaatttatagcctagatgagaytgaaattcttttggaaatgtgtaaattaataaaagtaactaaagagaaaatagaaaacctcaaaggcctatatctaccgagaatattgaatgaataattt

SEQ ID NO: 392691 - DNA, 201 bp, Homo sapiens
aattatatttaaaacggaaccaagtattcaaaactcataactttctagttattttactacatttcactattacgtatgcttttgaggatatttatgttaaytgtgtctgtgtggtaaaaatactagaaaatggtatgctactgcacatcacttctcactgataccatgttggtattttaaagtaggccatagtgaaagtat

SEQ ID NO: 392692 - DNA, 201 bp, Homo sapiens
atctttcagagagtatagggttacatctgacataaattgtgaagaagaagagaatctcccctatcagcccattattttctgtaagaacaagcctagttaamcccccctccccaaaagggccagggttctcttcaggtactcctgctgtgagacaagaatggcagaatgactcccatgccctgacagttggaagagatcaag

SEQ ID NO: 392693 - DNA, 201 bp, Homo sapiens
ttataaatgagacattgagacacagaatctatgctgtcctggtgatggctcacactgagttgcaagagccaaagcaagctgacggagttttagaaattttrtgggttggttgttaagtgcagctcttgttacaaattaagttatataaactttcaattaaatgaattatatttaaaacggaaccaagtattcaaaactcat

SEQ ID NO: 392694 - DNA, 201 bp, Homo sapiens
aatggagatgatacttgtgcctgcctcatccaattttgtgaagaacaaatgactgaatctatgtaaagtgtttagaaaaatgcctggtaccacgtgcacgygcctatttattgcggcactattcacaatagcaaagatttggaaccaacccaaaggcccatcagtgatagactggataaagaaaatgtgtcacatatatac

SEQ ID NO: 392695 - DNA, 201 bp, Homo sapiens
tttcttataaaactaaccacacacgtactctatgatctagaatttctcctcccaggtatttccctaataaaaagaaacaaaacatatgttcatagaaacayttgtataaaaacacttatagctttatcgatcagaacttgaaatagtcaagatgtccatcaataagaggataaacacattgcagtatattgatataatgga

SEQ ID NO: 392696 - DNA, 201 bp, Homo sapiens
aatcagggcttgtacctgcctatagctgtcctcaaaaagttcagggagatgaggcgggatacagtctgaatcatgggaaggaacggtcctctgcctgactracaggaagtacaaagatgaaaacagaggaggtgttgagctgtcctgatggctcaagggttgccttggggcagtccaactgacacctccttccttttcctc

SEQ ID NO: 392697 - DNA, 201 bp, Homo sapiens
actgtgttagccaggatggtctcgatctcctgaccttgtgatccgcccgcctcggcctcccaaagtgctgtaattacaggtgtgagccaccgcgcccggcmtttttttttttttttttttttttttttgagacagggtctcgctctttcacccagtctggagtgtagtggcacaatcacagctcactgcagcttcaacctc

SEQ ID NO: 392698 - DNA, 201 bp, Homo sapiens
caagcaattctctgcctcagcctcccgagtagctgggattactggcactcgcaaccatacccggctaattttttgtatttttagtagagacggggtttcaycatattggccaggctggtcttgaactcctgacctcgtgatccacctgccttggcctcccaaagtgctgggattacaggcgtgagccactgcgcccggccc

SEQ ID NO: 392699 - DNA, 201 bp, Homo sapiens
ccccaccccactgcccctgtaaggacaggttctcgctatattgcccaggccagtcttgaacacctgacttcaagcaatcctcttgcctctgcctccccacrtgctgcagttacaggcgcgagccaccatgccagcctgaatgtttgttgttgttgttgtttgagatggagtctcacccaggctggagtgcagtggcgcgat

SEQ ID NO: 392700 - DNA, 201 bp, Homo sapiens
cgatttcagccttgtactccttgtatttcagagcttgtactcctgatctaactcgaatttgcctctgaagataaggaataatataggttggagtcttaacagaacccttttctaacagtgagactgagggtgcctcatctaatctccctaagccacgttttccccatctgtaaaagagtatttcaacagcagggttttctt

SEQ ID NO: 392701 - DNA, 201 bp, Homo sapiens
aggagaggacagggagcaggcagaagtctgaaaaccacgcctgggcccaagaatgttttcacaatgtggcctggctgcacagggaagaacagacagcttgragaagtagtgagctgcccgtctttgaaggtattcaagcagtggctagagggacacctgtctgtggtcttgcagaatcctggcgttgggcagtgactgtac

SEQ ID NO: 392702 - DNA, 201 bp, Homo sapiens
gaggcaagcagtcagcagaggattccagcaggtgacattttagggagctggagacagcagagcctggggttgctaagttcctgatgttgcccaccaggctwttgctctgagcagcgctgcctcccagctttctggaaccttctgggacgcctggggtgcatcaagtcccaaggggacagggagcagaagggggggctctgg

SEQ ID NO: 392703 - DNA, 201 bp, Homo sapiens
attacaggcgtgagccaccatgcctggccctttttttctttttttttctttttttgagatggagtctctctgtcaccaagtctggagtgcagtggtgtgawctcagctcactgcaacctctgcctccgggattcaagcaattacaggcataattgctgggattacaggcacctgccaccatgcccggctaatttttgtatt

SEQ ID NO: 392704 - DNA, 201 bp, Homo sapiens
ccaggccagtcttgaacacctgacttcaagcaatcctcttgcctctgcctccccacatgctgcagttacaggcgcgagccaccatgccagcctgaatgttygttgttgttgttgtttgagatggagtctcacccaggctggagtgcagtggcgcgatctcagctcactgcaacctctgcctcccgggttcaagcaattatc

SEQ ID NO: 392705 - DNA, 201 bp, Homo sapiens
agtcaacgcctgcctcctctcgagcgtcctcagcgcagccgccgcccgcggagccagcacgaacgagcccagcaccggccggatggagcgtccgcaacccsacaggcaagcgcggggcgcgggacgcgggacgggcgcctttctctcccaaccctgcttgcgtcctagccccaccccgggacactgccacacagcgacaga

SEQ ID NO: 392706 - DNA, 201 bp, Homo sapiens
aagggggggctctggaaggagcaaaatcacacccagagcctgcagcttctcagatttccttaaaggttttgtgtgtgtgtgtgtgtgtgtgtgtgtgtgtatgtgtgtgtgtgtgtgtgtgtgtgtgtgttttctctaaaagtcctatggccagactttgtttcccaagggtcatatgactgctcctctccaccccacact

SEQ ID NO: 392707 - DNA, 201 bp, Homo sapiens
tgttggccaggctgggctcaaactcctggcctcaggtgatctgcccgcctcagcctcccaaagtgctaggattacaggcgtgagccaccatgcctggccctttttttctttttttttctttttttgagatggagtctctctgtcaccaagtctggagtgcagtggtgtgatctcagctcactgcaacctctgcctccggga

SEQ ID NO: 392708 - DNA, 201 bp, Homo sapiens
ctcaacggggtctgtgaggacaaagcatttttataacactactactatttttttggttttttttttttcgtttgagacagtcttgctgtcacccaggctgragtgcagtggcatgatctcggctcactgcaagctccgcctcccaggttcacgccattctcctgcctcagcctcccgagtagctgggactacaggtgcccg

SEQ ID NO: 392709 - DNA, 201 bp, Homo sapiens
tctctggggctctgccagcctgggggagcatgcttggttctcttggtggcatctgtccctcactagctacggaggacctgagccagacatcaccctggctrcggtgttccatgtctcacagatagcccagttcagggaggcgacatgcccaagagtgctcagttagctggtgtcagaactgggccttgaaccttggtctgc

SEQ ID NO: 392710 - DNA, 201 bp, Homo sapiens
ttccatgttgggcattttgtacacgtggtttctaatctgtgcttcaaccctgacgagaaagatgaggactggaaggctcagagaggttcagtgactaacaraaggtcacacagccagtaagtggaaaaggctgaaatcaaccaagaccgatttcagccttgtactccttgtatttcagagcttgtactcctgatctaactc

SEQ ID NO: 392711 - DNA, 201 bp, Homo sapiens
tttttttttttaactcctgggcttaagcatcctcccacctcagcctccagagtagctgggacttacagacatgtgccatttctcctgagactttgaccagytgtgttgtagaacagggaagcagggcaggagaaaagggaaaaatgacaattctgtggggaggcagggatacggacccatgacagaaatactcccagaaag

SEQ ID NO: 392712 - DNA, 201 bp, Homo sapiens
actggaaggctcagagaggttcagtgactaacagaaggtcacacagccagtaagtggaaaaggctgaaatcaaccaagaccgatttcagccttgtactccktgtatttcagagcttgtactcctgatctaactcgaatttgcctctgaagataaggaataatataggttggagtcttaacagaacccttttctaacagtga

SEQ ID NO: 392713 - DNA, 201 bp, Homo sapiens
aacccgacaggcaagcgcggggcgcgggacgcgggacgggcgcctttctctcccaaccctgcttgcgtcctagccccaccccgggacactgccacacagcracagagcccaggagccagaaacttgggctctggagtcaggaggtgcggggttctgatcctgcctgtgcccgtagggtagttggagggaggaacggtaatt

SEQ ID NO: 392714 - DNA, 201 bp, Homo sapiens
cgcccacctgttaatgaccttgccccattttctctttcagattctgcccccgtggagactcccagagggaagcccccactcaacacccgctcccaggctcygcttctccgatgggtccttacactcagctttctggtggcgacagttgctgtagggctttatgccatgtgaatgcaggcatgctggctcccagggccatga

SEQ ID NO: 392715 - DNA, 201 bp, Homo sapiens
aagcagggcaggagaaaagggaaaaatgacaattctgtggggaggcagggatacggacccatgacagaaatactcccagaaagactttttctttgactaamgcagactttctcaggctttttaaccctgacgccttcatgatgagcataacatgatagggggtcatgagatttgcatctggaactttaacaaaataactga

SEQ ID NO: 392716 - DNA, 201 bp, Homo sapiens
gtgcctcatctaatctccctaagccacgttttccccatctgtaaaagagtatttcaacagcagggttttcttaagcacccactatatgccaggtactgatwttgctgtttcccagcactgttgtgaaattcatgcaaatagaaggaaagcacttgatgaagaaccgggaagatactgggtgttaaaacatcagcgtgggga

SEQ ID NO: 392717 - DNA, 201 bp, Homo sapiens
ctcctcctcctctccactgcgaactacctgtaccaggatttcccccttggtttgggggactgtattatttagtgttttaatgactgaagagtgtttacaargctgcgagagccaccatgcccagcctgaatttgttttttgttttttgtttttttgtttttttgcttttttgcttttctttttttgagatggagtgttgct

SEQ ID NO: 392718 - DNA, 201 bp, Homo sapiens
cctgaaggaggccaccaaggaggtgcacacccaggcagagaatgctgagttcatgaggaactttcagaagggccaggtgacccgagacggcttcaaggtaygtggcttggtgggactagccctggtggagggtgtggcaggtgtgggtggacccaaggctcagaccagtggtttaagtggggatgctgagggaccagatgg

SEQ ID NO: 392719 - DNA, 201 bp, Homo sapiens
cgcgatctcggctcactgcaacctctgcctcctgggttcaagcgattctcctgcctcagcctcccaagtagttgggattacaggcgcccactaccatgccyggctatttttttttttttttttgtatttttagtagagatagggtttcaccatgttggccaggctgggctcaaactcctggcctcaggtgatctgcccgcc

SEQ ID NO: 392720 - DNA, 201 bp, Homo sapiens
ccttccccaacattgccagtgccaccaagttcaagcagctctaccgctcccgcatgaactccctggagatgactcccgcagtcaggcagagggtgatagargaggccaagactgcgttcctgctcaacatccaggtgagggtcgggcagcctggggcagcctctgcctccccccgttgttcctccaagggacccttctcat

SEQ ID NO: 392721 - DNA, 201 bp, Homo sapiens
gaagggggggctctggaaggagcaaaatcacacccagagcctgcagcttctcagatttccttaaaggttttgtgtgtgtgtgtgtgtgtgtgtgtgtgtgtatgtgtgtgtgtgtgtgtgtgtgtgtgtgttttctctaaaagtcctatggccagactttgtttcccaagggtcatatgactgctcctctccaccccacac

SEQ ID NO: 392722 - DNA, 201 bp, Homo sapiens
tcttgggcaaatgccttcatctctctgtacctcagtttccctatctgtaaaatagggataataatggtacctatatcttagacttataaggcttgagtgartttacagcagtaaagtccccacagcagtgtctggcacagaggaagccctcaaacattcactactgtcataatgggacatgagaatcagttgtagctctct

SEQ ID NO: 392723 - DNA, 201 bp, Homo sapiens
gccctttttttctttttttttctttttttgagatggagtctctctgtcaccaagtctggagtgcagtggtgtgatctcagctcactgcaacctctgcctcsgggattcaagcaattacaggcataattgctgggattacaggcacctgccaccatgcccggctaatttttgtatttttagtagagacggggtttcaccatg

SEQ ID NO: 392724 - DNA, 201 bp, Homo sapiens
gcaacctctgcctccgggattcaagcaattacaggcataattgctgggattacaggcacctgccaccatgcccggctaatttttgtatttttagtagagayggggtttcaccatgtttgccaggctggtctcgaactcctgacctcaggtgatccacctgccttggcctcccaaagcgctgggattacaggcgtgagccac

SEQ ID NO: 392725 - DNA, 201 bp, Homo sapiens
aattcagtacttgtccctttatcttccaatattctaatctgttctcttagtttgtttaactcttcctgtaatgaggataaggctttttcttccttctccarggatactcttaaatactgattttctgtagcaaggttcgttttctgagtttcaaaggacatcttctctgcttcagtaagtgtccaacaccttgcaagattt

SEQ ID NO: 392726 - DNA, 201 bp, Homo sapiens
ttatcttgatgaagcagatgtattttacctaaatcccttaaactggttacatagagagtttcatgatgatgcatcattgcctactcacttgatcaccttcrgcattttggaagaggtaagtaaacatgaaaaagaggaaaactcagtattttaattttaccccaggtttaggaaaccctcaggtaaatagataatataacc

SEQ ID NO: 392727 - DNA, 201 bp, Homo sapiens
ttaacatcctgttcttctttttaactgatgaagatttggattcctagacttgcccaagcacttctgtctgctgtagcagatgtgagactttactcattaaygaagcaactagaaaatcaggaagtggcaagatgggtggtaagtcctaaatactttagaagctgtatgccagttatttcgttcctatgggtataaagcaca

SEQ ID NO: 392728 - DNA, 201 bp, Homo sapiens; identical to SEQ ID NO: 86123

SEQ ID NO: 392729 - DNA, 201 bp, Homo sapiens
tgctttatttcctaaatatttctcacatatattttagagatacttgattcttttacatttgtataaggctttataattcataatgtgttttcacatattayctcataattttcataatacttcagtctaggcaatatatgtttttattttgtagtagagaaaacaggaggctcgcagaaatttaaaatgtattagtcaaag

SEQ ID NO: 392730 - DNA, 201 bp, Homo sapiens
ccgtatgagcatctaatgtccagtgatctgaggtggaacagtttcatccagaaaccatgccccactcccacccccgcaacctgtttgtgggaaaactgtcwttcaagaaaccagaccctggtgccaaaaaggttagggaccgctaccttagggcccaccaattccaatcctaggtatatgtctaacagaaatgcacatata

SEQ ID NO: 392731 - DNA, 201 bp, Homo sapiens
agccaagtaaatataaattagccagtctcaggtattccagtatagcagtacaaacaaagacaaggctttaatgtagctttttgtatttgagcctactaaartagatgttgttttagcctaccaacctaagttaagtgcttcaacttatatttggggatctgctgtgtctgtgattggggttattacagatggttgaacttt

SEQ ID NO: 392732 - DNA, 201 bp, Homo sapiens
gccttggaaaattagttaacctctctgtgcctcagtttcctcatctataaaacagttcttgactcagaagattgttaggactgaatgagttgatacatataaaatagcatgatacatagtacacagtgctgcaaatatttgaatttttaaaaacctgttgttgctaatgaatataaatatacttttaaaatagaaacttgg

SEQ ID NO: 392733 - DNA, 201 bp, Homo sapiens
cccttgattaacatccaaataagtaatggctttactgtggcatagaaagactagagtaggccggcagctttttctgaggaatttctgcttccctttgaaasaagaccttcatttccaataaataaatcactattaggtcttgtgtacatttaatttttatgcatttcataaataaacctcctgcataattactaactccat

SEQ ID NO: 392734 - DNA, 201 bp, Homo sapiens
atctttaacatcattaacaaagtcagtgaagagcttctgatcatgtataaagacaccgtttaggaaaaacttattgatgaactgatcaagttcgttccagygacaaaaagtatccagttcttttaacatgtacctttgaattatctgtctaaattcatccatccttataggattcaccactgtgttaaaaaggctcatgga

SEQ ID NO: 392735 - DNA, 201 bp, Homo sapiens
acatctaacagctatttggcaagccttaagaatagctggccccatttgtcagaggaaatctgttcataaatcactattcagatgttaaatggtttctgttytgttgggtttttttacagccacttgagtgtgtattataattaaatcaagcattggcagagtacaaaggcaaatgtttttgtgtgcctggaggggacgggg

SEQ ID NO: 392736 - DNA, 201 bp, Homo sapiens
aagaaaaacattgagttaggcaatgtttgaccaagtatacatcaactcctacagatctgagatgtataatctcttcaatttaagaagataaacatacaaayataaaatcaaatattaaaaatctgtatttttgatacatctgaagttctgaaatcaaagcctcagtctgtcattactttacagtgtaaccacatacaaacg

SEQ ID NO: 392737 - DNA, 201 bp, Homo sapiens
tgtaactgactaccacttaactgctggagttccccccttaaagccgtagttactagtcgttctctctccagttctctctttagcatctttgcttctgtcarcagagtctccctttgactaagaaagctgtgttttttctgcttttcctcttccaaatgctgcttaagtttctgattttctttaactaattcagtacttgtc

SEQ ID NO: 392738 - DNA, 201 bp, Homo sapiens
ccttggaaaattagttaacctctctgtgcctcagtttcctcatctataaaacagttcttgactcagaagattgttaggactgaatgagttgatacatataaaatagcatgatacatagtacacagtgctgcaaatatttgaatttttaaaaacctgttgttgctaatgaatataaatatacttttaaaatagaaacttggc

SEQ ID NO: 392739 - DNA, 201 bp, Homo sapiens
cttggaaaattagttaacctctctgtgcctcagtttcctcatctataaaacagttcttgactcagaagattgttaggactgaatgagttgatacatataaaatagcatgatacatagtacacagtgctgcaaatatttgaatttttaaaaacctgttgttgctaatgaatataaatatacttttaaaatagaaacttggcc

SEQ ID NO: 392740 - DNA, 201 bp, Homo sapiens
ttggaaaattagttaacctctctgtgcctcagtttcctcatctataaaacagttcttgactcagaagattgttaggactgaatgagttgatacatataaaatagcatgatacatagtacacagtgctgcaaatatttgaatttttaaaaacctgttgttgctaatgaatataaatatacttttaaaatagaaacttggccg

SEQ ID NO: 392741 - DNA, 201 bp, Homo sapiens
cactctgtcgcccaggctggagtgcagtggcaccatcttggctggctgtaactgccgcctcccgggttcaagtgattctcctgcctcagcctcccgagtasctgggattacaggtgtctgccaccacacctggctaatttttgtatttttagtagagacggggtttcaccgtggccaggctggactcaaatgatctgcctg

SEQ ID NO: 392742 - DNA, 201 bp, Homo sapiens
ataatttaaaaatatatttataatatatgtgtgtgtatatatgtcatatatatgcacacatacagagaatgagactggtaaatatcatatttatatataaatatatatatttatatttataatatattttatatataacatatgtgtatatatgtcatatatacacacacatacagagaatgagactggtaaaacttaaaa

SEQ ID NO: 392743 - DNA, 201 bp, Homo sapiens
taatttaaaaatatatttataatatatgtgtgtgtatatatgtcatatatatgcacacatacagagaatgagactggtaaatatcatatttatatataaatatatatatttatatttataatatattttatatataacatatgtgtatatatgtcatatatacacacacatacagagaatgagactggtaaaacttaaaac

SEQ ID NO: 392744 - DNA, 201 bp, Homo sapiens
gtagtggcttaaaactccatttattataatttacaggtctacatttcaactgggcagttctcatctccactgagctcacttacacagctgcagattgggtrgatagctctattgacctaggctgggctctcatgtctggggttcaactagctgtaggccaagtcttctcagctcttctgagttttctcttcctccaacagg

SEQ ID NO: 392745 - DNA, 201 bp, Homo sapiens
aaatatatttataatatatgtgtgtgtatatatgtcatatatatgcacacatacagagaatgagactggtaaatatcatatttatatataaatatatatatttatatttataatatattttatatataacatatgtgtatatatgtcatatatacacacacatacagagaatgagactggtaaaacttaaaactacattga

SEQ ID NO: 392746 - DNA, 201 bp, Homo sapiens
ttcacttacttggattgaaatagaaatcccgtttttagaatgtaactgtactttgtaatttcaaattgacatcatattttatgattagttttaccatatcrtaatcaccttataactaaaaaataagatgaatttctgaagcaagaaattcagtctgaatacttagaaaataaatagatcaagttaaatatattttatatt

SEQ ID NO: 392747 - DNA, 201 bp, Homo sapiens
aatatatttataatatatgtgtgtgtatatatgtcatatatatgcacacatacagagaatgagactggtaaatatcatatttatatataaatatatatatttatatttataatatattttatatataacatatgtgtatatatgtcatatatacacacacatacagagaatgagactggtaaaacttaaaactacattgat

SEQ ID NO: 392748 - DNA, 201 bp, Homo sapiens
aatgagaattttctctacaatcatgcccaggactgcatttctttgaatttgtattttttctgaattctttaaagtgaactggcttttctttccttccatcwttttgcatagtagggcctctattatgatggttttctgtaggtgccttatactgtggatgtaaatagtcactaaaaactgttcttggtttttcagctgctt

SEQ ID NO: 392749 - DNA, 201 bp, Homo sapiens
tactacttggcactaacacatttctatttatttttccttcaacggtgccagtggactctggttcaatttaattttttgaaatttaacgtgctgcagaactkgggaacattttatggttctcatccatggcactggtacttcagtcaaggatttccagttatcttgggtactcacttacccttctttattcatggctgctat

SEQ ID NO: 392750 - DNA, 201 bp, Homo sapiens
gagttcgagaccagcctggccaacacggtgaaaccctgtctctactaaaaatacaaaaattatccaggcgtggtggcagacacctgtaatcccagctactygggaggctaaggcaggagaattgcttgaacccaggaggcagagattgtgccactgcactctaacctgggtgacagagcaagagcaagactccttctcgaa

SEQ ID NO: 392751 - DNA, 201 bp, Homo sapiens
agggcctctattatgatggttttctgtaggtgccttatactgtggatgtaaatagtcactaaaaactgttcttggtttttcagctgcttcttttgtagcaycaaatcttttattacccttttcatcaaagatattcttggtggtatctttaaagtgtctgaaagtggatttaactgaatctgagaattttttcagattttc

SEQ ID NO: 392752 - DNA, 201 bp, Homo sapiens
gcaatgcatgactgtactagtattcactagtcacaagtatttttcgggtagcaatctgaaaaggactaaattatcttgcatctcagttgctactgttgtcrtttctcagatgtattaataacattgcattaaatgtattcattcattcaggaattatttaatcctactatgtgccaggcagtgttccagatgtaggagatg

SEQ ID NO: 392753 - DNA, 201 bp, Homo sapiens
tgacttttttttcctctttcctcttttgtcttaatttttcatcagcgttccaaaacagggagacattccaaacaagtgcaacattccaaacaaggtcaacaaaaaaacagtcataatacttgtgtcagtactataagacagtttgagaaatattgattggaagaatctagttatgaatttcaatcatctgtaaactctacc

SEQ ID NO: 392754 - DNA, 201 bp, Homo sapiens
gggcctctattatgatggttttctgtaggtgccttatactgtggatgtaaatagtcactaaaaactgttcttggtttttcagctgcttcttttgtagcacyaaatcttttattacccttttcatcaaagatattcttggtggtatctttaaagtgtctgaaagtggatttaactgaatctgagaattttttcagattttcc

SEQ ID NO: 392755 - DNA, 201 bp, Homo sapiens
ttatattttttatttatgatcctgattataactattttaatttgcttaactgagtgcttttgtaattatttctaacttagtgttttccaatgctttatttsctaaatatttctcacatatattttagagatacttgattcttttacatttgtataaggctttataattcataatgtgttttcacatattacctcataattt

SEQ ID NO: 392756 - DNA, 201 bp, Homo sapiens
tttttcctctttcctcttttgtcttaatttttcatcagcgttccaaaacagggagacattccaaacaagtgcaacattccaaacaaggtcaacaaaaaaacagtcataatacttgtgtcagtactataagacagtttgagaaatattgattggaagaatctagttatgaatttcaatcatctgtaaactctaccatcaaag

SEQ ID NO: 392757 - DNA, 201 bp, Homo sapiens
gtgtggcaataatccatccatttattttagtagcctacaaatcacagattacgaacaagattttacatctttcagttaattattttatcttctaatgtcartgagaactcttagtccaaggaaatagaataatgcaaaacttatattttttatttatgatcctgattataactattttaatttgcttaactgagtgctttt

SEQ ID NO: 392758 - DNA, 201 bp, Homo sapiens
agcaaaaaccacaggctaaaaggaagacatcaagtatcctttcaacttgaggattccctactatatgtatatgtggctgaaaaagggacattcactctccrtgctcacattagggataatactgaggagaacaggaatcctagatgtaccaagatgttctttatacttaactgtagtcagttgatgtcttaggctttgaat

SEQ ID NO: 392759 - DNA, 201 bp, Homo sapiens
ctgggcgtggtggctcacacctgtaatcccagcactttggaaggctgaggcgggtggatcacctgaggttaggagttcaggaccagcctggccaacatggkgaaaccccatctctactaaaaaaatacaaaaatcagccaggcgtggttggcgggcgcctgtaatcccagctacttgggaggctgagacaggagaattgct

SEQ ID NO: 392760 - DNA, 201 bp, Homo sapiens
agtgtccatcaatagaaggaatacatacagtgtggtatacatagttacaatacacagtattgtaaaggaatgaactacagcacgcaaaaaaacttggttcratctcacaagcacaatgactaaaggaatttagacatgagtacatatggtatgatcctattcttataaaattcaaaaaaagataaaactcatctatgttat

SEQ ID NO: 392761 - DNA, 201 bp, Homo sapiens
ctgtctttcaagaaaccagaccctggtgccaaaaaggttagggaccgctaccttagggcccaccaattccaatcctaggtatatgtctaacagaaatgcayatatatggataccaaaagatgtgtaaaagaatgttcattgcagcactattcacaatagctggaaatggaagcacagtgtccatcaatagaaggaatacat

SEQ ID NO: 392762 - DNA, 201 bp, Homo sapiens
ctaacagctatttttatttttaatccattaatactttagaacagaggcaaatgattttttaaatgatatgggatacattacaaaagacttctaggcatatmctaataagcctttggttcaatttgttgtgctttctacataaaagaattagtactcctagctaatattcaggagagtacattttaaggcagggaattatta

SEQ ID NO: 392763 - DNA, 201 bp, Homo sapiens
aaaattgcatatgtacattatttcagaagacattccacaaggaattaaaaaaaaaaattgttcccctgctctccctatttcctctccccaaaaacaatcasttaagcattctttcagctggttattttggtatttatctcgatatctctaaaacatttataatgccacttaaaggtctttgttttaggcattaactgttga

SEQ ID NO: 392764 - DNA, 201 bp, Homo sapiens
gcattcttttcctccacaccctacctaaggttctagagtgggtcaaaaaactctaattcctaggagatttgtacttccactaacagtcagggctgtttaawgccaagaggttccaacagtaggatcagttctgtctagtgatgtcacctagacagaaatctctggacatttagaacagttctctttggagctcttgatgtt

SEQ ID NO: 392765 - DNA, 201 bp, Homo sapiens
ctgtcattattgtcagctttacgctgtaattcaaattgtaatgttttcaaagctttatcttcacaggtaatatgtcacattgtaaagtaccacacagtccraaaaatatgtctactatcctctttatctcttaactggatataaaacttggatggagctggaggccattattctaagtgaaataactcaggaatggaaagc

SEQ ID NO: 392766 - DNA, 201 bp, Homo sapiens
caaaagacttctaggcatatcctaataagcctttggttcaatttgttgtgctttctacataaaagaattagtactcctagctaatattcaggagagtacaytttaaggcagggaattattaagtgagcactgaatgttacctgttgctgtttctgtcattattgtcagctttacgctgtaattcaaattgtaatgttttca

SEQ ID NO: 392767 - DNA, 201 bp, Homo sapiens
atttgtcaagtgatggtaatacagggaaaaataattgtgggataagaaggatagaatgccagtgcttggggtaatgggggagctgttatttttaaataggrtagttgggaaagatcaccatgataaggtgacactggagccaaaacttaaaggagttgagagagtgaaccatgtagttacttgatgagagagtattccagg

SEQ ID NO: 392768 - DNA, 201 bp, Homo sapiens
agaatgtatccccattgttaagcaatgcatgactgtactagtattcactagtcacaagtatttttcgggtagcaatctgaaaaggactaaattatcttgcrtctcagttgctactgttgtcatttctcagatgtattaataacattgcattaaatgtattcattcattcaggaattatttaatcctactatgtgccaggca

SEQ ID NO: 392769 - DNA, 201 bp, Homo sapiens
tcccaagtatctagtagactaccccgaataattatttactgaagggatgactgcattctgactcttacaacagtaatctttttaatatacaatcatgcacygcataatgacattttggttagcactggactgcatttatgacagtggtcccataagattatattaccgtattttagtgtactttagtttctctgtttggct

SEQ ID NO: 392770 - DNA, 201 bp, Homo sapiens
tttttttcttttttttgagatggagtttcattgttgttgcccaggctagagtgcaatggcatgatctcagctcattgcaacctccacttcccaggttcaartgattctcctgcctcagcctcccaagtagctgggattacaggcacctgccaccacacccagctaatttttttctatctttagtagagacagggtttcacc

SEQ ID NO: 392771 - DNA, 201 bp, Homo sapiens
ctgtaagcatttgaatgtgttatccttgagcttacatcctcatcaacattacagaattcattcttttttttttttcttttttttgagatggagtttcattsttgttgcccaggctagagtgcaatggcatgatctcagctcattgcaacctccacttcccaggttcaagtgattctcctgcctcagcctcccaagtagctg

SEQ ID NO: 392772 - DNA, 201 bp, Homo sapiens
tgaatcctgccttagtcttccatcatttaggggcttagctagtctctccacttctgtttttgctagcaattacccagatttctccatatctcacgttcagyttgagagaatcgaattaggtccattaaatctcattgtctctatctggacataactttatttcacactggccagccttagattggctacctgggcccaggt

SEQ ID NO: 392773 - DNA, 201 bp, Homo sapiens
agtttacagattcagatttcacattttgctaagtataaatgacatatcttaagactaatgaaaactttcatgttttacttgtatttattatggtaactttycttttcatagccatgttcactgcccacttcccatgagatttctccagtgcccgccagacctgactggaaaaagtcattatcttgatgaagcagatgtatt

SEQ ID NO: 392774 - DNA, 201 bp, Homo sapiens
ttaattcttttattaagcaaaaagttgtagacagcaattagaataggcaattctaaaattgactgaaacagtactcagcaaaatgtagcctttatttactyaaacatttatttgcttctaggaaataagcgctttcctaatttcaagcaattataaaagaactgctgttttcttccacactcacttgccagagggtcgaat

SEQ ID NO: 392775 - DNA, 201 bp, Homo sapiens
ggcaggagaatcacttgcacctgggaggcagaagttgccgtgagccaagatcatgccactgcactccagcctgggtgacagagtgagactctgtctcaaamaaaacaaaacaaaacaaaaaaaagttcatatagctatttataccaaaaggaaaatgtcaaatcacagtgtaaatgatagataacttcaagttaatttccc

SEQ ID NO: 392776 - DNA, 201 bp, Homo sapiens
tagggattgtaattcttacccagtgatttaaagtgttctagtggttgggcacgatggctcacgcctataatcccagcactttgggaggctgaggcaggcasatcacctgaggtcaggagttcaagaccagcctggccaatatgatgaaaccctgtctctgctaaaaatacaaaaaaattagctgggcattgtggcacatgc

SEQ ID NO: 392777 - DNA, 201 bp, Homo sapiens
cgaggcaggcagatcacgaggtcaggagattgagaccatcctggctaacatggtgaaaccccgtctctactaaaaatagaaaaaattagccgggcgtggtrgcgggcgcctgtagtcccagctactcgggaggctgaggcaggagaatggcgtgaacccgcgaggcggagcttgcagtgagccgagatcgcgccactgcac

SEQ ID NO: 392778 - DNA, 201 bp, Homo sapiens
gacagcaattagaataggcaattctaaaattgactgaaacagtactcagcaaaatgtagcctttatttacttaaacatttatttgcttctaggaaataagygctttcctaatttcaagcaattataaaagaactgctgttttcttccacactcacttgccagagggtcgaattggaagtcacatatatgtctatgaacgga

SEQ ID NO: 392779 - DNA, 201 bp, Homo sapiens
tcccgagtagctgggattacaggcatccgccaccatacccggctaatttttgtattttaagtagagacagggtttcaccgtgttggccaggctggtctcgmactcctgacctcaggtgatccacccgcctcagcctcccaaaagtgctgggattgcaggcgtgagccaccgcgcccagcctggcatatgccattttttaag

SEQ ID NO: 392780 - DNA, 201 bp, Homo sapiens
attacaggcatccgccaccatacccggctaatttttgtattttaagtagagacagggtttcaccgtgttggccaggctggtctcgaactcctgacctcagrtgatccacccgcctcagcctcccaaaagtgctgggattgcaggcgtgagccaccgcgcccagcctggcatatgccattttttaagtaattaactcctgat

SEQ ID NO: 392781 - DNA, 201 bp, Homo sapiens
tgtttttaccacagtggctaatatagacttctctcttactgggccactttgtttttccatattcttatctttttttttttttttttttttttgagacagagtctctctctgtcgcccatgctggagtgcagtggcgcaatctcagctcactacaacctccgcctcctgggttcaagagattctcctgcctcagcctccaga

SEQ ID NO: 392782 - DNA, 201 bp, Homo sapiens
tgcgccaggcctaactccatgtagtattaacttttcttctcttctgattcttgtaccaactgcatcttttcttttaattccttctgatctttggcatactsttcaaatactggttgaaaaatatatactcctccagcaattccaaggacagtggcaaaaagcagttgtgcaaaagtcaatctcctaaacattgctgcaaca

SEQ ID NO: 392783 - DNA, 201 bp, Homo sapiens
gtttttaccacagtggctaatatagacttctctcttactgggccactttgtttttccatattcttatctttttttttttttttttttttttgagacagagtctctctctgtcgcccatgctggagtgcagtggcgcaatctcagctcactacaacctccgcctcctgggttcaagagattctcctgcctcagcctccagag

SEQ ID NO: 392784 - DNA, 201 bp, Homo sapiens
tttttaccacagtggctaatatagacttctctcttactgggccactttgtttttccatattcttatctttttttttttttttttttttttgagacagagtctctctctgtcgcccatgctggagtgcagtggcgcaatctcagctcactacaacctccgcctcctgggttcaagagattctcctgcctcagcctccagagt

SEQ ID NO: 392785 - DNA, 201 bp, Homo sapiens
tttaccacagtggctaatatagacttctctcttactgggccactttgtttttccatattcttatctttttttttttttttttttttttgagacagagtctctctctgtcgcccatgctggagtgcagtggcgcaatctcagctcactacaacctccgcctcctgggttcaagagattctcctgcctcagcctccagagtag

SEQ ID NO: 392786 - DNA, 201 bp, Homo sapiens
tttattacccttttcatcaaagatattcttggtggtatctttaaagtgtctgaaagtggatttaactgaatctgagaattttttcagattttccttcacakcttctttagcctgcttaattttctctttatgatgccttacaaactccttggtagaattcttcatggcatcaaatgtttccttaactgaacccaaaaatgt

SEQ ID NO: 392787 - DNA, 201 bp, Homo sapiens
gtttttccatattcttatctttttttttttttttttttttttgagacagagtctctctctgtcgcccatgctggagtgcagtggcgcaatctcagctcacyacaacctccgcctcctgggttcaagagattctcctgcctcagcctccagagtagctggaattacaggcccatgccaccacagccagctaatttttgtatt

SEQ ID NO: 392788 - DNA, 201 bp, Homo sapiens
tttctctttatgatgccttacaaactccttggtagaattcttcatggcatcaaatgtttccttaactgaacccaaaaatgtttcctttgacttatttttarccctgtggcttcctctgccccctttcttttttccatctgttccttgttttccattttgatcttttgcctcaacatacaatctttcccacaaatcagaacg

SEQ ID NO: 392789 - DNA, 201 bp, Homo sapiens
atgatgcatcattgcctactcacttgatcaccttcagcattttggaagaggtaagtaaacatgaaaaagaggaaaactcagtattttaattttaccccagstttaggaaaccctcaggtaaatagataatataacctttttatggtctgtttcaacccacatttcataattagtcttttctccagtcaaaattagccccag

SEQ ID NO: 392790 - DNA, 201 bp, Homo sapiens
aagggttacctttgggttacttttggggaggaggtagggactgactgattggagggacaaggtggtgctgctaatactctttatcctgctctgtatggcasgtacacagttgtgttcatgtagtgatgattcatagagctttaccttcatagcgtatttttctgtatatgtgtttgttggaggcagtctctgagatggcct

SEQ ID NO: 392791 - DNA, 201 bp, Homo sapiens
gaagagttttggaagggcaaataggaaatacttggactttatttggcttcctttaaactggggaaacaaataccacgcaatgggaacatgagtgaaggcayagaactgtaaatgggctccatttacagttacagttacagtatattcaaggcagattgtccagagtagttatagagtgttgtaggatgcatggaagaagat

SEQ ID NO: 392792 - DNA, 201 bp, Homo sapiens
atagttacaatacacagtattgtaaaggaatgaactacagcacgcaaaaaaacttggttcaatctcacaagcacaatgactaaaggaatttagacatgagyacatatggtatgatcctattcttataaaattcaaaaaaagataaaactcatctatgttatcagaaattaggatagtggttacctttgggaagaggaaggg

SEQ ID NO: 392793 - DNA, 201 bp, Homo sapiens
ctgcctctcaacccaaaacagtcagaagccagaaagcaaggtagccactgatgctgtccattcaggtcagctttcctgcgtgcagactggataaaggctgraggagaagagttttggaagggcaaataggaaatacttggactttatttggcttcctttaaactggggaaacaaataccacgcaatgggaacatgagtgaa

SEQ ID NO: 392794 - DNA, 201 bp, Homo sapiens
acagccagcctttagcaataatgaggagacagccagggaactaaataatcctgacccaactcttctgcctctcaacccaaaacagtcagaagccagaaagsaaggtagccactgatgctgtccattcaggtcagctttcctgcgtgcagactggataaaggctgaaggagaagagttttggaagggcaaataggaaatact

SEQ ID NO: 392795 - DNA, 201 bp, Homo sapiens
acagataatactcaaacaggataattaaggagagtttaacaaaaggaatatttgcaaaggtttagacaatatttagaaaagccaataaggaaacaccatartacccccagcatggttatagtaggaagtctgtattatctctaggccccaaggagcaaggagaagaaatggttactggaatctataaaaagctgtaattgt

SEQ ID NO: 392796 - DNA, 201 bp, Homo sapiens
ggcggatcacaaggtccggagttcgagaccagcctggccaacacggtgaaaccctgtctctactaaaaatacaaaaattatccaggcgtggtggcagacayctgtaatcccagctactcgggaggctaaggcaggagaattgcttgaacccaggaggcagagattgtgccactgcactctaacctgggtgacagagcaaga

SEQ ID NO: 392797 - DNA, 201 bp, Homo sapiens
ggagatagtacaagggcaggactaatggtgtaaaagtttctctagcctcactcccatgatcttttaagctgtcatcagatgagactcagagtttgtgctcyccccgatttctgtcagtgggggttaatggctcagcattccaaaggcagtccaaatcctgacgtgttttgtgtagcttagaaagacacaggttctagggta

SEQ ID NO: 392798 - DNA, 201 bp, Homo sapiens
tatttggccgacaggctgtccatttgtggtcaagagcaggactttggagacatcacacagacccgggtttgaatcctgataagtaatttacaactttattyggacaaggcagtttaatttctgggcctcaatttgctcgtctgtaaaatggggctaataatacctatcccataatattgtttggaggattaagtgagatgc

SEQ ID NO: 392799 - DNA, 201 bp, Homo sapiens; identical to SEQ ID NO: 86121

SEQ ID NO: 392800 - DNA, 201 bp, Homo sapiens
gttttgcaagtggaactgcctgacttttgtgccactattacctgttttgttctgtttttcagatcttcttggagaaaatatttatctgctcttgtttaccwtagctttacgaatattaaactgctttttagtgcagacaagttttgttccagatgaatactggcagtctcttgaagtttcacatcacatggttttcaaata

SEQ ID NO: 392801 - DNA, 201 bp, Homo sapiens
tatcataattcagtttgaaccaacagatatttttaacatcctgttcttctttttaactgatgaagatttggattcctagacttgcccaagcacttctgtcygctgtagcagatgtgagactttactcattaatgaagcaactagaaaatcaggaagtggcaagatgggtggtaagtcctaaatactttagaagctgtatgc

SEQ ID NO: 392802 - DNA, 201 bp, Homo sapiens
gtgctctgtgtgcatgttcttccaaaaactgattcattaatttagtcaatctccaaattaaaatttaataatgtctcctgacttttttttcctctttcctsttttgtcttaatttttcatcagcgttccaaaacagggagacattccaaacaagtgcaacattccaaacaaggtcaacaaaaaaacagtcataatacttgt

SEQ ID NO: 392803 - DNA, 201 bp, Homo sapiens
ataactggtattagaaatgaatccatcttttttatactctaatcttttttttgttttgagacagactcttgctctgtcgcccaggctggagtgcagtggcrtatgatctcagctcactgcaacctccgtcttctgggttcaagaaattgtcctgcctcagcctcttgagtagctggaactacaggcacataccaccatgcc

SEQ ID NO: 392804 - DNA, 201 bp, Homo sapiens
ccgccaccatacccggctaatttttgtattttaagtagagacagggtttcaccgtgttggccaggctggtctcgaactcctgacctcaggtgatccacccrcctcagcctcccaaaagtgctgggattgcaggcgtgagccaccgcgcccagcctggcatatgccattttttaagtaattaactcctgattttattcaggc

SEQ ID NO: 392805 - DNA, 201 bp, Homo sapiens; identical to SEQ ID NO: 86129

SEQ ID NO: 392806 - DNA, 201 bp, Homo sapiens; identical to SEQ ID NO: 86130

SEQ ID NO: 392807 - DNA, 201 bp, Homo sapiens
ggtgttttgttaccaagttggcccaagcttgaagtccaggtagctgaagatcagagagacccacctaaactgagtgatgagtgatgggctgtcccaagacrggctagaacattccatcttggaggctgaagtggcagagaactcagacatttggaagatgtggtgggggcagcactccacaaggagttgtgcagagtatcc

SEQ ID NO: 392808 - DNA, 201 bp, Homo sapiens
tgtattctatcaaattattttccagttgatgtataaaactggaagtgtgttttgtttaaaagtgccatttctgatgtagattacagcaacttttctcataytgattcatattctgtttattggaatgatatttacttgcttttaaggaaaccaagaatccaagaataaatcttttacaaaggatgtacctaaagtaggagg

SEQ ID NO: 392809 - DNA, 201 bp, Homo sapiens
aattttagacacatcaacatgagctgaaaaatggtggatcagaaatagttgtcaccaataagaacaaaaaggaatatatttagtaagtattttattagtawgtattttattggatataattttgtactttattccagaaagactcttcttaccatctttctctgtccccttgtccagaatctcagtgttctttttctctat

SEQ ID NO: 392810 - DNA, 201 bp, Homo sapiens
acaattccctaagatggattcttgaaaatgacccaacagaattggacctcaggtttatcatagatgaagaactttttggacaggtttgtgaattttgatcwgttaaaatggcacataaattgtgagacaaatgtttagatgttaatacgtacacttaatacattcctaggctctgtttttacattcatttcccagtaacaa

SEQ ID NO: 392811 - DNA, 201 bp, Homo sapiens
agaatgcaagagggaaacaatcagcctgcggagctaacagaccagcttatacagggcctgtgtgtgaagtggtagagttcggagttttctctgaatttcartgagggagaaggaaggtagcattaaaggctattaaccaataagacaccaagattcaatttatgttttagatcattctggaagtgctatgtagagcaagtt

SEQ ID NO: 392812 - DNA, 201 bp, Homo sapiens
gttgctagtcttagcaggtaagggaggtatagagatgacctgagatgttatagaacctatagccattggtggagtaacagacctgattgtatagcaacaartgacctgtgtcattataaatgtcattccgtctttattctgctgaggcactcacaactaaatttaaaatgtaccattttcctagcaaattctcttggaaaa

SEQ ID NO: 392813 - DNA, 201 bp, Homo sapiens
aatgcatataagcatatggttagaagcagccaggccacttcttgaacactttgctgcttagaaatttcttctgccagataccgtaaatcatctctttcaakttcaaagttccacagatttctagagcaggggcacaatgctgccagtctctttgtagaagcatagcaagagggacctttatttcagttcccaaaagattcc

SEQ ID NO: 392814 - DNA, 201 bp, Homo sapiens
tatactttaagttctagggtacctgtgcacaacgtgcaggtttgttacatatgtatacacgtgccatattggtgtgctgcacccattaacttgtcatttayattaggtatatctcctaatactatccctccccacttcccccaccccatgacaggccccagtgtgtgacgtaccccttcctgtgtccaagtgttctcattg

SEQ ID NO: 392815 - DNA, 201 bp, Homo sapiens
cctaagaatcctgacttttaaattcaggaaataattgtagatataactaacaaggaaaactgtgaattttatagtctgggtaatctgagcttggggtaagyaataattaaaatttttctttctttttttttttttttttaacagtgatccttacgtgagagtgacgttatatgacccaatgaatggagttcttacaagtgt

SEQ ID NO: 392816 - DNA, 201 bp, Homo sapiens
ctgactcactaggttaggggtaaggatggattctgataaataccagtatgttgcgagtgttctggtgccttcgagtttggccaattaagaggtaacgtggyatgaggaaatggagttgggggaaggatagtttggattagtttggagggtacttcgtggagaatggtgagtactttggatacccgaggaaaacaggagaaa

SEQ ID NO: 392817 - DNA, 201 bp, Homo sapiens
ttaactgatgtaatacactgtattaatagaataaaagaagacagtcatcttttttttattatacgttaagttctagggtacatgtgcacaatgtgcaggtytgttacacatgtatacatatgccatgttggtgtgctgcacccatcaactcatcgtttacattaggtatatctcctaatgctatccctcaccccttccccc

SEQ ID NO: 392818 - DNA, 201 bp, Homo sapiens
caaacgggaaactccaagttgaagttagtgctcaatagcaaattatggccaggcacggtggctcatgcctgttttcccagtgctttgggaggccgaggagkgtggattgcctgaggtcaggagttcaagaccagcccggccaatatggtgaaacctcatctctgctaaaaatacaaaaatcagctgggcatcatggcgcat

SEQ ID NO: 392819 - DNA, 201 bp, Homo sapiens
cagcttcccggctgctttgtttacctactcaagcctcagcaatggtggacaccccttaccccaccagtctgcagactggcaggtcgatctcagactgctgygctagcagtgagcaaggctctgtgggcatggtacccgccaatccaggcatgggagagaatctcctggtctgccagttgataagaccatgggaaaagcaca

SEQ ID NO: 392820 - DNA, 201 bp, Homo sapiens
tattccattgtacaagtaacccttaaggcatttcaccagtctcctattgaaagactttagattgtttacagtactattataaacagtactacagtggataktctgattcaatttgtatgtgcattgtaaattttgatgtcattaaataacaaaactaagatatttcagatagtgataatagcatgtatagaaaaacataag

SEQ ID NO: 392821 - DNA, 201 bp, Homo sapiens
tacacaaacacgttcagaaaatggagggcatttcccaactcattttattaggctaatattatcttgatccccaaaccagacacagacatcacaagaaaacytaaaaccaatatctgtcaacatagatgcaaaaatgaaattaaacattatgtagcaatatatcaccacttaggatttttcctacaaatgcaaggtttgttc

SEQ ID NO: 392822 - DNA, 201 bp, Homo sapiens
taccaaaaaaggaagatccaagattgaaaattccagcccatctgagaggaaagacatcacttgatacttccaatgatctagggcctttacctgtaagtgtwtagaaatgctaacccatctaacttggctatctcaaatattttgcattttcgggtatagtatttctttatcatctataattaatgttattattaaaatgtt

SEQ ID NO: 392823 - DNA, 201 bp, Homo sapiens
aacaataactattgaatgaagttaacatgtgcaatgaagattatttacttggatgtttatttcacccaagcattaatagttttccctctaaggatatttcygtagaaggaatggccattattgatggccttcttaaaggttaaggagtagagaatagaatataaatctagtttttcaaagttttctaaaactgtatattct

SEQ ID NO: 392824 - DNA, 201 bp, Homo sapiens
aaaaaataaaaattctacacaaacacgttcagaaaatggagggcatttcccaactcattttattaggctaatattatcttgatccccaaaccagacacagwcatcacaagaaaacttaaaaccaatatctgtcaacatagatgcaaaaatgaaattaaacattatgtagcaatatatcaccacttaggatttttcctacaa

SEQ ID NO: 392825 - DNA, 201 bp, Homo sapiens
taacttggatgttccaactcatcttgcagaagaattgaatgccagactcaccatttttggaaattcagccgtgagccagccagcatcgagctcagtaagaygctcttagattttgttacggcttcagtagtttatattatgcatattatactattcaacaactaacttttatgtaaaattttgtcttaaatgcaataatat

SEQ ID NO: 392826 - DNA, 201 bp, Homo sapiens
atgtctcagatggattcataacagtatagtgatccataaactataagaatactaggatttttattgcccaggactttaaaaatcctaactctgctgtttcrttttttaaatgacttgataatattcaaaattacttgactctagatactacccttttaattgcgtcttaattttaataggtttttaattttatgtagccac

SEQ ID NO: 392827 - DNA, 201 bp, Homo sapiens
ttgaacctgggagatggaggttgcagtgagccaagattatgccactgcacttcagcctgcatgacaagagtgaaactccatctcaaaaacaaacaaaaaarcaacgtaaagggcagtgacaatggaaaacaaacaataaacctgtagactaaatccaatcatatcaataattacaaggaacattaatggattaaaataaat

SEQ ID NO: 392828 - DNA, 201 bp, Homo sapiens
tcaaaaaaataaaataaaaaaaataaaagtcggaaaaggaggaacaaatgaacaaaaaaagtaaaagaggctgggtgcggtggctcacccttgtaatcccracactttgggaggctaaggcgggtggatcacctgaggtcaggagttcgagagtagcctgggcaacatggtgaaaccccatctctactaaaaatacaaaaa

SEQ ID NO: 392829 - DNA, 201 bp, Homo sapiens
cagcctaggcgacagagtgagaccctgtctcaaaaaaaaaaaaaataaaaaagagtgccagaaaaggagaagcaaatgatttaaaaaagtaacggaggccrgttgtggtagctcacgcctgtaatcctagcacttagggaggctgaggctggtggatcacctgaggacaggagtttgagaccagcctggccaacatggtga

SEQ ID NO: 392830 - DNA, 201 bp, Homo sapiens
gtgtatgttctcggcacctttacccaatatgaattcactgtagatgtatggatttgtttctgggttctctattctgttccattggtctgtctgtttttatrccagtaccatgccattttggttacaatagctttgtaatgtaatttgatgtcaggtaatgtgatttctccagttttgttctttttgcttaggatgcctctg

SEQ ID NO: 392831 - DNA, 201 bp, Homo sapiens
tcaaagcctcagataaggatgaacacgttagggaaggtatacagtgagatgggaagggaagataaattataattttggggaccaccaactttggtgaggcrgtagaagaggggataaagaagagactaaggaggaaccacacagaggccaagagagcatggaggcatggagagcatggaggcgtggaggcatagaggcatg

SEQ ID NO: 392832 - DNA, 201 bp, Homo sapiens
aacctaacagatgctgagaatggcaacattcaactgcaagcacaacgtgcatttaccaccaggcggcagatatccgaggaaacagaaagtgttgacaaccragagtcttccgaggtataagtagtttcctagttctccttgaaagacacatgctatagcaataaagtatgtgtggctcaagcttattctgttcattttaga

SEQ ID NO: 392833 - DNA, 201 bp, Homo sapiens
tggcgtggacccgggaggcagagcttgcagtgagtcgagatcgcgccactgcactccagcctgggccacagagcgaaaccccgtctcaaaaaaaaaaaaawtttttttcagtctaatatgtgatgtgctaaatagaggtgtgtatgaaaaagtagaaagatgtgacattatttatctggagagaggacctggttggtagag

SEQ ID NO: 392834 - DNA, 201 bp, Homo sapiens
cgggaggctgaggcaggagaatggcgtggacccgggaggcagagcttgcagtgagtcgagatcgcgccactgcactccagcctgggccacagagcgaaacyccgtctcaaaaaaaaaaaaattttttttcagtctaatatgtgatgtgctaaatagaggtgtgtatgaaaaagtagaaagatgtgacattatttatctgga

SEQ ID NO: 392835 - DNA, 201 bp, Homo sapiens
agacacatgctatagcaataaagtatgtgtggctcaagcttattctgttcattttagaactgggaaattataagagaagatgaagccaccatgtatagcarccaggccttcccatcacctccaccgtcaagtaacttggatgttccaactcatcttgcagaagaattgaatgccagactcaccatttttggaaattcagcc

SEQ ID NO: 392836 - DNA, 201 bp, Homo sapiens
ttttttaaatctaatgagaacttttacctgtatctgggacactgtctgtgttctgtgtttacaacttagagtgaagatgagactttgtagtctatctccakaataatgttgatttcaggcatagcaaacaacataacagtgactggcatatgtttattacatatgccttttgaaatacagtattacttttgtaaaggctat

SEQ ID NO: 392837 - DNA, 201 bp, Homo sapiens
aagcagaggaaaaataaatggcatttgtatttgtatatacccttaaccacaggaattttgtttccaccctatttttctttagccacgagttaatactgccytctaaaatgtaactcactctttcaacaatattgaattctaagttttaatatttttgaatttggtttaaattgctaggcatttaccacaattttctattta

SEQ ID NO: 392838 - DNA, 201 bp, Homo sapiens
atatgcaagtgtatgtttatattatgttatagaagtaatataacttatgcaagatagtttttttaataaagagaaatgaaaatcagccataatttcatctygataaaccaccactgataatatgcttttctgggatttcctatgtgtttttttttcttttgtatttttatggatagggggaaaaaacttacctacatacgc

SEQ ID NO: 392839 - DNA, 201 bp, Homo sapiens
atggggtttcaccatgtaggtcaggctggtctcgaactcctgacctcatgatccgccatccttggcctcccaaagtgctgggattgattacaggcatgagmcaccatgcccagccagcccttttatttttaatattctcttccttgagttcaagcaaagttacttaaaatgcttttttgataatgtcctccctttcctctt

SEQ ID NO: 392840 - DNA, 201 bp, Homo sapiens
tattttccattgatgctgcatatgactgaataaaaaaaaaactctacattttctgtgaatggtggcactatctcatcaaactcttctaaaggaattgagcrtattactaattatattttttcttccttctcttatagacaagagatgatttcctaggtcaagtggatgttccactttatccattaccggttggtataggtg

SEQ ID NO: 392841 - DNA, 201 bp, Homo sapiens
ttttaacagtgatccttacgtgagagtgacgttatatgacccaatgaatggagttcttacaagtgtgcaaacaaaaaccattaaaaaggttagacttagcmatattcaaaagtttttaatgtactttgttttatttttataagacaaaaccttatttagttatactatgtttattattttttagagtttgaatccaaagtg

SEQ ID NO: 392842 - DNA, 201 bp, Homo sapiens
tgcctatgaatggatttgctgaactatacggtaaggattttccatagatcattaaaaaaatggaataatgcgtattgtctttttcatggctgacgaatcckcaagcttccatcatttactaacacttagcttaattttaaaaagaattaagattttgaaagtgataccattagggacactggagtaggctaaaatatattt

SEQ ID NO: 392843 - DNA, 201 bp, Homo sapiens
ttccaaaatttccaactaaaggcagtgccctactccagggattacaaaagaaagtatgagttcttccgaagaaagttgaagaagcaggttagtcatgtttrtaataaatacttaagagtcatcaatatatagatggaaagtaatgggaaatgttttttacagtaataatttgttctatatttgtaacaactttgagtgaac

SEQ ID NO: 392844 - DNA, 201 bp, Homo sapiens
tgggctgggtgcagtgtctcacacctgtaaatctcaacattttaggaggctgaggcaggcagatcacctgaggtcaggagttcgagaccagcccagccaayggtgaaaccctgtctctactaaaaatagaaaaattatctgggcatggtggcgcatgcctgtaatctcagctactcaggaggttgaggcatgagaatcgct

SEQ ID NO: 392845 - DNA, 201 bp, Homo sapiens
tcagtctatgtgtgtctttataggtgaagtgtgtttcttgtatgcaacagattgttgggtactgttttgttaatccatcaaccactctatgtcttttgatyggagagtttagttcacttacattcattgttattattgataagtaaggacttctgccatttttaatttgttttctggttgttttgtgctcctttttgtgaa

SEQ ID NO: 392846 - DNA, 201 bp, Homo sapiens
tttccaactattactatattgaagtctagctgactctttgactttaacaatatttgctttatataactgggtatttcagtgttggatgcatatgtatttayaattgttgtatcttcttgttgaaatgatgcctttatcattgtgtaataaccttttttgtctctttttttagtttttgtattgaaatctatttgatctgat

SEQ ID NO: 392847 - DNA, 201 bp, Homo sapiens
catcttggaggctgaagtggcagagaactcagacatttggaagatgtggtgggggcagcactccacaaggagttgtgcagagtatccatgcccagaacccmgtcctacgtcttacttctacccctggtgaaaagacatattttggtggtgttggaacattctcatcaagaatagcagcattgctctgtttgctgtggtggt

SEQ ID NO: 392848 - DNA, 201 bp, Homo sapiens
gggtttaaatataccctagagtattatttaaaaataaatttgtttctttcaaatagaataccaaccttggtctatggcatttgagagagaaattaaaataytaaattttgattgcctagtaaactgaaaataaaggttaaataaatacaaagcagaaaaaatatatatacaaaatcacaacctctaaaaggacaaacagtc

SEQ ID NO: 392849 - DNA, 201 bp, Homo sapiens
tggtagtggtggcaataatgacagaacatttcagaatgatgtgtcttaaaaaaactctacccaccaatgcaaaagttagcactgtgtcaccagtctaagayatacacctgtacacattcagccaccggttttaggagccacctatattctgggtggagaccctgtgcttctcacgtttagcagttgtattagtgaaggttc

SEQ ID NO: 392850 - DNA, 201 bp, Homo sapiens
aacaatatttgccctgcctatctcataagcatattgtgaggataaaatgagacaatgacgatgaaaatacttggaaaattctttatcatgatacaaatatwaaatgtcatttaacattcgtagacttaacgcgtttgtagctctctgatatggtatatcttgtgttagctaagatataccatttagtatatctactgtgtt

SEQ ID NO: 392851 - DNA, 201 bp, Homo sapiens
tctccctatgtacgtgtctgagtctatctctaagagatatgttttagagttgaattgctagatcatggtattactgttatttttcctgttgccactgatascgatgtgaattttgcctgatcattgagtgtattattggtgaactattttatttgcgttatttgcatgttgtccacaaggagggacagctcacatttgtgc

SEQ ID NO: 392852 - DNA, 201 bp, Homo sapiens
ttccagtattttgctcttacaaattgataaacatttttatgtctccctatgtacgtgtctgagtctatctctaagagatatgttttagagttgaattgctrgatcatggtattactgttatttttcctgttgccactgataccgatgtgaattttgcctgatcattgagtgtattattggtgaactattttatttgcgtta

SEQ ID NO: 392853 - DNA, 201 bp, Homo sapiens
aatcataatgctataatttatgtatttaacctccttaatagatattagtgttatttccagtattttgctcttacaaattgataaacatttttatgtctccstatgtacgtgtctgagtctatctctaagagatatgttttagagttgaattgctagatcatggtattactgttatttttcctgttgccactgataccgatg

SEQ ID NO: 392854 - DNA, 201 bp, Homo sapiens
aaccgattggtaagttatattgtgcttatatgaaatatgaagtaagggtacatttcagtggagcagccaggggaagtgggtaagcagtctgggatttgagwgatggcttgggggtggttatggagactctgggcaaaatggtgagggagatagaatttgttttcttcctcctggtcctactcgctccctttccattctcct

SEQ ID NO: 392855 - DNA, 201 bp, Homo sapiens
tggagtgcagtgccgtgatcttggctcactgcaacctctgcctcccaggttgaagcaattctggtgccttggcctcccgagcagctgggattacaggtacrtgccacctgtctggctaatttttttatttttagtagagatggggtttcaccatgttggccaggctggtcttgaacctctgacctcaagtgatccacctgc

SEQ ID NO: 392856 - DNA, 201 bp, Homo sapiens
ttacttttatcaaggtaaaacatgtgcccattttaaaagtcagatattatttctttgaagattttctgtctttttctccatgttttctcttcctagaattyctgttagccaaagtttgcacttcctggattgaccttaaaattttcttttctctcctgttttctgtttctttgcctccttaatctacttcttggaagattt

SEQ ID NO: 392857 - DNA, 201 bp, Homo sapiens
ggcataatccatagaaaacaaccagagaacaatatagtataatatataataatgtttatatacctacttcatgcaggtaaacacctaaacattgagatatrtgattgcccatatgatttaattacttttatcaaggtaaaacatgtgcccattttaaaagtcagatattatttctttgaagattttctgtctttttctcca

SEQ ID NO: 392858 - DNA, 201 bp, Homo sapiens
acttcagtttgtcactggcacatctcgggtgcctatgaatggatttgctgaactatacggtaaggattttccatagatcattaaaaaaatggaataatgcrtattgtctttttcatggctgacgaatccgcaagcttccatcatttactaacacttagcttaattttaaaaagaattaagattttgaaagtgataccatta

SEQ ID NO: 392859 - DNA, 201 bp, Homo sapiens
agaaaaaagaataagattacttcagtttgtcactggcacatctcgggtgcctatgaatggatttgctgaactatacggtaaggattttccatagatcattwaaaaaatggaataatgcgtattgtctttttcatggctgacgaatccgcaagcttccatcatttactaacacttagcttaattttaaaaagaattaagatt

SEQ ID NO: 392860 - DNA, 201 bp, Homo sapiens
aaagaaacatccacatctagtaagggattattaatattctaaattccgatagcttatgtttcaggataatttgtttacctctttcccagtgctgttccctraatgatgtttttatcttattcaggctgttttaatgatggattcagaaaaaagaataagattacttcagtttgtcactggcacatctcgggtgcctatgaa

SEQ ID NO: 392861 - DNA, 201 bp, Homo sapiens
aaaaaagcaaaaacccacattgtttattttgcatattttttaatttgtaaaaatagtatatctctatagacattcctctgatatgcttttttgcttaacawtatatttgtgagatctgtgattacacatttcaatgatgcataattttctatattctgaaaaatcataatgctataatttatgtatttaacctccttaata

SEQ ID NO: 392862 - DNA, 201 bp, Homo sapiens
gagctcaggagtttgagaccagcctgggcaatatggtgaaacctgtctctacaaaaagtacaaaaaatcagctgggcatggtggcgcatgcctgtactccyggctacatgggtgactgagtcaggaggattgcttgagtctgggtggttgaggctgctgcagtgagacaagattgtgccaatgcactccagcctgggtgac

SEQ ID NO: 392863 - DNA, 201 bp, Homo sapiens
tctaagatccattctttatctctggcctttgggagtttggttactaaatgtcttaaggtagtcttctttgggttaaatctgcttgatattctataaccttyctgtgcctgaatattgatatctttttctaggcctagaaagttctttgttattatttctctgaataaactttttaccccaatctctcttgctacctcctct

SEQ ID NO: 392864 - DNA, 201 bp, Homo sapiens
cctttgggagtttggttactaaatgtcttaaggtagtcttctttgggttaaatctgcttgatattctataacctttctgtgcctgaatattgatatctttytctaggcctagaaagttctttgttattatttctctgaataaactttttaccccaatctctcttgctacctcctctttaaagctaataagtcttttttttt

SEQ ID NO: 392865 - DNA, 201 bp, Homo sapiens
atattcaggtataaaatttatttttactctttaaaaagcatgattgaaacaaaaagtttgatattacagcagaaaaccttggctatcttgttggcctctgsctgtgaagaaattattctttctataatcctttgccttttacagtagatttgccctggaaaattatttataattcatatttattatttatttatttattta

SEQ ID NO: 392866 - DNA, 201 bp, Homo sapiens
cagtgtctcacacctgtaaatctcaacattttaggaggctgaggcaggcagatcacctgaggtcaggagttcgagaccagcccagccaatggtgaaaccctgtctctactaaaaatagaaaaattatctgggcatggtggcgcatgcctgtaatctcagctactcaggaggttgaggcatgagaatcgcttgaaccgggag

SEQ ID NO: 392867 - DNA, 201 bp, Homo sapiens
tgagaatcgcttgaaccgggaggcagaggttacagtgagccaggatcacaccactgcactccagcctgggcaacagagtgagactctgtctcaaaaaaaawccaaaagccaaatggttatgaactttcgattttgtgtacatatatagcaataattggaaattcctattagttgcaatactttggctttagattttcttga

SEQ ID NO: 392868 - DNA, 201 bp, Homo sapiens
taaattgtgagacaaatgtttagatgttaatacgtacacttaatacattcctaggctctgtttttacattcatttcccagtaacaaaagctgtctctgagyaagaatttgtactttctttaacatttgactcgttccatatttattttagtaaaactagtattttaagttttcttagtttttaacttttgactggacttaa

SEQ ID NO: 392869 - DNA, 201 bp, Homo sapiens
atcatagatgaagaactttttggacaggtttgtgaattttgatcagttaaaatggcacataaattgtgagacaaatgtttagatgttaatacgtacacttratacattcctaggctctgtttttacattcatttcccagtaacaaaagctgtctctgagcaagaatttgtactttctttaacatttgactcgttccatatt

SEQ ID NO: 392870 - DNA, 201 bp, Homo sapiens
gagagctgaagagctcagcaactcatctgaagacaaaagatctgaacagagatcacagtcactgcctaagaaacggggtttgggagactgaggcagacagrttgcttgagctcaggagtttgagaccagcctgggcaatatggtgaaacctgtctctacaaaaagtacaaaaaatcagctgggcatggtggcgcatgcctg

SEQ ID NO: 392871 - DNA, 201 bp, Homo sapiens
atgttgggaaaatattaacatgccataactacatttgaaaatgagcctcaaatatttagagtctctttaatggagggtgtgtattctatttgcaggttaarttacctttttaactacatctatttgtgagttctctctataaaatattacaatatgatttcattaatgtgctaggccacagtggagaccagtcagctgacc

SEQ ID NO: 392872 - DNA, 201 bp, Homo sapiens
taggcagtgtcccagtgggaaccctgtgtggggactccagtcccacatttcccatccacactgccctaatagaagttctccatgagggctctgcccctgcratatccagacttctgtgtggatatcgacacatttccatacatcctctgaaatctaggaagagctcctaagcctcagctcttgccctgtgcccacctgcag

SEQ ID NO: 392873 - DNA, 201 bp, Homo sapiens
taactggaccagtaagtctctctgccagtgtgctctgatgggactgtccgctcacctgtctcttcaagagcagatagtcacgggcataaccctacaggcaytgagaggaaagcacattggccgttctctcctctcccccatttcccatactccaagtctcagttatttgaaaagattctataacgtcattatccttaccct

SEQ ID NO: 392874 - DNA, 201 bp, Homo sapiens; identical to SEQ ID NO: 86142

SEQ ID NO: 392875 - DNA, 201 bp, Homo sapiens
tttacagttgaacagtggggtactcctgaaaagctgccaagagctcatacctggtaagcagttgtttggaccttgatagaacaaagcctcagagagtgagrttcctctgttagtctagccacagcagggctagtctcctctgtgttatgtcggtggcaggtatggattatgggtaagaaggagttggtgacacccaacgaa

SEQ ID NO: 392876 - DNA, 201 bp, Homo sapiens
ctatactggtggattacatttaactgatacagaaaaatatacagaccagaaaaaattatctttgattttatactgtatacatgcaccttctgggtctgtarctattactaggtaagtaaaatgttcagaaggtagtaagtggaatgacaggctgagacaggcacttagttttctactaaagtagggactgaaagaacttgt

SEQ ID NO: 392877 - DNA, 201 bp, Homo sapiens
ggttttttcatccgcccattttacaagatgatgcttcacaaaccaataacccttcatgatatggaatctgtggtatgtctttttcacttatagtatagacraagtataatttaacaagcagcttgaacattttgaagaatttgcttttaatgacatggaaattaatatattatcatgtttcaaaatacaaatgaacttttt

SEQ ID NO: 392878 - DNA, 201 bp, Homo sapiens
atttgtcacataagcaaagaacgtacaaaagattagtgaggcaatgtagctccattaattaagagcacagactcaggagctaagactttcttaagtcgtcktcttcagttttatgtgtaaaatgaagacaataatagtagctttcgcatagtgttgttatgaggttaaacacgttaacctgccattccagggtacccatgc

SEQ ID NO: 392879 - DNA, 201 bp, Homo sapiens
tgtggtcacagatacttacagcagttccaaagacatgatgatgtccagaggctgaaaagggagagctttttgctgagtatcttttttttttttttttttttgaaacagagtctcactctgtcgccaggctggagtgtagtggcacgatctcaactcactgcaacctctgcctcccggattcaaatgagtctcctgccgcag

SEQ ID NO: 392880 - DNA, 201 bp, Homo sapiens
atcttatacatggtctgcaaatatttttcccattttgtacggtgccttttcactttgttgattgtttcttttgtcatatagctttttagttaaatgtagcygcacttgtcaatttttgctttcattgcctttgtttttggtgtcacccaaaaaatcattgtcattgtcaagaccaaagtcaagaagcttcttctctgtttt

SEQ ID NO: 392881 - DNA, 201 bp, Homo sapiens
gatgtaaagtaatgatgagttgttctttcttagaaattatatagtattgattgaataaagtctagtattttaaatgaggaatacttccataaccacgttarctgcagcagttttctttcctacccccatgttctgtacctgtggttgtcaactttagtgtccatctgaatcatctgaagagttgttaaaatacagactacc

SEQ ID NO: 392882 - DNA, 201 bp, Homo sapiens
attacgaagtcaaaattgacagaactaaataaataaacaaatccacaatagttgattttaccacttctagtaactgatacaacaactagacaaaaaaaaaatagtaaatatatagatgatttgaacaacactaccaatcatgttaacctgtttgacatgtatagtacactacagctaatacccaagtgtatattcttttta

SEQ ID NO: 392883 - DNA, 201 bp, Homo sapiens
ctcagagagcagtgtcccaaggttgtgtagggcagcagggccctgggcctggtctatgaaatcattcttcccttctagtcctctggggctgtgataggagkagctgccacaaagatctctaaaatgcattcaaggcatcttccccattgtcttggctatgaacattcagctccagcagctggcttgaattcctccccacaa

SEQ ID NO: 392884 - DNA, 201 bp, Homo sapiens
ccctgaccccttgcacttccgaggtgaggcaatgccccatcctgcttcggcttgccctctgtgggctgcacccactgtccagccagtccaaatgagatgarccaggcacctcaggtggaaatgtagaaatcacccgtcttctgcgtcaatcataccgggagctgcagacaggagctgttcctatttggccatcttccaatc

SEQ ID NO: 392885 - DNA, 201 bp, Homo sapiens
cttgactctttatctaattcgccagtctgtgtcttttaatgggggcatttagcccatttacatttaaggttaatattgttatgtgtgaatttgatcctgtmattatgatgttcactggttattttgctcgttaattgatggagtttcttcatagcatcgatgatctttataatttggcatggttttgcagtggctggtact

SEQ ID NO: 392886 - DNA, 201 bp, Homo sapiens
taaatttccctctacacactgctttaaatgtgtcccagagattctggtatgttgtgtctttgttctcattggtttcaaagaacatctttgtttctgccttmatttcgttatgtacccagtagtcattcaggagcaggttgttcagtttctatgtagttgagcagttttgagtgagtttcttaatcctgagttctagtttga

SEQ ID NO: 392887 - DNA, 201 bp, Homo sapiens
ttttttatgtctctctctccttgagttctgctcttaccttagttatttcttgtcttctgctagcttttgaatgtgtttgctcttgcttctctagttctttyaattgtgatgttagggtgtcaattttagatctttcctgctttctcttgtgggcatttagtgctataaatttccctctacacactgctttaaatgtgtccc

SEQ ID NO: 392888 - DNA, 201 bp, Homo sapiens
ttggtaggctattaattattgtctcaatttcagagcctgttattggtctattcagagattcaacttcttcctggtttagtcttgggagggtgtatgtgtcraggaatttatccatttcttctagcttttctagtttatttgcatagaggtgtttatagtattctctgatggtagtttgtagtttgtatttctgtgggattg

SEQ ID NO: 392889 - DNA, 201 bp, Homo sapiens
gggctgtattagtttattgcttcataataatattaccacaaactggccaggcgcggtggctcacatctgtaatcccagcactttgggaggctgaggcgggmggatcacaaggtcaggagattgagaccatcctggctaacactttgaaacctgtctctactaaaaatacaaaaaattatccgggtgtggtggtgggctcct

SEQ ID NO: 392890 - DNA, 201 bp, Homo sapiens
ggactttttttggttggtaggctattaattattgtctcaatttcagagcctgttattggtctattcagagattcaacttcttcctggtttagtcttgggarggtgtatgtgtcgaggaatttatccatttcttctagcttttctagtttatttgcatagaggtgtttatagtattctctgatggtagtttgtagtttgtat

SEQ ID NO: 392891 - DNA, 201 bp, Homo sapiens
cctaaaatgttcttccttgaccccatattcccctttagctgttgagtcgtttctctgttcacctgaataaggaacattcatgggagagttgtctgccctcrtcatttctgcttctccgggacgctcgttaacccactgtactctaaatccccatcactcaaatgaaactgctgttattcgggtcaccagtgacttccctgc

SEQ ID NO: 392892 - DNA, 201 bp, Homo sapiens
atttttaaaataatttatttttaaattatgtatttacttttgagacggagtcttgctctgtcacacaggctggagtgcaatggcgtgatctcagctcactrcaccctctgcctaccaggttccagcgattttcctgcatcaccctccagggtagctgggattataggcacgcaccaccacgcccagctaatttttgtattt

SEQ ID NO: 392893 - DNA, 201 bp, Homo sapiens
ttcttttttggaggtgacagaatattgatggcatgttttctcttactggtttcccctggaaatttgcccatgaagtactgaggaataaaatatttagatayatcttttgtaaaatttacaataagttctgcctaaagcatagttgtgtacatttgtcacataagcaaagaacgtacaaaagattagtgaggcaatgtagct

SEQ ID NO: 392894 - DNA, 201 bp, Homo sapiens
cattttccctaaataaattgagaatgaaattgattttttttccttagagctaaccttcttttttggaggtgacagaatattgatggcatgttttctcttastggtttcccctggaaatttgcccatgaagtactgaggaataaaatatttagatatatcttttgtaaaatttacaataagttctgcctaaagcatagttgt

SEQ ID NO: 392895 - DNA, 201 bp, Homo sapiens
cccctataatccctgccttctttcccttcctctcccttcttctccttctgtgccctctaggtattaaatatatcagacctctcatgtatgctgttcctccrtccttccctccctttctctgtctaaagacttcctctcaaagccttcttgattgcctcatttgaagtcaatagctcagtcttttatgccctgcagaacatt

SEQ ID NO: 392896 - DNA, 201 bp, Homo sapiens
aggcaactccttggagttcaaggaaaaagtacgcttttcacattgtccctttaatggagaaatcactttgaaagtctctttagaaatggaaatttttgttkctaatatttctctacctggaagaaatttcctatttctggcatgctgcattttaagaatattgcataatgaaaattacagccataggaattgctgaataca

SEQ ID NO: 392897 - DNA, 201 bp, Homo sapiens
aatgatgacagtcctccacaaatcagagaggagcagagagtgtatgcggatgaggaagcagcagcaccctatccactccagggtcattcttaaattttttwatagaaatcaagccaggctcacacctgtaatcccagcactttgggaggccaaggcaggtggatcacctgaggtcaggagttcgagaccggcccggccaac

SEQ ID NO: 392898 - DNA, 201 bp, Homo sapiens
aggaaagcacattggccgttctctcctctcccccatttcccatactccaagtctcagttatttgaaaagattctataacgtcattatccttaccctacgcratagcagtgaggggacaagtgagccagacagtcagaatgctaaggcagtgtgggctgctgagctcaggctggtgcctcccactgtctgaacaagaatgat

SEQ ID NO: 392899 - DNA, 201 bp, Homo sapiens
acaggcattgagaggaaagcacattggccgttctctcctctcccccatttcccatactccaagtctcagttatttgaaaagattctataacgtcattatcyttaccctacgcaatagcagtgaggggacaagtgagccagacagtcagaatgctaaggcagtgtgggctgctgagctcaggctggtgcctcccactgtctg

SEQ ID NO: 392900 - DNA, 201 bp, Homo sapiens
agaacacaatgggaagatcctcggttggagaatgtagcaataactggaccagtaagtctctctgccagtgtgctctgatgggactgtccgctcacctgtcycttcaagagcagatagtcacgggcataaccctacaggcattgagaggaaagcacattggccgttctctcctctcccccatttcccatactccaagtctca

SEQ ID NO: 392901 - DNA, 201 bp, Homo sapiens
ccccgtttctactaaaaatacaaaataattagtcaggcatggtggcgggtgcctgtagtcccagctgttcaggaggctgaggctagagaatggcatgaacmcaggaggcggaggttgcagtgagccaagatcgcaccactgcactccagcctgggcaacagagcgagactccgtctcaaaaaaaaaaaaagaaaaattact

SEQ ID NO: 392902 - DNA, 201 bp, Homo sapiens
ttattttgagatacgtcccatcaatacctaatttattgagagtttttagcatgaagggctgttgaattttgtcaaaggccttttctgcatctattgagatratcatatggtttttgtctttggttctgtttatatgctggattacgtttattgattgcgtatgttgaaccagccttgcatcccagggatgaagcccacttg

SEQ ID NO: 392903 - DNA, 201 bp, Homo sapiens
tttgttacatttttcttagaaacatatgtattttctttttttttttaattatactttaagttctagggtacctgtgcacaacgtgcaggtttgttacataygtatacacgtgccatattggtgtgctgcacccattaacttgtcatttacattaggtatatctcctaatactatccctccccacttcccccaccccatgac

SEQ ID NO: 392904 - DNA, 201 bp, Homo sapiens
agatctgtcccatgcttaagaggagaggaacacaaagaacatgaatattaggaggtggggataataggagctgccctagtgtctggatgccacaatattcygggccttgaaacaataaaccacattcttttgaaatgcacatggtacgttaatcaagatagaccatgtgtgggtccataggacaagtttcagaggttttca

SEQ ID NO: 392905 - DNA, 201 bp, Homo sapiens
agatataactaacaaggaaaactgtgaattttatagtctgggtaatctgagcttggggtaagcaataattaaaatttttctttctttttttttttttttttaacagtgatccttacgtgagagtgacgttatatgacccaatgaatggagttcttacaagtgtgcaaacaaaaaccattaaaaaggttagacttagcaata

SEQ ID NO: 392906 - DNA, 201 bp, Homo sapiens
gccttacatcctacgatgtttctcattttgggtctgtttgggtctgtttagtgtttcttgatgaccatgttcaggtcacgctctcttggcaggaatcataraaatgatgctgtgttcttcgcatgcatcacaccaggggacacatgatgctgacttgtcccaacactgtcagtgaccttaatcacttggtcaccttggtgt

SEQ ID NO: 392907 - DNA, 201 bp, Homo sapiens
aacccaggaggcagaggttgcagtgagccaagactgcaccactgcactccagcctgggcaacagagcaagactctgtctcaaaaaaaaagaaaaaaaaaaagaattaatacacgaaacgtgattacagtggtgtctggcactgagtaattgctatataagtgttcttgtttttattattaaaaactgcctctgaaaaggtt

SEQ ID NO: 392908 - DNA, 201 bp, Homo sapiens
aaaatacaaaattagccaggtgtggtgatgcatgcctgtaatcccagctacttgggaggctgaggcaaaagaatcacttgaacctgggaggcggaggttgyggtgagccgagatcgcgccattgcattccagcctaggcaataagagtgaaactccatctcaaaaaaaaaaaggcaaaactcttgaacacagtgtctgtgt

SEQ ID NO: 392909 - DNA, 201 bp, Homo sapiens
tgagcccaggaagttgaggctacagtgagccgtgtttgtgccaccttactccagcctaggtgacaaagcgagaccctgcctcaaaaaaaaaaaaaaaaaaatgtagtatagatccttttgtagtttttaagtgtcatgatggggtgtccatgcacatgtgtaagatgtgccactcttgaagcttgttacaacatgggcaga

SEQ ID NO: 392910 - DNA, 201 bp, Homo sapiens
tgacggaattaaaggggaactttttaaaactcccaccgtcatagttggaggcattaacacttctctttcagcagttgataaaacaactaaataaaaaaatmaaaaacataaatttaaacaatattatgaataactttgacctaaagaacactatttctaacaactttcttttcaaatgtacattcttttcaagtgtacatg

SEQ ID NO: 392911 - DNA, 201 bp, Homo sapiens
ggatcgctggagcccaggaggtcaaggctccaatgagccatgattttgccactgcactccagcctaggcgacagagtgagaccctgtctcaaaaaaaaaawaaataaaaaagagtgccagaaaaggagaagcaaatgatttaaaaaagtaacggaggccggttgtggtagctcacgcctgtaatcctagcacttagggagg

SEQ ID NO: 392912 - DNA, 201 bp, Homo sapiens
aacctgggaggcagaggttgcagtgagccgagttcacaccattgtgctccagcctgggtgacaagagtgaaactctgtctcaaaaaaaaaaaaaagaaaasaaatagcaaattataattaaaatctacactttacatgcttagagggaaaaaagtgcaacacattaggtgcaatgcacatgttatttactctgtgcataag

SEQ ID NO: 392913 - DNA, 201 bp, Homo sapiens
aaccatagaatgataagcagacacacacacacacacacacacacacacacacacacaccagcagcaaaattcacacacacacacacacacacacacacaccagcagcaaaattcagtctccaaaacttaacatttataatatatgtccaggatataatgcaaaattacttatctaaaaagaaccaggaaaatggaaggcat

SEQ ID NO: 392914 - DNA, 201 bp, Homo sapiens
actactggaagaactaataaatgaatttaacaccaccacaaaatgcaaagtcagtgtttgtataacccaaaatcagttatatttctgtatcctatcattgrgccattggaaaatacaatttaaaaacgtgtttacaattgtataaaagttaaatatttagaaataaatacaacaaaagatttgtaataaatggacactgaa

SEQ ID NO: 392915 - DNA, 201 bp, Homo sapiens
caaaccatagaatgataagcagacacacacacacacacacacacacacacacacacacaccagcagcaaaattcacacacacacacacacacacacacacaccagcagcaaaattcagtctccaaaacttaacatttataatatatgtccaggatataatgcaaaattacttatctaaaaagaaccaggaaaatggaaggc

SEQ ID NO: 392916 - DNA, 201 bp, Homo sapiens
aaaaaaagcagcagcagcttatgaaagacaggttttcaaaagatttaaaatattactacagcaggcagcagcctttagcttagacaactgattattcaaaraggtgatacaatataaaaatagattaggtaaattaatgtgtgacagattcaaacagctgccaaagagatgtagcaggtttcagacactgatcaggccttg

SEQ ID NO: 392917 - DNA, 201 bp, Homo sapiens
tttagcttggagaagtttgtttttaccgaccttctgaagcctacttctgtcaactcatcaaagtcattctccttccagctttgttctgttgctggcgaggrgctgcgatcctttggaggagaagatgcgctctggtttttagaattttcagcttttctgctctggtttctccccatcttggtggttttatctacctttcat

SEQ ID NO: 392918 - DNA, 201 bp, Homo sapiens
atagcaatgcctgacttcccattaccaattttctgtattagtttgttcttgcattgctataaagaactccctgagactgagcagtttataaagaaaacggstgtaattgactcacagttccacaggctgtacaggaagcctggatgagggggcctcaggaaacttaacaattgtgacagaaggtgaaggggaagcaggctc

SEQ ID NO: 392919 - DNA, 201 bp, Homo sapiens
tgttcttgcattgctataaagaactccctgagactgagcagtttataaagaaaacggctgtaattgactcacagttccacaggctgtacaggaagcctggmtgagggggcctcaggaaacttaacaattgtgacagaaggtgaaggggaagcaggctcatctaacatggccagagaaggaggaggagaatgaagggggaag

SEQ ID NO: 392920 - DNA, 201 bp, Homo sapiens
gagttcgagaccagcctggccaacatggcgaaaccccgtctctaatacaaaaattagccgagtgcagtggcgtgtgtctgtaatcccagctactcggtagrctgaggcaagagaattgcttgaacctgggaggtggaggttgcagtgagacaagatcgcaccaccatactccagcctgggcatcagagcaagactctgtct

SEQ ID NO: 392921 - DNA, 201 bp, Homo sapiens
atgtcattttcaggtagccaaaatcatatatttagggggaaaaaaactgaagcattcccttagagccatgtatcaaaattatgttttctttagctacggtmcagtaagaactggtcttctgactagcctgagctcatgtcgcattaaataaacagtaattttattattaaatatttgaacaaaattcttgatctgatagac

SEQ ID NO: 392922 - DNA, 201 bp, Homo sapiens
gttggagtgctaaaacaagaggcacaacgtcagcagatgaggctggagaggatagcctgatcaggcaagcctggcatgccgtgttaaggatttggaattgkataccaagtagcatggaaatcaaatgcacgcacgcgcgcgcacgcacacacacacacaccattgtcgtcatcatcaacattatttttcatagttaatatt

SEQ ID NO: 392923 - DNA, 201 bp, Homo sapiens
gctgatgtcattttcaggtagccaaaatcatatatttagggggaaaaaaactgaagcattcccttagagccatgtatcaaaattatgttttctttagctayggtacagtaagaactggtcttctgactagcctgagctcatgtcgcattaaataaacagtaattttattattaaatatttgaacaaaattcttgatctgat

SEQ ID NO: 392924 - DNA, 201 bp, Homo sapiens
tgtcttgtttcttaaactataaaatgcatttgaaaatgtacttttggaacttagtaaaatttttcacttaaaaatgattttttaaattactgtttgtaatrtaaatattaaaaaaatgaaaaggagtgctcactgactgttaatatttactctctataaaggaagtcacatttaatttctgtagatgtctggaatgtaaat

SEQ ID NO: 392925 - DNA, 201 bp, Homo sapiens
tcccaaacaaagttacttgatgtttatcaaaaaaatttaaatttaagctgtaactaaaactccttttgatcttctatacctcattgacaagtaaaatctaktgaaaacgtgtgtggatttactgtcaaaaaggtcaaactaaagcagagaaaggacatctgtgaaagcaacagtatttgtcttgtttcttaaactataaaa

SEQ ID NO: 392926 - DNA, 201 bp, Homo sapiens
cttttgggatgttaacatactaaccactctatactgtttttctgcttattctcttctgccctccctttggctccacaacccacctgctcagctagttttcrtttgagttgtgatgtcggctgcaattcctcttgggcaggaaagtgaaagcactgtcaagttagcatttgataaactaaagctacttttttttctcacttc

SEQ ID NO: 392927 - DNA, 201 bp, Homo sapiens
aattaattaattttatatggtgtggagaagggagaaaatatcaaggaaattgaaactaaggatgaataggagttagcaggtgaagagtggggcaatagaascccattgagtaaatagaaccacatgtgcaaaagatgggatggagacgaacaggaaggttggagtgctaaaacaagaggcacaacgtcagcagatgaggct

SEQ ID NO: 392928 - DNA, 201 bp, Homo sapiens
tataccttctgtagcagtggttcttaatgaggaatgatcttgccacccaggggatatttgacaaagccagaaaatgtttttggttgttataactggagggygggtactactgacacaagtgggtagaggccaggaatgttggtaaatatccttcaatgcacaagacagcccccacaacaaaaaaaaaattatctggctcga

SEQ ID NO: 392929 - DNA, 201 bp, Homo sapiens
tacttgagaggctgaggcaggaaaattgtttgaatcgggaggtgggggttgcagtgaaccgagactgcgccactgcactccagtctgggcaacagaagaasactctgtctcaaaaaaaaaaaaaaaagtatatctaaaaattaattaattttatatggtgtggagaagggagaaaatatcaaggaaattgaaactaaggat

SEQ ID NO: 392930 - DNA, 201 bp, Homo sapiens
aacattaaataaattatcacacatcaatattttataagtgttattaaggaaaacagtgtaagatgaaagtatttataacaggctgggcgcagtggctcacrcctgtaatcccagcactttcggaggctgagatgggtggatcacttgaggtcaggagttcgagaccagcctggccaacatggtgaaaccctgtctctacca

SEQ ID NO: 392931 - DNA, 201 bp, Homo sapiens
cattggaaatcaaatttcaacatgcggtttgaaggatacaaatatccaaaccatagaatgataagcagacacacacacacacacacacacacacacacacmcacaccagcagcaaaattcacacacacacacacacacacacacacaccagcagcaaaattcagtctccaaaacttaacatttataatatatgtccaggat

SEQ ID NO: 392932 - DNA, 201 bp, Homo sapiens
cacattggaaatcaaatttcaacatgcggtttgaaggatacaaatatccaaaccatagaatgataagcagacacacacacacacacacacacacacacacacacacaccagcagcaaaattcacacacacacacacacacacacacacaccagcagcaaaattcagtctccaaaacttaacatttataatatatgtccagg

SEQ ID NO: 392933 - DNA, 201 bp, Homo sapiens
cccaagaactagatccacaaattggtaacgtttcgcttattcccctttatttgtatacacacacatacacacacacacacacacacacacacacacacacmgcatagttatgttcagttttttatttgctaagttatttgaaaataagttgcaagctttatgatactttattcctaagcacttcaatatgtgtctcttaaa

SEQ ID NO: 392934 - DNA, 201 bp, Homo sapiens
agagtaatataagtagtacagtgtacacctgtatacccaagaactagatccacaaattggtaacgtttcgcttattcccctttatttgtatacacacacayacacacacacacacacacacacacacacacacacagcatagttatgttcagttttttatttgctaagttatttgaaaataagttgcaagctttatgatac

SEQ ID NO: 392935 - DNA, 201 bp, Homo sapiens
acagattcaaacagctgccaaagagatgtagcaggtttcagacactgatcaggccttgccctctactcttctgtcatccaaaaaaatatggccagattagyatccctaaagcacatctctgaggatacctttctctatcccccaaattctcagtgatttaccaaaatatgcaaaataaagtctgaagttgtctgattttgc

SEQ ID NO: 392936 - DNA, 201 bp, Homo sapiens
cagactagtctcgaactcctgacctcaagagatccactcgcctcagcctcccaaagtgctgggattacaggcatgagccaccatgcccggcccaataactsttaactttgcccttttgaggctattttctagatcctgtaggcatgctttgttacttttattctttttttatttttacacctctgacggtatattttcaaa

SEQ ID NO: 392937 - DNA, 201 bp, Homo sapiens
aggtatttttctctgattttcgtataattgtttttaaagttttcaagtattcattcagtagaagtttctctacctggctttttggtgtaccagagtatctygaataatggaattctgtttgaaatgaaggatatctgctgtaaagaaagaaaattatttatttagtaacttgaaaaaatttaacagcatttcattatttag

SEQ ID NO: 392938 - DNA, 201 bp, Homo sapiens
cctgcctcagcctcctgagtagctgggattacaggtgcacgctgccatgcttggctaatttttgtatttttagtggagacggggtttaaccatgttggacrgactagtctcgaactcctgacctcaagagatccactcgcctcagcctcccaaagtgctgggattacaggcatgagccaccatgcccggcccaataactgt

SEQ ID NO: 392939 - DNA, 201 bp, Homo sapiens
tatcttctgccctggaacttgtctttgaacctccctttgtagaccccctggtacctagtgggtgttcattaaactcttattaattgaatacttttctcccrgtgttaaagttttatgaatatttattttcttttctacagtcacaaatcaagagttaaaggttatctgagactaaaaatgacttatttacctaaaaccagt

SEQ ID NO: 392940 - DNA, 201 bp, Homo sapiens
cctctgcctcccagattcaagcatttctcctgcctcagcctcctgagtagctgggattacaggtgcacgctgccatgcttggctaatttttgtatttttartggagacggggtttaaccatgttggacagactagtctcgaactcctgacctcaagagatccactcgcctcagcctcccaaagtgctgggattacaggcat

SEQ ID NO: 392941 - DNA, 201 bp, Homo sapiens
tataatcctttacagcagtagtgagaactattttattaataaattgtattaatcttaaaggaaaagtaatcaatggttatattcaaccaaaaaatgttaartttatattttctcaaaagagtaaagtataaaaacttaacgtgttttgggattgaaaccagaaacatacagtctgattcaatatatgcaagactaaatttt

SEQ ID NO: 392942 - DNA, 201 bp, Homo sapiens
gctcatgcctataataccagcacttcgagaggccagggtgggccccctaaaagtttaaggtcatcctgagcaaaatagtgggaccccatctctaccaaaawaaaacgaccctcttcacaaggcatggtggcacacacctatagacccagctactttggaggctgacatgggagacaattctttgagccaaggaattcgagg

SEQ ID NO: 392943 - DNA, 201 bp, Homo sapiens
aactattttattaataaattgtattaatcttaaaggaaaagtaatcaatggttatattcaaccaaaaaatgttaaatttatattttctcaaaagagtaaartataaaaacttaacgtgttttgggattgaaaccagaaacatacagtctgattcaatatatgcaagactaaattttaggtatgctagatcctgtattatca

SEQ ID NO: 392944 - DNA, 201 bp, Homo sapiens
agatgatttcttatcgcttattaatatccttttcttttagactgtgggacaccctttagcatttcttgaaggctaggtctgatgttgattaaatccctcakcttttgtttgtccaggaaagtctttatttctcctttatgtttgaagggtattttcaccggatatactattctacaataaaaattttttccttcagcactt

SEQ ID NO: 392945 - DNA, 201 bp, Homo sapiens
tagatcctgtattatcataatttaagagaaaggaaaagaaagaaagaaggaagatcaacatggatgggcagacaaagtaagaggatataaggaaagaagaraatgaaatttgggcaataaaaagaaaaaaatagagataacaattcttataaaagaggtaaaaatttaaaaaaaaaaagaagaaaggttgggcacagtggc

SEQ ID NO: 392946 - DNA, 201 bp, Homo sapiens
attctgtatttgtctgtgtacttacttttacatgtgaattttgtaccttcagatgatttcttatcgcttattaatatccttttcttttagactgtgggacrccctttagcatttcttgaaggctaggtctgatgttgattaaatccctcagcttttgtttgtccaggaaagtctttatttctcctttatgtttgaagggta

SEQ ID NO: 392947 - DNA, 201 bp, Homo sapiens
ctggattttcagaatgacattccaaacaaatttgaaatgaaacttcgccgagcaactgttcttgaagactcttaccggagaattatgggtgtcaagagagmagacttcctgaaggctcgactgtggattgagtttgatggtgaaaagggattggattatggaggagttgccagagaatggttcttcctgatctcaaaggaa

SEQ ID NO: 392948 - DNA, 201 bp, Homo sapiens
gtcttctgtttgaaacatactcgtaattttttaatgtgttcattagcctcctaatttttggctatgatattttgtgcctgatatatgccaagcacttttayagatattttctgttctcaaatccttccaaaacaaatcagcaattcaagtacttcatggcacagaagcttcagtcttcatagagtgacgtacagactgcaa

SEQ ID NO: 392949 - DNA, 201 bp, Homo sapiens
acaggcgtgtgccaccacacccagctaattttgtatttttagtagagacgaggtttcaccctgttggccagaatggtctcgaactcctgacctcaggtgayctgcctgcctcggcctaccaaagtgctgggattacaggtgtgaaccactgcctccagccaagactgtgtaatttataaaggaaaaagttttaattgactc

SEQ ID NO: 392950 - DNA, 201 bp, Homo sapiens
gtctgttctgtcttccattcatttcattttttcacaggggagtgggacaggtcagtcaaagacctaaactacattaggccaggcgtggtggctcacgcctrtaatcccagcactttgggaggctgggattatagatgggttgaagtcaggagttcaagaccagcctgggcaacatggcgaaaccttgtcactactaaaaat

SEQ ID NO: 392951 - DNA, 201 bp, Homo sapiens
ttttacaattgtattttgtattcctgttgaaagatatacttgttccttttttctccctctttccttctctttctctgaaaaatttaataattatctttacrcccgtgttttaaaatttcacagttatatgccttgtatgtacagtttttaaaatccattgtgtttggcctttggtaagtgaattagtccattctgatgctg

SEQ ID NO: 392952 - DNA, 201 bp, Homo sapiens
tgctagatattttgatagacattgatactttggaggtttttcctcaaaatggtttctatagccctgtctccctccctactccaactggggccatcctaagmaaagctctgctgactccctgcctgagttactagggctccagctcctgtagacaccagggtctgtctccagtccaattcattttgtgcaccactgacaaaa

SEQ ID NO: 392953 - DNA, 201 bp, Homo sapiens
ctaaaaattaattaattttatatggtgtggagaagggagaaaatatcaaggaaattgaaactaaggatgaataggagttagcaggtgaagagtggggcaatagaaccccattgagtaaatagaaccacatgtgcaaaagatgggatggagacgaacaggaaggttggagtgctaaaacaagaggcacaacgtcagcagatg

SEQ ID NO: 392954 - DNA, 201 bp, Homo sapiens
ggtgtaggggtggcacacgcactcccttgaccactccaactggtgtctcactagatcacctgccccccaagtccactggttccaatccaagcccagtacgractaggacttaactaggaattgcagtccttgtggcctaaactgcctttcaagtttatttagaaccccagagtgctttagcccacagtggtgaggcttgcc

SEQ ID NO: 392955 - DNA, 201 bp, Homo sapiens
tccaaagtggaatgaagaaatattattcagagtaagtatatattttattttactaaagtggaaaaagtaagtttttttcttaggaggttagaatgataaaytctcatttttaatatttgaagatgtatctcagaatttgcctaaagttgtgaaaatacaaaaggaattgaaattttgtcttataaaaaacataaatgtaag

SEQ ID NO: 392956 - DNA, 201 bp, Homo sapiens
aaattatgtatttacttttgagacggagtcttgctctgtcacacaggctggagtgcaatggcgtgatctcagctcactgcaccctctgcctaccaggttcyagcgattttcctgcatcaccctccagggtagctgggattataggcacgcaccaccacgcccagctaatttttgtatttttggtagagatggggttttacc

SEQ ID NO: 392957 - DNA, 201 bp, Homo sapiens
tgaataaatatagtgtatttttaaaataatttatttttaaattatgtatttacttttgagacggagtcttgctctgtcacacaggctggagtgcaatggcrtgatctcagctcactgcaccctctgcctaccaggttccagcgattttcctgcatcaccctccagggtagctgggattataggcacgcaccaccacgccca

SEQ ID NO: 392958 - DNA, 201 bp, Homo sapiens
ttttacaaaaacagcaatttggattttctttttatgttctaaaaattgttttaagaaactgaaattcatgtcattataatactagaaaaggtattatttaytgactaaactgtgcccattgcagatagtcctgtttaaaatcacctggtgttctaaattctttttcagactttcaggcattcttaaattacttatattata

SEQ ID NO: 392959 - DNA, 201 bp, Homo sapiens
ggggtacacaacctagatcgcttgcatggacagttcacaatagggttcatgctcttatgagaatctaatgccgctgctgatctgacaggcagcagagctcmggaggtaatgtgatcggtgaggagtggctgtaaatacagatgaagctttgctcactggcctgccactcacctcctgctgtgtggctggttcctaaggttg

SEQ ID NO: 392960 - DNA, 201 bp, Homo sapiens
ttagaattatatgatctatacagaggaatcatgacatttgcgcatagaggattttaatacagctctgtgaagacagttgttattaacaatgattaagataytaatacaaatgtaagcctcttgatcttgaatctttgatcttgatcttacctttgaagaaaggtatttaaacttatctgtgcttcttggctcactcagaaa

SEQ ID NO: 392961 - DNA, 201 bp, Homo sapiens
gaaaaaaatcaaattttttgctttcttgttggctgactaagctgccacatgtaccttttatcaagatgagacccagttaactgaaaatccatcaacctaayttatactgcttgcttaagtattgtaatatttaagttgtatagttccttctcttagtaccttggtgtcgtcaaacattttacacttctcttgagagttctt

SEQ ID NO: 392962 - DNA, 201 bp, Homo sapiens
cccattatagtataaagcacagtcaataaggaagtaggaaagaagcagctatacaaatgcaattttgtttattaataagattggtttaccttagaaaacarttaagttaaatttacagtgatttttgtgagccttttttctatctatatctagtatgtagtatgaatccatatagtgtggattttgagaggaaggatgttc

SEQ ID NO: 392963 - DNA, 201 bp, Homo sapiens
tgccaaggaatttagtttttcctctggaccagtatttttgaaatgtggtcctcaccagtctgtaagatgcctcgtataaaacctaccccattgacagatargtttgtataatgccacatgctgtatcttggaataccacagtgcacattagtaaatctaagttcctaaagttctgtaggaaataaacttttgagcttggtt

SEQ ID NO: 392964 - DNA, 201 bp, Homo sapiens
taccctcctgaacttaacctggagcctgactctagaagctagtcactagtatttgttgacctcaaggaatttaccgtctggttggagtgcaagagaactawaatacagatattaaaaacagatacaaagggaagtagaattacagaggaggaaattagcaatttagtatcatcaggtaaatttttattaaaatggcattgt

SEQ ID NO: 392965 - DNA, 201 bp, Homo sapiens
aaaaattgaatatgaagttcagtagtttgtaacttttagattcatttacctttgaaaatgattaaaaccggaatctggagcaataaatctaacaaccaaawgatgagctaaatagtgacttccaactatgtgcagtgtgttggtaggccttacactatatggaaaaacttaggaattatttttaaccttccttttggaaca

SEQ ID NO: 392966 - DNA, 201 bp, Homo sapiens
tatgtcttttgattggagagtttagttcacttacattcattgttattattgataagtaaggacttctgccatttttaatttgttttctggttgttttgtgstcctttttgtgaaagtgttttctttagtggtatgctttaatttcttggtttatctattgtatgtctgttgtagattttttaacttgatgttacatgaggg

SEQ ID NO: 392967 - DNA, 201 bp, Homo sapiens
catatgccaggagaagaatatgtattatgcagccattggatgaaatgttctgtaaatatctattaggtccatttggtttacagtgcagattaagtccaacatttctttgttggttttctgtctgaatgatctatccagtgccgaaagtgggatattgaaatttccaactattactatattgaagtctagctgactctttga

SEQ ID NO: 392968 - DNA, 201 bp, Homo sapiens
ccatatgccaggagaagaatatgtattatgcagccattggatgaaatgttctgtaaatatctattaggtccatttggtttacagtgcagattaagtccaacatttctttgttggttttctgtctgaatgatctatccagtgccgaaagtgggatattgaaatttccaactattactatattgaagtctagctgactctttg

SEQ ID NO: 392969 - DNA, 201 bp, Homo sapiens
tccatatgccaggagaagaatatgtattatgcagccattggatgaaatgttctgtaaatatctattaggtccatttggtttacagtgcagattaagtccaacatttctttgttggttttctgtctgaatgatctatccagtgccgaaagtgggatattgaaatttccaactattactatattgaagtctagctgactcttt

SEQ ID NO: 392970 - DNA, 201 bp, Homo sapiens
ctaggcttctctttgctgggagactttactacagcttcaacctcattatttgttactggtctttttatgttttggatttcttcatggttcaatcttggaargttgtatgtgtataggaatttatccatttcctttaggttttataatttattggcatatagttgttcgcagtagtctctaatgatcctttgagtttctgtg

SEQ ID NO: 392971 - DNA, 201 bp, Homo sapiens
gcattgaatctgtagattgctttgggtagtatggacattttaacaatattgattgttccaatccatgaacatggaatatttttcccttttgttttttttttggtgtcgtcttctatctctttcatctatagttttcattgtagagatctctcacttctttggttaagtttattcctagttgtttaattttatttgtaggga

SEQ ID NO: 392972 - DNA, 201 bp, Homo sapiens
gagcccaggaggcagagcttgcagtgaagtgagattgcaccactgcactccagcctgggccacagagcgagcctccgtctcaaaaaaaaaaaaaaaaaaaatttttgcccagattggataagggtaccccttttgccacgttcttgccagcatttgttattgcccatcttttggataagagccattttaactggggtgaga

SEQ ID NO: 392973 - DNA, 201 bp, Homo sapiens; identical to SEQ ID NO: 86134

SEQ ID NO: 392974 - DNA, 201 bp, Homo sapiens
atcctcagcagcaccggcttctttttgaagtgtttgacgaaaaccgattggtaagttatattgtgcttatatgaaatatgaagtaagggtacatttcagtrgagcagccaggggaagtgggtaagcagtctgggatttgagtgatggcttgggggtggttatggagactctgggcaaaatggtgagggagatagaatttgt

SEQ ID NO: 392975 - DNA, 201 bp, Homo sapiens
cttcgggaggccaaggcgggtggatcaggaggtcaggagatcgagaccatccttgctaacacggtgaaaccccgtctgtactaaaaatacaaaaaaaaaaattagccaggtgtggtggcgggcgcctgtagtcccagctcttagggaggcgaggcaggagaacggcgtgagcccaggaggcagagcttgcagtgaagtgag

SEQ ID NO: 392976 - DNA, 201 bp, Homo sapiens; identical to SEQ ID NO: 86136

SEQ ID NO: 392977 - DNA, 201 bp, Homo sapiens
aggatagcctgatcaggcaagcctggcatgccgtgttaaggatttggaattgtataccaagtagcatggaaatcaaatgcacgcacgcgcgcgcacgcacrcacacacacaccattgtcgtcatcatcaacattatttttcatagttaatatttgttcctcatatgcttaacatttgtttgctagttatttctttatttct

SEQ ID NO: 392978 - DNA, 201 bp, Homo sapiens; identical to SEQ ID NO: 86137

SEQ ID NO: 392979 - DNA, 201 bp, Homo sapiens
attaattttatatggtgtggagaagggagaaaatatcaaggaaattgaaactaaggatgaataggagttagcaggtgaagagtggggcaatagaaccccaytgagtaaatagaaccacatgtgcaaaagatgggatggagacgaacaggaaggttggagtgctaaaacaagaggcacaacgtcagcagatgaggctggaga

SEQ ID NO: 392980 - DNA, 201 bp, Homo sapiens; identical to SEQ ID NO: 86139

SEQ ID NO: 392981 - DNA, 201 bp, Homo sapiens
atacagccacatcatttgttttggtattgcccatctctgctttcacacgacatcatctgaataaagtagttacagcagcaaccatatggcccacagccagyatttactgtctggatcttaacaggaaatgtgtgctaacctctgctctagcatcttcttcaagaagcttcacagtagatagttgtacgtgaatatgaatat

SEQ ID NO: 392982 - DNA, 201 bp, Homo sapiens; identical to SEQ ID NO: 86141

SEQ ID NO: 392983 - DNA, 201 bp, Homo sapiens
aatctcactctgttgcctaggctggagtgcagtggcgcagtctcagctcactgcaacctctgcctcccaggttcaagctattctcctgcctcagccttccragtagctgggattacaggcacccgcctccttgcccagcttatttttgtatttttagtagagacggggtttcaccatgttggccaggctggtcccttctag

SEQ ID NO: 392984 - DNA, 201 bp, Homo sapiens
aattaattttatatggtgtggagaagggagaaaatatcaaggaaattgaaactaaggatgaataggagttagcaggtgaagagtggggcaatagaaccccwttgagtaaatagaaccacatgtgcaaaagatgggatggagacgaacaggaaggttggagtgctaaaacaagaggcacaacgtcagcagatgaggctggag

SEQ ID NO: 392985 - DNA, 201 bp, Homo sapiens
agaccatcctagctaacacggtgaaaccccgtctctactaaaaatacaaaaacttacccaggcgtggtggcgggcgcctgtagtcccagctactcaggagsctgaggcaggagaatggcgtgaacccggaaggcggagccgagatcacgccactgcactccagcctgggcaacagagcaagactcctctaaaaaaaaaagt

SEQ ID NO: 392986 - DNA, 201 bp, Homo sapiens
cagtggctcatgcctgtaatcccagcactttgggaggccgaggcgggcggatcacaaggtcaggatatcgagaccatcctagctaacacggtgaaaccccrtctctactaaaaatacaaaaacttacccaggcgtggtggcgggcgcctgtagtcccagctactcaggaggctgaggcaggagaatggcgtgaacccggaa

SEQ ID NO: 392987 - DNA, 201 bp, Homo sapiens
tgaggtcgaggctgcagtaagccatgttcacgccactgcactccagcctggactacagagctgtctccaaaaacaaaagcttcttcagatgtaaagaagtmtatattactaagtgattaaagaaaatgcagaaactgtctcataccatagaggaaaccaagacaatatacctagttgtgttttccctgagtatattacgta

SEQ ID NO: 392988 - DNA, 201 bp, Homo sapiens
tccattagatcagagcccgctcaagctgagttccatggtgtttttccctctgcacgttataatgtcctctatacaatgaatatgtggaagttctcattgaytgacagacattcacccaagacacaattttagatggaccggatgagcagcagaatctcgagatgatttatattttagtaccagaaaagttgtttccatgcc

SEQ ID NO: 392989 - DNA, 201 bp, Homo sapiens
aaccccaactcaaaggccagcttctctttgacattgtctctgatcgttcacttaaacttccttagcatcttctttgtgtcataacaattattgatttattkatttatttatttatttatttatttatatatgtttgccttttctctaccttctattcctttccctagatatcttctgccctggaacttgtctttgaacctc

SEQ ID NO: 392990 - DNA, 201 bp, Homo sapiens
gggtttcatcactcaggcgtgcactggcattcacatgcccggcagccaggctggagtttatcagtccttggtctgtttcttccctgcaatatcacatccaycagtctactaaggccttctgcttcctgctcagtgctgtcccagccacagcctggatggcagcttggaccttaaccctgcctccatcctcttcctaacaca

SEQ ID NO: 392991 - DNA, 201 bp, Homo sapiens
ctgaatgctttctttctgaccctctttgacttgattaaattgtgagcaattacatattggctttgcggttagaaattaaataaggttcattgatacttagmaagttattttataaagaatagcagctgatacatatttaataggaaggccttctatccaaaaaattgactgtatagaggcattgtatccagtctttctaag

SEQ ID NO: 392992 - DNA, 201 bp, Homo sapiens
atgttggttgtacctctgaatgctttctttctgaccctctttgacttgattaaattgtgagcaattacatattggctttgcggttagaaattaaataaggktcattgatacttagaaagttattttataaagaatagcagctgatacatatttaataggaaggccttctatccaaaaaattgactgtatagaggcattgta

SEQ ID NO: 392993 - DNA, 201 bp, Homo sapiens
aggtccctctgtcttctctcactcagctattccaggggtctttaactgaccagtgtgcctcttgtttctcctctttaaaaccaccctttacaccctgtccygtcagcttctgagaacccagcaatctgaccgtgtggctccccaacccagaaactctcttcttaactgcattcacactgtccaccctctggccccagacta

SEQ ID NO: 392994 - DNA, 201 bp, Homo sapiens
attattaaagaaggatcagagtgttgaaattattgtaagcatcaaggctgcttgcccgtgaattaaggaagtttgcaggaggataatctcagtaaagtctrtagactgaaaactttcataaatcctgagttgttaacagtgttttcaggcccactaatgctagtgttgtttaatacatagaaaaaattgaatatgaagttc

SEQ ID NO: 392995 - DNA, 201 bp, Homo sapiens
agtaattcagctattataattttacatttatatagttactctttgagacatacataaaagctcaattttgtatgattcatataagcaactcaattttgtcrgtctgatagggcttttataaagctctcttatagctatctctccctttactgaaagtaattatgtatttggctcttaggatattttttaaccttctgaagt

SEQ ID NO: 392996 - DNA, 201 bp, Homo sapiens
ttattgattaacacatactttgttttctgcctcctataacattgtttatgaatttcatccttaagttctttttatttaataaatgttataaactacctatrttattataagctagttttttcccaaatattttaaaacttttcgttagggaaaatttcaaacatacacaaaagtagaaagaatattgcagtgaacccctat

SEQ ID NO: 392997 - DNA, 201 bp, Homo sapiens
cagcctcctgactagcggcgattacaggcacctgccaccatgctgacctaatttctctcaaatatttccttccttgtcttccaacttgtgatttataattwctttgtttttttctgattacttttattgattaacacatactttgttttctgcctcctataacattgtttatgaatttcatccttaagttctttttattta

SEQ ID NO: 392998 - DNA, 201 bp, Homo sapiens
gaaaaaaaagtttagggattattattaaacattaccagagaaccagtttctctcgcaaatatttctttttatttatttatttattttttatttgagatggrgtctcgctctgtcacccaggctggaatgcaatagcacgatctcggttcactgcaacctccacttcctgggttcaagtgattctgctgcctcagcctcctg

SEQ ID NO: 392999 - DNA, 201 bp, Homo sapiens
taattaattttatatggtgtggagaagggagaaaatatcaaggaaattgaaactaaggatgaataggagttagcaggtgaagagtggggcaatagaacccyattgagtaaatagaaccacatgtgcaaaagatgggatggagacgaacaggaaggttggagtgctaaaacaagaggcacaacgtcagcagatgaggctgga

SEQ ID NO: 393000 - DNA, 201 bp, Homo sapiens
tgtttgaatcgggaggtgggggttgcagtgaaccgagactgcgccactgcactccagtctgggcaacagaagaacactctgtctcaaaaaaaaaaaaaaaagtatatctaaaaattaattaattttatatggtgtggagaagggagaaaatatcaaggaaattgaaactaaggatgaataggagttagcaggtgaagagtg

SEQ ID NO: 393001 - DNA, 201 bp, Homo sapiens
ctacaatttgggtacttggtgtgctcattgttactgggatatactcttggaccatctctgaacagttaagcgtgtgtgtgtgtgtgtgtgtgtgtgtgtgtatgtgtactctacacacatatataagtatacacaaagatctatagctatttctatatcaatctgtaaatacataaatttaaaaatcatgaattcatactg

SEQ ID NO: 393002 - DNA, 201 bp, Homo sapiens
gctacaatttgggtacttggtgtgctcattgttactgggatatactcttggaccatctctgaacagttaagcgtgtgtgtgtgtgtgtgtgtgtgtgtgtgtatgtgtactctacacacatatataagtatacacaaagatctatagctatttctatatcaatctgtaaatacataaatttaaaaatcatgaattcatact

SEQ ID NO: 393003 - DNA, 201 bp, Homo sapiens
tgctacaatttgggtacttggtgtgctcattgttactgggatatactcttggaccatctctgaacagttaagcgtgtgtgtgtgtgtgtgtgtgtgtgtgkgtatgtgtactctacacacatatataagtatacacaaagatctatagctatttctatatcaatctgtaaatacataaatttaaaaatcatgaattcatac

SEQ ID NO: 393004 - DNA, 201 bp, Homo sapiens
tctgagcctgcagcgtgcagcatggagaatggacttaaggaagtaagacttgcaacggggaaacctcttaggatattgctgccattgtaatcaaagtgacraaagatgaaacttgaagttaaaacaacaataaaactagtaactaaagtggagagggagtgtatttgagaatggtttctgtgaaacattcaagagaaggtg

SEQ ID NO: 393005 - DNA, 201 bp, Homo sapiens
gtgacgacatatagctgcctttctttgtggctatattttattcagaatataaattaaaaagttacttaaatttttccaattggtagacagattgtcagagyactcatttcttaagctaacttacaatcttctgttaaatatgtatctggctgggcatggtggctgacgcctaaaatcccaacacttgaggaggctgaggcg

SEQ ID NO: 393006 - DNA, 201 bp, Homo sapiens
accatcagaaaagttgaaagtacaacacaaagagctccagtattcttctcatacagattctgcaactgttaaccttttcactgcaattgttccatcacctktttttgccattttcattaatctttttctgaaccacttgagagcaagctgcagacacaatgccccatcatctttaaatactctagtgtgtatttttctaaa

SEQ ID NO: 393007 - DNA, 201 bp, Homo sapiens
atcacttgagtcaaggaggtcgaggctgcagtgagccacagtcgccccactgcactccaacctaagggacagagcgagaccctgtctcaaaaaaaaaaaaattaaattaaaaaataaaaataaaacatttaacacgaagtcacataggcatatgaggaatgtgctaagtgctcctggatatccagagaagttaggttttat

SEQ ID NO: 393008 - DNA, 201 bp, Homo sapiens
tgaagccaaaaaagtataaatactttataaagaagttaccacatctgttccctttgaaaactagattaagctctgggatttgaagaaggcaaagctgtttsttttcagctaaataactaatgctgattatgcctatgcttattaaaaatattgtacgaccatttggaaaggttgttccgtcgtaaatgatatgtggcttct

SEQ ID NO: 393009 - DNA, 201 bp, Homo sapiens
tggcatgaacccaggaggcggaggttgcagtgagccaagatcgcaccactgcactccagcctgggcaacagagcgagactccgtctcaaaaaaaaaaaaaraaaaattacttaaaattagcagcagatgaatatattttaattaattattaaaagaccaacatagcttaaataatactaaacttatttaataaattaataa

SEQ ID NO: 393010 - DNA, 201 bp, Homo sapiens
gaggctgaggctagagaatggcatgaacccaggaggcggaggttgcagtgagccaagatcgcaccactgcactccagcctgggcaacagagcgagactccrtctcaaaaaaaaaaaaagaaaaattacttaaaattagcagcagatgaatatattttaattaattattaaaagaccaacatagcttaaataatactaaact

SEQ ID NO: 393011 - DNA, 201 bp, Homo sapiens
tttgatacatatacgtatgtatcatatacatgtacagtatgtatatgtatttttacatacgtatatgtattttacatactgtatatgtatatgatacataygtatatgtattttacatactgtatatgtatatgatacatatgtatatgtatttttacatatacatactgtatgatacagtatgtatatgtaaaaagttat

SEQ ID NO: 393012 - DNA, 201 bp, Homo sapiens
aattgtttagtgcttggcttactactaatagaaaaattacctaaaggccgggtgcagtggctcatgcctgtaatcccagcactttgggaggccgagggggkagatcacgaggtcaggagatggagatcgagaccatcctggctaacatggtgaaaccccgtttctactaaaaatacaaaataattagtcaggcatggtggc

SEQ ID NO: 393013 - DNA, 201 bp, Homo sapiens
ttctttatagatatcaaacagctaaatggattgtttcaaagtaccagcaggggccagcaaagagctcttagagtttttcagaacagaattggcattgagayatgtttatttgatgtgctaaatcctttttagacttctttacttaccacaacactctcttaagtgaatgaattgcagagacagtggaataaaatatcctgt

SEQ ID NO: 393014 - DNA, 201 bp, Homo sapiens
agcctgggaggtcaaggctgcagtgaaccgtaattgagccactgtgcttcatcctgggcgacagagggagatgctgtctcaaaacaaaaaaaaaaaaaagaagaagaagaagaagaaaaaaaaagcagcagcagcttatgaaagacaggttttcaaaagatttaaaatattactacagcaggcagcagcctttagcttaga

SEQ ID NO: 393015 - DNA, 201 bp, Homo sapiens
acaagcgattcaagacattttggaaacgtcagtctctggaatgggtcgtctttttctttctatgatatctggtatctaatgttttacttaggataaagactactacttaatagctcttttaggcaccacaaatgattttttcttttgatgcagtgcagctgcttctagcctgtctacggacagagatctttgttatgactt

SEQ ID NO: 393016 - DNA, 201 bp, Homo sapiens
gagcctgggaggtcaaggctgcagtgaaccgtaattgagccactgtgcttcatcctgggcgacagagggagatgctgtctcaaaacaaaaaaaaaaaaaagaagaagaagaagaagaaaaaaaaagcagcagcagcttatgaaagacaggttttcaaaagatttaaaatattactacagcaggcagcagcctttagcttag

SEQ ID NO: 393017 - DNA, 201 bp, Homo sapiens
tgagcctgggaggtcaaggctgcagtgaaccgtaattgagccactgtgcttcatcctgggcgacagagggagatgctgtctcaaaacaaaaaaaaaaaaaagaagaagaagaagaagaaaaaaaaagcagcagcagcttatgaaagacaggttttcaaaagatttaaaatattactacagcaggcagcagcctttagctta

SEQ ID NO: 393018 - DNA, 201 bp, Homo sapiens
tgtgaagatcacctgagcctgggaggtcaaggctgcagtgaaccgtaattgagccactgtgcttcatcctgggcgacagagggagatgctgtctcaaaacraaaaaaaaaaaaagaagaagaagaagaagaaaaaaaaagcagcagcagcttatgaaagacaggttttcaaaagatttaaaatattactacagcaggcagc

SEQ ID NO: 393019 - DNA, 201 bp, Homo sapiens
gaatgctgtgaatgatggtcaccttgtaagcagtccagccatttgtagtggtagccttagtaacttttcaaccagtgataatgggtcttacagcagcaacrgtagtgattttgggtcatgtgcaagtatcacaagtggaggttcatatactaacagtgtcatcagtgacagtagtagttatacttttccaccaagtgatga

SEQ ID NO: 393020 - DNA, 201 bp, Homo sapiens
tgcgcgcctgtagtcccagctacttgggaggctgaggtaggaggatcacttgagtcaaggaggtcgaggctgcagtgagccacagtcgccccactgcactscaacctaagggacagagcgagaccctgtctcaaaaaaaaaaaaattaaattaaaaaataaaaataaaacatttaacacgaagtcacataggcatatgagg

SEQ ID NO: 393021 - DNA, 201 bp, Homo sapiens
cctcagcctcctgagtagctgggattacaggcatgtgccaccgtacccggctaattttgtatttttagtagagacggggtttctccatgttggtcaggctwgtctcaaactcccaacctcaggtgatccacccacctcggcctcccaaagtgctgggattacatgcctggccaaaatgcctcattttcatacctctggtct

SEQ ID NO: 393022 - DNA, 201 bp, Homo sapiens
cttgctcgatgtcataaaataagcatgagatagcataggcaaggtatatatgtagttattgttatacagaaggcatatgtgaagtggatataagatgtatragacaaactccctctctacagggagagtacagtctctttttcctggagaaaaaaataaaggttacagtcttacgttctttcaccttggaactatagaata

SEQ ID NO: 393023 - DNA, 201 bp, Homo sapiens
ttcagcatcagttgaaatgatcatatgggttttgtcctccattctgttgatatgacatttgactttcatttgtgtatgttgaaccatcctttcatccctgrtatgaatcccacttggtcacgatgaatgattttttttcaatgtgttgtcaaatttggtttgctagtattttattacggatttttgcatcaatgtttatca

SEQ ID NO: 393024 - DNA, 201 bp, Homo sapiens
atactattctacaataaaaattttttccttcagcacttcaaataaatcatgccactgtctcctgcctattaggtgtccactcagaaacctgctgccagatrtattggagctgctttgttttttgttttgttttgttttgtttttaattttctcttgctgcgtctaagatccattctttatctctggcctttgggagtttgg

SEQ ID NO: 393025 - DNA, 201 bp, Homo sapiens
ttctcccagacaaatagagtgtctctctctctcacacacaaatagagtctctctctctctctttctctttctgtgtgtgtgtgtgtgtgtgtgtgtgtgtktttgtgtgtgtgtgtgtgttgagatgcctggaactaggggagggatgacacaagcatccctgtggccaccaccactgggaatgcactgggtcaaacctaa

SEQ ID NO: 393026 - DNA, 201 bp, Homo sapiens
tctcccagacaaatagagtgtctctctctctcacacacaaatagagtctctctctctctctttctctttctgtgtgtgtgtgtgtgtgtgtgtgtgtgtgkttgtgtgtgtgtgtgtgttgagatgcctggaactaggggagggatgacacaagcatccctgtggccaccaccactgggaatgcactgggtcaaacctaaa

SEQ ID NO: 393027 - DNA, 201 bp, Homo sapiens
ctaagtactttctggaaatatatgttgaaccctgtaaaaatctcatttttcattgaactttgaatgtactcatttattataatttatatctgtaatgaacwcatggtaccagaattattcattggattataatctgttgctatcataatttattttagtgctcaagttaggccatctttggccagtgggagcttttttcag

SEQ ID NO: 393028 - DNA, 201 bp, Homo sapiens
tttttgtagagatggtgtttcaccatgtttcccaggctagtctcaaattccttggctcaagcagtctgcccacccagcctcccaaagtgctgggattacagaatgagccactgcgtctggccacaggaagttttaaaaatagccactttgaggaataaatgagagagaacagactgtgcacatgtacattttctggccaat

SEQ ID NO: 393029 - DNA, 201 bp, Homo sapiens
gtaatttttttattgtgggctggacaatgaatatagtaactaatagagacagtgaattttattatatttccctgaggagagttgatttcctttttttttttctttttgagcggagtcttactctgtcacccaagctggagtgcagtggcatggtccaggctcactgcaacgtctgcctcctggatttaagccactctcctg

SEQ ID NO: 393030 - DNA, 201 bp, Homo sapiens
tttgcatgtctagtaatttttttattgtgggctggacaatgaatatagtaactaatagagacagtgaattttattatatttccctgaggagagttgatttyctttttttttttctttttgagcggagtcttactctgtcacccaagctggagtgcagtggcatggtccaggctcactgcaacgtctgcctcctggatttaa

SEQ ID NO: 393031 - DNA, 201 bp, Homo sapiens
gagtctcgctctgtctcccaggctggagtgcaatggtgccatctcagctcactgccacctccacctcccatgttcaagcaattctcttgcctcagcttccygagtagctgggattacaagcatgcaccaccatgcctagttatttttttttgtatttttagtagagacggggtttcaccttgttggccaggctggtctcaa

SEQ ID NO: 393032 - DNA, 201 bp, Homo sapiens
cctttgaacatctttataatagctgctttattttccttgtctgcttattccatgatctgcgtcatcttgtggctggtttctgttaattactttttctcttyctactgggtttttttttttatttctttgcatgtctagtaatttttttattgtgggctggacaatgaatatagtaactaatagagacagtgaattttatta

SEQ ID NO: 393033 - DNA, 201 bp, Homo sapiens
ttttgtatttttagtagagatggggtttcaccatgtaggtcaggctggtctcgaactcctgacctcatgatccgccatccttggcctcccaaagtgctggrattgattacaggcatgagacaccatgcccagccagcccttttatttttaatattctcttccttgagttcaagcaaagttacttaaaatgcttttttgata

SEQ ID NO: 393034 - DNA, 201 bp, Homo sapiens
cccctttcatgcactttgcctaatattcagtgggcctttttattctttttttttggagacggggtctcactccgtcacccagactagcgtgcaatggtgcratctcggctcactgcaacctccacttcctgggttcaagcaattctcctgcctcagcctcctgagtagctgggattaaaggcatgtaccactatgccctgc

SEQ ID NO: 393035 - DNA, 201 bp, Homo sapiens
gccggaacccgggaggtagaggttgcagtgagccgagatcacgccattgcactccagcctgggcaaaaagagtaaaactgcatctcaaaaaaaaaaaaaaagaaaagaaaagaaacttactgcaatatagccttgaaaacatcattaaaagctaacttacccatttcaaaaattatcatcaactcatgttctagaatagga

SEQ ID NO: 393036 - DNA, 201 bp, Homo sapiens
gttcagtaaagacttacccctgccattttgttatttgttttctggttgttttatagttttttcttccttcttttcttccttcctgtcttccttttagtgamggtgattttatctggtggtatgttttaatttctgtcttttaattttttgtgtatcttttgtatgtctttttatttaaggttaccaagaggcttgcaaata

SEQ ID NO: 393037 - DNA, 201 bp, Homo sapiens
aagtacctttttccatccctttgtttttagtctttatgtctttataggtgaaatgtgtttcttgtagacaacagattgttgggtcttgattttttttttttaaatctattcagccactgtatgtcttttgattggagcgtttagtctgtttatattcagtgttattattgttcagtaaagacttacccctgccattttgtt

SEQ ID NO: 393038 - DNA, 201 bp, Homo sapiens
gttttaaggcctattcccagaaactacttggataataggcaattctgtctatgttgccggcttcttacaggctatggagcctaccatgtgctagctgttgwgaggcctcacccgtttgtgtccactctccctttacatcacaggtgacagggaaacaagacagaccaggagaagccaggacaagaggctttgtaggctgaa

SEQ ID NO: 393039 - DNA, 201 bp, Homo sapiens
aagaattgcttgaacctggaaggtggaggttgcggtgagctgagatcacaccactgcactccagcctgggtgacagagcaagactctgtctccaaaaaaaacaaaacaaaacaaaacaaaacactaaattaaattatttttgactaaagttaccctattctgctatcaaatactagatcttatttattcttttttgtgtag

SEQ ID NO: 393040 - DNA, 201 bp, Homo sapiens
gatcacgaggtcaggagatcgagaccatcctgggtaacacagtgaaaccccatctctacaaaaatacaaaaaaattagccaggcatggtggcgggcacctrtagtcccagctactcgggaggctgaggcaggagaatggcgtgaacctgggaggtggagcttgcagtgagccaagattgtgccactgcactccggtctggg

SEQ ID NO: 393041 - DNA, 201 bp, Homo sapiens
tatatatgaaggggaatttagtaggagaattgactcacatgatcacaaagtgatgtcccactattggccatctgcaagctgcggagcaaggaagccagtcmgagtcccaaaacctcaaaaataggaaagccaacaatgcagccttcagtctgtggctgaaggtacaagagcccctagcatatcactggtgtaagtccaaga

SEQ ID NO: 393042 - DNA, 201 bp, Homo sapiens
tcccagacaaatagagtgtctctctctctcacacacaaatagagtctctctctctctctttctctttctgtgtgtgtgtgtgtgtgtgtgtgtgtgtgttkgtgtgtgtgtgtgtgttgagatgcctggaactaggggagggatgacacaagcatccctgtggccaccaccactgggaatgcactgggtcaaacctaaagc

SEQ ID NO: 393043 - DNA, 201 bp, Homo sapiens
ttattctaccatcataattgaaaaaggtagtttttctgaatgtagaattctacataagaaatatctttctctcattattttgcaggaagtactctcttatmtttcaggtttgtgtattagctactttgttactctccaagcttttagaatttctttatctctggtgctctgaaatgtcacggtgatgtgccttgcagcaag

SEQ ID NO: 393044 - DNA, 201 bp, Homo sapiens
agcccaggaggcagagcttgcagtgaagtgagattgcaccactgcactccagcctgggccacagagcgagcctccgtctcaaaaaaaaaaaaaaaaaaaawttttgcccagattggataagggtaccccttttgccacgttcttgccagcatttgttattgcccatcttttggataagagccattttaactggggtgagat

SEQ ID NO: 393045 - DNA, 201 bp, Homo sapiens
tgcaaggagaaaggttaaaagttaaatgtatctgggatagctgtgttatttataattcccctggaattgtttttgattaatgcttgttacattttccccakgaggctggggagtgtttcagtcgaggctaacatggatggtttttaatatcaggagctccacaaatatggattaactttttagagatagatggtaatctct

SEQ ID NO: 393046 - DNA, 201 bp, Homo sapiens
aggcagatcacctgaggtcaggagtttgagaccagcctgaccaacatggcgaaaccctgtctctactaaaaatacaaaaattagccaggcgtggtggcgcrtgcctgtaatcccagctacttgggaggctgaggcaggagaatcacttgaacccgggaggcggaagttgcaatgagccaagatcgtgccactgcactccag

SEQ ID NO: 393047 - DNA, 201 bp, Homo sapiens
gcaatgaagagagtaatatgaacaaacaatcatggccgtcaataaagatgctttagtgaaagtattctcctttgggaaaaagagtcaacctaaataaatarcaactgcctttaactgaatacccactctgtgccaggcaccaggttagattttttcatactttagctgtaatcatcacaacattattgcagaagtaggaag

SEQ ID NO: 393048 - DNA, 201 bp, Homo sapiens
gtgaccttaatcacttggtcaccttggtgtctgccaggtttcttctctgtaatgtcaccttttttctctttataattgatagtattttcaggggacatatygtaagattatgccaatatcctatttctcgtcaagtcttcatcctcagttttagcatccattgatgaattctatctgaaccaaacaccactattttgtttt

SEQ ID NO: 393049 - DNA, 201 bp, Homo sapiens
gtttcatggaagatagtttttccatggaccggggatgcggtccagtggtttcaggatgattcaagcacattacatgtatggtgcactctacttctattatkattacattgtgatatgtaatgaagtaattatacagctcaccgtaatgtagaattagtgggagccctgagcttgttttcctgcaactagatggtcccaagt

SEQ ID NO: 393050 - DNA, 201 bp, Homo sapiens
aagtctttgctattgtgaatagtgctgcaataaacatacgtgtccatgtgtctttatagcagcatgatttataatcctttgggtatatacccagtaatggkatggctgggtcaaatggtatttctagttctagatccgtgaggaatcgccacactgtcttccacaatggttgaactagtttagagtcccaccaacagtgta

SEQ ID NO: 393051 - DNA, 201 bp, Homo sapiens
ggttttgatcatcataatatggttatttaagatgttaacatttggtggatctgggtgaaaagtatatgaggattctctcgcagtatttttgcaattttttwaaatctgaaattcttttaaaatgagaagttggctgggcacagtggctcacacctgtaatcccagcactttgaaacaccaaggcaggagactcgcttgagc

SEQ ID NO: 393052 - DNA, 201 bp, Homo sapiens
gcaggttaaggagctaaggtactatgtatacagttacaacaatgattgctattcagatttctaaatctgtatagtagttacttttctctactgttattttrtttcccccatctgttgttttctaaatctcctatgttatgttgttaggatgctcagagatttcagtaccctattatttaatgtgcattagcatttttccca

SEQ ID NO: 393053 - DNA, 201 bp, Homo sapiens
atgtatctatttgatgtagtgctaaagttttaattcattgtaaagttttggtatttccaaatttacctaactgtttgaattcacacattaaaaaaaaaaaattaacagtccctatattaactaacttgactagattcctagtatggctactatttggaaattcaatctttgatttgatgcttaattacatggggttttgtt

SEQ ID NO: 393054 - DNA, 201 bp, Homo sapiens
ttaaaaaatacaatttgtttcttctgtctgcaatgaatattattgcaagtgtagaaagaactttattcagatagaaaatgtactacattcctaaatttgtktgagccccattaagtcaaaaccttgaggcttcttttccaattgaaaagacatgaaacatacacttgtagagaaacttttcaacaaaacattgtctgagca

SEQ ID NO: 393055 - DNA, 201 bp, Homo sapiens
tccagagaaacagaaacaatagattgtgtatatattttatgtattatttatttttcatatattttatatatgaaattatgtataatatatgaatatatatwtttccacacaatatatatatagtgaagacttcaatctgaaatctgcagggcaggccaggaagctgagaacttaggcagggattctacattgtagtcttga

SEQ ID NO: 393056 - DNA, 201 bp, Homo sapiens
tattcagatagaaaatgtactacattcctaaatttgtgtgagccccattaagtcaaaaccttgaggcttcttttccaattgaaaagacatgaaacatacamttgtagagaaacttttcaacaaaacattgtctgagcacattttctgtatccatcttttatagccacaagtcagaatgttcacatctccttcagtatggag

SEQ ID NO: 393057 - DNA, 201 bp, Homo sapiens
agaaacagtgttatgtgtgcaaagcttatcagttacaagcaccagaaaaattaaacagttttgttcattttttagctaacagagaaactagcttttttttwaaaaaaaagtctgtttttagtgttaaactacattcatgttttttttgccctcaagaaatggtaattatactggcaactaaagatattgccaatgaaatct

SEQ ID NO: 393058 - DNA, 201 bp, Homo sapiens
gattggaaaaaacaaactagaattccatgccaaggaatttagtttttcctctggaccagtatttttgaaatgtggtcctcaccagtctgtaagatgcctcrtataaaacctaccccattgacagataggtttgtataatgccacatgctgtatcttggaataccacagtgcacattagtaaatctaagttcctaaagttct

SEQ ID NO: 393059 - DNA, 201 bp, Homo sapiens
gagaggttggcatttgagctgggcttgaatgatgagcacagtgtagacatgtagagtggagaaggtgttgcaagtggatagaccttaacatgctcagaagyacaaatcagaaaatgcaagaagcaattagtagtgagtttccagtgtgattacagtatagggtagatgcatatttggttgggcagggggacatttgtagga

SEQ ID NO: 393060 - DNA, 201 bp, Homo sapiens
cctgtgagtgagaacatgcggtgtttggttttctgtccctgtgatagtttgctcagaatgatggtttctagcttcatccatgtccctacaaggccattaamtcatccttttttatggatgagtagtattccacagtgtatatctgccacattttcttaatccagtctatcattgatggacatttgggttggttccaagtct

SEQ ID NO: 393061 - DNA, 201 bp, Homo sapiens
cgaactcctgacctaaggtgattcaccgccttaggtttcccaaagtgctgggattacaggcgtgagccaccgcgcccggccaagtacgagaaaaatcttaygtaacaaaccagtaatatgggctatagccttgttcccacgtagcatcttaaactgttaaaaataaatcagagttattctgaaatcattgaggaaaataaa

SEQ ID NO: 393062 - DNA, 201 bp, Homo sapiens
gaaagaaagaaggaagatcaacatggatgggcagacaaagtaagaggatataaggaaagaagaaaatgaaatttgggcaataaaaagaaaaaaatagagakaacaattcttataaaagaggtaaaaatttaaaaaaaaaaagaagaaaggttgggcacagtggctcacgctggtaatcccagcactttgggagaccaaggc

SEQ ID NO: 393063 - DNA, 201 bp, Homo sapiens
taaaaaattagccgagcatggtagtgcatgcctgtagaccctcaggaggctgaggtgggaggattgcttgagcctggttgcactgagctgtgatcgcaccrctgcattccagcctgggtgacagagtgagactctatctcaaaaaaaaaagaatcttgtcgtctttgtctgtctcatttccttagagcacgctcattctgc

SEQ ID NO: 393064 - DNA, 201 bp, Homo sapiens
attttatagtctgggtaatctgagcttggggtaagcaataattaaaatttttctttctttttttttttttttttaacagtgatccttacgtgagagtgacrttatatgacccaatgaatggagttcttacaagtgtgcaaacaaaaaccattaaaaaggttagacttagcaatattcaaaagtttttaatgtactttgttt

SEQ ID NO: 393065 - DNA, 201 bp, Homo sapiens
gctgggattacaggcgtgtgccaccacacccagctaattttgtatttttagtagagacgaggtttcaccctgttggccagaatggtctcgaactcctgacmtcaggtgacctgcctgcctcggcctaccaaagtgctgggattacaggtgtgaaccactgcctccagccaagactgtgtaatttataaaggaaaaagtttt

SEQ ID NO: 393066 - DNA, 201 bp, Homo sapiens
tgccccgtgctggcgagcatgccaaccatgcacctctgtgaaattcaccctcactccacagacattttctgtagtggcctgtgattgactgctctgcgccmggaacagaaaaggagaaggaactataatttcttttataggtaattaggaattcatatatcacataggagtagaatctttgagctggaagagaccttgtaa

SEQ ID NO: 393067 - DNA, 201 bp, Homo sapiens
accctcactccacagacattttctgtagtggcctgtgattgactgctctgcgccaggaacagaaaaggagaaggaactataatttcttttataggtaattrggaattcatatatcacataggagtagaatctttgagctggaagagaccttgtaaataaatcatttagggtgagcaggggtatagaaaatgggattctttt

SEQ ID NO: 393068 - DNA, 201 bp, Homo sapiens
gaatatgagattctgatttgttcaagaaccttctcccagtagggagaagtgttatattcataacaaacacttggtccttccactttcctgctactaatacrcaaataaaataatttaacagaagagactttttctcaggaatatgatgaatgtgaatggaatgtgtgcaaaattaacttgtaattgttatgctctcatttc

SEQ ID NO: 393069 - DNA, 201 bp, Homo sapiens
taaggcagaataatattccattatttttgcatataatgctttgtttaggctgggcgtggtggctcatgcctgtaatcccaccactttgggaggccaaggcwggtggatcacaatgccaggagttcaagaccagcctgaccaacatagtgaaaccctgtctctactaaaaatacaaaaattaaccaggcatggtggcgggcg

SEQ ID NO: 393070 - DNA, 201 bp, Homo sapiens
cttgcaatttgacttgattcttattcatcagactcccgtctttcatttaggtctgtgtgtttcatgttataaactttccccaaatatttagtagtccatawctgcccataatgtataatattccaatatttattggaagggttttgttcatgggcatctactgactagtggacttcactttggggtgagcagagagaatta

SEQ ID NO: 393071 - DNA, 201 bp, Homo sapiens
aatgccatctctactaaaaatacaaaattagccaggtgtggtgatgcatgcctgtaatcccagctacttgggaggctgaggcaaaagaatcacttgaaccygggaggcggaggttgcggtgagccgagatcgcgccattgcattccagcctaggcaataagagtgaaactccatctcaaaaaaaaaaaggcaaaactcttg

SEQ ID NO: 393072 - DNA, 201 bp, Homo sapiens
ttttctttttttcccgtgtaacttttaataaaattaattattgaaaaagattcttcaattaattttaatatcctaattactttatttgatatatatttttwaaaaaattgtgtcttagttaacttataagtacatgaaaatgaaatctaaatttttgtattttaggaaaattcacgaattgtgagagtaagagttatagcc

SEQ ID NO: 393073 - DNA, 201 bp, Homo sapiens
aaatatctattaggtccatttggtttacagtgcagattaagtccaacatttctttgttggttttctgtctgaatgatctatccagtgccgaaagtgggatrttgaaatttccaactattactatattgaagtctagctgactctttgactttaacaatatttgctttatataactgggtatttcagtgttggatgcatatg

SEQ ID NO: 393074 - DNA, 201 bp, Homo sapiens
atgaataaacctacggtgaacattcatctataaatcttttcataaaagtatatttttatttctcttgtgtaaatacctaggaatggaatttctgggtcatrgggttatatgtgtttaactttataagaaactgcctaacagtctcccaacacgattgtaccattttaatctcccattggtaatatgtgaaagttctagttg

SEQ ID NO: 393075 - DNA, 201 bp, Homo sapiens
tttgtatcaatagctcattctttttcttggtgaatagtatttcgttgtatgaatatatccattctccttcgatggacacattgattgtttccaactttggrctattatgaataaacctacggtgaacattcatctataaatcttttcataaaagtatatttttatttctcttgtgtaaatacctaggaatggaatttctgg

SEQ ID NO: 393076 - DNA, 201 bp, Homo sapiens
agtttgaatccaaagtggaatgaagaaatattattcagagtaagtatatattttattttactaaagtggaaaaagtaagtttttttcttaggaggttagartgataaattctcatttttaatatttgaagatgtatctcagaatttgcctaaagttgtgaaaatacaaaaggaattgaaattttgtcttataaaaaacata

SEQ ID NO: 393077 - DNA, 201 bp, Homo sapiens
aatatttgttcctcatatgcttaacatttgtttgctagttatttctttatttcttcttgcttcttcacctttccatctaggatcactttttctgcctaaartatatcacctagaatttttttttttaagagatggagtttcactcttgttgcccaggctgaagtgcaatggcgcaatctcggttcactgcaacctctgcct

SEQ ID NO: 393078 - DNA, 201 bp, Homo sapiens; identical to SEQ ID NO: 86138

SEQ ID NO: 393079 - DNA, 201 bp, Homo sapiens
atatatagaatagaacagagtattcaatatctttatctgggtttgatacatatacgtatgtatcatatacatgtacagtatgtatatgtatttttacatahgtatatgtattttacatactgtatatgtatatgatacatacgtatatgtattttacatactgtatatgtatatgatacatatgtatatgtatttttacat

SEQ ID NO: 393080 - DNA, 201 bp, Homo sapiens
ctggagaggatagcctgatcaggcaagcctggcatgccgtgttaaggatttggaattgtataccaagtagcatggaaatcaaatgcacgcacgcgcgcgcrcgcacacacacacacaccattgtcgtcatcatcaacattatttttcatagttaatatttgttcctcatatgcttaacatttgtttgctagttatttcttt

SEQ ID NO: 393081 - DNA, 201 bp, Homo sapiens
gaggtcaggctctagggagaggttggcatttgagctgggcttgaatgatgagcacagtgtagacatgtagagtggagaaggtgttgcaagtggatagaccktaacatgctcagaagtacaaatcagaaaatgcaagaagcaattagtagtgagtttccagtgtgattacagtatagggtagatgcatatttggttgggcag

SEQ ID NO: 393082 - DNA, 201 bp, Homo sapiens
agctttttgctgagtatcttttttttttttttttttttgaaacagagtctcactctgtcgccaggctggagtgtagtggcacgatctcaactcactgcaamctctgcctcccggattcaaatgagtctcctgccgcagcctcccgagtagctgggactacaggcgcatgccaccacgcttggctaattttttgtagtttta

SEQ ID NO: 393083 - DNA, 201 bp, Homo sapiens
acaaatggcacaaagcttacgattgcactttgcagccagaagaagcaatacttaccctttgtcagaaacctccggagatgacttggatagccatgttcacrtgtgcttcaaaagaccaacacggatttcaacgtctaacgttgttcaaatgaagctgactcccagacagactgcactagctccgttaataaaggaaaacgt

SEQ ID NO: 393084 - DNA, 201 bp, Homo sapiens
agtcctaacgtcctacttgtttttatgaatacaatctcttatttctctgagaatattttacttcgggtttggtctattttctttcttaagttttgtttcargtcctatgttgtctctggttccctttggtccctttgctgttgttattgttatttctctttaatactggacatttccctccagatatctgttgttgatatt

SEQ ID NO: 393085 - DNA, 201 bp, Homo sapiens
ttaaacttttctggccaggcactgtggctcatgcctataatcccagcactttgggagtccaagtcaggtggatcacctggggtcagtagtttgagactagmctggccaacatggtaaaacctgtctttactaataacacaaaaaaattagctggttgtggtggcacatgcctgtaatctcagctacttgcgaggctgaggc

SEQ ID NO: 393086 - DNA, 201 bp, Homo sapiens
agaacattattgaatcacatgtctgacatggaggcttaagaaaataagcaagaagtaaagataatacaagttgaacttggaagataagagtggcgtctctygtagaaaagtgaggaagaaaagccattttgttttgaaaagcaaaaaatttatttttggacaaacagagttttgataggaaacaaagaaaatgaaagttta

SEQ ID NO: 393087 - DNA, 201 bp, Homo sapiens
attgtctgagcacattttctgtatccatcttttatagccacaagtcagaatgttcacatctccttcagtatggagacacaagccacattagcggccttggraataagcatcaggatttcactgactactcatgaaaggatacactcaatttgccaaatccatgagaaccatacagagaagagctaaaaagattaggggagg

SEQ ID NO: 393088 - DNA, 201 bp, Homo sapiens
cagaatgttcacatctccttcagtatggagacacaagccacattagcggccttgggaataagcatcaggatttcactgactactcatgaaaggatacactmaatttgccaaatccatgagaaccatacagagaagagctaaaaagattaggggaggcttgggagtgggggtaggtaatctcttgaagacagaataaaagga

SEQ ID NO: 393089 - DNA, 201 bp, Homo sapiens; identical to SEQ ID NO: 86131

SEQ ID NO: 393090 - DNA, 201 bp, Homo sapiens; identical to SEQ ID NO: 86132

SEQ ID NO: 393091 - DNA, 201 bp, Homo sapiens
gaaggtacaagagcccctagcatatcactggtgtaagtccaagagtccaaaagctgaagaacttggagtctgatgttcgagggcaggaagcatccagcacragagaaagatgaaggccagaagactcagcaagtcaagtccttccacgttctgcctgctttattctagctgccctggcagctgattagatggtgcccaccc

SEQ ID NO: 393092 - DNA, 201 bp, Homo sapiens
ttaaacacaattcattttgattataaactatttgactttttaaaatcttctgacacagtaaatatatatatcaagattgatgtatcaaaatttattgcacmctttaaagtgtaaaatcattttttaaaatcttgaatccacaaataaagttctattctgattttaaaaaacaaaacaaaactgtggttcattataaaatag

SEQ ID NO: 393093 - DNA, 201 bp, Homo sapiens
tattcaggtataaaatttatttttactctttaaaaagcatgattgaaacaaaaagtttgatattacagcagaaaaccttggctatcttgttggcctctggstgtgaagaaattattctttctataatcctttgccttttacagtagatttgccctggaaaattatttataattcatatttattatttatttatttatttat

SEQ ID NO: 393094 - DNA, 201 bp, Homo sapiens
gctaattcattatgcttagaaaaaaactgaaaacatacggtgaaatatcttctgtgcaaaggacattattatgtgtggtcctctattttcctctttgtcayttatatcatcatttttatatagcccagaatgttttgaactgaatgtattcgccataaaaatgtctgttgagataacatattacagcaaaaacttggttct

SEQ ID NO: 393095 - DNA, 201 bp, Homo sapiens
ctatttgtaattgacaaatcaggattaggactctactgccatttccttattttttattttattttctataacttccctattaccaaatgttttagctagtyacatttaccaaatatttacttcatttttgggatcacaggctacacatttgtttcaattagaaattctgctattttattataaggataactagataaattt

SEQ ID NO: 393096 - DNA, 201 bp, Homo sapiens
tgtttttttgttttgttttttgttttgttttgttttcagacagtctcactggaatgcagtggcacgatctcggctcaccgcaaccaccacctcccaggttyaaatgattctcctgcctcagcttcctgagtagctgggactacaggcacacgccaccatgcccagctaatttttgtatttttagtagagacagggtttcac

SEQ ID NO: 393097 - DNA, 201 bp, Homo sapiens
cgagtttcagtacagttaaaaggattgaaattcaacaggattggctgggcgcaatggctcacgcctataatcctcgcactttgggaagccgatgcaggcakatcacttgaggtcaggaatttgagacaagcctgaccaatatgatgaaaccccgcctctactaaagaaaaaaagtatacaaaaagtagctgggtgtgatgg

SEQ ID NO: 393098 - DNA, 201 bp, Homo sapiens
ttgggctgggcatggtggctcacacctgttatcccagcactttgggaggccgaggtgggcagatcacaaggtcaggagtttgaaatgagcctgaccaacarcgtgaaacctcatctatactagaaacacaaaaattagccaggtgtggtggtgggcgcctgtaatcccagctactcaggaggctgaggcaggagaatcgct

SEQ ID NO: 393099 - DNA, 201 bp, Homo sapiens
agtgcttggattacaggtatcacccaccatgcctggccttagctctgcatcttaaacctcgtttgtctgtccctcacagcttaacacagtgctgtacaccrcggactggcatgctctctctgaaaagggccagataataatatgttaggctttgtggtctatacggccttaaacacaattactcaactctgccactgtagt

SEQ ID NO: 393100 - DNA, 201 bp, Homo sapiens
ttctttggacttgtttgagatcagtaaaattctaaggcaggggatggaaaccaactctatttgtaagctctgtatctttttttcttttttcttttcttttyttttttttttttagacagggtctctcactctgctgcccaggctggagtgcagtgtcacaatcatggctcactatggcctcaaactcccagcctcaagtga

SEQ ID NO: 393101 - DNA, 201 bp, Homo sapiens
ctcaactgagaagtcagcctctggggcaggcaccaggaatctgccttttcagtaagacctaaattactcttatgaagccaactgtctctgagaaccagcaatggcaggttcttgaaggatgtagaacatgatgcttggggttatcattgctgcgggttttctttggacttgtttgagatcagtaaaattctaaggcagggg

SEQ ID NO: 393102 - DNA, 201 bp, Homo sapiens
gattgtcacgcttctttctgctgctcctgcttccctctcatcctcaggcaaggctggaagaaacattgtgagggcagagacctgtccgagtggaaaaaagrctgtgaggtttcctaaactggaactggacccaggatgctttgcagcaacgccctaggatttgcagtgaatgtccaaatgcctgtgtcatcttgtcccgtt

SEQ ID NO: 393103 - DNA, 201 bp, Homo sapiens
gactcaactgagaagtcagcctctggggcaggcaccaggaatctgccttttcagtaagacctaaattactcttatgaagccaactgtctctgagaaccagcaatggcaggttcttgaaggatgtagaacatgatgcttggggttatcattgctgcgggttttctttggacttgtttgagatcagtaaaattctaaggcagg

SEQ ID NO: 393104 - DNA, 201 bp, Homo sapiens
cagtaagaaaaaggaagctgcctgccagctgctttccataagcaattcgctcagaggatgcagtttgtacttcttagtgcagaatgagatgaatacacttkaggtttctttcttttcttttccctttttcttttctttctttttttttcttttcttttcttttttttttttttttttttttttgagacagggtctcactct

SEQ ID NO: 393105 - DNA, 201 bp, Homo sapiens
atccttgaagctcagaagcaaatgaaacccaacccagggttccgctggcgattttggttaatttctgtaggctttgaaactaagacggtttggattgtcaygcttctttctgctgctcctgcttccctctcatcctcaggcaaggctggaagaaacattgtgagggcagagacctgtccgagtggaaaaaaggctgtgagg

SEQ ID NO: 393106 - DNA, 201 bp, Homo sapiens
gtctgaactaggcaaaaggacagcatccttgaagctcagaagcaaatgaaacccaacccagggttccgctggcgattttggttaatttctgtaggctttgraactaagacggtttggattgtcacgcttctttctgctgctcctgcttccctctcatcctcaggcaaggctggaagaaacattgtgagggcagagacctgt

SEQ ID NO: 393107 - DNA, 201 bp, Homo sapiens
ctttaactaaaatttggagttcaggcttgcaaataggtctgttccagattggtaaattatgcaacagtttccaaggtgacactcaggatcctgtggctgayttctccaaagatgacttattccttgtagacagttttatgaagcccccactaaagcaggtggatggacaaacaaccctactgccctttcatgttagagata

SEQ ID NO: 393108 - DNA, 201 bp, Homo sapiens
gagatcaagtggtttgagtatttttgtccttgattggtggttgtggtggtcatggagatgggcctcccagatcccctgctaaggaaagacgtgctgccccygctgcagttgtgtgatgagcagacagtacctgccacctgcttcaggattggcttcaggtgcaggttgttcccttccggggtgacccacacccagtgacat

SEQ ID NO: 393109 - DNA, 201 bp, Homo sapiens
agggaatgtttcacccctgtattctatttttcattcatagaattaaaatagaaatcctaaaaatgccccctgtggttttcacctggatgtgtattaaggarggttaatttttttgcttgcttaaccctgagaacacagcattgacttgaaagttactgtatggaaaagcattaaggaaacagccttcagttgccttccttc

SEQ ID NO: 393110 - DNA, 201 bp, Homo sapiens
ataaatggacccacgcagttcaaacccatgatgttcaagggtcagcagtatagggaatgtttcacccctgtattctatttttcattcatagaattaaaatrgaaatcctaaaaatgccccctgtggttttcacctggatgtgtattaaggagggttaatttttttgcttgcttaaccctgagaacacagcattgacttgaa

SEQ ID NO: 393111 - DNA, 201 bp, Homo sapiens
attgcccctctgctcccccaggtgctttcctcctttcgtgaggcatcgtcttctatccctcttgctccccagtcaggcgccagacttttaggaggcccccyggagcactggtggtgaagcttagcaaagcaatgcatttgcaatctaagataaaacactcatgttttgggctgggcatggtggctcacacctgttatccca

SEQ ID NO: 393112 - DNA, 201 bp, Homo sapiens
ctctacaaaaaataaaacagattagccgggtgtggtggcctgtgcctgtggtcccagctacttgggaggctgaggtgggaggatcacttgagccttgaagrtcaaggctgcagtgagctctgaccgtaccaccgcgctccagtctgggcaacagagtgaaacactgtctcaaaaaaaaaaaaaaagtttaaagcatgaaaa

SEQ ID NO: 393113 - DNA, 201 bp, Homo sapiens
tctcttgatcctactcccatttcagatgattccgcaggggtctctttattgcccctctgctcccccaggtgctttcctcctttcgtgaggcatcgtcttcyatccctcttgctccccagtcaggcgccagacttttaggaggccccccggagcactggtggtgaagcttagcaaagcaatgcatttgcaatctaagataaa

SEQ ID NO: 393114 - DNA, 201 bp, Homo sapiens
gcaaaacctagtgtgtgtatttatcacagttatggtggaattgacaaactcacctccgcagagtggtccaaccaatggaaggagaccttgtctatattctyctccatcagtgtgtgggtgtgcagtgaacatagtagtacatagaaagggagaggagacttgggattgggttaagataatttgcaattgcttttcatatga

SEQ ID NO: 393115 - DNA, 201 bp, Homo sapiens
cctaagacgttgaatccattatacgcccacgagcaagtatccagagaacctgcctctctgtgcccttgtcaacgtcaagcattacccaattctctaaaaawcaaaaacaaaaacaaaacaaaacaaaacaaaacctttgagtaattgacaagcagaaatgagatcaagtggtttgagtatttttgtccttgattggtggtt

SEQ ID NO: 393116 - DNA, 201 bp, Homo sapiens
tttcccccatgttataaaacatcctgggaaaacataatttaaatggctgtttattttattaaatgaaggtattatgattaatttgaacatcactgattatraggcaattggatttttttcattttaactcttgtaaataaaactagagtaaaccactttgtaaagaaatatttgtctagcatcatgactgtttccttagga

SEQ ID NO: 393117 - DNA, 201 bp, Homo sapiens
ttatccctgttttgggcctagcctttcaatgcaggaatccagccccagggagagaaactaatgactggagaagtttctaggcaagtgcagaaaatgacacsggatgaacatatgtaagaacatcaagttcaggatcccgagtagttgtcagaaatttcacttcaccccatcccagcaaggctgttgtatttagggaagaca

SEQ ID NO: 393118 - DNA, 201 bp, Homo sapiens
gtgtgccatcccagcccccgatgtgcccctcgtgtgccccctgggtgcatgcccgccctgccctgcccaaggtgtattgggaggaagcagtcaggtaacarggataaggaaactcgccctcagaccaagcttagagcaaaagatgcacttcctttgctggcgtttctggctttcccccctccagggatctgcatggcatat

SEQ ID NO: 393119 - DNA, 201 bp, Homo sapiens
aaaaaatgattattgactctctatctagtgtagtctagtgcacttatattaattttatttttcatcaccctggtatctgaattggcctttgtcatctcacrggggaaagagatgaacatcgagggtgtgtggctgctagatttcacttgggaggcaggaggatgccgaggagagacacagatactttgaagtagaactaac

SEQ ID NO: 393120 - DNA, 201 bp, Homo sapiens
gaaatcagccaccaatgatatattaccaaatgggtgtagctatgtttcaataaaactttacatacaaaagcgggcctggtttgcccacgcttgctattcaygtttgtaatgtacatgcccctcatgcaatgcagttccttaccttattgcttagtcaccttaaagccctgcttgttacttggtgcggtggccttgctgatg

SEQ ID NO: 393121 - DNA, 201 bp, Homo sapiens
cccttagcctcaggccagagagttttttattagaacaatgtcattctgtcccacatattacagaagtagggacatttgtcatgggaaactgaaaaaaagtyagcattagggtgtgtttacaaggtacgtgacgttatatgcatgtacagcatggatacacttcatgatctttttcttctttttgtttttggtagagaaggg

SEQ ID NO: 393122 - DNA, 201 bp, Homo sapiens
cttaaggagtagttagaacatccagtcccttcctgaggcattcacctactgactgcccctcactcaccctggcagaatactgggactttttcctctagacragtaaagtagaaaacctctcaactgagacctcaacaatctttgaggttgagagctccagaccacagacatgggagattaagttatagtttctatagttcc

SEQ ID NO: 393123 - DNA, 201 bp, Homo sapiens
ccatcccagcccccgatgtgcccctcgtgtgccccctgggtgcatgcccgccctgccctgcccaaggtgtattgggaggaagcagtcaggtaacaaggatraggaaactcgccctcagaccaagcttagagcaaaagatgcacttcctttgctggcgtttctggctttcccccctccagggatctgcatggcatattatga

SEQ ID NO: 393124 - DNA, 201 bp, Homo sapiens
ctagtttttccttctgggtttattcaaaacaagtttgctttatgttacacataaaaacttattaactgtatgcaaatgatttataagtacctctcatctcyggtttcttatcttctgagctaaaacattcagtatattcactttccataggcatgacttttgaacccttctctgtcccagtcaatcttattagcattccct

SEQ ID NO: 393125 - DNA, 201 bp, Homo sapiens
gtgccataaaaagactgaatgatggtcatggttggtgacatggagaagactgatgcaagagatgctgaacaggcagagggcagagctcagtcaaaggcatyttctctgtgctgcctctagagtgtaagtcccttgagggcagagagttctgtttcattcactgatgtatcctcaatgtctagaatggtgcctggccattgc

SEQ ID NO: 393126 - DNA, 201 bp, Homo sapiens
caaaagcaaagaggtgcctgtgggaaggtgtgaagcatgaacagagagtagggagaggcttgttttttctgtaacaaagtgacatgaagagaatcccaggraaggcaggtggagaggctaacgaccatctgagtgtgaaaaacccaggctaagaggctttcactgatttctgcctgcaagaggaaaccaagagaggtcagt

SEQ ID NO: 393127 - DNA, 201 bp, Homo sapiens
agactcaactgagaagtcagcctctggggcaggcaccaggaatctgccttttcagtaagacctaaattactcttatgaagccaactgtctctgagaaccagcaatggcaggttcttgaaggatgtagaacatgatgcttggggttatcattgctgcgggttttctttggacttgtttgagatcagtaaaattctaaggcag

SEQ ID NO: 393128 - DNA, 201 bp, Homo sapiens
gcagactcaactgagaagtcagcctctggggcaggcaccaggaatctgccttttcagtaagacctaaattactcttatgaagccaactgtctctgagaaccagcaatggcaggttcttgaaggatgtagaacatgatgcttggggttatcattgctgcgggttttctttggacttgtttgagatcagtaaaattctaaggc

SEQ ID NO: 393129 - DNA, 201 bp, Homo sapiens
tgactaacttagtgattaaagacatctgaatcctaaatcagcagagagaaagctgagaagcaaacacagaaccaacaacaacaacaacaacaaaaagctcygaaatcagtagcattagctacttctggaagttagaatgaagacagattacaaacaggaagacacatttaaagttcacttaaggagtagttagaacatcca

SEQ ID NO: 393130 - DNA, 201 bp, Homo sapiens
ccgcagactcaactgagaagtcagcctctggggcaggcaccaggaatctgccttttcagtaagacctaaattactcttatgaagccaactgtctctgagaaccagcaatggcaggttcttgaaggatgtagaacatgatgcttggggttatcattgctgcgggttttctttggacttgtttgagatcagtaaaattctaag

SEQ ID NO: 393131 - DNA, 201 bp, Homo sapiens
tccgcagactcaactgagaagtcagcctctggggcaggcaccaggaatctgccttttcagtaagacctaaattactcttatgaagccaactgtctctgagaaccagcaatggcaggttcttgaaggatgtagaacatgatgcttggggttatcattgctgcgggttttctttggacttgtttgagatcagtaaaattctaa

SEQ ID NO: 393132 - DNA, 201 bp, Homo sapiens
tcttccgcagactcaactgagaagtcagcctctggggcaggcaccaggaatctgccttttcagtaagacctaaattactcttatgaagccaactgtctctgagaaccagcaatggcaggttcttgaaggatgtagaacatgatgcttggggttatcattgctgcgggttttctttggacttgtttgagatcagtaaaattc

SEQ ID NO: 393133 - DNA, 201 bp, Homo sapiens
ttcttccgcagactcaactgagaagtcagcctctggggcaggcaccaggaatctgccttttcagtaagacctaaattactcttatgaagccaactgtctctgagaaccagcaatggcaggttcttgaaggatgtagaacatgatgcttggggttatcattgctgcgggttttctttggacttgtttgagatcagtaaaatt

SEQ ID NO: 393134 - DNA, 201 bp, Homo sapiens
tttcttccgcagactcaactgagaagtcagcctctggggcaggcaccaggaatctgccttttcagtaagacctaaattactcttatgaagccaactgtctctgagaaccagcaatggcaggttcttgaaggatgtagaacatgatgcttggggttatcattgctgcgggttttctttggacttgtttgagatcagtaaaat

SEQ ID NO: 393135 - DNA, 201 bp, Homo sapiens
tatatatggaattatatataatacgtatatataatagtaatcttttgggtctgccttcttttatttagcaaaatgcatttaagattcatcctcattgttgygggaatcaaatagctcattcctttcattgctgagtagtattccattgtatggatagatcatagtttttgaatatatttgcctgctgaaggtcatctttgt

SEQ ID NO: 393136 - DNA, 201 bp, Homo sapiens
gtttcttccgcagactcaactgagaagtcagcctctggggcaggcaccaggaatctgccttttcagtaagacctaaattactcttatgaagccaactgtctctgagaaccagcaatggcaggttcttgaaggatgtagaacatgatgcttggggttatcattgctgcgggttttctttggacttgtttgagatcagtaaaa

SEQ ID NO: 393137 - DNA, 201 bp, Homo sapiens
gatgattccgcaggggtctctttattgcccctctgctcccccaggtgctttcctcctttcgtgaggcatcgtcttctatccctcttgctccccagtcaggygccagacttttaggaggccccccggagcactggtggtgaagcttagcaaagcaatgcatttgcaatctaagataaaacactcatgttttgggctgggcat

SEQ ID NO: 393138 - DNA, 201 bp, Homo sapiens
gtgtttcttccgcagactcaactgagaagtcagcctctggggcaggcaccaggaatctgccttttcagtaagacctaaattactcttatgaagccaactgtctctgagaaccagcaatggcaggttcttgaaggatgtagaacatgatgcttggggttatcattgctgcgggttttctttggacttgtttgagatcagtaa

SEQ ID NO: 393139 - DNA, 201 bp, Homo sapiens
gacctgactgttggtctagattaggctcagcccctgactgggtgtgcagcttcaggtgtgccatcccagcccccgatgtgcccctcgtgtgccccctgggygcatgcccgccctgccctgcccaaggtgtattgggaggaagcagtcaggtaacaaggataaggaaactcgccctcagaccaagcttagagcaaaagatgc

SEQ ID NO: 393140 - DNA, 201 bp, Homo sapiens
  misc_feature (1)...(201): n = A,T,C or G
acactcgttgcaaactggcaaaaatattctcgagggctggcctggacaattactggggcttcagccttggaaactgtgagattatttctttcctgctctcnttctgtccttgacctttcccctgagatgttgaaggtcctggccacactccctgctgtgtcttcccaactacccctgctctgccctcaccgcacccagggg

SEQ ID NO: 393141 - DNA, 201 bp, Homo sapiens
tttgcccacgcttgctattcacgtttgtaatgtacatgcccctcatgcaatgcagttccttaccttattgcttagtcaccttaaagccctgcttgttactyggtgcggtggccttgctgatgactacttatccctgttttgggcctagcctttcaatgcaggaatccagccccagggagagaaactaatgactggagaagt

SEQ ID NO: 393142 - DNA, 201 bp, Homo sapiens
agtgtttcttccgcagactcaactgagaagtcagcctctggggcaggcaccaggaatctgccttttcagtaagacctaaattactcttatgaagccaactgtctctgagaaccagcaatggcaggttcttgaaggatgtagaacatgatgcttggggttatcattgctgcgggttttctttggacttgtttgagatcagta

SEQ ID NO: 393143 - DNA, 201 bp, Homo sapiens
  misc_feature (1)...(201): n = A,T,C or G
cgccgagtccaaaatctacactcgttgcaaactggcaaaaatattctcgagggctggcctggacaattactggggcttcagccttggaaactgtgagattntttctttcctgctctctttctgtccttgacctttcccctgagatgttgaaggtcctggccacactccctgctgtgtcttcccaactacccctgctctgcc

SEQ ID NO: 393144 - DNA, 201 bp, Homo sapiens
aagtgcttggattacaggtatcacccaccatgcctggccttagctctgcatcttaaacctcgtttgtctgtccctcacagcttaacacagtgctgtacacmacggactggcatgctctctctgaaaagggccagataataatatgttaggctttgtggtctatacggccttaaacacaattactcaactctgccactgtag

SEQ ID NO: 393145 - DNA, 201 bp, Homo sapiens
cattgtgaaatgattattacaatcaagtttaacaaatccatcacctcacatagttaccgcttatgtatgtgtgtgtgtgtgtgtgtgtgtgtgtgtgtgtgaaagagattgagagagagagagagagagagagagagaagaacacttaagattctggctctgtcacccagcctgaagtgcggtggtgcaatctcagcttac

SEQ ID NO: 393146 - DNA, 201 bp, Homo sapiens
tagccagggaaggggaaaataatgccacctctgctggcattgtggggagtggggggacctgactgttggtctagattaggctcagcccctgactgggtgtrcagcttcaggtgtgccatcccagcccccgatgtgcccctcgtgtgccccctgggtgcatgcccgccctgccctgcccaaggtgtattgggaggaagcagt

SEQ ID NO: 393147 - DNA, 201 bp, Homo sapiens
acattgtgaaatgattattacaatcaagtttaacaaatccatcacctcacatagttaccgcttatgtatgtgtgtgtgtgtgtgtgtgtgtgtgtgtgtgtgaaagagattgagagagagagagagagagagagagagaagaacacttaagattctggctctgtcacccagcctgaagtgcggtggtgcaatctcagctta

SEQ ID NO: 393148 - DNA, 201 bp, Homo sapiens
ctcttcattcctttggtggatttatttggggaagtagtcaatcgatatcactttccttcagctgaaagaactttctttaccttctttttggttttggtttyggtttttttagactagaggtctactggcaagcattttctctgcttttgtttgtctgaaaatatctctattttattttgattttgaggaatattttcttta

SEQ ID NO: 393149 - DNA, 201 bp, Homo sapiens
ggagacagctctcttgatcctactcccatttcagatgattccgcaggggtctctttattgcccctctgctcccccaggtgctttcctcctttcgtgaggcwtcgtcttctatccctcttgctccccagtcaggcgccagacttttaggaggccccccggagcactggtggtgaagcttagcaaagcaatgcatttgcaatc

SEQ ID NO: 393150 - DNA, 201 bp, Homo sapiens
tgtgattattgatatggttagttttaaatcccatcttgctattctgttttctgtttatgccatctattcttggttccattttttctgctttctttggaattaaaaaaaaaattattattctctttcatttcctccattggtttgttagctatatctctattttgtttttagtagttactctagggtttccaataggcatca

SEQ ID NO: 393151 - DNA, 201 bp, Homo sapiens
ggcagcaggagacagctctcttgatcctactcccatttcagatgattccgcaggggtctctttattgcccctctgctcccccaggtgctttcctcctttcrtgaggcatcgtcttctatccctcttgctccccagtcaggcgccagacttttaggaggccccccggagcactggtggtgaagcttagcaaagcaatgcatt

SEQ ID NO: 393152 - DNA, 201 bp, Homo sapiens
tgtgaacgcagccatagaaagtatgtaaatgaatgggactggctgtgttccaataaggctttatttacagaaacaggaggttttcctgtgggacatacatygtggaaccttgattagatcatttacatttaatgtgattattgatatggttagttttaaatcccatcttgctattctgttttctgtttatgccatctattc

SEQ ID NO: 393153 - DNA, 201 bp, Homo sapiens
aaatgacaccggatgaacatatgtaagaacatcaagttcaggatcccgagtagttgtcagaaatttcacttcaccccatcccagcaaggctgttgtatttrgggaagacattatttcaagaggggaagagattgtggaaaatcagtaggcagcaggagacagctctcttgatcctactcccatttcagatgattccgcagg

SEQ ID NO: 393154 - DNA, 201 bp, Homo sapiens
cagcaccgaggtacaaggggtctgcagggagaggacaaccttctaggatctgagaccttccttcaagggatgtgacttgtgctgagtgacctgacagaaakaaagctggaagatattatatgtatatcccaacctcagtgtccctcctctgtcccttccctgctgatgcctactcttatttaaaccccttcagaagtcaga

SEQ ID NO: 393155 - DNA, 201 bp, Homo sapiens
ggagaatattaataaagactctacttacaaaaatctgatcaaatcatagaaaaaacatggcaatagtgaagtaagggattaggaatcacaggcaattaccwcccccttgcccaatgaggaatggaaagagaactatgaccagcaccgaggtacaaggggtctgcagggagaggacaaccttctaggatctgagaccttcct

SEQ ID NO: 393156 - DNA, 201 bp, Homo sapiens
tgtacttcttagtgcagaatgagatgaatacactttaggtttctttcttttcttttccctttttcttttctttctttttttttcttttcttttcttttttytttttttttttttttttgagacagggtctcactctgttgcctaggctggaatgcagtgatgtgatcatagctcattgcagtcttgacctccaggccccaa

SEQ ID NO: 393157 - DNA, 201 bp, Homo sapiens
tttgtacttcttagtgcagaatgagatgaatacactttaggtttctttcttttcttttccctttttcttttctttctttttttttcttttcttttcttttytttttttttttttttttttgagacagggtctcactctgttgcctaggctggaatgcagtgatgtgatcatagctcattgcagtcttgacctccaggcccc

SEQ ID NO: 393158 - DNA, 201 bp, Homo sapiens
ttgggaggaagcagtcaggtaacaaggataaggaaactcgccctcagaccaagcttagagcaaaagatgcacttcctttgctggcgtttctggctttcccycctccagggatctgcatggcatattatgagagcggctacaacaccacagcccagacggtcctggatgacggcagcatcgactatggcatcttccagatca

SEQ ID NO: 393159 - DNA, 201 bp, Homo sapiens
ctgatgactacttatccctgttttgggcctagcctttcaatgcaggaatccagccccagggagagaaactaatgactggagaagtttctaggcaagtgcasaaaatgacaccggatgaacatatgtaagaacatcaagttcaggatcccgagtagttgtcagaaatttcacttcaccccatcccagcaaggctgttgtatt

SEQ ID NO: 393160 - DNA, 201 bp, Homo sapiens
ctcacaacaatcttgggatataggggaatgaaaacttcactccatatacacgtccctgagatacggaaggggtaactatcgcccaggggccacagcgcaayggcagagaatccaagaggcccctgctgccctgcggggatcttcagaactcagtgacagaacgtgtcctagttcctttacgaacagggagtgcctgagccc

SEQ ID NO: 393161 - DNA, 201 bp, Homo sapiens
ttgtggaaaatcagtaggcagcaggagacagctctcttgatcctactcccatttcagatgattccgcaggggtctctttattgcccctctgctcccccagrtgctttcctcctttcgtgaggcatcgtcttctatccctcttgctccccagtcaggcgccagacttttaggaggccccccggagcactggtggtgaagctt

SEQ ID NO: 393162 - DNA, 201 bp, Homo sapiens
cagtgtttcttccgcagactcaactgagaagtcagcctctggggcaggcaccaggaatctgccttttcagtaagacctaaattactcttatgaagccaactgtctctgagaaccagcaatggcaggttcttgaaggatgtagaacatgatgcttggggttatcattgctgcgggttttctttggacttgtttgagatcagt

SEQ ID NO: 393163 - DNA, 201 bp, Homo sapiens
aaggccggcacgagggatgctccctttaatggagtcttccatgattattcataaacgggtgggaagaggtgttgctagtaagcatgttctgggcggtcctyttcgtgcatttgcgcagtagctgtacatggatgttcatatgtcgcatgtctcattagcatcttaaatctccacccaggtgtgtgttttttattattataa

SEQ ID NO: 393164 - DNA, 201 bp, Homo sapiens
ggagcagtgtttcttccgcagactcaactgagaagtcagcctctggggcaggcaccaggaatctgccttttcagtaagacctaaattactcttatgaagccaactgtctctgagaaccagcaatggcaggttcttgaaggatgtagaacatgatgcttggggttatcattgctgcgggttttctttggacttgtttgagat

SEQ ID NO: 393165 - DNA, 201 bp, Homo sapiens
tggagcagtgtttcttccgcagactcaactgagaagtcagcctctggggcaggcaccaggaatctgccttttcagtaagacctaaattactcttatgaagccaactgtctctgagaaccagcaatggcaggttcttgaaggatgtagaacatgatgcttggggttatcattgctgcgggttttctttggacttgtttgaga

SEQ ID NO: 393166 - DNA, 201 bp, Homo sapiens
acacagtgctgtacaccacggactggcatgctctctctgaaaagggccagataataatatgttaggctttgtggtctatacggccttaaacacaattactsaactctgccactgtagttggaaatcagccaccaatgatatattaccaaatgggtgtagctatgtttcaataaaactttacatacaaaagcgggcctggtt

SEQ ID NO: 393167 - DNA, 201 bp, Homo sapiens
ggtggagcagtgtttcttccgcagactcaactgagaagtcagcctctggggcaggcaccaggaatctgccttttcagtaagacctaaattactcttatgaagccaactgtctctgagaaccagcaatggcaggttcttgaaggatgtagaacatgatgcttggggttatcattgctgcgggttttctttggacttgtttga

SEQ ID NO: 393168 - DNA, 201 bp, Homo sapiens
gaggtggaggaggaagaggaggggttggtcttgctgtctcggggtggcagaggcagaagaaaattcacggataaatggacccacgcagttcaaacccatgwtgttcaagggtcagcagtatagggaatgtttcacccctgtattctatttttcattcatagaattaaaatagaaatcctaaaaatgccccctgtggttttc

SEQ ID NO: 393169 - DNA, 201 bp, Homo sapiens
aaatgttcttgagctaggaaaggattactcgcgcctcgttagaatcagacatggcttcaggggatgcaggacgctcccctgagctgcctgtcaccgactargtggagcagtgtttcttccgcagactcaactgagaagtcagcctctggggcaggcaccaggaatctgccttttcagtaagacctaaattactcttatgaa

SEQ ID NO: 393170 - DNA, 201 bp, Homo sapiens
  misc_feature (1)...(201): n = A,T,C or G
ggcgccgagtccaaaatctacactcgttgcaaactggcaaaaatattctcgagggctggcctggacaattactggggcttcagccttggaaactgtgagantatttctttcctgctctctttctgtccttgacctttcccctgagatgttgaaggtcctggccacactccctgctgtgtcttcccaactacccctgctctg

SEQ ID NO: 393171 - DNA, 201 bp, Homo sapiens
tgaatgaccaaagtgacaggcagcatctaggcagggctgtgcacagtcaccaccgctggatttcaaagttcctgaatcaagatcatctgacctgttctcckgctctttggcaggttctgtctccggcaggctttgaggatgaaggctgcgggcattctgaccctcattggctgcctggtcacaggcgccgagtccaaaatc

SEQ ID NO: 393172 - DNA, 201 bp, Homo sapiens
cagccttcagttgccttccttccctggaccgtagagtggccggttttccctgatggtggcactgaatgaccaaagtgacaggcagcatctaggcagggctrtgcacagtcaccaccgctggatttcaaagttcctgaatcaagatcatctgacctgttctccggctctttggcaggttctgtctccggcaggctttgagga

SEQ ID NO: 393173 - DNA, 201 bp, Homo sapiens
atgtgcccctcgtgtgccccctgggtgcatgcccgccctgccctgcccaaggtgtattgggaggaagcagtcaggtaacaaggataaggaaactcgccctyagaccaagcttagagcaaaagatgcacttcctttgctggcgtttctggctttcccccctccagggatctgcatggcatattatgagagcggctacaacac

SEQ ID NO: 393174 - DNA, 201 bp, Homo sapiens
cccccgatgtgcccctcgtgtgccccctgggtgcatgcccgccctgccctgcccaaggtgtattgggaggaagcagtcaggtaacaaggataaggaaactygccctcagaccaagcttagagcaaaagatgcacttcctttgctggcgtttctggctttcccccctccagggatctgcatggcatattatgagagcggcta

SEQ ID NO: 393175 - DNA, 201 bp, Homo sapiens
tgctccccagtcaggcgccagacttttaggaggccccccggagcactggtggtgaagcttagcaaagcaatgcatttgcaatctaagataaaacactcatrttttgggctgggcatggtggctcacacctgttatcccagcactttgggaggccgaggtgggcagatcacaaggtcaggagtttgaaatgagcctgaccaa

SEQ ID NO: 393176 - DNA, 201 bp, Homo sapiens
ctctgctggcattgtggggagtggggggacctgactgttggtctagattaggctcagcccctgactgggtgtgcagcttcaggtgtgccatcccagccccygatgtgcccctcgtgtgccccctgggtgcatgcccgccctgccctgcccaaggtgtattgggaggaagcagtcaggtaacaaggataaggaaactcgccc

SEQ ID NO: 393177 - DNA, 201 bp, Homo sapiens
tccctcacagcttaacacagtgctgtacaccacggactggcatgctctctctgaaaagggccagataataatatgttaggctttgtggtctatacggcctyaaacacaattactcaactctgccactgtagttggaaatcagccaccaatgatatattaccaaatgggtgtagctatgtttcaataaaactttacatacaa

SEQ ID NO: 393178 - DNA, 201 bp, Homo sapiens
ctgtccttgacctttcccctgagatgttgaaggtcctggccacactccctgctgtgtcttcccaactacccctgctctgccctcaccgcacccaggggtggctgctagcctaactgtggctctctgggtctcctctccttcctcccctgcccctcatttccttattcctggagtcctgtccttatgacactagccagggaa

SEQ ID NO: 393179 - DNA, 201 bp, Homo sapiens
tcctgctctctttctgtccttgacctttcccctgagatgttgaaggtcctggccacactccctgctgtgtcttcccaactacccctgctctgccctcaccrcacccaggggtggctgctagcctaactgtggctctctgggtctcctctccttcctcccctgcccctcatttccttattcctggagtcctgtccttatgac

SEQ ID NO: 393180 - DNA, 201 bp, Homo sapiens
tctgaactaggcaaaaggacagcatccttgaagctcagaagcaaatgaaacccaacccagggttccgctggcgattttggttaatttctgtaggctttgaractaagacggtttggattgtcacgcttctttctgctgctcctgcttccctctcatcctcaggcaaggctggaagaaacattgtgagggcagagacctgtc

SEQ ID NO: 393181 - DNA, 201 bp, Homo sapiens
tggctgcctggtcacaggcgccgagtccaaaatctacactcgttgcaaactggcaaaaatattctcgagggctggcctggacaattactggggcttcagccttggaaactgtgagattatttctttcctgctctctttctgtccttgacctttcccctgagatgttgaaggtcctggccacactccctgctgtgtcttccc

SEQ ID NO: 393182 - DNA, 201 bp, Homo sapiens
gatgtgtattaaggagggttaatttttttgcttgcttaaccctgagaacacagcattgacttgaaagttactgtatggaaaagcattaaggaaacagcctkcagttgccttccttccctggaccgtagagtggccggttttccctgatggtggcactgaatgaccaaagtgacaggcagcatctaggcagggctgtgcaca

SEQ ID NO: 393183 - DNA, 201 bp, Homo sapiens
gctgggaatggccctcaggtgacaacctgcaagcaacagggatctcagtccaacacccacaaggaactgaactctgccaaaactcaagtgagcaaggaaayggatcttcctgcagagtgtccagaaaggaaaacagacctgtcagcactttgacttcagccctgtgaatcccctggcactcttccagccatcggaactgta

SEQ ID NO: 393184 - DNA, 201 bp, Homo sapiens
ttcaggattgggctcttcctctgaaacatcaggtagtgcaagatgaaaacggtcttaaaacaacaacaaaaagttctttttgaagaagcttaatgaaaatragattgtggctttgcaggcaaaatcatagttcttccaaccctcttgatccaaaaagactgagaaaagtgaagtaaagttgagttgaggtccctctccaac

SEQ ID NO: 393185 - DNA, 201 bp, Homo sapiens
ttgattgcaactactcaaccacgacagagtgtgaacgcagccatagaaagtatgtaaatgaatgggactggctgtgttccaataaggctttatttacagamacaggaggttttcctgtgggacatacatcgtggaaccttgattagatcatttacatttaatgtgattattgatatggttagttttaaatcccatcttgct

SEQ ID NO: 393186 - DNA, 201 bp, Homo sapiens
aatctaccttatctgatagcaatacagcccactctcactttctttggggaagtctttgcataatatgtttctttccatccttttacttttaacccatctgkgtctttatatttaaagtgaatttcttatagatagcatatagttatgtgttgcttttatatccattctggtaattactgcttttcagtaggagtgattaaa

SEQ ID NO: 393187 - DNA, 201 bp, Homo sapiens
tttcctaaactggaactggacccaggatgctttgcagcaacgccctaggatttgcagtgaatgtccaaatgcctgtgtcatcttgtcccgtttcctcccartattccttctcaaacttggagagggaaaattaagctatacttttaagaaaataaatatttccatttaaatgtcttcaccccgtctcagttccaatgatgt

SEQ ID NO: 393188 - DNA, 201 bp, Homo sapiens
gaaagaatgcggatatcaaacaatacatttcaatcaaaagatttgttatgtctgaagcaatagaaaatgtaataagtggccaggcacagtgctggctgtartatcagcactttgggagccaaggcaggaggatcacttgatccccagagttcaagaccagcctggccaacatggtgaaaccttctctctgcaaaaaataca

SEQ ID NO: 393189 - DNA, 201 bp, Homo sapiens
tccctgatggtggcactgaatgaccaaagtgacaggcagcatctaggcagggctgtgcacagtcaccaccgctggatttcaaagttcctgaatcaagatcrtctgacctgttctccggctctttggcaggttctgtctccggcaggctttgaggatgaaggctgcgggcattctgaccctcattggctgcctggtcacagg

SEQ ID NO: 393190 - DNA, 201 bp, Homo sapiens
aggctgtgaggtttcctaaactggaactggacccaggatgctttgcagcaacgccctaggatttgcagtgaatgtccaaatgcctgtgtcatcttgtcccrtttcctcccaatattccttctcaaacttggagagggaaaattaagctatacttttaagaaaataaatatttccatttaaatgtcttcaccccgtctcagt

SEQ ID NO: 393191 - DNA, 201 bp, Homo sapiens
tgctaaggaaagacgtgctgcccctgctgcagttgtgtgatgagcagacagtacctgccacctgcttcaggattggcttcaggtgcaggttgttcccttcyggggtgacccacacccagtgacatgtgaggcagaggcatgcggacctggcatgtgggcccgacttgggccactctgatgggcggtgctcactcgggagct

SEQ ID NO: 393192 - DNA, 201 bp, Homo sapiens
  misc_feature (1)...(201): n = A,T,C or G
gccggttttccctgatggtggcactgaatgaccaaagtgacaggcagcatctaggcagggctgtgcacagtcaccaccgctggatttcaaagttcctgaancaagatcatctgacctgttctccggctctttggcaggttctgtctccggcaggctttgaggatgaaggctgcgggcattctgaccctcattggctgcctg

SEQ ID NO: 393193 - DNA, 201 bp, Homo sapiens
ggagaggacaaccttctaggatctgagaccttccttcaagggatgtgacttgtgctgagtgacctgacagaaagaaagctggaagatattatatgtatatsccaacctcagtgtccctcctctgtcccttccctgctgatgcctactcttatttaaaccccttcagaagtcagaggacatgggagaccattgacggcaact

SEQ ID NO: 393194 - DNA, 201 bp, Homo sapiens
gtaggggtcacgggcaccgacgcctgctcagttgaaaatctgcatgtaacttttgactccccagaaacttaacgactccatagcctactgctgactggaakccttactgataacataaatagccaataaacacatattttttatgttctatgtcttctgtactggattcttacaataaagtaagctagagaaatgaaatgt

SEQ ID NO: 393195 - DNA, 201 bp, Homo sapiens
aacttcaaattcagaaaactaccattaatatcttcagatagataagagaggatgcttggatgaaacaaagcaagatgctttttttgaaaaaaaaaaaaaaagagagaaaaaggaaacattcagataaccaaataaagaacctttggaaattaacaatatgatacagaaatggaaaactcagtaaagtagttagaagataac

SEQ ID NO: 393196 - DNA, 201 bp, Homo sapiens
  misc_feature (1)...(201): n = A,T,C or G
gctctctttctgtccttgacctttcccctgagatgttgaaggtcctggccacactccctgctgtgtcttcccaactacccctgctctgccctcaccgcacncaggggtggctgctagcctaactgtggctctctgggtctcctctccttcctcccctgcccctcatttccttattcctggagtcctgtccttatgacacta

SEQ ID NO: 393197 - DNA, 201 bp, Homo sapiens
attgacttgaaagttactgtatggaaaagcattaaggaaacagccttcagttgccttccttccctggaccgtagagtggccggttttccctgatggtggcwctgaatgaccaaagtgacaggcagcatctaggcagggctgtgcacagtcaccaccgctggatttcaaagttcctgaatcaagatcatctgacctgttctc

SEQ ID NO: 393198 - DNA, 201 bp, Homo sapiens
  misc_feature (1)...(201): n = A,T,C or G
cttaaccctgagaacacagcattgacttgaaagttactgtatggaaaagcattaaggaaacagccttcagttgccttccttccctggaccgtagagtggcnggttttccctgatggtggcactgaatgaccaaagtgacaggcagcatctaggcagggctgtgcacagtcaccaccgctggatttcaaagttcctgaatca

SEQ ID NO: 393199 - DNA, 201 bp, Homo sapiens
agccttggaaactgtgagattatttctttcctgctctctttctgtccttgacctttcccctgagatgttgaaggtcctggccacactccctgctgtgtctycccaactacccctgctctgccctcaccgcacccaggggtggctgctagcctaactgtggctctctgggtctcctctccttcctcccctgcccctcatttc

SEQ ID NO: 393200 - DNA, 201 bp, Homo sapiens
tcccttctggagacagctttgtttgaatgagctggccttcagtgtgaatgctgaggctcatcgtgttgactggccagtcaccatagttgccgtaccccgcrgacacagttgcttccttgcctacctatcctgcctcatatgcaacattgttgagtgtctagactatgtgtcttcctttaaagagtgttgaatttcttttcc

SEQ ID NO: 393201 - DNA, 201 bp, Homo sapiens
tgaaatgggctgtctgtttctacacatccagttgatccttgaacaaatgtaggggtcacgggcaccgacgcctgctcagttgaaaatctgcatgtaacttytgactccccagaaacttaacgactccatagcctactgctgactggaagccttactgataacataaatagccaataaacacatattttttatgttctatgt

SEQ ID NO: 393202 - DNA, 201 bp, Homo sapiens
gataaacccccaaacaataacccttaaagttttccatacaggcccacgtgtctttcatctgtggctgaaatgggctgtctgtttctacacatccagttgayccttgaacaaatgtaggggtcacgggcaccgacgcctgctcagttgaaaatctgcatgtaacttttgactccccagaaacttaacgactccatagcctac

SEQ ID NO: 393203 - DNA, 201 bp, Homo sapiens
aaggtaaaaagacattggctgtcctaacattagactcatctatctttttgcaaaactcacaagatttctaagcatgcaatcctactcttccccttcccccwtgtttgatttatttctataaagaataatttaggatgaaaagaatacattttcccagataattttccataattaaagccttcagaaattcaagaggacatg

SEQ ID NO: 393204 - DNA, 201 bp, Homo sapiens
caaacccatgatgttcaagggtcagcagtatagggaatgtttcacccctgtattctatttttcattcatagaattaaaatagaaatcctaaaaatgccccytgtggttttcacctggatgtgtattaaggagggttaatttttttgcttgcttaaccctgagaacacagcattgacttgaaagttactgtatggaaaagca

SEQ ID NO: 393205 - DNA, 201 bp, Homo sapiens
ccccagaaacttaacgactccatagcctactgctgactggaagccttactgataacataaatagccaataaacacatattttttatgttctatgtcttctrtactggattcttacaataaagtaagctagagaaatgaaatgttattcagaaaagaataaggaagagaagatacatttactatttgttaagtggaagtgga

SEQ ID NO: 393206 - DNA, 201 bp, Homo sapiens
cttttgactccccagaaacttaacgactccatagcctactgctgactggaagccttactgataacataaatagccaataaacacatattttttatgttctrtgtcttctgtactggattcttacaataaagtaagctagagaaatgaaatgttattcagaaaagaataaggaagagaagatacatttactatttgttaagt

SEQ ID NO: 393207 - DNA, 201 bp, Homo sapiens
acctccaggccccaagcgatcctccctcctctgggtagctagaactataggcacacgcccggctattttgtaatttttttgtagagacagagtctggctayggagtcccgttatggggtcccacctgggctggtcttgaactcctggcctaaggagattctcctgcctcggcctctcagagtgctatagttattggtgtgg

SEQ ID NO: 393208 - DNA, 201 bp, Homo sapiens
ttttttttttttttttgagacagggtctcactctgttgcctaggctggaatgcagtgatgtgatcatagctcattgcagtcttgacctccaggccccaagygatcctccctcctctgggtagctagaactataggcacacgcccggctattttgtaatttttttgtagagacagagtctggctacggagtcccgttatggg

SEQ ID NO: 393209 - DNA, 201 bp, Homo sapiens
tgggctgggcatggtggctcacacctgttatcccagcactttgggaggccgaggtgggcagatcacaaggtcaggagtttgaaatgagcctgaccaacaaygtgaaacctcatctatactagaaacacaaaaattagccaggtgtggtggtgggcgcctgtaatcccagctactcaggaggctgaggcaggagaatcgctt

SEQ ID NO: 393210 - DNA, 201 bp, Homo sapiens
tgccagctgctttccataagcaattcgctcagaggatgcagtttgtacttcttagtgcagaatgagatgaatacactttaggtttctttcttttcttttcsctttttcttttctttctttttttttcttttcttttcttttttttttttttttttttttttgagacagggtctcactctgttgcctaggctggaatgcagt

SEQ ID NO: 393211 - DNA, 201 bp, Homo sapiens
cactatcctctgaagtctctctgcctttgcatcttgtcctttttttacatgggcaggctcaagtgcgatgccatataagcggaatcccatgcgttcagaaygttgctgcagtcttgcccgccacctgatgacccttgtcatggacccgctacagacagcatctgtccagtggtttgaacgcacactggatgatagtgccaa

SEQ ID NO: 393212 - DNA, 201 bp, Homo sapiens
aaacatgatttaaatataagtaatttgggatgcttataaggaatgagcctgatatccactgagagagtaaatctaacagttcatttgggaaacattgggawatacatatcaagagccttgaaaaatattctttatgatagtaaacattagaaacaatctaaatgggccgggtgtggtggctcatgcctgtaaacccaccat

SEQ ID NO: 393213 - DNA, 201 bp, Homo sapiens
agtcttaaatgaaacataattaaaggcatctttgtgtaactggcgagtcagatagtgggagaagaacagtcttcttacttggaaaatcctttaaaaaagtmcccagttgtgtggatgggctcaacaattaccgtttcatatcgacatgtgttggagctaactgaaatatgtacatctggagattaccttcctcacgagcag

SEQ ID NO: 393214 - DNA, 201 bp, Homo sapiens
ctttgcttacaccaataatctgttagcagttaacaaggaaaacagtaagattaattttggggatatactatagcttgtgatgtgcctcctatggacattcstagtgttacgccttgatgttcctagctgtcagtgtcattagcctaagaggaaagaaattccatttggaataggttaggttatctattagaaattaggctg

SEQ ID NO: 393215 - DNA, 201 bp, Homo sapiens
gcgtgatcaaggcttattgcaacctccgcctcccaggctcagacagctctcctgtctcagtctcccaagtaggtgggagtacaggtgcatgccacctcacstggctaattttctgtagaaatggtttttgccatgttgcccaggctggtctcaaactcctgagctcaagggatccacccgtcttggcctttcaaagtgttg

SEQ ID NO: 393216 - DNA, 201 bp, Homo sapiens
taaggagttggcagatgtttcctaccaaccctagattccctatgttaggagataggcaccagttacaactaaatcaacacagtgtaaatttttacatagaytatcattttttcaggtgaatgacaaccctatgtttaatctgtagaactaattgtttcttcttctcctttcttcttctcttcctccttctcctttcttctt

SEQ ID NO: 393217 - DNA, 201 bp, Homo sapiens
ttcgcccgacagctaccgctcacctcttgcctcccgctatgccagcccggagatgtgcttcgtgtttagcgacaggtataaattccggacatggcggcagytgtggctgtggctggcggaggccgagcaggtaacggatcccgggctgaggggctgggccgggagggacgggcccgccccagcacgtgccgggctctgttc

SEQ ID NO: 393218 - DNA, 201 bp, Homo sapiens
aggaagtcccgccccgccccgtcctgccctggcctccaggtttccgcttccgctcttccctggtccagtccaccctggcggggtcgcagggttgggatggyggctggaggcgatcatggttcgcccgacagctaccgctcacctcttgcctcccgctatgccagcccggagatgtgcttcgtgtttagcgacaggtataaa

SEQ ID NO: 393219 - DNA, 201 bp, Homo sapiens
ctacagacagcatctgtccagtggtttgaacgcacactggatgatagtgccaaccggtcagtggcacagggacatcacatacaccaagttgagtggaggtstgaaggagggacctagaagtaaaaggacatatttgagcatctctacagtctccttatccccaaggatcccagagtctagcagggaggcaaaaacataaaa

SEQ ID NO: 393220 - DNA, 201 bp, Homo sapiens
cttgaggggaggaagcagtatggccgtgctgccctctgctgctttgctttggaaggagcccagaggtgtcatgtcttctgtgactgtaaaggttccaggcmgttctgccacatgtggctgccgagtacttgaaatgcagctagtgtgactgagaaactgactttttacttttatttatatatttaggttttgagactgggt

SEQ ID NO: 393221 - DNA, 201 bp, Homo sapiens
ctttgggttttcaggcctgcacagctgaccacagttgggaaacgttgctgtctttggattcaggatctttgcatggatctccagaacttgaagcgtgtccragatgacctgcgcttccggggagtaaagggtaccactggcactcaggccagtttcctgcagctctttgagggagatgaccataaggtattctgaaagtga

SEQ ID NO: 393222 - DNA, 201 bp, Homo sapiens
aagaaaaaacttggagaataagagattaggaggaatgcagaaaatttgtagtaaggaaagtatgaattttgaaaagataaattgcttgaggggaggaagcmgtatggccgtgctgccctctgctgctttgctttggaaggagcccagaggtgtcatgtcttctgtgactgtaaaggttccaggcagttctgccacatgtgg

SEQ ID NO: 393223 - DNA, 201 bp, Homo sapiens
tcactgtcttcccaggattgccatgagaaaatcagagtgctttctcagcaggcagcttctgtggttaagcaggaagggggtgacaatgacctcatagagcrtatccaggttgatgcctacttcagtcccattcactcccagttggatcatttactggatccttcttctttcactggtcgtgcctcccagcaggtaagcttc

SEQ ID NO: 393224 - DNA, 201 bp, Homo sapiens
cattttgtttgacatcctgctgtgtttatgactttaaccttgaggcacctttcttggtcattcaccgtatcttttcctataggtaattgaacggcgcattyggcaagagctgcctttcatggccacagagaacatcatcatggccatggtcaaagctggaggtagccgccaggtttgtaacccctcatgttcctggataag

SEQ ID NO: 393225 - DNA, 201 bp, Homo sapiens
gggtgctctggggtgtgttgagggagctgtattctgatccgataggcattcttcccacccgagctcatccttcagttcataagctctagggaactagctcygtggaattcatagacacattatagaaacagaaaaagaagtattttaaattgccttaaactatctagcagcatgaatcatcagctctggtgtgactaggca

SEQ ID NO: 393226 - DNA, 201 bp, Homo sapiens
gaatcagaacttcggttctttttatgactgaaaagcgttccattggttgtaccatgtttcatttacccaattgtcaacaactgatggacatttgggtaatwtctactttttggctactatgaataatgctgccatgaacaagtccatgctaatttacttctttctttgcttacaccaataatctgttagcagttaacaagg

SEQ ID NO: 393227 - DNA, 201 bp, Homo sapiens
actgagagagtaaatctaacagttcatttgggaaacattgggaaatacatatcaagagccttgaaaaatattctttatgatagtaaacattagaaacaatstaaatgggccgggtgtggtggctcatgcctgtaaacccaccattttgggaggtcaaggtgggcagatcccttgaggttaggagttcaccaccagcctggc

SEQ ID NO: 393228 - DNA, 201 bp, Homo sapiens
agtgctttctcagcaggcagcttctgtggttaagcaggaagggggtgacaatgacctcatagagcgtatccaggttgatgcctacttcagtcccattcacycccagttggatcatttactggatccttcttctttcactggtcgtgcctcccagcaggtaagcttccaagaagcctcttttctgctgggctgcagaacctg

SEQ ID NO: 393229 - DNA, 201 bp, Homo sapiens
caggcctgcacagctgaccacagttgggaaacgttgctgtctttggattcaggatctttgcatggatctccagaacttgaagcgtgtccgagatgacctgygcttccggggagtaaagggtaccactggcactcaggccagtttcctgcagctctttgagggagatgaccataaggtattctgaaagtgacctgcaggaca

SEQ ID NO: 393230 - DNA, 201 bp, Homo sapiens
ccaggattgccatgagaaaatcagagtgctttctcagcaggcagcttctgtggttaagcaggaagggggtgacaatgacctcatagagcgtatccaggttratgcctacttcagtcccattcactcccagttggatcatttactggatccttcttctttcactggtcgtgcctcccagcaggtaagcttccaagaagcctc

SEQ ID NO: 393231 - DNA, 201 bp, Homo sapiens
tcgtgtttagcgacaggtataaattccggacatggcggcagctgtggctgtggctggcggaggccgagcaggtaacggatcccgggctgaggggctgggcsgggagggacgggcccgccccagcacgtgccgggctctgttccgggctgggcttagccaccccggagctgcggcccggctattttcagctgggtgttccct

SEQ ID NO: 393232 - DNA, 201 bp, Homo sapiens
cccctacctcccccagatttgcaccgacatacgcctcctggcaaacctcaaggagatggaggaaccctttgaaaaacagcagattggtgagtgctgtgtakagacctgtgagcacacattgctgctggaaggctgtggatgggggctgagagctcattcagcatgcttgcctactcactatcctctgaagtctctctgcct

SEQ ID NO: 393233 - DNA, 201 bp, Homo sapiens
ggctggtagctgagcaacccagcctttctggccaaaaagtgttatgtaataatattgtttgagcaaagctgctaaatataagatcattgcattttctttcrtaggacttgattattcttagaaatgcacttgacctgcttttgccaaaggtaaggagttggcagatgtttcctaccaaccctagattccctatgttaggag

SEQ ID NO: 393234 - DNA, 201 bp, Homo sapiens
agagagcagaatgtgtgagggagtgaaccaagcagaggtctcaggcagaaggaacagtcaagagcaggattatgttgttgttttatttattggagctttcttttttttttttttttggagacagaggcttactctgttgcccaggctggagtgcagtgccgcaatcttggctcactgcaagctctgcctcctgggttcaag

SEQ ID NO: 393235 - DNA, 201 bp, Homo sapiens
agaagaccctggtacagatagacacaggaaccacctcagcctagaggggttttgtgtagagctgtgtagactgcatggatgggaagtatctgatgactttktaaaagtgttcaaacgccctgttagtagggaactgacaatacttcactgtcttcccaggattgccatgagaaaatcagagtgctttctcagcaggcagct

SEQ ID NO: 393236 - DNA, 201 bp, Homo sapiens
aatcccagcactttgggaggccaaggtgggtggatcacctgaggtcaggagttcaagaccagcctggctcacatggtgaaaccctgtctctactaaaaatmcaaaaaaaaaaaaaaaaaaaattagccggacgcagtggcgcatgcctatagtcccagctacttgggaggctgaggcaggagaattgtttgaacctgggag

SEQ ID NO: 393237 - DNA, 201 bp, Homo sapiens
cattcggcaagagctgcctttcatggccacagagaacatcatcatggccatggtcaaagctggaggtagccgccaggtttgtaacccctcatgttcctggrtaagttgagagtgcacgtttggtcctgctctcttctccgtgaaggagagcagatgaaggtgtttatgtcattaccttcagtcacagtaatggtacagagc

SEQ ID NO: 393238 - DNA, 201 bp, Homo sapiens
ccaacatggtgaaactccatgtgtgctaaaaataacacaaatagctgggtgtggtggcagatgcctgtaatcccagctactcaggaggctgaggcaggagmatcacttgaaccccggatgcagaggttgcagtgagccaagatcgcgccgctgcactccagcctgggcgacagagtgaaattccgtctccaaaaaaaaaaa

SEQ ID NO: 393239 - DNA, 201 bp, Homo sapiens
aagtcccgccccgccccgtcctgccctggcctccaggtttccgcttccgctcttccctggtccagtccaccctggcggggtcgcagggttgggatggcggytggaggcgatcatggttcgcccgacagctaccgctcacctcttgcctcccgctatgccagcccggagatgtgcttcgtgtttagcgacaggtataaattc

SEQ ID NO: 393240 - DNA, 201 bp, Homo sapiens
tcgggaacagagaggagtcggagtaagatactctgcaggagctctttgggaggatgcgctggtcttcagctcagccacagcacacctaagagctcatctcyttcatcagcctagtcacagctcccagactctactgcacactgacagtgtggggtgatgcttattcccctacctcccccagatttgcaccgacatacgcct

SEQ ID NO: 393241 - DNA, 201 bp, Homo sapiens
agagaaacgtttacgacatgatgtgatggctcacgtgcacacatttggccactgctgtccaaaagctgcaggcattattcaccttggtgctacttcttgcyatgttggagacaatactgtaggcgcctgtgttgtttatacttaaaactcagtctctagaatctatttgtcaattttatttgatgttgtccagttgaggaa

SEQ ID NO: 393242 - DNA, 201 bp, Homo sapiens
atgtgtgctaaaaataacacaaatagctgggtgtggtggcagatgcctgtaatcccagctactcaggaggctgaggcaggagaatcacttgaaccccggakgcagaggttgcagtgagccaagatcgcgccgctgcactccagcctgggcgacagagtgaaattccgtctccaaaaaaaaaaataaaagaaagaaattagg

SEQ ID NO: 393243 - DNA, 201 bp, Homo sapiens
gaggcaggagaatcacttgaacccgggacgcggaggttgcagtgagccaagatcgcaccactgcattccagtttgggtgacagagcaagactccgtctcawaaaaaaaaaaaaagaaaaaaatctaaatgttcaataataagagaataagtaaggcatagtattcatacatccataggttggaataacatgcaaccattta

SEQ ID NO: 393244 - DNA, 201 bp, Homo sapiens
attatctgaaagttttgttcctaattatgtaatgaacacaacctgaattcaacctctttctatcacatgatctttcttgtagcttgccagagtgatctctyggcttgccgactttgctaaggaacgagccagtctacccacattaggtttcacacatttccagtaagtgataagattacttcttgtttatgtgcatatggc

SEQ ID NO: 393245 - DNA, 201 bp, Homo sapiens
gaggcaggagaatcacttgaaccccggatgcagaggttgcagtgagccaagatcgcgccgctgcactccagcctgggcgacagagtgaaattccgtctccraaaaaaaaaataaaagaaagaaattaggctggtcatagtgacttatggctgtaatctcggcactttgcggggccaaggcaggacgatagcttgaggcatg

SEQ ID NO: 393246 - DNA, 201 bp, Homo sapiens
atctaacagttcatttgggaaacattgggaaatacatatcaagagccttgaaaaatattctttatgatagtaaacattagaaacaatctaaatgggccggktgtggtggctcatgcctgtaaacccaccattttgggaggtcaaggtgggcagatcccttgaggttaggagttcaccaccagcctggccaatgtggtgaaa

SEQ ID NO: 393247 - DNA, 201 bp, Homo sapiens
agctcatctccttcatcagcctagtcacagctcccagactctactgcacactgacagtgtggggtgatgcttattcccctacctcccccagatttgcaccracatacgcctcctggcaaacctcaaggagatggaggaaccctttgaaaaacagcagattggtgagtgctgtgtagagacctgtgagcacacattgctgct

SEQ ID NO: 393248 - DNA, 201 bp, Homo sapiens
aggcaggagaatcacttgaaccccggatgcagaggttgcagtgagccaagatcgcgccgctgcactccagcctgggcgacagagtgaaattccgtctccawaaaaaaaaataaaagaaagaaattaggctggtcatagtgacttatggctgtaatctcggcactttgcggggccaaggcaggacgatagcttgaggcatgg

SEQ ID NO: 393249 - DNA, 201 bp, Homo sapiens
ttgctgcagtcttgcccgccacctgatgacccttgtcatggacccgctacagacagcatctgtccagtggtttgaacgcacactggatgatagtgccaacyggtcagtggcacagggacatcacatacaccaagttgagtggaggtctgaaggagggacctagaagtaaaaggacatatttgagcatctctacagtctcct

SEQ ID NO: 393250 - DNA, 201 bp, Homo sapiens
atcacttgaaccccggatgcagaggttgcagtgagccaagatcgcgccgctgcactccagcctgggcgacagagtgaaattccgtctccaaaaaaaaaaawaaaagaaagaaattaggctggtcatagtgacttatggctgtaatctcggcactttgcggggccaaggcaggacgatagcttgaggcatggagttcgagac

SEQ ID NO: 393251 - DNA, 201 bp, Homo sapiens
cgtatcttttcctataggtaattgaacggcgcattcggcaagagctgcctttcatggccacagagaacatcatcatggccatggtcaaagctggaggtagmcgccaggtttgtaacccctcatgttcctggataagttgagagtgcacgtttggtcctgctctcttctccgtgaaggagagcagatgaaggtgtttatgtc

SEQ ID NO: 393252 - DNA, 201 bp, Homo sapiens
tcatgtcagaacaagttaggggctactttaaaagtctgaggccacattggtgcagtggccatgtaaatggagaggaaggatatagatccagagtcgaaggyagactggccagcccagccctggtggttgaccggagtgagtataaagagcttggtgagtggggcgctactgccatttactgaggcaggagctacaagggag

SEQ ID NO: 393253 - DNA, 201 bp, Homo sapiens
tgacattgaatctccgtaacgattatttggttaaacattttatctcttgttttatctttaccagttactccctctcttacttaaattgttctccctccaaggggtaatggtggttattaaaagaagcaatgaaaccttgatgatttaaggtctcggtctgagactttcgtgtgttctctttgggttttcaggcctgcacag

SEQ ID NO: 393254 - DNA, 201 bp, Homo sapiens
gaagggggtgacaatgacctcatagagcgtatccaggttgatgcctacttcagtcccattcactcccagttggatcatttactggatccttcttctttcastggtcgtgcctcccagcaggtaagcttccaagaagcctcttttctgctgggctgcagaacctggggtactctctttgatgtttttgctttataggaggta

SEQ ID NO: 393255 - DNA, 201 bp, Homo sapiens
  misc_feature (1)...(201): n = A,T,C or G
ctgaggggctgggccgggagggacgggcccgccccagcacgtgccgggctctgttccgggctgggcttagccaccccggagctgcggcccggctattttcngctgggtgttccctgtcctgaggagctgcggccccaggaaagcaagggcaggagatccgggagccgccacctgttgcctcacgtgttctcagtccgagag

SEQ ID NO: 393256 - DNA, 201 bp, Homo sapiens
  misc_feature (1)...(201): n = A,T,C or G
ggctattttcagctgggtgttccctgtcctgaggagctgcggccccaggaaagcaagggcaggagatccgggagccgccacctgttgcctcacgtgttctnagtccgagagggttcgagacgcggaggaggctgggagaaattcagcctgtagtttcagggaattcattttggccatccccgcaggagtacgctgctaacc

SEQ ID NO: 393257 - DNA, 201 bp, Homo sapiens
cgggagccgccacctgttgcctcacgtgttctcagtccgagagggttcgagacgcggaggaggctgggagaaattcagcctgtagtttcagggaattcathttggccatccccgcaggagtacgctgctaaccacagacaccgagcgcttgtttcgtactgttgtgctcattatttcactaatcttttcttgtgtaatcca

SEQ ID NO: 393258 - DNA, 201 bp, Homo sapiens
accctggcggggtcgcagggttgggatggcggctggaggcgatcatggttcgcccgacagctaccgctcacctcttgcctcccgctatgccagcccggagwtgtgcttcgtgtttagcgacaggtataaattccggacatggcggcagctgtggctgtggctggcggaggccgagcaggtaacggatcccgggctgagggg

SEQ ID NO: 393259 - DNA, 201 bp, Homo sapiens
cccagactctactgcacactgacagtgtggggtgatgcttattcccctacctcccccagatttgcaccgacatacgcctcctggcaaacctcaaggagatkgaggaaccctttgaaaaacagcagattggtgagtgctgtgtagagacctgtgagcacacattgctgctggaaggctgtggatgggggctgagagctcatt

SEQ ID NO: 393260 - DNA, 201 bp, Homo sapiens
ccttgaatttgtcatcccagtccttcgggaacagagaggagtcggagtaagatactctgcaggagctctttgggaggatgcgctggtcttcagctcagccwcagcacacctaagagctcatctccttcatcagcctagtcacagctcccagactctactgcacactgacagtgtggggtgatgcttattcccctacctccc

SEQ ID NO: 393261 - DNA, 201 bp, Homo sapiens
gacactgagactattttattttattttgcctattctgcagacattgggtttgcctatcacagatgaacaaatccaggagatgaaatcaaacctggagaacrtcgacttcaagatggcagctgaggaagagaaacgtttacgacatgatgtgatggctcacgtgcacacatttggccactgctgtccaaaagctgcaggcat

SEQ ID NO: 393262 - DNA, 201 bp, Homo sapiens
ttgtatttccaatagtaagagtacatcagatacttggcaaatattacacgagtatctaatgtatttcttaccaatgtctgtggatatagccatgaacaaawgggacattgtccctgcccttataataaattgtctcttgccgtgcatcacagtggttcatgcctgtaatcccaacactttggaaggctgaagtaggtggat

SEQ ID NO: 393263 - DNA, 201 bp, Homo sapiens
atgagcctgatatccactgagagagtaaatctaacagttcatttgggaaacattgggaaatacatatcaagagccttgaaaaatattctttatgatagtawacattagaaacaatctaaatgggccgggtgtggtggctcatgcctgtaaacccaccattttgggaggtcaaggtgggcagatcccttgaggttaggagtt

SEQ ID NO: 393264 - DNA, 201 bp, Homo sapiens
tgcttgcctactcactatcctctgaagtctctctgcctttgcatcttgtcctttttttacatgggcaggctcaagtgcgatgccatataagcggaatcccrtgcgttcagaacgttgctgcagtcttgcccgccacctgatgacccttgtcatggacccgctacagacagcatctgtccagtggtttgaacgcacactgga

SEQ ID NO: 393265 - DNA, 201 bp, Homo sapiens
cctaattatgtaatgaacacaacctgaattcaacctctttctatcacatgatctttcttgtagcttgccagagtgatctctcggcttgccgactttgctawggaacgagccagtctacccacattaggtttcacacatttccagtaagtgataagattacttcttgtttatgtgcatatggctttcagctgcttcttgagt

SEQ ID NO: 393266 - DNA, 201 bp, Homo sapiens
ggtagtcaactcagttttcaaattttggttactgtgaactcttccaggcactttagggtacaaagatggaaggatatggctgctgcctttcatgagttagyggtctaattttatacaaaattatctgaaagttttgttcctaattatgtaatgaacacaacctgaattcaacctctttctatcacatgatctttcttgtag

SEQ ID NO: 393267 - DNA, 201 bp, Homo sapiens
agcctggtctcgaactcctgacctcagacgatctaccctcctcagccccccaaagtgctgggattacaggcgttagccaccacgcctggcaaatttttaaratatttatagggacagtgtttcaccatgctgcccagaatggccttgaactcctgtgttcaaacagtcctcctgccttagcctcccaaagtcctgggatta

SEQ ID NO: 393268 - DNA, 201 bp, Homo sapiens
tttgggaaacattgggaaatacatatcaagagccttgaaaaatattctttatgatagtaaacattagaaacaatctaaatgggccgggtgtggtggctcaygcctgtaaacccaccattttgggaggtcaaggtgggcagatcccttgaggttaggagttcaccaccagcctggccaatgtggtgaaacgctgtctctact

SEQ ID NO: 393269 - DNA, 201 bp, Homo sapiens
tttctttaggatgtgtttttccttgtttgacagagtcatgttttgaattattattattttataagagtctcccagtgatgcttaggctggccttaacctcytgagttaaagcagtcctcctccgttagcctcctaagtagctgggactacagtcatgcaccactgcaatggctttaaaatattttaacctaagtctctctt

SEQ ID NO: 393270 - DNA, 201 bp, Homo sapiens
gtctgacattctgtaggaaatgagcaggaaacgagcaaatgattcatgaggctttacagaagagggccagagcaaggtgggcatccatttcaggcttgtcmtaagatgtgggcagagagttgagaagaccctggtacagatagacacaggaaccacctcagcctagaggggttttgtgtagagctgtgtagactgcatgga

SEQ ID NO: 393271 - DNA, 201 bp, Homo sapiens
gctaaatataagatcattgcattttctttcgtaggacttgattattcttagaaatgcacttgacctgcttttgccaaaggtaaggagttggcagatgtttsctaccaaccctagattccctatgttaggagataggcaccagttacaactaaatcaacacagtgtaaatttttacatagactatcattttttcaggtgaat

SEQ ID NO: 393272 - DNA, 201 bp, Homo sapiens
atcatgccaagcactaaggattaagcaataaataaaacaaagctcctcaagaagtattcattctagagggaaatgacaggttaataaatatgtaaaaatgycatgtggtgataagtgctgtaaataaaaccaagtgacacagagtgtgttttacattgaagtcagggaagacctctttgagaagatgacatttgattccag

SEQ ID NO: 393273 - DNA, 201 bp, Homo sapiens
atgtgttgtggtttgtgatgtactagtgtgtactctttctatttcatctgatattctattctgtagatgagggtagtggtactcaagactttgccagggtygccaaagctagtaaatggcttcaagctggaattggaatgtagagtctgagtatgtgttctttgtgttggcctaaaatgcatacaattttggctttggatt

SEQ ID NO: 393274 - DNA, 201 bp, Homo sapiens
atcaaacctggagaacatcgacttcaagatggcagctgaggaagagaaacgtttacgacatgatgtgatggctcacgtgcacacatttggccactgctgtscaaaagctgcaggcattattcaccttggtgctacttcttgctatgttggagacaatactgtaggcgcctgtgttgtttatacttaaaactcagtctctag

SEQ ID NO: 393275 - DNA, 201 bp, Homo sapiens
aactgacaatacttcactgtcttcccaggattgccatgagaaaatcagagtgctttctcagcaggcagcttctgtggttaagcaggaagggggtgacaatkacctcatagagcgtatccaggttgatgcctacttcagtcccattcactcccagttggatcatttactggatccttcttctttcactggtcgtgcctccca

SEQ ID NO: 393276 - DNA, 201 bp, Homo sapiens
gtgatctcggctcactgcagcctccttctcctggattcaagagattctcctatctcagcctcctgagtagctggaactataggcgtgtgccaccatgcccrgctaatttttgtatttttagtagagatgggttttgacacattggccaggctgatcttgaactcctgacctcaggtgatcctcctgctttggtctcccaaa

SEQ ID NO: 393277 - DNA, 201 bp, Homo sapiens
tggagtgcagtggtgtgatctcggctcactgcagcctccttctcctggattcaagagattctcctatctcagcctcctgagtagctggaactataggcgtrtgccaccatgcccggctaatttttgtatttttagtagagatgggttttgacacattggccaggctgatcttgaactcctgacctcaggtgatcctcctgc

SEQ ID NO: 393278 - DNA, 201 bp, Homo sapiens
gtgttttattttatacgtgtctgcgtgtctgtgaaatctttttttttttttttttttgagatagagtctcgccctgttgcccaggctggagtgcaatggcrcaatctcagctcactgcaacctctgcctcccgggttcaagcaattctcctacctcagcctcccgagtagctgggactacaggcgtgtgccaccagacctg

SEQ ID NO: 393279 - DNA, 201 bp, Homo sapiens
ggcacacttttgcttatattgatgactaaacagataaactggtagagggtagagaaacttgaagttcaaatgagtatttgttgaagagaaatcaaaatcawaagcatagtatctaagatatgatgtcagttaggaaacaatttaatcttgtggcatctgcaggaaaaaaagaaaataaagaaacaatttaaattacaaaca

SEQ ID NO: 393280 - DNA, 201 bp, Homo sapiens
attttacagtatgtattcaacagccatgattgtagttactctgtaaggctttgttagttttaataaattttgagggaaggcttgatatgttttaatcttaagacagacatttaaaactctttgatttgcagcttattttatagcaaggtaaaggactttttcttttcttttctttctttctttctttctttcttttttttt

SEQ ID NO: 393281 - DNA, 201 bp, Homo sapiens
cattttacagtatgtattcaacagccatgattgtagttactctgtaaggctttgttagttttaataaattttgagggaaggcttgatatgttttaatcttaagacagacatttaaaactctttgatttgcagcttattttatagcaaggtaaaggactttttcttttcttttctttctttctttctttctttctttttttt

SEQ ID NO: 393282 - DNA, 201 bp, Homo sapiens
agctaactttttttttttttttttttttttttttttttaagtagagacagtgtttcactatgttggccaggttggtctcaaactcctgacctcatgatccrccggcctcggcctcccaaagtgctgggattacaggagtgagccaccgtgcctggccgaaacataaggctttttacaacttgtctttgcatgtttatattc

SEQ ID NO: 393283 - DNA, 201 bp, Homo sapiens
agctggagtgcaatggtgtgatctcagctcactgcaatctctgcctcccaggttcaagtgattctcctgcctcagcctcccaagtagctgggattacaggygcccaccaccacgcccagctaactttttttttttttttttttttttttttttttaagtagagacagtgtttcactatgttggccaggttggtctcaaact

SEQ ID NO: 393284 - DNA, 201 bp, Homo sapiens
tcaaacaatcctcccacttcagtctcctgagtaactggtactacaggcatgtgccatcatgcccagctaattaaaaagattttttctgtagagacagggtstcgcttcccaggttggtcttgaactcctggcctcaaggggtcctcctgcctgggtttctctaagtctgggattatagatgttagccacccaccactccag

SEQ ID NO: 393285 - DNA, 201 bp, Homo sapiens
ctcccgggttcaagcaattctcctgcctcagcctcccaagtagctgggattccaggcatgcaacaccacacccggatacattttttttttttttttttttktatttttagtagagacggggtttctccatattggtcgggctggtctcaaacttccaccctcaggtgatctgcctgccttggcttcccaaagtgctgggat

SEQ ID NO: 393286 - DNA, 201 bp, Homo sapiens
ttttttctattttttgtaggcacagggtctcactatgttacccaggctagtctcaaactcctgacctcaagcgatcctcccaccttggcctccccaagtgytgggattacaggcatgagccatcatgtccagcctaccccagttatcctctaacctattatttcatctttattttctcctagtaattctcactttcaaaat

SEQ ID NO: 393287 - DNA, 201 bp, Homo sapiens
tttctttgtgttgtgaacattaaaaatcctctcttgtagctttttgaaaatatacactaaattattgttaaccatattcagcatatagtgttacaaagccytagaacttattccatctagctgtaactttgtgtgtattaaccaacctctccctgtcttccccctcccctcccctttccagcttttaataccaacagttct

SEQ ID NO: 393288 - DNA, 201 bp, Homo sapiens
gtctctcttgcctgttggaaatttatactcagctgggtcaataagcttcacacagctcttaacttcctggcctgtagttggtgggaaatgctctgggtgcstcagcctttagagatgtgacctagggttcttttccaatatgggtccaaaatcagtgcaaattataatgagttgtggggtgagaaaagtcacctggaaaca

SEQ ID NO: 393289 - DNA, 201 bp, Homo sapiens
atcatatgcagtctctcttgcctgttggaaatttatactcagctgggtcaataagcttcacacagctcttaacttcctggcctgtagttggtgggaaatgytctgggtgcctcagcctttagagatgtgacctagggttcttttccaatatgggtccaaaatcagtgcaaattataatgagttgtggggtgagaaaagtca

SEQ ID NO: 393290 - DNA, 201 bp, Homo sapiens
cgcatgcctgtaatcccagctatttgggagcctgatgcaggagaatcgcttgaaccagggagtcagaggttgcagttaactgagatcatgccactgcattytagcctggcgacagagcaagactccgtctcaaaaaaaaaaaaaaaaaaaaaaagaaagaaaaagggaacatatagaagatctcaatcttttacgtaagga

SEQ ID NO: 393291 - DNA, 201 bp, Homo sapiens
ccatgaaaaagggaatataggctgggcgcggtggctcacacctgtaatcccagcactttgggaggctgaggtgggtggatcacgaggtcaggagattgagmccatcctggccaacatggtgaaacctactaaaaactactgaaaatacaaaaattagctgggcatggtggcgcatgcctgtaatcccagctatttgggagc

SEQ ID NO: 393292 - DNA, 201 bp, Homo sapiens
cattattaacacaaacataatgaaatacatatacaatttagagtaatatttaaagtgatgtaaatatctagatgcgattaaacacttcactcactgaagtytaattattttaatttgctacatttgctgtttaatgttactttggtcttctcttctccccatcccatcccaaatatgcatagttttaattcacccctgccc

SEQ ID NO: 393293 - DNA, 201 bp, Homo sapiens
taaaaaacatacaggcacacgcaactaacctcccacacaagttaaataactattgctccttttctgttcaaaaccaaatatatactcttgcattcactggraagtgttactagtatatgatttgctatctattcagaagaatagatatttgagaataaaataaaaaagtatataataatgaaagcaactaccaaattaaaa

SEQ ID NO: 393294 - DNA, 201 bp, Homo sapiens
agtctcactctgtcacccaagctggagtgcaatggtgtgatctcagctcactgcaatctctgcctcccaggttcaagtgattctcctgcctcagcctcccragtagctgggattacaggtgcccaccaccacgcccagctaactttttttttttttttttttttttttttttttaagtagagacagtgtttcactatgttg

SEQ ID NO: 393295 - DNA, 201 bp, Homo sapiens
aggaggaaatggaaggtgcacactgataacttaaaacagcctccactccctatgtagtaacttctaccagcaaaaatagatttgcaaagagtgctttggcwggaaggtgtagctgggtgaatgaagtgctgctcttagcagatggtctctagtctggcttccaccttgtgcagtggaatattcactcccagaagagttcca

SEQ ID NO: 393296 - DNA, 201 bp, Homo sapiens
tttgttttgtttgagatggagtctcactctgtcacccaagctggagtgcaatggtgtgatctcagctcactgcaatctctgcctcccaggttcaagtgatyctcctgcctcagcctcccaagtagctgggattacaggtgcccaccaccacgcccagctaactttttttttttttttttttttttttttttttaagtagag

SEQ ID NO: 393297 - DNA, 201 bp, Homo sapiens
gaccaaggtaatcttattctccctaaatcagtggttgcctagtaccttgaccatgcctggctcataatgtgtacccccaaaaatatttgttaaagacattygttaatctgccacttaccgtcttaatcatataccaaaaaccctgcttgctaccttaactttatcactagcctcctccctttgcttatgttttcaccaaag

SEQ ID NO: 393298 - DNA, 201 bp, Homo sapiens
gtggatcacgagggcaggagttcaagaccagcctggccaagatagtgaaacctgtcactactaaaactataaaaattagccaggcgtggtggcaggcaccwgtaatcccagctactcaggaggctgaggcaggagaatcgcttgaacccgggtgacagaggttggagtgagccgagattgtgcccctgcactccagcctga

SEQ ID NO: 393299 - DNA, 201 bp, Homo sapiens
ctggtggatcacgagggcaggagttcaagaccagcctggccaagatagtgaaacctgtcactactaaaactataaaaattagccaggcgtggtggcaggcrcctgtaatcccagctactcaggaggctgaggcaggagaatcgcttgaacccgggtgacagaggttggagtgagccgagattgtgcccctgcactccagcc

SEQ ID NO: 393300 - DNA, 201 bp, Homo sapiens
ctcccaaagtgctgggattacaggtgtgagcctggcccaactctgctcttgttatgattatgagtgtcctcttgactgacaaatcaatgagattttattayttaaaatttccatgattctgctcattctcttttctgtgaaactgagttttcactaggctactgtgacatcttctcttggattactccttatggatctctc

SEQ ID NO: 393301 - DNA, 201 bp, Homo sapiens
ataggcatgtgccaccatgcccggctaatatttgtatttttagtagagatggggttttgccatgttgaccaggctggtctcgaactcctgacctcaggcartccgcccgcctcaacctctccaagtgctgggattacaggtgtgagccactgcgcctggccttaaacacataatcttgaaatgaatgcattagttctgttc

SEQ ID NO: 393302 - DNA, 201 bp, Homo sapiens
aaactgttttcaaaatgggccattttttaaatggagcttatccagcttgatccatgcttgaagcagcactgaaccattaaataaaaacctgggacaaaatrcctttgaaaagggttaattagctttaatattgacttattccatataggacggtaatagactagaacatttatttctgttttggatcattaaaaactggcg

SEQ ID NO: 393303 - DNA, 201 bp, Homo sapiens
tagtttttttcaaactttcagcattttctttgagtcttttatgtcacccaggcatttctttattaaaagatgatggttagtggttagggtaggctcaaccrtcataactgaaaggcctgaaaatagatacaagctcaagcacaagtttaatttttgcttatatcatggtctttgttggtggatcactttcctttcaatgat

SEQ ID NO: 393304 - DNA, 201 bp, Homo sapiens
agtcttaatggatgtagaagcaatgtgcaacttggtatcagtcttcttttctactcctatacttgggtttctgatggttattgtgaaaacgaaaatgattrtgtgtattggagatgtataaaaatgtatgttctccagccttagtcatgagagagttatcttacctttttctacacaatacctttttctatttcttgctgt

SEQ ID NO: 393305 - DNA, 201 bp, Homo sapiens
gaaggctgcgtgttagctgctgtggctctcttctccacattctagattggcttcagatctcatctgagatgtgcccttcttatggcacaggagtaagagakgctaagcaaaactataaagttaccatgaaagcttttactcaaaagtagcatatatcatacctattcatgttccacagtccaaagtaagtcacatggccaa

SEQ ID NO: 393306 - DNA, 201 bp, Homo sapiens
gggacaaaatgcctttgaaaagggttaattagctttaatattgacttattccatataggacggtaatagactagaacatttatttctgttttggatcattwaaaactggcgttagttcttcaacaatttgtttctaataaataaaaattggaccaattagagtagttttagtataagccacagttcatgatacacttctta

SEQ ID NO: 393307 - DNA, 201 bp, Homo sapiens
aattttgtagacctcacatgcctaatccaagtgcctttcatgtgggtgacacctagtaagcagttgttcattaatggttgccccataattcagtcatcccyaattcagcaataagtgataagagtgtgctgggtgtgattggacaccagataccacacaggcaggtgtatttcaggtaatctattcaactggatactttaa

SEQ ID NO: 393308 - DNA, 201 bp, Homo sapiens; identical to SEQ ID NO: 86232

SEQ ID NO: 393309 - DNA, 201 bp, Homo sapiens
aatactgtagcaaataggaatgggaccagaagacagaatgggcaaatgtaataccaaatttcaaaaacgagaggagagaaaaatatagtttgcaacctagraactaatggtcttggcattgatcttgcgtggttttctagattgtgacattttaagtttattttatcagcatttatcaagaaatagtgatcacggaagcta

SEQ ID NO: 393310 - DNA, 201 bp, Homo sapiens
caaaagtgatgaaaataatgcagttcagagtactaggttctcaaaagttgttttcttttcattttaactgaataaaagaaaggatattggctaagtgttgkctcatgcctgtaatcccagcactttgggaggccaaggtaggaggatcacttgagcccaggagtttgagaccagcctgggcaacatgtgagaccctgtctc

SEQ ID NO: 393311 - DNA, 201 bp, Homo sapiens; identical to SEQ ID NO: 86234

SEQ ID NO: 393312 - DNA, 201 bp, Homo sapiens
aaagggctggggaggcagtccaaagataggggttatagatttatgttaataaatatataatatatattaatatgtaattttatttttatttttacttttttaagtgacaaagtctcgttcagttgttaggctggagtacagtggagtgatcacaactcactgcagtcttgacctctggagtttaagcaaatctcctcagcc

SEQ ID NO: 393313 - DNA, 201 bp, Homo sapiens
aatggcctgtgcttcatttcatgtgttgtaaataaacagcagaatttagggttgaaagacatggcactttagaaacaataagaatctgattttatgaataygctatgtggtttaggttttaagtaattttcttgaatgcagttgagttaaaagcaggagataattgaaactatctgcaggttttcttgtagagtttttttt

SEQ ID NO: 393314 - DNA, 201 bp, Homo sapiens
gctggtgatgctcagatgcatacacacacacacgcacaacacatacatacatacatatacacgcacacaaacacacatacagggttaggctaagtagatcwttatgttttttaattaacccaaactcttgtgatatgcagagggtaatgaagcatttttatatattcataaaatactttctgtattcattgggttctgttc

SEQ ID NO: 393315 - DNA, 201 bp, Homo sapiens
tagaaaaacaattccatccattcaagatagatttgacaaggcttaacaatagcacatgtgaaaaagaaatatggttttagttaactgtgaatgcatagccrttaacagtggaccatggctgcccccaaatccaattgcaatcttaagccgcattaatagaaatcatatatctagattgatgatgctgatagttactccctt

SEQ ID NO: 393316 - DNA, 201 bp, Homo sapiens
attttatgctaggaattcaggctgtaggaggtaggaaggaggaagaaaattctgtaaactggttgtgtttggccctactaaggaagctagatttaacttcrgttcatattttatgaacagatttatgtgctcagaaatgctctcccatcccccttaacaaagtaacataaataaagacctaaagctattactcagtatctg

SEQ ID NO: 393317 - DNA, 201 bp, Homo sapiens
tattgatttctgacactatttcccctgtgttcatttagatattttcacatgccttttattgattgttttttgaaagtggcaaacatgaaaaaaaaacccccaaaacatatgcctaaataactaatgtgaagctaaaccgcacatttacctcttaattgtcacttcctgtgggctttattttctactaatttttaaaacaaa

SEQ ID NO: 393318 - DNA, 201 bp, Homo sapiens
gtgggtggggatctctacccgtgaagtgagcgtggggctttaacggagactggatcacttatgttctacctataaatacatggaagacttggcatacctggttggtccataaaagtcttttcaattaacataccattttgtagtcagcgaattggtgaaactaacaaatagttattgttaattctgatgtttgataagagt

SEQ ID NO: 393319 - DNA, 201 bp, Homo sapiens
ggtagaaccctagatagcttcaggatggagatgggagctggtgccagaggaaccaactatgtaattagagggttggaatttcagcttcactccagacctcyggggagaggagaggggctggaaatccagtcagtcaccagtggacaataatttaatcaatcatgcccacatcatggagccttcataaaaaccttaaatttt

SEQ ID NO: 393320 - DNA, 201 bp, Homo sapiens
ataagtagggccttaggctgtgtttactgcctctaaaataaacgtggtacttagcttctcagttgcaacacttcccagcttttatggaaaaaaaaaaaaaacaaaaataaaatgttattttaaaaagtagtgtcagaaagtaaataaattacccttaatagtgctgtatgttttaaaaaaatattttggagggactgttca

SEQ ID NO: 393321 - DNA, 201 bp, Homo sapiens
tctctactaaaaatacaaaaattagccgggcatggtggtggatgcctataatcccagctactcaggaggctgagacaggagaattgcttgaacctgggagrtggaggttgtagtgagccgagatcgcaccactgcactccagcctgggcaacacagtgagactgcatctcaaaacaaacaaataaacaaacaaaaacaaaa

SEQ ID NO: 393322 - DNA, 201 bp, Homo sapiens
tgaaatataggcactgcacaactttaaaatgaaatataactcatttcacttcaatgaatttgtttaaaaagaaaactatattttatgagtttatattttatgagtttattaatttgttctggttttttttaaagcacatatttatatttatataaaataaaaacatttttatatcacttgaaatcacatatcagtcaatgg

SEQ ID NO: 393323 - DNA, 201 bp, Homo sapiens
  misc_feature (1)...(201): n = A,T,C or G
aggaagccctacccaggattgttgaactgatgggcagggaactgaattgggatgattataagaagcaggtattatatagaagtctttaaaaccacaattcntattgtaaacgcggaatggcttaatttgttagtagaagctagcgtagtttttgatgataaccttagatttcttaccagtttttctttgtgtgtgtttaat

SEQ ID NO: 393324 - DNA, 201 bp, Homo sapiens
ttgaaatataggcactgcacaactttaaaatgaaatataactcatttcacttcaatgaatttgtttaaaaagaaaactatattttatgagtttatattttatgagtttattaatttgttctggttttttttaaagcacatatttatatttatataaaataaaaacatttttatatcacttgaaatcacatatcagtcaatg

SEQ ID NO: 393325 - DNA, 201 bp, Homo sapiens
tttgaaatataggcactgcacaactttaaaatgaaatataactcatttcacttcaatgaatttgtttaaaaagaaaactatattttatgagtttatattttatgagtttattaatttgttctggttttttttaaagcacatatttatatttatataaaataaaaacatttttatatcacttgaaatcacatatcagtcaat

SEQ ID NO: 393326 - DNA, 201 bp, Homo sapiens
cctggcccctgcaatgtagagtaattcttcctggtcagcgttaactccactggcaataataaatagaaaaagtctctagtgatgccagtattttaaagtgmttaatcatctttccccccttctcctcccccttagttttctttaactaggatttttcagcaataaatctttaacaatacaggtaggaattgttctgtaatt

SEQ ID NO: 393327 - DNA, 201 bp, Homo sapiens
gagctttggtaaccaatgaacacttacctggctatgggaaaaatttgtttttctctagaaatgggcaaggactaaaatagttggctctagacatgtggtgrtcattaaaagtacatggtagactcatcactggaaagtacccacatggtgggaaaaggtcaatcccagaagctgcgtttaagatgtcttagtagcaggtag

SEQ ID NO: 393328 - DNA, 201 bp, Homo sapiens
gtttccctattatagaatcttgtagattgcagttggtatttttgcctgttttctcatataatttgttaactctttccccctctcccattgtgtcctttttyctatacttgcatctactcattatgaacatggctaatggtatcctaatgaaaaagcaaccctctctctctcctgggggtcattggtgtcatttgaatatgc

SEQ ID NO: 393329 - DNA, 201 bp, Homo sapiens
ttttgaaatataggcactgcacaactttaaaatgaaatataactcatttcacttcaatgaatttgtttaaaaagaaaactatattttatgagtttatattttatgagtttattaatttgttctggttttttttaaagcacatatttatatttatataaaataaaaacatttttatatcacttgaaatcacatatcagtcaa

SEQ ID NO: 393330 - DNA, 201 bp, Homo sapiens
ttctgttttctcttgagacgtgggaattgtacagtaattacagtgggatgtaagtttcacgaaggtagagatcaccctgtgtctttctcagttatattccrtgcatttgtcacagtgcctgattcataacaaaggattttcatttttgtaagtagatggacacatggatgattctagtatcataaagactatttaaaaagg

SEQ ID NO: 393331 - DNA, 201 bp, Homo sapiens
tttttgaaatataggcactgcacaactttaaaatgaaatataactcatttcacttcaatgaatttgtttaaaaagaaaactatattttatgagtttatattttatgagtttattaatttgttctggttttttttaaagcacatatttatatttatataaaataaaaacatttttatatcacttgaaatcacatatcagtca

SEQ ID NO: 393332 - DNA, 201 bp, Homo sapiens
gctaataactagaaaaaaaacaaagacaaacaagtaagcctttctgttttctcttgagacgtgggaattgtacagtaattacagtgggatgtaagtttcaygaaggtagagatcaccctgtgtctttctcagttatattccgtgcatttgtcacagtgcctgattcataacaaaggattttcatttttgtaagtagatgga

SEQ ID NO: 393333 - DNA, 201 bp, Homo sapiens
acagtttttgaaatataggcactgcacaactttaaaatgaaatataactcatttcacttcaatgaatttgtttaaaaagaaaactatattttatgagtttatattttatgagtttattaatttgttctggttttttttaaagcacatatttatatttatataaaataaaaacatttttatatcacttgaaatcacatatca

SEQ ID NO: 393334 - DNA, 201 bp, Homo sapiens
tttgtaagagaaaatgaagtcctctgtagtaagatttaataattctaatattttgaaacaatccattttcctatcaacactgttttcctctggattaaaarccattccccatcttcctatccttcatgacatacagaaaaaagaatcttatttttcagtggtaaaaagtggagagagagaaaaggagtaaaagaagaacaa

SEQ ID NO: 393335 - DNA, 201 bp, Homo sapiens
tatgtacagaatgtctccatctctgcagtaaagtccatgggacagtgctgatcttgagaatctagaggtgtttaaatatacacttagagaaagacatactmaatttaatagaatcgttgaatttgggtttttttgtttgttaagtaaaatagagaaattcattatcttgtaaaacaagaactccagacacaacaagcctca

SEQ ID NO: 393336 - DNA, 201 bp, Homo sapiens
cttcacagtttttgaaatataggcactgcacaactttaaaatgaaatataactcatttcacttcaatgaatttgtttaaaaagaaaactatattttatgagtttatattttatgagtttattaatttgttctggttttttttaaagcacatatttatatttatataaaataaaaacatttttatatcacttgaaatcacat

SEQ ID NO: 393337 - DNA, 201 bp, Homo sapiens
taataagtgtctatctatctctctttttttttggcctatgtaagtatatttttccattatttaatcttgtgttccaggtataagaagagatttcataagtytgatgcagaccagaaaggctttattaccattgttgatgttcagcgtgtattagaggtaattttctttggttgatgtcagcctctgatactagaagaatat

SEQ ID NO: 393338 - DNA, 201 bp, Homo sapiens
tattttctactaatttttaaaacaaacacttatcttgccaagtatgagtaaaaatatgaattatagtttgaaataatcacatcatacttaattttttcaaytagccgtgaaaattgtctgttcaacttttctatttatattttaccctttacatattacattactaaaatctgaatgagttattttttgggaatgtaatac

SEQ ID NO: 393339 - DNA, 201 bp, Homo sapiens
gtaaattgtgaccagatgaattcaaaactcaaaaagtaaaattgcctttgaatttgtatcctcagctacgatattgattgaaaatcgatgagtaactcttwttcttgttttctataggcagtaagaaattcacagaatctatttacagctatacgtgacagcacttaaccttgactatgcctgctaaaaggtttcttgact

SEQ ID NO: 393340 - DNA, 201 bp, Homo sapiens
accttcacagtttttgaaatataggcactgcacaactttaaaatgaaatataactcatttcacttcaatgaatttgtttaaaaagaaaactatattttatgagtttatattttatgagtttattaatttgttctggttttttttaaagcacatatttatatttatataaaataaaaacatttttatatcacttgaaatcac

SEQ ID NO: 393341 - DNA, 201 bp, Homo sapiens
tttcatattgagttaggaagaaaaatgatcttttgaaaaatgtatcattaagtctgctgtgtagaggttaatcagaaggatgcagtgacaaaactaagctrtgacttaacaggattgagagagacagaagatttgctgagtgctttatccatgtagtttttcctggagtacttctttaggcagcttctctacttgtacaca

SEQ ID NO: 393342 - DNA, 201 bp, Homo sapiens
gagaggggggtggggggagagagagagagagagagagagagaaagaaagacctgggaaagagaaggcatattacatgggccattatccatctgcttgcttkaatttcttggacaactccagcatctactacccagattttcttgttgttgtttttttttgttttgttttgttagttgtctttgtggcttacctctttattt

SEQ ID NO: 393343 - DNA, 201 bp, Homo sapiens
ttatgtgatcacatttgtaaacaaaatgcttcaaaactgcttcaaaaatggttcaggtgactcctagtttaattgactaatccatattgtatagtattaawtgcttttaatctaaagtaatggatgtaatttcattcttaagagtctctttggatatctacaataatagtataaaagatactaaatacatatcattgaaat

SEQ ID NO: 393344 - DNA, 201 bp, Homo sapiens
ttatatcagaaatcttataatgttgatgtcagtgaaggacatggaaaagcactatgttagtctgaatgcaactcactagcatctgtgtatcctttttcccyaaaggatttttttttggttatgtgatcacatttgtaaacaaaatgcttcaaaactgcttcaaaaatggttcaggtgactcctagtttaattgactaatcc

SEQ ID NO: 393345 - DNA, 201 bp, Homo sapiens
taggtttcatgtcttattatgttgaatcttcgtgtctaatttaggttgaagccttgctctgggacacccttttccccaactcttcatcttggcaaaatttytatactggagaaaccacctattctttgtattcctgtgggatgttggtcatatcgtttgtatatcacaacattatattataggtaatagtccaagatgtat

SEQ ID NO: 393346 - DNA, 201 bp, Homo sapiens
tctaccagaattttctttctaaaacacaattctgatcatcacttttctgcacaaatatacactttagatatcttctcattgactttaggaaaaatgctaamttctcttgcatgaaacataaagctttttgttttgttttgttttgtttgagatggagtctcactctgtcacccaagctggagtgcaatggtgtgatctcag

SEQ ID NO: 393347 - DNA, 201 bp, Homo sapiens
accaggcaggtccatcagccacttcattgccctggttcacatctgtgccatttctcacttgaacagttgcattggccccacaatggcctctttaggtcagktctctatccctctccagtctaatccttctaccagaattttctttctaaaacacaattctgatcatcacttttctgcacaaatatacactttagatatctt

SEQ ID NO: 393348 - DNA, 201 bp, Homo sapiens
agtatgagcaaagagagataaacatatttctccactcaattatgtcaatttttttctttttttcttttatttatttatttatttatttttattattattayactttaagttttagggtacatgtgcacaatgtgcaggttagttacatatgtatacatgtgccatgctagtgcgctgcacccactaacttgtcatctagca

SEQ ID NO: 393349 - DNA, 201 bp, Homo sapiens
ggtagaattgaaataagaattttctttttctaaggcctggactctgtgcatgtacctggtttgacattctttttttctttttcttttttcttttttgagayggagttttgctcttgttgcccaggctggagtccaatggcgtgatctcggctcactgcaacctccgcctcccgggttcaagcaattctcctgcctcagcct

SEQ ID NO: 393350 - DNA, 201 bp, Homo sapiens
cagctatttgggagcctgatgcaggagaatcgcttgaaccagggagtcagaggttgcagttaactgagatcatgccactgcattctagcctggcgacagarcaagactccgtctcaaaaaaaaaaaaaaaaaaaaaaagaaagaaaaagggaacatatagaagatctcaatcttttacgtaaggacattgaagtccaggga

SEQ ID NO: 393351 - DNA, 201 bp, Homo sapiens
ggtggtaaaaatggcagaaggccttggagtgccaaaggcaagggttatgggtccagcagtaccatgaaaaagggaatataggctgggcgcggtggctcacmcctgtaatcccagcactttgggaggctgaggtgggtggatcacgaggtcaggagattgagaccatcctggccaacatggtgaaacctactaaaaactact

SEQ ID NO: 393352 - DNA, 201 bp, Homo sapiens
gatcacctgaggtcaggagtttgagaccagcctggctaacatggcaaaaccatggctctactaaagatacaaaaattagctgggcatggtggcacatgccygtgatcccagctacttgggaggctgaggcaggagaatcgcttgaacccgggaggtggaggttgcagtgagctgagatcacgccacttcactgcagcctgg

SEQ ID NO: 393353 - DNA, 201 bp, Homo sapiens
tgaagttactccagactttcaaattgttcctcacccttcacaagacgggaagtttcctaaggctgaaggaagcagcagtcactgagtgcagaatgtttctsttggtgcagtgggttgtgaccactctcattgttgttttcttcctgtccagagtgaaacaggtatccttcagaaatttcatagcatgtagccctgaagagc

SEQ ID NO: 393354 - DNA, 201 bp, Homo sapiens
atcagaggtgaggtggttgaggaattggagccttcatgtagttgtagaaaacagcaatgatggccgggcctgtaatcccagcacttcgggaggctgaggckggtggatcacctgaggtcaggagtttgagaccagcctggctaacatggcaaaaccatggctctactaaagatacaaaaattagctgggcatggtggcaca

SEQ ID NO: 393355 - DNA, 201 bp, Homo sapiens
aaggtcatcagaggtgaggtggttgaggaattggagccttcatgtagttgtagaaaacagcaatgatggccgggcctgtaatcccagcacttcgggaggcygaggcgggtggatcacctgaggtcaggagtttgagaccagcctggctaacatggcaaaaccatggctctactaaagatacaaaaattagctgggcatggt

SEQ ID NO: 393356 - DNA, 201 bp, Homo sapiens
gcaggcgcgggagcgggaggaggaagtcgggaagagggaaggcgggggcgcggcccgcccggcgctcgagttacacccgcccagcccgcctcgagtgacakccccgcgcgcctcgctgggagcacccgggccgaggctctgattctggggggaggccgactccaccctggctggaggaactgggtgctcctgcccgctggc

SEQ ID NO: 393357 - DNA, 201 bp, Homo sapiens
ggcgcggcggcgcgcacctgcaatcgcaggctgaggcaggagaatcaggcagggaggttgcagtgagccgagatggcagcagtacagtccagcttcggctmggcatcagagggagaccatggaaagagagggagagggagaccgtggggagaggggagaggggagagggagaactctttcaagaagtttcattatgaagga

SEQ ID NO: 393358 - DNA, 201 bp, Homo sapiens
gatgggttttgttaatgtttgtttacagttgtctcttctttcaaatatgttttattatttgattttagaatagtaaatatcagtaaatatttttgactatmgttttgggagattttatgtagtctttcagtagaggcagcattgtaccttgatttaacatagtacactactagtgtcttttatgtaaaagattttcattgc

SEQ ID NO: 393359 - DNA, 201 bp, Homo sapiens
agcaccttcacagtttttgaaatataggcactgcacaactttaaaatgaaatataactcatttcacttcaatgaatttgtttaaaaagaaaactatattttatgagtttatattttatgagtttattaatttgttctggttttttttaaagcacatatttatatttatataaaataaaaacatttttatatcacttgaaat

SEQ ID NO: 393360 - DNA, 201 bp, Homo sapiens
gaagtggggagggaaggggtagctctgctgtggaatattgttatcatcacatttgtttcattctgttttgttatctaagttatttttttcttttaggagtytctagattagggtaggggaagtgcaagtaatagttcatatctttcttgtttgcatatttgagaattaatgaataaatagtttttcgaatgcagattaatg

SEQ ID NO: 393361 - DNA, 201 bp, Homo sapiens
aagcaccttcacagtttttgaaatataggcactgcacaactttaaaatgaaatataactcatttcacttcaatgaatttgtttaaaaagaaaactatattttatgagtttatattttatgagtttattaatttgttctggttttttttaaagcacatatttatatttatataaaataaaaacatttttatatcacttgaaa

SEQ ID NO: 393362 - DNA, 201 bp, Homo sapiens
agctagaaaggggatggagtgggaatatgaacttcgcctggagtttggccgtcctgtggccgatctcctctctgaccatccacagccaaactcttcttgaygtttaaatgccctttctcttctctcctctctgctgtgccactcttctgcttctttgctcttctgcttatctgttatctgctcatctgctcgaggagcctg

SEQ ID NO: 393363 - DNA, 201 bp, Homo sapiens
atgaataaatgatggtgggcccagggtttcctcaggacatagagttttttccttccttcttccttccttccttccttccttccttccttccttcctccctycctccctccctccctccctcgctcccttccctccctcccttccctcctctcccctccgctccccttccttcctcccctccccttccctctttcctgtttc

SEQ ID NO: 393364 - DNA, 201 bp, Homo sapiens
gaagcaccttcacagtttttgaaatataggcactgcacaactttaaaatgaaatataactcatttcacttcaatgaatttgtttaaaaagaaaactatattttatgagtttatattttatgagtttattaatttgttctggttttttttaaagcacatatttatatttatataaaataaaaacatttttatatcacttgaa

SEQ ID NO: 393365 - DNA, 201 bp, Homo sapiens
cctctggagtttaagcaaatctcctcagcctccgactagctaagactatcgttgtgcaccaacacatctggctagtttttatttttaaaaaactctttgcrgagacaaggccttgctttgttgcccaggctggtgatgaacacctggcttcaagttgtcctctcaccttggcctcccaaagtgctgggattacagatgtga

SEQ ID NO: 393366 - DNA, 201 bp, Homo sapiens
taagtttgatgaataaatgatggtgggcccagggtttcctcaggacatagagttttttccttccttcttccttccttccttccttccttccttccttcctycctccctccctccctccctccctccctcgctcccttccctccctcccttccctcctctcccctccgctccccttccttcctcccctccccttccctcttt

SEQ ID NO: 393367 - DNA, 201 bp, Homo sapiens
atgaagcaccttcacagtttttgaaatataggcactgcacaactttaaaatgaaatataactcatttcacttcaatgaatttgtttaaaaagaaaactatattttatgagtttatattttatgagtttattaatttgttctggttttttttaaagcacatatttatatttatataaaataaaaacatttttatatcacttg

SEQ ID NO: 393368 - DNA, 201 bp, Homo sapiens
cagttgttaggctggagtacagtggagtgatcacaactcactgcagtcttgacctctggagtttaagcaaatctcctcagcctccgactagctaagactaycgttgtgcaccaacacatctggctagtttttatttttaaaaaactctttgcagagacaaggccttgctttgttgcccaggctggtgatgaacacctggct

SEQ ID NO: 393369 - DNA, 201 bp, Homo sapiens
ataagtttgatgaataaatgatggtgggcccagggtttcctcaggacatagagttttttccttccttcttccttccttccttccttccttccttccttccytcctccctccctccctccctccctccctcgctcccttccctccctcccttccctcctctcccctccgctccccttccttcctcccctccccttccctctt

SEQ ID NO: 393370 - DNA, 201 bp, Homo sapiens
taatgaagcaccttcacagtttttgaaatataggcactgcacaactttaaaatgaaatataactcatttcacttcaatgaatttgtttaaaaagaaaactatattttatgagtttatattttatgagtttattaatttgttctggttttttttaaagcacatatttatatttatataaaataaaaacatttttatatcact

SEQ ID NO: 393371 - DNA, 201 bp, Homo sapiens
ttaatgaagcaccttcacagtttttgaaatataggcactgcacaactttaaaatgaaatataactcatttcacttcaatgaatttgtttaaaaagaaaactatattttatgagtttatattttatgagtttattaatttgttctggttttttttaaagcacatatttatatttatataaaataaaaacatttttatatcac

SEQ ID NO: 393372 - DNA, 201 bp, Homo sapiens
tgagttacataaatgaaactgacatcattgctcatacagcaggcatatttttttttgcccccaaatgctgcctttttgctattcagtgtatctggataccrgctaatgctaaatgaagtttgacatgtacccctaagaaacaaaacttataaattgtggcttcaaaggaaaccttgaataaataggacacactgtgtccac

SEQ ID NO: 393373 - DNA, 201 bp, Homo sapiens
tgtgcatttctaatggtatttcctttttaggttgatgaatattataattttatgattaaatttatcatgtttattattttagacacatcatatgatgtctrgtccttgatatagtcatataaaacatgtcagcatataattcgtttatcaattgttagaatatagaatttttttgtttcaatatacttctgtttatcaaat

SEQ ID NO: 393374 - DNA, 201 bp, Homo sapiens
aattgaaagcctgactcttattccccctaccttttgttccctcccccagttcttctctggtaattaataacctcttcttccaattccttccttaaaatcaygtttttacaagcacaaatgtgtattctgttaaaaattttgtgtgaaagtggtcatgttgcatatattgttctatattatgctttatacacttagtaacag

SEQ ID NO: 393375 - DNA, 201 bp, Homo sapiens
tttactttggactggagacatcaaggtgcctcttaaggcaccactgcataagataatagaaatgtatgcagtggtacctaattgagtttttaaaactgttraccagaagcttagttcaaatgaaaaggagagaaataaatatatgaaaatgtcccatatgtttctcgtatatagagaagttttcaacattagttccagatg

SEQ ID NO: 393376 - DNA, 201 bp, Homo sapiens
tataaatgcaaaaagtatatgtacagagagggaaaaggggaccaaactcaagaaaatgtcctaggatcaacaatattagaaaaatgttaagggtcttaggyaaacattaaaagctagaaaattcacagtttacagtgcttccgagcatctgaacaccacaggggggccacttaactatttttttggtgcccttgattgagt

SEQ ID NO: 393377 - DNA, 201 bp, Homo sapiens
  misc_feature (1)...(201): n = A,T,C or G
catggaggtagtgagcttgctcaagaagacagacccccagacagggaaagtgcatgtgagcggcgcacggtgcaaggatgtcctcacaggtatgccaggtntctgggagggaggtatttcttagtatcttgcctagcttatataatgactgaattataatttttctgtcacttctctttcatttatgccacgcttcagagt

SEQ ID NO: 393378 - DNA, 201 bp, Homo sapiens
gggtccagtggcacgatcttggcttattgcaacctccacctcccgggctcaagccattatcccacctcggtctcctgagcagctgggattacaggcacgtrccaccatgcccagctaatttttttgtatttcagtagagatggggtttcaccatgttgcccagggtggtttcgaacacctgagctctggcagtccgcctgc

SEQ ID NO: 393379 - DNA, 201 bp, Homo sapiens
gatacaagtgatggtatatgaacgtactgaagctttaagagatttggatacatggagacattgtatgttagaagaaaatacctagcactatatatctcccyaccaccgaaaaagggaggggggatttttttgcaatacagttgggaatgctgctttaatcccgtaaactgttattcaaaatacactaaatgtgaaatgcat

SEQ ID NO: 393380 - DNA, 201 bp, Homo sapiens
tatatattctgttttatcatattccatgtgaatcaaggatgtaactttaaaacatcataaaactattagaagcaggtatatgtaaatttttttaaaaaatkgggtaggaaaggtgtttttaagtatgacagcaaaaagccataaaggaaaagcctgcttttgattttataaaaattaaaatgtatccatggcaaaagatgt

SEQ ID NO: 393381 - DNA, 201 bp, Homo sapiens
gccattgctctgactgctgccaggtatggggctgccacagccaattacatggaggtagtgagcttgctcaagaagacagacccccagacagggaaagtgcrtgtgagcggcgcacggtgcaaggatgtcctcacaggtatgccaggtatctgggagggaggtatttcttagtatcttgcctagcttatataatgactgaat

SEQ ID NO: 393382 - DNA, 201 bp, Homo sapiens
agcagggtccagtggcacgatcttggcttattgcaacctccacctcccgggctcaagccattatcccacctcggtctcctgagcagctgggattacaggckcgtgccaccatgcccagctaatttttttgtatttcagtagagatggggtttcaccatgttgcccagggtggtttcgaacacctgagctctggcagtccgc

SEQ ID NO: 393383 - DNA, 201 bp, Homo sapiens
gcatgcatatatattctgttttatcatattccatgtgaatcaaggatgtaactttaaaacatcataaaactattagaagcaggtatatgtaaatttttttwaaaaatggggtaggaaaggtgtttttaagtatgacagcaaaaagccataaaggaaaagcctgcttttgattttataaaaattaaaatgtatccatggcaa

SEQ ID NO: 393384 - DNA, 201 bp, Homo sapiens
agcttaacttcaaatatgattttaagcaaccttaggatcatgctgagttgaaactatggaaccgctacccttcccacttatagctcaactactgctattgkcattgtttttttcttctactttcattctattaattgttagataaaataactccttattttgcatgttgaggtttaacataagttctccacttgatagagc

SEQ ID NO: 393385 - DNA, 201 bp, Homo sapiens
ggcagcatttcaaaactgtcatcattagttacttaataaatgatgttggggtatccactccccccgatttatatatatgcatgtgtgtgtgtgtgtgtgtgtctgtgtatgtatgcatgcatatatattctgttttatcatattccatgtgaatcaaggatgtaactttaaaacatcataaaactattagaagcaggtata

SEQ ID NO: 393386 - DNA, 201 bp, Homo sapiens
cattgaggattaagacaaagttttctctaccaccatcaaccttcattctttttggtgggtagattttatattttgtttctctaaacaagagaaaacagttwtagttccacctcttgtgtgcttcctctcctatgagttgtaggctcagtatgtgcacatatgcaagatttcaagtgcaaaagagaacagagtcggaaacag

SEQ ID NO: 393387 - DNA, 201 bp, Homo sapiens
ttgagtttggtaggtgaggctttgaattatctttgctagacctctaagggggagctgccagagaggtcactgtgacactctcagtctgagacaatgaagcmtggggaataaatttagttagaaatgagattaaagctttagggaggtattgtttcttaccagcatcatttttcccctttcttgaagtagtcaaagtgattg

SEQ ID NO: 393388 - DNA, 201 bp, Homo sapiens
agatcgacagaatccataatgagaaagtggaatgcttttctttcttcaattccgacttgtttttggtaaattcactcagatgagagccttttgtttggctsttcaataacttgagctgctcaggtcacttagtgtggtatgcagtatacttcaccatgggttaagttaatagatgaattagtaatacacagcatccgttaa

SEQ ID NO: 393389 - DNA, 201 bp, Homo sapiens
cagacggggcggccgggcagagacgctcctcacctcccagacggggtcgcggccgggcagaggcgctcctcacatcccagacggggcggcggggcagaggygctccccacatctcagacgatgggcggccgggcagagatgcttctctcttcctagatgggatggcggccgggcagagacgctcctcactttccagactgg

SEQ ID NO: 393390 - DNA, 201 bp, Homo sapiens
ttgaagtgagatcttgaaagggataggtaattattaacaattagctattgcatgcattgtataatttcagatgtacccggctcatctccttttataggacrctgaagcccaaagcagcacagtgtatcacccacattcccccagccatgttaatgacacaaccaaaagttgcaactcagtcattctaagcccagagccatt

SEQ ID NO: 393391 - DNA, 201 bp, Homo sapiens
cagacagggaaagtgcatgtgagcggcgcacggtgcaaggatgtcctcacaggtatgccaggtatctgggagggaggtatttcttagtatcttgcctagcytatataatgactgaattataatttttctgtcacttctctttcatttatgccacgcttcagagtcatattaattatattcgttattgtcagcaatgactgg

SEQ ID NO: 393392 - DNA, 201 bp, Homo sapiens
gacggggcagctggcagggcggggggctgacccccccacctccctcccggacggggcggctggccgggcggggggctgacccccccacctccctcccggamggggcggctggccgagcgggggggctgacccccccacctccctcccagacggggcggctggccgggcgggggtctgacccccccacctccttcccggaca

SEQ ID NO: 393393 - DNA, 201 bp, Homo sapiens
tcacatttaccaacattccgttggccaaaacaatttcacatgggtgagttgagagttagagtggggcactgtgaggactcaaggcaaagggcatggctacmgggaggggtgaaggattgggacaatttttgcaatatattatatagcccatactgctaatcaaatcaaagtttatagatctaacggaagcgtacgatttct

SEQ ID NO: 393394 - DNA, 201 bp, Homo sapiens
cctttgaccttctaagtgcaccagagtatgttactgccatgaaattgcactgtaatattttctagttgtgattcattcacagcttaatatgcttctagttstggcttgacttttcccccaggaagagcctaaaatctcttcattataatatagacagtgtactgcactttgaatacaaatttatccatgttcagagtaatt

SEQ ID NO: 393395 - DNA, 201 bp, Homo sapiens
tcttagtacagaacaaaatgaaaagtctcccatgtctacttctttctacacagacacggcaaccatccgatttctcaatcttttccccacctttccccccsttctattccacaaaaccgccattgtcatcatggcccgttctcaatgagctgctgggcacacctcccagacggggtggtggccgggcagaggggctcctca

SEQ ID NO: 393396 - DNA, 201 bp, Homo sapiens
ctgagttcaagtgattctcctgcctcagcctcccgagtagctcgcccgccaccacacccagctaattttcatatttttagtagagacagggtttcaccatkttggccaggctggtatcaaactcctggcctcaagtgatctgcccgcctcgcctcccaaagtgctgggattacagacgtgagccactgtgcccggcccctt

SEQ ID NO: 393397 - DNA, 201 bp, Homo sapiens
gtggaagtggagacagttcttatagacaactcttttttttttttttttttttattgatcattcttgggtgtttctcgcagagggggatttggcagggtcayaggacaatagtggagggaaggtcagcagataaacaagtgaacaaaggtctctggttttcctaggcagaggaccctgcggccttccgcagtgtttgtgtcc

SEQ ID NO: 393398 - DNA, 201 bp, Homo sapiens
atcttggcccactgcaacctccacctcctgagttcaagtgattctcctgcctcagcctcccgagtagctcgcccgccaccacacccagctaattttcatakttttagtagagacagggtttcaccatgttggccaggctggtatcaaactcctggcctcaagtgatctgcccgcctcgcctcccaaagtgctgggattaca

SEQ ID NO: 393399 - DNA, 201 bp, Homo sapiens
ctttctttaattcctgtcgaaccagaaagtaacttttatgtgatcaattcccttgtctagaattttttggctatttattttgagttgcagtatacacattsgtttgttagtaatttccttattttatgttttcttttctagtttaacatggtttcataatctacacagtgtcttattattgggatggttatgcgataacta

SEQ ID NO: 393400 - DNA, 201 bp, Homo sapiens
ggacaaagtttattggattaaattgtggaagtggagacagttcttatagacaactcttttttttttttttttttttattgatcattcttgggtgtttctcrcagagggggatttggcagggtcataggacaatagtggagggaaggtcagcagataaacaagtgaacaaaggtctctggttttcctaggcagaggaccctg

SEQ ID NO: 393401 - DNA, 201 bp, Homo sapiens
aatcttaattctgaagtgatattgatagtggtaataataacaacataaaatataggtttcttttttctccatcaaactgtccctaaacgtgttaattcacrgttgtcccttttgtgcatttgcagctctttaagtttgtaccactcatgtcctacctacatatcttgtgacagtttctcaaaggtttaggtcttgtttccc

SEQ ID NO: 393402 - DNA, 201 bp, Homo sapiens
tatagtttaagaagaggctgggacaaagtttattggattaaattgtggaagtggagacagttcttatagacaactcttttttttttttttttttttattgmtcattcttgggtgtttctcgcagagggggatttggcagggtcataggacaatagtggagggaaggtcagcagataaacaagtgaacaaaggtctctggtt

SEQ ID NO: 393403 - DNA, 201 bp, Homo sapiens
gaggcaggagaatggtgtgaatccaggagggggagcttgcagtgagccgagatcacgccactgcactgcagcctgtgcaacagagcaagactgcatctcaraaaaaaaaaaaaaaaaagatcaggattttgcctagtaactatagagttcaagcagaagcaatgaaatggtctaaactatagcttaaaaaacaatatctgt

SEQ ID NO: 393404 - DNA, 201 bp, Homo sapiens
aatccagtagggcaaacctatttgaataaccaaattaagatcaggattggctgggtgtggtggttcacgcctgtaatcccagcactttgggaggccaaggygggtggatcacgaggtcaggagattgagaccatcctggctaacacggtgaaaccccgtctctactaaaaatacaaaaaaattagctgggcatggtggcgg

SEQ ID NO: 393405 - DNA, 201 bp, Homo sapiens
taaggggtggcaacctgatgaattgtctatcaatttctttataggtggaaagtggacaacttatcggtctatggcagaagataccataaatgctgctgtcmaaactcataatttaaaagcaggaccaagtagaacagttgggcttttccttcaagggggtaaagattggagccccacactctacattaggcttgtgcagga

SEQ ID NO: 393406 - DNA, 201 bp, Homo sapiens
tattatatagaagagaaggaggagttgccagtgggatgggatggaaagcagaagagcgtggtgtctctgaggctaagaattcaaaagatattaaaaaagasacggttctactatgttaattatagagattacatttggtgaaatgaggtcatttgtgattttgacaatttgacatatagtttaagaagaggctgggacaaa

SEQ ID NO: 393407 - DNA, 201 bp, Homo sapiens
taggtggaaagtggacaacttatcggtctatggcagaagataccataaatgctgctgtcaaaactcataatttaaaagcaggaccaagtagaacagttggrcttttccttcaagggggtaaagattggagccccacactctacattaggcttgtgcaggattatggacttgaaagcgaggtgagtgtgcattgccacatca

SEQ ID NO: 393408 - DNA, 201 bp, Homo sapiens
ggtgaacttgcctgctagattatttggaggaaaggaagaagaataaaagaaaggcttgcattttctatttgagagctggtccacttactgagaaggggagrgctgggagagaggcagacttgatggaagatataaagtgttctgctttggctaagtttgaagtgattattagatattcctttggagatgtcagacaactgg

SEQ ID NO: 393409 - DNA, 201 bp, Homo sapiens
gccgggcatggtggcacatgcctgtaatcccagctactagggaggctgaggcaggagccttgaacctgggaggtggaggttgcagtgagccaagattgtgycactgcactccagcctgggtgacagagtgagactctgtctcaaagagaaaaagcatagaaagaagtggatagattcaggatatatttttgagatagaatt

SEQ ID NO: 393410 - DNA, 201 bp, Homo sapiens
tccttcagaagaagatatcaacttcattttgaatgaagtgcgtaattacctgagttgtgatgttgaaggtaactaagcattcctttaagtttgtctctctstgtccatatctcccaagccattccagctctcactggataaatgctatgtctccagtctgactcatcttcacacttgtcctcttgtgcctcttagaacatt

SEQ ID NO: 393411 - DNA, 201 bp, Homo sapiens
aaaaaaaaagccgggcatggtggcacatgcctgtaatcccagctactagggaggctgaggcaggagccttgaacctgggaggtggaggttgcagtgagccragattgtgccactgcactccagcctgggtgacagagtgagactctgtctcaaagagaaaaagcatagaaagaagtggatagattcaggatatatttttga

SEQ ID NO: 393412 - DNA, 201 bp, Homo sapiens
tgaagtggggagggaaggggtagctctgctgtggaatattgttatcatcacatttgtttcattctgttttgttatctaagttatttttttcttttaggagyttctagattagggtaggggaagtgcaagtaatagttcatatctttcttgtttgcatatttgagaattaatgaataaatagtttttcgaatgcagattaat

SEQ ID NO: 393413 - DNA, 201 bp, Homo sapiens
cccctttcttgaagtagtcaaagtgattgctcaagactcaggtcaggacacagggacatggaaggaaatattctcaacatttcaacagtggcagtttttarttgatgaaattatggacagatgctattctaattgagaagtactttttctaacaaatagagtttctatactggcaggtagatatcagatcaataagtctgt

SEQ ID NO: 393414 - DNA, 201 bp, Homo sapiens
gtaggggaggaggaggtttaccctgcatccatggaggtaaatggattaagctgaatgtctgggaagacgaggattgctgggtggaggtgtgaggcccaggrctcggggataccatcagattacttgctcctcaagttttgggagctaataatacctgtgcttgcatttccctgcaaagcaagggataccttctgggataag

SEQ ID NO: 393415 - DNA, 201 bp, Homo sapiens
gaaaaaaatggttctgtgaaagtgaaaggattcacttgcttttcccagtcctattatgaaagatggtttagttatatcaaagggcttcttttgacttgttrtataattcgattcttgagttttcagttggcttatttgaaattttgtaaattgcaatttataaaattggagggccctgagagatcaagttccactttgtgg

SEQ ID NO: 393416 - DNA, 201 bp, Homo sapiens
acatgtcataattgtacatatttatggaatgcagaatgatatttctgtgcatgtatacaacatgtaacgatcaaatcagggtaattagcatatccattacytcaaacattgatcatttctttgtgttgtgaacattaaaaatcctctcttgtagctttttgaaaatatacactaaattattgttaaccatattcagcatat

SEQ ID NO: 393417 - DNA, 201 bp, Homo sapiens
cccccaaacccccgaggggaagttttgttttaaatgtttacatgttttatattgacacatttgttggcttaaaaaatatggcaatagcatctagcatagtrctagatgtatgtggttgcaatttgacattattttattgataactatattgtgtataaactttcttttcatgtctttttatgtgagagacatcagatattc

SEQ ID NO: 393418 - DNA, 201 bp, Homo sapiens
gaggtatgtttccttacctttatttatttacatatttattcctttatttttgtttgacatgtcataattgtacatatttatggaatgcagaatgatatttytgtgcatgtatacaacatgtaacgatcaaatcagggtaattagcatatccattacctcaaacattgatcatttctttgtgttgtgaacattaaaaatcct

SEQ ID NO: 393419 - DNA, 201 bp, Homo sapiens
ctctctttttttttttttttttcctgagatggagtttcactcttgttgcccaggctggagtgccaggggcatgatctcagctcattgcaacctctgcctcytgggttcaagcgattctcctgcctcagcctcccaagtagctgggattacaagcaccctgattctaagaagatcattcctcctaaggtctctttttaatgg

SEQ ID NO: 393420 - DNA, 201 bp, Homo sapiens
tttcccccctgcaccataaataggcaaggagtgagcttcagaatatgaaaatcaagatctctctctctttttttttttttttttcctgagatggagtttcrctcttgttgcccaggctggagtgccaggggcatgatctcagctcattgcaacctctgcctcctgggttcaagcgattctcctgcctcagcctcccaagta

SEQ ID NO: 393421 - DNA, 201 bp, Homo sapiens
tgtgtgtgtgtgtgtgtgtgtgtgtgtatataatttttttcctcattagatggaaggcaaagaccataattgaaatatgttaatgttctctgtagtacctrctggttacatttatttagttaacaaactaaatgtatataaaggtaaaaaatagggacatggttattagcagataattaaaagaagctatatgaaaaataa

SEQ ID NO: 393422 - DNA, 201 bp, Homo sapiens
atagcctggtgtttttttccctctagggtggcatttattctttctatgtacttgttatatatatgtatgtgtgtgtgtgtgtgtgtgtgtgtgtgtgtgtrtataatttttttcctcattagatggaaggcaaagaccataattgaaatatgttaatgttctctgtagtacctactggttacatttatttagttaacaaac

SEQ ID NO: 393423 - DNA, 201 bp, Homo sapiens
attcaaattagggtgagtgtgaggagtaaggagtgaggcagtagaaaaaaaacaagatttacaggtctatcgggaatttttaggatagttgttagagatayatgtaagaggtgtttattattgttgagactgagataggttagagcttggtgatgagaaggacaagggagggagtgaatataggagaaactgttgttaatg

SEQ ID NO: 393424 - DNA, 201 bp, Homo sapiens
ggcatgtccttttaatgacattggtggaggacaagggcaccagcagaaacatacaagtgttcttttgagcctctgtttctgtcacatttaccaacattccrttggccaaaacaatttcacatgggtgagttgagagttagagtggggcactgtgaggactcaaggcaaagggcatggctaccgggaggggtgaaggattgg

SEQ ID NO: 393425 - DNA, 201 bp, Homo sapiens
tttggtgtttaattttgggcagtagagtgactcacaaaggaagctaagagagagtggttcaaagaggctggagagagagagagttgtcccccagatgcccmggtgagtgaacaatcatttgtgcatttattggatttggtggcatagttggcatttagtcagttttgtggttgttggtagtggttggatgtatgtgaaaat

SEQ ID NO: 393426 - DNA, 201 bp, Homo sapiens
gctcagggggctactcaacatttgctgtcatcttcctcctggtaccattaggctaacctgggcatgtccttttaatgacattggtggaggacaagggcacmagcagaaacatacaagtgttcttttgagcctctgtttctgtcacatttaccaacattccgttggccaaaacaatttcacatgggtgagttgagagttaga

SEQ ID NO: 393427 - DNA, 201 bp, Homo sapiens
aacctgaataaagctatattcagttggaagctcttgaagggttttatacatggaaatgacattatttgggtttttaaatgatcactccggttgtaatataraaaatgatatggaaggaggctgggtaaatgtgtgaaggcctttgggagaatatcatgttagtataggggagagggaagataccttgatttgagaggtagc

SEQ ID NO: 393428 - DNA, 201 bp, Homo sapiens
ctgtgaaagaagctttgtaaatctttctttaacttaagagagaaaataaggtatgtgtagaatgctgtttggtaatattttaagaaaactgcagaggaagragaaaggaagtgtgctagaaaatcaaaagacttttgggagcatgtgactcctccacattaggtaaatttgctcttgtatctctgttccaggacagctagg

SEQ ID NO: 393429 - DNA, 201 bp, Homo sapiens
aactgttttccaaaatagctgtataattttgcatttctgtaagcagtgtaagagagtttcaattgtgttgcattctcaccaccacttggtattccctcccyacctttttttttttttttttttttttttgagacagaatatcctctgtcacctaggctggagtgcagtggtgtgatctcggctcactgcagcctccttctc

SEQ ID NO: 393430 - DNA, 201 bp, Homo sapiens
ccaaacccccgaggggaagttttgttttaaatgtttacatgttttatattgacacatttgttggcttaaaaaatatggcaatagcatctagcatagtgctwgatgtatgtggttgcaatttgacattattttattgataactatattgtgtataaactttcttttcatgtctttttatgtgagagacatcagatattctac

SEQ ID NO: 393431 - DNA, 201 bp, Homo sapiens
tacagattagaatcaaactgtttagaatattagaaaagtctttttcaagtacaaagggcagagattatatctgtaggtagttcccccaaacccccgagggkaagttttgttttaaatgtttacatgttttatattgacacatttgttggcttaaaaaatatggcaatagcatctagcatagtgctagatgtatgtggttgc

SEQ ID NO: 393432 - DNA, 201 bp, Homo sapiens
tgtaggggttccttaaagacagataacagtttatgggcagataacagtttccagagggatggggctccctgtataatgccaggggctgccaggattgactyaggattgactcagggactgcgtggggctgaccctgcaggttgaatgctgtcagtgattacaacagggcaagggcaccttgactgtctcagaaactaatag

SEQ ID NO: 393433 - DNA, 201 bp, Homo sapiens
tatttttaacctgtatcatattaagctctttgacaaatcgcattttgatttatagtctgtgcttctggcatgtgctttaatggcattagccaactctagasacatactgaattcattatgtaccttatgtatgtaagtagtaatacttccttttaatgaacatacggtcacgtcaaagtgctgcgaggttgttttacaaaa

SEQ ID NO: 393434 - DNA, 201 bp, Homo sapiens
gccctcttgctacatgctctctttctcctttccttcaagctgttcttccttaaagtactttttgtgcattatttttctacttcttcaccttccattccctmcacaactgttggaatctgtcttcgatctcagatgaatctctctctttttttttttcctgagacagggtcttatcctgtcactcaggctggattgcagtag

SEQ ID NO: 393435 - DNA, 201 bp, Homo sapiens
gccaggatgaggagtttagtttgaattctctaggcaatgggcatccagtgaatgcaaacagcatttgatacaggtactcagggtgcagaaaactgaatgaytaataggagggcattagatgagattttatgctgatgggaaggaatcccaggtgagagagagagagagaaagagagagaaagaaagagaaaaagacctggg

SEQ ID NO: 393436 - DNA, 201 bp, Homo sapiens
cagggtcttatcctgtcactcaggctggattgcagtagcacaatcatagttcatggcagccttgaactcctgggctcaagcgatcctcctacgtcagcctyctgagtggctgggaccccaggttcaggccatcatacctgattgatttttactttttttatagagatggagccttgccatgtggcccaggctggtcttgaa

SEQ ID NO: 393437 - DNA, 201 bp, Homo sapiens
tttttgagatggagtcttgctttgttgcccaggctggtgtgcagtggcatgatcttggctcactaaagcctccacctcctgggttcaagtgattctcctgyctcagcctcctgagtagctgggactacaggcacccatcacaacgcctggctaatttttgtagttttagtagagatggggcttcaccatgttggccaggct

SEQ ID NO: 393438 - DNA, 201 bp, Homo sapiens
ggctcaagccgattctcccacctcagcctcccaagtagctgagaaaacaggcacatgccactatgcccggctaatttttgtattttttggttgatacaggrttttgtcatgatgtctaggctggtcttgaactcctgggctcaagtgatcatcctcccgccttggcttccaaagtgctaggattatgtgagccactcacac

SEQ ID NO: 393439 - DNA, 201 bp, Homo sapiens
tgacctcaagtgatcctcccacccctcccaaagtgctgggattacagtcatgagccactgtgcccagccactttttctttttcttttctttttttttttttgagatagggtctcattctgtcattcaggctgaagtgcagcagtgcaatcttggctcactgcaacttctgtcttttgggctcaagccgattctcccacctc

SEQ ID NO: 393440 - DNA, 201 bp, Homo sapiens
ctactaaaactataaaaattagccaggcgtggtggcaggcacctgtaatcccagctactcaggaggctgaggcaggagaatcgcttgaacccgggtgacaraggttggagtgagccgagattgtgcccctgcactccagcctgagtgacagagtgagactccatctaaaaaaaaaaaaaaagacactcccaaactgttttc

SEQ ID NO: 393441 - DNA, 201 bp, Homo sapiens
aaaaccatatgaagccaaaatgagtctttttcctgtcataattataagtagggccttaggctgtgtttactgcctctaaaataaacgtggtacttagcttytcagttgcaacacttcccagcttttatggaaaaaaaaaaaaaacaaaaataaaatgttattttaaaaagtagtgtcagaaagtaaataaattacccttaa

SEQ ID NO: 393442 - DNA, 201 bp, Homo sapiens
gccattacatatgtgtcttgaatttagtttctaatctggtggacaaatgagctatatttcttttgatgagaattttattgttagggttatgccaaagactrtatcattcatttgcctctcttatttagaaccctttgcatggattcctggaagaactgtttttctcttagaaatataactaaatttgtgggaatgtgtctg

SEQ ID NO: 393443 - DNA, 201 bp, Homo sapiens
aggacaaagcttcttccctgaaataaaagcaggggctatattctaaatacaaatggattgaatataaaagttggtacattgttaaaacatttttggtgatragatagtactatgagtgtttaggtgccaggtcagctcctgaaaacctttgagtcaattctgtagttaaattaccttatatatgtaaagaaaacaattgta

SEQ ID NO: 393444 - DNA, 201 bp, Homo sapiens
ggctgaggcaggagaatcgcttgaacccgggtgacagaggttggagtgagccgagattgtgcccctgcactccagcctgagtgacagagtgagactccatytaaaaaaaaaaaaaaagacactcccaaactgttttccaaaatagctgtataattttgcatttctgtaagcagtgtaagagagtttcaattgtgttgcatt

SEQ ID NO: 393445 - DNA, 201 bp, Homo sapiens
tggtactcccaggacaaagcttcttccctgaaataaaagcaggggctatattctaaatacaaatggattgaatataaaagttggtacattgttaaaacatktttggtgatgagatagtactatgagtgtttaggtgccaggtcagctcctgaaaacctttgagtcaattctgtagttaaattaccttatatatgtaaagaa

SEQ ID NO: 393446 - DNA, 201 bp, Homo sapiens
agctactctggaggctgaggtgggaggactgcttgagcctggaaggtggaggctgtagtgagctgagatcatgccactgtacttcagcctgggtgacaaartgaaaccctgtctcaatcaatcaataaaatgcataaataaaatcacatattaggaagaattagtatgctggcctatcattaaaaaacccaacaagccaat

SEQ ID NO: 393447 - DNA, 201 bp, Homo sapiens
gagagcgagaaagagaaaaagacctgggggggggcggggagagagagagacctaggaaagagaggggggtggggggagagagagagagagagagagagagaaagaaagacctgggaaagagaaggcatattacatgggccattatccatctgcttgcttgaatttcttggacaactccagcatctactacccagattttct

SEQ ID NO: 393448 - DNA, 201 bp, Homo sapiens
agagagcgagaaagagaaaaagacctgggggggggcggggagagagagagacctaggaaagagaggggggtggggggagagagagagagagagagagagagaaagaaagacctgggaaagagaaggcatattacatgggccattatccatctgcttgcttgaatttcttggacaactccagcatctactacccagattttc

SEQ ID NO: 393449 - DNA, 201 bp, Homo sapiens
agagagagaaagaaagaaagagagagagagcgagaaagagaaaaagacctgggggggggcggggagagagagagacctaggaaagagaggggggtggggggagagagagagagagagagagagagaaagaaagacctgggaaagagaaggcatattacatgggccattatccatctgcttgcttgaatttcttggacaact

SEQ ID NO: 393450 - DNA, 201 bp, Homo sapiens
gatagatagatagatagatagatagatagatagatagatagatattttatggagatggggtcttgctctgttgcccaggctggtcttgaactcctgggctyaagtgatcctcccaccttggcctcccgaagtgctgggattccaggcataagccactatacccagccaacaataatttcttaatatcaaatatctggttat

SEQ ID NO: 393451 - DNA, 201 bp, Homo sapiens
agaaagaaagagaaaaagacctgggaaagagagagagagagaagagagagaaagaaagaaagagagagagagcgagaaagagaaaaagacctgggggggggcggggagagagagagacctaggaaagagaggggggtggggggagagagagagagagagagagagagaaagaaagacctgggaaagagaaggcatattaca

SEQ ID NO: 393452 - DNA, 201 bp, Homo sapiens
cagggagaatgaaacaagaatagagtgggaaggagtacagggatttcacacggggctaccctagtcttttttcttttcattatagcccaacggcactgtttaacacttttttttttaagttaacatttatttcataccttctaggtcctaactggaaaaactgatgtgatgatgtaggcttttctttaacctcagtgatgt

SEQ ID NO: 393453 - DNA, 201 bp, Homo sapiens
tagagagggttcttggatctcacacaagagttaagggtgagtccataaagtgaaagtgaaggaataaaagaatgactactccatacacacagggctgctggttgcccatttttatggttatttcttgattatatgctaaacaaggggtggcttattttacccagctcctattcaagatggagttcctctggttcacacgcc

SEQ ID NO: 393454 - DNA, 201 bp, Homo sapiens
gacatttaaaactctttgatttgcagcttattttatagcaaggtaaaggactttttcttttcttttctttctttctttctttctttcttttttttttttttgagacaggatctcattctatcacctgtgctggagtgcagtggtgccctcatagctcactgcagccttgaattcctgggttcaaacaatcctcccacttca

SEQ ID NO: 393455 - DNA, 201 bp, Homo sapiens
cttaggaaagtcaaatgaaactggctgattcttgcctttgactttgagctagccagatgaccgtacagaaggatttgatcacagtagaaataatgagcccycaagcatacattatttttttaaattatggaaaaaggaaaactctttattgattatagttgatattattgctaactctgcaagatgacatgagaatgtagt

SEQ ID NO: 393456 - DNA, 201 bp, Homo sapiens
aatttcattctttcagcattaaaacaaagttcttttttaaattttttattttttgagacagggtcttactctgtcacccagactggagtgcagtggcgcartctcggctcactgcagtctccgcctccgaggctcaagggattctcttgcctcaggctcccgagtagctgggattacaggcgcatgccactactgcctggc

SEQ ID NO: 393457 - DNA, 201 bp, Homo sapiens
aacactaaaaatctacttgaacagtctttacagaacgttagacaaaacatcttacttccttaatctacagcctctactccccgttgccaacaggatatcayagaaatattttacttcacgtgtacacagtcttcctctctcttccctctggacttctttttaaacaccatttctagctgtacatcatctccagccaaacga

SEQ ID NO: 393458 - DNA, 201 bp, Homo sapiens
caaattttcttagttgcaagctgagcttctcttcttccttaaacctgcttctctttctagatcttaatattgaaatcttggggtcattttccagctgcccraactaaaaccacttattgtgttcagtctcttcctgctgcctcctgtaatcggttgtcaggtcttgtcatgctgtctaattgagtgctgtccttagacagt

SEQ ID NO: 393459 - DNA, 201 bp, Homo sapiens
cttttttctctgccaagcactaagtcaatacatacaaatcagtgatcacagtacctggcacatagcaggtcttcagtatctgctttacttctttcccttcscctgaggtaggatatgaacatttgaaatagacctagccttgtcaggcataataagaaagatataacatcagagtttaaaaaaaaatagctgaacttttgg

SEQ ID NO: 393460 - DNA, 201 bp, Homo sapiens
aaggggtggcttattttacccagctcctattcaagatggagttcctctggttcacacgcctctgacaaagggacccagggcttattccacagaggagtgayaaatgtatttgcatggaatctttttctttttctttttcttttttttttaagacagggttttgctctgtcgcccaggctggagtgcagtggtatgatcatg

SEQ ID NO: 393461 - DNA, 201 bp, Homo sapiens
gctgggagggaagaggcttttgagctcactccttcttctgttttactgtggacttgctgtcaagctatccatgattacagacccgtttgctaggaccttcyctgatgaggttctatatgcttattttgtaagactcatgcacttttcttcaataagtcactggatttgtatgcgagtgtgaggcctggccctctgagttgt

SEQ ID NO: 393462 - DNA, 201 bp, Homo sapiens
ttgtgtttgtgtgtttttgcttttgatataatagagaaaaggctaaagaaggtgacggaaggataaaagtgtcttctgttttcttaggacttgatacattmacttctttccatagggattgtcttttgtgaagaacccttgggtcaatttcctgtccagtcttggcctaaatcctttttaaaagcaacaacaacaaaagag

SEQ ID NO: 393463 - DNA, 201 bp, Homo sapiens
gtgtttattttctttcgctttctctttgtttcctgattttttttttttctcattcttctttatggaaatactcttcctctgctaaaattgtttactttctyttgggctggggtgggcccttctggcagtaattgcctggggaaataaatggattggaagtgaaagaacctgcccttcttggaagcaggctggccttttgat

SEQ ID NO: 393464 - DNA, 201 bp, Homo sapiens
tagatagatagatagatagatagatagatagatagatagatagatattttatggagatggggtcttgctctgttgcccaggctggtcttgaactcctgggytcaagtgatcctcccaccttggcctcccgaagtgctgggattccaggcataagccactatacccagccaacaataatttcttaatatcaaatatctggtt

SEQ ID NO: 393465 - DNA, 201 bp, Homo sapiens
gacataaaggtgacccagggagactcagaattttctagctttacactatgtgaattgatataaatatagtgtttattttctttcgctttctctttgtttcmtgattttttttttttctcattcttctttatggaaatactcttcctctgctaaaattgtttactttctcttgggctggggtgggcccttctggcagtaatt

SEQ ID NO: 393466 - DNA, 201 bp, Homo sapiens
taatttcttttctagatagatagatagatagatagatagatagatagatagatagatagatattttatggagatggggtcttgctctgttgcccaggctgrtcttgaactcctgggctcaagtgatcctcccaccttggcctcccgaagtgctgggattccaggcataagccactatacccagccaacaataatttcttaa

SEQ ID NO: 393467 - DNA, 201 bp, Homo sapiens
ccagctaattaaaaagattttttctgtagagacagggtgtcgcttcccaggttggtcttgaactcctggcctcaaggggtcctcctgcctgggtttctctragtctgggattatagatgttagccacccaccactccaggcctttttcttgttttgattactgaagtagattctgtaacagcatgtaaaatgtaaaaagag

SEQ ID NO: 393468 - DNA, 201 bp, Homo sapiens
tatttagtctgtatctttaaagttaagaactctctttcaaacacagccacacctaaattgttcaacaataatttcttttctagatagatagatagatagayagatagatagatagatagatagatagatattttatggagatggggtcttgctctgttgcccaggctggtcttgaactcctgggctcaagtgatcctccca

SEQ ID NO: 393469 - DNA, 201 bp, Homo sapiens
tctggttactctaagacaaaaaactatacagactaaagaggtgagatcataactttttgacactcgtccttttcctagtcagctatgtaaattaaaatccwcattatgtataagcatagagaggtaagtgatgactgtggatggttaatgagaagtgatgcaatttgcatgtttatgccaggttctattcaggaaaaaggc

SEQ ID NO: 393470 - DNA, 201 bp, Homo sapiens
tttcttttttctttctttttttttttttttgagacagagtctcactctgttgcccaggatggtgtgcagtgttgcacgatctcggctcactgtaacctcckcctcctgggttcaagcggttctcctgcctcagcctccagagtagctgggactacaagtgcgcaccaccatgcccggctaatttttaaaatattttttgca

SEQ ID NO: 393471 - DNA, 201 bp, Homo sapiens
cctcccgggttcaagcaattctcctgcctcagcctcccaagtagctgggattccaggcatgcaacaccacacccggatacattttttttttttttttttttgtatttttagtagagacggggtttctccatattggtcgggctggtctcaaacttccaccctcaggtgatctgcctgccttggcttcccaaagtgctggga

SEQ ID NO: 393472 - DNA, 201 bp, Homo sapiens
ctcagtgctttggtaggccaaatgggaggattacttgaggccaggagttctataccagccagggcaacatagtgagaccctatctctatgaaaaaaaaaaagtgataatataaccaagcttctctttatatgatatgggaaaatagtgttattagtgttcagcatctgaaattcaggttaaatcttactttctttatgttt

SEQ ID NO: 393473 - DNA, 201 bp, Homo sapiens
agttttatttttaaactttgtaaaagtattatgtgatggttacataaggtgatataaattttgtagagcagttggacatgcctagaaaagttgggggtacmttgtgatctagtaattttattagtaggtatatgccttaggggaactgttgcatgtgtctaccagggtatatgtacaaaaagttcatagaagcactgggta

SEQ ID NO: 393474 - DNA, 201 bp, Homo sapiens
caattccttagggctttcttttcaactacagccagccagtggatggtgaaagggaaaggcaggaagcatatctactttctaaacacacacttattttttttgagatgagtctcgctctgttgcccaggttgagtgcagtgggacgatctcagctcactgcaacctctgcctcctgggcttgagcgattctcctgcctcagc

SEQ ID NO: 393475 - DNA, 201 bp, Homo sapiens
atccaaccaacttggaagaactgattagggaagaaggcaatgtcttagggagttggggattgttagaggagttggcaggaacatttagagaaaaaaaaaaacattgccaaattgtgttctgcagggtacaaattaatatacttgaaaggatgactacatggtcaaaagagaaattctgagttaaacaagtaaaaccacttc

SEQ ID NO: 393476 - DNA, 201 bp, Homo sapiens
tgcactccagcctgagtgacagagtgagactccatctaaaaaaaaaaaaaaagacactcccaaactgttttccaaaatagctgtataattttgcatttctrtaagcagtgtaagagagtttcaattgtgttgcattctcaccaccacttggtattccctccctacctttttttttttttttttttttttttgagacagaat

SEQ ID NO: 393477 - DNA, 201 bp, Homo sapiens
ctaaaaaaaaaaaaaaagacactcccaaactgttttccaaaatagctgtataattttgcatttctgtaagcagtgtaagagagtttcaattgtgttgcatyctcaccaccacttggtattccctccctacctttttttttttttttttttttttttgagacagaatatcctctgtcacctaggctggagtgcagtggtgtg

SEQ ID NO: 393478 - DNA, 201 bp, Homo sapiens
gataccatttatctgttcatttgtcatctttaaaaattatatgtagctaagttttaatgcacatatgtcagctaaaaccaggactactatgtctttccaayatagatccttttatttataaaattttaatcttaattctgaagtgatattgatagtggtaataataacaacataaaatataggtttcttttttctccatca

SEQ ID NO: 393479 - DNA, 201 bp, Homo sapiens
cccagctaattttttgtatttttagtagagacagagtttcaccatgttggccaggttggtcttgaactcctgacctcaagtgatccacccgcctccgcctytcaaagtgctgggattacaggcataagccactacgcctggcaagaatatattctttactcatggttactctgcacagtgttcatttttactggcttggat

SEQ ID NO: 393480 - DNA, 201 bp, Homo sapiens
gtgaatggtcacataggaatttcatgtctgccatgggataccatttatctgttcatttgtcatctttaaaaattatatgtagctaagttttaatgcacatrtgtcagctaaaaccaggactactatgtctttccaatatagatccttttatttataaaattttaatcttaattctgaagtgatattgatagtggtaataat

SEQ ID NO: 393481 - DNA, 201 bp, Homo sapiens
aaaaaaaaagacactcccaaactgttttccaaaatagctgtataattttgcatttctgtaagcagtgtaagagagtttcaattgtgttgcattctcaccascacttggtattccctccctacctttttttttttttttttttttttttgagacagaatatcctctgtcacctaggctggagtgcagtggtgtgatctcggc

SEQ ID NO: 393482 - DNA, 201 bp, Homo sapiens
tcataatttaaaaaaataagctcaggatttcttaaaccatcttcaacagatacttccccaaatatatttctaacggcatataatgcagttgcaacaggaasttttgaaagaattggtacattttcttttctttttttttttgagatggagtcttgctttgttgcccaggctggtgtgcagtggcatgatcttggctcacta

SEQ ID NO: 393483 - DNA, 201 bp, Homo sapiens
aaaaggaatattgagtcgaaccctttattttctctatttatgctatttaaattttagacctgtcacctctgtgctattagctctgtagtgttgataccaarcatcttatgcagaataactagactatagtacttgaatgcttttcatgagggtttgtgctagcccttttaaagaagaaaagaaatatctttttctttagtt

SEQ ID NO: 393484 - DNA, 201 bp, Homo sapiens
agaataccccctgatgattttcttttttaatttagagttttgggaatacaacatagagaattatatatttttgggaaagactatagagttcttttttgaaraaaagatcaatgacagcttcaaaaggaatattgagtcgaaccctttattttctctatttatgctatttaaattttagacctgtcacctctgtgctattag

SEQ ID NO: 393485 - DNA, 201 bp, Homo sapiens
ttttctttttcttttttcttttttgagatggagttttgctcttgttgcccaggctggagtccaatggcgtgatctcggctcactgcaacctccgcctcccrggttcaagcaattctcctgcctcagcctcccaagtagctgggattccaggcatgcaacaccacacccggatacattttttttttttttttttttgtattt

SEQ ID NO: 393486 - DNA, 201 bp, Homo sapiens
atttttttagacttttctttattatgattcttttcagtatgaaagtgttgctttttcaagtcagagtgggttaaggggatgttgatggcagtcatttggcmtggtgagtgacttacgcctactgtccggtttaggtggtaaaaatggcagaaggccttggagtgccaaaggcaagggttatgggtccagcagtaccatgaa

SEQ ID NO: 393487 - DNA, 201 bp, Homo sapiens
agatcaacagtaaaaaaaggaggaaaaaaatcaatatttccatgtgtctttgaactttgtgtgtatctctgttttaggaacaacttgaaacagccaggaaktttctatattatgaaatgggctataaatctcgatcagaacagttaacagatcgctctgaaattagcctactgccttcagacattgacaggtacttataat

SEQ ID NO: 393488 - DNA, 201 bp, Homo sapiens; identical to SEQ ID NO: 86223

SEQ ID NO: 393489 - DNA, 201 bp, Homo sapiens
gaaggagatgacttaggtttacaaacttaactgcactttgagctctgcattacacatctataaatttaggcttatgacacctaattcacaggctgttttgrtatttaaatgaactactataataaatgcaaaataatttataagtacaaaacattactcccgtattatttttggggggtcaatttcatggatactctatag

SEQ ID NO: 393490 - DNA, 201 bp, Homo sapiens
taggagttactggagggcactgccacccagaaactggatgaaaccaagtcagaaattctgagtataactgacaaatgctttataggaatttagaaggacaytgggtagtagagggcttgggaaaaagtaaattccctaatttcctcctctgtgacccacatttgatatagaaatcatgatttgtctagtattggacagaat

SEQ ID NO: 393491 - DNA, 201 bp, Homo sapiens
ggcagagaagtaaaccagcaacaagtagggctcaagatctagcctgtctgatcaggcttccagaccaaggagtggcagcagtccaaaccacctgtctctgmtgactaggcaatcttaatagccatcccactcctcatcagtacgtgggatctgagcacaggtctaagcagattaatagttttcttagtgaagtgatccatg

SEQ ID NO: 393492 - DNA, 201 bp, Homo sapiens
atggacttgaaagcgaggtgagtgtgcattgccacatcatcttactctttacctaatctctcactgctgccagtgacagaactggcagcaatcaggtctcyctgattgagatttccttttgctgaatacatttctgccagtctgttatggaaggaaaaaaagatgatcttgctttgctttacttgcccaacaagcaatgta

SEQ ID NO: 393493 - DNA, 201 bp, Homo sapiens
ccagcactttgggaggccagggcaggcagatcccttgagcccagaagtttgagaccagcctggacaatatggtgaaaccctgtctctacaaaaaaatacaraaattagctgggcgtgatggtgtacatctgtagtcccagctactctggaggctgaggtgggaggactgcttgagcctggaaggtggaggctgtagtgagc

SEQ ID NO: 393494 - DNA, 201 bp, Homo sapiens
ttttaaggctagataatagttcgttgtaagtgtatgttacattttgtttattcatctgttgatggacacttggtttgcttctaccttttggctattgttartaatgctatgaacaaggttgtaaaacttttctctgctccatttctttggagtatatacccagaagtgtaattgctagatcttatggtaattctaaatgtt

SEQ ID NO: 393495 - DNA, 201 bp, Homo sapiens
gttcactgactcaaacctgtaatcccagcactttgggaggccagggcaggcagatcccttgagcccagaagtttgagaccagcctggacaatatggtgaarccctgtctctacaaaaaaatacaaaaattagctgggcgtgatggtgtacatctgtagtcccagctactctggaggctgaggtgggaggactgcttgagcc

SEQ ID NO: 393496 - DNA, 201 bp, Homo sapiens
aaaagtttttctaatttatattgtgaaagagctgtagtgctgcatcagaaaggagtctctgtttgctagaagagctatgtcagcaggtgaggcctaaagcytaaaggcctgaggggtggtcagggatgggagagaatgaagttactccagactttcaaattgttcctcacccttcacaagacgggaagtttcctaaggctg

SEQ ID NO: 393497 - DNA, 201 bp, Homo sapiens
ttgccataaaagtttttctaatttatattgtgaaagagctgtagtgctgcatcagaaaggagtctctgtttgctagaagagctatgtcagcaggtgaggcytaaagcctaaaggcctgaggggtggtcagggatgggagagaatgaagttactccagactttcaaattgttcctcacccttcacaagacgggaagtttcct

SEQ ID NO: 393498 - DNA, 201 bp, Homo sapiens
acttcactcactgaagtttaattattttaatttgctacatttgctgtttaatgttactttggtcttctcttctccccatcccatcccaaatatgcatagtwttaattcacccctgccccctttaaatatatatgtatttaaaatccacagattggtgttagtgttgggaagggggatttctgctgaaactccacatgtgct

SEQ ID NO: 393499 - DNA, 201 bp, Homo sapiens
acaagaaattagccaggtgcggtggcatgcacttgtagtcccagctacttggggggctgaggtggctgcagtgagctgagatcccgccattacactccagmctgggcaacagcatgagaccctatttcaaaaaaaaaaaaagaagaagaagaaaagaaatattagcaaatgtcatatctgaatttgtgacatcctgtttta

SEQ ID NO: 393500 - DNA, 201 bp, Homo sapiens
aattcctacaaggtgaagaaattctagaatgtctaacttatttaagggtgccatttatttttttagacttttctttattatgattcttttcagtatgaaaktgttgctttttcaagtcagagtgggttaaggggatgttgatggcagtcatttggcatggtgagtgacttacgcctactgtccggtttaggtggtaaaaat

SEQ ID NO: 393501 - DNA, 201 bp, Homo sapiens
ctattggaaagatcacctttgttttaggaatgtttgctattgtgtacttcattgtatgaaaaagccaacataatcttgtactttcaaaaatgatctttctrttgaaaattatatgggaaatcttcagtaaaattctgcatatgcaagaaatcaatacttgtcactatgtctgtgaagtttaaagctcaggattggcgtgaa

SEQ ID NO: 393502 - DNA, 201 bp, Homo sapiens
ttggtgaatttttttttttccttataacattcacaggttccagggattaggatgaggatatgttgtgcgcgtcattatttaacctactgcagtgaagggcyggatcctataggtctttataatccaaggtgagatgtttagatttcattctagggtgctagaaaccattagaggattatatgcaggcaagagaaactgtgt

SEQ ID NO: 393503 - DNA, 201 bp, Homo sapiens
acctttccctcttaaggtcttaatttaatcacattggtgaatttttttttttccttataacattcacaggttccagggattaggatgaggatatgttgtgsgcgtcattatttaacctactgcagtgaagggctggatcctataggtctttataatccaaggtgagatgtttagatttcattctagggtgctagaaaccat

SEQ ID NO: 393504 - DNA, 201 bp, Homo sapiens
ccatgcaaagttgaggagcagagcattccaggtagaggcagctggccccaaaacactaatagtaatcctgatttgacagacatcagaaggcaaataaatcyggaacttagtgggtaagagtgagaggtgtctgtattggtgtcctgtggctgctgtaacaaatgaccacaaacttggtggcttaaaacaacagaaatttat

SEQ ID NO: 393505 - DNA, 201 bp, Homo sapiens
taatttgggaaggcctctctgaggacttgacatttaagctgagtcgtgaatgactggaaggagcttgccatgcaaagttgaggagcagagcattccaggtrgaggcagctggccccaaaacactaatagtaatcctgatttgacagacatcagaaggcaaataaatctggaacttagtgggtaagagtgagaggtgtctgt

SEQ ID NO: 393506 - DNA, 201 bp, Homo sapiens
ttaaataaaggagagacatgagaagataagagttgtatgcatactttggatttgaataatttgggaaggcctctctgaggacttgacatttaagctgagtygtgaatgactggaaggagcttgccatgcaaagttgaggagcagagcattccaggtagaggcagctggccccaaaacactaatagtaatcctgatttgaca

SEQ ID NO: 393507 - DNA, 201 bp, Homo sapiens
gttgattcattctttttattgttgttattatattttagattcaggggcacatgtacaggtttgttacatggatatattattgcttaatggtgacgttgggrcttctagtgaacccatcacccaaatagtgaacattatactcaataggtagctttttaactctcaccctcttcccacccacccccaccttttggagccccc

SEQ ID NO: 393508 - DNA, 201 bp, Homo sapiens
tatgtttgttttggctgtgggtattagcgtggaatttggagtcagggaaatctgggtacttatcctggcttaacttctttaacagatgtgtatgtgttggkggacggggggcaaagcacttaatttgtctaaggttccttgtctttcaaatgaggaaaaaataccttctctgaatgattgttgtgagagttacatgttaat

SEQ ID NO: 393509 - DNA, 201 bp, Homo sapiens
gcctgtgcatgctacatcttttttttttttcttgagacggagtctcactgtatcacctaggctggagtgcaatggcacgatctcggctcactgcaacctcygcctcctgggttcaagcgattctcctgcctcagcctcctgagtagctgggattacaggcatgcaccaccgtgcctgacaaattttttttttaagtagaga

SEQ ID NO: 393510 - DNA, 201 bp, Homo sapiens
cacctgccaccatgcccggctaattgttttgtatttttagtagagacggggtttcaccatcttggtcaggctggtcttgagctcctgacctcgtgatccamcaccttggcctcccaaagtgctgggatgggattacaggcgtgagccactgcgcctggcctatgtcagcaatttttctacaaataagattatagtggtgta

SEQ ID NO: 393511 - DNA, 201 bp, Homo sapiens
catgatctcggctcattgcaacctccgcctcccaggtacaagcaattctctgcctcagcctcccgagtagctgggattacaagcacctgccaccatgcccrgctaattgttttgtatttttagtagagacggggtttcaccatcttggtcaggctggtcttgagctcctgacctcgtgatccaccaccttggcctcccaaa

SEQ ID NO: 393512 - DNA, 201 bp, Homo sapiens
ccggcccttgccttctattattctgagagaattgaaataacatgtcaaatcttaaaatttttctcctttccacatcatttttatatctgaatccatcaacycctcattaattcttgacttagaggtggttatccgaagttgatgctttcccccgtactctggatcccccattcccttcagatgccttattctatgacattt

SEQ ID NO: 393513 - DNA, 201 bp, Homo sapiens
catcaaacttgaaaaggaaaaaaatccctatgctcataattgcaaagtgccttccagattaaaggcctttgcccgctgcctgcatgtaatttcaagactawttctgattttatccattggataaaaatgaattagctaaaatctgggctgtagagtgcttttaattcttaaggtagatctctgggtccattttcaaggaat

SEQ ID NO: 393514 - DNA, 201 bp, Homo sapiens
aaataagctgcgtctggtggtgcgtgtctcctacttaggaggctgaggtgggaggatcctttgagcctaggaggccgaggctgcagtgagccatgattgcrttactgcactccagcttgggcaacagagcaagaccctgtctcaaaaaaataaaaaagtaataaaaaataataaaaagaaaggatgttttgtttcattgtg

SEQ ID NO: 393515 - DNA, 201 bp, Homo sapiens
gtaggaggatcacttgagcccaggagtttgagaccagcctgggcaacatgtgagaccctgtctctacaaaaaataaaaaataagctgcgtctggtggtgcrtgtctcctacttaggaggctgaggtgggaggatcctttgagcctaggaggccgaggctgcagtgagccatgattgcattactgcactccagcttgggcaa

SEQ ID NO: 393516 - DNA, 201 bp, Homo sapiens
tttaagaaagggtagtatggccaggtaaagtcagtgggggaggaagatgacagggaacactgtggccaaagcatgcagacccatggaattacaggaagcakttgtgtagagcttgagtgtagggtggtgtagggcctgaatcatggaggacaaggtatgccaggatgaggagtttagtttgaattctctaggcaatgggca

SEQ ID NO: 393517 - DNA, 201 bp, Homo sapiens
tgtgccattgcactccagcctgggcgacagaaggagaatctgtctcaaaaaataaataaataaataaataaataaagtgtcagatggcctgccagttattytattcagttttgacaatggggtatattttatatattttttacctggagtataaggagaaaattattagtcatcagggttgagacccctcaacccgctaaa

SEQ ID NO: 393518 - DNA, 201 bp, Homo sapiens
ttacttatgtactgtatttttgacagtgagatactgtcaaagtctgggtactttagaacaatgattgtttgatttagatttttcaagccttatgttttttkaatactagtatgtcctctgtggaatctcatatttgattgtgcacatatatccttctataaaagggtttaatatagtgggaaaaacaaacctgacaagcta

SEQ ID NO: 393519 - DNA, 201 bp, Homo sapiens
ggcaagtagtagacttcaaaagactagcttccatcctatatttttccttcttatactcaagtaggaaaatatgggcaaagaatgtagttagcttgaaaatwtgggcaaagaattcttgcatgttgtgcatgaattatccgtacatttttttcggttagttgagtgtgttgggatggggagaggagaggcgagttagtggta

SEQ ID NO: 393520 - DNA, 201 bp, Homo sapiens
cagtcctacagttcttgctggctaccacatgacatctggatgccattgcccaatggagaccgtgtgcagtctggggaaccttgtgatgtggatgttgaaayccccctctgtttctcacaggggcgttatgtcaaattacaacactcccttgacttttacaaatcaactcgtgaaataatacagcaatattttaatgaataa

SEQ ID NO: 393521 - DNA, 201 bp, Homo sapiens
aatgttttatatagtagttctagactaaaagaaaactctaaggaggaaagcacatgatactatctttaaatacttattaagctgtgataaaaaaaaaaaaacattaggtttgttctaccctaggaaaggatttgttaatccccccaaaactggaagaatttcaaggaggtagatttaatctcactgtaaaaccttctaata

SEQ ID NO: 393522 - DNA, 201 bp, Homo sapiens
tcacactgggcccaggcacttcttcgtagctactgaccactctagtcccagtcctacagttcttgctggctaccacatgacatctggatgccattgcccartggagaccgtgtgcagtctggggaaccttgtgatgtggatgttgaaacccccctctgtttctcacaggggcgttatgtcaaattacaacactcccttgac

SEQ ID NO: 393523 - DNA, 201 bp, Homo sapiens
taatgttttatatagtagttctagactaaaagaaaactctaaggaggaaagcacatgatactatctttaaatacttattaagctgtgataaaaaaaaaaaaacattaggtttgttctaccctaggaaaggatttgttaatccccccaaaactggaagaatttcaaggaggtagatttaatctcactgtaaaaccttctaat

SEQ ID NO: 393524 - DNA, 201 bp, Homo sapiens
cataatttatgttgagatactgtttttttagtatcctaagttaaaactaccttcataataaattgttttcttgagttgtgagctatcagtagaatgtaacrtgtgttgtccagacaggccagtgctccacccctacaaggaaatagggtagtggcttccctgtttccctgcttttgtgaatgtaaagtcttaggcaggtca

SEQ ID NO: 393525 - DNA, 201 bp, Homo sapiens; identical to SEQ ID NO: 86227

SEQ ID NO: 393526 - DNA, 201 bp, Homo sapiens
gcagcatttcaaaactgtcatcattagttacttaataaatgatgttggggtatccactccccccgatttatatatatgcatgtgtgtgtgtgtgtgtgtgtctgtgtatgtatgcatgcatatatattctgttttatcatattccatgtgaatcaaggatgtaactttaaaacatcataaaactattagaagcaggtatat

SEQ ID NO: 393527 - DNA, 201 bp, Homo sapiens
aacctgggcatgtccttttaatgacattggtggaggacaagggcaccagcagaaacatacaagtgttcttttgagcctctgtttctgtcacatttaccaayattccgttggccaaaacaatttcacatgggtgagttgagagttagagtggggcactgtgaggactcaaggcaaagggcatggctaccgggaggggtgaag

SEQ ID NO: 393528 - DNA, 201 bp, Homo sapiens
gcaatctcggctcactgcagtctccgcctccgaggctcaagggattctcttgcctcaggctcccgagtagctgggattacaggcgcatgccactactgccyggctaatttttgtatttttagtagagacaaggtttcagcatgttggccaggctggtcttgaactcctgacctcaaatgatctacccacctcagcctccca

SEQ ID NO: 393529 - DNA, 201 bp, Homo sapiens
atttggtttatatagttctaaatttcattctttcagcattaaaacaaagttcttttttaaattttttattttttgagacagggtcttactctgtcacccaractggagtgcagtggcgcaatctcggctcactgcagtctccgcctccgaggctcaagggattctcttgcctcaggctcccgagtagctgggattacaggc

SEQ ID NO: 393530 - DNA, 201 bp, Homo sapiens
actacagcctcaaattcccaggcttaggtgattctcccacctcagcctcccaagtagctgggactacaggcatgcaccaccatgcccagctagtttttaamattttttttgtggagacagggttttgccatgctgtccgggctggtctcaaactcccgggctcatgcgatccacctgcctcagcctcccaaagtgctggga

SEQ ID NO: 393531 - DNA, 201 bp, Homo sapiens
ccctacattaataaaaattgatttcttcagcttaacttcaaatatgattttaagcaaccttaggatcatgctgagttgaaactatggaaccgctacccttyccacttatagctcaactactgctattgtcattgtttttttcttctactttcattctattaattgttagataaaataactccttattttgcatgttgaggt

SEQ ID NO: 393532 - DNA, 201 bp, Homo sapiens
ctttcattctattaattgttagataaaataactccttattttgcatgttgaggtttaacataagttctccacttgatagagcatttaattttggggggacrgttcttagccgattatattagttcagtggttttagaataagacgtttgtggggaggggcagcagaatcttcagtcattgattctctctttataactttgc

SEQ ID NO: 393533 - DNA, 201 bp, Homo sapiens
tctccagttagtaagactgagaaggcttaggctttcctcgccagttaattatgttggtatttcagttacagtgtttggattatgggtttgattaaacatcytgtagaggtgatgggtatctactctttcagattatagttatgtcaagagtgtagcctttaagaatctatagtaaaatatgccagattaacttgagttgaa

SEQ ID NO: 393534 - DNA, 201 bp, Homo sapiens
atctttcctgagttagacatcctgaccaccctaatagccaaatgaaatggatagcagcagcttgaagtcatttataattttaacctgacaagttctgttgwaaaagattactacaggcatatgcaatcaatgagttgcataagaaatccaactatgtgcatttcttttctggtgattcctgtccctttaagatactgccat

SEQ ID NO: 393535 - DNA, 201 bp, Homo sapiens
ccactatttgtctcatgcctgctggaggaccagagagtataaagaaaaatattacctttgtgaagcacacatttattttttttaagtgaagctttatttcycattttctaaagaagagtctcaactaataatttttctttaattcaaactcaggtgaaatatgggattaaggagtatgcctgcactgctgtggatatgatt

SEQ ID NO: 393536 - DNA, 201 bp, Homo sapiens
cattaaggaacataagaggatcatgtgcagactgtaaatggttgagctaaagtatcctgttataaaatgtaaacataccacataccacttgaaacccaagscattttgagtcatgttacgtgtctgagttaaccaaggctgaaatttggttaggaagtgtcagattataaattataaaacttaattttcctaatgttttta

SEQ ID NO: 393537 - DNA, 201 bp, Homo sapiens
acttgtgatgtgttcaggcttatttactcaaaatctatgagtctgttatcttatttgtaaaattagtgttataatagcaatgctggctttttagagaggcrtaatgaggactacagcagttaagacaaaagcctttttataatctgtaaaatactgtgcaactgttaagaagcatcattgcttggtttcatgaaggcaaga

SEQ ID NO: 393538 - DNA, 201 bp, Homo sapiens
gccactcaagtgtggctttggtcactgtctggacctttcacttttctccttgtcaaataaggtggctggactggatgaatttgaagtccatggagagcatraaatgtttatttctcttgtcctgcctaaaaggaagccagtcatggccactgggttctgtttgcctctggaccctggcctagattttccttttattacctg

SEQ ID NO: 393539 - DNA, 201 bp, Homo sapiens
atttcctgagatggagtctcaccctgtcacccaggctggagtgcagtggcatgatcttggctcactgtaacctctgcctcctgggttcaagcgattctcckgcctcagcctcccgagtagctgggattacaggcgcatgccaccatgccaccatgcccagctaattttttgtatttttagtagagacagagtttcaccatg

SEQ ID NO: 393540 - DNA, 201 bp, Homo sapiens
catgcctaattcacttctaatatcaggattttggctctcaatattcttaaaaatatgtactaatatttttctgtgttcttagaatattcactactaaattygctaggcattgctagggttttaatagctgagaattttacaggtctttctctggcatatatacttaaaaggagtgacctggggctgtgatacctgtaactt

SEQ ID NO: 393541 - DNA, 201 bp, Homo sapiens
ggcgcaatctcggctcactgcagtctccgcctccgaggctcaagggattctcttgcctcaggctcccgagtagctgggattacaggcgcatgccactactrcctggctaatttttgtatttttagtagagacaaggtttcagcatgttggccaggctggtcttgaactcctgacctcaaatgatctacccacctcagcctc

SEQ ID NO: 393542 - DNA, 201 bp, Homo sapiens
ttccaaagtgctaggattatgtgagccactcacacctggccacatcttgtttttttctgatgaaacatttgtttcttaaactgatccaggacacatagctstgttctcagaggcatcttccttttgaggagatccagatattacttacttgtgagaaacagtggttaacaggacaagatccaaatacctgaatgtgtaaga

SEQ ID NO: 393543 - DNA, 201 bp, Homo sapiens
taggtcatggtttgtctttgttcaatccctgagattcctttttaagattttaaatggaattaaagatccaatatttgaagttgctaaaaaaaaaaaaaaaagtgccttgagcacattaaaggacaaaaaatgatgcattaagatttgcttttagaggcagggtgatttactagatggatgtagtttttgtggcagtgttga

SEQ ID NO: 393544 - DNA, 201 bp, Homo sapiens
agcctcctgagtagctgggattacaggcatgcaccaccgtgcctgacaaattttttttttaagtagagatggggttttgccaggttgaccaggctggtctygaactcctgacctcaagtgatcctcccacccctcccaaagtgctgggattacagtcatgagccactgtgcccagccactttttctttttcttttcttttt

SEQ ID NO: 393545 - DNA, 201 bp, Homo sapiens
cacgcacacaaacacacatacagggttaggctaagtagatctttatgttttttaattaacccaaactcttgtgatatgcagagggtaatgaagcatttttmtatattcataaaatactttctgtattcattgggttctgttcctttctcccaggatctcttgaacccatttcatttaggcacttttgccaccactttgctg

SEQ ID NO: 393546 - DNA, 201 bp, Homo sapiens
tgcctgagcactaaatgcttatcatttgtgtcatttgagattttatatttatattccaaattttaaaagctggtgatgctcagatgcatacacacacacacgcacaacacatacatacatacatatacacgcacacaaacacacatacagggttaggctaagtagatctttatgttttttaattaacccaaactcttgtga

SEQ ID NO: 393547 - DNA, 201 bp, Homo sapiens
tcgaactcctgacctcaagtgatccacccgccacggcctcccagagtgctgggattacaggcatgagccaccgtgcccggcctggactttgttttcttacraaacattttacagtatgtattcaacagccatgattgtagttactctgtaaggctttgttagttttaataaattttgagggaaggcttgatatgttttaat

SEQ ID NO: 393548 - DNA, 201 bp, Homo sapiens
aatatttcattttatcccatgaatcatttgccatccttattgcagacaaatggcaaaattatggtgtaccatgttttcataaattactctgccgccccccsacccccattcccagttcatttcattatctgtttggaaagactataagagtcagaacccagacacttgcggtaaacaattctgattttacagcaggctaat

SEQ ID NO: 393549 - DNA, 201 bp, Homo sapiens
  misc_feature (1)...(201): n = A,T,C or G
caggattgttgaactgatgggcagggaactgaattgggatgattataagaagcaggtattatatagaagtctttaaaaccacaattcctattgtaaacgcngaatggcttaatttgttagtagaagctagcgtagtttttgatgataaccttagatttcttaccagtttttctttgtgtgtgtttaatattgttaggcctt

SEQ ID NO: 393550 - DNA, 201 bp, Homo sapiens; identical to SEQ ID NO: 86238

SEQ ID NO: 393551 - DNA, 201 bp, Homo sapiens
aaaaaaaaaaaaaaagccgggcatggtggcacatgcctgtaatcccagctactagggaggctgaggcaggagccttgaacctgggaggtggaggttgcagmgagccaagattgtgccactgcactccagcctgggtgacagagtgagactctgtctcaaagagaaaaagcatagaaagaagtggatagattcaggatatat

SEQ ID NO: 393552 - DNA, 201 bp, Homo sapiens; identical to SEQ ID NO: 86226

SEQ ID NO: 393553 - DNA, 201 bp, Homo sapiens
aaaaaaaaaaaaaaaaagccgggcatggtggcacatgcctgtaatcccagctactagggaggctgaggcaggagccttgaacctgggaggtggaggttgcsgtgagccaagattgtgccactgcactccagcctgggtgacagagtgagactctgtctcaaagagaaaaagcatagaaagaagtggatagattcaggatat

SEQ ID NO: 393554 - DNA, 201 bp, Homo sapiens; identical to SEQ ID NO: 86230

SEQ ID NO: 393555 - DNA, 201 bp, Homo sapiens
aatcccagcactttgggaggctgaggcgggtgaatcacatgaggccaggagttcgagaccagcctggccaatatggcaaaactccatctctactaaatatmcaaaaaaaaaaaaaaaaaaaaaaaaagccgggcatggtggcacatgcctgtaatcccagctactagggaggctgaggcaggagccttgaacctgggaggt

SEQ ID NO: 393556 - DNA, 201 bp, Homo sapiens
gacaaccattgtattaaagatagaaaaaagtggcctgggcgtggtggcttatgcctgtaatcccagcactttgggaggctgaggcgggtgaatcacatgargccaggagttcgagaccagcctggccaatatggcaaaactccatctctactaaatatacaaaaaaaaaaaaaaaaaaaaaaaaagccgggcatggtggca

SEQ ID NO: 393557 - DNA, 201 bp, Homo sapiens
gtatgttagaagaaaatacctagcactatatatctccccaccaccgaaaaagggaggggggatttttttgcaatacagttgggaatgctgctttaatcccrtaaactgttattcaaaatacactaaatgtgaaatgcatcaaccaaaatggagttgggggagggaatgacttccctaagggtgtacaataatattagcaag

SEQ ID NO: 393558 - DNA, 201 bp, Homo sapiens
tgttaggtctatcaatcacctaatatgtgtcagcaattttccctttttttttttttgactcttgctctgttgcccaggctggagtgcagtggcatgatctyggctcattgcaacctccgcctcccaggtacaagcaattctctgcctcagcctcccgagtagctgggattacaagcacctgccaccatgcccggctaattg

SEQ ID NO: 393559 - DNA, 201 bp, Homo sapiens
gccatcatcttttctctcactgcctacatcatccatccatttgtttgttaggtctatcaatcacctaatatgtgtcagcaattttccctttttttttttttgactcttgctctgttgcccaggctggagtgcagtggcatgatctcggctcattgcaacctccgcctcccaggtacaagcaattctctgcctcagcctccc

SEQ ID NO: 393560 - DNA, 201 bp, Homo sapiens
tttttgtgctattatcttggtgtctctgatacttatttcagagtgattattctcacctttctatttagaaatatcttaatagtgacatttcttaaaatttrttctaatgatataattaaagatacaaggagtttaaatgaaaatataatcttgcagcactatctgtaatagtgaaacaatgggataatccaaatattcaaa

SEQ ID NO: 393561 - DNA, 201 bp, Homo sapiens
tcctgggcttgagcgattctcctgcctcagcctcccaagtagctgggattataggcatgtgccaccatgcccggctaatatttgtatttttagtagagatrgggttttgccatgttgaccaggctggtctcgaactcctgacctcaggcaatccgcccgcctcaacctctccaagtgctgggattacaggtgtgagccact

SEQ ID NO: 393562 - DNA, 201 bp, Homo sapiens
gcccttattagatcagttttgtttcatgctctttttccataccctcaactctgtaagtatagtaatgaccatgagagacttttcttggaaccaaaagactmctgcccttgttgattttggggaccttgcagactagctgctgagacaagtggtgccttggctgtggtgctggtgccaaggctgtgtctgtctttctgcttc

SEQ ID NO: 393563 - DNA, 201 bp, Homo sapiens
ttcattttaactgaataaaagaaaggatattggctaagtgttgtctcatgcctgtaatcccagcactttgggaggccaaggtaggaggatcacttgagccyaggagtttgagaccagcctgggcaacatgtgagaccctgtctctacaaaaaataaaaaataagctgcgtctggtggtgcgtgtctcctacttaggaggct

SEQ ID NO: 393564 - DNA, 201 bp, Homo sapiens
ctgcctgagcactaaatgcttatcatttgtgtcatttgagattttatatttatattccaaattttaaaagctggtgatgctcagatgcatacacacacacacgcacaacacatacatacatacatatacacgcacacaaacacacatacagggttaggctaagtagatctttatgttttttaattaacccaaactcttgtg

SEQ ID NO: 393565 - DNA, 201 bp, Homo sapiens
aaagttgttttcttttcattttaactgaataaaagaaaggatattggctaagtgttgtctcatgcctgtaatcccagcactttgggaggccaaggtaggasgatcacttgagcccaggagtttgagaccagcctgggcaacatgtgagaccctgtctctacaaaaaataaaaaataagctgcgtctggtggtgcgtgtctc

SEQ ID NO: 393566 - DNA, 201 bp, Homo sapiens
cgtgtgtaggttataaaaaatttcagaattccaatttcttcataaaataaagataatgtaactttacttacaggcttttttctctgccaagcactaagtcratacatacaaatcagtgatcacagtacctggcacatagcaggtcttcagtatctgctttacttctttcccttcccctgaggtaggatatgaacatttgaa

SEQ ID NO: 393567 - DNA, 201 bp, Homo sapiens
aagtggcttaaccttacagagagccttaagtttctcaggcataaatggaggataataataacattcttctctataaataaacatttgggaaaggaaggagrtgtgtgcattgtaggataaatgcagaaaagggagagccttggagatagtgcattctgagaattatggtctccacccatccaccatgaaggtaggagaaaa

SEQ ID NO: 393568 - DNA, 201 bp, Homo sapiens
cacagtgactcacacctgtaatcccagcactttgggctgggaggcctaggcaggcggatcacctgaggtcaggaattggagaccagcctggccaacatggyaaaaccctgtctctactaaaaatacaaaaattagccgggcatgatcgtgggcacctgtaatcccagctactaggaaggctgaggcaggagaattgcttga

SEQ ID NO: 393569 - DNA, 201 bp, Homo sapiens
catggtggcgcatgcctgtaatcccagctatttgggagcctgatgcaggagaatcgcttgaaccagggagtcagaggttgcagttaactgagatcatgccmctgcattctagcctggcgacagagcaagactccgtctcaaaaaaaaaaaaaaaaaaaaaaagaaagaaaaagggaacatatagaagatctcaatctttta

SEQ ID NO: 393570 - DNA, 201 bp, Homo sapiens
gagttcctggaacataggaagctttcaaaaagtgttacctcttatgagattcccaagggatatgaatataaagtgcggttgtagtcagcaagcaagttgcycttgtcactagagatcttgcattcacggatactttgttaaaacttttgggattagtagcaaatgatatatccttcattttaggttatagaagaatggctc

SEQ ID NO: 393571 - DNA, 201 bp, Homo sapiens
atcaagttctgaaccagctctgagaatagtaagactagtaagatgtggccttgatttcaaggaacaacttagcagtttattactatttattgaacaaatamactttttcttctggcagtgaagggcattctgtagtgatcaaggtattagctagtatattagcagatgattgtgggtgatgatagttgtggtggtgatgat

SEQ ID NO: 393572 - DNA, 201 bp, Homo sapiens
tcaccttctgaaaagtcttactatatttgcctttgtgcactttgtatatttatagtttttaaaaaaatagacaagattgtatttcttttttgcagtgtgtwtctttcaaatagtagtgtgtttatatcaatctttacatttatatagtattcatgatttttaatgggaaaattccattttatttattttcatttaataact

SEQ ID NO: 393573 - DNA, 201 bp, Homo sapiens
agtgttccagtctgagaaaatgtgcaggaggaacagcgtggaatcagtgtatgtgggagacagcatgtgttgtaatttggagcattgaggctatatatgaragaacacatgagagaagagtggaaaggcagggctgggtctggtatgctaggggaaagcctttgggctttattgaatagatcacttggagatactgcctta

SEQ ID NO: 393574 - DNA, 201 bp, Homo sapiens
cactgaaacatgagggtagtcatatctacatagaatggtcaggagtgggaaactttacttatgctgtttggcataggtaacattttaataggcaaacattrcttgctcaaagtgttccagtctgagaaaatgtgcaggaggaacagcgtggaatcagtgtatgtgggagacagcatgtgttgtaatttggagcattgaggc

SEQ ID NO: 393575 - DNA, 201 bp, Homo sapiens
gaatctaaatgcagaaaattttcacaggttgtgtccagcattacaaaaaagaatgtttggttctttagcttactgtttaactaaatacacattttaaattraatttaaaatttatgcttgggaattaaaacaccatttaatgcattttttgtgtagtttttctggagaatattttattgttgccctcacaatgttagaaaa

SEQ ID NO: 393576 - DNA, 201 bp, Homo sapiens
ttgaatccaatagaattactgtaggttctttagagtcaccatatcctgctgggcgactctaatctaaatattgctagttaaccttgtttttcaaaaatacrttggaaaaagctaaatggaacctctttccataatcagtttacattatgttacacactaactgttgattacattttccagagatgcattatttcccttaca

SEQ ID NO: 393577 - DNA, 201 bp, Homo sapiens
ggagtttgagaccagcctggacaacatggaaaccccatctttacaaaaaaatacaaaaattaaccaggcatggtggcacgtgcctgtagtcccagctactyaggaggccaaaacgtgagaattgcttgagactgtctcagaaaaaaaaaaaaaaaaaaaaaaaaaaaaaaaaaaaaaaacaagccaggcaggcacagtgac

SEQ ID NO: 393578 - DNA, 201 bp, Homo sapiens
aagagagagaaagaaagaaagagagagagagcgagaaagagaaaaagacctgggggggggcggggagagagagagacctaggaaagagaggggggtggggrgagagagagagagagagagagagagaaagaaagacctgggaaagagaaggcatattacatgggccattatccatctgcttgcttgaatttcttggacaac

SEQ ID NO: 393579 - DNA, 201 bp, Homo sapiens
atctcttttaactttattgaacaagcattttttttattctgaattaagttttacacaatcccatgtttgttacaaacaacaggaaaattttgttattggtragttgataaatggttaattataagaaaaataaggggtggcaacctgatgaattgtctatcaatttctttataggtggaaagtggacaacttatcggtcta

SEQ ID NO: 393580 - DNA, 201 bp, Homo sapiens
tagatgagattttatgctgatgggaaggaatcccaggtgagagagagagagagaaagagagagaaagaaagagaaaaagacctgggaaagagagagagagmgaagagagagaaagaaagaaagagagagagagcgagaaagagaaaaagacctgggggggggcggggagagagagagacctaggaaagagaggggggtggg

SEQ ID NO: 393581 - DNA, 201 bp, Homo sapiens
actctccctccctcatctgaatggccatagcctggtgtttttttccctctagggtggcatttattctttctatgtacttgttatatatatgtatgtgtgtrtgtgtgtgtgtgtgtgtgtgtgtgtatataatttttttcctcattagatggaaggcaaagaccataattgaaatatgttaatgttctctgtagtacctac

SEQ ID NO: 393582 - DNA, 201 bp, Homo sapiens
taatgagatctttttctgaggggaagcttgtcaacataaactcatgaatttgaagtatttgatagatacatgtcaatccatcagaattattgatgttcatrttgcccatctctggccctggggcacttcctgcagttggcccctgagcccttttgataccctgtcagtggtctatgatgatttctgtgctgtttgctatga

SEQ ID NO: 393583 - DNA, 201 bp, Homo sapiens
aatgctcttttggcagttgccatccaagatggctaagtattaagcagctcagtggagagtcagggtgacagccttttacaccttgccttcttggtacccasgttcttgcccagcatctgggaagaatcaggtcatacagacttggaggatggtgaatgcagaggttttattgagtggtggaggtggccctcagtgggatgg

SEQ ID NO: 393584 - DNA, 201 bp, Homo sapiens
gtgcaaccaaggtttaaaattatgtaaatattgatacacataaaagaatacgtgtaacacgtatgtaagttgtaaagttagtcattaagattgtgggatcygcaactgtccttaaaacctagtgagataggagagttgcctggacccttcgtgggacttgcgacaggggtgtggctcgattacctggccgggtgctcaaac

SEQ ID NO: 393585 - DNA, 201 bp, Homo sapiens
tttctcataaacacagttcatcctaattaaattctggatggctattgcatatgatgaaggcaaagtttgttctcccacagaagttcatagaggtaataaakaagttccatgcactcttccctccaacattttatatattttttttaatttttattttttgtagagacaggctggtcttgaactcctggcctcaagtgatcc

SEQ ID NO: 393586 - DNA, 201 bp, Homo sapiens
gcctttgaaaagggttaattagctttaatattgacttattccatataggacggtaatagactagaacatttatttctgttttggatcattaaaaactggcrttagttcttcaacaatttgtttctaataaataaaaattggaccaattagagtagttttagtataagccacagttcatgatacacttcttatgaacacaaa

SEQ ID NO: 393587 - DNA, 201 bp, Homo sapiens
cgtgcctgtagtcccagctactcaggaggccaaaacgtgagaattgcttgagactgtctcagaaaaaaaaaaaaaaaaaaaaaaaaaaaaaaaaaaaaaamcaagccaggcaggcacagtgactcacacctgtaatcccagcactttgggctgggaggcctaggcaggcggatcacctgaggtcaggaattggagaccagc

SEQ ID NO: 393588 - DNA, 201 bp, Homo sapiens
aaatacaaaaattaaccaggcatggtggcacgtgcctgtagtcccagctactcaggaggccaaaacgtgagaattgcttgagactgtctcagaaaaaaaaraaaaaaaaaaaaaaaaaaaaaaaaaaaaaacaagccaggcaggcacagtgactcacacctgtaatcccagcactttgggctgggaggcctaggcaggcgg

SEQ ID NO: 393589 - DNA, 201 bp, Homo sapiens
cctttaacacacttgcttaaaaatgtgtcagataggccaggtgcagtggatcacacctgtaatcccagcactttgctttgggaggccaaggcaggcagatygcttgagcccaggagtttgagaccagcctggacaacatggaaaccccatctttacaaaaaaatacaaaaattaaccaggcatggtggcacgtgcctgtag

SEQ ID NO: 393590 - DNA, 201 bp, Homo sapiens
ctccactccctatgtagtaacttctaccagcaaaaatagatttgcaaagagtgctttggcaggaaggtgtagctgggtgaatgaagtgctgctcttagcaratggtctctagtctggcttccaccttgtgcagtggaatattcactcccagaagagttccagagtaatttacaaacacaaattcttgcaaagtgttagtga

SEQ ID NO: 393591 - DNA, 201 bp, Homo sapiens
gaaggtgcacactgataacttaaaacagcctccactccctatgtagtaacttctaccagcaaaaatagatttgcaaagagtgctttggcaggaaggtgtakctgggtgaatgaagtgctgctcttagcagatggtctctagtctggcttccaccttgtgcagtggaatattcactcccagaagagttccagagtaatttac

SEQ ID NO: 393592 - DNA, 201 bp, Homo sapiens
aaaaacgaccctttggtattaaatgtaataagtggctttgaattgaatacatgcacaggttctcctaaatgaactttgtgagtccaaactgctctagttaygtattctcattgtaactggattctatgacattctttcatcctccaagagtgttccaggccatgaaaactcctcatggcttggtgtcgatgtattctttgg

SEQ ID NO: 393593 - DNA, 201 bp, Homo sapiens
gccaccacacccggctaatttttgtatttttagtacagactgtgtttcaccatgttggtcaggctggtctcgaactcctgacctcgtgatccacccgcctyggcctcccaaagtgctgggattacaggtgtgagccaccgcgcccagcttaagctttttgcctatagctagttagtattggagccataatttgagtataag

SEQ ID NO: 393594 - DNA, 201 bp, Homo sapiens
ttgaaacaatccattttcctatcaacactgttttcctctggattaaaaaccattccccatcttcctatccttcatgacatacagaaaaaagaatcttattwttcagtggtaaaaagtggagagagagaaaaggagtaaaagaagaacaaacagtattcatgcagtgcagagattagaggttagttgttacacatttcaggg

SEQ ID NO: 393595 - DNA, 201 bp, Homo sapiens
gttcagcaagcattgatttattgtgtgtaggctggtaaaggaagagtaaggaaccatatgtgcagtgtatcttcttgggctgttttcagaagtatctttayagcatttgttaattttgttgtaactttaactaatgttccagttgtggaattatcttacaccatgatagcagctttttaggggaagaggggaagaaggaaa

SEQ ID NO: 393596 - DNA, 201 bp, Homo sapiens
gatggagtctcactctgttgcccagggtggagttcagtggtgccatctcagctcactgtaacctctgcctcccaggttcaagtgattctcctgcctcagcytcctgagtagctgggattacaggtgtttgccaccatgcccggctaatttttgtatttttagtagagatagggtttcaccatgttggttaggctggtcttg

SEQ ID NO: 393597 - DNA, 201 bp, Homo sapiens
gaatctgaaaccaggtgtcctatggctaaatagttgtgattcatgaaaagaaatacaccgagaaatgtaaggattgttttcccccaaggcagttggtcctrtaactctatgtggactgtggactctctttagctcttatattccttatttctattagaaatttccttttagtatattgtaaaatttgttaaattgacattc

SEQ ID NO: 393598 - DNA, 201 bp, Homo sapiens
ggctcatgcctgtaatctcagcagtttggaaggccgaggcagatggattgcttgattgattctaggagttcgagaccacgctgggcaacatggtgaaaccycatctcttcaaaaaatacgaaaatcagccaggcttggtggcgcacacctgtagtcccagctactctgtaggctgaggtggcagattcacctgaacgtggg

SEQ ID NO: 393599 - DNA, 201 bp, Homo sapiens
aggtttagttacttatgaagtattactttgtgttaggtaaaaatttaaatgaaggaaagccaggaaaatgagattggtaagaagtttccaaatattatgargtgttcagtttgttttctttttttttctctttaccttacaactgtgacttcccatagttcaaactgatgcccggaaataattttgctgaatggctttgtt

SEQ ID NO: 393600 - DNA, 201 bp, Homo sapiens
acaagtgagaggaaagaaagttaagagctaagacaatgcagaacttgagaaatattcagtggagcagagtgtggggtggctcatgtttgtaatcctagcaytttgggaagccaaggtaggagattgcttgagtccagtttgggcaacatagcaagaccttgtctctacagaaaaaaaaaaaagaagaagaaagaaagaaaa

SEQ ID NO: 393601 - DNA, 201 bp, Homo sapiens
tcagcatgttggccaggctggtcttgaactcctgacctcaaatgatctacccacctcagcctcccaaagtgctgggattacagatgtgagccaccgtgccmggccctaaaacaaaggtcttacattacctggcagaagattactagtagatactttgctagagacttcttcattgccttggagattaacccaaatgccaag

SEQ ID NO: 393602 - DNA, 201 bp, Homo sapiens
gacttattgctccacagagggaatgagtaatgggtatttgaatgtgatcagcacagtacaatgcaattaaggaagcagtactgttctgtgcctttaatccygaactaatttgaattgcagtttgatagcacagtgaatcctgcataattatgtagggtgcatattaaactctgtgacaaactggagaagcttttaaccatc

SEQ ID NO: 393603 - DNA, 201 bp, Homo sapiens; identical to SEQ ID NO: 86263

SEQ ID NO: 393604 - DNA, 201 bp, Homo sapiens
attaaaattatttgaattagagttctggtcatatttttttcattttattgcctttaccttgccaaaaaaaaggatttaggaagtttacgaaatacataccrtacagagaggttatgtaaactagaagtaggtgtgaaagatgaggcaaaggaaaacaatgctagcaccaacagaatggagcaccagaagaggttagaattc

SEQ ID NO: 393605 - DNA, 201 bp, Homo sapiens
caaaaatcataatgatctgaatttgagatgttgcaaatgaattgtggtgtccggtagtttcttcttacattttcctttgcctttatactttaggggtcttrctccattaattcatttgttacattagtaaaattcagtatgaataaatatttggattgatgtagtcttcagtgttttgctttattttgtattgagcctatt

SEQ ID NO: 393606 - DNA, 201 bp, Homo sapiens
cttttacaactcaagtgttgcatgtttaattgtcttttactttagtagtggctattcacatcgtattttgaaaatatccctcttgaaattttatatgacaygactaacataagtgttgtttggcagtaaatagttgttgaaattgagtcatatgaatgctaatagatgagatcagtgaatggagctggcctgtttgtatcc

SEQ ID NO: 393607 - DNA, 201 bp, Homo sapiens
atagtcataactaaatcatatttgttgttgtgttttcttcctctttttttttttttctttttgagattgagtcctgctctgtcacccaggagtgcaatggygcgatcttggctcactgcaacctccacctcctgggttcaagtgattctcctgcctcagcctcctgagtagctggaactataggcacatgccaccatgcct

SEQ ID NO: 393608 - DNA, 201 bp, Homo sapiens
ttggggtacagttagctttgtattttttaaacgttttttgggataaaatttttggttaaactttaagggttttttttggtttttattttttggtttttttwtagaaagaaaatgagtgttgtatgtcttctctcagtaagcgaatggttttctcagaattaacaaggacatcaacacattttaagtggtttataataagac

SEQ ID NO: 393609 - DNA, 201 bp, Homo sapiens
ctgcagctgggttggaaggtttcctaagatccttataggttggggagtttggggtacagttagctttgtattttttaaacgttttttgggataaaattttwggttaaactttaagggttttttttggtttttattttttggtttttttttagaaagaaaatgagtgttgtatgtcttctctcagtaagcgaatggttttct

SEQ ID NO: 393610 - DNA, 201 bp, Homo sapiens
gccattccctcatagccatttaagtggtttccaaatctctattctgataggtcgtgctttgatgcagtctcttgtaactaaatctctatgcacatccttarttagtcccttaggctgaattcccagaagaactggtgggtcaaagaggatccccataatcagggtttgactgttgtctggatagattaagtttcttgcttt

SEQ ID NO: 393611 - DNA, 201 bp, Homo sapiens
accataagtatatattgtttggtgtttagaagttgtctttttcacttttttcctttgctttaaacaaaatgacaggtttgaagattctgtgggtcttcagrtggtatcccattgcaccaccagaaagatcaaaagtgattcaccaaaatcagctcaaaaattttgtaagttaattgttcttagcttttggtaataaaggat

SEQ ID NO: 393612 - DNA, 201 bp, Homo sapiens
actcaagtgttgcatgtttaattgtcttttactttagtagtggctattcacatcgtattttgaaaatatccctcttgaaattttatatgacacgactaacrtaagtgttgtttggcagtaaatagttgttgaaattgagtcatatgaatgctaatagatgagatcagtgaatggagctggcctgtttgtatccttatcatg

SEQ ID NO: 393613 - DNA, 201 bp, Homo sapiens
gggattacaggcaggaaccaccgtgcccagcctgtagttgtgttttctactctcgggacacttatgaaacattttaaaagaaaatgattacattaaaattwggtctataattatttgacacaatttatcgttactttgtcatattaaactgagaatgataaatttttcactggtgatgtccacaaaattaaaattatagat

SEQ ID NO: 393614 - DNA, 201 bp, Homo sapiens
gcaccatacttggagctaagctttctagcagtcagagggggagatgtcatgggtgcaattctcacatatgccacaaaagcaaaccacttgctcaggggaartataaccaatcctgataccagaccaaaataaaagtatcctgaacatagagcacatttaaggctttctcctgacagatcttctgcccctgctaaatcatgt

SEQ ID NO: 393615 - DNA, 201 bp, Homo sapiens
cattaattcctttggtaagccaagccttcataatgtgtaaggaacaagttaggccctgtagcagtcaagatgaacacaccatggtcccttctttagtactyttttaggagctcaccatctagtggaagagacagatatctgaatatatgaatagatgtgtttatatgtttgaaggtacaaactaaaatgttgtatctatag

SEQ ID NO: 393616 - DNA, 201 bp, Homo sapiens
ttgttatcttctcaattttatttgttgctagttaaataattttacctgtttttaatagatcactttcatacataaaataaatttctataatttttcattgkcaataactatggaagtaggttatcaacataaacatttttcaaggtatatggttcagtgcataattatcctctcagttttgctatccatagagcaattaat

SEQ ID NO: 393617 - DNA, 201 bp, Homo sapiens
tcagtaagagaaatgatgagtaacttgtttgttgaattttattttccagctctaatccttaaaatattgtccatgatttataaattagtacagagcaacasttatgcaaccaaaaggtaaatatattgttctagtaaattactcttcaaaatgtaatgtgagaaatagttggattaacttttattatatgctttgaaaagt

SEQ ID NO: 393618 - DNA, 201 bp, Homo sapiens
  misc_feature (1)...(201): n = A,T,C or G
ttttatgtaagataaaaactttttttttaaaaggctgttgctgtgccatcgaatattcaaggaattcggagtatcctttaagtgggaaaactatttaaacntttggaatgttcattcattcattaattcctttggtaagccaagccttcataatgtgtaaggaacaagttaggccctgtagcagtcaagatgaacacacca

SEQ ID NO: 393619 - DNA, 201 bp, Homo sapiens
acccttaagactattgtccctggttttggagaataaagcaattctagattactagtttgttgaattgacagaaatgcaactaagaactctggtatgagtayattttacttttattgacagatggaaataatggcagactctaaaatgaaggcagaaattcaagctttgactttcctatcatcagattatctttccagagtg

SEQ ID NO: 393620 - DNA, 201 bp, Homo sapiens
tggtaagaggatttacaatattatctacacaatgtcctgttttcaatataatgcatcctttgggatcatagaacgggaatttccaatgtgtttatttaaasatcctcaaagctggctatcacctcaagttcttttttttttaatagagacagggtctcgctctgttgcccaggccgaagtaccatggcatgatcatagagc

SEQ ID NO: 393621 - DNA, 201 bp, Homo sapiens; identical to SEQ ID NO: 86267

SEQ ID NO: 393622 - DNA, 201 bp, Homo sapiens
ttagtgggagattcttcacagtcaagctcccagttgctcttgatcctggggccaagatttcagtcattgtggaaacagtctacacccatgtgcttcatccrtatccaacccagatcacccagtcagagaaacagtttgtggtgtttgaggggaaccattatttctactctccctatccaacgaagacacaaaccatgcgtg

SEQ ID NO: 393623 - DNA, 201 bp, Homo sapiens
agtaaacataattttaaaatgttgcatacgttagatacatcataatttacccgttctgttgctgatatataggttgtctccaatcaatctgatttaaactratggtgcattctctgttgccaaaactttgaactatttgtttccttccttccaggatacttttaaagtacattatgagaacaacagccctttcctgaccat

SEQ ID NO: 393624 - DNA, 201 bp, Homo sapiens
tttttagtagagatggggtttctccatgttggtcaggctggtctcgaactcctgacctcaggtgatccgcccactttggcctcccaaagtgctgggattaygggtgtgagcccctgcgcctggccatatgccactttgtaaaagtaagtctttgacaatattcttgtgtttcagagaaaaaaaaattgttactgaaaagaa

SEQ ID NO: 393625 - DNA, 201 bp, Homo sapiens
gaggctatattttattcccatcttcttccaggaacattgaaattgatagtccctatgaaatcagccgtgccccagatgagctgcactacacctatctggayacatttggccgccctgtgattgttgcctacaagaaaaatctggtagaacagcacattcaggacattgtggtgagtggctccactgtttgccttccatggc

SEQ ID NO: 393626 - DNA, 201 bp, Homo sapiens
aatgttcaacttggacattgtgagaaatgaggactttatcacagctacctattctttgcttttcgaaactagctaaatatttaggcagttgtttagggttractgatgttcatcttgttgattggcagtgttagaaaccaacagaatcttaaaaaatacccccccatatatatagataagccattttcttttttttctttg

SEQ ID NO: 393627 - DNA, 201 bp, Homo sapiens
gcagtaagagggacaaaggctttgagatggtgtggctgggcagatactggggtagcaaagctgttggagtggttgagggccttccttgaatgttgggcctyggttggaacttgaagagagagggagcaattaaggcttacaaagattttgttactatggcaaatcgcaaacatgccaaagtacaaagactagtataaactc

SEQ ID NO: 393628 - DNA, 201 bp, Homo sapiens
ctccatgttggacaggctggtctcgaactcctgacttcaggtgatccgcccacttcggcctcccaaagtgctgggattacaggcatgagccaccgcgcccrgccgccttggcctctcaaagtgctgggattacaggcgtgagccaccatgcccagcctaaaccatatattttttttttttttggagacagagtctcgctct

SEQ ID NO: 393629 - DNA, 201 bp, Homo sapiens
ttttttaaacctttttactgaaaaataagatacagaaaaccatacaaaaaatgtatagctcagtgaattattatgaggaagaccttgtgccgctccccacmccctcctgtcaagaaatcaaaatttgctagctactcaaaaagtgttccatgtacctcttccttctcaaagtcattgccccgactttgagtaatcactttc

SEQ ID NO: 393630 - DNA, 201 bp, Homo sapiens
tggggtcttgctgtgttgcccaggctggtcttcaacacctagcctcaagcagtcctcccaaagtgttgggattacaggtgtgagccactgcacttggcctrgctggaatattcccactgtgataagattctagtcaaagtaatgaaacttgtttgtattagactgtacagctttattgaggatgattgtatgattgttttt

SEQ ID NO: 393631 - DNA, 201 bp, Homo sapiens
tgacctatatggggttctcagtaaatcagtttgagtacatgagtaaaaaaccaagtcattcacacaatgttctcccattagatccagctagagaagagctwtaggaaaaaaaaaaaagacctgctccatgtacatcagtttagacagttctgtgttgtctagccttttattgattgaaaaaccttcattagctggtgcttc

SEQ ID NO: 393632 - DNA, 201 bp, Homo sapiens
gacctatatggggttctcagtaaatcagtttgagtacatgagtaaaaaaccaagtcattcacacaatgttctcccattagatccagctagagaagagcttyaggaaaaaaaaaaaagacctgctccatgtacatcagtttagacagttctgtgttgtctagccttttattgattgaaaaaccttcattagctggtgcttcc

SEQ ID NO: 393633 - DNA, 201 bp, Homo sapiens
cctgcctatagtcaggtaagctcaggtggagtccagcccatccctgtctgcttcagagaatgtcttgcagagtgactactggttgataggcttgggtggtrtggggtggatgaaatctgcagtcatttctaaggtcatcccaaaagtgtttaacctgcagtgaaatgactccatgggggtcttgtttctccttgggggatc

SEQ ID NO: 393634 - DNA, 201 bp, Homo sapiens
catcattcaggaaaatgttacgcatttatagcggttttatgccacttttttttttttagatggaattttgctcttgttatgcaggctggagtgtgatggcrccatctcagccggctgcaacctctgcctcccgggttcaagcaattctcctgcctcagcctcccgagtagctgggattacaggcatgtgccaccatgccta

SEQ ID NO: 393635 - DNA, 201 bp, Homo sapiens
ggcgtcacagagttgcttggcttggggccctccatgcctcactgctttgtctagggcagacactgggcagctctcttgcttacctgcatgcttgtgggatragactgcatctggccataacttttcatgtggtgccagtccttgtggaggaaaaagggatttttggggtcctggtgtgagctgggtgtggaggaagctctg

SEQ ID NO: 393636 - DNA, 201 bp, Homo sapiens; identical to SEQ ID NO: 86281

SEQ ID NO: 393637 - DNA, 201 bp, Homo sapiens
tgcctcagtttcctcatctataaaatgggaatgctgttagcccctcataggggttctgagtgtgaaatgagttaatgcatgcaaaatattcagaaccctgycctgatacaagctatgtaaaggagttatctgtaaatgaggacagtaaccttttcgcagaggtgcccctcagagtcactgactcccctgtccactccctgg

SEQ ID NO: 393638 - DNA, 201 bp, Homo sapiens
agcctggctaatttttttttgtatttttagtagagacagggtttctccatgttggacaggctggtctcgaactcctgacttcaggtgatccgcccacttcrgcctcccaaagtgctgggattacaggcatgagccaccgcgcccggccgccttggcctctcaaagtgctgggattacaggcgtgagccaccatgcccagcc

SEQ ID NO: 393639 - DNA, 201 bp, Homo sapiens; identical to SEQ ID NO: 86276

SEQ ID NO: 393640 - DNA, 201 bp, Homo sapiens
caaggcaagcatttacattttacatattagaacactgaggtattctagtaccagagtgttgaaagtggtgccagagtgttgaaagagttgacgtggcttakgtcacagaatggagtagtggagtgaggcctccatttttgtagtttttgcatccttcctgtgagtcatgttttactcagcatcaaggaaacagtgatgagc

SEQ ID NO: 393641 - DNA, 201 bp, Homo sapiens
ttccgaaggagggatggtttagagtggcttttgtaccttcccagatctctgctattttagtgcaaaaacatgtggcttgctttctgagctttcctctgtgyggtttttgagttccattgtccctatcatgttcatttttgattgtgttgagcagtttctcctcactgtagggcactgtcccagaaggggagttctgctctc

SEQ ID NO: 393642 - DNA, 201 bp, Homo sapiens
cctggccttcagtgggttattttcaaacccttgtagaattttaggagctagcagaagggaccatggtggttactgactaggagccagtggttgcttctctktttaccaccaaggacccatctaatgatttttcctctcttttggatcctgtatctgaaatattttggcatgctaatattttattaagtaacaatatttttc

SEQ ID NO: 393643 - DNA, 201 bp, Homo sapiens
tgggccacgtcagcaccggcctgcccccgcgcgggtcgctgctcacgtgggcagctgctgggatccgcggccgaccagcctcggagcttgcccctgtttgsgccgttctcggcaccgctcgggagacctcgggccggtagaacgcacctcccttccgtaaggcgagcgcggcagcccctcggcccggtgccagcgggcgcc

SEQ ID NO: 393644 - DNA, 201 bp, Homo sapiens
tttttgatatattttaaaagttctccaatacagctttttgtatcttactgggaatcactacttcagtcctaaaagatagtctaatttttgtttttttcagwtgagggtgggttggcagagagatcagtgggatatgtatacccttctcccttgcagtctgctccacagtcttatgattggagataactactctttctcaga

SEQ ID NO: 393645 - DNA, 201 bp, Homo sapiens
atggtcatggctcactgcagcctccacctcctgggttcaagcaattctcctgcctcagcctcccaagtagctggattacaggcacctgccaccacgcccarctaattgttgtattttttagtagagatgaagtttcactatattggccaggctggtctcgaactcctgacctcaggtgatccgcacccctcctctgcctgt

SEQ ID NO: 393646 - DNA, 201 bp, Homo sapiens
ctccagggctcaaaccgtccttctccctcagcctcccaaataggtgggactagaggtatgtaccaccacacttggctaatatgtgtgtgtgtatatgtatrtatttttagtagacaccgggttttgccatgtcacccaggctggtcttgaactcctgtcctcaagcagttctttgcctcccagagtcctaggattataggc

SEQ ID NO: 393647 - DNA, 201 bp, Homo sapiens
aaaaagatgtctttgcatctctctgtgtgtttagaacatgtgtcaccaaggatgtgcaatcaaaatactttgttctaatgctacttgaaataattgtttctttttttttttttgtctttattttattttattttttttgagaaggagtcttgatctgtcattcagactggagtgcagtggggcgatctcagctaaccgcaa

SEQ ID NO: 393648 - DNA, 201 bp, Homo sapiens; identical to SEQ ID NO: 86278

SEQ ID NO: 393649 - DNA, 201 bp, Homo sapiens
ttcttacttgcagttctgtcatcagatggaaccgctgaaattcctttaaatagtttttgagttatttaaaaaatgaaaattcagagaataataaaaaacayttttatatgaacacccagaactaatgattgaaaacattttgtcatattttctttcaagtctttcttttttttgagacggaatctcactcttgccacccag

SEQ ID NO: 393650 - DNA, 201 bp, Homo sapiens
tgaacaaatggaaataaagcagggactgtgaacatttgtttttggtctgttgaagatctctcataatttaattcttaattttgggaatagtgcttttatcragtgctttttattcattaaataatggatttgcttctcagcaggtttgcaaggcaagcatttacattttacatattagaacactgaggtattctagtacca

SEQ ID NO: 393651 - DNA, 201 bp, Homo sapiens
tgtatgaggatttgtagtaaacatacttatattcctccatgtctcaaaacatagctccctatgtatattgttgcacggtggggttgtttttggggagagakagggtctctgtgcctcctgttgtggttgcagagtgcccagggcccacgtgcccactgtgaagatgacagccttgccactctgagctgtgctttctctaac

SEQ ID NO: 393652 - DNA, 201 bp, Homo sapiens
aaaagtgttccatgtacctcttccttctcaaagtcattgccccgactttgagtaatcactttcttgaatatctttgtagttttatcacccaagtgtatatmtctacatactataccttagttttgcccttttcaatctattcaatttgccttatctattaatctgcagttaatacctacatctgtttttcttggcttgatc

SEQ ID NO: 393653 - DNA, 201 bp, Homo sapiens
catccttgttcacatctatctgtctgccttactggactgtgaagtgaaatgtctgcttcatctttttttttttttttttgagatggagtttcgctctgtcrcccaggctggagtgcagtggtgcgatctcggctcactgcaacctccgcctcctgggttcaggtgattctcctgcctcagcctcctgagtagctgagatta

SEQ ID NO: 393654 - DNA, 201 bp, Homo sapiens
agctaacaaaatagatcttgtccttttcatggacttttgggaagcaaggtgtgttgggccttattgagaggtagtatttaccacatagaagagtgaaatcrggctgggcacgatggcttgctgggcacggtggctcatgcctgtaatcccagcactttggtaggccaaggtgggcagatcacctgaggtcaggggttcgag

SEQ ID NO: 393655 - DNA, 201 bp, Homo sapiens; identical to SEQ ID NO: 86280

SEQ ID NO: 393656 - DNA, 201 bp, Homo sapiens; identical to SEQ ID NO: 86275

SEQ ID NO: 393657 - DNA, 201 bp, Homo sapiens
ctagctaatttgtatttttagtagagatggggtttctccatgttggtcaggctggtctcgaactcctgacctcaggtgatccgcccactttggcctcccaragtgctgggattacgggtgtgagcccctgcgcctggccatatgccactttgtaaaagtaagtctttgacaatattcttgtgtttcagagaaaaaaaaatt

SEQ ID NO: 393658 - DNA, 201 bp, Homo sapiens
ggagtgcagtggcacgatctcagctcactgcaacctctgcctcccaggttcaagtgattctcctgcctcagcctcccaagtagctggccttaaaggtgccygccaccacacccagctaatttttttatttttagtagagatggggtttcaccatgttggccagctgctctcaaactcctgacctcaggtgattggcctctc

SEQ ID NO: 393659 - DNA, 201 bp, Homo sapiens
gctatagtgcagtggcatgatctcggctcactgcaagctccgcctcccgggttcacaccattctcctgcctcagcctccagagtagctgggactacaggcraccgccatcacgccctgctaatttttctatttttagtagagacggggtttcaccgtgttagccaggatggtctcaaactcctgaccttgtgatctgcccg

SEQ ID NO: 393660 - DNA, 201 bp, Homo sapiens
ttagtagagagagggtttcactatgttggccaggctggttttgaattcctgacctcaggtgatccacctgccttggcctcccagagtgctaggattacagrtatcagccactacctggccaccttttttgttttctgtgttatcttcatagttgtctttctttggttgttaagtttaatccttgaattactttgagttcat

SEQ ID NO: 393661 - DNA, 201 bp, Homo sapiens
tagtgcagtggcatgatctcggctcactgcaagctccgcctcccgggttcacaccattctcctgcctcagcctccagagtagctgggactacaggcaacckccatcacgccctgctaatttttctatttttagtagagacggggtttcaccgtgttagccaggatggtctcaaactcctgaccttgtgatctgcccgccta

SEQ ID NO: 393662 - DNA, 201 bp, Homo sapiens
aagcaggacatgtcccctgccccgtaagaagctcttattcatgtgaagagaaagaacattcagaacagctcgtgaggcatctgttcaagcctcccagggaytcactgggtaggatgtacaggagagctgtgtcaactttgtgactccaaggagtggggccagtactggtgagaacttgggagtggaggattcagagggaca

SEQ ID NO: 393663 - DNA, 201 bp, Homo sapiens
ggagtctctctctgtcacccaggctggagtgtagtggcgctatcttggctcactgcaacctccgcctcccgggttcaagtgatcctcccacttcaacctcycaagtagctgggactacaggtgtgcaccaccacgcccagctaatttttgtatttttaatagagacagggttttgccatgttggccaggctggtctggaac

SEQ ID NO: 393664 - DNA, 201 bp, Homo sapiens
tttttttccttaagacagggtcttactctcgcccaggctggagtgtagtggtgcaatctcagctcactgcaacctctgcctcttgagtttaagtgattctyccacctcagcctccccagtagctgggacttacaggcatgtgcgaccatgcctggctaatttttgtattttttgttagagacagggtttcaccatgttggc

SEQ ID NO: 393665 - DNA, 201 bp, Homo sapiens
cagctggtgcttgaggactgtggaatgtgatgacaggcacagcgtgtgtttttttttttgagatggagtctcgctctgttgccatgctggagtgcagtggygcgatctccattcactgcaacctctgcctcccgggttcgagcgattctgcctcagcctcctgtgtagctgggaccacaggtgcgcaccaagggtgtgctt

SEQ ID NO: 393666 - DNA, 201 bp, Homo sapiens
agacaggatttcaccatgttggccaggctggtcttgaactcctggcctcaagtgatccacctgccttggcttctctttcttttttttttttttcttgagayggagttttgctcttgttgcccaggctggagggcaatggcgcgatctcggctcgccacaacctccgcctcccaggttcaagcaattctcccgcctcagcct

SEQ ID NO: 393667 - DNA, 201 bp, Homo sapiens
atttaatattataatatacatctctgcatattatacaaaagttatgaatttttgtattctcaggattttctgaagtaatgtttttcaaattgaaggatatraacattttaaaatctcttgctggttgggcacagtggcttatgcttgtaatcccagcactttgggaggtcaaggtgggtagattgcttgagaccagcttgg

SEQ ID NO: 393668 - DNA, 201 bp, Homo sapiens
ttggcttctctttcttttttttttttttcttgagacggagttttgctcttgttgcccaggctggagggcaatggcgcgatctcggctcgccacaacctccrcctcccaggttcaagcaattctcccgcctcagcctcccgagtagctgggattacaggcatgcaccaccaagcctggctaatttttttttgtatttttagt

SEQ ID NO: 393669 - DNA, 201 bp, Homo sapiens; identical to SEQ ID NO: 86277

SEQ ID NO: 393670 - DNA, 201 bp, Homo sapiens
agtgagctgagatcatgccactgcactccagcctgggcgacagagcaacactctgtctcaaaaaaagaaaaaaataatttaagtcttctaagacagatatstagctgtttctctcagggctgtttataaatagcaagagtgtaaaacagtgtaaatgttcaacaatggaacaaaagttaaaaacattctaataggtaatcc

SEQ ID NO: 393671 - DNA, 201 bp, Homo sapiens
gagctctggggtctgtaggcctgggagatggtggggcctgctgagtggggtgggaggacagctcacaagtcctgccctgctcttgcctcggccaggtgagygaaatgcagaagctggatgcacaggtcaaggagctggtgctgaagtcggcggtggaggctgagcgcctggtggctggcaagctcaagaaagacacgtaca

SEQ ID NO: 393672 - DNA, 201 bp, Homo sapiens
accactgggctgctgaggggcttagccatggggacctgggctctcagctgccctggaaagccacagggctagctgggctggccaaggccggtggctccccmagcatcctgtggtgggtgcatccctgggcccagtggggcatccggtgctgccctccccacctacgggcttacatcctttggttgctgggacagagcgccc

SEQ ID NO: 393673 - DNA, 201 bp, Homo sapiens
agggcttcgagttatggggccctaggctcctgctagaaggttcccactcttccacggggtggcaggcgccctggctcagcggaggcctctgcattctcacrggacagccagtgcactctgcctcacgggcagagccctgcagcagctccacatgtggcccagcacccatatcactttatcacaaatgtgagcaccaggttg

SEQ ID NO: 393674 - DNA, 201 bp, Homo sapiens
tcactttatcacaaatgtgagcaccaggttgacatgaccatcagaagggaacttttccaggcaaaatgcctgagtgccccagccaagcctttgacacacayaaagctgcaaccaagctttgcgcctcactggcctttttgggaataaaatctaatttaaaattaagagaacatgatcaagtaccttgtaaaaaactggctt

SEQ ID NO: 393675 - DNA, 201 bp, Homo sapiens
ttctgactaatgaaacccaaatcccagtgaaggatattactattgcccagaaagttccttgtgccaatctctaacacactagaggcaaccactgttagaattttttttttttttgcaatagattaggttttcctgctctagaatttcatgtaaatggcatcatacaacatgacttgtttctttcacttagcttttgagctc

SEQ ID NO: 393676 - DNA, 201 bp, Homo sapiens
ggtatcgccattttgcccaggctggtcttgaactcctgggctcaagcaatccacctgcctcggcctcccaaagtgctgggattgcaggcttgagccaccgygcccagtcccggttttattcaggggtttctatcttaagtgctataccttgctgagctttcctgtatctacagtctctgaactttcaaggcaaatagttta

SEQ ID NO: 393677 - DNA, 201 bp, Homo sapiens
cctcttttttgtgccacttgtcactcacatggggtgagtacaaaaaaaaatggctttggagattggggtttgcatcctggtgctgctgcttgcggttttaycttgggtgtgttggtaacttttgagtttgtttcttaatctataaaatacaaactagatgatcaaggtcataggctagttggggagattcgatgaggtcta

SEQ ID NO: 393678 - DNA, 201 bp, Homo sapiens
ctttggagattggggtttgcatcctggtgctgctgcttgcggttttaccttgggtgtgttggtaacttttgagtttgtttcttaatctataaaatacaaaytagatgatcaaggtcataggctagttggggagattcgatgaggtctatgcagcactctgtagtaggtgtaggaatagtagccatatcatatactttccct

SEQ ID NO: 393679 - DNA, 201 bp, Homo sapiens
gggggaagccaacccggagacacagacggaagtgggtgaccggagctctagcagcagccgcgatgggcgcagccgtgagcctatggagagcggaggtgttyccgcttccaccaatggaaagccggtctaggcgggcctttgcaaattgccctagtaacggccgcatggtaactcaggcgccgggcgcactgtcctagctgc

SEQ ID NO: 393680 - DNA, 201 bp, Homo sapiens
aatcgggcacctgagatttgctgagtgcccaaggtcacactgaaaattagtggcagaaccagcactaatctttctgttcctggctagtgcattttatactstgctatacactgattctctaccagattttactacctcaaaactatcaccaaaagggcatagaaaagaaaatctgagaggaaccttgactgttaattttaa

SEQ ID NO: 393681 - DNA, 201 bp, Homo sapiens
tccaattacaggaaaacaatagcagttcaggtctcttactcagaagcaagtttaagagatggaatacttttaaaggtaagacagcttaagaagataggccrtttccgagatgcagaagttacctataaatatcatacaaactttctataagagagcaatgaggtttcagagctagagtactttttgcttctcttgaactaa

SEQ ID NO: 393682 - DNA, 201 bp, Homo sapiens
gacctgcttctcccaatttaccttggatttcctaaatttatacaaagtactcaaggaagcatcaaatgtgatcttgcccactcttctctatggctccctayctcaagctccactctcctttgtaacctgttaggcacatgcagccttcacttgtttggggaccagttttccatctcattaatgagataatatggtctctgg

SEQ ID NO: 393683 - DNA, 201 bp, Homo sapiens
cctagtttccctcagatctgcttatagaaatagcttatttcttttaactgttacataaaagtccagttattaagccatttctgttttttgaacatttagawttattctcagcttttactcttaaaaacaaggctactaggaatatccttttatgtgtctttgtgcacatgtgcgagtatgtttctaggatttgcctgctga

SEQ ID NO: 393684 - DNA, 201 bp, Homo sapiens
acaagatttccacggcacttggtggatgtagcacagcatgccaatgtttgatacacatctaccaggagccaggcatcatgtaatttcatgttgcttctcaytgcatcctggtaaccaagattcagtggtgcaggaatctgcccaaagccacgtatgtatgactaacaggaacagccaggatttgaacgcaggtgctaagct

SEQ ID NO: 393685 - DNA, 201 bp, Homo sapiens
taacttgctagggacccagttagtaagtggcagaagtagtttgatccgacatctttctcatttctagagccgttgctgtgaagattggctgtgagaagaamatggcttctctttcgaatttttgctttttgctagctaggacttctggggcagttttttggccccatttctgctggcacagcactgggcaagtcctagttt

SEQ ID NO: 393686 - DNA, 201 bp, Homo sapiens
tctatagatttgctttttctggaaattttgtataaatagcaccatataatctggtcttttgtgactggcttctttcacttagcatgatgctgtagcatgcrtagtacttatttctttttccagctgaatagtattctattatatggaatatttaatagtgtatcttatttaaccattcattagttgatggacattgggttg

SEQ ID NO: 393687 - DNA, 201 bp, Homo sapiens
ttttcccttcagagctgggagaggatttggctttgcagggaagataagggcctttcaggcagaggacaccgtgtggcttcttgggattcgtgaggggactggccagatacttgaaactcaccagagttcccaatttgagcttgcttattcttcaaaagggccgcttgatgtgggcaagtaggagcttggggttgtgtgtga

SEQ ID NO: 393688 - DNA, 201 bp, Homo sapiens
tggaatttaaggaggcagcactgtgggctggtacagctggaagggttgagacttgacattttcccttcagagctgggagaggatttggctttgcagggaarataagggcctttcaggcagaggacaccgtgtggcttcttgggattcgtgaggggactggccagatacttgaaactcaccagagttcccaatttgagcttg

SEQ ID NO: 393689 - DNA, 201 bp, Homo sapiens
cttcctggtctttttcgctatactttggtcactgcaacctttctgtcccttggatatgccaagcttgtttctgctttggattttctgaattcgctgttttstttgcctggaacgctgactcctgctcctcccagaggttcacatatcaaattaaatgtcatcagaaagacactccaggatcactttctagccactcgttct

SEQ ID NO: 393690 - DNA, 201 bp, Homo sapiens
tgcaaaggttaaaacaaaagttacatggacacttggggacaatcctataccattcccacttctctggcagtcggctgaataaaatttcactttcacagttytttttgccagtgccaggataaaaagcaaaattttaaattggaaaatgtctagcactttacacagtggaatgaaagaatacgaaattcaaaaacattatta

SEQ ID NO: 393691 - DNA, 201 bp, Homo sapiens
gtcacagatgatttcatgtgtattgtttcttatcccagccaagcctctggccctgagctagccagcttcctccatggcttcactccagcagtgggctcacrcctgggattttctgggtgttaatggcaggagggcaggagtgttctatgagccctttacaggatttcagaaagcctaacaaagctctttctttccccctgc

SEQ ID NO: 393692 - DNA, 201 bp, Homo sapiens
agtgggctcacgcctgggattttctgggtgttaatggcaggagggcaggagtgttctatgagccctttacaggatttcagaaagcctaacaaagctctttstttccccctgcttagcaaaagccacagtgttttagctttgagctggtactgttgtctgcttctcatacagatggatacttatgccttggctagtaaagtg

SEQ ID NO: 393693 - DNA, 201 bp, Homo sapiens
gcaggcgggactatggggctcctcctgaggcctggtgccttccagccccctgcccaccagcttgggtacagctgcctgcctgccagaggccaagcattccyaagcgtgggctgggggaggccctgcccctctgtagcagcagagcagacagggcagtgggagaaccatgtgggtaggagggcatcaggtctcaagagcctc

SEQ ID NO: 393694 - DNA, 201 bp, Homo sapiens
ccttgcagggcccagccgatggttacaggctgcaggcgggactatggggctcctcctgaggcctggtgccttccagccccctgcccaccagcttgggtacmgctgcctgcctgccagaggccaagcattcctaagcgtgggctgggggaggccctgcccctctgtagcagcagagcagacagggcagtgggagaaccatgt

SEQ ID NO: 393695 - DNA, 201 bp, Homo sapiens
gacctggggccaccactcaccggttgagttcatggaccatggaggtctctcggtggcctctcatcaccatctgctgctccttcagctgctttgcaacctgyagggtgcccacaggggagaagttggaattggaggctgaaggggaaataggcattccaagtggtactgaacagttacagatcgcctcttcgagcactgaca

SEQ ID NO: 393696 - DNA, 201 bp, Homo sapiens
ccaactatagccctcggcaactactaatctactttcggttgccttcttttggacatttcatataaatggaacatacagtgtatgtctttttttgtatctgrcttctttcaccaagtcctgggttttcactttttaattttgtttgggcaaagcccaagttttttttccaccatagctacattgtataacatagatctccat

SEQ ID NO: 393697 - DNA, 201 bp, Homo sapiens
ttagaagagcacctgaaggagggagtttgtgaaactgatcatataataagaggcttcattggaggacccttggaagcatctagctcagtggctggcacacygtgcatgccctgaagtctgcgtgagctgaatctgggttaggctgagttgggagacgacagggatgtatgagcgtgggctttatccaaagggccacagtcc

SEQ ID NO: 393698 - DNA, 201 bp, Homo sapiens
tggccctttatgtataataaagtttgccttccctttatcttcattctttaaccttctcgcgattaaaacagatagtctgttagaaaaaatactaaaacctkttcagagggggaggacagggtgagaaaccaaaacaactttagtcactttcaaattgaaatgtgcagtgtatttaatcttccttttatctctttggtattt

SEQ ID NO: 393699 - DNA, 201 bp, Homo sapiens
gtaaagtgcaggaaaggatgttatcactatatgacatttctaggaaatagtgaatagtcactattagggaatagtttgttttctgacttgaaatttgatcygtgggtgttttgttccttggagctttggtcaagagattactgaagactcatcttggaccaacaggtccccttggttggtgaaatggccatccccaaactg

SEQ ID NO: 393700 - DNA, 201 bp, Homo sapiens
ttgtagacacagttcctggcacatagtgggtgctcaggaaagttcttctgagtgagtgagagaagtgggtagactttgaagcagttagaaaacagaagccttttttttttttttttgagagagagtctctgtcgccaggctggagtgcagtggcgtgatctcagctcactgcaacctcagcctcctgggttcaagcgattc

SEQ ID NO: 393701 - DNA, 201 bp, Homo sapiens
ctaccaaaaatacaaaaaaattagccgggcgtggtggcgggcgcctgtagtcccagctactcgggaggctggaggctgaggcaggagaatggagtgaaccsgggaggcagaggttgcagtgagtcgagatcgcgccactgcactccagcctgggcaacagagcgagactctatctcaaaaaaaaaaaaaaaaaaagttgca

SEQ ID NO: 393702 - DNA, 201 bp, Homo sapiens
gaacaaggggttggaaaaagatagggctggaaaaggaggctgggcaggccccacggagcttatacttgccatgaaaggattttgtttgattcttacaggtyaggggaacctctaaaaattcctctgtgtttagaagctcctcaggctttgaggaggggtctccatacctcaggatcccatgttgagttgatgagtgggatg

SEQ ID NO: 393703 - DNA, 201 bp, Homo sapiens
cctataaatatcatacaaactttctataagagagcaatgaggtttcagagctagagtactttttgcttctcttgaactaagaacttaaaaatgtatcttayctgtcgataggcccaacccagaggaacatgatttcacttacgttagaactgccttaattttgtttcgttaatggcaggtcccatgactcaatgaacatgc

SEQ ID NO: 393704 - DNA, 201 bp, Homo sapiens
ggtggcgggcgcctgtagtcccagctactcgggaggctggaggctgaggcaggagaatggagtgaaccggggaggcagaggttgcagtgagtcgagatcgygccactgcactccagcctgggcaacagagcgagactctatctcaaaaaaaaaaaaaaaaaaagttgcatttctaatagtgcctctaatttacattgatat

SEQ ID NO: 393705 - DNA, 201 bp, Homo sapiens
gagaccagcctggggaacatggtgaaactgtgtctctacaaaaaatacaaaaattagctgggtgtggtgacgtgtgcctgtagtcccagctactcggaagsctggggtgggaggatcacctgagtaagtcgaggctgcagtgagctgaaatcacaccactgcacttcaacacaggcaacagtgagaccctgtctcaaaaac

SEQ ID NO: 393706 - DNA, 201 bp, Homo sapiens
taaggaaactggaatcataacttgtccctcatcgtaaagacaggataagaacccagctccttctgataacaaaaccagcattttctttctttttttttttkgggacagagtctcactgtgtcgcccaggctggagtgcagtggcgcgatctcggctcactgcaagctccacctcccgggttcacaccattctcctgcctca

SEQ ID NO: 393707 - DNA, 201 bp, Homo sapiens
gagtttctcactgaaagtcactttgttgcaccaaaacatcaagacttaagaaacagtatggactctgctcagtgtaaccctgtggcagatagtgttccaamaaaaaaaaaaaccaactttatggagacataattcatataaaatacagtttttttttgtgatttctagtgtattcacagagttgtgcaaccatcaccacgg

SEQ ID NO: 393708 - DNA, 201 bp, Homo sapiens
cacctgaggtgaggcaaatgaaggagtgaagtagggatgatgatttcaagaggggtgatagggcctgtggtcctgtggacagtgggggctgggcccacccrtctcacggcagccaggaccatccttataaaagcgctgctgccagtttacagcctttggaatcaagggaaagaggagagtacgtgtcccctgtgtccctct

SEQ ID NO: 393709 - DNA, 201 bp, Homo sapiens
attagtatacactatatattatactatagggcataattagtatatactatatattatactatagagtataattagtatatactataatatagtatatactrtatattatactatataatttgtttatatatgaatgtttggcaaatatctagatgattatttttgagtatgattttagttatttttttcctccttcccagt

SEQ ID NO: 393710 - DNA, 201 bp, Homo sapiens
tgccaggccaactctgggctggggctgtcttggctctgtcaggagggcctctcctcaggctttctctcaggactcgtggctttgttcccgctggcccaggygataacctcagcatttttactggagcctggggctaggtttttaaacaaactcaatgtaacttgtgtactctgcaatccaagccgacaccctcataaacta

SEQ ID NO: 393711 - DNA, 201 bp, Homo sapiens
gcctccccagcacagccagggccctcgctggggtcattctggacaataaaggcaggtcccttcctagggcatgggactctatccatccgctcttcctggcrcgatgggtgccagggcacttgagtttcaaatgcagaggatctatctgatggtttttaacaagctagagtaagggtgaagtccccatgtcctgcagcagat

SEQ ID NO: 393712 - DNA, 201 bp, Homo sapiens
aattatctagagttcagtacttgattatggttttttaagtttttttttttttttttttttttttttgagacggagtttcgctcctgttgcccaggctggartgcaatggcgccatctcagcttactgcaaccaccgcctcccgggttcaagtgattctcctgcctcagcctcccaagtagctgggattataagcgcatgcc

SEQ ID NO: 393713 - DNA, 201 bp, Homo sapiens
taattttgtgtttttagtagagatggggtttctccatgttggtcaggctggtcttgaactcctgacctcaggtgatccacctgctttggcctcccacagtrccagaattacaggcatgagccactgtgcccggctgcttatggttatttttaaacgttaaaaatacagtgaaatgtacaaatcctaagtggagcactccat

SEQ ID NO: 393714 - DNA, 201 bp, Homo sapiens
tctccatgttggtcaggctggtcttgaactcctgacctcaggtgatccacctgctttggcctcccacagtgccagaattacaggcatgagccactgtgccyggctgcttatggttatttttaaacgttaaaaatacagtgaaatgtacaaatcctaagtggagcactccatgagttctgactaatgaaacccaaatcccag

SEQ ID NO: 393715 - DNA, 201 bp, Homo sapiens
tgggccaggagaacgcgcgagaggtgtggccagtggaccagggagttgggggctgcaagcagggctgctgcggcgagagagctgctgaagtcggtggctcsgggcgggatgcgcgcgccaggggtctcccgccattatttcctcagggaagtgaaaatgggccaggggctcggggaggggcgccgccctggagctgggtga

SEQ ID NO: 393716 - DNA, 201 bp, Homo sapiens
acttctagacacgttctaagggagcagccacaagcctgccactcccacccacacaacactgggtccttctggcttggctacaggtcgggtctgaggccagyctcacaaccaagttaagacttctccaatcaccagctgggtactggagctgaggctcaaagggcttcgagttatggggccctaggctcctgctagaaggtt

SEQ ID NO: 393717 - DNA, 201 bp, Homo sapiens
tgcccaaagccacgtatgtatgactaacaggaacagccaggatttgaacgcaggtgctaagctccaagttcaggcctttttcagaaagctgccccttgcaygaccaagtgctttggtttaggaatttcatttttagaaacttattcactgagagcagctgccaaaatatacaaagatgaacatatgaggacagtcatggtt

SEQ ID NO: 393718 - DNA, 201 bp, Homo sapiens
gttggaaaaagatagggctggaaaaggaggctgggcaggccccacggagcttatacttgccatgaaaggattttgtttgattcttacaggttaggggaacytctaaaaattcctctgtgtttagaagctcctcaggctttgaggaggggtctccatacctcaggatcccatgttgagttgatgagtgggatgcagggggat

SEQ ID NO: 393719 - DNA, 201 bp, Homo sapiens
tttccctctttttctaaactgttgaaatagcaaaatatttcagaatgagaatactcggtagtgctatgatcctgtgagattagataactcatgtgtagctstataaattaggatagttattcattcaagtagctattcagggttctgtcaagcactacaacagttgctaaggaaatgcttatggctgtatgcatcaaatta

SEQ ID NO: 393720 - DNA, 201 bp, Homo sapiens
gctgtaatttattcagccccctccgatgggcatttagatgtttctagccttattgagctgtgctttgaaggatgaacaggagcttgtcaggcagacagcaragggaacaaggcccacaggtttgacagacactgcagaacccttactgctggggcatgagcttttaagaggagaggcaccttctgttccatttccccatga

SEQ ID NO: 393721 - DNA, 201 bp, Homo sapiens
ctccagaaccaggcattggtaggtgctgaagctcaggttggggcttttgctgactctcggacagtgccacatgcccatcccctggccctcatcaggaatcygttgctcttccccaggccatggggctcagacccctcagaaatgagatgggaggctcatcccagccttcctgaggacttcatgctggcctggcttcagcag

SEQ ID NO: 393722 - DNA, 201 bp, Homo sapiens
cacgtgctgtgctcctgtccagggcctccctgagccctgaggccagcaggtgcagagggagcgcggggcagacctggctgcacatgtgtcctagcagtctsaaaacacagtgctgaggtgtggcttctgcaaggccaggcccacacctgtccatcaggtggtctcagaggaaccatcctgctctgacccaactccccttgg

SEQ ID NO: 393723 - DNA, 201 bp, Homo sapiens
ttcttcctcatagcttagagcttgactctagcctaagtttctggcggcatttaggcagccatatagcacactgtgtgctatctgccccactgcagtcacartttctggcccctatgaggccccagaaatagggatttgtgtcgcccagctctgctggagcacaggctctggagccttggggctgtcagccccctccctagt

SEQ ID NO: 393724 - DNA, 201 bp, Homo sapiens
atgtggcccagcacccatatcactttatcacaaatgtgagcaccaggttgacatgaccatcagaagggaacttttccaggcaaaatgcctgagtgccccarccaagcctttgacacacataaagctgcaaccaagctttgcgcctcactggcctttttgggaataaaatctaatttaaaattaagagaacatgatcaagta

SEQ ID NO: 393725 - DNA, 201 bp, Homo sapiens
gcctaagtttctggcggcatttaggcagccatatagcacactgtgtgctatctgccccactgcagtcacaatttctggcccctatgaggccccagaaatakggatttgtgtcgcccagctctgctggagcacaggctctggagccttggggctgtcagccccctccctagtagagcacagggcagctccacagaccagctc

SEQ ID NO: 393726 - DNA, 201 bp, Homo sapiens
aaaatgcctgagtgccccagccaagcctttgacacacataaagctgcaaccaagctttgcgcctcactggcctttttgggaataaaatctaatttaaaatyaagagaacatgatcaagtaccttgtaaaaaactggctttatttgtcacttattcaccttatctcagttatgccattttggcgtccacagtgacagtcccc

SEQ ID NO: 393727 - DNA, 201 bp, Homo sapiens
ttcacacggttttcggtgtgcatcctctttggacaatccccgcctcttgcctttggtggaagacgctgcctcagatcttccagttttctatttgtgagctrctccctcctgatgataacacaggagctggtttggaaaatgagcactgagaccttagctgggttatgtaacttttgagagactcatccctctaggagctct

SEQ ID NO: 393728 - DNA, 201 bp, Homo sapiens
cgaaacctcgagctcctcaggatcttagcacccaactctgctgcccttgctgctgggcagtgcctgtcctaagaggggactccctaaaggccagagagagrgtgctcatctccaggacctaggccacctgtcagcacaaacagaacttattccagacataaacatgagtcttcttatttcaaacactggagcaactgatca

SEQ ID NO: 393729 - DNA, 201 bp, Homo sapiens
aagtgataaggcatggtagggagtgtgacagcagtgagcgtgtgctgtgaagggattcccatgcagaacacctgtgcaacctttttacatttaaccaaacycatcttttgggggaggctgccaattttgtgaccttttaggtgtgattatcactgtgttcagatgacgacactgaaacctggagtggggacacaccctgtc

SEQ ID NO: 393730 - DNA, 201 bp, Homo sapiens
ggtgtgattatcactgtgttcagatgacgacactgaaacctggagtggggacacaccctgtctgggatcacatagctagtaggaaaactaggctcctagcrtgggtttggattgaattcaggtggaggagaaaaggcgatagtctcccccagccctgtgctgaccttgcctgcccatccttgcatctcctagacaaacttc

SEQ ID NO: 393731 - DNA, 201 bp, Homo sapiens
gtgctcatctccaggacctaggccacctgtcagcacaaacagaacttattccagacataaacatgagtcttcttatttcaaacactggagcaactgatcamcaccaccacagcccatgcaccccgaacctgacttcactaccaaccttgagcctgtgctgtcctctctctgctgacgacactggtgacgcagaaaggaagt

SEQ ID NO: 393732 - DNA, 201 bp, Homo sapiens
gtcttggctgttcgcttttctgctgttccccctttgataagctttaggaaaaggatagtgaaaaaatcaacatgatgatagccattagggaggctaccagytctataaaaaggaagcaataaaatatgatttagtgatagccttttggtgaccaggccagaatatgcctgtggccttttctactcagaggacaaggccagg

SEQ ID NO: 393733 - DNA, 201 bp, Homo sapiens
gtttttgagggaaaatgtgccaagtggcttgcctctggcctcatttccctagtcaccaaaggcagcagctgtcctgtcactcatgaggagggtctcccacstgatcttttgggtgtgatactacaatttggtcgttcaattggagtgtacaaaggtgagatcagacagggctagcctttgatgacattatacacatgaacg

SEQ ID NO: 393734 - DNA, 201 bp, Homo sapiens
aatctggtttatccacccctccaagcatcctttttgaccattccaattaaatctcctttttctaagtgctggtgatgccaagtactttcacatacatattwttttttggcaggtgaaaatattgagttggggagagggcacttcacgtatatgcttgacactcgttttagtaacggtaaacctggggtttgcacccacgtg

SEQ ID NO: 393735 - DNA, 201 bp, Homo sapiens
ggtctgtccacctagcttggccaggctcagcttggcagagctgatgacccaagtggactaaacacggagctagcagaaacaggcagactctaagcccaacsagaagagtcagctagaagagccaataggtgcacagacaaatccacagatggccaggagtgtcttctgggaaagccatccctctcttttggaagaagttct

SEQ ID NO: 393736 - DNA, 201 bp, Homo sapiens
taacattttactgtgctgctttatcatatatcttttcatctgtccctctcccaatccacttttacatttcaaggtgaattgcaggcatcactacactttayccctacaccctttaacctgtgtgccattgactagtatgaactctgttcaagtgaggaaattctggttcatagaggtcaaataagtaggtccaaggttact

SEQ ID NO: 393737 - DNA, 201 bp, Homo sapiens
tgggtaagccccacaatgggggttctgtagtgctgtgagcactgcagtatagcaacagcccttccccctcaggcggtttctttcacttgcaattaggaatygaatgcgtgattcaagtccatgtggcagcatcttgtagctactctgaatccccgtccgtgatgctctctagacaagaccactgtcataagtgcttcctaa

SEQ ID NO: 393738 - DNA, 201 bp, Homo sapiens
tctgtccctctcccaatccacttttacatttcaaggtgaattgcaggcatcactacactttacccctacaccctttaacctgtgtgccattgactagtatraactctgttcaagtgaggaaattctggttcatagaggtcaaataagtaggtccaaggttactcatctggtaagtgcgagagccagtattttaactcaagt

SEQ ID NO: 393739 - DNA, 201 bp, Homo sapiens
gacagatggtgccccctgctggggagctctgctaataggcttccctccctccacagtagggaacccagcccagcccatacctgcagagcctggcatctctygtctcagaagtaaggtctctcagtcccatcccactcaggactaaggtgcacagaaaggtggccttgatctcagaacctgctcagtggagacaaagctctg

SEQ ID NO: 393740 - DNA, 201 bp, Homo sapiens
ctttgaggaggggtctccatacctcaggatcccatgttgagttgatgagtgggatgcagggggatgaggcttctgtagtcaccttagaaagcagcactgaytctaagtcttctcttatgcaggggggacaagatatcctgtccatgatgggccagctaatgaagccaaagaagacagaaatcacaggtaggagaaccagtg

SEQ ID NO: 393741 - DNA, 201 bp, Homo sapiens
ccatgatgagagctccccttccgaggcgcttctggagcagcttcctcaacctgtccgggagacgggctcagaagagcagggcccccatgctgccaacctcrctttgctccttaacgaagatctcaaagtactggtagatgattgtgactgcgagcaggatcccggttccagacccaatggcgcctaggaagtcagccagga

SEQ ID NO: 393742 - DNA, 201 bp, Homo sapiens
accacacccacctaatttttgtctttttagtagagatggggtttcgccatgttggtcaggctggtcttaaactccagacctcaggtgatccacctgcctcsgcctcccaaagtgctgggattacaggcgtgagccattgtgtcctgccaaaatcaggacgtttcgtacaaggatctgagttctgagcctgtcttgagaaaa

SEQ ID NO: 393743 - DNA, 201 bp, Homo sapiens
gaggttgtggagactccttgctagactgtagttactcaagtggaaggaagacactcagaacatggatttttaggcaggtcggctcaggtaacgcagattcrgttgtttgctttggaagagaattttggcactatgttctagtaggaaatttgttgtagtggtgataataatgtcaacatggtaatgaaaaaagtaatagcc

SEQ ID NO: 393744 - DNA, 201 bp, Homo sapiens
atccacagtgtcacagttattgtaagaggaaagtagtcacaaatgagtcagccatgttgcacatgtggtggtatatctataggatacttttccagaagtayatttgtcttgcttttatagatacgctgtattggattccaaggagatttgggtctgtggcttcatagctccaaactgtctatctggaggaagctcactaat

SEQ ID NO: 393745 - DNA, 201 bp, Homo sapiens
ggtttgattttaaaaaatcaaagttcactttaaaagtacaggattttcccagtttaccacaatgttctgatatattcgtgttgtttggagaatttttgtcyaagattaatgttcaggaactaagaatttggtaaagcacaaatgaaatgggtcctctcttttggggctattccaaaacttccatttataggctatcagata

SEQ ID NO: 393746 - DNA, 201 bp, Homo sapiens
ctaagaggggactccctaaaggccagagagagggtgctcatctccaggacctaggccacctgtcagcacaaacagaacttattccagacataaacatgagtcttcttatttcaaacactggagcaactgatcaccaccaccacagcccatgcaccccgaacctgacttcactaccaaccttgagcctgtgctgtcctctct

SEQ ID NO: 393747 - DNA, 201 bp, Homo sapiens
ttacccatcacattacccagagaggtgtttttactgtgctttctgtcagcagaaaagctttgtgttatccgtgtccctgtagttacaggattacataaagmagcatttatgtagtgattcttaaccaggggcaaatttgttccgctggggacatgtagcaatgtctggagacatttttacttaacatgactcagaagtgct

SEQ ID NO: 393748 - DNA, 201 bp, Homo sapiens
cagggcgctctcttcagcaccccaccggcatgagccagggtgagggtcccgctgccagtcacagctgttgctctcaggacccttactgcactgtctcctayccgcctggccacatgcttccatctccttacccagtggctccctctggaggaaaggggctgtaagtgtttatttttacgtctccagtgtccagcacttagc

SEQ ID NO: 393749 - DNA, 201 bp, Homo sapiens
aagaggggactccctaaaggccagagagagggtgctcatctccaggacctaggccacctgtcagcacaaacagaacttattccagacataaacatgagtcttcttatttcaaacactggagcaactgatcaccaccaccacagcccatgcaccccgaacctgacttcactaccaaccttgagcctgtgctgtcctctctct

SEQ ID NO: 393750 - DNA, 201 bp, Homo sapiens
tgggattacaggcatgaaccaccacgcccggccccagcattttctttctatcccagacctctgaaccacactggtgtctttccatcctcccgctccactcyttcccatccctttggcctgcctttgggaagggcagatgttgacccctggaagacaagtgttcatacggtgctcatcctgccaagattggcccaaagctgg

SEQ ID NO: 393751 - DNA, 201 bp, Homo sapiens
ttcagattctcatacccacagctgatctactgctggactccatctgtcagcccttaaagcttctgaactgccccctaaaggacgacgatctatctgcacaygtcacagaccattatttatgatgaggtgacaagtccacaccccttataccagtcacactttcatcacccttccagaaagttttgcttctacttacatctt

SEQ ID NO: 393752 - DNA, 201 bp, Homo sapiens
cgccattatttcctcagggaagtgaaaatgggccaggggctcggggaggggcgccgccctggagctgggtgaggggccgccccaggatacctagtgacgayccactgggggcagttgacggtttgccaactcatggacaagtgctgatataaacccacacaaccccgtccccttaattcgtaccaggctctattcgcgaca

SEQ ID NO: 393753 - DNA, 201 bp, Homo sapiens
gggatgatgatttcaagaggggtgatagggcctgtggtcctgtggacagtgggggctgggcccacccgtctcacggcagccaggaccatccttataaaagygctgctgccagtttacagcctttggaatcaagggaaagaggagagtacgtgtcccctgtgtccctctcatgctcgttacatagggatgcaggtatgctgg

SEQ ID NO: 393754 - DNA, 201 bp, Homo sapiens
cagtcctaagccagatattcccacgcctgattgtgaaggagacatgccagcaaggtcccacgtctccgggaaatacatgatctgctcccagcttcacaccytactgccaaaatgaaacgtagacatttcagtgtttgtgcttccaaccagagtgagaaattccctttgtggggaaacaggtgagacggctgcagccgcata

SEQ ID NO: 393755 - DNA, 201 bp, Homo sapiens
cagtatgttaaatggatttttggagcagggagatggaataggaccttgctctttccactccatgcatccacctggtattgcagtacctccaggaatagtgyaccccctttgggggaataaaaaaaaaggattgcaggtgagcccccatatccctgtcatctaggcactgcactgcccatccccctgtctgcctgccagtca

SEQ ID NO: 393756 - DNA, 201 bp, Homo sapiens
tcccgggtgtgctgtttgttgatgaggtccacatgctggacattgagtgcttcacctacctgcaccgcgccctggagtcttctatcgctcccatcgtcatytttgcatccaaccgaggcaactgtgtcatcaggtaggatggctgcctgccagccacaaggcttttttaacttccatctgggctcatttgttcctcaggat

SEQ ID NO: 393757 - DNA, 201 bp, Homo sapiens
cttttaaaataagggaaaacaatggtgtcttagagagaaacagtcctaagccagatattcccacgcctgattgtgaaggagacatgccagcaaggtcccaygtctccgggaaatacatgatctgctcccagcttcacaccctactgccaaaatgaaacgtagacatttcagtgtttgtgcttccaaccagagtgagaaatt

SEQ ID NO: 393758 - DNA, 201 bp, Homo sapiens
ctaccaagatcttcaaactgcaacaagcgtcagcctcttcttgatagattagatatctcccggtgatgttatgaggcctggtaaatctttaaaagtaactkttttgatttatttaaccatcatatttatcaagcaaataaaaaatgtcccttcttgcctgagtgcttgtaggcagtagtgcccatgctggagaggaaggtt

SEQ ID NO: 393759 - DNA, 201 bp, Homo sapiens
catttgacgtgaactttaatgactgggaacttctaggaaggagaatggcattcctggcagatggaatagactcaaaagcattgagtcataaaaaagcttgkgggtgtccagggcagggctggtagtcttgtgtggctaatcaaggaacaaggggttggaaaaagatagggctggaaaaggaggctgggcaggccccacgga

SEQ ID NO: 393760 - DNA, 201 bp, Homo sapiens
gcaagttatggcattgccgtgggctgctgctgtgccagtggaaacacaggtcaccatggggacaatttggaggatgaggaagaagaatgtgtgaagggggrggggatacgttttaaactgagtctgctaggaggagttgcctaagctaaaaagagtggttcaggaagcagaaccgttatatgcaaaagcatgtaatgaaca

SEQ ID NO: 393761 - DNA, 201 bp, Homo sapiens
taggcattccaagtggtactgaacagttacagatcgcctcttcgagcactgacaatattcatacagagaactttaaaactgccgcaaggaagtcatatgamaaagtctaactttacagtgtggattcagattctcatacccacagctgatctactgctggactccatctgtcagcccttaaagcttctgaactgcccccta

SEQ ID NO: 393762 - DNA, 201 bp, Homo sapiens
aacaatgattcttggataatgaacaaacgtttattaaagagctaatgtggatgatgtttagaattcagagagaaatttacctttatttgcaatattctaaygtaaggtgctttggaaattggttttgttgttatggccttagaaaaactgtagagcagctgggaatggtagctcacacctgtaatcccagcactttgggag

SEQ ID NO: 393763 - DNA, 201 bp, Homo sapiens
agggaggaaatcctgtgtgctggttctggggctcccagttccgagagcttgtgcccactccttacccaccactgcactcctgcacttggcacatccagaargggcccagaaaagctggtttaaaaatacactgaaggctaggcgtggtgacttacacctgtaatcccagcactttgggaggccgaggtgggagaattgctt

SEQ ID NO: 393764 - DNA, 201 bp, Homo sapiens
cttgcagggcccagccgatggttacaggctgcaggcgggactatggggctcctcctgaggcctggtgccttccagccccctgcccaccagcttgggtacasctgcctgcctgccagaggccaagcattcctaagcgtgggctgggggaggccctgcccctctgtagcagcagagcagacagggcagtgggagaaccatgtg

SEQ ID NO: 393765 - DNA, 201 bp, Homo sapiens
ctcgggaggctgaggcaggagaatcgcttgaacctgggaggcggaggttgcagtgagtcgagtcgagatcgcgccactgcactccagcctgggcaacagascaagactccgtctcaaaaaaaaaaaaaaaaaaaaaattcttaatgatctgactgcaaattctggcaaagcccctaaagagatagctttttattaagcaag

SEQ ID NO: 393766 - DNA, 201 bp, Homo sapiens
agcaagactccgtctcaaaaaaaaaaaaaaaaaaaaaattcttaatgatctgactgcaaattctggcaaagcccctaaagagatagctttttattaagcargaatgtggcttagtctcagcagaaggaatgggaaaagcatgtagctcgtataaatacctttcacaaacatcaaactgcctttcatctctgtcccttcttt

SEQ ID NO: 393767 - DNA, 201 bp, Homo sapiens
ctataagagagcaatgaggtttcagagctagagtactttttgcttctcttgaactaagaacttaaaaatgtatcttacctgtcgataggcccaacccagargaacatgatttcacttacgttagaactgccttaattttgtttcgttaatggcaggtcccatgactcaatgaacatgcttgtccagctcatctggaaacct

SEQ ID NO: 393768 - DNA, 201 bp, Homo sapiens
catatttatcaagcaaataaaaaatgtcccttcttgcctgagtgcttgtaggcagtagtgcccatgctggagaggaaggttagagcccttgcaggagcccmgggtaggttagaagaggccccagttctctgcctggggacaggggacgggaggacatggaggcaagagtgagccacttgggaagctgcatacctccttggg

SEQ ID NO: 393769 - DNA, 201 bp, Homo sapiens
cttgtaggattgagcccttaacctatgggatctgacaatgtcttgagatagtatcagaattgaattcaattataggacactcagtttgtgttttctggagwactgtttggtgtctgggggaaatcccacacacatctggtcacagaagtattctgtgttcagtgtgacagtagaaaaagcagtttgtgtgtatgtgtgtgt

SEQ ID NO: 393770 - DNA, 201 bp, Homo sapiens
agcagaggtggttgcacagtaataaataagtacaaccaagatgtatatatggtggttaaaaaaaaaataaaaccaccacccaaatttaaccctgtgtaaargccttgagtaaagggattcagcaagactgtggagaaacttgggagaagaaaaaagagctttggaagaggaagaactgagaaatctccagagaaacgtcca

SEQ ID NO: 393771 - DNA, 201 bp, Homo sapiens
ggaagggaaggtttgggttgtgcatcagattatctgattctcacagcctggcacagtctaccacctgcctgccctctaccatcttacctaagtaccattgmctaaactatttttgctatagttactcattgagcagacttatgaaatctccccacagcacaaaactgaaggtatccacctccagaggtgagattctcacca

SEQ ID NO: 393772 - DNA, 201 bp, Homo sapiens
ggttgtgcatcagattatctgattctcacagcctggcacagtctaccacctgcctgccctctaccatcttacctaagtaccattgcctaaactatttttgytatagttactcattgagcagacttatgaaatctccccacagcacaaaactgaaggtatccacctccagaggtgagattctcaccaagacaggctgtgggg

SEQ ID NO: 393773 - DNA, 201 bp, Homo sapiens
ctggatattttgctccttcccatttttttcctttaatgtttcaggaaaagactataatactgttgaagaatttagtttcttccttgagtttgccctcttcrtggatagatttaaaacacacccaaatgccaaaagccccacttgcttcttcaagtcttctcagcatcagattccatacatcactgcttcctctgcctttta

SEQ ID NO: 393774 - DNA, 201 bp, Homo sapiens
agattcctggagctgatcctaaggaagaagagccagagtaactagtgtaaatctgtgctactgttgcagattaacaacaacctgagacacgcggatgaaaygttctggaaccacgtatccatgtgcattttaaatggaggtggtatccggtcgcccattgatgaacgcaacaatggtatgctcccaggcccagctcctcag

SEQ ID NO: 393775 - DNA, 201 bp, Homo sapiens
acacgcggatgaaatgttctggaaccacgtatccatgtgcattttaaatggaggtggtatccggtcgcccattgatgaacgcaacaatggtatgctcccasgcccagctcctcagtgtgtcatgttctctctctgatctccttttctgttatggttcttgccctgaacacacccatgtgcagcctcagttcatctctgctg

SEQ ID NO: 393776 - DNA, 201 bp, Homo sapiens; identical to SEQ ID NO: 86293

SEQ ID NO: 393777 - DNA, 201 bp, Homo sapiens; identical to SEQ ID NO: 86299

SEQ ID NO: 393778 - DNA, 201 bp, Homo sapiens
gtctctatattattaccagacacatagtgtggtgtctatatatgttgttattaccagacactataatatagggttaagaaaaggaaagaaagaaagaaagrgaaagaaagaaagaaacttcagagagagccaaaatgtggaaagacttgggtttcaaaggatttcaataaagtaggtttggcggcagagatttaggaagag

SEQ ID NO: 393779 - DNA, 201 bp, Homo sapiens
ttgaaagggaaaccgcgtcgaagaagctgaataaattaacaggcaccatccccgcaaaaagggagacgtgataagaatggacaccagatctctttgacccyggagcttgagagtaattaagctcacagctttggggtagattctctgttcaattaccttctatgtgaccttgagcaagttatttactctttcttgcctcag

SEQ ID NO: 393780 - DNA, 201 bp, Homo sapiens
caccagtaatggaactacacgggcatgccaagatgaaaattagtctctctctctctctccaccccattcttttggccactgcattttaaacaggccatagygatagaaccagaaggtagctgtgtttcgattatttttgttttcttatttttaaacattgctttatagaagcctgttctataatgtaagaagtgaatagga

SEQ ID NO: 393781 - DNA, 201 bp, Homo sapiens
ctgttcacacatcagattgaccctatgttctctgtgacaccaggtgagctctggcaccagtgcccagcagatgattactgaatgattaataaaactactcmctccacctgctgcttttaaatgggctccattttggtatgatttggtgcgtgaaccattaaaacttttcagaagtcaggatttgaaacaaacttggtaaaa

SEQ ID NO: 393782 - DNA, 201 bp, Homo sapiens
tgggaaggaagcatcccacatggaggagagagactcagactccatgttgcttctgggaatctggtgggagggaggaagtccactgcgtgaagggaccaagktctaatggggaaggggagaaagattctgcttgtacttctgctgtgagcagctgagtagtagattgtgacagagaagccgcacattgaacctctgtcgtcc

SEQ ID NO: 393783 - DNA, 201 bp, Homo sapiens
tagaagttcctaaggaaatttcatggtcaaaaccaaaatgcacacaaatatggtaaacaaatatgttctcacagcaagtaagatagatgatgtttcattcsttttccagaatttagcccagtgtgagatttaattgtagggtaccttcttttctttcttctagatccaagcataaaagcagacattaacaaatggaggata

SEQ ID NO: 393784 - DNA, 201 bp, Homo sapiens
gaaagaaaaggctgcttcctggcacttctattaccatgtgacacgagaagggcaattgtccagacccacacttaggttcaccacagtccttggttcccagracagagtcctttgaggttccttcaagcacccacaccatgctggaaaatgcaggctttataaactccagatgtcagtccacaactccacagccccattggg

SEQ ID NO: 393785 - DNA, 201 bp, Homo sapiens
ccagccctttaccaggctgtaacagagaggggatcaaaagtgacactgctgtttccagcagctgctggaagagagggctgcattttgcagggcccagtgtkgggggaaagggatggggtggaatagaatgtttccaggagcactgcttcttccaagactacaggcccagcggcctggtgtgggttcttcctacagttcttt

SEQ ID NO: 393786 - DNA, 201 bp, Homo sapiens
attagttctaattatagttgagagatccctgggaacacagcagcaggtgaaaagcagctttatttcctcactagagctaaccagattcctggagctgatcytaaggaagaagagccagagtaactagtgtaaatctgtgctactgttgcagattaacaacaacctgagacacgcggatgaaatgttctggaaccacgtatc

SEQ ID NO: 393787 - DNA, 201 bp, Homo sapiens
attacaaaggactaccttactgttgattgataattaccttttctgtagttaaaataatgtatatgtttttctaggtgaccaagatatcaacgtggtttctrcatatatctccaaaatgaaagtaatttatccagcagttgaaggtcggatcaagttttccacaggaagtcactgccatggaagcttttctttaatatttct

SEQ ID NO: 393788 - DNA, 201 bp, Homo sapiens
gatagtgaaagctgggtccaggggggtcactgccttctggtcctgcggtgccaacaatgcactggatataccagcatttattattaagtttagtgagggcrggggtacgttagtgagggatttagggtcatttgattatgaggtgagatggtcacatggggatgaagtaattctttaacataacatttgtatgtagaagta

SEQ ID NO: 393789 - DNA, 201 bp, Homo sapiens
cagagctgaggcaactctacttcccccaattacccaatattgaacaacagacacattttacatctggagcatgaaaaagcaatcaaattctttgtacttaygatcactagcgttcttgtcttctgtgacactttacccctgcttatgaaattgcttcccttttataattacaaaggactaccttactgttgattgataatt

SEQ ID NO: 393790 - DNA, 201 bp, Homo sapiens
tagtcacttctgatgatgggcggaaggttcctgtagtccaggcctatgcttttggcaaatacctaggctatctgaagatcgagtttgatgaaagaggaaaygtcatctcttcccatggaaatcccattcttctaaacagcagcattcctgaaggtaagtgaagttcaggggaatgttccaccaatctaaaatttagatggc

SEQ ID NO: 393791 - DNA, 201 bp, Homo sapiens
ataatacatcccttggaattttaaatcttactgagaaccatttctgcacacacagtatccaatatacaaacacacatggaagaaaacctttccaaagctcktggattgcaccctcatattttctgttctgttatttgagtttttaaatgctggttaccacccattatattaattttattgtattgtagcttgctcatattt

SEQ ID NO: 393792 - DNA, 201 bp, Homo sapiens
tacaaatatataaaacaatatctgaagcctcctcacagtttgcaaccaagttcaagcaaaacaatatccacaaccttaaactaatacaacataaagtgaaygtaatgaggatattgatttgaatttttatttacttcttaggggttttgtatttaatgaataaatatgttttggttttactgactcttgagctttagtaaa

SEQ ID NO: 393793 - DNA, 201 bp, Homo sapiens
ggcagagagtgccaaggtcaggtttgcatttgagaaaagtttttctggcagcaatataaagaatagtttagcaaaagaaatgagaatagctggaaacccarttaggaggctgtggtagtccaggagcacactaaggcagcaacaataggtggatggaaactggagcatttaggtaagggagagggatgccagaggacgtga

SEQ ID NO: 393794 - DNA, 201 bp, Homo sapiens
gaatcgttggatacacttccaaagaaaccccttttctctcaaatccaggtattttctacttttatagcactcaatgcttgaaaatagatgccctaaatcayagcttggcattatatttatggactgtagataaaagtaggaacaactgggtaaatagtgcactagaataacactgataaaagcaatctggtaaattctatg

SEQ ID NO: 393795 - DNA, 201 bp, Homo sapiens
acttctctagatctcagattttctcatcagtaaaatgagtgcagtaagagtaccaccctcacagcatgaaatcagattttctgtactctttactaactcaytttccatgacgctggcatgtggcaagtgctgactcaatactggctcatttccttaactgcttttattttattcattcactgccattccagaggaaactgc

SEQ ID NO: 393796 - DNA, 201 bp, Homo sapiens
caatatgtctcatagagcttagtcagttttgagaaatactggactaatgttatgtttttaaagcacctaattctttttctcttttctgttttatctaggcrctgggaaatcatgaatttgataatggtgtggaaggactgatcgagccactcctcaaagaggccaaatttccaattctgagtgcaaacattaaagcaaagg

SEQ ID NO: 393797 - DNA, 201 bp, Homo sapiens
accattggactgtacagggctgtggcagacaggagcagtggaaagagatttggatgggacgtcagaacacccagattttacttcttggctcttccacttaytagctgtgtgaatttggcagtggtttccttatctataaaatgggggaattggagagggtggtctactgcatgttacttctcagcacctcagctcctcccc

SEQ ID NO: 393798 - DNA, 201 bp, Homo sapiens
tccctgccatggtagtactaactacttgcactgtggtagtgcaagggatacatttgctgtgcaagtagttaggaattttttttttttttttttttttttttagtgctttgtgtatgctaggctttatgcaaatatacagccaagcacagaggttaagaactttggaatcaaaccgaagtggttctagtcccagctccccct

SEQ ID NO: 393799 - DNA, 201 bp, Homo sapiens
aggacacaaaatcatgcaatatgtctcatagagcttagtcagttttgagaaatactggactaatgttatgtttttaaagcacctaattctttttctctttyctgttttatctaggcactgggaaatcatgaatttgataatggtgtggaaggactgatcgagccactcctcaaagaggccaaatttccaattctgagtgca

SEQ ID NO: 393800 - DNA, 201 bp, Homo sapiens
cgaccagtaccagggcactatctggttcaccgtgtacaagggcgccgaggtggcgcacttcatgaacgccctgcgctacgatgccatggtaagacccgagyccgcgcccgggatagtagtcccggactgagagaggagccgggctggaaaagcagcggatggcagagtgtggcaagcctaggtccagggcgcggagagatg

SEQ ID NO: 393801 - DNA, 201 bp, Homo sapiens
gggggctggtcgccagaaagactaatttatgactagagggttagaactttcagccctacctctcccacttctagagggtagatgggctacagattgagttyggtctccaacagccagtgaattaatcaatcatgccttcacgataaaccttcatgaagacccctaaacaaccagattcagagagcttccaagttggtgaac

SEQ ID NO: 393802 - DNA, 201 bp, Homo sapiens
tttctggagaactgtttggtgtctgggggaaatcccacacacatctggtcacagaagtattctgtgttcagtgtgacagtagaaaaagcagtttgtgtgtrtgtgtgtgtttgtgcttttgtatgctaatgagatgatctatggctgggggcccttagatagcttcgggaagggggctggtcgccagaaagactaatttat

SEQ ID NO: 393803 - DNA, 201 bp, Homo sapiens
gagcccaggagtttgaggctgcagtgagctatgattacgccactgcactccagccagtgtgacagagagagaccttgtctcaaaaaaaaaaaaaaaaaagkattttgctttcctggtctgtttgaatgtggtaagcacaagaacttatttgtactggtggtcacccacttgggtcctttcagtaaacttctggccatggcc

SEQ ID NO: 393804 - DNA, 201 bp, Homo sapiens
tggagaactttattgctgatgaaaatggctctcagtgggatggggagctggaaaggggatggagtgggaaggtgtctccccctggagttaggccatccccrgctgaactcttctccgaggtcctaccgtcaagccatccctctgaagtcaagctgcttttcaccagtgtcaagcttcttctcttctctccttctctgccat

SEQ ID NO: 393805 - DNA, 201 bp, Homo sapiens
aagataagagctaaaatgcaaacgctttctctaaagaagttaaatcctagagtcacgaactggtccatgttgcttcctttagagaaaaaagtagtaaaatsagtgcaggttgaaacctgcagcaggtacaacaggggactctattctctgtgctgtccttgaagggactccaaagatgctgtttctctgtttgcctcccag

SEQ ID NO: 393806 - DNA, 201 bp, Homo sapiens
cctttcccacttcccccaccttgcactgcatagatctttgaagtattcccaaggaaaggaagaagaggctggtaaacagttcttctatcagcattcgcaargaaggctttggcgtgggaacagccctccccttgaagaggctcctgcttctaccatccttatgtgggctgtcaaagaccatgctattttgataaaagcgaa

SEQ ID NO: 393807 - DNA, 201 bp, Homo sapiens
atgttttggttttactgactcttgagctttagtaaattaaggtgtttaacctttgcatgttaatatgtatattaagtaatataataaaaattgttaataartatccattttatttattttgttccttagggacaaatttagtgtttgaagatgaaatcactgcattacaacctgaagtagataagttaaaaactctaaatg

SEQ ID NO: 393808 - DNA, 201 bp, Homo sapiens
tctgcattggtattgtggaagttgagatgtacaaatatataaaacaatatctgaagcctcctcacagtttgcaaccaagttcaagcaaaacaatatccacmaccttaaactaatacaacataaagtgaatgtaatgaggatattgatttgaatttttatttacttcttaggggttttgtatttaatgaataaatatgtttt

SEQ ID NO: 393809 - DNA, 201 bp, Homo sapiens
ctctggcaccagtgcccagcagatgattactgaatgattaataaaactactcactccacctgctgcttttaaatgggctccattttggtatgatttggtgygtgaaccattaaaacttttcagaagtcaggatttgaaacaaacttggtaaaaagtagttaagcaatgtcttcgttgtaaagtgagaaaccaagttgcttg

SEQ ID NO: 393810 - DNA, 201 bp, Homo sapiens
aaaggctcacatagaaggcaacatagcactgagggtcaacggggagccctgggcttcttggggcaaccaacaggaagcagattgtccttgatgttctcatratagacaacagtggcaaaactacaactcttgatttttcaacattgcctatgagttacagacagccttgcctgtccaacacatctgtgagctgctaattat

SEQ ID NO: 393811 - DNA, 201 bp, Homo sapiens
tcagtggggcctctgcatggattccctccactcccccccagcccccaactcactacggggagctgcaaaatgacagacaatgggtggttttgtacccagcrgccactcctcaaccagtgaggaatgggagagagataagaaggtgggaaacaaggattgcttgtcaccatccctgctcctcctgaagccctgcgctgggag

SEQ ID NO: 393812 - DNA, 201 bp, Homo sapiens
gagaaaagtcagggctggagattttcggtttacagttgaaggtatgagtaggaatgagatcatttactcagtccatcccaccacattgagcaccatgaatmaggggctcctctccccatggggcaagagaggtgaaaagacagtcaaagtcactactttcaggaggattaggctcaagttaggatggggaggtggagaagg

SEQ ID NO: 393813 - DNA, 201 bp, Homo sapiens
acctctgctgtctcactattgcccaatgactgtgcacagtgcctggcatatgataagtcctcaggaagcattgctgggatgaatacatgagagcaggaagktataggggccacagtcacagaacagcagatagttccatttcctggagcatgggttctgactaggaaaagctagaaagttggatcagggctagattgtagg

SEQ ID NO: 393814 - DNA, 201 bp, Homo sapiens
accacattcccacagccccacttgctgtgtcacctctcccctgagggagaggtgtcttcctgccagtctcttcaccaccaggctcacacaactcccatccrttcactgcaggctgccagactgagctttccaagcacccccggactgcctccagccctactttctcttcaaggcttcccacttccctcaaaatgaaagccc

SEQ ID NO: 393815 - DNA, 201 bp, Homo sapiens
agagctaaccagattcctggagctgatcctaaggaagaagagccagagtaactagtgtaaatctgtgctactgttgcagattaacaacaacctgagacacrcggatgaaatgttctggaaccacgtatccatgtgcattttaaatggaggtggtatccggtcgcccattgatgaacgcaacaatggtatgctcccaggccc

SEQ ID NO: 393816 - DNA, 201 bp, Homo sapiens
tacaaggactcttatgttaaaggaaactgtcacaattactttatcttcagtcatgaagcctttcttgaggaaagaaaaattagcaatactagtttgggaarcttgaaagagagattctgtttgcaatgacacttttaaaaaggcaacaacaaccaaaaaagtaattattcctaaagctcaggtgtcagaagttgtgaatgt

SEQ ID NO: 393817 - DNA, 201 bp, Homo sapiens; identical to SEQ ID NO: 86295

SEQ ID NO: 393818 - DNA, 201 bp, Homo sapiens
ggtgtggaaaatgtgaagccctggactggtttctgtgtcagtggtttcctgggactgccgagttgaaggggagcagaaagggctcagctgtggaggaggcrgagattagccaaactagaccagctatcgccccagctgcatggatagcatcttccttcttgttcctgattaagctcatttaatatgccaatgacaaaagga

SEQ ID NO: 393819 - DNA, 201 bp, Homo sapiens
ccgcggccgcagtgctctgagggcccgcgaccctcggccccaacccccgggccaccgcgggggcctcaccctttctggtcactcaatggtaacagccccasaccccgctcggaaccgcagccgcagttcctcaggcgccagctgcgcgcgacctgcggcgaggcgggggcggggctggcggatagtcctctgccgtgattg

SEQ ID NO: 393820 - DNA, 201 bp, Homo sapiens
ggtgtgactgttctaggaggtcaattccatggtatgtagttatcctgagttggaaattaaactaatatttaaaaaactttaatttacaaaagtaatgtatrtttatttagaaaagtttgaaaatacagatgaacaaaaaatgtttaaaaaatgaactcctagatacaaaatactaactttaaaaatcatcttccaggtcgt

SEQ ID NO: 393821 - DNA, 201 bp, Homo sapiens
tttttgcatttgcttgcagaaccagcaaccctgccagtttcaggatgggatatattattttcttccttttctttcctaggcccagcagtgagaaactttcmcaatctgtaatagatggtgtgactgttctaggaggtcaattccatggtatgtagttatcctgagttggaaattaaactaatatttaaaaaactttaattt

SEQ ID NO: 393822 - DNA, 201 bp, Homo sapiens; identical to SEQ ID NO: 86308

SEQ ID NO: 393823 - DNA, 201 bp, Homo sapiens; identical to SEQ ID NO: 86318

SEQ ID NO: 393824 - DNA, 201 bp, Homo sapiens
gacatctgagtaattgctgtatttctttaaatgcatgtgttataggtacctgtctattgcactaagactggtgtaaaacatttgcaccacaaggctcaagwgtttgacattggagtttattttgaagcaaatgggcatggcactgtaagttctcttaattatagttggccttagctggcacttttctttatgatgagactt

SEQ ID NO: 393825 - DNA, 201 bp, Homo sapiens
gcgagagaggccgcagtgccagcaggatgggctccgagttccccagcgccagtcgccacccctcggtcctggactcgcggaccgcccccccccaacaccgsggtggccttttcgcttgggccgcattccagggctccggacgtttacgattcactggcctctgccccgagggacccaggataagggtagggggtgtctcag

SEQ ID NO: 393826 - DNA, 201 bp, Homo sapiens; identical to SEQ ID NO: 86305

SEQ ID NO: 393827 - DNA, 201 bp, Homo sapiens
gaagtacaagctttctcgagcttttgtccggccctctggtacagaagatgtcgtccgagtatatgcagaagcagactcacaagtaagctgggatagttctrttgaaaaagagcctaatattaggtgatgggcaggcaaactattttaatggtttttagaatctcactatgatgattaaggctttattttgttgagcctttt

SEQ ID NO: 393828 - DNA, 201 bp, Homo sapiens
tttaaaaaatgaactcctagatacaaaatactaactttaaaaatcatcttccaggtcgtttctgggcaggcatgttttgtcttacctatggtagtactataggagattatagctgggaaattctgaactaatacaacttcctttactttggtaaggctgaatttcctcaaataaaaacctttttaagtacttgaagatgat

SEQ ID NO: 393829 - DNA, 201 bp, Homo sapiens
caccacagtaaagtcatcccacatgtatttggttcttaactattaactaatgtaagtgatgaaacattttttcctacaaggcagtttttttattatttttyatttttttgatacggagtctcgctctgtcaccaggctggagtgcagtggcacagtcttggctcattgcaccctctgactcccagggtcaagtgattctcc

SEQ ID NO: 393830 - DNA, 201 bp, Homo sapiens
caacaccatgttttgatatatgtatacattgtgaaatgattaccactatcaggctaattaacatatccattagctcacatagttaccttgttttgtggtgrgaatacttaagacgtacgctcaacacattttcaatatatattattatgaactatagtcaccacgctgtacgttagtcttccagaacttattcatcttata

SEQ ID NO: 393831 - DNA, 201 bp, Homo sapiens
ttaaaaaatgaactcctagatacaaaatactaactttaaaaatcatcttccaggtcgtttctgggcaggcatgttttgtcttacctatggtagtactataggagattatagctgggaaattctgaactaatacaacttcctttactttggtaaggctgaatttcctcaaataaaaacctttttaagtacttgaagatgatc

SEQ ID NO: 393832 - DNA, 201 bp, Homo sapiens
tagcagagtaacttatgttctgaagtaaattatcccaccacagtaaagtcatcccacatgtatttggttcttaactattaactaatgtaagtgatgaaacrttttttcctacaaggcagtttttttattatttttcatttttttgatacggagtctcgctctgtcaccaggctggagtgcagtggcacagtcttggctcat

SEQ ID NO: 393833 - DNA, 201 bp, Homo sapiens
taaaaaatgaactcctagatacaaaatactaactttaaaaatcatcttccaggtcgtttctgggcaggcatgttttgtcttacctatggtagtactataggagattatagctgggaaattctgaactaatacaacttcctttactttggtaaggctgaatttcctcaaataaaaacctttttaagtacttgaagatgatca

SEQ ID NO: 393834 - DNA, 201 bp, Homo sapiens
acacattccaggtttctgagttgatgagttggatagataatgcttttcactgggtatatatactagtcatttagtaaatgtttatttggtaattttgataktggtcacaaaattattttgtttcttactttagcatgtcttttagaataatgggttcctctagtaaacacttccattaaactaatctaagctcttatttgt

SEQ ID NO: 393835 - DNA, 201 bp, Homo sapiens
cagctacttggcaggagaatcacttgaggctgggaggtggaggttgtagtgagctgagattgcgccattgcactccagcctgagcgatacggtgaaactcygtctcaaaaaaaaaaaattcatgacaaagttcctttggactcctgtggttatgtatgttgggcaggaagtccatgcaagggcctgtgcttggtaacagct

SEQ ID NO: 393836 - DNA, 201 bp, Homo sapiens
cagattatggcttgttaacaacaccccagctgcactacatggtgtattgtcgaaacacgggtggccgatatggaaaggcaactatagaaggttactaccaraaactctctaaggcttttgtggaactcaccaaacaggtgaaaagtttattgaacatggttaaagttaaacaaatgaataaagtaacatggtctactgaac

SEQ ID NO: 393837 - DNA, 201 bp, Homo sapiens
ttccatggtatgtagttatcctgagttggaaattaaactaatatttaaaaaactttaatttacaaaagtaatgtatatttatttagaaaagtttgaaaatwcagatgaacaaaaaatgtttaaaaaatgaactcctagatacaaaatactaactttaaaaatcatcttccaggtcgtttctgggcaggcatgttttgtctt

SEQ ID NO: 393838 - DNA, 201 bp, Homo sapiens
gtcacagagagaagggaaaggaaagttgttaagaaagggaaacagaccagctaggccgctcttgaaaaattggtattgcattcaaaggattttgtgatatrtggggagaacagaactgtgaagaacacattccaggtttctgagttgatgagttggatagataatgcttttcactgggtatatatactagtcatttagtaa

SEQ ID NO: 393839 - DNA, 201 bp, Homo sapiens
tgagctccttttcattgaattgcttgttttgacatttacttgacagttcagttctgccacttatttatccatttcttaaatactgagctcttactctctaygctctaggctttgggactacagtatgaacaaaaccatagtccttgctttcctgaagcttgcatcatgtcctttcatcaatcttatgatcccattcctgac

SEQ ID NO: 393840 - DNA, 201 bp, Homo sapiens
aggtgtttgcgtccaatttgtaactatctacctgtcacagaggtatgaaaagttttattactcctttagagaagggcagttaacacaggtggccatccctrttaccaagtaagtttaggataaactatgtgtgtgacaaatggtggtttcaagttttcctatttgaggactagtgttaaagaaaaaataattcatgacact

SEQ ID NO: 393841 - DNA, 201 bp, Homo sapiens
gtggtattttggctaaactgatctaacaggacttttgctgaaggtaggccagggcggtcacatattacctgggggatggtagagaatgagaactcagatcrgatgtcaagagtggtcatgtatcaggatgagggattctcgctaagctcacttagcatgactcttattaaaatcgggctattggaagacatgcctaaggac

SEQ ID NO: 393842 - DNA, 201 bp, Homo sapiens
cttttagtagagatggggtttcaccatgttggccaggctggtctcgaacttttgacctcaggtgatccacccaccttggcctcccagagtgctgggattayaggcgtgagccaccgtgcctggccagatacttttatttaaaaaattaaagaggtgaagatcaggagatacaggcttcttaaaagaggaattctcatagaa

SEQ ID NO: 393843 - DNA, 201 bp, Homo sapiens
aggagggcggatcacgaggtcaggagatcgagaccctcctggctaacagggtgaaacctcgtctctactaaaaatacaaaaaattagccgggcatggtggygggcacctgtagtcccagctactcgggaggctgaggcaggagcatggtgtgaacccgggaggcagagcttgcagtgagccaagatcacgccactgcactc

SEQ ID NO: 393844 - DNA, 201 bp, Homo sapiens
tgattgttcagattatttttggcatatttaagaaattcttatcggtcttcttatataatgggctaccacttatcctgtttttgtgtgtgatatgggacttagtcatatcgtatttactggccattatcttagtggtaactctaagcatttgtggaaatattttttgccaaaggtaattctttatagactgaagaaaaagag

SEQ ID NO: 393845 - DNA, 201 bp, Homo sapiens
cggaaccgcagccgcagttcctcaggcgccagctgcgcgcgacctgcggcgaggcgggggcggggctggcggatagtcctctgccgtgattggccaggggscgtggcgacgagccggaagccacgcagggccacgtctgcggttctgaggactgggtttgggtgcagacgttgttgcttgggcgcttctccgctgcgtgta

SEQ ID NO: 393846 - DNA, 201 bp, Homo sapiens
aggttgcagacaggagagttattagcactaccgatgctgaaagacaagcagttacacccccaggattacaggaggcaatcaatgacctggtgaagaagtayaagctttctcgagcttttgtccggccctctggtacagaagatgtcgtccgagtatatgcagaagcagactcacaagtaagctgggatagttctattgaaa

SEQ ID NO: 393847 - DNA, 201 bp, Homo sapiens
gctgggcgtggtggcacacacctgtagtcccagctacttgggaggctgaggcaggagaatcacttgaacctgggaggcagaggttgcagtgagccgagatyatgccattgcactctggcctggcgacagagcgagactccgtctcaaaacaaaaaaagaaggccttatgatacctaattgtattctcttacagctgaaaaa

SEQ ID NO: 393848 - DNA, 201 bp, Homo sapiens; identical to SEQ ID NO: 86315

SEQ ID NO: 393849 - DNA, 201 bp, Homo sapiens
gtgccactgtttaaaaattccgtgacttctcttatatattggaatctctagcatctctttaccaaaatcagaaaatgttcacacatggcattagtccactrcagtcagatagatgctgctcccctaaaataggacatgcattctggaactctacagacttcatccagttgcctcattcattcatgttattatgctttactt

SEQ ID NO: 393850 - DNA, 201 bp, Homo sapiens
agtattttgttcccctttgtatctctgggatactaggtatgcaagaaacatttgacatctgagtaattgctgtatttctttaaatgcatgtgttataggtrcctgtctattgcactaagactggtgtaaaacatttgcaccacaaggctcaagagtttgacattggagtttattttgaagcaaatgggcatggcactgtaa

SEQ ID NO: 393851 - DNA, 201 bp, Homo sapiens
attgaagtgtgtaaccagcgggacagaatccagtctggagaaccagaaagtctcctctgagggaataacaactgaaggatgagtaggaaatagctacaacrgtggttctcaaatgcccagtccacgtattacctatgctatgctaatgttgctggagataaatggatcagaagatggaggtaaattcatttttagtcttta

SEQ ID NO: 393852 - DNA, 201 bp, Homo sapiens
gagtaggaaatagctacaacagtggttctcaaatgcccagtccacgtattacctatgctatgctaatgttgctggagataaatggatcagaagatggaggkaaattcatttttagtctttagatttttccatccatatttgctttctgtgttatggtgccatcaaaaaatccactcattcactccttaaaagacagttatg

SEQ ID NO: 393853 - DNA, 201 bp, Homo sapiens
tgatcttacattaatttcatacattttaaggctgccactatttttcccctcagtttctccagattgactaggagggaaaagtgggttagctagaataataktacttatgactaggttttggatagtgttttgagactgattttatattcttttgctgcaggcactgtttagtacagctgttgaaatgaagataaaacaatc

SEQ ID NO: 393854 - DNA, 201 bp, Homo sapiens
caagaaaaatgtatttcatcaagtagttgagcatagtatgctaatcttgctcagtattaggcctctagaaggcagtaaaaaagatgagtatttccaaatgrgataagactcttgaggagcatgatgaattatatattgtaatgactatccatgacattatttgccatattttgatgaatactatgaactcttaattttgcc

SEQ ID NO: 393855 - DNA, 201 bp, Homo sapiens
acatccatttccaagatttgcttgtgttaagtggtttcttccatttgtttccccatttgcaggcagctggtgatgctatttctgacatgctggtgattgargcaatcttggctctgaagggcttgactgtacaacagtgggatgctctctatacagatcttccaaacagacaacttaaagttcaggtgtgagagaaacttt

SEQ ID NO: 393856 - DNA, 201 bp, Homo sapiens
  misc_feature (1)...(201): n = A,T,C or G
ctgaagaaaaagagaaaagttgcacaaatgttgaaattaattaccctgaccttggagaaagaagttttaatgtaattttatatttagtctggcacttttcntagaatgtatgtttaacaggttaagcttctgaaaggaagtgtaatagagtaacaaatatgaaatgcttgcacttaggttgcagacaggagagttattagc

SEQ ID NO: 393857 - DNA, 201 bp, Homo sapiens
gtatgtttaacaggttaagcttctgaaaggaagtgtaatagagtaacaaatatgaaatgcttgcacttaggttgcagacaggagagttattagcactaccratgctgaaagacaagcagttacacccccaggattacaggaggcaatcaatgacctggtgaagaagtacaagctttctcgagcttttgtccggccctctgg

SEQ ID NO: 393858 - DNA, 201 bp, Homo sapiens; identical to SEQ ID NO: 86312

SEQ ID NO: 393859 - DNA, 201 bp, Homo sapiens
acaggacttactctcctgcccattgctctgtcaaacatagggttctttgaggaggttcaggatgagacagacctattcgtttggggtggcagtttttgaarcaaatggttcttaagaaattacttgttatgcccgaaacaatatttcttaattttgtagacatggatttaggtgctattacaaaatactcagcattacacg

SEQ ID NO: 393860 - DNA, 201 bp, Homo sapiens
tttggattcctcttcaatcaaatcagcttcacaagttaaatggattgtttttattaatttacaatgaaatagtttttgaatgacttcacacaaaaacctasagataacatcacaattgcaatgttataaagtttaaaggcctattcatttcactgtcagttgaaattcgttaccaggtgaaaattctggagctgggttttg

SEQ ID NO: 393861 - DNA, 201 bp, Homo sapiens
tttttcttatggtgctttctatttcatatcttcatgtcactgtcttaggtaaatgtgaacatttatgtataacttgataggatgattaaagttaggacacrtaggttaaggtggtttttcttccttgtagtgcacataatgcccctagttatcgagcttgtgtccagctgctcagcagtcttagtgggtatcagtacacac

SEQ ID NO: 393862 - DNA, 201 bp, Homo sapiens
cccagcactttgggagaccaaggcgggaggattgcttgaggccaagaattcaagacctcatgagaccctgtctctacaaaaaataaaaatagtgaagtgtkgtggcatttgcctgtagacctatctactcaggaggctgaggcaggagaattatcaggtatattacagctgataatatgtaattcacatagagcaatgcct

SEQ ID NO: 393863 - DNA, 201 bp, Homo sapiens
ttagtttgccaaacattagtgataaatttagatactgcttcccttctccatgtcctattcttttttatgtgtttttttctttttcttttttttttttttttgagacagtttcactcttgttgcccaggctggagtcaagtggggtgatctcagctcactgcaacctctgcctcccgggctcaagctattctcctccctcag

SEQ ID NO: 393864 - DNA, 201 bp, Homo sapiens; identical to SEQ ID NO: 86341

SEQ ID NO: 393865 - DNA, 201 bp, Homo sapiens
gccctttattgttgaattgcagtttgatttaggggattagaggtggtatggtaccagtaattgagtaatggtggaaatgtgaaagtcagtcacaggactcycattggtgccagtgtcatagttaagaaagaaagaaagaaagttttatatatcctgtaatctagactggaagctaaataattgctaggaagcaaacttaag

SEQ ID NO: 393866 - DNA, 201 bp, Homo sapiens
attagcaagtaatttttatagaggaatttctaatttgagaaactattttgtgcttctagaaatcactatatagaattaatataaagttttggccttgtatktatttggattatttagtttgccaaacattagtgataaatttagatactgcttcccttctccatgtcctattcttttttatgtgtttttttctttttcttt

SEQ ID NO: 393867 - DNA, 201 bp, Homo sapiens
caaatatgttttaacatcacaaatgaattattctagacagttcagtatatcacatgaatatttctatagcaatgaaacattattatagtttatctagtctrtgtatcatactgaaaatatagctagtgataaaagcatagacttcggaggtggatgtactgagttgaaatcttgcctatacagacactgagcttagggaag

SEQ ID NO: 393868 - DNA, 201 bp, Homo sapiens
aagatttttaaagctactcatgaggctgaggcaggaagattgcatgagtcaaggatcagtcctagatttatagcttttggtcagccagatagatagtgatrccatattttgaaattgacagttattacagggaaggcacatgttttgctggggcacattgggggagaattctgtttttggaattgtgaaatatgaggactt

SEQ ID NO: 393869 - DNA, 201 bp, Homo sapiens
atgaaacttctgcaaaatgtctcttctcatttttcagcaatttaagattttgcttttaatattttgttttatatgtttgatataaacatatatcaaacaaacaagctatatgaagtctttttaatcatatttaaatatttaggaatttattgcctaaaaaaaagtaagaaagttcaaattaattacctgaccaaacttttt

SEQ ID NO: 393870 - DNA, 201 bp, Homo sapiens
aagtctcatcataaagaaaagtgccagctaaggccaactataattaagagaacttacagtgccatgcccatttgcttcaaaataaactccaatgtcaaacwcttgagccttgtggtgcaaatgttttacaccagtcttagtgcaatagacaggtacctataacacatgcatttaaagaaatacagcaattactcagatgtc

SEQ ID NO: 393871 - DNA, 201 bp, Homo sapiens
tcagccttttgttttcttaaaaatctctaacaggtatcatcagtttctcatgaaaatcctactgaagtgtttgaagatggagaaaatccaccaagtagtcratcatcagagagtggattcactgagtttatacaatatcaagcagaccgaactgatgatattgacagagaactgagtgagggccagggggcagctgccatc

SEQ ID NO: 393872 - DNA, 201 bp, Homo sapiens
tcactgctgatgaagatatttcacggtaatatgtaatttaaatatattgttgtccattttttaataccctgaaattattcagaatattactcagcatctargagaatatagtctttttctgaatacttatttattattatctaattgattacgtttggatataatgtagttttacttattccttaagccctttagattgga

SEQ ID NO: 393873 - DNA, 201 bp, Homo sapiens
ttttgatatgtttaaaatactacaagataaaaatttttaaaaagaataaagagtggatgaagatagtaaccttctcaggagtttatagtcagttgacaacrttataaatgtgaaagactaatggcatatcattttcttgtgtctgtcccatcttgcttcattttatttgttttatgtcagaatttgcttttattatataga

SEQ ID NO: 393874 - DNA, 201 bp, Homo sapiens; identical to SEQ ID NO: 86340

SEQ ID NO: 393875 - DNA, 201 bp, Homo sapiens
aaaaggctcaacaaaataaagccttaatcatcatagtgagattctaaaaaccattaaaatagtttgcctgcccatcacctaatattaggctctttttcaayagaactatcccagcttacttgtgagtctgcttctgcatatactcggacgacatcttctgtaccagagggccggacaaaagctcgagaaagcttgtacttc

SEQ ID NO: 393876 - DNA, 201 bp, Homo sapiens
cttcctttcagaatgaaggatcctcttccttttcaacatgtgcatattctgaatgttaaaacaaaaagttgaaagttgaacattttcagttatactagaamctttatttccttttaaaatttgtcagtttacctttttgccaaccattgtactgatcctctaaaattacctaattaaaaaatagatattgatatgaaggtt

SEQ ID NO: 393877 - DNA, 201 bp, Homo sapiens
ataggataaggtctgaagatagagcattggatctggcaattggtggacattggtgaccaaaatgagaacagtttcagtggaggaggtagaagtatcgtgaytgattaatgatggaagataaacagaagaaattcataaaaatatatatatattttaacagttgatagagtttggtagctttaagccagaaggttagttaga

SEQ ID NO: 393878 - DNA, 201 bp, Homo sapiens
ttgattcctaataggtccccagtaaatacttggtaagtgaatagaggtggtgggcacagaaagcctttgtgaaacaggaaggggaagggtattctggggcraagtaccttgtctgatttggtaatagagcagggcacaggcagtggtatagtggaaaataagactgaatgaaaagggagatgggagctagatggggcagga

SEQ ID NO: 393879 - DNA, 201 bp, Homo sapiens
tagtagttatgggactattcaaatttatttatgtcagttttaataagttttttctctcaaaatttgcctatttttactaaatttttagatgcatcagcctraagttcttaatatactgttatctttgtagcatgtaggatctatagtgatgtctcctctttcactcttgatattggtgactcaagccatccttttttttta

SEQ ID NO: 393880 - DNA, 201 bp, Homo sapiens
tgtgacatgcctaaatattcactattactatattactacaaagtccatactttatagttgagtgatgccttctatacagtgatattgtccccttagattamtttatttcatttaagggacaaagactctcacatatgtcatttgtctcttgacaaaccctgtggtggtaatgaaaagatcattttactgagcaggttgctg

SEQ ID NO: 393881 - DNA, 201 bp, Homo sapiens
ggaagatttgtaattacagattaatttctttagtagttatgggactattcaaatttatttatgtcagttttaataagttttttctctcaaaatttgcctayttttactaaatttttagatgcatcagcctaaagttcttaatatactgttatctttgtagcatgtaggatctatagtgatgtctcctctttcactcttgat

SEQ ID NO: 393882 - DNA, 201 bp, Homo sapiens
ttacttaaagtctgaactcaggaataattatttatgagacaggatgagatgatccttttaagttcaatatttctgtatatatttacatattttctgtgttyctactgccataaagaatataaataaagtttattgcaatgtgtgtttgaatattgtggacgttgaacgtaatacagtactcctaaatagtactctgatttt

SEQ ID NO: 393883 - DNA, 201 bp, Homo sapiens
tcactggcctaacattgatccaccatctgttcttatcctcttctaccctgttctccacatagtaccagtgtaatctttttaatatattaaataatgttacygtcttgctaaaaagtctattgactgcttctcagcacacttcagaaaaattaagaaaaaggctttaacatggctttgaagactttacttcctgaagtactc

SEQ ID NO: 393884 - DNA, 201 bp, Homo sapiens
gcatctgtgaggatgttataagtcagcagttaacccataaagataaggtaaatcctcttatcttgtgcacaccgccccctccgccacacacacacacacamacaaatactgaaaagtaagaaaactttagggaaattattgcaattaacatcggagtaagagaaaatagctttgttcacagtgatcttaatatctttaaaa

SEQ ID NO: 393885 - DNA, 201 bp, Homo sapiens
cttttttttagacagggtctcatcttttcacccaggctggaatgcagtggtgtgatcctggctcattgcagcctcgacctcccaggctcgggtgattcccscacctcagcctcctgagcagctgagaccacaggtgtgtgccaccatgcctggctagtgttttttttttttgtctgtgtgtattttttgtagagacagggt

SEQ ID NO: 393886 - DNA, 201 bp, Homo sapiens
tctctctctgaaaatctagctttatagtttccctgcaaatataattgctttaatctttcttttatttttccttttttttttgttttttgagatggagtctygctctgtcacccaggctggagtgcagtggcgagatctcagctcactgcaagctctgcctcccgggttcaggccattctcctgcctcagcctcccgagtag

SEQ ID NO: 393887 - DNA, 201 bp, Homo sapiens
tacttgctgtaatttgatatactaggacaatggttgtacctcttccaagtactgtaaatatctactttgaggccagactttatttcaaagtagcaaaaatrgattgaaggctgtaactttccatgttacatgttcatgtaacattccagctgtcttctcacatcaaatattaaaaatttaccaaaaaaaatctaaaatacc

SEQ ID NO: 393888 - DNA, 201 bp, Homo sapiens
tattcgtatatgcagatcttccagatggtcccaatttaatatacttttattctttttaatagaggcagtttattaatgtatgactaaatacaattttttayttacacaaatttataaattgaaaagttcctttaagaccaagtttcttgaatatattttcttcttcagtagtagatttataaaaaggatctcctgtactaa

SEQ ID NO: 393889 - DNA, 201 bp, Homo sapiens
aaaacaaatatcattaaaggactatcataaaaggttccaagggcttgggtgatcagaaggtaggtacatggaagactgccttagtaacctcatccccatgsagtagaatattaaaagcctttcaggtctgacagagagcaggcattcatttgtacctaataggaaatatttgttaaattttcatgtatggtattgtgactg

SEQ ID NO: 393890 - DNA, 201 bp, Homo sapiens
cctaaaacaagtggttatttctcccttaccagcaagcaagcagttctacagtagataccagctggatgtgctgcagttcaatttggacactatctacctgsagatagtatcagatcccacaggttgagggctgagcctcataagactgtcctcctgttttgatgccaatcacaagccctagtttgttttacctgtgcttct

SEQ ID NO: 393891 - DNA, 201 bp, Homo sapiens
aaacattgcaacatatagccaaccctgttatggtaggtaacctggaaccaggctattcgtatatgcagatcttccagatggtcccaatttaatatactttwattctttttaatagaggcagtttattaatgtatgactaaatacaattttttacttacacaaatttataaattgaaaagttcctttaagaccaagtttctt

SEQ ID NO: 393892 - DNA, 201 bp, Homo sapiens
tttcaatagaactatcccagcttacttgtgagtctgcttctgcatatactcggacgacatcttctgtaccagagggccggacaaaagctcgagaaagcttrtacttcttcaccaggtcattgattgcctcctgtaatcctgggggtgtaactgcttgtctttcagcatcggtagtgctaataactctcctgtctgcaacct

SEQ ID NO: 393893 - DNA, 201 bp, Homo sapiens
gtggcacacgcctgtagtcccaggtactcgggaggctgaggcaagagaattgcttgaacctgggaggcggaggttgtggtgagccaagatcatgccactgyactccagcctgggcaacagagcaagactcttcctcaaaaaataaataaataaagataaaaataaaataaaatttgaggtcaaatataaaagatatgtgaa

SEQ ID NO: 393894 - DNA, 201 bp, Homo sapiens
ttataactaggttcacacaaatctttattaattaaaataggaaccattacaatcaacacatttttgccaatgagaaataagtttgtttactcctgtagcayaaaaatccatgcttccaaatttgacgaactcttggaaagcattttctgtgtcctgctagttgtggaagcaatttccctgcaaaacgttgctgagatgcct

SEQ ID NO: 393895 - DNA, 201 bp, Homo sapiens
acatagtgaaaccccgtctctactaaaaatacaaaaattagccaggcatggtggcacacgcctgtagtcccaggtactcgggaggctgaggcaagagaatygcttgaacctgggaggcggaggttgtggtgagccaagatcatgccactgcactccagcctgggcaacagagcaagactcttcctcaaaaaataaataaat

SEQ ID NO: 393896 - DNA, 201 bp, Homo sapiens
ttacagtgccatgcccatttgcttcaaaataaactccaatgtcaaactcttgagccttgtggtgcaaatgttttacaccagtcttagtgcaatagacaggyacctataacacatgcatttaaagaaatacagcaattactcagatgtcaaatgtttcttgcatacctagtatcccagagatacaaaggggaacaaaatact

SEQ ID NO: 393897 - DNA, 201 bp, Homo sapiens
gaataatggctcgtaatatttagaattccagtccttctcattctaacctggtggctggtggcctttcatttgttttacaagaacagtttagctttaaactrtaaactaaattccttcccaaggctagttcagcctatacccaggaatgaacaaggacagtggagaggatagaagatgaggtcagttaggtttgatatcttt

SEQ ID NO: 393898 - DNA, 201 bp, Homo sapiens
ttttcatgagtatgtttatgaatgtcagttgagtcataggatatgtatatatattaaatatttaaaatggaaatcaagaccattaagccgcttaactcatmgtgagaaattagatcgcattagtttcttttagcctgatatttcccgtttctgttttctctttggcccttttagggttctgaatgagtttattatgaaaaa

SEQ ID NO: 393899 - DNA, 201 bp, Homo sapiens
gcaacatagatggatggccagctccttgtgaatgattactttcttggatctggtttagtgtttagtctgtactacactacatttttaactctgtcatggcytacagtcctgacaatagcagctggacccatttacaatagctgtagcaatacctctagtgatagagatggctgagctggatttaactgctctgacatatta

SEQ ID NO: 393900 - DNA, 201 bp, Homo sapiens
gatcaggatcttgtcagcagcccttcatgtagtgctaaggagggatatgtctctgaatcgaagactttatgcatggcttcttggtaggtatttgatgtctrtggtcatgattggggaaaaaatggagggagatttgtcatgtataagtattaccaagttgtatgtatgtcctgaatttaaaaactaaaatctcttgtgtaa

SEQ ID NO: 393901 - DNA, 201 bp, Homo sapiens
actctcgaaactatgcatattgccactgaatccattattttggtataggtgaacatacagtaattcattctgcttttttaatgttaggaatgattacatgmaatatcttcttactatcatattccattttgcgtttaactgacctgtgaacagaagttatgatttgagtttttataacttcttactcaagaacctgactct

SEQ ID NO: 393902 - DNA, 201 bp, Homo sapiens
gtgacctttacaaagatcagaacaataggactaaggccaaatagctgttaattgacagtgttggaatttgaacagcccagttcaattgtttgtttttttttcctaaactacattttagctgagtcagggaaaaagaatactatagtttctagtactaaattcactgtttactcactgtcacagaaggttcttgaactcttt

SEQ ID NO: 393903 - DNA, 201 bp, Homo sapiens
ataaaatgtaattttaggaaaatataagtagatgatgacactaatgattaaaaattttgatcagtctacatttctacatttcaattattttaatgcatttkgtatttttcttcttttactgtttttctcatatatcagtgagccaagtacaactcatcacatcaaaaggaaatggtgaaaagccacttaccatggatgaaa

SEQ ID NO: 393904 - DNA, 201 bp, Homo sapiens
aataaaatgtaattttaggaaaatataagtagatgatgacactaatgattaaaaattttgatcagtctacatttctacatttcaattattttaatgcattktgtatttttcttcttttactgtttttctcatatatcagtgagccaagtacaactcatcacatcaaaaggaaatggtgaaaagccacttaccatggatgaa

SEQ ID NO: 393905 - DNA, 201 bp, Homo sapiens
agtaatctgcccgcctcagcctcccaaagtgctgagattacaggtgtgagcaacacttttgcttttcatacagtaaaacctcagcactccaaaactctcaygaaaactttttctgactcttcatattgtctcattatcatctgtggcgtataaagtcactcagaaaaaaattcagaaaactcagtctttgatttctaccac

SEQ ID NO: 393906 - DNA, 201 bp, Homo sapiens
atttttcttatggtgctttctatttcatatcttcatgtcactgtcttaggtaaatgtgaacatttatgtataacttgataggatgattaaagttaggacaygtaggttaaggtggtttttcttccttgtagtgcacataatgcccctagttatcgagcttgtgtccagctgctcagcagtcttagtgggtatcagtacaca

SEQ ID NO: 393907 - DNA, 201 bp, Homo sapiens
tcattatatatatactattcaaaataatgtaaatatctttaattattgattagatcctcagaagcatactttcgagaaaataaagagttgtcacattttcrtggcaaaaatgtctcagcataatagacaatagatgttaaagatgctgttatttcaggtagaagcagtaagtacttcagtgcaggactcaagtgtacttgt

SEQ ID NO: 393908 - DNA, 201 bp, Homo sapiens
aaacttctgcaaaatgtctcttctcatttttcagcaatttaagattttgcttttaatattttgttttatatgtttgatataaacatatatcaaacaaacaagctatatgaagtctttttaatcatatttaaatatttaggaatttattgcctaaaaaaaagtaagaaagttcaaattaattacctgaccaaactttttagc

SEQ ID NO: 393909 - DNA, 201 bp, Homo sapiens
gaaacttctgcaaaatgtctcttctcatttttcagcaatttaagattttgcttttaatattttgttttatatgtttgatataaacatatatcaaacaaacaagctatatgaagtctttttaatcatatttaaatatttaggaatttattgcctaaaaaaaagtaagaaagttcaaattaattacctgaccaaactttttag

SEQ ID NO: 393910 - DNA, 201 bp, Homo sapiens
tatttgatctgtttggaccctattattattttcggggagttaatatttgtaggcaatgcatgatggcattaagtatctctaatatctcattactaatattyttattaaaaaactaaaatgtatatggtattttattacttagcgtactttaacaacctagtgaggtagataggtcttgtggtggagtgttttgttgttgtt

SEQ ID NO: 393911 - DNA, 201 bp, Homo sapiens
tgaaacttctgcaaaatgtctcttctcatttttcagcaatttaagattttgcttttaatattttgttttatatgtttgatataaacatatatcaaacaaacaagctatatgaagtctttttaatcatatttaaatatttaggaatttattgcctaaaaaaaagtaagaaagttcaaattaattacctgaccaaacttttta

SEQ ID NO: 393912 - DNA, 201 bp, Homo sapiens
caaatccagttcatccggacttgattttttttctcttgctgcttgtgcttttggtgttatattaggaaaccattgtctaatccaaggtaccagagatttastcttttttcttcaatgcgtaagtttattagaaactgccaaactattttccaaaatggctatgctttttaaattcaggttttaaaatatactgttacattt

SEQ ID NO: 393913 - DNA, 201 bp, Homo sapiens
aaagctcaataaatggtatcaccatctatccatttatataaccctcaaatctgagagttacacttgttaccttgttttccccacccacattttcccacctscggtgtacacagtctgttgttcagagttatgtctcatggtggttaagagaagagatggcagggtcaaactagctctgtgatctggggccattgtcctcac

SEQ ID NO: 393914 - DNA, 201 bp, Homo sapiens
aaagataataggaagaaaaatcacatttattgcttacttatacaatatttttctttttaatttcaagattaacaacagagggcaagctttatatctctagrgtgctatactcttaatatgagcaaggaataaaaaaccctcaaggatcattttgaaaaattaaacaatttgattgatcatactttactttttctgcatatg

SEQ ID NO: 393915 - DNA, 201 bp, Homo sapiens
tagtttttcctctgctctcaccacgacaatcaatgcagaagatttctataaccctaaaacaagtggttatttctcccttaccagcaagcaagcagttctayagtagataccagctggatgtgctgcagttcaatttggacactatctacctgcagatagtatcagatcccacaggttgagggctgagcctcataagactgt

SEQ ID NO: 393916 - DNA, 201 bp, Homo sapiens
tcttgaactcttggcctcaaatgatcctcccacctcagcctcccaaagtgctgggattacaggcattagccactatacccagcctatcaaatagcttaacwtacaaattaggaaagaagtttgtcttaaaatacatactaagatgtgtgggggaagaaaacacagatagtttttcctctgctctcaccacgacaatcaatg

SEQ ID NO: 393917 - DNA, 201 bp, Homo sapiens
aaagtttctctcacacctgaactttaagttgtctgtttggaagatctgtatagagagcatcccactgttgtacagtcaagcccttcagagccaagattgcytcaatcaccagcatgtcagaaatagcatcaccagctgcctgcaaatggggaaacaaatggaagaaaccacttaacacaagcaaatcttggaaatggatgt

SEQ ID NO: 393918 - DNA, 201 bp, Homo sapiens
ccagagggccggacaaaagctcgagaaagcttgtacttcttcaccaggtcattgattgcctcctgtaatcctgggggtgtaactgcttgtctttcagcatyggtagtgctaataactctcctgtctgcaacctaagtgcaagcatttcatatttgttactctattacacttcctttcagaagcttaacctgttaaacatac

SEQ ID NO: 393919 - DNA, 201 bp, Homo sapiens
aaaactaataaatggcagtaaaaggtctcagaagcaccaagggttttgatcaggtcaggagttagaaacttaatgtcatttgtattcatttcttgaccaaytgccaaagtttatatatttttaatttttctaacataccacattgtctgttgtattaataccagttcactttttgttttctgcagaaaaatccagaggaag

SEQ ID NO: 393920 - DNA, 201 bp, Homo sapiens
taatcatattttttttcagttcttcagtattaatcttagtaatgtatgcctgtgaaatttcaaagcatgagtatatttttaaaagggcaaaaggttttttycctttcttatacccaccgagactattgggattaagattattaaaatactatgatcaaaatttatcctgaagtatgactacttcaaaatagttaattcaaa

SEQ ID NO: 393921 - DNA, 201 bp, Homo sapiens
tgatttcatgaagtagatgaaatagtcatttgaaaacaaggatatagatcctagagacttgtatatatgtatttttgtcctcaagaatctaaccttatgtrtgctgtgtgtgtagtgcatagtaaatacttggtgaatgaataaatcagtgtggggctgctttaagagtcaacagaatgggcagattaagttgtgaatagt

SEQ ID NO: 393922 - DNA, 201 bp, Homo sapiens
ataaaatatacagtgttaattaagagcatgatgcatataaaacattatggatgagtaaaatcattgcctatttatatagattaaaaaatgtaacttttggkttccacattgtttaaacttttttcatttcacttttattttcaggagacttacattgaaatccagacagaacacttgccccagttgctgctcagaatgatt

SEQ ID NO: 393923 - DNA, 201 bp, Homo sapiens
tagtcctgaacactcttcgtgtcaaaaacttgagaatgtaatataatgttcatcttaatgccatgatgacaaacaaaagtatgagttgattgaaaaaaatrcagtacaaaagggatttttagaacctgtcagagttgtttcaacagaactaatcaatgggtaagaagattatacattttaaatttgtaaaatatgagtcag

SEQ ID NO: 393924 - DNA, 201 bp, Homo sapiens; identical to SEQ ID NO: 86357

SEQ ID NO: 393925 - DNA, 201 bp, Homo sapiens
tcataaatatatgcaattttattgtcaaatttaaaataataataataaattttaaattcgttaaaaaacttacaaaaataaataaagacacaagttgcatwtaaaataaaagttgacataccttggcttccgaaacaccaaactatattgttggcaagccagacccacagtgggagtataaacaataggcatgaatttctc

SEQ ID NO: 393926 - DNA, 201 bp, Homo sapiens; identical to SEQ ID NO: 86358

SEQ ID NO: 393927 - DNA, 201 bp, Homo sapiens; identical to SEQ ID NO: 86359

SEQ ID NO: 393928 - DNA, 201 bp, Homo sapiens
atagtgactattgctaaggataatttattatatacgtgaaaactgctaaaagtagattttagcatactcaccacaaataaatgatatgaatgtgaaataaygcatatgctaattagcttgattctaccatttcacaatgtatacatgtttcagaacatcctctgtacatcataaatatatgcaattttattgtcaaattta

SEQ ID NO: 393929 - DNA, 201 bp, Homo sapiens
tgctttgtttttatgggaattaaactcagaatagcccttcttaataggtcttttcaaaaatttggtagaagagaagttggtgtgttaatcaacataagatwttagaatgcatttctatttcaattttctctcctactaatcctgttactgtggttaataatcaatgtgtaaatagtgaatatctgttctttactctgtacc

SEQ ID NO: 393930 - DNA, 201 bp, Homo sapiens
agaagatgatataatttggagaagccaattggagaaattagcatttaaagataaaaggtattaaactgatattagctctgcgtttagttatttatacctgkgtagtaagtctatgccttatcttctctggttgaagctttgattgtccaggaagctccttcaaagaaaaaaaataaaccaataattctctaactagaaatc

SEQ ID NO: 393931 - DNA, 201 bp, Homo sapiens
gttagtatcctttgtgactttccaagagaggaattttttatgcattgcttagcaaaattccttttatgtttgtttgtttgcattaacacttcttcgctctwtcactagtgatccttggtacacactttgggaagtgctggtacagataatagaaaaaagttctagtcaagctgaactcagtagtggaatgggacagaaagg

SEQ ID NO: 393932 - DNA, 201 bp, Homo sapiens
tgcccaggctggtctcaaacttttgtccccaagcagcccaccactccttggtctcccagagtgctgggattaccaggcatgagccacaacacccagcctcrtactgcttcttgtattgaattcgataacttcttacactatgactttcggagctgcctggaatctaattcctgtaccttttgggggttctgttgaacaaat

SEQ ID NO: 393933 - DNA, 201 bp, Homo sapiens
taagaacatttattataagtagttgtgtggcattttagagaattatttaaagaagttcaagttcttagtttttcaagtattttttaacacattttcaaagkggaaaattggaagcgtttatcaagaagcctaaagacctaaattccagttgccattctgctcctcaccagcatgaaactttattcacaaattacttacctc

SEQ ID NO: 393934 - DNA, 201 bp, Homo sapiens
gagagccttcttgctagtggggactccctgcaagagtcccgatgcagtatagggcatcccatggtaagggggctgagcatgcaagctcagttctctcttcytcttttcataaagccaccagtcctactcccatgaacccactaatccattaattcatgaatctgccctgatgacccaatcgcttaaaggccctaccattca

SEQ ID NO: 393935 - DNA, 201 bp, Homo sapiens
tcttgctagtggggactccctgcaagagtcccgatgcagtatagggcatcccatggtaagggggctgagcatgcaagctcagttctctcttcctcttttcrtaaagccaccagtcctactcccatgaacccactaatccattaattcatgaatctgccctgatgacccaatcgcttaaaggccctaccattcagtactgcc

SEQ ID NO: 393936 - DNA, 201 bp, Homo sapiens
attcctcagctgattaatgaataaagaatgatagaagtagaatatcaccaattgcagtgcttaatgaactaatggatctatacatagatcataatggtagytagcactcaaaaagagaggcaaccatttattacatgcctccagatagaggaacattacctgtgaaatagtcttgtcaaaaagatttgaacctgtgtctga

SEQ ID NO: 393937 - DNA, 201 bp, Homo sapiens
tatccttgaactgagctttttaaaaaagtggtgagctactaggcactggatctgttcaagcagatgctggatgatgctttgtctgtaagatattatagagrtaaagcctgtgctggatgaggctaaaaattgccttaaagttctcctagtctttaagactatcattctgtgattttgaagtttacatttctgacaacacaa

SEQ ID NO: 393938 - DNA, 201 bp, Homo sapiens
tgttacactcacaagattggtgccacaattcttatttgggacattaggcccaacctcttcttccatcaaagcttcataatatatagtaattaataaggaawgttcatctcattgtagcttttgatcttcattctctgtaactgagtgaaagtaaataatatatgtgatcaaaagccaagcagcaagacaaaaagggaagac

SEQ ID NO: 393939 - DNA, 201 bp, Homo sapiens
actttaataatcttacagttttagaaaataacaaagtctttaaatcttcgtatagtttgagttggaggccaggattatgcatattgttagataaaacataraagtaagttacagccagcagtcagtgttctctgctcgtgatggctgccaatattgttacactcacaagattggtgccacaattcttatttgggacattag

SEQ ID NO: 393940 - DNA, 201 bp, Homo sapiens
gggattgctgggtcaaatggtagttctgtttttagttctttgaggaatcaccatatcactttccacaatggttgaactaatttacagtctcaccaacagttgtataaacatcctcttttctccgcaacctcgccaacatctgttatttttttactttttattaatgccattctaactgccatgagatggtatctcattgtg

SEQ ID NO: 393941 - DNA, 201 bp, Homo sapiens
tggagactttgttgtccttgcttgaggcactgactcctagtattgtgtaatttatgatccccatagactcctggcgttttgggctttttttttttttttttagtgaggtcaggtcaagccctagctagaaaacaaaatgaccatgcctgtgtatatggctttggaagatttagcaggaattttaccatattctgaggcttg

SEQ ID NO: 393942 - DNA, 201 bp, Homo sapiens
tgccaacaaccagaatgcctcttctcctccaaaggatcacaactcctcactagcaagggaacataactggatggataatgaatttgacaaattgacagaastaggcttcagaaggtgggtaataacaaattcctgaaggagcatgttctaacccagtgcaaggaagctaagaaccttgacagaaggctagaggagtatcta

SEQ ID NO: 393943 - DNA, 201 bp, Homo sapiens
tttggaatgctgctgaaagaaattctgtgaatttacttccttttgtgcttacctttaagagactttataaagctggactggttggttattttctaatatayagctggtcaaaaaactgcagtacttttcttgggtctgaaatccaacctcttcttttcttccaagattattatataggatgaacattttaagttatctgag

SEQ ID NO: 393944 - DNA, 201 bp, Homo sapiens
gactccgtctcaaaaaaaaaaaaaaaaaaaagaattaaatttgcttttgtgggggcattcgatgctaatttgtacatctcaacctttttttttttttttttgttagctttatgtcaattagttgccatggctatatttgagcttgtttgaaaaccagcaacacatagtagtttggcccttaataaattagtttgaaagaac

SEQ ID NO: 393945 - DNA, 201 bp, Homo sapiens
acagtgattaattaaatggaatgtatttggaaagatttattgaaacttatatttataagttttacaatttttgagaagttcatttaggatattatttctgyttgctttggtacaggtttcgtttataatgtcagcccttatatggagtatcatcctggtggagaagatgaactaatgagagcagcaggatcagatggtact

SEQ ID NO: 393946 - DNA, 201 bp, Homo sapiens
tctgtttttgaggtctgtttagtgccataatttttacacttttgtgtttttggttggtgtttttactgtttaaaatggcccccaagaatagtgctgaagtkctgtggcaagaaagctgtagtatgccttatggagaaaatatatgtcagataggtttcattcagacatgagttatagtgagttacagctgttgtctgtgag

SEQ ID NO: 393947 - DNA, 201 bp, Homo sapiens
aatttggctttccatgtgttctgatactggaaacaagatatcctcaatgggacatgtaatgttcaggtcactagatacatgtaaccccagctgtaagtcakttgccattctggcatgtgtgctttaatctcttctgaatttgattagcatcagttatcctatgtgagtctaatcaattttgttaacattggaaagactggg

SEQ ID NO: 393948 - DNA, 201 bp, Homo sapiens
atgagaatttacttgtgcccagtattttagctgcacaaataatagtaatttccttattgtcctatttctgtttttatcccaccgctgacctcttatcttgsatttccaaatacctgataggcaatttaatgccctatacttcaactcattatgccctcaaataatatcaagtcattttctttcctctttttccttctgttt

SEQ ID NO: 393949 - DNA, 201 bp, Homo sapiens
ttctaaaattgcttactagtgctactgttgttaagccttaaaggcttgagtttcaggacttttccatggtgtaagaaaagattttagaatgtaccgtggckcatgcctataatctcaacactttgggaagccaagatggatggattgcttgagtccaggagttcgacatcagcctgggcaacatagtgaaacccaatctct

SEQ ID NO: 393950 - DNA, 201 bp, Homo sapiens
gaacccgggaggcggagcttgcagtgagccaagatcacgccactgccctccagcctgggtgacagagcaagactccgtctcaaaaaaaaaaaaaaaaaaaagaattaaatttgcttttgtgggggcattcgatgctaatttgtacatctcaacctttttttttttttttttgttagctttatgtcaattagttgccatggc

SEQ ID NO: 393951 - DNA, 201 bp, Homo sapiens
ctgctgtaaatttttccttgaatcctgaaacaccattaaaaaagaaaggtttagctttcttgtttgaaatgggagctataatgtgtttttcagtgaaggtkttccactttggaaaatgacttggagtttaggagatatttttgtttatttcactgcattagcaaagataatttcatctttctcttttctcctccttaactc

SEQ ID NO: 393952 - DNA, 201 bp, Homo sapiens
cttgaactcctgacctcgtgatctgcccacctcggcctcccagagtgccgggattacgggcgtgagccactgtgcccggcctagattttttttttttttttaatatgaaagatagctttactggcccaaacttaagagtcttttgtagggttttataggctccttattccagccattactcttatcgtcgtgccttctgtg

SEQ ID NO: 393953 - DNA, 201 bp, Homo sapiens
atcaaaatcaataatataaaatacttgttggcccagttgtgtaaaatctctcgtgcctgacacctacaagaagtcttccaaggcccattggtcacatgtcytactgactgtccttcgctaggtggcccattccactggtctgttccttgccagttctgccataggaagtcagtggctgcagcaaagcagcctggactacaa

SEQ ID NO: 393954 - DNA, 201 bp, Homo sapiens
gattcttcccactttctctttcccagtccagtcagccgctaagttctgttgagtctacatctcagtgactttttcagctacctcttctgccactgtcttayagtaagccttcatcatatcttcattggcttctgtttccttacaattgaccctactgcttcgcagctttgaaacctctgatgggtccccattatctgtact

SEQ ID NO: 393955 - DNA, 201 bp, Homo sapiens
gtggtcactactgacataaaatgcatggtgctaactctgactgaactatattgatgtacatttagaaacatttttttctttcatttgcaaaagcaagttayagaaatgcaactaacaagctagattgccagatgagttacctttttctttgttaactgaaatagtctatattgtggactaatttatgcaatttatagtacc

SEQ ID NO: 393956 - DNA, 201 bp, Homo sapiens
tttcaagaaaataactgttaaatatctgagtctgaataatcagtttgtttactagcagttcttataaatggcccttcattttttttgttctttttttttttaacttttattttaggttcaggggtacgtgtgcaggtttgttatataggtaaactcatgtcatgaggattcattgtacagattatttcatcatccaggtac

SEQ ID NO: 393957 - DNA, 201 bp, Homo sapiens; identical to SEQ ID NO: 86365

SEQ ID NO: 393958 - DNA, 201 bp, Homo sapiens; identical to SEQ ID NO: 86366

SEQ ID NO: 393959 - DNA, 201 bp, Homo sapiens
atgcagctggtgacttgaagtcagtgtccatttaccattccaagaatcctagggccctagagaattatgctaagtctgccctgcctgtgctctataaatgrgacaacaaagcttggatgacagtacctcagtgtttatagcatggtttactgaatattttaagctcaatgttgagacctactgctctttaaaaaagtttct

SEQ ID NO: 393960 - DNA, 201 bp, Homo sapiens; identical to SEQ ID NO: 86367

SEQ ID NO: 393961 - DNA, 201 bp, Homo sapiens
ttggctaaagatgccacgtaggaatttcacagctagagaggggatgcctggcttcaaagcttcaaaggacagtctgacagtctgactctcttgttaaggcmtaatgcagctggtgacttgaagtcagtgtccatttaccattccaagaatcctagggccctagagaattatgctaagtctgccctgcctgtgctctataaa

SEQ ID NO: 393962 - DNA, 201 bp, Homo sapiens
tggtttgatacattttagggaggcatgagacatcaatcaaatacatttaagaaatacattagtttggtccagaaaggcaggacaactcaaagctggattgkggggggcacgggtttccaggctctaggtaagtttaaacatttaaacattttctggttgacaattggttgagtttgtctaaagacctgagatccacagaaa

SEQ ID NO: 393963 - DNA, 201 bp, Homo sapiens
cggaatttagcctggcaggtcccagcctctttttcctagccctctctcaaaatggagtcgctctggttcgaacgcctctgacagtagggatattctaatgwtatcacaagatagaacccagctgagggacttccatgtttcgtgtttccatattgttggctcctggagttgggaaatatactagttccttaataagaaact

SEQ ID NO: 393964 - DNA, 201 bp, Homo sapiens
attgagttactcatttctactcatatttttaacttctataaatcctttgatttcttttcctttgttttagcatcctattcttattagcttatcttttaaakaatgactggtaatgttttcttctcactgtataacttctgtgtccctcaggtttgttgtttttcatttgttatggtgtctttaatattaaatgctttcttt

SEQ ID NO: 393965 - DNA, 201 bp, Homo sapiens
aagcacaaacttgggtggccatttgggcagacaccaagctagctgcaggagtttttttttgtaccccagtggcgcctggaacaccagagagacagaaccaytcactcccctggaaagggggctgaagccagggagccaggtggtcttgctcagcggatcccaccccaacggagcccagcaagctaaaatccactggcttga

SEQ ID NO: 393966 - DNA, 201 bp, Homo sapiens
ttaggagtttcttcctcagaaacaagacaaaataagtcagttttcttagatgtgagctcacctccattgtttgcatacacatgccaaatagtttattaatstacaattttttaagctgagtggtgcatccagccattctggatgacttgcaaataatgactgacacttcctctcccccgcaaaaaagtttggcatggtggt

SEQ ID NO: 393967 - DNA, 201 bp, Homo sapiens
agttgagatgattttaattagtcacagttgtattttagttagcatttaaggatcttcattttctaatatagtaaatcatcactctttaccatatcttgacyctctctatatcactttcagttttagtagtaaagttcctgatgccaaaatatgttactggaacacatttctgtggttaaattattattgaattgtaaatat

SEQ ID NO: 393968 - DNA, 201 bp, Homo sapiens
tagaagggattggatgctaggggaaaacattaatgtctaccacagagagtctggtaacttgccaaaggcatagctgatgagaatggagccactgtttcaayttaggcagccttattctaagcctttacacttaaactatagactgtgctgcctcctgttttactatattcagctctaaagttaatcatgctttagcatttg

SEQ ID NO: 393969 - DNA, 201 bp, Homo sapiens
ttttgtgagatttttttcctttgagcacatagcaatttttactacagttgcaggcattttctttagctagaaaaaaaacaaaaaacaaaaaaaacaaaagyaggaaaagctggggccccaagtactctgaaataccaatctgtgggcagtgaggaatcactgaagcttttaagcaaaaaagttgtaaagttgtatcagagt

SEQ ID NO: 393970 - DNA, 201 bp, Homo sapiens
actgcgcccggccctttttcagttttttttaaatttgctttcatatgggagaaatttttcctgtagatgtatctgtgatgttggtggggtaggacacttcrgctttgatcctgggtgtgtgcagtagtgtagtctctatatgatttcttcaggtgtaaacagcatcagtgatgactgtgacttcctcggtgtcttagggta

SEQ ID NO: 393971 - DNA, 201 bp, Homo sapiens
tttggttaagcttcaaatcagtgctcattgaattgaattcatttgactcatctatctttaaaagttaaattgttactgggtgttgtgttcactataggggrgagcagaacattgtttctgaagaaaaattaaatatgctttaaatctttaaaagcatgttcaattcataaaatttaaatcagcatatgaaagcacatattt

SEQ ID NO: 393972 - DNA, 201 bp, Homo sapiens
atataaaaaatctttcattaaagaattattgagtcttaacttgggaatgctcctgttccagtttaagctcttttctcagcgtatgaaaaggagataagcargataacagcctctttagaatatccttaaattgcagccagagattaaaatgcatgtgtcactggtaattgctatttactgtgatttataccagcatattat

SEQ ID NO: 393973 - DNA, 201 bp, Homo sapiens
taccatgcttggataattagttcaatttaaaaaaaaatgccaaattacattccttatctataggaaaagctaatccttagtaaatatagatttacctataygtttttgttaaatcttacaatttttttcagtgtttttctagcaagtaagtgtatctttatatattaaattgttcctttaggggagaaatatattcttgaa

SEQ ID NO: 393974 - DNA, 201 bp, Homo sapiens
caaataaattgcaggatggagtgggggtctgggggatcttacagatcaaaggatgcctaaaagacttatcagccaatcataatgagtaaattttaattggmtattgattgaaactattttttaaaattatgacatttatgagctagttgaaaatttgagcactgcttagatatttcatgatatttaggagttactaatcac

SEQ ID NO: 393975 - DNA, 201 bp, Homo sapiens; identical to SEQ ID NO: 86362

SEQ ID NO: 393976 - DNA, 201 bp, Homo sapiens
gagataaaggtcttagatttgactttgattgtaacagttttgatcaagttcccattgctggtacagtaattctatttcagggaaaacggtatacttactcwcttaaacctaggtcacaaactgcatcctgtagcctagtgtgggaccaaactgaagcatatatgacagggagtagttccctgaacaaaaagtgatactgtt

SEQ ID NO: 393977 - DNA, 201 bp, Homo sapiens
tttcacatagtcccatatttcttggaggctttgttcatttctgagttcccttttctttacatcctcaccagcgtctattatttcttgttttttttttttttgtaatagccattctatctgggataggatgatgtctaattatggttttgatttgcatgtccctgatgatcagtgatattgagcattttttcatgtactcat

SEQ ID NO: 393978 - DNA, 201 bp, Homo sapiens
gaagtgagaaagacctagattctttcaccatatctgccagttaatctctttgagtctgtttcctcagatgtaaatgagaataacagtacccattttatagsattgttcataggattcaatgagataatgtttctcttagcacagccttggtaagcacccagtaaatgctacttgtcctgaggcttttattcagatctcaca

SEQ ID NO: 393979 - DNA, 201 bp, Homo sapiens
gcaaatgcaggtatctctttgatgtaatgatttattttactttggatagatacccaatagtgggattgctatggtagttctattaatattttagttttttragaaatctccatactgttttccataatggttgtactaatttacattcccaacaacagtgtgtgagttccattttctttttttttttattatactttaagt

SEQ ID NO: 393980 - DNA, 201 bp, Homo sapiens
gaagtgtcatatttccttgctttttcatgtttcctgtgtccttatgttgatattgcacatctggtgtaacagtcacttctttccttttttttttgtatgtwtgttttgtttgtttgttttttgttttgttttgagatagaatctcaccctgttacccaggctggagtgcagcggtgcagcctcagctcactgcaacctccg

SEQ ID NO: 393981 - DNA, 201 bp, Homo sapiens
ttggagttcattttcattcttctgcatatggatatccaattttcccagcaccatttattgaagaaggtgtcctttcctcattgtatattcttgacgtcatygttgaaaatcagttggctataaatatgtggatttatttctgggttctctgctctgttctgttggtttatatgtctagtttcataccaatactgtgctgtt

SEQ ID NO: 393982 - DNA, 201 bp, Homo sapiens
aatggccttctttgtctcttttgatctttgttggtttaaagtctgtttcatcagagactaggattgcaacccctgcctttttttgttttccatttgcttgrtagatcttcctccatcccttaattttgagtctatgtgtgtctctgcacgtgagatgggtttcctgaatacagcatactgatgggtcttgactctttatcc

SEQ ID NO: 393983 - DNA, 201 bp, Homo sapiens
tctttatttctgccttcgtttcgttttgtacccagtagtcattcaggagcaggttgttcagtttccatgtagttgagtggtgttgagtgagtttcttaatyctgagttctagtttgattgcactgtggtctgagagacagtttgttataatttctgttcttttacttttgctgaggagtgctttacttccaactaagtggt

SEQ ID NO: 393984 - DNA, 201 bp, Homo sapiens
tcattggtttcaaagaacatctttatttctgccttcgtttcgttttgtacccagtagtcattcaggagcaggttgttcagtttccatgtagttgagtggtkttgagtgagtttcttaatcctgagttctagtttgattgcactgtggtctgagagacagtttgttataatttctgttcttttacttttgctgaggagtgct

SEQ ID NO: 393985 - DNA, 201 bp, Homo sapiens; identical to SEQ ID NO: 86364

SEQ ID NO: 393986 - DNA, 201 bp, Homo sapiens
tcccagaaattctggtatgttgtgtctttgttctcattggtttcaaagaacatctttatttctgccttcgtttcgttttgtacccagtagtcattcaggarcaggttgttcagtttccatgtagttgagtggtgttgagtgagtttcttaatcctgagttctagtttgattgcactgtggtctgagagacagtttgttata

SEQ ID NO: 393987 - DNA, 201 bp, Homo sapiens
atagttgtagatatgtggcattagttctgagggctctgttctgttccattggtctatatctctgttttggtaccagtaccatgctgttttggttactgtarccttgtagtatagtttgaagtcaggtagcatgatgcctccagctttgttcttttggcttaggattgacttggcaatgtgggctcttttttggttccatgt

SEQ ID NO: 393988 - DNA, 201 bp, Homo sapiens
ctttcaagagagaaagaattctttctgtataaaaaggcaatattcgtttttaggtaaaaaaatgatatccttgaactgagctttttaaaaaagtggtgagytactaggcactggatctgttcaagcagatgctggatgatgctttgtctgtaagatattatagagataaagcctgtgctggatgaggctaaaaattgcctt

SEQ ID NO: 393989 - DNA, 201 bp, Homo sapiens
ttaaacatttaaagacttaaaaacatttttatgtttttatggtagcgtttttatggttttaaacatttaaagacttaaaaacatttaagtctttaatccaycttgaattaatttttgtgtaagatgtaaggaaggggtccagtttcagctttctacatatggctagccagttttcccagcaccatttattaaatagggaat

SEQ ID NO: 393990 - DNA, 201 bp, Homo sapiens
cagagacgtggattagagcttgattcttttttcatcagattcttctaccagggcaatatggaaatgttatgtctgtagtagtcactttctctctctctcttcctctctctctctctctctctgtgtgcgtgtgtgtactttcaaaaattatatacacagtatttcatttctttgtgttgggagacaattttcttttgcatt

SEQ ID NO: 393991 - DNA, 201 bp, Homo sapiens
tagaagatctagaagaagtggataaattcctggacacatacaccctcccaagactaaaccaggaagaagctgaatccttgaatagacccagtaacaagttstgaaactgaggtagtaattaatagcctaccaaacaaaaaaagctcaggaccagatggatttacagctgaattctaccagagatacaaagaggagctggta

SEQ ID NO: 393992 - DNA, 201 bp, Homo sapiens
atcagagacgtggattagagcttgattcttttttcatcagattcttctaccagggcaatatggaaatgttatgtctgtagtagtcactttctctctctctcttcctctctctctctctctctctgtgtgcgtgtgtgtactttcaaaaattatatacacagtatttcatttctttgtgttgggagacaattttcttttgca

SEQ ID NO: 393993 - DNA, 201 bp, Homo sapiens
actggttgcatattgtgccaagcattttgctgggtgtagagagagaaaaatgtaagtggcatatataggaaagttcaaatgggttaattttaccagagcargaagtctgaattttttggtcatagagaaatgatagtgtgatatagcagatcagaaaacaatagaaaagggacaatggaaatgaaaaggtatttttagagt

SEQ ID NO: 393994 - DNA, 201 bp, Homo sapiens
ctgcagcaagttatctagaagatctagctaagatcagtgatgtagttgaatacacgaaacaacacattttccatgtagattaaatagtcttctattggctraagatgccacgtaggaatttcacagctagagaggggatgcctggcttcaaagcttcaaaggacagtctgacagtctgactctcttgttaaggcctaatgc

SEQ ID NO: 393995 - DNA, 201 bp, Homo sapiens
ctgtatgtggtaaattcctttcagctgtaaaattattttggtaaaatgaggaaaaggaaaaggatggtcatttggcttccttaattattattattttgggwtggatgagtgaagtgtaattaattatggaatttctggtgaaatattggaacacaaaaaatttgaaagctttgattttaaatacgttagtttctttttgta

SEQ ID NO: 393996 - DNA, 201 bp, Homo sapiens; identical to SEQ ID NO: 86369

SEQ ID NO: 393997 - DNA, 201 bp, Homo sapiens
attttagctgcacaaataatagtaatttccttattgtcctatttctgtttttatcccaccgctgacctcttatcttgcatttccaaatacctgataggcartttaatgccctatacttcaactcattatgccctcaaataatatcaagtcattttctttcctctttttccttctgtttcctgtttcttgtaataggggctt

SEQ ID NO: 393998 - DNA, 201 bp, Homo sapiens; identical to SEQ ID NO: 86370

SEQ ID NO: 393999 - DNA, 201 bp, Homo sapiens; identical to SEQ ID NO: 86372

SEQ ID NO: 394000 - DNA, 201 bp, Homo sapiens
gattttttacaaattgaagattcgtggcaactctgtgtctaacaactttttggcaccattttcccaagagcatgtgctcacttcatgtctctgtgtcacaytttgatagttcttgcaaactttttcattattattgtatctcttatgatgatctgtgatcttgatgttactattgtaatagttttggagtgccacaaatcg

SEQ ID NO: 394001 - DNA, 201 bp, Homo sapiens
atacttacatgccagttatttgtataaaacatatataatttctcaacatttcatatgatattcacaaatttagttgaatggggagaagacaggcacatagwatcaaagttgaggtcagaagtagtctttctatgcctcaagttgtgagtgcatagacaaaaattttaaaatactggtttttatacatttttaaacttacgt

SEQ ID NO: 394002 - DNA, 201 bp, Homo sapiens
agaaaaacacattaaatcattacctgtaattgaaaaagggaatcaatcttagggcttttaaattatagatattttaaataaatgatgagcaaagtaactcrtattttaatactcctcttcagtccttaaatccagtagtaaaatagtatggatgtttaatacttaatgtactacattgagggatccctagaattaaaacaa

SEQ ID NO: 394003 - DNA, 201 bp, Homo sapiens
aggcaagggttggcagttttttttctgcaaagggccaggtggtgttttcggctttgagagcctcataaggtttcaggctctttaccaccacatgtgaagaygattctttgctcaagggctgtatagaaacaggtacaggccatagtttgccaccccttccctacagtgttacaagttttattttccattatttgataaact

SEQ ID NO: 394004 - DNA, 201 bp, Homo sapiens
cgattctttgctcaagggctgtatagaaacaggtacaggccatagtttgccaccccttccctacagtgttacaagttttattttccattatttgataaacyttgttactcaatggattcttagataagattgctatctaatgatttctaatagtctgtttatcttgacagtccagaaaatcaactatagttaattgtctct

SEQ ID NO: 394005 - DNA, 201 bp, Homo sapiens
caatttgttccatgcctctcacctagcttctggtggtttgctggcaatctttggagttccttggcttatagaacattaccctaatatctgacttcatcttmacgtggcatattccctatgtgcttgtctgtggtcagattttctgtttttatatggaccctaatcatactcgattagggacctcccctactccagtatgac

SEQ ID NO: 394006 - DNA, 201 bp, Homo sapiens
ctgattcttgggcctcttggtggcctagttggatcccaatagtggcaacagtgggtgagttcttgggcccctgggcaggtggtgtggcatgggtggtgacrgtggcagtcgcaggatgacctctgggtcccaggtggtacacgcttatgttggtggaggctgttatgggctgcgcaggccagtctctaaccctgcagatgg

SEQ ID NO: 394007 - DNA, 201 bp, Homo sapiens
ttcttttttattacaaatttaattttaaaaaaggatatagggctatttaaattttctctttacttttgtgtcagttttagttgtgtttttcaatgaattcrttaattttatctcatttaatatattggcatatagttatttgtaatattccctttttatttctttaatgtctttaagttctatgatataccctatatatcc

SEQ ID NO: 394008 - DNA, 201 bp, Homo sapiens
cagtgttctctctggatggtctattcagaatgtaattatccattcactatcttggttcttagtggaggaggcaagtatgaaatacctctagtcaactatcwtctttctatactttacatacttactattttagtgcatatttatttactctggaatataccataaagattccagtatcaacatttttttggctggttattt

SEQ ID NO: 394009 - DNA, 201 bp, Homo sapiens
aagaacttcctttaacttttttttttcagacagagtcttgctctgtcaccaggctggagtgcagtggcacgatcttggctcactacaaccttcgcctcccrggctcaagggattctcctgcctcagcctccccagtctgggagtacaggcgtgtgctaccacacctggctaattttttatatttttagtagagatgggttt

SEQ ID NO: 394010 - DNA, 201 bp, Homo sapiens
cagtatcaacatttttttggctggttattttaatgattatatagtattgtattgaatggcattatatattgattttcctttgccggtcttttacaattggrcatttaaattgtttccagtattttgctaatttaagtagtgctgtgatgagtatcctggtacctacatctttatatacatgcaaatattttctcaggtaaa

SEQ ID NO: 394011 - DNA, 201 bp, Homo sapiens
gttgtttaaatataatttccaccagtggcatctgacaacaaatactgtcagttcttttccttgaagcagtagaatcactttgtttcttttcaagaaaatamctgttaaatatctgagtctgaataatcagtttgtttactagcagttcttataaatggcccttcattttttttgttctttttttttttaacttttatttta

SEQ ID NO: 394012 - DNA, 201 bp, Homo sapiens
ctgagacattactttcaaagatttcttttactgtcacagcactgtgagcaaggacaagacatctattgaatgggctgcctgccagttggaagttcaacttytgtaaagtcagtcaaagttctttcttctagaagcctcagtttcctcattggtaaaatggagacaatttaggtagacaaagcacaagctcagagactaact

SEQ ID NO: 394013 - DNA, 201 bp, Homo sapiens
tacataaggagggagaatttgtgagtgggtgaatagagcagaaggtgactttactaacgtctttcgcgcattcattagccctcagcatgcttaaaggtgargtttaaggatgattaaaggtgaggttttcttcttaccccacagtagtggctgttgacatttgatatttttgctcttaaaggtgtgagatgctctttgcat

SEQ ID NO: 394014 - DNA, 201 bp, Homo sapiens
aaaacagagtaggagaatttttaaaggtaacccagattctttaagtggaagttctctttctactagtacttcttgtatttaaaaaagacttggtggtgggrgggaactactaattttgcagaatccagaaagttctgacagattcaaatctattcatatcaggcaagaaataatcataagagataatattttcttcttaga

SEQ ID NO: 394015 - DNA, 201 bp, Homo sapiens; identical to SEQ ID NO: 86371

SEQ ID NO: 394016 - DNA, 201 bp, Homo sapiens
ggagaatgaataaattgtgaactatacatataaagtaatactgctcagttacaaaaaggaccaagctgatgaattcagtagcatggataaaatttcagaamgcctagatttgatttattgcttattatttatcatgcttatttcacataagaactgtaatgtctagaatattggacaaaaagccagactaaaagagaacat

SEQ ID NO: 394017 - DNA, 201 bp, Homo sapiens
ggacaaaaagccagactaaaagagaacatgtgttatcattctacttatataaagttcaaacacaggcaaatactaaccatggtgttagtagtcagaatacrtgttactcttgaggcaggggtggtgattgaaaagggggcatgaagagagtgctgactgcaagggtatgtatgtttcactttatcacggccttttggctaa

SEQ ID NO: 394018 - DNA, 201 bp, Homo sapiens
gaagaaggaacattgggatccgctgctaacttgctgaatcactttaaacaagtaacttagcttcttttctgttagtcctttgtcacctagggattgctatrtattcagcctactgctatatactgaatttgcatgtcatgtagaaagttagccgatggtgattaatgaatagaaacttatttttcctagcatgatggcaga

SEQ ID NO: 394019 - DNA, 201 bp, Homo sapiens
ctttctttgtaaaggcatgcttcccaagagccaagtgacagatacacttgccaaagaaggtcctagttatccaaggtatgcattcttatttaaaatttttraagttaaatcaattatgtacaaaaatgtacacatttaaaaaataaagtagctctgggtttgatttattgcttactgttagtcatgctctttgacacaaga

SEQ ID NO: 394020 - DNA, 201 bp, Homo sapiens
attttatcattgtataattttggtttgttgtcagttatcctgactgcactataacctatatgagggcagggacattgttggtcttactgctctgtcctgastggctggcacatagaggccattgacttgtatttgttcaatgagtgtaacacttacttttaagaagtatggtcacttaaagaggtatctggtggttttcac

SEQ ID NO: 394021 - DNA, 201 bp, Homo sapiens
gtactgaactttttgatcaggtaagatgtgctgaaagtaaccaaagtattccggtggaagagtactcagatttatcagtgtgacatttgtagaaagaaagraaatagttgcataaattccagatgcattggcttgaattttgaagtgtgggaagatgctcacaagtagcagctgttcatttaatttgccctttgagttatt

SEQ ID NO: 394022 - DNA, 201 bp, Homo sapiens
ctgcaggagtgaccagcctctgcttggaaagagccaagatggccagaggcactacttatcctgttttccactccctcttgatattgtctcttcatcacacwgttcaaaacccagagcacaggctctagggaggtccacttgcactggtaatatcaatggaacacagaggatggatggctaagggaaaaggaaaggtttcca

SEQ ID NO: 394023 - DNA, 201 bp, Homo sapiens
taattttggtttgttgtcagttatcctgactgcactataacctatatgagggcagggacattgttggtcttactgctctgtcctgagtggctggcacataraggccattgacttgtatttgttcaatgagtgtaacacttacttttaagaagtatggtcacttaaagaggtatctggtggttttcacagtggattggtgat

SEQ ID NO: 394024 - DNA, 201 bp, Homo sapiens
gtgggcaaaggatatcaacagacactttccaatagaagacatttatgcagccaacaaacatactggtcattagagaaatgcaagtcaaaaccacaatgagwtaccatctcacatcattaggatggcgatcatttaaaaagtcaggaaacaacatgctggagagggtgtggagaaataggaacacttttacactgttggcag

SEQ ID NO: 394025 - DNA, 201 bp, Homo sapiens
ttcttttagctcaaattcagtcttctcataataagcatttcaattgcaaataaaaatggatagaggtgaatgtcataggtggctaccttatttgaatgctygtatttgaatggccacatatagtcacacactttttcttctgattctgcaaacataaccttgattttttaggcactttaagaactaagtagttaaacagag

SEQ ID NO: 394026 - DNA, 201 bp, Homo sapiens
tctctaacaaggaaagtcagtaaatcactgtaacccaggatttccttgtgttttaaatatcattggagagttgcatagttactatagcaaacttttctagsaaatgctagagtagaaattgtcaatccagaaggtgagcattttcatacagctgtaaagttatcaagatgatatgcactagattttattagaagaaaacaa

SEQ ID NO: 394027 - DNA, 201 bp, Homo sapiens
gtaacccaggatttccttgtgttttaaatatcattggagagttgcatagttactatagcaaacttttctagcaaatgctagagtagaaattgtcaatccaraaggtgagcattttcatacagctgtaaagttatcaagatgatatgcactagattttattagaagaaaacaacactgtggtccttagacctgtgcaagagg

SEQ ID NO: 394028 - DNA, 201 bp, Homo sapiens; identical to SEQ ID NO: 86368

SEQ ID NO: 394029 - DNA, 201 bp, Homo sapiens
accatgcttggataattagttcaatttaaaaaaaaatgccaaattacattccttatctataggaaaagctaatccttagtaaatatagatttacctatatrtttttgttaaatcttacaatttttttcagtgtttttctagcaagtaagtgtatctttatatattaaattgttcctttaggggagaaatatattcttgaac

SEQ ID NO: 394030 - DNA, 201 bp, Homo sapiens
acaaataaatataaaatgcacaaatgaaaaactataggcagtgtctttcaagagagaaagaattctttctgtataaaaaggcaatattcgtttttaggtawaaaaatgatatccttgaactgagctttttaaaaaagtggtgagctactaggcactggatctgttcaagcagatgctggatgatgctttgtctgtaagata

SEQ ID NO: 394031 - DNA, 201 bp, Homo sapiens
gaggtgaggaagctgtggaagaaaagttagaaactagcaaaggttggttcatgaggtttaaggaaataagccaccttcataacttaaaagtgcaatgtgargcatcaaatgctgatgtagaagctgcagcaagttatctagaagatctagctaagatcagtgatgtagttgaatacacgaaacaacacattttccatgtag

SEQ ID NO: 394032 - DNA, 201 bp, Homo sapiens
agagcagtgttttcttgtggccttctactgttttcccactttttaaatttttgttttttattgacacgtaattgtacatatttatgggctaccatgtgtcrttttagtacatgtatacattgtgtaatgatcaaatcagggtaattagctattgatcacctcaaatatttatcatttctttgtgatgggaacgtacaatct

SEQ ID NO: 394033 - DNA, 201 bp, Homo sapiens
taacattcttgaatataccgataccacatttactttaaattattataaaatcaatttgtctttcattaatttattttccatttgtcttcattgaagttggmaagttttattgccgagtgctctaaaataatatgcagagtttcagtgattatagctgattatctcctgttagatcaagactccaacaaatgccaactataa

SEQ ID NO: 394034 - DNA, 201 bp, Homo sapiens
aggagaaaatctggaaagctgccagagaaaacacactaggaaataataaaaacgactgctgaaggaaaagtaacaccatcaaccctgaattctatacccgyagggagacagaattcttgaaggataaagatgaaataaagactttttcagataaaccaaaactggaaatttattacctgtagatctgcaatataagataga

SEQ ID NO: 394035 - DNA, 201 bp, Homo sapiens
aggataggagttagagagcagtaaatggttcttatattacgtgggaaggcatacaatattaactcttaagtaagcaggtaaaagttgaggatatatactasagttcctagaacaatcacttaaaaaataatttaaagaggaaggccaaaaagccaatcgattaaatgaaattctaaaaaaagtttggttaacccaaaagaa

SEQ ID NO: 394036 - DNA, 201 bp, Homo sapiens
ggaaaatgaaaaagtatcatgattatggtggtaaactgctcttatttcttcattttaaagcattttccctaagaaacatgtgctttttatttgtttttcargttgctgcatgatctcaacttttccaaaaatgagatccatagttttacagcataatgaagagctgtcattgtcctttattcaactagtttatctaaattt

SEQ ID NO: 394037 - DNA, 201 bp, Homo sapiens
cacatcttttctcctcgtttattttatagacaggaaatgaacagtggtgaataattgcaagaatgctacagtatactggcataatatttggtatatacgtkataggcattaaatgaatttttgttgaatgaatataatgtggggcttttagaattaaatatttgtttgaatttcaaaacccaaaattattttttaatctta

SEQ ID NO: 394038 - DNA, 201 bp, Homo sapiens
taggcattaaatgaatttttgttgaatgaatataatgtggggcttttagaattaaatatttgtttgaatttcaaaacccaaaattattttttaatcttatyacggaaataacgcttttacttaaagcagtggttctcaaactttttggtcttaaaatatctttactcttttattgttgaagactccaaggactattgttta

SEQ ID NO: 394039 - DNA, 201 bp, Homo sapiens
ggaatttatttcttacagttatagaggctgagaagtccaaggtcaacaggccacatcttgtgagagccttcttgctagtggggactccctgcaagagtccygatgcagtatagggcatcccatggtaagggggctgagcatgcaagctcagttctctcttcctcttttcataaagccaccagtcctactcccatgaaccca

SEQ ID NO: 394040 - DNA, 201 bp, Homo sapiens
gaatttatttcttacagttatagaggctgagaagtccaaggtcaacaggccacatcttgtgagagccttcttgctagtggggactccctgcaagagtcccratgcagtatagggcatcccatggtaagggggctgagcatgcaagctcagttctctcttcctcttttcataaagccaccagtcctactcccatgaacccac

SEQ ID NO: 394041 - DNA, 201 bp, Homo sapiens
gagaagtccaaggtcaacaggccacatcttgtgagagccttcttgctagtggggactccctgcaagagtcccgatgcagtatagggcatcccatggtaagsgggctgagcatgcaagctcagttctctcttcctcttttcataaagccaccagtcctactcccatgaacccactaatccattaattcatgaatctgccctg

SEQ ID NO: 394042 - DNA, 201 bp, Homo sapiens
cctcagcttcccaaatagctaggaccacaggcacatgccaccacacctggctaagtttaaacagttttttttgttgttgttgtttttgggtttttttttttgtagaaactaggtctcactgtgttgcccaggctggtctcaaactcctgttctcaaacaatcctcccaccttggcctcccaagatgctagggttacaggtg

SEQ ID NO: 394043 - DNA, 201 bp, Homo sapiens
gcctcagcttcccaaatagctaggaccacaggcacatgccaccacacctggctaagtttaaacagttttttttgttgttgttgtttttgggtttttttttytgtagaaactaggtctcactgtgttgcccaggctggtctcaaactcctgttctcaaacaatcctcccaccttggcctcccaagatgctagggttacaggt

SEQ ID NO: 394044 - DNA, 201 bp, Homo sapiens
ggagcacccagattcataaagcaagttcttagagacctacgaagagacactttcacacaataatagtgggagactttaacaccctactgtcaatattagartcaatgagacagaaaattaataaggatattcaggacttgaactcagctctgcaccaagcagacctaatagacatctatggaactcttcaccccaaatcaa

SEQ ID NO: 394045 - DNA, 201 bp, Homo sapiens
ctgcctggattcatccattgttgacatagttatcattatattttaatgaaaccattttttctccactattattttttatacttctttgcttttttttttttagcagctgctctaagggtttatgatatacatttctaatgtatcagtctactttcaaataatatactatttcacatatagtataataaccttttaataata

SEQ ID NO: 394046 - DNA, 201 bp, Homo sapiens
tgtatttagtatcgatgaacacaaatggaatttatcttcttttcagtgcgggttgttgagagtgtgggaaaaatagagattgttctacaaaaaaaagagartacttcttgggactttcttggccatcccctgaagaatcataattcacttattccaaggaaagatacaggtatgctgtgttcttttgttacgttaatttca

SEQ ID NO: 394047 - DNA, 201 bp, Homo sapiens
tcattatattcctctcattccttcacacttctgtttttcaccttactttctaagtggagaatcagtcatatttgggctgaggtcatcaaaaagggtggggmaacaccaggttacattcaaagtgggagcccagttcaagctccaatttttcttttaattggttactgttctctggctatacagaagctcatatgaatgttt

SEQ ID NO: 394048 - DNA, 201 bp, Homo sapiens
acatatatatagaaaagggtgcatattagaagtgctctacttgatgatactttgcaaaatgaacatatcctgtattttctctttggaaattggtagtattygctccttgttctaagtgttttggaatttcacaatgatgtgccagaacatggatgatttttcatccttcatgctgggtatacattttttgtgctaatcttt

SEQ ID NO: 394049 - DNA, 201 bp, Homo sapiens
ttttaagctcaatgttgagacctactgctctttaaaaaagtttcttttcaaattactactcattgacaatgcaactggtcacccaagaggtctgatagcastgtacgtcatgccttctctattaagctgttcttgcattgctgtaaataaatacctgagactgagactaggtaatatataaagaaaagaggtttaattggc

SEQ ID NO: 394050 - DNA, 201 bp, Homo sapiens
tcctagggccctagagaattatgctaagtctgccctgcctgtgctctataaatgggacaacaaagcttggatgacagtacctcagtgtttatagcatggtktactgaatattttaagctcaatgttgagacctactgctctttaaaaaagtttcttttcaaattactactcattgacaatgcaactggtcacccaagaggt

SEQ ID NO: 394051 - DNA, 201 bp, Homo sapiens
cttctatctcccattgaagactttacctgtgttttctgttttggccttgtgaaattctattttttaaaagggaaaatacagtttctttttaacattaagaraaaagtatgcccaaatagtcttattatcctcagtatttcacccttaccctgagtatctcaatattaattgtatgtatttaattcaaataagttaggtatt

SEQ ID NO: 394052 - DNA, 201 bp, Homo sapiens
ctaccatcttcagcttttcacttgaattaattttcagataccaaaacctacacctttaagcataaatgtttttgttttaatcatttttgacagttaaaatrttctctaatcatgtatataaaatacatacacacaaacatagagacacaagaatgtctatctttcttgcctttgtcaaagagatattctaaaattgcttac

SEQ ID NO: 394053 - DNA, 201 bp, Homo sapiens
ggtaattttctcatatgaatggtacatggtgattatatcaactgggctgtagaaaatgggcactgatttctcaactgtgttgattctagattggtaagtgrcatgctccaagtatagttgactgcatttctgatcttgctttgtttttatgggaattaaactcagaatagcccttcttaataggtcttttcaaaaatttgg

SEQ ID NO: 394054 - DNA, 201 bp, Homo sapiens
tgaatgaaatcaaatgtattaactgacatatgatagagcaactctgaaattttgagcaaggcgcttcatatagccgagtattgctcttttcactgtaagtraagataattgtatctattaccttgtaagtttgctggtaaggattaaacgagatatctagtacttagaacagtgaccgctcttctaaatagccactgtaaa

SEQ ID NO: 394055 - DNA, 201 bp, Homo sapiens
atggtggaaggggaagtaaacacccttcttcacatggcagcagcaaggagaagtacagagtgaaggggagaaaagtcctttgtaaaactatcagatttcaygagaactcacctactatcacaagaatagcatgagggtaacagcccccatgattcaatcacctcccaccgggtccttccagaaacgtgcagcttatgggaa

SEQ ID NO: 394056 - DNA, 201 bp, Homo sapiens
tgctgggctagcggcggcggctgcccagtcggtgtaagccttttccgcgcgcccgctggccggcggggagcctgtgagcctgggctccctgcggggcaagrgactacttatcgagaatgtggcgtccctcggaggcaccacggtccgggactacacccagatgaacgagccgcagcggcgcctcggccccggggcctggtg

SEQ ID NO: 394057 - DNA, 201 bp, Homo sapiens
agtggcgcgatctcggctcactgcaagctccgcctcccgggttcacgccattctcctgcctcagcctcccgagtagctgggactacaggtgcccgccaccrcgcccggctaattttttgtatttttagtagagacagggtttcaccgtgttaaccaggatggtcttgatctcctgacctcgtgatctgcccgcctcggcct

SEQ ID NO: 394058 - DNA, 201 bp, Homo sapiens
ctgctaagtttatcatactcaacactcgttgaaatatccttgtgtgtattttttttttttttttttagacagagtcttgtactgtcacctggcctggagtkcagtggcatgatctcggctcactgcaacctctgcctcccgagttcaagtgattctcctgcctcagcctcccaagtagctgggattacaggtacccaccac

SEQ ID NO: 394059 - DNA, 201 bp, Homo sapiens
actcaacactcgttgaaatatccttgtgtgtattttttttttttttttttagacagagtcttgtactgtcacctggcctggagtgcagtggcatgatctcrgctcactgcaacctctgcctcccgagttcaagtgattctcctgcctcagcctcccaagtagctgggattacaggtacccaccaccacacccaggtaattt

SEQ ID NO: 394060 - DNA, 201 bp, Homo sapiens
ctaaatttttttggaataaatcattccaaaacacaaaacaaatgtatctgtcgttcttgttgttgttgttgttgtttttgagatggagtcttgatctgtckcccaggctggagtgcagtggcgccatctcggctcactgcaagctccgcctcccgggttcacgccattctccttcctcagcctccctagtagcttggacta

SEQ ID NO: 394061 - DNA, 201 bp, Homo sapiens
gggcagaaatgggagataaaagctgctaagtttatcatactcaacactcgttgaaatatccttgtgtgtattttttttttttttttttagacagagtcttstactgtcacctggcctggagtgcagtggcatgatctcggctcactgcaacctctgcctcccgagttcaagtgattctcctgcctcagcctcccaagtagc

SEQ ID NO: 394062 - DNA, 201 bp, Homo sapiens
cattccaaaacacaaaacaaatgtatctgtcgttcttgttgttgttgttgttgtttttgagatggagtcttgatctgtctcccaggctggagtgcagtggmgccatctcggctcactgcaagctccgcctcccgggttcacgccattctccttcctcagcctccctagtagcttggactacaggtgcctgccatcatgccc

SEQ ID NO: 394063 - DNA, 201 bp, Homo sapiens
gctaataggagataatacagagaatatcttcctggttccagagtaggggaagaatattttggcttaatctagtcccaaaacgcttctcgttttatagttgttttttttttttaaacttttatgttcaggagtacatgtgccagttttttctatcaataactcatgtcacaaaggtttgttgcagattattttgtcacccag

SEQ ID NO: 394064 - DNA, 201 bp, Homo sapiens
aacccaggaggtgaaggttgcagtgagccaagatggcgtcactgtcctccagcctgggtgacagaatcagactccaggtcaaaaaaaaaaaaaaagagaaytcttttcatcttacacattgtaattttttttgtttcggattcaggggtacatgtgcaaggttgtgtttatattacatgatgatgaggtttgggatacgaa

SEQ ID NO: 394065 - DNA, 201 bp, Homo sapiens
accttagacagagtaatttataaaaaacagaaatttatttctcacagtttttgaagctgaaggcccaagatcaagatgtcagcaggggcctggcacagtgrctcacacctgcaatcctagcactttgggaggcagaggcaggcagatcacctgaggtcaggagttcgagaccagcctgcccaacatggtgaaaccccatct

SEQ ID NO: 394066 - DNA, 201 bp, Homo sapiens
aagatcaagatgtcagcaggggcctggcacagtgactcacacctgcaatcctagcactttgggaggcagaggcaggcagatcacctgaggtcaggagttcragaccagcctgcccaacatggtgaaaccccatctctactaaaaatacaaaaaaatccaccgggagtggtgacacatgcctgtagtcccagctacttggga

SEQ ID NO: 394067 - DNA, 201 bp, Homo sapiens
aatttgatcctataattttcttttctttctttttttttttttggaaaaaggaaggttttttaaatgacatacaccggccataaaacatttcaagagatgtrgaagcctacaatcagctacttgttttaatgaacacttcaaatttagcctattcaaaaatatgtttttctcttgtcaatttcccttaagaagctgcttgaa

SEQ ID NO: 394068 - DNA, 201 bp, Homo sapiens
ttgggaggcagaggcaggcagatcacctgaggtcaggagttcgagaccagcctgcccaacatggtgaaaccccatctctactaaaaatacaaaaaaatccmccgggagtggtgacacatgcctgtagtcccagctacttgggagactgagatgggagaattgcttgaacccaggggacggaggttgcagtgagctgagata

SEQ ID NO: 394069 - DNA, 201 bp, Homo sapiens
tagtataaaaaatgaccttgtatctccctgatagaaataattctggagtcaggtataaacagactcggagaggagagacagagaaaatgtactttaactargttataggggcataaaaatgaaatggatcttgacgacatcacaagctctacagcagaaatgggagcgtttaatttgatcctataattttcttttctttct

SEQ ID NO: 394070 - DNA, 201 bp, Homo sapiens
agaacattctcttttaatgttgccattatctgttccctcagatcatataaaggtggaattgaaattaacatttgtagatgaaagacactgtttttctcctraagaacttgcttaaaccaattgtttaaagatccaatgttcttaggctctaagttgatttctaataagagattttttttcttctactatgacaatattcta

SEQ ID NO: 394071 - DNA, 201 bp, Homo sapiens
gtaagttctatatttgaaagaggtcttgtataaaactggagaactgtttattttaatagtataaaaaatgaccttgtatctccctgatagaaataattctrgagtcaggtataaacagactcggagaggagagacagagaaaatgtactttaactaggttataggggcataaaaatgaaatggatcttgacgacatcacaa

SEQ ID NO: 394072 - DNA, 201 bp, Homo sapiens
ctccagcctatgtgacagagtgagactccatctcaaaaaaataaaataaaataaattaaaataaaataaattaaaaataaaagcttatgctctttactttstacataccattctattttctttattttcatatttctaatttatggcactttgagctacaaaatacattttaaaacatctttcaaatgccataaatatttt

SEQ ID NO: 394073 - DNA, 201 bp, Homo sapiens
cctccattatttccctagttttctagctatgatttgatcaaactgtgtttataagttcctttatattaaatttaggtggtaagctagatttaaatcttttyggagaaaaattgttatttgatattaaatgtaattatttatttcactggaaatataaaatatatagccttccaagtaacaaagggtaatgaatttattgtt

SEQ ID NO: 394074 - DNA, 201 bp, Homo sapiens
cccaggctggagtgcagtggcgcgatctcggctcactgcaagctccgcctcccgggttcacgccattctcctgcctcagcctcccgagtagctgggactayaggtgcccgccaccgcgcccggctaattttttgtatttttagtagagacagggtttcaccgtgttaaccaggatggtcttgatctcctgacctcgtgatc

SEQ ID NO: 394075 - DNA, 201 bp, Homo sapiens
acaggatggaactccctgagaacaggttgaaattgtcctcaagagaaatttcttctttttctttctctttcaattactctatctctctctctctctctctyagaaacatcaaccctgcttttaaggctttgcaactcattcacttaggcccactcacattatccagaataatccctcttgcttaaagacaatgcattagga

SEQ ID NO: 394076 - DNA, 201 bp, Homo sapiens
gcaggcagatcacctgaggtcaggagttcgagaccagcctgcccaacatggtgaaaccccatctctactaaaaatacaaaaaaatccaccgggagtggtgrcacatgcctgtagtcccagctacttgggagactgagatgggagaattgcttgaacccaggggacggaggttgcagtgagctgagatagtgtcactgcact

SEQ ID NO: 394077 - DNA, 201 bp, Homo sapiens
taggttataggggcataaaaatgaaatggatcttgacgacatcacaagctctacagcagaaatgggagcgtttaatttgatcctataattttcttttctttctttttttttttttggaaaaaggaaggttttttaaatgacatacaccggccataaaacatttcaagagatgtggaagcctacaatcagctacttgtttta

SEQ ID NO: 394078 - DNA, 201 bp, Homo sapiens
aggttataggggcataaaaatgaaatggatcttgacgacatcacaagctctacagcagaaatgggagcgtttaatttgatcctataattttcttttctttctttttttttttttggaaaaaggaaggttttttaaatgacatacaccggccataaaacatttcaagagatgtggaagcctacaatcagctacttgttttaa

SEQ ID NO: 394079 - DNA, 201 bp, Homo sapiens
ggttataggggcataaaaatgaaatggatcttgacgacatcacaagctctacagcagaaatgggagcgtttaatttgatcctataattttcttttctttctttttttttttttggaaaaaggaaggttttttaaatgacatacaccggccataaaacatttcaagagatgtggaagcctacaatcagctacttgttttaat

SEQ ID NO: 394080 - DNA, 201 bp, Homo sapiens
tgctatttaatgtttgcagaatgaggaaagctaactggccgagtggattttttccgagctgtcaattattctctagaatcaagaaatatttttcttttttytttttttttttttaacaaacagtgacactttgcttgtatatagctcagttggtacccactctttttgatcatctgacattcctgcaatgagtggaaattt

SEQ ID NO: 394081 - DNA, 201 bp, Homo sapiens
taagtgggtccctcatgagctgagcaaaaataaaaaataaaaaaaagttattttgaagcaccctcttctcttattctactcaacaacaatgaaccatttchcaatcagattgtgacatgccatgaaaagtggattttatatgacaattagctacaccagctcagtggttaaactgagaaaaagctccaaagcacttcccaa

SEQ ID NO: 394082 - DNA, 201 bp, Homo sapiens
ggtccctcatgagctgagcaaaaataaaaaataaaaaaaagttattttgaagcaccctcttctcttattctactcaacaacaatgaaccatttctcaatcdgattgtgacatgccatgaaaagtggattttatatgacaattagctacaccagctcagtggttaaactgagaaaaagctccaaagcacttcccaaagccaa

SEQ ID NO: 394083 - DNA, 201 bp, Homo sapiens
ttctactcaacaacaatgaaccatttctcaatcagattgtgacatgccatgaaaagtggattttatatgacaattagctacaccagctcagtggttaaacygagaaaaagctccaaagcacttcccaaagccaaacttataccaaacgaaggtcatggtccctgtttgttgatctgctgccagtctgatcctctacagctt

SEQ ID NO: 394084 - DNA, 201 bp, Homo sapiens
acagctcctgcagccagcattggtcaacagaaagggcccaattctccacaacaatgcctgactacacgttgcacaaccaacccttcaaaagttgaacaaaytgggctacgaagttttgcctcttctgccgtattcacctgacttctcgccgactgactgacactttttcaagcatcttgacaactttttgcagggaaaaca

SEQ ID NO: 394085 - DNA, 201 bp, Homo sapiens
tcagcagttttagttatggtaaaagtagctctgcctctttgtacaaatgacttgcagatcacatagtacaggaggtcggaggtctttttggtagataaaamattatgtctagtctctggagaaccatagcaaaaaaaaccacagcacagaactaggaattgaaacaaagtcataccatctttggcaaagaactagtcacat

SEQ ID NO: 394086 - DNA, 201 bp, Homo sapiens
ttaagaataaaaattaaatctatcagatttatattaaacctaataaaatgttttagtttattggctttaaaaaattttaattcatttttctatcatctatkacagtgccgattatgtcactcctaattaaagagggtgaggtccctccttatttaaaatcagagcggtattttgagaatttcaatatttgaatgataaaag

SEQ ID NO: 394087 - DNA, 201 bp, Homo sapiens
agcaaaagccaatggaggccctgcagacttcagctggccatgccagggttctgccttttaaatattaccacatattggtaaacatggtatttgttgaaaamcaaaattattccataaaatccagttgtgaatcataatatcttttttataaagttcttgataaaatatgcagttattttacgataatactactccctttca

SEQ ID NO: 394088 - DNA, 201 bp, Homo sapiens
tttgcattttagatcaagccatagagaatacaaatttttaagggagcaggtttggagacagagagcacaggctattgtagcagttcaaatgagaataaacmatacctaaaccaggaaaaaggtattcatagtagaaataaagtagagaatatacagtttaaagtttttaagaggtacattaaagaaaggttttagctttag

SEQ ID NO: 394089 - DNA, 201 bp, Homo sapiens
aacgaagagattctgaattccctcaagtacgtccaacctggtggtgggttcgagcccagcttcatgctcttggagaagtgcgaggtgaacggtgcgggggygcaccctctctccgcctttctgcgggacgccggccagcccccagcgacgacgccactgagctcatgaccgaccccaagctcatcacctggtctccggtgt

SEQ ID NO: 394090 - DNA, 201 bp, Homo sapiens
tgtaagtgaagataattgtatctattaccttgtaagtttgctggtaaggattaaacgagatatctagtacttagaacagtgaccgctcttctaaatagccmctgtaaatgtaaagcgtaatctccaagaaggtaagataattctgtttaacccatcattgaatcacgagtaccacgaattatgtttgtcattagtagatga

SEQ ID NO: 394091 - DNA, 201 bp, Homo sapiens
tgctggctcatagggattgaaattcttagttcatcctcccgaatgtctccatccaggcttaatattccactcctccccaatagggccctgaactcagtatraagaatttgacagaaatatgaatttagtctccttttggctctacctctcttcctttaaaatcttgaacctgattttcaacacatttttctcttcaacaca

SEQ ID NO: 394092 - DNA, 201 bp, Homo sapiens
cgagtattgctcttttcactgtaagtgaagataattgtatctattaccttgtaagtttgctggtaaggattaaacgagatatctagtacttagaacagtgmccgctcttctaaatagccactgtaaatgtaaagcgtaatctccaagaaggtaagataattctgtttaacccatcattgaatcacgagtaccacgaattat

SEQ ID NO: 394093 - DNA, 201 bp, Homo sapiens
ctccttatttaaaatcagagcggtattttgagaatttcaatatttgaatgataaaagaaaaagccagccaaaggtctcaaacattcatttaaattatctgrcagagagaacccgtaagttctatatttgaaagaggtcttgtataaaactggagaactgtttattttaatagtataaaaaatgaccttgtatctccctgat

SEQ ID NO: 394094 - DNA, 201 bp, Homo sapiens
acttttgaactttcagagtaggagagaacacctcccccacaaaaaaaccctcacaaattaatattttaaagagacgtagacttcattttatgaattctcayataaaattttgtaatttttgataacactgtcagagctatcttgctaagtccacagatactgggataatgcctctgctttcaagcattcagagatgaacct

SEQ ID NO: 394095 - DNA, 201 bp, Homo sapiens
caccagtcagagttcaaccggaggtgcagaacatttaagattgtacaggtattagaattatatctctcttgatagatggatggatggacagatgatagatgatagatagatagatagatggatagatggatagatgatagatagatagatagattagatagatagatagatggatggcatggttgtggggactggaataaa

SEQ ID NO: 394096 - DNA, 201 bp, Homo sapiens
accagtcagagttcaaccggaggtgcagaacatttaagattgtacaggtattagaattatatctctcttgatagatggatggatggacagatgatagatgatagatagatagatagatggatagatggatagatgatagatagatagatagattagatagatagatagatggatggcatggttgtggggactggaataaag

SEQ ID NO: 394097 - DNA, 201 bp, Homo sapiens
ccagtcagagttcaaccggaggtgcagaacatttaagattgtacaggtattagaattatatctctcttgatagatggatggatggacagatgatagatgatagatagatagatagatggatagatggatagatgatagatagatagatagattagatagatagatagatggatggcatggttgtggggactggaataaagt

SEQ ID NO: 394098 - DNA, 201 bp, Homo sapiens
cagtcagagttcaaccggaggtgcagaacatttaagattgtacaggtattagaattatatctctcttgatagatggatggatggacagatgatagatgatagatagatagatagatggatagatggatagatgatagatagatagatagattagatagatagatagatggatggcatggttgtggggactggaataaagtc

SEQ ID NO: 394099 - DNA, 201 bp, Homo sapiens
ccacaagaaagcaagatcacaaacaggatggaactccctgagaacaggttgaaattgtcctcaagagaaatttcttctttttctttctctttcaattactmtatctctctctctctctctcttagaaacatcaaccctgcttttaaggctttgcaactcattcacttaggcccactcacattatccagaataatccctctt

SEQ ID NO: 394100 - DNA, 201 bp, Homo sapiens
gatcttttaaaaacagtcctatccctgaaaccaccccgaaacaagccattgatgggaaaagtgacttatgatgtctgtcaagcatagtgttttgtgtgtakgtgtgtgtgtgtgtgtttaagagagaaagagagtcagagacagagaaaccaacatgacctacatttcatgcgcagggaagttgtagataagcatattgta

SEQ ID NO: 394101 - DNA, 201 bp, Homo sapiens
gcaaatatgaaaagaagagcttaaaacaagataagcaaaggaaacgtagttatttttcacgtgacattctctcaaattcatttgatgggaaaaattatggttttttttttttaacaaaaaagtaggaaaagttacttggtctcatacctcttttctatttgaaaaattaaaagaaaacaaaaccaaactaaatacttacaa

SEQ ID NO: 394102 - DNA, 201 bp, Homo sapiens
ctggggaggcctcagaatcatagtggaaggcaaaggaggagcaaagtcatgtcttacatggcagcaagcaagacagcatgtgcaggggaacttccctcgawaaaaccatccgatctcataagacttactcactatcacaagaacagcatgggaaaacccacccccatgattcaattacctctcactttgtccttcccacaa

SEQ ID NO: 394103 - DNA, 201 bp, Homo sapiens
ggacaatttacaaaagaaagaggtttgatggacttacagttccacatgggcggggaagcctcacagtcatggcagaaggcaagggaggagcaagtcatatmctacatggatggcagcaggcaaagagagagagagagagagagagagagagagagagagaacttatgcaggggaactcctcttttcaaaaccatcagatct

SEQ ID NO: 394104 - DNA, 201 bp, Homo sapiens
gccaccacagtgttagtgctctctgtacaagcctttattactcactcttacctcatgggcagaaagtgtcctactgcaagcatttgtggctctcaggccargagtcttgcctcaatctgtgcactagatggaatggaaacactggggaactaacatctccaggaagtattctcagcccatgaaaaatggatctttgaggat

SEQ ID NO: 394105 - DNA, 201 bp, Homo sapiens
tttattacaactacagaattccttcacagcaacacctgtatttgtgtttgattgtataaaaaggcaagttgaaacatcacaatagccaccacagtgttagkgctctctgtacaagcctttattactcactcttacctcatgggcagaaagtgtcctactgcaagcatttgtggctctcaggccaggagtcttgcctcaatc

SEQ ID NO: 394106 - DNA, 201 bp, Homo sapiens
aaaaccacagcacagaactaggaattgaaacaaagtcataccatctttggcaaagaactagtcacattttgaaagaagctccttatgctgttgggtcctgytagagatggtgcaccagagcatggactaccaggtgacaatgtaatgaaatgtccacccagagctggatcttttcttttccatcagatcacttagaaacgt

SEQ ID NO: 394107 - DNA, 201 bp, Homo sapiens
aaaaaccacagcacagaactaggaattgaaacaaagtcataccatctttggcaaagaactagtcacattttgaaagaagctccttatgctgttgggtcctrctagagatggtgcaccagagcatggactaccaggtgacaatgtaatgaaatgtccacccagagctggatcttttcttttccatcagatcacttagaaacg

SEQ ID NO: 394108 - DNA, 201 bp, Homo sapiens
tttaaaaaattttaattcatttttctatcatctatgacagtgccgattatgtcactcctaattaaagagggtgaggtccctccttatttaaaatcagagcrgtattttgagaatttcaatatttgaatgataaaagaaaaagccagccaaaggtctcaaacattcatttaaattatctgacagagagaacccgtaagttct

SEQ ID NO: 394109 - DNA, 201 bp, Homo sapiens
aacttaacaaattctatggtacagatgatagtgatttaactgtctcctctaatagtctttttaatggaaaagggcatgtcttacttatgtcttgtctttgytacctattacaacatctagaacttactagacacccagtaaaaagtctgcaaaataaattgaaattaaagcataagaaaaatattttcaaacaattatata

SEQ ID NO: 394110 - DNA, 201 bp, Homo sapiens
tttttatattagttacatatagcaatgaaaatattttttatctattccttaaatgaaatatatcactaaagtcaatttcctctgttaattcttatctgttyaatgtgactagtagaaaattttaaattacatatgtggctcatatttgtggctctcctggcattggtatcctatcgtatagtgctattctagaacttgttc

SEQ ID NO: 394111 - DNA, 201 bp, Homo sapiens
atattcactatcatgagaatagcacaagaaagacctgcccccatgattcagttacctcctactggttcccccctatgacacatgggaattgtgggagttamaattcaaattgggatttgggtggggacacagctaaaccatatcagtctcattgatcatttttatattagttacatatagcaatgaaaatattttttatct

SEQ ID NO: 394112 - DNA, 201 bp, Homo sapiens
catcagatctcatgagacatattcactatcatgagaatagcacaagaaagacctgcccccatgattcagttacctcctactggttcccccctatgacacaygggaattgtgggagttaaaattcaaattgggatttgggtggggacacagctaaaccatatcagtctcattgatcatttttatattagttacatatagcaa

SEQ ID NO: 394113 - DNA, 201 bp, Homo sapiens
ttgtacaggaaaattacaaaattaatgaattttcttgtttttattttaaaaactaactttatttgtagaaaaaataaaattaattcaaaaattgccttaartattttttaagttaatgtggagaattctcctttaaaatattgaggtactgctactaagaaacttgaaagaccaaagatctatgaaaatgtcttcatttct

SEQ ID NO: 394114 - DNA, 201 bp, Homo sapiens
gagctacaattcaagatgagatttgggtaaggacatagccaaaccatatcactgtatgacttgaggctcctcacactacacttctcaaagctttgcacatkccctgtcttggttcaggagtccctgcctcagagaggcttctttgatttttttcaagtgctagtaatcagcccttttgttgatctagacctcattgtccaa

SEQ ID NO: 394115 - DNA, 201 bp, Homo sapiens
atccaaggggaaaagtgctcaattaggcatgatgttcaaatgcctaggcattccctggggcttctggcattagtatcttggctcctggcatagttgttcakgacgaaaaaattatctgctcccctttgtcaacttcattattttatactttcaaagttctcgttatacttttggatgtcttagactatgctactgaatgta

SEQ ID NO: 394116 - DNA, 201 bp, Homo sapiens
tcactcttacctcatgggcagaaagtgtcctactgcaagcatttgtggctctcaggccaggagtcttgcctcaatctgtgcactagatggaatggaaacaytggggaactaacatctccaggaagtattctcagcccatgaaaaatggatctttgaggataaatacatcagcttgtgtacccatcaggtgctcttctccaa

SEQ ID NO: 394117 - DNA, 201 bp, Homo sapiens
ttacattttttaagcatgaagggcactatcatcaacaaccattattatagaaaaggggccagggatcattagctataatgttaaatgcatgattatacttyaccatgctcttttgtgttttgaattctgcattcccagtcacctttcatgctgtccggtataactctctcctattattggttatcttcctctagttactga

SEQ ID NO: 394118 - DNA, 201 bp, Homo sapiens
cagaaggcaagggaggagcaagtcatatactacatggatggcagcaggcaaagagagagagagagagagagagagagagagagagagaacttatgcagggkaactcctcttttcaaaaccatcagatctcatgagacatattcactatcatgagaatagcacaagaaagacctgcccccatgattcagttacctcctactg

SEQ ID NO: 394119 - DNA, 201 bp, Homo sapiens
tcaaagtcaccttatgccccaaccacactatttttattacactttattttctttcatgcaactacatctgtttcccccgccttttttttttttttttttttgaattaaatatacttctagcggactgtcccctctgtgctggaattaaattcacctgttaaactcccatcaggttcattgttaagtactctcagatctgca

SEQ ID NO: 394120 - DNA, 201 bp, Homo sapiens
gggttcgagcccagcttcatgctcttggagaagtgcgaggtgaacggtgcgggggcgcaccctctctccgcctttctgcgggacgccggccagcccccagsgacgacgccactgagctcatgaccgaccccaagctcatcacctggtctccggtgtgtcgcaacgatgttgcctggaacttctttgagaagttcctggtgg

SEQ ID NO: 394121 - DNA, 201 bp, Homo sapiens
gagttaattaaccatgagaaagtttctcatctctctgtgattagttcactcctaaaatgaaaatactttgtgacgattaatggagttaaacataaagcacttaggataattctaggatacaacaagattttaataaatgctattactattatttttgttattcaaagtattttttttgacagtgtttgttcggggcgctcc

SEQ ID NO: 394122 - DNA, 201 bp, Homo sapiens
ttcctggtgggccctgacggtgtgcctgtatgcaggtatagctgccgcttccagaccattgacatcgagcctgacatcgaagccctgctgtctcaagggcycagatgtgcctagggcgcccctcctaccccgactgcttggcagttgcagcgctgctctctggggggttttcatctatgagggtgtttcctctaaacctgc

SEQ ID NO: 394123 - DNA, 201 bp, Homo sapiens
gtgatgtaacttagtattattacaacaacacaaaaaatctcagccacatggtaaaagttgatccaaaaacaaatgagtaacatcaaaaccaggccaaagakcatatccagtgaactgaaaaaaaagaaaaatctaacaatttcaatggaaacttctacactagttatgatcttaaaatgaagggtggggaaggtcattatt

SEQ ID NO: 394124 - DNA, 201 bp, Homo sapiens
  misc_feature (1)...(201): n = A,T,C or G
ttgtggaaacaccaaagaaaattacttaatggtaaagagtacaccctctaaagtgggttgcctaaaatgatatctcagaatggccacctactagttgtttncctaattcatttgagttaattaaccatgagaaagtttctcatctctctgtgattagttcactcctaaaatgaaaatactttgtgacgattaatggagtta

SEQ ID NO: 394125 - DNA, 201 bp, Homo sapiens
atgctcagcaaatcaacgggatgcaccacaaactacagctcctgcagccagcattggtcaacagaaagggcccaattctccacaacaatgcctgactacamgttgcacaaccaacccttcaaaagttgaacaaattgggctacgaagttttgcctcttctgccgtattcacctgacttctcgccgactgactgacactttt

SEQ ID NO: 394126 - DNA, 201 bp, Homo sapiens
gaattaaatatacttctagcggactgtcccctctgtgctggaattaaattcacctgttaaactcccatcaggttcattgttaagtactctcagatctgcaractcagtaatatctctttctattctaccataatactgtgtagtagcacagggtgattataattgtgccttgaaaacaaaatgtgatcaattaatattagc

SEQ ID NO: 394127 - DNA, 201 bp, Homo sapiens
ttttttttgaattaaatatacttctagcggactgtcccctctgtgctggaattaaattcacctgttaaactcccatcaggttcattgttaagtactctcaratctgcagactcagtaatatctctttctattctaccataatactgtgtagtagcacagggtgattataattgtgccttgaaaacaaaatgtgatcaatta

SEQ ID NO: 394128 - DNA, 201 bp, Homo sapiens
acttatgtcttgtctttgctacctattacaacatctagaacttactagacacccagtaaaaagtctgcaaaataaattgaaattaaagcataagaaaaatrttttcaaacaattatatagttcaagttatattgttacctgtttacatattattaaaaaatattagtaatgagtaaaatagtttagaattacatttcctca

SEQ ID NO: 394129 - DNA, 201 bp, Homo sapiens
ttacttatgtcttgtctttgctacctattacaacatctagaacttactagacacccagtaaaaagtctgcaaaataaattgaaattaaagcataagaaaartattttcaaacaattatatagttcaagttatattgttacctgtttacatattattaaaaaatattagtaatgagtaaaatagtttagaattacatttcct

SEQ ID NO: 394130 - DNA, 201 bp, Homo sapiens
aaaaaaggaaatttgcaggggcgattaatttgtagatcacagcatgggaagattatctggtattatccaggaagaaaaatgtccttgcaagggtctttacmgggaaagacaggagccagtgagaggagctatgaaaagagaagcagatgtgatagagagattgaaagatgctgtacccctggccttgaagatacaagactt

SEQ ID NO: 394131 - DNA, 201 bp, Homo sapiens
agatcttattttagtgcatgcagtgatattagtgcaaatactgaattttaggaaaggcattccaacgtcttttttgtctttagaacattctcatgtgtgtyctgggtataaacaaatatacacacagcaagattgtacccacacatacacatatatatacaaagagcaggaactgcttgagataaaaattatttcatacga

SEQ ID NO: 394132 - DNA, 201 bp, Homo sapiens
taaaccactgctactcatattcttgccttgaagtttgcttctgaggtaacttttcctaagacacctctcttctcagtattcttttctcaccaactcctaaycaaattagtcagtgttcttcactgcaaatgacacaagtcaattctagtaaattaataggtagaggctgtttgcaagaaggcaatctgatggctccagaaa

SEQ ID NO: 394133 - DNA, 201 bp, Homo sapiens
cctcatgggcagaaagtgtcctactgcaagcatttgtggctctcaggccaggagtcttgcctcaatctgtgcactagatggaatggaaacactggggaacyaacatctccaggaagtattctcagcccatgaaaaatggatctttgaggataaatacatcagcttgtgtacccatcaggtgctcttctccaacagaattaa

SEQ ID NO: 394134 - DNA, 201 bp, Homo sapiens
aatgtggcgtccctcggaggcaccacggtccgggactacacccagatgaacgagccgcagcggcgcctcggccccggggcctggtggtgcttggcttcccstgcaaccagtctgggcatcaggagaacgccaagaacgaagagattctgaattccctcaagtacgtccaacctggtggtgggttcgagcccagcttcatgc

SEQ ID NO: 394135 - DNA, 201 bp, Homo sapiens
tgtgatttgaagtgaattactgaaacagttttatctgtaagcgtataaacaataacatatactctaccctgtacatatcaaaattaatgaaataacctttytgaaaatccatcacaatgcctgacgatggcaggttcaatgagatgaacctgaatatatgtaaaaatatatattatatataacatatatgttatatgcatt

SEQ ID NO: 394136 - DNA, 201 bp, Homo sapiens
tctgtcacagaaagtctaagtcatttctttctttctttttttttttattattatactttaagttttagggtacatgtgcacaagtctaagtcatttcttayggccaaataggtaatgccaaacttgagattcaaaatcaaggtcctctgacttgaaagcagtcctagccaatgttctagactgcatcgcttacaataaaaa

SEQ ID NO: 394137 - DNA, 201 bp, Homo sapiens
aaaggaacaattcccgcatgcattgatgttgttataccaaactcttttaccgacaaaaggaccacgttttctcagtctaaagaaagaaacaaagaaatgtyatttttagctcagatatctttatagctctggctatattctctaattattaagtattttatattccttatctatcccaaaataaacttggattctttacac

SEQ ID NO: 394138 - DNA, 201 bp, Homo sapiens
atggcatggttgtggggactggaataaagtcctaaatccatagagcagacattcaggaaggcacagttttgaacctgtggctatggttgaagctatcatcyacaagaaagcaagatcacaaacaggatggaactccctgagaacaggttgaaattgtcctcaagagaaatttcttctttttctttctctttcaattactct

SEQ ID NO: 394139 - DNA, 201 bp, Homo sapiens
aaatttgttatgacctgagctgtgttccaccacaatttgtatgttgaaattctaactcagagtatctcagaatatgactgtatttagagagagaatcttcraaaagggaaataaggtaaaatgaggtcatatgaaaggacctgatccaatataattggtatctttaaaagaagaggaaacgtagacacaggcatgtacata

SEQ ID NO: 394140 - DNA, 201 bp, Homo sapiens
cataacacattattactactcacctagaggcttttaaaaaaaatctcacatttctataattcagaagaccagcaagtgccaaaattaaggtatcagccaasttggacatttatctggaggctatgagaaagagcctcctcggagattattcagcttgttgggatagagtccagttccttgcagttgtagaattgacagccc

SEQ ID NO: 394141 - DNA, 201 bp, Homo sapiens
ctttctatatactttcaacttggaaatgatgttttgtttcaatgtaaagaaaaaaattaactattaaactaaatagtaaaaataaactcttaactattaarccaaaagaccagtttatatttgatgtgaattccatttaatactaacaaacaggccctgattaaaatttatatagtgatagcaaaactaacaacttttcac

SEQ ID NO: 394142 - DNA, 201 bp, Homo sapiens
cctcaaaagatttataatcatttagaaaggtggacttgcagattctgagaaaatacacacacacacatatacacatgagataaatttctgtagatacaatrgataagtgttttttgttttcttgattgcagcctctatggtctgaatattcatgtcctaccaaaattcctgtgttaaaatctaatcccccagggtaatggt

SEQ ID NO: 394143 - DNA, 201 bp, Homo sapiens
gaaattgtagagcgtaagctccaagttacccacaattgtgtcctgggcctcaaaagatttataatcatttagaaaggtggacttgcagattctgagaaaayacacacacacacatatacacatgagataaatttctgtagatacaatggataagtgttttttgttttcttgattgcagcctctatggtctgaatattcatg

SEQ ID NO: 394144 - DNA, 201 bp, Homo sapiens
ccactgcactccagcctgagtggcagagtgagaccctgtctcaaaaaaaaaaaaaaaaaaaaagagtttttgttttaggtaaaccacatgtctctttctayatactttcaacttggaaatgatgttttgtttcaatgtaaagaaaaaaattaactattaaactaaatagtaaaaataaactcttaactattaaaccaaaag

SEQ ID NO: 394145 - DNA, 201 bp, Homo sapiens
aaatttttaatttgttattttggaacaaaaaatggcagctgataagctttttcaagtaggcatattctctttaacaatttcaaataaaaatcaattcatgyatagccttcaaggacatatgattttacaaagtaaatctgacgactgtttgtagaattattcaataaagaaataattgcttatttctggataaagcctcta

SEQ ID NO: 394146 - DNA, 201 bp, Homo sapiens
tcaagagatgtggaagcctacaatcagctacttgttttaatgaacacttcaaatttagcctattcaaaaatatgtttttctcttgtcaatttcccttaagragctgcttgaagggctgggagtaagggcaaggttggtggtagggaccaagacggaagtgaccgagaaagaattcagatcacatgaaatctctaacatgtt

SEQ ID NO: 394147 - DNA, 201 bp, Homo sapiens
tgtgtttgttatggcagcacctacttccaaataccaaaattatctacaccagtcagagttcaaccggaggtgcagaacatttaagattgtacaggtattaraattatatctctcttgatagatggatggatggacagatgatagatgatagatagatagatagatggatagatggatagatgatagatagatagatagatt

SEQ ID NO: 394148 - DNA, 201 bp, Homo sapiens
ataacatgcccctcacttcattctgagcccttaccagaaaggctcataaagttcatattttgactcacaatcggttgaagacaatttaggcattctctatyatcagatctttcaaaatttttctcagacttcttccagcctccatccacttggtttcaaagccaactccatatttgtgtgtgtttgttatggcagcaccta

SEQ ID NO: 394149 - DNA, 201 bp, Homo sapiens
ccgggactacacccagatgaacgagccgcagcggcgcctcggccccggggcctggtggtgcttggcttcccgtgcaaccagtctgggcatcaggagaacgmcaagaacgaagagattctgaattccctcaagtacgtccaacctggtggtgggttcgagcccagcttcatgctcttggagaagtgcgaggtgaacggtgcg

SEQ ID NO: 394150 - DNA, 201 bp, Homo sapiens
gacaaagagatgtctgtccaaagataaagaaatctagaatggatgacaggaagaggaaaattaagatgttgggatcaactgcggtggtagagactatagaytgtttgatcagagcatcctagggccaggtttcttgttttgttctttcttgtttgttttggtttggtttttaagaaattgtgactggccactagtacatgt

SEQ ID NO: 394151 - DNA, 201 bp, Homo sapiens
aggtgacaatgtaatgaaatgtccacccagagctggatcttttcttttccatcagatcacttagaaacgtccaatctccaagcccctttccagctccacartggataaaaatcttagcaaagggagagaagtcagtgcatctgaggtaggtgtggtatgggtgtcaggtcctctgttcctatttatttgtatttggatttc

SEQ ID NO: 394152 - DNA, 201 bp, Homo sapiens
catgaaaagtggattttatatgacaattagctacaccagctcagtggttaaactgagaaaaagctccaaagcacttcccaaagccaaacttataccaaacraaggtcatggtccctgtttgttgatctgctgccagtctgatcctctacagctttctgaatcatagtgaaaccataacatctgagaagtatgctcagcaaa

SEQ ID NO: 394153 - DNA, 201 bp, Homo sapiens
aggaattgaaacaaagtcataccatctttggcaaagaactagtcacattttgaaagaagctccttatgctgttgggtcctgctagagatggtgcaccagarcatggactaccaggtgacaatgtaatgaaatgtccacccagagctggatcttttcttttccatcagatcacttagaaacgtccaatctccaagccccttt

SEQ ID NO: 394154 - DNA, 201 bp, Homo sapiens
ttccatgtaataagtgacttagaaggctgacagttttcagtgtggcccatagcaaggtagattcttcagcagttttagttatggtaaaagtagctctgccwctttgtacaaatgacttgcagatcacatagtacaggaggtcggaggtctttttggtagataaaacattatgtctagtctctggagaaccatagcaaaaaa

SEQ ID NO: 394155 - DNA, 201 bp, Homo sapiens
gagtctcttgaaatgctgcaaagaatggcttttggcttttactctgccaccttatttaatagtgtctattttcttccttcagagcgtatgtggctaccaamaactgctaattaattttacaatctttattagtgtaatttagcccatataattcatgtaaagaactattacaaaatgaatgcattacctcttcatttgtac

SEQ ID NO: 394156 - DNA, 201 bp, Homo sapiens
aaactatggaaatgatgtcagacaaaaagcaaattcaagagattttcctatttgagttcaaaatgggtcttaaagcagtagagacaacttgcaacattaaygcatttggcccaggaactgctaacgaatatacaatgcagtggtggttcaagaagttttgcataggagaggagagccttgaagataaggagcatggtggcc

SEQ ID NO: 394157 - DNA, 201 bp, Homo sapiens
gtacatattagtcaggcctatcactctatgttgaacattccctttcttctcctagtaggaacatgattttcctgattaagtcatgcagagatttgtcctaygtaattggttcagaggcaattaggggaagtaggggtagaaagtaagaaagacaagcatcatcttagaagtcatcgatcttgggtgaatcctttgcacagt

SEQ ID NO: 394158 - DNA, 201 bp, Homo sapiens
aaattcacagtccaaaaccgcaattatttttgcaccaacctatagtacctatatgaatatagtcactcttctccaggctcatattctgttctccatagttragacccttaagatccactcccaggcaggttttcctggttataatcagtacatattagtcaggcctatcactctatgttgaacattccctttcttctccta

SEQ ID NO: 394159 - DNA, 201 bp, Homo sapiens
acttgcagattctgagaaaatacacacacacacatatacacatgagataaatttctgtagatacaatggataagtgttttttgttttcttgattgcagcckctatggtctgaatattcatgtcctaccaaaattcctgtgttaaaatctaatcccccagggtaatggtattaagagggggcctttgggaggtaattaggat

SEQ ID NO: 394160 - DNA, 201 bp, Homo sapiens
ttcagagaatgtgtctttcagaatacaacacggaattgaaaattatgtaccaaaattatcaatcaaaaatcagttccattgccaatagtatgaaatggacrcatcacactctccagcccaatagatagcatctctccaactgtgatacttgaaagtattatagaaaggaaaaaataaaaataaccttagaccaatgaagtc

SEQ ID NO: 394161 - DNA, 201 bp, Homo sapiens
ttattttcatatttctaatttatggcactttgagctacaaaatacattttaaaacatctttcaaatgccataaatatttttcaattactgtttagtgaagrcttcagtaacttgttcctttctatttattttgcgtagaaccctagctgagaggtttgcaaacaagacaaaacttcaatgtaaatttttaatttgttattt

SEQ ID NO: 394162 - DNA, 201 bp, Homo sapiens
tgcccatgtgtggtggctcactcccgtaatcccagcactttgggaggccaagacaggcagatcacctgaggtcaggagttgcagaccagcctggccaacayggtgaaaccccgtctctactaaaaatacaaaaattagccgggcatggtggcgggcacctatagtcccagctactcaggaggattcgcttgaacccaggag

SEQ ID NO: 394163 - DNA, 201 bp, Homo sapiens
aaacaaatgtaagcaaaatattaaaaataacttgacattagtacgtggaattggggcaattgcataagttttctcattcaaacattcatataagtacttgmaatcatgaatacaagcatattaacactagagattttagaattcctccattatttccctagttttctagctatgatttgatcaaactgtgtttataagttc

SEQ ID NO: 394164 - DNA, 201 bp, Homo sapiens
gtacccactagtaattttttctgatcctctctcctcccaccctcattttatagtttaaatggagttccttctccttaatcaggagaaaagccagaaccaayagttgactccccatcctgttctttcctagaaaccatttttcatatatttatctgccccaagggacacatacattatcttgaatccttctgatccttggag

SEQ ID NO: 394165 - DNA, 201 bp, Homo sapiens
cagagtatcaaatgttcactgataccgtttcagattatgctctgcaactaatctttatgaaattatcatttatttagtttttgtcaaatattaaagaagamtgttcacaattatccgaaagtacaattaattatccgaaagtacaattaaaatattggtttcttttgtatccacataattgtgtgaggctggattttctta

SEQ ID NO: 394166 - DNA, 201 bp, Homo sapiens
tataaatgagacatttgttgtcttattaaaaattagtaattaaaaattaaaattatttcatatgttttagcaaaacataagaaataaaatatttcctcaayaataaattctcatatactttataggtatgagtgctgattttctctttagagtatgacagcttagtggttagcttacttagcagatagcaaaattcatatc

SEQ ID NO: 394167 - DNA, 201 bp, Homo sapiens
tatcttttttataaagttcttgataaaatatgcagttattttacgataatactactccctttcaggcatcaaaacaaactcatggtagagccactcattamccgcttgaccttgagaaaactagtggatttgtaggattctcagatttgtctatgaattcgagactttcatcctggggcctgcctgtttcacaagttgtca

SEQ ID NO: 394168 - DNA, 201 bp, Homo sapiens
aagtgaattactgaaacagttttatctgtaagcgtataaacaataacatatactctaccctgtacatatcaaaattaatgaaataacctttttgaaaatcsatcacaatgcctgacgatggcaggttcaatgagatgaacctgaatatatgtaaaaatatatattatatataacatatatgttatatgcattatatataaa

SEQ ID NO: 394169 - DNA, 201 bp, Homo sapiens
ttatttaacaaaaaaaatataaatttaatgtgaactccaatatttaaaaactaattatttctaattagcctataagatgttatttacataatgccacttaygatatatgacttgatttttttcctctcaattagctgggatagctttatactgatctcttaacaaacatatgctttctctgacaataaatagtaagacttt

SEQ ID NO: 394170 - DNA, 201 bp, Homo sapiens
tacatgtaatgggaagccatcagagggttttaaatagaaagacaaatgaactatcatgtactttaagagatcactctaggttctttctagagaatggaaarcagcatggaacaataaaggaagaatattggaaatctatttttatattaattgttagaaagtcagtttgacttgtaggcatctattatttaacaaaaaaaa

SEQ ID NO: 394171 - DNA, 201 bp, Homo sapiens
acaatttcaatggaaacttctacactagttatgatcttaaaatgaagggtggggaaggtcattattttattaactctgtaaagcactgaaataagggaacmaaagtgagttttatacttcaccagaggaaagacagagaatttataaattacaggggtacgttttgctatttattggtgagtgctctctaaaactaacggc

SEQ ID NO: 394172 - DNA, 201 bp, Homo sapiens
tgccacaaaggtaaagagttagaattaatgtaagtgtgtaagattctgctcttaacatattttatatcactagtatgtaataaggcaaaaatatcaaagaytataaatctgaatatatgcatatgtaaaatatattattcagctcatattctgtgtcaaagtaattaggtaattaaatgaagaaatgagaagtacacatat

SEQ ID NO: 394173 - DNA, 201 bp, Homo sapiens
tttaaggtttaattttcattcagttctacttttcagaagagcagtgatgtaacttagtattattacaacaacacaaaaaatctcagccacatggtaaaagytgatccaaaaacaaatgagtaacatcaaaaccaggccaaagatcatatccagtgaactgaaaaaaaagaaaaatctaacaatttcaatggaaacttctac

SEQ ID NO: 394174 - DNA, 201 bp, Homo sapiens
tttaatcctcacactaactgtatgatgcaggccatcttatctttaactaccttcctgtctatctacctatatagttaataatcctagttgacaaaactgasactcaagaagtttacgaaatgtaaattcccactgccacaaaggtaaagagttagaattaatgtaagtgtgtaagattctgctcttaacatattttatatc

SEQ ID NO: 394175 - DNA, 201 bp, Homo sapiens
tttagagaattgcaatgtcattggaaaagttcaatgatcgtatattagtcacatgcatcaccatttaaatatcctgagacttccctcctactaattttttwaaggagaaagaaataatagctataaatctacaaagaaatcatgagaagattcatagggaataaaatttcaactaatatgtggtcagacagaaagcataga

SEQ ID NO: 394176 - DNA, 201 bp, Homo sapiens
gtcaccttatgccccaaccacactatttttattacactttattttctttcatgcaactacatctgtttcccccgccttttttttttttttttttttgaatwaaatatacttctagcggactgtcccctctgtgctggaattaaattcacctgttaaactcccatcaggttcattgttaagtactctcagatctgcagactc

SEQ ID NO: 394177 - DNA, 201 bp, Homo sapiens
tctcttgtcaatttcccttaagaagctgcttgaagggctgggagtaagggcaaggttggtggtagggaccaagacggaagtgaccgagaaagaattcagaycacatgaaatctctaacatgttttaaaattaaaattaaaattaacagtttgtgttatgtttatacttatcctctggccatgttgtaataaataaataaaa

SEQ ID NO: 394178 - DNA, 201 bp, Homo sapiens
tttgtaataaaaatatgctatttaatgtttgcagaatgaggaaagctaactggccgagtggattttttccgagctgtcaattattctctagaatcaagaartatttttcttttttctttttttttttttaacaaacagtgacactttgcttgtatatagctcagttggtacccactctttttgatcatctgacattcctgc

SEQ ID NO: 394179 - DNA, 201 bp, Homo sapiens
agagcttattcttaaggcctggctgtcaagtttgtaataaaaatatgctatttaatgtttgcagaatgaggaaagctaactggccgagtggattttttccragctgtcaattattctctagaatcaagaaatatttttcttttttctttttttttttttaacaaacagtgacactttgcttgtatatagctcagttggtac

SEQ ID NO: 394180 - DNA, 201 bp, Homo sapiens
agcttgaccccttcccaatacttaaagacttttcaggtaagattagtggtgatattactgatttttttaatattatataacaaaatgtatcaacatttagaatatctgcctaattcagtgaactaatattgtccaaatgaccaatgcatgatgttccaaaatctgcatgaataaatgatacattgaaagcgaaaaataaac

SEQ ID NO: 394181 - DNA, 201 bp, Homo sapiens
cttgaccccttcccaatacttaaagacttttcaggtaagattagtggtgatattactgatttttttaatattatataacaaaatgtatcaacatttagaayatctgcctaattcagtgaactaatattgtccaaatgaccaatgcatgatgttccaaaatctgcatgaataaatgatacattgaaagcgaaaaataaacca

SEQ ID NO: 394182 - DNA, 201 bp, Homo sapiens
tcatccttttaagaatcatctgagagtcttttagaactagctcataatgcaaaacatctactttcaggcataactggtacaaatcagaatcatttacatgsttatcatagtaatttccagtggtgtactgctttcttcctatatcattcctacatcatttatttagcacatatttattgaaattgtagagcgtaagctcca

SEQ ID NO: 394183 - DNA, 201 bp, Homo sapiens
tgggatctaattaaactaaagagcttctgcacagcaaaagaaaccaccattagagtgaacaggcaatctacagaatgggagaaaattttcgcaacctactyatcagacaaagggctaatatccagaatctacaatgaagtcaaacaaatttacaagaaaaaatcaaacaaccccatcaaaaagtgggcaaaggatatgaac

SEQ ID NO: 394184 - DNA, 201 bp, Homo sapiens
ctattttcatgggtgggaggtctgtgaaggtgaataacatggcttccacgggacgtagactcaatggtgaaaccaaatgaagaaatctgtagcccccctcygagctgtctggtggagattaggtctgatctaacaccttttggtcttgctctgtctaaacaaacactcaaatctgaaacccagccagtcatagcagtccct

SEQ ID NO: 394185 - DNA, 201 bp, Homo sapiens
acgctttgcttccttctgcttgttaatttagaaaaacagtgctgctcccaaccatcactaaatgtgctttattccatgggtggcaattctagttcttgttytcttggaatggctgtccctattttcatgggtgggaggtctgtgaaggtgaataacatggcttccacgggacgtagactcaatggtgaaaccaaatgaaga

SEQ ID NO: 394186 - DNA, 201 bp, Homo sapiens
ctgtccctattttcatgggtgggaggtctgtgaaggtgaataacatggcttccacgggacgtagactcaatggtgaaaccaaatgaagaaatctgtagccyccctctgagctgtctggtggagattaggtctgatctaacaccttttggtcttgctctgtctaaacaaacactcaaatctgaaacccagccagtcatagca

SEQ ID NO: 394187 - DNA, 201 bp, Homo sapiens
ctggctaaagggtgattctgttcagctaatagtgtgttgtttcagtggagattcaggtgtataaataagtgagaaataagccaagccaagaaagtagcacrctttgcttccttctgcttgttaatttagaaaaacagtgctgctcccaaccatcactaaatgtgctttattccatgggtggcaattctagttcttgttttc

SEQ ID NO: 394188 - DNA, 201 bp, Homo sapiens
tttagaaaataaatttttagtcaattatcttatttatgagagattatttctaaatttgtacaggaaaattacaaaattaatgaattttcttgtttttattktaaaaactaactttatttgtagaaaaaataaaattaattcaaaaattgccttaagtattttttaagttaatgtggagaattctcctttaaaatattgagg

SEQ ID NO: 394189 - DNA, 201 bp, Homo sapiens
aaaaaaaaaaagatgtcagtaagtttagtgtctgaatgaggcccactttctgcttccaatatggcacctcttgcttattctcatgtggtggaagtaagcaraagggccagataatatgtcctcacatggcagaagcgatggaagaataagagtacaaaaaggggctagctagctctctccagccctttcataggcactaaa

SEQ ID NO: 394190 - DNA, 201 bp, Homo sapiens
aagccaggctcaagtgactggttcaacaaaaaaaaaaaaaaaaaaaaaaaaaaaagatgtcagtaagtttagtgtctgaatgaggcccactttctgcttcyaatatggcacctcttgcttattctcatgtggtggaagtaagcagaagggccagataatatgtcctcacatggcagaagcgatggaagaataagagtacaa

SEQ ID NO: 394191 - DNA, 201 bp, Homo sapiens
caaaatctcaggaggccaagaaaaacatgagctaatcctttaggtttcccagttatttgcaaatttgcctttcaaagtaagaaacagctaggaagaaaagrgactgggctgatggtttccacaacagcctcaaaatgaaaacatatggcatttttgcttaagagtgacatttactcaatgatttttttttcctgacacaaa

SEQ ID NO: 394192 - DNA, 201 bp, Homo sapiens
ctccattatttccctagttttctagctatgatttgatcaaactgtgtttataagttcctttatattaaatttaggtggtaagctagatttaaatcttttcrgagaaaaattgttatttgatattaaatgtaattatttatttcactggaaatataaaatatatagccttccaagtaacaaagggtaatgaatttattgttt

SEQ ID NO: 394193 - DNA, 201 bp, Homo sapiens
ctcccaacgtgctgggattacaggtgtgagccactgttcccggccccttgtatgtatttttacacacacagaatggtgaaagagaaggtgtcaggcaagtyccctgaaggatcatgagacatttgagtagaaaaggaaataatgagctgaatgagaagctggcaatgtaaggaaaagcactcattgtattagtccattctc

SEQ ID NO: 394194 - DNA, 201 bp, Homo sapiens
agttcctcaaccattttatgtcattgtataatgagggcacctaatttcctacaataattatcttagtctatttctgctccgataacaaaataccttagacwgagtaatttataaaaaacagaaatttatttctcacagtttttgaagctgaaggcccaagatcaagatgtcagcaggggcctggcacagtgactcacacct

SEQ ID NO: 394195 - DNA, 201 bp, Homo sapiens
tttataatataataaaatattttcattttcaaatatttaacaatttaaacaaatgtaagcaaaatattaaaaataacttgacattagtacgtggaattggrgcaattgcataagttttctcattcaaacattcatataagtacttgaaatcatgaatacaagcatattaacactagagattttagaattcctccattattt

SEQ ID NO: 394196 - DNA, 201 bp, Homo sapiens
atgtatatattatttgatccagcaatttcattttgggtatttttcttaacagataattgaactggcacaacaaaggtaagttaaatatattaattgcatcrttgtttatattatcaaaattatgaaaatgcaatgatatctatcaatataagattattgaaataatatattgtgaaggcaaaacattttatatgaaaatac

SEQ ID NO: 394197 - DNA, 201 bp, Homo sapiens
ggtgctggagaggatgtggagaaataggaacacttttacaccattggtgggactgtaaactagttcaaccattgtggaagtcggtgtggtgattcctcagsgatctagaactagaaataccatttgacccagccatcccattactgggtatatactcaaaggattataaatcatgctgctgtaaagacacatgcacacgta

SEQ ID NO: 394198 - DNA, 201 bp, Homo sapiens
aaactatcgcaaggacaaaaaaccaaacaccatatgttctcgctcataggtgggaattgaacaatgagaacacatggacacaggaaggggaacatcacacrccggggactgttgtggggtgggtggagaggggagggatagcattaggagatatacctaatgctaaatgacgagttaatgggtgcagcacaccaacatggc

SEQ ID NO: 394199 - DNA, 201 bp, Homo sapiens
actatcgcaaggacaaaaaaccaaacaccatatgttctcgctcataggtgggaattgaacaatgagaacacatggacacaggaaggggaacatcacacacyggggactgttgtggggtgggtggagaggggagggatagcattaggagatatacctaatgctaaatgacgagttaatgggtgcagcacaccaacatggcac

SEQ ID NO: 394200 - DNA, 201 bp, Homo sapiens
ggggagggatagcattaggagatatacctaatgctaaatgacgagttaatgggtgcagcacaccaacatggcacatgtatacatatgtaacaaacctgcaygttgtgcacatgtaccctaaaacttaaagtataataataaaacaaaaaaacaaacaaaaaacttgttactttttatgtgagttttttgaacatttataaa

SEQ ID NO: 394201 - DNA, 201 bp, Homo sapiens
ccagcactttcggaggtcgaggcaggaggatcacgaggtcaggagatagagaccatcctggctaatacagtgaaaccctgtctgtctttactaaaactacaaaaaaaaaaaaaaattagccacgcatggtggcacgcacctgtagtcccagctacttgggaggctgaggcggaggttgcaatgagccgagatcacgccact

SEQ ID NO: 394202 - DNA, 201 bp, Homo sapiens
aggttgcaatgagccgagatcacgccactgtactccagcctatgtgacagagtgagactccatctcaaaaaaataaaataaaataaattaaaataaaatarattaaaaataaaagcttatgctctttactttctacataccattctattttctttattttcatatttctaatttatggcactttgagctacaaaatacatt

SEQ ID NO: 394203 - DNA, 201 bp, Homo sapiens
tataaactaaaataaaattaattgcatttacatgcccggacacttgtattttagagctgatagttatttaaaaaccagatcaactcaggacttaagttacaaaaaaaagctgtgccctgccctgccctgcccttgtaagttcaaggcagatgtttaacattgctcaaacatagtgttttttaaggtttaattttcattcag

SEQ ID NO: 394204 - DNA, 201 bp, Homo sapiens
taaacttggattctttacactatattgcttctgttttttttttttttttttttttgagacggagtctcgctctgtcgcccaggctggagtgcagtggcgcratctcggctcactgcaagctccgcctcccgggttcacgccattctcctgcctcagcctcccgagtagctgggactacaggtgcccgccaccgcgcccggc

SEQ ID NO: 394205 - DNA, 201 bp, Homo sapiens
gctcccctttgtcaacttcattattttatactttcaaagttctcgttatacttttggatgtcttagactatgctactgaatgtatgtttcccgcacgaaaytttgcacagcaaaggacaaaggatagtccagactctttgttaaactggctagtcccaaattttctctaactggcacacttccagaagtgaaattctttct

SEQ ID NO: 394206 - DNA, 201 bp, Homo sapiens
ggctggagtgcagtggcgcgatctcggctcactgcaagctccgcctcccgggttcacgccattctcctgcctcagcctcccgagtagctgggactacaggygcccgccaccgcgcccggctaattttttgtatttttagtagagacagggtttcaccgtgttaaccaggatggtcttgatctcctgacctcgtgatctgcc

SEQ ID NO: 394207 - DNA, 201 bp, Homo sapiens
ctctcagaacatggagctacaggaatgctattgtcaccatcgttataaaatgttaggaggtcctatctctctagtaacttaatcttaatgtatgtgatccmaggggaaaagtgctcaattaggcatgatgttcaaatgcctaggcattccctggggcttctggcattagtatcttggctcctggcatagttgttcatgacg

SEQ ID NO: 394208 - DNA, 201 bp, Homo sapiens
taaatgacatacaccggccataaaacatttcaagagatgtggaagcctacaatcagctacttgttttaatgaacacttcaaatttagcctattcaaaaatrtgtttttctcttgtcaatttcccttaagaagctgcttgaagggctgggagtaagggcaaggttggtggtagggaccaagacggaagtgaccgagaaagaa

SEQ ID NO: 394209 - DNA, 201 bp, Homo sapiens
ataagaattttgagtaaaaatagactagttaggtaatcctaaatgaaagggagaaagacattctcagtgcaaggtgtagaaatgactcatttaaattgcargatttcaatgagttgacatttaacatgaaatccttcttccctataatctccagagtttcttttggcagtgattaaaaccatttcctaaaatccactatga

SEQ ID NO: 394210 - DNA, 201 bp, Homo sapiens
aactgcaatgagataccatctcacaccactcagaatggttattattaagtttaaaaataatagatgctggcaaggctatggaaaaaaggaaacacgtgtawgctattggtgggaatgcaaattagttcagctactgtggaaagcagtttggattagttcagctactgtggaaagcagtttggagatttctcagaaaaaact

SEQ ID NO: 394211 - DNA, 201 bp, Homo sapiens
gatgaggtttgggatacgaatggttctgtcacctcacccagatggtgagcatagtactcaataggtagtttttcagtccattcctccctctctcctccccmctctagtaattcccagtgtctactgttcccatctttatgtctatgtgtttttaatacttagcccctacttgtaagtgagaacatacagtatttgcttttc

SEQ ID NO: 394212 - DNA, 201 bp, Homo sapiens
actcaacatacagcagacgatgggtggagttattttaaattccatacagctctctaccatctacctagctccacaaccctcttcctcactcctttttctarattgacaggtatattactttaacatctcacttagaacatttccacccacttccaggtccctgaagatctcatcttccactctcaatcacttgtcaaggga

SEQ ID NO: 394213 - DNA, 201 bp, Homo sapiens
tctgtgcactagatggaatggaaacactggggaactaacatctccaggaagtattctcagcccatgaaaaatggatctttgaggataaatacatcagcttktgtacccatcaggtgctcttctccaacagaattaattatgttaccctcacccgcagactgttcatgacatcctttccttctgcctcacctgcccacttcc

SEQ ID NO: 394214 - DNA, 201 bp, Homo sapiens
gaaacacaatttcaggctgtgactatacagagccctcctcacagtctctgggagctgctgagacaggtcctcaggctttcttctgactgtgtgttttcctrtctgtgtggacttttgccctccacgagtacagatatgtacccagccccgtcactggttcatatacacaccttcaaacacacatcactcttaaacactcac

SEQ ID NO: 394215 - DNA, 201 bp, Homo sapiens
ccaacagttgactccccatcctgttctttcctagaaaccatttttcatatatttatctgccccaagggacacatacattatcttgaatccttctgatcctyggagatctggttaaacctgacctgaaacacaatttcaggctgtgactatacagagccctcctcacagtctctgggagctgctgagacaggtcctcaggct

SEQ ID NO: 394216 - DNA, 201 bp, Homo sapiens
ttttatgcttctaatctgtggtgagctggacatttagatgactacatttatagaatgtgttacagaagtaaaaatatatacaaacaaagcaaggattcacsaggtctattatggctgaagtcaatgaattttagtgtatggcctgtgacatttattttagttctgaagtattgctttttatttaatcaacagttcttgatt

SEQ ID NO: 394217 - DNA, 201 bp, Homo sapiens
ttacaataaaaatggccatttttatcggtaattggtaattaccaataaaattaattaattggtaattggaactgattccaattgcagttcagtcactatcyggtggtgtgatttgaagtgaattactgaaacagttttatctgtaagcgtataaacaataacatatactctaccctgtacatatcaaaattaatgaaataa

SEQ ID NO: 394218 - DNA, 201 bp, Homo sapiens
cgcaaagataagctcaaggtcaatgattccaaattatctgagaagcatgaagaccacataaacaaataacaaaccaaagtactcacacacaaggaaataawactaaagcactcagaagaagactttaaaacaagtgaaattaattaagctaatgttgaatttatgaaacaaaagcaaattgccataaaaaaggatccatta

SEQ ID NO: 394219 - DNA, 201 bp, Homo sapiens
accttgattaattttacatcatagtatttaagttatgggatatcaaggagagagtaaacatcacatgaagactttaccacctcttctgggaaacgggttaragtgtttctggtggaatgctggattgttaatcgtgttagatggaattatgaccttgttgttgtctttatgtggcagttaagtatggtttaaagagatgtt

SEQ ID NO: 394220 - DNA, 201 bp, Homo sapiens
ccagcctgtttaccaattgactcaaaaagctgctagttttgagtagggcccagaacaagaaaagagtctgcaacaggtccaggctgctgtgcaagctgctstgccacttgggtcatatgatccagtggtgtttcagtggcagtggcagatagggatgctgtttgaagcttctggcaggtccctataggtgaatcttggttt

SEQ ID NO: 394221 - DNA, 201 bp, Homo sapiens
cttccctaaaaattattcatgttcaaactgctccatcatactacgtaattgtagaagcagcataattttagatcatctctaaatttgatttcttagctaartaatttgatatcataagacatttaaagttgcttaaatttatagaagattgggaatgtagaaaagtataaagaagaaaattaaaatcacctataaatttta

SEQ ID NO: 394222 - DNA, 201 bp, Homo sapiens
ttagtagacatttatttgatatacattgttttgtcagatgaatacaatttataaatcatctgtgtttaacttattaaattgcttattgatcatgcacactrccaaatggcttaatggattttaccttttgatttttattttagaagaaattttgaaaataatgaagacaaaaggtctgcaaggaaccactgcactttccag

SEQ ID NO: 394223 - DNA, 201 bp, Homo sapiens
ttttttgagacacagtctcactctgtcgcccaggctggagtgtagtggcgcaatcttggctcactgcagactccgccttctgggttcaagcaattatcctscctcagcctccccagtagctgggattacaggcacccaccactgtgcccgactagtttttgtatttttagtagagactgggtttcatcatgttggccatgg

SEQ ID NO: 394224 - DNA, 201 bp, Homo sapiens
taaaagctaattaggaatagacatggacactgatatggtttggatttgtgtccccactcaaatctcatgttgaattttaatcccctagtattggaggaggkgcatggtgagaggtgattggatcatgggggcagacttgctccttgctgttgtcgtgatagtgagttcttagcgagatctggttgtttaaaagtgtgtagc

SEQ ID NO: 394225 - DNA, 201 bp, Homo sapiens
gttccttctagcttctttctgtgttaagtacaaaagctacccatgtctctcaatgttaagcattgtattaatagtaataacttattaagcccttgatataygcagggcaatgttctcaaaactttaaatatacttccttatttattcctaacagtggataaaaatatttttttattaataaaaacattttttatccactta

SEQ ID NO: 394226 - DNA, 201 bp, Homo sapiens
atgtgtttcacactttaaactacaagagggccagatgcattgggacattttgaaactttgtttctgtacagtaggtctcttataaaacaagctgttccttstagcttctttctgtgttaagtacaaaagctacccatgtctctcaatgttaagcattgtattaatagtaataacttattaagcccttgatatatgcagggc

SEQ ID NO: 394227 - DNA, 201 bp, Homo sapiens
agcattctaagatggttaacattcaaagatcagatactattttcccaattagcatatagctgtccagaaaaagaatttttgtcctgctctattattggggcaggacaaagaattattattttaattctctaggatatactgatggctctatgaatgttaggtattaaaaatgatagaggaacttttttcaaaaataaattt

SEQ ID NO: 394228 - DNA, 201 bp, Homo sapiens
gcattctaagatggttaacattcaaagatcagatactattttcccaattagcatatagctgtccagaaaaagaatttttgtcctgctctattattggggcaggacaaagaattattattttaattctctaggatatactgatggctctatgaatgttaggtattaaaaatgatagaggaacttttttcaaaaataaatttt

SEQ ID NO: 394229 - DNA, 201 bp, Homo sapiens
ctaagatggttaacattcaaagatcagatactattttcccaattagcatatagctgtccagaaaaagaatttttgtcctgctctattattggggcaggacmaagaattattattttaattctctaggatatactgatggctctatgaatgttaggtattaaaaatgatagaggaacttttttcaaaaataaattttgtaat

SEQ ID NO: 394230 - DNA, 201 bp, Homo sapiens
acagatatcggaaaaattgtgaaaatgttagcatatatagttgtaaacttatatccaagtctatacagattatacagaattagagtttgctttcttatttyattttctaaaagtgaacccagaatataaatatatgtgctgttgaggagtataggctttttaatattcattctgatagtttaatttccttatttttattta

SEQ ID NO: 394231 - DNA, 201 bp, Homo sapiens
aagtggacaagataacctgttctgtggatactagtaggcctctttctccagccacacctgtcatcacccaattgtttcatgagcaaagtagccatggtgayaagaatagaggttatgcatgggctcagcaacgtggacttctactcaccaaggctgacctggccaaggctatctctgagtgcccagtctgccagcaacaga

SEQ ID NO: 394232 - DNA, 201 bp, Homo sapiens
tatgttgctgaaatcaaaagttaataatgtaaaatgctttaatttataagataacctggcatgttaatgaatcacttaaaacagttaatcactgacagtarctaatacaggcataaatttatgttgaaagagaaaagaggttttcagaggtaaatttttctgattttaaaaagtattatcttctcttttccccgtttataa

SEQ ID NO: 394233 - DNA, 201 bp, Homo sapiens
taggtgacagagcaagaccctgtctcaaaaaaaaaaaaaaaaaaaaagaaacaatatacaatgataaggatctaaagattttttaatattatataaactcmtggatattatttctaaaatataattagattgttagaggaaacatgcttcagtgtgcctttatataatatataataaatatatatatttaataatatataa

SEQ ID NO: 394234 - DNA, 201 bp, Homo sapiens
gtaggaagtcacggaatagaggcagcttgggctggtggcagaaatggtcgggaagtcatggacaggttttttcccctggttccagatctcctttcaccaaraggattattctatttagttaccattaaagaaaacaacccaggtaatacagaccaatttattgtttaagcatttatgttgctgaaatcaaaagttaataat

SEQ ID NO: 394235 - DNA, 201 bp, Homo sapiens
cagtttgtgatctaaatcaaacttgagttaaaagaaaacattctttctaattgttcacaggtaggaagtcacggaatagaggcagcttgggctggtggcaraaatggtcgggaagtcatggacaggttttttcccctggttccagatctcctttcaccaagaggattattctatttagttaccattaaagaaaacaaccca

SEQ ID NO: 394236 - DNA, 201 bp, Homo sapiens
aacattatagagggctggcactgtggttcgtgcctatagtcctaactacttgggaggctgaggtgggaggatcacttgagcaagcccaggagttaaaggcwgcagtgagctgtgatggcaccactgcactctagcctaggtgacagagcaagagcctgtctctaaaaaagaagcaacttccaagattataggcaagaaaat

SEQ ID NO: 394237 - DNA, 201 bp, Homo sapiens
tcggatgatccgcccgcctcggcctcctaaagtgctgggattacaggcatgagccagtgtgcctggcctaaaaatttctttaatgtttccataattagtataagtaagtgtttttgatagaatggtgaaacaccagagatagaagagactatagaacagtatccagtaaataatggtaggtatctgtacagatatcggaaa

SEQ ID NO: 394238 - DNA, 201 bp, Homo sapiens
gcacacacctgtaatcccagctatttggagactgaggcaggagaatggcgttaaccctggaggcggagcttgcagtgagctgagatcaagccactgcactscagcctggacgatagtgcgagactctgtctcaaaaaaaaattagccaggcatggtggcttgcgcctgtagtcctacatacttgggaagctgaagtgggag

SEQ ID NO: 394239 - DNA, 201 bp, Homo sapiens
ctacctgccttctctcttccagcctgcatcggtggcttcatggggacttccctgtgatcagctgacagagaaagagaagacttaggcctggtttacagagkgttctgtatgatatgcaggtaccaccctaaagtggatagctgcagcactacatctcacctctgggctaccttgaaggacagtggtgaagggaaatcctcc

SEQ ID NO: 394240 - DNA, 201 bp, Homo sapiens
taacagcattctaagatggttaacattcaaagatcagatactattttcccaattagcatatagctgtccagaaaaagaatttttgtcctgctctattattggggcaggacaaagaattattattttaattctctaggatatactgatggctctatgaatgttaggtattaaaaatgatagaggaacttttttcaaaaataa

SEQ ID NO: 394241 - DNA, 201 bp, Homo sapiens
tctaattgtacatatggaactattctttttctaattttacagataaaagaggaaagtaattcacaaacaggattactaatttatccaaggttacacactaraaaatgatgaaacttagattcaacttgactgctccttcgtcagcagtaaaatgcaaaatatatacttttttggtgatattacttgtcaaaaagattcagt

SEQ ID NO: 394242 - DNA, 201 bp, Homo sapiens
ggtggaagctgcagtgagccatgattacaccactgtactccagtctaggtgacagagcaagaccctgtctcaaaaaaaaaaaaaaaaaaaaagaaacaatmtacaatgataaggatctaaagattttttaatattatataaactcatggatattatttctaaaatataattagattgttagaggaaacatgcttcagtgtg

SEQ ID NO: 394243 - DNA, 201 bp, Homo sapiens
tataacttgtcttttcttctcaagatagcccagaaagatttacaagcacaaattgcactgcaaagtatgctgtaaaaggagctgattttgttataaagtcytgggttatttctagtttggaattctaattatttatgagaccatgatagttattttcaaagagaagccacctggtgagattctcagaccttactaccacct

SEQ ID NO: 394244 - DNA, 201 bp, Homo sapiens
tcctcagatggatttacatcactggcttccctggttctcaagcctttggattcagactgaattataccacaggccttcctgggtctccagcttatagatgrcagatcatgggacctcttagcctccataatcatgtaagccactttcttgtagtactggtaaaagatatattagaccaatctataaaacagctagctatga

SEQ ID NO: 394245 - DNA, 201 bp, Homo sapiens
aaacatacaacaaaatttaattattaatattttcaattattttgtttgtaaaatcaaatgaatgtcatcctatgacatcagtcagctgctgctatcacagwctactctgattttactcctaattgtcagtaattgagtcctattaaaagacctaggaaaggaaccttaaatgatggaaatacaaactgtgacacatatcta

SEQ ID NO: 394246 - DNA, 201 bp, Homo sapiens
ttttgatgcatgtataacattatagagggctggcactgtggttcgtgcctatagtcctaactacttgggaggctgaggtgggaggatcacttgagcaagcscaggagttaaaggctgcagtgagctgtgatggcaccactgcactctagcctaggtgacagagcaagagcctgtctctaaaaaagaagcaacttccaagat

SEQ ID NO: 394247 - DNA, 201 bp, Homo sapiens
aaatagctggacatggttgtgcgcacctgtcgtgccagctacttgggaggctgagatgcgaggatcacttgaccctgggaggttgaggctgccttgagccrtgatcgtgccactgcactccagcctgtggaacagaacaaagccctgtctcaaaaaaaaaaaaaaaaaaaaaattgatggcttcagcacagctacttccag

SEQ ID NO: 394248 - DNA, 201 bp, Homo sapiens
cctaataaagacttgtcagatgtgtagactggttccaaaagtttaaaacctctggagcttgtcactgggtagttgttttgggagttcagtgctaaaaattyccctaaatgccatcaagctgatctttttaatggggatgatttatgcttttgatgcatgtataacattatagagggctggcactgtggttcgtgcctatag

SEQ ID NO: 394249 - DNA, 201 bp, Homo sapiens
tgcttgagcccaggagtttgaaatcagcctgggcaacatagagagactccatctctacaaaaaaattaaaaattaaccaggtgcagtggcatgtgcggtartcccagctacttgagaagctgagatgggaggattgcttgagcccaggaggtcaaggctggagcgagccatgatggcaccactgcactccagcctaggtga

SEQ ID NO: 394250 - DNA, 201 bp, Homo sapiens
gggggactcagtaaaggagatagccatccccaaggtgggtggacatcatccagtttgttgagggcgtaaataaaataaaaggcagaggaaggaagaattcmccccccttttttttcctgcctcattgtttgagctgtgacatctcatcttctgtcctcagatggatttacatcactggcttccctggttctcaagcctttg

SEQ ID NO: 394251 - DNA, 201 bp, Homo sapiens
acttgtgatggttaattttatatgtcaacttgaataggccacagggtgccagatatctgtttaaacattattctgaagtgtcttgagtgtgtttacagacragatttgcatttgaactgggggactcagtaaaggagatagccatccccaaggtgggtggacatcatccagtttgttgagggcgtaaataaaataaaaggc

SEQ ID NO: 394252 - DNA, 201 bp, Homo sapiens
taagtatggtttaaagagatgtttatgggtgccaagttgacaagggtagacttgtgatggttaattttatatgtcaacttgaataggccacagggtgccaratatctgtttaaacattattctgaagtgtcttgagtgtgtttacagacgagatttgcatttgaactgggggactcagtaaaggagatagccatccccaag

SEQ ID NO: 394253 - DNA, 201 bp, Homo sapiens
aggtatctgtacagatatcggaaaaattgtgaaaatgttagcatatatagttgtaaacttatatccaagtctatacagattatacagaattagagtttgcyttcttatttcattttctaaaagtgaacccagaatataaatatatgtgctgttgaggagtataggctttttaatattcattctgatagtttaatttcctta

SEQ ID NO: 394254 - DNA, 201 bp, Homo sapiens
gttaatcgtgttagatggaattatgaccttgttgttgtctttatgtggcagttaagtatggtttaaagagatgtttatgggtgccaagttgacaagggtaracttgtgatggttaattttatatgtcaacttgaataggccacagggtgccagatatctgtttaaacattattctgaagtgtcttgagtgtgtttacagac

SEQ ID NO: 394255 - DNA, 201 bp, Homo sapiens
cagaatgagtgttatctggatcaacttgggttatgtgcctatctctcaaccttttgctgtggccaaaggagatttgaatgtggagatgattggcttcaaamtgcctcatagttccatcccaggagctggattgggataaaccctactcaggccacttagattgagaatgatgggaggtagagcttccctaacaaaagtcaa

SEQ ID NO: 394256 - DNA, 201 bp, Homo sapiens
acgggttaaagtgtttctggtggaatgctggattgttaatcgtgttagatggaattatgaccttgttgttgtctttatgtggcagttaagtatggtttaargagatgtttatgggtgccaagttgacaagggtagacttgtgatggttaattttatatgtcaacttgaataggccacagggtgccagatatctgtttaaac

SEQ ID NO: 394257 - DNA, 201 bp, Homo sapiens
agtacttgcatcttgctgctcttaaaaccaagaaagaggcacaatacttagtgggcctctttgggttttggaggcaacattttccaatttcattatgttayaccagcctgtttaccaattgactcaaaaagctgctagttttgagtagggcccagaacaagaaaagagtctgcaacaggtccaggctgctgtgcaagctgc

SEQ ID NO: 394258 - DNA, 201 bp, Homo sapiens
atattcattctgatagtttaatttccttatttttatttaattgcatgtattatttttctgaatgaaaacataaaaatacttcatttctgtctacaagcgtmgcccgtaacacattattttcccaaaaacatgggagattatttttaaagattaatttgtcagttatttaattcagagtttaatgtaaaattcttactgttg

SEQ ID NO: 394259 - DNA, 201 bp, Homo sapiens
acccaccactgtgcccgactagtttttgtatttttagtagagactgggtttcatcatgttggccatgggttggcgaggctggtctcgaactcctgagctcrgatgatccgcccgcctcggcctcctaaagtgctgggattacaggcatgagccagtgtgcctggcctaaaaatttctttaatgtttccataattagtataa

SEQ ID NO: 394260 - DNA, 201 bp, Homo sapiens
gttgatgtaatccaccttttccacaattcaggcctctttcagtcagaagtgatagtgaacccagttcaaactggcttaaatttaaaaaattagtccgggtrcaaaggctcacgcctttaatcccagtactctgggatgctgaggtgggatgattgcttgagcccaggagttcaagaccagcttgtacaatatagtgagaac

SEQ ID NO: 394261 - DNA, 201 bp, Homo sapiens
ctttctaattgttcacaggtaggaagtcacggaatagaggcagcttgggctggtggcagaaatggtcgggaagtcatggacaggttttttcccctggttcyagatctcctttcaccaagaggattattctatttagttaccattaaagaaaacaacccaggtaatacagaccaatttattgtttaagcatttatgttgctg

SEQ ID NO: 394262 - DNA, 201 bp, Homo sapiens
cttgttctctttttctttgccattattgaatacgttctaatttttttttttctaaatctgttctgtgtagaattaatggaacataccttgatattactcartaacagatttgccttatggacataggatatagtttccttccatttctgtttataggtgcactgatatcaaccctgaggcagcagcttgtaccctagagac

SEQ ID NO: 394263 - DNA, 201 bp, Homo sapiens
tacatttaggtcaaaggcttgctaccaagattgaccgaaaaagttgatcttctggtgtttaatcccccctatgtagtgactccacctcaagaggtaaaacwtacaacaaaatttaattattaatattttcaattattttgtttgtaaaatcaaatgaatgtcatcctatgacatcagtcagctgctgctatcacagtctac

SEQ ID NO: 394264 - DNA, 201 bp, Homo sapiens
tatgtgtattcttctactcttggacattgtatcaatataacagtctttttcatcaatagaacaaatccttgttctctttttctttgccattattgaatacrttctaatttttttttttctaaatctgttctgtgtagaattaatggaacataccttgatattactcagtaacagatttgccttatggacataggatatagt

SEQ ID NO: 394265 - DNA, 201 bp, Homo sapiens
taatagcatgcaccaggtagacatatgaaaggcaaaatacttctgtgctccttaacttgcacttttcttacaatgacgagggtaggtagctttccggtttyttttttttttttttttttttaaataaatgattttgtagcttagaaggaattaagccaaagagataagaaattattttcatattattagaagttgttactg

SEQ ID NO: 394266 - DNA, 201 bp, Homo sapiens
actaaaaatgataaataaggcatcatggaataaatataacgtgtacaggactaacatgcaatttgattaaaatacttttttgttttttgagacaaggtctkgctctgtcacccaggctggagtgcagtggcgtgaacttggctcactgcaacctccaccccacaagcttaggcaatcctctcacctcagcctcttgagttt

SEQ ID NO: 394267 - DNA, 201 bp, Homo sapiens; identical to SEQ ID NO: 86395

SEQ ID NO: 394268 - DNA, 201 bp, Homo sapiens; identical to SEQ ID NO: 86397

SEQ ID NO: 394269 - DNA, 201 bp, Homo sapiens
tgcaggggagaagccgtgcctcttcagctcgtgtgtggtggcctggcattcaatttgtgaggtgtaaaacctgcatgaaggacccctctttttgtggagarctttccttttgcctaataaattctgccctcctcgcctttcagtgtgtacgcgtgcctaattttttctggtcatgtgataacccaaatttaactgaactaa

SEQ ID NO: 394270 - DNA, 201 bp, Homo sapiens
agcaacactctgtcatcagatggaagtggtatacacatgattgggcctgagaggccctgaaggcacaaggaagttacatgaagaagtaggccaaatttccrtagtccccacttctgctacctgccttctctcttccagcctgcatcggtggcttcatggggacttccctgtgatcagctgacagagaaagagaagacttag

SEQ ID NO: 394271 - DNA, 201 bp, Homo sapiens; identical to SEQ ID NO: 86402

SEQ ID NO: 394272 - DNA, 201 bp, Homo sapiens; identical to SEQ ID NO: 86404

SEQ ID NO: 394273 - DNA, 201 bp, Homo sapiens
gaactacattagacttagtggaaagacatttgcatcagagggtaggaaataaatatgactacaattcaagggccttctaccttagtgaaattggtagggayccagtgacatggggcatgttaggatatttcttctacggtgaaggataagtacttgcatcttgctgctcttaaaaccaagaaagaggcacaatacttagtg

SEQ ID NO: 394274 - DNA, 201 bp, Homo sapiens
ctgtgaagagtattttgattctactatactaatatttatttatttttttttcagagtggaaatatgcctggaagtagggtcagggtctggtgtagtatctkcattcctagcctctatgataggccctcaggctttgtacatgtaagtatatcatattcatctagatcttccactgacaggttaactatgataactctaatg

SEQ ID NO: 394275 - DNA, 201 bp, Homo sapiens
tggaattgatctggcaaatgtcttttttttcataccagtccataaaggcagtttgctttcagatggcagggccagcaacacaccttcattgtcgtatctcmggtgtgtatcagctctccaactctatgtcataattcagttcatggggatcttgattacctttcccttccacaaaatattacactgattggttatatcgat

SEQ ID NO: 394276 - DNA, 201 bp, Homo sapiens
gggctctgacgggaaagggttgcggctttctgaagaagtgcggtggaggagggccggaacggtgactatcaccgccctgagccggagcaggcggggtccayttgcagatgattgacagccaggacgccgtaattgagaattttcctgtagctacaagtaatgagtgtgccggggacgcatctcctttgccagggggctgct

SEQ ID NO: 394277 - DNA, 201 bp, Homo sapiens
gggagaacttcgctacgccgttccacgggcacgtgggccgcggcgccttcagcgacgtgtacgagcccgcggaggacacgtttctgcttttggacgcgctsgaggcagcggctgccgaactggcagggtgcgaggaggggaggggctctgacgggaaagggttgcggctttctgaagaagtgcggtggaggagggccggaa

SEQ ID NO: 394278 - DNA, 201 bp, Homo sapiens
actcctaggcctgcgcatgagggcgagggcatgcgcatgcgcatgcgcacgccctgcgcacgcgcatggaacgcagcgaaggactatggcaggggagaacytcgctacgccgttccacgggcacgtgggccgcggcgccttcagcgacgtgtacgagcccgcggaggacacgtttctgcttttggacgcgctcgaggcagc

SEQ ID NO: 394279 - DNA, 201 bp, Homo sapiens
accaacaaataactagtctctttttgagaaacagctcttggcctgctactgggccttagtagagactgatacttaatgagtcaccaagttaccgtgcaacmtgagcttcccatcatgaactggatgttatctgagccaccaacgcacaaagttggatatgcacagcaacactctgtcatcagatggaagtggtatacacat

SEQ ID NO: 394280 - DNA, 201 bp, Homo sapiens
ctttttgagaaacagctcttggcctgctactgggccttagtagagactgatacttaatgagtcaccaagttaccgtgcaacctgagcttcccatcatgaamtggatgttatctgagccaccaacgcacaaagttggatatgcacagcaacactctgtcatcagatggaagtggtatacacatgattgggcctgagaggccc

SEQ ID NO: 394281 - DNA, 201 bp, Homo sapiens
tatggcaggggagaacttcgctacgccgttccacgggcacgtgggccgcggcgccttcagcgacgtgtacgagcccgcggaggacacgtttctgcttttgracgcgctcgaggcagcggctgccgaactggcagggtgcgaggaggggaggggctctgacgggaaagggttgcggctttctgaagaagtgcggtggaggag

SEQ ID NO: 394282 - DNA, 201 bp, Homo sapiens
tttctccagccacacctgtcatcacccaattgtttcatgagcaaagtagccatggtgacaagaatagaggttatgcatgggctcagcaacgtggacttctrctcaccaaggctgacctggccaaggctatctctgagtgcccagtctgccagcaacagagaccaacactgagcccctgatatgacaccattccccagggtc

SEQ ID NO: 394283 - DNA, 201 bp, Homo sapiens; identical to SEQ ID NO: 86394

SEQ ID NO: 394284 - DNA, 201 bp, Homo sapiens
tgaatttgatataatagactaatatagaactctgaaactaacaatcagggaatgcatattctttctcaagcacccatgggatgtttacaaacataattacrtattagaccaaaagtaagtccctgtaaaattcaaagaatcaatatgatatagctaatcttctctgactataaagtgtttaggttataaattaataacaaa

SEQ ID NO: 394285 - DNA, 201 bp, Homo sapiens
tcgttaggagttttatcatgaaagctatttaattgtatagatttttatatctttgttttcagattgctttataactaaattgaccataatctttcctctcwttttctgtacacttcaagtttgattttcagcttatactaaaagtcctcagcccttcaaatcacatgattgctagttttctcttgtctttctcccttcctt

SEQ ID NO: 394286 - DNA, 201 bp, Homo sapiens
ctggcatgttaatgaatcacttaaaacagttaatcactgacagtagctaatacaggcataaatttatgttgaaagagaaaagaggttttcagaggtaaatwtttctgattttaaaaagtattatcttctcttttccccgtttataacctaatattcaagtataaaaatctctaatgtttttttctaacacctcactctcag

SEQ ID NO: 394287 - DNA, 201 bp, Homo sapiens; identical to SEQ ID NO: 86403

SEQ ID NO: 394288 - DNA, 201 bp, Homo sapiens; identical to SEQ ID NO: 86405

SEQ ID NO: 394289 - DNA, 201 bp, Homo sapiens
gttttaccatgtttcccaggccggtctcaaactcttaagctcaagagatccgcctctctctgcctcccaaagtgctgggattacaggcatgagccgtaacrctaggcctcacggtcagattgacaaacgcagtggcatcttacaacataaagaacattgattttttttgtcataaataattaaccagagtgagtaatcatc

SEQ ID NO: 394290 - DNA, 201 bp, Homo sapiens
aaaatctgctcgatgttggtcgccatggcgtccgctccgttctctcaactcctcctcgctagtcctccaggctcccagcatgcctcgggaggaggcgcacsggccaattcggtctctcgccttcctgattggctccaaagggaatgcccggtccggcccgctccaccgagggaccaatcagtgagcacggccctgctctcc

SEQ ID NO: 394291 - DNA, 201 bp, Homo sapiens
agctacagctcattttgtatcatagctttgttgttgaaaagtctgaaaacagttgaggaatttttattgttatcttattaattagaagaagtttatgtttracctttatggatagaggggtaaagtaataagagtattgtattctctcagatggatgtagcctgatttttttccctctattgtaagtaacactgctatgaa

SEQ ID NO: 394292 - DNA, 201 bp, Homo sapiens
cataatacaaatgctggataatgctaaaagtcaactaagtatcaaaaacttaccaagcctctttttttaaaaaaaaaaaaaaaaaaaatcttacaatcagsagaaagcctttggggcagctggagaaacaattgtcattgaagaacttcttgacggagaagaggtgtcggtatgtatattcatctttttggcttttgtagt

SEQ ID NO: 394293 - DNA, 201 bp, Homo sapiens
tgaacccgggaggtggaggttgcagtgaacccagatcgtggcactgcactcctagcctgggcgacagagtgagactccctctcaaaaaaaaaaaaagaagwagtagtatgagctcactgctgtttttctcccttctcaggatcgaacctgcaagcacttatagacagtactcgggaaccaaatagctctgcacaaattgat

SEQ ID NO: 394294 - DNA, 201 bp, Homo sapiens
gagtgacataaataataatatacgcccaagttttatagaagtatctttatacatgaaatgtttgagcaaaatgaatctgtaggttgatcaaggaacaaaayaacctctttttttaatttaaaaaaaaaaaaaagggaatctctctctgtcacccaggttggagtgcagtggttcaatcacagctcactgcagccttgacct

SEQ ID NO: 394295 - DNA, 201 bp, Homo sapiens
tttattggatgttgacgattactctgtctttacagtgcagacttccctgctttggttgtgaaggccagtggtcttgcagctggaaaaggggtgattgttgsaaagagcaaagaagaggcctgcaaagctgtacaagagatcatgcaggtaggctgggtcttctgaaaaaatttacttttctattcatactgaataaatacc

SEQ ID NO: 394296 - DNA, 201 bp, Homo sapiens
ggtgtctcggctggggagcagtcaggcagcgcccagggcgggagggaatcagactagattctcgccgcggagacccagggccgcgcggaccaatggggcagggaagccgtcgtagggcggggcagtgaggggcggtgccgcgctggtcccgcgccggtcccggtgggccgacttccggcgagcgggcaagcgggaaccagg

SEQ ID NO: 394297 - DNA, 201 bp, Homo sapiens
tacaggccatgctgagacaacgcagctgatagaaatgctaccagcatcttaaaccagcttggtgcagacaatctgactagtttaaggagaccgactgaagytctgcccaaatagtctgtggatggaaaagcactgcttgctaatggaggggatggtgatgaagttctagatcttgtaaggagttttgatgaggctattaag

SEQ ID NO: 394298 - DNA, 201 bp, Homo sapiens
gcttaggctttggtttggggatttaagatcgcgaactgagtgaaaccatagaaactgatttgtagaaattttcctgttgtttgtaaatgcggtgggtgggkgttggccatgtgcttttcacttgctactgttagctggtttctatttgctcttttacttttcctgttttctaagatgtcaaggcctttttgtgtctttata

SEQ ID NO: 394299 - DNA, 201 bp, Homo sapiens
tagaccaagtagcttgtcagaatttcgtgttcttttgtttttaggtgttaagagcagctaatcaaatggataagatacaattttgaacttattccctaatrtggatgtttatattgttcttacatagattgcccagctatgcaataaacatgataccattggtcaagatttggtagcaatgtgtgttaatgatattctggc

SEQ ID NO: 394300 - DNA, 201 bp, Homo sapiens; identical to SEQ ID NO: 86457

SEQ ID NO: 394301 - DNA, 201 bp, Homo sapiens
tcttccagaagtacatctcacaggccgctaaatatactggtttttttaaactagtagacatttaaataattacatgtttaatctattaaaatgtagcaagyaattaatttcctctccaacaggctgtaaagttgatcttggaggttttgctggtctttttgatttaaaagcagctggtttcaaagatccccttctggcctc

SEQ ID NO: 394302 - DNA, 201 bp, Homo sapiens
gtatatttagcagcctgtgagaagtacttgtagaagaaataggtgattgagttagaatagcggttctcagggatgatgtaatcaagtcaactggggagatkgttcaaactcatttcaattcccagagcctgccctagaccagttaaatcagaatctgtatagatgtggcccaggcactgactttaaaaaaatttaagcact

SEQ ID NO: 394303 - DNA, 201 bp, Homo sapiens
ttgctcccttcttttaagggttcaaatgcccatgagcaagccctggaaaccggagtcacagttactgggtgcactgtacactttgtagctgtgagtatgtstttttctaccaacataatattagtagtcagatgtaaatgacactggctagaaggtaatgttcaaaacttttgcttacttttccaggaagatgtggatgct

SEQ ID NO: 394304 - DNA, 201 bp, Homo sapiens
tttgaatatggacaaagaaagaaatgggccagaaccaagatcccttgcattggtaaaatttccctaagattgaagtaacaagtgtataatagttctgccaragcaatattgagttttaccagtactggcaggcagagtagccattcagaatcactaaatggctttgtgttgtaaaaacactcagggaagatgtatattaac

SEQ ID NO: 394305 - DNA, 201 bp, Homo sapiens; identical to SEQ ID NO: 86453

SEQ ID NO: 394306 - DNA, 201 bp, Homo sapiens
gggtgatgttgttgttggaatagcttcatctggtcttcatagcaatggatttagccttgtgaggaaaatcgtggcaaaatcttccctccagtactcctctscagcacctgatggttgtggtgaccagactttaggtaaactccctcatgtttaaactgtcctgcttggaaatgcctgagcaagcatttagtggttttagtc

SEQ ID NO: 394307 - DNA, 201 bp, Homo sapiens
gaataactgtgatgaaaagaagttcctttacaggccaggcacggtggctcacacctgtaatcctaacacttggggaggccgaagcgggcagatcacttgargtcaggagttcgagaccagcctggccaacatggtgaaaccccgtctccactaaaaatacaaaaacaattagccaaatgtggtggtgcatgcctataatcc

SEQ ID NO: 394308 - DNA, 201 bp, Homo sapiens
cactgactttaaaaaaatttaagcactttagggtatgtgaaaatcacttgggatatcttctgctttaaataatattttaagattaaaataattttccctgrcgtttaggtgatgacttgtttttaattctttaggagtttgacttacaaggaatctggagtagatatcgcagctggaaatatgctggtcaagaaaattcag

SEQ ID NO: 394309 - DNA, 201 bp, Homo sapiens
tgctgtttctgagcggctggggtagaggtgctgacgtttgcgccgcgcacgactatgtccgccatgttagtgtctgacgcaggcgccattacaggagccgyctctcttgaggcgaccgtgtccgcataagttgtcagtccccagcagtgtttgggagccttaacaggcttgctaagtgcctgagattaaaggcgaagagga

SEQ ID NO: 394310 - DNA, 201 bp, Homo sapiens
ttcaggcgctctcaggtggcgccaagttcagtttcgacagggatatgcatccgggagagaatttttcagcccccgcccccactggcatgtgagaggaggarctcgctgttgccctgtgtcttccccagtgcgttctataaccagcctcatttttttttttagcaataggccggatgtcctaagcgaccggcattcaaagcc

SEQ ID NO: 394311 - DNA, 201 bp, Homo sapiens
ctagacccgtactcccaaactgtcaggcaggccttatctttcttcccaatttttggccaccttttaacatccccatcagtctcagtagcctcctcaacaamcaggtctaggagttatttcctccttattgaccccacggtacaggcagatgggttcctggcattccggatcttaactaaagccaaattttcccatagagtg

SEQ ID NO: 394312 - DNA, 201 bp, Homo sapiens
ttaatgtacacatgattacacatggaaaattcttaatcattgggggttttgggagggaaaaactcgacccttttctatctctttttgcttcattatctgtmtttataagacataaaatattgtcatgtaattggcttacataaagttgaagtactcgataagtaggtcctccaaggggattggtaacttcaagctctatta

SEQ ID NO: 394313 - DNA, 201 bp, Homo sapiens
aaaaatctgctcgatgttggtcgccatggcgtccgctccgttctctcaactcctcctcgctagtcctccaggctcccagcatgcctcgggaggaggcgcasgggccaattcggtctctcgccttcctgattggctccaaagggaatgcccggtccggcccgctccaccgagggaccaatcagtgagcacggccctgctctc

SEQ ID NO: 394314 - DNA, 201 bp, Homo sapiens
tctgcccaaatagtctgtggatggaaaagcactgcttgctaatggaggggatggtgatgaagttctagatcttgtaaggagttttgatgaggctattaagaatgaggcaaactgaattgagtcaacttctgaagaagaaaaaatatgaagtaactaggagctgctattttacattatgactgctttctgaaattgtttatg

SEQ ID NO: 394315 - DNA, 201 bp, Homo sapiens
tattttccaaagcaatgcttggttactgtaagttttgccctgcttaagccaaacccagtcttctgctttcttttctttaatattaaagtatttctcatctrtcatgttaaactcaaaaggatatgtatgctcctttactttttttttttttttttttgagacaagagtcttgcccaggctggagtgcaatggcaccatctc

SEQ ID NO: 394316 - DNA, 201 bp, Homo sapiens
tttttaaatcttcagtgtgtttattccaaggtgactgtgagcagaagttgaagtcatgctgaagataaattgggtgattatttgcacgtagtaatagttawagccaagagaatgagggagaccaaaaggttgtttctcaaagtagagtgactgaaaagaacagtccaaagtagtgggtaaaccatgtaaaagtattatcat

SEQ ID NO: 394317 - DNA, 201 bp, Homo sapiens
atggctcatgcctataatcccagcgctttgggaggctgaggcagaagaagcccaggaggtcaaaactagactgggcaacatggtaagaccctgtctctccaaaaaaaaaattttttaaatagccaggcatggtgtcgcatgcctgtagtcccagctactcaggaggatgaagtgagaagatcacttgagcctgggacatca

SEQ ID NO: 394318 - DNA, 201 bp, Homo sapiens
tcctggactcaagtgatcctcccacctcagcctcccaagtagctgggacaataggcacacaccactactcccagctagtttttatattttttgtagagacrgagttttaccatgtttcccaggccggtctcaaactcttaagctcaagagatccgcctctctctgcctcccaaagtgctgggattacaggcatgagccgta

SEQ ID NO: 394319 - DNA, 201 bp, Homo sapiens
ggtattctctatgctggaataatgctgaccaagaatggcccaaaagttctagagtttaattgccgttttggtgatccagagtgccaagtgggtaaaaataycaaagtattacttggtagaagatatgtggtattttaatcttggaatttatcagcctggaagtaattacctttgggaaattcatgcaagttctgctagtac

SEQ ID NO: 394320 - DNA, 201 bp, Homo sapiens
ttaaccagagtgagtaatcatcacttggtcatctgccaccactattgccattttattttatttatttatttatttatttttatttttatttatttatttatttttttttttttgagtctcgttctttcacccaggccggactgcagtggcgctatctctatctcggctcactgcaagctccgcctcccaggttcatgccat

SEQ ID NO: 394321 - DNA, 201 bp, Homo sapiens
agcagctaatcaaatggataagatacaattttgaacttattccctaatgtggatgtttatattgttcttacatagattgcccagctatgcaataaacatgrtaccattggtcaagatttggtagcaatgtgtgttaatgatattctggcacaaggagcagagcccctcttcttccttgattacttttcctgtggaaaactt

SEQ ID NO: 394322 - DNA, 201 bp, Homo sapiens
atttcttgtgtgtgtgtgatatgaattgagaaccaagtcagatcagaatttgttctgatctttctacttcataacagacaacacgtttccaaacaatttckgcacagtttttgtttttgttgttgttttttgagacggagtctcgctctgttaccaggctggggtgcagtggcacgatcttggctcactacatcctccacc

SEQ ID NO: 394323 - DNA, 201 bp, Homo sapiens
ttagccctatgtaaaaatgtgatcagtgccaatgtagctagcaagagagactgtatatcacaagatgcatatatgtgatatgcacaaatgaaatataggtraaactacctgaattaaatttagagcctgctaccttcaaagccctcctcaggggtttgtcctctagacccgtactcccaaactgtcaggcaggccttatct

SEQ ID NO: 394324 - DNA, 201 bp, Homo sapiens; identical to SEQ ID NO: 86461

SEQ ID NO: 394325 - DNA, 201 bp, Homo sapiens
atggtctgtgtaaaggttgagtttttaattatttttggtaattcattgaaaagggttgtgcttatctttttctattacaggtaattaatcataaactgtayaaaaatcgtgtagaatttgacagtgcaattgacctagtccttgaagagttctccatagacatagtctgtcttgcaggattcatgagaattctttctggcc

SEQ ID NO: 394326 - DNA, 201 bp, Homo sapiens
atatgtatgctcctttactttttttttttttttttttgagacaagagtcttgcccaggctggagtgcaatggcaccatctcggctcactgcaacctctgcrtcctgatttcaagcgattctcctgcctcagtctcccaagtaattgggattataggcacccaccatcatgcctggctaatttttgtatttttgtagagaca

SEQ ID NO: 394327 - DNA, 201 bp, Homo sapiens
cctataatcccagcgctttgggaggctgaggcagaagaagcccaggaggtcaaaactagactgggcaacatggtaagaccctgtctctccaaaaaaaaaattttttaaatagccaggcatggtgtcgcatgcctgtagtcccagctactcaggaggatgaagtgagaagatcacttgagcctgggacatcaaggctacagt

SEQ ID NO: 394328 - DNA, 201 bp, Homo sapiens
cactttgtagctgtgagtatgtctttttctaccaacataatattagtagtcagatgtaaatgacactggctagaaggtaatgttcaaaacttttgcttacwtttccaggaagatgtggatgctggacagattattttgcaagaagctgttcccgtgaagaggggtgatactgtcgcaactctttctgaaagagtaaaatta

SEQ ID NO: 394329 - DNA, 201 bp, Homo sapiens; identical to SEQ ID NO: 86433

SEQ ID NO: 394330 - DNA, 201 bp, Homo sapiens
ctccctcacctggaaagaatcactgagggtgatgttgttgttggaatagcttcatctggtcttcatagcaatggatttagccttgtgaggaaaatcgtggyaaaatcttccctccagtactcctctccagcacctgatggttgtggtgaccagactttaggtaaactccctcatgtttaaactgtcctgcttggaaatgcc

SEQ ID NO: 394331 - DNA, 201 bp, Homo sapiens
cacatagatgctatgtaagaacctcttgcttatttttaatagtacgtgccagcaacaagctggtattcagcttgaactccccaccttcctgtcaccatgartgtctgttcagagcaccccagcatgcctttaactgtgcaaggcgggtacttgctgcttccagggccttcttggatgagaacttacttttacctcatttct

SEQ ID NO: 394332 - DNA, 201 bp, Homo sapiens
gttttaaagtggggagtaatagttattatttgttattaatggtatgctgtcaaccatatctgtactttatgttaataaagataggctgggcacagtggctmatgcctgtaatcccagcactttgggaggccgagatatgcggatcatgaggtcaggagatggagaccatcctggctaacatggtgaaaccccgtctttact

SEQ ID NO: 394333 - DNA, 201 bp, Homo sapiens
agctggttaaagagaaaccagaaaagatagaagctacagctcattttgtatcatagctttgttgttgaaaagtctgaaaacagttgaggaatttttattgktatcttattaattagaagaagtttatgtttaacctttatggatagaggggtaaagtaataagagtattgtattctctcagatggatgtagcctgattttt

SEQ ID NO: 394334 - DNA, 201 bp, Homo sapiens
taggagagaacttgtttcatttctattacgtttcgggaagttatttttggctagttcttttaagagtgtattttttgaaaatcataaagctaaaatacctrcttgacagagtcattgtgaggattgagaaagtttaaatctttcaagttcaaagtgttcagcatgtttcaggtagtaaaaaaatgagttatcctcatcatc

SEQ ID NO: 394335 - DNA, 201 bp, Homo sapiens
tggccaggctggtgtcgaactcctgacttcgtgatctgcgggcctcggcctcctaaagtgctgagattacaggcctgagccactgcacccgcctcattttraaaattgtatcaacttcaggctgggcatggtggctcacccctgtaattccagcacttcgggaggctgaggtggatggatcccctgaggtcaggagttcaa

SEQ ID NO: 394336 - DNA, 201 bp, Homo sapiens
gggtggtctcgctaggaagatttggggagtaggggcagaatactggcaggcagtcatatatatccaccgtgcacttcaagatagtgatgtgatctgcagcytttagttgaagtaattacatatgttcaccttttggaagtttttatgaaagagtagtgttaagtgatacaaatgtgttgttcattttagtccttgcattat

SEQ ID NO: 394337 - DNA, 201 bp, Homo sapiens
attattttgaagtaaattgtaacatcctttgttgtctgccactgaaagaaaatcctcagactctagaacatataaataaattatcaagccatccatgaggwcaaaagtatttgtcccacatgtcccgggtctaagagaagtaaattaatgaatgaatatgccttgtctttcgtgatcgatctttgttgttgtgggttttct

SEQ ID NO: 394338 - DNA, 201 bp, Homo sapiens
gaaggacacctctctgaggaagagatggccagaacatttaactgtggggttggcgctgtccttgtggtatcaaaggagcagacagagcagattctgagggrtatccagcagcacaaggaagaagcctgggtgattggcagtgtggttgcacgagctgaaggtacttgctccttactcatttttagatatataattttagct

SEQ ID NO: 394339 - DNA, 201 bp, Homo sapiens
aaaactcaaattccttaccatgcctttcaaagccctttgtgcagtctgtcttctgcctgctcttccagcctgatcttttatatccctttttctcttttcastataccctatccatgctgtcctaccaatttcccaagcagaagcttgctgctttggactttatatttgttcccaccccttactatgactgtctcctcatta

SEQ ID NO: 394340 - DNA, 201 bp, Homo sapiens
tagtagtcagatgtaaatgacactggctagaaggtaatgttcaaaacttttgcttacttttccaggaagatgtggatgctggacagattattttgcaagawgctgttcccgtgaagaggggtgatactgtcgcaactctttctgaaagagtaaaattagcagaacataaaatatttcctgcagcccttcagctggtggcca

SEQ ID NO: 394341 - DNA, 201 bp, Homo sapiens
cgtaccactgtcacattataaacgtgctaaggcttgggtgtctcggctggggagcagtcaggcagcgcccagggcgggagggaatcagactagattctcgycgcggagacccagggccgcgcggaccaatggggcagggaagccgtcgtagggcggggcagtgaggggcggtgccgcgctggtcccgcgccggtcccggtg

SEQ ID NO: 394342 - DNA, 201 bp, Homo sapiens
gcaagagggtactccatatacaggtaggcccacccacattactatggaagccacctatagagtaactttctacttttgataaaacttattttccattcccttttttttttttttttaccactttttaatggaccattttttaaatgtttatgatttttccaaaactttgattattagaagtttatgtagtagattttatat

SEQ ID NO: 394343 - DNA, 201 bp, Homo sapiens
taaatgtttatgatttttccaaaactttgattattagaagtttatgtagtagattttatatttgtaatacagtgtcttcatcatagattttctttctctcttttttttttttttcttttttaatgaaggtattctctatgctggaataatgctgaccaagaatggcccaaaagttctagagtttaattgccgttttggtga

SEQ ID NO: 394344 - DNA, 201 bp, Homo sapiens; identical to SEQ ID NO: 86456

SEQ ID NO: 394345 - DNA, 201 bp, Homo sapiens; identical to SEQ ID NO: 86458

SEQ ID NO: 394346 - DNA, 201 bp, Homo sapiens
actacaccaagggtgtagagataacaggtgagtgtcagggagcaagaggttggagtacaacgtgacaagtgccagcaccacagcagacccccctctcacamtaaggcttgctctcgataagagtgtgaagccatcagaaacctttcagagggtcttaaccatgttgcttattggatatgtgtgttcaaatatccgcaatta

SEQ ID NO: 394347 - DNA, 201 bp, Homo sapiens
tttcattttcctttggaatttctgctttacagacagaacaatggcagcccgagtacttataattggcagtggaggaagggaacatacgctggcctggaaayttgcacagtctcatcatgtcaaacaagtgttggttgccccaggaaacgcaggcactgcctgctctgaaaagatttcaaataccggtaatcatgttttaaa

SEQ ID NO: 394348 - DNA, 201 bp, Homo sapiens
caaggtaggattttaacgtgacactggtccgcagtgtcaggtacagcacaaagatctagaataagcactagaaaaagaccagtgtattttagagttaggtyaaaagtcagtttgctggacatagataccacccactagattgttgtggcagagttgtggagacagtgggtagagatttctgtttgaagaaacatactggta

SEQ ID NO: 394349 - DNA, 201 bp, Homo sapiens
ttgcccaggctggtctcgaactcatggactcaagcagtccttgcctcagcctcccaaagtgctggaattataagcatgagccaccgcacctagccaagttaaaaaaaaaaaaaaagaaacttgtggaaatcgtaaatcacttcacggtgtgaaatactgttgctatttgaaatcatatgtcaaatatgctctcttctaggg

SEQ ID NO: 394350 - DNA, 201 bp, Homo sapiens
attggtaacttcaagctctattaagatggagccctacacaccaggaaaggaaatgttagctattaagtaatccatattcgagataaaaggacctaaaccamggcatagagaagggaggcacattggagaatcattttatgcttagaagtaaaaagaagtctcaggtttctagttaagcaggtgagtaggcggtaacatcat

SEQ ID NO: 394351 - DNA, 201 bp, Homo sapiens
taagagtgtgaagccatcagaaacctttcagagggtcttaaccatgttgcttattggatatgtgtgttcaaatatccgcaattactgtattcagagaaccrttgatttcccttcctgtgcaaggaagacataagtggcagaaccacatctcccgagtgtcacccagtgcagccttccacttccacctgcctagagccaggg

SEQ ID NO: 394352 - DNA, 201 bp, Homo sapiens
cctcccgcgtgcccggaagtcccgccttctaaaaaggaagtaggggtgcgtgagaacgccggcggtgaccgcagccacagcggtgaccgagtgagaggaasgcggcggcggcggcggcggcggcgtgaagtcactgctgctctgggttcgggttggcgactgaaggcggtaccggcctcccggaacagcccgggggagggc

SEQ ID NO: 394353 - DNA, 201 bp, Homo sapiens; identical to SEQ ID NO: 86497

SEQ ID NO: 394354 - DNA, 201 bp, Homo sapiens
acagagccatctggcccaacctgtgagaagaaaacatactctgtgcctgcccaccaggaacgcgcctatgagtacgtggagtgtcccattaggggcactgyggctgagaataaggagaacctagatccttcaaatctggtaatccacactcatcttttctttctggagctttttatgcagggttgcttatacagactccca

SEQ ID NO: 394355 - DNA, 201 bp, Homo sapiens
aatggtgatgtggttgtcattgtaatttcaagtctgggaaaaatgatcctgattctatcaaattaacttattttgaaataaaaattttcttatatatgcawataaaggtgtttaaatgtatagcactgatgcagcaggtgacttctgttctaagctggcagagcacaaaattctcctttcctataatgtctgtgttgcaga

SEQ ID NO: 394356 - DNA, 201 bp, Homo sapiens
aacacggtgaaaccctgtctctactaaaaatacaaaaattagccgggcgtggtggtgggcacctgtaatcccagctactcgggaggctgaggcaggagaayggcgtgaacccgggaggcggagcttgcagtgagccgagatcgcgccactgcactctagcctgggcggacagagcgagactccgtctcaaaaaaaaaaagg

SEQ ID NO: 394357 - DNA, 201 bp, Homo sapiens
attctaaaaagctttcaatgcaaatgacactgttttctaatctgcttttttattttgtagagaaacagaaaaataccctccttgccaaaaatgtttatctrtcactagtagagaaatagcagtttccttcttcatctgttgattgctttgcctgcttcctagaaccatagtcattgtttttcacctatggaattgtgaatg

SEQ ID NO: 394358 - DNA, 201 bp, Homo sapiens
  misc_feature (1)...(201): n = A,T,C or G
tgctaagtaaagctttccaggtaagtatggtcatttcttatttcattctggcccatggacacctagaatggtattaaaaaataaaataatacagtaatcanattcttccaggaagtaaattacttccaagaaaaaggttgggtacttgttggaaacttgaactctttgggtctattaagaaacaatttaggctaatgttgc

SEQ ID NO: 394359 - DNA, 201 bp, Homo sapiens
taaaactgggaggcagagcttgcagtgagccaagatcccgccactgcactccaacctgggcgacagagcgagactccgtctcaaaaaagaaaaaaaaaaamaaaacaaaacaaaaaattagcccggcttggtggtgcatgcctgtaatcccagctacgtgggaggctgaggcagaagaatcgcttgaacctgggagacaga

SEQ ID NO: 394360 - DNA, 201 bp, Homo sapiens
tttgcatggtctgcatctggcatcagtttagatttgagtcttaatgcgcatcgtagcatgcaagaacagacaactgataatagatttttctggtgagttcrttttttcccttttggtgatttgggacataatatgttcagcagttgttcagtcatcaaaaacctcctcaccgtgacagcaagaaaggaggaagaaccctga

SEQ ID NO: 394361 - DNA, 201 bp, Homo sapiens
gtgctgggattataggcgtgagccaccaagcccagccctataaaacttatttcatatacatacatgcatacattatatatatatatatatatatatatatttttttttttttttttctttgagatggagtttcattcttgttgcccaggctagagtgcaatggcacgatctcggctcactgcaacctccccttcccaagtt

SEQ ID NO: 394362 - DNA, 201 bp, Homo sapiens
tgctgggattataggcgtgagccaccaagcccagccctataaaacttatttcatatacatacatgcatacattatatatatatatatatatatatatatttttttttttttttttctttgagatggagtttcattcttgttgcccaggctagagtgcaatggcacgatctcggctcactgcaacctccccttcccaagttc

SEQ ID NO: 394363 - DNA, 201 bp, Homo sapiens
gctgggattataggcgtgagccaccaagcccagccctataaaacttatttcatatacatacatgcatacattatatatatatatatatatatatatatttttttttttttttttctttgagatggagtttcattcttgttgcccaggctagagtgcaatggcacgatctcggctcactgcaacctccccttcccaagttca

SEQ ID NO: 394364 - DNA, 201 bp, Homo sapiens
cctcaccctagtcagacttcaggaactcatgccaggcggcccctcccacaagtggacgcccttttcccctgcctctagcttcagcttcttgcacaggccatccttctcctagtggccattactgggcctccctccagtctactcaaaacctttgaagcatatatcgtaaagtagggaaacatctactgtccttcagataca

SEQ ID NO: 394365 - DNA, 201 bp, Homo sapiens
gggagcagcagcggactcacgtctccaaaaaccgagctccccgagtgagcaattcctgtcccttttaagggcttacagctctaagggagtccatgtgagakggtcgtgatcgattgagcaagcagggggtatgggactgggggctgcatgcactggtaatcagaatggaacagaacaggacagggattttcacgatgcttt

SEQ ID NO: 394366 - DNA, 201 bp, Homo sapiens
tgacttttaaaattaatttggccttcattttggagtgataccaaggtttgtattgtgctgtacagtgttcacttaaaatcttcacactttaaaaatgcctrttgtattcagaagctgtgcttggaaaatatcaatgtgttctcttcatcttcaataatcccagctccctgaatttcagtgcattctgcatattcatctacc

SEQ ID NO: 394367 - DNA, 201 bp, Homo sapiens
agaagatggagtaaagaaaaggtcaacatatgggaaatggaggataactctaaaaacagaagttatggacctctacgtaaaagatggggaggtgaggtggygccatggattcctaactcttaaaattaaagcttttgctcttttccatattacatgctagcatgggagtaaggatgaattgcttttatctgtctagtggta

SEQ ID NO: 394368 - DNA, 201 bp, Homo sapiens
ggcgggcggacgcctccaagaccagtctctgcctccgcagcgtcagcgggagcggtgaggggcgaccgcgagcagccggggtgcgggaggacgggcggggttgtgagcagaccactggttgtgcggggtgccgcgtcaggctgggggctgtggtgacagcggctgtcagcccgcccgcgggaacgaaccgaatccgcctgg

SEQ ID NO: 394369 - DNA, 201 bp, Homo sapiens
tcgccactgcgctccagcttgggcaacacagtgagaccctgtttcaaaaattaaaaagaaaaaaaagtatatgattatatatacacatatatatgatttargcaaataatcctagtgttgggattagtttagttactgattatatctttataaattaaaaatagtgtttgaaaggcatacttacaaatataagcccttaaa

SEQ ID NO: 394370 - DNA, 201 bp, Homo sapiens
aaacttatttcatatacatacatgcatacattatatatatatatatatatatatatatttttttttttttttttctttgagatggagtttcattcttgttscccaggctagagtgcaatggcacgatctcggctcactgcaacctccccttcccaagttcaagtgattttcccgcatcagcctcccaagtagctgggatta

SEQ ID NO: 394371 - DNA, 201 bp, Homo sapiens
gactcttcccgggtggccattcgtatttatcggccccgcctgccgtccccccagccggcggtagcccggggcaggagaggcggcggtaacctgtgcctttycccttgcccttcatcgccacccccgggagagcctgtcgcgtgggataatccttttccttctcctgccccctaaggagctttgaaccagccttgtcaccct

SEQ ID NO: 394372 - DNA, 201 bp, Homo sapiens
ttctttgagatggagtttcattcttgttgcccaggctagagtgcaatggcacgatctcggctcactgcaacctccccttcccaagttcaagtgattttccygcatcagcctcccaagtagctgggattacaggcatgcgccatcatacctagctaattttgtatttttagtagagacagggtttctccatgttggtcaggc

SEQ ID NO: 394373 - DNA, 201 bp, Homo sapiens
ataattgatctttacttatcttaccttagaaaggtggctatcaagatgtgccaacgaagtgtgagatatgggccaggtgtggtggctgacgcctataatcycagcactttgggaggctgaggcaggtggatcacttgagaccaggagttctagtctagcctggccaacatagcgaaaccacatctctactgaaaatagaaa

SEQ ID NO: 394374 - DNA, 201 bp, Homo sapiens
accttagaaaggtggctatcaagatgtgccaacgaagtgtgagatatgggccaggtgtggtggctgacgcctataatcccagcactttgggaggctgaggyaggtggatcacttgagaccaggagttctagtctagcctggccaacatagcgaaaccacatctctactgaaaatagaaaatactagctgggcatggtggtg

SEQ ID NO: 394375 - DNA, 201 bp, Homo sapiens
atgctcttggttgtttttcttaaagagacaggcttagttgaaaaaaatgccacataacctaaatctgaataaccaccgtctgtcattagttcttttaaggraaaattgtattccaaaaaaaaagtggcagtttgactcacaatttaaagcattttctttttttgttacagatcataagtcagtatgcaacacaagtgcttt

SEQ ID NO: 394376 - DNA, 201 bp, Homo sapiens
acagggaagtgttggaagtctcaaatgaatgatcaagataaggttcattgagaagatgaggaatgagtttcagctacttgcggggctgaggtgggaggatygcttgagctcaggcagaggttgcagtgaaccgacatcctgccacagcactccagccctgggtgacagagtgagaccccatctcaagaaaaaaagagagat

SEQ ID NO: 394377 - DNA, 201 bp, Homo sapiens
aagtaatagattagattttgaaatgtggttttcttttggctaaattgtagattttcctttttaaaggaaacaaaaacagcctaagcttccttcagagtctyaggatatttgggtagataaaggtataattgacaattgtcataaaataggctattgtcaatacctttttaaaaaattctctttttaatattttcttgtagc

SEQ ID NO: 394378 - DNA, 201 bp, Homo sapiens
tggaagtctcagtacccataagtcagagaggaagttgcattcatgagttttcgtaaattcggctttgagaccatgtacaatgaattcgcacccagttttcmaattctgtgtttaaaatactgccatgtaagttatatttaataatggattattgtttattgaaaaaattgggcttcttatttgacatgtatttatttcctt

SEQ ID NO: 394379 - DNA, 201 bp, Homo sapiens; identical to SEQ ID NO: 86504

SEQ ID NO: 394380 - DNA, 201 bp, Homo sapiens
atgctgacttgaaaataatacaagaaatatgaatgatttttcttacccaaagtagaaggaacaagtggggggcaaagaggaattgggacaaaaatagccartcagaaaaagggactgcctaaagagacccaaattaaaaggccagggccgggcgtggtggctcacgcctgtaatcccagcgctttgggaggccgagatggg

SEQ ID NO: 394381 - DNA, 201 bp, Homo sapiens
ggttgaggcgggagaatcgcttgagcccaggggtttcaggttacagtgagctatgatcatgccactgcactcaggcttgggtgagagtgagagatcctgtytgggaaaaaaaaaaaagttcaaatgtctgttaaacttttggctaatgcactcctggtctagggtaattagagaaaagttcttctctgatcccttagaatt

SEQ ID NO: 394382 - DNA, 201 bp, Homo sapiens
caccctgccacttcataaacttcagtattttaaaccctagttagcaaccatttaacaatgcctatatttcccacccccaccttactactccctgccacagrcatacacatttgaaagtttccagacgtaactgaggagttgttgaatgtgaatctcagtaatgagggcattcaaatactttcaatgataaagtaaaatgtt

SEQ ID NO: 394383 - DNA, 201 bp, Homo sapiens
cctaatttttgtatttttaatagagacggggtttcaccatgatggccaggctggtttcgatctcccaacctcaggtgatccactttatatattatttttawattagcaaaacatgttctttaatgcacaacctttccatttgtttttgtctattagatgaacatttaatcagcaattgcagtgttccattcagagtctctg

SEQ ID NO: 394384 - DNA, 201 bp, Homo sapiens
atgctcccacactcatggcacccgagttcttatctggtgtccaggaggaatgaggtcacatgaacgaattgaagatggtaaatatggggtattttattgcygatgaaaatggctcttggcaggaaggggagctgaaaaggggacagagcaataagataatcttcccctgaaatccagccatcccatggccagactcctctc

SEQ ID NO: 394385 - DNA, 201 bp, Homo sapiens
caactacttgcccttcatcatctgtgtatagacagcaattagtaaggttaaatttcccacagacccccaccttcagctgctagcaagtagtcgagagccartctattttgatagatagcatttctcatctgagactcttgccagggcagtatagtcaaggctctgccagttttattagtgattatttctaagacagcttgt

SEQ ID NO: 394386 - DNA, 201 bp, Homo sapiens
gtctcaaactcctgaccttgtgatccacccacctcagcttcccaaagtgctgagattataggcgtgagccaccacgcctggccttcaaaattacctgtttraaatagaaaataatttcattattatttcttctgttgcattgatttatttaaaacactttctaaaaagttcttacccttagataacagttaatatgttttt

SEQ ID NO: 394387 - DNA, 201 bp, Homo sapiens
ctgtccactggttggataatttggcacaagctctatgcccacatatacagtataatccagtgggggctgtccagtcctggtgggactccggatgggtccamacggtttgcaactttgggaatttactaaatggattcctttctgtgtgatttgaactccaccaagtgactgtttttgtggtaccattatacagtttctgtc

SEQ ID NO: 394388 - DNA, 201 bp, Homo sapiens
caaatagtgtgcaggcatttcttggcttagaggtaaaagaataaattaaaatgtatgtgccttgtatcatctgcctctttaagtgctttttgaatacttaygtttcttattaccttccagaaagtgtatgtaatgttatgcttcattttgtacttctaatctctgtctctttttttggccaaactttcttttgatttaaat

SEQ ID NO: 394389 - DNA, 201 bp, Homo sapiens
aggaaatgatggatttgggcagctttttatcattttacctgagtaattaatgaagatataaagtaatccttcattaaaaaggattttaattacatttcagaaaaaaaaatgataaattcagtatagtaaaactggttctaaaggtttttttctctttttggtttttttcttgatcaggttcatcatattccgtaaaggtat

SEQ ID NO: 394390 - DNA, 201 bp, Homo sapiens
aggctggagtgcagtggcaggatctcggctcactgcaacctctacctcccgagttcaaacgattctcctgcctcagcctcctgagtagctgggattacagrcatctgccaccgtgcccggctaattttttgtatttttagtagagatggggtttcaccatgttggccaggctggtctcaaactcctgacctcaggtgatcc

SEQ ID NO: 394391 - DNA, 201 bp, Homo sapiens
aaggagttctcctgcctcagcctcctgagtagctgggaccacaggcgccccccaccacacctagctaatttttccttatttttagtagagacagggtttcmccatgttggccaggctggtctcaaactcctgaccttgtgatccacccacctcagcttcccaaagtgctgagattataggcgtgagccaccacgcctggcc

SEQ ID NO: 394392 - DNA, 201 bp, Homo sapiens
tttttaaacttcattgttttatggtgaccttattatctcattaagttgtttttgtttttgtttttgtttttgagagggagagtttcgctcttgttgcccargctggagtgcaatggtgcgatctcggctcactgcaacctctgcctcccgggttcaagcagttctcctgcctcagcctcccaagtagctgggattacaggc

SEQ ID NO: 394393 - DNA, 201 bp, Homo sapiens
cacggctgtggtggatccaggctgggattccttctcctttacagccgtgggggtggtcaggatgatggtgtgaggtcttttccactgtggccgcaaagggrctacgttccagtccttgatccacatgcgatcacttggagagaaagggtgaactggggagaataagctgacgggacacctctcatttacccaagttgagat

SEQ ID NO: 394394 - DNA, 201 bp, Homo sapiens
cagtcttaccttcactgagttctagagcccgagttaaagcaatgagctcagccttctgggctgaagtgccctgtggcaatggtttggcttcaatgacagcrttcaaagttaccaccgcatatcctgcacatctttctccatgtggattgatgaagttgctcccgtccatgtataactcccagtctgctgatgcccatggct

SEQ ID NO: 394395 - DNA, 201 bp, Homo sapiens
agaataaactgagtccaacatgtctacacagttatgcttgaccaggctctctgatactgggagcagggtggcgggatttagggtgttacagacgtcagtgrttatgcggggattttcacatagcaagctttggtacttggttaatctagcatttgttagccaatgatgtcctttggtattcatcaaagttaccacagtatg

SEQ ID NO: 394396 - DNA, 201 bp, Homo sapiens; identical to SEQ ID NO: 86505

SEQ ID NO: 394397 - DNA, 201 bp, Homo sapiens
ttgtcttgatagaacaaatagtgtgcaggcatttcttggcttagaggtaaaagaataaattaaaatgtatgtgccttgtatcatctgcctctttaagtgcyttttgaatacttatgtttcttattaccttccagaaagtgtatgtaatgttatgcttcattttgtacttctaatctctgtctctttttttggccaaacttt

SEQ ID NO: 394398 - DNA, 201 bp, Homo sapiens
tttatatttatttatttatatatttatttatttgagacagggtctcactctgccacccaggcttgagtgcactggtgcaatcatggctcactgcagcctcratctcccaggctcaagtgatcctcccacctcagcctgccaggtagctgggactacaggcacataccactattttttgtagagacagggtcccaccttgtt

SEQ ID NO: 394399 - DNA, 201 bp, Homo sapiens
taatttttttatttttagtagaaatggggtttcaccatattgaccagactggtcttgcactcctgatctcaggtgatccacctgccttggcctcccaaagsactgggattacaggcatgagccaccgtgcccggccaggaatcctcatttttaaccaagttctctaccactcaaagtcaagaacttctattttataagatc

SEQ ID NO: 394400 - DNA, 201 bp, Homo sapiens
gagttcaagaccagcctagccaaaatggtgaaaccccatctctactaaaaatacaaaaattagctgggcgtgttggtgggcacctgtaatcccagctactygagaggctgaggcaggagaattgcttgaacccaggaggcgaaggttacagtgagccaagatcgcgtcactgcactctagcctaggtgacaagagtgagac

SEQ ID NO: 394401 - DNA, 201 bp, Homo sapiens
atgtgggcaacaaaattattcattttggctgaagcatgggatgcaagggagattattaagggaaaaagaatgatggtgatgattgtaaaatatttccaagygctgtattttatctaaagattatacatattattttatgtaatgttgtatatagcctttcttattttaaataatctctttatagtagaagattctaaaata

SEQ ID NO: 394402 - DNA, 201 bp, Homo sapiens
ataattgaggtttttaggacccagaaattatcagggtgattcttttgagctgggaattcatcaggaactgggtctgtaggtactaattctcgggcttctcrtggccattgatctcccattacagttcctccacatacataatgtgaagcaacattgagagactaggctacatgcttggctaattgcaaaaacaaatttctt

SEQ ID NO: 394403 - DNA, 201 bp, Homo sapiens
cgcattgctgtcagagtattgtagatcctgggtctgctcagtggctagtgctaaggagtatatgtaactatatatgtatatgacatatatacttatatctrtgtttctatctttttgtctgtctttagtctatctagaaaacactggtaactccaattctttttttttttttttgagacagagtctcactctgtcaccagg

SEQ ID NO: 394404 - DNA, 201 bp, Homo sapiens
gtcttctatgcagggaaaatcagtggaagtttttactatacaagtccaaattataaggaaaatgagtcccacgatgattctcctcatgcctcggccgtgcrtagaccagtcagcttccgggtgtgactggagcagggcttgtcatcctcctcagagtcactttcaggagttgtctgggctcggttttgcctcccaagtttc

SEQ ID NO: 394405 - DNA, 201 bp, Homo sapiens
ttgatatatgggaaatcatccatgttgacatatgggaaatcatccatgttgacatatgggaaatcatccatgttgatatatgggaaatcatccatgttgayatatgggaaatcatccatgttgacatatgggaaatcatccatgttgtagcaagtggcagtagtttactcatatttgttgcagtgtagtccattttatgaa

SEQ ID NO: 394406 - DNA, 201 bp, Homo sapiens
agggcgtagtccacagaattaagatggtatggcttctacagagtgaaaatcaaagacacctcaagtcctttcagagagtaaatgaacaaatggagaagaarttgtgtttagactttcctcaaatcttttgacaaaggtctatcccaaagctttcaaattaaacaaaacaaaacatttcaaaaatcttaaggttcttgaaag

SEQ ID NO: 394407 - DNA, 201 bp, Homo sapiens
agcgagactctgtctcaaaaaaaaaaaaaaaattctttgtgtgtattgcttttgaaataggttttgtagagttttgtttgttttcctaaatgtaatactartatactcatgtaaaatcatgtatcaggaaacatggaaaagaattaaaaataagaccactcacataatgctaccattctgaagtaatttctcttaacctta

SEQ ID NO: 394408 - DNA, 201 bp, Homo sapiens
tgttggtgtatggtttagtcccaataattaaagttgaggtaaaaaagtagaagttccaaaagggtattctaagaacagaaatgaatttaagtaattacgcygaaaatttccttaaacatgatttaaaaatgcatttgtttgatggcaacattatcaaaagaaaaaatttttaaatgcatttgttttctaacacaatatgct

SEQ ID NO: 394409 - DNA, 201 bp, Homo sapiens
acagtatttcataaggggagtatcctgttagaagggatgcatctaattttaaacaataccataggaagggcctgtatccattttaatcctgtttcctgacrtactttccctaaactatttttgatagtctgattcattcgctccacctttccagaactctgaggtcagtaggcggcatgtagtttccaagtgattcctaat

SEQ ID NO: 394410 - DNA, 201 bp, Homo sapiens
aggccatgatgggaggattacttgagaccaggagttcaagaccatcctgggcaacatagacccatatttctacaaaaaaataaaaaaataaaaatcattcrggcatggtgacgtgtgcctgtagtctcagctactcagcaggctgaggtgggaggatcccttgagcccaggaggtcgaggctgcagtgagctatggttgca

SEQ ID NO: 394411 - DNA, 201 bp, Homo sapiens
gaggattacttgagaccaggagttcaagaccatcctgggcaacatagacccatatttctacaaaaaaataaaaaaataaaaatcattcgggcatggtgacrtgtgcctgtagtctcagctactcagcaggctgaggtgggaggatcccttgagcccaggaggtcgaggctgcagtgagctatggttgcaccactgcattcc

SEQ ID NO: 394412 - DNA, 201 bp, Homo sapiens
cgcggggcgcggtggctcatgcctgtaatcccagcactttgggaggctgaggcgggcagatcacaaggtcaagagattgagaccatcctggccaacatggygaaaccctgtctctactaaaaatacaaaaattagctgggcgtggtggcgggcgcctgtagtcccagccactcgggaggctgaggcaggagaatcgcctga

SEQ ID NO: 394413 - DNA, 201 bp, Homo sapiens
agtgtctgcatgagaactacactgatttttcttggtttgtattggaaaagacatctgttttgaattcagaaagtgtctgcttgagcctttttttttttttygccacgtaatgtcaccgtgagctgcagagtaacctttgcagttactagtttatctgtaattttgcagctcaaagtgttcttcaacattggtactggtcca

SEQ ID NO: 394414 - DNA, 201 bp, Homo sapiens
acctctacctcatctcccaaaagatttctgggtcccaacgccttgagggagcaatgtaagagtagacagtcagatatgagcaggcacgagggggtggtatmcgtgttggaaagaatgccccggaactcctcttaggatgctcagtactcactccgtggtcgaactgtcagaatgttgttaagtagatcctgataaggaagg

SEQ ID NO: 394415 - DNA, 201 bp, Homo sapiens
agtaaagtatggaagtttaagtcagtgtatttttaaaataagtaatggtcatcagatttaacattatccctgttgtaatatcatcactcatttatattccygtgtgatttcctggatggataagaggggttggggtcatagctggttttccagaactgctgaccaccctttttatctctgttgcagcctgtaatctgaggg

SEQ ID NO: 394416 - DNA, 201 bp, Homo sapiens
ttgtgtaatttgacaaatgcagtcctgtctgttgctcagaagccacttgtctgccagactctaaggggcagcagtgccgcatcttgtgaccattcacacarctgactgtatgttttcaaggttcacgagagagttctatggggaatgccaccctaaaagtggtcccatgagtgagatatcaaactaaagtcaccacttgtc

SEQ ID NO: 394417 - DNA, 201 bp, Homo sapiens
tcttctttaggctaggtttaatcaaattctttaggctgggtgtggtggctcatgcctgtaatcccaatgctttgggaggccaaggcaggtggatcacttgrggtcaggagtttgagaccagcctggccaatatagtgaaaccctatctctactaaaaatacaaaaaaatcagctggacgtggtgccccgtgcctgtaatcc

SEQ ID NO: 394418 - DNA, 201 bp, Homo sapiens
ctaacatttcactaaagaaggaaaaaaacatggttttctagaatatacctaacatctgacaaccactggttttttaggttcaactttccttcctgaaccaytgaagcctcaggctgcttttcctccgcagtcttctttgcccccgcctgctcaaaggttgcaagagcctcttgtccctgtggcagcacctatgcctcagtc

SEQ ID NO: 394419 - DNA, 201 bp, Homo sapiens
gggagcagttgcaatccgaatgctcttccatacaaccagcctttgcttcgtctgtagccactttgctgcagggcagtcacaagtcaaagaaagaaatgaasattttatagaaatagcacgaaaattgagttttcctatggtaagctcttgctgcttgttcttgaagataaagctttgaaatatattttaatttgccccaaa

SEQ ID NO: 394420 - DNA, 201 bp, Homo sapiens
ttttgatcataggaaattttcttcagggaagtcactgagacagtgaaaatacatagtactgggttgtggggtccggagacttggatcccagccctgtaacwtattctccttatagagtcactttgaacaagtcacttaacctctgtccctttttgccttgtcaatgaaatggaggattggatgggactggattagcagtga

SEQ ID NO: 394421 - DNA, 201 bp, Homo sapiens
ttgatatatgggaaatcatccatgttgatatatgggaaatcatccatgttgatatatgggaaatcatccatgttgatatatgggaaatcatccatgttgayatatgggaaatcatccatgttgacatatgggaaatcatccatgttgacatatgggaaatcatccatgttgacatatgggaaatcatccatgttgacatat

SEQ ID NO: 394422 - DNA, 201 bp, Homo sapiens
atttgtaacacttggtgttctatagctatcagaaaaaaataaagtcatcaaattgacttaagtgaggtcttctcaaaatgttttgtcactatactcaacawtttaattgtaacttgtttttactaatgattctttgttttcttcttgttgcatccatagtttctgagcagacattacagtcaggtacagtatagaaaatca

SEQ ID NO: 394423 - DNA, 201 bp, Homo sapiens
ttgacatatgggaaatcatccatgttgacatatgggaaatcatccatgttgacatatgggaaatcatccatgttgacatatgggaaatcatccatgttgayatatgggaaatcatctatgttgatatatgggaaatcatccatgttgatatatgggaaatcatccatgttgacatatgggaaatcatccatgttgacatat

SEQ ID NO: 394424 - DNA, 201 bp, Homo sapiens
catccatgttgacatatgggaaatcatccatgttgacatatgggaaatcatccatgttgacatatgggaaatcatccatgttgacatatgggaaatcatcyatgttgatatatgggaaatcatccatgttgatatatgggaaatcatccatgttgacatatgggaaatcatccatgttgacatatgggaaatcatccatgt

SEQ ID NO: 394425 - DNA, 201 bp, Homo sapiens
cagtctgtagcttagtcttcatcgtttttacatgacccacagccagattctgagctctgcaggaccagaaactatagcaagggtgataggcatgtaataarcaaactcacaagaaactgatgtataaattaaaacaccaatttattaatgttagaaaaatgtctgactgtatcaaggattaccaattatatggagaggggg

SEQ ID NO: 394426 - DNA, 201 bp, Homo sapiens
ttgatatatgggaaatcatccatgttgacatatgggaaatcatccatgttgacatatgggaaatcatccatgttgacatatgggaaatcatccatgttgayatatgggaaatcatccatgttgacatatgggaaatcatccatgttgatatatgggaaatcatccatgttgacatatgggaaatcatccatgttgacatgg

SEQ ID NO: 394427 - DNA, 201 bp, Homo sapiens
ttgatatatgggaaatcatccatgttgacatatgggaaatcatccatgttgatatatgggaaatcatccatgttgacatatgggaaatcatccatgttgayatatgggaaatcatccatgttgatatatgggaaatcatccatgttgacatatgggaaatcatccatgttgacatatgggaaatcatccatgttgtagcaa

SEQ ID NO: 394428 - DNA, 201 bp, Homo sapiens
ttgacatatgggaaatcatccatgttgatatatgggaaatcatccatgttgacatatgggaaatcatccatgttgacatatgggaaatcatccatgttgayatatgggaaatcatccatgttgacatatgggaaatcatccatgttgacatatgggaaatcatccatgttgtagcaagtggcagtagtttactcatatttg

SEQ ID NO: 394429 - DNA, 201 bp, Homo sapiens
ttgacatatgggaaatcatccatgttgacatatgggaaatcatccatgttgatatatgggaaatcatccatgttgacatatgggaaatcatccatgttgayatatgggaaatcatccatgttgtagcaagtggcagtagtttactcatatttgttgcagtgtagtccattttatgaatattaaaatatttagctgttttgt

SEQ ID NO: 394430 - DNA, 201 bp, Homo sapiens
ttaaatatatgatatgatgtctttgttccaggacgcagtcagccttcacctcaagcaggacttgcaggcccaggacctgctggatacagtacagccagacyggtaggtaaaacctcgcctggggccaaggggtctcggttctaagtcctgtttactactagtcagttttgttaccttggagaaatcatgtgacccttcaag

SEQ ID NO: 394431 - DNA, 201 bp, Homo sapiens
atttgagacagggtctcactctgccacccaggcttgagtgcactggtgcaatcatggctcactgcagcctcgatctcccaggctcaagtgatcctcccacytcagcctgccaggtagctgggactacaggcacataccactattttttgtagagacagggtcccaccttgttgcccaggatggtcttgaactcctgggcaa

SEQ ID NO: 394432 - DNA, 201 bp, Homo sapiens
cctttacaaagtataaaaaatcctcacttatctatctgacttctagcatcttagtcatctttatcagctgagagccagaaataaggaaatgcaactggaartaaaggaaccgaactcactgctatactgttactgtgagacctggtagaaaaatcacagcattctagacccatttaatggaggatacagcaaccttgtacc

SEQ ID NO: 394433 - DNA, 201 bp, Homo sapiens
ctattaggaatcagtctttgcatttgcatctcaaacactatggcgtgaattgtgatgactggttattacgtcttatgtgtggaggagtagaaatcagaacratttatgctgctcataaacaggcgaaggcttgcctcatttcaagattaagctgtgaacgagctgggaccaggtttaatgtccggggaacaaatgatgatg

SEQ ID NO: 394434 - DNA, 201 bp, Homo sapiens
gcaacaaaattattcattttggctgaagcatgggatgcaagggagattattaagggaaaaagaatgatggtgatgattgtaaaatatttccaagtgctgtrttttatctaaagattatacatattattttatgtaatgttgtatatagcctttcttattttaaataatctctttatagtagaagattctaaaataattttc

SEQ ID NO: 394435 - DNA, 201 bp, Homo sapiens
aaggaaattgaaactatgtgggagagagattaaatttagaaagcaagtttgttataagaatatgggttttaaatgagaactcctttctagtgcacattttstccttgaccaaagagtcttgctgttatcagcaagtttttttgagagtattttttaaatacattgacacgatctgctataatttgattataatgtcttggt

SEQ ID NO: 394436 - DNA, 201 bp, Homo sapiens
attattgtttattgaaaaaattgggcttcttatttgacatgtatttatttcctttctttcttaaataggcattttagaacacttaagaacttatatggtaracaaataatagtaaatttgcttggatctaaggaaggtgaacatatgctaagtaaagctttccaggtaagtatggtcatttcttatttcattctggcccat

SEQ ID NO: 394437 - DNA, 201 bp, Homo sapiens
attatactttagtctaaaagtcacccaaatttatagagaaggcagagtgccagtttcacaggtagaagtcattctgtttttagaatgattaatttttgttkaagatttaaaatggtgttcagttctcttaatattcttctgacatttgaaatgctaaaactgtataggttagcacttagcagctgacaatatagcagctct

SEQ ID NO: 394438 - DNA, 201 bp, Homo sapiens
taccagcattggtaactgcatcagaaaataattgttgggaagctgtaaggatcatggtagcagatacaagttttccagaatactaatttttgcctgaaaaygcaagtttttccattgaaaacaaatgctcttggttgtttttcttaaagagacaggcttagttgaaaaaaatgccacataacctaaatctgaataaccacc

SEQ ID NO: 394439 - DNA, 201 bp, Homo sapiens
tgttgacatatgggaaatcatccatgttgatatatgggaaatcatccatgttgacatatgggaaatcatccatgttgacatgggaaatcatccatgttgayatatgggaaatcatccatgttgacatatgggaaatcatccatgttgatatatgggaaatcatccatgttgacatatgggaaatcatccatgttgacatat

SEQ ID NO: 394440 - DNA, 201 bp, Homo sapiens
tgttgatatatgggaaatcatccatgttgacatatgggaaatcatccatgttgacatgggaaatcatccatgttgatatatgggaaatcatccatgttgayatatgggaaatcatccatgttgatatatgggaaatcatccatgttgacatatgggaaatcatccatgttgacatatgggaaatcatccatgttgatatat

SEQ ID NO: 394441 - DNA, 201 bp, Homo sapiens
tgttgacatatgggaaatcatccatgttgacatgggaaatcatccatgttgatatatgggaaatcatccatgttgacatatgggaaatcatccatgttgayatatgggaaatcatccatgttgacatatgggaaatcatccatgttgacatatgggaaatcatccatgttgatatatgggaaatcatccatgttgacatat

SEQ ID NO: 394442 - DNA, 201 bp, Homo sapiens
tcttcaataatcccagctccctgaatttcagtgcattctgcatattcatctacctgaagaatcttctaaaatcatgttttttctttgtttgtttgcttgtytgttttttgagacagggtctcactctgttgcccaggctggagtgcagtggcatgatctcggctcactgcaacctccacctcctgggttcaagtggttctc

SEQ ID NO: 394443 - DNA, 201 bp, Homo sapiens
tgttgacatgggaaatcatccatgttgatatatgggaaatcatccatgttgacatatgggaaatcatccatgttgatatatgggaaatcatccatgttgayatatgggaaatcatccatgttgacatatgggaaatcatccatgttgatatatgggaaatcatccatgttgacatatgggaaatcatccatgttgacatat

SEQ ID NO: 394444 - DNA, 201 bp, Homo sapiens
aaatcatgttttttctttgtttgtttgcttgtttgttttttgagacagggtctcactctgttgcccaggctggagtgcagtggcatgatctcggctcactrcaacctccacctcctgggttcaagtggttctcctgcctcggcctcccaagtagctggaattataggtgtgtgccaccacgccttgctaatttttgtattt

SEQ ID NO: 394445 - DNA, 201 bp, Homo sapiens; identical to SEQ ID NO: 86508

SEQ ID NO: 394446 - DNA, 201 bp, Homo sapiens
gtcttgttctgtcacccaggctggagtgcagtggcatgatcacagctcactgtaattgaactccctggaactcccgggctcaattgatcctcctgcctcarcctcctgagtagctgggactacaggcgcacacgactatgcccagataatttttttcgtatttttttgtagatagggggcttcctcatgttgccctgctga

SEQ ID NO: 394447 - DNA, 201 bp, Homo sapiens
gatcaaatccatgccacacttgcacaggcacatgtgtcagttttgtcatatctctaattatgtcttcaactacttgcccttcatcatctgtgtatagacarcaattagtaaggttaaatttcccacagacccccaccttcagctgctagcaagtagtcgagagccaatctattttgatagatagcatttctcatctgagac

SEQ ID NO: 394448 - DNA, 201 bp, Homo sapiens
ggtgtgtgccaccatgcctggcttattttttttttttttttttttttttggtagagacgggggtctccctgtattgccctggctgggctcaaactcctggkctcaagtgatccacctgcctcagcctcccaaagtgctaggtttacaggcatgagccatctcacccatcctatacttgattttaaacttgtttttctttct

SEQ ID NO: 394449 - DNA, 201 bp, Homo sapiens
ggatatgttgaatttgagatgttcatggagtcagtcaaacatgagtctggtgctcaggaaagagctctggagtcaaggcagctctaatagcctgcaaagcrtgggcatttgttaatataactttggccaataggattatgacgagacagaagagaatgaatcgaatatggagaaatacagacctgggattgagtatgtgga

SEQ ID NO: 394450 - DNA, 201 bp, Homo sapiens
gcttattttttttttttttttttttttttggtagagacgggggtctccctgtattgccctggctgggctcaaactcctgggctcaagtgatccacctgccrcagcctcccaaagtgctaggtttacaggcatgagccatctcacccatcctatacttgattttaaacttgtttttctttctttagaattcaccaaataata

SEQ ID NO: 394451 - DNA, 201 bp, Homo sapiens
gcacatgctttgtgtgtgcccccttagattgtgttcttgaatctcatggttgtcagttcatcaaaaagacaaagatatttgtttcaaatcctgaagtatcyttttgcctcagtcattgatatcaaactccttaatattagatacacagacacacttttctttcttggagggtggggtcttgtttacatgcagagtgtcatt

SEQ ID NO: 394452 - DNA, 201 bp, Homo sapiens
gaggccgagacaggtggatcacctgaggtcaggagtttgagaccagcctggccaacatggcaaaaacctgtctctactaaaaatacaagaagtagccaggygtggtggtgggcgcctgtaatcccagctgcttgggagactgaggcagcagaatcacttgaacctgggtggcagaggttgcagcgagccgagattgcacca

SEQ ID NO: 394453 - DNA, 201 bp, Homo sapiens
tccacctgcctcagcctcccaaagtgctaggtttacaggcatgagccatctcacccatcctatacttgattttaaacttgtttttctttctttagaattcmccaaataataatgagaggttacattagtgagcgcattttatggagcaggcagtgtacttaagtcttttttttttttttttttgagacggagtctcgctct

SEQ ID NO: 394454 - DNA, 201 bp, Homo sapiens
tttttcctgcaagtatatggcagtggggattgtaatgatgactagtatagtttggtgcctaaattcgagtgaaagcaccagcacttttacccattgttgcktttgcaccatcagtgcaaatgttagtcaacacagtgaaagatgtcttaatagtatgatgaaaatagttgtgaccccatgggctttgggaaccctcaaaga

SEQ ID NO: 394455 - DNA, 201 bp, Homo sapiens
acatgtctacacagttatgcttgaccaggctctctgatactgggagcagggtggcgggatttagggtgttacagacgtcagtggttatgcggggattttcwcatagcaagctttggtacttggttaatctagcatttgttagccaatgatgtcctttggtattcatcaaagttaccacagtatggaaggcctttatattca

SEQ ID NO: 394456 - DNA, 201 bp, Homo sapiens
tacaagaagtagccaggcgtggtggtgggcgcctgtaatcccagctgcttgggagactgaggcagcagaatcacttgaacctgggtggcagaggttgcagygagccgagattgcaccagtgcactccagcctgggcaacagagcgagactctgtctcaaaaaaaaaaaaaaaattctttgtgtgtattgcttttgaaatag

SEQ ID NO: 394457 - DNA, 201 bp, Homo sapiens
tgctataatgataaatttttggtttgattctggtagttcttaaaagccatattacaattaatatattaatgtacttataaaaatttcttgtttgctttttwagatgctagctaaacagttggaagctcttggtttagctgaaaagcctcagttggtgactcgctttcaagaagtttttcggtcaatgtggtccgtgaatgg

SEQ ID NO: 394458 - DNA, 201 bp, Homo sapiens; identical to SEQ ID NO: 86503

SEQ ID NO: 394459 - DNA, 201 bp, Homo sapiens
aggatccaaatggattatggagggatgtttgtgagggagtaaatgaagaaaagaaatgcagagagagaagtaggtgtgggatggaagatgaattttgtttyggatatgttgaatttgagatgttcatggagtcagtcaaacatgagtctggtgctcaggaaagagctctggagtcaaggcagctctaatagcctgcaaagc

SEQ ID NO: 394460 - DNA, 201 bp, Homo sapiens
tgacgagacagaagagaatgaatcgaatatggagaaatacagacctgggattgagtatgtggaaacacagagtttaaatatagacagaagaaggctgcccrtgaaaagaaaatgagaagaaacaatggcaattgtttctagaaatgtcaaagagccaagagaaattcatggcttaaaaatcaaggaaagaaagtggagcat

SEQ ID NO: 394461 - DNA, 201 bp, Homo sapiens
ctgtctcctgtccctatgggtatgaaaaatgctatgtctcaggttatttttctaagctttgttccattcagctagaagtgttcatcagacgcatacagatwtcttctgagagcatccagcatgtaatagacatttaatggatgactgtctgaatgaaaacagaacttgttgctgtttgggaataacttactttgtatatgt

SEQ ID NO: 394462 - DNA, 201 bp, Homo sapiens
agaataaaagggtaagaagacagagttcagatcagtggacaggatggattaattaatagatggtcttggaataatttattaactctttgggaagaatactmatgttactagtttaagaaaatatgcagtacatttattttaagaatatcagatttagaaacttttgattgaaactctggatttatacttagctaaatagaa

SEQ ID NO: 394463 - DNA, 201 bp, Homo sapiens
gacatagtggcacatgcctgtagtcccagctccttgggaggctgaggtgggaggattacttgagccctggaggtcaaggctgcattgagctgtgattgtgycactgaactccagcctctgtctcaaaaaaaaaaaataaaaataaaaataaaactatattttcttcttaactcctactgcctcctggcatttgaacccaaa

SEQ ID NO: 394464 - DNA, 201 bp, Homo sapiens
aatgaaaacagaacttgttgctgtttgggaataacttactttgtatatgtttattttaggtttttagaggatttttagaaggaaaggtaacctttgctccracatataagtatgacttgttttctgacgactatgacaccagtgaaaagtgccgcacccctgcctggacagaccgtgtcctttggagaaggaggaaatggc

SEQ ID NO: 394465 - DNA, 201 bp, Homo sapiens
ctgggcttggtggcgggcgcctgtaatgccagccacttgggaagctgaggcaaggagaatcgcttgaacctgagaggcggaggttgcagtgagccgaggtygcaccactgcactccagcctgggtgacagtgtgagactccgtctcaataaataaataaataaaataaaaaaatttaaaatacacgaggatatatttttag

SEQ ID NO: 394466 - DNA, 201 bp, Homo sapiens
ctgaaaaagataccttcgtgtagttaggtaagaatggtctccctgtgtatttcaaaggatagcatcctgcaatttagttttatgccaaagaaattgagtcrgttgccttggtcatatctgtgggattgtagaaatcggttccctccaggcccttgattttaccagggtgaagtacttatgcacacttttgttttggccttt

SEQ ID NO: 394467 - DNA, 201 bp, Homo sapiens
ttcttagcttttctctaaagaacatggtaggcgcaacagacaaggtagagtgtttgcagagtagattcctctaaggtgttttcacagctgcctttagctgscttctcaccagccagccagagaggtttattttgtttttgctaatttgatctagttaggcatgtaaactgttcttaggtaaaattaggtttaatttttttc

SEQ ID NO: 394468 - DNA, 201 bp, Homo sapiens
ttaaaatggagttatctctgatcaagcctgcttttccttaggtgatgttgatgactatagtgctgaagtggaggaacttcttcctcagcatctccagccaycttcaagttccggccttggtacttcccccagctcttcaccccgaactagtccctgccagtcacctacaatatcagagggtcctgtaccttcccttcccat

SEQ ID NO: 394469 - DNA, 201 bp, Homo sapiens
aaaaaaagaatggacttaattataattgtctgtttcatcattactttttatttcctggtattatctacagactactttcttctcaagtatttgtcccttaytgagggagtttggaacaatacttgagatagttttcattattttatattcttaaatattgtttaactttttaaggatcctggcctcacttgaatttatcaa

SEQ ID NO: 394470 - DNA, 201 bp, Homo sapiens
agtagatgttgttacaggatttttccctacctgatgaatgtgtcttttctgtatgtttatatgttctcttatacacataggttttttattatttgaaaackttctctggactataacaggtaatcaagaacagagagaaagagcaaatagaaaccagtaatcagtgacttaggctagtccagtaggagctgggactactga

SEQ ID NO: 394471 - DNA, 201 bp, Homo sapiens
acatttttatctccaccgtttatttggctagccttcctgtctcactataaaggtcacttcctcagtgaggtttattctaatcattgtcctcctccaacaawcaatttaaaattaggttctcccattgtaatctgttagaactccattatagtacttactataatttataattttgcatttgtatggttatataattcctgt

SEQ ID NO: 394472 - DNA, 201 bp, Homo sapiens
cttgccaggggcctggtgcatggtaggcattcaataaatacttcttgcgtgaatgaaagttttttttttttccttaaatgtcaccaagattggaatgtgargtttaaataggacattaatttagatagtttaatatctttcagctggaattttaattacttttgtaagagaaaccttttccttttaaaataatttttctct

SEQ ID NO: 394473 - DNA, 201 bp, Homo sapiens
cataagtttttcctttaactcatgggggcctgccatgcgctgctgtggtgaggcgttcgaccggggcaattacctacccggaagtgctctcaggatccgcrttgctcaagctggccggagtcccccacagggatgtgccacagggcaggcctaagccacctaaggggctgccttgaccatccgttaatcacctcacttccc

SEQ ID NO: 394474 - DNA, 201 bp, Homo sapiens
aagaaaagatgagatgagttttcacaattcctcagaagaacttttacaaatccagtgttactaaggctcactgtgcatgtgtagcctggtctgtttctatkgtagcttgcctagtgacatggctgagcaattcaggtcttactacagactgactttgcctgtgtgtagatcttaatgactgcgtgtgataagaatagctaa

SEQ ID NO: 394475 - DNA, 201 bp, Homo sapiens
gatgtctttgttccaggacgcagtcagccttcacctcaagcaggacttgcaggcccaggacctgctggatacagtacagccagaccggtaggtaaaacctygcctggggccaaggggtctcggttctaagtcctgtttactactagtcagttttgttaccttggagaaatcatgtgacccttcaaggcctcaatttcctca

SEQ ID NO: 394476 - DNA, 201 bp, Homo sapiens
  misc_feature (1)...(201): n = A,T,C or G
tattcacccttaaaactggaccgtgaaatagacacttggaatataagtacatggtttcttgtttatttttttaaacttaaatatatgatatgatgtctttnttccaggacgcagtcagccttcacctcaagcaggacttgcaggcccaggacctgctggatacagtacagccagaccggtaggtaaaacctcgcctggggc

SEQ ID NO: 394477 - DNA, 201 bp, Homo sapiens
aggtgacaaccttttatttccatttctgctagatgtaaaattcttcactctattttaaaatgttttgcatgttttccaatctctagcttctggattttacwgttttttctatcattattgctatttcttagcttttctctaaagaacatggtaggcgcaacagacaaggtagagtgtttgcagagtagattcctctaaggt

SEQ ID NO: 394478 - DNA, 201 bp, Homo sapiens
tgctataactgtcactagatgacaattgttcttaatcttttttctatgtggttaggtttgtctatgtcttataactgatgattttctatggtatgaacccrttaactatttgagctttttcttctctctactggccagactacaaaatggcttaactcaaacaatactttgtgcatatcaatagggccacttagtaaatta

SEQ ID NO: 394479 - DNA, 201 bp, Homo sapiens
agtagagcagtgtcactgagaaaattaggctgggtggggcccatttgttccatcctcagatacccaagtgacaaccatgtaatgagactccagcttggggrcaggctgttgaagtaggggttcccatcttaagacttccctcttctctgtgaagtgttgaagtgatctgcaggagtgggacagctcacagtttcaggaggg

SEQ ID NO: 394480 - DNA, 201 bp, Homo sapiens
aatatattttaatttgccccaaattctacatcaatgtttttggaaatttaagatagttcctagaaacattaagaatattcacctaaatagatatttcatgwgtattaacccaaaatatctgagacagggctcagtcaatttagaaagtttattttgccaaggttaaggatgtggccatgatatagcctccagaattcagaa

SEQ ID NO: 394481 - DNA, 201 bp, Homo sapiens
ttaaggttctatgctgagaatttaaccaggatagaatgtggtttagaaagggaaaagatgggttgtagaccaaaaaaaaaaaaaacgggagagattgaggwttcaaaatgtattgaacattcattcatttaacaattatttattgagcacttactgcgtaccaggtagtcttttagttactaggagtattcccataaagaa

SEQ ID NO: 394482 - DNA, 201 bp, Homo sapiens
tttagaaatatcagatctgtttataataacttatttaatttttcagcctattttcatataatttcatgtaaagagaagcaaggaaatatttttgtgaaatytttaattgaagctaatttaggtttttaagctaactttagtggtttgcatatgttttgaactgccacttgtctcttgaattgtttatgaaacaccatttag

SEQ ID NO: 394483 - DNA, 201 bp, Homo sapiens
taatacatgtagaaaagtatataaatcttaaacatacagcttgatatattattatagaatgaacatacccttattaccacaactgggttgagaaatagaayattattactagcataccagagagctttccagagaataatcccctcatgctccttcccagttatctttattatgatctgcaaagataatcactattcagac

SEQ ID NO: 394484 - DNA, 201 bp, Homo sapiens
ttgaaactcagataatgggttagaacccacaaaaggaaaatgcacttccccttgcaccggattgagtgtttgtgtattcctgaaccaaaaatgactgttgrgatatcatgtgctgtttgcatcaggtagatcattggcagaagaaggtagaaatttctgtgatttccatagtatcacaaactgtttggtggctaccaaatg

SEQ ID NO: 394485 - DNA, 201 bp, Homo sapiens
acatgaaattttgtctttcatactattagcacataccaaaagattgcaagtaaaaatacaatgaaaatagtctcatacaatggatccccttagggacccamgtgttcactaatgcagcctcaagactctgtctttatgtcgataggattctaagcttaaatcagtcatgatgttatgacattatcagtgttacagtcacct

SEQ ID NO: 394486 - DNA, 201 bp, Homo sapiens
agtgatccacctgccttggcctcccaaagtgctgggattataggcgtgagccaccaagcccagccctataaaacttatttcatatacatacatgcatacattatatatatatatatatatatatatatttttttttttttttttctttgagatggagtttcattcttgttgcccaggctagagtgcaatggcacgatctcg

SEQ ID NO: 394487 - DNA, 201 bp, Homo sapiens
tagttactgattatatctttataaattaaaaatagtgtttgaaaggcatacttacaaatataagcccttaaatatcttaaactactaagctttctccagcytcaataaatgaagagcataagacctcactctttgcatgtagaatattaatgtcagttaaagtgttaacttgactaaatagtataattgcatcttgatggg

SEQ ID NO: 394488 - DNA, 201 bp, Homo sapiens
gtgatccacctgccttggcctcccaaagtgctgggattataggcgtgagccaccaagcccagccctataaaacttatttcatatacatacatgcatacattatatatatatatatatatatatatatttttttttttttttttctttgagatggagtttcattcttgttgcccaggctagagtgcaatggcacgatctcgg

SEQ ID NO: 394489 - DNA, 201 bp, Homo sapiens
cgggagagcctgtcgcgtgggataatccttttccttctcctgccccctaaggagctttgaaccagccttgtcacccttccctcccacctccgctcctttcmcctcgaaggaactgcttgaagtttccaaataggttccctttcaacgtagtgacagatcttgaagcaggaagctgataaacagctccggacgaaatacgct

SEQ ID NO: 394490 - DNA, 201 bp, Homo sapiens
tgatccacctgccttggcctcccaaagtgctgggattataggcgtgagccaccaagcccagccctataaaacttatttcatatacatacatgcatacattatatatatatatatatatatatatatttttttttttttttttctttgagatggagtttcattcttgttgcccaggctagagtgcaatggcacgatctcggc

SEQ ID NO: 394491 - DNA, 201 bp, Homo sapiens
atccacctgccttggcctcccaaagtgctgggattataggcgtgagccaccaagcccagccctataaaacttatttcatatacatacatgcatacattatatatatatatatatatatatatatttttttttttttttttctttgagatggagtttcattcttgttgcccaggctagagtgcaatggcacgatctcggctc

SEQ ID NO: 394492 - DNA, 201 bp, Homo sapiens
ataagtcattgctgggcgcggtggctcacacctgtaatcccagcactctgggaggctgaggtgggcagatcatgaggtcaagagatcgagaccatcctggscaacatggtgaaacccgtttctactaaaaatacaaaaattagctgggcatggtggcgcgcgcctgtagtcccagctactctggaggctgaggcagaagaa

SEQ ID NO: 394493 - DNA, 201 bp, Homo sapiens
tttttttaaaagcatatcatgaatggaaatcagttatttgattaacgactgtgtgttcagcaaagaaattgttagatattgtaagcagtgatatttctttygtctatatgttggtttttggtttgattaaatatatttttcttgtctaaggtgggatctcatcgtgtccgtatgtcaaggggatttgaagccaatgcacct

SEQ ID NO: 394494 - DNA, 201 bp, Homo sapiens
caaagtgctgggattataggcgtgagccaccaagcccagccctataaaacttatttcatatacatacatgcatacattatatatatatatatatatatatwtatttttttttttttttttctttgagatggagtttcattcttgttgcccaggctagagtgcaatggcacgatctcggctcactgcaacctccccttccca

SEQ ID NO: 394495 - DNA, 201 bp, Homo sapiens
agtgctgggattataggcgtgagccaccaagcccagccctataaaacttatttcatatacatacatgcatacattatatatatatatatatatatatatatttttttttttttttttctttgagatggagtttcattcttgttgcccaggctagagtgcaatggcacgatctcggctcactgcaacctccccttcccaagt

SEQ ID NO: 394496 - DNA, 201 bp, Homo sapiens
atgcctgtaatcccagcactttgggaggccatggcgggtcgatcgcctgaggtcaggaattcaagaccagcctgaccaatatggtgaaaccctgtctcttytgttttgtaaaaatacaaaaattacccaggcatggtggtgtgcgcctgtagtcccagctactcaggaggctgagacaggagaattggttgaacctgcgag

SEQ ID NO: 394497 - DNA, 201 bp, Homo sapiens
atagccctatcttctgatccctagcatagtaaatgtaaatgaattgatttgttgtttgtgcctttaaatttaataatattaaattaattttccaggagatkattttaaaagtcatactttgttacttagtattccataagctaatcatttatttcttttcctattaggaatcagtctttgcatttgcatctcaaacactat

SEQ ID NO: 394498 - DNA, 201 bp, Homo sapiens
ggcagtacgtttttattcacacagttcattgtcttgctgaatattttaagccgtgtaattattatagaacttgtgtgttgatatagaatggattatagacrctatgttcgcattggtaacaagcagtgacttcaatttttaagagcaatgataaaccataattatagagaattatttttatctaggtacagtcagctttga

SEQ ID NO: 394499 - DNA, 201 bp, Homo sapiens
aatcctctatttagttactaagataagaaatgtcagagtgggtcttgagcagccttataaaacttgtgatatttattggtacttatgtaataacttaagarcactggtttatccttgaaaaactttgttggcattcagtttgggttctctgcaccaaactgttaataaatagccagaaccaaacatttagcagaggatact

SEQ ID NO: 394500 - DNA, 201 bp, Homo sapiens
gcgtgatagggtcatgatcaattgagcaagcagggggtatgtgactgggggctgcatgcaccagtaatcagaacagaacaggacagggattttcatgatgyttttccatacaggcctgaaatctataggtaacacaaacagttaggtcaggggttgatttttaaccaccaggcccagggcgcagtgctgggctatctgctt

SEQ ID NO: 394501 - DNA, 201 bp, Homo sapiens
tcaattgagcaagcagggggtatgtgactgggggctgcatgcaccagtaatcagaacagaacaggacagggattttcatgatgcttttccatacaggcctraaatctataggtaacacaaacagttaggtcaggggttgatttttaaccaccaggcccagggcgcagtgctgggctatctgcttgtggcttccatttctgc

SEQ ID NO: 394502 - DNA, 201 bp, Homo sapiens
tattccaaatctacaaggtatttaaaacataatgtatatgacccagttttactttttattatttatcctttgactttataattttgtatagaagagattcrtttaattcgagtgattatataacatgttatacgtcctttacaaagtataaaaaatcctcacttatctatctgacttctagcatcttagtcatctttatca

SEQ ID NO: 394503 - DNA, 201 bp, Homo sapiens
tttttcttagtattttggattttaggaaccatgtagttgttcttgctaatgctttaccactttttgcttcatttttttatgaaaattaacaaaactaaaamgtgtaacttcaagaaagtaagatttaggtatatgaaggcctttttggcaaaaccagatcggttcttggttttaacaatggcatttatgtaattacataaa

SEQ ID NO: 394504 - DNA, 201 bp, Homo sapiens
ttggatgtgtgttggaagggagaatattataaaatgtcattgatcacttttggcatgtgtggaaatagggaaatatgaaagaagaacagattgtgggaggsggggagataggtttttaacatgttgattttcaagatgcctgagttacattaaagagaaccacacaagctatgagatacatgagctggaaagaagatctag

SEQ ID NO: 394505 - DNA, 201 bp, Homo sapiens
cataaatagctcctattattttgagatatgtcccatcaacatttttaaagaaaataattttcaacccagaatttcatatccagccaaactaagcttcatamgtgaaggaggaataaaatcctttacagacaaacaaatgctgagagattttgtcaccaccaggcctgccctaaaagagctccagaaggaaacactaaacat

SEQ ID NO: 394506 - DNA, 201 bp, Homo sapiens
aattggatgtgtgttggaagggagaatattataaaatgtcattgatcacttttggcatgtgtggaaatagggaaatatgaaagaagaacagattgtgggaggcggggagataggtttttaacatgttgattttcaagatgcctgagttacattaaagagaaccacacaagctatgagatacatgagctggaaagaagatct

SEQ ID NO: 394507 - DNA, 201 bp, Homo sapiens
ttctactcttacaggtggagtgtggacacggtgatatccgtgtgaccgccattcccagctgaaggttatctcatctatgattttcttatacgtgactggcrccccctagtgaatagggacttaagttgacctccacggtagaagaaataccagggaaatacctgaagctgttttaacaatttctccttgtattaagtatta

SEQ ID NO: 394508 - DNA, 201 bp, Homo sapiens; identical to SEQ ID NO: 86537

SEQ ID NO: 394509 - DNA, 201 bp, Homo sapiens; identical to SEQ ID NO: 86538

SEQ ID NO: 394510 - DNA, 201 bp, Homo sapiens; identical to SEQ ID NO: 86535

SEQ ID NO: 394511 - DNA, 201 bp, Homo sapiens
ccagtgatgatgggcattttttcatgtgtctgttggctgcataaatgtcttcttttgagaagtgtctgttcatagccttcgcccacttgttgatggggttktttgtttttttcttataaatttgtttgagttctttgtagattctggatatgagccctttgtcagatgagtagatagcaaaaattttctcccattctgtag

SEQ ID NO: 394512 - DNA, 201 bp, Homo sapiens
gcatcttctcttgcattgccaaccacatccctgagacaccatggggaaagtgaaggttggagtcaatggatttggttgtattgggcgcctggtcatcaggrctgcttgtaattctggtaaagtagatattatcgccatcaatgacccattcattgacctcagctacatggtctacatgttccagtatgatcccacccatgg

SEQ ID NO: 394513 - DNA, 201 bp, Homo sapiens; identical to SEQ ID NO: 86541

SEQ ID NO: 394514 - DNA, 201 bp, Homo sapiens
aatttttaaaaaagcagattatagagtagcattattttaaaaaaccatctgtgttaagaaaaaaaggcttatataggcatgtaaaatttatttagaatggkagacaaaattataggggggattttcattttgtttctttttttgttattttatctgtgctaatgtattatcaggataatctatgtccatttaaataaaata

SEQ ID NO: 394515 - DNA, 201 bp, Homo sapiens
gatttctctgaagttgctgggggcaggagctgggcaggaactccccaggggtgccaagcagagcaggtagttggctaagtttgcctccaggaaagaagtcyctggagagcgagctggttctagaaagctccattattatttcatgttgcttttggcgaatatatgtagaacagaattttgacaatgaaattttcaggtgct

SEQ ID NO: 394516 - DNA, 201 bp, Homo sapiens; identical to SEQ ID NO: 86570

SEQ ID NO: 394517 - DNA, 201 bp, Homo sapiens
atcccagcgtctccagcttgcatggcctgtcacggtatttcccaacctccgtaatcacgctagccaattcttctaagaaatttcttctcatctatctgtcbatctatctatctgtctacctaccgacttacctacctacctgcctatctatcttttgattaatctacctatcaatctttctatctatccataacctgttga

SEQ ID NO: 394518 - DNA, 201 bp, Homo sapiens; identical to SEQ ID NO: 86562

SEQ ID NO: 394519 - DNA, 201 bp, Homo sapiens; identical to SEQ ID NO: 86554

SEQ ID NO: 394520 - DNA, 201 bp, Homo sapiens; identical to SEQ ID NO: 86558
  misc_feature (1)...(201): n = A,T,C or G

SEQ ID NO: 394521 - DNA, 201 bp, Homo sapiens; identical to SEQ ID NO: 86559

SEQ ID NO: 394522 - DNA, 201 bp, Homo sapiens; identical to SEQ ID NO: 86561

SEQ ID NO: 394523 - DNA, 201 bp, Homo sapiens
tcctggcatcccagcgtctccagcttgcatggcctgtcacggtatttcccaacctccgtaatcacgctagccaattcttctaagaaatttcttctcatctrtctgtctatctatctatctgtctacctaccgacttacctacctacctgcctatctatcttttgattaatctacctatcaatctttctatctatccataac

SEQ ID NO: 394524 - DNA, 201 bp, Homo sapiens
tgagccctgccttcctcttcacactgtgttttctctgtttgtgagtctgtgtccaaatttccctggagaaatacccatcatatgggttagggatcccccamtgacctcactgaaacttagtgtggagcctgtctccaaataaggtcacattctgaggtattggtggtgaggactttaacatgggagttttttgggaggagg

SEQ ID NO: 394525 - DNA, 201 bp, Homo sapiens; identical to SEQ ID NO: 86555

SEQ ID NO: 394526 - DNA, 201 bp, Homo sapiens
ctctttctggcctcatagtggggcttggccattgtcccttcactccagatctctcctttcagatccaggaagtgcatcttgaacttaactttccagacccycccttcagttttccagtccttagagaggtggacttctgattcctttgtctctgtgccctgtagcctcaggtcaggcttaaggcaaggtctcctcacctgg

SEQ ID NO: 394527 - DNA, 201 bp, Homo sapiens
gtctctgccattcagtgggcatagctgtgcccttttagtggggtctagatctcagccctgggattgggggcattttctcagttgctcaatctcagccctargggcagtgaccattccttatatatggttgtttgtatattctttggaactgtcttgattttattactgttagtctctcattactccactcccttattatag

SEQ ID NO: 394528 - DNA, 201 bp, Homo sapiens
gatcatacccattttacagatgagaaaagtgaggctgggattggggctcaaatgcgtgctcagagtcacataagtaggttggaaggtgacgctacagacayggtaaattgtgaaggcctgctggtaaggcacgagtgatttgaatgacactctttttttttttttcctagtgattcctgtcagaatcaccatttttggtaa

SEQ ID NO: 394529 - DNA, 201 bp, Homo sapiens; identical to SEQ ID NO: 86560

SEQ ID NO: 394530 - DNA, 201 bp, Homo sapiens; identical to SEQ ID NO: 86556

SEQ ID NO: 394531 - DNA, 201 bp, Homo sapiens; identical to SEQ ID NO: 86557

SEQ ID NO: 394532 - DNA, 201 bp, Homo sapiens
  misc_feature (1)...(201): n = A,T,C or G
ctggagtgcagaatctgctggagaaactgccattccgttattgactggctggtcaggccatacagcctggtggtctagatgtgtttggaggtagggcttcngtagcacagatagtgcctgttcatggctctgtcccaggtaaggcagagctagcttgtgctgagggcttctgctttgcagctggcctggggtggctaggat

SEQ ID NO: 394533 - DNA, 201 bp, Homo sapiens
cagtcctgtccgactgggctgagcctgcgcccctctgtgcgtgtcagaagcccagacagtgttgccctgtgtcttgtggtctaaggagggttacgccctgyggtgcctgtcttctgtcccccacctgattcagtgtggaaatgtggagtctccagaggtgtcctgggtgtcacatttgggatggatacacgtgggcccagc

SEQ ID NO: 394534 - DNA, 201 bp, Homo sapiens
tttctacatggaggaacttacctggagaaaaacttccagcctctttctgcttccagagaagtagagtgactcatttgattgaatttcagagaacagatagrgtggagtgtgctcaggctcctctgggtactctttctggggtctgtgggttgactggaggggtgtcttctggtgggcactcaattgcatagtgcttggtga

SEQ ID NO: 394535 - DNA, 201 bp, Homo sapiens
taacgacagacccagagctgcagaagctctcatcttgttactgtggcaggaggtggctctggttagtgggggcttctcctccatgcactcttaatttaagrggcttcttcttaaaggtcctgggtggacaggacaggagcctggaggaccgtggtggcgtgtggccgggcctgggagctccccgtggacttggcctgagtg

SEQ ID NO: 394536 - DNA, 201 bp, Homo sapiens
cgtcacagggctggaggtgtggccggcccactgggttggtggtggtgggtgcccgtcacagggctggaggtgtggccggcccactgggttggtggtggtgrgtgcccgtcacagggctggaggtgtggccggcccactgggttggtggtggtgggtgcccgtcacagggctggaggtgtggccggcccactgggttgtgct

SEQ ID NO: 394537 - DNA, 201 bp, Homo sapiens
gtgggtgcccgtcacagggctggaggtgtggccggcccactgggttggtggtggtgggtgcccgtcacagggctggaggtgtggccggcccactgggttgktggtggtgggtgcccgtcacagggctggaggtgtggccggcccactgggttgtgctttctgccgtacgtcccttcccatgaggatgagatgacccatctg

SEQ ID NO: 394538 - DNA, 201 bp, Homo sapiens
acttttcctcctgccaggtaggagtatgctgccccagcctgatggtatggccaccctggatcacccttgggatcctggcccagcctggtctagggttttgwtgaagcaggtgaaaatccaggggctcacaagaaaagggctggcaaactctgccctatgtcagagtcgtcctgctattggtctaggggatcagctagcctt

SEQ ID NO: 394539 - DNA, 201 bp, Homo sapiens
ctgagttcatctgcccttcttccagggtgtagggaccagccccacagggtcggtgggtctctccctgtgtgcggcgatgagagagtgtagaaataaagacrcaagacaaagagataaaagacagctgggcccgggggaccactgccaccaatgcacggagaccagtagtggccccgaatgtctggctgtgctgttatttat

SEQ ID NO: 394540 - DNA, 201 bp, Homo sapiens
tgcacatttccccgtcctaacaacattataactgttaggaaagagacgggcttgttttgggatggctcattttatgtgaccctgtgcgctgtctctgagtycatctgcccttcttccagggtgtagggaccagccccacagggtcggtgggtctctccctgtgtgcggcgatgagagagtgtagaaataaagacgcaagac

SEQ ID NO: 394541 - DNA, 201 bp, Homo sapiens
gatgcctcccaaccctgagtaggaagattagggtccacggcctcgctggagcgggttagaaggcaggagatctccggtcccagccgtgtctccagccgccrgactctctcccagccctgtctccagctgccccactgtctcccagagtctgccgtgtggatgtttagaggtggggagcaccgtgcttggctgagtgcagct

SEQ ID NO: 394542 - DNA, 201 bp, Homo sapiens; identical to SEQ ID NO: 86637

SEQ ID NO: 394543 - DNA, 201 bp, Homo sapiens
attttacgtggggctgcaggctgaggatgggcactggacgggtgattatggtggcccacttttcctcctgccaggtaggagtatgctgccccagcctgatkgtatggccaccctggatcacccttgggatcctggcccagcctggtctagggttttgatgaagcaggtgaaaatccaggggctcacaagaaaagggctggc

SEQ ID NO: 394544 - DNA, 201 bp, Homo sapiens
agggcttctgggtcttcctggcctctgtgtggccaaggctggcacccatcttgggctcaagcagaggaggggcattgtcctgctgtgcctggcccaatggyggcctgctcctgctcctgcctcctgcccaggacttgctctgggtgatggggacttggggaggctgactgaaccctacggcactccaggcctcttcccttc

SEQ ID NO: 394545 - DNA, 201 bp, Homo sapiens; identical to SEQ ID NO: 86583

SEQ ID NO: 394546 - DNA, 201 bp, Homo sapiens
ccaggccagtgccaggcctcgggaggggacagacggcctctctgggaccctcctgagtgcagggtctgggtagcagctgggcttccagctttctccttgcrcctgacttgggcttttttctcctcacaggatgggccttgacggcatgaaaatgcaggtaagggctgcgggactgcggctgcatgcttcctttgcaatcat

SEQ ID NO: 394547 - DNA, 201 bp, Homo sapiens
tttcctgcactggtgtttcaggtcacccccaccctcccatcccctccctagcccctgctccatccaccggtcctcctcgggctggcctcacctggggcagytctctgaggcctgcagggtgctgggggtgctggcagtttctgcgtcctgctcatgttggagccactgtgtgcaagggccaggcacgggcaggggctgtgt

SEQ ID NO: 394548 - DNA, 201 bp, Homo sapiens
caggcgtgagccactgcacctggctgagttggagcttttcttccctctttttggactttggaaaatgctcttggtccatgatgctatgtagacagctcccrttgactgtggcctgtgcggcattgggcagcactctggtgaacactgaatcgggtctgacctcctagccccaccatttactggctgagcctcagtttcctt

SEQ ID NO: 394549 - DNA, 201 bp, Homo sapiens; identical to SEQ ID NO: 86585

SEQ ID NO: 394550 - DNA, 201 bp, Homo sapiens
aaggaggggcagagggaggaaatgagcttctgggcagacctgggactcatggagctggggagctcctcagagcggtcctcccatagggggccttcatgtgscctcggggtcagttgctggagggacccccacccaggaagggactggcccagggccctgagggcggatggtgggaggccacccctcctggtttgagccagg

SEQ ID NO: 394551 - DNA, 201 bp, Homo sapiens
cggctcacagatctgggacaccgcattcgccatccaggctctgcttgaggttcgtggctccttctcttttctcagcctcagctgaccttcctgtgcacgtragcccacgcatccacctgagggcagcactgctggccacacacttgccactcctcgatacttccagtgacctgggctctggcctctggcttcagagggtcg

SEQ ID NO: 394552 - DNA, 201 bp, Homo sapiens
tccttgagtgttgtgggaaccctggtgggggtgtcccctagagagctatcagcagggctgggggggtcccttgtgttagatgactttggtgcgggggtggrgggtggggggtcaagttaggggaggcaggaagtgaaggggccgctcaagaaaggacagcagcagtgtcctgatgcaaaggccgggggcttaaccccggaa

SEQ ID NO: 394553 - DNA, 201 bp, Homo sapiens
ttctcctgcaccttaccaggaagcacacaccaactttgatcccttgattaaggtgatgaccgctgtacttagtttctccgctatgaagttgcttttttttwctttgtggggagacagttttagactatgtaaacgtcctatttctcatcatacttatacctgttagtgttagcatttgatgatgattcttgcctgaatcaa

SEQ ID NO: 394554 - DNA, 201 bp, Homo sapiens
ctggagcctctaagggatcgtccagtcctagaagtgtcctcagagggacactgtcctgcctggtggcccatgaagaaagggagggctccctgagtctcccygacgtgtgtctgcctgcagggctcagccttctctgaggcccttgtcagccatgaggggtgcccagggctcagagcctgaggctgagcgttggctgggtgg

SEQ ID NO: 394555 - DNA, 201 bp, Homo sapiens
aaagaaatggggtcatttccaggcatcaccatgactgaggtgcgccactgtcattgggtgagagcagctggatgctctatgtgtaggtgctggagcctctragggatcgtccagtcctagaagtgtcctcagagggacactgtcctgcctggtggcccatgaagaaagggagggctccctgagtctccccgacgtgtgtct

SEQ ID NO: 394556 - DNA, 201 bp, Homo sapiens
aggccaaggtgggcggatcacaaggtcaggagatagagaccatcctggctaacatggtgaaaccccgatgctactaaaaaatacaaaaaaaattagctggrtgtgctggcaggagcctgtaatcccagctactccggaggctgaggcaggagaatggcgtgaacccaggaggcggagcttgcagcgagctgagatcacgcc

SEQ ID NO: 394557 - DNA, 201 bp, Homo sapiens
ccttgtccctggaggctgctgtgggtctggagcggagccttgacagggctgtctctcctgcagatctcgaaaaccatcaacatgcttgtgcgctggtatgtggacgggcccgcctccactgccttccaggagcatgtctccagaatcccggactatctctggtgagtgtggctgggatatgctggcggggcctctcacgaa

SEQ ID NO: 394558 - DNA, 201 bp, Homo sapiens
tcctgattcctcctgcctagctagggacttggagctctcacctctgtggggcctgcaggggtccaggtgtggccagttcagtgaccttagagggtgcaatycccgggctgtgctggtgcgtggccgcctcctgacagagtcagcaggccctgggctgtgctgcagctgctgccgtagctgtgcgcgtagctgctgcggtgt

SEQ ID NO: 394559 - DNA, 201 bp, Homo sapiens
tgtcatgaggtcatgtgaggccaaccgccctcccctgggatgaggctgagttggtggaagctgatgtggttgtgaggggctggtgaccctggcttagggtytgctgcagggcggggagtctgagctgggctgatggtgccatgactgatgcgggatggactacttgctttcctatgctcttgcttaattagccctttccag

SEQ ID NO: 394560 - DNA, 201 bp, Homo sapiens
gtgctgactcccagtcccgtctgggctggtttgagccctcgctggccagtcacgtttcccagcagctgtgggtggtgagctaaacaggtgcaggccctcgmgcgcctcgcagcaccagtggtggctgtggccggcagagtaagctcccaggcacgttctgcctctccagtcctgcccagtctgtctcagcgatgtcccaga

SEQ ID NO: 394561 - DNA, 201 bp, Homo sapiens
ccacacacagacataggtacatgaagacagatgcacacacaggtctatgcacacacgtatgcatgcacaggcacctgtgtacacacatgcagatgcacccrcagtatcccatctgtgccacacacagacatacgtacatggagacagatgcacatacaggtctatgcacacatgtacacatgcacaggcacctgtgtacac

SEQ ID NO: 394562 - DNA, 201 bp, Homo sapiens
tttcctgactgggcaccggcacacccctccacactctggtgccactgccggcaggtgtacctgcccatgagctactgctacgccgttcggctgagtgccgyggaagacccgctggtccagagcctccgccaggtaggacctcatcagggaacaaagtgaaggcctctggggctgggacccacagggcctggggcttctgga

SEQ ID NO: 394563 - DNA, 201 bp, Homo sapiens
tgctgaccgaactaggaggtgcagctcctcagagggtgcacctatggttcaactgtgcccctcaggagcacggttgggaaatgcccgcagatgcactgacrtggtggggaatagccatccaccagtgttcgtgcttgaaagggcccaaggtatggatgctggcggagggggcaggcttgagtcttggggtctcccactgac

SEQ ID NO: 394564 - DNA, 201 bp, Homo sapiens
atggagacagatgcacatacaggtctatgcacacatgtacacatgcacaggcacctgtgtacacacatgcagatgcacccgcagtatcccatctgtgccayacacagacatacgtacatggagacagatgcacatacaggtctatgcacacatgtacacatgcacaggcacctgtgcacacatatgcagatgcacccgcag

SEQ ID NO: 394565 - DNA, 201 bp, Homo sapiens
aacctgcttcgcacatgggggtcgcaagatccacatgaggctgcccttgcctcatggagaggggcacacgtgactcccagagggtgaagcttcccagctaraggcagtgcagactttgctgacaggaagcagatgacgtgggcctattctctccccgctcaggtggtgctgtggccatcccctcctgggggaagttctggc

SEQ ID NO: 394566 - DNA, 201 bp, Homo sapiens
gaagttctggctggctgtcctgaatgtttacagctgggaaggcctcaataccctgttcccagagatgtggtatgtctgctgttgattgggttgttgggtcrctgctgctgtcccggggagtagagtgacagggaccgtgggtcaggtgcaggctgtgacagcagagaggggtgggcattctgtgggtgggtggagttaggc

SEQ ID NO: 394567 - DNA, 201 bp, Homo sapiens
gggagcagagccatagcccaaagtggaccgcccttgagctagaagtgttgactcaggcgtgggaaggtgtagagcaggcgggtcacggtgaggaaggagtsgggggctcagttgtcatgggaggtgcatgaattcgtactgcagagtggctgctcaggggtctcctgtgttggcatgttatgtcaggttaaggcattttag

SEQ ID NO: 394568 - DNA, 201 bp, Homo sapiens; identical to SEQ ID NO: 86587

SEQ ID NO: 394569 - DNA, 201 bp, Homo sapiens
ggtgcggacatctggcagctggcagtgggcggcgtagagcactgcagcagcaatgacggagggcacgtgagtcccctcgccccgggctcctgacgaatgcrgggtggtcctaggtgctgaggagagcgcgactggggcagtgggccggcggccggcgttggggcggggcctgggtcgctgatggccggtggtcctcaggtg

SEQ ID NO: 394570 - DNA, 201 bp, Homo sapiens
gggtctgggaccttccttggtgtgatggtgtctcctgtctctggtctttgcaggactgcctgtgcagaggtctcccgggcctgtgacttcctgctgtcccrgcagatggcagacggaggctggggggaggactttgagtcctgcgaggagcggcgttatttgcagagtgcccagtcccagatccataacacatgctgggcc

SEQ ID NO: 394571 - DNA, 201 bp, Homo sapiens
gcagcctgctggggtgagaagccaggggtctgggaccttccttggtgtgatggtgtctcctgtctctggtctttgcaggactgcctgtgcagaggtctccygggcctgtgacttcctgctgtcccggcagatggcagacggaggctggggggaggactttgagtcctgcgaggagcggcgttatttgcagagtgcccagtc

SEQ ID NO: 394572 - DNA, 201 bp, Homo sapiens
tcggtctgtgtaaactgtttatttttatgtggtttttaagggagaccattctcattcttttgagaccctggaaaggatggaattgggataggtaaactgcwgttttaccagaatgttcactggaccaatctcgtgttccagggagaccctcacgcagggcttagagttctgtcggcggcagcagagggccgatggctcctg

SEQ ID NO: 394573 - DNA, 201 bp, Homo sapiens
agttggtggaagctgatgtggttgtgaggggctggtgaccctggcttagggtttgctgcagggcggggagtctgagctgggctgatggtgccatgactgaygcgggatggactacttgctttcctatgctcttgcttaattagccctttccaggctgactcacccacaagccagccaagccaacagccagggctccagttc

SEQ ID NO: 394574 - DNA, 201 bp, Homo sapiens; identical to SEQ ID NO: 86639

SEQ ID NO: 394575 - DNA, 201 bp, Homo sapiens
tcagacactgcccctaccaggagctctatgtggaggacttcgccagcattgactggctggcgcagaggaacaacgtggcccccgacgagctgtacacgccscacagctggctgctccgcgtggtatatggtgagcgcctcctgaggggccggcagggcagcccagggtcagggtcagggtgtcgcccactcattcacgcac

SEQ ID NO: 394576 - DNA, 201 bp, Homo sapiens
cacagggctggaggtgtggccggcccactgggttggtggtggtgggtgcccgtcacagggctggaggtgtggccggcccactgggttggtggtggtgggtrcccgtcacagggctggaggtgtggccggcccactgggttggtggtggtgggtgcccgtcacagggctggaggtgtggccggcccactgggttgtgctttc

SEQ ID NO: 394577 - DNA, 201 bp, Homo sapiens
ctgtgcagaggtctcccgggcctgtgacttcctgctgtcccggcagatggcagacggaggctggggggaggactttgagtcctgcgaggagcggcgttatktgcagagtgcccagtcccagatccataacacatgctgggccatgatggggctgatggccgttcggtggggacgacgggaccgtccctgagccttgggttt

SEQ ID NO: 394578 - DNA, 201 bp, Homo sapiens
gctcgggtttcagtagtggcccatggcccttaggtagggtggccccatcgtgcaggctcctccccgtaccccaaggcagcctgctggggtgagaagccagrggtctgggaccttccttggtgtgatggtgtctcctgtctctggtctttgcaggactgcctgtgcagaggtctcccgggcctgtgacttcctgctgtcccg

SEQ ID NO: 394579 - DNA, 201 bp, Homo sapiens
aagtcaagctcgggtttcagtagtggcccatggcccttaggtagggtggccccatcgtgcaggctcctccccgtaccccaaggcagcctgctggggtgagragccaggggtctgggaccttccttggtgtgatggtgtctcctgtctctggtctttgcaggactgcctgtgcagaggtctcccgggcctgtgacttcctgc

SEQ ID NO: 394580 - DNA, 201 bp, Homo sapiens
tcagcgtgtgtgcctttaaaagatcagtgtctgtggccaggtggggtggctcatgcctgtaatcccagcacttcgggaggccgaggcgggcagatcacgargtcaagggatcgagaccatcctggccaacatagtgaaatcccgtctctactaaaaatacaaaaattagctgggcgtggcggcgcgtgcctctagtttcca

SEQ ID NO: 394581 - DNA, 201 bp, Homo sapiens
catgcccggcctggctacctctcctcttgcctataggccctgaggggcaattccagcccaagggaatccatggctcctgctgctccaagaaaacctagttyatgttgtggctctgcagagcctggcctggtcttgtcctctgtgtttcacagaccttccgtagccagtcccacctgccctgctctctgctgcatgcgcagg

SEQ ID NO: 394582 - DNA, 201 bp, Homo sapiens
atctgttcccagttcacatctgcaaaagtcaagctcgggtttcagtagtggcccatggcccttaggtagggtggccccatcgtgcaggctcctccccgtamcccaaggcagcctgctggggtgagaagccaggggtctgggaccttccttggtgtgatggtgtctcctgtctctggtctttgcaggactgcctgtgcagag

SEQ ID NO: 394583 - DNA, 201 bp, Homo sapiens
gagaggggcacacgtgactcccagagggtgaagcttcccagctagaggcagtgcagactttgctgacaggaagcagatgacgtgggcctattctctccccsctcaggtggtgctgtggccatcccctcctgggggaagttctggctggctgtcctgaatgtttacagctgggaaggcctcaataccctgttcccagagatg

SEQ ID NO: 394584 - DNA, 201 bp, Homo sapiens
gtctctaataaaataaaaaagccaagcaaactaagacaaccaggtaattctgtttgtttcctgaattggcaaaaacttaaacgaaccgtgttaatatgtcyaccttctgggggcagcctggctgcaggcaagagcagccctggagcttgcaccttccaagctgatcgtctacctctccaagcccggggctgtccacctctc

SEQ ID NO: 394585 - DNA, 201 bp, Homo sapiens
tttggggtttggagcagggactcctcagaagcatgtttagatggtgtggctgtgccaggactgctgctgctgaagtggctctggcatggggccagcgtgcyggagctactctggagtctagggtcgtctttgttcccatacaggaccagtctgccaagtggagatgacacagactggggcagctcaggcttggctcagagg

SEQ ID NO: 394586 - DNA, 201 bp, Homo sapiens
ccacctctccaagcccggggctgtccacctctccaagccccgggctgtccacctctccaagccccgggttgtcttacctctccaagccccaactgtctacytctccaagccctggtctggctacctctccaagccctggctgtccacctatccaagccccggcctggctacctctccaagccccaggctgtccacctctcc

SEQ ID NO: 394587 - DNA, 201 bp, Homo sapiens; identical to SEQ ID NO: 86580

SEQ ID NO: 394588 - DNA, 201 bp, Homo sapiens; identical to SEQ ID NO: 86581

SEQ ID NO: 394589 - DNA, 201 bp, Homo sapiens
gtaagggctgcgggactgcggctgcatgcttcctttgcaatcatgtctcccctttattatttttcctttggggttcagaaataactcctcctggaccaggwcccggcagcgtgcgactagaggctgagtcagttgaggcctctggccgtgtccctgtgggtgctgttggtctctgtgtgggtgcccaccgttctcgatgtc

SEQ ID NO: 394590 - DNA, 201 bp, Homo sapiens
gcacctgtgcacacatatgcagatgcacccgcagtatcgcatctgtgccacacagacatacgtacatggagacagatgtacatacaggtctatgcacacaygtacacatgcacaggcacctgtgcacacatacatacagatgcacccgcaacatcccgtctgtgctgccctattaggtttgtggccatttggggaatcttc

SEQ ID NO: 394591 - DNA, 201 bp, Homo sapiens
gctggaagctggaggtctgtctggatgtacccagcttggggccctggctgcacccacacctttggtggctgggcccctgccctgaccgggtgctctgtggyggggagggatgcgtgcggctgtggggaggttctgagaactggggtgtggacacccccagcctggagtcatggcttgtgctctgcagggtggcttctcctt

SEQ ID NO: 394592 - DNA, 201 bp, Homo sapiens
  misc_feature (1)...(201): n = A,T,C or G
ggagatccggtaaggagggtctcagccattcagtgtgggcgctgccaagtcgggggccaagacccagacgcatcattctgtgacacggccctggtggcccntctcagaagcgaaactcatggaaacatgcaagaggcttcggatgttgtggaatccagtcatatgccctaaagcatacaaaatatctgttaggggctcaga

SEQ ID NO: 394593 - DNA, 201 bp, Homo sapiens
gactggctggcgcagaggaacaacgtggcccccgacgagctgtacacgccgcacagctggctgctccgcgtggtatatggtgagcgcctcctgaggggccrgcagggcagcccagggtcagggtcagggtgtcgcccactcattcacgcactcatcccctgccagcggcactgggccacctcctctgtgccaggccccagg

SEQ ID NO: 394594 - DNA, 201 bp, Homo sapiens
cacaggcacctgtgcacacatatgcagatgcacccgcagtatcgcatctgtgccacacagacatacgtacatggagacagatgtacatacaggtctatgcrcacatgtacacatgcacaggcacctgtgcacacatacatacagatgcacccgcaacatcccgtctgtgctgccctattaggtttgtggccatttggggaa

SEQ ID NO: 394595 - DNA, 201 bp, Homo sapiens
ttaacgtggaaatcagctctccgccccctgttcctgccccatcggttgtcagccctagtgttgcctctagagagttccgctgtgccctgggcgcctgtgtrtgctcagcacatgggcgagttctagggtgctctctgtgatttcagctgctgaacatgagaaatccagatggagggttcgccacctatgagaccaagcgtg

SEQ ID NO: 394596 - DNA, 201 bp, Homo sapiens
cagctgctgcttggggcacccgagggcttggttaacgtggaaatcagctctccgccccctgttcctgccccatcggttgtcagccctagtgttgcctctakagagttccgctgtgccctgggcgcctgtgtgtgctcagcacatgggcgagttctagggtgctctctgtgatttcagctgctgaacatgagaaatccagat

SEQ ID NO: 394597 - DNA, 201 bp, Homo sapiens
gatgctgcccaggtcccagataaccctcccgactaccagaagtactaccgccagatgcgcaaggtatgcgggagccagccccatccctgtcccgtcccccrggggaggccgccctcagcagggtgggtccttccctctgaagggggggctcctccctgggggactcctcccttggcgtttttgggtgtcctgctgtggtgg

SEQ ID NO: 394598 - DNA, 201 bp, Homo sapiens
agctgtgggtggtgagctaaacaggtgcaggccctcgcgcgcctcgcagcaccagtggtggctgtggccggcagagtaagctcccaggcacgttctgcctytccagtcctgcccagtctgtctcagcgatgtcccagatggggacgtcccgtggtgacgtgttctctgcttccacatttgccctcgatgctgcccaggtcc

SEQ ID NO: 394599 - DNA, 201 bp, Homo sapiens
cccgtctgggctggtttgagccctcgctggccagtcacgtttcccagcagctgtgggtggtgagctaaacaggtgcaggccctcgcgcgcctcgcagcacyagtggtggctgtggccggcagagtaagctcccaggcacgttctgcctctccagtcctgcccagtctgtctcagcgatgtcccagatggggacgtcccgtg

SEQ ID NO: 394600 - DNA, 201 bp, Homo sapiens
gcagaaggcccctgtcctggccctgagtgatctgcacggcactttatgcctgggggctgctgtggatctggacgagaccttgtccctggaggctgctgtgsgtctggagcggagccttgacagggctgtctctcctgcagatctcgaaaaccatcaacatgcttgtgcgctggtatgtggacgggcccgcctccactgcct

SEQ ID NO: 394601 - DNA, 201 bp, Homo sapiens
ggtcttagcagtcatgaccacctgtccccagtgaggaacatctctcctgccacacaggcctcctgatcacttgccacgtggcacgcatccctctgccagcyggatacagagaagagattgtgcggtacctgcggtcagtgcagctccctgacggtggctggggcctgtgagtgtgcctgcccctgtgtcactgcacatgtg

SEQ ID NO: 394602 - DNA, 201 bp, Homo sapiens
gggtttgtttgtttgtttgtttgtttttgagacggagtctcgctctgtcaaccgggctgacatgcagtggcatgatcctagctcactgcagtctcaaactsgtgggctcaagcgatcctcccgagtagctgggatcacaggtgcacgccaccaccccgggctaatcttttaaaacttttatgtagagatggagtcttgctg

SEQ ID NO: 394603 - DNA, 201 bp, Homo sapiens
aacagctgaaacttttaaagtaatttacattcactgttttgacttgggctgtatgtgaagagggttcctctggccgggcaacagtcccgtcagctatctctttttttttttttcgatctctttgcagaagaattactttaaggacttgcccaaagcccacaccgcctttgagggggctctgaacgggatgacattttacgt

SEQ ID NO: 394604 - DNA, 201 bp, Homo sapiens
acgcagggcttagagttctgtcggcggcagcagagggccgatggctcctgggaagggtgagtgagcctccactcgtgagtgcagagatgcacgggatccasaggtttctgctctcacacactgcgttcataaatgttggcttgtatgttgttgctacaccagaagtttctggaagtgagctgccagcccgtgacttctggg

SEQ ID NO: 394605 - DNA, 201 bp, Homo sapiens
acagctgaaacttttaaagtaatttacattcactgttttgacttgggctgtatgtgaagagggttcctctggccgggcaacagtcccgtcagctatctctttttttttttttcgatctctttgcagaagaattactttaaggacttgcccaaagcccacaccgcctttgagggggctctgaacgggatgacattttacgtg

SEQ ID NO: 394606 - DNA, 201 bp, Homo sapiens
cagttcagtgaccttagagggtgcaatccccgggctgtgctggtgcgtggccgcctcctgacagagtcagcaggccctgggctgtgctgcagctgctgccrtagctgtgcgcgtagctgctgcggtgtagtgggttggcttaggcattctctggacatacccaggtggcactgggccactgagtcccaccctgacactgca

SEQ ID NO: 394607 - DNA, 201 bp, Homo sapiens
gagaccctcacgcagggcttagagttctgtcggcggcagcagagggccgatggctcctgggaagggtgagtgagcctccactcgtgagtgcagagatgcaygggatccacaggtttctgctctcacacactgcgttcataaatgttggcttgtatgttgttgctacaccagaagtttctggaagtgagctgccagcccgtg

SEQ ID NO: 394608 - DNA, 201 bp, Homo sapiens
agtggggattactgtgttgtttgttcttgctgctttggctctgggcttagctggctgggacccttcctgtgggctggctgtgagttggagtttttttgtatttttttttttttttgagacagcgttcgctcttgttccccaggctggagtgcaatggcacaattttggctcgttgcagcctctgcctcctgggtgcaagtg

SEQ ID NO: 394609 - DNA, 201 bp, Homo sapiens
aggaccggggtctcgcctgagcttccagtgaggaaggatctgcctctgagcacacagggtcctcggcacgatcccattcctcagctggaagctgccgactrccgtctgctgcggggcctctctagatggcatcttcacaaaagcgagaagggagagttggtagagggagtctgctagcaccatgggagtcgcggtcacaca

SEQ ID NO: 394610 - DNA, 201 bp, Homo sapiens
atatttattggatacaagacaaaggggcagggtaaggagtgtgagccatctccaatgataggtaaggtcacatgggtcacgtgtccactggacagtgggcycttccctgcctggcagccgaggcagagagtgggagagagagagagagagacagcttatgccattatttctgcatatcagagacttttagtactttcacta

SEQ ID NO: 394611 - DNA, 201 bp, Homo sapiens
tacttcaccgtttctgtgtgtcagaagtccaggcgcggcctcgcaggtcgtcctctgcctcagggtctctccgggcttcagtcagggtgttagccaggacyggggtctcgcctgagcttccagtgaggaaggatctgcctctgagcacacagggtcctcggcacgatcccattcctcagctggaagctgccgactaccgtc

SEQ ID NO: 394612 - DNA, 201 bp, Homo sapiens
tctccagtgataggtaaggtcacgtgggtcacgtgtccactggacagggggcccttccctgcctggcagccgaggcagagagaggagacacagagaaagamaacttatgccattatttctgcatatcagagacttttagtactttcactaattgactactgctatctagaaggcagagccaggtgtacaggatggaacatg

SEQ ID NO: 394613 - DNA, 201 bp, Homo sapiens
cctcgtgatctgcccacctcgatctcccaaagtgctgggattacaaggcgtgagccactgcgcccggcagcagtttctcagttttaatttggagttttgcmtctgtgttcatgagtgagcctgaaattttcacttttccatatcttatttctctgggttcctagaatgagctagagagtgttcctcctttctgttctctgg

SEQ ID NO: 394614 - DNA, 201 bp, Homo sapiens
caacttatgccattatttctgcatatcagagacttttagtactttcactaattgactactgctatctagaaggcagagccaggtgtacaggatggaacatsaaggcggactaggagcgtgaccactgaagcacagcatcacagggagacaggcctccggataactgcgggcaggtctgactaatgtgaggccctccacaag

SEQ ID NO: 394615 - DNA, 201 bp, Homo sapiens
cctttaaagtctttggctcatttttaaattaaattttcttattgttgagttttagttcttcatatattttggctgccagtcctttatcagatatgtctttygcaaatattttctgcctgtgtcttgtcttttcattctattaacagtatcttttgcagagccagttttcatttcaaggaagtccagcttatcaatgttctc

SEQ ID NO: 394616 - DNA, 201 bp, Homo sapiens
acttcctgctgtcccggcagatggcagacggaggctggggggaggactttgagtcctgcgaggagcggcgttatttgcagagtgcccagtcccagatccayaacacatgctgggccatgatggggctgatggccgttcggtggggacgacgggaccgtccctgagccttgggtttgggtagaggagggacactcagctgtg

SEQ ID NO: 394617 - DNA, 201 bp, Homo sapiens
tggtacgagcccggaacattcttcacaagaaaggtacggcatgtgcagcatgtgctgggccaggggttcgtgtcaactcgataatgagctctcacaaacgmgatacagaaagatgcacttgcagctgaaacagtgggcaaaagcacatgagcagggaatttgtcaaagcagaagtaggcagacactgtttaacctaggcat

SEQ ID NO: 394618 - DNA, 201 bp, Homo sapiens
tgatgatatgcacctgtagtctcagctacttggaggctagtaaggcaggaggaacacttgagcccaggagttctgggttgcaatgagctggttgtactacygcactctagcctgggtgacagagtgcgaccctgtctctaataaaataaaaaagccaagcaaactaagacaaccaggtaattctgtttgtttcctgaattg

SEQ ID NO: 394619 - DNA, 201 bp, Homo sapiens
gaaggagtggggggctcagttgtcatgggaggtgcatgaattcgtactgcagagtggctgctcaggggtctcctgtgttggcatgttatgtcaggttaagscattttagcattcttagttttctgaggaaactccacagaaagttttgctttatttcttagaagtaaggacagataccggtttctcacctgtcctctgctc

SEQ ID NO: 394620 - DNA, 201 bp, Homo sapiens
atagtgagacctggtctctacaaaaacaataaaatattagccaggtgtgatgatatgcacctgtagtctcagctacttggaggctagtaaggcaggaggawcacttgagcccaggagttctgggttgcaatgagctggttgtactaccgcactctagcctgggtgacagagtgcgaccctgtctctaataaaataaaaaag

SEQ ID NO: 394621 - DNA, 201 bp, Homo sapiens
agtgggccagttgggaacaaggcttggcgtcctcttcaggggggaacaccagggcaggcctgaggaggcctgtgtccccagcctgtcattgctgtggctcygcttctcagggagcctaggaagaaggtgtggcaagagcccgaggcgctggctgcacctggcggggcctgtgggcgtcagtttagacccatccattctcac

SEQ ID NO: 394622 - DNA, 201 bp, Homo sapiens
gtggggcctcggcttcacatcttttgttaaatggattttgtggctgttaggacactcttgagacccacatgtgaaaactgtcagtctgttatcacttaagrcagaagaaaattgcccttgactctgggctggcagcaggtggagacaaggcctgacagctttcctgccatgtggcacacactttgggagcagagccatagc

SEQ ID NO: 394623 - DNA, 201 bp, Homo sapiens
gggctggaggtgtggccggcccactgggttggtggtggtgggtgcccgtcacagggctggaggtgtggccggcccactgggttggtggtggtgggtgcccrtcacagggctggaggtgtggccggcccactgggttggtggtggtgggtgcccgtcacagggctggaggtgtggccggcccactgggttgtgctttctgcc

SEQ ID NO: 394624 - DNA, 201 bp, Homo sapiens
gcccgctgagccctggatccttcttggtgtcttatcctggccagcaagcaagtgtgagctcctgtgggtctccagaggcccatgaggaccagtgggccagktgggaacaaggcttggcgtcctcttcaggggggaacaccagggcaggcctgaggaggcctgtgtccccagcctgtcattgctgtggctccgcttctcagg

SEQ ID NO: 394625 - DNA, 201 bp, Homo sapiens
tgcccatgagctactgctacgccgttcggctgagtgccgcggaagacccgctggtccagagcctccgccaggtaggacctcatcagggaacaaagtgaagrcctctggggctgggacccacagggcctggggcttctggaatctaaccacacctgtccactcacctggtggccctgtggagcggagagccctgtggagcag

SEQ ID NO: 394626 - DNA, 201 bp, Homo sapiens
ggtgggtgagggagagactagcaggcggggagtgggctgaaggccatgcaggtggggcctcggcttcacatcttttgttaaatggattttgtggctgttasgacactcttgagacccacatgtgaaaactgtcagtctgttatcacttaaggcagaagaaaattgcccttgactctgggctggcagcaggtggagacaagg

SEQ ID NO: 394627 - DNA, 201 bp, Homo sapiens
tctcatgatgtaggagatgcttgggtttccaggcagctgccaggggttaggagtgattgcagctgtgggtgtggggtgggtgagggagagactagcaggcrgggagtgggctgaaggccatgcaggtggggcctcggcttcacatcttttgttaaatggattttgtggctgttaggacactcttgagacccacatgtgaaa

SEQ ID NO: 394628 - DNA, 201 bp, Homo sapiens
tttgtatttttttttttttttgagacagcgttcgctcttgttccccaggctggagtgcaatggcacaattttggctcgttgcagcctctgcctcctgggtscaagtgattctcctgcctcagcctcctgtagggtccagccccacagggtcggtaggtttttctccctgtgtgcggagatgagagattgtagaaataaaga

SEQ ID NO: 394629 - DNA, 201 bp, Homo sapiens
ttcttgctgctttggctctgggcttagctggctgggacccttcctgtgggctggctgtgagttggagtttttttgtatttttttttttttttgagacagcrttcgctcttgttccccaggctggagtgcaatggcacaattttggctcgttgcagcctctgcctcctgggtgcaagtgattctcctgcctcagcctcctgt

SEQ ID NO: 394630 - DNA, 201 bp, Homo sapiens
acagagataccagagtagggggcagggttagggtgccgctacctgaggcgggccgtagagcacataggttgggaggtgtcctggggccattcaaatgcccrctggactctgcgcctcgcccgtgtgtaatgagcggcagaggaaggactgagacggcagtcagcacagctgccagggcaggaggggtgtgggttccacacg

SEQ ID NO: 394631 - DNA, 201 bp, Homo sapiens
tagtgacttgtaatcacattgtttcaatgacgtgaattcctacataaataggttttgtttctgtgataactcttactgatacatcattttcttttactacrctgactttgtaatagatagaaagtccttatatacctttgttgcctttctttttaaaacatctcttacctgtgtctattcatttactcatccaaattgcct

SEQ ID NO: 394632 - DNA, 201 bp, Homo sapiens
ggatgggatggacattccaggtggaaggcccagcctatgccaaggggctgtaggtgggcagagtggtgggtggggagctgatatctgctgtgaacttcctyggggctattgcaggagagcttcaggttcaggctggtgagtaggaggagcatagcagttggactgcctgggtattgaactgatttggctacacaagactat

SEQ ID NO: 394633 - DNA, 201 bp, Homo sapiens
agcaggcgggtcacggtgaggaaggagtggggggctcagttgtcatgggaggtgcatgaattcgtactgcagagtggctgctcaggggtctcctgtgttgrcatgttatgtcaggttaaggcattttagcattcttagttttctgaggaaactccacagaaagttttgctttatttcttagaagtaaggacagataccggt

SEQ ID NO: 394634 - DNA, 201 bp, Homo sapiens
tagtggccccgaatgtctggctgtgctgttatttattggatacaaagcaaaaggggcagggtaaagagtgtgagtcatctccagtgataggtaaggtcacrtgggtcacgtgtccactggacagggggcccttccctgcctggcagccgaggcagagagaggagacacagagaaagacaacttatgccattatttctgcat

SEQ ID NO: 394635 - DNA, 201 bp, Homo sapiens
attggccaggtgcggtggctcacgcctgtaatccctacactttgggaggccaaggtgggcggatcacaaggtcaggagatagagaccatcctggctaacayggtgaaaccccgatgctactaaaaaatacaaaaaaaattagctgggtgtgctggcaggagcctgtaatcccagctactccggaggctgaggcaggagaat

SEQ ID NO: 394636 - DNA, 201 bp, Homo sapiens
atggtaagagtgtgtttagttctgtaagaagctgccaaactgtatcttaagtggctgcaccatttgcgtttccaccagcaatgatgagcgttttgttgctycacatcctcaccagcatttgctgttgtgttttgggttttagcctttctaagaggtgtgtagtggtatctccttgtttcaatttgcaattccctaatgaca

SEQ ID NO: 394637 - DNA, 201 bp, Homo sapiens
tcaaaaaaaaaagaaatggggtcatttccaggcatcaccatgactgaggtgcgccactgtcattgggtgagagcagctggatgctctatgtgtaggtgctrgagcctctaagggatcgtccagtcctagaagtgtcctcagagggacactgtcctgcctggtggcccatgaagaaagggagggctccctgagtctccccga

SEQ ID NO: 394638 - DNA, 201 bp, Homo sapiens
aggctgaggcagagaattgcttgaacccgggaagtggagggtgcagcgagccgagattgtgccactgcactccagcctgggtgacagagagaggctccgtytcaaaaaaaaaaaaaaaaaaaaagaactggaactgtttgttatgggcattctcgagccagtactggagaaaaacgagagtggatttttatgccggtggga

SEQ ID NO: 394639 - DNA, 201 bp, Homo sapiens
tccccttcggtcgctggcgaagtgggagtggtcaaccgctggcaggtggactggtcagctgcagtcatggaagtgtccccataggggtagagcaggtggcrcgcaggcttgtgggcctccagggccccaggcagctcttccaggctggtcctggctggcagtttgctctgctgcatgtgtctcttctcctgggtcaggggc

SEQ ID NO: 394640 - DNA, 201 bp, Homo sapiens
gtttgcaacattcataaattattatcgtccagagtccattgtttacattcagcttcctcttcatgttgttcattctgtggtttcacagatgtgtgatgcaygtgcccaccactgcagtgtcacacaggatctcactgccccggagtcctctgcgctgtccccgcctccagaaccccttagtagcaaacactgatattttta

SEQ ID NO: 394641 - DNA, 201 bp, Homo sapiens
tctcaaaaaaaaaagaaatggggtcatttccaggcatcaccatgactgaggtgcgccactgtcattgggtgagagcagctggatgctctatgtgtaggtgytggagcctctaagggatcgtccagtcctagaagtgtcctcagagggacactgtcctgcctggtggcccatgaagaaagggagggctccctgagtctcccc

SEQ ID NO: 394642 - DNA, 201 bp, Homo sapiens
ctgaggcagagaattgcttgaacccgggaagtggagggtgcagcgagccgagattgtgccactgcactccagcctgggtgacagagagaggctccgtctcaaaaaaaaaaaaaaaaaaaaagaactggaactgtttgttatgggcattctcgagccagtactggagaaaaacgagagtggatttttatgccggtgggaatg

SEQ ID NO: 394643 - DNA, 201 bp, Homo sapiens
tgtaggcacattgaggataagtccaccgtgtttgggactgcgctcaactatgtgtctctcagaattctgggtgttgggcctgacgatcctgacctggtacragcccggaacattcttcacaagaaaggtacggcatgtgcagcatgtgctgggccaggggttcgtgtcaactcgataatgagctctcacaaacgcgataca

SEQ ID NO: 394644 - DNA, 201 bp, Homo sapiens
gctctaccctcagggcttcatgacctgtcctcccacatgatccaggctctaccctcagggcttcatgacctgtcctcccacgtgatccaggctctaccctsagggcttcatgacctgtcctcccacgtgatccaggctctaccctcagggcttcatgacctgtcctcccacgtgatccaggctctaccctcagggcttcat

SEQ ID NO: 394645 - DNA, 201 bp, Homo sapiens
cactgtcattgggtgagagcagctggatgctctatgtgtaggtgctggagcctctaagggatcgtccagtcctagaagtgtcctcagagggacactgtcckgcctggtggcccatgaagaaagggagggctccctgagtctccccgacgtgtgtctgcctgcagggctcagccttctctgaggcccttgtcagccatgagg

SEQ ID NO: 394646 - DNA, 201 bp, Homo sapiens
tgaggcaggagaatggcgtgaacccgggaggtggagcttgcagtgagccgagatggtgccactgcactccagcctaggcgagagtgcaagacaccgtctcaaaaaaaaaaaaaagattttaaacttacctggagagtttttgagatacagtttggagttgcaagttactttaacactatttatatggaatattctatttta

SEQ ID NO: 394647 - DNA, 201 bp, Homo sapiens
ggtctctccctgtgtgcggcgatgagagagtgtagaaataaagacgcaagacaaagagataaaagacagctgggcccgggggaccactgccaccaatgcayggagaccagtagtggccccgaatgtctggctgtgctgttatttattggatacaaagcaaaaggggcagggtaaagagtgtgagtcatctccagtgatagg

SEQ ID NO: 394648 - DNA, 201 bp, Homo sapiens
cacagagtggtgggattgtgtgagatgccacagggaagcacatgtcagttgttgtcactgtgtagaacaatgagtcccggatgtggcccgcaggggagcartggtgacttaatcgcgggcttcctctgcatttctttggtgacttccaagctagaacattctttttttgtttatttgtttgaagcagggtctcactctgtt

SEQ ID NO: 394649 - DNA, 201 bp, Homo sapiens
gcttttttctcctcacaggatgggccttgacggcatgaaaatgcaggtaagggctgcgggactgcggctgcatgcttcctttgcaatcatgtctccccttyattatttttcctttggggttcagaaataactcctcctggaccaggtcccggcagcgtgcgactagaggctgagtcagttgaggcctctggccgtgtccct

SEQ ID NO: 394650 - DNA, 201 bp, Homo sapiens
tttttctaatgttaagacacctttgtatttctgagatcgaccttagtattggtctatatttaagacagtattcagtttctcagttgttttttgttttttgktttttttttttgagacagagtctctgtctcccaggctggagtccagtggcacaatctcagctcaccgcaagctctgcctcccggattcacgccattctcc

SEQ ID NO: 394651 - DNA, 201 bp, Homo sapiens
acctgcctgggtcagcccccatccctgccccttctggctgtctgacctggcctggtgacttctcttctctgctcatctctctccctgcctgagtgggcaasagtacagcctcacagagtggtgggattgtgtgagatgccacagggaagcacatgtcagttgttgtcactgtgtagaacaatgagtcccggatgtggcccg

SEQ ID NO: 394652 - DNA, 201 bp, Homo sapiens
agcttccgctgtacaggcctcttcctctggtgcctcagcactgcacgagggcggcagggctggcacagcctggggtcggggagcctcccgctgccccttgscttgggtgtggcccttctgggtgagtgtgtcctgttttccatagagtgtggccctcacccccaggagcccagcagcccagctggggtggcatccaggcca

SEQ ID NO: 394653 - DNA, 201 bp, Homo sapiens
ctaccgagatgggtgagtgagtgcctgtcctctggtgggtgggggttctcaacccaatgctctgtcatgagtgttttttgctttgacatttggttttagggtttgtttgtttgtttgtttgtttttgagacggagtctcgctctgtcaaccgggctgacatgcagtggcatgatcctagctcactgcagtctcaaactcgt

SEQ ID NO: 394654 - DNA, 201 bp, Homo sapiens
tccccattttaaccttaactggtattttcttgttaaatatttattcatgaccattattattccctagagccacatggcttggggtccacctgcctgggtcmgcccccatccctgccccttctggctgtctgacctggcctggtgacttctcttctctgctcatctctctccctgcctgagtgggcaacagtacagcctcac

SEQ ID NO: 394655 - DNA, 201 bp, Homo sapiens
tcccggactatctctggtgagtgtggctgggatatgctggcggggcctctcacgaagactggatctgagccccagctgcatcccagtgagggggcccccayggtgccatctgggaatactgccagggaatacctccaggaaccagcagtgtcagggcttgtggaagccactgagggttgtctttgaattggaagatttgcc

SEQ ID NO: 394656 - DNA, 201 bp, Homo sapiens
taccgagatgggtgagtgagtgcctgtcctctggtgggtgggggttctcaacccaatgctctgtcatgagtgttttttgctttgacatttggttttagggtttgtttgtttgtttgtttgtttttgagacggagtctcgctctgtcaaccgggctgacatgcagtggcatgatcctagctcactgcagtctcaaactcgtg

SEQ ID NO: 394657 - DNA, 201 bp, Homo sapiens
atctgctgttgctgtttggtctccacatttccatggcggcttgctgcccctttcacgcctggcccactttgtgcctggtgaggtttctaaaagccccaccmttgagcgcgctcctccagcacgagcagtaatggcacaggtgttgtgtcattttactcagtagcctctgggttatttttcagttttccttgttgtttttta

SEQ ID NO: 394658 - DNA, 201 bp, Homo sapiens
accgagatgggtgagtgagtgcctgtcctctggtgggtgggggttctcaacccaatgctctgtcatgagtgttttttgctttgacatttggttttagggtttgtttgtttgtttgtttgtttttgagacggagtctcgctctgtcaaccgggctgacatgcagtggcatgatcctagctcactgcagtctcaaactcgtgg

SEQ ID NO: 394659 - DNA, 201 bp, Homo sapiens
atggagctccaggctgaggccagtgtcatggtgtctggcatccactgacccctgtcccctgtagcgctcctcaacctgtatgagcaccaccacagtgcccrcctgcggcagcgggccgtgcagaagctgtatgaacacattgtggccgacgaccgattcaccaagagcatcagcatcggcccggtcagtgcccctgcccgg

SEQ ID NO: 394660 - DNA, 201 bp, Homo sapiens
ttatcattccttccatatgtattagttggtgttcttccaaaagcttttcctttgcctctgtttatttacttatttatcactgtggacgcatagattcttaygcaattgattttgatactgatctcatagctagacaattttgctaaacttttaaaaaaatttatgtactttatcttttatagcagctttaaatttacagaa

SEQ ID NO: 394661 - DNA, 201 bp, Homo sapiens
tttttggaagccgtggatggagcaggggttttcttgtgcttcacaggtgcagctaggagggcactgtgtccagggtcttctgtcggcctggcgtggccctyggccatgtgctgctctgcggcatgaggtgggcgtgagttgtcctcagccacatttagagaattggccttttaaaaaatagatcatcttttaaaaatcact

SEQ ID NO: 394662 - DNA, 201 bp, Homo sapiens
gagggggaaaccctggggaagggcaagtccaggcgttgcagtgcatggagctccaggctgaggccagtgtcatggtgtctggcatccactgacccctgtcycctgtagcgctcctcaacctgtatgagcaccaccacagtgcccacctgcggcagcgggccgtgcagaagctgtatgaacacattgtggccgacgaccgat

SEQ ID NO: 394663 - DNA, 201 bp, Homo sapiens
ccgagatgggtgagtgagtgcctgtcctctggtgggtgggggttctcaacccaatgctctgtcatgagtgttttttgctttgacatttggttttagggtttgtttgtttgtttgtttgtttttgagacggagtctcgctctgtcaaccgggctgacatgcagtggcatgatcctagctcactgcagtctcaaactcgtggg

SEQ ID NO: 394664 - DNA, 201 bp, Homo sapiens
aggtgtgagccaccacactggcctttgctattttctttctcctttatttttctaacttgaatacttagatatttgattttcaggcttttattgaaatatgmatttgaggctataaatgagttttgagatatcattcagttaaatgtgtgttctggtgcttgctgtggtagcacagatactaaaagtgttttctgtttctac

SEQ ID NO: 394665 - DNA, 201 bp, Homo sapiens
  misc_feature (1)...(201): n = A,T,C or G
actcatggaaacatgcaagaggcttcggatgttgtggaatccagtcatatgccctaaagcatacaaaatatctgttaggggctcagaatagcacagttatnatacaaaaatggattttctctctcttttaataatgttaagaagacatcacatacctgactccaccggtgtcccagaaacggtttttaagtaacctttcct

SEQ ID NO: 394666 - DNA, 201 bp, Homo sapiens
gcccatccccaaggcgagcgcccacgggaactgcgttcgcgggcccctccgcttcagccccttcatctctaaaccacgcataggagactcctaatgttttmttttttagcaccttattttgagataatttttgacttataggagagttgcaaagatagttgtaactttgtttttattcacaaaaagtgtttggatccactg

SEQ ID NO: 394667 - DNA, 201 bp, Homo sapiens
tgtggtaaggctgtggtcccagcagccccgtccatacctcgtgtcctgcagatgagctgcgtgctcacttccactcctgtgggctccagcccagcacacaktccggccaggccgtaggagcttgtccttggatggtgtctatatgtggagaactgtgagctctggctggacccctaggggccttgctgggctgtgtgcaca

SEQ ID NO: 394668 - DNA, 201 bp, Homo sapiens
gggcgattggggacgagctccacacatggagaacctggcctcgcctcgcaagaccgcgggacgcgcagatgtgaagtgcgcctgcgcggggcgcagccccwgctgcagacgatctgtgagcgacgcgccggcgcaagtcgagggcggtggcttggcttccctggaatgggggacgtcttaggactgcgcctgcgcggggcg

SEQ ID NO: 394669 - DNA, 201 bp, Homo sapiens
ttaggactgcgcctgcgcggggcgccgggccctgggcggggccttcccggctgacggcctgcgtgcactgcgcttgcgcgggttgagggcggtggctcagkctcctggaaaggaccgtccacccctccgcgctggcggtgtggacgcggaactcagcggagaaacgcgattgaggtaggtgtcctgatgggcagctcagat

SEQ ID NO: 394670 - DNA, 201 bp, Homo sapiens; identical to SEQ ID NO: 86654

SEQ ID NO: 394671 - DNA, 201 bp, Homo sapiens
atgatattgtaaacatcaagtacattaaacagtgtacattaagctatatatatgtgtgtgtatatacatatatgtgtgtgtgtgtgtgtatatatatatgtatatgtaaaaaatactgtcgggtgtgtctgtagttcagctactcaggaggctgaagcaggagaatcacttggggccgggagtttgaggatgtggtgtatt

SEQ ID NO: 394672 - DNA, 201 bp, Homo sapiens
aatgatattgtaaacatcaagtacattaaacagtgtacattaagctatatatatgtgtgtgtatatacatatatgtgtgtgtgtgtgtgtatatatatatgtatatgtaaaaaatactgtcgggtgtgtctgtagttcagctactcaggaggctgaagcaggagaatcacttggggccgggagtttgaggatgtggtgtat

SEQ ID NO: 394673 - DNA, 201 bp, Homo sapiens
catttttttttttttttttttttgagacggagtctcgctctgtcgcccaggctggagtgcagtgatgcgatctcggctcactgcaagctccgcctcctggrttcacaccattctcctgcctcagcctcccgagtagctgggactacaggtgaccaccaccacgcccggctaattttttgtatttttagtagagacggggtt

SEQ ID NO: 394674 - DNA, 201 bp, Homo sapiens
ggtgacagagggtgacctcatctcaaaaaaaaaaaaaaaaagcgtattcttcaaccctggcattctatcctgcagaaataaaatgtcatcacataagcttrtctgtgcacagacttcttttattgcagcatcggttatggtggtagaaaactggataccaagacaaagtctatcaaagggggatggctgaagaatcaagcg

SEQ ID NO: 394675 - DNA, 201 bp, Homo sapiens
tgcatttctgtaatgaccagtgatgaagagttttttttcacgtttattggccgcattaatgtcttcttttgagaagggttcatttctcttcattattttttctctaatcttatcttcacactttatttcattaagttgatcttcagtctctgatatcctttcttttacctgattgatttggctattgatatttgtgtatgc

SEQ ID NO: 394676 - DNA, 201 bp, Homo sapiens
tgtctgtgcacagacttcttttattgcagcatcggttatggtggtagaaaactggataccaagacaaagtctatcaaagggggatggctgaagaatcaagyggaattcctgctatggaatatcgtatagccattgaaggtagtaaatcagggttctaacagttggagagtttttccagaaggtattgtgtaagaaaagcaa

SEQ ID NO: 394677 - DNA, 201 bp, Homo sapiens
ttgcatttctgtaatgaccagtgatgaagagttttttttcacgtttattggccgcattaatgtcttcttttgagaagggttcatttctcttcattattttttctctaatcttatcttcacactttatttcattaagttgatcttcagtctctgatatcctttcttttacctgattgatttggctattgatatttgtgtatg

SEQ ID NO: 394678 - DNA, 201 bp, Homo sapiens
tatacgtgtacacagggctttgtgtgtgacatgggcatggtggaggtgtggaaggccgcacaccggggggttagtaagggttgcctgggctgggtggatcrgggatggggtggagagcaagcagagggcagtgctgccttagagtgagtcatgctcctggcatagggaaaagcacgaagggtacaaatagacagtaaggta

SEQ ID NO: 394679 - DNA, 201 bp, Homo sapiens
gagtgagagtgtgggaagattggtggttccctctcagcaagcggtccagggaacacctttctggagagcactgggtggtaaaaccaaaagccacatagtcycagtccatcaggttcacattcagagacttaccctaagaagattaaggtacatacagaatgatttatgttgaaagaagttcatcttaacatgatttagaat

SEQ ID NO: 394680 - DNA, 201 bp, Homo sapiens
tgggaagattggtggttccctctcagcaagcggtccagggaacacctttctggagagcactgggtggtaaaaccaaaagccacatagtctcagtccatcargttcacattcagagacttaccctaagaagattaaggtacatacagaatgatttatgttgaaagaagttcatcttaacatgatttagaatagtaaaaactg

SEQ ID NO: 394681 - DNA, 201 bp, Homo sapiens; identical to SEQ ID NO: 86650

SEQ ID NO: 394682 - DNA, 201 bp, Homo sapiens
aagttaaatgaagaggtattcagatgcgtagggccacacaagacctgtgtgtgaagctcacagcccagccagttctgcctcaagcatgatgtaaagatacsaggcatggagtggggaccctcagccaggggcagaagcacctgttctggtttctacttggaatgtagaacccacccagttaatgaaaagtaaggctaccaa

SEQ ID NO: 394683 - DNA, 201 bp, Homo sapiens; identical to SEQ ID NO: 86651

SEQ ID NO: 394684 - DNA, 201 bp, Homo sapiens
ggtggaggatgtggtgctgcccgagaaggtggacgtgctggtgtctgagtggatggggacctgcctgctggtgagggcgggcgtgcgggcagctgggggcyggagctggggggcttctgagcacgggctcggctgggccaacctcaggatctcaagggtcgtgcgtgattcattttgatgttttccctaatgtgaggtcta

SEQ ID NO: 394685 - DNA, 201 bp, Homo sapiens
gcccctctgggtcggaccccaagccgagccccccaaccccgcggctgggctgggcgattggggacgagctccacacatggagaacctggcctcgcctcgcwagaccgcgggacgcgcagatgtgaagtgcgcctgcgcggggcgcagccccagctgcagacgatctgtgagcgacgcgccggcgcaagtcgagggcggtgg

SEQ ID NO: 394686 - DNA, 201 bp, Homo sapiens
gcggcgctcgcaagtggtcagcataacgccgggcgaattcggaaagcccgtgcgtccgtggacgacccacttggaaggagttgggagaagtccttgttccyacgcgcggacgcttccctccgtgtgtccttcgagccacaaaaagcccagaccctaacccgctcctttctcccgccgcgtccatgcagaactccgccgttc

SEQ ID NO: 394687 - DNA, 201 bp, Homo sapiens
agcctgggtgacagagggtgacctcatctcaaaaaaaaaaaaaaaaagcgtattcttcaaccctggcattctatcctgcagaaataaaatgtcatcacatmagcttgtctgtgcacagacttcttttattgcagcatcggttatggtggtagaaaactggataccaagacaaagtctatcaaagggggatggctgaagaat

SEQ ID NO: 394688 - DNA, 201 bp, Homo sapiens
ggggcagaagcacctgttctggtttctacttggaatgtagaacccacccagttaatgaaaagtaaggctaccaaatatatcaagctatatctgcttggacrtagctttgtttactttgtgacaggaatttcttagagtcagcctccagtaactcagttggcatagttgagttacaatgaagaggctgttgagaaattctct

SEQ ID NO: 394689 - DNA, 201 bp, Homo sapiens
agtctatgagaaaatttcctaaaactagtgagtgagtttaacaagatcacagagtgcaaggtcatcatacagaagtcatttttatatcttagcaatgtacwattagaaattaaagaatatcacagtagcttcaaaaatatgaaaggcttagaaatctaacaaaatgtgatctggatgctgaaaatgatgagatgataatga

SEQ ID NO: 394690 - DNA, 201 bp, Homo sapiens
tattcctttttggcaacacaaaaatggactaagagaactagagtagctgatagaattttttaaaagaagggtaaagttggaggaactatactacttgattytgaagctacagtaatcaggacaatgtggtgaagggacagacacgtaagtcaatggaatggagacgagagatttctacaaatatggtcaatgggttttttt

SEQ ID NO: 394691 - DNA, 201 bp, Homo sapiens
ataactgaaaaaataagattgaaaaataagatgtatatattttttgtgtgcgtgtgtagaaaaatacttgaaggtaaactgcagagtgataacagtggttycttctaggtactgggttaatatgtgatttttatgtttgtttgagcttttctaagttttctacattttccgtacaaaacatgtattacttctgtaataaaa

SEQ ID NO: 394692 - DNA, 201 bp, Homo sapiens
  misc_feature (1)...(201): n = A,T,C or G
ttgcatggtacactggcctaggcaggaatattcttgaggctaaaactgtagaactgtcagactagtgttacgaatgtggtggtgagaggcctgtgcagccncggggcctgtgatgtgtctcctgtgtgtctttcactcctatgcagtttgagttcatgatcgagtccatcctgtatgcccgggatgcctggctgaaggagg

SEQ ID NO: 394693 - DNA, 201 bp, Homo sapiens
tttgggacacatttccccgccagcaccctgggcatgtgtggcagtggagctgccttcagggccctgcaggccttccctttgggtggggttggctaccccgstctggcacctgccccgctgacttcccagcgtggtggccccgcgaggggaccccggctccagggaggtcgcagaggtgcggggttgatggcctggcctggc

SEQ ID NO: 394694 - DNA, 201 bp, Homo sapiens
caccctctcaagggtgatgtcctgacttgtaactgtcgattactcttgcctgaatggagttgtacacgtgttcttttgtgtctgccttctttaattaaacattgtttgtgagactcatctatgaattttagacagtgtggttgtggttgactttttcattgtggcatagtattcaactgcatgaatagaccacagtttatg

SEQ ID NO: 394695 - DNA, 201 bp, Homo sapiens
gcgcactgcggcctccactccgaccccgtcccagtttggacccaggtcttccaatgaaaatataattatgcaaatcagtaagcatttgtaactacgaatawcacaaaaataagcttcaagtctggatttagaagtgaagcatgcattttaaacaaagaattgctatgcaattttaaaaacacattgatcccagagcagtgt

SEQ ID NO: 394696 - DNA, 201 bp, Homo sapiens
cacgcggaaggcggccagcggatcccggtgcgcgcagctcccagcgctggggttccagcgccccgcctcttcctgtagcaaccagcgggacctgccgtccsccggggcaccccgaggggtctgcgcccgcttctttccgaaacgggaaggcgctgggggctcggcagccagagggacgggttcagggagcgtccggtgagc

SEQ ID NO: 394697 - DNA, 201 bp, Homo sapiens; identical to SEQ ID NO: 86652

SEQ ID NO: 394698 - DNA, 201 bp, Homo sapiens
tgagccgagatcacgtcactgcactccagcctgggtgacagagcacaaaagacaggcatgactttgtacttaactgctcagctttgtaatcactgggggcycagatgctcacttggattctaactttgttggcatctgggcctaaaagccgtgatgcaggtgagcaatgatgcagagggctctgtgcgcctggcgggctct

SEQ ID NO: 394699 - DNA, 201 bp, Homo sapiens
atgagccgagatcacgtcactgcactccagcctgggtgacagagcacaaaagacaggcatgactttgtacttaactgctcagctttgtaatcactgggggyccagatgctcacttggattctaactttgttggcatctgggcctaaaagccgtgatgcaggtgagcaatgatgcagagggctctgtgcgcctggcgggctc

SEQ ID NO: 394700 - DNA, 201 bp, Homo sapiens
gacaggaccatgtggtggttttctccagtgcaggcagtggagggggaaggcggagctttgcaggtgagggcttgaggcagttccgacttcagactcccccscagggagactgagggaccaccaccatcattactcaggccaaggaggcccagaacagggcagacggggctgcaagagttcctatggcgatagttgttgggg

SEQ ID NO: 394701 - DNA, 201 bp, Homo sapiens; identical to SEQ ID NO: 86659

SEQ ID NO: 394702 - DNA, 201 bp, Homo sapiens; identical to SEQ ID NO: 86648

SEQ ID NO: 394703 - DNA, 201 bp, Homo sapiens; identical to SEQ ID NO: 86662

SEQ ID NO: 394704 - DNA, 201 bp, Homo sapiens
acatggagaacctggcctcgcctcgcaagaccgcgggacgcgcagatgtgaagtgcgcctgcgcggggcgcagccccagctgcagacgatctgtgagcgasgcgccggcgcaagtcgagggcggtggcttggcttccctggaatgggggacgtcttaggactgcgcctgcgcggggcgccgggccctgggcggggccttcc

SEQ ID NO: 394705 - DNA, 201 bp, Homo sapiens
tctttaattattcataaaatgttttaattccgtggacatcttatttttcttttgagaaatttaacaaatattaggacatttccagaatgatattgtaaacrtcaagtacattaaacagtgtacattaagctatatatatgtgtgtgtatatacatatatgtgtgtgtgtgtgtgtatatatatatgtatatgtaaaaaata

SEQ ID NO: 394706 - DNA, 201 bp, Homo sapiens
cacatagtctcagtccatcaggttcacattcagagacttaccctaagaagattaaggtacatacagaatgatttatgttgaaagaagttcatcttaacatratttagaatagtaaaaactgaaaagtctaaatgtacaagactaggaaactggataggtaagtcctgataattcatagactggatattaaatagtgttaga

SEQ ID NO: 394707 - DNA, 201 bp, Homo sapiens
taggcaagacacgctgcaactccccttgtcctctgggttatgaggggtgagcgttggtttccgtgtgctcagatcccatgaatgagacctcacagggaagygcccagtgactggcaggctccttaatgcctccaggtcaggctcaggaagtctctggatgcctgggtagagtctgggtcttctcagagcgggaggcaccca

SEQ ID NO: 394708 - DNA, 201 bp, Homo sapiens
gcacactcagcagtctcccactagccagtggcactgcaggtgcaggggctgcctcctggacctttcaggacgctttgcaaggtcactgaggatctccattrcacatttggtagaattaaaagactgccagactcagtcttactgttgttagtgtattcgtgctgtcaatatgtgatgaggacatattatattccgttattc

SEQ ID NO: 394709 - DNA, 201 bp, Homo sapiens
tacaggaggttttaattttcttctgtgtacttggtgttttcacacattttctaaagtaaacacgaattacttttatgtttaggaaaatgtgtttaaaatgyatgtattgagacaaggttgattcattgaactggagtgtgtgatctgaggttctgccccctgcagtgatgtcttccaggcaagcttattcttatataaagt

SEQ ID NO: 394710 - DNA, 201 bp, Homo sapiens
ttgaactggagtgtgtgatctgaggttctgccccctgcagtgatgtcttccaggcaagcttattcttatataaagtgaacggccaggcatggtggctcatrcctgtagtcctagcactttgggaggatgaggcaggtggattgcctgagctgaggatttcgaggccaacctgggcaacatggtgaaaccccatctctacta

SEQ ID NO: 394711 - DNA, 201 bp, Homo sapiens
tgacctgggaagttggctgagcaatcctctaatatctgatgctcccgatgctgaggttgtggggaagtgtgcaccgccatgccctttttttggcagtgtarattggtaaagccttttgaaggaaaatagggcagaataagtcaaagagcattaaaatttttttgtttttccagaagcagcaaagttctgaaggagacgcaa

SEQ ID NO: 394712 - DNA, 201 bp, Homo sapiens
ctgcccgagaaggtggacgtgctggtgtctgagtggatggggacctgcctgctggtgagggcgggcgtgcgggcagctgggggccggagctggggggcttytgagcacgggctcggctgggccaacctcaggatctcaagggtcgtgcgtgattcattttgatgttttccctaatgtgaggtctaattaatttcttgtgtg

SEQ ID NO: 394713 - DNA, 201 bp, Homo sapiens; identical to SEQ ID NO: 86664

SEQ ID NO: 394714 - DNA, 201 bp, Homo sapiens; identical to SEQ ID NO: 86660

SEQ ID NO: 394715 - DNA, 201 bp, Homo sapiens
agatcacgtcactgcactccagcctgggtgacagagcacaaaagacaggcatgactttgtacttaactgctcagctttgtaatcactgggggcccagatgytcacttggattctaactttgttggcatctgggcctaaaagccgtgatgcaggtgagcaatgatgcagagggctctgtgcgcctggcgggctctgtttgcc

SEQ ID NO: 394716 - DNA, 201 bp, Homo sapiens
gagatcacgtcactgcactccagcctgggtgacagagcacaaaagacaggcatgactttgtacttaactgctcagctttgtaatcactgggggcccagatrctcacttggattctaactttgttggcatctgggcctaaaagccgtgatgcaggtgagcaatgatgcagagggctctgtgcgcctggcgggctctgtttgc

SEQ ID NO: 394717 - DNA, 201 bp, Homo sapiens
tgtattaggtataccgatagaagtacatcttatagattcctaagacctctttttttttttctatcttagacttgcaaactcttgatcatctgtgtcattgycctggcagttgccggctaaatagccctaaatctgcatattaaaggaaactattagatgaaaaattagatagcaaaatttacattttaaggtacagagagg

SEQ ID NO: 394718 - DNA, 201 bp, Homo sapiens
cctctgggtcggaccccaagccgagccccccaaccccgcggctgggctgggcgattggggacgagctccacacatggagaacctggcctcgcctcgcaagrccgcgggacgcgcagatgtgaagtgcgcctgcgcggggcgcagccccagctgcagacgatctgtgagcgacgcgccggcgcaagtcgagggcggtggctt

SEQ ID NO: 394719 - DNA, 201 bp, Homo sapiens
gggggctcaccggtgactccatggtcttgttgagcaccctgcacgtggggctcagggtcggtaaaatagcagtgcgtggagaccgcgtgctagaggccgtrgcgcccgcgtacaatgagtcgcagacagcacagacgggagtagggcagaatagacaatatcccgtgaattgcgtggggcggggtatgttctgtgagacgt

SEQ ID NO: 394720 - DNA, 201 bp, Homo sapiens
gatgaaggacaagggctcctcaccaaatagacactagtggtgcctgtttctgacttcttgctttgatgttctcttttagggtccagataattttttttttyagaaaagaaatgtagagtgaaggtgacagcctttgattatagtagtaaagatgatccaaatagtttgtataataaatacttggacacatgaatctgtatt

SEQ ID NO: 394721 - DNA, 201 bp, Homo sapiens
gaatttttgctgctgtttgacatgtctcatgctctattcttattttttttttcattttgtgcttcagtttggaaaatttctgttgacctgactcttgaggygctgatcataaacaagataactgggaaaacaatatgtttgtaaaacaatttcttgagatgtgaaatagtatctatattgtaccaagagtagtcccagcta

SEQ ID NO: 394722 - DNA, 201 bp, Homo sapiens
tgccactgcactccagcctaggcgacagagcgagactccatcctaaaaaaaaagccaaacaaagaaacagcctgtgtgtgtgtgtgtgtgtgtgtgtgtgtatacgtgtacacagggctttgtgtgtgacatgggcatggtggaggtgtggaaggccgcacaccggggggttagtaagggttgcctgggctgggtggatcg

SEQ ID NO: 394723 - DNA, 201 bp, Homo sapiens
gtgccactgcactccagcctaggcgacagagcgagactccatcctaaaaaaaaagccaaacaaagaaacagcctgtgtgtgtgtgtgtgtgtgtgtgtgtgtatacgtgtacacagggctttgtgtgtgacatgggcatggtggaggtgtggaaggccgcacaccggggggttagtaagggttgcctgggctgggtggatc

SEQ ID NO: 394724 - DNA, 201 bp, Homo sapiens
tgtgccactgcactccagcctaggcgacagagcgagactccatcctaaaaaaaaagccaaacaaagaaacagcctgtgtgtgtgtgtgtgtgtgtgtgtgtgtatacgtgtacacagggctttgtgtgtgacatgggcatggtggaggtgtggaaggccgcacaccggggggttagtaagggttgcctgggctgggtggat

SEQ ID NO: 394725 - DNA, 201 bp, Homo sapiens
ttgtgccactgcactccagcctaggcgacagagcgagactccatcctaaaaaaaaagccaaacaaagaaacagcctgtgtgtgtgtgtgtgtgtgtgtgtgtgtatacgtgtacacagggctttgtgtgtgacatgggcatggtggaggtgtggaaggccgcacaccggggggttagtaagggttgcctgggctgggtgga

SEQ ID NO: 394726 - DNA, 201 bp, Homo sapiens
cttgaagtggggagttcgagaccagcctggccaacatgatgaaaccccatccatttctaccaaaaatgcaaaaattagccgggcgtagtgacacacgcctrtagtcccagcctctcgggaggctgaggcatgcgaattgcttgaactggggaggtggaggttgcagtgagccgagattgtgccactgcactccagcctagg

SEQ ID NO: 394727 - DNA, 201 bp, Homo sapiens
aattaaagctatcacacttctaagaaattaatgaatactgatttattgccttaagtcgacacctgatctaacagaaactaacaggcttcagcaaatgaacragattaacaccttgcagactagtgaagaaaacacactatttgaagtttatgatttttaaatgcttttgtctctgtaaagtattgtaaattttcatttcta

SEQ ID NO: 394728 - DNA, 201 bp, Homo sapiens
acatcaagtacattaaacagtgtacattaagctatatatatgtgtgtgtatatacatatatgtgtgtgtgtgtgtgtatatatatatgtatatgtaaaaaatactgtcgggtgtgtctgtagttcagctactcaggaggctgaagcaggagaatcacttggggccgggagtttgaggatgtggtgtattatgattgtgcct

SEQ ID NO: 394729 - DNA, 201 bp, Homo sapiens
tcctgtgtgttcaacccagagatatgcaagctgtgttcacacaaaaacctgtatgtgaatgattatactagctctctttataattgcaaaaaaaaaaaaaacaaaacctggaaacaacccaagtgtccttcatctggataatccttaaggataaactggtgcgtccacacagtggaataccactgagcagtgaagaggagc

SEQ ID NO: 394730 - DNA, 201 bp, Homo sapiens
ttgtaaacatcaagtacattaaacagtgtacattaagctatatatatgtgtgtgtatatacatatatgtgtgtgtgtgtgtgtatatatatatgtatatgtaaaaaatactgtcgggtgtgtctgtagttcagctactcaggaggctgaagcaggagaatcacttggggccgggagtttgaggatgtggtgtattatgatt

SEQ ID NO: 394731 - DNA, 201 bp, Homo sapiens
attgtaaacatcaagtacattaaacagtgtacattaagctatatatatgtgtgtgtatatacatatatgtgtgtgtgtgtgtgtatatatatatgtatatgtaaaaaatactgtcgggtgtgtctgtagttcagctactcaggaggctgaagcaggagaatcacttggggccgggagtttgaggatgtggtgtattatgat

SEQ ID NO: 394732 - DNA, 201 bp, Homo sapiens
tattgtaaacatcaagtacattaaacagtgtacattaagctatatatatgtgtgtgtatatacatatatgtgtgtgtgtgtgtgtatatatatatgtatatgtaaaaaatactgtcgggtgtgtctgtagttcagctactcaggaggctgaagcaggagaatcacttggggccgggagtttgaggatgtggtgtattatga

SEQ ID NO: 394733 - DNA, 201 bp, Homo sapiens
gtgttcaccgtgttgccgtgttccagggctgcccagtggccggattggccagactgtgttgcatcagggaggcagaggccagatgtagggaactgtgtgtstgaggactttgtgccacgtcctggacaccgaagggagtgccactggtgtgtgagtgatggagtaagaggtgggctgtgttttggaggcccctgggtatgt

SEQ ID NO: 394734 - DNA, 201 bp, Homo sapiens
tccctgctgccgctctccagcgtccccgggtgcagaccctctgccgccacagctggagactcccaaaggaggcaagcaagcctcagcgatcccaggaggcyccatcggcccttcccaggctttcctctctttaagctcctcctccttcttccctttcttcagaatcgaatctaggcaaggatttcacagtctgagctttga

SEQ ID NO: 394735 - DNA, 201 bp, Homo sapiens
gatttaaaaaatgcctttatgagaaatttaagtcaaagttcatgtaacattttcatgagtgatttacatgaactgtgttctcctcggggatctgtaaaaaycctgtgcctaacaggtaaggctgtttctttaatgccagtagggccttcgtccctggccagggtctcctcgccttagactggccccagtgatgctgtgaag

SEQ ID NO: 394736 - DNA, 201 bp, Homo sapiens; identical to SEQ ID NO: 86661

SEQ ID NO: 394737 - DNA, 201 bp, Homo sapiens
agtctggatttagaagtgaagcatgcattttaaacaaagaattgctatgcaattttaaaaacacattgatcccagagcagtgtgtggattacactatcacyggaaaaatacgaattgagaagaaggaaaagactggaagatgcagaccttggttcctgttagtggaaacactgtaaggtcccaggtagggacttttaattg

SEQ ID NO: 394738 - DNA, 201 bp, Homo sapiens; identical to SEQ ID NO: 86656

SEQ ID NO: 394739 - DNA, 201 bp, Homo sapiens
cctgtaacactcactgccaaggtgtgtagcttcactcctcaagtcagcgagaccaccaacccaccgggaggagctaacagctgtgctacgcgccacctgtragagctgtaacactcgctgcgaaggtcggcggcctcacggggaggaagaaacagctcccgacgcgccacctgtaagagcttaacgctcactgtgaaggtc

SEQ ID NO: 394740 - DNA, 201 bp, Homo sapiens
aaacgcaccaatcagcactctttaaaaacggaccaatcagcactctgtaaaatggaccaatcagcactctgtaaagtggaccaatcagcaggatgtgggcrgggccaaataagggcataaaagctggccaccgaaaccagcaagcgccaaccgtggcgggttctgttccaagctgtgggggctttgttcttttgctcttcg

SEQ ID NO: 394741 - DNA, 201 bp, Homo sapiens
agcaaggcagggcccttctttagaagcctgcaattccaggaaaggaggcctgcaagaatctcaggaacacagtgatgagtgctctcaggcaggccagagasgacccgtttcagccacagcataagacagaaacaccatcttcagataacacccactcaggcaggcagtgaccccacctccctccaaacgggacaggaacat

SEQ ID NO: 394742 - DNA, 201 bp, Homo sapiens
ggtgcctgctggggcggggcccacagggctcctggcggggcagaggtggggggtgccagccacgcccctgccctgctccccgcaaaagcacctgtgtgctyggggcagggggcggctgccgcaagggtgggacccgcgggttccgaggctttcctggtggtggagacgcgccgaggccgtttccactccaagccccttttc

SEQ ID NO: 394743 - DNA, 201 bp, Homo sapiens
ggagggagcccctccacctgcgtcctccaggaactgagtcctggaccccctgccggtccaggcctgaccgccgggctctcctgcagtttacctgtacggcraggcagccaggatggacagtcgccggaccctgccggccatccgggccggggagtacgaggccctccctaagaaggtgcccccaccccgggcggtcgggcc

SEQ ID NO: 394744 - DNA, 201 bp, Homo sapiens
ggctacagccgcgacgtgcacccggcgttcagcgagttcctcatcaacacctacggaatcctgaagcagcggcccgacctgcgcgccaaccccctgcacarcagcccggccgcgctgcgcaagctggtcatcgacgtggtgccccccaagttcctgggcgactcgctgctgctgctcaactgcctgtgcgagctctccaag

SEQ ID NO: 394745 - DNA, 201 bp, Homo sapiens
cactctagcctgggcaacagaacgacaccctgtctctaatgtaaacatatgtatataaaacataggaacaattttatgtttagaaatttaaaataaggtgmataattaaaaaacaagtaggaaaagtacatagatgaaaatgtaatcaagggacaggaaggaaacaagacgtgtggtttagagaaccatgagcggggacag

SEQ ID NO: 394746 - DNA, 201 bp, Homo sapiens
gtcagcgtggatgagtgtgtgctctgcgcccaggcctttggccagaggctggcagaggagctggacgtgccaggtgagcgtgcccccccgcccccctcacyctgctcccgtctcattggtgtgggttattggctccttctgtatcccccagttccctgcccttgactgctcttgcaagggcagagtgttccaaaaagccaa

SEQ ID NO: 394747 - DNA, 201 bp, Homo sapiens
cacctggcctcctgcccggcctcgccgtctctctgcaggagagcacccccgcatgggggccctagacgtctgccccttcatccccgtgaggggcgtcagcrtggatgagtgtgtgctctgcgcccaggcctttggccagaggctggcagaggagctggacgtgccaggtgagcgtgcccccccgcccccctcactctgctc

SEQ ID NO: 394748 - DNA, 201 bp, Homo sapiens
ggctgatggggcagcttgagtggctaaggcccaggccatggaggaggtggtgggcttggtgtcccgggtcgtcttcccaggatgggcagagccgctgcccrtgggccccaaggacatcccgtggctcagggccctggggagtgcctgacccaggggtgggtggaacacgactggtgcttgtgggggctgaggcttggctgt

SEQ ID NO: 394749 - DNA, 201 bp, Homo sapiens
tttgtaaacacaccagtcagcactgtgtctagctactggggtgggaacttggagaacttctctgtctagctaaagtattgtaaaaacgcaccagtcagtgstctgtgtctagctaaaggtttgtaaacgcaccaatcagcactctttaaaaacggaccaatcagcactctgtaaaatggaccaatcagcactctgtaaagt

SEQ ID NO: 394750 - DNA, 201 bp, Homo sapiens
atacatatgagccaggcacggtggtgcctgtggtcccagctacttgggaggctgaggcaggagaattgcttgagcacaggaggtcaaggctgcagtgagcygtgatcacaccactgcgctccagccttggtgacagagcaagaccctgggtcaaaaacaacaaaacacgagaaagcacacaaggcagctcttggaagtaga

SEQ ID NO: 394751 - DNA, 201 bp, Homo sapiens
ggcctgtgtcccaggtgatcgacgccatctctggagccatcacacagaccccgggctgcgtgctgctggatgtggacgcaggcccttccaccaaccgcacygtgtacaccttcgtggggccgccggagtgcgtggtggagggggccctcaacgctgcccgggtagcttcccgacttatcgacatgagcaggcaccaaggtg

SEQ ID NO: 394752 - DNA, 201 bp, Homo sapiens
ggaggtgaggcccgaagagctggtcaagcatctagggctgatggggcagcttgagtggctaaggcccaggccatggaggaggtggtgggcttggtgtcccrggtcgtcttcccaggatgggcagagccgctgcccgtgggccccaaggacatcccgtggctcagggccctggggagtgcctgacccaggggtgggtggaac

SEQ ID NO: 394753 - DNA, 201 bp, Homo sapiens
acccttggccaagatctgcccagggagaccatggacaccgcaaggcctgggtgtgagagagtgttcgtagcgcgagtcgcagcttgaggatggctgtcctkcctccgcctgcaactgctacagacccttgtgcagaggacagcctgggagaggggctgcagccaggaggcctggtctggatgatgccccagccagtcaggg

SEQ ID NO: 394754 - DNA, 201 bp, Homo sapiens
tcccgggcggccgctgtgtgcgggcactttcggtgggagctcagcttgtcggagagcccccaaaggcttggcccgcctcctcagcccccatttgtgtctcrgggtgcagccacctccaagctccttttccttctttcaaacggggagactgaggtgtgggggccgggcctgtgtcccaggtgatcgacgccatctctggag

SEQ ID NO: 394755 - DNA, 201 bp, Homo sapiens
gccttgctggttaatgagaagccggtggggaggtgctgccggtgagcgtataaaggccctggcggcggctgcggagcactggccctgtccttccatctgcycagagaggagcatctggatcaaggtgctggccatgtcccagctggtggaatgcgtccccaacttttcggaggggaagaaccaggaggtgaggcccgaaga

SEQ ID NO: 394756 - DNA, 201 bp, Homo sapiens
ggcagggccaaaggtgtgtggacacacgggcgctggccaggggctgggctgtgggccgctcatgagaggccagggatccacagtgatcctgaggggtggayggatgagaagcttatctctaagtggccagccctgggcggtggcggcaaaggcgggggaggctggcgtcccctggggtgggcgccgacccacggcttggtg

SEQ ID NO: 394757 - DNA, 201 bp, Homo sapiens
gtgctgggtgtttgggaatgacttcccatcgcccgcttctgcagcctgctcagccctgttggggtgcagtgtgtccactgcctgcctgtgtgtgccgctgygctcaggctctcctcttgctcctttcaggcgcacggcggccctacaggagggtctgaggcgggcagtctctgtgccgctgacgctggcggagacggtggc

SEQ ID NO: 394758 - DNA, 201 bp, Homo sapiens; identical to SEQ ID NO: 86688

SEQ ID NO: 394759 - DNA, 201 bp, Homo sapiens
gacggcaagcccctcttcgcctggtgagccgccccgcgcccgccgccttgcctgcagtaaacgcgtttgttccaacccggggccgcggtgcctcctgcgcrtccccccggaggggaaagggccgcgtcccccgcgcgcgaggccagagaaggccccgctcccaccggtgctgggccccgaccgcagcccgccgctgcccgc

SEQ ID NO: 394760 - DNA, 201 bp, Homo sapiens
ggacagaagggagccgaggacagggggaagggaaggctggcttgccctttggcactttaagaagctccttttctttcagattctatttgccagacagtggrgggtggcggcaggtgggaggaggggggtggaggagccgccccccacgtggccgagggcaccctcgagggcagtggatcctcgcgctcccctgaccttgtc

SEQ ID NO: 394761 - DNA, 201 bp, Homo sapiens
ctgcctctcgggccttgcggggcgctggggtccctgcgtggagacccggctgagtcctcccagcgcctccctttgggcgcctactcggcctgcgccaagcmggggtctgggggctgaggggggcacagagaccccggccgggtccccgcaggttctcagccgagtggtcacctccccgtgggtgcagacgggcgtggggcc

SEQ ID NO: 394762 - DNA, 201 bp, Homo sapiens
gcctcaggttccccaagggcaactcagggtgatggctgtttccagaagcctgtacggggtgcctgctggggcggggcccacagggctcctggcggggcagmggtggggggtgccagccacgcccctgccctgctccccgcaaaagcacctgtgtgctcggggcagggggcggctgccgcaagggtgggacccgcgggttcc

SEQ ID NO: 394763 - DNA, 201 bp, Homo sapiens
aagagcttaacgctcactgtgaaggtcggcggcctcacggggaggaagaaacagctcccgacgcgccacctgtaagagcttatggctcactgtgaaggtckgcggcctcaccgggaggaagaaacagctcccgacgcgccacctgtaagagctcactgagaaggtctccggcttcactcctgaagtcaggcaagaccacga

SEQ ID NO: 394764 - DNA, 201 bp, Homo sapiens
atcctttctgtctaagcagcagctgtcgcttctccacatttccttgtcttcttatgtgtgaggccccgtctgctttccagtgtggcgttttgtcttcttcttttttttttttttttttgagatggagtctcactttgtcacccaggccggagtgcagtggtgtgatctcggctcactgcaacctccacctcccggattgaa

SEQ ID NO: 394765 - DNA, 201 bp, Homo sapiens
ggccgtgaggttgtggctcagcgggaaggccacctgctgctcgccggggccaccaaactgcagcagcgccacgcgtgcgttgagagggtcgtcgtccctcygggccagcgtcagccgccgcgccacctgctccacgaagcgccgggccttgtggaagttctgctcacccagccgctcggagccgtccagcaggaagacgat

SEQ ID NO: 394766 - DNA, 201 bp, Homo sapiens
tcctttctgtctaagcagcagctgtcgcttctccacatttccttgtcttcttatgtgtgaggccccgtctgctttccagtgtggcgttttgtcttcttcttttttttttttttttttgagatggagtctcactttgtcacccaggccggagtgcagtggtgtgatctcggctcactgcaacctccacctcccggattgaag

SEQ ID NO: 394767 - DNA, 201 bp, Homo sapiens
tcctgccactgactgaaagggctgtgtgaggtcacacgaggtggcccagcatggtccccactgccgcctctccatctccactggagttagcttgctgagcycccaccctgcagccaccatcctcactggacccaaaacgaagtaggcacagagggggcagcaggcccccaggtccggcctctcgccttccacagccctgag

SEQ ID NO: 394768 - DNA, 201 bp, Homo sapiens
gcttctccacatttccttgtcttcttatgtgtgaggccccgtctgctttccagtgtggcgttttgtcttcttcttttttttttttttttttgagatggagyctcactttgtcacccaggccggagtgcagtggtgtgatctcggctcactgcaacctccacctcccggattgaagcagttctctgcctcagcctctcgagt

SEQ ID NO: 394769 - DNA, 201 bp, Homo sapiens
gcgggctgcgcacgatggcattgatggcgtgcaccacgcctgcgcccacgtgcgagaaggagttcaggtattgtgtggtctccagcgcctcgtggatggcmgtgaggttgtggctcagcgggaaggccacctgctgctcgccggggccaccaaactgcagcagcgccacgcgtgcgttgagagggtcgtcgtccctccggg

SEQ ID NO: 394770 - DNA, 201 bp, Homo sapiens
ctttcggtggggggttgggcagatctctgggcctcaaagggccttggtgctcccccctgaaaatggggctcctgccactgactgaaagggctgtgtgaggycacacgaggtggcccagcatggtccccactgccgcctctccatctccactggagttagcttgctgagctcccaccctgcagccaccatcctcactggacc

SEQ ID NO: 394771 - DNA, 201 bp, Homo sapiens
tctagctactggggtgggaacttggagaacttctctgtctagctaaagtattgtaaaaacgcaccagtcagtgctctgtgtctagctaaaggtttgtaaaygcaccaatcagcactctttaaaaacggaccaatcagcactctgtaaaatggaccaatcagcactctgtaaagtggaccaatcagcaggatgtgggcgggg

SEQ ID NO: 394772 - DNA, 201 bp, Homo sapiens
ttctgcttgcgcatggagtgcgccgactcgtgcagactgtcgttgcccgtgacgccgtccgtgaggaacacgaaggacagctctgcgtgcctccgggcccygccacgcgggctgcgcacgatggcattgatggcgtgcaccacgcctgcgcccacgtgcgagaaggagttcaggtattgtgtggtctccagcgcctcgtgg

SEQ ID NO: 394773 - DNA, 201 bp, Homo sapiens
ttgagtggctaaggcccaggccatggaggaggtggtgggcttggtgtcccgggtcgtcttcccaggatgggcagagccgctgcccgtgggccccaaggacrtcccgtggctcagggccctggggagtgcctgacccaggggtgggtggaacacgactggtgcttgtgggggctgaggcttggctgtggcttcaggggcctt

SEQ ID NO: 394774 - DNA, 201 bp, Homo sapiens
gcccagagaggagcatctggatcaaggtgctggccatgtcccagctggtggaatgcgtccccaacttttcggaggggaagaaccaggaggtgaggcccgargagctggtcaagcatctagggctgatggggcagcttgagtggctaaggcccaggccatggaggaggtggtgggcttggtgtcccgggtcgtcttcccagg

SEQ ID NO: 394775 - DNA, 201 bp, Homo sapiens
tagcattttggaaaaccaaggtgggcaaatcccttgagctcaggtgtttgaaaccagcctagaccacacaccaagaccctgtatttacccacccaaaaagaaaaaaaaaaaataaagccaggcgtggtagcaggtacctgtggtcccagctactcaggaggcttaagtgggggtagcttgaggccaggagtttgaggctgc

SEQ ID NO: 394776 - DNA, 201 bp, Homo sapiens
ttagcaccatggacggggtgggctcacgaccctcgactgcggggcccgggcggcggcgctagcagatccagcggatgaagcggtcgaagaagccgggttgygccaggctgtcatagtccttctcgtggaacacggcggcgcggtcacccaggctgagcgtggtgagcacgtccatgtccacgtcgctgcccaaggccagca

SEQ ID NO: 394777 - DNA, 201 bp, Homo sapiens
gcgctccagccttggtgacagagcaagaccctgggtcaaaaacaacaaaacacgagaaagcacacaaggcagctcttggaagtagatgcctcacactgacrggccacagctgggcagagggtcccagagaaggagcgtctctctcatgggctcagcactttctgcagctgccctaagacctcatggtcttcgggttcttta

SEQ ID NO: 394778 - DNA, 201 bp, Homo sapiens
ggcccgcttagcaccatggacggggtgggctcacgaccctcgactgcggggcccgggcggcggcgctagcagatccagcggatgaagcggtcgaagaagcygggttgcgccaggctgtcatagtccttctcgtggaacacggcggcgcggtcacccaggctgagcgtggtgagcacgtccatgtccacgtcgctgcccaag

SEQ ID NO: 394779 - DNA, 201 bp, Homo sapiens
ctggaggctgaggcaggagaatggcgtgaacccgggaggcagagcttgcagtgagccaagatcgcaccactgcactccagcctgggcgacagagcgagacyctgtctcaaaaaaaaaaaaaaaaaaaaaaaaaaagaacttcaagtggggctgggctcagtggctcacacttgtaattccagcactttgggaggccgaggc

SEQ ID NO: 394780 - DNA, 201 bp, Homo sapiens; identical to SEQ ID NO: 86677

SEQ ID NO: 394781 - DNA, 201 bp, Homo sapiens
ctggccgtgtgggacccgggcccgcttagcaccatggacggggtgggctcacgaccctcgactgcggggcccgggcggcggcgctagcagatccagcggakgaagcggtcgaagaagccgggttgcgccaggctgtcatagtccttctcgtggaacacggcggcgcggtcacccaggctgagcgtggtgagcacgtccatg

SEQ ID NO: 394782 - DNA, 201 bp, Homo sapiens
gcccagagtacaagatcaaagtgtctgcagattctgtttgtctgaggtctctctgcttggcttgcaggcggccgcctccctgctttgtcctcctggccttktctctgagtgcatccctggtgtctctccctcttctcaccgccctgtccatctccacatccaatccagtcggcggtgctgggggtaatccagtctgccatg

SEQ ID NO: 394783 - DNA, 201 bp, Homo sapiens; identical to SEQ ID NO: 86678

SEQ ID NO: 394784 - DNA, 201 bp, Homo sapiens
cacagaaatttattctatcacagtcctgaaggcccagagtacaagatcaaagtgtctgcagattctgtttgtctgaggtctctctgcttggcttgcaggcrgccgcctccctgctttgtcctcctggccttttctctgagtgcatccctggtgtctctccctcttctcaccgccctgtccatctccacatccaatccagtc

SEQ ID NO: 394785 - DNA, 201 bp, Homo sapiens; identical to SEQ ID NO: 86759

SEQ ID NO: 394786 - DNA, 201 bp, Homo sapiens
actgcggggcccgggcggcggcgctagcagatccagcggatgaagcggtcgaagaagccgggttgcgccaggctgtcatagtccttctcgtggaacacggyggcgcggtcacccaggctgagcgtggtgagcacgtccatgtccacgtcgctgcccaaggccagcacggtgggtaccacgttctgcttgcgcatggagtgc

SEQ ID NO: 394787 - DNA, 201 bp, Homo sapiens
agacgaggcatttaaggaccaggtgagcaggaggcaggtgtggtgcccggaccccacgtgggggcctggattcacagcctcagggtgattgccgactggcygtgggcagtgggggtcggaggttgctgcccagcaagctgggctgaagactggaactaccagacccctctttccctgtgtccatcagatccaccatcgtgt

SEQ ID NO: 394788 - DNA, 201 bp, Homo sapiens
tttggcgcatatttcaacgtgctcatcaacctgagggacatcacagacgaggcatttaaggaccaggtgagcaggaggcaggtgtggtgcccggaccccaygtgggggcctggattcacagcctcagggtgattgccgactggccgtgggcagtgggggtcggaggttgctgcccagcaagctgggctgaagactggaact

SEQ ID NO: 394789 - DNA, 201 bp, Homo sapiens
cgtcaggcagagaccctccttccggcagtttgctcagccttgatccatgtaggggctccctggggtccttgcaggtggcggccaaagccctggagatgggygtgtttggcgcatatttcaacgtgctcatcaacctgagggacatcacagacgaggcatttaaggaccaggtgagcaggaggcaggtgtggtgcccggacc

SEQ ID NO: 394790 - DNA, 201 bp, Homo sapiens
atcagcactctgtaaaatggaccaatcagcactctgtaaagtggaccaatcagcaggatgtgggcggggccaaataagggcataaaagctggccaccgaarccagcaagcgccaaccgtggcgggttctgttccaagctgtgggggctttgttcttttgctcttcgaactaaatcttgctgctgcttactctttgggcctt

SEQ ID NO: 394791 - DNA, 201 bp, Homo sapiens
ggttcctagagtggcggagagcctccagtgtgactgctcccaggcctcctgtggggctgagccctgcttggataagagaaagttttgttttctaagctcartggtggggcttagccctctgtggggcgaaagcgggggctgcgctgggctccttgtgaggaggaggacgaagtccggcctgtcccagagcccgtcaggcag

SEQ ID NO: 394792 - DNA, 201 bp, Homo sapiens
gctcactgtgaaggtcggcggcctcacggggaggaagaaacagctcccgacgcgccacctgtaagagcttatggctcactgtgaaggtctgcggcctcacsgggaggaagaaacagctcccgacgcgccacctgtaagagctcactgagaaggtctccggcttcactcctgaagtcaggcaagaccacgaacccgccagaa

SEQ ID NO: 394793 - DNA, 201 bp, Homo sapiens
tgaagctgcctccgggggccctccaggggatgactgtctctagaactgtggtcctggttcctagagtggcggagagcctccagtgtgactgctcccaggcytcctgtggggctgagccctgcttggataagagaaagttttgttttctaagctcagtggtggggcttagccctctgtggggcgaaagcgggggctgcgctg

SEQ ID NO: 394794 - DNA, 201 bp, Homo sapiens
gccgctgctgctgtgaggggcgagccgatctgtcccgtgggcagggcgggggccccacatcctccagccagggccattctccagccagcccccagggggtracgctgcctgtgccttggcaggagctgagcctcccagtggtgggctcacagctggtgggcctggtgcccctgaaggctctgctggatgcggccgccttct

SEQ ID NO: 394795 - DNA, 201 bp, Homo sapiens
gtcccagagcccgtcaggcagagaccctccttccggcagtttgctcagccttgatccatgtaggggctccctggggtccttgcaggtggcggccaaagccytggagatgggcgtgtttggcgcatatttcaacgtgctcatcaacctgagggacatcacagacgaggcatttaaggaccaggtgagcaggaggcaggtgtg

SEQ ID NO: 394796 - DNA, 201 bp, Homo sapiens
acggcggccctacaggagggtctgaggcgggcagtctctgtgccgctgacgctggcggagacggtggcctcgctgtggccggcgctgcaggaactggcccrgtgtgggaacctggcctgccggtcagacctccaggtaggggggcccgggggaccccaggcctcctgccgcaaagcaggaagcagctgttggggctgagtt

SEQ ID NO: 394797 - DNA, 201 bp, Homo sapiens
agtggggcccccacctgcctgggtggtcaccagccctgggcatcggggacagcttgggggcctggccatagccacaacccaggccaggctgcctaccacaygtgtgggtgtcacgtggggccagagaccacaggacaggacacggacagtccttgcgtggacctggccctgtggcctcaccaagacctcagctcctgggat

SEQ ID NO: 394798 - DNA, 201 bp, Homo sapiens
catggtggaaggtgaaagaggagcaaagtcacgtcttacaagagggtgtgtgcaggggaactgccctttataaaaccatcggatctcgtgagaccattcastatcacaaaaacagcaccggaaaaagccgcccccgtgattcagtgacctcccaccgggtccctcccatgacgtgggaactatgggctctacaattcaaga

SEQ ID NO: 394799 - DNA, 201 bp, Homo sapiens
ttgctcctttcaggcgcacggcggccctacaggagggtctgaggcgggcagtctctgtgccgctgacgctggcggagacggtggcctcgctgtggccggcsctgcaggaactggcccggtgtgggaacctggcctgccggtcagacctccaggtaggggggcccgggggaccccaggcctcctgccgcaaagcaggaagca

SEQ ID NO: 394800 - DNA, 201 bp, Homo sapiens
aggcccccaggtccggcctctcgccttccacagccctgaggtccaggctcctccgggaacaaacgcaggccctaagggccacctggaaggcctcccagagsgcagcaccaggccacaggggtcacccgcaggggtgcagggaggcctcgtcatgccgggattccagccagcaccaaggccctgggacagggcaagatttgg

SEQ ID NO: 394801 - DNA, 201 bp, Homo sapiens
cactctgctgtggtgcgaggatgaaggtgccagcccagtgtgggcaaccctcacagccagaatgttccagtgccccgcacctcgggaccctggatgtgtgyggctgccgtcacaaagtaccgcagacccagcagcttaaaccacagaaatttattctatcacagtcctgaaggcccagagtacaagatcaaagtgtctgca

SEQ ID NO: 394802 - DNA, 201 bp, Homo sapiens
cgagtgtatggttctggtcactctgctgtggtgcgaggatgaaggtgccagcccagtgtgggcaaccctcacagccagaatgttccagtgccccgcacctygggaccctggatgtgtgcggctgccgtcacaaagtaccgcagacccagcagcttaaaccacagaaatttattctatcacagtcctgaaggcccagagtac

SEQ ID NO: 394803 - DNA, 201 bp, Homo sapiens
ctaatgtctcagtgctgcccctgagaaccagcgccggcgtcacaaccagccccattccccctcgtgttctcagctgtagccaagccctggtccagcagtakctgggtaggaaatgcatgcagctcctgccggggcctcccgccccaaccctctctcctgacaggcgatttgctgggctggaggacagggccaggtcttggc

SEQ ID NO: 394804 - DNA, 201 bp, Homo sapiens
ctatgtttgtctcatactctgggttagaaaagtgtatggcctgcctggccctggaatcagtagccctgggcctgtcactggggagagatggtggaaaccckggtgtgggcatagctgagattctttctcctgtaagtggggtcccttagggtccccgattcaggagctatttacagcacctgccagcatttctaatgtctc

SEQ ID NO: 394805 - DNA, 201 bp, Homo sapiens; identical to SEQ ID NO: 86755

SEQ ID NO: 394806 - DNA, 201 bp, Homo sapiens
gagtcctggaccccctgccggtccaggcctgaccgccgggctctcctgcagtttacctgtacggcgaggcagccaggatggacagtcgccggaccctgccrgccatccgggccggggagtacgaggccctccctaagaaggtgcccccaccccgggcggtcgggcctgggaaggaggtggacctgcccctttgtcctggct

SEQ ID NO: 394807 - DNA, 201 bp, Homo sapiens
ctgactttaaaggagagtgtgtcacaaagtactgcagacccagctacttaaaccacaggagggcacgtaccgtgccacacagggccgcccggggcggggcrccgtggcaacaggacgcagaaggcgagaggggagagcatggccagaggctctgtgggggtttccctgggaagagaggccagggagggtaggcacgaagga

SEQ ID NO: 394808 - DNA, 201 bp, Homo sapiens
cagcgagtggatactttcagcaagcctgggataggaagggctgtgatgaaacgcaccaggatttatttcagttgggtgtggtgggatacagacacaggacycctgactttaaaggagagtgtgtcacaaagtactgcagacccagctacttaaaccacaggagggcacgtaccgtgccacacagggccgcccggggcgggg

SEQ ID NO: 394809 - DNA, 201 bp, Homo sapiens
ggcgagcacaggggagccccggagaccatgggggtgccgggggtgggcgagcgccggggagccccagagaccgtgggagtgttgggggtgggcgaggacargggagccccgagaccgtgggggtgccgggggtgggcgagcgccggggagccccggagaccatgggggtgctgggggtggacgagcacaggggagccccgg

SEQ ID NO: 394810 - DNA, 201 bp, Homo sapiens
gcaccgcagccttcacagaacgcttgagacatggacgccgtctgagcacgcacgagctggcagatggggttccctcagtgagcttatgagtgacgcagctyattcagtgaaaggaagggcagcctccctgttaaggccacacctaggaaccggcttaaatgtccagaaactcctcaggtaccgctgggcttcccaaacccc

SEQ ID NO: 394811 - DNA, 201 bp, Homo sapiens
acgtaacccccgtcacggtcatgccagtccccccgaaggaaatcccgacgcagggcccacgtcacagtcacactggtgtgcgggttcacgagtttttcctyttctctgccgttatatttatgtggttgcttgcggttctgtttatcatacaaagaaaacagaagcatgaacgtcctgccgttagcatgtcccacatgttcc

SEQ ID NO: 394812 - DNA, 201 bp, Homo sapiens
caatgcaaaggtcgacttttgaaaaacataaggagatatctgtaccttgcaccaaatacataagtaatttccagatggaatagaaaactgtatttccccaycaccaacacaaccaagcctcacgataaatcacagaaaacaaaacggaccgggcgggcaggcctcggccggacgcagatgaggccacctaaagcacaccct

SEQ ID NO: 394813 - DNA, 201 bp, Homo sapiens
tgtgtgccgctgtgctcaggctctcctcttgctcctttcaggcgcacggcggccctacaggagggtctgaggcgggcagtctctgtgccgctgacgctggyggagacggtggcctcgctgtggccggcgctgcaggaactggcccggtgtgggaacctggcctgccggtcagacctccaggtaggggggcccgggggaccc

SEQ ID NO: 394814 - DNA, 201 bp, Homo sapiens
tctgcagcctgctcagccctgttggggtgcagtgtgtccactgcctgcctgtgtgtgccgctgtgctcaggctctcctcttgctcctttcaggcgcacggyggccctacaggagggtctgaggcgggcagtctctgtgccgctgacgctggcggagacggtggcctcgctgtggccggcgctgcaggaactggcccggtgt

SEQ ID NO: 394815 - DNA, 201 bp, Homo sapiens
gcgtgctgggtgtttgggaatgacttcccatcgcccgcttctgcagcctgctcagccctgttggggtgcagtgtgtccactgcctgcctgtgtgtgccgcygtgctcaggctctcctcttgctcctttcaggcgcacggcggccctacaggagggtctgaggcgggcagtctctgtgccgctgacgctggcggagacggtg

SEQ ID NO: 394816 - DNA, 201 bp, Homo sapiens
atcttctggactttgaggtcacggcactgcacacggtctacgaggagacctgccgagaagcacaggtgagcccgggagcagccgctgctgctgtgaggggygagccgatctgtcccgtgggcagggcgggggccccacatcctccagccagggccattctccagccagcccccagggggtgacgctgcctgtgccttggca

SEQ ID NO: 394817 - DNA, 201 bp, Homo sapiens
ggttgtggctcagcgggaaggccacctgctgctcgccggggccaccaaactgcagcagcgccacgcgtgcgttgagagggtcgtcgtccctccgggccagygtcagccgccgcgccacctgctccacgaagcgccgggccttgtggaagttctgctcacccagccgctcggagccgtccagcaggaagacgatgtccacgg

SEQ ID NO: 394818 - DNA, 201 bp, Homo sapiens
cggggcccgggcggcggcgctagcagatccagcggatgaagcggtcgaagaagccgggttgcgccaggctgtcatagtccttctcgtggaacacggcggcrcggtcacccaggctgagcgtggtgagcacgtccatgtccacgtcgctgcccaaggccagcacggtgggtaccacgttctgcttgcgcatggagtgcgccg

SEQ ID NO: 394819 - DNA, 201 bp, Homo sapiens
gctctgcgtgcctccgggccccgccacgcgggctgcgcacgatggcattgatggcgtgcaccacgcctgcgcccacgtgcgagaaggagttcaggtattgygtggtctccagcgcctcgtggatggccgtgaggttgtggctcagcgggaaggccacctgctgctcgccggggccaccaaactgcagcagcgccacgcgtg

SEQ ID NO: 394820 - DNA, 201 bp, Homo sapiens
acataggaacaattttatgtttagaaatttaaaataaggtgaataattaaaaaacaagtaggaaaagtacatagatgaaaatgtaatcaagggacaggaargaaacaagacgtgtggtttagagaaccatgagcggggacagtgagactgtgctaggcatcagtggtcgaaatcagtggattggtttacgctccctgtgag

SEQ ID NO: 394821 - DNA, 201 bp, Homo sapiens; identical to SEQ ID NO: 86674

SEQ ID NO: 394822 - DNA, 201 bp, Homo sapiens
acccgaaactcggtttctgggggccctggaggtgcaacggtccagccccgcaggcagtgagcaaagctctgaacacagcagggtgacctcacgctgcaccrcagccttcacagaacgcttgagacatggacgccgtctgagcacgcacgagctggcagatggggttccctcagtgagcttatgagtgacgcagctcattca

SEQ ID NO: 394823 - DNA, 201 bp, Homo sapiens
ccaacccctggacgtcgtcacagctggtacatggacccccaggaatgcacacagaggaccctgacccgaaactcggtttctgggggccctggaggtgcaayggtccagccccgcaggcagtgagcaaagctctgaacacagcagggtgacctcacgctgcaccgcagccttcacagaacgcttgagacatggacgccgtct

SEQ ID NO: 394824 - DNA, 201 bp, Homo sapiens
agggtgtctgcttctcagcccaacccctggacgtcgtcacagctggtacatggacccccaggaatgcacacagaggaccctgacccgaaactcggtttctsggggccctggaggtgcaacggtccagccccgcaggcagtgagcaaagctctgaacacagcagggtgacctcacgctgcaccgcagccttcacagaacgct

SEQ ID NO: 394825 - DNA, 201 bp, Homo sapiens; identical to SEQ ID NO: 86761

SEQ ID NO: 394826 - DNA, 201 bp, Homo sapiens
  misc_feature (1)...(201): n = A,T,C or G
gggccctgagggaactacctgcttctcacatccccgggtctctgaccatctgctgtgtgccccgaccccccctaccctgctcctccaccaagcctgatgcnaagggctataaaccactggcccaacagaagcttggttcccagagaactggtccctgcctgggacatgctccttgctacagccccttgtgggagctcagag

SEQ ID NO: 394827 - DNA, 201 bp, Homo sapiens
ctcacagaccactgggctctgcgggggcgtttctgcagggcagccctgggtgtgggtccttagcccaagacactttcaggcggcactgctgggagccgccrtctcctctgctggtgctcccaggcctgagaccctgacacaggccccaggccctgtccacctgctgagcaccatccctgcacaggctgccctcctgggagg

SEQ ID NO: 394828 - DNA, 201 bp, Homo sapiens
ctgggtgtttgggaatgacttcccatcgcccgcttctgcagcctgctcagccctgttggggtgcagtgtgtccactgcctgcctgtgtgtgccgctgtgcycaggctctcctcttgctcctttcaggcgcacggcggccctacaggagggtctgaggcgggcagtctctgtgccgctgacgctggcggagacggtggcctc

SEQ ID NO: 394829 - DNA, 201 bp, Homo sapiens
tgtgtggactgggggctgcccaggccggagaggacagagggtccgagaaccccgtggagctcccacccgctcccacacctggcctcctgcccggcctcgcygtctctctgcaggagagcacccccgcatgggggccctagacgtctgccccttcatccccgtgaggggcgtcagcgtggatgagtgtgtgctctgcgccca

SEQ ID NO: 394830 - DNA, 201 bp, Homo sapiens
agtttgaggctgcagtgagtcgtgattgcaccactgcactctagcctgggcaacagaacgacaccctgtctctaatgtaaacatatgtatataaaacatargaacaattttatgtttagaaatttaaaataaggtgaataattaaaaaacaagtaggaaaagtacatagatgaaaatgtaatcaagggacaggaaggaaac

SEQ ID NO: 394831 - DNA, 201 bp, Homo sapiens
tctttgttcatatggttggggttagctctaccagtctttgttgatatggttgaggttagctctaccagtctttgttgatatggttggggttagctctaccwgtctttgttcatatggttggggttagctctaccagcctttgttcatatggttggggttagctctaccacgttgctatttgctgtttcttgatcttgggtt

SEQ ID NO: 394832 - DNA, 201 bp, Homo sapiens
ctgggtgacacagtgagactctatctcaaaaaaaaaaaaattgtacaacctcagtcttttttagtgtcttcattttgttgtgcaaccatcaccactatttmattccagaacatttccatcaacccaaaaagaatccctgtacctgtgagcagtcccccctccatccccttcaccccccagcccctggcaggccctgttctc

SEQ ID NO: 394833 - DNA, 201 bp, Homo sapiens
tttgtgtgcaaatttttgtatgaaagatacatggtgaaatgaggtattttgaggtacattggattaaatgagatattaaaaatttttttaaagtctagccrtcttgaaggggagggcctgagagaagtgctgaaagttcacagcagaggataccggatgctgcgggtgtgccaggctggcctgtccaggaggtccctgcag

SEQ ID NO: 394834 - DNA, 201 bp, Homo sapiens
cagtgaaagggagctgaaggacaggtgcccagcttctttgctccacagtgggaccaatctctgacatcatcaatgcagttgctcaaagggagctcagagcraggagtcacctgtacatcaactcaccctctgggagctctcttcccttccatgcctcaatcccccactccctcccagggcttcctgggctggcctccaaat

SEQ ID NO: 394835 - DNA, 201 bp, Homo sapiens
actcttccttaactgttattccattctgtctatacatttcttattttgaagcaaggataggttcacacgctgctgtaatgatgcatgcagagaaagcccaytcatggcccggtttctcccagtggtgacatcttgcaaaactctagcacaatgtcacagcctggcattgaccgtgacacggtccagatccggaacatggcg

SEQ ID NO: 394836 - DNA, 201 bp, Homo sapiens
gtgacatcttgcaaaactctagcacaatgtcacagcctggcattgaccgtgacacggtccagatccggaacatggcgtcccccacaaggatcccacctgcygctctttaatagccacgctgcttcccttccattccccactggatccctgtcccctggcaaccaagaggtctctctcttttttgtttttgtttttgttttt

SEQ ID NO: 394837 - DNA, 201 bp, Homo sapiens
attctgtaacgttctacacatgtaatcatgcagtaggtgactttgggattggcgccttccacccagcacaaccccctggcatccatccgggttgtcgcctrtatccgtggttcattcccttctttctgagtcatactccgcggtatggatggaccacggttggttcaaccattctcccttgaaaggcatctgcatcgtttg

SEQ ID NO: 394838 - DNA, 201 bp, Homo sapiens
cagcctccactccccagctcagttcacccaagagcagcaggcggccagtcccaggggctgcactgctgcaaacctgctcaaaacctccagccgccacgtgkcaacttgctccccagctctgagagtgcaggaccggggcgcagagacgacagaagaggctttaaatatgcagaatgactgtctaggtcaacgcacaaaagg

SEQ ID NO: 394839 - DNA, 201 bp, Homo sapiens
caactctgcctccactgacacagctcctggcttctggactttgcccagggccttgggtctccccggagtaggaactttcaggattatcaaaccccaggggstctttcccactcctgtgcgggcctggcttcaggctcaggtgcacggcagatccctggccccgccggcgccttctccaccccaggcagggagcaacacctg

SEQ ID NO: 394840 - DNA, 201 bp, Homo sapiens
ccagcatgttgaggcgcctggtcccaactgcccattcactccctgtacacagactgcttctttgtcctccagccaggggtgaagggccatgctggcgaaayagcaaacaaccccaacatgctttgcagcctggccaaccacatgaccagtttgaggaggttggctggagatcacaatgaggaagttggatgagggggtcca

SEQ ID NO: 394841 - DNA, 201 bp, Homo sapiens
cacaaaactgcatctggccacgcatgaggcacctggcactcagagaacgtcagggcgcctaaaagtgatcacctccctcccttccagcaggggcgcccccrcttttctccgagtggtttggcccagtgtcctgcccatcacaaaccagacagaggacatgacttcaggctgctgtgtcctcccatgtgttagggcctccga

SEQ ID NO: 394842 - DNA, 201 bp, Homo sapiens
acttggctgtcctagagaaacgcgtggaatgtgagtgacgtttctgtttcctttttgcttctctgtcctttaacctctattcaaattaaccacttggaacrgggaggagttcagtgccgaaggtaaatacaaataaatgtcttttctttgtgaaatacttgaaaattacctttgatgttaacaaaggctagcacagtgact

SEQ ID NO: 394843 - DNA, 201 bp, Homo sapiens
ccgctgagattgtttttcatctgtagaaatcaataaattcctttttggtgcagtgttttgtgaacgggtgcactctctcacccggtcgctgtcctaagaaytctccttgacttcggaactggccctccacgccccaggatccacctgccaggagacccccagtgtgctctcaaacccccacccatctgagtggcctggaaa

SEQ ID NO: 394844 - DNA, 201 bp, Homo sapiens
cccacccatctgagtggcctggaaaggctggtctgaagacctctcttcccatgtctgccgaccaggctttgctctccagggactttctgggagggggagarcccacctcctgccaacggccctgctggcactccgaggacagcagagggaaggaagccaggggctggggagccggccacacaactgcccagtgcctatcct

SEQ ID NO: 394845 - DNA, 201 bp, Homo sapiens
aaataccaagaagcacaattgctggatcttttggtaacagcatgtttagttttgtaagaagctgccaaacggtcttccaaagtgactgggccattttgcaytcccagcagcaatgaacgagcattcctgccgctccacatcctccccagcttttgtgtttcagtgtcttggattttcaccactctgataggtgtattgcag

SEQ ID NO: 394846 - DNA, 201 bp, Homo sapiens
tacagcatggtctggctctgcagtctccaggtgggtcctgcccgctgcacacccagacctctactctcgggggtcagacggaggcccccttccagggagcrgcagccccatcccaccaagagagccacaggcgtggggtccccagccgctccgcccctcctagggacgcacccctgcccaccgttgtcagtcaccccatgg

SEQ ID NO: 394847 - DNA, 201 bp, Homo sapiens
tttcaccactctgataggtgtattgcagtatcttcttcttgttttattttgcaattccctagtgacatatcatgataagcatcttctcatatgcctgcttkccatctgcatgtcttctttgaggtgtctgttcatatcttttggccacttttaatcatcctgaacttttcacaatctatttagaattaatactgtaccgcc

SEQ ID NO: 394848 - DNA, 201 bp, Homo sapiens
ccagatggctgcaggggcctttgtcccccgcttaccactcacccaattccaccccccctcaccccatcccaccctccgagtgaagagagcaaacacctacrccctgttttccaatccaggagaagttctcacaaacggatatcctgatcctaatgacagcggccatctgccacgatctggaccatcccggctacaacaaca

SEQ ID NO: 394849 - DNA, 201 bp, Homo sapiens
cctcagtggcgcagcagctctctctgttgaactgtgtgtttgtgtgatgtcatcacatgcctgagagctctgctgccatgtgtcagcgcctagtgggttcygaggtgtggctgtcagcgctcctcccggggccatcaccatgcacacccatctgttccccttttgctcatttcacactcacagtggccggcacagcacagg

SEQ ID NO: 394850 - DNA, 201 bp, Homo sapiens
gcacagcacaggtcagcagaggccttgaccacagcatcccagtgaacctcagcctcgttctgcccacctgcctctggcacctggtgacgtttgataatttyacaagaggccgtgatgcctcagggcctgtcccagggagcatgccgcttcctcagaggtgtctgtctggtgggactgcaggagcatggggacgtgcagttg

SEQ ID NO: 394851 - DNA, 201 bp, Homo sapiens
gacctcctggccaggccagggcacaggcagctcccccagcccccacggcaccttctcctgactctacttgctccacttacatggctgggtgttgctccccsgtgcaggtacctggtgagggcgcctgagtctcccctcactctctccttgcctcccaggtaccagatcaatgcccgcacagagctggcggtccgctacaat

SEQ ID NO: 394852 - DNA, 201 bp, Homo sapiens
ttgtagactaagattatgaataacacctaggagagacattggattttgttatcatcctctgaagagtgttaattttgctccagcagtcagttccgttactsactgatcatctgaacttcgtgcagcctggttttatgctttgttggggtagatctctagactgacccttctgtggttttagtaggaagcctgaggtattta

SEQ ID NO: 394853 - DNA, 201 bp, Homo sapiens
agtgccctggggacccaagggaacccctccctccttcctcacctcctccagggcccagagtggagccccaaaaagagggtaccctcgccatgcgcacgtgyatcccactgacctgcacttcccagcctgtatttaattcagccttcactggctccctttgagataaatcctttgtccctcttccagcccaagaaactgagg

SEQ ID NO: 394854 - DNA, 201 bp, Homo sapiens
tggatcaactgaggtcaggagtttgaaaccagcctggccaacatggtgaaatcctgtctcttctaaaaaaaattttgaaaaaattagccgggtgtggtggygcatacctgtaatcccagctactcaggagctgaggcaggagaatcccttgaacctgggagccagaggttgcagtgagccgagatggcgccactgccctcc

SEQ ID NO: 394855 - DNA, 201 bp, Homo sapiens
tggggttagctctaccagtctttgttgatatggttgaggttagctctaccagtctttgttgatatggttggggttagctctcccagtctttgttgatatgrttggggttagctctaccagtctttgttcatatggttggggttagctctaccagtctttgttgatatggttgaggttagctctaccagtctttgttgatat

SEQ ID NO: 394856 - DNA, 201 bp, Homo sapiens
cagcctggccaacatggtgaaatcctgtctcttctaaaaaaaattttgaaaaaattagccgggtgtggtggtgcatacctgtaatcccagctactcaggagctgaggcaggagaatcccttgaacctgggagccagaggttgcagtgagccgagatggcgccactgccctccagcctgggtgacagagtgagagtctgtct

SEQ ID NO: 394857 - DNA, 201 bp, Homo sapiens
cggaggttgcggtgagccgagatcatgccattgcactccagcctgggcaacaagagcaaaactccatctcaataaataaataaataagttcaccccactaygggcaagaagccacacagaaagaaaaataaaataggtatctctggggttttctgaagggaaagtaagtgcagctctgtcccgtctttgcagctctaaata

SEQ ID NO: 394858 - DNA, 201 bp, Homo sapiens
gcggtatggatggaccacggttggttcaaccattctcccttgaaaggcatctgcatcgtttgcatttgggactactacaaatacatccgccaggaacatgyggacaggcctttgtgtgaacatcagttctccgcgtacatcatctctctgccctggtgcttgcatctttagttggttttttctgtcttttgaagaacctac

SEQ ID NO: 394859 - DNA, 201 bp, Homo sapiens
cccttacaaaaaacagaaaaacaaatatccagtaagacctaggagaagacagtgtgcaataccaaagcagtgttcttgtcttctgtatagaaccacagccytctgtccttgtgacagcttaacctaaagcctgatgtcctcagaagcaacccaggggcaccggccccatcagcaggcctgctcttctagctctcggcagaa

SEQ ID NO: 394860 - DNA, 201 bp, Homo sapiens
gctgaactgagctgctcctcacctagtcacgttccccaaaccagcaggtgcagcccgcagcccgggggcatgtgcctcagctgggctttcctgtctaatcmgcttcagagcctggatggcaaccaacactttggtctggaaacctggtgattccagacactcatttgtgcccggtgcaggcagggccacgggacgccagcc

SEQ ID NO: 394861 - DNA, 201 bp, Homo sapiens
ccacccctcgctgacagggaagccttccagcccttcctccaaagagccttggctctcaggggttggaggttggacaagagcagaaataaaggcaccctgcycccaccccccacaatcttccggacgtctagagtgcttatctctttgggggcaagtaatgtgaattattttccctaatgcaaaaataaaaaataagagacc

SEQ ID NO: 394862 - DNA, 201 bp, Homo sapiens
cggcacagcacaggtcagcagaggccttgaccacagcatcccagtgaacctcagcctcgttctgcccacctgcctctggcacctggtgacgtttgataatytcacaagaggccgtgatgcctcagggcctgtcccagggagcatgccgcttcctcagaggtgtctgtctggtgggactgcaggagcatggggacgtgcagt

SEQ ID NO: 394863 - DNA, 201 bp, Homo sapiens
acctggtgacgtttgataatttcacaagaggccgtgatgcctcagggcctgtcccagggagcatgccgcttcctcagaggtgtctgtctggtgggactgcmggagcatggggacgtgcagttgcaggggcagctgagcggcaggagggacctcctggccaggccagggcacaggcagctcccccagcccccacggcacctt

SEQ ID NO: 394864 - DNA, 201 bp, Homo sapiens
aatgttcaaaccagcgcacagccttctgggtggctttgggaggagaggtgggcgggcccaggcacagggtgactcggaccccctgcctcccgcagttctgygtccacgacaactacagaaacaaccccttccacaacttccggcactgcttctgcgtggcccagatgatgtacagcatggtctggctctgcagtctccagg

SEQ ID NO: 394865 - DNA, 201 bp, Homo sapiens
cctggtgacgtttgataatttcacaagaggccgtgatgcctcagggcctgtcccagggagcatgccgcttcctcagaggtgtctgtctggtgggactgcasgagcatggggacgtgcagttgcaggggcagctgagcggcaggagggacctcctggccaggccagggcacaggcagctcccccagcccccacggcaccttc

SEQ ID NO: 394866 - DNA, 201 bp, Homo sapiens
gtcacggtggccccccaaatccagaaccgccctcctcgctgtgtgaggagggtcctgcctgcaccgctttgcagacatgggccagcctggatgcctgggcracgctgccctgcgactcgctggcctgcaggacatctgcaaaacattcaggtctcacggcagtggccatgaacggcctcacagacactgagtggacctgac

SEQ ID NO: 394867 - DNA, 201 bp, Homo sapiens
cacggtggccccccaaatccagaaccgccctcctcgctgtgtgaggagggtcctgcctgcaccgctttgcagacatgggccagcctggatgcctgggcgaygctgccctgcgactcgctggcctgcaggacatctgcaaaacattcaggtctcacggcagtggccatgaacggcctcacagacactgagtggacctgaccc

SEQ ID NO: 394868 - DNA, 201 bp, Homo sapiens
tgcccaaggaggggacaggccctggacagacacatctgctgcatccaacataggagagctgccccctgccccataaccccagctgctgtcacctgccaccyacagcccagtcagcccccttccttttatttatttttttttcttttgagacagagtctcgctctgttgcccaggctggagtgtaatggcaggatctcggct

SEQ ID NO: 394869 - DNA, 201 bp, Homo sapiens
  misc_feature (1)...(201): n = A,T,C or G
tcccatcccaccacaccttggtcaggctggtcctgggactgtcctggttgtctcagggctctggccccatgtgtacattcaagtgtacatcccagagcacnctatgggcgaaaacacgggcttgggtgtgttttccaggaacacgaccatctccctgctgaccaccgacgacgccatggtctccatcgaccccaccatgcc

SEQ ID NO: 394870 - DNA, 201 bp, Homo sapiens
ttcctccccacaggctgtgggcaaggaagtgtcgatgccaggctggctcagtaggtggaagaaccttccggaatgcctgcccgcaggctgctgctggcatsgagtctgtgtcctattttccattcactgcatgcatcctccaagtatgatttccactcggaaccctgagctgcctcatccctcgctccgtctcccctccct

SEQ ID NO: 394871 - DNA, 201 bp, Homo sapiens
cctcaggtgatccacctgcctcgacctcccaaagtgctgggattacaggtgtgagccaccacgcccggccaccccttccattttagataagggggctttakgcctctcagggcgtgatgggaggagagtgagaggatatctgcgtgagaggaagatgacctggtccacctgccccagacaaacacctccagctcaccgaaa

SEQ ID NO: 394872 - DNA, 201 bp, Homo sapiens
tccaaagactagtgtccttggacgaggagacagagtagaaaacagcccagacacagaggagaaggccgcatgaagacgcagtgattggagatttgagtgaygcagccccaaactaagggacttcggggcccccaggagcaggaggagacaaggaaggaccctcccctggagtcttctttgagagcagggccctgcccacac

SEQ ID NO: 394873 - DNA, 201 bp, Homo sapiens
ggcggccccaggacactcacccagggcaccgtcttctgcggttccacaaggcagacctcagccattcgaagtctaagtggcttccttccagaggcagcaasaaagactgcctggacttcagcactgggaagatactcaccaccctccaggcgtgctgctgagcctccctttatcagagagcagcagcctcttctaccatgg

SEQ ID NO: 394874 - DNA, 201 bp, Homo sapiens
tgcttccagtcttgtttttacagcgatcagatggttcttcttaatttctcttgctacaaatgttgctgctgtgtacaacctgttaaagtccacagatggartaaaagctttggtttgcaaaaatgactcaatctttacaaacattctgtcatttgtaccataatcaattagtttattggatcaccgaattgcctgacagaa

SEQ ID NO: 394875 - DNA, 201 bp, Homo sapiens
aaggcagacctcagccattcgaagtctaagtggcttccttccagaggcagcaagaaagactgcctggacttcagcactgggaagatactcaccaccctccmggcgtgctgctgagcctccctttatcagagagcagcagcctcttctaccatggctttccaatttgtctacgcttccaggaagttcaaagcccagtgtaaa

SEQ ID NO: 394876 - DNA, 201 bp, Homo sapiens
taatcaattagtttattggatcaccgaattgcctgacagaatccttcctggaactagtctatggggtcatttggcatagagtcaaagcctcagacacgatragccagagttgatttcctttggcttcacataattaaactttcccagaggattatcaggttacagtgacacacacacaggctgtcagataatggacaaagt

SEQ ID NO: 394877 - DNA, 201 bp, Homo sapiens
gaagaccatgaagcaccccccaggagctggagctcctccttctggacccagtgtctcttctcagcctcacgacgaggagacctgctcatggagctgctgcsccggcctgagctctgatccctcctccgacccagcctcaccctgcaagcagcaccatgtggggctcagaatggggatcttaagggacccttcccacaacct

SEQ ID NO: 394878 - DNA, 201 bp, Homo sapiens
cccacttttttaaaaatatattttgtcatggaagatttcaggaataactgaataaatgcttcactaataacacaattaaatgtttacaggaaaattgaatwattcaagatacaagtgatccccccaaaaaaatatatatatatacagttgaaatgacctagattgatgggtttgggttttgtatctgatgcttgttgtttt

SEQ ID NO: 394879 - DNA, 201 bp, Homo sapiens
acctagaacagcacccagagcatagtaacagctccttgcagatgttacagtaccttgatctatacaacagtaaagggaaatgcatgctagctgccccagaygctgccagcttcacaggcatttttctgcctgcaaactaatcctaaggaagagaggagggcagggggagaaattgcacccagtcaaatgtaaacgatacaa

SEQ ID NO: 394880 - DNA, 201 bp, Homo sapiens
tcatggaagatttcaggaataactgaataaatgcttcactaataacacaattaaatgtttacaggaaaattgaataattcaagatacaagtgatccccccmaaaaaatatatatatatacagttgaaatgacctagattgatgggtttgggttttgtatctgatgcttgttgttttattttcttggaagaggaaaacatca

SEQ ID NO: 394881 - DNA, 201 bp, Homo sapiens
tgccagcttcacaggcatttttctgcctgcaaactaatcctaaggaagagaggagggcagggggagaaattgcacccagtcaaatgtaaacgatacaaaaygtgaaattcccctctctgaaaatgaaagggaaaaaactcgattcaatgcctgcccctgaggtgaacctgaaatgacaaggcagacactctccagaacttc

SEQ ID NO: 394882 - DNA, 201 bp, Homo sapiens
atacaaaatgtgaaattcccctctctgaaaatgaaagggaaaaaactcgattcaatgcctgcccctgaggtgaacctgaaatgacaaggcagacactctcyagaacttcacgtttggccaccagggtcttcagttgattttcctttcttcgtcatatctgagtggctgaaacgccagtgatctgggatagtcctttggctg

SEQ ID NO: 394883 - DNA, 201 bp, Homo sapiens
tgaaagggaaaaaactcgattcaatgcctgcccctgaggtgaacctgaaatgacaaggcagacactctccagaacttcacgtttggccaccagggtcttcrgttgattttcctttcttcgtcatatctgagtggctgaaacgccagtgatctgggatagtcctttggctgctgatagacttatgcaatcccttggcaggca

SEQ ID NO: 394884 - DNA, 201 bp, Homo sapiens
tcatatctgagtggctgaaacgccagtgatctgggatagtcctttggctgctgatagacttatgcaatcccttggcaggcaggacaggccagaggaagggmtcctgtgcctttaaggtcactgttaatcatgtaactttattgtgttcctgggctataaaggaaatgtcgtccttgatctgaatgtctgttttatgatgtc

SEQ ID NO: 394885 - DNA, 201 bp, Homo sapiens
tctgggatagtcctttggctgctgatagacttatgcaatcccttggcaggcaggacaggccagaggaagggctcctgtgcctttaaggtcactgttaatcwtgtaactttattgtgttcctgggctataaaggaaatgtcgtccttgatctgaatgtctgttttatgatgtccataaacagtgaattgccagtgactgtac

SEQ ID NO: 394886 - DNA, 201 bp, Homo sapiens
gatgagtttgcttcccaggaagagagacagtgccaccccacccctcgctgacagggaagccttccagcccttcctccaaagagccttggctctcaggggtyggaggttggacaagagcagaaataaaggcaccctgctcccaccccccacaatcttccggacgtctagagtgcttatctctttgggggcaagtaatgtgaa

SEQ ID NO: 394887 - DNA, 201 bp, Homo sapiens
agtaaacaattcctggaagaagtgggcgaggcagaggcttgaactatccactcagaccaaggaggagtcaggcaatggcttctgggcatcgtgtggggtgsgggcagcccctgccctggacacccgtgaacacggaggcagccgtgtgaacaccatgaggcagggtgtccatcctgccacccacacagctgcgtcctgccc

SEQ ID NO: 394888 - DNA, 201 bp, Homo sapiens
ggtcataggccctctgtttctttccattgctctacctgtctgtctttctgccagtacctcacagtcttgattaccgaaattatgtcataagtctcaaaaakaagataggctgattcctctcattttgtctgttgtttttcaaaattgtttttattcttgtgaatcctttccctatctaaatgttagaataatctctatttc

SEQ ID NO: 394889 - DNA, 201 bp, Homo sapiens
tttgtctgttgtttttcaaaattgtttttattcttgtgaatcctttccctatctaaatgttagaataatctctatttctacaaaaaaaaaaaaaaaaaaamaaagtcttgctaggctttcaatgggaattgtgtaaaacttgtttacctatgtggggagaatttactatgttgagtcttccaacccattaacatggtcagt

SEQ ID NO: 394890 - DNA, 201 bp, Homo sapiens
gggaggccaaggcaggcagatcacttgaggccaggagttcaagaccagcctggctaacatgctaaaaccccggctctactaaaaatacaaaaaattagcckggcttagtggcgggcacctataatcccagctactcaggaggctgaggcagagaatcacttgagcccaggaggcggaggctgcagagagctgggatcatac

SEQ ID NO: 394891 - DNA, 201 bp, Homo sapiens
aacagcagaaaatagggggtgaccaggcacagggcagtgcttcaggggatatcacctgggctggggtggccagaaaggctggaaggaggggacccaaacargaccttgaaggttcattctccattgagaagggagcctgtcctccctgaaggcagccaagctcagttgcatggtccagcaggtcctccgtctcttcctgcc

SEQ ID NO: 394892 - DNA, 201 bp, Homo sapiens
gcccgcgaattcagaacggtaagaggctccggccgcgctcctcggggtgtgcctggcacttctctccatgacatgggaggctttctgtgattttgtaaatktgctactgcagaaaggtgtgaattgacagcagagatggagagcgagggtaggagccagtgtgaaggaagcttgactcgtcgtgttcccctgcagaggagc

SEQ ID NO: 394893 - DNA, 201 bp, Homo sapiens
caggctagagagaagtggcgtgatcttggctcactgcaacctctgccccccgaagacaggacacttctgtctcagcctcccaagtagctgggattatagcygcccgccaccatgtccggctaatttttgtatttttagtagagatggggttccgccatgttggccaggctggtctcgaactcctgacctcaggtgatcgac

SEQ ID NO: 394894 - DNA, 201 bp, Homo sapiens
caccatgcccgcgaattcagaacggtaagaggctccggccgcgctcctcggggtgtgcctggcacttctctccatgacatgggaggctttctgtgattttktaaatgtgctactgcagaaaggtgtgaattgacagcagagatggagagcgagggtaggagccagtgtgaaggaagcttgactcgtcgtgttcccctgcag

SEQ ID NO: 394895 - DNA, 201 bp, Homo sapiens
tcgttttttaaactaaaagaaggaaaaagaaatcttgagcttgcccctgtgataaaatatatactagttaagcatttgaatctaagcatttgaaatatatrtgagttacctttgaagcatttaactatatgttagttaagcatttgaatctgcatttgaagccgatacaactgcagaatctgaaaccttgtactactgtaa

SEQ ID NO: 394896 - DNA, 201 bp, Homo sapiens
agcatttgaatctgcatttgaagccgatacaactgcagaatctgaaaccttgtactactgtaagggctctgcctttctaaccccagggagaatagcatctkcctggggttagcctcccttgtgtggattttttcttactccttttggccactgcctgttcctggtctatggccgttccattggctgcactgtctgtccctg

SEQ ID NO: 394897 - DNA, 201 bp, Homo sapiens
caagccgtggccagtctgctgagagaccactgagggacagacgggttgtgggcctggagcagccccggagggaaggagcatttgaaagtggacaggtagarcccaggcccagagagccccagggctgctaccaggaaggccagcgcatccctccaggtaacgggcagctcctcggccacagcctccaccccccaacacgtg

SEQ ID NO: 394898 - DNA, 201 bp, Homo sapiens
gaaggccagcgcatccctccaggtaacgggcagctcctcggccacagcctccaccccccaacacgtgggattcgggctgcaatggcctacacatcttttcytcttgtccgtgttccatctgtctttcttctttggtttgtagagagagaagaattaatccagagcgtgctggcgcaggttgcagagcagttctcaaggtac

SEQ ID NO: 394899 - DNA, 201 bp, Homo sapiens
cattggctggaagctcccagaagctcctggccacagcagtgccctggggacccaagggaacccctccctccttcctcacctcctccagggcccagagtggmgccccaaaaagagggtaccctcgccatgcgcacgtgcatcccactgacctgcacttcccagcctgtatttaattcagccttcactggctccctttgagat

SEQ ID NO: 394900 - DNA, 201 bp, Homo sapiens
  misc_feature (1)...(201): n = A,T,C or G
gcacgggggacacaggaggcaggaaggggactttctgtaggacctcatggagggtgatgagggccagagacagagccgcagtgggtggaggcagcagagcnggcacgagggtgtccaggagctgggactggcccagaggtttccgcacggagcacctgacacctgtttttctccgacgtttcccattgccttaagaacgag

SEQ ID NO: 394901 - DNA, 201 bp, Homo sapiens
ctggttttcaaggtcatgactcttactaggaaagtccgggcagggcctccctcctgatgggtcctccttcatggtcagaggcagcattctcccattcctcyatctcttttggatttgaaggagataagtgggtgaaggccgtgcatctcgctctgctttccagagaataaaaccagctctcccatgaaggcacagccccag

SEQ ID NO: 394902 - DNA, 201 bp, Homo sapiens
acacgtgtaccttccatcagaaagcctggctcagtaaaattagggaatgcgatgagggaaaccaaaactgcattcgccaagaacacgtcaggtctcagtascttcgagggagtttactggccgtgcccttcacaagaatcacaactgtcacccacacctgtggacacccaggtgtctttgggtgtatcagccgccgttaga

SEQ ID NO: 394903 - DNA, 201 bp, Homo sapiens
tgctggtaggtgcacccccttcaagccagcccaaggagccatgatttgagtcggtcttgccagatgtgtctggagagaatttaactccaagatcatccccygtgcactctgaggggctgggacaggatgtggtgccctttgtgcccaggaggagaagcacccagtggggcggggtggggcgaggactttataaaggcgtca

SEQ ID NO: 394904 - DNA, 201 bp, Homo sapiens
cagagaataaaaccagctctcccatgaaggcacagccccagcatggcactctgaaagcccacctatgtgggggcaactccaacacagctcccgctccccargccagcatcccccaccaggcccacaccatagcccagcacccctccataaccaggacaaggtggccagagaaggggtagggggcctcccccatgagaaggt

SEQ ID NO: 394905 - DNA, 201 bp, Homo sapiens
acccgggatgccaatggcatcctacagcgcacaggacaggcccacaacaatgacacacgtggccggagacatcagcggtgctgaggcggagcacctggtgwctgaggtctcccctgtgctctgtcgctgtcctctcaccctcccccaatcttccaacctagtagttctcagacaactgcgtcagaatccgcagggggcttg

SEQ ID NO: 394906 - DNA, 201 bp, Homo sapiens
ggcacagccccagcatggcactctgaaagcccacctatgtgggggcaactccaacacagctcccgctccccaagccagcatcccccaccaggcccacaccrtagcccagcacccctccataaccaggacaaggtggccagagaaggggtagggggcctcccccatgagaaggtgcacttaggttgcccagcatctgccttt

SEQ ID NO: 394907 - DNA, 201 bp, Homo sapiens
accgccctacagacaaagggcccaaagtgcagggaggtcagtgccacacaggttttattttttcacattattggtgtttaaaattgtaaagattttccacrttacctgtaaccatcaaaccacatgtattgcccccagttaatcaccatgaacagcttggtgtgtatacccctccatattcactgtgtttcttcttccagg

SEQ ID NO: 394908 - DNA, 201 bp, Homo sapiens
gccccagcatggcactctgaaagcccacctatgtgggggcaactccaacacagctcccgctccccaagccagcatcccccaccaggcccacaccatagccyagcacccctccataaccaggacaaggtggccagagaaggggtagggggcctcccccatgagaaggtgcacttaggttgcccagcatctgccttttggaaa

SEQ ID NO: 394909 - DNA, 201 bp, Homo sapiens
gaggaatattttatgcaggtaagagtcttgcagagcaatcaagcctccagccactcttattagccccacttagtaagggtttgcgttaaacgagcacgccwgggtggtcccgcatattccccgggctgccgacagttcagcctccagaaagccttcagggtaagcgtacatcagaaacaaaataggttataatttgagacc

SEQ ID NO: 394910 - DNA, 201 bp, Homo sapiens
aagccttcagggtaagcgtacatcagaaacaaaataggttataatttgagacctgaaagacagtaacaatccagaaaagctaatactctaaaactgtcacmtgtcactgctaattgagccattattacaagcagccttgtcaaacaaattgcctgaaagtcaagaagcaaggactgcagaagcaggagggggcccaggagg

SEQ ID NO: 394911 - DNA, 201 bp, Homo sapiens
tctggactcggccatcacgacagcgaccacactggctccagccacatgcacttccggaccccatgtcctctagctgttgggtagaagaggggtggagaagrtttctgtagcacagaaacacatcagcaggaccagatccaaatattgcactctccagattcttcgtccttctggcagaaagaagcagtgtcccgggaacat

SEQ ID NO: 394912 - DNA, 201 bp, Homo sapiens
ttggagaaagcggggtggttgtgtgtgtttggtccccagccccacatcaccccataggtgccttttctacccagggggcttgacccagatcaacactgggygaaaggctgacttcagaaatgggttgaaaagaccagtgatctgccttatcgagtcctcagagtcccacaggagttaatgtcctaaatcaacagtgtgttc

SEQ ID NO: 394913 - DNA, 201 bp, Homo sapiens
cccaccagccacgagtgagtgagccgtgtttccacgggggttggcattattttgtatcccagccattttgataggtgtgcagtggtgtctcactgtggttrtaactggcatttcctaatggccgagtggctctcagcatctcttcatgggcttctttccatctgtgactttctccagtacccatctgctcatctcttgccc

SEQ ID NO: 394914 - DNA, 201 bp, Homo sapiens
tacagtgacacacacacaggctgtcagataatggacaaagtcccagcagcgtgtacaaccagctggtggctcccaaattcaaattcccccagcggcatccrttcggttattcgtacccacaccctcccttagaagtttacccctccgccaggcgcagtgactcacgcctgtaatcccagcactttgggaggccaaggcggg

SEQ ID NO: 394915 - DNA, 201 bp, Homo sapiens
agcatctgggacccctcagagtacagtgcctggcctggccccagggctgacttgttcagaggaggccatggggtagaaaggggccctcccctggcacgggracaaagcgaccacccacctgccagctcccgggcccagaacacacaccggcacctctcaggggccagggagcctggggctggctttaggttgctgctggat

SEQ ID NO: 394916 - DNA, 201 bp, Homo sapiens
gatacatgcatgcacacacaggcacacacacatatacacatatgcacacaggtacacacagacacacactcatgcacacacgtacacagatacacacagaygcacatacaggcacatacacatatacacacacgcacacagctacacacaggcacacacacaggcacacacttgtgcacacaggtacacaggcacacaaat

SEQ ID NO: 394917 - DNA, 201 bp, Homo sapiens
ttactggagccagggtcaggacacgtgtggatgaaccacgaccaaactggggatggaaatgccggtagtagcaaagagacggcggtgatgatgagcagagygcatgcattgaggcacttactgtgtgcgggcgctgtgcttagtgaggggcacacaggacctgctcacacctccgggctttgcctccatgcccgctggtgc

SEQ ID NO: 394918 - DNA, 201 bp, Homo sapiens
cgcagtgaggagtcgctggctgtccaggggagctgcattttcctagcagcgacaacccctcccacatctccatagtcacatcctggctgggctaacaccayctttccccgcctctgggtgcgtggggaccccgctctccaaataggccagtgttccaggcttttctttaggagacaaagtcggtgtcaggtagaccccccc

SEQ ID NO: 394919 - DNA, 201 bp, Homo sapiens
gtcgctggctgtccaggggagctgcattttcctagcagcgacaacccctcccacatctccatagtcacatcctggctgggctaacaccacctttccccgcytctgggtgcgtggggaccccgctctccaaataggccagtgttccaggcttttctttaggagacaaagtcggtgtcaggtagaccccccccaccccaccaa

SEQ ID NO: 394920 - DNA, 201 bp, Homo sapiens
cacaggtacacacaggcacacctgcacacctgcacatcctgagcagcctcttccccggctgtcgtggtgaccgctgtccctgttccatccagagcctgctmcccacagcctggcccgtgaccccagcatctcccactctgtgctgcactccctgccttgccttgctgggccctggggggcccctcactgccctcacccatc

SEQ ID NO: 394921 - DNA, 201 bp, Homo sapiens
cctgctccccacagcctggcccgtgaccccagcatctcccactctgtgctgcactccctgccttgccttgctgggccctggggggcccctcactgccctcrcccatcgctgccggccttcaggaccctggaggcagcactggctgtggactctcctgtccccactctgcgtcccagttcctcacctgtggaggaacccctg

SEQ ID NO: 394922 - DNA, 201 bp, Homo sapiens
gtaagtgcggggcttgcaggcaccacgtcccagggggaggcagctcaggatcttggacgccagtgggaccacccccatcgctcttcctccttcttgctttytcctcttctttttaaagactgaaaaaaaaaaacaaaacttgttttgccaggttttagttgaaactaactaacactttatagcagggcccaggagacttca

SEQ ID NO: 394923 - DNA, 201 bp, Homo sapiens
tgagtctctagtcctgagccctgctgcccagtaggggatagtagggttccttaaggcctctgccttcccccctgtcagcccccacaaaaaggagagacacrccaaagaggtgaaaaggccaagcccaagccgcaggctctgcacacaccaccagtccccgcggctgtggtggctgcagctgggtgagctcactgtccaggc

SEQ ID NO: 394924 - DNA, 201 bp, Homo sapiens
aggtggggcttgccccacgaagctgggggatctgtgtctccataatagaaaggccacctctctgtcctctgatcacagagtggattcacagctgctctcgsggctggcaggtgggcaaggcagacagctcccggcagctggactcagcctctgggtggcatctcccacggcccgtggctcctgcccagcagatctcaaggg

SEQ ID NO: 394925 - DNA, 201 bp, Homo sapiens
gacacgccaaagaggtgaaaaggccaagcccaagccgcaggctctgcacacaccaccagtccccgcggctgtggtggctgcagctgggtgagctcactgtmcaggccccagatgaggcaccaagggtagcgggacagggtatgcagagctgcctctgaaaagcccatgtcaggagtgcttgggctcagaggggctggggac

SEQ ID NO: 394926 - DNA, 201 bp, Homo sapiens
actcctgacctcgtgatccacccaccttggtctctcaaagtgctgggattaaaggtgtgagccaccgcgccctaattctaacaaaaacaaatcagtcatcrtttcccttcttccaggagactgtgcctgaggaaagcggggggcgtggctgcagttctggacgggctggccgagctgcgcgggatccttgtgcagggaaga

SEQ ID NO: 394927 - DNA, 201 bp, Homo sapiens
atgtgaattattttccctaatgcaaaaataaaaaataagagaccccttttacccttttctgaaaggatagcagaggtatttttcttttcttttttttttttgagatggaatcttgctctgtcaccaggctggagtgcagtggcacaatctcagctcactgcaacctccgactccctggttcaagtgattctcctgcctcag

SEQ ID NO: 394928 - DNA, 201 bp, Homo sapiens
caggagaatcccttgaacctgggagccagaggttgcagtgagccgagatggcgccactgccctccagcctgggtgacagagtgagagtctgtctcaaaaawaaaaaaaaaaaaaaaagaaatattccttcgttcttttataggagcatagtacttcattttgtagatgtactattgtgtatcctactgatagatacttgtg

SEQ ID NO: 394929 - DNA, 201 bp, Homo sapiens
gctctaccacgttgctatttgctgtttcttgatcttgggttttgtttttctgttcctccttttctgccttctcctgtgttaattgaataaatttttgttttccattttattccttctgctgactctttagctgtctctttttgcattatttttcctcggctgttgtaagtgttacaatatgcatctttacttttttttttt

SEQ ID NO: 394930 - DNA, 201 bp, Homo sapiens
tctagctctcggcagaaaccaggaatgggttccagacaggagcatctcagaataacttcttaggtggtatctgaatttatgccaagtgaattttacccccrcacttcactttattgccctttttttattattatttttgagatggagtctcactctgtcgcccaggctggtgtgcagtggcacgatcttggctcactgcaa

SEQ ID NO: 394931 - DNA, 201 bp, Homo sapiens
gttagctctcccagtctttgttcatatggttggggttggctctaccagtctttgttcatatggttggggttagctctaccagtctttattgatatggttgrggttagctctaccagtctttgtcgatatggttggggttagctctaccagtctttgttgatatggttggggttagctctaccagtctttgttgatatggtt

SEQ ID NO: 394932 - DNA, 201 bp, Homo sapiens
tcagttcgtaacatgcccttttgggaggagaaagtcaggcaatgagcagacacaggcaggaagccacgccgggctccagcagggatggcccagtgccctgyacaggcagcaggcagctgggctggaggtgggccctgggtggaggacacctaccaggtgtgtctaaactgcccctttcctacacatcttccttcgcactgg

SEQ ID NO: 394933 - DNA, 201 bp, Homo sapiens
gcagagcccccaagtctttgttgatatggttggggttagctctcccagtctttgttcatatggttggggttggctctaccagtctttgttcatatggttgrggttagctctaccagtctttattgatatggttgaggttagctctaccagtctttgtcgatatggttggggttagctctaccagtctttgttgatatggtt

SEQ ID NO: 394934 - DNA, 201 bp, Homo sapiens
tgttgcccaggctggagtgcatgaccatgggaaatgtatctaatttttgtcaatttgttaaaactttttttttcattccaattttttttttttttttttttgagatggagtctcactttgtcgcccaggctggagtgcagtggtgcaatcttggctcactgcaagctccacctcccgggttcacgccattctcctgcctca

SEQ ID NO: 394935 - DNA, 201 bp, Homo sapiens
gacaaagcgaccacccacctgccagctcccgggcccagaacacacaccggcacctctcaggggccagggagcctggggctggctttaggttgctgctggayagatatcattttggaggaaggggtccaggtcacagcctcagggcccacgcagtctttctacggattccccacggctgtctgctgtcctgctgcccatggt

SEQ ID NO: 394936 - DNA, 201 bp, Homo sapiens
tcttgaacctgggaggaggaggttgcagtgagcagaggttgcgccactgcactccagtctgggcgacagagcgagactccatctcaaaaaaaaaaaaaaaagaaagaaaaaaagaaactgccaagctgttctaccaagaggttgtaccattccacattcccaccagcagcatctgagtgatccagctgttccacatccctg

SEQ ID NO: 394937 - DNA, 201 bp, Homo sapiens
cttccactttgcacacggtgttgcaggctccccgcgttgtggcatatgacagctctttgttcctttatggctggatgacgttccgttgcgtggctgcgtcstgtggctgcattgtgtggctgtgtcacgtggctacgtcacgtttggttgatccgttcatcagctgatggacatttgggctgtttccacaaaggctcttgt

SEQ ID NO: 394938 - DNA, 201 bp, Homo sapiens
  misc_feature (1)...(201): n = A,T,C or G
tgaaattattagtcttcttggaacaaggtgtctataaatctggttttcaaggtcatgactcttactaggaaagtccgggcagggcctccctcctgatgggncctccttcatggtcagaggcagcattctcccattcctccatctcttttggatttgaaggagataagtgggtgaaggccgtgcatctcgctctgctttcca

SEQ ID NO: 394939 - DNA, 201 bp, Homo sapiens
  misc_feature (1)...(201): n = A,T,C or G
gaaattattagtcttcttggaacaaggtgtctataaatctggttttcaaggtcatgactcttactaggaaagtccgggcagggcctccctcctgatgggtnctccttcatggtcagaggcagcattctcccattcctccatctcttttggatttgaaggagataagtgggtgaaggccgtgcatctcgctctgctttccag

SEQ ID NO: 394940 - DNA, 201 bp, Homo sapiens
ttttccacttttttctccccaagaccgtttattagcaattgaaggaacaacgcatgtatcaaagactggatttgagaaattccaacaaatctgccccctcrcagttgggagctggcatcgtgcaatcttcggaatgcagcctctggctctcccatcaaaaggcaacgcagccccctgtgatttcagctttgaccttgtggg

SEQ ID NO: 394941 - DNA, 201 bp, Homo sapiens
atgcccggctaattactgtatttttagtagagacggtgtttcaccgtgttggccaggttggtcttgaactcctgacctcaggtgatccacccacctcagcmtcccaaagtgctgggattacaggcgtaagccagcccagcctcatctgagatttttgaatggagactagtgcctttttccattggaaaatatgccccgcgc

SEQ ID NO: 394942 - DNA, 201 bp, Homo sapiens
gtcgggaggctttctgcaggacgctgctgccgtcctgggatacatccatccaactcacctctgcctatctctcaggtcggtcttcccagctagacctgcaygcccagctctgtttagcactgaagatagggtcaccttctccttgttcttactgagacacatttgtggtgtggtttggttggttggtggttaactggcgca

SEQ ID NO: 394943 - DNA, 201 bp, Homo sapiens
tagaggtaaattgcagatgaattgcagatgtacacagacagatggatggacagatgattgatatagattgattgacagatgattcatagataacttgcaaygtttcttcagtgaacgcatatttatttcttgggtaataagaaaaaacaatagaatgtggaatttggggcttggcctcttttagctcatttaaaaaaatat

SEQ ID NO: 394944 - DNA, 201 bp, Homo sapiens
actcctgcctggctcctccgcagcctcaatgcccttctgagagctgcctgccccagtaggaggccaggctgggaccaaggacacccagttctgggtaaccrtcttcccatggctccttggacaaccaccttaaagaagggaaaggcaagaagcagaaggaaagcagaggctggacattggaatcagcctttctttaaacta

SEQ ID NO: 394945 - DNA, 201 bp, Homo sapiens
cagacaaaatgtggcgaaaagtttttctaggtgcctttgttcactcagagacttcctagagacttgtgtgaaaatcacaggatttgcaaccagtggggacrttgagattcgtggcaactgaaatgatacaaacttgaactttgtgtcaaaccagtagtgttttgtgtaattcttttcaaacctgtcatttcacttactgct

SEQ ID NO: 394946 - DNA, 201 bp, Homo sapiens
gtggaactttgcagcttgatctccaggcttggtctgtctcaagattagcccctggaacgtctaagaaggtgcataatgagatgcgtgcataatgagatgcrcacatacagttagagaactgtgaagcgggtatagacagtgagaaaggcggggacgtgaagcctactttaaggctaagggaaaaggcttctgcagttcgct

SEQ ID NO: 394947 - DNA, 201 bp, Homo sapiens
aatcgcttgaacctgggggtagaggttgcagcaagccgagatcacaccactgcactctagcctgggtgacacagtgagactctatctcaaaaaaaaaaaaattgtacaacctcagtcttttttagtgtcttcattttgttgtgcaaccatcaccactatttaattccagaacatttccatcaacccaaaaagaatccctgt

SEQ ID NO: 394948 - DNA, 201 bp, Homo sapiens
actgcaacctctgcctcccaagttcaagtgattctcctgcctcaccctcccaggtagctgggattacaggcgtgcaccaccaagcctgggtaattttttttgtatttttggtagagacgggattttgccatgttagccaggctggtctcgaactcctgacctcaggtgatccacctgtcttagcctcccaaagtgctagga

SEQ ID NO: 394949 - DNA, 201 bp, Homo sapiens
aagaccagtgatctgccttatcgagtcctcagagtcccacaggagttaatgtcctaaatcaacagtgtgttcgagccagtgaattttctaattatcagcaractttccaaatgtaaagggtgagcaggagtagctttggctcaaggattaactttaaagttaggacggaggtggagaagggcaattgaagtttctcacaga

SEQ ID NO: 394950 - DNA, 201 bp, Homo sapiens
gcatttgtggcccctgggatgccttggggtgcctcatacagttacttgggccgctgtgttacaatcctttttctttttctttttttttttttaaaaaaaaacggagtctggtcctgtcacccagggctggaatgcagtggcacgatctcggctcactgcaacctctgcctcccaagttcaagtgattctcctgcctcaccc

SEQ ID NO: 394951 - DNA, 201 bp, Homo sapiens
gtgcaatggtgtgatctcagctcactgcaacctctgcctcccaggttccagggattctcctgcctcagcctcccaagtagctgggatcacaggcatgcacraccacacctggctaattttgtatttttagtaaagatggggtttctccatgttggtcaggctggtctcaaactcctgacctcaggtgatccgcccacctca

SEQ ID NO: 394952 - DNA, 201 bp, Homo sapiens
tcttatttgaaccactccctgtaagctagttccactaaagagtggctttccaccctggctgcagattgcaaccacccaggaatctttttttttttttttttgagacggagtctggctctgtcgcccaggctggagtgcagtggcgcgatctcggctcactgcaagctctgccttccgggttcacgccattctcctgcctca

SEQ ID NO: 394953 - DNA, 201 bp, Homo sapiens
ggcggggcatgctgggtgcaggatggaatgagttggggacggagtgaaccagtccagctcgtgcgtgcctccccctctgcactgcccagagcagttttttyttctggggacgcagggcaacgtctggagacatttctggatgtcaccaggggtaagggcctgctacttgtatctgatgggtggagacccgggatgccaatg

SEQ ID NO: 394954 - DNA, 201 bp, Homo sapiens
ataccagtggggataacgggcaaggagaggtgctgtttactgtcttattgttgccagttcagcagcccacaggaaatggtgttagtcacagaaaaaaaaaatctgttttctatatttcactgtttccaagtaaagaaaaaagaaaactaatcttagcttaaaaaaaaaaaaaatggtgcgctgggcaccgaaaaataacca

SEQ ID NO: 394955 - DNA, 201 bp, Homo sapiens
aggatcctagcacagcccacaccctgcatttgcttggtgtctcctgaggtctctagttatacttcccatcccttttcttgccatgtatttcctgaacacatgttatctttgatccttaaaccatgacttagagatacagatgtatgacaagctgagagatgatgtgagactgttgttaattttttctccatgtactaatta

SEQ ID NO: 394956 - DNA, 201 bp, Homo sapiens
cagttttacaggccaggcaacaaagggagcaaccggctggacccaggcctgcctcccccgtgcagacccgccgtgagaacaccgtgttctgaattgagacstgccttgcactcactttgtcccagtaattgcccccataaaatagacctggacactaagaggaaacttcccatatttggaaacccagtcctgcctgctttt

SEQ ID NO: 394957 - DNA, 201 bp, Homo sapiens
tcccaatatgttttcaaaagcaggatcactctctatgactgctttaaaatcttttttttgtactttaacaacagacatgaacatttttcaaaatattattyctaatagcaaaatatcattccagatatatgtctgatgatacagttttctcatcatttatttaatgagtctccattgggtgggcgtgcaggttgtgacagt

SEQ ID NO: 394958 - DNA, 201 bp, Homo sapiens
caggatcctagcacagcccacaccctgcatttgcttggtgtctcctgaggtctctagttatacttcccatcccttttcttgccatgtatttcctgaacacatgttatctttgatccttaaaccatgacttagagatacagatgtatgacaagctgagagatgatgtgagactgttgttaattttttctccatgtactaatt

SEQ ID NO: 394959 - DNA, 201 bp, Homo sapiens
tgctcacacactcacacatacacttacactcacagtcacatacacccacattcacacacatacactcacattcacacgcacatacactctgacacacatayacatacattcactcacacatacattcacacacacacggatgcattagttttcaagtcaggatcctagcacagcccacaccctgcatttgcttggtgtctc

SEQ ID NO: 394960 - DNA, 201 bp, Homo sapiens
actcacaccttcacacacacaggcaatcacacattcacactcacgtacacttacccacacattcacacatacacacaccacatacacgcatacacttacayatgcactcacacactatcacattcacacacacatacacttacaaactatcattcacacacatacacacatacacatgcattcacacacatgctcacacac

SEQ ID NO: 394961 - DNA, 201 bp, Homo sapiens
ttcaacagatgcatggcaataaaaggaaagcaccatgtttcaccttcacacacacacacttacacattcacacactcacatacttacacacattctcatayactcacacatatgcttacacacattcacaggctcacacatgcttacacacacattcacacgcacacacattcacacgcacacatacacttacacacattc

SEQ ID NO: 394962 - DNA, 201 bp, Homo sapiens
ctttcccccctgcagttctagtggaatctcccctcccttatcccattcccacttggaaatgatgatgatggaatgggcgatgccggcttaccaagacatccaagctctctgggtcgaagttggagagaggggtgcacaaaaaggattccactcctgtctgccttcccctgcctccccgctggggtgtccctttcccatggt

SEQ ID NO: 394963 - DNA, 201 bp, Homo sapiens
cgtgatctcggctcactgcaacctccgcctcccaggttcaaggaattctcctgcctcagcctccggagtagctgggactacaggcgcctgccaccaggccyggctaattttttatttttagtagagacggggtttcagcaccttgaccaggctggtctcgaactcctgaccatgtgatccgcccgcctcagcctcccaaag

SEQ ID NO: 394964 - DNA, 201 bp, Homo sapiens
tttccattggaaaatatgccccgcgcttctcaggatcctgtcccagggagccgtgaagcacagcctagatccaaaataaaaggtgtcagccctccagatcygtccccttacaaaaaacagaaaaacaaatatccagtaagacctaggagaagacagtgtgcaataccaaagcagtgttcttgtcttctgtatagaaccaca

SEQ ID NO: 394965 - DNA, 201 bp, Homo sapiens
aattggctccactggaaaataagcttcctcgctgagcttctgtgtagttaggagacttccttttcatcggagtcatcccaacaatcctgacctggataccstattttccatttctcaaactgacttctctgtggcgtcttactgcccaggttaattaaaatagtgaaaagcacagacgggtgggattttttaaaaaccttt

SEQ ID NO: 394966 - DNA, 201 bp, Homo sapiens
tctgtccttgtgacagcttaacctaaagcctgatgtcctcagaagcaacccaggggcaccggccccatcagcaggcctgctcttctagctctcggcagaarccaggaatgggttccagacaggagcatctcagaataacttcttaggtggtatctgaatttatgccaagtgaattttacccccacacttcactttattgcc

SEQ ID NO: 394967 - DNA, 201 bp, Homo sapiens
gggattacaggcatgcgccaccaagccggctaattttcggtatttttaatagagacggggtttcatcatgttggccaggctggtcttgaactccagacctyaggtgatccacctgcctcgacctcccaaagtgctgggattacaggtgtgagccaccacgcccggccaccccttccattttagataagggggctttatgcc

SEQ ID NO: 394968 - DNA, 201 bp, Homo sapiens
tctctgagaacagcgatctggttatggggcatttctgtctctaatgtcactgtctgctgcattccctgcagagcgaccgtgagaagtcagaaggccttccygtggcaccgttcatggaccgagacaaagtgaccaaggccacagcccagattgggttcatcaagtttgtcctgatcccaatgtttgaaacagtgaccaagg

SEQ ID NO: 394969 - DNA, 201 bp, Homo sapiens
ctccagcggatgtgctttagcgggaggtggccaggatgctgcacctgtgctgagccccagagattctgagttccagagacactacaagggcagcagagccktaacccaaagatgcaagagcccagacattttaggaagcttggagggcagaaacggaaagtccttttgaggagagggcctgcagctgaacctctcacgcag

SEQ ID NO: 394970 - DNA, 201 bp, Homo sapiens
gttttgcaagcatgaaacagagggaagggctaccaaatggatctccgtggagcggtggttatcacggggaagagacggcagcatgccgagaaaataacacygaagcctctttttccagaaaggaaatagattgattattctagttttgaaaatagcacaggctcattggaaaacctccaaactacactgatgggagctgaa

SEQ ID NO: 394971 - DNA, 201 bp, Homo sapiens
acgtgagggtcaggggtccccagattcctgggagctggggccggtgccctggcagaaacacggcctcaggcagggtccagggcctgtgggggtgagtcacsttgttatgggctgaattctctccccaaaacttacgtccaagcccaacctggtgcctcccagtaccgtatttggagacagtgcctttaaaaggtggttaag

SEQ ID NO: 394972 - DNA, 201 bp, Homo sapiens
ctgtgttctctgaaacatgtgctgtgtccactcagggttgaatggattaagggcggtgcaagatgtgctttgttaaacagatgcttgaaggcagcatgcgsgttaagagtcatcaccactccctaatctcaagtacccagggacacaaacactgcggaaggccgcagggtcctctgcctaggaaaaccagagacctttgtt

SEQ ID NO: 394973 - DNA, 201 bp, Homo sapiens
cctgtgttctctgaaacatgtgctgtgtccactcagggttgaatggattaagggcggtgcaagatgtgctttgttaaacagatgcttgaaggcagcatgckcgttaagagtcatcaccactccctaatctcaagtacccagggacacaaacactgcggaaggccgcagggtcctctgcctaggaaaaccagagacctttgt

SEQ ID NO: 394974 - DNA, 201 bp, Homo sapiens; identical to SEQ ID NO: 86792

SEQ ID NO: 394975 - DNA, 201 bp, Homo sapiens
tataatcctgtaacgtttctgcgactgctggcacttttttttttccttcttttgtgagacggagtctcgctctgttgcccaggctggagtgcagtggtgcratctcggctcactgcaatctccacctcccgggttcaagcaattctcctgtctcagcctcccgagtagctgggattacaggtgtgtgccaccacgcctggc

SEQ ID NO: 394976 - DNA, 201 bp, Homo sapiens
gcgggtgcctgtagtcccagctacttgagaggctgaggcaggagaatggagtgaacccaggaggcggagattgccgtgagccaagatcgcgccactgcachccagcctgggcaacagagcgagacttcgtctcaaaaaataaaaataaataaataagccgggcgcagtggctcatgcctgtagtcccagcactttgggagg

SEQ ID NO: 394977 - DNA, 201 bp, Homo sapiens
agcccatgtggcccacaatgcccttttgagcactgagccattttccaggcgtagccttgggttggtctcatctccctcgactgacggccccgtgctccccrtgcccacacccgcctggagcgccatgccaggcacatggtaggcgctcagcaattgcttaggagtccactgaaaatccagaccagctgccctgacttctcc

SEQ ID NO: 394978 - DNA, 201 bp, Homo sapiens
gcgaagttaaactgattagttttttttaattttttaaatgaaattaatatacgttaattatagaaaatgcataagaaaaaggggaaatgcataagatagasggaagcaaacatttttaaataaaatttatataaaacttataaccaaagatgactactatttttattttggagtatactctcccaatatgttttcaaaagc

SEQ ID NO: 394979 - DNA, 201 bp, Homo sapiens
acacacagacacacactcatgcacacacgtacacagatacacacagacgcacatacaggcacatacacatatacacacacgcacacagctacacacaggcrcacacacaggcacacacttgtgcacacaggtacacaggcacacaaatgcacacacacggcacacacaggcacacactcgtgcacacacatgtacacaggc

SEQ ID NO: 394980 - DNA, 201 bp, Homo sapiens
tacacatatgcacacaggtacacacagacacacactcatgcacacacgtacacagatacacacagacgcacatacaggcacatacacatatacacacacgyacacagctacacacaggcacacacacaggcacacacttgtgcacacaggtacacaggcacacaaatgcacacacacggcacacacaggcacacactcgtg

SEQ ID NO: 394981 - DNA, 201 bp, Homo sapiens
ggatagagaaaataaaaggaatttgaattggtttattttcctttagaggagcctaaatcaatatttattctgagtatgcaatcagaaatatcagtaatttsagaacaaggcaaacagagctgcacatcccgttatggccacgagcccacctcgccttcgttcagaccacagctgaaggtctgacttaggtgcagcacgcac

SEQ ID NO: 394982 - DNA, 201 bp, Homo sapiens
ccacctggggcctgcctgcaaagacagatgccctgccgtgtttagaaaaagagaaaactggcctaaaccacagtgaggtcaaatggatcatttaacccgtygagtttggtttcttgttcatccgacgcggttgatcttattaacgcatatgtgtttgtgttgatgtggcctccagcttctgtcgcactgtggacacagttg

SEQ ID NO: 394983 - DNA, 201 bp, Homo sapiens
ttcaggagttgagtggggacgaggcaggtggccacacagctcggagggagggcagaaggcacccgtcttcgcagagtcacagtggggcttgcctcctataygtgccggaagggtgaagccccttatctcattgcccgatgtgatgaggtttgaagtggttgagcttggagggtatgggctgagcccacagcagacaggcct

SEQ ID NO: 394984 - DNA, 201 bp, Homo sapiens
aactgaactcacatctccacctcctctcttcctactcctctgcctttcttgcacctagagcagtgtacaacatcaacaactgaccagggcgatcctagagrtaagagacagccgaatggcacggacccagccaagcccaggcctgcccaggtggaacagagccagctaggagcattcggtagcagaggtcagtccgctgat

SEQ ID NO: 394985 - DNA, 201 bp, Homo sapiens
tccccttggtgctatccttgagatagtgaattcttgcaagatctggttgtttatgtgtgaaggtagaaggcatctcctctctctccctcacgggtgtgcaygcctcccttcatcatgtgatatgcctgctcctgtttcaccttccatcctgagtgaaagctccctgaggcctccccagaagcccagtgatgtcggtgccat

SEQ ID NO: 394986 - DNA, 201 bp, Homo sapiens
tccctcacgggtgtgcacgcctcccttcatcatgtgatatgcctgctcctgtttcaccttccatcctgagtgaaagctccctgaggcctccccagaagccyagtgatgtcggtgccatgcttatacagcctgcagaactgtgagccaattagaaattggctttataaatgacccagtctcagatatttctttatagcaatg

SEQ ID NO: 394987 - DNA, 201 bp, Homo sapiens
tactcacttgagcatgtgcacttacttctgcacgatgttcttgcctgtgtagactcttacatccacaaccacagtcacagtctagaacattccatcgccgyaaggctgcctcttataaccaaccacatcccctacctgcacccatttccaacaccccatgcctaactcgatttccagcaccccgtcctggtgaacatgaat

SEQ ID NO: 394988 - DNA, 201 bp, Homo sapiens
atgaatctgttctctatctcttcaattccgtcatttcaagaatattatataaatgggattacacagtatgtaacctcttgagactggctttttccaactgkcatcattcccttgagatccatccaagtggttgtgtgcaccttttccttgctgagccgtgttccatgttgtgggccgaccccagtttagcactcgcccatt

SEQ ID NO: 394989 - DNA, 201 bp, Homo sapiens
aagagtaaataaaaatatgaggcagggtgaaatgtaagatgctcgagaggctgagatcagtagctgtgtgaatacagcagggcgggcaccagcagtgagckccacggggcccagcgtccggcctcattaaccagctgcccttggggaggagcagagcccgctcttccctcctggggaagggtagtgtgatggaaagacagg

SEQ ID NO: 394990 - DNA, 201 bp, Homo sapiens
tgagatcagtagctgtgtgaatacagcagggcgggcaccagcagtgagctccacggggcccagcgtccggcctcattaaccagctgcccttggggaggagmagagcccgctcttccctcctggggaagggtagtgtgatggaaagacaggctgcccttctctcctgcaggagctcagcatcatgctgtgtacatgcctggg

SEQ ID NO: 394991 - DNA, 201 bp, Homo sapiens
tggaaagacaggctgcccttctctcctgcaggagctcagcatcatgctgtgtacatgcctgggctctcttcttcagccctagccacttaaaaccacttggrgggaaagattgtagaataattataatgaggaaaatttcgctccagattcgttactccaagttcagagaagctctgtaaaaattgttgctaaggcaattga

SEQ ID NO: 394992 - DNA, 201 bp, Homo sapiens
ggccagaggctgtcgtgtgtcagcgacagaaacgttttggctgtcgtctgcacagccagtattctctccccatcacgctgggcctcgtgatgatggggggrggggggttgacatcacagagatcccagtgcattttcgacttcatcactgtcaccatcctctcttgttcatttgggggatacagccgccatcagctcaaca

SEQ ID NO: 394993 - DNA, 201 bp, Homo sapiens
gtcaccacatgtcacacttgcttacactcagatacatgcatgcacacacaggcacacacacatatacacatatgcacacaggtacacacagacacacactyatgcacacacgtacacagatacacacagacgcacatacaggcacatacacatatacacacacgcacacagctacacacaggcacacacacaggcacacac

SEQ ID NO: 394994 - DNA, 201 bp, Homo sapiens
gtttgtcctgatcccaatgtttgaaacagtgaccaaggtgagtaactgtcaccacatgtcacacttgcttacactcagatacatgcatgcacacacaggcrcacacacatatacacatatgcacacaggtacacacagacacacactcatgcacacacgtacacagatacacacagacgcacatacaggcacatacacata

SEQ ID NO: 394995 - DNA, 201 bp, Homo sapiens
tccactgcactccagcctgggcaacagagcaagggtctgtctcagataacagagagagagagaggtgcatgagaactgccctcccggccttcagagagaaagctggttttgtggagccttgtctaagcatcaggtgcacccctggcattcttactctgaaatttgattatctgtttaaaatcaatagcatcactttccacc

SEQ ID NO: 394996 - DNA, 201 bp, Homo sapiens
ttggaagaggaaaacatcatacctggcacagagatgtgttctgtaaatgcttgtggggtgggtgggtggatggatggatggatggatggatggatggatgratgggtggatgggtggatggacaaatggatggaagggtggatggatggatgggtggatgggtggatgaatggacagatggataaatgggtggaaggatgg

SEQ ID NO: 394997 - DNA, 201 bp, Homo sapiens
agaacagcgatctggttatggggcatttctgtctctaatgtcactgtctgctgcattccctgcagagcgaccgtgagaagtcagaaggccttcctgtggcmccgttcatggaccgagacaaagtgaccaaggccacagcccagattgggttcatcaagtttgtcctgatcccaatgtttgaaacagtgaccaaggtgagta

SEQ ID NO: 394998 - DNA, 201 bp, Homo sapiens
tcacagtggccggcacagcacaggtcagcagaggccttgaccacagcatcccagtgaacctcagcctcgttctgcccacctgcctctggcacctggtgacrtttgataatttcacaagaggccgtgatgcctcagggcctgtcccagggagcatgccgcttcctcagaggtgtctgtctggtgggactgcaggagcatggg

SEQ ID NO: 394999 - DNA, 201 bp, Homo sapiens
cacttgaacccaggaggcagaggttgccgtgagccaagatcgcaccactgcactccagcgtgggcaagagtgagactctatctcaaaaaaaaaaaaaaaaagaaagaaagaaaaagaaagagaacgggagaaagaggagaaatatctcagcatgcacatcactgtcacaggcccacggcgcctggttaacacggaactcct

SEQ ID NO: 395000 - DNA, 201 bp, Homo sapiens
atttttgagatggagtctcactctgtcgcccaggctggtgtgcagtggcacgatcttggctcactgcaacctccccctcctgggttcaagcaattctcccrcctcaggctcccaagtagctgggattacaggcacctgccatcatgcctggctaatttttgtatttttgtagagtcgggattccaccatgtttgccaggtt

SEQ ID NO: 395001 - DNA, 201 bp, Homo sapiens
cactttattgccctttttttattattatttttgagatggagtctcactctgtcgcccaggctggtgtgcagtggcacgatcttggctcactgcaacctccmcctcctgggttcaagcaattctcccacctcaggctcccaagtagctgggattacaggcacctgccatcatgcctggctaatttttgtatttttgtagagt

SEQ ID NO: 395002 - DNA, 201 bp, Homo sapiens
tcaagtgattctcctgcctcagcctgagtaggtgggattacaggcacccaccgccatgcccggctaattactgtatttttagtagagacggtgtttcaccrtgttggccaggttggtcttgaactcctgacctcaggtgatccacccacctcagcatcccaaagtgctgggattacaggcgtaagccagcccagcctcatc

SEQ ID NO: 395003 - DNA, 201 bp, Homo sapiens
tgtttgtccaggaattggagcatttctaggtagcaccacaaatgtctgtgcaagaaacccacaatttccagtggtcattggctttgtgccaatccaaactwgagtctgacaaacccagcaagaaatattcgcggcagctgcaaggaagctcctcaaatagaaatagaaaaatgaaccagggtctgctcttcccttccgggt

SEQ ID NO: 395004 - DNA, 201 bp, Homo sapiens
cttggacaaccaccttaaagaagggaaaggcaagaagcagaaggaaagcagaggctggacattggaatcagcctttctttaaactaaaaaaaagttttcayatatgtgaatgcgtgtgtgaatttgaagtcgtatgtggaaggggccatatatccgtcaatgcatgctccaaaaatcagaactgatggacggcaaacagca

SEQ ID NO: 395005 - DNA, 201 bp, Homo sapiens
cttaaagaagggaaaggcaagaagcagaaggaaagcagaggctggacattggaatcagcctttctttaaactaaaaaaaagttttcacatatgtgaatgcrtgtgtgaatttgaagtcgtatgtggaaggggccatatatccgtcaatgcatgctccaaaaatcagaactgatggacggcaaacagcatcggatgtgcagc

SEQ ID NO: 395006 - DNA, 201 bp, Homo sapiens
attcttccggcggccacctcccgggggaaataggtgcagcagacaggaccgtctgtgggacggggacaggcaagcatgacagcaggtaccacagatcaggktgcacagacagggctgggggaggcagcgtggcacggcacccacttcccctcggcgtgtctgggctgaagcccagtggactcccgctgatcagaaggatcc

SEQ ID NO: 395007 - DNA, 201 bp, Homo sapiens
ggagctcctccttctggacccagtgtctcttctcagcctcacgacgaggagacctgctcatggagctgctgcgccggcctgagctctgatccctcctccgrcccagcctcaccctgcaagcagcaccatgtggggctcagaatggggatcttaagggacccttcccacaacctcccgataagcctttccacggagggccca

SEQ ID NO: 395008 - DNA, 201 bp, Homo sapiens
gagctgctgcgccggcctgagctctgatccctcctccgacccagcctcaccctgcaagcagcaccatgtggggctcagaatggggatcttaagggaccctycccacaacctcccgataagcctttccacggagggcccaagcggagacaggagaacactgtatttgataaaatagagtcaaatccaggaaaatgcctctgg

SEQ ID NO: 395009 - DNA, 201 bp, Homo sapiens
ggaggccagaccctcaaactccagccttgtttcttctaagtgtgccagtcaagatgcttctcactgcaagaaacagactctttctcaagccagttcaagamgatctgcgttgctgcagaggccgatgggtgtggggagcaggctcagtgagagactgtcgtaaggaggctgagaggtcttcagaaaaatccccaggacctg

SEQ ID NO: 395010 - DNA, 201 bp, Homo sapiens
ccgcctttctgaaggtcaaggcagcgccctccccaagaaacggtgggaacagaggagccaggtgttcgttcttcccagctccggaaacgctgcagattgcrcactcgagttcctgctgacataacagtggctgccagacaaaatgtggcgaaaagtttttctaggtgcctttgttcactcagagacttcctagagacttgt

SEQ ID NO: 395011 - DNA, 201 bp, Homo sapiens
acgctgcagattgcgcactcgagttcctgctgacataacagtggctgccagacaaaatgtggcgaaaagtttttctaggtgcctttgttcactcagagacytcctagagacttgtgtgaaaatcacaggatttgcaaccagtggggacgttgagattcgtggcaactgaaatgatacaaacttgaactttgtgtcaaacca

SEQ ID NO: 395012 - DNA, 201 bp, Homo sapiens
aattaaaatagtgaaaagcacagacgggtgggattttttaaaaacctttgaattggccgggtgcggtggctcacgcctgtaatcccagcactttgggaggyggaggcgggcagatcacctgaggtcgggagttcaagaccagcctgaccaacatggagaaaccccgtctctacgaaaaatacaaaattagccgggcgtggt

SEQ ID NO: 395013 - DNA, 201 bp, Homo sapiens
tgcatctcattttcaaatttcattttatcaactttttttgcactatttgtttctggataaaggatttgcaaaattcttcagcatgtggtcaggaagccctrtggcctcctgacgaggcagcctaggggtcctcccgtggtctgaagctgcagccgggctggcctcccacagtcaggagcagcatcaggctgggtgcttctg

SEQ ID NO: 395014 - DNA, 201 bp, Homo sapiens
aagtcccagcagcgtgtacaaccagctggtggctcccaaattcaaattcccccagcggcatccgttcggttattcgtacccacaccctcccttagaagttyacccctccgccaggcgcagtgactcacgcctgtaatcccagcactttgggaggccaaggcgggcggatcacctgaggttgggagttcgagaccagcctga

SEQ ID NO: 395015 - DNA, 201 bp, Homo sapiens; identical to SEQ ID NO: 86791

SEQ ID NO: 395016 - DNA, 201 bp, Homo sapiens
ggctggagtgcaatggcatgatctcagctcactgcaacctctgcctcttgggttcaagtgattctcctgcctcagcctgagtaggtgggattacaggcacscaccgccatgcccggctaattactgtatttttagtagagacggtgtttcaccgtgttggccaggttggtcttgaactcctgacctcaggtgatccaccca

SEQ ID NO: 395017 - DNA, 201 bp, Homo sapiens
gtcctggatattgtcaggttctgggtggatttggggggtttttgtttttttcttttgatactgagtctcactctgtcacccaggctggagtgcaatggcaygatctcagctcactgcaacctctgcctcttgggttcaagtgattctcctgcctcagcctgagtaggtgggattacaggcacccaccgccatgcccggcta

SEQ ID NO: 395018 - DNA, 201 bp, Homo sapiens
gttgcccaggctggagtgcaatggcacaatcttggctcactgcaacctctgcctcctgggttcaagcaattctcctacctcagcctcccaagtagggggcrttacaggtgcccgtcaccatgcccagttaatttttttgtatttttttagtagagacagggtttcaccatgttggccaggctggtcttgaacttgtgacct

SEQ ID NO: 395019 - DNA, 201 bp, Homo sapiens
cgccttcagctgggaagcaggcaaaatcccggcccacctgcttttttttttttttttttttgagacagtgtttcactcttgttgcccaggctggagtgcartggcacaatcttggctcactgcaacctctgcctcctgggttcaagcaattctcctacctcagcctcccaagtagggggcattacaggtgcccgtcaccat

SEQ ID NO: 395020 - DNA, 201 bp, Homo sapiens
cgacaaaaggagggtctcgagttgccggtcacccgctcaacgccttcagctgggaagcaggcaaaatcccggcccacctgcttttttttttttttttttttgagacagtgtttcactcttgttgcccaggctggagtgcaatggcacaatcttggctcactgcaacctctgcctcctgggttcaagcaattctcctacctc

SEQ ID NO: 395021 - DNA, 201 bp, Homo sapiens
actcttgtgttgtttagattttttagaatgtttttcttttgaaaacagcttctaaaagagaagatagccctcaacatctgacttttttttcttttttttttgagatggagtttcgctcttgttgcccagactggccaggctggcgtgcagtggcacaatctctgctcactgcaacctccgcctcctgggttcaagcgattc

SEQ ID NO: 395022 - DNA, 201 bp, Homo sapiens
gcgggagaatcgcttgaacccaggaggtggaggttgcagtgagccgagatcgcgccactgcactccagcctgggctcgacagagcaagactctgtctcaaraaaaaaagagcacatattggagataggggctgggaagacgatttcacagaagaagagtcctcctcctgcagatccaagccttaggagcaatgtgtccagc

SEQ ID NO: 395023 - DNA, 201 bp, Homo sapiens
catccctccaggtaacgggcagctcctcggccacagcctccaccccccaacacgtgggattcgggctgcaatggcctacacatcttttcctcttgtccgtrttccatctgtctttcttctttggtttgtagagagagaagaattaatccagagcgtgctggcgcaggttgcagagcagttctcaaggtacagagtcttcta

SEQ ID NO: 395024 - DNA, 201 bp, Homo sapiens
ccagtgccggctgtgcgggagaccagagttttattattcctcaaatcagtctccccgagcattcggggcgcagagtttttaaggataacttagtgggtggkgggaagccagtgagccaggaatgctgattgattggtcagggaggaaatcatagggagttgaagctgtctgcttttttttttttttttttttttttttgag

SEQ ID NO: 395025 - DNA, 201 bp, Homo sapiens
attcttcgtccttctggcagaaagaagcagtgtcccgggaacatgcccctacttgacccctgaccctggaaacgcctcgaaacccacccgggaggctgattccagccagtctgccctgggccactgtactgggagagtttctttccggagctgcagtacttcctttggggtgggaaggagttgttacaaactagccaaagg

SEQ ID NO: 395026 - DNA, 201 bp, Homo sapiens
tcatggagggtgatgagggccagagacagagccgcagtgggtggaggcagcagagccggcacgagggtgtccaggagctgggactggcccagaggtttccrcacggagcacctgacacctgtttttctccgacgtttcccattgccttaagaacgagggactctgaataaatccgtgtgtctctcccagctcttccccatg

SEQ ID NO: 395027 - DNA, 201 bp, Homo sapiens
tgacgaggcagcctaggggtcctcccgtggtctgaagctgcagccgggctggcctcccacagtcaggagcagcatcaggctgggtgcttctgacaccagcraagagcgcggctgtccaagcccccatccctagggctcacgcctcatgcccaaactcgcacccactttggcgccgctggagactaatgaacagcaaaagct

SEQ ID NO: 395028 - DNA, 201 bp, Homo sapiens
gtaatcgccctcccctcgccttttgaggtcttgctggtaggtgcacccccttcaagccagcccaaggagccatgatttgagtcggtcttgccagatgtgtytggagagaatttaactccaagatcatcccccgtgcactctgaggggctgggacaggatgtggtgccctttgtgcccaggaggagaagcacccagtggggc

SEQ ID NO: 395029 - DNA, 201 bp, Homo sapiens
cagggcaccttccggatggcactgcgctccctgtgagcagaggtgacatttccccgggagttctgtgaggacactcagcctgtctctgttcctccttccaycaaaaccttctttacgcccgagctactcctgctctgataagcaaggagtagcttatcagtgagactctgccatcatcaagcaaagcagcatgtcctaaag

SEQ ID NO: 395030 - DNA, 201 bp, Homo sapiens
gagtcggtcttgccagatgtgtctggagagaatttaactccaagatcatcccccgtgcactctgaggggctgggacaggatgtggtgccctttgtgcccasgaggagaagcacccagtggggcggggtggggcgaggactttataaaggcgtcatttgctgcggccacccaggttggaacacagggaccacagggcccccc

SEQ ID NO: 395031 - DNA, 201 bp, Homo sapiens
ctggagagaatttaactccaagatcatcccccgtgcactctgaggggctgggacaggatgtggtgccctttgtgcccaggaggagaagcacccagtggggyggggtggggcgaggactttataaaggcgtcatttgctgcggccacccaggttggaacacagggaccacagggccccccgccttctgcaggaccaccccgc

SEQ ID NO: 395032 - DNA, 201 bp, Homo sapiens
tctgggaggagccagcagagtcctgcaaaggaggatgtgggggaaatggggtgaggccaaagtgggggctgctgaaggggctactgcacccgtgcgagcakggccaggaccaagctgcataggcagccagggacacagccgatgccacagacgtcaggaaccacgcaatgacacaggccacctttgaccgaccgttacccc

SEQ ID NO: 395033 - DNA, 201 bp, Homo sapiens
gatgtgggggaaatggggtgaggccaaagtgggggctgctgaaggggctactgcacccgtgcgagcagggccaggaccaagctgcataggcagccagggayacagccgatgccacagacgtcaggaaccacgcaatgacacaggccacctttgaccgaccgttacccctggggcaaataccagtggggataacgggcaagg

SEQ ID NO: 395034 - DNA, 201 bp, Homo sapiens
tcggggtgtgcctggcacttctctccatgacatgggaggctttctgtgattttgtaaatgtgctactgcagaaaggtgtgaattgacagcagagatggagrgcgagggtaggagccagtgtgaaggaagcttgactcgtcgtgttcccctgcagaggagctgggcacgttccaagataacaattgcagccgtggctctgca

SEQ ID NO: 395035 - DNA, 201 bp, Homo sapiens
cacttctctccatgacatgggaggctttctgtgattttgtaaatgtgctactgcagaaaggtgtgaattgacagcagagatggagagcgagggtaggagcsagtgtgaaggaagcttgactcgtcgtgttcccctgcagaggagctgggcacgttccaagataacaattgcagccgtggctctgcacctgcttctcaacgg

SEQ ID NO: 395036 - DNA, 201 bp, Homo sapiens
accatgaagcaccccccaggagctggagctcctccttctggacccagtgtctcttctcagcctcacgacgaggagacctgctcatggagctgctgcgccgrcctgagctctgatccctcctccgacccagcctcaccctgcaagcagcaccatgtggggctcagaatggggatcttaagggacccttcccacaacctcccg

SEQ ID NO: 395037 - DNA, 201 bp, Homo sapiens
tttgtatttttagtagagatggggttccgccatgttggccaggctggtctcgaactcctgacctcaggtgatcgacccgcctcggcctcccaaagtgctgrgattacaggcgtgagccattgtgcccggccaagctgttttctgcctcttgagttaaaggattcatccactagaactggccaccttaaggccatattatat

SEQ ID NO: 395038 - DNA, 201 bp, Homo sapiens
ccaggctagagagaagtggcgtgatcttggctcactgcaacctctgccccccgaagacaggacacttctgtctcagcctcccaagtagctgggattatagstgcccgccaccatgtccggctaatttttgtatttttagtagagatggggttccgccatgttggccaggctggtctcgaactcctgacctcaggtgatcga

SEQ ID NO: 395039 - DNA, 201 bp, Homo sapiens
tatttaccaacttaggaactaaataaacagaatccagacaggataccattaagagttgcagcatcaccaaaaatatctggctgattgactgaatgtcgtcrcttttctttttctttttttgagagacagagtcttgctctgttgtccaggctggagtgcaatagcacaatcttggctcaatgcaaccttcgcctcctgggt

SEQ ID NO: 395040 - DNA, 201 bp, Homo sapiens
gcctcccgagtacctgggattacaggcatgcaccaccatgcctggctaattttgtattttttagtagagacggggtttctccatgttggtcaggctggtcycgaactcccgacctcaggtgatctgcctgcctcggcctcccaaagtgctgggattacaggcgtgagccactgcgcccagcgcagctttggttttatttgt

SEQ ID NO: 395041 - DNA, 201 bp, Homo sapiens
ttgagcccaggaggcggaggctgcagagagctgggatcataccactgcactccagcttgggggacagagtgagactcagtctcaaaaaaaaaaaaaaaaaagaatggtagtgttccctcctcttctgttttcttgaagatattgttagaatcatgttgactttttaaacatttggtagaattctctataaatgtttagaac

SEQ ID NO: 395042 - DNA, 201 bp, Homo sapiens
cagatcacttgaggccaggagttcaagaccagcctggctaacatgctaaaaccccggctctactaaaaatacaaaaaattagcctggcttagtggcgggcrcctataatcccagctactcaggaggctgaggcagagaatcacttgagcccaggaggcggaggctgcagagagctgggatcataccactgcactccagctt

SEQ ID NO: 395043 - DNA, 201 bp, Homo sapiens
gtcctggaaccaatccctcagagacaccaaggaacaactgtataatattggctgtaaggttatggttgatgcttttaatcaacttgaagaagttctcctccattcctaattttatgagagttttctcatgaacatgtgttgaattttgtcagatgttttttatgaattagttaatatgatcatgtaatttttcttctttag

SEQ ID NO: 395044 - DNA, 201 bp, Homo sapiens
agtcctggaaccaatccctcagagacaccaaggaacaactgtataatattggctgtaaggttatggttgatgcttttaatcaacttgaagaagttctcctccattcctaattttatgagagttttctcatgaacatgtgttgaattttgtcagatgttttttatgaattagttaatatgatcatgtaatttttcttcttta

SEQ ID NO: 395045 - DNA, 201 bp, Homo sapiens
gagtcctggaaccaatccctcagagacaccaaggaacaactgtataatattggctgtaaggttatggttgatgcttttaatcaacttgaagaagttctcctccattcctaattttatgagagttttctcatgaacatgtgttgaattttgtcagatgttttttatgaattagttaatatgatcatgtaatttttcttcttt

SEQ ID NO: 395046 - DNA, 201 bp, Homo sapiens
gaaacactatttccaacactattactgaatgccaccacgcctggccatatatatatatatatatatatatatatatatatatattttttttttttttttgyagagatggagatctctctttgttccccggctggtctcaaactcctgggctcaagcaatcctccaacctcgacctcccaaagtgctgggattacaggcatg

SEQ ID NO: 395047 - DNA, 201 bp, Homo sapiens
agctggctggccaatcaaattaacttattgttacactaatttttagaatcagaattatgggtcaggctgtgctagcaatcagtgaaatcaaatttcatgtyattctgcactgggtagactcaggatttgcctgaaacaagtaaacaattcctggaagaagtgggcgaggcagaggcttgaactatccactcagaccaagga

SEQ ID NO: 395048 - DNA, 201 bp, Homo sapiens
tggagggtgatgagggccagagacagagccgcagtgggtggaggcagcagagccggcacgagggtgtccaggagctgggactggcccagaggtttccgcayggagcacctgacacctgtttttctccgacgtttcccattgccttaagaacgagggactctgaataaatccgtgtgtctctcccagctcttccccatggtt

SEQ ID NO: 395049 - DNA, 201 bp, Homo sapiens
ggccaatcaaattaacttattgttacactaatttttagaatcagaattatgggtcaggctgtgctagcaatcagtgaaatcaaatttcatgtcattctgcrctgggtagactcaggatttgcctgaaacaagtaaacaattcctggaagaagtgggcgaggcagaggcttgaactatccactcagaccaaggaggagtcag

SEQ ID NO: 395050 - DNA, 201 bp, Homo sapiens
agccgtccccctcagtgagcgctcagtagacatggccagtgccgtcctcagcgaggtccccgtgggtgtggccagcgccatccccctcagcgaggtcctcktgggtgtggccagcaccatcccactcagcgaggtcccagtggacatggccagcgccgcccccctcagtgaggcttcagtgggcatggccagtgccgtccc

SEQ ID NO: 395051 - DNA, 201 bp, Homo sapiens
aaagtcactgagtgacctgtcctcctgacacccacaagactaaaatgatctctcagaggggacctcacagaaaccagcaccttgtccatgccagctgggtmtctgagagaaactgctttgttttcctgaagtcatttgaaacagcgtgcagagacatttaaactcggcgggaaataggagaagcccaccttgacccttcta

SEQ ID NO: 395052 - DNA, 201 bp, Homo sapiens
gaggcagccgtgtgaacaccatgaggcagggtgtccatcctgccacccacacagctgcgtcctgcccaggaatgaggctggcagcccataggcccctcctyggtccctctagaggtttgcttcattccagtacccttggttctgtcaagtgggcagggcctgggcccctctgctgcaaacccatggcccaaagcggacctg

SEQ ID NO: 395053 - DNA, 201 bp, Homo sapiens
tgggcgggcactcgtccttctggggctcttggaggaaatggttacagaagactaggccagatgacaataagggatggagaataactaagtgccaagccaaygagccatctgctggtaagaactccatgccaggcagcacaggcggtcccaacagcacgatctctggattagcccaaatagcatcggaacatttgacaacaa

SEQ ID NO: 395054 - DNA, 201 bp, Homo sapiens
gcccggagcgcaccctgtcaccccaaggatgatgacaccccagggaaggtggtggaagcaggaaggggaggtcagaggaaaactggggccctcagtgggcrtccgtgatgcggaaacactaataatgccaacagcaatagcagaggcaggcagggcttacgtggccagggctgggctggtgctgtcctgagcacttgacat

SEQ ID NO: 395055 - DNA, 201 bp, Homo sapiens
ggaattccaatgattctagggtcaggagaggaggcacccacttcctgatcagggctctgtttgtggatgcgtgggtgtggttggcctttgtgcacactggyggttttgcttctttcccccagcaaaagaatgcagattttgcattatctaaagaggcggttccgtgagcccactgtgctgagtcacatatattccatcggt

SEQ ID NO: 395056 - DNA, 201 bp, Homo sapiens
aagatggaggtagacgcgggtgaggatacaggtggagaagatggaggtagacgcggatgaggatacaggtggagaagatggaggtagacgcggatgaggayacaggtggagaagatggaggtagacgcggatgaggatacaggtggagaagatggggttagacgcggatgaggacacaggtggagaagaggaagttagacg

SEQ ID NO: 395057 - DNA, 201 bp, Homo sapiens
tcatactccgcggtatggatggaccacggttggttcaaccattctcccttgaaaggcatctgcatcgtttgcatttgggactactacaaatacatccgccrggaacatgtggacaggcctttgtgtgaacatcagttctccgcgtacatcatctctctgccctggtgcttgcatctttagttggttttttctgtcttttga

SEQ ID NO: 395058 - DNA, 201 bp, Homo sapiens
ttagacgcggatgaggacacaggtggagaagaggaagttagacgcggatgaggatatagatagatgcatagggtgtggatctaaccgggtacaggtgatgyggaaacggatctagacagcgatgtggaaatggatctagacagcgatgtggatgtgatctagataatgtggctctggacgtagaaagagcttcagatgctc

SEQ ID NO: 395059 - DNA, 201 bp, Homo sapiens
gaggaagttagacgcggatgaggatatagatagatgcatagggtgtggatctaaccgggtacaggtgatgcggaaacggatctagacagcgatgtggaaayggatctagacagcgatgtggatgtgatctagataatgtggctctggacgtagaaagagcttcagatgctctatctatgatcgtgggtgtggatataggca

SEQ ID NO: 395060 - DNA, 201 bp, Homo sapiens
tccgtcctaagaacttcctaaagatgtcccgggagcagctctcttggaagcaggtgaaaagtggaggagagcttcaggaggggtgggaggaggacgctggkcatggcaggccaggctgttattgtgggcagggtagcttttcacagtggacacgctgaggttggggtgatctccagaaaagcagcctgcaggtgggccctg

SEQ ID NO: 395061 - DNA, 201 bp, Homo sapiens
tcttctctcataggaaggaaatttcaccttgctctctgctggatttccagcccctaaacgaggcggggcatgctgggtgcaggatggaatgagttggggayggagtgaaccagtccagctcgtgcgtgcctccccctctgcactgcccagagcagttttttcttctggggacgcagggcaacgtctggagacatttctgga

SEQ ID NO: 395062 - DNA, 201 bp, Homo sapiens
gtcctggttgaagctgaatcgtttgcccaagccatgtgccgggcaaagcatgataacttctcgctcacctcccaggctgcacacccagcagtgctgtcacrgatgggttgcaccgggctcagctgagagcactttcagtgccgctgccatcagccgccattccttctcttaaagtaccaggcactgggtaaatcctggaat

SEQ ID NO: 395063 - DNA, 201 bp, Homo sapiens
ctccgcctccttcagagccatctcatcaatgcagtgatcgcaagcttcgatttacaaaaactcgcctcccttgcagcatttccaggtttcacacacagcgwaacaagtaaaaatggatttttgggcagcacgcctgtcctagtttgctgaggctgccataacaaagtaccagagactggggtggcgtcagcagcaaaagtt

SEQ ID NO: 395064 - DNA, 201 bp, Homo sapiens
ctttcagtgccgctgccatcagccgccattccttctcttaaagtaccaggcactgggtaaatcctggaatttccagcgtgaatctgtctccctgccatccrccccatctcctctccatcaaaggtcatggaaacaaacccatgttgcttcctaggagggagccctgggggtcactgggtgcaggagataagggatgtgttg

SEQ ID NO: 395065 - DNA, 201 bp, Homo sapiens
ctctcctccactcggtgcctggtgacatgcggccatcctcagagatgtgcttcggggcccgcacgccttgctcctcgcactcttcctgcaccggagccgcsgtgcgaggcctcgggaatgctcaccgtttctctcccgccccccggccgcatgctgcagccattccctcaccacatgtccaggagggagccggcatccttt

SEQ ID NO: 395066 - DNA, 201 bp, Homo sapiens
gctgaaacctctgccacactaggcccacaaacatgcgtcattcagggatccaccaaggaacagggtagtttatacagaatttgggtcccactgccatggcytcctcctttgggaactctcctttccatttccatcctctctgacaacctaaaactgtgtcatctgacgcttcaacctggaactttctgcttaagttttagc

SEQ ID NO: 395067 - DNA, 201 bp, Homo sapiens
gagccgctgcagccacttggcgccaggccaatgctttatttatatgaagaaaactccagacacgcacaggtgtcacatcaccagagtgacacagtgggagwcagcaacaggaatttgggggattgtcttccctcctcaggagcttttccttcagaggttgtgcagaggaagctgggcgtgtgaagtgagtcggaggttgcc

SEQ ID NO: 395068 - DNA, 201 bp, Homo sapiens
cgcggatgaggatacaggcgaagaagatggagacacacgcggatgaggatacaggtgaagaagatggagacacacgcggatgaggatacaggtgaagaagrtggagacagacgcggatgaggatacagatggagaagatggaggtagacgcgggtgaggatacaggtggagaagatggaggtagacgcgggtgaggataca

SEQ ID NO: 395069 - DNA, 201 bp, Homo sapiens
acagtgggagtcagcaacaggaatttgggggattgtcttccctcctcaggagcttttccttcagaggttgtgcagaggaagctgggcgtgtgaagtgagtyggaggttgcctcctgagccctacacgaaggcaggactctgtgccctggagtccaactgaggctccgttttcagtgctcccctctcatctcgagaaccttg

SEQ ID NO: 395070 - DNA, 201 bp, Homo sapiens
atgataaacagcagcagacgttgcaggctgggtgggccagccccgtgtggggcctgatgaacaggtttttttccctgacgatcggctttgcaggctttgtrggctttgtggggaaggagccctttgtgcagaactggtagccatgaggatggcctggtgagaagctgctgaagggctggggacagcctccacccagccagc

SEQ ID NO: 395071 - DNA, 201 bp, Homo sapiens
ccaaccctgcccctgcccagagactggcacgagaaccagtaacagttgttgaataatgaacaatggatgcatgcagctcacccgtgagagggcgttgctckgctgggccagggatgaagcttctcccgcgtggctccaccgtctatccctcaagctcctgatgctcccctgggcacctctgcgccatgaggccccgttgaa

SEQ ID NO: 395072 - DNA, 201 bp, Homo sapiens
aacagcgtgcagagacatttaaactcggcgggaaataggagaagcccaccttgacccttctaattctctggccccaggtgccttattaacaagagacagtrtcagacacaccagacaaaagccctcctgagcccaaagagcccaaatgtctggaagctctctgctgagatgccaaaatgcatgcctttctgataaagagac

SEQ ID NO: 395073 - DNA, 201 bp, Homo sapiens
gtgaggaaaacaaaagcgaagctacgcagaaaaatgacaagagtgatgagcacagcagtcatgacaaatgagccctgtgcggaggcccgggatccgcgcakatgccggcgcgggggaaatgggccctgaaatcccaccgtcaggccaggcagctctgagcgtgacctggagggctgttcagacggtctgggtagccgtgtc

SEQ ID NO: 395074 - DNA, 201 bp, Homo sapiens
tggccttctcctgccctgggactgggtccccaccatcagctcccgggtgctgccctcaggcttgcactggagccacaccaccagctttcccggggctccgrcttgcaggcggtagctggcaggacttctcagcctccgtcctcatgtgagccaactcctcactattggtctgcttctctgaaggaccccaactcatgggtc

SEQ ID NO: 395075 - DNA, 201 bp, Homo sapiens
gcctcgggaatgctcaccgtttctctcccgccccccggccgcatgctgcagccattccctcaccacatgtccaggagggagccggcatcctttgctgactytcttgctgtgactatggtgctgcgtggaaaaggggccgtgggaaggctgggcaggtggctgctcagagccccacctgacacggtgacccacggggcctgg

SEQ ID NO: 395076 - DNA, 201 bp, Homo sapiens
tgtttaaattacctgtttgatattgaatgagttgtagtacctcatgcttctctaggagttggtccattttattgaagatgtcagagttatgtgtgtagagrcatttgtagtgttcccgtattatccttttgatgtctgcagggtctgtagtgatgttccctctttcattcctgatattgacagtctgtgtcttccctctaa

SEQ ID NO: 395077 - DNA, 201 bp, Homo sapiens
tgaacatttttcaaaatattatttctaatagcaaaatatcattccagatatatgtctgatgatacagttttctcatcatttatttaatgagtctccattgrgtgggcgtgcaggttgtgacagttttctctgtgttaaataacactgtgatgaatatcttttgtgtacatgcatgatgatttcctagaaatgggaccctgg

SEQ ID NO: 395078 - DNA, 201 bp, Homo sapiens
tgctcctcattccaaactaaacaaattgttgcattggattattctttcaaaatactccttgccttaatgccatcctttagattttggtggctggctcctgktgtggaccgcatctcacaggtggacttcctggtttctgcctcctgttacccctcacagttatctctcccttgagtcctgctaccttccagaaaaataggc

SEQ ID NO: 395079 - DNA, 201 bp, Homo sapiens
cccaggccttctcgtgatgcttccacccagcctggtcctggcacccaaggccaacctctgcgggccccagagctgtgcctttttggctcaggtcctccccrcagtgcttggagtccaggcctctgcaccctgctggggtggtctgtggtcctggcccaagggaatgtcgctccctgctgcctggttctactgatctgtcct

SEQ ID NO: 395080 - DNA, 201 bp, Homo sapiens
gctgggattacaggcgtgagccactgcgcccagcgcagctttggttttatttgttttgtttatagtggagggttagacatgaaatcaacatagaagatgaygtaaacttatgactaagcctggtgtgggctctcggtgttctggggcatgagctagaggatggctggagccaggtagagaccgctcccttccttagaatgt

SEQ ID NO: 395081 - DNA, 201 bp, Homo sapiens
tgcttcctgacaaccctaccccttccattccccagtcactactgcttcaagatgcagtggaaggagataaatcagacacctcagtagcgtgagtgaaagtrgggtgtgtggtgagacacatacagaggggagagggccagaggacggcgccgtgcgacacacaccattgctccttttgttcccggtttcggccaagttgtg

SEQ ID NO: 395082 - DNA, 201 bp, Homo sapiens
cttgtcttgtcactccccgagtccactgtgagctagaaccacaggctcccatgaagaaggagccagaaccacaggccccatgagcccaggtcccacagccmgcaccttcgtcttccagccagcctctccggagctcagtgtgggtggaggggctgtctggcctcagaaatgggcaaaagacagctctcgttgtcagcgagg

SEQ ID NO: 395083 - DNA, 201 bp, Homo sapiens
aatcacctcccaaggccctacctcctaatcttacccactggggatgagggcttcattatatgaatttggggtgggggtgcctcaacattcagaccccagcmccatgggaccactaatgtggcatcctgcctgtggagagatgcacagactgacccatccagacagcacagtggagcacgctctttcaacccacctgcacct

SEQ ID NO: 395084 - DNA, 201 bp, Homo sapiens
tcagtgtgggtggaggggctgtctggcctcagaaatgggcaaaagacagctctcgttgtcagcgaggtaaatctagcgcagaggaagggcacactgtcccygtcagacgcctcagatgaactgacatgcaaatgagagatgaaacggggacgagccgggcagctgatctcagtgcagcaactgggacacctcggggcataa

SEQ ID NO: 395085 - DNA, 201 bp, Homo sapiens
aagccacagagaggttaggtaacctcaagttcactcagcaaattagaaaaataaataaagctgggactggcacccagggtcctggccgggctgctgtcacdgcctgctacctgcccttctggaacgagtcacttccctgcacacctggctgaagaggaccaggcactccatgaggattccttgataacgcaggttagaaag

SEQ ID NO: 395086 - DNA, 201 bp, Homo sapiens
ggacctaggtcccccggaggctccacaaccacttatgcagatatcaggctgcttctccatgtcactggctacaggttcaaaatctagacagagccaggccrcgcacccaaggtctagctgcaaggcaggccccacgaagggaggctgtgagtatcctgaagctgcctcacaaagcaccacagactgggaggcttaagcatc

SEQ ID NO: 395087 - DNA, 201 bp, Homo sapiens
aaccacagcattttattccgtttgctttagattctctgccaatttttttttttttttgagatggagtctcgctctgtcgcccaggctagagtgcagtggcrtgatctcggctcactgcaacctccgcctcccaggttcaaggaattctcctgcctcagcctccggagtagctgggactacaggcgcctgccaccaggcccg

SEQ ID NO: 395088 - DNA, 201 bp, Homo sapiens
caaggcaggcatttgtggcccctgggatgccttggggtgcctcatacagttacttgggccgctgtgttacaatcctttttctttttctttttttttttttwaaaaaaaacggagtctggtcctgtcacccagggctggaatgcagtggcacgatctcggctcactgcaacctctgcctcccaagttcaagtgattctcctg

SEQ ID NO: 395089 - DNA, 201 bp, Homo sapiens
agtgcagtggcgtgatctcggctcactgcaacctccgcctcccaggttcaaggaattctcctgcctcagcctccggagtagctgggactacaggcgcctgycaccaggcccggctaattttttatttttagtagagacggggtttcagcaccttgaccaggctggtctcgaactcctgaccatgtgatccgcccgcctcag

SEQ ID NO: 395090 - DNA, 201 bp, Homo sapiens
agctgtgtggcctccctggggcaagtcattcaccctctctgtgcctcagtgtctctgtgaagtggggggaagtttttggaagattaagtgggctaatacgygtcaaatgctagaacacactggcacttggtaaatgctatataagtgttatcatttttgtttgtttattatttatttatccatgtcatggatttaaggcag

SEQ ID NO: 395091 - DNA, 201 bp, Homo sapiens
tgcccctcggagtgccaggcttggcttctggaagagaaagctgggggtttagtgactccagccaactgctgtgagcccaaggcatcaaactaaaaatagcraggccaagagggagtctttgtgttcggctcagtgggcaatggtgcctcacctcgcagcatgacacagggctgatgacacggggcacgttggtcacaaagt

SEQ ID NO: 395092 - DNA, 201 bp, Homo sapiens
agggctgatgacacggggcacgttggtcacaaagtgccagtctcagcctggcacagggacgtgccacctgcaggtgatgacacatcacagtggcagccgcycctgatggtgctgctgcattgagtaggagcccagatccagggagacagttgcagcagatgaggcaggaggccagcgaggggttctacctgctttccgggc

SEQ ID NO: 395093 - DNA, 201 bp, Homo sapiens
ggctgttcagacggtctgggtagccgtgtcctgcgcatgaacatcctccgtcgggagaggaattccccacggattatcagagctgctccctccaccccccsccacgtcccacgcgggccacatcaactccctctgcagcctctggccagcggctgagccctccgtgtctcccctcgttaatgcctccttcaccatcccctc

SEQ ID NO: 395094 - DNA, 201 bp, Homo sapiens
tagggcgtttggctctggttctagcccgagtgtggtctcagtccccattggtggttgtggttgtggcatgggcatcattagtcacacaacataaaaccacrgaacgcagaatttgctcaccctggttcacacaggagcaagcttgggcaccagcaccccctgaacgcatgccaaagggcaggtccagctcagtgctggggt

SEQ ID NO: 395095 - DNA, 201 bp, Homo sapiens
aagaagcagtcaaggatccccccaggcctccggggccgcctgggctgcctggcctcacgacctggccccatgctcctgagatggagaagccccaggcccakgagcctgttgcccttggcaaagccacttcccttctgagtaaagtcagacgagcctgcccagtcccaagagactgcgattccgtaatcgccctcccctcgc

SEQ ID NO: 395096 - DNA, 201 bp, Homo sapiens
ttctgtgtgttttccaagagtctagtgtgaggtcagaggtcagacaggtcatcagggattttgcttcgagtgagttgctgctgccctgactcctctcccayagcaaataagaccacacggggcttgggggttgggtttgtcgcttgcttttgctgtgctgagggcttcaccagactgaaacagcaggaccacagctcatct

SEQ ID NO: 395097 - DNA, 201 bp, Homo sapiens
ctttcctgtggctgcaggcatctctgctcaattgtgcagggctgcgtcccccggccacactgactcctctccaggtttctcggctccagcaccactgtctrcgccctccttcccaggtggacggcggctctcctcgccatcctctccacttccagcctatcatctgtctgcctgttacatgtttgtaacttttgaccttta

SEQ ID NO: 395098 - DNA, 201 bp, Homo sapiens
aacacagacattttcagggatttggagaggaaactaatgccatcctggtttaccagctttatggggtcatctctccggtgaaaaagactgcagccagcctygcagagagggcgctgtcttagggaggcacctccaactgtccccgcgacccagcccctaagtgcttcacatcaacactgttcttttgtgacggtgctgctg

SEQ ID NO: 395099 - DNA, 201 bp, Homo sapiens
gtgtgtttggtccccagccccacatcaccccataggtgccttttctacccagggggcttgacccagatcaacactgggtgaaaggctgacttcagaaatgkgttgaaaagaccagtgatctgccttatcgagtcctcagagtcccacaggagttaatgtcctaaatcaacagtgtgttcgagccagtgaattttctaatta

SEQ ID NO: 395100 - DNA, 201 bp, Homo sapiens
ctccctaaattcatctgctgagacaaaggattttaactggtgtttctacactgctttccccaagatgtggcaacccacaccccaccagcaacacctgtgaygtctgccgccctgtgtccttgtagcacctctcttaccaggtttccaaatgttgctaaactgctgggtcaaggaatagcatctgcctggggttagcctcac

SEQ ID NO: 395101 - DNA, 201 bp, Homo sapiens
gccagaggctgtcgtgtgtcagcgacagaaacgttttggctgtcgtctgcacagccagtattctctccccatcacgctgggcctcgtgatgatggggggakgggggttgacatcacagagatcccagtgcattttcgacttcatcactgtcaccatcctctcttgttcatttgggggatacagccgccatcagctcaacag

SEQ ID NO: 395102 - DNA, 201 bp, Homo sapiens
attttcgacttcatcactgtcaccatcctctcttgttcatttgggggatacagccgccatcagctcaacagagcaaaagagagggaggccacctgcatccrccaggtgctgaaatgggtccaggcagctgccagagtctgacatttccaacttgatacagcacctgtgatcggcagtagtacccatgacaacatttattta

SEQ ID NO: 395103 - DNA, 201 bp, Homo sapiens
tgccccacagcctctatgaaggccacataaatggcaccaagtgtctctgtctgccgatcagcatcccctcttggcttcacagcagacgcatctgcctttcrggactgccttgaacaacatctgggctggtcaggtggagagcgaggagtttccaggttgcagcccctatggtcctgagggctggcgtccaggatggtgggg

SEQ ID NO: 395104 - DNA, 201 bp, Homo sapiens
aaaacgagtgtgtggttcacgtgctttaaggacgtttcccaggtgacattccaagctcccatctgtggccgcaagtgggggagtttccagttttccagatrgattttctgccatgccagagaaccctccgcctccttcagagccatctcatcaatgcagtgatcgcaagcttcgatttacaaaaactcgcctcccttgcag

SEQ ID NO: 395105 - DNA, 201 bp, Homo sapiens
agccttaacccaaagatgcaagagcccagacattttaggaagcttggagggcagaaacggaaagtccttttgaggagagggcctgcagctgaacctctcaygcaggccactgggtaggtgcgcgcccagcttctcagaaggtcagtcccaaccctgcacggctgccagaagctagccagatggggaaggcggccaggagcc

SEQ ID NO: 395106 - DNA, 201 bp, Homo sapiens
cgtggcaggagctgaccggctggggcaaagtttaacacaggccatacaaacagcccagagcctggatgctagaaccaagccttgcttttctctgtcactcmggaagtgtgctctacgcgggctctttagtgaggctcctggaggaagtgttgaaacacaactctattcatacatgtctttaaacagctttcactagctctg

SEQ ID NO: 395107 - DNA, 201 bp, Homo sapiens
tctgctttggtttgtggtgcgtggtctgtgcccgcctgtgttcagcgtttgaaggcagaggagcgggccatgatgggcagagccgacgtccaggctccacrgtagggccgtcctgctgctgtctgcagacctctcaggcttgaggccccccgccccacaggactggcccgctcctccctctggattgaggtggagcagggc

SEQ ID NO: 395108 - DNA, 201 bp, Homo sapiens
tcttccccaaagcagccgggtgtcctggaaaggccagggagtgaggaggcaggacccccggggacacaggcacacacatccaccacatgctcacctctgcytcctcctgcagacctccccgccagccccgtcatttcatggcatcttgctttctcttcattgaggaatgcacttttgcaatgttgttactcactatccatc

SEQ ID NO: 395109 - DNA, 201 bp, Homo sapiens
ggtgtggtgggttttggaaggaatacgtggggcgcatgacagccaggtaggaccacgagcttctccactgcagagttactgttgatctccttccctgctcytctttgaaagcaagtcacgaagtccagcccacccaaacacaggagagaaaaaccgaggttcgttttctctacacagatattcatttctccagcaccattt

SEQ ID NO: 395110 - DNA, 201 bp, Homo sapiens
agccaggtaggaccacgagcttctccactgcagagttactgttgatctccttccctgctcttctttgaaagcaagtcacgaagtccagcccacccaaacasaggagagaaaaaccgaggttcgttttctctacacagatattcatttctccagcaccatttgttgaaaagatgatcttttctcccactgaattaccatgac

SEQ ID NO: 395111 - DNA, 201 bp, Homo sapiens
gttcataaatatggtctatctccccattcatttgggtttcctttaatgtttctcaataatgtgttaccattgttaatatgaagtacttaataaatactgayaaatacatcactatttcatgtatttaatggtactgcaaatggacttttttttcatttcaatttccggtagtttttagtttataggaattggcttctgtat

SEQ ID NO: 395112 - DNA, 201 bp, Homo sapiens
tggaccttggacagagggcccagctgccctgtttgcagtctacaccgcatgcccaacccttccccagatctactcactttcagaatgtgctgccttccacrtgtgaaccagactgagctcctttctgccactgatgttgaattgtccatttgctcacgtcagtgtccacgtggcaaatccacagggcatgggtgggatcct

SEQ ID NO: 395113 - DNA, 201 bp, Homo sapiens
gcagccgctcctgatggtgctgctgcattgagtaggagcccagatccagggagacagttgcagcagatgaggcaggaggccagcgaggggttctacctgcyttccgggctggcctctgcatggacacaaagcagaaagggcataaaggtgaccctggccaccaaagcagacctggagcaaactggaccagcgcaaggcccc

SEQ ID NO: 395114 - DNA, 201 bp, Homo sapiens
aggctggagtgcagtgatgcggtcatagctcacgacagccttgacctcctaggctgaagcaatcctccctcctcagcctcccaagtagctgggactatagrcacacaccaccatgcccggcgaattttttaagtttttatagggacaaggtcttacagtattgcccaggctggtctcaaactcctaaactcaagtaatcct

SEQ ID NO: 395115 - DNA, 201 bp, Homo sapiens
ttggacagagggcccagctgccctgtttgcagtctacaccgcatgcccaacccttccccagatctactcactttcagaatgtgctgccttccacgtgtgarccagactgagctcctttctgccactgatgttgaattgtccatttgctcacgtcagtgtccacgtggcaaatccacagggcatgggtgggatcctgcagtc

SEQ ID NO: 395116 - DNA, 201 bp, Homo sapiens
tttccgggctggcctctgcatggacacaaagcagaaagggcataaaggtgaccctggccaccaaagcagacctggagcaaactggaccagcgcaaggcccyggtgccagcactcagagacatttcttttctggcaggaaatttgtgcttcattttctaatgaaattccaaggcaatcaaaaggcaaggaaagaggagggaa

SEQ ID NO: 395117 - DNA, 201 bp, Homo sapiens
tgaatgatagacagcctgagagcgtcccctgactcactcacactgtttctttctttccagacctttttttctgtttgctttatttttcttagacttttccrtgacgtcttccattgcactggtcttccctcctgcagtatctagtctgctgttaatctcgttcagtgaaattttcatttcagatattgcattcttcatccc

SEQ ID NO: 395118 - DNA, 201 bp, Homo sapiens
ccttccccagatctactcactttcagaatgtgctgccttccacgtgtgaaccagactgagctcctttctgccactgatgttgaattgtccatttgctcacrtcagtgtccacgtggcaaatccacagggcatgggtgggatcctgcagtctagacaaagccaaggagcaccgctggaggccacgttgggcttcccaatcca

SEQ ID NO: 395119 - DNA, 201 bp, Homo sapiens
acacagttcagtccatagcacccgctttgggaagtgggaatgacctctcccttccccatcttctggcctttgtaaccctaatgtgggaaagcaggagggayccagaacgacattgggtcaccaaagagagcatcgcagcccaaaaggttgaaaggcggcaccaaggtcccgcgcctggtgaccgccgactcgccctcccgg

SEQ ID NO: 395120 - DNA, 201 bp, Homo sapiens
ggctctcgcaggccagcgaagacaggcgagatggctgtgctcagagttagaagagcatcgctgggagcagaggaaagagggatttctgtgtcacctggggrcccatccaggaccagtgggagatggagttgggctcattgagggaaagaggtgaatggaaggaagttggaaccagctgtcctaaggccggagctgctcctc

SEQ ID NO: 395121 - DNA, 201 bp, Homo sapiens
tgctgccttccacgtgtgaaccagactgagctcctttctgccactgatgttgaattgtccatttgctcacgtcagtgtccacgtggcaaatccacagggcrtgggtgggatcctgcagtctagacaaagccaaggagcaccgctggaggccacgttgggcttcccaatccacatgcaaacccaaaatgtgttcttgggtac

SEQ ID NO: 395122 - DNA, 201 bp, Homo sapiens
caaccccagcatgttgaggcgcctggtcccaactgcccattcactccctgtacacagactgcttctttgtcctccagccaggggtgaagggccatgctggygaaacagcaaacaaccccaacatgctttgcagcctggccaaccacatgaccagtttgaggaggttggctggagatcacaatgaggaagttggatgagggg

SEQ ID NO: 395123 - DNA, 201 bp, Homo sapiens
atgagaaaaagcaggaaacagtgctgcaccgccaggctctgcaccgtctctacagagggctggggttggttcaggagcattcggcccaggctgtgatctcragaaggtggtcagggcccaggctcccgccagccctcacggcagcacgaggctggtacgagacaggtgcttcaggtgtttgttgagagctgcacacacttc

SEQ ID NO: 395124 - DNA, 201 bp, Homo sapiens
gtgtgagctgcagagacttctctggagcggtgaacagctcctgccaggaaagagcatggcacagcctcgttctccagcgtagagtagaaggaatggccccrtccacgcgaaggtctgtgttcaccaagcatcttctgtagaaaaatgctctcttcgcctgatcatgggagggaatcaaatggatagagcatttatcccttt

SEQ ID NO: 395125 - DNA, 201 bp, Homo sapiens
attgcaactggcgagaggccttcagaaatgccccgtgagagtcctgtgtgcagagctccatctcagcacacttcctgttcttttggttcgtcgatttttgyattttcagtcccctgtgatccattatttataacagtggagattggcctcagacactagcagtgaggaaaacaaaagcgaagctacgcagaaaaatgacaa

SEQ ID NO: 395126 - DNA, 201 bp, Homo sapiens
ctgcagagacttctctggagcggtgaacagctcctgccaggaaagagcatggcacagcctcgttctccagcgtagagtagaaggaatggccccgtccacgygaaggtctgtgttcaccaagcatcttctgtagaaaaatgctctcttcgcctgatcatgggagggaatcaaatggatagagcatttatcccttttgtgact

SEQ ID NO: 395127 - DNA, 201 bp, Homo sapiens
cctgcctccccgctggggtgtccctttcccatggtttcctctaaatcttttcacccatgtccagccacaccattctcacatactgccttgaaactgggctygaaggggctgcgtgctgagagaaggtcctctcccccagtgatcctccagaggggctgccgcctgggtcccccgagcacctcctaccccaccctccccatt

SEQ ID NO: 395128 - DNA, 201 bp, Homo sapiens
catgcagcgagagttgcttcgagcttgaaccgcgtatccaggagtcaagcagattgcaactggcgagaggccttcagaaatgccccgtgagagtcctgtgygcagagctccatctcagcacacttcctgttcttttggttcgtcgatttttgcattttcagtcccctgtgatccattatttataacagtggagattggcct

SEQ ID NO: 395129 - DNA, 201 bp, Homo sapiens
ggtctgggtagccgtgtcctgcgcatgaacatcctccgtcgggagaggaattccccacggattatcagagctgctccctccaccccccgccacgtcccacrcgggccacatcaactccctctgcagcctctggccagcggctgagccctccgtgtctcccctcgttaatgcctccttcaccatcccctcctgaagtttccc

SEQ ID NO: 395130 - DNA, 201 bp, Homo sapiens
ccatcactagcaaagtcacccagacccatcaccatcaccatccagagtcacccagcccttcactatcaccatccaaagtcaccagccccatcaccatcacyatccagagtcaccagccccatcaccatcaccattcaaagtcacccaccccgataccatcaccatccaaagtcacccagacctatcaccatcatcatccag

SEQ ID NO: 395131 - DNA, 201 bp, Homo sapiens
gattatcagagctgctccctccaccccccgccacgtcccacgcgggccacatcaactccctctgcagcctctggccagcggctgagccctccgtgtctccyctcgttaatgcctccttcaccatcccctcctgaagtttcccccattgcatacacgcgctgaggcccacccggtatcaaggactcccattgcttgcgaaaa

SEQ ID NO: 395132 - DNA, 201 bp, Homo sapiens
tgtttaacttaagacttacttgttaagtgtaagaaactgccaagctgggccgggcacagtggctcacgcctgtaatcccagcactttgggaggccgaggcrggcggatcacttgaggtcaggagttcgagaccagcctggccaacatggcaaaaccccatctctacaaaaagtgcaaaaaattagcagggtgtggtggtgt

SEQ ID NO: 395133 - DNA, 201 bp, Homo sapiens
gaacattatagaggaaggtgatcatttaaatgatatacttgaaattcatctgagtaaggaagctgagaacagtcaaagaagctaatttaaaaaataaaaawaaataaaaagaaccacctaatccgctgatttctaatcatgccgagtgcttatctctcctgccaggcatacagcgagcgccttgcagagtctcacagcggc

SEQ ID NO: 395134 - DNA, 201 bp, Homo sapiens
atgcctcctaaatggcttggtgctctccttgagatagtgagttctcgcaagatctggttgtttaaaagcacgtggcatctctctaccctcctgcttctccrttgccttccaccatgattggaggcttctcgaggcctccccaagagccaagcagatgccggcaccaggcttcctgtaaagcccacagaactgggagccaat

SEQ ID NO: 395135 - DNA, 201 bp, Homo sapiens
gcactgtatttaccaacttaggaactaaataaacagaatccagacaggataccattaagagttgcagcatcaccaaaaatatctggctgattgactgaatrtcgtcgcttttctttttctttttttgagagacagagtcttgctctgttgtccaggctggagtgcaatagcacaatcttggctcaatgcaaccttcgcctc

SEQ ID NO: 395136 - DNA, 201 bp, Homo sapiens
gcccgccgtgtttattgagcatctactatgtgctgagtgctggggtccatgggaagctgagtgctggcggaatgggaaggcaactacaaatgataaacagyagcagacgttgcaggctgggtgggccagccccgtgtggggcctgatgaacaggtttttttccctgacgatcggctttgcaggctttgtgggctttgtggg

SEQ ID NO: 395137 - DNA, 201 bp, Homo sapiens
gggcatgggtgggatcctgcagtctagacaaagccaaggagcaccgctggaggccacgttgggcttcccaatccacatgcaaacccaaaatgtgttcttgkgtaccttttctgagaagacagcctgtggcatgcatcagcttccttgaggggcccatgatgctggagaaaacggagacccggctccaaaggagaatgtgga

SEQ ID NO: 395138 - DNA, 201 bp, Homo sapiens
tggccccgtccacgcgaaggtctgtgttcaccaagcatcttctgtagaaaaatgctctcttcgcctgatcatgggagggaatcaaatggatagagcatttmtcccttttgtgactaaaataaaggtaatagcaactacaaaaaccacgacacaggcttctcagcatctttttataacgatagtgctgattttttggaaaat

SEQ ID NO: 395139 - DNA, 201 bp, Homo sapiens
agttctgctgatcctcaactttgcctatttatttctcttctgttttaagtcaacactttctcctggtgaaactgctctggaaggacgttccaatgaaaagmttttcccataatgagatcgtaatccttgctgaaaacgctttgccgttcactgcattttaatgctctggcaccacatgtgcccccttttctttttgggata

SEQ ID NO: 395140 - DNA, 201 bp, Homo sapiens
ggccagagaccgagggtgactcggaggcttccagttcccagcagctttattggcgttgctgtttccatagaaggacaataaaagggggccataaggaggcrcatccgcagagtgcgtgcttgagcttctgcaagccagaggaggccggcggccggcagggtgggcaggctggctggctgtgccccacaacatgcatgtgga

SEQ ID NO: 395141 - DNA, 201 bp, Homo sapiens
gcacatgcctgtaaccccagctacttgggaagctgaggcgggagaatcgcttgaacccaggaggtggaggttgcagtgagccgagatcgcgccactgcacyccagcctgggctcgacagagcaagactctgtctcaagaaaaaaagagcacatattggagataggggctgggaagacgatttcacagaagaagagtcctcc

SEQ ID NO: 395142 - DNA, 201 bp, Homo sapiens
tctgtgtcctattttccattcactgcatgcatcctccaagtatgatttccactcggaaccctgagctgcctcatccctcgctccgtctcccctccctcccrcccagctcacactgaaatcacgcctcgcgttcagcggctggagtcctggtggattgctgcttcggggctctcagaaatccctttacttgagtcttggttt

SEQ ID NO: 395143 - DNA, 201 bp, Homo sapiens
ggtgactcggaggcttccagttcccagcagctttattggcgttgctgtttccatagaaggacaataaaagggggccataaggaggcgcatccgcagagtgygtgcttgagcttctgcaagccagaggaggccggcggccggcagggtgggcaggctggctggctgtgccccacaacatgcatgtggagaggttttgggggc

SEQ ID NO: 395144 - DNA, 201 bp, Homo sapiens
cagaggccctgggcatgggtttcgcagccccctggaggccagaccctcaaactccagccttgtttcttctaagtgtgccagtcaagatgcttctcactgcmagaaacagactctttctcaagccagttcaagaagatctgcgttgctgcagaggccgatgggtgtggggagcaggctcagtgagagactgtcgtaaggagg

SEQ ID NO: 395145 - DNA, 201 bp, Homo sapiens
agcaagactctgtctcaagaaaaaaagagcacatattggagataggggctgggaagacgatttcacagaagaagagtcctcctcctgcagatccaagcctyaggagcaatgtgtccagcttggaataagttgatatccacttttaaagacagaacaagaagaggaaaagcattaggggaggagcctcctgttgcccccagg

SEQ ID NO: 395146 - DNA, 201 bp, Homo sapiens
acggattatctcgcagctctggaggatggagtccaaaatctgaatcgctgggctgaaatccaggtgtgggcagggccgcgctccctctagaggctcccccrgagattcccttccttgcctcttccagctgctggtggctgccagcagtttgggaattgcggccgcatcacaccacctttctgtttgttgttgacatccccg

SEQ ID NO: 395147 - DNA, 201 bp, Homo sapiens
ttcccctctgcccagagccaggcggagatgggttgcctcaagctggggctgcgggtgtagcagggccagcctttccagccccaccagcagcacgaggggawgaggacaaaaactgagttctagtcttcagcctgaaaccagactccctgaacagcggcctctgggccccatatgggttggggaactccaccgccccaaggg

SEQ ID NO: 395148 - DNA, 201 bp, Homo sapiens
cttccagctgctggtggctgccagcagtttgggaattgcggccgcatcacaccacctttctgtttgttgttgacatccccgcctcccctgcctgcggggtyttagatgtctctctccttcccactgagtttcactccacatttgaattggattaactcatgccatgttaggcaaacgtgcccctcaaatccttccacttaa

SEQ ID NO: 395149 - DNA, 201 bp, Homo sapiens
gccagcaggccctgccacctctgaaggccccaggggagggaccttcccggtctctcttggcctctggtggctgccggcggcattctctgcctgcttcttcmcctggtgctcccatccgttctgtccaaattccccctttttgtaaggacacccatcctattggagtaggggtcaccctcctccaggatgacatccccttaa

SEQ ID NO: 395150 - DNA, 201 bp, Homo sapiens
caccacctttctgtttgttgttgacatccccgcctcccctgcctgcggggtcttagatgtctctctccttcccactgagtttcactccacatttgaattgsattaactcatgccatgttaggcaaacgtgcccctcaaatccttccacttaacagacatttattgaaggttcctgtgtgcggggcccaagagaagggacat

SEQ ID NO: 395151 - DNA, 201 bp, Homo sapiens
cgcagagagaggggctgcctggccaggcagggtcagcgggccccagcagaccctcctctgctcccagctctggtatctgcaaggaaacagcgggattcgamcagtcaaactgtcttgctcggtgaagatttccataaccctcctggggaatgcaggagacttacagagacagcacatgtgcgaatgtttacacaaaacagg

SEQ ID NO: 395152 - DNA, 201 bp, Homo sapiens
tgcggggtcttagatgtctctctccttcccactgagtttcactccacatttgaattggattaactcatgccatgttaggcaaacgtgcccctcaaatcctyccacttaacagacatttattgaaggttcctgtgtgcggggcccaagagaagggacattaaattaggagatgaaccttgggaggccatggcatgcttcgga

SEQ ID NO: 395153 - DNA, 201 bp, Homo sapiens
gcttttgaggatttccaactaagaaccttagactccaagacaggtcaagccccctggcatactcatttgtcatttggatgaaatagccttaggagagctayttaaccccactgaacttccatttccctgacaaaataggaattctaatgcataccttgcatggttcttggaggataaatgaagtaatttatgcaaaatgct

SEQ ID NO: 395154 - DNA, 201 bp, Homo sapiens
gccgtgtttccacgggggttggcattattttgtatcccagccattttgataggtgtgcagtggtgtctcactgtggttgtaactggcatttcctaatggcygagtggctctcagcatctcttcatgggcttctttccatctgtgactttctccagtacccatctgctcatctcttgcccgctttcaagttggctggttttg

SEQ ID NO: 395155 - DNA, 201 bp, Homo sapiens
tggttcttggaggataaatgaagtaatttatgcaaaatgctgagcacagtgcctgccacttggtaagcgcccagtaaatggttgttatcattgaaaatgayttagggggcatttttgaatggctaaagttatgtctctctggaattgctgaattttaatagaacaggaatgcttcctaaggtctaaaacaaaaggcggagg

SEQ ID NO: 395156 - DNA, 201 bp, Homo sapiens
gttgtttttgtttttgaggagtttcgctcttgttgccgaggctggagtgcagtggcgcgatctcggctcactgcaacttctgcctcctgggttcaagcaaktatcctgcctcagcctcccgtgtagctgagattacaggcgcatgccaccatgcccagctaattttttgtatttttagtagagacaaggtttcaccatgtt

SEQ ID NO: 395157 - DNA, 201 bp, Homo sapiens
ttattagtatgtttatcttcattatgtccctaagagccattcctggaaatgagactgtgagtcaaagggcacaaataccgccaacctgctttccgacagcrctgtgtggatacacgggcccgaacggcgccagcctcactgcctctgcgttagtgccgccacttcatctcagatactctcctgaagataagaggagagtcc

SEQ ID NO: 395158 - DNA, 201 bp, Homo sapiens
ttggggcccagttcaagcaggaggggaggcgtggggacaggtgttgaagctgtgggtgtgcagcggaggcttcatgacgctttcctcctgctcttgtgtaygtctgagcatttccataacagggaagtgttttgttttgttttttaaataacattttaaatgcctctggcacatgggaatccatggtaatttctgtcgttg

SEQ ID NO: 395159 - DNA, 201 bp, Homo sapiens
ttactcatttcagtttacaaaaaatctaggtcgttaaaggtgactgatagcttaagaagacagggaaagggcttcataacagagccggaaagtccaacagyacaacgacacgcatgatgccaaaaagtaaagcgttcctcactcattccactcagtgctccgtaactgattctccactggctcctgggctgcagcctcatg

SEQ ID NO: 395160 - DNA, 201 bp, Homo sapiens
actgtctgtccctgcccctcggccagaggccatcccaaggactttgcagttgcagggcggcatccactctggtcttcctggcccagcacctgtcctccccbctccactgtgagttgccaaggcaggcatttgtggcccctgggatgccttggggtgcctcatacagttacttgggccgctgtgttacaatcctttttcttt

SEQ ID NO: 395161 - DNA, 201 bp, Homo sapiens
aatgtgtgaatctgctagtgggttgcgtttggctggtcctgcaggctgatttggtctgttctctctcccagagagatccccaagcccggctgagatgtgcytgtttgtcttgagggcagacaaagcctagcaaaatcttatggaagctgatataaaagcttaatagcttataaaagctctaaaaatgattcacagtctagg

SEQ ID NO: 395162 - DNA, 201 bp, Homo sapiens
accatgcccagcccacaggatcctgccttcccagctctgcagaaccagcttctgcttatccgctaggtgccagcccagccacctgccttaagcaccatccrcagtcacccagcccatcaccatcactagcaaagtcacccagacccatcaccatcaccatccagagtcacccagcccttcactatcaccatccaaagtcac

SEQ ID NO: 395163 - DNA, 201 bp, Homo sapiens
aagcttaatagcttataaaagctctaaaaatgattcacagtctaggatagagaaaataaaaggaatttgaattggtttattttcctttagaggagcctaartcaatatttattctgagtatgcaatcagaaatatcagtaatttgagaacaaggcaaacagagctgcacatcccgttatggccacgagcccacctcgcctt

SEQ ID NO: 395164 - DNA, 201 bp, Homo sapiens
tatttatgtgtgatttatacatcataaaatgccatttaagtgcctattttgatgacttttgaaaaatgtgtacacccttgtaaccatcaccaaaatcaagrcatttgcaccacctagaaaagctctctcttgccccctccagtgtgtctcagtccacaacggacctgctttctgacatcatccatgagatttctttttgag

SEQ ID NO: 395165 - DNA, 201 bp, Homo sapiens
aacagtctaggagttgtggagggtaagggaggggcttgggtgaggtcaggggggactctcctcagtcctcctggctgccctcctcccctggcatgcaactsacacccccaccccaggaggcagccatgtccagacaggctgtcctcctcctgaactccacctggctttgggctcatcctccccgggcacttctggctgatg

SEQ ID NO: 395166 - DNA, 201 bp, Homo sapiens
gaaagtccttttgaggagagggcctgcagctgaacctctcacgcaggccactgggtaggtgcgcgcccagcttctcagaaggtcagtcccaaccctgcacrgctgccagaagctagccagatggggaaggcggccaggagcctggtccgacaccccgatgcacagggcctgggccagaggcagatgctcccatctacatat

SEQ ID NO: 395167 - DNA, 201 bp, Homo sapiens
ggtccgacaccccgatgcacagggcctgggccagaggcagatgctcccatctacatatgcacacacacatataaacacaaacagagaaaggtgcacatgcrctcacatatacacatgtgaaatcacacaggcatgtcaggatgtcacatatacatgcacacgtgtaagcacccaggcacgtgcagatacattcatatatat

SEQ ID NO: 395168 - DNA, 201 bp, Homo sapiens
ggtctgaacacatcggtggccgcttgagtttgcggggctgtttctactgtaaaccagagcagtgaatgcgcacagcccaaagggaggagccgcgctagaargtgttcaagcgtccgcagaagtcggctcccagttcttaatagtttgccacccaccgtggctacgccacacctacgcttgcctccacccgacctatgcctg

SEQ ID NO: 395169 - DNA, 201 bp, Homo sapiens
ttgagtttgcggggctgtttctactgtaaaccagagcagtgaatgcgcacagcccaaagggaggagccgcgctagaaagtgttcaagcgtccgcagaagtyggctcccagttcttaatagtttgccacccaccgtggctacgccacacctacgcttgcctccacccgacctatgcctgcccccttcacatgcgggagccca

SEQ ID NO: 395170 - DNA, 201 bp, Homo sapiens
ccgcgctagaaagtgttcaagcgtccgcagaagtcggctcccagttcttaatagtttgccacccaccgtggctacgccacacctacgcttgcctccacccsacctatgcctgcccccttcacatgcgggagcccagggctccgtgccctgggcagctggtggggtctgcccaggccttctcgtgatgcttccacccagcct

SEQ ID NO: 395171 - DNA, 201 bp, Homo sapiens
ctgaatctgttagcgttcccccttacacatcaaactgtggtagcaactctgatgggttttgcaagcatgaaacagagggaagggctaccaaatggatctcygtggagcggtggttatcacggggaagagacggcagcatgccgagaaaataacaccgaagcctctttttccagaaaggaaatagattgattattctagttt

SEQ ID NO: 395172 - DNA, 201 bp, Homo sapiens
gcccagccccctggtgcactctgctgcaggggcccaagagcagccagacctcctggggcagctgctcctcattcagcctctggggaccaccctgaagccakcacactgcccaaccggaaggtggctttcctctgaaacatgcctggctcactttgccctgctcctatgtgggatacctcgataccaagtgctaaacaaaaa

SEQ ID NO: 395173 - DNA, 201 bp, Homo sapiens
acccagtgtctcttctcagcctcacgacgaggagacctgctcatggagctgctgcgccggcctgagctctgatccctcctccgacccagcctcaccctgcmagcagcaccatgtggggctcagaatggggatcttaagggacccttcccacaacctcccgataagcctttccacggagggcccaagcggagacaggagaac

SEQ ID NO: 395174 - DNA, 201 bp, Homo sapiens
tgtagctgagattacaggcgcatgccaccatgcccagctaattttttgtatttttagtagagacaaggtttcaccatgttggccaggctgatctcgaactyctgacctcaggtgatccacctgcctcagcctcccaaagtgctgggattacaggcatgagccactgtgcccagccacagtttgatgagttttgatagaagt

SEQ ID NO: 395175 - DNA, 201 bp, Homo sapiens
gtgtgaggtcagaggtcagacaggtcatcagggattttgcttcgagtgagttgctgctgccctgactcctctcccacagcaaataagaccacacggggctygggggttgggtttgtcgcttgcttttgctgtgctgagggcttcaccagactgaaacagcaggaccacagctcatctctgctccttctctctaggaccaac

SEQ ID NO: 395176 - DNA, 201 bp, Homo sapiens
tttcaggaatcaccacccaaaccagaaataccatttgacccagcaatgacgtttatatatatacccaaaggaatataaatcattctattataaagatatayctacatgtatgttcattgtagcactattcacaatagcaaagagatagtatcaatccaaatgcccatcaatgatagattggataaagaaaatgtggtacat

SEQ ID NO: 395177 - DNA, 201 bp, Homo sapiens
tcaatgccctggggacggcctcccacccttcccatcccaccacaccttggtcaggctggtcctgggactgtcctggttgtctcagggctctggccccatgwgtacattcaagtgtacatcccagagcacactatgggcgaaaacacgggcttgggtgtgttttccaggaacacgaccatctccctgctgaccaccgacgac

SEQ ID NO: 395178 - DNA, 201 bp, Homo sapiens
ttgtacaagtcttattgtgggcatccttgtccatgatcttgggtccacctaggagttaaatggctggctcatatgctgtgtttgtttaacttaagacttamttgttaagtgtaagaaactgccaagctgggccgggcacagtggctcacgcctgtaatcccagcactttgggaggccgaggcgggcggatcacttgaggtc

SEQ ID NO: 395179 - DNA, 201 bp, Homo sapiens
tagtagagacagggtttcaccatgttggtcagggtggtctcgaactcctgacctcaggtgatccacccgcctcagcctcccaaagtgctgggattacaggygtgagccacagcacctggccgcttttcatgtattgctagatttgatttcctaacaattcgttaagaatgtggctgtctatgcttaaatgggatattgatt

SEQ ID NO: 395180 - DNA, 201 bp, Homo sapiens
aacactttatagcagggcccaggagacttcacagcaaggggattctgtgagtgggggagacggctgtcaggggcagggaggctccacccagggctcctgayggcgctgggccccccgagccatctgctcatcctgcagaccctcatgcacgccggtggcagccccgtgctgcagaacacccctgccaggagcaaatctctc

SEQ ID NO: 395181 - DNA, 201 bp, Homo sapiens
cacgccggtggcagccccgtgctgcagaacacccctgccaggagcaaatctctcctcaaggaaggggctgcggtcagagtgctctgctctgagagcagtgyctgcaaaggcaaggcacaggcaaccggctgccccagataagtggacatgtgggattccgggaactgtgtcaccttctgcagcaaggcttgaggccaggaa

SEQ ID NO: 395182 - DNA, 201 bp, Homo sapiens
ggcaacttgctccccagctctgagagtgcaggaccggggcgcagagacgacagaagaggctttaaatatgcagaatgactgtctaggtcaacgcacaaaargaaagggccccaggtgtgggagatgcaaggggtgagagggaaagctcagaagagacgtgttggagctgctggcctgcagcagctcccagggtccctgcac

SEQ ID NO: 395183 - DNA, 201 bp, Homo sapiens
tttttaaatgttctcaagtagcttcctcttcaagtccggtttctttttcttgttttctgctgggaactagatgtagttcccctccttcctcagcagcaccmtttaggtacgagacgggtggggttggccctttccattctttaaggagagtattttccactgtgagatggtcacataccttctctttggtaacaggacaaa

SEQ ID NO: 395184 - DNA, 201 bp, Homo sapiens
aagtgatgacagcagacatccttctcttacatgtcatcttgggggaacacattcagtctttcaccattaggtatgatgttggctgtaggattttttattgytgttttttgttttagagacaaggtctcactctttcacccaggctggagtgcagtaacgtgatcatagctcattgtaacctgaaactcctgggcccaagtg

SEQ ID NO: 395185 - DNA, 201 bp, Homo sapiens
agtattttccactgtgagatggtcacataccttctctttggtaacaggacaaaagagcaaatgctggaaaaactaagcttatgagctttggggaagcctgrtgtgcaaatgagggaggctaacatgattttcgggctactggattggtgctcactcccaatttgaaaactagtcaggagataccgaggccctgtgtgatgt

SEQ ID NO: 395186 - DNA, 201 bp, Homo sapiens
tggtcctgtatttgtatcattttgaaagcaatgcaaagccctgtcatgatcagtatttacatttatgaagtgtagtagcatgatacagaaagagaaggcayctgttgaagaaaagctgtgaaagtggcatctttctctagttttagtattttcctttatgatagtagcattttcagtgacagtgagagtagtatttcagtg

SEQ ID NO: 395187 - DNA, 201 bp, Homo sapiens
tctatgatagggtccttccagtgggaggtacacaaatttaacttaactatagttaaacaagagccagaaaggtaaagaaggtattgttgagaacaaatacrgctggatgcacttttggggtgcaaatttgtctcttctctgtgtcagttgtatctccccaaagcaaggaataagtgctggagttgagtgcgtcagagcagg

SEQ ID NO: 395188 - DNA, 201 bp, Homo sapiens
ccagtgggaggtacacaaatttaacttaactatagttaaacaagagccagaaaggtaaagaaggtattgttgagaacaaatacggctggatgcacttttgrggtgcaaatttgtctcttctctgtgtcagttgtatctccccaaagcaaggaataagtgctggagttgagtgcgtcagagcagggcttgtggcaaggcagg

SEQ ID NO: 395189 - DNA, 201 bp, Homo sapiens
tgctctgtgaggggatggtgctagtgagagctcaggtcgagagggctggggtgctccttcgtctctcagctcatcagcagtgacttggaagacaatcaggrtctacctgtgttgttgagaagcgttacgcaagcaggaaagcgcacaagaggaaggcgcagctgagtgaagcattgcagagcccgccaggctgtgccttcc

SEQ ID NO: 395190 - DNA, 201 bp, Homo sapiens
aattagccaggcgtggtgttgcacacctgtagtcccagctactcgggaggctgaggcaggagaattgcttgaacacaggaggtggaggttgcagtgagctragatcgtgccactgtactccagcctgggcgacagagcaagactctgtctcaaaaacaaaacaaaacaaaactatatatatatatgtgtgtgtgtgtatat

SEQ ID NO: 395191 - DNA, 201 bp, Homo sapiens; identical to SEQ ID NO: 86808

SEQ ID NO: 395192 - DNA, 201 bp, Homo sapiens
agccaatcctggaaggtatgagacgagattcttcaacaagccagtttctcaagaaaatgttaacagataaaaactaacctgtgttaatatcccttttcctktttttctttttatttttagacttggatgtggatctgataagagtctctataaaagcatggatttttttctttccaattaacttaattagaaaactttaat

SEQ ID NO: 395193 - DNA, 201 bp, Homo sapiens
tgttttgttttgttttgttttgttttgtttttttagatggagtctggcactgtcacccaggctggagagcagtggcatgatcttggctcaccaaaacctcyacctcctggggtcaagcaattctcctgcctcagcctcccaagtagctgggattacaggtgcccgccaccacacctggctaatttttgtatttttagtaga

SEQ ID NO: 395194 - DNA, 201 bp, Homo sapiens
aaccagcagtcctcaacctttttggcaccagggactggtgacaatttttccatgggccgaggtgggggctgggagaatggtttggggatgattccagcgcrttacatttattgtgcattttctttccatgattacattgtaatatataatgaaataatcatacaactcagcatcatgtagaatcagtgggagccctgagct

SEQ ID NO: 395195 - DNA, 201 bp, Homo sapiens
gattgtaattaaccaagtaattagaatggagtgagaatattggattaaaattgtatcagtatttaaatttgggtaataaatatctctaaatcagaggtgtrtgtgatcctccatatttctgaggaattctaatttgctaaatgtgtaattaaagtatttatttgcctgatatttcagaagcagataaacactagtgaaaag

SEQ ID NO: 395196 - DNA, 201 bp, Homo sapiens
gcagcctcattctgctgcccatgtgctgggcaccttctccactatcacgacttccttgacatttcagtctgttctgttcaagttttggccttccatccctytgaaatgggtcttgctagtcactaatgatctgtctcttgttaaggtcagtggcctgtatttcgtcctggtctcaatcagtgtctcaacaggactgtacag

SEQ ID NO: 395197 - DNA, 201 bp, Homo sapiens
catggcagccttcttcatcaactggaatctctgttgaggatggagaaaaatctgtggtccttttgtttactgggtgactttctgacctctctctcttctcmttctctctactgcattacaactgtttgatgagagagattttaaaaatgaacataaacaatttttatggaaatatctgttatctattttttttatatagtt

SEQ ID NO: 395198 - DNA, 201 bp, Homo sapiens
attgcaaaacctttcattgtttctgtaatcatggaaaatctctcaaaatcataactttaattagtaacaataaggctgcatcccattcttccacaatgctyaacacacatatgcacacatacatacaataacataacatggtcataaatttcaagtctgtgtttaagaccatgtgattttgttgtatgctgtataaataga

SEQ ID NO: 395199 - DNA, 201 bp, Homo sapiens
gccgggcatggtggtgggcgcctgtagtcccagctacttgggaggctgaggcaggaaaatggcgtgaacccaggaggcggagcttgcaatgagctgagacygtgccattgcactccagcctgggcaacagagcgagacgccgtctaaaaaaaaaaaaagaaaagaaaaagaaaactcagtggttttctgtgtcaactttct

SEQ ID NO: 395200 - DNA, 201 bp, Homo sapiens
ttgggctcatttttattccacactcttcccatcctcatcttcctagattctgatgacatcatcttgagttttagaaactcattttatcgtgctttttttttaaaagcctttcgtaatgagtcacatagcctcatgatcaacaattgtttagatgaagccgtaagagctcctggtttctcttctaaccagttttctgtagcc

SEQ ID NO: 395201 - DNA, 201 bp, Homo sapiens
gtcttccctgtctctaggtagtctctgtatttctggaacattgagtgtatgttaaaagtatagaaaaatgcattgtgtcaatccaaaactcagctgggctrggcttagagaattatgagcagcctttccacctgcatggaagtccttttgtgcaggacagttctttgtttccggggtggccctgctccctccaggaggttt

SEQ ID NO: 395202 - DNA, 201 bp, Homo sapiens
aggcagatcacctgaggtcaggagttcaagaccagcctggccaacatggtgaaaccccatctctactaaaaatacaaaaattagccaggcatggtggcacrtccctgtaatcccagctactcgggaggctgaggcaggcagcttgaacctgggaggtagaggttgcagtcagccgagatagcgccactgcactccagcctg

SEQ ID NO: 395203 - DNA, 201 bp, Homo sapiens
tcagtgctactagatcccatgtgattttttattttcaggattactctttgctaaaatattaaagcctgagttcaaaatattgtctgatgtgacttgtcttsccttaatattgacagagtggcatataagaccattgaaatgacatcaaatgccgtggatcccagatgtctgaaccttcagtgtgtaggctaggagcacctt

SEQ ID NO: 395204 - DNA, 201 bp, Homo sapiens
ttgaaatgacatcaaatgccgtggatcccagatgtctgaaccttcagtgtgtaggctaggagcaccttaggcggacgcagatcgaagtgccagtagagatrtcacccctgcctccctggcttggctgtgcgcctgcagtgacttctgtgtggagcatgaccagagcccctggcttgggaaggctggagggacatctgttgg

SEQ ID NO: 395205 - DNA, 201 bp, Homo sapiens
cagggctgcctcagccccctgacgccacgttcctctgggctctgtaggtgctgaacaccaggctctaggcctcatgtccagaaccactagggcatgagggsatggagctgcacttcgagtctctgccggagtggaacctgccaccttgtgtctttggagcccccaggatagccccggaatgtgacgtgttccttgtaggac

SEQ ID NO: 395206 - DNA, 201 bp, Homo sapiens
gagcccccaggatagccccggaatgtgacgtgttccttgtaggacccgggtggccctcccagaagcagtccttagggctttgttggtgggctctattgtcyttcaacaggaaatttccaaatgtgcattctaggatgggtggaaaaccctcactctttttctagagtaacccttgaaggacgtaggtcagtcatccctgcg

SEQ ID NO: 395207 - DNA, 201 bp, Homo sapiens
aagtttgcccagaagacctaattcagcttaaagatgctgagtccatagaggcttctaatctgtagaagaaaggggcctgtgtttcttagaggtattgaatyatttcatgctttttctgtaagttagggaaaccttcattttcatttccattttggaaggtggaaggaatgtgtcataggaattggaggatttgtccattcg

SEQ ID NO: 395208 - DNA, 201 bp, Homo sapiens
ttcagggtcaccccaggagcattccttcaagtacatacacccctttttctttttcacagaaccccgccctttctcccaaattgattttacctcaatttatrgttcttcatttgtctttttattgcattattgtttagctcctgagctgtatctccccccaggtacttcacaccctgtgtatgtagcgcccagcaaagggtg

SEQ ID NO: 395209 - DNA, 201 bp, Homo sapiens
  misc_feature (1)...(201): n = A,T,C or G
catcctcatgaatgaaaaaaacaccacctgagctgctctgtggctatcaaaagaacatcagagtccttctaaagagacccaaggtgatgtttctgaggctntccgggccttgtctctagggccttttaagtgagtctctctgtaagattaatctcctttaccaatcacaaacctagccattcatagaagaattgatgggtt

SEQ ID NO: 395210 - DNA, 201 bp, Homo sapiens
tatgcacagcctccccatcatcagcatctcccactctagtgctatattcattacaatcgaagacacatcatcatcacccaaagcccacagtttacaatggsgctcactcttgatgctgcacattgtctggctttggacaaatgtataatgacctgtatccaccatcacagtgtgagaccagagtagtttcactgccctaaa

SEQ ID NO: 395211 - DNA, 201 bp, Homo sapiens
aagaggttcttttaaaaagggaagaaaaaatagctctgtgaaatgtgctaaagtgcttgcatgtgctgttttgctttgttttataacctttggtacaagarttggcattcgtcaaaactgaaaacgttggcttctgctctgcaagagatttgtagctcccattcttaatgtgggcggtacctgcaggtactcacctgccac

SEQ ID NO: 395212 - DNA, 201 bp, Homo sapiens
tgtgaaatgtgctaaagtgcttgcatgtgctgttttgctttgttttataacctttggtacaagagttggcattcgtcaaaactgaaaacgttggcttctgytctgcaagagatttgtagctcccattcttaatgtgggcggtacctgcaggtactcacctgccaccacactcggcatgactattttctactgcgagacatt

SEQ ID NO: 395213 - DNA, 201 bp, Homo sapiens
agaaaacccatttcttcagatggtatcagttccagtagttctttgttttcatttttaaactaatgtttatttggaaaaaaaaagtaacataagcagatggyaaaaagcatacaatgataaagtttaaaacctccctcttcagagccctcctgtggcacccacagtgagtgggttttgactgtccatccagaagctgtcaaa

SEQ ID NO: 395214 - DNA, 201 bp, Homo sapiens
tgcatagcacagagccatccatttggaggatccttgctggggcgtggggatgtcacacacataaatgcaggagtcggggctcatggacctgaacccttcakatccaagccttttattatatagtaattagactttacctcaaggaagaaacaaacacaagctgatagaacctagcatgggtgggccaagaaatagcaaatg

SEQ ID NO: 395215 - DNA, 201 bp, Homo sapiens
cagggctgggggatctggccggaggactgctggcattttcttgggagccactggactgttttgtgccagggaatggcctgtgctggcccacgtgttcacargggtcaagaggagagggcttggggcaggcaccgggttccccttaggagagggcgtcatgacacaggcaggggggcatgacttgacccatggcgtagcagt

SEQ ID NO: 395216 - DNA, 201 bp, Homo sapiens
aggattggagggatgctcatgtgtggtgcccacactccacactggccccacgcgggtggcgaaggactcagccagagcctggcaggatcctggggtgtctrtttccaaggaatgttctggaagaaacatacacacatacttgtttgccagatttacctgtgtggttttccagatgagaagcagcctgtgtcactccataag

SEQ ID NO: 395217 - DNA, 201 bp, Homo sapiens
acctgaagtattaattccacaaagacactgtccctcaggaccactcaggtacagctctgccagggacagagtcctgctagtgggaggtctcaggtggggckgtgtgttctgtgccatgaggcagcgacaggtccagatggatgtcgtcaccaccttcctcagctctcatcacctggtcgtacgccaggcccacctcttccc

SEQ ID NO: 395218 - DNA, 201 bp, Homo sapiens; identical to SEQ ID NO: 86804

SEQ ID NO: 395219 - DNA, 201 bp, Homo sapiens
tgaccacgttctcaccgagctgtggactcctcactaggagcctttacctacggccagatggctgttgtcactgcctgtggtggggttacggtttcggactyacctgatccgttctgccgggattacctacggccagatggctgttgtcactgcctgtggtggggttatggtttcggacgcacctgatccgttctgccggga

SEQ ID NO: 395220 - DNA, 201 bp, Homo sapiens; identical to SEQ ID NO: 86805

SEQ ID NO: 395221 - DNA, 201 bp, Homo sapiens
aggtggcagacttagggagcgcttgccatccctgcccttcccagctctacccagaacaaggaggcctcgcacactacctggtcatattttgacttcatgcmtttaatgaaccaaactaaaggtaaatattttcttttgattcccaaggcagacttgtgggtacccaagttcctcagcccatctttaactcagtaggatgtg

SEQ ID NO: 395222 - DNA, 201 bp, Homo sapiens
atgagtcacatagcctcatgatcaacaattgtttagatgaagccgtaagagctcctggtttctcttctaaccagttttctgtagccagtgctcctgccctyaactccacatccagatttatttttcactttgctggaatatatccttaattggggtgacagggtgatttcttggttggttgtttttgtttggtttttggag

SEQ ID NO: 395223 - DNA, 201 bp, Homo sapiens
ggagctcatgcctggcccacttccctgcaccacggccgccacacggctccgtctcttgctctagttctcctttctgggagagtgactccatttggggctcrtcatctctgttgggttttcagtggctgcatttggggttcctcatgtctgttgggttttcagttctccttttgcatactgagagaacaactttctagtgat

SEQ ID NO: 395224 - DNA, 201 bp, Homo sapiens; identical to SEQ ID NO: 86811

SEQ ID NO: 395225 - DNA, 201 bp, Homo sapiens
cctgtgaatggcctcaatctgctctggaagatggcaaggggcttactaattcttcctttatttgaaagtagagcctatctattgtatcagttaatgttaaygatgccagataagtttcagtgtgacttcctttgaggagggagagagctctagcaagagtagaaaatccgtggggaaaaaaagcacaatttagaacgatag

SEQ ID NO: 395226 - DNA, 201 bp, Homo sapiens
cgctcaagtctgcgtatattcctcggcaggcagaattcccccaccacgcacttctgtggccatgtctgagcacagtgtgccgcccgtggctgctccctccytgggggtgaaagcgggcttcacaccaccttcctgtgtcttccgtttcaggcatcagcaatgcagaagcacggcagccagggaaggcccccaacttcagtg

SEQ ID NO: 395227 - DNA, 201 bp, Homo sapiens; identical to SEQ ID NO: 86809

SEQ ID NO: 395228 - DNA, 201 bp, Homo sapiens
taggcctatcacgtagtatcagatagctaattttatgttaacattttggtgtttttgcaaatgtatttcatgagaccagtgtggggattgtgttttttccmgtaacatcttctactgacagtggcatgtttttaatttttggtgtgttctctgcaacaggtgtcagaatttgctgcagacgtttttccttcctcgttatcg

SEQ ID NO: 395229 - DNA, 201 bp, Homo sapiens; identical to SEQ ID NO: 86810

SEQ ID NO: 395230 - DNA, 201 bp, Homo sapiens
gacttagcagaaaattcgacacaagcaggaacttgattttttaagaaaaaatattacattttgaggacattttgacaagtaggggaagagagggcttctgktgttttgttttgttttgttaactaaacctgaagtattaattccacaaagacactgtccctcaggaccactcaggtacagctctgccagggacagagtcct

SEQ ID NO: 395231 - DNA, 201 bp, Homo sapiens
ttcattttggcctaagtatgatacaagaggtggaaggctggtttctctgtttccttcagctgctcctgactggtcctcatctgttccttctcagatcacarttaactgaatatattttaaaagagaaaactcgtaagtgccctaaggaaataaggaattattttgaacactaaagctaaaagcattctaacattgtgttgc

SEQ ID NO: 395232 - DNA, 201 bp, Homo sapiens
ggctgaggtgggagaattgcttgatcccaggagacgggtggcaatgagccaagattgtgccaatgcactccagcctgggcgacagagcgagaccctgtctyaaaaaaaaaagttgtgactttgctgtgtagtctttgtgtaacataattttatgattctattgttttaagcttaatattccaaataggtaataattatgtt

SEQ ID NO: 395233 - DNA, 201 bp, Homo sapiens
tgtcttcttgttctactttctgaagtctcttctgtgagacagcagtgtatagaacccaagagtgaaaacatccagtccatatatatatatatatatatatattttttttttttttttttgtagttatcttcatggtcatcctcatcattttggcaggagaccagtctagttgtaatttcaggtccttttctggttactagt

SEQ ID NO: 395234 - DNA, 201 bp, Homo sapiens
tttgtcttcttgttctactttctgaagtctcttctgtgagacagcagtgtatagaacccaagagtgaaaacatccagtccatatatatatatatatatatatattttttttttttttttttgtagttatcttcatggtcatcctcatcattttggcaggagaccagtctagttgtaatttcaggtccttttctggttacta

SEQ ID NO: 395235 - DNA, 201 bp, Homo sapiens
tgtttgtcttcttgttctactttctgaagtctcttctgtgagacagcagtgtatagaacccaagagtgaaaacatccagtccatatatatatatatatatatatattttttttttttttttttgtagttatcttcatggtcatcctcatcattttggcaggagaccagtctagttgtaatttcaggtccttttctggttac

SEQ ID NO: 395236 - DNA, 201 bp, Homo sapiens
tgtgtttgtcttcttgttctactttctgaagtctcttctgtgagacagcagtgtatagaacccaagagtgaaaacatccagtccatatatatatatatatatatatattttttttttttttttttgtagttatcttcatggtcatcctcatcattttggcaggagaccagtctagttgtaatttcaggtccttttctggtt

SEQ ID NO: 395237 - DNA, 201 bp, Homo sapiens
tttattatagtcactcattgttttaacatactgtttgatttggatgactaatattttacttaggatttttgtttataagttaaataggcctatactttttytaaactttttaattgttcttatctgattttggaatccaggttaatatagcctcataaagtgtgtttgtcttcttgttctactttctgaagtctcttctgt

SEQ ID NO: 395238 - DNA, 201 bp, Homo sapiens
tgggttcacacctgtcatcccaacactttgggaggccaaggcctagtggattgcttgagcccagaagttcaagaccagcctgagaaaaatggcaaaaccccatctctacaaaaaatacaaaaaaatcagccagatgaggtggggcatgcctgtggtcccagctacttgggaggctgaggtgggaggatcacctgagcccag

SEQ ID NO: 395239 - DNA, 201 bp, Homo sapiens; identical to SEQ ID NO: 86806

SEQ ID NO: 395240 - DNA, 201 bp, Homo sapiens
agcctattcccagtgagggtcttcagctgcatttaccgcaggtgaggaactatgctgctgctttaaaacacggggtcattgctcttggtaatgcttctagrcagcattttagtttcaggattactgttgactttccaccttgacatcactctgtccccaccaggaggagttactggtaagtctggctgcttgatttccatg

SEQ ID NO: 395241 - DNA, 201 bp, Homo sapiens
aactccaccttcagcttacagagggcttaaggcctggggcccaggctgtcagttccacagaccggagtgagaacttacggtgcttttccagggctcacccrtgactgcccatgcaccaatcagcacacactttcctctgaagcccataaaaacccccggactcagccagacttgggcagaagacaggacgacctgcttatg

SEQ ID NO: 395242 - DNA, 201 bp, Homo sapiens
tgactaatgaagttgaatgccctttcacatgctgatttgccatccctgtgccttcttcaataaactgttcaaaacttatgcacatttttactgagttgttyaacatcttattactgggttttgagagttatttatattttctagatacagatcctttatcagatatatgatttgaaaaatgctttctcccaatcagtggct

SEQ ID NO: 395243 - DNA, 201 bp, Homo sapiens; identical to SEQ ID NO: 86814

SEQ ID NO: 395244 - DNA, 201 bp, Homo sapiens
attgagacttacctttcttatagaatttgttttcttctgggatctcttgatttttttaaaattggatttactgaggtaaaatgtacagacaataaaactcytttttttttttttttttttttttttttgacacagagtttcgctcttgtcacccaggctggagtgcaatggcatgatctctactcactgcaacctctgcct

SEQ ID NO: 395245 - DNA, 201 bp, Homo sapiens
ccagtgcgctccaatgcgagcatccaaacgtgggacggggtgctgcaaggggagcggctgctcaccatgtcctgcagtgacaagattgcacggtaaggggygggggctccctgtggccacctccctgcacacaggattcatccatactgtttgccaacctcccttttccacaaccatttgaattttggccccatttcccac

SEQ ID NO: 395246 - DNA, 201 bp, Homo sapiens
ccatatctggctgctgtaggttttttacagatgtctttatcagctcaagacattttttttttctatttatagcttactcagcgtttttaatcaagaatgtrtgctggattttgtctgatgctttttttctgctcttagatgactgttgtcattgcagtgacttaggcctatagtcccagctacttgggaactaaggcagga

SEQ ID NO: 395247 - DNA, 201 bp, Homo sapiens
cgatcgggagcaatctggggcagttgggggcccgaggtgacttttgacgtgttcacatcagaaggaaaattattgcgtggtggatgggtgcgagggaaggkgtcagattgggctgtggacgctgaaacgtgttggagtcccgatttacacgctggaaaacctaacctaaaacgtgttcctgtccaggtttctatgtcggag

SEQ ID NO: 395248 - DNA, 201 bp, Homo sapiens
aatgtttgtagttttgtcagattttctgtttcctcctgagttagtgttaataagttgtatttcttttctttttaaatggtgatgtgtgtgtgtgtgtgtgwgtgtgtgtgtgtgtgtgtgtgtgtgtgtgacagggtctcactctggttgcctaggccggagtgcagtggtgcaatctcagctcactgcagcctcgaccat

SEQ ID NO: 395249 - DNA, 201 bp, Homo sapiens
taatgtttgtagttttgtcagattttctgtttcctcctgagttagtgttaataagttgtatttcttttctttttaaatggtgatgtgtgtgtgtgtgtgtrtgtgtgtgtgtgtgtgtgtgtgtgtgtgtgacagggtctcactctggttgcctaggccggagtgcagtggtgcaatctcagctcactgcagcctcgacca

SEQ ID NO: 395250 - DNA, 201 bp, Homo sapiens
agaggctgccccgggtacaaggttgcgccggggaacgggaggctgcgttggcaacaaggctgcgcctggggacggtaggctatgtccctggggagacgctscgcccggcatgggacgctgcgccgggggacggcaggctgcgcccgggatgaggctgggcccgggcaggggaggctgccttgggaggggacgctgtgccac

SEQ ID NO: 395251 - DNA, 201 bp, Homo sapiens
tgccttgggaggggacgctgtgccacgggagtggagactgcgttggggacgagtctgcgccctggacggtcctgcgtgtccttccgagggcgcagtgtccrcgcgggatgctctgcgccgcgggcggcccgggccagggaagttcctgcgggtgccgggcgtctgcagcgatcgggagcaatctggggcagttgggggccc

SEQ ID NO: 395252 - DNA, 201 bp, Homo sapiens
gcttctggcataaagcagtacatttgtattgatagatttaaaaagataagcaagcacacagtacctacagaaaggtaaagcctcattccactccatccctkggcacttggttcaaaggctgcacccaattgtgtattgtcctagcaggagtcaaagtgtgtattgtatatgttttaatatatgacaaaccttgctatagtg

SEQ ID NO: 395253 - DNA, 201 bp, Homo sapiens
cttctggcataaagcagtacatttgtattgatagatttaaaaagataagcaagcacacagtacctacagaaaggtaaagcctcattccactccatccctgrgcacttggttcaaaggctgcacccaattgtgtattgtcctagcaggagtcaaagtgtgtattgtatatgttttaatatatgacaaaccttgctatagtgc

SEQ ID NO: 395254 - DNA, 201 bp, Homo sapiens
gagacattagtagcatgagcctcagaggacatcgtgggaatgcagtgaggacaatttacctaacagacctggtgcttacctgccacatggtgtgcacaccrttggttcagctgcagtggatgcgagtttcccggcaggtgacttccagggtcctggcatcacacctctggtcagtggtttatctcacaaagttgagacgga

SEQ ID NO: 395255 - DNA, 201 bp, Homo sapiens
agtggttggcccagacaacattgagtgagttctagacatcgtttgtgggatgatgatccccattttatgtaatattttccaaggatagaaaagtagggaakaattctgcagctcattgtgtggctcataactcaaaggttactacaacctttatctccacaccagacaaggacagtaaaggaaaacaaaacaacaacatgt

SEQ ID NO: 395256 - DNA, 201 bp, Homo sapiens
ataatatgtgaggtaggaaaagcaaatgggaaaattaaaaattgtccagtgaaatcattaagattccttccttattccttgagtgacttttctttccaagktgacagctttttatctggggtgtggacagggacagcgcagtagcccacagaggtcttcgtggcagggcttaccgcaccttccatttgcagagttttgctt

SEQ ID NO: 395257 - DNA, 201 bp, Homo sapiens
taatcaaaagtgagtggtaattttcggcagaacagtggcacaacatacaatctgaaaagacctgcagacccatggggcagcactggtgatcaggcctgccygtgtttaaaagaaaatgtaaactagatggaggcttgtctctctcacagaaaattaagtccaaaaataggtggcccagagaagctctggtggctccatggt

SEQ ID NO: 395258 - DNA, 201 bp, Homo sapiens
gattcagcctactgaatttcagcatttgtaagatgccatcatttttaagttgcatcatcatttcttatgctgctaacaaagggaaaatgtagccaactagrttgtgacacaatgctttcttgttacccagcattcatttatactcattgaaagagcttagactaagcattgacttttaaaatcatataattcatgcacttt

SEQ ID NO: 395259 - DNA, 201 bp, Homo sapiens
agcaggaaggaatgggcgtggggcaaccactaggaagctgtagtccttcctgaaagcctggctgactgggccgagtgctgtggaggctgtggtttgggtcrgagtagttctcctgccctgtgtggtctggccgacgtctgtctgcagctcagtctctcaggccgggccctttactgaatcaggggacagatcagatgatag

SEQ ID NO: 395260 - DNA, 201 bp, Homo sapiens
gatgccatcatttttaagttgcatcatcatttcttatgctgctaacaaagggaaaatgtagccaactagattgtgacacaatgctttcttgttacccagcrttcatttatactcattgaaagagcttagactaagcattgacttttaaaatcatataattcatgcactttcataaaaaaggaaaatacaagtaaaataaag

SEQ ID NO: 395261 - DNA, 201 bp, Homo sapiens
cctcccatggggtccgcaggacaggtggctgtggacatgtagtgggtatctctaggagacgtcctgcctgcagtcttggcagagctttacttgttttattygcatggacgctgactgtgtctgacaccctctcgctggcgctaggcgatttcatcctgatgaagtttgtcccagctgtcctttgtgaggtgcattagtgga

SEQ ID NO: 395262 - DNA, 201 bp, Homo sapiens
tcacatcccgggctggacagcacaagatcgcaccacactcctcagaacggcatacagttgaaagtctggaagtgtttatttctggaatttttcatttaatrtcttcagatcacggttgacagtgagtaactgaaacctctgaaagtgaaacctcagataaggggacctgctataattaaatatgtaatttcctttctgata

SEQ ID NO: 395263 - DNA, 201 bp, Homo sapiens
aaacgtaatggtaaaaacaaacacagtgtaaaataacttttaagtagatttttgtctttgtgatcgtaagctgctaaatcagtctgttaactttttgttgyactccttcgtcagttggttgggatcctgcggaattgccagtgcatccctgtaaccacgcaggcttgggctgggctgcgtcgacactgagtccgagctccc

SEQ ID NO: 395264 - DNA, 201 bp, Homo sapiens
tggtaaaaacaaacacagtgtaaaataacttttaagtagatttttgtctttgtgatcgtaagctgctaaatcagtctgttaactttttgttgcactccttygtcagttggttgggatcctgcggaattgccagtgcatccctgtaaccacgcaggcttgggctgggctgcgtcgacactgagtccgagctccctgaagact

SEQ ID NO: 395265 - DNA, 201 bp, Homo sapiens
ctctgtaagattaatctcctttaccaatcacaaacctagccattcatagaagaattgatgggttcacacctgtcatcccaacactttgggaggccaaggcytagtggattgcttgagcccagaagttcaagaccagcctgagaaaaatggcaaaaccccatctctacaaaaaatacaaaaaaatcagccagatgaggtggg

SEQ ID NO: 395266 - DNA, 201 bp, Homo sapiens
actgtgcatcacagctcacgtcgtgtttgttacactttgtcacctcacattttattataaaggtcattcccgtgttaaaaagagagcgcggtatgacagcrcctagtgaattgtagtgtctttagggaggaacaaaaatggacataaatgaatacaaagaaaagattacctgaaactgggagcaaatcaaagtaaaaatgt

SEQ ID NO: 395267 - DNA, 201 bp, Homo sapiens
tgtgcacggcaaggtactgaggcgccctcaccgcaatgcgccggctccacctccccaatagcttgtctgtcctcacacctactgttccttaagttgtttcrtcatgtcatcatgcacagcttccgaaaacgatcacttggaatgattcttccttcagattgttttagcttagaagtgtggctacgtccctgaaaccttaat

SEQ ID NO: 395268 - DNA, 201 bp, Homo sapiens
ttgtcttttgatgaccatcttttccttggggttgagactgctgtatcctttttgcctgctgagggtttcccagaggggaaagggagaaggaagaaaggatmaaagcttggctgatacagttccttcttggataagagaattaactgtctctcattgcgcggttcctccggaggacagggtccagtatgcatggacagccac

SEQ ID NO: 395269 - DNA, 201 bp, Homo sapiens
ccagtaacaatttttgacttgactgtggtacccatacagtcattctgtttttcacttttggcatagcattcaataaattgcatgcgatattaagtactttrttataaaataggctttgtattagatgattttgttcaattgtaggctaatgtgagtgttctgagcaccttttaggtaggctaggctaagctttgatgtttg

SEQ ID NO: 395270 - DNA, 201 bp, Homo sapiens
gagctctggttctggcctcctgtcaggtgccctcgtgcgggaatgagtgagggacagcagggcaggctttccaggcttccagcaagctctacatgatgggyggggagaccctgctcttaaaaacatgtggacccttagcattcttcttcctcagacctggggcctcagcctaagctgagatgacagggaagaactacagat

SEQ ID NO: 395271 - DNA, 201 bp, Homo sapiens
gtgcagctcagcactcctaccctccccaggaggaccccggttctgacctctctccacctttgttctcacttggggattgaataccttgtttattttcacgycatccttgttttctcttctgtgcacatgcagctctacgttttccccccaagaactgccttggccacctcatttgtagatagcgaaatgcagggtttgtaa

SEQ ID NO: 395272 - DNA, 201 bp, Homo sapiens
aagtctgggaagagccagtgttgggatttgaacatgtggagcttgtgactggaaggcagcccagctcagcagctccactcaagggccagatctggaggacragggttgggtcattgtgcagctacttcctagatgatcttgagcaagcagtctaatctctgtgcttcagttttctcatctataaattaggaagaataaaag

SEQ ID NO: 395273 - DNA, 201 bp, Homo sapiens
acttataagttgttgaaaaatcatggctcctgaaactatgaattgtcatcgtggtatatacccagacagcccacattaaactgctgtgaacatgagaaaayggacatcgaaatgataaaagcaagagtgttggtaattgaaatccattataaataaagctgtcattggtaacgcacgaaatgctgtttctgaggatgagga

SEQ ID NO: 395274 - DNA, 201 bp, Homo sapiens
tgtaaatttgggagtcatttgcatattgctgatctatgaggcatacagtatggatacagaggagcaggagatgaggaatggcctgggagcttttggcaagsggtccacattgggagggagggtctagcaacgccattgaaaaggactctgtttgaagaaggaagaaactagtgagagtctagtggcctggaaaccaagaca

SEQ ID NO: 395275 - DNA, 201 bp, Homo sapiens
aggatttcctgcgactaggagcagtcacccagagaaagctctggaaaggtggtggtgctggggttgaagatgagctgctggcccctggcatgtcagtgggmggaggtgggagacgtgcagagctgcctatcccacagtacttccctttccccatccaccctttcaggtggctcactccccaccagtttcgcaggatggctc

SEQ ID NO: 395276 - DNA, 201 bp, Homo sapiens
gtcttcaactagagacctcattttgtattgggttctgtttgagtctgcaaagcagttgtcatctaatatgtgactagcagaatatttgtttgtatagatayctctcaacttacgatgaggttcataacttaaatatattgtcagttgaaaatgcatttaatacacctaaccttcaaaattcaaagtacactttctattaaa

SEQ ID NO: 395277 - DNA, 201 bp, Homo sapiens
ggttctgtttgagtctgcaaagcagttgtcatctaatatgtgactagcagaatatttgtttgtatagatacctctcaacttacgatgaggttcataacttraatatattgtcagttgaaaatgcatttaatacacctaaccttcaaaattcaaagtacactttctattaaatatgtatcactttcacaccatcataaagta

SEQ ID NO: 395278 - DNA, 201 bp, Homo sapiens
taagttctaagtgttttctgttttctcctgtgattattttcttttgtctatggattatttagaagtgtattgctgaactctcagacatatgggactttctrgttatacttggcttgttaatttctaggctcatggtattacgatcagaggatgagctctgtctgatttcagccacctgaaatatgttgagattttctttac

SEQ ID NO: 395279 - DNA, 201 bp, Homo sapiens
tttttggtgaaggagcaaacaggaaagtgtcccagaatttgggagatcaggattgtaatcccagccctgcttctgaacaggatggtgcattctcttcatgsctctgctgcaggctccttggatgtagaatgagggcagttgaattgcttgttgccgaggttctctccatttctggaagactattgtaagtcagagtcaaat

SEQ ID NO: 395280 - DNA, 201 bp, Homo sapiens
ttgtttcgttggtctggctgtggctcttcttgggccagcagcctgggagccacacagggacagggtaactgcgataaaatacaattatgcaggagaggagkcggaagggcccagcctggccctgtctggccagcttcctgcaccctgcacagcagggagcatcctcattctccagaccctgattcttctcgggttggggcg

SEQ ID NO: 395281 - DNA, 201 bp, Homo sapiens
ttctggtggagaaactaaacagatcacagaggcagacaccgtgcctcacaactacacacggacccggcttatgatggttccagtaacaatttttgacttgrctgtggtacccatacagtcattctgtttttcacttttggcatagcattcaataaattgcatgcgatattaagtactttgttataaaataggctttgtatt

SEQ ID NO: 395282 - DNA, 201 bp, Homo sapiens
tggattatttagaagtgtattgctgaactctcagacatatgggactttctagttatacttggcttgttaatttctaggctcatggtattacgatcagaggrtgagctctgtctgatttcagccacctgaaatatgttgagattttctttacggctgggatatggtctatttttagaagtggctcatgtgtccttgaggagc

SEQ ID NO: 395283 - DNA, 201 bp, Homo sapiens
gggccctctgccagctgctgcatccccaagccctctcttgtgtcattgttttcccttttcaggaatagtttccactagggacctgctccctcaaatttctrtcatttgaggtgaggtttcgtgttggttcatctgactggccgagtgcaccctggctgtgagaacaggaaatagaattctggcttttgtcttagggatatc

SEQ ID NO: 395284 - DNA, 201 bp, Homo sapiens
aatgtgagtgttctgagcaccttttaggtaggctaggctaagctttgatgtttggtagggtaggtgtattgaatgctttttcaggttaggatgtcttcaasttgcgatgggttcataggatcggaactccaccgtcagtcaaggagcacctgtgctgtctttatcggcatgaccgaggagacagggctgaggtagatggca

SEQ ID NO: 395285 - DNA, 201 bp, Homo sapiens
aactctcagacatatgggactttctagttatacttggcttgttaatttctaggctcatggtattacgatcagaggatgagctctgtctgatttcagccacmtgaaatatgttgagattttctttacggctgggatatggtctatttttagaagtggctcatgtgtccttgaggagctgatgtgtgatgcactgttaggagc

SEQ ID NO: 395286 - DNA, 201 bp, Homo sapiens
ccagctgctgcatccccaagccctctcttgtgtcattgttttcccttttcaggaatagtttccactagggacctgctccctcaaatttctatcatttgagktgaggtttcgtgttggttcatctgactggccgagtgcaccctggctgtgagaacaggaaatagaattctggcttttgtcttagggatatccccaggtaga

SEQ ID NO: 395287 - DNA, 201 bp, Homo sapiens
atttattgactaaaataaccaactgagcaaaggtgatgttttagtatctaaatattccaaaagattactgaaattttaaagtaaaaatttggccaagaacragaagtctctgaatgtgcttttctggcatgacccctgtcaccaggaagctgtcagtgtggtgttgggcctgattgattcgcatcagctcaggtggcgtcc

SEQ ID NO: 395288 - DNA, 201 bp, Homo sapiens
gtattacgatcagaggatgagctctgtctgatttcagccacctgaaatatgttgagattttctttacggctgggatatggtctatttttagaagtggctcwtgtgtccttgaggagctgatgtgtgatgcactgttaggagcagcgtcttgcatgtgaccgccatgcagcttgttaattgtgttgtgcagatcttccatct

SEQ ID NO: 395289 - DNA, 201 bp, Homo sapiens
ttttatccctctaatgaaactgtgaggaattgattctgttgacacagaaaaggctggtgtcacatgaacctaaaggacgtcattgagcatgtgcctctcaygcagaactgacatagagcctcccgtgcagctcaccttgaattctccatgcacgaatcagccataggcacgtgttatgtgtggcacaggcaagaagtgcct

SEQ ID NO: 395290 - DNA, 201 bp, Homo sapiens
ttggtttttggagaaaagtcctgtgtgggtggggccctggatcttgatgttacctggcccttgcctgtgtgccaggtggactggggactgtggatgtctgsgctctgccctaccccaaggacacgtcaagacctccatgccacccctccatggtcaccctttgtcacagagccagtttgagtttctttcctttctagaagg

SEQ ID NO: 395291 - DNA, 201 bp, Homo sapiens
tcggtaggggctgctgttgtcgcagctgccggcacacggaagtgagtcggtgtgctgctgccccgagtgactgagggacagaatgaggctggggccggccrgactggcattggcgtgtctgcatggcgtcgtccaccactgggcctttgcacatggggacctttttcagcatcatggggcgtcggtataaaaggaggcgca

SEQ ID NO: 395292 - DNA, 201 bp, Homo sapiens
tctttacggctgggatatggtctatttttagaagtggctcatgtgtccttgaggagctgatgtgtgatgcactgttaggagcagcgtcttgcatgtgaccrccatgcagcttgttaattgtgttgtgcagatcttccatctctccactgttttgttttttcagccgctgtctgctgtctctgtcacctgctcctctccact

SEQ ID NO: 395293 - DNA, 201 bp, Homo sapiens
gcctgatagattttagttctgtttattgctggaagcccttgctgtaggaaaaggaaggttttttcctttcctggacaatgattttgagctacggtgtagamtggaaaaggcaggctttgatttgccagacactgcttgctatgtgtgaagccgggatagggcggtgctgttggacagaagacctgccctgtgtgccttttc

SEQ ID NO: 395294 - DNA, 201 bp, Homo sapiens
caagacctccatgccacccctccatggtcaccctttgtcacagagccagtttgagtttctttcctttctagaaggtacctccttgttttctctcctgtagygttacatttatctattttccctaaaattcaggaatttcaacagattaagcctaggtgtgtggttagtttgtttgagtttctttcctacttactaccctga

SEQ ID NO: 395295 - DNA, 201 bp, Homo sapiens
tttgtggctctttggattgagggaggggctaggtgccatctccagagaagcttgttcagctcatgctcactcggggcccttgctctctgcccactggggasgggctgtggtggagctggattcggactgagtggaggcaacgctgaaggtcagaggccaacgtccttgcacttcttgacactctccacccaggcgtggtga

SEQ ID NO: 395296 - DNA, 201 bp, Homo sapiens
ttcttatttgcagaataaaggccactttcagtcgagattgtaagtacacattttccttgatccactaatgaatgtctgatagtttctataacatgaacccrtaataaccctaaaatatccattaatcattatgtatattattcatttttgattaccctactgtatgaggaacctattggaaaatacctttagggtagaaat

SEQ ID NO: 395297 - DNA, 201 bp, Homo sapiens
atgtacagcacaggagtaaacataggtgtacgcgttacatgcatgggttagtgatacacctacatatgcatctcctagccttgtccgttgggaagacctaraagcaatgacctccagcaacagggagcacacctaaatatcagttgctgataaaaataagcagggctccttgcagaagatgagtctggaacctctgatgat

SEQ ID NO: 395298 - DNA, 201 bp, Homo sapiens
aaaaatgcattgtgtcaatccaaaactcagctgggctgggcttagagaattatgagcagcctttccacctgcatggaagtccttttgtgcaggacagttcyttgtttccggggtggccctgctccctccaggaggtttaggagtgcccatgtcaccatgatgcctacgccacttctcatgttgctacctgttgctaccacc

SEQ ID NO: 395299 - DNA, 201 bp, Homo sapiens
ttttgctttaaaagttctgattcagcacacttaatttacaacaacagagggattctcgttaccagccaagttgttcttgcttttattggtttctgtaccgyggcctgggattaactcattaccctagttccctctttgcaggctggaaagataagcatctcactcacgtcagcccccacactgcactggcctcagggactc

SEQ ID NO: 395300 - DNA, 201 bp, Homo sapiens
atttgggttttactccttttttgttcatttccacaagttgaactctgtgttattatcctattttctgttagggtcattgtgttgttaagtaatcgacttayatagaaggtgtgcacctagaaggttaacagaaaacaagttgaaacatgactgaaaatatatttctgtaagaattactgtaattcttctgagagtataaat

SEQ ID NO: 395301 - DNA, 201 bp, Homo sapiens
ccccccacctccaccctgcaccaggggcgctgactctgggccctcaaggccccccactggggacgctgactctgggccctcaaggccagtggcatccacasctccatccacagcagcgagccttgtgcagtttcaccacaatagtagcacatgtgtgacctcctgggggctgctggggcctatgggagtcgggtgtggacg

SEQ ID NO: 395302 - DNA, 201 bp, Homo sapiens
ctcaaggccccccactggggacgctgactctgggccctcaaggccagtggcatccacagctccatccacagcagcgagccttgtgcagtttcaccacaatrgtagcacatgtgtgacctcctgggggctgctggggcctatgggagtcgggtgtggacggtgtgctccctgggcctgctcggggatgctgagtaccaggca

SEQ ID NO: 395303 - DNA, 201 bp, Homo sapiens
tatctcagaagctcatcctgacaccagctctgtcctctgtactgggaacatggagcagaaatccatcacggctgctgatccatgcatgctgatgagttgcyggctgcctccttgtgcacagcatctgggggcactcaggtggccctgctgtctctgggcctgtccctgacactggcaggggttggggcaccagagttcaaa

SEQ ID NO: 395304 - DNA, 201 bp, Homo sapiens
ctccgtctcttgctctagttctcctttctgggagagtgactccatttggggctcgtcatctctgttgggttttcagtggctgcatttggggttcctcatgyctgttgggttttcagttctccttttgcatactgagagaacaactttctagtgattggaactgtctagaaaagtttcctgaaaggaattgagctcccctga

SEQ ID NO: 395305 - DNA, 201 bp, Homo sapiens
gtcgagattgtaagtacacattttccttgatccactaatgaatgtctgatagtttctataacatgaacccataataaccctaaaatatccattaatcattrtgtatattattcatttttgattaccctactgtatgaggaacctattggaaaatacctttagggtagaaataagaaaaaacatcaatgccagctcttctga

SEQ ID NO: 395306 - DNA, 201 bp, Homo sapiens
aaatacaaaaattagccaggcatggtggcacgtccctgtaatcccagctactcgggaggctgaggcaggcagcttgaacctgggaggtagaggttgcagtsagccgagatagcgccactgcactccagcctgggtgagcgagattctcaaaaataaaaaataaaaaatactttttattttgagataatatagattcacatg

SEQ ID NO: 395307 - DNA, 201 bp, Homo sapiens
gaagccttgactgaaaggagaagtgaggaggggcatggagcccagtgccaagaggcagctgcgtctttaggggctggcacttttcagaggggctcttgggrccagaaggaaagagccgtcattcaaggcttacacagcgtggaggtgccctccctggggtgtcctgtgtgctgacctctgtcctggtgcctggcggtgtcc

SEQ ID NO: 395308 - DNA, 201 bp, Homo sapiens
ccagctcctccagtcttccttccttcctgtctgctgggtggcggctcatctgtcaagttttcacagtcatgtgcttctgggcgcaaagccctggtgagccyggctcgtttccctggtggaatcggacagttgtcgaaggggtgtcagcctctgttcagaagcctgagcccctgattctgttccttgaagtgtcaggagtta

SEQ ID NO: 395309 - DNA, 201 bp, Homo sapiens
aaaaaaatcagccagatgaggtggggcatgcctgtggtcccagctacttgggaggctgaggtgggaggatcacctgagcccaggaggtcaaggttgcagtragccaagattgtaccactgcactccagcctggacaacagagtgagaccctgtctttaaaagaaagaaagaaagaaagaaagaaatgaaaaatgaaaagaa

SEQ ID NO: 395310 - DNA, 201 bp, Homo sapiens
gcactgactgagaaaagaatttgtcttacctgtacctgacaggtgtgtacctgaaagaggtgtgtgcccgacggtgtgtgcgaccgatgggtgtatgctcracagtggtgtgtgcgcccaccgggtgtgtgcccgacggtgtgtgcgcccgatgggtgtgtgtgcccgacagtggtgtgtgcgcccgatgggtgtgtgtgc

SEQ ID NO: 395311 - DNA, 201 bp, Homo sapiens
gaaagaggtgtgtgcccgacggtgtgtgcgaccgatgggtgtatgctcgacagtggtgtgtgcgcccaccgggtgtgtgcccgacggtgtgtgcgcccgaygggtgtgtgtgcccgacagtggtgtgtgcgcccgatgggtgtgtgtgcccgacagtggtgtgtgcgcccgccgggtgtgcgcccgacgggggtgtgtgcc

SEQ ID NO: 395312 - DNA, 201 bp, Homo sapiens
cctcagaagatgaaggcagagtgcgagaaaggctttctggaactgacaagtctgccatccacatttcgaaatgtattagaaaaattggaaaaaaaacataygaagtgtagaatgtcagcagaaaggtgtggccacagtcaagagggccctctgtgggtcctgtggtcctggactgcaggtgggcccagtggagactgtgct

SEQ ID NO: 395313 - DNA, 201 bp, Homo sapiens
actgacaagtctgccatccacatttcgaaatgtattagaaaaattggaaaaaaaacatacgaagtgtagaatgtcagcagaaaggtgtggccacagtcaasagggccctctgtgggtcctgtggtcctggactgcaggtgggcccagtggagactgtgctgcccctcaccctccccggtgggtcctctgtgatgggggtgg

SEQ ID NO: 395314 - DNA, 201 bp, Homo sapiens
acaaatgtggggacagaccagtcctgtggggacagctggcgggggtagaaaacagtagagctgccccaccagccagcggctgctgggagagcaggggtgtycccgcacccagaggaggcaccctgccgctctcccccaggttgcttggtgtgtgcgctgcagggagaatcccgcccccagctggtgtccacaggggccagg

SEQ ID NO: 395315 - DNA, 201 bp, Homo sapiens
acaggggccagggacactggtaggtaggtgtggaacaagggagtttgtgacttgggattgttttctacttaaaaaataatctgagtaaagcttggtttaarcagcatcaagttaaaaaaattcctaagaagtggttggattcccagtttatatgtggctttaaggttctgaagaagtacacaattaaccacagaagtatga

SEQ ID NO: 395316 - DNA, 201 bp, Homo sapiens
ctcggagtgacacagcagctccctcttgtgggcagattcccctgtgtaaggtgctggaggctgaggttccagcctgcagccgcttgtgatcctgatatgtsgagagttctggaagactgatgactgctgacccccttcttaacctacgccatcgccatgctggtggtggggatggggctcttggccattcctgccccttgg

SEQ ID NO: 395317 - DNA, 201 bp, Homo sapiens
tgctggtcatcctagagactgagtggcccatgtgctcgtggcctgtgggccctgggcggcctctcagtttcctgcatggaaggcagcagaagcacttatcyggccctcagctcctcggtggtgtcagtttgtctgacctctgtcagtttgttgtcttcttttttttttttttttaagacagagtctcgctctgttgcctag

SEQ ID NO: 395318 - DNA, 201 bp, Homo sapiens
ctggccctgaacctcccttgctgggacctggtcccaccctcatcatccctccatgtgggagaatccacgcgagacgtcctttgctgtgctggaatccacgygagaagtcttttgctggactggaatgtgccaaggaggagtattttgtaccagatggcagatctgacttctctaacaagacctagttcttattttatgatt

SEQ ID NO: 395319 - DNA, 201 bp, Homo sapiens
agggcccagcctggccctgtctggccagcttcctgcaccctgcacagcagggagcatcctcattctccagaccctgattcttctcgggttggggcgggagkggggaactcccttgtccattgttctctcagccactggcctcatcctttgggggttctttctgatcatcgcctccagagtcccatctgaagagggtatcag

SEQ ID NO: 395320 - DNA, 201 bp, Homo sapiens
tggctgttcctgggcggtttcaggtgctgcggctacctagaaccttccatcttcctttcttcactcttcccagaagagaacactcttcccagctgtcttayggccagcttcctcaccacctcgctgcagtcttttccgcaatggcatcgccactactgccctcccacatccagccatcatcctagaataacagccactgtt

SEQ ID NO: 395321 - DNA, 201 bp, Homo sapiens
taatgttacaatttcccatgtgttgattttatgtaaataatgagtaaattactctcatagagattttagaattctaataaactcatatttccccttcttawaagagtagaaaaatgcttttaagagttttcctaaattaatattctgggaacattaaattttagaactttactctgagggcatagataaaaataaaattaa

SEQ ID NO: 395322 - DNA, 201 bp, Homo sapiens
attcaggcacaaattcagtacaccacacaatgggggaaacatgttcaaagatttttacttacaggtcctgagcagggagggtgccatgagtcaggagggcmgtcctctgtccctgggtcatgcaagcaggaacaaagggtcaggcagagagagagagcactgcagccaaccagcagaacaaataagggagtagggtggggt

SEQ ID NO: 395323 - DNA, 201 bp, Homo sapiens
tggaaaatgggaagatgttggcgtttgcccctcccttggctgtgtgtcattcacctggggcatgagctgtgcccctgctctgcagtaatgaacaaggcagstcagcattggtccgagacacgtgagttaagagaggaggaagagcactctctgggggcggggggatccatttgtcagtggcctgcagtttcctgtcccagg

SEQ ID NO: 395324 - DNA, 201 bp, Homo sapiens
tgagctgtgcccctgctctgcagtaatgaacaaggcagctcagcattggtccgagacacgtgagttaagagaggaggaagagcactctctgggggcggggsgatccatttgtcagtggcctgcagtttcctgtcccagggatttcactggtgacatcctgaccactcacctgcactttatatggagctgttttcatcagct

SEQ ID NO: 395325 - DNA, 201 bp, Homo sapiens
ctgagggacagaatgaggctggggccggccggactggcattggcgtgtctgcatggcgtcgtccaccactgggcctttgcacatggggacctttttcagcrtcatggggcgtcggtataaaaggaggcgcaagaagcgctctgagaggaaaggtaattcatttagtttttattcttcagtgtgaagcatttgtctttaatg

SEQ ID NO: 395326 - DNA, 201 bp, Homo sapiens
gggccctctgtgcaccgtgctgccaggtgcttgtgtccagggctggggatgccacaccctcgatgctttcctggactgacgggcggtctcaggacagccartctgtgcggccccctctgccctcacctcaagaggtcacagcattggcctgtttttgtttcctcagttaagctttggaaattgagatgtcactaagacagg

SEQ ID NO: 395327 - DNA, 201 bp, Homo sapiens
tctgtgcggccccctctgccctcacctcaagaggtcacagcattggcctgtttttgtttcctcagttaagctttggaaattgagatgtcactaagacaggyaatagggagtaaaacaaaggcacaggcaaaaactaaaggacatttttaccaaataccctcaatttagaattaccaccacttttcccatggacactcatca

SEQ ID NO: 395328 - DNA, 201 bp, Homo sapiens
taaaatgtaattctttgatgaaaacaatgtagtagcaagttacgggttttagttggcttcagtggcaatataatttcagtgatttttttcatcactcctgrattatacttgcagttactcccttccacagggcaaataattgactgttgactgtgtgtgagcctcagatgggttagcttaatcatcaggaaaatagggcta

SEQ ID NO: 395329 - DNA, 201 bp, Homo sapiens
gaaaacaatgtagtagcaagttacgggttttagttggcttcagtggcaatataatttcagtgatttttttcatcactcctgaattatacttgcagttactsccttccacagggcaaataattgactgttgactgtgtgtgagcctcagatgggttagcttaatcatcaggaaaatagggctaaagaataatgtaccattta

SEQ ID NO: 395330 - DNA, 201 bp, Homo sapiens
tgtattgaatgctttttcaggttaggatgtcttcaacttgcgatgggttcataggatcggaactccaccgtcagtcaaggagcacctgtgctgtctttatyggcatgaccgaggagacagggctgaggtagatggcatcaagagggtggctcctggtggaggtatgatgttctgggaaggcctctctgagtgcgatgtggt

SEQ ID NO: 395331 - DNA, 201 bp, Homo sapiens
gcacagagccatccatttggaggatccttgctggggcgtggggatgtcacacacataaatgcaggagtcggggctcatggacctgaacccttcagatccargccttttattatatagtaattagactttacctcaaggaagaaacaaacacaagctgatagaacctagcatgggtgggccaagaaatagcaaatggccaga

SEQ ID NO: 395332 - DNA, 201 bp, Homo sapiens
ttctgtatagagtaaggcatattcgtgtatgtgggagggaggcttagaataaaatttattttttttcttatggaagcagtacatgttcattgtaagaattmggaaacatagatacaaaataaactttatgaaaaagcaaaggtgatcatctgcattagtctgttttcacactgctaataaagactgaataatttataaagt

SEQ ID NO: 395333 - DNA, 201 bp, Homo sapiens
gttcttctaccctggaactaggaagccagacccaagaaatgtatccacaccaggttttgcccatagtttttaaaaatgttgaatttctttaacttgaggcyctcacaattttctgggcccccataagttatagaacagggaccaggcctgctaccttgtgggggctgggtgggcactggctccccagggcacagatccttc

SEQ ID NO: 395334 - DNA, 201 bp, Homo sapiens
ggttgttttaactcccattaaaaggagtggctttcagccttcttgcttactgtcttgtgatgtatgtgtgttcacatgttccatgcacatttgtaacgctyaccatgctctctgattcagctttgttcccttagagttgccccagcactgctttgccatgatgattgtggtttttaaaatacttccagttgcttacttctg

SEQ ID NO: 395335 - DNA, 201 bp, Homo sapiens
gttcacatgttccatgcacatttgtaacgcttaccatgctctctgattcagctttgttcccttagagttgccccagcactgctttgccatgatgattgtgktttttaaaatacttccagttgcttacttctgtttagttatctcagtgctaaatattgttaattaattaaatataagcagcatgttctagattttatgtgt

SEQ ID NO: 395336 - DNA, 201 bp, Homo sapiens
acccgggaggtggaggttgcagtgagccgagatcgcgccactgcaccccagtctcaaaaatacatacatacatacatacatacatacatacatacatacahgtataaatccataaataaataaaatttaaaaattatgtttattttgccatgtaattttacaattctaaaattgtctgtattaattcaaaatctgaaatac

SEQ ID NO: 395337 - DNA, 201 bp, Homo sapiens
gctgcagcgggggaggctagggctctgtgctccgcaagttggtgggaaccgggaacaggtggaagccccacccccttccaagttggaggggcaggagcccygccatcctgggcacagctgcagccgtccattagaagctgtggacccaggcatccctgcactcaccggggcccaggaagcccccctgccccgacaggctga

SEQ ID NO: 395338 - DNA, 201 bp, Homo sapiens
gcatgaccgaggagacagggctgaggtagatggcatcaagagggtggctcctggtggaggtatgatgttctgggaaggcctctctgagtgcgatgtggtaygctgaggcccagagggaaagcatgagctcatgtcaggaggggggacaacagccttctggctagaaggatagcctgccagagagcctgcttattagagtgg

SEQ ID NO: 395339 - DNA, 201 bp, Homo sapiens
cccacccccttccaagttggaggggcaggagccccgccatcctgggcacagctgcagccgtccattagaagctgtggacccaggcatccctgcactcaccrgggcccaggaagcccccctgccccgacaggctgagaagtgcctgctcccactgcttggtctctccccactcccagcacctgctccagtttcagatcaaag

SEQ ID NO: 395340 - DNA, 201 bp, Homo sapiens
ttagaaaggttaatgatgaaagtgttgtaatactacagtttggtgaaatggcactttttgtgttgtgtgaactgtcatcacttaatgaggagcaggagatsagcttacagttttctgctatagttctggacatcatgagaccttattccccaccagcatgatctctgtctatggctcagagggagagcaatagggatatgg

SEQ ID NO: 395341 - DNA, 201 bp, Homo sapiens
cattagaagctgtggacccaggcatccctgcactcaccggggcccaggaagcccccctgccccgacaggctgagaagtgcctgctcccactgcttggtctstccccactcccagcacctgctccagtttcagatcaaagttgtggccgagctgggacactgtcacaacctggctgggtgtgtgtttgctcagggcagtgct

SEQ ID NO: 395342 - DNA, 201 bp, Homo sapiens
acctctctctcttctcattctctctactgcattacaactgtttgatgagagagattttaaaaatgaacataaacaatttttatggaaatatctgttatctwttttttttatatagttataccattggaatttactcttaccttcaggtaacagttgtgaggaccaaatcttaatcctggtaggtgacctttaaatcttaga

SEQ ID NO: 395343 - DNA, 201 bp, Homo sapiens
atttcatgggaagcagctcatgtcctgtgtcatcgtttgcatcaggctttcacttaacatgtttttcgggttcatccgtgtgttgtagaacatatcagtartttgttccttttagtcgtattggcgtagcgtgttcgtttattccactccagcgatggactttgggttgtttctgcattctggctattatgaatcacgtga

SEQ ID NO: 395344 - DNA, 201 bp, Homo sapiens
gcacactgtggatggcaggataatggtggccggaggcagacaagctcctgggaagaaaggggagggtccctggtgaaactccaccttcagcttacagaggrcttaaggcctggggcccaggctgtcagttccacagaccggagtgagaacttacggtgcttttccagggctcacccgtgactgcccatgcaccaatcagca

SEQ ID NO: 395345 - DNA, 201 bp, Homo sapiens
tagcgaaatgcagggtttgtaatgatttttattgaaaaattgagcatctgattattattgtggcactggctttattaaacaatgtaggttctgtgataacytttcttaaatgttgggcattgctgccatgttatattcatgaagttcatcagcttcatataaactgacgtttttcattcatgtgtttatgcagtcattgaa

SEQ ID NO: 395346 - DNA, 201 bp, Homo sapiens
tccctggtttcagccatggaagctgtgtgtggtatgcctggttcagctgcagccttgcagggagccagtgtccatgccagtgcctaggtctgcccgtctcrcctgcctggctgtacacaatggctggaccccacgcccactcactcacacaccccttgccactccacacctggctcccccttggcaggcatgggatccagg

SEQ ID NO: 395347 - DNA, 201 bp, Homo sapiens
ttattattgtggcactggctttattaaacaatgtaggttctgtgataacttttcttaaatgttgggcattgctgccatgttatattcatgaagttcatcarcttcatataaactgacgtttttcattcatgtgtttatgcagtcattgaataaatattttttgagcactttggataccaaaggtttagcagtgaatgaaat

SEQ ID NO: 395348 - DNA, 201 bp, Homo sapiens
ggccagaaaaatgataccctgaggatcctatgacactgggttctgatttaccaaaaagagccacacctgactagggacatggggaagcaggggcatgcagrtctgtccatgaaagccccactccttgctttagggacagtagctgatgcccatgagcgctccttcatgcaggtgctgtgctagcactgaatcaccagggct

SEQ ID NO: 395349 - DNA, 201 bp, Homo sapiens
gctttattaaacaatgtaggttctgtgataacttttcttaaatgttgggcattgctgccatgttatattcatgaagttcatcagcttcatataaactgacrtttttcattcatgtgtttatgcagtcattgaataaatattttttgagcactttggataccaaaggtttagcagtgaatgaaataactcagtccctttctt

SEQ ID NO: 395350 - DNA, 201 bp, Homo sapiens
aatcttaactcacagcaccagacacttcagacccaggtcggagagctcgagggcctgaaacaggctcagtcccagactctcacccagtgctcccttgcccrctcggccaactgtcgttttgcagacggcaggctggtcagaggcttcccatccagagtgacccatgaggtgtttctgttccttagaagaggacgctaatag

SEQ ID NO: 395351 - DNA, 201 bp, Homo sapiens
ttcacatcagaaggaaaattattgcgtggtggatgggtgcgagggaaggtgtcagattgggctgtggacgctgaaacgtgttggagtcccgatttacacgytggaaaacctaacctaaaacgtgttcctgtccaggtttctatgtcggagatctgcaccgtggtgtttagttcccagttaatatttttggtcagcaggttt

SEQ ID NO: 395352 - DNA, 201 bp, Homo sapiens
acagttgtgaggaccaaatcttaatcctggtaggtgacctttaaatcttagaatcaggaattcggctttagtcaaaagttaactttttccttattattgtkctcctgttggatttttaaaaatggatacattctatttattggtatttacaagtcacttgactagactgatactaatagtatgacacaggaaaaacaaaaa

SEQ ID NO: 395353 - DNA, 201 bp, Homo sapiens
ggccctagatctggggctacagggacttttctcacaactccaggcgagggcacaccgggcttggctcttctaggtctggcgactgctcccattggcaggtktccacaggcctctgcctgacgtccttgacaagaggaagagaggacccggctttctgtgggtgccgagccctctgggccacacagctgctgttctctgact

SEQ ID NO: 395354 - DNA, 201 bp, Homo sapiens
accaggggtatggggagactgtgctgcagcctcaggaatgtcagggtgaagaggccctggaggctgatgcttccggccaagggcttcttctggattttcarataaagtcccagaacagaattactttatgttttaatttcaggcaaatgtctctcatctgcccttttaagtacattaggattgggtttttcgaccctgcac

SEQ ID NO: 395355 - DNA, 201 bp, Homo sapiens
tatctctaatgatatcgtcttatcccttatattgatgatttgtatcttctcttggttgtttttttctgatcagtctagctggaagtttttcaattctgttygtctctaagtgccaacttttaggttcagtgatttttgtcttttgttttatatttcaataatttttactctgattttaattatttcttttttttccgctta

SEQ ID NO: 395356 - DNA, 201 bp, Homo sapiens
ttctgttcgtctctaagtgccaacttttaggttcagtgatttttgtcttttgttttatatttcaataatttttactctgattttaattatttctttttttyccgcttacctggtgtttcaattgcccatctttttgtagttttttaaggtgctagttgaggtcattgttttaagaccctttttactgcttttgtagcattt

SEQ ID NO: 395357 - DNA, 201 bp, Homo sapiens
atctatttcttccccttttttagagtttttacttcctgtattttgtagctctgtgattagatgcataaaaatgtaggattgttggtttatcttaataaacygacctcctttaccattatatgatgaccctctttatttctggtaatagtgtttgttctgaaatttgttttgagattaatataacctcctcaactttctttt

SEQ ID NO: 395358 - DNA, 201 bp, Homo sapiens
tttatagtatgcattcttaccacgatctcccttcaagtgatattatactacttcacatatagtaaaagaaccttacaacaggatactttcgtttttccatycccaacctttgtggtattgttttcagacacttttgcatgtgttaaaaaaatccacatcttattattttcatcttaataattatcttttaaaggaatttaa

SEQ ID NO: 395359 - DNA, 201 bp, Homo sapiens
tattaggtgttgttttcatctgttacagcgtcaacagttgcatttgtttttttatcccttcacaggttccctcccacttactacgctccaagattaccaarcccaacgtgtaccatgagtccaagctggcggcaaaggagtaccaggccgccaaggcgcgtctgttcacagccttcatcaaggcggggctgggggcctggg

SEQ ID NO: 395360 - DNA, 201 bp, Homo sapiens
tcaggtgtcttttctggaattgccttttttattcggtgtaaagaggcacagggacttcatatctgctatagatgagtgaaggttgcctagacatgcacacraggcccttggtggacttcccctatccctggggctcctcataacccttccctcttctcttccctggactttctgggctggggccagggcttggggtcgggg

SEQ ID NO: 395361 - DNA, 201 bp, Homo sapiens
atgccatttacatcccagtcaaattagcagccagatcactgatttcttataggtatacatcttttgacttcagcataatctcttcccctttttctgcatcyttgggttttaaaggatgtttactatgtaaatgtttaacatgtttactatttaaacttaatagttgaggtagcttttaaaatttgtgtccattaaacccaa

SEQ ID NO: 395362 - DNA, 201 bp, Homo sapiens
tattgtgggtcaaggggagttagtgtctcacctaaaatctggggccatgatgtcaccacattaaatagtagggatgtttgctcatcttttaagggtatttyttccccctgcaaagcaaaatgctgaagagatacatatttgttaattaactgatttcaccctcgtcatccatcctctttccataaggaactgtatgttgca

SEQ ID NO: 395363 - DNA, 201 bp, Homo sapiens
cagctgtcccgtcacatcctgcatgtcagtacaggtagtgccgttctcttcgtaggactgtgacactttatctttgttctttcacagttaaaaaaaaaaamgcttctttaaaattctgactttatataactaacgcaatgctcatgctacttcacttgttacaagaacatattattctgtcctatagatgtactgcagtta

SEQ ID NO: 395364 - DNA, 201 bp, Homo sapiens
ctatcccacagtacttccctttccccatccaccctttcaggtggctcactccccaccagtttcgcaggatggctcaaggcaaatggagaaaacggcacagrttgaaactcttggccgtagcttgcgagcttgcctcttagcacctccaaccacgatctccttgaatgtagtctcctcagtctctcttttttgtgtgaggaa

SEQ ID NO: 395365 - DNA, 201 bp, Homo sapiens
tgccacattgcaggcaatgaggagaggaggagagaaggagagaagagctgcagcccttcaaggagcccagacctaggagctccctgagccagggcagtgaygccccctttggggccctgcggttcctggtgtttccaagcttctgggcactaccgtattccctggtttcagccatggaagctgtgtgtggtatgcctggtt

SEQ ID NO: 395366 - DNA, 201 bp, Homo sapiens
tgtgatcacagttctctgcagtctcaacttcctaggcataggtgatcctcccactgcagcttccagagcagttgggattacagacatgagccaccactcckggctaattttgtttactttttatagagatggtgtctccctgtgttgcccaggctgttcttgaactcttgggctcaagcgatccttccgcctctgtctccc

SEQ ID NO: 395367 - DNA, 201 bp, Homo sapiens
acaggtgtgagccatcgtgctggcctttttgtttgtttttgagacagtgtctcactctgtcactcaggctggagtgcagtggcaggattatggctcactgyagccttgaactcccaggttcaaacagtcctcccgccttagcctgctgagcagctgacaccacaggtgcacaccagcatgcctcgctgagtttttaatttt

SEQ ID NO: 395368 - DNA, 201 bp, Homo sapiens
ctgatcaaatctgactggtagaaatgcctttttcttgatataaaccgcttaattaagccttttggcttgcctttgaaagatgctttattgaatacttcccrgcacagatgatctgttactgttggttgatttctaatcttactgcagccttagctcacccatgagtccctcctgcttgttctggggtggtgcctgctgccc

SEQ ID NO: 395369 - DNA, 201 bp, Homo sapiens
ccttgcccgctcggccaactgtcgttttgcagacggcaggctggtcagaggcttcccatccagagtgacccatgaggtgtttctgttccttagaagaggaygctaatagctgcctgggaaaacagttgttaatgaggattgtactaagtagatccctttcacatcaatagtaaccagtttaaagccttttcatttacaaat

SEQ ID NO: 395370 - DNA, 201 bp, Homo sapiens
tcccggcacagatgatctgttactgttggttgatttctaatcttactgcagccttagctcacccatgagtccctcctgcttgttctggggtggtgcctgcygccctccagtggcatgtgtggcacctgctgccctccagtggcatgtgtggcacttgctgccctctttggggtcagttcaccatttattgagtcagtgctt

SEQ ID NO: 395371 - DNA, 201 bp, Homo sapiens
gatagaagttcatgctttttccttctggtgaagaccaacacatggccctgttttaaagagcagaaagctgcagagccactgccacgtcgcaggcaccatcsaggatgtgtaggcgtctcagggatgttacggcactcagaggattggtttatttttaggaaacaactgtagcagccaagtgaagactctggacaggggagg

SEQ ID NO: 395372 - DNA, 201 bp, Homo sapiens
agcctgccccagccatgtgggcctcgcagcccactgggagaggcaggccacaaacagggagacaaattgtggattgcactgtgcgtggagggagagggagsggggcggtggggtgggttggtgccgtgtgagctgggacttgagcagtaaggtggggtctgatgaagccttgcgcgaggacatggcagggagggaacaggg

SEQ ID NO: 395373 - DNA, 201 bp, Homo sapiens
tttgagagtttttgattaatcccctaggatacttttgaatgataggttttggggagatacatttggttgttttggcaccactaccatcagcctcactcacktgctgccaggcgccccgccagatcagggaacatcctctgtacatggaagcagccccgagcactatgtctgcttgtgtttctgctctcaaggtttctacgg

SEQ ID NO: 395374 - DNA, 201 bp, Homo sapiens
taatttcaggcaaatgtctctcatctgcccttttaagtacattaggattgggtttttcgaccctgcacagcacatgggggctcctcagagaagtgtctgawaaaataaaattaaataactcgctttttagcacttcgtttttactggtgatttgttagtcattgattgaggtgattgtgattgatccaattatttgtctgc

SEQ ID NO: 395375 - DNA, 201 bp, Homo sapiens
ctcagggtcaagagaaggcagagaggctcctgcacaagctgagtggtaacagcagcgcagaagcagacaggctgatgtgtttagcccaactttgggagaaragctggtgacatggggtgtggggtgagaggggagagagaaccaggtagtctccaggtgtctggcctgatggctgcagcgaggtgacaggatttacacatg

SEQ ID NO: 395376 - DNA, 201 bp, Homo sapiens
atcaagtactcacacaagcagatgtaaagtcataactgtgatgaaggaagaccaattgaggacctccatcagccgaggggcctggacgctcactgagaggygaggtttgcactcagtctccttgcccaaagctggcagcctcattctgctgcccatgtgctgggcaccttctccactatcacgacttccttgacatttcag

SEQ ID NO: 395377 - DNA, 201 bp, Homo sapiens
attgtgattgatccaattatttgtctgcccatcctgattgtaactttttttatttacaggattttaaaagatagtttcttgatcttaatgttatatttaaygttctctttcataagatggttttttgatgactttgtgtttaaaaagtgagggtcttttgagaaatagaatatatcaaattatttgttcagaaacattcaa

SEQ ID NO: 395378 - DNA, 201 bp, Homo sapiens
caagatctataaagattcacttagcagcttgcagggacggtttcctagaaggtaaaatatttcactgaaaatattatcaattgaatattttggaacacttyagtgatattgtttggtttagataatactgaaagcaaaatataaattatgaggtgaagtgtatctctaaacatgcatgattcgcttgttgagtttcagatt

SEQ ID NO: 395379 - DNA, 201 bp, Homo sapiens
tcccttggagcactctcccaggtctgctgcaggcccatggcctcctcccttggaccactctccccgtctctgtctaggggctgctcacagcttcctagaaktttcttgcctgggctttgcttattcccagctggtggctttccatctgtgctcttcctctgctgacggccccttctgccccagctcattatatgaccgttg

SEQ ID NO: 395380 - DNA, 201 bp, Homo sapiens
taatgatctgtctcttgttaaggtcagtggcctgtatttcgtcctggtctcaatcagtgtctcaacaggactgtacagaactagccaacctcttggattcygtgggcagtgccaccctggcatccttctggctcagtcttctgtgcaggtcccccagtcaccaggagccctgcaggtgcagcctacctgcccccagcccag

SEQ ID NO: 395381 - DNA, 201 bp, Homo sapiens
aaagttttatagttttatgttttgcatgtaagcccataatctattttgagttaagttttgaataaggtaggagacctgaattgaggttcatttttttggawctctagttgccccaataaggctgtgcctcttcacgaaattgcttttgcacctttgtccaaaatcagttggacatatttgtgtggtgtattcggggttctc

SEQ ID NO: 395382 - DNA, 201 bp, Homo sapiens
tgcctggaactcaacccagtgttttttctctgccccctttttctgttagctcttcccccagtggtgtggggctgggacaggggcctcacattgtcgtccaygtttcccgaggcttctgtctctccatcccgctgtttcagggttctgcatcctgctgtttcagggttctgcatcccgctgtttcagggttctgcatcccgc

SEQ ID NO: 395383 - DNA, 201 bp, Homo sapiens
ggaaggggttgttagagcctggtggaaatgaagattgtggcttgtcactcagccttgtctgacaccacccaacaaggggactctggggttgtccttacagyctggcacgggtggggcgtggttgaggttttttgtttggtgtttggctggaataaagcaattcttgtctaagaagttttctgtcttgctgggctacctctt

SEQ ID NO: 395384 - DNA, 201 bp, Homo sapiens
ttcccccagtggtgtggggctgggacaggggcctcacattgtcgtccacgtttcccgaggcttctgtctctccatcccgctgtttcagggttctgcatccygctgtttcagggttctgcatcccgctgtttcagggttctgcatcccgctgtttcagggtgcacgtttccttctcgggcttggctccttgggtcatgtctc

SEQ ID NO: 395385 - DNA, 201 bp, Homo sapiens
ccacagcctactgagggcatctgccctgactgcaggggtcttgccctctgtgcctacatctcacctcccattctagaccttaacccaattactttttatcrgtccttccataatggaaatattaaaacatatacaaatatacaattgtatcaagaactctgcatgcccgtcagccacatcagtaattaccaaccagggccc

SEQ ID NO: 395386 - DNA, 201 bp, Homo sapiens
cacgtttcccgaggcttctgtctctccatcccgctgtttcagggttctgcatcctgctgtttcagggttctgcatcccgctgtttcagggttctgcatccygctgtttcagggtgcacgtttccttctcgggcttggctccttgggtcatgtctccagcctgacgttccagctgagaggtggtgaggcaggaaggggtgtc

SEQ ID NO: 395387 - DNA, 201 bp, Homo sapiens
tatcttgaaatagttaatgactataaaataataatgcttttaaaactatctggaaaactttgttgaataaaggattctaaagagaaactcatttaactttyagcaacacatttgcctgaaatatagtgagattgaaagttattaacatgatttcatgaaaaactatatatataaaatatctatttttagatatatgatatt

SEQ ID NO: 395388 - DNA, 201 bp, Homo sapiens
caagtagcttcctcttcaagtccggtttctttttcttgttttctgctgggaactagatgtagttcccctccttcctcagcagcaccctttaggtacgagaygggtggggttggccctttccattctttaaggagagtattttccactgtgagatggtcacataccttctctttggtaacaggacaaaagagcaaatgctgg

SEQ ID NO: 395389 - DNA, 201 bp, Homo sapiens
aagagaaactcatttaactttcagcaacacatttgcctgaaatatagtgagattgaaagttattaacatgatttcatgaaaaactatatatataaaatatmtatttttagatatatgatatttgatatagatatataagatatatgcatgttttagtacattttagtcaccattttctaagagcaatgaatttgcctttta

SEQ ID NO: 395390 - DNA, 201 bp, Homo sapiens
ttgcttattcccagctggtggctttccatctgtgctcttcctctgctgacggccccttctgccccagctcattatatgaccgttgtctcccatcccgtccygacctgcctgtttatggaggcatcctctaggttctcagtggagggtgcctggcccctggaacaaaactgttgagtttgaatcatccccaccctgcctctt

SEQ ID NO: 395391 - DNA, 201 bp, Homo sapiens
cttttggaaattgtaatgaacttcaccatcgtagagctttaatatttctttcctgaagcagaaagcatgtgaaattttctggatagtgtatacttaatacrcaagcttttggagtttttgaatgctgggtatgttagcacaccagtcttgctgactattacgtgggagatgagtgctgcttaaaattgtgtaaggggtcag

SEQ ID NO: 395392 - DNA, 201 bp, Homo sapiens
agtgcagtggtaatcatggttcactgcagcctcaacttccaggctcaagtgatcctcccacctcagcctcctgagtagctgggactgtggggctacaggcrcactaccacacccagctaactttttttattttttgtagagacggagtcttgctgtgttgcccaggctagacttgaactcctggcgtcaagcgatcctccc

SEQ ID NO: 395393 - DNA, 201 bp, Homo sapiens
ccacagcagcctcctcctccaccgaagagggtagttgtctccctgaagcagtcacagcaggcgtctctgccgctccgtcaccacagtggggttttgttcargcagatcgcgctggggttctgcacctgcagaaggagaggggtctgttgtcgctggctttcccccaagcaggctcttgcacactctagaaaaaacaccttg

SEQ ID NO: 395394 - DNA, 201 bp, Homo sapiens
gtcgtacgccaggcccacctcttcccagcaagggacgccaaagaactgcagtttttattctgagtcttaatttaacttttcatcatcttttcctattttgragaattttttgtaattaaaagcaattattttaaaatgtgcaagccagtatctcacaaggcatggatttctgtggaatttatttttattcaaataaccata

SEQ ID NO: 395395 - DNA, 201 bp, Homo sapiens; identical to SEQ ID NO: 86812

SEQ ID NO: 395396 - DNA, 201 bp, Homo sapiens
ttactaaatgctagctgcgaatagaaatcgtgtatttcctttctttcataaaataagagctaatttcggcagcaaacagtttggcgtgttattcttttccyttttcagggtggtttaaataaaaataaataaacatgaaagattttggctggaacatctttggaagcacggccgtcctcagcctcactgcactgtctggtt

SEQ ID NO: 395397 - DNA, 201 bp, Homo sapiens
gacaatctgaatttacttctgttcagtagttcccaaaggctttttctacatggagggactcggagtgacacagcagctccctcttgtgggcagattccccygtgtaaggtgctggaggctgaggttccagcctgcagccgcttgtgatcctgatatgtggagagttctggaagactgatgactgctgacccccttcttaac

SEQ ID NO: 395398 - DNA, 201 bp, Homo sapiens
tgttctgtaaccttggttcaatcaaagttccaaattcataaatggcacttatattattatgacgattgctgaaagtcatgccacagtttaatttgctttawacttggatttggtatacttgattttttggttctgttttctctttttcctgatttccttgatttttttggttccgttttctctttctcctggtttccttga

SEQ ID NO: 395399 - DNA, 201 bp, Homo sapiens
atctgtgtgtgtgtgcgtgagtgtatgtgtgtgtgcattccagtgtgcgtccagaagccagtttccttcagaaagctttctgttccctggcttcatttttrccatttagaggacctgtgaagcaatgagatggaatacttatagctggtttaattcagtgagtgatctgaattgtaaataaaattttatcaagtaatttat

SEQ ID NO: 395400 - DNA, 201 bp, Homo sapiens
ccatctgtgctcttcctctgctgacggccccttctgccccagctcattatatgaccgttgtctcccatcccgtcccgacctgcctgtttatggaggcatcstctaggttctcagtggagggtgcctggcccctggaacaaaactgttgagtttgaatcatccccaccctgcctcttcctagctgcagtgctgggcctcagt

SEQ ID NO: 395401 - DNA, 201 bp, Homo sapiens
gaaattgtaatacctgttctttgaggatttcctgtggtttctcctgccaacaaaataatacttatatgtaactaagaaattagattgaattttagcagtcwtgtgcactttagttttgtctgcataaggagctattcaaggtgagagagaagtagctaagtgagaagctgtaggttctggttctgctgtgtggctttagtt

SEQ ID NO: 395402 - DNA, 201 bp, Homo sapiens
tgaccaaggaaccagatcccaagaggcctctgccactgaaaggagatttttattacttgcgtttcctagacgggggggcactcgcgccaagcaggcccacrgggcacactggtgtcagtcaaggggcagaaaggagccacaggaaagcccaggacagagcctgagtggggtttctgtgggaaaggcagggcagggcacccg

SEQ ID NO: 395403 - DNA, 201 bp, Homo sapiens
gcatcactgtgccccgtggaatgggcttctgggtatatctcatgaagccccactgtttcatgtggagtcctgtcacggcatgcctctcagaataatgctcygagtattcacacatacaaatcgaagataacgtctgagattgatttaaatacccaggcctttgcaataataggacagaaatatttcccttcaaaatgcagg

SEQ ID NO: 395404 - DNA, 201 bp, Homo sapiens
cagagcaaatgcttcagtagtagtgttaccagcagacagatggcgctttagaggtgacatgtgatagatgcttgggactgaaatttagccgtggatcatarcctgaatgggattttcacgcatgtcttccctctcaggatttctcttaagggttgttgattccacatttctccttgaggagggggtggtggtagggctggt

SEQ ID NO: 395405 - DNA, 201 bp, Homo sapiens
ggggtcttggagtcactcttgcgtaccatgtagaacccaaaccatgacccagtgaagcatttctgcatggtattgatttctgcatggtattgatttctgcrtggtattgctgccccatgggtgtgctgtggaggcggctgggcctctgctctatggactgtgtgctaagtgttggctttggttgaagtcagccatctgggg

SEQ ID NO: 395406 - DNA, 201 bp, Homo sapiens
tgttcccttcagcggggtaggcctgctaccctctccttccacttgggcttcccctttcttgtctgtctccttgtgcctggcagccttgggtatctgtgatrtggctgtggttagttttggtgcagtgggatatatttatgtgctgcagtcacttctgtgaagagttaggtgctgtccgggtgctgtcagcttggattccgg

SEQ ID NO: 395407 - DNA, 201 bp, Homo sapiens
cagaatcagtgcaagaactgattctctgaagcccagttcctaacaggtcatggactgttacttgtccatggcccaggggttgggactcctgtattaaaccrtgctcatgtaagatcttaataatagaaaatgggtgtggggtctgtggggcctttctgtcacatctgctcaatttttcttcaaatctaaaattgttctaaa

SEQ ID NO: 395408 - DNA, 201 bp, Homo sapiens
ccggaggacagggtccagtatgcatggacagccacaacgggggctcggtaagtatttgatgagacaggctgagctgggtgcctatatcttgcctgtggtgsagaggatgaactcacacagactctgaaaggaatgcattgtctgtgagtgatgccctgttagatgtctgagggttcctaagactgggtatatcccactaca

SEQ ID NO: 395409 - DNA, 201 bp, Homo sapiens
ggagaaacttacctaacagggttaaagtggagacaaggatggcatgtgaagctttggctttacttcccaggtgatttttctgttacgcttagcatgcatcrttgctgcttcgttgttttgttttgttttgttttgttttgtttttttagatggagtctggcactgtcacccaggctggagagcagtggcatgatcttggct

SEQ ID NO: 395410 - DNA, 201 bp, Homo sapiens
attttgtaaaatacatcattaggatttatagcttacaccacatgcaaaaataggctgcaagtgggtcagagaactcagtgtgaaaaaggcaactgttccartgttagacacaaacatggttgaatattacctatgtgttgggaaaggcttttttaaaggcgtaactcaaaattcagcttcaacaaagaaaagatggatgaa

SEQ ID NO: 395411 - DNA, 201 bp, Homo sapiens
gctctggggttcatgcgggaatcaccagtctgcgctgctgcctcctcctgtatgcgtgtgtgtgtgcgcgcgtgtgcgtatatgtgtgtgcgcgcgtgtgygtatatgtgtgtgcacgtgtttgcgcgcgtgtgtgcgcgcttgtgtgtatatgtgtgtgcgcgcgtgtgcgtatgtgtgtgcactgtgcgcgcgtgtgcg

SEQ ID NO: 395412 - DNA, 201 bp, Homo sapiens
cccccccatgaccctcatcccacagcaagcctttagcaggagagacggaagaagagcccagtctttgaaaccttgcccccagttcagcaccattttccttyaaaggtctcatccaagaatctcacattcaagataagtgacaccagcccgtcagcagctgaaaacccaagtctgggtcaagatggcagcctctgggctccc

SEQ ID NO: 395413 - DNA, 201 bp, Homo sapiens
cgggaatcaccagtctgcgctgctgcctcctcctgtatgcgtgtgtgtgtgcgcgcgtgtgcgtatatgtgtgtgcgcgcgtgtgcgtatatgtgtgtgcrcgtgtttgcgcgcgtgtgtgcgcgcttgtgtgtatatgtgtgtgcgcgcgtgtgcgtatgtgtgtgcactgtgcgcgcgtgtgcgcgcttgtgcgtatat

SEQ ID NO: 395414 - DNA, 201 bp, Homo sapiens
tgcctaaaggaatcaaatgcaacatcagtataaaataatatattcaaggtatttcactgatttttttaacgaaccaaatacttgcttcccttattaacctstcgtcaacattgtttataaggattattagtccatttgtactttaacaaatcagtgctactagatcccatgtgattttttattttcaggattactctttgc

SEQ ID NO: 395415 - DNA, 201 bp, Homo sapiens
tgtgcacgtgtttgcgcgcgtgtgtgcgcgcttgtgtgtatatgtgtgtgcgcgcgtgtgcgtatgtgtgtgcactgtgcgcgcgtgtgcgcgcttgtgcrtatatgtgtgtgcacgtgtgtgcgcgcgtgtgcgtatatgtgtgtgcacgtgtgtgtccccatgagtcctgtggcaccaccgagttgtcatgaatgcttt

SEQ ID NO: 395416 - DNA, 201 bp, Homo sapiens
cagccccagcaccagaccttcagagtgaggctctcggaactcactctgaagttaaagttcttcgcctctctttgaaagtttggagattcgcctaatcttayatgaaatggaaacttttatttcctctggcttatccctaatcttcttatgactttttcttctctgtaaactcgaatgaatcgccctttccctctggcaccc

SEQ ID NO: 395417 - DNA, 201 bp, Homo sapiens
cgcttgtgtgtatatgtgtgtgcgcgcgtgtgcgtatgtgtgtgcactgtgcgcgcgtgtgcgcgcttgtgcgtatatgtgtgtgcacgtgtgtgcgcgcktgtgcgtatatgtgtgtgcacgtgtgtgtccccatgagtcctgtggcaccaccgagttgtcatgaatgctttcgtttaacgagtcaggagcagtttccca

SEQ ID NO: 395418 - DNA, 201 bp, Homo sapiens
gtgagcggagtcagagtgcatttgtgtggagaggctggaatgactgagaagcctctcggtggcgcctttgagggaggtgctgtgcacagcttgtggcttcyttcactggatcgcatctccaagctgcccctttctcttgcctttgattttgcacatcatcctgggctgtgctcccagctgtgtgtggccctggagctgact

SEQ ID NO: 395419 - DNA, 201 bp, Homo sapiens
ctctttctggatgcttttggtgatagagaagccaaatcacgctggttttaagcaaaaatcatgtatttgctcctgaaattttcctttgaaaactttctgtrtgcggttgtacgtcagtatgtggttttcagccacactgggaggcgcctttctctctctttttgtcgctatagacattagtggaaagccacaagtagcgtg

SEQ ID NO: 395420 - DNA, 201 bp, Homo sapiens
tgtctctccatcccgctgtttcagggttctgcatcctgctgtttcagggttctgcatcccgctgtttcagggttctgcatcccgctgtttcagggtgcacrtttccttctcgggcttggctccttgggtcatgtctccagcctgacgttccagctgagaggtggtgaggcaggaaggggtgtctctgcatcaggaaagcga

SEQ ID NO: 395421 - DNA, 201 bp, Homo sapiens
actgagaagcctctcggtggcgcctttgagggaggtgctgtgcacagcttgtggcttctttcactggatcgcatctccaagctgcccctttctcttgcctktgattttgcacatcatcctgggctgtgctcccagctgtgtgtggccctggagctgactgagccacaccgtgtgtgcatgtgagagagggcaaggggggtg

SEQ ID NO: 395422 - DNA, 201 bp, Homo sapiens
ttgcctttgattttgcacatcatcctgggctgtgctcccagctgtgtgtggccctggagctgactgagccacaccgtgtgtgcatgtgagagagggcaagrggggtgggagggccatactaggtgggcgtaggcgtgggcaggtggccctgagcaggcagctttgcctgtttgcctcggtttcctcctgagggccgggctg

SEQ ID NO: 395423 - DNA, 201 bp, Homo sapiens
gtctctccatcccgctgtttcagggttctgcatcctgctgtttcagggttctgcatcccgctgtttcagggttctgcatcccgctgtttcagggtgcacgwttccttctcgggcttggctccttgggtcatgtctccagcctgacgttccagctgagaggtggtgaggcaggaaggggtgtctctgcatcaggaaagcgat

SEQ ID NO: 395424 - DNA, 201 bp, Homo sapiens
actcagccagagcctggcaggatcctggggtgtctatttccaaggaatgttctggaagaaacatacacacatacttgtttgccagatttacctgtgtggtyttccagatgagaagcagcctgtgtcactccataagggagagtgcgtgcagcattgagagagtgagccctgctcccagctgcatctggcccctaacctgca

SEQ ID NO: 395425 - DNA, 201 bp, Homo sapiens
ctggcttctaattctttaatgtttgtagttttgtcagattttctgtttcctcctgagttagtgttaataagttgtatttcttttctttttaaatggtgatrtgtgtgtgtgtgtgtgtgtgtgtgtgtgtgtgtgtgtgtgtgtgtgacagggtctcactctggttgcctaggccggagtgcagtggtgcaatctcagctc

SEQ ID NO: 395426 - DNA, 201 bp, Homo sapiens
cacacatacttgtttgccagatttacctgtgtggttttccagatgagaagcagcctgtgtcactccataagggagagtgcgtgcagcattgagagagtgarccctgctcccagctgcatctggcccctaacctgcatctgtgcttcccacacaggttttagctgacgctgtctcacgcctggtcctgggtaagtttggtga

SEQ ID NO: 395427 - DNA, 201 bp, Homo sapiens
tgaggccactgccacggcagatgcacgctcaagtctgcgtatattcctcggcaggcagaattcccccaccacgcacttctgtggccatgtctgagcacagygtgccgcccgtggctgctccctccctgggggtgaaagcgggcttcacaccaccttcctgtgtcttccgtttcaggcatcagcaatgcagaagcacggcag

SEQ ID NO: 395428 - DNA, 201 bp, Homo sapiens
aggtcagggaggaagctggggacagtttctctgtctacatccaccagcccaggagaaacccccagttctcggtatgtgactttcttgttctttccccctgmggggtcacctctatcagactctgcagccctcttcactgacccacctcttgctgccctaggaaacctggctgctctgctcatgaccattgtttccttgccg

SEQ ID NO: 395429 - DNA, 201 bp, Homo sapiens
agaccacttgctcagagccatagtttacatctgaagccaggacgctggagcacttggcactccagacagctggttcagggggctcccgctggttgagtggmcttgggcaggttacaaggcctctgtgcctcagttccctcatctatacagtggagacattagtagcatgagcctcagaggacatcgtgggaatgcagtgag

SEQ ID NO: 395430 - DNA, 201 bp, Homo sapiens
ggagatacagtacttaacaagataggtagagatcaaaaatgcttctggcataaagcagtacatttgtattgatagatttaaaaagataagcaagcacacastacctacagaaaggtaaagcctcattccactccatccctgggcacttggttcaaaggctgcacccaattgtgtattgtcctagcaggagtcaaagtgtgt

SEQ ID NO: 395431 - DNA, 201 bp, Homo sapiens
gcgtctttccagagtgcaaatgccagtgcctttgtccctagttcagcgctcttcatggccctccattgcctggaatcaaacccaccctcctcagagtggtrtgaggtccctgggcactggccctgaacctcccttgctgggacctggtcccaccctcatcatccctccatgtgggagaatccacgcgagacgtcctttgct

SEQ ID NO: 395432 - DNA, 201 bp, Homo sapiens
ccctgggagtggcttggcgtcttggccacctctttccacggatgtggtggatgtgggggtaaactagagagactaaagcccactattgggctcagcttccygtagaaatcaaatcagatgaaaaccctgacccagagggagaaggcagagagttggacttttgaaaacgtgagtgtgtccagcaaccaggcagcaacagtc

SEQ ID NO: 395433 - DNA, 201 bp, Homo sapiens
tgtctcaggccaggcccccgggggtgcacaggaacagcacagctgcagtgaaggaggggctcctgcagccgggctggccccagagctgtgggtcgtgcccygcgtgttgctcagcgcgttctgcagttgccctggccttagtcccccatctcgctgtgatagccatgcaggtcagcaactgtgagccttcctggctcccac

SEQ ID NO: 395434 - DNA, 201 bp, Homo sapiens
cccctctgccctcacctcaagaggtcacagcattggcctgtttttgtttcctcagttaagctttggaaattgagatgtcactaagacaggcaatagggagyaaaacaaaggcacaggcaaaaactaaaggacatttttaccaaataccctcaatttagaattaccaccacttttcccatggacactcatcactaattattt

SEQ ID NO: 395435 - DNA, 201 bp, Homo sapiens
gtctgtgccgtgtagccacaggtcgcactgcagggctgtggggagttatttttagtttcaggcagactcactgtttttgcctttctttttgcttgaaaagmctgaagttatttcttgtgtttttatacatgagattatcttctgaggctggaacatcttggggggatacaatagatagaattcctatagtaattcccctgc

SEQ ID NO: 395436 - DNA, 201 bp, Homo sapiens
ctgcatttgcttgctgtagtcagtaccatctagtgttttagtcaatatcagtttttgtagtgtggatgaggctggtgatggcagctgcagcctgtctggarttgctgctgccgtggtgtcagctgcagcgggggaggctagggctctgtgctccgcaagttggtgggaaccgggaacaggtggaagccccacccccttcca

SEQ ID NO: 395437 - DNA, 201 bp, Homo sapiens
tgatgcatcccttttagtgaggaaggaactagagccacagtttgatgaagttgctgactggaccactgaggtgttagtgccctgtgcaaggtgccctaactgacacctctgcatgtttctttctgtcatttgtccttgctagaatttcctcttctgtttcagtagattcctattctcatcaatatttcccacttaatatga

SEQ ID NO: 395438 - DNA, 201 bp, Homo sapiens
cagggctcacccgtgactgcccatgcaccaatcagcacacactttcctctgaagcccataaaaacccccggactcagccagacttgggcagaagacaggaygacctgcttatggagaatagctgcccactgtgggtctctctgagctgttctgtcactcaatgaagcacctcttcacattgctcaccttccacttgtccac

SEQ ID NO: 395439 - DNA, 201 bp, Homo sapiens
gtgatgcatcccttttagtgaggaaggaactagagccacagtttgatgaagttgctgactggaccactgaggtgttagtgccctgtgcaaggtgccctaactgacacctctgcatgtttctttctgtcatttgtccttgctagaatttcctcttctgtttcagtagattcctattctcatcaatatttcccacttaatatg

SEQ ID NO: 395440 - DNA, 201 bp, Homo sapiens
ctgagagctgtggacactgaggatgaggcttgagtctgtcctagcagagctcagggcctggtgggaaaagcagggtggtcaggccagcgggggagtgagcrgggaggggcaaccagctttgcacaaggagccaggaatctcccccccacctccaccctgcaccaggggcgctgactctgggccctcaaggccccccactgg

SEQ ID NO: 395441 - DNA, 201 bp, Homo sapiens
cgtgatgcatcccttttagtgaggaaggaactagagccacagtttgatgaagttgctgactggaccactgaggtgttagtgccctgtgcaaggtgccctaactgacacctctgcatgtttctttctgtcatttgtccttgctagaatttcctcttctgtttcagtagattcctattctcatcaatatttcccacttaatat

SEQ ID NO: 395442 - DNA, 201 bp, Homo sapiens
aatcagcttctttgcttttttaggctttttgctagtgatagtgttgtctttgttctgtaaaacaactgtaaaggaataccaacaatctagtgcagaaattsttttgtaagaacaagctaccctgatgtcatgtcgtgttttaggactgtttgcttctcaacctgatgaagttgttcttagctgtttgctttgttttctcat

SEQ ID NO: 395443 - DNA, 201 bp, Homo sapiens
ccgtgatgcatcccttttagtgaggaaggaactagagccacagtttgatgaagttgctgactggaccactgaggtgttagtgccctgtgcaaggtgccctaactgacacctctgcatgtttctttctgtcatttgtccttgctagaatttcctcttctgtttcagtagattcctattctcatcaatatttcccacttaata

SEQ ID NO: 395444 - DNA, 201 bp, Homo sapiens
tgcatgcacaggctgccaggatgcccccgctctactgtggattattctaggctgtttctccttccttccaaccaccacacccacatccctaaacctagggktttaaatttaggtaacacacctagggcttgttaaatttaggtagtttccacacttcgaccttttttcttaggatggctctgtattcattatggatttcat

SEQ ID NO: 395445 - DNA, 201 bp, Homo sapiens
gaggccaagggggaaggattagctatgaagtgataacatcatccacaaaaaacatcttggctcagaggctaatttcacttcctcgtgaatttatgtattgyaaaacatttgaattcttttagatttttggaataagaatttttttaacttctatttgtccagtgaatgcataaaacaaacttaatccatttgacaaatact

SEQ ID NO: 395446 - DNA, 201 bp, Homo sapiens
gtgtgcgcgcttgtgcgtatatgtgtgtgcacgtgtgtgcgcgcgtgtgcgtatatgtgtgtgcacgtgtgtgtccccatgagtcctgtggcaccaccgasttgtcatgaatgctttcgtttaacgagtcaggagcagtttcccattttgtaggctgtttttctgtgacctggattttaatggcttggtcaacaggtggaa

SEQ ID NO: 395447 - DNA, 201 bp, Homo sapiens
gccagcacacggagcgctgcagtccctgaaggcttcctcaggctcctcctgttggcgtgggtgcctgccactgacctctgtgggtgacaggtttgtcactkgagcttgtatcctgcaacctgtttgtttgggcgtgcctgtttgtttgtttttaacgttttaataaactttattttttagagcagttttatatttacagca

SEQ ID NO: 395448 - DNA, 201 bp, Homo sapiens
tttcagacagaaacagtctccgccagtcaagaaaccctcaaaagtattttgccatggatatagaagatgaagaaaacatgagtaagatctaggcctatcaygtagtatcagatagctaattttatgttaacattttggtgtttttgcaaatgtatttcatgagaccagtgtggggattgtgttttttcccgtaacatcttc

SEQ ID NO: 395449 - DNA, 201 bp, Homo sapiens
ctgtacatagtactctgctgtttgaccatatcatatattcattctgctgacgatggatagttagacggtttccagtttggggccattataagcaaaactgytctgaccatactgatacatgtgttttggtaaagaagcacaggtgttgctggggtggatgggctggctgtgagcacacgcacttcagcgtgagtgggtgat

SEQ ID NO: 395450 - DNA, 201 bp, Homo sapiens
aaaatttataattcagttagttaaaaatatgtttgagcacctgttaaagcaccagaattcttttataaattgaggaaagccatgccatctaacacatatgyggcattaagtgttcttttaataaatattatgcttagtagacatactctacataccaatcagaggttgccatcctaaaccaaaactacatatccagcacat

SEQ ID NO: 395451 - DNA, 201 bp, Homo sapiens
gctcctaccctttaaaaggcttaccagcttttagatggagtcatagataagacatggatagtaacagaaaggaagcatggcttatcagctgtgtcaagtcmggacacatgtatccccattcacattgctgaactcaggaagatatccaagcaccattgtgacatacttgtccacagagaccgcagataaccccagcaccct

SEQ ID NO: 395452 - DNA, 201 bp, Homo sapiens; identical to SEQ ID NO: 86807

SEQ ID NO: 395453 - DNA, 201 bp, Homo sapiens
attagtctattcctttaccccagaaatgcagaaatacatggttttggatgtttgacctcattggttggtgggcatgaggaggtggtctgctttggtgccartgaccgtctgtgagtcacagagtgagtgaatgctgagccgctgtgatgggaaagctctctgctgagttggttcagtctgggtcacagagtgagtgaatgc

SEQ ID NO: 395454 - DNA, 201 bp, Homo sapiens
gtctgtgagtcacagagtgagtgaatgctgagccgctgtgatgggaaagctctctgctgagttggttcagtctgggtcacagagtgagtgaatgctgggcygctgtgatgggaaagctgtctgctgaattggttcagcagtgcacctgcttcctcacggggcattagccggtcagggcgatgtctctggatcactcaactt

SEQ ID NO: 395455 - DNA, 201 bp, Homo sapiens
ctggtgctgttacataacacgtggtattgtgggtcaaggggagttagtgtctcacctaaaatctggggccatgatgtcaccacattaaatagtagggatgyttgctcatcttttaagggtatttcttccccctgcaaagcaaaatgctgaagagatacatatttgttaattaactgatttcaccctcgtcatccatcctct

SEQ ID NO: 395456 - DNA, 201 bp, Homo sapiens
tacttattgataatttggtagggtctagaattctaggatcgtataattttccttttgaaatcagaaaatattctctattattttccagagtctagtgttgktaatgagaagttggatatccgtttgatccttgttctactgcaggtaaacatcttctactctctccttctctccctccctgggcttcatgtcctgacggtt

SEQ ID NO: 395457 - DNA, 201 bp, Homo sapiens
gtagtgtgatcgtggctcactgcagcctccaccttctgggctcaagcaatactcctgttatcagcctcttgagtagcttggaccacagtcacgtgccacaytgactgattaatttttaaattttttgtagaggtggggtcttgccgtgttgcccagactggtctcgaactcctaggctcaagccatcctcccaccttggcc

SEQ ID NO: 395458 - DNA, 201 bp, Homo sapiens
gctgagcacaccactgtgcctagcctaaaagcctttttagatcactctcagtggcaaaattagtgccttggtcacctttaccagtagctgttcttgctctscagtggaaatatcactcaacattatcaaagaatcgggatgaaattaaatgaaccagtttaggtacttttgatacagaagttcttatgagacgtgttgttc

SEQ ID NO: 395459 - DNA, 201 bp, Homo sapiens
ctcccttgctgggacctggtcccaccctcatcatccctccatgtgggagaatccacgcgagacgtcctttgctgtgctggaatccacgcgagaagtctttkgctggactggaatgtgccaaggaggagtattttgtaccagatggcagatctgacttctctaacaagacctagttcttattttatgatttttttcctttaa

SEQ ID NO: 395460 - DNA, 201 bp, Homo sapiens
catctgtccgtcaacctatcatccatctgttcactcatttacccatctacccacccatccatcatccatccactcacccatccatccacccatctacccaygcatccatcatccatctctccatgcatccatcatccatctctccatctagtcatccatctatctgcgcatctacccatcacccatctattcatccatcca

SEQ ID NO: 395461 - DNA, 201 bp, Homo sapiens
tccctagtgactcgtgatcctgagcatcttttcatgagtttattttccatctgtagatcctcttcgtgtcctttgcccattttctaattggactatttgtwtattttactgttgagctttgagaatttcttatatattctatttgttggatatatatttttcaaatattttctcccagtctgtagcttgttttttcatctt

SEQ ID NO: 395462 - DNA, 201 bp, Homo sapiens
atctgtccgtcaacctatcatccatctgttcactcatttacccatctacccacccatccatcatccatccactcacccatccatccacccatctacccatscatccatcatccatctctccatgcatccatcatccatctctccatctagtcatccatctatctgcgcatctacccatcacccatctattcatccatccac

SEQ ID NO: 395463 - DNA, 201 bp, Homo sapiens
tatttgtgtggtgtattcggggttctctgtgctatcctcttgtgatctgctcgtctgccccttgccaacactgtaccgtaccgatgactgtagctttgtartaaatgctgagatcagctagactgattgctcccactttattttttttttatggtggttacattaaagtctttctaagagaattctaacacctgtgtcatc

SEQ ID NO: 395464 - DNA, 201 bp, Homo sapiens
gggtcacagagtgagtgaatgctgggccgctgtgatgggaaagctgtctgctgaattggttcagcagtgcacctgcttcctcacggggcattagccggtcrgggcgatgtctctggatcactcaacttgtccctgacagagcaaggaataagaaacccagttagattgtctgtatcatcagatgccatttacatcccagtc

SEQ ID NO: 395465 - DNA, 201 bp, Homo sapiens
gtcctgcgtgtccttccgagggcgcagtgtccgcgcgggatgctctgcgccgcgggcggcccgggccagggaagttcctgcgggtgccgggcgtctgcagygatcgggagcaatctggggcagttgggggcccgaggtgacttttgacgtgttcacatcagaaggaaaattattgcgtggtggatgggtgcgagggaaggt

SEQ ID NO: 395466 - DNA, 201 bp, Homo sapiens
ttgggaggcagaatgtttaagtatttcactcattgactaaacttagttgagttttatttgtctgtgaaaagggaaatctacttgccttgcttgcacgcctytcctagggatattttggggactaaaatgtgatagtgaattttaaaatattggttgaaatggccaggctcggtggctcacgcctgtaattccagcactttg

SEQ ID NO: 395467 - DNA, 201 bp, Homo sapiens
aggaggttctatacatctgtttcgaaataaagacggagatgacttagggtacttataagttgttgaaaaatcatggctcctgaaactatgaattgtcatcrtggtatatacccagacagcccacattaaactgctgtgaacatgagaaaacggacatcgaaatgataaaagcaagagtgttggtaattgaaatccattata

SEQ ID NO: 395468 - DNA, 201 bp, Homo sapiens
cttgcagtgtacttgctgttggtacaaggcatgttaaatcctcagtggtccctcttttcatagcattgctgtggcactggcatttccctttgttaggagayagtggggtataaacccattgtggaaaccccttcagcttgacaaatttggagtcatgctattttcagaagaggatttcctgcgactaggagcagtcaccca

SEQ ID NO: 395469 - DNA, 201 bp, Homo sapiens
taccagtccatctactcattgtagtccatccatctgtccgtcaacctatcatccatctgttcactcatttacccatctacccacccatccatcatccatcyactcacccatccatccacccatctacccatgcatccatcatccatctctccatgcatccatcatccatctctccatctagtcatccatctatctgcgcat

SEQ ID NO: 395470 - DNA, 201 bp, Homo sapiens
ataatgagagccaggtttctcactgtcccaggaagaagttacaaatagcaaaaggaagatggcagagggaggccgtgctgttggattgggataggtgtcastgtgactctgtggtctttaatagatgcatgtacagcacaggagtaaacataggtgtacgcgttacatgcatgggttagtgatacacctacatatgcatct

SEQ ID NO: 395471 - DNA, 201 bp, Homo sapiens
tgcccttcccagctctacccagaacaaggaggcctcgcacactacctggtcatattttgacttcatgcatttaatgaaccaaactaaaggtaaatattttmttttgattcccaaggcagacttgtgggtacccaagttcctcagcccatctttaactcagtaggatgtggcatctccattgaggctcttcatggaatccct

SEQ ID NO: 395472 - DNA, 201 bp, Homo sapiens
atccatccatctacccacccacccatcatccattcatccatccatccatccacccatcatcacctatcatccatcatccattcatccatccatccatccayctacccatcatcacccatcatctgtcatccatccatccatccacccacccacccatcatcacccatcacccatcatctatccagccatccatccacccac

SEQ ID NO: 395473 - DNA, 201 bp, Homo sapiens
ccactcacccacccaccatcacccatcatccacccacccaaccacccaccatcacccatcatccattcatccatccatctacccacccacccatcatccaytcatccatccatccatccacccatcatcacctatcatccatcatccattcatccatccatccatccacctacccatcatcacccatcatctgtcatccat

SEQ ID NO: 395474 - DNA, 201 bp, Homo sapiens
ccatcatcacccattacccattatccatcatccatccatccatccacccacccacccatcatccattcatccaaccattcatccacccacccaccctcatmacccattacccatcatccatcatccacccacccacccatcatcccccatcatccatcatccagccatccacccacccacccaccatcacccattacccat

SEQ ID NO: 395475 - DNA, 201 bp, Homo sapiens
cccatcatcacccattacccattatccatcatccatccatccatccacccacccacccatcatccattcatccaaccattcatccacccacccaccctcaycacccattacccatcatccatcatccacccacccacccatcatcccccatcatccatcatccagccatccacccacccacccaccatcacccattaccca

SEQ ID NO: 395476 - DNA, 201 bp, Homo sapiens
gtgtggcctggtgccgctgatgccgagatgttgggctggcagcgatctgcctccgtctgtcacaggtgcctctacctgctgcaggcagacggacggagacrtgatggattgcgcatatcccctttacagattcggaagagtacatttaaaataacttaaatttgtatttagaagacttttcatggagagtatttattgtta

SEQ ID NO: 395477 - DNA, 201 bp, Homo sapiens
gtgtgtaaaaggcaagaagtgagaagattcacgtgtagatccaggacaatctgaatttacttctgttcagtagttcccaaaggctttttctacatggaggsactcggagtgacacagcagctccctcttgtgggcagattcccctgtgtaaggtgctggaggctgaggttccagcctgcagccgcttgtgatcctgatatg

SEQ ID NO: 395478 - DNA, 201 bp, Homo sapiens
ttgtgggtcacttagccacccctgggccactgtagccacctctgggtgtccttagccacccccgggccaccttggccactctgggtcaccttgtctacccytgggttacctgagccacccttggtcactgtctgtgggtgcttgcttgctttaagccacattatgctactgcagctaattaaggtcgctcaattcaagtgt

SEQ ID NO: 395479 - DNA, 201 bp, Homo sapiens
tagcagccgtgtccagcctgctgctctgaaacctcagtctcctttactgagatttgatgatgtttaaatgagcaaatgcatgtgtagtgattggcaggtgrccatcgctcagccgacttttcctgtgccctctgcttcggcaggtgcccttcctggctccctgcttcttcctctcctaacctcctggcactgtgctcctca

SEQ ID NO: 395480 - DNA, 201 bp, Homo sapiens
cctcctcagagtggtgtgaggtccctgggcactggccctgaacctcccttgctgggacctggtcccaccctcatcatccctccatgtgggagaatccacgygagacgtcctttgctgtgctggaatccacgcgagaagtcttttgctggactggaatgtgccaaggaggagtattttgtaccagatggcagatctgacttc

SEQ ID NO: 395481 - DNA, 201 bp, Homo sapiens
ccctcctcagagtggtgtgaggtccctgggcactggccctgaacctcccttgctgggacctggtcccaccctcatcatccctccatgtgggagaatccacrcgagacgtcctttgctgtgctggaatccacgcgagaagtcttttgctggactggaatgtgccaaggaggagtattttgtaccagatggcagatctgactt

SEQ ID NO: 395482 - DNA, 201 bp, Homo sapiens
ctctccatctagtcatccatctatctgcgcatctacccatcacccatctattcatccatccacccacccacccacccatcatcacctatcatccatcatcyattcatccatccatccacccacccacccacccatcatcacccattacccattatccatcatccatccatccatccacccacccacccatcatccattcat

SEQ ID NO: 395483 - DNA, 201 bp, Homo sapiens
cagtaaatagttagatgaatgaatatttgctacttttcttattgacagacatttctgaggtactttaatattacgttaagtaatgttacaatttcccatgygttgattttatgtaaataatgagtaaattactctcatagagattttagaattctaataaactcatatttccccttcttaaaagagtagaaaaatgctttt

SEQ ID NO: 395484 - DNA, 201 bp, Homo sapiens
acattagcaagcatgtctgcgtgtggatgtgtattttcatttgtcataggtagattcctaggagttcgtaggagcttcgaaatggagtttaagacagaagmctttgtttgatactgataatgctagcaagggccatttatttggcttgctcttgaagtctgtctctgtgatgtgcattgtgcttcttgaattgtatgagcc

SEQ ID NO: 395485 - DNA, 201 bp, Homo sapiens
actaaaaatcttcctggatatgacttccagtcataacgttatggattttattgtaaacaaggtagaattttatttgccttttaatcatttcattatggtgwgtgtcctccttacagagcgtgtactgaatttgggttttactccttttttgttcatttccacaagttgaactctgtgttattatcctattttctgttaggg

SEQ ID NO: 395486 - DNA, 201 bp, Homo sapiens
ttctaagctttgtacttcccctgtattaattggctaggacttctggtactgtgctgagtgtagtgtttggatcatagtgatggctagcaggctgcatctcrttgttgtctttgacgtgaatgcttccagtatttcatccttaagtgtgacattactctagttgttttgtacataccctttatcttgtctagcatgttacct

SEQ ID NO: 395487 - DNA, 201 bp, Homo sapiens
ttaataccttctattttttcaaaatgagtctctccccagccctacccctagtcttttcatttttttcatgtagtttacatgctgtagtagctacatagtgktataagtgcttaacacctggcttttggtgggaaggaggagtgggagtgtatggaaacccctgatttgtagcatttgccaatttccaagttataaatgtcc

SEQ ID NO: 395488 - DNA, 201 bp, Homo sapiens
ggtgggaaggaggagtgggagtgtatggaaacccctgatttgtagcatttgccaatttccaagttataaatgtccctaccgtgccctatttcaagctaccratgagctgtcaactggtttacaaaattcctgaaaatgtgacagtcttctctcatgaacaggtataagtataccagtggggcctgagtgtgcagcctggtg

SEQ ID NO: 395489 - DNA, 201 bp, Homo sapiens
gtgtagaggagcagagtgtgtgacaggcacagtgggactgacctttgcttctgggcctggattaccatgtctggagagtgatgctttggaggaagtatggrtcacttcgctcctgggccgtcggttcagaaggtgcagccttgcccggagctgaggtccagtgctagcagcacattccctttccttgccctgagcctgcat

SEQ ID NO: 395490 - DNA, 201 bp, Homo sapiens
acagagcagacaaggcagaggaaaaccagtcaagctctttatagcttaaatctaaccctttacctgaataataatttaaaaaactattttataaatcaagyctcccattcctgtaaaataggagtaattcattatcacacatttttgtacctttaatttttttttttcttgatggagcccaagtcttaaagatgtcaaaac

SEQ ID NO: 395491 - DNA, 201 bp, Homo sapiens
catccagttgacacctttcaataaaaattgcagattaataataaatgatagaagttcatgctttttccttctggtgaagaccaacacatggccctgttttraagagcagaaagctgcagagccactgccacgtcgcaggcaccatccaggatgtgtaggcgtctcagggatgttacggcactcagaggattggtttatttt

SEQ ID NO: 395492 - DNA, 201 bp, Homo sapiens
tcctattctcatcaatatttcccacttaatatgatgaatattgtacattattattcttattttaattatctccttttgcattgcactagaaaaaatgtgtktgctgaaaattaggcacaaatcttgcttgctctgtgtacaagatctataaagattcacttagcagcttgcagggacggtttcctagaaggtaaaatattt

SEQ ID NO: 395493 - DNA, 201 bp, Homo sapiens
ggttaggatgtcttcaacttgcgatgggttcataggatcggaactccaccgtcagtcaaggagcacctgtgctgtctttatcggcatgaccgaggagacasggctgaggtagatggcatcaagagggtggctcctggtggaggtatgatgttctgggaaggcctctctgagtgcgatgtggtacgctgaggcccagaggga

SEQ ID NO: 395494 - DNA, 201 bp, Homo sapiens
gtgtacctcacagtttccttcatgctcctccctgatgataactccccctcatccatatgacacatctaatatatactacgtgtgtgtgtgtgtgtgtgtgtataattaattataattattattattttgagacaatgttttgctctgtggcccaggccagaatgcagtggtgtgatcacagttctctgcagtctcaacttc

SEQ ID NO: 395495 - DNA, 201 bp, Homo sapiens
tgtgtacctcacagtttccttcatgctcctccctgatgataactccccctcatccatatgacacatctaatatatactacgtgtgtgtgtgtgtgtgtgtgtataattaattataattattattattttgagacaatgttttgctctgtggcccaggccagaatgcagtggtgtgatcacagttctctgcagtctcaactt

SEQ ID NO: 395496 - DNA, 201 bp, Homo sapiens
ttgccatccctgcccttcccagctctacccagaacaaggaggcctcgcacactacctggtcatattttgacttcatgcatttaatgaaccaaactaaaggkaaatattttcttttgattcccaaggcagacttgtgggtacccaagttcctcagcccatctttaactcagtaggatgtggcatctccattgaggctcttca

SEQ ID NO: 395497 - DNA, 201 bp, Homo sapiens
cagcttctttgcttttttaggctttttgctagtgatagtgttgtctttgttctgtaaaacaactgtaaaggaataccaacaatctagtgcagaaattcttytgtaagaacaagctaccctgatgtcatgtcgtgttttaggactgtttgcttctcaacctgatgaagttgttcttagctgtttgctttgttttctcatcca

SEQ ID NO: 395498 - DNA, 201 bp, Homo sapiens
catcaactttttgttccccattgttgctactaattcttaggactaataaagcacttcaaatggcagctactgtcaaaaattaggaagaaggcttctttgcygtagcagcctccagttgattactttctcttgacctgtactttacttgccacgagcatatcatgcctctgtacttgctgcagtaattactgtctcgaaaca

SEQ ID NO: 395499 - DNA, 201 bp, Homo sapiens
cagcttctctgtaaccagaggttattgaaagaatgaggatcccagagttggaatgagtctgaaagagacgttgtggtttaatattgctaagttaagtgtcratttgtgactacctatttttaacatgccacagaagtaaaacattgcattaattatgccatatatgtgaaatagcaagtatttttatataatataactgtg

SEQ ID NO: 395500 - DNA, 201 bp, Homo sapiens
gggaacccctgaccctgggccctctgtgcaccgtgctgccaggtgcttgtgtccagggctggggatgccacaccctcgatgctttcctggactgacgggcrgtctcaggacagccaatctgtgcggccccctctgccctcacctcaagaggtcacagcattggcctgtttttgtttcctcagttaagctttggaaattgag

SEQ ID NO: 395501 - DNA, 201 bp, Homo sapiens
aaagcatgtgctgagaaagcaaaactgaagagctggaaattataaaatattacgacatgatgagtcatatctcctcctcctgattctgtgttactaaatgytagctgcgaatagaaatcgtgtatttcctttctttcataaaataagagctaatttcggcagcaaacagtttggcgtgttattcttttcccttttcagggt

SEQ ID NO: 395502 - DNA, 201 bp, Homo sapiens
aaataactcgctttttagcacttcgtttttactggtgatttgttagtcattgattgaggtgattgtgattgatccaattatttgtctgcccatcctgattrtaactttttttatttacaggattttaaaagatagtttcttgatcttaatgttatatttaacgttctctttcataagatggttttttgatgactttgtgtt

SEQ ID NO: 395503 - DNA, 201 bp, Homo sapiens
ccctctcaccctctgtgtgccctcagggatcgggctggccctggctgcggcagtgaggggctatcgctgcatcatcgtgatgccagagaagatgagctccragaaggtgggtgggcgtggccaggggcggggtcatagggcaggggatgagggtgcctgggccaggcggaaggtgcaggccaccgctttccctcctgcagg

SEQ ID NO: 395504 - DNA, 201 bp, Homo sapiens
tgagtggagaggtggcaatttttcagaacccacagacccccaagcccgtcccccaccctggggtgtatcaggtaatgggggggtgagcaggaatcaatggsggggtggtcagggggtcccctctgtgattcatctctgcctcccagtggccaagtgtgagttcttcaacgcgggcgggagcgtgaaggaccgcatcagcct

SEQ ID NO: 395505 - DNA, 201 bp, Homo sapiens
tttcagggcaaaatctccaaaaatcttgccagatattctgaagaaaatcggggacacccctatggtcagaatcaacaagattgggaagaagttcggcctgmagtgtgagctctgtgagtgccctggctttggagaggggcttcctccatctacactgggctccgtgggcctggggggtcctggggggtcctgggatggatc

SEQ ID NO: 395506 - DNA, 201 bp, Homo sapiens
tgggtgggcgtggccaggggcggggtcatagggcaggggatgagggtgcctgggccaggcggaaggtgcaggccaccgctttccctcctgcaggtggacgygctgcgggcactgggggctgagattgtgaggacgcccaccaatgccaggttcgactccccggagtcacacgtgggggtggcctggcggctgaagaacgaa

SEQ ID NO: 395507 - DNA, 201 bp, Homo sapiens
ggagacaggcattccctaggagggtctcggtcagggatgtgggggtgactgaggtgtcaggggtcagctcacgggctctgctctctttctatgcagtaccrcaacgccagcaaccccctggctcactacgacaccaccgctgatgagatcctgcagcagtgtgatggtgcgtccctctgtccatcttgattgcatttatcc

SEQ ID NO: 395508 - DNA, 201 bp, Homo sapiens
cctccatctacactgggctccgtgggcctggggggtcctggggggtcctgggatggatcccttaggcaaggccctgggatcagaaaactcgctggttaatragtggccaagaacatatcagcttaagtttgggaaaaacacacaacagggcattgtgtcagagggtgaccaaagtgactccccagcagatggaccagggaa

SEQ ID NO: 395509 - DNA, 201 bp, Homo sapiens
agccctgaagccgcgccctctgcagatcattggggtggatcccgaagggtccatcctcgcagagccggaggagctgaaccagacggagcagacaacctacraggtggaagggatcggctacgacttcatccccacggtgctggacaggacggtaggtcgagtccagagcccggccacagtgccggtgcagcctgtaactca

SEQ ID NO: 395510 - DNA, 201 bp, Homo sapiens
gcacgcgtggctggctcactgtgctccgtacaggatgacgtctaaacttggcggttgcccttgaagtaggttttggaatgcccgttttacagacagacacrccgagggtcaggttggtcacgtggcttgccggaggccaccagctctgatttctgcttcggagctggcccccaggcgctagtgagaatgatctaactgagg

SEQ ID NO: 395511 - DNA, 201 bp, Homo sapiens
taggtctgcaacatgtcagttttgaggggacacaatctagcccatagcactccccacccccaacacacacacaccgtgcacagagtgcctgttaggccggrtgtgatggctcacgcctgtaatcctagcactttgggaggccgaggcaggtggatcacctgagtcaggagttcgagaccagcctggccaacatggagtgcc

SEQ ID NO: 395512 - DNA, 201 bp, Homo sapiens
cggctctgtgctcatttgtcagacaatagggacccttaactcgtacgcagcacgcgtggctggctcactgtgctccgtacaggatgacgtctaaacttggyggttgcccttgaagtaggttttggaatgcccgttttacagacagacacaccgagggtcaggttggtcacgtggcttgccggaggccaccagctctgattt

SEQ ID NO: 395513 - DNA, 201 bp, Homo sapiens; identical to SEQ ID NO: 86900

SEQ ID NO: 395514 - DNA, 201 bp, Homo sapiens
ccggctctgtgctcatttgtcagacaatagggacccttaactcgtacgcagcacgcgtggctggctcactgtgctccgtacaggatgacgtctaaacttgrcggttgcccttgaagtaggttttggaatgcccgttttacagacagacacaccgagggtcaggttggtcacgtggcttgccggaggccaccagctctgatt

SEQ ID NO: 395515 - DNA, 201 bp, Homo sapiens
ggtgttaggggagtgggtggtgccgaccttcagtgacacccagtctttatgcccgggcctcccacatgccctgggctggtgggctgtacctgtgattcctrcagggacccctcatcaggccacactgggtagggccctttgtccagcatgcagaggctcaggagtccaggccccttgcctccggggaggccagcagtcttg

SEQ ID NO: 395516 - DNA, 201 bp, Homo sapiens
agagccctggtagacctcagcatcgtcacagagaaagctgtgggtgcagaggccttggggacaaggcggggacggaatttcgtatttcagatgaccaaggycaagtgagttcggagggaggcaggaagggtgccgcggagaaccccgcgacagggccagatggagggggtggagttcgagtgggaaggagagggaaccagt

SEQ ID NO: 395517 - DNA, 201 bp, Homo sapiens; identical to SEQ ID NO: 87140

SEQ ID NO: 395518 - DNA, 201 bp, Homo sapiens
caccgaggcccagtgctgagtcagcacacctgctgcagggaggcgggactcttcccgcctggctggccagatgcccgaactgaattaatgaactaatcccmggcgctgtcaccctggggcttggctttccacctggccctggctctctacacctgccaagcctggttcccttctgccgagaactgcttctgagggaacctc

SEQ ID NO: 395519 - DNA, 201 bp, Homo sapiens
aaatgtcatctccagtaaagcctttctgaaaaggtggacctaaacctttgttttggagtcagtatttgcttattttaacttttttatttggaaataatttrctactcacaataagtggcaaaaataatagatcctttgtacccttctcccagcttcccactaacaacatctgccacgactgtaggttcattttcaaacctg

SEQ ID NO: 395520 - DNA, 201 bp, Homo sapiens; identical to SEQ ID NO: 86833

SEQ ID NO: 395521 - DNA, 201 bp, Homo sapiens
atagaggggcgttcgagagtcccaggtgcctcatcgtggaagtggaatcacacagtatttgtccttttgtgtctggctcatttcgcttggcataatgtcckgaaggttcgtccgtgttgtagcgtgtgccagaattcatttctcttagggctgagtaatattctagtgtgtgtatgagcctactgtgtgtgttcatccgtc

SEQ ID NO: 395522 - DNA, 201 bp, Homo sapiens
aaggctctgagggaggccctggccacctttcccagccctgtggaggccgccagccatccctgccatttctcgtctggtggcagcacatctcatctctgcckccatctccacatggcctttttctctccgcgtgtctgtgtccacgtctctcttcttataaagactggacaggatttttttttttttttttttttttttttt

SEQ ID NO: 395523 - DNA, 201 bp, Homo sapiens
acgtgctgcgggcactgggggctgagattgtgaggacgcccaccaatgccaggttcgactccccggagtcacacgtgggggtggcctggcggctgaagaaygaaatccccaattctcacatcctagaccaggtgaggcacctggggcctggagacaggcattccctaggagggtctcggtcagggatgtgggggtgactga

SEQ ID NO: 395524 - DNA, 201 bp, Homo sapiens
tggacatttaattctaattcacgtctcactccctcccctactgtgagccccacgtggcagagaccgcggcggagctgcgcgggccggaggaggctgcggarcatcgctctgacctgagccggggacgctgcggaggcgcagcacgttcctctgcccagagctgatgggcaccgtccgtgtctttcgctgcaggtccggggg

SEQ ID NO: 395525 - DNA, 201 bp, Homo sapiens
ccaggcggaaggtgcaggccaccgctttccctcctgcaggtggacgtgctgcgggcactgggggctgagattgtgaggacgcccaccaatgccaggttcgwctccccggagtcacacgtgggggtggcctggcggctgaagaacgaaatccccaattctcacatcctagaccaggtgaggcacctggggcctggagacagg

SEQ ID NO: 395526 - DNA, 201 bp, Homo sapiens
caggggatgagggtgcctgggccaggcggaaggtgcaggccaccgctttccctcctgcaggtggacgtgctgcgggcactgggggctgagattgtgaggaygcccaccaatgccaggttcgactccccggagtcacacgtgggggtggcctggcggctgaagaacgaaatccccaattctcacatcctagaccaggtgagg

SEQ ID NO: 395527 - DNA, 201 bp, Homo sapiens
gtgactgaggtgtcaggggtcagctcacgggctctgctctctttctatgcagtaccgcaacgccagcaaccccctggctcactacgacaccaccgctgatragatcctgcagcagtgtgatggtgcgtccctctgtccatcttgattgcatttatccctggctgcctgggagtgtacacatctcttgccctctccttggtg

SEQ ID NO: 395528 - DNA, 201 bp, Homo sapiens
accgcctagacacggggtccaccatgaggctgttcaccctcttggtcacgtgggagcggctcccacgctgacgggctgtggtggggtcctgctcaggtggyggacaagtggttcaagagcaacgatgaggaggcgttcacctttgcccgcatgctgatcgcgcaagaggggctgctgtgcggtgagtgggtggcgggcacg

SEQ ID NO: 395529 - DNA, 201 bp, Homo sapiens
catgcgtgcacgtgcacaattcatgcatacgtgtgcacccacgcacgctcaccctggcgcgtctgactcgtggccctctctgcaggtggcagtgctggcarcacggtggcggtggccgtgaaggccgcgcaggagctgcaggagggccagcgctgcgtggtcattctgcccgactcagtgcggaactacatgtaagacacg

SEQ ID NO: 395530 - DNA, 201 bp, Homo sapiens
gggggccgggtcagcagggttcgctggaaccccacagcatccgagcctgaaccgacgcctctctccttgctttgccaggtcccagcatgccttctgagacyccccaggcagaagtggggcccacaggctgcccccaccgctcagggccacactcggcgaaggggagcctggagaaggggtccccagaggataaggaagcca

SEQ ID NO: 395531 - DNA, 201 bp, Homo sapiens
gcgtgcacgtgcacaattcatgcatacgtgtgcacccacgcacgctcaccctggcgcgtctgactcgtggccctctctgcaggtggcagtgctggcagcayggtggcggtggccgtgaaggccgcgcaggagctgcaggagggccagcgctgcgtggtcattctgcccgactcagtgcggaactacatgtaagacacggct

SEQ ID NO: 395532 - DNA, 201 bp, Homo sapiens
gtaggctcgtggcagaggacttccatgtgtggccagagagcgctcctccctggggcagctgagcgtgtgccccaccgtcctgggaggggtgaggtatgagygctgacccctgcctgcccccgtcccacagggtaatcctgggaatggtgacgcttgggaacatgctctcgtccctgcttgccgggaaggtgcagccgtcag

SEQ ID NO: 395533 - DNA, 201 bp, Homo sapiens
gtgcacgtgcacaattcatgcatacgtgtgcacccacgcacgctcaccctggcgcgtctgactcgtggccctctctgcaggtggcagtgctggcagcacgrtggcggtggccgtgaaggccgcgcaggagctgcaggagggccagcgctgcgtggtcattctgcccgactcagtgcggaactacatgtaagacacggcttc

SEQ ID NO: 395534 - DNA, 201 bp, Homo sapiens
ctcatcctgcctctgaggctgggaacaggccaccacccacaggcagatcattaacaggcagttgttaacggcggtattggccactcccataatagaatatygaggcatgtccaggcggggcttttgctggccttgagccctgaagccgcgccctctgcagatcattggggtggatcccgaagggtccatcctcgcagagcc

SEQ ID NO: 395535 - DNA, 201 bp, Homo sapiens
cttgccgggaaggtgcagccgtcagaccaagttggcaaagtcatctacaagcagttcaaacaggtacccagtcacctacaggcagctcaaacagatgcgcrgtcacctacaggcagctcaaacaggtgcccggtcacctacacgcagctcaaacaggtgcgcggtcacctacaggcagctcaaacaggtgagcggtcacct

SEQ ID NO: 395536 - DNA, 201 bp, Homo sapiens
aacaggtgcccggtcacctacacgcagctcaaacaggtgcgcggtcacctacaggcagctcaaacaggtgagcggtcacctacaggcagctcaaacaggtrcccggtcacctacaggcagctcaaacaggtgcgcggtcagctacaggcagctcaagcgggtgcgcggtcacctacaggcagctcaaacgggtgcccagtc

SEQ ID NO: 395537 - DNA, 201 bp, Homo sapiens
cacgtgcacaattcatgcatacgtgtgcacccacgcacgctcaccctggcgcgtctgactcgtggccctctctgcaggtggcagtgctggcagcacggtgscggtggccgtgaaggccgcgcaggagctgcaggagggccagcgctgcgtggtcattctgcccgactcagtgcggaactacatgtaagacacggcttccct

SEQ ID NO: 395538 - DNA, 201 bp, Homo sapiens
caggtgcccggtcacctacacgcagctcaaacaggtgcgcggtcacctacaggcagctcaaacaggtgagcggtcacctacaggcagctcaaacaggtacscggtcacctacaggcagctcaaacaggtgcgcggtcagctacaggcagctcaagcgggtgcgcggtcacctacaggcagctcaaacgggtgcccagtcac

SEQ ID NO: 395539 - DNA, 201 bp, Homo sapiens
caggagaggggctgggcaggcagtgcgtgccactcagcaggggcgggggcccggtggggccctgcggggactcggtgactcccccatcccgcaggaccaasttcctgagcgacaggtggatgctgcagaagggctttctgaaggaggaggacctcacggagaagaagccctggtaagaccgctcggccggagacccgctgc

SEQ ID NO: 395540 - DNA, 201 bp, Homo sapiens
gggcccagactggttcctgccgcgtgtaggctcgtggcagaggacttccatgtgtggccagagagcgctcctccctggggcagctgagcgtgtgccccacygtcctgggaggggtgaggtatgagcgctgacccctgcctgcccccgtcccacagggtaatcctgggaatggtgacgcttgggaacatgctctcgtccctg

SEQ ID NO: 395541 - DNA, 201 bp, Homo sapiens
caccacccagataaagccagttctttttttttttttttttttttttccagttcttcgagtgttgatttgtgtaagacaatgtctgccagggctggtactatttttttttttttttcctgaataattgtggactcctctgtttcagggcaaaatctccaaaaatcttgccagatattctgaagaaaatcggggacaccccta

SEQ ID NO: 395542 - DNA, 201 bp, Homo sapiens
tccaggagaggggctgggcaggcagtgcgtgccactcagcaggggcgggggcccggtggggccctgcggggactcggtgactcccccatcccgcaggaccragttcctgagcgacaggtggatgctgcagaagggctttctgaaggaggaggacctcacggagaagaagccctggtaagaccgctcggccggagacccgct

SEQ ID NO: 395543 - DNA, 201 bp, Homo sapiens
gagagcggtccctgtggcctcctgctgaggtgctgccggcgggggtgcgagagcgtttgtccttatcctgatccccccgacctgccctcttccctcaggtrgtggcacctccgtgttcaggagctgggcctgtcagccccgctgaccgtgctcccgaccatcacctgtgggcacaccatcgagatcctccgggagaagggc

SEQ ID NO: 395544 - DNA, 201 bp, Homo sapiens
tctgccagggctggtactatttttttttttttttcctgaataattgtggactcctctgtttcagggcaaaatctccaaaaatcttgccagatattctgaaraaaatcggggacacccctatggtcagaatcaacaagattgggaagaagttcggcctgaagtgtgagctctgtgagtgccctggctttggagaggggcttc

SEQ ID NO: 395545 - DNA, 201 bp, Homo sapiens
cgtgcacgtgcacaattcatgcatacgtgtgcacccacgcacgctcaccctggcgcgtctgactcgtggccctctctgcaggtggcagtgctggcagcacrgtggcggtggccgtgaaggccgcgcaggagctgcaggagggccagcgctgcgtggtcattctgcccgactcagtgcggaactacatgtaagacacggctt

SEQ ID NO: 395546 - DNA, 201 bp, Homo sapiens
gctcagtggggctggcgggcagttttgctgtctgcaaaacgtgttggaactggaaagtctgcagacgtgccgatcccagggggagaggctggggtgagacmtctggggtcctaccgcctagacacggggtccaccatgaggctgttcaccctcttggtcacgtgggagcggctcccacgctgacgggctgtggtggggtcc

SEQ ID NO: 395547 - DNA, 201 bp, Homo sapiens
ccagagagcgctcctccctggggcagctgagcgtgtgccccaccgtcctgggaggggtgaggtatgagcgctgacccctgcctgcccccgtcccacagggwaatcctgggaatggtgacgcttgggaacatgctctcgtccctgcttgccgggaaggtgcagccgtcagaccaagttggcaaagtcatctacaagcagttc

SEQ ID NO: 395548 - DNA, 201 bp, Homo sapiens
tttttttttttttttcctgaataattgtggactcctctgtttcagggcaaaatctccaaaaatcttgccagatattctgaagaaaatcggggacacccctwtggtcagaatcaacaagattgggaagaagttcggcctgaagtgtgagctctgtgagtgccctggctttggagaggggcttcctccatctacactgggctc

SEQ ID NO: 395549 - DNA, 201 bp, Homo sapiens
attaacaggcagttgttaacggcggtattggccactcccataatagaatatcgaggcatgtccaggcggggcttttgctggccttgagccctgaagccgckccctctgcagatcattggggtggatcccgaagggtccatcctcgcagagccggaggagctgaaccagacggagcagacaacctacgaggtggaagggatc

SEQ ID NO: 395550 - DNA, 201 bp, Homo sapiens
gagctccgagaaggtgggtgggcgtggccaggggcggggtcatagggcaggggatgagggtgcctgggccaggcggaaggtgcaggccaccgctttccctcctgcaggtggacgtgctgcgggcactgggggctgagattgtgaggacgcccaccaatgccaggttcgactccccggagtcacacgtgggggtggcctggc

SEQ ID NO: 395551 - DNA, 201 bp, Homo sapiens
cccagcactttgggaggtcgaggcgggtggatcacctgaggtcaggagttcaagaccagcctggccaacagggagaaaccccgtctctactaaaaataccaaaaaaaaaaaaaaaagtagccgatgtaatggtgcatgcctgtaatcccagctactcgggaggctgaggcaagagaattgcttgaacctgggaggtggagg

SEQ ID NO: 395552 - DNA, 201 bp, Homo sapiens
aggcaagagaattgcttgaacctgggaggtggaggttgcagtgagccgagatcacgccattgcactccagcctgggtgataagagcaaaaactccatctcaaaaaaaaaaaaaagaaaagaaaagcattttccagatgaatctgtcacgaaaggtgacttggtgcccataatcgttgggctctccctgtctcagtctccct

SEQ ID NO: 395553 - DNA, 201 bp, Homo sapiens
ggtggtcagggggtcccctctgtgattcatctctgcctcccagtggccaagtgtgagttcttcaacgcgggcgggagcgtgaaggaccgcatcagcctgcvgatgattgaggatgctgagcgcgacgggacgctgaagcccggggacacgattatcgagccgacatccgggaacaccggtgggtgccaggcccagaggggg

SEQ ID NO: 395554 - DNA, 201 bp, Homo sapiens
ggtacccggtcacctacaggcagctcaaacaggtgcgcggtcagctacaggcagctcaagcgggtgcgcggtcacctacaggcagctcaaacgggtgcccrgtcacctacaggcagctcaaacgggtgcccggtcacctacaggcagctcaaacgggtgcccggtcacctacaggcagctcaaacgggtgcgcggtcacct

SEQ ID NO: 395555 - DNA, 201 bp, Homo sapiens
tgtgattataccactgcactccagcctgggtgacagagcaagaccttgtctcaaaaaaaggggagaaaatattggagctctgtaagaaatgtaattacatracatgactaggctaggaataatagttgcttcatcataatcgtgtaaacactggatattaatctattctcaattataaaactgtcctgaaggaatccgaga

SEQ ID NO: 395556 - DNA, 201 bp, Homo sapiens
ctccagggctatccctgcaagtcacatcctttttcttgctaagcgctctgggcctggccctgatcacctctgcaaacttctcaggtaacttcacagccacygaggcccagtgctgagtcagcacacctgctgcagggaggcgggactcttcccgcctggctggccagatgcccgaactgaattaatgaactaatccccggc

SEQ ID NO: 395557 - DNA, 201 bp, Homo sapiens
tcggagggcccctgagaatagtggcgttgcggggaggtgctgcagaggtgggtcaggagttggaggttcattctaggacagtggcgtgtcctcccaggagmctcttgggctgtggaagtgggagtccttgagataaggggctccagggctatccctgcaagtcacatcctttttcttgctaagcgctctgggcctggccct

SEQ ID NO: 395558 - DNA, 201 bp, Homo sapiens
gcctgtgtcccaacctagcttcctttgaccagcattcggggccagtgccgatgctctcggggcgatggcacctggcagtgcctggcacacaagacgagcayccggagtctgctcttcctgtgcctgtgtacccggctgggcctggaggaaccagatctcctgtcctgcgccgctgcctcctcctccttgacgtgtaccttt

SEQ ID NO: 395559 - DNA, 201 bp, Homo sapiens
agacaagggtgcttgacacataagggaccagcagctcgtgacccgaaggagctggggctgggtgctcgctcaccggccagtgtcttggagaaccttcctgygctgagtggggggtcggagttccaactgggggcctctgaggatcagccaggagctctaagtcctctggtcctgagtctgcccctcaactggggcttgtgg

SEQ ID NO: 395560 - DNA, 201 bp, Homo sapiens
ccctacccatgccgagcctgccgggacccgggggggatggctgagctgcagccgcatgtgctggcccgcctggccgcctgctccctggcatcttgcaccckctgccggcctgtgtcccaacctagcttcctttgaccagcattcggggccagtgccgatgctctcggggcgatggcacctggcagtgcctggcacacaaga

SEQ ID NO: 395561 - DNA, 201 bp, Homo sapiens
cccctacccatgccgagcctgccgggacccgggggggatggctgagctgcagccgcatgtgctggcccgcctggccgcctgctccctggcatcttgcaccygctgccggcctgtgtcccaacctagcttcctttgaccagcattcggggccagtgccgatgctctcggggcgatggcacctggcagtgcctggcacacaag

SEQ ID NO: 395562 - DNA, 201 bp, Homo sapiens
ctgtgattcatctctgcctcccagtggccaagtgtgagttcttcaacgcgggcgggagcgtgaaggaccgcatcagcctgcggatgattgaggatgctgascgcgacgggacgctgaagcccggggacacgattatcgagccgacatccgggaacaccggtgggtgccaggcccagagggggtggccagggctggctgtcc

SEQ ID NO: 395563 - DNA, 201 bp, Homo sapiens
tggatcccgaagggtccatcctcgcagagccggaggagctgaaccagacggagcagacaacctacgaggtggaagggatcggctacgacttcatccccacrgtgctggacaggacggtaggtcgagtccagagcccggccacagtgccggtgcagcctgtaactcaccctcacactggggagcctggctgaccctgggccc

SEQ ID NO: 395564 - DNA, 201 bp, Homo sapiens
tggtcagggggtcccctctgtgattcatctctgcctcccagtggccaagtgtgagttcttcaacgcgggcgggagcgtgaaggaccgcatcagcctgcggrtgattgaggatgctgagcgcgacgggacgctgaagcccggggacacgattatcgagccgacatccgggaacaccggtgggtgccaggcccagagggggtg

SEQ ID NO: 395565 - DNA, 201 bp, Homo sapiens
ggtgggctttgcaggacccaccatcgcatcccctctcactccacagaaaactcgtggggccatgttccccctgccactgaccacgcttcccttgcagatcygcctcacggacacgctgggcaggctctcgcacatcctggagatggaccacttcgccctggtggtgcacgagcagatccagtgtgagtggggccctgctct

SEQ ID NO: 395566 - DNA, 201 bp, Homo sapiens
gggtggtcagggggtcccctctgtgattcatctctgcctcccagtggccaagtgtgagttcttcaacgcgggcgggagcgtgaaggaccgcatcagcctgyggatgattgaggatgctgagcgcgacgggacgctgaagcccggggacacgattatcgagccgacatccgggaacaccggtgggtgccaggcccagagggg

SEQ ID NO: 395567 - DNA, 201 bp, Homo sapiens
gggtcccctctgtgattcatctctgcctcccagtggccaagtgtgagttcttcaacgcgggcgggagcgtgaaggaccgcatcagcctgcggatgattgasgatgctgagcgcgacgggacgctgaagcccggggacacgattatcgagccgacatccgggaacaccggtgggtgccaggcccagagggggtggccagggc

SEQ ID NO: 395568 - DNA, 201 bp, Homo sapiens
acatggagataagatctacctcatgcagatgaatggagaagcaaaatgtggactatccgggcaacggacaatgattcagcttaaaaaggaatgaaaccacrccacgtgctacaacagcacaaaccctgcatgaccccacgaatcctgcgtgaccccacttatgtaaagaatctagaacagctgaactcagagaggcaacga

SEQ ID NO: 395569 - DNA, 201 bp, Homo sapiens
agacaggaaaggagcacaagcaagtttctggacatatggatgcaagtaagtttataggtgagcgccactccagcctgactggcagacggagaccctgtccrcccctcccctctaaaaacagtagagctctggtgagctgaacagtggtccttcaaagctaccaggccctaatctctgaaacctgtgaatgggccctctttg

SEQ ID NO: 395570 - DNA, 201 bp, Homo sapiens
tctatcagtggaaaagacaaatcaacaaaaatccctaccccagcatgaaactgaaatcaagctcactaagccttaggattatctttatttccttagtgtamtcttggaggagaacaaatagatcaaagaatgtgcttcttagatgtttgattccttttttttttttttttttttttgagacagagtctcgctgtcacccag

SEQ ID NO: 395571 - DNA, 201 bp, Homo sapiens
ttttctggtggcacagactgttcggtgaagaagccatcattttgtaagccctctacggggtagatagatgtttgcagttacctcattttacataactgcartagaagatacgacacattcatttagccaacaagtctttcctcagcgccatgtgcatttcgtgccctgctcaaggcgcagaagatctatcagtggaaaaga

SEQ ID NO: 395572 - DNA, 201 bp, Homo sapiens
ctatttttttttttttttcctgaataattgtggactcctctgtttcagggcaaaatctccaaaaatcttgccagatattctgaagaaaatcggggacaccyctatggtcagaatcaacaagattgggaagaagttcggcctgaagtgtgagctctgtgagtgccctggctttggagaggggcttcctccatctacactggg

SEQ ID NO: 395573 - DNA, 201 bp, Homo sapiens
cggagcagacaacctacgaggtggaagggatcggctacgacttcatccccacggtgctggacaggacggtaggtcgagtccagagcccggccacagtgccrgtgcagcctgtaactcaccctcacactggggagcctggctgaccctgggccccaaccagcttctccactgaaacagaagggcaagccccgcacgcatggt

SEQ ID NO: 395574 - DNA, 201 bp, Homo sapiens
atgagtgatgggctggccaggcagggacccaagaatgttatccgtccaccagggaagctggacatgctggtggcttcagtgggcacgggcggcaccatcabgggcattgccaggaagctgaaggagaagtgtcctggatgcagggtgagtggtgtggccgggccggagaggggcagtgcggagtggccccggcttctgagc

SEQ ID NO: 395575 - DNA, 201 bp, Homo sapiens
tgtgtttttgtgcagttcttcctgggcttctctgagggagcagagcacgcctcccagagggggccgggtcagcagggttcgctggaaccccacagcatccragcctgaaccgacgcctctctccttgctttgccaggtcccagcatgccttctgagaccccccaggcagaagtggggcccacaggctgcccccaccgctca

SEQ ID NO: 395576 - DNA, 201 bp, Homo sapiens
ccccaccgctcagggccacactcggcgaaggggagcctggagaaggggtccccagaggataaggaagccaaggagcccctgtggatccggcccgatgctcygagcaggtgcacctggcagctgggccggcctgcctccgagtccccacatcaccacactgccccgtaagtcctgcttttgatcacaagagggctgatccat

SEQ ID NO: 395577 - DNA, 201 bp, Homo sapiens
ccacccagcctcccacggcacctgcaaacccactgcctcgttctcccctcagaccacagcaccgggaagtccagtcagcggcagatggtgttcggggtggwcaccgccattgacttgctgaacttcgtggccgcccaggagcgggaccagaagtgaagtccggagcgctgggcggtgcggagcgggcccgccacccttgcc

SEQ ID NO: 395578 - DNA, 201 bp, Homo sapiens
ccccctcttaatctcacatttacttgtgtttgaacatctcagaaaaaaaaaaagatgcaaattccaatgtcagggtccccaaatcaagtcttcctggagcrtgtccacgcttgtcaccaccgtctgtggctgctttcaagcacgtcagggctgcgtgctcataacagagacggcacggcccccaagacctaaaataccacc

SEQ ID NO: 395579 - DNA, 201 bp, Homo sapiens
  misc_feature (1)...(201): n = A,T,C or G
gcctggcctctgccatgggcagcagctgggccccccatcccctgcggggtgttaggggagtgggtggtgccgaccttcagtgacacccagtctttatgccngggcctcccacatgccctgggctggtgggctgtacctgtgattcctgcagggacccctcatcaggccacactgggtagggccctttgtccagcatgcaga

SEQ ID NO: 395580 - DNA, 201 bp, Homo sapiens; identical to SEQ ID NO: 87196

SEQ ID NO: 395581 - DNA, 201 bp, Homo sapiens
gccgcgccctctgcagatcattggggtggatcccgaagggtccatcctcgcagagccggaggagctgaaccagacggagcagacaacctacgaggtggaarggatcggctacgacttcatccccacggtgctggacaggacggtaggtcgagtccagagcccggccacagtgccggtgcagcctgtaactcaccctcacac

SEQ ID NO: 395582 - DNA, 201 bp, Homo sapiens
gctgggatcacaggtgtgagccactgtgcccggccctgtaagcgggtttgaatttcatgcccacaccggctctgaagtcatgagtgcctcaggagctcagmcggtgggccagggaagggtgtgtcctgacctgcggtgggtggagcctggcctggggcccaggggactcacgtggtgggtagaacctggcctgggggctca

SEQ ID NO: 395583 - DNA, 201 bp, Homo sapiens; identical to SEQ ID NO: 86898

SEQ ID NO: 395584 - DNA, 201 bp, Homo sapiens
accctggcgcgtctgactcgtggccctctctgcaggtggcagtgctggcagcacggtggcggtggccgtgaaggccgcgcaggagctgcaggagggccagygctgcgtggtcattctgcccgactcagtgcggaactacatgtaagacacggcttccctcccaggtccctgctcctctccatcctgccacccttccctgga

SEQ ID NO: 395585 - DNA, 201 bp, Homo sapiens
aatacttggagcctgggttcttgggtttctcatcctgcctctgaggctgggaacaggccaccacccacaggcagatcattaacaggcagttgttaacggcrgtattggccactcccataatagaatatcgaggcatgtccaggcggggcttttgctggccttgagccctgaagccgcgccctctgcagatcattggggtgg

SEQ ID NO: 395586 - DNA, 201 bp, Homo sapiens
tgtggggcttcccagcctcttaatgctgtgaaaatcaatgcacactcgcagtgacagccctgacaggaggggcatgaaagacggtggctccctctctgtcyctcctgtcccttcctctctggtgtctgtccccctcactgctctggggtccgtgagctccaacgggtagccctggccacatggactgacgtcctcttgggc

SEQ ID NO: 395587 - DNA, 201 bp, Homo sapiens; identical to SEQ ID NO: 87142

SEQ ID NO: 395588 - DNA, 201 bp, Homo sapiens; identical to SEQ ID NO: 86975

SEQ ID NO: 395589 - DNA, 201 bp, Homo sapiens
gtactgaggttttcccaagagatccctttagagataagttgccaagaggttggcgccctggcttcctattgggaatccggtgttggcatgggctggagtayaccctcagtccgtgcccaggagccgggctgtaaggtccaggcatttggttgtttgggctttatgtgtgagaactctctcatttggcaaaaacagtcctgt

SEQ ID NO: 395590 - DNA, 201 bp, Homo sapiens; identical to SEQ ID NO: 86976

SEQ ID NO: 395591 - DNA, 201 bp, Homo sapiens; identical to SEQ ID NO: 86836

SEQ ID NO: 395592 - DNA, 201 bp, Homo sapiens; identical to SEQ ID NO: 86904

SEQ ID NO: 395593 - DNA, 201 bp, Homo sapiens; identical to SEQ ID NO: 86905

SEQ ID NO: 395594 - DNA, 201 bp, Homo sapiens
tccctcaggtggtggcacctccgtgttcaggagctgggcctgtcagccccgctgaccgtgctcccgaccatcacctgtgggcacaccatcgagatcctccrggagaagggcttcgaccaggcgcccgtggtggatgaggcggggtcagtctcagcccctgctcagagctcagtcctgggttctgtctgcccagctccaccc

SEQ ID NO: 395595 - DNA, 201 bp, Homo sapiens
accctggggtgtatcaggtaatgggggggtgagcaggaatcaatgggggggtggtcagggggtcccctctgtgattcatctctgcctcccagtggccaagygtgagttcttcaacgcgggcgggagcgtgaaggaccgcatcagcctgcggatgattgaggatgctgagcgcgacgggacgctgaagcccggggacacgat

SEQ ID NO: 395596 - DNA, 201 bp, Homo sapiens; identical to SEQ ID NO: 86849

SEQ ID NO: 395597 - DNA, 201 bp, Homo sapiens; identical to SEQ ID NO: 86851

SEQ ID NO: 395598 - DNA, 201 bp, Homo sapiens; identical to SEQ ID NO: 87100

SEQ ID NO: 395599 - DNA, 201 bp, Homo sapiens; identical to SEQ ID NO: 87103

SEQ ID NO: 395600 - DNA, 201 bp, Homo sapiens; identical to SEQ ID NO: 87104

SEQ ID NO: 395601 - DNA, 201 bp, Homo sapiens
ctggtggcttcagtgggcacgggcggcaccatcacgggcattgccaggaagctgaaggagaagtgtcctggatgcagggtgagtggtgtggccgggccggrgaggggcagtgcggagtggccccggcttctgagctgaaagctgtcattcctcacggtctgctcagcacgctgtctcccgcggtatttctgcgctgcctgg

SEQ ID NO: 395602 - DNA, 201 bp, Homo sapiens
cctgggatcccccatttagccatagggcggggggatcaggttcagcctctgaaagtccagagcacgatgtttgggaaacggccccgcccgcggcctccggsacctggcgaaggagccccgcggggcgcccctgctaccaccctgcgcggagtcggccccgtccccgagagcgcccggcagcccctggccgtgggccgcacc

SEQ ID NO: 395603 - DNA, 201 bp, Homo sapiens
gacctgccctcttccctcaggtggtggcacctccgtgttcaggagctgggcctgtcagccccgctgaccgtgctcccgaccatcacctgtgggcacaccaycgagatcctccgggagaagggcttcgaccaggcgcccgtggtggatgaggcggggtcagtctcagcccctgctcagagctcagtcctgggttctgtctgc

SEQ ID NO: 395604 - DNA, 201 bp, Homo sapiens
cccgacctgccctcttccctcaggtggtggcacctccgtgttcaggagctgggcctgtcagccccgctgaccgtgctcccgaccatcacctgtgggcacamcatcgagatcctccgggagaagggcttcgaccaggcgcccgtggtggatgaggcggggtcagtctcagcccctgctcagagctcagtcctgggttctgtc

SEQ ID NO: 395605 - DNA, 201 bp, Homo sapiens
  misc_feature (1)...(201): n = A,T,C or G
atccacgtatttcccacgttcggctgccactgcctcccgggtgggctttgcaggacccaccatcgcatcccctctcactccacagaaaactcgtggggccntgttccccctgccactgaccacgcttcccttgcagatccgcctcacggacacgctgggcaggctctcgcacatcctggagatggaccacttcgccctggt

SEQ ID NO: 395606 - DNA, 201 bp, Homo sapiens
ccctaggagggtctcggtcagggatgtgggggtgactgaggtgtcaggggtcagctcacgggctctgctctctttctatgcagtaccgcaacgccagcaavcccctggctcactacgacaccaccgctgatgagatcctgcagcagtgtgatggtgcgtccctctgtccatcttgattgcatttatccctggctgcctggg

SEQ ID NO: 395607 - DNA, 201 bp, Homo sapiens
tatcgagccgacatccgggaacaccggtgggtgccaggcccagagggggtggccagggctggctgtcccctacccatgccgagcctgccgggacccggggrggatggctgagctgcagccgcatgtgctggcccgcctggccgcctgctccctggcatcttgcacccgctgccggcctgtgtcccaacctagcttcctttg

SEQ ID NO: 395608 - DNA, 201 bp, Homo sapiens
gtggggtcctgctcaggtggtggacaagtggttcaagagcaacgatgaggaggcgttcacctttgcccgcatgctgatcgcgcaagaggggctgctgtgcrgtgagtgggtggcgggcacgggggtatggggaaggcagagatggctagggggcactggggatggctgggggcgcaccctcagtcagccaccgacctgcat

SEQ ID NO: 395609 - DNA, 201 bp, Homo sapiens
aatcaatgggggggtggtcagggggtcccctctgtgattcatctctgcctcccagtggccaagtgtgagttcttcaacgcgggcgggagcgtgaaggaccdcatcagcctgcggatgattgaggatgctgagcgcgacgggacgctgaagcccggggacacgattatcgagccgacatccgggaacaccggtgggtgccag

SEQ ID NO: 395610 - DNA, 201 bp, Homo sapiens
gaatcaatgggggggtggtcagggggtcccctctgtgattcatctctgcctcccagtggccaagtgtgagttcttcaacgcgggcgggagcgtgaaggacygcatcagcctgcggatgattgaggatgctgagcgcgacgggacgctgaagcccggggacacgattatcgagccgacatccgggaacaccggtgggtgcca

SEQ ID NO: 395611 - DNA, 201 bp, Homo sapiens; identical to SEQ ID NO: 87132

SEQ ID NO: 395612 - DNA, 201 bp, Homo sapiens; identical to SEQ ID NO: 87065

SEQ ID NO: 395613 - DNA, 201 bp, Homo sapiens; identical to SEQ ID NO: 87067

SEQ ID NO: 395614 - DNA, 201 bp, Homo sapiens; identical to SEQ ID NO: 87071

SEQ ID NO: 395615 - DNA, 201 bp, Homo sapiens
tcacatctggtgcccagggtcaagatgccctgtgcagggctcctgcccacccccgtcagtgcaagaacaccatctccccacatacttggccagcctgccaygtgtacctgtgcgtgtgagtgtgtgaggggcagagagcgagcatgagaggacgtgtttatctgagtgcctgagcgatggctgtgtgcatgctcacacacg

SEQ ID NO: 395616 - DNA, 201 bp, Homo sapiens
gccctggccacatggactgacgtcctcttgggccgggccctgtgccacctcctatccaccctgactccctctgctgcttcccccaaactccagattgggamcgagtgctgcccaggtggccccctaggacttgctgtgactgttttgcccagaggcccctcggacagtaacgccacagacctcgctggtcaccgggcagcc

SEQ ID NO: 395617 - DNA, 201 bp, Homo sapiens
ccctggcgcgtctgactcgtggccctctctgcaggtggcagtgctggcagcacggtggcggtggccgtgaaggccgcgcaggagctgcaggagggccagcrctgcgtggtcattctgcccgactcagtgcggaactacatgtaagacacggcttccctcccaggtccctgctcctctccatcctgccacccttccctggat

SEQ ID NO: 395618 - DNA, 201 bp, Homo sapiens
catacgtgtgcacccacgcacgctcaccctggcgcgtctgactcgtggccctctctgcaggtggcagtgctggcagcacggtggcggtggccgtgaaggcygcgcaggagctgcaggagggccagcgctgcgtggtcattctgcccgactcagtgcggaactacatgtaagacacggcttccctcccaggtccctgctcct

SEQ ID NO: 395619 - DNA, 201 bp, Homo sapiens
cggcacctgcaaacccactgcctcgttctcccctcagaccacagcaccgggaagtccagtcagcggcagatggtgttcggggtggtcaccgccattgactygctgaacttcgtggccgcccaggagcgggaccagaagtgaagtccggagcgctgggcggtgcggagcgggcccgccacccttgcccacttctccttcgct

SEQ ID NO: 395620 - DNA, 201 bp, Homo sapiens
caaacctaggagtgaattcgacttctttcccatctcacacacacacccgagacgtcacccgaatccacgtatttcccacgttcggctgccactgcctcccrggtgggctttgcaggacccaccatcgcatcccctctcactccacagaaaactcgtggggccatgttccccctgccactgaccacgcttcccttgcagatc

SEQ ID NO: 395621 - DNA, 201 bp, Homo sapiens
tgggtcctcgaccctcaacaccacttaggccgaagctggctgcacccctcaaaccatgaagctgagaagcacccactttacaagtgcagcagccggagagsaggctctcatcagtgcaggctcatccacaccagccgtgttttggggacttaaggaggtcattcgcgctcagaggctgtcccgggcaccatgcggcgtctg

SEQ ID NO: 395622 - DNA, 201 bp, Homo sapiens
gggctggtactatttttttttttttttcctgaataattgtggactcctctgtttcagggcaaaatctccaaaaatcttgccagatattctgaagaaaatcrgggacacccctatggtcagaatcaacaagattgggaagaagttcggcctgaagtgtgagctctgtgagtgccctggctttggagaggggcttcctccatc

SEQ ID NO: 395623 - DNA, 201 bp, Homo sapiens
tccccagaggataaggaagccaaggagcccctgtggatccggcccgatgctccgagcaggtgcacctggcagctgggccggcctgcctccgagtccccacrtcaccacactgccccgtaagtcctgcttttgatcacaagagggctgatccataacctggagggcaggagtttgttacctggacaccacacagccaggagg

SEQ ID NO: 395624 - DNA, 201 bp, Homo sapiens
tgtttcagggcaaaatctccaaaaatcttgccagatattctgaagaaaatcggggacacccctatggtcagaatcaacaagattgggaagaagttcggccygaagtgtgagctctgtgagtgccctggctttggagaggggcttcctccatctacactgggctccgtgggcctggggggtcctggggggtcctgggatgga

SEQ ID NO: 395625 - DNA, 201 bp, Homo sapiens
atacgtgtgcacccacgcacgctcaccctggcgcgtctgactcgtggccctctctgcaggtggcagtgctggcagcacggtggcggtggccgtgaaggccrcgcaggagctgcaggagggccagcgctgcgtggtcattctgcccgactcagtgcggaactacatgtaagacacggcttccctcccaggtccctgctcctc

SEQ ID NO: 395626 - DNA, 201 bp, Homo sapiens
ccgtgcccctctgcccacctgcttgggggtggacagaccaggtggccgctggcaatgccactgactagccacacaggcagcagaggccctgtagggaccayagttgatctagacctctggggactcggagagcacacaccagcttctaaaacgcaggcagggacatgtgaggtttctacatgtgcattccgtgtgtcatgt

SEQ ID NO: 395627 - DNA, 201 bp, Homo sapiens
tcactgcccagcaatgccctttgtccccaaaggctctgctgctccgccgcagggtggtctgtctggactgtcctgggggccccgctccgagaagcaccccrgggaggtcagttcctcccaggcacctgcctttacttctgagcgccctgcactgaacatttaggtcattaccgctttaatacttggagcctgggttcttgg

SEQ ID NO: 395628 - DNA, 201 bp, Homo sapiens
gacaagggtgcttgacacataagggaccagcagctcgtgacccgaaggagctggggctgggtgctcgctcaccggccagtgtcttggagaaccttcctgcrctgagtggggggtcggagttccaactgggggcctctgaggatcagccaggagctctaagtcctctggtcctgagtctgcccctcaactggggcttgtggg

SEQ ID NO: 395629 - DNA, 201 bp, Homo sapiens
cgcttgttggccatgggggcgggaagtccagcccccaggcttccccctggggcttccagccagcacttgggggtctctgctgcaccagtgaggtccaggaraggggctgggcaggcagtgcgtgccactcagcaggggcgggggcccggtggggccctgcggggactcggtgactcccccatcccgcaggaccaagttcct

SEQ ID NO: 395630 - DNA, 201 bp, Homo sapiens
ggtcagggatgtgggggtgactgaggtgtcaggggtcagctcacgggctctgctctctttctatgcagtaccgcaacgccagcaaccccctggctcactaygacaccaccgctgatgagatcctgcagcagtgtgatggtgcgtccctctgtccatcttgattgcatttatccctggctgcctgggagtgtacacatctct

SEQ ID NO: 395631 - DNA, 201 bp, Homo sapiens; identical to SEQ ID NO: 86948

SEQ ID NO: 395632 - DNA, 201 bp, Homo sapiens
ccgacatccgggaacaccggtgggtgccaggcccagagggggtggccagggctggctgtcccctacccatgccgagcctgccgggacccgggggggatggmtgagctgcagccgcatgtgctggcccgcctggccgcctgctccctggcatcttgcacccgctgccggcctgtgtcccaacctagcttcctttgaccagca

SEQ ID NO: 395633 - DNA, 201 bp, Homo sapiens
ttgaggatgctgagcgcgacgggacgctgaagcccggggacacgattatcgagccgacatccgggaacaccggtgggtgccaggcccagagggggtggccrgggctggctgtcccctacccatgccgagcctgccgggacccgggggggatggctgagctgcagccgcatgtgctggcccgcctggccgcctgctccctgg

SEQ ID NO: 395634 - DNA, 201 bp, Homo sapiens
agaggacttgcagtaaggaaggaagtgcaagtgaaggccttggccttgtgcgggaaccgcgcagggagcccttccccgggcaggtgacgccccacaggggraggaggacaatgggaggctgtagggagagtatgcgagtccccatccgatggggaagccagtgctgtggcttcaggacatcaagctgctttggcaggggcc

SEQ ID NO: 395635 - DNA, 201 bp, Homo sapiens
ctcgctcttaaaaactaaatatttttaagagctggagagggagagaggacttgcagtaaggaaggaagtgcaagtgaaggccttggccttgtgcgggaacygcgcagggagcccttccccgggcaggtgacgccccacagggggaggaggacaatgggaggctgtagggagagtatgcgagtccccatccgatggggaagc

SEQ ID NO: 395636 - DNA, 201 bp, Homo sapiens
cctggttctaggggcaacacctgtctggtggttgctttcagaaattttgaggtgctgcaggctggtcccaggtccctcaaatcacatttcatgcagcccaktctctcgctcttaaaaactaaatatttttaagagctggagagggagagaggacttgcagtaaggaaggaagtgcaagtgaaggccttggccttgtgcggg

SEQ ID NO: 395637 - DNA, 201 bp, Homo sapiens
cccatgttggtggagaaacaagcccctgcctttggggctggaaagcaggtccatgggccccgttacagaggagggtgcctctcttcctgtgggggctcctrctgcagacttagaccttcccgactgctgtgtgcaccctcaaactaagcccagagaagacgcctctgactctgacttcagggctcctagggacagctggtg

SEQ ID NO: 395638 - DNA, 201 bp, Homo sapiens
agtgccggtgcagcctgtaactcaccctcacactggggagcctggctgaccctgggccccaaccagcttctccactgaaacagaagggcaagccccgcacrcatggtgagaagctggtctcgaaggtcgagacaaagtagactgggggacgatgtccgcacacgtggcctgacctcaccaagggatgtagcccaggtggca

SEQ ID NO: 395639 - DNA, 201 bp, Homo sapiens
agaccgcagctgagctgtaggatgcaagcgggaggcggagcgtgggtgggagagcggagcgcgaaattctcggcttcccgaggatcttctgggcttacttstccccagctttgtcccaaagtgtcgcttccggaggcggagtggccggcggtttccgggtctcagtagggtctggatctcccacctggaaacctagaggag

SEQ ID NO: 395640 - DNA, 201 bp, Homo sapiens
ggggcgttcgagagtcccaggtgcctcatcgtggaagtggaatcacacagtatttgtccttttgtgtctggctcatttcgcttggcataatgtcctgaagkttcgtccgtgttgtagcgtgtgccagaattcatttctcttagggctgagtaatattctagtgtgtgtatgagcctactgtgtgtgttcatccgtctgcgg

SEQ ID NO: 395641 - DNA, 201 bp, Homo sapiens
cgaggcatgtccaggcggggcttttgctggccttgagccctgaagccgcgccctctgcagatcattggggtggatcccgaagggtccatcctcgcagagcyggaggagctgaaccagacggagcagacaacctacgaggtggaagggatcggctacgacttcatccccacggtgctggacaggacggtaggtcgagtccag

SEQ ID NO: 395642 - DNA, 201 bp, Homo sapiens
ttaacggcggtattggccactcccataatagaatatcgaggcatgtccaggcggggcttttgctggccttgagccctgaagccgcgccctctgcagatcaytggggtggatcccgaagggtccatcctcgcagagccggaggagctgaaccagacggagcagacaacctacgaggtggaagggatcggctacgacttcatc

SEQ ID NO: 395643 - DNA, 201 bp, Homo sapiens
ctgatgtcgtatatttgttactttatttattttcttttatttttatttttatttttattttttgagacggagtctcgctctgttgccaggctggagtgcartggcgcgatctcggctcactgacctccccctcccgggttcaagcgattctcctgcctcagcttcccgagtagctgggactacaggtgtgcgccaccatgc

SEQ ID NO: 395644 - DNA, 201 bp, Homo sapiens
tgagacggagtctcgctctgttgccaggctggagtgcagtggcgcgatctcggctcactgacctccccctcccgggttcaagcgattctcctgcctcagcytcccgagtagctgggactacaggtgtgcgccaccatgcttggctaatttttgtagttttagtagaaacggggtttcaccatgttggccaggatggtctcg

SEQ ID NO: 395645 - DNA, 201 bp, Homo sapiens
tcagggcaaaatctccaaaaatcttgccagatattctgaagaaaatcggggacacccctatggtcagaatcaacaagattgggaagaagttcggcctgaastgtgagctctgtgagtgccctggctttggagaggggcttcctccatctacactgggctccgtgggcctggggggtcctggggggtcctgggatggatccc

SEQ ID NO: 395646 - DNA, 201 bp, Homo sapiens
cactgacctccccctcccgggttcaagcgattctcctgcctcagcttcccgagtagctgggactacaggtgtgcgccaccatgcttggctaatttttgtakttttagtagaaacggggtttcaccatgttggccaggatggtctcgatctcttgacctcatgatccgcccgcctcggcctcccaaagtgctgggattacag

SEQ ID NO: 395647 - DNA, 201 bp, Homo sapiens
gttcttcaacgcgggcgggagcgtgaaggaccgcatcagcctgcggatgattgaggatgctgagcgcgacgggacgctgaagcccggggacacgattatcragccgacatccgggaacaccggtgggtgccaggcccagagggggtggccagggctggctgtcccctacccatgccgagcctgccgggacccgggggggat

SEQ ID NO: 395648 - DNA, 201 bp, Homo sapiens
gtgcgccaccatgcttggctaatttttgtagttttagtagaaacggggtttcaccatgttggccaggatggtctcgatctcttgacctcatgatccgcccrcctcggcctcccaaagtgctgggattacaggcgtgagccaccgcgcccggcctatttgttacaattaatgagccaattccacgatcacataaccattgtt

SEQ ID NO: 395649 - DNA, 201 bp, Homo sapiens
ttcaacgcgggcgggagcgtgaaggaccgcatcagcctgcggatgattgaggatgctgagcgcgacgggacgctgaagcccggggacacgattatcgagcygacatccgggaacaccggtgggtgccaggcccagagggggtggccagggctggctgtcccctacccatgccgagcctgccgggacccgggggggatggct

SEQ ID NO: 395650 - DNA, 201 bp, Homo sapiens
gggcgggagcgtgaaggaccgcatcagcctgcggatgattgaggatgctgagcgcgacgggacgctgaagcccggggacacgattatcgagccgacatccrggaacaccggtgggtgccaggcccagagggggtggccagggctggctgtcccctacccatgccgagcctgccgggacccgggggggatggctgagctgca

SEQ ID NO: 395651 - DNA, 201 bp, Homo sapiens
cgtgaaggaccgcatcagcctgcggatgattgaggatgctgagcgcgacgggacgctgaagcccggggacacgattatcgagccgacatccgggaacaccrgtgggtgccaggcccagagggggtggccagggctggctgtcccctacccatgccgagcctgccgggacccgggggggatggctgagctgcagccgcatgt

SEQ ID NO: 395652 - DNA, 201 bp, Homo sapiens
gtgccctcagggatcgggctggccctggctgcggcagtgaggggctatcgctgcatcatcgtgatgccagagaagatgagctccgagaaggtgggtgggcrtggccaggggcggggtcatagggcaggggatgagggtgcctgggccaggcggaaggtgcaggccaccgctttccctcctgcaggtggacgtgctgcgggc

SEQ ID NO: 395653 - DNA, 201 bp, Homo sapiens
aggcaggggcggggcagggcttggggggtcactgggcccctctcaccctctgtgtgccctcagggatcgggctggccctggctgcggcagtgaggggctaycgctgcatcatcgtgatgccagagaagatgagctccgagaaggtgggtgggcgtggccaggggcggggtcatagggcaggggatgagggtgcctgggcca

SEQ ID NO: 395654 - DNA, 201 bp, Homo sapiens
gggaaccggcatcggggtgtgcccctgtgtcccaggcaggggcggggcagggcttggggggtcactgggcccctctcaccctctgtgtgccctcagggatsgggctggccctggctgcggcagtgaggggctatcgctgcatcatcgtgatgccagagaagatgagctccgagaaggtgggtgggcgtggccaggggcggg

SEQ ID NO: 395655 - DNA, 201 bp, Homo sapiens
ggcatcggggtgtgcccctgtgtcccaggcaggggcggggcagggcttggggggtcactgggcccctctcaccctctgtgtgccctcagggatcgggctgrccctggctgcggcagtgaggggctatcgctgcatcatcgtgatgccagagaagatgagctccgagaaggtgggtgggcgtggccaggggcggggtcatag

SEQ ID NO: 395656 - DNA, 201 bp, Homo sapiens
gcgcgacgggacgctgaagcccggggacacgattatcgagccgacatccgggaacaccggtgggtgccaggcccagagggggtggccagggctggctgtcmcctacccatgccgagcctgccgggacccgggggggatggctgagctgcagccgcatgtgctggcccgcctggccgcctgctccctggcatcttgcacccg

SEQ ID NO: 395657 - DNA, 201 bp, Homo sapiens; identical to SEQ ID NO: 87274

SEQ ID NO: 395658 - DNA, 201 bp, Homo sapiens
  misc_feature (1)...(201): n = A,T,C or G
gtaatgtgagggtcccctttagaaccaaaccccacatgttgcaggggccccggcccagggtggccagtggacgaagagttagctgcctgtggggatggggntttccagagccgctgcggtttggggaatgtcaacacacaacccggagaggagaggctcacctgtccccacccgcctgtccccgcctgtcttccaggttac

SEQ ID NO: 395659 - DNA, 201 bp, Homo sapiens
tgtgtacatggtgtgtgtgtatgtgggtgtgcttgtgtgtacatggcatgcatgtgtgcatgtgggatgcatgtgtatggggcatgtgtgcatggcgtgtrtgcacatgtctgggcatgcatgcgtgtgtcatgggcatgcatgtgtgtgtatgcggtgtgttgctctgcaggccccagtgttggccggcccccccgtctt

SEQ ID NO: 395660 - DNA, 201 bp, Homo sapiens; identical to SEQ ID NO: 87275

SEQ ID NO: 395661 - DNA, 201 bp, Homo sapiens
cggggccaccacagcagagggagggtgggggcagcacaggcggccaggtcacctgccgccctgtgaggggaagaggagtgtgttgggcttggctgtctgayaccgagtttgaaaaggtctttctttgggtgcatggctccccccagctgaagaatcacacaccaggggaagccaccagcgccccagtgccatgaagagtgg

SEQ ID NO: 395662 - DNA, 201 bp, Homo sapiens
ggggtccctgagttcactgggaggacgcgtccacccggctgtgctgattgtttacacagacaccacctggttgattttctctgaacagtgtgaaaatgackcagaaggctggggccatgcactaagctagtggccgcgggttcatacccatgggcccaaaagaacagctgtgacctccttgccgctctatgtttggacatg

SEQ ID NO: 395663 - DNA, 201 bp, Homo sapiens
gcccccaggtgcaccccccagatgccgcactgtgcctggagcgtggctcctgatggcagtctcaggacctttgcgccacacgtcctcccgtgcgacggctsctggggaaagccaaaggcgtcccttccagcgggagccagcgactggtacgcaggagggccctcaggggcaggagccatggagccctcctctggtgtggga

SEQ ID NO: 395664 - DNA, 201 bp, Homo sapiens
gactgcagagtcagctgaccctggagcagggtccagattctgctatggacacgtgctgggtggcgatgcagcacatgtgtgtgtgtgtgtgtgtgtgtgtgcgcgcgcgtgctgcccgatctgaggcaaccgtgcggtggagacagtttctacgagagttacagaaaagccaacgtacagaggggccagctcctcctcgct

SEQ ID NO: 395665 - DNA, 201 bp, Homo sapiens
tgggtgtgagggacggggcggagtgtgggtgtgagggacggggcggagtgtgggtgtgagggacggggctttcgtgtggacggggacctggagtcctgggygtcgctcgggcagagcctgcacagcatatcagggtgtaggcctgggtggcctcgcctctgagaggggttgtgttgactcagcttggctgctttgaggctg

SEQ ID NO: 395666 - DNA, 201 bp, Homo sapiens
ggactgcagagtcagctgaccctggagcagggtccagattctgctatggacacgtgctgggtggcgatgcagcacatgtgtgtgtgtgtgtgtgtgtgtgtgcgcgcgcgtgctgcccgatctgaggcaaccgtgcggtggagacagtttctacgagagttacagaaaagccaacgtacagaggggccagctcctcctcgc

SEQ ID NO: 395667 - DNA, 201 bp, Homo sapiens
gtgcacgtgtgtgtgtgcacatgtgcatgtgcgtctgtgtgcatgtgtgtccatgggcgtgtgggcatgggtgtgcacgcatgtgtgcatgtgtgtgcgtrtgtgtgcacgtgtttgcacatgtgtgtgcatgtgtgtgtgtgtgtgtgtgcacatgtgtgtgaagagctattgtaaggcggtggcttgagctgtgtgggg

SEQ ID NO: 395668 - DNA, 201 bp, Homo sapiens
tttttgagacggagtctcactctgtcacccaggctggagtgcagtggcgtgatcttggctcactgcagcctcctcctcctcccaggttcacgccattctcmtgcctcagcctcccaggtagctgggactacaggcgcccgccaccacaccaggcaaatttttctgtatttttagtagagacagggtttcaccatgttagcc

SEQ ID NO: 395669 - DNA, 201 bp, Homo sapiens
ccatgggcgtgtgggcatgggtgtgcacgcatgtgtgcatgtgtgtgcgtatgtgtgcacgtgtttgcacatgtgtgtgcatgtgtgtgtgtgtgtgtgtkcacatgtgtgtgaagagctattgtaaggcggtggcttgagctgtgtgggggctcctgggcatgtttgggatttgcagggccagctgttgggaagggcagg

SEQ ID NO: 395670 - DNA, 201 bp, Homo sapiens
ctcacacctataatcccagtactttaggaggccgaggtggggggatcacttgagcctgggagtttgagaccaccgtgggcaacatagcaagactccagctytacaagaaaaaaaaaaaaaagctggctatgtgactcacatctgtagtcccacctacttgggaaggtgaagtgggaggatcacctgatcccaggaggtgga

SEQ ID NO: 395671 - DNA, 201 bp, Homo sapiens
tccatgggcgtgtgggcatgggtgtgcacgcatgtgtgcatgtgtgtgcgtatgtgtgcacgtgtttgcacatgtgtgtgcatgtgtgtgtgtgtgtgtgtgcacatgtgtgtgaagagctattgtaaggcggtggcttgagctgtgtgggggctcctgggcatgtttgggatttgcagggccagctgttgggaagggcag

SEQ ID NO: 395672 - DNA, 201 bp, Homo sapiens
cctcaagtcaggagctgatttctatcctcaaatatttaagcatccccaagcccaggtgcggtggctcacacctataatcccagtactttaggaggccgagrtggggggatcacttgagcctgggagtttgagaccaccgtgggcaacatagcaagactccagctctacaagaaaaaaaaaaaaaagctggctatgtgactc

SEQ ID NO: 395673 - DNA, 201 bp, Homo sapiens
ggaaatcccctcctggcagcagtgggcacgtcgggtgttgtgagtgggccaggggcacagcaagtctgtcctccctgcaggtggcctgtgagaagaccgtstctaccttgcaccacgttctgcagaggaccatccagtgtgcaaaaggtacggcggccgggctgcatgggctgcgtgggctcctggctcccgaagtgggtg

SEQ ID NO: 395674 - DNA, 201 bp, Homo sapiens
cgtctgtgtgcatgtgtgtccatgggcgtgtgggcatgggtgtgcacgcatgtgtgcatgtgtgtgcgtatgtgtgcacgtgtttgcacatgtgtgtgcawgtgtgtgtgtgtgtgtgtgcacatgtgtgtgaagagctattgtaaggcggtggcttgagctgtgtgggggctcctgggcatgtttgggatttgcagggcc

SEQ ID NO: 395675 - DNA, 201 bp, Homo sapiens
gtctgaggccagtagctgccctgtggggagaggcaagcctgtcctgtcactgtgcatcccgtccagatggacaggtagtagattcccgctggctgggtgayatccgtgtccttcatctgtcagcctctggagccgccgaggctgggtgccaggcactgccgcctgggacacatgtgacctccgtgctgcaggaccacagtg

SEQ ID NO: 395676 - DNA, 201 bp, Homo sapiens
tgggtgatagacaaacaaagtgtccgtacatacaatggagtattactcagtctggaaaaggaaggaaattctgacacactctgcaatgtggatggcgcttraggacatgatgcttagtgaaagtagccagacaccaaaaagggagactgttacacgatcccgctatctgaaatagctaggaaaggccagttcatcgaggta

SEQ ID NO: 395677 - DNA, 201 bp, Homo sapiens; identical to SEQ ID NO: 87278

SEQ ID NO: 395678 - DNA, 201 bp, Homo sapiens
ctcctgtgaccacactggggttccagtgcccaggggagggtgcaggcagggtgttgggaacgctgaccggggcaggacaggtgggtgggacactcaattasgtgacgggctgctacctggtacactgccatcctttgtcaactttctggttaaaaaaaaattgtatttgtatacatgtttattattattattatttttgag

SEQ ID NO: 395679 - DNA, 201 bp, Homo sapiens
aattagttacataaaatgcagtcgccccaggtgaggaccctaaatccagggcctggtgtactcgtaagaagaaggccttgtgaggccgtgtgaccacgagrtcgatcgatcgcagtgaagctgctccaggcagaggaccgctgacaccctggagaccaagacaacagctgcttcaaagcgagggtctgaggaccaggcata

SEQ ID NO: 395680 - DNA, 201 bp, Homo sapiens; identical to SEQ ID NO: 87284

SEQ ID NO: 395681 - DNA, 201 bp, Homo sapiens; identical to SEQ ID NO: 87287

SEQ ID NO: 395682 - DNA, 201 bp, Homo sapiens; identical to SEQ ID NO: 87290

SEQ ID NO: 395683 - DNA, 201 bp, Homo sapiens
atatgactcagtttttaataatgactctatgtaaaactgacctgcactattgcatctggcaatcgcgtggcccaatccatcttcaaagccagcaacagtcrttgagtccttcttttaacttccaatctctgatttttccttctgcccttcagcctgagaaaactctgcttttgaagggctcatgtcattcaattaaactct

SEQ ID NO: 395684 - DNA, 201 bp, Homo sapiens
gaagaagaagaagctgcccaatccagtttctcagaaagaaacatttaatagggacttcggaacagaagccatgtctgtgtctggggcccacccatcacccmcaagcctagggcttatgtaccgtaggggaggggtgcgtgtggttcagaagggatgtgctggacagttgaagcagacagcatcccagtcatttgccctaag

SEQ ID NO: 395685 - DNA, 201 bp, Homo sapiens
caccagaagaccctgtgaggtggctggctccatctggggcctgcaggcagccgcattctttcattctcctggtccgtcggtgcggagcagacctgagacasctgagggggcttggcggaggttgtatttctctgtctaggggcctcaatgccatgcccgttaggcaggtggactgtggctcaagcgccccacaggaagagg

SEQ ID NO: 395686 - DNA, 201 bp, Homo sapiens; identical to SEQ ID NO: 87294

SEQ ID NO: 395687 - DNA, 201 bp, Homo sapiens; identical to SEQ ID NO: 87298

SEQ ID NO: 395688 - DNA, 201 bp, Homo sapiens; identical to SEQ ID NO: 87300

SEQ ID NO: 395689 - DNA, 201 bp, Homo sapiens
tgttgtgtccttggtgacttgggggctgctgcagaggagtggcaccctgcagcatttcccacagtgtgaccacggcagtgacctgagggacggaaaggccrgagccgcccttcggggacagtaggtgggaggctgaggacaggggtccaggcaggtgtggagagccgtctttctgggcgttttgtctggatgtctgcctgc

SEQ ID NO: 395690 - DNA, 201 bp, Homo sapiens
gcgtctgtgtgcatgtgtgtccatgggcgtgtgggcatgggtgtgcacgcatgtgtgcatgtgtgtgcgtatgtgtgcacgtgtttgcacatgtgtgtgcrtgtgtgtgtgtgtgtgtgtgcacatgtgtgtgaagagctattgtaaggcggtggcttgagctgtgtgggggctcctgggcatgtttgggatttgcagggc

SEQ ID NO: 395691 - DNA, 201 bp, Homo sapiens
gggaagccaccagcgccccagtgccatgaagagtggagctgcccgcggagggggctggtgcctgtcacagcttagctctacctggccctgagccaggtctygagcccccccattcacgcaggggtgggggcgcctggactcttggaggcctgggatccctgacctgggcctgtccaaacttgggggtggcatctcactcga

SEQ ID NO: 395692 - DNA, 201 bp, Homo sapiens
ggtgaattaaaggcccagaagttgatgacgtcaagacgtcctttttggaagtgaggggagcagcacagctgtgagtctccaaactgggctgtgcagagatygtcccaagcacgtctgaggccagtagctgccctgtggggagaggcaagcctgtcctgtcactgtgcatcccgtccagatggacaggtagtagattcccgc

SEQ ID NO: 395693 - DNA, 201 bp, Homo sapiens
acatgtgcatgtgcgtctgtgtgcatgtgtgtccatgggcgtgtgggcatgggtgtgcacgcatgtgtgcatgtgtgtgcgtatgtgtgcacgtgtttgcrcatgtgtgtgcatgtgtgtgtgtgtgtgtgtgcacatgtgtgtgaagagctattgtaaggcggtggcttgagctgtgtgggggctcctgggcatgtttgg

SEQ ID NO: 395694 - DNA, 201 bp, Homo sapiens
agaagcaatgtgatgaccgaggggctgagatggctggagacccagcgagcctggaccagccttagtgggcacaggagggaatgggggacagagcctggaartggccttggggccagtgtttgccgcttctagctgcagttccaaggggacgtgtccccaaagtctagagctgctcttgcaagagtttgttcttgattttga

SEQ ID NO: 395695 - DNA, 201 bp, Homo sapiens
cacatgtgcatgtgcgtctgtgtgcatgtgtgtccatgggcgtgtgggcatgggtgtgcacgcatgtgtgcatgtgtgtgcgtatgtgtgcacgtgtttgyacatgtgtgtgcatgtgtgtgtgtgtgtgtgtgcacatgtgtgtgaagagctattgtaaggcggtggcttgagctgtgtgggggctcctgggcatgtttg

SEQ ID NO: 395696 - DNA, 201 bp, Homo sapiens
gtgtgtgcacatgtgcatgtgcgtctgtgtgcatgtgtgtccatgggcgtgtgggcatgggtgtgcacgcatgtgtgcatgtgtgtgcgtatgtgtgcacrtgtttgcacatgtgtgtgcatgtgtgtgtgtgtgtgtgtgcacatgtgtgtgaagagctattgtaaggcggtggcttgagctgtgtgggggctcctgggc

SEQ ID NO: 395697 - DNA, 201 bp, Homo sapiens
gtgtgtgtgtgcacatgtgcatgtgcgtctgtgtgcatgtgtgtccatgggcgtgtgggcatgggtgtgcacgcatgtgtgcatgtgtgtgcgtatgtgtgcacgtgtttgcacatgtgtgtgcatgtgtgtgtgtgtgtgtgtgcacatgtgtgtgaagagctattgtaaggcggtggcttgagctgtgtgggggctcct

SEQ ID NO: 395698 - DNA, 201 bp, Homo sapiens
cgtgtgtgtgtgcacatgtgcatgtgcgtctgtgtgcatgtgtgtccatgggcgtgtgggcatgggtgtgcacgcatgtgtgcatgtgtgtgcgtatgtgtgcacgtgtttgcacatgtgtgtgcatgtgtgtgtgtgtgtgtgtgcacatgtgtgtgaagagctattgtaaggcggtggcttgagctgtgtgggggctcc

SEQ ID NO: 395699 - DNA, 201 bp, Homo sapiens
ggtctcgtgagcctttctcgtgtgtcccatgggtaagcacacagctcagcggggacagaggagttttgttgcaactgtggcgctcagatccgtgacctccygtgctgcatgcagcagagttgcttgtggcctcggcaggtggttttgtcagctgagtccgaggacgcctggagtgtgtcttcttacaacaccgtccagagc

SEQ ID NO: 395700 - DNA, 201 bp, Homo sapiens
acgtgtgtgtgtgcacatgtgcatgtgcgtctgtgtgcatgtgtgtccatgggcgtgtgggcatgggtgtgcacgcatgtgtgcatgtgtgtgcgtatgtktgcacgtgtttgcacatgtgtgtgcatgtgtgtgtgtgtgtgtgtgcacatgtgtgtgaagagctattgtaaggcggtggcttgagctgtgtgggggctc

SEQ ID NO: 395701 - DNA, 201 bp, Homo sapiens
gaaattctgacacactctgcaatgtggatggcgcttgaggacatgatgcttagtgaaagtagccagacaccaaaaagggagactgttacacgatcccgctmtctgaaatagctaggaaaggccagttcatcgaggtagaaagcagacgaaggctcgtcgcggctgggaaaggccagttcatcgcggtagaaagcagacgga

SEQ ID NO: 395702 - DNA, 201 bp, Homo sapiens
gtgcacatgtgcatgtgcgtctgtgtgcatgtgtgtccatgggcgtgtgggcatgggtgtgcacgcatgtgtgcatgtgtgtgcgtatgtgtgcacgtgtktgcacatgtgtgtgcatgtgtgtgtgtgtgtgtgtgcacatgtgtgtgaagagctattgtaaggcggtggcttgagctgtgtgggggctcctgggcatgt

SEQ ID NO: 395703 - DNA, 201 bp, Homo sapiens
tgcacgtgtgtgtgtgcacatgtgcatgtgcgtctgtgtgcatgtgtgtccatgggcgtgtgggcatgggtgtgcacgcatgtgtgcatgtgtgtgcgtatgtgtgcacgtgtttgcacatgtgtgtgcatgtgtgtgtgtgtgtgtgtgcacatgtgtgtgaagagctattgtaaggcggtggcttgagctgtgtggggg

SEQ ID NO: 395704 - DNA, 201 bp, Homo sapiens
gtgtgcacgtgtgtgtgtgcacatgtgcatgtgcgtctgtgtgcatgtgtgtccatgggcgtgtgggcatgggtgtgcacgcatgtgtgcatgtgtgtgcgtatgtgtgcacgtgtttgcacatgtgtgtgcatgtgtgtgtgtgtgtgtgtgcacatgtgtgtgaagagctattgtaaggcggtggcttgagctgtgtgg

SEQ ID NO: 395705 - DNA, 201 bp, Homo sapiens
tgtgtgcacgtgtgtgtgtgcacatgtgcatgtgcgtctgtgtgcatgtgtgtccatgggcgtgtgggcatgggtgtgcacgcatgtgtgcatgtgtgtgcgtatgtgtgcacgtgtttgcacatgtgtgtgcatgtgtgtgtgtgtgtgtgtgcacatgtgtgtgaagagctattgtaaggcggtggcttgagctgtgtg

SEQ ID NO: 395706 - DNA, 201 bp, Homo sapiens
caaagaaaaagtggtgccgcttgcagacattatcacgcccaaccagtttgaggccgagtaagtcattttattttattttactttatttatttatttttcargatgggtctcgctcttgtcacccaggctggagtgcagtggcacgatcacagctcactgcaacctctgtctccggggttcaagcaattctcctgcctcagc

SEQ ID NO: 395707 - DNA, 201 bp, Homo sapiens
  misc_feature (1)...(201): n = A,T,C or G
gcaccgtggccgcctctgctcttcccagaggaaggtgttctttggggctgcaagaatgttttgggttcaatagcatgaaatttaagccttatccagcaccnggatgacacccccattttacagactctcagggatcaggtgggattcccaagacctcacaggtcacgatgaatggcctggctggaactggcttccacggac

SEQ ID NO: 395708 - DNA, 201 bp, Homo sapiens; identical to SEQ ID NO: 87279

SEQ ID NO: 395709 - DNA, 201 bp, Homo sapiens
gttgtggagagcccagcagcccgctgggctgaaccttggaccaagaaccagtctgtccttggctcccttgtgggtggggaaagatgaggtgtatcaggcarggtccagtccagaaacagaaaccagagcaacaatcgtagaggccgttgttcagccaggtattgagaaaatagagaaggcaaaaagggaacactggtgtcg

SEQ ID NO: 395710 - DNA, 201 bp, Homo sapiens
ggaagacaggacacctctgtcactattgggtgcgctggggaaggaagagttcagaggtcaggacctgcaggtggctctccctgtgctgtctttgccgggcygcttaaggggccacgtgtcccccggggtacacctcctccccaacaagtcagtttcagctgagtgtcctggtgtgtaaaatggaagaggtggactgaggcc

SEQ ID NO: 395711 - DNA, 201 bp, Homo sapiens
aaaaaaaaaaaaagtaaaaaataaacatgtatggaagtacaatgtatttttaaccagaaagttgacagagaataccgatgcactaggtagaccctgttttwaaaaaaaaaaaatcccctgctctgcaaagtggcctcttcttcagagatgtggcatcactggagggttctcttggggaaatggttaaaacacctggtgttg

SEQ ID NO: 395712 - DNA, 201 bp, Homo sapiens
gggagcactccgtggtgggcttccctccgcgccccctggcgtgcttccctcacggtgactcagcctctcctcctgtctcctttgttggccagtacgtcccrgaggacctccttcccgtctacaaagaaaaagtggtgccgcttgcagacattatcacgcccaaccagtttgaggccgagtaagtcattttattttatttta

SEQ ID NO: 395713 - DNA, 201 bp, Homo sapiens
gtaagcctgccgtgtttaattggtggtgcagggcagtggaaaagtgccagctggcaccccgaggaggcctcactgccaggccgcccaaggtcacattctgrgtttggccagcccagggttgtggagtcggggagcgagttccccgtgcttccccagcacctttgactctgaggcatcactgagtgatgattggctgactct

SEQ ID NO: 395714 - DNA, 201 bp, Homo sapiens
gggttatgtatgagtttgctggattgaaaataccatatgcagccttagggtcatgtaggagtttgcccggactgccaaaacaaagtaccacaaaccaggtkgctcattgtagcagaaattcacctctcatagtctgggggccagaagtctgagaccagggtgtgggcagggccatgctccctccatacaagggtccttccc

SEQ ID NO: 395715 - DNA, 201 bp, Homo sapiens
tgactgaacagtctgtaccagtcggggcctccagagatcagcaggatatatgtgtgtgtgtacatgtgtggacatgtttgtgcatgtgtgtgtgtgtgtgtgcatgtgtgcgtgtgtgcgcgcgtattgtgtgtgggtgtgtgtgtggatgtgtgcgtgtgtgcgcgcacccatgtgtgcatgtgtgcacgtgtgtgtgtg

SEQ ID NO: 395716 - DNA, 201 bp, Homo sapiens; identical to SEQ ID NO: 87303

SEQ ID NO: 395717 - DNA, 201 bp, Homo sapiens
agcggagggctgagcgctctgcgggcccctgcgggtgggacgggtccggcgtcggggtacgcgggtaggagggagccctgtgcaccagctatggcgcagcygctcgtcctcgccccttcccgccgaccgggccaactgccgcgggggcgggcgggcggtgcggctcccggaggcgaggaaatgtcgcagagccccgaggag

SEQ ID NO: 395718 - DNA, 201 bp, Homo sapiens
tcctctttcctcattctggtttcctaaagtggtcagaggtctctgcaaaataagctaaagggagggttctgctgggtgggtggcttcggcttctgtgcagsgctcaccctgctctcccctggaacgcctggaactagggtggtcaggctggggtggaggagctcccctggaatgttccagagcttcccccactcctgccgt

SEQ ID NO: 395719 - DNA, 201 bp, Homo sapiens
tgtgcatgtgtgcacgtgtgtgtgtgcacatgtgcatgtgcgtctgtgtgcatgtgtgtccatgggcgtgtgggcatgggtgtgcacgcatgtgtgcatgygtgtgcgtatgtgtgcacgtgtttgcacatgtgtgtgcatgtgtgtgtgtgtgtgtgtgcacatgtgtgtgaagagctattgtaaggcggtggcttgagc

SEQ ID NO: 395720 - DNA, 201 bp, Homo sapiens
atgtgtgcatgtgtgcacgtgtgtgtgtgcacatgtgcatgtgcgtctgtgtgcatgtgtgtccatgggcgtgtgggcatgggtgtgcacgcatgtgtgcrtgtgtgtgcgtatgtgtgcacgtgtttgcacatgtgtgtgcatgtgtgtgtgtgtgtgtgtgcacatgtgtgtgaagagctattgtaaggcggtggcttg

SEQ ID NO: 395721 - DNA, 201 bp, Homo sapiens
catgtgtgcatgtgtgcacgtgtgtgtgtgcacatgtgcatgtgcgtctgtgtgcatgtgtgtccatgggcgtgtgggcatgggtgtgcacgcatgtgtgcatgtgtgtgcgtatgtgtgcacgtgtttgcacatgtgtgtgcatgtgtgtgtgtgtgtgtgtgcacatgtgtgtgaagagctattgtaaggcggtggctt

SEQ ID NO: 395722 - DNA, 201 bp, Homo sapiens
gcatgtgtgcgtgtgtgcgcgcgtattgtgtgtgggtgtgtgtgtggatgtgtgcgtgtgtgcgcgcacccatgtgtgcatgtgtgcacgtgtgtgtgtgsacatgtgcatgtgcgtctgtgtgcatgtgtgtccatgggcgtgtgggcatgggtgtgcacgcatgtgtgcatgtgtgtgcgtatgtgtgcacgtgtttgc

SEQ ID NO: 395723 - DNA, 201 bp, Homo sapiens
atgtgtggacatgtttgtgcatgtgtgtgtgtgtgtgtgcatgtgtgcgtgtgtgcgcgcgtattgtgtgtgggtgtgtgtgtggatgtgtgcgtgtgtgygcgcacccatgtgtgcatgtgtgcacgtgtgtgtgtgcacatgtgcatgtgcgtctgtgtgcatgtgtgtccatgggcgtgtgggcatgggtgtgcacgc

SEQ ID NO: 395724 - DNA, 201 bp, Homo sapiens
tatatgtgtgtgtgtacatgtgtggacatgtttgtgcatgtgtgtgtgtgtgtgtgcatgtgtgcgtgtgtgcgcgcgtattgtgtgtgggtgtgtgtgtggatgtgtgcgtgtgtgcgcgcacccatgtgtgcatgtgtgcacgtgtgtgtgtgcacatgtgcatgtgcgtctgtgtgcatgtgtgtccatgggcgtgtg

SEQ ID NO: 395725 - DNA, 201 bp, Homo sapiens
gactgaacagtctgtaccagtcggggcctccagagatcagcaggatatatgtgtgtgtgtacatgtgtggacatgtttgtgcatgtgtgtgtgtgtgtgtgcatgtgtgcgtgtgtgcgcgcgtattgtgtgtgggtgtgtgtgtggatgtgtgcgtgtgtgcgcgcacccatgtgtgcatgtgtgcacgtgtgtgtgtgc

SEQ ID NO: 395726 - DNA, 201 bp, Homo sapiens
acgggagacaggctgcctgagtggcaccactgtgtcatttctccccagcagtgactgaacagtctgtaccagtcggggcctccagagatcagcaggatatrtgtgtgtgtgtacatgtgtggacatgtttgtgcatgtgtgtgtgtgtgtgtgcatgtgtgcgtgtgtgcgcgcgtattgtgtgtgggtgtgtgtgtggat

SEQ ID NO: 395727 - DNA, 201 bp, Homo sapiens
gtggagaccagagctcagtgccttttgcagcctccattttgccactggccccctggctcctacctttatgaactcttttctttttctttttttttttttttggagacggagtctcactctgttgcccaggctggagtgcagtggcgcgatctccactcactgcaagctccaccccctgggttcatgccattctcctgcctt

SEQ ID NO: 395728 - DNA, 201 bp, Homo sapiens
aaagatacgctgtttgagcacaaaggagattcattgaaaccgctattgctgtagattacgcctgtgacgcactgcctccctttcactgtttcgccctgaayatctgcttctcagatctaagtgactgtactcaataaatagcgtggagaccagagctcagtgccttttgcagcctccattttgccactggccccctggctc

SEQ ID NO: 395729 - DNA, 201 bp, Homo sapiens; identical to SEQ ID NO: 87280

SEQ ID NO: 395730 - DNA, 201 bp, Homo sapiens; identical to SEQ ID NO: 87281

SEQ ID NO: 395731 - DNA, 201 bp, Homo sapiens; identical to SEQ ID NO: 87282

SEQ ID NO: 395732 - DNA, 201 bp, Homo sapiens; identical to SEQ ID NO: 87289

SEQ ID NO: 395733 - DNA, 201 bp, Homo sapiens; identical to SEQ ID NO: 87291

SEQ ID NO: 395734 - DNA, 201 bp, Homo sapiens; identical to SEQ ID NO: 87295

SEQ ID NO: 395735 - DNA, 201 bp, Homo sapiens
ggagccagcgactggtacgcaggagggccctcaggggcaggagccatggagccctcctctggtgtgggaattcaggggatcttagccacagggcatggcgygtgggcgcagagccggccgtgacccacaagtgcgtgatacttgtactttgctattctaggaacccatacatcagttttccttatttgctgaaaaaggcat

SEQ ID NO: 395736 - DNA, 201 bp, Homo sapiens
tgaggtggtccccagcccctgggctcagcccccaaaactcccctgggtacttcccactgcgtccgcagtgggttcaggtgggagggaggggcctgccatcyctttggaatgtggggcagggcaggggtgccatgggagtgacaggaggaagacaggacacctctgtcactattgggtgcgctggggaaggaagagttcaga

SEQ ID NO: 395737 - DNA, 201 bp, Homo sapiens
gcctgatttggcagggagctgggatgatgctgccagggagctcattcgcgactctgcccagggttttccttttcctttttctgtttttttttttttttttttgtgagacaaggtctccctctgtcattcaggctggagtgcagtcctgcggtcatgactcactgcagccttgacttcctgagctcaagagatcctcccacc

SEQ ID NO: 395738 - DNA, 201 bp, Homo sapiens
gagggacggggcggagtgtgggtgtgagggacggggctttcgtgtggacggggacctggagtcctgggcgtcgctcgggcagagcctgcacagcatatcagggtgtaggcctgggtggcctcgcctctgagaggggttgtgttgactcagcttggctgctttgaggctgtgtgacccagtgcaggtggcagaacctctcgg

SEQ ID NO: 395739 - DNA, 201 bp, Homo sapiens
gaagggccaagtgctgaattcagatgagctccaggagttgtacgaaggcctgaggctgaacaacatgaataaatatgactacgtgctcacaggtaggtgcmggagcaagctgccgcaggggactacgcaccccactccagccagggtgggctcagggaggtccagagcacccccgccctgggcctgtctcgggtccctgcc

SEQ ID NO: 395740 - DNA, 201 bp, Homo sapiens
tgagggacggggcggagtgtgggtgtgagggacggggctttcgtgtggacggggacctggagtcctgggcgtcgctcgggcagagcctgcacagcatatcagggtgtaggcctgggtggcctcgcctctgagaggggttgtgttgactcagcttggctgctttgaggctgtgtgacccagtgcaggtggcagaacctctcg

SEQ ID NO: 395741 - DNA, 201 bp, Homo sapiens
ccacctcggcctcccaaagtactgggattacaggcatggggccaccacgcctggccttctttttctttttctttcttttttttttttttgagacgagggtytcactctgtcgctcaggctgaagtacaatggagcgatctaggctcactgcaacctcccccttccaggtacaagcaattctcctgcctcagcctcctgagt

SEQ ID NO: 395742 - DNA, 201 bp, Homo sapiens; identical to SEQ ID NO: 87277

SEQ ID NO: 395743 - DNA, 201 bp, Homo sapiens
ccattctcctgccttagcctcctgagtagctgggaccacaggcgcccgccaccacgcctggctaatttttttgtatttttagtagagacggggtttcaccrtgttagccaggatggtctcaatctcctgacctcgtgatccgcccacctcggcctcccaaagtactgggattacaggcatggggccaccacgcctggcctt

SEQ ID NO: 395744 - DNA, 201 bp, Homo sapiens
gatctcatcttggaatcttacatctgcaaagatactttttctttctttcttttttttgagacggagtcttgctgtgttgcccaggcagaagtgcagtggcrcgatctcggctcactgcaagctctgcctcccgggttcatgccattctcctgccttagcctcctgagtagctgggaccacaggcgcccgccaccacgcctg

SEQ ID NO: 395745 - DNA, 201 bp, Homo sapiens
tctgcagaggaccatccagtgtgcaaaaggtacggcggccgggctgcatgggctgcgtgggctcctggctcccgaagtgggtgggagagaagagctggcaygtgctggttttgaaggtgtgatcggtgtctcctgctgacctcacctctgggagtgggggcaacagcgggagcccctctgagatgggaactcagtgctctc

SEQ ID NO: 395746 - DNA, 201 bp, Homo sapiens
gaaggcaagaccatgggactccctgcagcccccaccagaagaccctgtgaggtggctggctccatctggggcctgcaggcagccgcattctttcattctcstggtccgtcggtgcggagcagacctgagacagctgagggggcttggcggaggttgtatttctctgtctaggggcctcaatgccatgcccgttaggcaggt

SEQ ID NO: 395747 - DNA, 201 bp, Homo sapiens
aggagttgtcaaagatgggctgagcaaaaaaccgtgcaatcagccgaggaggggccggcagcgcctcccttcctgcccacagagcagccgccttgtgcccrtctattccccggctctgcatggggcctctgttttaaagggttctgtggccaagacaagcctgccagcccctgtccctgtccttggccactcctccggcag

SEQ ID NO: 395748 - DNA, 201 bp, Homo sapiens
ggagagcaggacggcccttgtgttccctggaaatcccctcctggcagcagtgggcacgtcgggtgttgtgagtgggccaggggcacagcaagtctgtcctmcctgcaggtggcctgtgagaagaccgtgtctaccttgcaccacgttctgcagaggaccatccagtgtgcaaaaggtacggcggccgggctgcatgggctg

SEQ ID NO: 395749 - DNA, 201 bp, Homo sapiens
ggagtctgagctgcatcctgtgggcgcagcagacgctcaagggctgggtttagaggggtacgtctggaggtgcgggtggggaatgcacatgaggggagctrggagcagaacagtagcacgggccgagcacgatggctcacgccttgttattgcaccactttgggaggctgaggtgggaggatcgcttgagccccggagttc

SEQ ID NO: 395750 - DNA, 201 bp, Homo sapiens
ggggcaaagcccagccccccaccccgcacccgcccgcccgcaatcctgccccctggctgcggcctccgcggctcttcccaccccggctccgctgggtgctyggcgcttgtttacggagttacaccttgcggtagaggctgagcaggagcttgtccttcagacttcccagcggagacagccaggctgtcctgtggcagcagt

SEQ ID NO: 395751 - DNA, 201 bp, Homo sapiens
tccccttgtagactcgttataaggagttaattctgggaactcctaccaagctcctgctgcctgccaagttctatgcaggtcacgaggctgtcccttctgtragccatctcttgtccagagcaggtagctgggaccgggcatctgctcagccctccgggctctccgtggtgggcagtccgcagcctgtcctccagggttcag

SEQ ID NO: 395752 - DNA, 201 bp, Homo sapiens
taagtgatcaatcctccagcctcagcctcccaaagtgctgcgatcacaggtgtgagccactgtgcctggccatatgactcagtttttaataatgactctaygtaaaactgacctgcactattgcatctggcaatcgcgtggcccaatccatcttcaaagccagcaacagtcgttgagtccttcttttaacttccaatctct

SEQ ID NO: 395753 - DNA, 201 bp, Homo sapiens
gtttacggagttacaccttgcggtagaggctgagcaggagcttgtccttcagacttcccagcggagacagccaggctgtcctgtggcagcagtgggtttgycagaggccgggggctttggccagggccggcagagagccccagtcctgaagaaccctcgttcttcgcgtgctgtcgcgggggctccgtaggcacggttgca

SEQ ID NO: 395754 - DNA, 201 bp, Homo sapiens
agtccgcagcctgtcctccagggttcagcacgtgcattggcggagccggctccccggtggctcggagagcaggacggcccttgtgttccctggaaatcccytcctggcagcagtgggcacgtcgggtgttgtgagtgggccaggggcacagcaagtctgtcctccctgcaggtggcctgtgagaagaccgtgtctaccttg

SEQ ID NO: 395755 - DNA, 201 bp, Homo sapiens; identical to SEQ ID NO: 87283

SEQ ID NO: 395756 - DNA, 201 bp, Homo sapiens
ttactgtaaaacaaggtgattcacatacacagaccagtaatgctgttcctaaaggggcccaagctgatcccatcagtcagcagggctgctcacagggcacytggcctgtctttgttgaaggcgattcctgtgaaggcagtggaggagctccgggtgggaggtgagtgttgtggagagcccagcagcccgctgggctgaacc

SEQ ID NO: 395757 - DNA, 201 bp, Homo sapiens
gcctgcacccacctccctccccagccacccctctgcagggtctgctggtgcttctctttctttgtgccacagttgatcgtggtgagtctcctgttttctgrgggtgacctggattctccccctaaaggttatacgagggacaagtcgttcctggccatggtggtggacattgtgcaggagctgaagcagcagaaccccagg

SEQ ID NO: 395758 - DNA, 201 bp, Homo sapiens; identical to SEQ ID NO: 87286

SEQ ID NO: 395759 - DNA, 201 bp, Homo sapiens; identical to SEQ ID NO: 87285

SEQ ID NO: 395760 - DNA, 201 bp, Homo sapiens
attctcggatacgtttgccagccccaaaggattaattatctacacacccagaagcagtggagcagaatattttggcaggattttcaggatttgtgtcatcrttgcttaatatctgtttcttcacagtcggttagaattttaaaggatttgaaatactgcaagctatctgtgtatagaggctgtggattcgggctggtacat

SEQ ID NO: 395761 - DNA, 201 bp, Homo sapiens
ggttgctcacacctgtgatctgagcactttgggaggccaaggtgagaggatcgcttaagcctaggagttcaaaaccagcctcggcaacatggtgagaaccyatctgtacaaatcatttaaaagctagctgggtgtgctgctgcatgcctgtggtctcagccacttgggagggtgaggcaggaggatcgcccgagcctggaa

SEQ ID NO: 395762 - DNA, 201 bp, Homo sapiens
cgtgcttccctcacggtgactcagcctctcctcctgtctcctttgttggccagtacgtcccggaggacctccttcccgtctacaaagaaaaagtggtgccrcttgcagacattatcacgcccaaccagtttgaggccgagtaagtcattttattttattttactttatttatttatttttcaagatgggtctcgctcttgt

SEQ ID NO: 395763 - DNA, 201 bp, Homo sapiens
  misc_feature (1)...(201): n = A,T,C or G
ggaactcctaccaagctcctgctgcctgccaagttctatgcaggtcacgaggctgtcccttctgtgagccatctcttgtccagagcaggtagctgggaccnggcatctgctcagccctccgggctctccgtggtgggcagtccgcagcctgtcctccagggttcagcacgtgcattggcggagccggctccccggtggctc

SEQ ID NO: 395764 - DNA, 201 bp, Homo sapiens
taacgtgtttcattagttcagtgataataccggcttcaaagaaaagccttggcaaatacaaatcgtaagcagatagctcaactcatcatcacaaagcaaascccacccagtgaagaaacaaatgtgggaagccccggaagcccctccccatccccacccccccccccgccccccccgccctggaaacagccgctgtcctgg

SEQ ID NO: 395765 - DNA, 201 bp, Homo sapiens; identical to SEQ ID NO: 87292

SEQ ID NO: 395766 - DNA, 201 bp, Homo sapiens
tgaccggccgtggctgatgctccccgtgccactgccaggtgatggatcggggagtggggtgtgaccagccgtggctgacatgtgaccggccgtggctgacrctccctgtgccactgctaggtgatggacatgctgcactctatgggccccgacaccgtggtcatcaccagctccgacctgccctccccgcagggcagcaac

SEQ ID NO: 395767 - DNA, 201 bp, Homo sapiens
gtgcccaggaggatcagggatgggaggctggccctggcagaggagcggcagatctcagtgaccttgcccatcttctccccctagggaatcccgctggctcygtggtgatggaacgcatccggatggacattcgcaaagtggacgccgtctttgtgggcactggggacctgtttgctgccatgctcctggcgtggacacaca

SEQ ID NO: 395768 - DNA, 201 bp, Homo sapiens
cctggcagaggagcggcagatctcagtgaccttgcccatcttctccccctagggaatcccgctggctccgtggtgatggaacgcatccggatggacattcscaaagtggacgccgtctttgtgggcactggggacctgtttgctgccatgctcctggcgtggacacacaagcaccccaataacctcaaggtcagccacacg

SEQ ID NO: 395769 - DNA, 201 bp, Homo sapiens; identical to SEQ ID NO: 87299

SEQ ID NO: 395770 - DNA, 201 bp, Homo sapiens
gtggggtctcgtgagcctttctcgtgtgtcccatgggtaagcacacagctcagcggggacagaggagttttgttgcaactgtggcgctcagatccgtgacytcctgtgctgcatgcagcagagttgcttgtggcctcggcaggtggttttgtcagctgagtccgaggacgcctggagtgtgtcttcttacaacaccgtcca

SEQ ID NO: 395771 - DNA, 201 bp, Homo sapiens; identical to SEQ ID NO: 87301

SEQ ID NO: 395772 - DNA, 201 bp, Homo sapiens; identical to SEQ ID NO: 87302

SEQ ID NO: 395773 - DNA, 201 bp, Homo sapiens
cccacccacaccctacacccaccccacaccctacacccaacccaaacccacccaaacccaccactcccactctccacccacacccacaccccttcctcacmccccacacccccatcccccactcaccacccacgcccacaccccacaccccataccccggaggtggcactcctgctcccccccagggctggcagcccctca

SEQ ID NO: 395774 - DNA, 201 bp, Homo sapiens
gcattgcagcgactgctgactggctcggggaacggccaaggcaatgcctttctgtgatcagatgcaatctggacacgcgtccccgggtgctgcgtgttcaygcggatgtgtctttgactgcaggaccctgcccaagggccagctggagtccattgtggagaacatccgcatctatggtattcacgccctgctggtggtcgg

SEQ ID NO: 395775 - DNA, 201 bp, Homo sapiens
ggggaagttgctgagtcctgagccactgagtggctgcaagggccagaggaagcatccgctcctgccgctgagtgttgggcgagaaagcctcgggcaggaasgggttcccacggggagcccagcggggtggggggttcactcggttgcctggccggtgcctggtgatgctgagtggtgcccaggcggctcacgctgggcctg

SEQ ID NO: 395776 - DNA, 201 bp, Homo sapiens
ggtgcaagaagtaggctggcacgacgtggccggctggttggggcgtggtggctccatgctggggaccaagaggtgagctgcctgctgcgggtacctggggrcaggagggccagggcgcagtatccaggccctgcaggtgggggcggcaaggggaacccagcccggggccctgggctcggcccctcttcctgctggtggtct

SEQ ID NO: 395777 - DNA, 201 bp, Homo sapiens
ggaggctgtctgggggccgtgggcagctggccgtgggcaggaccctggggaggcagccccagccccatcatgcccacgcagccctgtgcccccacccccartggagctgggtgtaagaattcccatctcagtgtgggggaaacacccccgcggcccctaggccctgcggcctctgtacccccaccagggctgtgggagttg

SEQ ID NO: 395778 - DNA, 201 bp, Homo sapiens
gtcaggtgggtccggccggggcaaacaagtgaggacttgggccttctgtgtgcacacttggggcatttcctgtggaaggccggctgctggaggtggaggcygagacctgggtccgcgtgtcggtgcccacccgggcctgggtactcagctctgcctgcagcgtgatgcccaacactggctggcccccgggcacaggcccac

SEQ ID NO: 395779 - DNA, 201 bp, Homo sapiens
  misc_feature (1)...(201): n = A,T,C or G
gctgctgccaggcgtgggaatgggcaggacagagggacgagggatccctgggtgccccgaggcagaggaggggctgtctggccgttggccggggaggagtngtgtctgccagcacgagctcagatgtctcccagagatggaggtcagtgctcaagcctgagggagggcacccaggcagtgcatggggctggtggaggccgg

SEQ ID NO: 395780 - DNA, 201 bp, Homo sapiens
ggggaacggccaaggcaatgcctttctgtgatcagatgcaatctggacacgcgtccccgggtgctgcgtgttcatgcggatgtgtctttgactgcaggacyctgcccaagggccagctggagtccattgtggagaacatccgcatctatggtattcacgccctgctggtggtcggtgggtttgaggtgagagctgcccacg

SEQ ID NO: 395781 - DNA, 201 bp, Homo sapiens
ggctgtgcaccccccaccctcccgcccgctgccagccccttgtgtgggcactgacctgtgttcccgcccgcaagcctggcttcacaacagtgctcgccccytctgcctcctctgttgcctgcgtgccagggggccaggcttgcaccgtgtctcttttggtcttcaccagaatcttctggaattagaacagataccgtattc

SEQ ID NO: 395782 - DNA, 201 bp, Homo sapiens
tgcaggcctatgaaggggtgctgcagctggtggaggctcgcgggcgctacgaggagctctgcatcgtcatgtgtgtcatcccagccaccatcagcaacaaygtccctggcaccgacttcagcctgggctccgacactgctgtaaatgccgccatggaggtacggggctcctggacaccggcctgccatgcccaggcccttg

SEQ ID NO: 395783 - DNA, 201 bp, Homo sapiens
acggccagtgaggtcctggctcccaagccccttgagccacagccggagctgcaggccggggcagacagcgtggcccagcctgagtctggtcctcccttccrtggacatctttgggtgtccctgctgctccagcctcctgcttatccccagagctagtcagcgggctctaccctccgtggtggggcaacctggtctccacga

SEQ ID NO: 395784 - DNA, 201 bp, Homo sapiens
actgggtagcgcccctggggttttgggaccagccttgaccaactcatctatcactcatgggttcatcagcagctgcaggtgccccttgggggcgggacacrcaaggagtggggggctacggggctgacctcagtgaggcacctgtggtcctgcccccagtgggcaggaggcggagagggtcactcaggctgccgccgcccc

SEQ ID NO: 395785 - DNA, 201 bp, Homo sapiens
gtgtgacccgaatcccttccaggagcttcgagaacaactggaacatttacaagctcctcgcccaccagaagccccccaaggagaaggtgaggcagggagcsgcgcccacagagggaggaacgggctcagttattctgcagcctcttcacgctggccccgtggctgggcctgcctgcccccaccttccctcctgctggggtc

SEQ ID NO: 395786 - DNA, 201 bp, Homo sapiens
caggtcaacgtggagcacatgacggagaagatgaagacagacattcagaggggcctggtgctgcggtgaggctgccgtgggtccctggccacagctgcgcktccaactctcggggctggggtggggctgctgaggagcggctgggcaggagaaggcaggaggggtccttggagagggtgggccagggcggctttcctggga

SEQ ID NO: 395787 - DNA, 201 bp, Homo sapiens
cagggccagagactgtcagacaggtgggacttgtgctgagggagaccaggtgactgcgcccagccctgtgactgcacctggccctgtgactcgtgtgctgwgccgagcattcccagggaacccacacagctggacgagggccactctatagaggggaggcttcctcagagaggggccccgccgacctagccaggcagctgc

SEQ ID NO: 395788 - DNA, 201 bp, Homo sapiens
gctcatccgtgtccgcccctcccgcaggtcaacgtggagcacatgacggagaagatgaagacagacattcagaggggcctggtgctgcggtgaggctgccrtgggtccctggccacagctgcgcgtccaactctcggggctggggtggggctgctgaggagcggctgggcaggagaaggcaggaggggtccttggagaggg

SEQ ID NO: 395789 - DNA, 201 bp, Homo sapiens
gagatgaggagggtgaccagggccttcccccaccacccgccctctgagatggacagggtgtccaggcctcccctaccccctgtcctctgagatggggagggtgtccagggccttgcttctcagcgtgggactgacaggtttgccctgacctccacaggcatgaacgctgctgtccgggctgtgacgcgcatgggcatttat

SEQ ID NO: 395790 - DNA, 201 bp, Homo sapiens
cgggcagagccctcttgttcaccgcctccaggagggcggggcgtcctagtgggcccagcctcatctctgccctcgcgctccaggcctgctttcctcctgcygggtggggattgtgccctggcccatgtgggttgggaatggtggccccagggagggctcctggcacccgggggctgtgtccggggcaggtttccctgcctg

SEQ ID NO: 395791 - DNA, 201 bp, Homo sapiens
gcccgggcaggtgggacgcgtagcccagtgctcctgctggccccggatcgccggtcagcctggaattccctccccacagtcctccggctcatccgtgtccrcccctcccgcaggtcaacgtggagcacatgacggagaagatgaagacagacattcagaggggcctggtgctgcggtgaggctgccgtgggtccctggcca

SEQ ID NO: 395792 - DNA, 201 bp, Homo sapiens
gcaaggcctttaccaccagggaggggcgccgggcagcggcctacaacctggtccagcacggcatcaccaacctgtgcgtcatcggcggggatggcagcctyacaggtgccaacatcttccgcagcgagtggggcagcctgctggaggagctggtggcggaaggtgggtctgtgcccggcgcactgtaggccctggggtttt

SEQ ID NO: 395793 - DNA, 201 bp, Homo sapiens
tgtgtgctgggcccagccccgagggcccccttcctcccctgctgcccttcccaggctttcgggcagagccctcttgttcaccgcctccaggagggcggggsgtcctagtgggcccagcctcatctctgccctcgcgctccaggcctgctttcctcctgccgggtggggattgtgccctggcccatgtgggttgggaatggt

SEQ ID NO: 395794 - DNA, 201 bp, Homo sapiens
cttcccccaccacccgccctctgagatggacagggtgtccaggcctcccctaccccctgtcctctgagatggggagggtgtccagggccttgcttctcagygtgggactgacaggtttgccctgacctccacaggcatgaacgctgctgtccgggctgtgacgcgcatgggcatttatgtgggtgccaaagtcttcctcat

SEQ ID NO: 395795 - DNA, 201 bp, Homo sapiens
tcacgttgcctcctcctcgctgtccagcgggtcccggccagtctcagcagcggagctgagggagctcagtgtgcagcatagcttggggccgccgtggcctrtgccctctctctctggggccgcagtgatctcctctccctcactcagtgcacgggacagctcctcctccgtcacagctttgggatgaaagacagaagacag

SEQ ID NO: 395796 - DNA, 201 bp, Homo sapiens
aggagaaggcaggaggggtccttggagagggtgggccagggcggctttcctgggagctgccactccctctcccaggcctggcccagcggggactcaggatsggggggagacctgaactcgttcccgccgactcaggccctgctgcccctctcaggaacgagaagtgccatgactactacaccacggagttcctgtacaacc

SEQ ID NO: 395797 - DNA, 201 bp, Homo sapiens
acctggccggtaggctgctggcgcctaggttgtgttgagagggggatgcccctggccctgcctcactgtgacctgctcctgcccacgtgcagcacctgtcmccttttctagaaataaaatcaccctgactgtggggtgcatcggtctccggagagcacagcctgcagaactcctcagagagaggggggagcagcaccgagc

SEQ ID NO: 395798 - DNA, 201 bp, Homo sapiens
gggacgctgaacttgcctgtgtggatctgggtggggtgagggagctcagacaggcccctgcaccaaagcacttgccacaggagtcacgccccgggacacayggactcaccagctgtgcagagggtgtctggagccccctagggggcacccggaccctgttacccaggccctgggatgatggtggggcctcacagtcagcac

SEQ ID NO: 395799 - DNA, 201 bp, Homo sapiens
ccctgagatggggcaggggcacctgtcccccagcccagctggtggggaagggaggctgtcaggctagaagcccgccatggccagagtggggatgttcatgygccccgcagcgcgcactatcccttgaccccctgcctgcttgaggcacttgccctcctggcccccagggccctgacacctggttggggagaaggcggaggg

SEQ ID NO: 395800 - DNA, 201 bp, Homo sapiens
cagagggggccaggctggcctggcctgagccggaggaagtagctctgtggtccctcagatcagcccctgagatggggcaggggcacctgtcccccagcccmgctggtggggaagggaggctgtcaggctagaagcccgccatggccagagtggggatgttcatgcgccccgcagcgcgcactatcccttgaccccctgcct

SEQ ID NO: 395801 - DNA, 201 bp, Homo sapiens
actctgtctcaaaaaaaaaaaacagacttgaccaaaaaaaaaaaaaaaaaaaaaatggcccggcctgcctatgcctaccttcatctcgccctggcctgggyacttttaattctctgggccctttgtctagtgccccctccctgcccctgcaggacaccgtgccctgcctttccctggctggtgtgtttggacgttggtttc

SEQ ID NO: 395802 - DNA, 201 bp, Homo sapiens
tccctgacatggcctcctgtttggagccttcaggctcatgcttacatccttagctgatcattaaactttgtgaccatttcatgctcactgctttcttgccygggagctaatggtgaggaaaggtcactgggaaccagcgcaccaacctcagacattgattttgttccagccttttttcctgggcaggggtggctatcacct

SEQ ID NO: 395803 - DNA, 201 bp, Homo sapiens
ttttttttttttttttgagacagagtctcattctgttgcccaggctggagcgcagtggcacaatcttggctcgctgcaacctctgcctcccaggttcaagyaattttcctgcctcagcctcctgagtagctgggattacaggcacccaccaccacgcccagctgttttttgtatttttagtagagacggggtttcaccatg

SEQ ID NO: 395804 - DNA, 201 bp, Homo sapiens
catgccgaggtgtgttctgtgtgggtcacactgggagacggggtggtcctggcctggaggagctgatgggtatgtggtcttggggagtgtgagggggagcytggggccaggccaaaggcatctgcagaaagaagacctactgccttgggactcagcccggctggaggctcagaggctgcagagcacgggcctgggggcagg

SEQ ID NO: 395805 - DNA, 201 bp, Homo sapiens
tcattgtgaataggcatggagaggtagggcgaagatgctgacctgccctcctcccagggaaaggggcatgggcagcctggatgattctaggggggtaggawttttttttttttttttttttgagacagagtctcattctgttgcccaggctggagcgcagtggcacaatcttggctcgctgcaacctctgcctcccaggtt

SEQ ID NO: 395806 - DNA, 201 bp, Homo sapiens
gggtggggctggggccctgccagtattggattaggaagcaggtctcagagccctggggagctgggtgtgggggcctctctaggcaggctgggctgtgtccrtacaaacccctcctgccacctgctcgaccttcagtttcttcttctaagtggcaaaggggagaaattagggttttccggaacccccacacatttgtggttg

SEQ ID NO: 395807 - DNA, 201 bp, Homo sapiens
catggtggtgcgcatctgtaatcccagctactcaggaggctgaggcaggagaatcgcttgaaccaggaggtgcaggttgcagtgagccgagatcgagccayggcactctagcctgggcgacagagcgagactctgttgcaaaaaacaaacaagaaaaaaccccaaaaatcagccaggcgtggtggtacatgcctgtagtcc

SEQ ID NO: 395808 - DNA, 201 bp, Homo sapiens
cacctcaccacactccacagccacaccccaccccacaccccacactcccacccacaccctacacccaccccacaccctacacccaacccaaacccacccamacccaccactcccactctccacccacacccacaccccttcctcacaccccacacccccatcccccactcaccacccacgcccacaccccacaccccatac

SEQ ID NO: 395809 - DNA, 201 bp, Homo sapiens
ggcatggtatgggtgctgggagggaggcaggaagagcagggctggtcccaggggcaagcacaaactcaggcctgttacacggccccagacctcactcagarggggaccctggccgctggcgtgggtttcctcctctctgaagattaggtggtcttggctgccccttttgtatgaagtcatggatatcttttgagatggggg

SEQ ID NO: 395810 - DNA, 201 bp, Homo sapiens
gctgggggccgcaggtgtcctggtgcactgggtagcgcccctggggttttgggaccagccttgaccaactcatctatcactcatgggttcatcagcagctkcaggtgccccttgggggcgggacacgcaaggagtggggggctacggggctgacctcagtgaggcacctgtggtcctgcccccagtgggcaggaggcggag

SEQ ID NO: 395811 - DNA, 201 bp, Homo sapiens
tgctgggagggaggcaggaagagcagggctggtcccaggggcaagcacaaactcaggcctgttacacggccccagacctcactcagaaggggaccctggcygctggcgtgggtttcctcctctctgaagattaggtggtcttggctgccccttttgtatgaagtcatggatatcttttgagatgggggctctcgggaagaa

SEQ ID NO: 395812 - DNA, 201 bp, Homo sapiens
aagagaaaagagggctggggacatccccttccagggattgttttgggagggccggtgactccgctgcggccacctaccctggttgtccagcttctgtaggygcggcagggtgcgcagcacggtcatgcggtagcggtgggggctggtgccgcagcacgggttctcggccagccacagcacccgcagacgcggcagcccctt

SEQ ID NO: 395813 - DNA, 201 bp, Homo sapiens
gcatgggcatttatgtgggtgccaaagtcttcctcatctacgaggtaaggccaaggtgggctgtgtgtgtgcagggagtggggacctcctgaggcgcatgscgaggtgtgttctgtgtgggtcacactgggagacggggtggtcctggcctggaggagctgatgggtatgtggtcttggggagtgtgagggggagcttggg

SEQ ID NO: 395814 - DNA, 201 bp, Homo sapiens
tcaggtcctgcggtcactcggcgtgctcctgcacctcttccccacgcagggcctgcagccggctgcccacagtctgctgcacggcctccagcccctctgcrtccagctcccgcagcagcagcaggatggcagtcaggacgttctgagggcagaggggtgcggactaagcccacccggcacggcgaggctgcttccctccac

SEQ ID NO: 395815 - DNA, 201 bp, Homo sapiens
ggggtccagctgctgggcttctacagggctggccactggtggtcatgggacggccacggcaaccgcaggcctggctttcttgtccactgtggccggttccyggggtggggctggggcctgcctttgcagtgtgtccctggggggcagctcctggatgtgtcctctgcccagccctttggccggtgcggacacacaccaggg

SEQ ID NO: 395816 - DNA, 201 bp, Homo sapiens
tctctgtatgtgagctcccatgcgtggacagggaacaggtggttttctgcaagggaggaggactccacacacttccccagttcagggctggggctgattcrtggaggatgatctggggcgagtaggatgggaggaactgacattctgggcagaaccagagtcctgtttcatgagttcggaaaagcagtctgcagggctctc

SEQ ID NO: 395817 - DNA, 201 bp, Homo sapiens
gctgattcatggaggatgatctggggcgagtaggatgggaggaactgacattctgggcagaaccagagtcctgtttcatgagttcggaaaagcagtctgcrgggctctcccaggccaccactgctgctgccgtgtggctccccatggtgggtgctctgttttccttctcggggccccactgccttcctagaaaggctgacc

SEQ ID NO: 395818 - DNA, 201 bp, Homo sapiens
tctagctctgtcctctgtgcgctgaggctgaggcaggaccactggaaccagccctgggggcagagggtgggtttgggactgacacggtatccctgtccccrtgtgaaggtggcagcgtcactcccatctgtgtggacactggttccacctccgcgtggctgtacagtgctgccgagggcagtgggagaggccgtgggtaat

SEQ ID NO: 395819 - DNA, 201 bp, Homo sapiens
gtggccccagcaaggtccagacggcagggctgtgggggtggcgaggccaggagctgggccagtggggagcagggccttcccctgagggcggtcggggcccrggggtgggttctaggctggaaagatgtgtcggaacgtggctgtagccacagggtggacaggaggtcccggaagcaggagagggtggggaggctgctggga

SEQ ID NO: 395820 - DNA, 201 bp, Homo sapiens
tattcccagggcagttgggcggtgtgctgggcagcgtccaggctgctggcagggcctggcccctttttccagaacctgccggcctgctgacctcctgtgcmggttgggggtcccctccccggctgtgcctcacgctcatctccccttctctctgaagtctaacttctccctggccatcctgaatgtgggggccccggcggc

SEQ ID NO: 395821 - DNA, 201 bp, Homo sapiens
tggctatgaggggccacgtgagcgcacctggagctgctgaggcttgagccctggaggccctggccggttccctgagttggtacagggcctgtgtgtgcacrtgtgcacgcacatgtgtgtggcaacctatgcgtgtgtgtactgtgctttccagtctccaaagccttccactctattaccttggggcttcccaagcccagg

SEQ ID NO: 395822 - DNA, 201 bp, Homo sapiens
acaccctacacccaccccacaccctacacccaacccaaacccacccaaacccaccactcccactctccacccacacccacaccccttcctcacaccccacmcccccatcccccactcaccacccacgcccacaccccacaccccataccccggaggtggcactcctgctcccccccagggctggcagcccctcatcctctg

SEQ ID NO: 395823 - DNA, 201 bp, Homo sapiens
gcccctgagatggggcaggggcacctgtcccccagcccagctggtggggaagggaggctgtcaggctagaagcccgccatggccagagtggggatgttcaygcgccccgcagcgcgcactatcccttgaccccctgcctgcttgaggcacttgccctcctggcccccagggccctgacacctggttggggagaaggcggag

SEQ ID NO: 395824 - DNA, 201 bp, Homo sapiens
atcagcagtggagggttgggaaagttgagagcctggggtggcacgtgccccccccaccccctgccaccccatgcacagactaaacagagaaggggggctcrctggaggttgctgaagggccagcctggcaggtggttcttgggccagcggggaggggcacccagggtgacaggcggttctggatgctggtggaggatctgg

SEQ ID NO: 395825 - DNA, 201 bp, Homo sapiens
ggaacagcctctggaggagacttcacaggacacatctatgtcccgccagaccaggtatttgcagaaaaggagaagagaaaagagggctggggacatccccytccagggattgttttgggagggccggtgactccgctgcggccacctaccctggttgtccagcttctgtaggcgcggcagggtgcgcagcacggtcatgcg

SEQ ID NO: 395826 - DNA, 201 bp, Homo sapiens
cttggtgaggctggtgaagccccaaagcccacctgtggttccctgaaacacagagggtccccaaccagcttccttgtttgcaaagtgggagcatcagcagyggagggttgggaaagttgagagcctggggtggcacgtgccccccccaccccctgccaccccatgcacagactaaacagagaaggggggctcgctggaggt

SEQ ID NO: 395827 - DNA, 201 bp, Homo sapiens
gagtctggagggcagacaggttgctgtggggccagcccgcctgcccaccagggaggcgctttcttggtgaggctggtgaagccccaaagcccacctgtggytccctgaaacacagagggtccccaaccagcttccttgtttgcaaagtgggagcatcagcagtggagggttgggaaagttgagagcctggggtggcacgtg

SEQ ID NO: 395828 - DNA, 201 bp, Homo sapiens
atgagattagacaagaaaggccccgagtctggagggcagacaggttgctgtggggccagcccgcctgcccaccagggaggcgctttcttggtgaggctggygaagccccaaagcccacctgtggttccctgaaacacagagggtccccaaccagcttccttgtttgcaaagtgggagcatcagcagtggagggttgggaaa

SEQ ID NO: 395829 - DNA, 201 bp, Homo sapiens
ggagggtgaactcgggaagctccatcccatgagattagacaagaaaggccccgagtctggagggcagacaggttgctgtggggccagcccgcctgcccacyagggaggcgctttcttggtgaggctggtgaagccccaaagcccacctgtggttccctgaaacacagagggtccccaaccagcttccttgtttgcaaagtg

SEQ ID NO: 395830 - DNA, 201 bp, Homo sapiens
aataacctgtgcaaaggtagctagaagacttgaagcaggccgggtgcggtggctcacacctgtaattccagcactttgggtggcctggtgggttgtgggcmcaggtgggagaggaggcccgtggccttggagggtgaactcgggaagctccatcccatgagattagacaagaaaggccccgagtctggagggcagacaggt

SEQ ID NO: 395831 - DNA, 201 bp, Homo sapiens
tctcccaggccaccactgctgctgccgtgtggctccccatggtgggtgctctgttttccttctcggggccccactgccttcctagaaaggctgaccctggycgaggggaagcctgtggcatagtgtgcccttctctttgccctctatgtcagccgggcagcaggagagtggggactgggaggcactttctgccccaatgct

SEQ ID NO: 395832 - DNA, 201 bp, Homo sapiens
gatcattaaactttgtgaccatttcatgctcactgctttcttgcccgggagctaatggtgaggaaaggtcactgggaaccagcgcaccaacctcagacatygattttgttccagccttttttcctgggcaggggtggctatcacctgctggtaggcagcggcaggcccactgtcctgcctgccctctgactgcggtgtcgg

SEQ ID NO: 395833 - DNA, 201 bp, Homo sapiens
caggagctccctcgggtgggggcccgcctgtagggaggtgtgtgtgttctcagcttcccgctctggcgggcagatggtagcctgggctgttcacacggccrccacacagcaagagcacgcgccgcacaccccgccggccgcatgcctgggaggactccagtggggacagaaggagccacgcacagcagcctctgtggtgtc

SEQ ID NO: 395834 - DNA, 201 bp, Homo sapiens
gggcctgagacccttctgtgggcatggggtgggcacagtccccctgtgtgactacaggggaagttgctgagtcctgagccactgagtggctgcaagggccrgaggaagcatccgctcctgccgctgagtgttgggcgagaaagcctcgggcaggaaggggttcccacggggagcccagcggggtggggggttcactcggtt

SEQ ID NO: 395835 - DNA, 201 bp, Homo sapiens
cagatgcgcacacaggtacacagatacagaaacatacagacatatgtactcagagtcacacacacacgtgccccatcgcacagggactcaggttcaggccsaccctgtcatctgctgccatggaattgttgggtcgcagggtcatggggttgccaggggccaggaggacctggagacgtggccgtgctgggtcctggggga

SEQ ID NO: 395836 - DNA, 201 bp, Homo sapiens
cctgagcaggcaggcgctcgctcctccaggtacctggcgctggtatctgcactggcctcaggggccgactggctgttcatccccgaggctccacccgaggwcggctgggagaacttcatgtgtgagaggctgggtgaggtgggtgccgtccagcctgctgggggccgcaggtgtcctggtgcactgggtagcgcccctggg

SEQ ID NO: 395837 - DNA, 201 bp, Homo sapiens
cccagggctggtcctcaagtttcctggcctggtgcctcctgagatggggagggtgaccaggccttccctaccccctgccctctgagatggggagggcgtcygggccttccctgacccttgccctcttgagatgaggagggtgaccagggccttcccccaccacccgccctctgagatggacagggtgtccaggcctcccct

SEQ ID NO: 395838 - DNA, 201 bp, Homo sapiens
gccatggggaccttgggcctcagtttccccacctttgatggaatacggtgaagtgcacaggacagggtcctccccagactggcctgtgccatggggcctcrggcctcagtttccccacctttgacttagagggaaggttggatggtgacttcttgtaacgatggccatgattctgtggctgcggcgggggcgcacctggag

SEQ ID NO: 395839 - DNA, 201 bp, Homo sapiens
aggtacctggcgctggtatctgcactggcctcaggggccgactggctgttcatccccgaggctccacccgaggacggctgggagaacttcatgtgtgagakgctgggtgaggtgggtgccgtccagcctgctgggggccgcaggtgtcctggtgcactgggtagcgcccctggggttttgggaccagccttgaccaactca

SEQ ID NO: 395840 - DNA, 201 bp, Homo sapiens
agtcctgggagccgagggcaaggggacaggaaagaggaagtgacctcagagcctggtggcaccagcatcatgtccaggctggggggtgagggtccctgaggccctggggcagggcagtgctgttccctgggtggctgaggccggaggggctctgttctcagtcccccatctcattgcggaggaaggagcccaagccccttc

SEQ ID NO: 395841 - DNA, 201 bp, Homo sapiens
ggagcagcggatgccctactgcctcagccccagtccccgtgggagatttggggctcgccctccgtcctgggtatttacacacccacacttgcgctcacacrtgtgcacacacaggcgcattcacacacttgggccacaccacgcactcacaggctgcattcttgccttgtcaggtggttttccacattccacaagacaagg

SEQ ID NO: 395842 - DNA, 201 bp, Homo sapiens
atctgcactggcctcaggggccgactggctgttcatccccgaggctccacccgaggacggctgggagaacttcatgtgtgagaggctgggtgaggtgggtrccgtccagcctgctgggggccgcaggtgtcctggtgcactgggtagcgcccctggggttttgggaccagccttgaccaactcatctatcactcatgggtt

SEQ ID NO: 395843 - DNA, 201 bp, Homo sapiens
agggggctccttcagacctggctgagccaggcctgtggtggctgcccacccgcccttttcacagctgtggcaagagcgggagctgctgcttgttgccggcyactggcagtgtcctggagccagtgtggctccacaagtcctgtcctgtgtggctctgggtcacgcctttcctgtgggccaggggtccgtgttgtcgagagg

SEQ ID NO: 395844 - DNA, 201 bp, Homo sapiens
agttaatgccatgggtgtgagagagccgggtgggggccgggagagacagagaagctgtggcccagagtcggacctctgggtacagggaagctcccctcaayggctgggtgggggtcctgagcaggcaggcgctcgctcctccaggtacctggcgctggtatctgcactggcctcaggggccgactggctgttcatccccga

SEQ ID NO: 395845 - DNA, 201 bp, Homo sapiens
aggggtgtgtctggagtgggggtgcctggaatgccgccctctggttcccttggggtggagttgggggctctggcctagaacaggctgacactgccctgtgraccctgagacccctcaactgggacaggtcggccccttggtggggtggggctcaatggtggaccagaggcacgggccattcaggctgtccttcgcccacac

SEQ ID NO: 395846 - DNA, 201 bp, Homo sapiens
gtgggtcccgactgaacatcatcatcatcgctgagggtgccattgaccgcaacgggaagcccatctcgtccagctacgtgaaggacgtgcgtgtgggcctsggggtggccactgggcacctgctcctctaggccgtgtgggctggggctcagggctggtccttcccactgtcctgcagctggtggttcagaggctgggctt

SEQ ID NO: 395847 - DNA, 201 bp, Homo sapiens
  misc_feature (1)...(201): n = A,T,C or G
cggcagacctgccggcatgccagcctgggccccagacactcaggccggccagcgcagggcagggcccgggcaggtgggacgcgtagcccagtgctcctgcnggccccggatcgccggtcagcctggaattccctccccacagtcctccggctcatccgtgtccgcccctcccgcaggtcaacgtggagcacatgacggaga

SEQ ID NO: 395848 - DNA, 201 bp, Homo sapiens
tgggggcagagggtgggtttgggactgacacggtatccctgtccccgtgtgaaggtggcagcgtcactcccatctgtgtggacactggttccacctccgcrtggctgtacagtgctgccgagggcagtgggagaggccgtgggtaatgacctggcttctagaaccttccccagtggagcctaggggccgggcggagatgga

SEQ ID NO: 395849 - DNA, 201 bp, Homo sapiens
tggctccacaagtcctgtcctgtgtggctctgggtcacgcctttcctgtgggccaggggtccgtgttgtcgagaggggagggcgttgttcaaggatgtctwtttgcacaataacctgtgcaaaggtagctagaagacttgaagcaggccgggtgcggtggctcacacctgtaattccagcactttgggtggcctggtgggt

SEQ ID NO: 395850 - DNA, 201 bp, Homo sapiens
ggggatagtgtgtggtgagcacctgggagggctgccagggttggggtttgtggggcacaggcccgggtgaaggggctcagctccctgccatagccacttcyaggtccaggggggccctgcgttgttcctcgctactgtgatgagctcagatggggagactgaggcgggaatgtccctgcgccccagtgctgggtagtctaa

SEQ ID NO: 395851 - DNA, 201 bp, Homo sapiens
ggaggggatagtgtgtggtgagcacctgggagggctgccagggttggggtttgtggggcacaggcccgggtgaaggggctcagctccctgccatagccacytccaggtccaggggggccctgcgttgttcctcgctactgtgatgagctcagatggggagactgaggcgggaatgtccctgcgccccagtgctgggtagtc

SEQ ID NO: 395852 - DNA, 201 bp, Homo sapiens
gagcctacggaggctgctggaggggatagtgtgtggtgagcacctgggagggctgccagggttggggtttgtggggcacaggcccgggtgaaggggctcasctccctgccatagccacttccaggtccaggggggccctgcgttgttcctcgctactgtgatgagctcagatggggagactgaggcgggaatgtccctgcg

SEQ ID NO: 395853 - DNA, 201 bp, Homo sapiens
gaaggtgtggggtacattagcaccagcgtttcctgagtgccgcctcccccgttaatgtccctctccaggaaactggctttgccaaggcccccgctgggacrgactgtttctttcactgcagtcctgggagccgagggcaaggggacaggaaagaggaagtgacctcagagcctggtggcaccagcatcatgtccaggctgg

SEQ ID NO: 395854 - DNA, 201 bp, Homo sapiens
tcccagccaccatcagcaacaacgtccctggcaccgacttcagcctgggctccgacactgctgtaaatgccgccatggaggtacggggctcctggacacckgcctgccatgcccaggcccttgtggggtggggctgagcctacggaggctgctggaggggatagtgtgtggtgagcacctgggagggctgccagggttggg

SEQ ID NO: 395855 - DNA, 201 bp, Homo sapiens
tgtaaatgccgccatggaggtacggggctcctggacaccggcctgccatgcccaggcccttgtggggtggggctgagcctacggaggctgctggaggggayagtgtgtggtgagcacctgggagggctgccagggttggggtttgtggggcacaggcccgggtgaaggggctcagctccctgccatagccacttccaggtc

SEQ ID NO: 395856 - DNA, 201 bp, Homo sapiens
  misc_feature (1)...(201): n = A,T,C or G
catgggcatttatgtgggtgccaaagtcttcctcatctacgaggtaaggccaaggtgggctgtgtgtgtgcagggagtggggacctcctgaggcgcatgcngaggtgtgttctgtgtgggtcacactgggagacggggtggtcctggcctggaggagctgatgggtatgtggtcttggggagtgtgagggggagcttgggg

SEQ ID NO: 395857 - DNA, 201 bp, Homo sapiens
agtgtcctggagccagtgtggctccacaagtcctgtcctgtgtggctctgggtcacgcctttcctgtgggccaggggtccgtgttgtcgagaggggagggygttgttcaaggatgtctttttgcacaataacctgtgcaaaggtagctagaagacttgaagcaggccgggtgcggtggctcacacctgtaattccagcact

SEQ ID NO: 395858 - DNA, 201 bp, Homo sapiens
aggagtggctcgtgggtgtcactgtctgaaccccggcctgcagagggggctccttcagacctggctgagccaggcctgtggtggctgcccacccgcccttytcacagctgtggcaagagcgggagctgctgcttgttgccggctactggcagtgtcctggagccagtgtggctccacaagtcctgtcctgtgtggctctgg

SEQ ID NO: 395859 - DNA, 201 bp, Homo sapiens
gagaaaatgcggacacacacccccacccagcttcaggcacctgaccctccttttccctatctggaagccaggaagaggcgagaaggaagccggccttgagygggaccaagccagggaggcaggagtggctcgtgggtgtcactgtctgaaccccggcctgcagagggggctccttcagacctggctgagccaggcctgtgg

SEQ ID NO: 395860 - DNA, 201 bp, Homo sapiens
  misc_feature (1)...(201): n = A,T,C or G
tgtccgcccctcccgcaggtcaacgtggagcacatgacggagaagatgaagacagacattcagaggggcctggtgctgcggtgaggctgccgtgggtcccnggccacagctgcgcgtccaactctcggggctggggtggggctgctgaggagcggctgggcaggagaaggcaggaggggtccttggagagggtgggccagg

SEQ ID NO: 395861 - DNA, 201 bp, Homo sapiens
agggaggcaggaagagcagggctggtcccaggggcaagcacaaactcaggcctgttacacggccccagacctcactcagaaggggaccctggccgctggcrtgggtttcctcctctctgaagattaggtggtcttggctgccccttttgtatgaagtcatggatatcttttgagatgggggctctcgggaagaaggtgtgg

SEQ ID NO: 395862 - DNA, 201 bp, Homo sapiens
gtgtcggagctgcagggagcctggtgagcatgggaagtcacaggggtccacggccactgagcttctgtaggcagtggtgggagttggggttacgatgggayggaggaggaggggccagtgatcagagcagagccctgggaggagctcaggcaggtgatggggaacactggggtggctggagcagggaccccaggagaggag

SEQ ID NO: 395863 - DNA, 201 bp, Homo sapiens
gggtgggacgtgggacctgggacgttccccaggaggtgtgtcggagctgcagggagcctggtgagcatgggaagtcacaggggtccacggccactgagctkctgtaggcagtggtgggagttggggttacgatgggacggaggaggaggggccagtgatcagagcagagccctgggaggagctcaggcaggtgatggggaa

SEQ ID NO: 395864 - DNA, 201 bp, Homo sapiens
ggccccgggggtccagctgctgggcttctacagggctggccactggtggtcatgggacggccacggcaaccgcaggcctggctttcttgtccactgtggcyggttcccggggtggggctggggcctgcctttgcagtgtgtccctggggggcagctcctggatgtgtcctctgcccagccctttggccggtgcggacacac

SEQ ID NO: 395865 - DNA, 201 bp, Homo sapiens
ggctggggggtgagggtccctgaggccctggggcagggcagtgctgttccctgggtggctgaggccggaggggctctgttctcagtcccccatctcattgyggaggaaggagcccaagccccttccagcaggtgctttcctcagtgcccagaggtgctccccggcttctccatccccacgccgcagcctgaatgtctgggg

SEQ ID NO: 395866 - DNA, 201 bp, Homo sapiens
gttctcagtcccccatctcattgcggaggaaggagcccaagccccttccagcaggtgctttcctcagtgcccagaggtgctccccggcttctccatccccrcgccgcagcctgaatgtctggggtggggccggtgtgggaggtgccggcctcttttccacctgccccactttttatcctgctctgtggtcaaggcctggcc

SEQ ID NO: 395867 - DNA, 201 bp, Homo sapiens; identical to SEQ ID NO: 87308

SEQ ID NO: 395868 - DNA, 201 bp, Homo sapiens
cgggccttccctgacccttgccctcttgagatgaggagggtgaccagggccttcccccaccacccgccctctgagatggacagggtgtccaggcctcccckaccccctgtcctctgagatggggagggtgtccagggccttgcttctcagcgtgggactgacaggtttgccctgacctccacaggcatgaacgctgctgtc

SEQ ID NO: 395869 - DNA, 201 bp, Homo sapiens
ctccagcctcacgttgcctcctcctcgctgtccagcgggtcccggccagtctcagcagcggagctgagggagctcagtgtgcagcatagcttggggccgcygtggcctgtgccctctctctctggggccgcagtgatctcctctccctcactcagtgcacgggacagctcctcctccgtcacagctttgggatgaaagaca

SEQ ID NO: 395870 - DNA, 201 bp, Homo sapiens
cttgagatgaggagggtgaccagggccttcccccaccacccgccctctgagatggacagggtgtccaggcctcccctaccccctgtcctctgagatggggrgggtgtccagggccttgcttctcagcgtgggactgacaggtttgccctgacctccacaggcatgaacgctgctgtccgggctgtgacgcgcatgggcatt

SEQ ID NO: 395871 - DNA, 201 bp, Homo sapiens
acggcctccagcccctctgcatccagctcccgcagcagcagcaggatggcagtcaggacgttctgagggcagaggggtgcggactaagcccacccggcacrgcgaggctgcttccctccacaagggctggggcctggccagcggtgccccaccacggagcgactggtcccgggggtgtgggccgtccaagtgactgaccgg

SEQ ID NO: 395872 - DNA, 201 bp, Homo sapiens
ggtcagtgctcaagcctgagggagggcacccaggcagtgcatggggctggtggaggccggtgttgctcaccctacgctgcgtagacaagtcttctctgtgwttgatccgagtgagattctggacatgcatggtcacagtctgcagaaatagagttgaagttggggtgacataagacacagagtcccgagattgctgcttgg

SEQ ID NO: 395873 - DNA, 201 bp, Homo sapiens
ggccagcccagtgggcagcagccccaggggtggagggccctctggccagtgcctgggccaggtcaaagggacatgtgccctgagaggccacaggtgctctycaggactccctgggggccaccagggtgacctgagcccctcctggtcctcccctgggggcagaagggtacagcctcactcctctgtctccccaacctcagc

SEQ ID NO: 395874 - DNA, 201 bp, Homo sapiens
tggcaccctgaccccgcaaggcctcctgggcccccatgcccaggtccccgccaggccgtggagagcagggaccatgcccaagtcttctgagcacaacactrggcaatcctttcgggtgggcatgggggcacagcgggtagccaggagtgggcacgcttgagggcggctgaggctgactctgtgctgtgcctccgagggatg

SEQ ID NO: 395875 - DNA, 201 bp, Homo sapiens
ggcccagaccttccctgaggcaggtgtgccaggcccagccccactggcaccctgaccccgcaaggcctcctgggcccccatgcccaggtccccgccaggcygtggagagcagggaccatgcccaagtcttctgagcacaacactgggcaatcctttcgggtgggcatgggggcacagcgggtagccaggagtgggcacgct

SEQ ID NO: 395876 - DNA, 201 bp, Homo sapiens
ctcaagaaagacactgatttcgagtgagttccaccaaagcctcgtggaggcgggtggggctgaggggtggcccagaccttccctgaggcaggtgtgccagrcccagccccactggcaccctgaccccgcaaggcctcctgggcccccatgcccaggtccccgccaggccgtggagagcagggaccatgcccaagtcttctg

SEQ ID NO: 395877 - DNA, 201 bp, Homo sapiens
ccgtcactgagctcaagaaagacactgatttcgagtgagttccaccaaagcctcgtggaggcgggtggggctgaggggtggcccagaccttccctgaggcmggtgtgccaggcccagccccactggcaccctgaccccgcaaggcctcctgggcccccatgcccaggtccccgccaggccgtggagagcagggaccatgcc

SEQ ID NO: 395878 - DNA, 201 bp, Homo sapiens
agccccaggggattgagcaggtgggtcctggcgtccagcacggggcacatgacaggtcagcagggagcagggctgggcggccgccggcagagcctgtcccyggcccaccctggcctcggtgctgcccttgacctgccccgtccctactgctgcaggcctatgaaggggtgctgcagctggtggaggctcgcgggcgctacg

SEQ ID NO: 395879 - DNA, 201 bp, Homo sapiens
gccctgtgaggctccatgctccctccccacggtttctgtgcagtgggtgcagtgggcagaggcagccgcggcccctagcggcccgccactcaccctgcccytgtggctgctcgaggcatccctggctgagagggaaggaaactggccccgggaaggcggcttcaggccacgttcatcctgggcgccgctgctgagagggag

SEQ ID NO: 395880 - DNA, 201 bp, Homo sapiens
tgctgccgtgtggctccccatggtgggtgctctgttttccttctcggggccccactgccttcctagaaaggctgaccctggccgaggggaagcctgtggcrtagtgtgcccttctctttgccctctatgtcagccgggcagcaggagagtggggactgggaggcactttctgccccaatgctgaagtctgcgtttgttgga

SEQ ID NO: 395881 - DNA, 201 bp, Homo sapiens
ggttggggacaagacaggccaccttgcaagttccttccagccagcccacaagtcctgtcctgtgtggctctgggtcacgcctttcctgttggccaggggtyggtgctgttgagcaggggagggcgttgttcaaggatatctatttgcacaataacctgtgcaaaggtagctagaagacttgaaacaggccgggcgcggtgg

SEQ ID NO: 395882 - DNA, 201 bp, Homo sapiens
acgaggagctctgcatcgtcatgtgtgtcatcccagccaccatcagcaacaacgtccctggcaccgacttcagcctgggctccgacactgctgtaaatgcygccatggaggtacggggctcctggacaccggcctgccatgcccaggcccttgtggggtggggctgagcctacggaggctgctggaggggatagtgtgtgg

SEQ ID NO: 395883 - DNA, 201 bp, Homo sapiens
ccccgtggaggctggagcggcgttcaggtcctgcggtcactcggcgtgctcctgcacctcttccccacgcagggcctgcagccggctgcccacagtctgcygcacggcctccagcccctctgcatccagctcccgcagcagcagcaggatggcagtcaggacgttctgagggcagaggggtgcggactaagcccacccggc

SEQ ID NO: 395884 - DNA, 201 bp, Homo sapiens
gggacacccacacatgcctgattgccatgctctgcatgggatgttcccagtttatctctgggcaccatactccaggtgctcggaagctgaagcctagagcytgctgggttcacccgagcctccacccgggggcccagggctggtcctcaagtttcctggcctggtgcctcctgagatggggagggtgaccaggccttccct

SEQ ID NO: 395885 - DNA, 201 bp, Homo sapiens
cacacctataatcccagcactttgggagaccaatgtgggaggatcatttgagcccaggagtttgagaccagcctaggcaacatagtgagactctgtctctrcaaaaaaataaaaataaaaattaaccaggcatggtggcatgcacctgtagtcccagctactcaggaggctgagttgggaggattgcttgagctggggagg

SEQ ID NO: 395886 - DNA, 201 bp, Homo sapiens
ctgaaaagaaaacccatgtctagtaacagtcactccaaattcccccttcttgcttcccttcttttaactctaggcaaccactcctcgactttctctcaacrtgggtttgccttttctggatcctttgcatttccgtatgaatttaggatcagcctgtcaactcctgcccaaaagccagctgggattttgagagggctctgc

SEQ ID NO: 395887 - DNA, 201 bp, Homo sapiens
gattgcacccggtgaggcgaggggcctgcccaggggggtgaaggggctgaggacacacccatcctttcagctactcattctggagtgtgggtggattttcytcccaaatggatgatttccctgagagcttctgatttctgtctccaatgcgtcatttggcatagagccctgagctatgggaggcgggtgtctacggttggc

SEQ ID NO: 395888 - DNA, 201 bp, Homo sapiens
gaccctcccgcccccagatggagccagtcaccatcccagatgtccacggcggatccttgcagaatgctgtccgcgtgtggagcaacatcccagccataagraggtatttcctgggcagctgaaagcgttcagggtcaaggggaacatggacccagaagcggggttcactgaggaaatggggtctgtctagcagagccaagc

SEQ ID NO: 395889 - DNA, 201 bp, Homo sapiens
agtcaaggtctgctcagcaagctgcttcccgtgctggggtgcatcagggatctgagcaggggctgacggctttctcacatctgtgtccgtgtgtcctgacrcagcatccccatggcggccatcccagccctggacccagaggccgagcccagcatggacgtgattttggtgggatccagtgagctctcaagctccgtttca

SEQ ID NO: 395890 - DNA, 201 bp, Homo sapiens
gatctgcgccccatgtaaggtaggcagggaggctgggggtgactccctcatggcctcagagcagggatgacacaagccagccttgctttgctccttccaaggacaagttcctggatgccctcttcctgtacgacgatgacgggtaccaatcctactgctccatctgctgctccggagagacgctgctcatctgcggaaacc

SEQ ID NO: 395891 - DNA, 201 bp, Homo sapiens
ttcgagtccctgtaggggcacaatccacgctcaccctctgggcccttctggtctctccccatccagagctgacgagtttgggctttttggaaagtggttcygacccgggacaactgaagcatgtggttgatgtcacagacacagtgaggaaggatgtgagtaccgccgtgaactctcagacactgtagtgggagcgggggt

SEQ ID NO: 395892 - DNA, 201 bp, Homo sapiens
caccttcacttcaaaacctctggcctcctgagctgtgaaagaataatttctgctgtgccaagtcccctggtctgttttttatttatttatttatttatttwtttattttttttttttttttgagacggagtctcgctctgtcgcccaggctggagtgcagtggcgggatctcggctcactgcaagctccgcctcccaggtt

SEQ ID NO: 395893 - DNA, 201 bp, Homo sapiens
cgtgtttagccgctgcagaaaaagcagcagctgtggcgtgagggcagagtccgtcctctcagtgtagggcacgcggctcggctcgacccttgcctggcgcrgcctgaggtcctgtttgtaatttgatatcttattgccacagagtctgttctgtcagtttaaaataattcatcagcatttttctccaaaggtgattcataa

SEQ ID NO: 395894 - DNA, 201 bp, Homo sapiens
ttcacttcaaaacctctggcctcctgagctgtgaaagaataatttctgctgtgccaagtcccctggtctgttttttatttatttatttatttatttatttattttttttttttttttgagacggagtctcgctctgtcgcccaggctggagtgcagtggcgggatctcggctcactgcaagctccgcctcccaggttcacg

SEQ ID NO: 395895 - DNA, 201 bp, Homo sapiens
ccggggtggagtcttatcatgtcagtgtgtcgcaatgaggccctaaacctcagaggtcttctcaggacacaggccctcaagcgcacaacctctgtaaaccrgccggagccagtctgtggtcggggtcccttatcaggaggaggttcctgaagtcagtctcctgcccagtcagagctgtggtcatggctgtggaacgtggtc

SEQ ID NO: 395896 - DNA, 201 bp, Homo sapiens
gttcagggtcaaggggaacatggacccagaagcggggttcactgaggaaatggggtctgtctagcagagccaagcccagagcagcctctgcgccccagtgkgactgcggtcggccttcggggccaccctgagaccctgaagacaccgaagcctgaggatgcccctttccccttggggagcttctccagcactggctctcag

SEQ ID NO: 395897 - DNA, 201 bp, Homo sapiens
ccaggccggtgcgtcccctcgaccccctcagcccttctctcaagccccagtttccttaggcccctgcccagatgcacctgaacagcgtccccatgaccagcccccccggccccccctcagccctgccccctcaccccactccaggctggtacctgttccagttccaccggctcctgcagtacgcacggcccaagccaggca

SEQ ID NO: 395898 - DNA, 201 bp, Homo sapiens
gtcccacctcgcaccactcctgtgctcacagaacacggcctcgggggctcacctcctgcccctgccccctcagtctccacccacacacacgcacatcacaycacacacacaggtgcacacacactgcagtgcacagtcactgtacacatgcaccacacacagggacacacttgccacacacacacaggcacactacgtgca

SEQ ID NO: 395899 - DNA, 201 bp, Homo sapiens
acgtgccctctctgcggctaagcacccccttctgctgcccccacagcctctcccagctgcccccgcccctcaacagcctttccaggcggcccagacctcaygacctccagccaaccgcccatccatcccctcactcccacactcgcctggcgtgcctcgctcatacgtgcattcgtgtggaacgagcgctttctggctcag

SEQ ID NO: 395900 - DNA, 201 bp, Homo sapiens
ggctttggctcctgctgtctatagattgatcaagcagaggtgagacagtgtcttccgcaccatgggctggagggcagagggcacacggtatggggtccccrgggctccccagcccccagcgggccatcggcgccagtcctcgcactatcacgggctcctggagagaagatggtttgcacggtcttcccacttctggagtgc

SEQ ID NO: 395901 - DNA, 201 bp, Homo sapiens
accactggaaccttgaacccaccagctggctgtacccggagccgtggcagcagccctgtgagtctctttcctactccctgaccatgctgccttcaagggtrcggctggccaagaccatccccaggggtccctgctgggcctgagggacactgtaggaggctggggcatgggagtccctgaggggtcgaaggctgggcccag

SEQ ID NO: 395902 - DNA, 201 bp, Homo sapiens
ggagctttctcctctgggctccaggcaggcagcccctgaggctggtggtggctgtggatggctctgccctagtgggctccactcctcagcttgccctggcmtgtgggccctgcgagctgagcagggtctgccctggggtcatctcgtgctgccgcacgcgaccttgcccactgctgctgcctctcagtgcccactcccctc

SEQ ID NO: 395903 - DNA, 201 bp, Homo sapiens
tctccaatgcgtcatttggcatagagccctgagctatgggaggcgggtgtctacggttggcgattgtgatttttcttttcggtgttgatattgccacatcrctgtgcaggggagcgatggaaaccccacaccccaggctgccagtcatgaccggggtgacaaggggtatgctcacccctcagtcgttactccctcgcctcg

SEQ ID NO: 395904 - DNA, 201 bp, Homo sapiens
cctgcccagtcagagctgtggtcatggctgtggaacgtggtcagttggcatctgcaggtggatgagctgcagtcatttgaaccttgctcatcctcatcgcrgggccagtgcgtgtttagccgctgcagaaaaagcagcagctgtggcgtgagggcagagtccgtcctctcagtgtagggcacgcggctcggctcgaccctt

SEQ ID NO: 395905 - DNA, 201 bp, Homo sapiens
ttccatgttgtaacagggccaggcaggtggggggcacgcctcaggggacccttgagcccctctcagggctggcactggccttggctgtcctgcccctcatycctgggttgggcaggtgggtgtcaccgcgggggttcaggtggcctgaactagtcaaggtctgctcagcaagctgcttcccgtgctggggtgcatcaggga

SEQ ID NO: 395906 - DNA, 201 bp, Homo sapiens
agagacgctgctcatctgcggaaaccctgattgcacccggtgaggcgaggggcctgcccaggggggtgaaggggctgaggacacacccatcctttcagctrctcattctggagtgtgggtggattttcttcccaaatggatgatttccctgagagcttctgatttctgtctccaatgcgtcatttggcatagagccctgag

SEQ ID NO: 395907 - DNA, 201 bp, Homo sapiens
ggggggcacgcctcaggggacccttgagcccctctcagggctggcactggccttggctgtcctgcccctcatccctgggttgggcaggtgggtgtcaccgygggggttcaggtggcctgaactagtcaaggtctgctcagcaagctgcttcccgtgctggggtgcatcagggatctgagcaggggctgacggctttctcac

SEQ ID NO: 395908 - DNA, 201 bp, Homo sapiens; identical to SEQ ID NO: 87321

SEQ ID NO: 395909 - DNA, 201 bp, Homo sapiens
gcagaatgctgtccgcgtgtggagcaacatcccagccataaggaggtatttcctgggcagctgaaagcgttcagggtcaaggggaacatggacccagaagyggggttcactgaggaaatggggtctgtctagcagagccaagcccagagcagcctctgcgccccagtgggactgcggtcggccttcggggccaccctgaga

SEQ ID NO: 395910 - DNA, 201 bp, Homo sapiens
tatcttcctttccagatcttattgcatatgaagtcaaggctaaccagcgaaatatagaaggtgagtgtttgcatactggcccacaccagacaaaagagacrgggcacagtggctcacacctataatcccagcactttgggagaccaatgtgggaggatcatttgagcccaggagtttgagaccagcctaggcaacatagtg

SEQ ID NO: 395911 - DNA, 201 bp, Homo sapiens
tcccagtccaccacctggtcttcccaaagggagctccagcgtgacttttccctccaaaacaaggctcaatcaggcccacctctgccatcctcaggagaggygggctgtcatgtccgctgctgtggttttctgtctggccttagatgctactgcttcgagtgtgtggatagcctggtcggccccgggacctcggggaaggtg

SEQ ID NO: 395912 - DNA, 201 bp, Homo sapiens
acgccatgagcaactgggtgtgctacctgtgcctgccgtcctcccgaagcgggctgctgcagcgtcggaggaagtggcgcagccagctcaaggccttctaygaccgagagtcggtaaggagcccgtggaggggcagcacccggcagcagcaggccctgacttacggccttccctcggttcccgctgcagaatgcaggcgcg

SEQ ID NO: 395913 - DNA, 201 bp, Homo sapiens
caggaggttctggggtgtgaagttagaaaactgcccttccggaagccgggcgcagtggctcacacctgtaatcccagcaccttgggaggccgaggcaggcrggttacctgaggtcaggaggtcgagaccagcctggccaacagggtgaaaccccgtctctactaaaaatacaaaaaatgctgggtgtggtggcatgcacct

SEQ ID NO: 395914 - DNA, 201 bp, Homo sapiens
atgggagggcagtcccacctcgcaccactcctgtgctcacagaacacggcctcgggggctcacctcctgcccctgccccctcagtctccacccacacacaygcacatcacaccacacacacaggtgcacacacactgcagtgcacagtcactgtacacatgcaccacacacagggacacacttgccacacacacacaggca

SEQ ID NO: 395915 - DNA, 201 bp, Homo sapiens
aggggcagggggatccctcagacccaggccggtgcgtcccctcgaccccctcagcccttctctcaagccccagtttccttaggcccctgcccagatgcacytgaacagcgtccccatgaccagcccccccggccccccctcagccctgccccctcaccccactccaggctggtacctgttccagttccaccggctcctgca

SEQ ID NO: 395916 - DNA, 201 bp, Homo sapiens
ttgtccaacatcttgaaatctaagtagccaaattccactgcctgtgatggggcgctgtccggcaaggaggggctgaacccccactccaccctctaaaatgrggaggccgagccttgacctggacaactggtcactgtttgaaagcatcctcccgctgctggaaggaggtgacacagctccagtcgtgcgttccccctgtag

SEQ ID NO: 395917 - DNA, 201 bp, Homo sapiens
ggcttcattgctgctggagggacaggggcagggggatccctcagacccaggccggtgcgtcccctcgaccccctcagcccttctctcaagccccagtttcyttaggcccctgcccagatgcacctgaacagcgtccccatgaccagcccccccggccccccctcagccctgccccctcaccccactccaggctggtacctg

SEQ ID NO: 395918 - DNA, 201 bp, Homo sapiens
ctccatgccagggcagaaactgcaaattgtcagcatttttcaaaaacagctttatcgaggcaccactgacatacagtaagttgcacgcattcagtgtgtcygactggatgagttctgagctagctccacacccatgcacccctcatcagagtaagagagcaacagagtaagagtccccatcactgcaggcttccctgtgcc

SEQ ID NO: 395919 - DNA, 201 bp, Homo sapiens
ggaaggatgtgagtaccgccgtgaactctcagacactgtagtgggagcgggggtgcgagcttcctcagaggaaatgccaaggatgaggcgggcaaggaggyggcagcaggggctgggaggagtcctgaacacacgggggcctctcggcagcctggtggggatcctgggtctgacaggagtcagcccaaccccgccggccca

SEQ ID NO: 395920 - DNA, 201 bp, Homo sapiens
ctgactccagggacgggactcgtcctaaagagtccggctcagatgcggttacgcgcctcacctcacccgggtgcggaccgccagtgcctccgccctgcackccgcgggccctgcccagctcttcccgccggagggcaggtggcccccgccccgcccctgccaggcgcgcgattttaaatccccccaacccccgtctctcag

SEQ ID NO: 395921 - DNA, 201 bp, Homo sapiens
cctgctccaattcgaaggaaagggtcagatgggaaggtattttataggaacagagcctagcactctgaaagccgaggcccccgagttttgggccttggggrttggccctttaacagggagcatgtgaggctggagctggctgcccgcctagcccatcaggttggcagggtcagggaaaaccacaggcctcacctgccccga

SEQ ID NO: 395922 - DNA, 201 bp, Homo sapiens
ccactggaaccttgaacccaccagctggctgtacccggagccgtggcagcagccctgtgagtctctttcctactccctgaccatgctgccttcaagggtgyggctggccaagaccatccccaggggtccctgctgggcctgagggacactgtaggaggctggggcatgggagtccctgaggggtcgaaggctgggcccaga

SEQ ID NO: 395923 - DNA, 201 bp, Homo sapiens
ctcaaaacaacaacaacaaaaatatacagttggctccttaatggtaggagggtcctctgatcgtccgtcagccttttcgagtccctgtaggggcacaatcyacgctcaccctctgggcccttctggtctctccccatccagagctgacgagtttgggctttttggaaagtggttctgacccgggacaactgaagcatgtgg

SEQ ID NO: 395924 - DNA, 201 bp, Homo sapiens
gtggcctgaactagtcaaggtctgctcagcaagctgcttcccgtgctggggtgcatcagggatctgagcaggggctgacggctttctcacatctgtgtccrtgtgtcctgacacagcatccccatggcggccatcccagccctggacccagaggccgagcccagcatggacgtgattttggtgggatccagtgagctctca

SEQ ID NO: 395925 - DNA, 201 bp, Homo sapiens
acgcttgcaccccctgcggtgcactcctgggctgccctccccaccttttggggccttgaacacatggcctttccccacgtgccctctctgcggctaagcamccccttctgctgcccccacagcctctcccagctgcccccgcccctcaacagcctttccaggcggcccagacctcacgacctccagccaaccgcccatcca

SEQ ID NO: 395926 - DNA, 201 bp, Homo sapiens
ctgaccccatgcagcccccagcgtgcccacatcactgcagctcacgtgtcctctggagcttcctctaaaaggcggtatttgtgccgcggcacgcgctctgygtcagctcctccctcggggttgcctgtctgtctcttccccactctaggcctgcctgggggaggaggggtccatgcacctctgtggccccagcactgggca

SEQ ID NO: 395927 - DNA, 201 bp, Homo sapiens
ggagtttggggctaatgggattcgggctgttatgtgatttgagggggtccagggaagtggagtccattgttgactggtgctatcaggagacggggttctgrtacttgactatcttaagttttggggggcttttttgttttttgtttttgagatggagtctcactctgttgcccaggctagagtgtagtggcacaatctggg

SEQ ID NO: 395928 - DNA, 201 bp, Homo sapiens
ggagcacatatctgccccatgcagccgatcaggagcctgatcccgcagcgcctgcacagcctgtccaaggtcttgctgcccaggaggggctgagaaagccrgggcctcctccagggccgttccagggctctgcagctcacaccagctgcagagtggagtggactccactgctctgtggatttcctagccagaggtgacatc

SEQ ID NO: 395929 - DNA, 201 bp, Homo sapiens
acacacatggaaagatgcctctaaacacctgactgcccctcaggccaccccccgggactccccaccccctcccctagaccggccaactgctgatgtcctgyacccttccccaccctgggcccatgctaaccctgcactggggcctttggaaatggcacttgtcttctgggccccgcaggcacagccaaatccatgaagaca

SEQ ID NO: 395930 - DNA, 201 bp, Homo sapiens
agtcaccatcccagatgtccacggcggatccttgcagaatgctgtccgcgtgtggagcaacatcccagccataaggaggtatttcctgggcagctgaaagygttcagggtcaaggggaacatggacccagaagcggggttcactgaggaaatggggtctgtctagcagagccaagcccagagcagcctctgcgccccagtg

SEQ ID NO: 395931 - DNA, 201 bp, Homo sapiens
ggacccttgagcccctctcagggctggcactggccttggctgtcctgcccctcatccctgggttgggcaggtgggtgtcaccgcgggggttcaggtggccygaactagtcaaggtctgctcagcaagctgcttcccgtgctggggtgcatcagggatctgagcaggggctgacggctttctcacatctgtgtccgtgtgtc

SEQ ID NO: 395932 - DNA, 201 bp, Homo sapiens
ccgctgggacacccactaaggcccacaagtgtctcagagcggcctcatgcgggagcacatatctgccccatgcagccgatcaggagcctgatcccgcagcscctgcacagcctgtccaaggtcttgctgcccaggaggggctgagaaagccagggcctcctccagggccgttccagggctctgcagctcacaccagctgca

SEQ ID NO: 395933 - DNA, 201 bp, Homo sapiens
cagcctgtcaactcctgcccaaaagccagctgggattttgagagggctctgcagctccatttggggactcatgctattttaacaatattaagtcttcttctttttttttttttttttttttttgagacacactctcactctgtcccccaggctggagtgcagaggcatgatcttggctcatagcaacctctgtctaccagg

SEQ ID NO: 395934 - DNA, 201 bp, Homo sapiens
ctgtccctttttgaagacatcaagaaaggtgagtcagtgatgtcccaaagacacacatggaaagatgcctctaaacacctgactgcccctcaggccacccmccgggactccccaccccctcccctagaccggccaactgctgatgtcctgtacccttccccaccctgggcccatgctaaccctgcactggggcctttggaa

SEQ ID NO: 395935 - DNA, 201 bp, Homo sapiens
atgaagcaagcttagtaaaaagtgagtatttcaagggattgtgaacttctgtctatatttcagtggagatgagaaacattagcgttggttctaggatgtarctcagaggagttttggatgacttaacgctttgagaatgtagcacgctgtctgccatgttgttttgtcttgcagtgccggtggtggtgtgcacattgagcc

SEQ ID NO: 395936 - DNA, 201 bp, Homo sapiens
agaagagaatcttgcaaaaagagtaatcattctaccctcttagctgggtggtctttctatgaatgcctgtgcatgtgacaaagctgcagcaaactcattaygaggatgtactgtcatgccaagcctactgaaaattaaaattacatcactgttagtgaagtgataccacagctatttaatttcatgcaattgactcaaggt

SEQ ID NO: 395937 - DNA, 201 bp, Homo sapiens
ttcagcggactcatgtggttctggattctctggcgcttttggcatgactcagaagaggtgctggtaagtgcaggagaagagcacttgtcgttttttgggtkggggagggaggatgtattaatagcttgtttatttttctgttgtagaccatttttctgtctggacatcgccctttgccaccactttttccatatgtatata

SEQ ID NO: 395938 - DNA, 201 bp, Homo sapiens
gctgaaaaatcactctggctgcagggagtggaggctgtcgcccagagagagcgccgtcgggtgagaggagcagaaagccggaagccaacgctggggcagcygtggcgtttaggagagtgacaggcagagccgcccgcgaggtggcccgagacgcagaccggagggcggagggctgggggtgcgaggtagggagcgggtgcg

SEQ ID NO: 395939 - DNA, 201 bp, Homo sapiens
aacccctaggggttaatatgtttttatttaacatgcttttattttatattttattttattttattttattttagtttgttatgttatgttatgttatgttwtgttttatgttatgttatgttatgttatgttatgttatgttatgttatgttatgttatttgagacagggtctcattctgtcatccagactggagtgcagc

SEQ ID NO: 395940 - DNA, 201 bp, Homo sapiens
gggcggcggcggtgaggcctagggagggcgcggtccagggtcccggtgcctggctgcggaatttagggtagagtctgttcggcagcctttaatcggagacktcacgtggccgctttttaatgctgaaaaatcactctggctgcagggagtggaggctgtcgcccagagagagcgccgtcgggtgagaggagcagaaagccg

SEQ ID NO: 395941 - DNA, 201 bp, Homo sapiens
cccctaggggttaatatgtttttatttaacatgcttttattttatattttattttattttattttattttagtttgttatgttatgttatgttatgttatrttttatgttatgttatgttatgttatgttatgttatgttatgttatgttatgttatttgagacagggtctcattctgtcatccagactggagtgcagcgt

SEQ ID NO: 395942 - DNA, 201 bp, Homo sapiens
ttgatgatggcaatatatagttacaggaaataataatgaaaacttactatgggccaggcactgttgttagcacttaatgtgtaaatttatcaaatcttcayattattatttccactttataggtgaagaagttgagctatagatgggttaggtgctttgccaagctcatacctgagattcagatcctgctgtcttgttcta

SEQ ID NO: 395943 - DNA, 201 bp, Homo sapiens; identical to SEQ ID NO: 87332

SEQ ID NO: 395944 - DNA, 201 bp, Homo sapiens
cctaggggttaatatgtttttatttaacatgcttttattttatattttattttattttattttattttagtttgttatgttatgttatgttatgttatgttttatgttatgttatgttatgttatgttatgttatgttatgttatgttatgttatttgagacagggtctcattctgtcatccagactggagtgcagcgtga

SEQ ID NO: 395945 - DNA, 201 bp, Homo sapiens
ctaggggttaatatgtttttatttaacatgcttttattttatattttattttattttattttattttagtttgttatgttatgttatgttatgttatgttttatgttatgttatgttatgttatgttatgttatgttatgttatgttatgttatttgagacagggtctcattctgtcatccagactggagtgcagcgtgat

SEQ ID NO: 395946 - DNA, 201 bp, Homo sapiens
gtctcaattttgttgatcttttctaaaaaccagctcctggattcattaattttttgaagggtttttgtgtctctatttccttcagttctgctctgatcttmgttatttcttgccttctgctagcttttgaatgtgtttgctcttgcttttctagttcttttaattgtgatgttagggtgcccattttagatctttcctgct

SEQ ID NO: 395947 - DNA, 201 bp, Homo sapiens
caaactctgaaaaatcagtgtctaggttggcagcagtactctggaaactgataaaaccaaattcggtcctatatttcaatttccccttctaagttaatacmtgattgctgcccatcatacagtacttcaaccctaaactacagcaatttctgtcaacatttctgttgtataaaagttccatgctttgaagagcctatggga

SEQ ID NO: 395948 - DNA, 201 bp, Homo sapiens
tcaaatagatagctaaacaaagcaaaattaatttatttttctgagtaagttagtgacctgctaacaagttcacagtcccttaactaaaacctttggggctrgcaccccagaatcaacacattcaaatttctagtgcaaaataatgaatcttcactaattgaaaaccaaaattagcctcttgtcagttttggtcagtttttg

SEQ ID NO: 395949 - DNA, 201 bp, Homo sapiens
ctgtcgcccagagagagcgccgtcgggtgagaggagcagaaagccggaagccaacgctggggcagccgtggcgtttaggagagtgacaggcagagccgccygcgaggtggcccgagacgcagaccggagggcggagggctgggggtgcgaggtagggagcgggtgcgaggtagggagcagctgccgaagccgagttagtgg

SEQ ID NO: 395950 - DNA, 201 bp, Homo sapiens
tggcgcgatcctagctcactgcagcctctaactcctgggctcaagtgattctccagcctcggcctcccaaagtgttgggaatacaggcgagccactgcgcytggtctcactaaagtgtttaaaacaattgctggtgcctgctaaggaccgtacaagtattctttaactgttgttgttattaaggaactgaggcccaggaaa

SEQ ID NO: 395951 - DNA, 201 bp, Homo sapiens
gggtttcatttatccatccactgatcaaagatatattaagaccaattctgtgccaagcacaggcctacagtggtgaacaggacagatggagcttacagtaygtagctgcaaaactacagtgtcctgctctcaacatttaaatagatccagcatatgggagtattactatatagaactatatgaaaactaactctttaaaca

SEQ ID NO: 395952 - DNA, 201 bp, Homo sapiens
gctcagtcagcagaaggatcgcttgagctaaggtcacgccactgcactctagcctgggcgacagagcctatctttaaaaaaacaaacaaaacagccgggcrcgtggctcacgcctgtaatcccagcactttgggaggccaaggtgggtggatcacctaaggtcaggagttcgagaccagtctggccaacacggggaaaccc

SEQ ID NO: 395953 - DNA, 201 bp, Homo sapiens
ctgctggagatggtggagtccgtcagtgagtgtggggctggggatgggggcctcgccggcctgtagcggacagcgcgggtccctgggacgctctcaccttractggggcgcctgaagaggccgcgtcccgaggcatgctgggacctgtagtccgcgtgtctcctgaagccgcgactcgaggagagggaccccgctggccgg

SEQ ID NO: 395954 - DNA, 201 bp, Homo sapiens
ttacagtttatttcccaccctcacattaatttttccctatcctagatttactgccacctcaccccattttggtctctgttctctacatctgtgcctactcygtgagctttgttgtttatgctagtttgcagtgacttccaactcatactccaccaaaacacacgtgggttcaaaaacttaacacaaaaatgcaacgcagta

SEQ ID NO: 395955 - DNA, 201 bp, Homo sapiens
taggggttaatatgtttttatttaacatgcttttattttatattttattttattttattttattttagtttgttatgttatgttatgttatgttatgttttatgttatgttatgttatgttatgttatgttatgttatgttatgttatgttatttgagacagggtctcattctgtcatccagactggagtgcagcgtgatc

SEQ ID NO: 395956 - DNA, 201 bp, Homo sapiens
aggggttaatatgtttttatttaacatgcttttattttatattttattttattttattttattttagtttgttatgttatgttatgttatgttatgttttatgttatgttatgttatgttatgttatgttatgttatgttatgttatgttatttgagacagggtctcattctgtcatccagactggagtgcagcgtgatca

SEQ ID NO: 395957 - DNA, 201 bp, Homo sapiens
tgtctgtaggcaacagcttaggctttgccatcacacagcatctcactggtaaatcattaataattacaggccttatcataacattatgaaaattaaatgarttaaaacttataaaatgcttagtgtggtatctggcacatggtaaacactcaataactaccagtcatcttttagagtgggggaggataaaaacagtctgcc

SEQ ID NO: 395958 - DNA, 201 bp, Homo sapiens
ggggttaatatgtttttatttaacatgcttttattttatattttattttattttattttattttagtttgttatgttatgttatgttatgttatgttttatgttatgttatgttatgttatgttatgttatgttatgttatgttatgttatttgagacagggtctcattctgtcatccagactggagtgcagcgtgatcat

SEQ ID NO: 395959 - DNA, 201 bp, Homo sapiens
atatgtttttatttaacatgcttttattttatattttattttattttattttattttagtttgttatgttatgttatgttatgttatgttttatgttatgttatgttatgttatgttatgttatgttatgttatgttatgttatttgagacagggtctcattctgtcatccagactggagtgcagcgtgatcatggctcac

SEQ ID NO: 395960 - DNA, 201 bp, Homo sapiens
tatgtttttatttaacatgcttttattttatattttattttattttattttattttagtttgttatgttatgttatgttatgttatgttttatgttatgttatgttatgttatgttatgttatgttatgttatgttatgttatttgagacagggtctcattctgtcatccagactggagtgcagcgtgatcatggctcact

SEQ ID NO: 395961 - DNA, 201 bp, Homo sapiens
gaatgccgatcttccctgaggtgctggcttgttcgtaacacacacttgtttcagagtgtgtgataattaagtgcataaatgtttatggagcatcttctatrtggctgctcctttctaggtgctgaggatatagcagaatacgagagagaatgaagtgtacattctggagaggagagaccagtagaaaagaaagaccttttt

SEQ ID NO: 395962 - DNA, 201 bp, Homo sapiens
atgtttttatttaacatgcttttattttatattttattttattttattttattttagtttgttatgttatgttatgttatgttatgttttatgttatgttatgttatgttatgttatgttatgttatgttatgttatgttatttgagacagggtctcattctgtcatccagactggagtgcagcgtgatcatggctcactg

SEQ ID NO: 395963 - DNA, 201 bp, Homo sapiens
tcctcatacacactcgtcaagtcactataattattcaaaatagctaaataaatgtcaacattttaataaagctgatttagtaattaataaaacttaacagytgaagttgtggatgttaaataaaagtactttagtcactcattgagttgccgactaattgccccatgcattttttttttttaaagcactgttaccttaatt

SEQ ID NO: 395964 - DNA, 201 bp, Homo sapiens
tgtttttatttaacatgcttttattttatattttattttattttattttattttagtttgttatgttatgttatgttatgttatgttttatgttatgttatgttatgttatgttatgttatgttatgttatgttatgttatttgagacagggtctcattctgtcatccagactggagtgcagcgtgatcatggctcactgt

SEQ ID NO: 395965 - DNA, 201 bp, Homo sapiens
gtttttatttaacatgcttttattttatattttattttattttattttattttagtttgttatgttatgttatgttatgttatgttttatgttatgttatgttatgttatgttatgttatgttatgttatgttatgttatttgagacagggtctcattctgtcatccagactggagtgcagcgtgatcatggctcactgta

SEQ ID NO: 395966 - DNA, 201 bp, Homo sapiens
gtaggtaacccgacctttctctctggctgcccttaacattttttccttcatttcaactttggtgaatctgacaattatgtgtcttggagttgctcttctckaggagtatctttgaggtgttctctgtatttcctgaatttgaatgttggcctgccttgctagattggggaagttctcctggataatatcctgcagagtgtt

SEQ ID NO: 395967 - DNA, 201 bp, Homo sapiens
aaattattaacacagctgagttaaaccagagtggctgctctcttcacaaatcactgatttctgctaaaatgttagcttttttattgcatcatgaaggcacrgtaagatcatttggcaaattgtcaaggtatttttctagagcctcacctacaccatttcaactcatgacctgtaagctatttgctgttcatactcacagta

SEQ ID NO: 395968 - DNA, 201 bp, Homo sapiens
actcctaacctcaggtgatctgcctgccttggcctcccaaagtgctgggattacaggcgtgagccaccacacctggcctaatttttgtattttttagtagrgacagtttcaccatgttggtcaggctagtctccactcctgacctcaggtgatccacccgcctcggcctcccaaattgctgggattacaggcgtgagccac

SEQ ID NO: 395969 - DNA, 201 bp, Homo sapiens
tagctgggattacaggtgctggccaccatgcccagcttttttttatttctttctgagatggagttttgctcttgttgcccaggctggagtgcaatggcacwatctcggtcggctcactcccgggttcaagcgattctcctgcctcagcctcctgagtagctggaattacaggcatgcgccaccacagccggataattttgt

SEQ ID NO: 395970 - DNA, 201 bp, Homo sapiens
caagccttctcaaaggaatggacctccacccgctgtatagcatatgggaaaatacttaacgtgggaggagtcccaaaaggattttaagtacaacatttgaytgatgatggcaatatatagttacaggaaataataatgaaaacttactatgggccaggcactgttgttagcacttaatgtgtaaatttatcaaatcttcac

SEQ ID NO: 395971 - DNA, 201 bp, Homo sapiens; identical to SEQ ID NO: 87335

SEQ ID NO: 395972 - DNA, 201 bp, Homo sapiens
ctgttccacatcagcttatgcattggaaattttgtatctttaaaaaaagatttgaggaacagaactgtgttttgatgttaacaaattgtacgaacacaagrcttaagaaataagagcagatgctgccatgatggtggctacttgaaggctgcaaattctcctgtagagggaggacaagagctaattttaaaaaagtcatct

SEQ ID NO: 395973 - DNA, 201 bp, Homo sapiens
tctgcccgttctcagatctcaagctacatgctgggagaaccactactctcttcaaagctcagttggaaatgcagaaatcacccatcttctgcatcgctcaygctgggagctgcagacgggagctgttcctattcggccatcttggctcctccccacaaggcatactgctaactagtttttggggccagaggaatgggtgaa

SEQ ID NO: 395974 - DNA, 201 bp, Homo sapiens
ctgccatgttgttttgtcttgcagtgccggtggtggtgtgcacattgagccccggtatagacagttcccccagctgaccagatcccaggtgttccagagcragttcttcagcggactcatgtggttctggattctctggcgcttttggcatgactcagaagaggtgctggtaagtgcaggagaagagcacttgtcgttttt

SEQ ID NO: 395975 - DNA, 201 bp, Homo sapiens
tagagatgggcgagaaaagcaaattgaacttttgactggtcagggagggcatttgagctgaaagcggaacaagtaggaggagccagttgtgcgagggtgargagtgttctgggagtaaggaacagcaggaatcaaggtctcgcatgggaccacagtcactcccgtgtttaaggaacagaaagtccagggcatctcccactg

SEQ ID NO: 395976 - DNA, 201 bp, Homo sapiens
attgcacattaaagttacaaattaaagtggcttggtcaagaatgagaatggagttgtggatcttttttttgggggggggtggggtggtggagaggtggtgsgaggggggcgggggacaaatctcactctgtcacccaggcttgagttccgtggtgtgatctcggctcactgcagcctccacctcctgggttcaagcaattc

SEQ ID NO: 395977 - DNA, 201 bp, Homo sapiens
ccagcatatgggagtattactatatagaactatatgaaaactaactctttaaacagtaaagggttatggctttttcattttccaggtcaggaagtcaagartttttcttctttaaaaagggaggtactaagaaggttccctttcctcataaacccctaggggttaatatgtttttatttaacatgcttttattttatattt

SEQ ID NO: 395978 - DNA, 201 bp, Homo sapiens
gttcccacccggaccagagcctgtgtggccaatctgccaggctggaactccacaagctgctcctgggagcatgctgctgcttctggatccacctgaccccracaaccttccagcccttaacggagacaaatactctttaatttctaacaaagaatatttcccatgattcaaccttccatttcttgaccttctgtccactta

SEQ ID NO: 395979 - DNA, 201 bp, Homo sapiens
ttgccctacgcatcgcctctcggctggcccgggatgagggctggctggcagagcacatgctggtgagggcctggtgagaagcagggcagctgccggggacmgggcaggggtggggcctggccagtctgcctcagcctcacctccctcctgccaggtgccaggctggtgggcggggactctacttgaaggcccaaagctttg

SEQ ID NO: 395980 - DNA, 201 bp, Homo sapiens
agacagcctttcctcatcagatcttgggtccatctcaggacaggggtgggtggagcaggaccttctttggtcttacatctcaagttttccttgtttggtcyttcctttctttcacttctcctaacaggtcgactccgggccatcaaccctgagaacggcttctttggggttgcccctggtacctctgccaccaccaatccc

SEQ ID NO: 395981 - DNA, 201 bp, Homo sapiens
cccccagggaagatcatcatgcacgacccatttgccatgcggcccttttttggctacaacttcgggcactacctggaacactggctgagcatggaagggcrcaagggggcccagctgccccgtatcttccatgtcaactggttccggcgtgacgaggcagggcacttcctgtggccaggctttggggagaatgctcgggtg

SEQ ID NO: 395982 - DNA, 201 bp, Homo sapiens
ccctaagctttagtttccacatcagttgaatgagggtagttgtgatagtacctatctcatgagattgttggaggattaaatagtgcataaaaagggtttakcacactgacaaatacacagtaaattctcaataataaatacaggctggatttttttttaatgaaaggaaaaggaaggacttttgaacattcttacagaagg

SEQ ID NO: 395983 - DNA, 201 bp, Homo sapiens
ccaggtcccagtagccctcctcccctgcccctggggccacactgatcatctatcctgctttagcggaaaccaccccagcttctaccccagacagactcaakctcccgtatccatgctctgagctttcttccttccccaggctaacaccctctgagtctgagctgccagcaagctgctgttccaccctcccaccaacaccaa

SEQ ID NO: 395984 - DNA, 201 bp, Homo sapiens
ccagctggctggcccgcacagaccccaaggatgtggcacgagtagagagcaagacggtgattgtaactccttctcagcgggacacggtaccactcccgccyggtggggcccgtgggcagctgggcaactggatgtccccagctgatttccagcgagctgtggatgagaggtttccaggctgcatgcagggtaaccagggca

SEQ ID NO: 395985 - DNA, 201 bp, Homo sapiens
gccaggggcagagacccccagagggctgggaccttggggaacaccccttagatgggacaaagcctggaggaagggactgagatgtgattgggtggggaaamataaggccaacagaagacctggagtcaaagttggacttgaaaaagtgggtctagggacaagggaaacctgctggccaccatcttcctgacaatcccctct

SEQ ID NO: 395986 - DNA, 201 bp, Homo sapiens
cccagtagccctcctcccctgcccctggggccacactgatcatctatcctgctttagcggaaaccaccccagcttctaccccagacagactcaagctcccstatccatgctctgagctttcttccttccccaggctaacaccctctgagtctgagctgccagcaagctgctgttccaccctcccaccaacaccaaagctct

SEQ ID NO: 395987 - DNA, 201 bp, Homo sapiens
atgtggctgagaccagtgatggtggcgtgtactgggagggcattgaccagcctcttccacctggtgttactgtgacctcctggctgggcaaaccctggaarcctggtatgtgcggtggggaaggtgtggcacagcctccaggcctcagcaccttaatggtggaaaagctttctccacaacctccaaccatcttctaggact

SEQ ID NO: 395988 - DNA, 201 bp, Homo sapiens
accaactgcaacctgctcttcatggtccctgcatgcagacatgttttagcaggctgcagcccaagctttctgtctctccaccacctgccttgtccactctygatgacagcaactagctcattgcctctgtttctcctataggcttaactggcatgggctgagccccttgggctggccatcatgccgtagcatccagaccct

SEQ ID NO: 395989 - DNA, 201 bp, Homo sapiens
tcaaagttacatcatgtgcggctgggagggcggtggcggatggggggcggggcctcgaagtcgggggccgaagagtggacccagtcctccaatgggagagrtgggtttggcggtttggaggcaggggttggggcggcggctgggctgacctggagcctggagccccggggccgagggagctggcctgccagcggggcggag

SEQ ID NO: 395990 - DNA, 201 bp, Homo sapiens; identical to SEQ ID NO: 87345

SEQ ID NO: 395991 - DNA, 201 bp, Homo sapiens
atatctaaccccattcccttgagccctggtcagtgccaagtgccagtagcttggcacaaacattagtgccctgccaaaccccaattcctctcccactcttwtctcacatagctcagctggccgcaccttcatggctaaacaacctgagctcttggagatgccctggctcccctctctctgctccttatcacacaaggttct

SEQ ID NO: 395992 - DNA, 201 bp, Homo sapiens
tcccctctctctgctccttatcacacaaggttctaggcagctgatgaggcaaaaaaaaaaaaagaaccctgcaagaatgtgtgcccatgtatgtgtgtgtygggggtcgacatgaccttggaaataatagtgtttgtatttcctctgccaggtgacaaggagccctgtgcacatcccaactctcgattttgtgccccggct

SEQ ID NO: 395993 - DNA, 201 bp, Homo sapiens
aactggcgtcatggggtgtttgtgggcagcgccatgcgctctgagtccactgctgcagcagaacacaaaggtgagcaccctcaccattcctccctctcctstgtgtgcacacagcacgtcctctctcccttcctgagccagaccttccttttgtccacccctggagtctgatatggccccacctcttcccacttctatctt

SEQ ID NO: 395994 - DNA, 201 bp, Homo sapiens
tccaaagaaaagggctgcctgtgactctgttcattggtgatctaggggtacccctggtatacgaggccttcaactggcgtcatggggtgtttgtgggcagmgccatgcgctctgagtccactgctgcagcagaacacaaaggtgagcaccctcaccattcctccctctcctgtgtgtgcacacagcacgtcctctctccct

SEQ ID NO: 395995 - DNA, 201 bp, Homo sapiens
cccctctcccccagctggctggcccgcacagaccccaaggatgtggcacgagtagagagcaagacggtgattgtaactccttctcagcgggacacggtacmactcccgcctggtggggcccgtgggcagctgggcaactggatgtccccagctgatttccagcgagctgtggatgagaggtttccaggctgcatgcagggt

SEQ ID NO: 395996 - DNA, 201 bp, Homo sapiens
atacatgtgtcctgaacacatcccacacaccaactgcaacctgctcttcatggtccctgcatgcagacatgttttagcaggctgcagcccaagctttctgyctctccaccacctgccttgtccactctcgatgacagcaactagctcattgcctctgtttctcctataggcttaactggcatgggctgagccccttgggct

SEQ ID NO: 395997 - DNA, 201 bp, Homo sapiens
tgaacacccaaccctgctccattcctctggcagcccagccacccgagagacagcctttcctcatcagatcttgggtccatctcaggacaggggtgggtggwgcaggaccttctttggtcttacatctcaagttttccttgtttggtccttcctttctttcacttctcctaacaggtcgactccgggccatcaaccctgaga

SEQ ID NO: 395998 - DNA, 201 bp, Homo sapiens
agcactatccataaagtttggcccattaggaaaagaggaaagctgcctcctctgctccaactctcctcctgccacttggctcccactgtcccctgtataayaaccactgtctaaaggtcagtattgttaccgtcacccttcccctgtccctccaaagcattcaccccaatccttcctacaaacaaaatcaggtcagtgctt

SEQ ID NO: 395999 - DNA, 201 bp, Homo sapiens
ggcggatgggagagggtggggattttggccccgtggcttccccactccccaggtctgaccagcaacctccagcagagaaggcaccatgtccactcaggggscacacagtggtgcttcatacatgtgccactgacttagtcccaacccccctccaggacacctgaaggtgccaagtgtgacctgggctcctgaggttatccc

SEQ ID NO: 396000 - DNA, 201 bp, Homo sapiens
ggatgccttcctccacaggccgcaccatgtatgtgcttccattcagcatgggtcctgtgggctccccgctgtcccgcatcggggtgcagctcactgactcrgcctatgtggtggcaagcatgcgtattatgacccgactggggacacctgtgcttcaggccctgggagatggtgactttgtcaagtgtctgcactccgtgg

SEQ ID NO: 396001 - DNA, 201 bp, Homo sapiens
ctctgaccgcgcgatctctatctgccactctcagaacttcctctctctcctcgctcctctctgctgagccaggtctccgcatatcctcctttccttcccaratacctccctcggacctctaacgggctctcagccagcgccccagggtacttcgagaggcagcagggccctggggacaagggtacgtgagccccgggagac

SEQ ID NO: 396002 - DNA, 201 bp, Homo sapiens
cttgatagaggaggagagtaacatccccttcatggtctttgctctctcgggtttactccaccttgagtccaggccaatcagagcagacgttgcttctctgkctcccagggccatgagaggacagacaacaggacgctgacctcctgagaattaagcccatgaaccccagccagtgacactcattccccagtggtcaacctt

SEQ ID NO: 396003 - DNA, 201 bp, Homo sapiens
gtccaaagaaaagggctgcctgtgactctgttcattggtgatctaggggtacccctggtatacgaggccttcaactggcgtcatggggtgtttgtgggcascgccatgcgctctgagtccactgctgcagcagaacacaaaggtgagcaccctcaccattcctccctctcctgtgtgtgcacacagcacgtcctctctccc

SEQ ID NO: 396004 - DNA, 201 bp, Homo sapiens
ccaaagaaaagggctgcctgtgactctgttcattggtgatctaggggtacccctggtatacgaggccttcaactggcgtcatggggtgtttgtgggcagcsccatgcgctctgagtccactgctgcagcagaacacaaaggtgagcaccctcaccattcctccctctcctgtgtgtgcacacagcacgtcctctctccctt

SEQ ID NO: 396005 - DNA, 201 bp, Homo sapiens; identical to SEQ ID NO: 87351

SEQ ID NO: 396006 - DNA, 201 bp, Homo sapiens
aggtgctccagcagctggagactcagaagtgcgtagggattcaggatctcagaagactgccctggccctgcgcctgcactgcctgggtctaggggtggagragaaatggggcagccagtggcatagatggaggatagtagggggctgggtgcagaaagtgaggggtgagctgaggttgactgtaggagagccctgaccccc

SEQ ID NO: 396007 - DNA, 201 bp, Homo sapiens
ttctgggttatctcacttataactgtatgactttgggcaagttgctgaatctctttgggcctcagtttgctcatctgtaaaatggggctaataattgcacmtactgcataaggctgttgtgaagattaaatgagagaatacctgtaaggccataaagcatggttcatagtacctgttgtataatgtgggattcacagaata

SEQ ID NO: 396008 - DNA, 201 bp, Homo sapiens
  misc_feature (1)...(201): n = A,T,C or G
gggctgtaaggtcagcttcccacatgctcccatcctcttcttggctggggtccccaagggcctgtggggcacagagggcatgtgcctaataaatgctggcngaggaccctctcccaggtctcctgggaagcccatcacctccttcctcccttcaccccccaggatctgacagtgctctgccatctggaacagctgctcttg

SEQ ID NO: 396009 - DNA, 201 bp, Homo sapiens; identical to SEQ ID NO: 87352

SEQ ID NO: 396010 - DNA, 201 bp, Homo sapiens; identical to SEQ ID NO: 87353

SEQ ID NO: 396011 - DNA, 201 bp, Homo sapiens
agaaatggggcagccagtggcatagatggaggatagtagggggctgggtgcagaaagtgaggggtgagctgaggttgactgtaggagagccctgacccccvccttcccttctgggtacaggtctcctgaagagttggctgctctggtgaaggcagaactgggcttcctggagagctgcctgcgggtgaaccccaagtctta

SEQ ID NO: 396012 - DNA, 201 bp, Homo sapiens
gaccctgtgagcccctctgtgctctgtggacccgtcaccctgagctcctcagttgctgaaccatccctggctgacagcgcctgtcctgcctccctgccctycctgcccccaggtgctgcaggccagtgataatgccatagagtccctggacggcgtcaccaacctaccccggctgcaggagctgctactgtgcaacaaccg

SEQ ID NO: 396013 - DNA, 201 bp, Homo sapiens
ctcagttgctgaaccatccctggctgacagcgcctgtcctgcctccctgccctccctgcccccaggtgctgcaggccagtgataatgccatagagtccctrgacggcgtcaccaacctaccccggctgcaggagctgctactgtgcaacaaccgtatccttccttctgggtgcctttcagacagtgggtaaagtgaggtgc

SEQ ID NO: 396014 - DNA, 201 bp, Homo sapiens
actttcctagtccttcccaacacattagttttatcacatcaccacagcccacctccattcctgccaaactcatctctgcctcatcaggaccagtccccatrggggaccagtctttgtttacccagcaccctccactggcccctgtacctccgaactccaggcctcctcctcctcacccaccccactggttaccccactcgc

SEQ ID NO: 396015 - DNA, 201 bp, Homo sapiens
  misc_feature (1)...(201): n = A,T,C or G
aactgccgacgagaggtgctccagcagctggagactcagaagtgcgtagggattcaggatctcagaagactgccctggccctgcgcctgcactgcctgggnctaggggtggaggagaaatggggcagccagtggcatagatggaggatagtagggggctgggtgcagaaagtgaggggtgagctgaggttgactgtaggag

SEQ ID NO: 396016 - DNA, 201 bp, Homo sapiens
aggaaggcctcaggaggatgggagcagaggaggatccaagagaaaccctccttttccctgccctctcctcagggtgcctgcttaccatcatcctgctgatrcgggcactggaccccctgctgtatgagaaggagaccctgcagtacttccagaccctcaaggcaagttctgtctgcagaacagaccagggggaggcccagc

SEQ ID NO: 396017 - DNA, 201 bp, Homo sapiens
ataagtgagactgggggctggaagtactccaaggagagggtagggtgttggagtggccaggagctcaccagtgtcctgaccacagccccatgcctcctggraccccacagagctggagctggtgcagaatgccttcttcactgaccccaatgaccagagtgcctggttttatcaccgttggctcctaggccgaggtgagca

SEQ ID NO: 396018 - DNA, 201 bp, Homo sapiens
gaaatggggcagccagtggcatagatggaggatagtagggggctgggtgcagaaagtgaggggtgagctgaggttgactgtaggagagccctgaccccccscttcccttctgggtacaggtctcctgaagagttggctgctctggtgaaggcagaactgggcttcctggagagctgcctgcgggtgaaccccaagtcttat

SEQ ID NO: 396019 - DNA, 201 bp, Homo sapiens
tgagctggaatcctgtaaggagctgcaggagctggagcctgagaataaatgtgaggccccattccgtgagagtctgctcccagagcccgctgaggaaaccyctttccagtgtggccctgagaggacagcaggaaggcctcaggaggatgggagcagaggaggatccaagagaaaccctccttttccctgccctctcctcag

SEQ ID NO: 396020 - DNA, 201 bp, Homo sapiens
cccatcacctccttcctcccttcaccccccaggatctgacagtgctctgccatctggaacagctgctcttggtcacccatcttgacttgtcacacaatcgyctccgaaccctgccacctgcactggctgccctgcgctgccttgaggtaaagtacccatgtctccgtccctgtcacgggtggttcttttcctcttcctctc

SEQ ID NO: 396021 - DNA, 201 bp, Homo sapiens
cgtggctgcagattctgtccccacagccctcacctgcccacattctggtactggggcctcagtaaggcccagaatggggagggatatccaggatgggtccmctgagctggtgctgaaagggatgttggagccaaatgcatcctccgtggagtgcactgaggtgtttctaggggttcctgaggggactctaggggtcccagc

SEQ ID NO: 396022 - DNA, 201 bp, Homo sapiens
ccaactactcttcctggcattaccgctcctgtctcttgccccagctgcacccccagccggattctggaccacaggggcgcctccctgaggatgtgctgctyaaaggtaaccagggtcagggatgctcaggaggactctgcagtgccacccttccagcccccatgcctgaccctgttcctgaacctgtcactcaggtttatt

SEQ ID NO: 396023 - DNA, 201 bp, Homo sapiens
cgtgccccctgcagaagagctagccttcactgacagcctcatcacccgaaacttctccaactactcttcctggcattaccgctcctgtctcttgccccagytgcacccccagccggattctggaccacaggggcgcctccctgaggatgtgctgctcaaaggtaaccagggtcagggatgctcaggaggactctgcagtgc

SEQ ID NO: 396024 - DNA, 201 bp, Homo sapiens
tccgtgagagtctgctcccagagcccgctgaggaaacccctttccagtgtggccctgagaggacagcaggaaggcctcaggaggatgggagcagaggaggwtccaagagaaaccctccttttccctgccctctcctcagggtgcctgcttaccatcatcctgctgatgcgggcactggaccccctgctgtatgagaaggag

SEQ ID NO: 396025 - DNA, 201 bp, Homo sapiens
cagaacagaccagggggaggcccagcaggcaggaggcaggcagctgacatgcataccctgcccacctcatccactccaggccgtggaccccatgcgggcarcgtatctggatgacctgcgcagcaagttcttgctggagaatagcgtgctcaagatggagtatgccgaggtgcgtgtgctgcacctggctcacaaggtatg

SEQ ID NO: 396026 - DNA, 201 bp, Homo sapiens
aatcccgagtcaccaggacctccttgtgctgtttcttccccaggctggtcacagcttcatcttccttcagagtgaccgctagcccactcctcccacacatkccagcacatctcaccctggagcaacctccaatacctgaaggccaaatactttccagagattcctgagaagttgtccaggctccactttcctagtccttcc

SEQ ID NO: 396027 - DNA, 201 bp, Homo sapiens
  misc_feature (1)...(201): n = A,T,C or G
ggtgctgcaggccagtgataatgccatagagtccctggacggcgtcaccaacctaccccggctgcaggagctgctactgtgcaacaaccgtatccttcctnctgggtgcctttcagacagtgggtaaagtgaggtgccaccctgggaagggacagacagcaggcagggtatgtgccaccctcttgcagggcaggagagagg

SEQ ID NO: 396028 - DNA, 201 bp, Homo sapiens
cactgctcttatctccaaaggcacctggctcagcctctctgtgccagccagctaagttagtttggctttctctcccccaccttcacgtcatattacatacytgaaatacccttcctgcccgctctttccaaaactcaagccctgccttctctgatgcagattttttcatgagactcacttcctctcttaagcctgcttgac

SEQ ID NO: 396029 - DNA, 201 bp, Homo sapiens
  misc_feature (1)...(201): n = A,T,C or G
agtacttccagaccctcaaggcaagttctgtctgcagaacagaccagggggaggcccagcaggcaggaggcaggcagctgacatgcataccctgcccaccncatccactccaggccgtggaccccatgcgggcaacgtatctggatgacctgcgcagcaagttcttgctggagaatagcgtgctcaagatggagtatgccg

SEQ ID NO: 396030 - DNA, 201 bp, Homo sapiens
ttctgtccccacagccctcacctgcccacattctggtactggggcctcagtaaggcccagaatggggagggatatccaggatgggtcccctgagctggtgytgaaagggatgttggagccaaatgcatcctccgtggagtgcactgaggtgtttctaggggttcctgaggggactctaggggtcccagccaggtagctcct

SEQ ID NO: 396031 - DNA, 201 bp, Homo sapiens; identical to SEQ ID NO: 87368

SEQ ID NO: 396032 - DNA, 201 bp, Homo sapiens
gagcccccgcgcacgcgcctccgagccggcctcttccgccgcaagtccctccccaagcctgcagagtgcgctgcgtttcgatgagccgggacgtggcgccrctctagccagcgcctgggctctgtggcgggcgccgcagctccgcgtcccccgcgcctcctcccagcgcaggtgggtccgcccgcggggggcgggggtgcc

SEQ ID NO: 396033 - DNA, 201 bp, Homo sapiens
ccccaccttcacgtcatattacatacctgaaatacccttcctgcccgctctttccaaaactcaagccctgccttctctgatgcagattttttcatgagacwcacttcctctcttaagcctgcttgactcaaccttcccagtttcaagattgctaatcacaatgtgattagtgactatgatgcaaggctgtacctggcaaat

SEQ ID NO: 396034 - DNA, 201 bp, Homo sapiens
catagtacacctcataagccatcaaagtggcaaagagaggcacacaggccacttgccgggatgagggctctgcacagtggaatgcctaaaggagaagacaraatatgatgaacctgagaacttctccgtcccttacctcaactttaagggaacaccttcaggaaaggaaagaaggcccaactccacaagaatgttagctct

SEQ ID NO: 396035 - DNA, 201 bp, Homo sapiens
cctcaagcaattctcccatctcagcctcccaaaatgctgggattacaggcataagccaccatgcctggcccctgtgcattttaatatgggtgacagcaggsgtagggaaagcaatccccctcacccacaagacattagtctttttagtccttttttcggaattttcctggctgttctctttctttttatttatttatttat

SEQ ID NO: 396036 - DNA, 201 bp, Homo sapiens
agccatgatcacaccactgcactccagtctagacgacacagcgagacactgtattaaaaaaaagaaaagaaagaaaagtaaaaaactttttgtttgagagyagagattttggaattgcaactaaagggttgtggacctgtgctttcctctatttcaggcaagactttattgaactgcacattttttacttatttactagac

SEQ ID NO: 396037 - DNA, 201 bp, Homo sapiens
tgacagcaggcgtagggaaagcaatccccctcacccacaagacattagtctttttagtccttttttcggaattttcctggctgttctctttctttttatttatttatttatttatttatttatttatttttgagacaatctcactctgtcagccaggctagagtgcagtggcacaatctcagcttactgcaacctccgcct

SEQ ID NO: 396038 - DNA, 201 bp, Homo sapiens
cactgccacccagggcaaagcagtccaggaggccaaaggcagtcctccaagaagggctgcaggtgccagccttgaaagcacagagtggggaccgggcacgrtgactcacacctgtaatcccagcacttttgggaggcagaggcgggtgggtcacttgaggtcaggcattcaagaccagcttggccaacatggtgaaacccc

SEQ ID NO: 396039 - DNA, 201 bp, Homo sapiens
cagaagttgaaatggggaggagacctgggcagtgctcttggaaattaacccttcacttctctgcccctgtgtttcagttcaaatcagccttctcatctgcrgaaaccacagaattgagtggcaaatgtgtggtggctttggcaacaggtgaagtttgggggcagctggtaataagaaagggcatggaggatgtgtagtgcg

SEQ ID NO: 396040 - DNA, 201 bp, Homo sapiens
agaaacgcgggcgcgctcctgacgcagctactacgtcatagttccgcgccgccccagccgggcggggtgggtgtgtcacccagatcgctccgcccccatcygcaggttctaactttggcctgggactctgcccctctacctcagcacagaatcgccccgggtcctactacagaatcaatccttgaacactgcctccacgtc

SEQ ID NO: 396041 - DNA, 201 bp, Homo sapiens
caggtggcaggtaagcggcgcacgctcgtcccacttagggcttaggatctccaggcttcgcgctcatccccggcccggaagctgcgcctctggctcagccrgactgggtcaggccagggaccggagcttcagatagcccaggactctgcgtggacgcgccccgaggggctgccgcgccagattcccatatccaggcagcca

SEQ ID NO: 396042 - DNA, 201 bp, Homo sapiens
aacaggcacagagaaagaaagaatgtgcctgagcagtgaaggagaagccagtgtgccagacgtagcactgatggggcactgagggcctgaccgagatgcarccccgccccaactgaggcaagtcaaggttcttggctggtccctgaagacgcttaattcctcaaaggagcccagggaaagaagaagagatttttgttttgc

SEQ ID NO: 396043 - DNA, 201 bp, Homo sapiens
cctgcctgccatctccacctgtctgtgtgcccgcagatcccaatatcctgagcctgagtggtaaggtgctgccatcctgtgaccttgctcgacgctatggmcttcgggatgtggacggtgaggaccctggcacagcagtcagccttgactgctgttccctctgttccctgcccactcctccctcggtctctccagccaagg

SEQ ID NO: 396044 - DNA, 201 bp, Homo sapiens
tcattcatcaccctccctgtgccttccagacgatcctgaacaccaggaataaggcattctgggaaacccctgcctccatgtgggatgatatcaacaacgtyggactcaggtgggtgctccactgccaggacccatgttctctcactcacttagccaactcgacggccaggcctttccttacatgccctctccttttccctc

SEQ ID NO: 396045 - DNA, 201 bp, Homo sapiens
cacagccccgccaacttgggtcgatcctgaggccctgaccatacctgccatctactgaggaaccgcgagtactcaggtagccaatcacagcattgcagagrtgagcgcaaaactggggaagtttgcggtgtaaaacctgtaaagccacttgaagacagaagctggagatcttatcagtgataaacactgtggagagagggc

SEQ ID NO: 396046 - DNA, 201 bp, Homo sapiens
acaatccccagtggtcagaatggtaaggctggctcctctcagctcctcctctgcctcatccatggacagttcctttgcttgtgctcctcttggttggctaragtaggcatcacactggggagcgtgggcagctgagaccttggggctcctgggaaggacagggtgggtggagcattcacagtagaagcagagagggcaggg

SEQ ID NO: 396047 - DNA, 201 bp, Homo sapiens
agcttagaaggtccaaacactatttggcactaccagatccttccacttagcaaagacagcagatcctggtgccagggcacagggctcacctggatgtgggsaggagtggctctggcacctgccaatactttgggtcctacaggccctgcttgaggtctttggcctctttggtctttggtctttttctcctggaacagaagt

SEQ ID NO: 396048 - DNA, 201 bp, Homo sapiens
ggatgtggacggtgaggaccctggcacagcagtcagccttgactgctgttccctctgttccctgcccactcctccctcggtctctccagccaaggtgaggrtatctgaggagtgggaaatgagaatctaatcctcctcctcctgttgttcccaggccgccccgtccaagactatttgtctttgagctctgttctctcacac

SEQ ID NO: 396049 - DNA, 201 bp, Homo sapiens; identical to SEQ ID NO: 87390

SEQ ID NO: 396050 - DNA, 201 bp, Homo sapiens
tgggtatggtggcgggcacctataggcctcattttcccccattcctgtgaactccttgggcattagacttcctgagtccagaggtacaaaaacttaagatyagataagtcctaaaaggtagaagttgaactgagggcataaacagattgtgggtaatatccactcacctccaacaagagctgtaggaccttggcttggtag

SEQ ID NO: 396051 - DNA, 201 bp, Homo sapiens
agttgcactacatcacctcattcatttcacacagccccgccaacttgggtcgatcctgaggccctgaccatacctgccatctactgaggaaccgcgagtaytcaggtagccaatcacagcattgcagaggtgagcgcaaaactggggaagtttgcggtgtaaaacctgtaaagccacttgaagacagaagctggagatctt

SEQ ID NO: 396052 - DNA, 201 bp, Homo sapiens
gcacagagaaagaaagaatgtgcctgagcagtgaaggagaagccagtgtgccagacgtagcactgatggggcactgagggcctgaccgagatgcagccccrccccaactgaggcaagtcaaggttcttggctggtccctgaagacgcttaattcctcaaaggagcccagggaaagaagaagagatttttgttttgcattgt

SEQ ID NO: 396053 - DNA, 201 bp, Homo sapiens
tctgcatactcccctgcctgccatctccacctgtctgtgtgcccgcagatcccaatatcctgagcctgagtggtaaggtgctgccatcctgtgaccttgckcgacgctatggccttcgggatgtggacggtgaggaccctggcacagcagtcagccttgactgctgttccctctgttccctgcccactcctccctcggtct

SEQ ID NO: 396054 - DNA, 201 bp, Homo sapiens
agcctgcagtatatgttcaatgtcccctatggtgtgggcaaagctgcggtgaggacccagtggcataggagctgaggaggtaaaagacagtgatgttacckatagctcaggaggtacaatccccagtggtcagaatggtaaggctggctcctctcagctcctcctctgcctcatccatggacagttcctttgcttgtgctc

SEQ ID NO: 396055 - DNA, 201 bp, Homo sapiens
taacctttaggttctgcagcacacggcggcgcagcttgcgcgtcacagaggggctggtcaggatggcatcgagcacatgagagccagcgggactttgggcragggacagaagctgtggtcccgtcaaggcacccagacttcgaagtacaagaccaggagtggagaagtgcagcagatgctggagcagtagagacccaagga

SEQ ID NO: 396056 - DNA, 201 bp, Homo sapiens
agatgattgggaaccacggggcctggctctctcagactccagaatagtccctcctaacacctgaagcagagttctgaccacgaagctgccatgtgtgtctycacagtagacaagaaaatcatcacacacctcagcggctagtcccaggaccagctcctccagggtctccgtgggaccatcctttccatcctcctcctcctc

SEQ ID NO: 396057 - DNA, 201 bp, Homo sapiens
actccaggcacaatccctcgggggccaatgtgtgcctgtggtgtgcgattcaagccaggagagtgaagtgcgaagcctgtttgagcaagtggatcgggaayagcaagggcgtctagatgtgctggtcaacaatgcttatgcaggggtccaggtaccctttgaactttgttcccaactccacatttctgacctccccctcag

SEQ ID NO: 396058 - DNA, 201 bp, Homo sapiens
tgtcctactccaggcacaatccctcgggggccaatgtgtgcctgtggtgtgcgattcaagccaggagagtgaagtgcgaagcctgtttgagcaagtggatsgggaacagcaagggcgtctagatgtgctggtcaacaatgcttatgcaggggtccaggtaccctttgaactttgttcccaactccacatttctgacctccc

SEQ ID NO: 396059 - DNA, 201 bp, Homo sapiens
tcctgagctccagggctctcagcagtgccctgtccaactgggcccaaaccttgtcactctgcatactcccctgcctgccatctccacctgtctgtgtgccygcagatcccaatatcctgagcctgagtggtaaggtgctgccatcctgtgaccttgctcgacgctatggccttcgggatgtggacggtgaggaccctggca

SEQ ID NO: 396060 - DNA, 201 bp, Homo sapiens
ttaacccttcacttctctgcccctgtgtttcagttcaaatcagccttctcatctgcggaaaccacagaattgagtggcaaatgtgtggtggctttggcaayaggtgaagtttgggggcagctggtaataagaaagggcatggaggatgtgtagtgcggtagcatccagtgcccagatctggctcgggagttggttgaggaa

SEQ ID NO: 396061 - DNA, 201 bp, Homo sapiens
agttagagcgcagagcagcccacacgcgacaaagcggtttcaagggactgaatcccaacagttcctgcagcatctcactgccagtcctgttcgtggacaamgctagggcctgagtctctacttccttcattatattgtgcaccatcagatctgaaaagggaagaaagacacactttgaagagacttagtagagaatacagt

SEQ ID NO: 396062 - DNA, 201 bp, Homo sapiens
tcttaccttggctcctcctcttagccctagtgaggttctcccctaccccccaacctcgccccaacacacacacagtctccaggcttccctcagagtaagtmtttgcttccacagacctgcctcctttgcctgtgagtcatggcagctcccatgaatggccaagtgtgtgtggtgactggtgcctccaggggtattggccgt

SEQ ID NO: 396063 - DNA, 201 bp, Homo sapiens
ctacctcgttcttccccagtctcgggagcctctttcaatgctgacagcgcccggcggaaatatcccagagcttccgggctcaggtgcgggtgcgaatctgragccggctccgagcgcccatccggaggcggccagggttgccgcttacggcctggtaaggggcgccccgaccccttggccccgcgcccccgtttgccacca

SEQ ID NO: 396064 - DNA, 201 bp, Homo sapiens; identical to SEQ ID NO: 87391

SEQ ID NO: 396065 - DNA, 201 bp, Homo sapiens
ggggactagggacaagaagggcatcaggcagtcttaactccatttcatgcaaaatacagttgcactacatcacctcattcatttcacacagccccgccaasttgggtcgatcctgaggccctgaccatacctgccatctactgaggaaccgcgagtactcaggtagccaatcacagcattgcagaggtgagcgcaaaactg

SEQ ID NO: 396066 - DNA, 201 bp, Homo sapiens
ccaggggtattggccgtggcattgccttgcagctctgcaaagcaggcgccacagtttacatcactggccgccatctggacacccttcgcgttgttgctcargaggtgagtgcttcctctgggaccacagttgcagaaaccacccgagagagcccttccacttaacagctcctttcctaatcccttacctgaaactataata

SEQ ID NO: 396067 - DNA, 201 bp, Homo sapiens
atagattccaacaggaagtcaggtacagaaagcagtcacttcaatgtaatgtgaatatggtaaattataagagggagatatgcacagaatactctaggggwgttggggagcatccagatgacataggagagtggctagggaaagtggtttgggaaagcgtcctggaggaggtaggtggttcttgaactgagttttgaaagg

SEQ ID NO: 396068 - DNA, 201 bp, Homo sapiens
  misc_feature (1)...(201): n = A,T,C or G
acaccaggaataaggcattctgggaaacccctgcctccatgtgggatgatatcaacaacgtcggactcaggtgggtgctccactgccaggacccatgttcnctcactcacttagccaactcgacggccaggcctttccttacatgccctctccttttccctctggcctcccccatctctttcttctcccttccattccatt

SEQ ID NO: 396069 - DNA, 201 bp, Homo sapiens
caaaatacagttgcactacatcacctcattcatttcacacagccccgccaacttgggtcgatcctgaggccctgaccatacctgccatctactgaggaacygcgagtactcaggtagccaatcacagcattgcagaggtgagcgcaaaactggggaagtttgcggtgtaaaacctgtaaagccacttgaagacagaagctg

SEQ ID NO: 396070 - DNA, 201 bp, Homo sapiens
cttctgtttactgtctcattctgaactttctaaattcttcttccccctaggtccactttcctcttgtaatacttaccagatgattgggaaccacggggccwggctctctcagactccagaatagtccctcctaacacctgaagcagagttctgaccacgaagctgccatgtgtgtctccacagtagacaagaaaatcatca

SEQ ID NO: 396071 - DNA, 201 bp, Homo sapiens
ggactcaggtgggtgctccactgccaggacccatgttctctcactcacttagccaactcgacggccaggcctttccttacatgccctctccttttccctcyggcctcccccatctctttcttctcccttccattccatttgtcccacttacctctggagaagttccatccaggtgagtctgtacctgagaatgtcaactct

SEQ ID NO: 396072 - DNA, 201 bp, Homo sapiens
cagttatgcctctgttactgttggaatgatgttacactctcatataatcaagtcatgcctgatggatgtgatcagtcacctgtgggagtaaccacgagatwatcggcaaatctgtgactaaagcatgtaagaacacccaccgctccaattttggtactctggtaacaatcccaaggaagcaggattagaatgcaattgtga

SEQ ID NO: 396073 - DNA, 201 bp, Homo sapiens; identical to SEQ ID NO: 87402

SEQ ID NO: 396074 - DNA, 201 bp, Homo sapiens
cccttggttcatagtctttgtaaatctgatgtccctgatgtcactcaccaaaccatgatggaacatctgtgcactgtacatacctgtggtacatagacatstgcccactgaaatggacacatactagtcacataaaaaggggtcacatgaataatgatttatctttttacaaccttagaagagtggccttcattttcttcg

SEQ ID NO: 396075 - DNA, 201 bp, Homo sapiens
ctgcccactgaaatggacacatactagtcacataaaaaggggtcacatgaataatgatttatctttttacaaccttagaagagtggccttcattttcttcrcagcattgaggggtgtgtctactgatcatcaaaagccaatcaactggtcaaatgggtctttagcctatactaccatgccttctccctttccctgaagcca

SEQ ID NO: 396076 - DNA, 201 bp, Homo sapiens
ggggactgtcttgatgctttatgtggagcctggctttcagtattgctgacgagaggtaaagaaatcaggttttagagataagagccaagtcttactgtaakaaaaaggttggatgcaagcaaacatctttttctaagtttggtatgtaatctgatgtgctcatcatgccacactctgccagtatatctccaacatctgctg

SEQ ID NO: 396077 - DNA, 201 bp, Homo sapiens
cacactctgccagtatatctccaacatctgctgacttcctatcctatggtgacttttctttgcttatcagtatgttgatgatagagttgttgagaaagcaraattcaataccagctttagctagatattgttgatctctgagtacgtatgtagagcacttgttgctagctaatacatgacttccttgggtttcttgttagt

SEQ ID NO: 396078 - DNA, 201 bp, Homo sapiens
tgatccatgtccccaactaggaaatttgtccttttttccactagagatggagacagggtagggtagccccttatcagctcttatcaaccttaaggcattamctttggtgagcatccagatctactgaattactgctggtaaatgaacgagaacataaccaaaaatagtttagtactaggttaccttaggaggaggggctga

SEQ ID NO: 396079 - DNA, 201 bp, Homo sapiens
gcccagtcagttctctggcagttagcagtcaggatgctctgatttacggttttttccactactgaagccctttatctgataagttcaaaaggccatctgarttagtgagattcaaagctaagttctgctccgatatttctgatatatgaacagaattttcccttttgtcctgtttagcagtttgtacaccttgccaacttt

SEQ ID NO: 396080 - DNA, 201 bp, Homo sapiens
atgagtaagacccgagaccagaatgagggtaatggagatggaaacaaaaatcaaacagaaagagcttttaagtgaaaaattagatcttataaaaggaccaygtaattttaaatgactctaaagaattgtattccagacacctgaatgattgatgggattaatacacgagatgggtattgggatatggcttatgacagaaga

SEQ ID NO: 396081 - DNA, 201 bp, Homo sapiens
tttctggggctgacatcatcaaagtgggaattgggccaggtaagctggttcattggggccactggctaccccccttcagtggcaaacacctgtggagcacrtcattcttacccttatcatgttcttcctaggctctgtgtgtactactcggaagaaaactggagtggggtatccacagctcagcgcagtgatggagtgtgc

SEQ ID NO: 396082 - DNA, 201 bp, Homo sapiens
ggactgaactcttcgtcggcctagaggggccagattgaagtgtcggccagctagaggttctgggtgcgtccttgaagatggtccctgaggaagatgtgtgycaggcttggcttttggcaggggattgtggagtgctagtctttgttgctgaggaggattctgttccatgggctcagccaggttcactgagtcagtaacaga

SEQ ID NO: 396083 - DNA, 201 bp, Homo sapiens
gtggtaacaggagagatggtagaagagctcatcctttctggggctgacatcatcaaagtgggaattgggccaggtaagctggttcattggggccactggcwaccccccttcagtggcaaacacctgtggagcacgtcattcttacccttatcatgttcttcctaggctctgtgtgtactactcggaagaaaactggagtgg

SEQ ID NO: 396084 - DNA, 201 bp, Homo sapiens
agttgcttttgagggtggccatgtgagcaccttggccagattaatctctttcccccctccatgatggtggcaggggcaggagctgacttcgtgatgctggrtggcatgctggctgggcacagtgagtcaggtggtgagctcatcgagagggatggcaagaagtacaagctcttctatggaatgagttctgaaatggccatg

SEQ ID NO: 396085 - DNA, 201 bp, Homo sapiens
ccactccgttttgctacatcagtccatttctcctctgctgcattatgatattcctagttcatttaatcatgatactggatgattatccatagttctaagcwgaaaatgtctatttggtcagtgtagtatctctgacccttggttcatagtctttgtaaatctgatgtccctgatgtcactcaccaaaccatgatggaacat

SEQ ID NO: 396086 - DNA, 201 bp, Homo sapiens
atctcacaagatccttttcatttcggaactcaaagcagacatactctggggttcccatcattgctgccaatatggatactgtgggcacctttgagatggcyaaggttctctgtaaggtagggctttcctcatgccccatccctattggtgtccagttagcccagctgactgcagaggtgtttgcatccccacccccatgcc

SEQ ID NO: 396087 - DNA, 201 bp, Homo sapiens
gaggcccattgggactgaactcttcgtcggcctagaggggccagattgaagtgtcggccagctagaggttctgggtgcgtccttgaagatggtccctgagraagatgtgtgccaggcttggcttttggcaggggattgtggagtgctagtctttgttgctgaggaggattctgttccatgggctcagccaggttcactgag

SEQ ID NO: 396088 - DNA, 201 bp, Homo sapiens
ttctcgccggcaactagaggaacctgttggcgtggcccagaaggcttagcgggattgcacgaggttagttgctaagcaaggtggtctttggtcaactgcckcctggaccaaggcaacaggaagtgagtacctctattccggaaactagttatgaaccctccccgccccccgtcgccaacattccttcgttcccctaaatca

SEQ ID NO: 396089 - DNA, 201 bp, Homo sapiens
tccactttcctgccactccgttttgctacatcagtccatttctcctctgctgcattatgatattcctagttcatttaatcatgatactggatgattatccrtagttctaagctgaaaatgtctatttggtcagtgtagtatctctgacccttggttcatagtctttgtaaatctgatgtccctgatgtcactcaccaaacc

SEQ ID NO: 396090 - DNA, 201 bp, Homo sapiens
gatccatgtagccctggttgatgaattctgctattgtttgtggctccattagtcttaaggacttcatatcctttttctatttttgattgctgtgtctttgyggaatgtcttgtcatttctttaaggttgatagttatgcagttttatttttactttatttttattgccattcagtaactgcttaggaatctttctgttgcc

SEQ ID NO: 396091 - DNA, 201 bp, Homo sapiens; identical to SEQ ID NO: 87404

SEQ ID NO: 396092 - DNA, 201 bp, Homo sapiens
ctctctctccctcttgccttccatgtcccccatctctgccaattctgtctctctctgtctctgtccctctgtccccatgacccaaggcaggtgcctccctyaccgcgttgcttggtgtagcttgacttctcaggctggtgattatgctgctgcctggggcaggtgactccttttaccctttgattagggcctaaccttgcc

SEQ ID NO: 396093 - DNA, 201 bp, Homo sapiens
gggcagcctttccatatgctcctcctcctgtcccggacctatgaatcctctgatcgcatcacccttgagttactcatcggtcagtggggcttggattgggrcgggtgaaggccctatgtttggtggggagaggctggcattagggtcagagaggtctttaggctcctccctgccccactcctcacctctgccagataaggc

SEQ ID NO: 396094 - DNA, 201 bp, Homo sapiens
gagttctagaagctgtcagtgttgtgcacctctagactgcagagctagcaggtggacggaccaggcccagggatgctggagcactctgatgtgtgtgcagytgggtcttgaggctgggacaagtgtccatgcagggaactatgtggatttcctgggatggatcgttgagtgggtttcttcattgggcagtttttcggatgt

SEQ ID NO: 396095 - DNA, 201 bp, Homo sapiens; identical to SEQ ID NO: 87423

SEQ ID NO: 396096 - DNA, 201 bp, Homo sapiens
cttcaacccctggtgcccaggtgagcagctggggtctggagcagagggtagatgggagggaaagacagggaagggcttcctgccctcggatgtggcggggwgcctaggtgcctgaccccaggagaagccagcctcccattgggcagatgagaggaccgaggcctggtgcagaaaggtggccagcccagggtcacacagcca

SEQ ID NO: 396097 - DNA, 201 bp, Homo sapiens
gaacccctaccacctccaccagggatgccctgggctctggaagctgcagccccaggaagcaggcagggttggccttcaggatcaggactgccctttcatamggggcaggtggatctgcccctccagcccaggcactgtgatagtcaggcaggcagaaggtgacaggagccctcgtctctcctccccacctcagagttcagt

SEQ ID NO: 396098 - DNA, 201 bp, Homo sapiens
cttttttttcaaagataacatccttctaatgttttggtgtgtgaaaatgctcttttctctttggaacgacgatcatagcagagagtgattacttttcttcmacctatgctcttgtcaaaactgaaagtatttgaaaatattgtgttgggcccccaaagtctcattttgaagttttcttggttttggaaaccccaggtgaga

SEQ ID NO: 396099 - DNA, 201 bp, Homo sapiens
acgagctgatagtgcgccgcgggcagcctttccatatgctcctcctcctgtcccggacctatgaatcctctgatcgcatcacccttgagttactcatcggwcagtggggcttggattgggacgggtgaaggccctatgtttggtggggagaggctggcattagggtcagagaggtctttaggctcctccctgccccactcc

SEQ ID NO: 396100 - DNA, 201 bp, Homo sapiens
taagggcctgggctcctcatggggcttcactgacacggagctgtgtccttgcagagggcatgctagtagtgaacggtgtggacttgctgagctcgcgctcrgaccagaaccgccgagagcaccacacagacgagtatgagtacgacgagctgatagtgcgccgcgggcagcctttccatatgctcctcctcctgtcccgga

SEQ ID NO: 396101 - DNA, 201 bp, Homo sapiens
agctcttactccccactccacccccaattactccaggcccatgaccttgtctctgcccacagggacattggaggcaatgaaacagtgacactgcgccagtygtttgtgcctgtgcgaccaggcccccgccagctcattgccagcttggacagcccacagctctcccaggtgcacggtgtcatccaggtggatgtggcccca

SEQ ID NO: 396102 - DNA, 201 bp, Homo sapiens
gtaagtgctccttacccagccctgccccctggatggctgggcacctcagggctgtggacatggagaccccaggagcagtggggagtccctgggggaagcckcatgtagggaagcaggcctcagtgacgccatgcctcttctccacagcggaccgtgtgaccatgccagtggcctacaaggaataccggccccatcttgtgg

SEQ ID NO: 396103 - DNA, 201 bp, Homo sapiens
gtctgtcctcctcagctgagagctaaaaggctttaatgggaccagagactcagcctggcatttctgggggggataggaagctaatgataagggcctgggcwcctcatggggcttcactgacacggagctgtgtccttgcagagggcatgctagtagtgaacggtgtggacttgctgagctcgcgctcggaccagaaccgcc

SEQ ID NO: 396104 - DNA, 201 bp, Homo sapiens
agttctagaagctgtcagtgttgtgcacctctagactgcagagctagcaggtggacggaccaggcccagggatgctggagcactctgatgtgtgtgcagcygggtcttgaggctgggacaagtgtccatgcagggaactatgtggatttcctgggatggatcgttgagtgggtttcttcattgggcagtttttcggatgtt

SEQ ID NO: 396105 - DNA, 201 bp, Homo sapiens
aaggattttccttttttttcaaagataacatccttctaatgttttggtgtgtgaaaatgctcttttctctttggaacgacgatcatagcagagagtgattmcttttcttcaacctatgctcttgtcaaaactgaaagtatttgaaaatattgtgttgggcccccaaagtctcattttgaagttttcttggttttggaaacc

SEQ ID NO: 396106 - DNA, 201 bp, Homo sapiens
agccaggatcgtgtgccacaagcaccaaaggagcactaaatccttgaaggatttagttcacctctgagtggttagcagaacagaatacaaaagtgggatgsgaggcaaggagtcccgttagaggactagtgaaatcatgattcccaggggaggtctgggaatcaatttttcagaggcccatgtggaaaggagaaaatgaaa

SEQ ID NO: 396107 - DNA, 201 bp, Homo sapiens
gaagttaaatagcttctcataagcctcacagctaacaagtggtagaaaagggagtagagtggtccagggaaacccctcagaaccaggttccaagccaaatsctttgccctgaaaaaaactcatccttggagttagggatgttggctcattctcttagaggacaatagttaatgcacaggttctatgtctggaaagggtccc

SEQ ID NO: 396108 - DNA, 201 bp, Homo sapiens; identical to SEQ ID NO: 87439

SEQ ID NO: 396109 - DNA, 201 bp, Homo sapiens
gcgacccggggcaagtcactcattatacaagtcagtttcctcacctgtaaaaggggataatcaaggctgccttgcttcctatactcgggatcagaagagawaacgggtatgaaactgcttcactagtcgtaaagtcagccattgagtgtgagggattactgatattgccaaagtgctctgccaggagcctcccagaccagc

SEQ ID NO: 396110 - DNA, 201 bp, Homo sapiens
gaaagtctccccttgggctctgccaggaagctcccacccttgggaccaagccctgtcccatagctcctgggatcaggggaaggaggccgggagtcaggccrccctcagaccctctggctcactcattcctgctcacccccaccccccacaggtgaatagtgacaaggtgtactggcagcggcaggatgatggcagcttcaa

SEQ ID NO: 396111 - DNA, 201 bp, Homo sapiens
agtagtgaacggtgtggacttgctgagctcgcgctcggaccagaaccgccgagagcaccacacagacgagtatgagtacgacgagctgatagtgcgccgcrggcagcctttccatatgctcctcctcctgtcccggacctatgaatcctctgatcgcatcacccttgagttactcatcggtcagtggggcttggattggga

SEQ ID NO: 396112 - DNA, 201 bp, Homo sapiens
tgtagggaagcaggcctcagtgacgccatgcctcttctccacagcggaccgtgtgaccatgccagtggcctacaaggaataccggccccatcttgtggacyagggggccatgctgctcaatgtctcaggccacgtcaaggagagcgggcaggtgctggccaagcagcacaccttccgtctgcgcaccccagacctctccct

SEQ ID NO: 396113 - DNA, 201 bp, Homo sapiens; identical to SEQ ID NO: 396016

SEQ ID NO: 396114 - DNA, 201 bp, Homo sapiens
gagagaactggagggaaccagttttgtgtgttctggggacacagaggacattgtgtacgtggaccatgaggattggcggcaggagtatgttcttaatgagyctgggagaatttactacgggaccgaagcacagattggtgagcggacctggaactacggccaggtatggtgcggctggccagggtcacatacacccagagg

SEQ ID NO: 396115 - DNA, 201 bp, Homo sapiens
aggattttccttttttttcaaagataacatccttctaatgttttggtgtgtgaaaatgctcttttctctttggaacgacgatcatagcagagagtgattamttttcttcaacctatgctcttgtcaaaactgaaagtatttgaaaatattgtgttgggcccccaaagtctcattttgaagttttcttggttttggaaaccc

SEQ ID NO: 396116 - DNA, 201 bp, Homo sapiens
actccacccccaattactccaggcccatgaccttgtctctgcccacagggacattggaggcaatgaaacagtgacactgcgccagtcgtttgtgcctgtgygaccaggcccccgccagctcattgccagcttggacagcccacagctctcccaggtgcacggtgtcatccaggtggatgtggccccagcccctggggatgg

SEQ ID NO: 396117 - DNA, 201 bp, Homo sapiens
tctcagtcactttctatactggtgtcagtggtaccatcttcaaggagaccaagaaggaagtggagctggcaccaggggcctgtaagtgctccttacccagycctgccccctggatggctgggcacctcagggctgtggacatggagaccccaggagcagtggggagtccctgggggaagcctcatgtagggaagcaggcct

SEQ ID NO: 396118 - DNA, 201 bp, Homo sapiens
actttcacttccattttatgacccagaaagtgaggaacagagaagttaaatagcttctcataagcctcacagctaacaagtggtagaaaagggagtagagwggtccagggaaacccctcagaaccaggttccaagccaaatgctttgccctgaaaaaaactcatccttggagttagggatgttggctcattctcttagagg

SEQ ID NO: 396119 - DNA, 201 bp, Homo sapiens
acaattgggagcctccagggggacatctctgagctgttggttcaggtacctaagattccaagatgggtgtactttgcctctcattcgcacatcagaggctrtggcatggaaccccattatagcataaggtgtgccacccccctgtggtgactggccacttaataaacattccagaactcactcctccagatggctgttgtc

SEQ ID NO: 396120 - DNA, 201 bp, Homo sapiens
tcctcatggggcttcactgacacggagctgtgtccttgcagagggcatgctagtagtgaacggtgtggacttgctgagctcgcgctcggaccagaaccgcygagagcaccacacagacgagtatgagtacgacgagctgatagtgcgccgcgggcagcctttccatatgctcctcctcctgtcccggacctatgaatcctc

SEQ ID NO: 396121 - DNA, 201 bp, Homo sapiens
ttactttcacttccattttatgacccagaaagtgaggaacagagaagttaaatagcttctcataagcctcacagctaacaagtggtagaaaagggagtagwgtggtccagggaaacccctcagaaccaggttccaagccaaatgctttgccctgaaaaaaactcatccttggagttagggatgttggctcattctcttaga

SEQ ID NO: 396122 - DNA, 201 bp, Homo sapiens; identical to SEQ ID NO: 87459

SEQ ID NO: 396123 - DNA, 201 bp, Homo sapiens
ggctgtcacctctgccctccatccctccttccagtttgaccacggggtgctggatgcctgcttatacatcctggaccggcgggggatgccatatggaggcygtggagacccagtcaatgtctcccgggtcatctctgccatggtgagcaccctcacatctctgagtcctactgtgtgtgtgcctgctgcctcgccacaccc

SEQ ID NO: 396124 - DNA, 201 bp, Homo sapiens
ctctggctcactcattcctgctcacccccaccccccacaggtgaatagtgacaaggtgtactggcagcggcaggatgatggcagcttcaagattgtttatrtggaggagaaggccatcggcacactcattgtcacaaaggccatcagctccaacatgcgggaggacatcacctacctctataagcacccagaaggtaccat

SEQ ID NO: 396125 - DNA, 201 bp, Homo sapiens
caccaacccatcagcgtgggtgggcagcgtggagatcctgcttagctacctacgcacgggatattccgtcccctatggccagtgctgggtctttgctggcrtgaccaccacaggtagtggagggactgggacaggagtggcccgggccctacagggagaagggaggaaagccaggcttacccagccctgcccagatgtggc

SEQ ID NO: 396126 - DNA, 201 bp, Homo sapiens
  misc_feature (1)...(201): n = A,T,C or G
tcctgacctgttccatctcagccccaggactcagtactgcggttgccaacactgctgccaggtgaggggctcccacgggtactgtggtgccgagtccaggnggcccacactatcagaggccgtgcctggatccagcaaggtggggtgtgggccagctgtgtacctgtcagccccagctaggctgttcccaacaccaagact

SEQ ID NO: 396127 - DNA, 201 bp, Homo sapiens
ctggtgccaggggccatcacagcggtggctcccaccaaagcccagcctaagcccccagacctcacccctgctccctccctagcatcttctccccatttccygcccagaggcctggcctcttctctccgccccctacagcagtttggcccctccctcccacataagtcacttaccaggtctgtccctgcggcatccagtctg

SEQ ID NO: 396128 - DNA, 201 bp, Homo sapiens
acatgaagtacgacacgcctttcatttttgctgaggtgagggctgggctccaggtgccttcttgggcttcagtcatgggttctctggtcccaacttcacckctgactgaccagctctgcgacccggggcaagtcactcattatacaagtcagtttcctcacctgtaaaaggggataatcaaggctgccttgcttcctatac

SEQ ID NO: 396129 - DNA, 201 bp, Homo sapiens
ggctggaaagcccaggtggtcaaggccagtgggcagaatctgaacctgcgggtccacacttcccccaacgccatcatcggcaagtttcagttcacagtccrcacacaatcagacgctggggagttccagttgccctttgacccccgcaatgagatctacatcctcttcaacccctggtgcccaggtgagcagctggggtct

SEQ ID NO: 396130 - DNA, 201 bp, Homo sapiens
cagccccaccaggcctttgcctcttggccctgcctggaagtaaggaaagggccactgtgctgagtgttgggggacctgtttcctgtctttagctgtagggyttatgtgagtctccctacagtaaaagacagggttggatgatggtttcttaaggcagatcctccctggacagtctgtggctccttagctgctgtgagccca

SEQ ID NO: 396131 - DNA, 201 bp, Homo sapiens; identical to SEQ ID NO: 87432

SEQ ID NO: 396132 - DNA, 201 bp, Homo sapiens
taagcagtcaggacatagcctagccattaagttatagacttaatttatagacttcctatcatactacgttctattatatatccctgcctccctccttcagrgagctcagaaacaccttcaagataatcagatcccactcctccttttactttcacttccattttatgacccagaaagtgaggaacagagaagttaaatagc

SEQ ID NO: 396133 - DNA, 201 bp, Homo sapiens
tcactcctccagatggctgttgtcaccaccaaaagcagtcaccagagaggctggaagtctgttccaaacccttcctgggaatttccctcagagtctgaatsatattctctagaatgtcctcagagtggtcagtctgccttcttaggggtagatttgactttgcagagaaacctgaagtcatcaagagctaagactaattaa

SEQ ID NO: 396134 - DNA, 201 bp, Homo sapiens
tgtcttgtgaggaaccttgagttgggggatttctgctaagaaatgagttctagaagctgtcagtgttgtgcacctctagactgcagagctagcaggtggasggaccaggcccagggatgctggagcactctgatgtgtgtgcagctgggtcttgaggctgggacaagtgtccatgcagggaactatgtggatttcctggga

SEQ ID NO: 396135 - DNA, 201 bp, Homo sapiens
cagccagctctgggccccacaacaagtgttcctgccaagtgcttggccacccacgtgggaattggaacctcacccttgaccctcaacccccaggctcagasgcagagcggaaggcagtagagacagcagcagcccacggcagcaaacccaatgtgtatgccaaccggggctcagcggaggatgtggccatgcaggtggagg

SEQ ID NO: 396136 - DNA, 201 bp, Homo sapiens
cccacataagtcacttaccaggtctgtccctgcggcatccagtctgtgggtcctgtcccatccatcctgacctgttccatctcagccccaggactcagtaytgcggttgccaacactgctgccaggtgaggggctcccacgggtactgtggtgccgagtccaggcggcccacactatcagaggccgtgcctggatccagca

SEQ ID NO: 396137 - DNA, 201 bp, Homo sapiens
gctagtagtgaacggtgtggacttgctgagctcgcgctcggaccagaaccgccgagagcaccacacagacgagtatgagtacgacgagctgatagtgcgcygcgggcagcctttccatatgctcctcctcctgtcccggacctatgaatcctctgatcgcatcacccttgagttactcatcggtcagtggggcttggattg

SEQ ID NO: 396138 - DNA, 201 bp, Homo sapiens; identical to SEQ ID NO: 87446

SEQ ID NO: 396139 - DNA, 201 bp, Homo sapiens
gagggccaagtagcagttccagaggagagaactccatccctcaggcccttacccagcccgtctgggcctgatcctgggctgggcaagcccctgggtgtagkgagggcacacacatgctgtgttcctgggcctgcggctgtcatctttgatacagacttacacgtgctgccccgtccccgcctaggaaaagcacggagggaa

SEQ ID NO: 396140 - DNA, 201 bp, Homo sapiens
gctgtcacctctgccctccatccctccttccagtttgaccacggggtgctggatgcctgcttatacatcctggaccggcgggggatgccatatggaggccktggagacccagtcaatgtctcccgggtcatctctgccatggtgagcaccctcacatctctgagtcctactgtgtgtgtgcctgctgcctcgccacacccc

SEQ ID NO: 396141 - DNA, 201 bp, Homo sapiens
gacggaccaggcccagggatgctggagcactctgatgtgtgtgcagctgggtcttgaggctgggacaagtgtccatgcagggaactatgtggatttcctgkgatggatcgttgagtgggtttcttcattgggcagtttttcggatgttgtttggtgggggtgaggggaaggcttttctctgcagcatgagaagcttctctg

SEQ ID NO: 396142 - DNA, 201 bp, Homo sapiens
gggggtcacagatggtggacatccagtgtcagccagccatgaaagagtatgtcagggacttggttatcaggcaggctggtccgcacatctgtaccctgccsccatcctccagcagagcagcctgggctgaggaaagcagattgagagccaaatggagccgctctctctttgttttccatacctgtgttgcactggctgtca

SEQ ID NO: 396143 - DNA, 201 bp, Homo sapiens
ctgggaatcaatttttcagaggcccatgtggaaaggagaaaatgaaaacactggttgtgtgtgtgtgtgtgtgtttgtccacccacctctctgtctctctwacacacacacacacacacacacacacacacagagacataagggtttatgtccatttaaagatgtctgttgtctgttcttgggaaggattttccttttttt

SEQ ID NO: 396144 - DNA, 201 bp, Homo sapiens
tgggaatcaatttttcagaggcccatgtggaaaggagaaaatgaaaacactggttgtgtgtgtgtgtgtgtgtttgtccacccacctctctgtctctctcwcacacacacacacacacacacacacacacagagacataagggtttatgtccatttaaagatgtctgttgtctgttcttgggaaggattttcctttttttt

SEQ ID NO: 396145 - DNA, 201 bp, Homo sapiens
ctagtagtgaacggtgtggacttgctgagctcgcgctcggaccagaaccgccgagagcaccacacagacgagtatgagtacgacgagctgatagtgcgccrcgggcagcctttccatatgctcctcctcctgtcccggacctatgaatcctctgatcgcatcacccttgagttactcatcggtcagtggggcttggattgg

SEQ ID NO: 396146 - DNA, 201 bp, Homo sapiens
aggaggccgggagtcaggccaccctcagaccctctggctcactcattcctgctcacccccaccccccacaggtgaatagtgacaaggtgtactggcagcgscaggatgatggcagcttcaagattgtttatgtggaggagaaggccatcggcacactcattgtcacaaaggccatcagctccaacatgcgggaggacatca

SEQ ID NO: 396147 - DNA, 201 bp, Homo sapiens
gccctctccgccttctcagatctcttgcctctgtcccgcctcactctctaggcatcttctgctgcggcccctgctctgtggagtccatcaagaatggcctsgtctacatgaagtacgacacgcctttcatttttgctgaggtgagggctgggctccaggtgccttcttgggcttcagtcatgggttctctggtcccaactt

SEQ ID NO: 396148 - DNA, 201 bp, Homo sapiens
actctgggttggttatgataaaggatggggcgtcctgtcctctgggggtcacagatggtggacatccagtgtcagccagccatgaaagagtatgtcagggmcttggttatcaggcaggctggtccgcacatctgtaccctgcccccatcctccagcagagcagcctgggctgaggaaagcagattgagagccaaatggagc

SEQ ID NO: 396149 - DNA, 201 bp, Homo sapiens
ctcagcagccccaccaggcctttgcctcttggccctgcctggaagtaaggaaagggccactgtgctgagtgttgggggacctgtttcctgtctttagctgyagggtttatgtgagtctccctacagtaaaagacagggttggatgatggtttcttaaggcagatcctccctggacagtctgtggctccttagctgctgtga

SEQ ID NO: 396150 - DNA, 201 bp, Homo sapiens
ccgcctaggaaaagcacggagggaaagcagagcaggccagagcctggccttctagatcagccttctgggacaggggcaggcttcatcttcagacagcgagytcctgagaaagaacaatggcttggggtggggaaactgaggggaggaagcagaggaccccctgcccacttgcccacccctccctcacacacagcagctctc

SEQ ID NO: 396151 - DNA, 201 bp, Homo sapiens
gttagtgctccattggtagttgttatttttattattgccattattacccccacttacagatggggaagctggcggtcacatctcatatggtctcacagctsgtagggggcaaactctgctcttcccactgtggtgcataccatgcacaggctctcaaactcattgtttgttttgtgccatgagggccaagtagcagttcca

SEQ ID NO: 396152 - DNA, 201 bp, Homo sapiens
agcctacattcctcccctggcctcttcccagtgccctccctctcactcagatatgtgaacacagccccatgagctgtgcaacccggtgatgcctgtgatgstgaaacagcctgtcccagacgctggcagatctgagctctggcccccaactctgggaagtggtggggtggacatcaggcagggggctcagggccagccaga

SEQ ID NO: 396153 - DNA, 201 bp, Homo sapiens
aggccgggagtcaggccaccctcagaccctctggctcactcattcctgctcacccccaccccccacaggtgaatagtgacaaggtgtactggcagcggcasgatgatggcagcttcaagattgtttatgtggaggagaaggccatcggcacactcattgtcacaaaggccatcagctccaacatgcgggaggacatcacct

SEQ ID NO: 396154 - DNA, 201 bp, Homo sapiens
ctgaggactcctgaccctggggctcagacccagcccctcctccatgtccatccaggaacttccatgtgtggaacgactgctggatgaagaggccggatctsccctcgggctttgatgggtggcaggtggtggatgccacaccccaagagactagcagtggtaagctgggccccccactccccaccatgcccctgcttatct

SEQ ID NO: 396155 - DNA, 201 bp, Homo sapiens
ggctcgctgctgtggctgctgttcatgccgaaatgcggcagatgacgactggggacctgaaccctctgactccaggggtcgagggtccagctctggcactygaagacctggctcccggggctcagactcccgccggcctgtatcccggggcagcggtgtcaatgcagctggagatggcaccatccgaggtgaggccggtct

SEQ ID NO: 396156 - DNA, 201 bp, Homo sapiens
catgctagtagtgaacggtgtggacttgctgagctcgcgctcggaccagaaccgccgagagcaccacacagacgagtatgagtacgacgagctgatagtgygccgcgggcagcctttccatatgctcctcctcctgtcccggacctatgaatcctctgatcgcatcacccttgagttactcatcggtcagtggggcttgga

SEQ ID NO: 396157 - DNA, 201 bp, Homo sapiens
gaggatgttctgtctggggcaggagcagtggtgatggaggggatggcatgagaggcctctgcggtggcatcagcagtctttgtccaggtggatgtgggagsagggagggaggagtcccagacgatggggagagttccagcacaggcagctggtgggtggctgctgagctggctatgcagaggcgccctggggatcctggtc

SEQ ID NO: 396158 - DNA, 201 bp, Homo sapiens
gttctgtcaggacccaaccaagcaggttggggccagctagcaatacctcccggcccagctcagtcccaccagcctttagggagacctcttgggcacctggkgctatgccatgtccttgccctgcctcactatctaattagggagcagaaggcccacataggaatcattagtaactcattgctaatatttgcccagcactga

SEQ ID NO: 396159 - DNA, 201 bp, Homo sapiens
agggggccatgctgctcaatgtctcaggccacgtcaaggagagcgggcaggtgctggccaagcagcacaccttccgtctgcgcaccccagacctctccctsacggtgaatgcagtttgctggggcatgaggggtggtcagagagtgaaggccaggggataaggacatcagaggtgggcgctaagccagcagcaggctggcc

SEQ ID NO: 396160 - DNA, 201 bp, Homo sapiens
ccttttttttcaaagataacatccttctaatgttttggtgtgtgaaaatgctcttttctctttggaacgacgatcatagcagagagtgattacttttcttmaacctatgctcttgtcaaaactgaaagtatttgaaaatattgtgttgggcccccaaagtctcattttgaagttttcttggttttggaaaccccaggtgag

SEQ ID NO: 396161 - DNA, 201 bp, Homo sapiens
aagttaaatagcttctcataagcctcacagctaacaagtggtagaaaagggagtagagtggtccagggaaacccctcagaaccaggttccaagccaaatgstttgccctgaaaaaaactcatccttggagttagggatgttggctcattctcttagaggacaatagttaatgcacaggttctatgtctggaaagggtcccc

SEQ ID NO: 396162 - DNA, 201 bp, Homo sapiens
ggtgctgcaggccagtgataatgccatagagtccctggacggcgtcaccaacctaccccggctgcaggagctgctactgtgcaacaaccgtatccttcctyctgggtgcctttcagacagtgggtaaagtgaggtgccaccctgggaagggacagacagcaggcagggtatgtgccaccctcttgcagggcaggagagagg

SEQ ID NO: 396163 - DNA, 201 bp, Homo sapiens
actcatcggtcagtggggcttggattgggacgggtgaaggccctatgtttggtggggagaggctggcattagggtcagagaggtctttaggctcctccctsccccactcctcacctctgccagataaggcaggtgcaagtgtgtgggtgtgcccctggggttgtgtctcagagagggtcttggtgttgcagtttttcccaa

SEQ ID NO: 396164 - DNA, 201 bp, Homo sapiens
tgggtttgaacgttgtataggaaatagaactgattagacttgataacagattcaatttggagaggagggagggcagagataagggtggtggcctgagtttytgactcatgggtgccacgaagagaggtgccatgcacagaaattcgaagctcaggaggaagaccatattataaaagggaaggtagaccaggcacggtggtt

SEQ ID NO: 396165 - DNA, 201 bp, Homo sapiens; identical to SEQ ID NO: 87368

SEQ ID NO: 396166 - DNA, 201 bp, Homo sapiens
agagccctctccgccttctcagatctcttgcctctgtcccgcctcactctctaggcatcttctgctgcggcccctgctctgtggagtccatcaagaatggsctggtctacatgaagtacgacacgcctttcatttttgctgaggtgagggctgggctccaggtgccttcttgggcttcagtcatgggttctctggtcccaa

SEQ ID NO: 396167 - DNA, 201 bp, Homo sapiens
ctgtgttgcactggctgtcaactgacccccaagtgtttgggtcagggctgatgaccttgttccagaggccaccaggcagtgggaccgggcctgagtgggtsgggctggggccctgtgtggaccttacccagggtctgaagagccctctccgccttctcagatctcttgcctctgtcccgcctcactctctaggcatcttct

SEQ ID NO: 396168 - DNA, 201 bp, Homo sapiens
atggcctggtctacatgaagtacgacacgcctttcatttttgctgaggtgagggctgggctccaggtgccttcttgggcttcagtcatgggttctctggtyccaacttcaccgctgactgaccagctctgcgacccggggcaagtcactcattatacaagtcagtttcctcacctgtaaaaggggataatcaaggctgcct

SEQ ID NO: 396169 - DNA, 201 bp, Homo sapiens
taagattctttccggttggatggtactcacttaccactctgtcctctcctgccaggcctcttcctgtcagcctatctcttctagacagcctcctgagtatsataagggcagactctatttcccaccagctccccccagtagaaagggcagcaggctgcagagctgagggttgttccgcatctctctggaatggtggtggcg

SEQ ID NO: 396170 - DNA, 201 bp, Homo sapiens; identical to SEQ ID NO: 87444

SEQ ID NO: 396171 - DNA, 201 bp, Homo sapiens
tgattgggaactggtctggtgattactcccgaggcaccaacccatcagcgtgggtgggcagcgtggagatcctgcttagctacctacgcacgggatattcygtcccctatggccagtgctgggtctttgctggcgtgaccaccacaggtagtggagggactgggacaggagtggcccgggccctacagggagaagggagga

SEQ ID NO: 396172 - DNA, 201 bp, Homo sapiens
gttcaattatggtatagagtaaatagacttctgagggctggtctgagcttgaacaaccttgaatcttgtatctatgaaaagttagcaaaaattaagagtgsaaatttgtaagcagtcaggacatagcctagccattaagttatagacttaatttatagacttcctatcatactacgttctattatatatccctgcctccct

SEQ ID NO: 396173 - DNA, 201 bp, Homo sapiens
cacgatgcctcacttgcccccaacccatgccttgaaccccaaccttcgctcctccacagtgctgcgctgcctgggtctggccacccgtactgtcaccaacktcaactccgcccacgacacagacacatcccttaccatggacatctacttcgacgagaacatgaagcccctggagcacctgaaccatgattctgtctggtg

SEQ ID NO: 396174 - DNA, 201 bp, Homo sapiens
gaaggctctgggttacagaggcccaagatcctcaacgttgggtgagtctggcctctccccctacccctgcttccactctggccttccccacaggctgcccwggctcccagctttgctccctctctgtctggacaagtatgttctgtcaggacccaaccaagcaggttggggccagctagcaatacctcccggcccagctca

SEQ ID NO: 396175 - DNA, 201 bp, Homo sapiens
ccaaccaagcaggttggggccagctagcaatacctcccggcccagctcagtcccaccagcctttagggagacctcttgggcacctggtgctatgccatgtycttgccctgcctcactatctaattagggagcagaaggcccacataggaatcattagtaactcattgctaatatttgcccagcactgaagaattgaccagg

SEQ ID NO: 396176 - DNA, 201 bp, Homo sapiens
gataaatgtgggactcggggaggttttgcttctaagcagcttcccctctctggtgcagtgtacggtccccgtgtgtttggccagggtctctgacgtggggsatgggcctctttttctctcagttactgggagcagcagtggttggccaggagtgtgaagtacagattgtcttcaagaacccccttcccgtcaccctcacca

SEQ ID NO: 396177 - DNA, 201 bp, Homo sapiens
gtagtgaacggtgtggacttgctgagctcgcgctcggaccagaaccgccgagagcaccacacagacgagtatgagtacgacgagctgatagtgcgccgcgrgcagcctttccatatgctcctcctcctgtcccggacctatgaatcctctgatcgcatcacccttgagttactcatcggtcagtggggcttggattgggac

SEQ ID NO: 396178 - DNA, 201 bp, Homo sapiens
ttctgtcaggacccaaccaagcaggttggggccagctagcaatacctcccggcccagctcagtcccaccagcctttagggagacctcttgggcacctggtkctatgccatgtccttgccctgcctcactatctaattagggagcagaaggcccacataggaatcattagtaactcattgctaatatttgcccagcactgaa

SEQ ID NO: 396179 - DNA, 201 bp, Homo sapiens
atgctagtagtgaacggtgtggacttgctgagctcgcgctcggaccagaaccgccgagagcaccacacagacgagtatgagtacgacgagctgatagtgcvccgcgggcagcctttccatatgctcctcctcctgtcccggacctatgaatcctctgatcgcatcacccttgagttactcatcggtcagtggggcttggat

SEQ ID NO: 396180 - DNA, 201 bp, Homo sapiens
ggcttgggctgcacagaactcggcagcaggagcctgtgagagcagaggtaggcagcctaagcttgggaccagaaggtcggccagacagggctgtgggtggragggcctgcctgccccactgcccttgcagcttcttcatccgggagaaggggctcctcacatgcccagtctggtaggaatcagcctggtgccaggggccat

SEQ ID NO: 396181 - DNA, 201 bp, Homo sapiens
tcaccttgctgtttccccgtctgtaaaggagtgtgtagtgttatgtcttgtctaagattctttccggttggatggtactcacttaccactctgtcctctcytgccaggcctcttcctgtcagcctatctcttctagacagcctcctgagtatgataagggcagactctatttcccaccagctccccccagtagaaagggca

SEQ ID NO: 396182 - DNA, 201 bp, Homo sapiens
ctcactcagatatgtgaacacagccccatgagctgtgcaacccggtgatgcctgtgatgctgaaacagcctgtcccagacgctggcagatctgagctctgscccccaactctgggaagtggtggggtggacatcaggcagggggctcagggccagccagactggggcttgatcccagcctgatcacttctcagatgtatgc

SEQ ID NO: 396183 - DNA, 201 bp, Homo sapiens
cgagctgatagtgcgccgcgggcagcctttccatatgctcctcctcctgtcccggacctatgaatcctctgatcgcatcacccttgagttactcatcggtsagtggggcttggattgggacgggtgaaggccctatgtttggtggggagaggctggcattagggtcagagaggtctttaggctcctccctgccccactcct

SEQ ID NO: 396184 - DNA, 201 bp, Homo sapiens
tagcctacattcctcccctggcctcttcccagtgccctccctctcactcagatatgtgaacacagccccatgagctgtgcaacccggtgatgcctgtgatsctgaaacagcctgtcccagacgctggcagatctgagctctggcccccaactctgggaagtggtggggtggacatcaggcagggggctcagggccagccag

SEQ ID NO: 396185 - DNA, 201 bp, Homo sapiens
tcttgtgaggaaccttgagttgggggatttctgctaagaaatgagttctagaagctgtcagtgttgtgcacctctagactgcagagctagcaggtggacgsaccaggcccagggatgctggagcactctgatgtgtgtgcagctgggtcttgaggctgggacaagtgtccatgcagggaactatgtggatttcctgggatg

SEQ ID NO: 396186 - DNA, 201 bp, Homo sapiens
ctcctgccctttctggattcctcaagaacccccagccctgtccctgccctcgtaaaggatacttcaggaaggggtctccctcctcttctctcccttgcctsccccccaccccgcctttcctggctcctgtcccagctcctgtggaatgtagggccaaacccaaaacttggcacacccaggattcacattcctgtgtcagag

SEQ ID NO: 396187 - DNA, 201 bp, Homo sapiens
tggtctctggcagctcagtgaacagagcctgaaccccccgggtagcctgctctgctagtcttgcccagcaggcatctcttacccacacccccaccatggtkgggggaggttcctcgtcctaagggatccgcagagctggacttgcctcagcagccccaccaggcctttgcctcttggccctgcctggaagtaaggaaaggg

SEQ ID NO: 396188 - DNA, 201 bp, Homo sapiens
cctcctcctgccctttctggattcctcaagaacccccagccctgtccctgccctcgtaaaggatacttcaggaaggggtctccctcctcttctctcccttscctgccccccaccccgcctttcctggctcctgtcccagctcctgtggaatgtagggccaaacccaaaacttggcacacccaggattcacattcctgtgtc

SEQ ID NO: 396189 - DNA, 201 bp, Homo sapiens
acccccaccctcctcctgccctttctggattcctcaagaacccccagccctgtccctgccctcgtaaaggatacttcaggaaggggtctccctcctcttcyctcccttgcctgccccccaccccgcctttcctggctcctgtcccagctcctgtggaatgtagggccaaacccaaaacttggcacacccaggattcacatt

SEQ ID NO: 396190 - DNA, 201 bp, Homo sapiens
gcaccaacccatcagcgtgggtgggcagcgtggagatcctgcttagctacctacgcacgggatattccgtcccctatggccagtgctgggtctttgctggmgtgaccaccacaggtagtggagggactgggacaggagtggcccgggccctacagggagaagggaggaaagccaggcttacccagccctgcccagatgtgg

SEQ ID NO: 396191 - DNA, 201 bp, Homo sapiens; identical to SEQ ID NO: 396020

SEQ ID NO: 396192 - DNA, 201 bp, Homo sapiens
gacgccatgcctcttctccacagcggaccgtgtgaccatgccagtggcctacaaggaataccggccccatcttgtggaccagggggccatgctgctcaatrtctcaggccacgtcaaggagagcgggcaggtgctggccaagcagcacaccttccgtctgcgcaccccagacctctccctcacggtgaatgcagtttgctg

SEQ ID NO: 396193 - DNA, 201 bp, Homo sapiens; identical to SEQ ID NO: 396025

SEQ ID NO: 396194 - DNA, 201 bp, Homo sapiens
ctctgggttggttatgataaaggatggggcgtcctgtcctctgggggtcacagatggtggacatccagtgtcagccagccatgaaagagtatgtcagggamttggttatcaggcaggctggtccgcacatctgtaccctgcccccatcctccagcagagcagcctgggctgaggaaagcagattgagagccaaatggagcc

SEQ ID NO: 396195 - DNA, 201 bp, Homo sapiens
gatagtcaggcaggcagaaggtgacaggagccctcgtctctcctccccacctcagagttcagtgtcaggggaacaggtttgggatgttggactgcggcackgccctaacatgtgggcaagcattgggtggagacagagctgctctaagggagactgtcagagaataaggtgatggcccaacgtagggacatacacagtggc

SEQ ID NO: 396196 - DNA, 201 bp, Homo sapiens
ttgggaactggtctggtgattactcccgaggcaccaacccatcagcgtgggtgggcagcgtggagatcctgcttagctacctacgcacgggatattccgtmccctatggccagtgctgggtctttgctggcgtgaccaccacaggtagtggagggactgggacaggagtggcccgggccctacagggagaagggaggaaag

SEQ ID NO: 396197 - DNA, 201 bp, Homo sapiens; identical to SEQ ID NO: 87431

SEQ ID NO: 396198 - DNA, 201 bp, Homo sapiens
aggggtcgagggtccagctctggcactcgaagacctggctcccggggctcagactcccgccggcctgtatcccggggcagcggtgtcaatgcagctggagwtggcaccatccgaggtgaggccggtctgtcctcctcagctgagagctaaaaggctttaatgggaccagagactcagcctggcatttctgggggggatagg

SEQ ID NO: 396199 - DNA, 201 bp, Homo sapiens
atcatcggcaagtttcagttcacagtccgcacacaatcagacgctggggagttccagttgccctttgacccccgcaatgagatctacatcctcttcaaccyctggtgcccaggtgagcagctggggtctggagcagagggtagatgggagggaaagacagggaagggcttcctgccctcggatgtggcggggtgcctaggt

SEQ ID NO: 396200 - DNA, 201 bp, Homo sapiens
gaggacattgtgtacgtggaccatgaggattggcggcaggagtatgttcttaatgagtctgggagaatttactacgggaccgaagcacagattggtgagcrgacctggaactacggccaggtatggtgcggctggccagggtcacatacacccagaggagctggggtgggtgtgggggctggggtattggagcagggtgct

SEQ ID NO: 396201 - DNA, 201 bp, Homo sapiens
gtgtacgtggaccatgaggattggcggcaggagtatgttcttaatgagtctgggagaatttactacgggaccgaagcacagattggtgagcggacctggamctacggccaggtatggtgcggctggccagggtcacatacacccagaggagctggggtgggtgtgggggctggggtattggagcagggtgctggcctaggg

SEQ ID NO: 396202 - DNA, 201 bp, Homo sapiens
tccttccagtttgaccacggggtgctggatgcctgcttatacatcctggaccggcgggggatgccatatggaggccgtggagacccagtcaatgtctcccrggtcatctctgccatggtgagcaccctcacatctctgagtcctactgtgtgtgtgcctgctgcctcgccacacccccaccctcctcctgccctttctgga

SEQ ID NO: 396203 - DNA, 201 bp, Homo sapiens
aggcaccaacccatcagcgtgggtgggcagcgtggagatcctgcttagctacctacgcacgggatattccgtcccctatggccagtgctgggtctttgctrgcgtgaccaccacaggtagtggagggactgggacaggagtggcccgggccctacagggagaagggaggaaagccaggcttacccagccctgcccagatgt

SEQ ID NO: 396204 - DNA, 201 bp, Homo sapiens
actgtcaccaacttcaactccgcccacgacacagacacatcccttaccatggacatctacttcgacgagaacatgaagcccctggagcacctgaaccatgwttctgtctggtgagctggggtggactgcccatctgtgctgaagaatggtgacctgagctttggaggtggagggtgggcagggctggggaggctggggaaa

SEQ ID NO: 396205 - DNA, 201 bp, Homo sapiens
acacccccaccctcctcctgccctttctggattcctcaagaacccccagccctgtccctgccctcgtaaaggatacttcaggaaggggtctccctcctctyctctcccttgcctgccccccaccccgcctttcctggctcctgtcccagctcctgtggaatgtagggccaaacccaaaacttggcacacccaggattcaca

SEQ ID NO: 396206 - DNA, 201 bp, Homo sapiens
actgtgatagtcaggcaggcagaaggtgacaggagccctcgtctctcctccccacctcagagttcagtgtcaggggaacaggtttgggatgttggactgcsgcactgccctaacatgtgggcaagcattgggtggagacagagctgctctaagggagactgtcagagaataaggtgatggcccaacgtagggacatacaca

SEQ ID NO: 396207 - DNA, 201 bp, Homo sapiens
aacccctaccacctccaccagggatgccctgggctctggaagctgcagccccaggaagcaggcagggttggccttcaggatcaggactgccctttcatacsgggcaggtggatctgcccctccagcccaggcactgtgatagtcaggcaggcagaaggtgacaggagccctcgtctctcctccccacctcagagttcagtg

SEQ ID NO: 396208 - DNA, 201 bp, Homo sapiens
gggctgtaaggtcagcttcccacatgctcccatcctcttcttggctggggtccccaagggcctgtggggcacagagggcatgtgcctaataaatgctggcygaggaccctctcccaggtctcctgggaagcccatcacctccttcctcccttcaccccccaggatctgacagtgctctgccatctggaacagctgctcttg

SEQ ID NO: 396209 - DNA, 201 bp, Homo sapiens
cagttttgtgtgttctggggacacagaggacattgtgtacgtggaccatgaggattggcggcaggagtatgttcttaatgagtctgggagaatttactacsggaccgaagcacagattggtgagcggacctggaactacggccaggtatggtgcggctggccagggtcacatacacccagaggagctggggtgggtgtggg

SEQ ID NO: 396210 - DNA, 201 bp, Homo sapiens; identical to SEQ ID NO: 396012

SEQ ID NO: 396211 - DNA, 201 bp, Homo sapiens
catatggtctcacagctcgtagggggcaaactctgctcttcccactgtggtgcataccatgcacaggctctcaaactcattgtttgttttgtgccatgagrgccaagtagcagttccagaggagagaactccatccctcaggcccttacccagcccgtctgggcctgatcctgggctgggcaagcccctgggtgtagtgag

SEQ ID NO: 396212 - DNA, 201 bp, Homo sapiens
aatgatacgggttcagctctagcacttactggctatatgcccttgggcaagcgacttctctccttcaagcctcagtgttctcacctgtaaagcagggatascaatagcccctggacctagggttgtttagtgcactgcttggcacaaagttagtgctccattggtagttgttatttttattattgccattattacccccac

SEQ ID NO: 396213 - DNA, 201 bp, Homo sapiens; identical to SEQ ID NO: 396013

SEQ ID NO: 396214 - DNA, 201 bp, Homo sapiens
aacaatggcttggggtggggaaactgaggggaggaagcagaggaccccctgcccacttgcccacccctccctcacacacagcagctctcctggtggtggcygccaccttcgccattaggccaaagctgagaaggaagctatgttgatctttgccccagcctgggcccctgggaatgctatgatgtgtcacaaagtagggct

SEQ ID NO: 396215 - DNA, 201 bp, Homo sapiens
cataccatggtctctggcagctcagtgaacagagcctgaaccccccgggtagcctgctctgctagtcttgcccagcaggcatctcttacccacacccccascatggtggggggaggttcctcgtcctaagggatccgcagagctggacttgcctcagcagccccaccaggcctttgcctcttggccctgcctggaagtaag

SEQ ID NO: 396216 - DNA, 201 bp, Homo sapiens
cagtgaacagagcctgaaccccccgggtagcctgctctgctagtcttgcccagcaggcatctcttacccacacccccaccatggtggggggaggttcctcrtcctaagggatccgcagagctggacttgcctcagcagccccaccaggcctttgcctcttggccctgcctggaagtaaggaaagggccactgtgctgagtg

SEQ ID NO: 396217 - DNA, 201 bp, Homo sapiens
aggtatggtgcggctggccagggtcacatacacccagaggagctggggtgggtgtgggggctggggtattggagcagggtgctggcctagggttcaggctrtcacctctgccctccatccctccttccagtttgaccacggggtgctggatgcctgcttatacatcctggaccggcgggggatgccatatggaggccgtgg

SEQ ID NO: 396218 - DNA, 201 bp, Homo sapiens
ttcctgccctcggatgtggcggggtgcctaggtgcctgaccccaggagaagccagcctcccattgggcagatgagaggaccgaggcctggtgcagaaaggwggccagcccagggtcacacagccagccacacctctcctggcaaaggcccctggctacagccaatctcctccaccatctgtcatgctccccgtgtcctccc

SEQ ID NO: 396219 - DNA, 201 bp, Homo sapiens
agcagggtgctggcctagggttcaggctgtcacctctgccctccatccctccttccagtttgaccacggggtgctggatgcctgcttatacatcctggacyggcgggggatgccatatggaggccgtggagacccagtcaatgtctcccgggtcatctctgccatggtgagcaccctcacatctctgagtcctactgtgtg

SEQ ID NO: 396220 - DNA, 201 bp, Homo sapiens
tccacacttcccccaacgccatcatcggcaagtttcagttcacagtccgcacacaatcagacgctggggagttccagttgccctttgacccccgcaatgaratctacatcctcttcaacccctggtgcccaggtgagcagctggggtctggagcagagggtagatgggagggaaagacagggaagggcttcctgccctcgg

SEQ ID NO: 396221 - DNA, 201 bp, Homo sapiens; identical to SEQ ID NO: 87465

SEQ ID NO: 396222 - DNA, 201 bp, Homo sapiens
ggggccctgtgtggaccttacccagggtctgaagagccctctccgccttctcagatctcttgcctctgtcccgcctcactctctaggcatcttctgctgcrgcccctgctctgtggagtccatcaagaatggcctggtctacatgaagtacgacacgcctttcatttttgctgaggtgagggctgggctccaggtgccttc

SEQ ID NO: 396223 - DNA, 201 bp, Homo sapiens
tcactcattcctgctcacccccaccccccacaggtgaatagtgacaaggtgtactggcagcggcaggatgatggcagcttcaagattgtttatgtggaggrgaaggccatcggcacactcattgtcacaaaggccatcagctccaacatgcgggaggacatcacctacctctataagcacccagaaggtaccattccccca

SEQ ID NO: 396224 - DNA, 201 bp, Homo sapiens
cctgtatgtcactccaacccacaaactcctaacacacacacacacacgcacgcacacacagcccttgtccagtcccagggaacatgccttgaccagtctaycacagactctagccttctcttctgtcctaatggggtggtggtggtgacctgacctgctcctatccctgtctctgcagtgagatttactgccacggggagc

SEQ ID NO: 396225 - DNA, 201 bp, Homo sapiens
cccactgccctgcctctcccaggagggatttggctggacgaatggcgtggtcctgatgctgctggaccgctatggtgaccggctgacctcaggggccaagytggctttcctggagccccactgcctggcggccacccttctgcccagcctcctgctcagcctcctgccatggtgacagccctcctctcctcacctggcccc

SEQ ID NO: 396226 - DNA, 201 bp, Homo sapiens
gagcaggccaggggtgggctggccaacaccagggaactcctgaactctgctgctcatgacccccgccccaggcctcagtgtgctcacctgcatgtgggccygggggaggagctgactggtgcttcctgtaccgctggggttaggcagggccagtgcccctggggagagagcccacagcccccaccaagggtatgaggcttc

SEQ ID NO: 396227 - DNA, 201 bp, Homo sapiens
aacctttcattctcgagtggatacagggtcacccatggtgtgaagagcagtcatgctgcaatcagttactggaggtaaaagttaccaatggaaattagagrtgattgatcactaaatttggggagttgactcatgtgcatagggaaatgtatactaagaagaagaaaagcaaatatacaatccctatagacttttatctct

SEQ ID NO: 396228 - DNA, 201 bp, Homo sapiens
ccaagagctgttcatagggccccttctatgtggcactaggatccatcagctcctcggtgcttccaaagttggccctagggggaaagaggcttcctgctcctgaataccattagcacctccttgcattccctgagcagcagactcctgaataaaccatttccattttattcaggaactcttctgggcactgccttcgttaca

SEQ ID NO: 396229 - DNA, 201 bp, Homo sapiens
ggcactggctgctggctctaaaggcagcactgccccagggaacgactcccaggccacgaagtacagaatcctgcggtcgcagcgcttggccgccctgaacrcagtcctgtgggatgagcagaccggagcctggttcgattacgaccttgagaagaagaagaaaaaccgggagttttacccatccaacctcactccactctg

SEQ ID NO: 396230 - DNA, 201 bp, Homo sapiens
tgttctgctgaaatgcttacaaatactgaaaacccccagcctgggcccaggcaaccaagggctcaatgctgggaaggagagcaggggaggtgggcttagtrttaaggcgtgaagggcgaggccagacagctggaggcctggtcctccactctccatttccatcacccttcggaggctgaaggaagggcggcggcaccacag

SEQ ID NO: 396231 - DNA, 201 bp, Homo sapiens
ggaagtggctttccagctggctcagaattggatccgaaccaattttgatgtctactcgcagaagtcagccatgtatgagaaggtgagctggcccaagcccyccctgcacccccaggctgtcccagtggccactcctgagcactgcaggggctgctgggcaggcagagcagcttctccccaggggctctggttgtttgttgt

SEQ ID NO: 396232 - DNA, 201 bp, Homo sapiens
ccgcggggtccagcgtcctgtcctggctcccagtccagccccacccacagtcatgggaatgtctgggaccttctaggacaaccggatcctgacttaccagyatgggatcccgacctctctccagaagacaggccagcagtgggatttccccaatgcctgggcccccctgcaggacctggtcatcagaggtagggaggcagg

SEQ ID NO: 396233 - DNA, 201 bp, Homo sapiens
aataggtccagagcctagaccctaccagtccatgtgagccccaggctgaaatgttcccttctcacaccacagcagtcctgggctctctaaactccctggamcctgacagagctataccctgacaaggggggcactggtccttggcgccccaggttcaaaagtgagtatcaagaggatcaaacacaaaggcttttccagtga

SEQ ID NO: 396234 - DNA, 201 bp, Homo sapiens
aaggcctgaccaagggaactgaagagaggaatgtgcctggggcccacagtgtcttcggagcacagatcaggtttcctttcctgagaaaccagtccctggcycctgggtccccaaatagaggccctctagaaagaacttctgaggtcagaagggcagcatctacttctaacatctcgcctcctccaggaaggctccctagcc

SEQ ID NO: 396235 - DNA, 201 bp, Homo sapiens
caaggcctgaccaagggaactgaagagaggaatgtgcctggggcccacagtgtcttcggagcacagatcaggtttcctttcctgagaaaccagtccctggyccctgggtccccaaatagaggccctctagaaagaacttctgaggtcagaagggcagcatctacttctaacatctcgcctcctccaggaaggctccctagc

SEQ ID NO: 396236 - DNA, 201 bp, Homo sapiens
aagaaaatgagaattcctatgtagcaggctctgtgctgggcactgcacctgcagtccgttttttttgttgttgttgttagagtcttgctcggtcgtccagrtggagtacagtggcaccatctccactcactgcagcctagacctcccgggttcgagagattctcgtgcctcagcctcctgagtagctggaatcacaggcat

SEQ ID NO: 396237 - DNA, 201 bp, Homo sapiens
gggagagtagggtgcagccactgctctgtctgggatgggagacctggaggttgagtcctgcctgcaatggggtctaggcctggccaaggcacctttacgtygggcccaggaagtggctttccagctggctcagaattggatccgaaccaattttgatgtctactcgcagaagtcagccatgtatgagaaggtgagctggcc

SEQ ID NO: 396238 - DNA, 201 bp, Homo sapiens
ggcctgtgttctttcagcccccagttcctgcagaagatttcagatgccaaactgcgtgcctgggcagggcagctgcatcagctctggaagaagctggggargaaggtatcagcgtcctgggcctgcccaaggcctgaccaagggaactgaagagaggaatgtgcctggggcccacagtgtcttcggagcacagatcaggtt

SEQ ID NO: 396239 - DNA, 201 bp, Homo sapiens
ccaatgtgatattggattcccctcattgtataacccatttactcattcctttaccctcagctactatgtctcttcctcaccatctgtcatttatttatttwttttttttgagatggagttttactccattgcccaggctgcagtgcagcggtgcaataccggcccactgcaacctccacttcctgggttcaagcaattctc

SEQ ID NO: 396240 - DNA, 201 bp, Homo sapiens
tgtctactcgcagaagtcagccatgtatgagaaggtgagctggcccaagccctccctgcacccccaggctgtcccagtggccactcctgagcactgcaggrgctgctgggcaggcagagcagcttctccccaggggctctggttgtttgttgttcctggagctggggggcagtacctgacatacagcccacccgcttgtcc

SEQ ID NO: 396241 - DNA, 201 bp, Homo sapiens
aaatcatgggatgtctactgctttaatactataagaaacccatttgggctgggcatgctggcccacatcacagtaatctcaacactttgggaggccaagcygggaggatcacttgaagccaggaggatcacttgaacccaggagttcaagaccagcctgggcaacatattgagaccctgtctctacaaaaaaatagaaaaa

SEQ ID NO: 396242 - DNA, 201 bp, Homo sapiens
tatggggctgttccccaggagaatttggacaaatcatgggatgtctactgctttaatactataagaaacccatttgggctgggcatgctggcccacatcamagtaatctcaacactttgggaggccaagccgggaggatcacttgaagccaggaggatcacttgaacccaggagttcaagaccagcctgggcaacatattg

SEQ ID NO: 396243 - DNA, 201 bp, Homo sapiens
tacatgttttgtacccagaatttgtgagttccccatagtagggttcgatgagtggacatcacacctaggtgtaattagtttgagtatgccataaggcctcmcatagccttccttgtctcagtatggggctgttccccaggagaatttggacaaatcatgggatgtctactgctttaatactataagaaacccatttgggct

SEQ ID NO: 396244 - DNA, 201 bp, Homo sapiens
aactggccccactgccctgcctctcccaggagggatttggctggacgaatggcgtggtcctgatgctgctggaccgctatggtgaccggctgacctcaggrgccaagctggctttcctggagccccactgcctggcggccacccttctgcccagcctcctgctcagcctcctgccatggtgacagccctcctctcctcacc

SEQ ID NO: 396245 - DNA, 201 bp, Homo sapiens
aagctggctttcctggagccccactgcctggcggccacccttctgcccagcctcctgctcagcctcctgccatggtgacagccctcctctcctcacctggmcccagctcctgccccattaaacctctgcaccagttcctgccttcccctgcctcttcatgccctcctacctcccagcctgtcctcagagcgaagtggaggg

SEQ ID NO: 396246 - DNA, 201 bp, Homo sapiens
tttgggcttgggttccagtggttagactagagacagagacaaggggttcaatagagggtgtgtgttacagggagagttgacagtgcttgcccatgacaatwgtggaatataaaggggaaaagtgtacctgggataattaataggttttgtcctgagcaattgtaatgaggacttcagagaggctgggtggtccagtgcttt

SEQ ID NO: 396247 - DNA, 201 bp, Homo sapiens
ctcctactgggtcatggagggtctgctcctctcagagatggctgagacggtgaagggcatgctgcagaacttcttggacctggtgaaaacgtgaggggggscaggcacctccagcctaggtggggaggagaggcaggtgtgccacgggcatgcagctggattgccttggtgccagttgctggggagagggcatctcagcag

SEQ ID NO: 396248 - DNA, 201 bp, Homo sapiens
gctaggggaatccacccagccagtacccttgggaggatagaccctggagaccctggggacagatcagctccagtggttccctgggagcagtgcggggccayaggccagaaatgtggtgggctccagatcggcacatccccttggtcatcagggtgtctcagcctttgcagagaaacacaaagcggggaggctaaagtagaa

SEQ ID NO: 396249 - DNA, 201 bp, Homo sapiens
gaatgtgagcacacactttttttttttttaaagacacagtcttgcttttgttgcccaagctggattgcagtggcgtgatctcggttcattgcaacctccayctcctgggttcaagtgattctcctgcctcagcctcccaagtagctgggatcacaggcacgtgccaccacatctgtctaatttttgtatttttagtggaga

SEQ ID NO: 396250 - DNA, 201 bp, Homo sapiens
cctctcaagctgaatgtgagcacacactttttttttttttaaagacacagtcttgcttttgttgcccaagctggattgcagtggcgtgatctcggttcatkgcaacctccacctcctgggttcaagtgattctcctgcctcagcctcccaagtagctgggatcacaggcacgtgccaccacatctgtctaatttttgtatt

SEQ ID NO: 396251 - DNA, 201 bp, Homo sapiens
ggccaacatggcgaaaccctgtctctactaaaatacaaaaattagctgggtgtggtggtacacgcctgtaatcccagcaacttgggaggctgaggcatgagaattgcttgaaccagggaggtggaggttgcagtgagctgagatggagccactgcactccagcctgggcgacagaatgagactcagtctcaaaaaaaaaaa

SEQ ID NO: 396252 - DNA, 201 bp, Homo sapiens
atacgcatggcctctgcagatggggccaccatgtagtacagccggtcatgggtctttacgcagaaggtgagggctgggttcgggctctgccaaaggaagasaggaaggtctaagatggggctcacccatgcccaggaatattctcacctgcctccctatctgccctttcccctcccagcccctagaaagccctggagctta

SEQ ID NO: 396253 - DNA, 201 bp, Homo sapiens
aacaaatcatatagtcataccaacaactccgccctccctcttcccagatcccccagaaaaattaggggaatccaaccaatggagacctccctttgctcctytcaagctgaatgtgagcacacactttttttttttttaaagacacagtcttgcttttgttgcccaagctggattgcagtggcgtgatctcggttcattgca

SEQ ID NO: 396254 - DNA, 201 bp, Homo sapiens
tggagtacggcagcacaatcacggctctgcaacctctgcctcctgggctcaagcgatcctgccacctcagcctcccaagcaacatggtgcatgccaccacrcccagctaattttttcattttttttgtagagacagggttttgccaccatgcctagccaaggtttgctagtgttttgttgaggatttttgcatcaatattc

SEQ ID NO: 396255 - DNA, 201 bp, Homo sapiens
ggatacagggtcacccatggtgtgaagagcagtcatgctgcaatcagttactggaggtaaaagttaccaatggaaattagagatgattgatcactaaatttggggagttgactcatgtgcatagggaaatgtatactaagaagaagaaaagcaaatatacaatccctatagacttttatctctaatagccaaactgaaagt

SEQ ID NO: 396256 - DNA, 201 bp, Homo sapiens
agtggatacagggtcacccatggtgtgaagagcagtcatgctgcaatcagttactggaggtaaaagttaccaatggaaattagagatgattgatcactaamtttggggagttgactcatgtgcatagggaaatgtatactaagaagaagaaaagcaaatatacaatccctatagacttttatctctaatagccaaactgaa

SEQ ID NO: 396257 - DNA, 201 bp, Homo sapiens
aacctctaagctcttggaatctcccaagtgataggaatgtctgttattaatagtggtccctgattagtgtttttttgttgttgtttttttctttctttttkttttttgagacagaatctagctctgttgcccaggctggagtgcagtggtgagattttggctcaatgcaacctctgcccccagggttcaagtgattctcct

SEQ ID NO: 396258 - DNA, 201 bp, Homo sapiens
gttgcagtgagctgagatctcgccattgcactccagcttgggcaacaagagcgaaactccatctcaaaaacaaaacaaaacaaaacaaaaaagtggtatgsgcttgaacaggttttatgtggagtggttgcatctcttctacctgaatgtattacagggatggatattgtatctgaccaggaaatatttccactacctagt

SEQ ID NO: 396259 - DNA, 201 bp, Homo sapiens
agttgaagcatgtgctatctaaaacagcagggaataagggtatgaaggtatgaaaggctggcttacatgccttcacaagtatgtgctcacactcaacgcargggggctcaagggtttgtccctattagatagattcttctgcttttctggaagttaaagggaagaggggctgggagacaatgactaacaattcttccaatg

SEQ ID NO: 396260 - DNA, 201 bp, Homo sapiens
ctttgtccttgacttttagtttgattattaaatgccttgaggtagtctttgggttaaatctgcttggtgttctataaccttcttgttcttggatattgatrtctttctctaggtttgggaagttctctgttattatccctttgaataaactttctgtccctatctctttctctacctcctctttaagtacaataagtctta

SEQ ID NO: 396261 - DNA, 201 bp, Homo sapiens
gttccctaagaccaacctcaggccagtgattcactaacacttccaaatggttataccatgattatggtttcattttttttctttttttgagacagagtctygctctgtcgccaggttggagtgcagtggtgcaatctcggctcgctgcaacctccaccttctgggttcaagcgattctcctgcctcagcctccccagtagc

SEQ ID NO: 396262 - DNA, 201 bp, Homo sapiens
tggtggtcttggggccacccaaggaacctggcatccaggttacaggtgtgtggcctcgactgtgtccctggcctttgggtgcccactccccacccccaccmccatgctctgagggaagggcctgagccattggcaccagctgagactgtgaaatagaagaggcaaagtagaagcaagggaggtggccactgtgccctgaga

SEQ ID NO: 396263 - DNA, 201 bp, Homo sapiens
actggaagtaggacccttgtgtgacaggccttcagcaacttagcctgtcgagccccgccctagtggaagcctgcactcacatttgcgtaccagacaagagracaaacggagccaaccctaatcctctcttcctccctttcttactgtgagggtctctagggtctgtgaggggaaccctagtccacgcatccaaaatccttc

SEQ ID NO: 396264 - DNA, 201 bp, Homo sapiens
gaattgtggcaggaaccattgctgagctgatctgggagaggacagtccaggcatggaaagggccatgcagaggccctgacgcactgttcagggattgggamgaaggcctgtgtgattggggcagagtgggaacaggtccggggagagcggggctccaggcaacaaggtttgggcttgggttccagtggttagactagagac

SEQ ID NO: 396265 - DNA, 201 bp, Homo sapiens
cagtttgaagtagagagaagttagggcccgctggtgtgggtgagcagagggtgtgttagagaggatggggagggacggtgtctctgaggaggtgatgtgtragcagaattgtggcaggaaccattgctgagctgatctgggagaggacagtccaggcatggaaagggccatgcagaggccctgacgcactgttcagggatt

SEQ ID NO: 396266 - DNA, 201 bp, Homo sapiens
tcgggaggtggaagttgcagtgagccaagatcatgccattgcactccagtcggggcaacaagagcaaaactctatctcaaataataataataataataatagaagcaaaacagtaacagaagcacagtttgaagtagagagaagttagggcccgctggtgtgggtgagcagagggtgtgttagagaggatggggagggacg

SEQ ID NO: 396267 - DNA, 201 bp, Homo sapiens
ctcgggaggtggaagttgcagtgagccaagatcatgccattgcactccagtcggggcaacaagagcaaaactctatctcaaataataataataataataatagaagcaaaacagtaacagaagcacagtttgaagtagagagaagttagggcccgctggtgtgggtgagcagagggtgtgttagagaggatggggagggac

SEQ ID NO: 396268 - DNA, 201 bp, Homo sapiens
actcgggaggtggaagttgcagtgagccaagatcatgccattgcactccagtcggggcaacaagagcaaaactctatctcaaataataataataataataatagaagcaaaacagtaacagaagcacagtttgaagtagagagaagttagggcccgctggtgtgggtgagcagagggtgtgttagagaggatggggaggga

SEQ ID NO: 396269 - DNA, 201 bp, Homo sapiens
ataataatagaagaaaaacagctgggcacggtggctcatgcctgtaatcccagcactttgggaggccaaggtgggagctatcatctgaggtcaggagttcragaccagcctggccaacatggtgaaaccccatctctatgaaaaatacaaaattagccgggcatggtggcgcacgcctgtaatcccagctactcgggaggc

SEQ ID NO: 396270 - DNA, 201 bp, Homo sapiens
caatcctttcatgtataagccacttcttgtataatgaggaattagtttcatttttgtcttgggttcctccaaagtaacctctaagctcttggaatctcccmagtgataggaatgtctgttattaatagtggtccctgattagtgtttttttgttgttgtttttttctttcttttttttttttgagacagaatctagctctg

SEQ ID NO: 396271 - DNA, 201 bp, Homo sapiens
tgcctgtaatcccagcactttgggaggccaaggtgggagctatcatctgaggtcaggagttcgagaccagcctggccaacatggtgaaaccccatctctaygaaaaatacaaaattagccgggcatggtggcgcacgcctgtaatcccagctactcgggaggctgaggcaggagagtcgcttgaactcgggaggtggaagt

SEQ ID NO: 396272 - DNA, 201 bp, Homo sapiens
cagggtttgaacacagcagacctgctgagtcaatcctttcatgtataagccacttcttgtataatgaggaattagtttcatttttgtcttgggttcctccmaagtaacctctaagctcttggaatctcccaagtgataggaatgtctgttattaatagtggtccctgattagtgtttttttgttgttgtttttttctttct

SEQ ID NO: 396273 - DNA, 201 bp, Homo sapiens
gcctcttctcaggattgttctagcaaactttctgctccagcttcctagtctgggtgtgagaggcagcctaagggcctgaagacagcacttgggcttgagcyctgaccctcatattctctctgtgacccagggcaggtcaaggctctttcctgagcctgagtttccatcaccagggacagagatgagtgaccctgtcctgtc

SEQ ID NO: 396274 - DNA, 201 bp, Homo sapiens
ctctccagagttcaaactgatactgggcggccaaaggcccctgccacaaatcacattattagcatcaaatatctggcatggcccaaggccccagaaaaacmaagacttatcaggcagcatattttggtaatttaaatctcatctctcagggctggtcacaggccagaattttctctgaaatgtgcagggtttgaacacagc

SEQ ID NO: 396275 - DNA, 201 bp, Homo sapiens
gcaggcctcttctcaggattgttctagcaaactttctgctccagcttcctagtctgggtgtgagaggcagcctaagggcctgaagacagcacttgggcttragctctgaccctcatattctctctgtgacccagggcaggtcaaggctctttcctgagcctgagtttccatcaccagggacagagatgagtgaccctgtcc

SEQ ID NO: 396276 - DNA, 201 bp, Homo sapiens
cagcctgtcattgatttttaccaaaattttccaccgttggaagggacattaggcttggcgactgtgctgggaatacaagcgtgagccaccgccccctgtcrggacctgcagtcctgataccagacgcagctgccagagcctggcctgaggtccaagagcctgctggccagagcccgccctcccttcctctcctcctccaag

SEQ ID NO: 396277 - DNA, 201 bp, Homo sapiens
ataaattcagcttgttccatgatgggggaacttatctcccttagagccttttctatctcatgggccaatgtttattccaccatgtatgctgttgccatttkgtattaaaggcctgagtgctgttagcatacatgttttgtacccagaatttgtgagttccccatagtagggttcgatgagtggacatcacacctaggtgta

SEQ ID NO: 396278 - DNA, 201 bp, Homo sapiens
attttaactggagacctttctaagcattcagtgatcaaggtttacagttacacagtgattagtctgccatgagttgtaaatcacacaatccaaaggccccmaaaagagtagttcctggaaattccttcccaaatggtatccttcgtagtagatgtaacctgaaaattaagagtcaaaagtctctggcgcattgctagagtt

SEQ ID NO: 396279 - DNA, 201 bp, Homo sapiens
tggggagagagcccacagcccccaccaagggtatgaggcttccccagaaactggccccactgccctgcctctcccaggagggatttggctggacgaatggygtggtcctgatgctgctggaccgctatggtgaccggctgacctcaggggccaagctggctttcctggagccccactgcctggcggccacccttctgccca

SEQ ID NO: 396280 - DNA, 201 bp, Homo sapiens
tccagtgtttttattggaggtcagtgatgaaagcgtggactacctgtgtggctgacctcagttactcactctccagagttcaaactgatactgggcggccmaaggcccctgccacaaatcacattattagcatcaaatatctggcatggcccaaggccccagaaaaacaaagacttatcaggcagcatattttggtaattt

SEQ ID NO: 396281 - DNA, 201 bp, Homo sapiens
gtcttcgtaatggccactgcttggtggatacctgcccagtgcctggctcagtggtcgggtcttctacccggcaccaagttgagctgggactcccaaggccrgcaggtgagggatgaggaccccaaggctcccagcggccaggccttgattacatggctgagtagcagtggagccagcgctgaacccaactgcctggctcca

SEQ ID NO: 396282 - DNA, 201 bp, Homo sapiens
agagtctcaccctgttgcccaggctggagtacggcagcacaatcacggctctgcaacctctgcctcctgggctcaagcgatcctgccacctcagcctcccmagcaacatggtgcatgccaccacgcccagctaattttttcattttttttgtagagacagggttttgccaccatgcctagccaaggtttgctagtgttttg

SEQ ID NO: 396283 - DNA, 201 bp, Homo sapiens
tctccctcccccactgtagacagcaaatgtttcgactctcttttccaattttctatcaaagcgctactctgaggacggtatgcaacaccgtatgtccattkgctgtggtattgcttggcccattgttggacactaggtgctgtcagttgtgttcttggatctgaagaaatgtaacttggtggtccatattggtacagcatc

SEQ ID NO: 396284 - DNA, 201 bp, Homo sapiens
cttgggttccagtggttagactagagacagagacaaggggttcaatagagggtgtgtgttacagggagagttgacagtgcttgcccatgacaattgtggartataaaggggaaaagtgtacctgggataattaataggttttgtcctgagcaattgtaatgaggacttcagagaggctgggtggtccagtgctttgtcaag

SEQ ID NO: 396285 - DNA, 201 bp, Homo sapiens
gtgacctgacctgctcctatccctgtctctgcagtgagatttactgccacggggagctcctaaaccaagttcaaatggccaagctctaccaggatgacaarcagtttgtggacatgccactgtctatagctccaggtgaagcacctagggctgaacgtcctctccagagaaccttctctccaaagaaggcagggggcaaga

SEQ ID NO: 396286 - DNA, 201 bp, Homo sapiens
ctgttctaatatagcatcttgtagtattttgcacatttgcatctacgacctgatatgcaaagctactttaatgtgccccttacctttccatagggttatgmcccaggtgggcaacactttaatagttcagtttttcactgcccatctgccaggccattggctactgcccataagtcagcaaaaacccaaacacaggggctt

SEQ ID NO: 396287 - DNA, 201 bp, Homo sapiens
gacccagggcaggtcaaggctctttcctgagcctgagtttccatcaccagggacagagatgagtgaccctgtcctgtctcctggactcaggcgatgtccayccttcgttccacatggatttatggagctgtggccacatcagccactttaccagctcctgcaagaacaataataatagaagaaaaacagctgggcacggtg

SEQ ID NO: 396288 - DNA, 201 bp, Homo sapiens
ttgtgtcctgccgtcatggaggcagtttcaggaaacacccaagagccagctagtaattgtctctcaaatggcctataccatacaccgcctggaaatgttcyggcccaatctcagccatcaccactgagtgcacctcccaggtttctgccataagcccttccgatcgagtctacacagggccattgtacagagaattggcca

SEQ ID NO: 396289 - DNA, 201 bp, Homo sapiens
ggctgtggggcccaagggcagctggatcaagatggctcagcctcttcttgaccacagaggggcttagtagctactagtgccaggctgcccacctctcctcyttgccaggcctgagtcctacagcaaagatgtggagttggctgacaccttgccagaaggtgagcagcaggagggtgagggagggctgggggcagggcagct

SEQ ID NO: 396290 - DNA, 201 bp, Homo sapiens; identical to SEQ ID NO: 87480

SEQ ID NO: 396291 - DNA, 201 bp, Homo sapiens
tcttattgcttttcttctagctcacctttgtggattttctcacctatgatatcttggatcagaaccgtatatttgaccccaagtgcctggatgagttcccraacctgaaggctttcatgtgccgttttgaggtgacgtttcctgcacctttctcttataaaaacactcacaggctcccctgggacctgcaggatcccatag

SEQ ID NO: 396292 - DNA, 201 bp, Homo sapiens; identical to SEQ ID NO: 87482

SEQ ID NO: 396293 - DNA, 201 bp, Homo sapiens
cttggaagagctacctggacaactgaaacaattctccatgtttctggggaaattctcatggtttgccggggaaaaggtaggaagaagggaaaagaagaggatacttctctatctctgcaggctactactcctcagacctaagcatcttattgcttttcttctagctcacctttgtggattttctcacctatgatatcttgg

SEQ ID NO: 396294 - DNA, 201 bp, Homo sapiens; identical to SEQ ID NO: 87483

SEQ ID NO: 396295 - DNA, 201 bp, Homo sapiens
acttggaagagctacctggacaactgaaacaattctccatgtttctggggaaattctcatggtttgccggggaaaaggtaggaagaagggaaaagaagaggatacttctctatctctgcaggctactactcctcagacctaagcatcttattgcttttcttctagctcacctttgtggattttctcacctatgatatcttg

SEQ ID NO: 396296 - DNA, 201 bp, Homo sapiens
gggccccgcccccttatgtcgggtataaagcccctcccgctcacagtttccctagtcctcgaaggctcggaagcccgtcaccatgtcgtgcgagtcgtctmtggttctcgggtactgggatattcgtggggtgagtgccgtctcaacggtagagccgctcggtcaaagagactgacgcggagagggcgggtctctgggtcc

SEQ ID NO: 396297 - DNA, 201 bp, Homo sapiens
tcacctttgtggattttctcacctatgatatcttggatcagaaccgtatatttgaccccaagtgcctggatgagttcccaaacctgaaggctttcatgtgycgttttgaggtgacgtttcctgcacctttctcttataaaaacactcacaggctcccctgggacctgcaggatcccatagtggaggattcttccccggctt

SEQ ID NO: 396298 - DNA, 201 bp, Homo sapiens
aagatcacccagagcaatgccatcttgcgctacatcgctcgcaagcacaacatgtgtgagtggggtagggctggtgagggaccccaggctggtagtttgtctgagagtggatgatgccaagggtgatttgttgtcatttggcctacaggtggtgagactgaagaagaaaagattcgagtggacatcatagagaaccaagta

SEQ ID NO: 396299 - DNA, 201 bp, Homo sapiens
tgaggtgagaggatcagttgaggccaggagtttaagaccagcctgggcaacatagtgagacccctgtctcccaaaaattttttttaattagctgtgcgcarttgctcatgcatagtcccagctacccaggaggctgaggtgggaggatcacttgagcccaggaatttgaagctgcagtgagctgtgttcttgccactgcac

SEQ ID NO: 396300 - DNA, 201 bp, Homo sapiens
ccatagtggaggattcttccccggcttttgcctaatgggatcaatggttggacacctctagacctttaagtcttgggaagagcctaacttctataccttgraggcactgtctacaaaaaaatggaggaggtagacgcaggcaacacgtgaatgttgctgttctggtatgcatctgttggactgggttggggtcgttataag

SEQ ID NO: 396301 - DNA, 201 bp, Homo sapiens
gtgcttttcgcgtcttcactggcaccattaatgaatgaagtctggctcccacccgcggggaagggaggagcctcaacctcgggtcctttgctctcctgcascactcctgcccgggtcccgcctcggggtcgccaggccctgaaccccaacgccggcattagtcgcgcctgcgcacggccctgtggagccgcggaggcaagg

SEQ ID NO: 396302 - DNA, 201 bp, Homo sapiens
tttagtagaggtggcgggcagaagggaaagccttcaagtatatccatccttgcctctctcctgcctggtacagaaggatgcaaaataggggatcttaaccyggatagaataaatagaattcaggggtccttgaactggatggatatgtattttcattcccattaaccactagcaaaagttatttccttttattgtgaagag

SEQ ID NO: 396303 - DNA, 201 bp, Homo sapiens; identical to SEQ ID NO: 87485

SEQ ID NO: 396304 - DNA, 201 bp, Homo sapiens; identical to SEQ ID NO: 87486

SEQ ID NO: 396305 - DNA, 201 bp, Homo sapiens; identical to SEQ ID NO: 87488

SEQ ID NO: 396306 - DNA, 201 bp, Homo sapiens; identical to SEQ ID NO: 87490

SEQ ID NO: 396307 - DNA, 201 bp, Homo sapiens
ttcctttcaggctttggagaaaatcgctgcctacttacagtctgatcagttctgcaagatgcccatcaacaacaagatggcccagtggggcaacaagcctrtatgctgagcaggaggcagacttgcagagcttgttttgtttcatcctgtccgtaaggggtcagcgctcttgctttgctcttttcaatgaatagcacttat

SEQ ID NO: 396308 - DNA, 201 bp, Homo sapiens
taccttggaggcactgtctacaaaaaaatggaggaggtagacgcaggcaacacgtgaatgttgctgttctggtatgcatctgttggactgggttggggtckttataagatttggtgtattttcctttcaggctttggagaaaatcgctgcctacttacagtctgatcagttctgcaagatgcccatcaacaacaagatggc

SEQ ID NO: 396309 - DNA, 201 bp, Homo sapiens
acatcatagagaaccaagtaatggatttccgcacacaactgataaggctctgttacagctctgaccacgtgagtttccttagcacacatctgctgaatggmgtatcagaaaaaggggtatttaggaacccaagggttatctctgttccattctgctgctgctaccttcccaccaatccagattgttagaataagaaacaga

SEQ ID NO: 396310 - DNA, 201 bp, Homo sapiens
tacttggaagagctacctggacaactgaaacaattctccatgtttctggggaaattctcatggtttgccggggaaaaggtaggaagaagggaaaagaagaggatacttctctatctctgcaggctactactcctcagacctaagcatcttattgcttttcttctagctcacctttgtggattttctcacctatgatatctt

SEQ ID NO: 396311 - DNA, 201 bp, Homo sapiens
ggattctttctccctgaaccctgggatgtgggactgagtggtcagattctagatccacctgtctcagggatcttgccactggctccttgggagggtccccrggaaggagggctgggctctggggaggtttgttttcacttcttccccaccacagctcctgactatgacagaagccagtggctgaatgaaaaattcaagctg

SEQ ID NO: 396312 - DNA, 201 bp, Homo sapiens
agtgtgacagtatttctatctcaggcctgccatgagcaggccctggtctcctctctgcccttgcatatgggaaggggatgctggggagcctggtggcccarctgagcttccccggtttcccatctatccagctgccctacttgattgatggggctcacaagatcacccagagcaatgccatcctgcgctacattgcccgca

SEQ ID NO: 396313 - DNA, 201 bp, Homo sapiens
tgatggggctcacaagatcacccagagcaatgccatcctgcgctacattgcccgcaagcacaacctgtgtgagtgtgggtggctgcaatgtgcggggggamggtgacctcctccttggctgggctgtgatgctgagattgagtctgtgttttgtgggtggcaggtggggagacagaagaggagaagattcgtgtggacatt

SEQ ID NO: 396314 - DNA, 201 bp, Homo sapiens
gatggggctcacaagatcacccagagcaatgccatcctgcgctacattgcccgcaagcacaacctgtgtgagtgtgggtggctgcaatgtgcggggggaasgtgacctcctccttggctgggctgtgatgctgagattgagtctgtgttttgtgggtggcaggtggggagacagaagaggagaagattcgtgtggacattt

SEQ ID NO: 396315 - DNA, 201 bp, Homo sapiens
ggtacgtgcagtatagactaggggctggcctggtgcagagaaagtcaccaagtcagggaccctccatctctgacccgagccgcgggccatctctcccagckggcccacgccatccgcttgctcctggaatacacagactcaagctatgtggaaaagaagtacacgctgggggacggtaatggcaccctcgtgtccgggccc

SEQ ID NO: 396316 - DNA, 201 bp, Homo sapiens
ttcttggccttcttcagatcacctttgtggatttccttgcctatgatgtccttgacatgaagcgtatatttgagcccaagtgcttggacgccttcctaaayttgaaggacttcatctcccgctttgaggtgatgcccccatcctcctttctctttgatgccccttgttcctttctctcctttcagatgctttcccagtcct

SEQ ID NO: 396317 - DNA, 201 bp, Homo sapiens
gggcacagggacatagggagatttagctcaggtaccaggtggagaagtttggactttatgctttaatgggaatgattagagcctggtctggccttcctttrgtggttcacccttaccctattcagtttcatccaggttttgctaagtcattgggtgagatctgtgctctcttcttggctgcacaggtgtgttctgagcccc

SEQ ID NO: 396318 - DNA, 201 bp, Homo sapiens
cacattcttggccttcttcagatcacctttgtggatttccttgcctatgatgtccttgacatgaagcgtatatttgagcccaagtgcttggacgccttccyaaacttgaaggacttcatctcccgctttgaggtgatgcccccatcctcctttctctttgatgccccttgttcctttctctcctttcagatgctttcccag

SEQ ID NO: 396319 - DNA, 201 bp, Homo sapiens
acagactcaagtacaagaccaaggaatgtaatggcaccctcaaattgcatcttctcctcaaagttttccaagtgctgtcattgacatgcaccgggatctgygcattttcataacagacagctcagaggcagccagagggcctttattcctctccctccttcctttcaacttgaacttctcatctccctggaaactagtcaa

SEQ ID NO: 396320 - DNA, 201 bp, Homo sapiens
gtcacccatttccctgccttttggcccagaccagggagggacttccaaagtcaggtctgtagcagactccggccagctgactggagacgtctataacctgrttctccaaaatgtccacacgaatcttctcctcttctgaagattcttgtggacattttggagaaccagaccacggacaactggatgcaactggtcatgatc

SEQ ID NO: 396321 - DNA, 201 bp, Homo sapiens
cctcagaagggcctgtgcatgacgctgtgtgtgtgtttgggggtgggggcgggtagaggaggcgacgggtacgtgcagtatagactaggggctggcctggkgcagagaaagtcaccaagtcagggaccctccatctctgacccgagccgcgggccatctctcccagctggcccacgccatccgcttgctcctggaatacac

SEQ ID NO: 396322 - DNA, 201 bp, Homo sapiens
catctcccgctttgaggtgatgcccccatcctcctttctctttgatgccccttgttcctttctctcctttcagatgctttcccagtcctggagctacacamagaataactcgtatgtattgagtacgggcttcatgccaggaatcatgcccagcacattatacctatcgtgtagaatttgaaatttccaacattcctacag

SEQ ID NO: 396323 - DNA, 201 bp, Homo sapiens
ggcagagcacttcaggaccacggatgcagctggcaatagtaggactgacacacagtggcattgatgttgagtactaaacctgcaggcagtattcatagccrcccccagaagctttgcatgatcggacccccatgtggaaaatcctgagatccggagctgtggctggagctggattagggtacatatgtgggtgcccctgtt

SEQ ID NO: 396324 - DNA, 201 bp, Homo sapiens
gagcacttcaggaccacggatgcagctggcaatagtaggactgacacacagtggcattgatgttgagtactaaacctgcaggcagtattcatagccacccycagaagctttgcatgatcggacccccatgtggaaaatcctgagatccggagctgtggctggagctggattagggtacatatgtgggtgcccctgttgaag

SEQ ID NO: 396325 - DNA, 201 bp, Homo sapiens
ctagaatatacagactcaagtacaagaccaaggaatgtaatggcaccctcaaattgcatcttctcctcaaagttttccaagtgctgtcattgacatgcacmgggatctgcgcattttcataacagacagctcagaggcagccagagggcctttattcctctccctccttcctttcaacttgaacttctcatctccctggaa

SEQ ID NO: 396326 - DNA, 201 bp, Homo sapiens
gccatctacagccctggggaggccacgtctgtgcagggagcttttgtctgagggtggtgacagctgttttctgcctcaggagaaactgaagccaaaatacytggaggaactccctgaaaagctaaagctctactcagagtttctggggaagcggccatggtttgcaggagacaaggtaaaggaggagtgatatggggaatg

SEQ ID NO: 396327 - DNA, 201 bp, Homo sapiens
ctgcccgcctcagaagggcctgtgcatgacgctgtgtgtgtgtttgggggtgggggcgggtagaggaggcgacgggtacgtgcagtatagactaggggctsgcctggtgcagagaaagtcaccaagtcagggaccctccatctctgacccgagccgcgggccatctctcccagctggcccacgccatccgcttgctcctgg

SEQ ID NO: 396328 - DNA, 201 bp, Homo sapiens
gtggctgcctctgcaggcctcccctgctggagctgcaggctgtcccttccctgagctcccgtgagtgagccctctggccttgcaaggcagaatgctggggmgggatgctggacaccctgtctaattgggttgggtgtccctcagagcttccctaaaccctggaagccttagccgttgtggggtccagagccctcagtggga

SEQ ID NO: 396329 - DNA, 201 bp, Homo sapiens
gcctgggcactgccccggttttagttgtggggaagatggctgcttgcctgtggccagcctgggccatctacagccctggggaggccacgtctgtgcagggwgcttttgtctgagggtggtgacagctgttttctgcctcaggagaaactgaagccaaaatacttggaggaactccctgaaaagctaaagctctactcagag

SEQ ID NO: 396330 - DNA, 201 bp, Homo sapiens
ctctgcccttgcatatgggaaggggatgctggggagcctggtggcccaactgagcttccccggtttcccatctatccagctgccctacttgattgatgggrctcacaagatcacccagagcaatgccatcctgcgctacattgcccgcaagcacaacctgtgtgagtgtgggtggctgcaatgtgcggggggaaggtgacc

SEQ ID NO: 396331 - DNA, 201 bp, Homo sapiens
agcctggtctggccttcctttggtggttcacccttaccctattcagtttcatccaggttttgctaagtcattgggtgagatctgtgctctcttcttggctrcacaggtgtgttctgagcccctttgttctgctggaggtcctttctgtgtgtgcaatcctaggcaagccaagaacctccctgtgaaaaaggagaatgtttg

SEQ ID NO: 396332 - DNA, 201 bp, Homo sapiens
tgtggcctggctagcagtagtagggctggagatgtgatgggggcacagggacatagggagatttagctcaggtaccaggtggagaagtttggactttatgytttaatgggaatgattagagcctggtctggccttcctttggtggttcacccttaccctattcagtttcatccaggttttgctaagtcattgggtgagatc

SEQ ID NO: 396333 - DNA, 201 bp, Homo sapiens
ctggacaccctgtctaattgggttgggtgtccctcagagcttccctaaaccctggaagccttagccgttgtggggtccagagccctcagtgggattctttstccctgaaccctgggatgtgggactgagtggtcagattctagatccacctgtctcagggatcttgccactggctccttgggagggtccccgggaaggagg

SEQ ID NO: 396334 - DNA, 201 bp, Homo sapiens
ctcttgcattcctgcacgcactggtcttttcttaagtccttggtaccactcatcctccaagtgctttcccatactatcagcagttattctcacgactccartgtcatgtcaacaaaagcagaggcaattcccaccaatcttaggacacgatccaggcatcccacggtggaaattcaattcctagatggtaaaatttgtgtt

SEQ ID NO: 396335 - DNA, 201 bp, Homo sapiens
gctagttcccatcagctctggttctggtccagcctgagcagccttggggttatgtaagaggtggtgggaggggagcggtggggaacagccgagggctgggkcatggagcctgcctgggcctggccctggccctttggggagagggagccctggatctctttgaattctttagaagttacatggtcattgaatcctggtaag

SEQ ID NO: 396336 - DNA, 201 bp, Homo sapiens
tcttggccttcttcagatcacctttgtggatttccttgcctatgatgtccttgacatgaagcgtatatttgagcccaagtgcttggacgccttcctaaacytgaaggacttcatctcccgctttgaggtgatgcccccatcctcctttctctttgatgccccttgttcctttctctcctttcagatgctttcccagtcctg

SEQ ID NO: 396337 - DNA, 201 bp, Homo sapiens; identical to SEQ ID NO: 87524

SEQ ID NO: 396338 - DNA, 201 bp, Homo sapiens; identical to SEQ ID NO: 87525

SEQ ID NO: 396339 - DNA, 201 bp, Homo sapiens
aaaacaggctgcactcagatttgcaaataagctgttttgcatttatttacaatgcttatagaatgcacttctttggtgaagggactctgaagagatattgygtaataagacttatatactaagcattgatatgaacaacccaaagtcactccttggattggctcttgtctccatccctctgtgaccccactcaggtttact

SEQ ID NO: 396340 - DNA, 201 bp, Homo sapiens
cattattagctggtgtgttctattcctattattttgcatcatggaaaacatctcctgcgaacactaggttggcccgctgtctccaagtcaggccacacagmagcacctattcatttaaaattcaaatatacccacacccatttaatcttttcttccagatttaagtctcacgtgtcagttatctgtaattatttccattgt

SEQ ID NO: 396341 - DNA, 201 bp, Homo sapiens; identical to SEQ ID NO: 54308

SEQ ID NO: 396342 - DNA, 201 bp, Homo sapiens
aattcccaggttggggccaccactttttagtctgacccctgcagccggagtctcccagagcccttgggaactcggcagctgagagaaggctgagggattcygcgggcagggaggagaagggagaagagctttgctccattaggatctggctggtgtctcaagcgcacagccaagtcgctgtggacctagcaagggctggat

SEQ ID NO: 396343 - DNA, 201 bp, Homo sapiens
ttagccgttgtggggtccagagccctcagtgggattctttctccctgaaccctgggatgtgggactgagtggtcagattctagatccacctgtctcagggrtcttgccactggctccttgggagggtccccgggaaggagggctgggctctggggaggtttgttttcacttcttccccaccacagctcctgactatgacag

SEQ ID NO: 396344 - DNA, 201 bp, Homo sapiens
gccagacatcctgcttcgggccaagcaagatttcctgaagacggacagtgactcggacctacagtgaggagggcagaggggcacaggggatgcggagctgsagcctgcccttctgccggctctaaacccctcccttgaatgcaccccctgcaggctctacaaggaacagggtgaggggcagggtgaccggagcctgcggga

SEQ ID NO: 396345 - DNA, 201 bp, Homo sapiens
gcggcctcatggtctccctgtccactgatgatcccttgcagttccacttcaccaaggtcagagcccagcaggcagccaggcgggcgggcgtcccaggacgstggggtctcccgggttgggtggggggcggtggggggggcggtctctcgggttggtgctgccccctgctggtagagcatagctggccaattgacaagtctt

SEQ ID NO: 396346 - DNA, 201 bp, Homo sapiens
tcctttcccattgcactgccccaggccccagaccttcctggcctctggtggatcagcagtgccctgttccattccaggtggacacccacatccatgcctcrtcctgcatgaaccagaagcatctgctgcgcttcatcaagcgggcaatgaagcggcacctggaggagatcgtgcacgtggagcagggccgtgaacagacgc

SEQ ID NO: 396347 - DNA, 201 bp, Homo sapiens
cttgctatgccatctctcgcccaacaaacctcactcttggcaccttgggccagggccactagacctctgacccacctgttgcctggactggatgggttctytctctgcccttggagctacatctgtcacccctcacagccagtaatctacccctgtcccccttatcccaggcctgcatagttattggctggaggacatatg

SEQ ID NO: 396348 - DNA, 201 bp, Homo sapiens
cgcggcctcatggtctccctgtccactgatgatcccttgcagttccacttcaccaaggtcagagcccagcaggcagccaggcgggcgggcgtcccaggacsctggggtctcccgggttgggtggggggcggtggggggggcggtctctcgggttggtgctgccccctgctggtagagcatagctggccaattgacaagtct

SEQ ID NO: 396349 - DNA, 201 bp, Homo sapiens; identical to SEQ ID NO: 87538

SEQ ID NO: 396350 - DNA, 201 bp, Homo sapiens; identical to SEQ ID NO: 87534

SEQ ID NO: 396351 - DNA, 201 bp, Homo sapiens
ccttcatgctggctgagaacatttcccacgggctccttctgcgcaaggtcaggatctgcacccctagccttccctcccaattgttcaccttcctctgaacmattcgggccccttcagcaaccgatcctcctcccacccagccctcagattggattctgccttcccaatgtaactacccttccccaccccagccttcagcct

SEQ ID NO: 396352 - DNA, 201 bp, Homo sapiens; identical to SEQ ID NO: 87541

SEQ ID NO: 396353 - DNA, 201 bp, Homo sapiens
gtggccgtctccatgtcctcatcccacacctctgcccagcctccccttcaagggccaggccccccacacagcatccagtacagagggtcctttcccattgyactgccccaggccccagaccttcctggcctctggtggatcagcagtgccctgttccattccaggtggacacccacatccatgcctcgtcctgcatgaacc

SEQ ID NO: 396354 - DNA, 201 bp, Homo sapiens; identical to SEQ ID NO: 87542

SEQ ID NO: 396355 - DNA, 201 bp, Homo sapiens
gccgtccctcaggacccgggctttctgctgtacagacttctcgtgggcagcctcccctcggaactcgggcatcatggcctcaggtgagtgtgtgtacgtgygttggagggagggtctctgggacagagaagtgctgtggccagagtgacaagagggtgggagtcacagcacagcagcaggacctagggaaggcggtcagct

SEQ ID NO: 396356 - DNA, 201 bp, Homo sapiens
ctctgtcccagacccccagacaagggggtctcctggccttcctgccttcctgggaggtagctatttggcgacggtggaattttcccgggacaggcccctcyctcctgggctgggattctcggttcttccccctcctcccagagctgggctaccccgggagctgagggtcagatgtggaaggaaagtgggtgctgggttttc

SEQ ID NO: 396357 - DNA, 201 bp, Homo sapiens; identical to SEQ ID NO: 87543

SEQ ID NO: 396358 - DNA, 201 bp, Homo sapiens
acccctcacagccagtaatctacccctgtcccccttatcccaggcctgcatagttattggctggaggacatatgcgtgctgggtggggggtcaggggctcyggtgagcccaggtgatcccaggctcaggagctgacactgtcttcatgtcccccaggcagaggggcttccacacgtttgtgctgaggccacactgtgggga

SEQ ID NO: 396359 - DNA, 201 bp, Homo sapiens
gccttccctcccaattgttcaccttcctctgaaccattcgggccccttcagcaaccgatcctcctcccacccagccctcagattggattctgccttcccartgtaactacccttccccaccccagccttcagcctggggccccaacttggattttgactaattcaccctttgcacatcaggccaagcctggattcccctcc

SEQ ID NO: 396360 - DNA, 201 bp, Homo sapiens
  misc_feature (1)...(201): n = A,T,C or G
tgtcttagtgggttcccccagcctggagagctgggggtgggggctggaaagggcgtttctctttccagcagctggaggggcggaggggcagaggggctgcntaggagccacttgatgtgctggaccagggtgatctgagtgttcctgggggtcagggcctgtgggaggtggggatagtttgggttctaagataaggcctta

SEQ ID NO: 396361 - DNA, 201 bp, Homo sapiens; identical to SEQ ID NO: 87544

SEQ ID NO: 396362 - DNA, 201 bp, Homo sapiens
tgtccctaaagctctcagactgggaagtatgagggctgtgtgccaggccacatctcacatgccctgcacggggtcccctctccgtgtccactcctgggggrgtggaggggagcaagtggggagctatctgggcccccaggctgcggtagaggatgggtaagggtgtttggttagggtgacaataatcctgatttctaaacc

SEQ ID NO: 396363 - DNA, 201 bp, Homo sapiens; identical to SEQ ID NO: 87535

SEQ ID NO: 396364 - DNA, 201 bp, Homo sapiens
ggggcggggccaagggccgcagagcctggcgcggagccggcgagattttggtggggtctcacctgttgcgtgactcccccacagtccggccgcgggagtcygaccctgaatgcccagggagtgttgagagaaatctggacgagtttcgggtcccgctcccttgggagcacgtggcctaccagcctctcgattgcagggttg

SEQ ID NO: 396365 - DNA, 201 bp, Homo sapiens
catcctgcttcgggccaagcaagatttcctgaagacggacagtgactcggacctacagtgaggagggcagaggggcacaggggatgcggagctggagcctrcccttctgccggctctaaacccctcccttgaatgcaccccctgcaggctctacaaggaacagggtgaggggcagggtgaccggagcctgcgggagcgtga

SEQ ID NO: 396366 - DNA, 201 bp, Homo sapiens
atattgtaaacatttccacatcattaaacatttctccaagaacaatttttaatggctgtatttcatggtatgaatattacataaacattcccctattgttygacctttaaagtatctaacttttctatgcaatacacattgtggtgctgaacaactttttgcatacatatttttctggcagctctttttagaaaaacaact

SEQ ID NO: 396367 - DNA, 201 bp, Homo sapiens
tcactgtctctgcagaggctcggggtggtctgggggcccctccgctgcagtctgcccgatccctgccgggccccgccccctgcctcaagcacttcccgctsgacctgcgcacgtctatggatggcaaatgcaaggagatcgccgaggtatcacctggcaccacccgcaccctcaccccgtgtctccatgccctgcctctgc

SEQ ID NO: 396368 - DNA, 201 bp, Homo sapiens
gcttgggtctgcgcatggtgcggggtgtggtgcacgtctacacccgcagggaacccgacgagcagtaagaggggtgtggtgcgtgttggggggatgcagcrtgggaggttgcgttggcttgggagaggccacagggctcggcttgctctcctcacccaagctcccctccatgccagttgctcagaggtggagctgccatac

SEQ ID NO: 396369 - DNA, 201 bp, Homo sapiens
ggagtcacagcacagcagcaggacctagggaaggcggtcagctcctcccaggagggcctggggagcagagccagagtgtgcagagacagaggaaaaatccraagaggctagggtctctgtcccagacccccagacaagggggtctcctggccttcctgccttcctgggaggtagctatttggcgacggtggaattttcccg

SEQ ID NO: 396370 - DNA, 201 bp, Homo sapiens
ccatgcctggggacctgggcttgggtctgcgcatggtgcggggtgtggtgcacgtctacacccgcagggaacccgacgagcagtaagaggggtgtggtgcrtgttggggggatgcagcgtgggaggttgcgttggcttgggagaggccacagggctcggcttgctctcctcacccaagctcccctccatgccagttgctca

SEQ ID NO: 396371 - DNA, 201 bp, Homo sapiens
cataaggtagctgttccctttagccagggggatcagccattccttatttaacacctaagtgggacttacctcaagtaaaaagatgaataacacaaaccctrcagactaggagaaaggtaaccactgattgcatttctggtagaattatggagagtgaataatataatgggcattctttgaagcttgcccttgaaactcttc

SEQ ID NO: 396372 - DNA, 201 bp, Homo sapiens
gtctctttccactaaacttaatttccattcttttcctcagaagccttctgtcttgcataaatgaaatggaaagaatacttctagaaaatgattcaagaacrgctttgtggaagagagagagaagagcagagctgtgactctcaaattttaaaggcttaaatgtcattaaagtgaaggtttcaagcctctgccccccagaga

SEQ ID NO: 396373 - DNA, 201 bp, Homo sapiens
ttttatcttctgagtccactggtcttcctttgccactgcaccctccttctagaataaaaggattggtgaaatatcgtggaagttttagtactgacaatacrgcatcctctatttcatttaattttcacaaccctataataggttaacattatcctcattttattaatctggaaattgagagcattaagatgattgagacct

SEQ ID NO: 396374 - DNA, 201 bp, Homo sapiens
acacacctcccaattagccatgtcagacttgcatctggctttctctgtgtccttcagtaggaagtcaacaccacccagagcgagtatcaggatttccagcrtctgctatctcctgtgacaacttctttttgttctgtacatcagaaggtgcggcttcttttgaagatttttgactcaccttttatgggcagaattttgtgg

SEQ ID NO: 396375 - DNA, 201 bp, Homo sapiens
agcataggaagagttttttcctctactctctaaataacacttctgtacaacgtagttgcctcagatggaaaaaggaacttgagatagatagggtgtctgtstgtgtgtgtgtgtgtgtgtgtgtgtgtgtgtgtgtgctttttggtatttggttgtcagataaagtttctacaaacgaaagaaaatagtatcagccataat

SEQ ID NO: 396376 - DNA, 201 bp, Homo sapiens
catttcacattataagctatgcattttttgatctttttcccctggtaatataggtcaatatggtcacttctaaataaaatatattctatctaaaacaagayatattataataattttattttaatatacataaagtttatgttagaacttattttatcagtattttaaatttaaaatccatgttaattgaaaatattttta

SEQ ID NO: 396377 - DNA, 201 bp, Homo sapiens
attatgttagtttagttttattgcaaacattgataagaaaaagaagttatttcatgtgtgatgaaatatggataaatactgttatttcattttttcttctkattatataagtcataaaatgggcttttaaattggtataatatttatgttacttcatttcacattataagctatgcattttttgatctttttcccctggta

SEQ ID NO: 396378 - DNA, 201 bp, Homo sapiens
catggttttgatagtctatgaaagctacagagggctaacattgttcttaaataaatcagagccttacataaatataatacaagatgaactattgtaaataytgtagagttcaaaacaagcatggaaacttataaaggtatattttaaatgctggtgattttaaatgagtttttcataaaaatcatattgaatgaatcagca

SEQ ID NO: 396379 - DNA, 201 bp, Homo sapiens
tatccacactgtgcttctttttaaacttagggccacctatcaaatctcctagtcttaaatcaaaaatatggaagattattgagctatctgtctaaccaggyatttttgtgtgcataacagcggtatagtgtcctagactctaaagtccttcaggacaacaactatattattgagagtgcctggcatataataggtgtccag

SEQ ID NO: 396380 - DNA, 201 bp, Homo sapiens
gtctgaacgcaatctacttttgaaaagcaaatacattttcaaaggcaaatacatatttgaagacaaacacatcagaacgaacaccacttgaagttctagakggatcagtacttaggagcaaagaattactttgcctagtgggtagtcaatttccgaaatggtaaaattatgaaattccttgcccacaagtgcctggtataa

SEQ ID NO: 396381 - DNA, 201 bp, Homo sapiens
gaacttcaaagtatttaaatatattcaggcaatctctattaggaacctctagtttgttttcaaaataacaataacagttatgtatgctctacaaaaacttstatggcactatgatttgcattctaatactgttattcacagagattgagaatttatcacaagttgatggtcctcaagtggaagagcaacttctttcaacca

SEQ ID NO: 396382 - DNA, 201 bp, Homo sapiens
tgcatttactattaaaactgttaaagaaaaccttgatcaactgaaaaaccaaatacaggagccatgcaagaagtttgccattgcagatgcaaccagagaastatgggcttaatgttttatatctattgattgacaatactacattcagtagaaagatggcaaaggctattttatactgaccatctgaaaaatattatttaa

SEQ ID NO: 396383 - DNA, 201 bp, Homo sapiens
aacaactaaagtcaagttaatataaccaacagacttgaaagaagttatgaaaggcaacatgccccttgagaggtatgtgtagaagagaagcattgccttakttgcaataacaagcctgggaagcaggagggaaggaaggaatgccgtgtagaataccgcaggcatgcggatgagctccaggtccaataacccatgaactac

SEQ ID NO: 396384 - DNA, 201 bp, Homo sapiens
attcagtagaaagatggcaaaggctattttatactgaccatctgaaaaatattatttaaaaattttagcaaacaagtttcaggtttttttttaattgatgytaggcagtaaagcactacagtgaattctcgcctctagacctcttttagttttctaatttacatgaggaatagcttattcattgtttgtacatatgagtta

SEQ ID NO: 396385 - DNA, 201 bp, Homo sapiens
cgtgagacagttaatgatttccgagagaagatgatgtataaagctatacattgtgttcaaaatatgaaaccagaggagtatgctcataaggtattgttggycacctctgaatttgattttcatttaaaaatggcggcatgtggttgccattgatatctctgtgactcattctccagacaaaaattgtgctgaattataagt

SEQ ID NO: 396386 - DNA, 201 bp, Homo sapiens
gagaaatattgccaagcattacaagaataacccatcactaataactttcctttgcaaaaactgcagtgtgctagcctgttctggggaagatatccatgtarttgagaaaatgcatcacgtcaatatgaccccagaattcaagtgagtccagaaagacccatttttacatttttccacaaggggtgaagcaggttgcattgt

SEQ ID NO: 396387 - DNA, 201 bp, Homo sapiens
agaaatttactaatctaaaagagaaaataaaagaaggctaaagactctaatgaatggatataaaaataattctgccccatatttccaaaaaaaagatatamcaataaatttcccataacattaaaaaaacacaaatttgagaaaaattgattatagtaataatcaactatgcaaatattacataggaaaaaatataaatct

SEQ ID NO: 396388 - DNA, 201 bp, Homo sapiens
ggcaagagcaaagctaaagaaaactaccaaatttgcattttcattaattcagccttaaatgtaactttgtgtcactgaataagtgacttacttcctaaacrtgacggtcagacaggaaatcacttttcttgtgattagcataatgcttatattgtttttttagctacagtctaatcattacaaagaactactcgttgtgtc

SEQ ID NO: 396389 - DNA, 201 bp, Homo sapiens
aatggctgaggtaaaatttattttctaggtgtcaggtttgaataattcaatagcttttaaaaaaaatggttcatatttaaaaggacacttggtccagagatttttgttgttgttgttgttgttgtcccggagatttttttccctgccgacttcagaattgctacaggtaacattgctattttcttcaatgtttcaatgtaa

SEQ ID NO: 396390 - DNA, 201 bp, Homo sapiens
cctagtgtctcagaagcagagctatcctcacagaaagctgtgtggatggagcccttagagagagcaggctgtcttgcagagccctagaacctgccattccrtggacctggaaggcagagcatcaaaccaaacagagctattctcaagccttataagccttaagatgtgacagaatttaccttaataagttttggatttgct

SEQ ID NO: 396391 - DNA, 201 bp, Homo sapiens
ccagactggatgatggaaatatttttgttattgtgtggtaatcccagattggaaatcaaatgttgtctcaccattatgtctttgttcaatgccaaaaacaratggcaacaaatccatgtatgatctaatcctttgatttacactgaccagttgcaatttattatttcttcctctaattagaagattttaatgtgtttagca

SEQ ID NO: 396392 - DNA, 201 bp, Homo sapiens
atggctgaggtaaaatttattttctaggtgtcaggtttgaataattcaatagcttttaaaaaaaatggttcatatttaaaaggacacttggtccagagatttttgttgttgttgttgttgttgtcccggagatttttttccctgccgacttcagaattgctacaggtaacattgctattttcttcaatgtttcaatgtaag

SEQ ID NO: 396393 - DNA, 201 bp, Homo sapiens
tgactgctggtttggaaatgtagtcatttagctagcatatttccacccagaataaaattatggttctgttaggaaaaatggacactgaatgaaaaactagyggtttctgctacaaatgtgtaaagagtagactgattaagatggtgaagggtctgaaaattataaagcatgaaaaaagattaaaggcatttgggtgcttag

SEQ ID NO: 396394 - DNA, 201 bp, Homo sapiens
ctgaggtaaaatttattttctaggtgtcaggtttgaataattcaatagcttttaaaaaaaatggttcatatttaaaaggacacttggtccagagatttttgttgttgttgttgttgttgtcccggagatttttttccctgccgacttcagaattgctacaggtaacattgctattttcttcaatgtttcaatgtaagcctt

SEQ ID NO: 396395 - DNA, 201 bp, Homo sapiens
aatgagtccaatgtcagattttggaactcaaccctatgaacaatgggccattcaaatggaaaaaaaaggtaatttaggtttggacctaacacttagtttawcccatgtttataccaagattttagatgactatatcacagattccccaaaaaatggaaagcaaaagtagttccaaatagaatttctgtgttctctgtagga

SEQ ID NO: 396396 - DNA, 201 bp, Homo sapiens
tatagcattgggctttcattctcatggtcgaagatggcttttagaatttcagctgccacatcctcattctaggcaggaagtaagaggagaatggaaagggygaaaggtacacatgccagctatctaatttttaagaagattttctgaaaattccactcaacagctttttacatgtcattgactgctggtttggaaatgtag

SEQ ID NO: 396397 - DNA, 201 bp, Homo sapiens; identical to SEQ ID NO: 87575

SEQ ID NO: 396398 - DNA, 201 bp, Homo sapiens
agaagttgaaaaacaatagactcaagaaagaaaacaaaccagtgattccccttcctcagatactgggactaacagcttcacctggtgttggaggggccacsaagcaagccaaagctgaagaacacattttaaaagtaagtcataattttatgtataaccaatgaaagcaaagctaaaacaaatgccaggacttcttggtct

SEQ ID NO: 396399 - DNA, 201 bp, Homo sapiens
taggtgtcaggtttgaataattcaatagcttttaaaaaaaatggttcatatttaaaaggacacttggtccagagatttttgttgttgttgttgttgttgtyccggagatttttttccctgccgacttcagaattgctacaggtaacattgctattttcttcaatgtttcaatgtaagcctttatttatacttatgcttaat

SEQ ID NO: 396400 - DNA, 201 bp, Homo sapiens
ttattttgctataatttacataggaaattaatcttggtacttgtctgattaatctattatatagcctccaggcttgcttgcaaggttttattctcttttcyatgctatatatggctgccttgaagggagatctaaaatgtagagttagaagccaaagagatgggctttgttcaactgcactgatgacttacttttactgaa

SEQ ID NO: 396401 - DNA, 201 bp, Homo sapiens
aaatgaactctttgaattttcttttaagacttttccctcattatcattgatgaatgtcatcacaccaacaaagaagcagtgtataataacatcatgaggcrttatttgatgcagaagttgaaaaacaatagactcaagaaagaaaacaaaccagtgattccccttcctcagatactgggactaacagcttcacctggtgtt

SEQ ID NO: 396402 - DNA, 201 bp, Homo sapiens
agtttctctgtgagagtgtggaataatttttgtgtgcatcatttacatgtattatcagttccaaaactaagatatggtggacaatgagacggaagcattamgtttggtagaataatctatattgaggtggtggtcattgacaaatgtttatcttacagcagcaaagtgtgataagactgtagaaggggaacacatggattt

SEQ ID NO: 396403 - DNA, 201 bp, Homo sapiens
accactaatgaatgatgagaattgacagataagatgaaatctttcttccatgtcataaacacagtttaaacataacagagcttcttaaaattaaatcagasttctaggagcaagttgatcatcataaatgtttttctctagcattgattcaatttttttgctacattattacactttatttggacttaggctgattgtagc

SEQ ID NO: 396404 - DNA, 201 bp, Homo sapiens
aattttgtggtgcaatgtcactccataatacagagattcttaattaaatcattcagcatgagtgtatttaaagacaaatcaaatgtagatcttgtcctcamgaaatatacagtctagaagaaagatgagagatatatgttgataatatgataattaatattttattgcactttataaagcactctcagatatattatctca

SEQ ID NO: 396405 - DNA, 201 bp, Homo sapiens
ttgacacaaagaagatatagagtaacgggacttttgtgtactggtagcagttaaggccaaaacaacccaaattctccctctgattcacatttcaaaggagrccccaaaagactgagcagctataaatttgaggctctctaggaagcaatagtttctctgtgagagtgtggaataatttttgtgtgcatcatttacatgtat

SEQ ID NO: 396406 - DNA, 201 bp, Homo sapiens
tcagatttcactttatctcttacccacctatgttaatggcattattgtaacctgttgagtaggcataggtgttatgctgattaatagatacactattcttmctataaaattaactaaagggatttttaaataacttaaattgcatccttgaataaaaggcaagtcatagaagactaagataaccagactgccatcaaatta

SEQ ID NO: 396407 - DNA, 201 bp, Homo sapiens
tgtaggacaagcataataaacatgttctaattccttttctaaggagagagattccaatgctatccaattttctctttgtctccagagtcttgagataaacwttaatagctctgtctccaaaggcaaactcaactaatatattttcatgccatttctctgtgcatcagctacatgtttttgctgaggcagaactcaagcagc

SEQ ID NO: 396408 - DNA, 201 bp, Homo sapiens
ttaaaaatgtatttcttattcaaccttagcttcagtttatcttttcactgactcatggcttactagattcaaattccttcaaattccccttttttgagtcrtcagttgcttcttctcttaactgtcactttgtgtgtgtttctaggtgagcattattacattgtgttgtaataatttgtcttgctttgtttagtcttggtc

SEQ ID NO: 396409 - DNA, 201 bp, Homo sapiens
taaatcacttcaacagtacaacttgtagggatcctgtaaactgttatactacatgtaaaatactctgcttgatgtttgcagccctttataacctggcactkctctacaaatttaaaaatgtatttcttattcaaccttagcttcagtttatcttttcactgactcatggcttactagattcaaattccttcaaattcccct

SEQ ID NO: 396410 - DNA, 201 bp, Homo sapiens
atttacttgatttatttgtgttttcaggcccgtggtcgagccagagctgatgagagcacctacgtcctggttgctcacagtggttcaggagttatcgaacrtgagacagttaatgatttccgagagaagatgatgtataaagctatacattgtgttcaaaatatgaaaccagaggagtatgctcataaggtattgttggtc

SEQ ID NO: 396411 - DNA, 201 bp, Homo sapiens
ggaaatatttgcagttttgagttgtatatcatctcttttcagagaagttttattaaaacatactatgtgtctattttttcatccatttttatttccagccrtaaatatgacactcagactagttttaaatagctaagagctacctcattggtgtgttaagaggctttaggatgaaatattatctaagtataaatattataa

SEQ ID NO: 396412 - DNA, 201 bp, Homo sapiens
gaaggaaggaatgccgtgtagaataccgcaggcatgcggatgagctccaggtccaataacccatgaactacacactggtattttgtcagttctccatgatrattctttccctttgatacttatagggaactttacattgtaagagaaaacaaaacactgcaaaagaagtgtgccgactatcaaataaatggtgaaatcatc

SEQ ID NO: 396413 - DNA, 201 bp, Homo sapiens; identical to SEQ ID NO: 87577

SEQ ID NO: 396414 - DNA, 201 bp, Homo sapiens
caataacccatgaactacacactggtattttgtcagttctccatgatgattctttccctttgatacttatagggaactttacattgtaagagaaaacaaarcactgcaaaagaagtgtgccgactatcaaataaatggtgaaatcatctgcaaatgtggccaggtgagtaaattgctgtgggccagattttactttagcca

SEQ ID NO: 396415 - DNA, 201 bp, Homo sapiens
atttagaagctcctttttcctatattaggacaaatgttgctgattgtgggttaatgagatccataataaaacaatgttaaaatgctatatttagcaagcartgctacatattactttcatgaaattttataccacatatttatgctacaatttaatgctacatattttttacatgaaaaagagttctacgttgaataaagt

SEQ ID NO: 396416 - DNA, 201 bp, Homo sapiens
tgtgggttaatgagatccataataaaacaatgttaaaatgctatatttagcaagcaatgctacatattactttcatgaaattttataccacatatttatgstacaatttaatgctacatattttttacatgaaaaagagttctacgttgaataaagtgaaagggaaaaataattgcataaatattgaaaaatgtctctttt

SEQ ID NO: 396417 - DNA, 201 bp, Homo sapiens
gaagattcttcaaattctgcctagtgattgagaattcaataaagcagaaagacacaatgctaaacaccaagatttttagaatcaaaattttaagagtggarcatatgtgatagatcatctattttatcaccttaacaaatgaggaaattgatgcctgggaaaatatcaactgatcaaagaccatttttcatccaaccaaca

SEQ ID NO: 396418 - DNA, 201 bp, Homo sapiens
ttgccatgtgcttatttctgtggattatatttgttttttctatccttgtcataaaattgttcaatttaataattaacatttctattacatgctatgctagractcaaaatagataatctagctaatatttaacatcattataggttgttttaagtttttggagatcatgctaattttcatttgtctaagtaagggcttttc

SEQ ID NO: 396419 - DNA, 201 bp, Homo sapiens
taggcagtaaagcactacagtgaattctcgcctctagacctcttttagttttctaatttacatgaggaatagcttattcattgtttgtacatatgagttamaagggacagtgaggggccatgggcagagggatgtgtaactaagctggaggggttatgacagttcgttttagcctttttaattttcttcgtgaattccagg

SEQ ID NO: 396420 - DNA, 201 bp, Homo sapiens
cataccctccctaatgtatttatgcaattaaagcaattcttttctacagtgaaatagttttggaactttgccattcactttctttaaaagtgtaacttacaaactcttagaaccaaactctctaattttgatccagtacatatctttctggtctggcatatgccacattccatagagtcatgtcatctattttatttatgg

SEQ ID NO: 396421 - DNA, 201 bp, Homo sapiens
taggaaaacagtgcaatggtaaagaagtgaaatatttactttaatgatgcttttctgatgaatttttcaggaattataagaataaactgagagtcaatttrgacattatggccagtaaattatgtcaatactttattttgtaaaatttagaaagcattacaaattctggccatatgtacttgataataccattgaaaataa

SEQ ID NO: 396422 - DNA, 201 bp, Homo sapiens
aaattttaccaggtttttcccaaattactttcaatatcagttgtatattccaccagcaataaatgagagtgcctcttcctaattccccacaccttaattaktacttcctgttatcagttttccaatttgttagtctgatagatttcaaattgtttctttcttttctttgagtgtatatttccatgatgactactaagctaa

SEQ ID NO: 396423 - DNA, 201 bp, Homo sapiens
accctccctaatgtatttatgcaattaaagcaattcttttctacagtgaaatagttttggaactttgccattcactttctttaaaagtgtaacttacaaastcttagaaccaaactctctaattttgatccagtacatatctttctggtctggcatatgccacattccatagagtcatgtcatctattttatttatgggat

SEQ ID NO: 396424 - DNA, 201 bp, Homo sapiens
  misc_feature (1)...(201): n = A,T,C or G
agaagagaagcattgccttagttgcaataacaagcctgggaagcaggagggaaggaaggaatgccgtgtagaataccgcaggcatgcggatgagctccagntccaataacccatgaactacacactggtattttgtcagttctccatgatgattctttccctttgatacttatagggaactttacattgtaagagaaaaca

SEQ ID NO: 396425 - DNA, 201 bp, Homo sapiens
taactgttgtgtaaaccttaaaaagtgtgaaataagacgccatatagtggaagcatgggggctgttcataccctccctaatgtatttatgcaattaaagcrattcttttctacagtgaaatagttttggaactttgccattcactttctttaaaagtgtaacttacaaactcttagaaccaaactctctaattttgatcca

SEQ ID NO: 396426 - DNA, 201 bp, Homo sapiens
tttattctcagaaatattttaaaaatattttaaaatgttttcctttgcagaatcagacacaagtttggcagaaggaagtgtcagctgcttagatgaaagtmttggacataacagcaacatgggcagtgattcaggcaccatgggaagtgattcaggtactgcctaactgttgtgtaaaccttaaaaagtgtgaaataagac

SEQ ID NO: 396427 - DNA, 201 bp, Homo sapiens
tagtcagcaataaaaaggaacaaattagtaatacacacaacaacgtagatgaatcacaattactataaactaagttttaaaagacagacataaaggctacmtattgcatgaatccattcatatgacatcctggaaaaggaaaaactattggaacagaaaccagatcagtggttgccactggttgtctgatgtggaacagaa

SEQ ID NO: 396428 - DNA, 201 bp, Homo sapiens
gatagtttgctcagaatgatggttttcagtttcatccatgtccctacaaaggacatgaactcatccttttttatggctgcatagactagatggatactttyaactgggtggttgaggaaggtctcttagaaggagtgacagggaagctgcatctgaatgataagaaaatacagaatatgtcatctagctacatctcaattt

SEQ ID NO: 396429 - DNA, 201 bp, Homo sapiens
tatatttatgttgtgctaatatacttaaacagtatgtatgtccattgagaatttttctacaaatttcttatcagcttacttttaatttttaagaaagataycttacatatttgattggcattggctgtaattctgttatagctcttaaactaaataggctcatccaaattggatgggagatgtaaatgtcacagattctca

SEQ ID NO: 396430 - DNA, 201 bp, Homo sapiens
ccaggcgcaagtgatcctcccacctcagtctcccaagtagctggcatcacgggcgtgcgccaccatacccagctaatttttgtattttttttagagaatgrggtttcaccatgttgtcaagacttgtctggaaactcctgggctcaaggaatcctcctgccttggcctcccaaagtgctgggattataggcttgagctgct

SEQ ID NO: 396431 - DNA, 201 bp, Homo sapiens
gggtggaggtggcttctctccattctgtgggaacacatgttccctggcacggagaggaaaatctgacagaccaaaatgtgagtgtgtgtgtgtgtgtgtgygcgcgcgcgcgtgcgtgtgtgtgtagatccatatacatagagctgaaaataaaagtgatctatttcctctcaaaaaagattaagttatttcaaaaggaaa

SEQ ID NO: 396432 - DNA, 201 bp, Homo sapiens
cattacaaagaactactcgttgtgtccatattaaaattaaaagtaccttgccataacaaaagcacattctaagcctttcgaaatgtcaacatattaaaatrtattaaagcaatctctattgcgggctctccattttgttttcaaaataacaataacagctatttatattgtataaaatcttgcattgcaatacaatttaca

SEQ ID NO: 396433 - DNA, 201 bp, Homo sapiens
tatgagtgtaagcccacttgagaagcccatgcagtctttgtgtgtgtgcccaaacgtgcacacatgtttcaagctttcggggtagcttggaccttccaggmgtgaggattatgaaactggagggaaggtggggatagctgcaaaggtgaagctaaaatgcatcacaaggtcagaactagaataaacatgaaattaccatga

SEQ ID NO: 396434 - DNA, 201 bp, Homo sapiens
ttggtatagacccatctatattttttaaagtataccgatcatattgttcatacccttttataattgttaattttaagcaagatatatcattttaacttacmtaatttataaaacatgatttttagtgattgtatgttatttacattgtatagaagtaccataaggtgtttaatcagttacatatgattggacagttgagtt

SEQ ID NO: 396435 - DNA, 201 bp, Homo sapiens
aaacacaaaaattagccgggcatggtggcgcacacctagagttccagctgctctggaggctgaggcaggagaatcacttgaatccaagaggcggaggttgyagtgagccgagatcacgccattgcactccaacctgggtgacggagcgagactccagctcaaaaacaaacaaacaaacaaaaaaactctatgtggatgtta

SEQ ID NO: 396436 - DNA, 201 bp, Homo sapiens
tatttagagcttttctgtgatacgaaagaaaatactatatgagaggcagaagaatatgcacacttacatcccccgtattgggacaaattgtgttctgaaawtttgttttttttaagtcagttgtttggatattgcactggttttccccataaaagaagtaatcttttagatgatggctgactttccatactgcctgaaaaa

SEQ ID NO: 396437 - DNA, 201 bp, Homo sapiens
tggatattccccaatgttttaactgagtttatgtgcctaagtcttcaaaatggggtttatagtatcaagtgaggctgtttggttcttctgaaaacacactyattttctgacacatggctagactttatgccaggtacatgctatttttgaaaagctcttttttaagaggtaactgtttattaaaacaatctgtttcaccaa

SEQ ID NO: 396438 - DNA, 201 bp, Homo sapiens
aaaatgtcttcaaccctgctggtcgagacaagaaatctttatggggtagttggagctgaaagcaggttaggcacctattaaaacatcacagaacaggttakattgtggtttgaagaactggatattccccaatgttttaactgagtttatgtgcctaagtcttcaaaatggggtttatagtatcaagtgaggctgtttggt

SEQ ID NO: 396439 - DNA, 201 bp, Homo sapiens
taaaatttaggggtccagtttaaaggttccccttttcaggcttttttctggagtcttaaaaaatactgtggccaagcactactgcaattaaaaaaaaatcwttttttttttttccttgggcccaaatctaaaaatggcccaattctgcagaatacaccctaatgggctacaaaggaaatagaacttgtgtttctcaaatga

SEQ ID NO: 396440 - DNA, 201 bp, Homo sapiens
acaatagtgtctccctagcttcatccgtgcctcttatactggcatgtccatcacaagccgggctggacagggcccagtgtgttctgtgggaagtggtatgytgcctcacctgagcatctttctttttggtgggaacaggtcacagctctcatcaagctgaaggagtgtgaggatacccaccttggggaggaggtggatagg

SEQ ID NO: 396441 - DNA, 201 bp, Homo sapiens
attggttttgttgtggtctgtttagagggaaacagaaaatctcaatgctgactaatcaggtcttgcaagggcacataggcattagcctcttcctctggtgrgtgggaagcaaatgagtctgtgtgagaggaacctgcaagatcctgactctgggaggcactagcaacatccttgtttattggcctcctgtcctttcattct

SEQ ID NO: 396442 - DNA, 201 bp, Homo sapiens
ctcacgcctgtaatcccagcactttgggaggccgaggtgggcggatcacaaggtcaagagatcgagaccaacctggccaacatggtgaaaccccgtctctrctaaaaatacaaaaattagccgggcttggtggcacatgcctgtagttccagctactcgggaggctgaggcaggagaattgcttgaatccgggaggcggag

SEQ ID NO: 396443 - DNA, 201 bp, Homo sapiens; identical to SEQ ID NO: 87584

SEQ ID NO: 396444 - DNA, 201 bp, Homo sapiens
ataaagatgtaatgaggatttaaggattagtagtttacttcagaatttaaaaaatatatatattaggggaaaataacagatgtataaaatatctgaggccsctaaccttttttatctatggtcttttttcttttagcatatatacgtttccatctaatttcaccgttgatacagaaatctgcagcaaagtaagcaattgtc

SEQ ID NO: 396445 - DNA, 201 bp, Homo sapiens
gtaatctaaggctatcctattatctaagacacctgagccaatgaattaattcttttctgctagacagctattgctgctgaagtttccttagcaagaattcstaaagagagagatttctaatcatgtgctcataggatgccactccccaccaaggtaacaaagtccatccaaagaaataacccgcatccatctttttagtac

SEQ ID NO: 396446 - DNA, 201 bp, Homo sapiens
gggttctctattgagaattagtgaaattcatgtgcctggtagaactaacaaatactcttcaatgatggtcactcagataaagcaaaaagtttcctttttcrtttagatctgttttttactataaatttccaaagaatttcttactaaatataagaagtgaatcaaaggaaaacataaatcatatatatgtatgatatatat

SEQ ID NO: 396447 - DNA, 201 bp, Homo sapiens
aaccaccattaatgttttggtatagacccatctatattttttaaagtataccgatcatattgttcatacccttttataattgttaattttaagcaagatawatcattttaacttacataatttataaaacatgatttttagtgattgtatgttatttacattgtatagaagtaccataaggtgtttaatcagttacatatg

SEQ ID NO: 396448 - DNA, 201 bp, Homo sapiens
agatatatgttagaaaggacatggacacagggagggaacatcacacaccagggcctgttggggggtgggggtgctgggggagggatagtgttaggagaaawacctaatgtaaatgacgaattgatgggtgcagcaaaactaacatggtacatgtatacctatgtaacaaacctgcacattgtgcacatgtaccctagaatt

SEQ ID NO: 396449 - DNA, 201 bp, Homo sapiens
tattgcctatatgacttcagcagccttctaactgctctcttttcttccagtcttgcctttgcccccaccatccaatgtttttcatacatgagccagagtgrtctacttggaaaacacttgtgatcatactctctcttttcttttgttcaaccattatttactgagtaccacagtgtgccagaaactattctagaagctggg

SEQ ID NO: 396450 - DNA, 201 bp, Homo sapiens
gatcgagatcatcctggctaacacagtgaaaccccgtctctactaaagatacaaaaaatttgccaggcgtggtggcaggcgcctgtagtctcagctactckggaggctgaggcaggagaatggtgtgaccctgggaggcggagcttgaagtgagccgagatcgcgccactgcattccagcctgggcaatagagcgaagact

SEQ ID NO: 396451 - DNA, 201 bp, Homo sapiens
ttagaattacctggagagcttattaaaaatacaaaccatggaaaagtatttgatattcttgaatttgtgagacttagccttaatattaaaacctaatatakaacatatatatatgtatgtatgtatgtatagaaaactagagatcaattttatctgtagaatatagatgtaaactttctaaaaattaaatccagtttagca

SEQ ID NO: 396452 - DNA, 201 bp, Homo sapiens
tgaacatagcagatacttgggaaatgtgtctgaacgtaggagatacttgggaaatgtatctgaacgtaggagatacttgggaaatgtgtctgaacgtagcrgatacttgggaaatgtgtctgaacctaggagatacttgggaaatgtgtctgaacgtaggagatacttgggaaatgttggtgcatttcttctttcttttcc

SEQ ID NO: 396453 - DNA, 201 bp, Homo sapiens
gtgtctgaacgtagttgatacttcggaaatgtgtctgaacctaggagatacttgggaaatgtgtctgaacataggagatacttgggaaatgtgtctgaacstaggagatacttgggaaatgtgtctgaacctaggagatacttgggaaatgtgtctgaatgtagcagatacttgggaaatgtatctgaacttaggagatac

SEQ ID NO: 396454 - DNA, 201 bp, Homo sapiens
gtgtctgaatgtagttgatatttcggaaatgtgtctgaatataggagatacttgggaaatgtgtctgaacgtagttgatacttcggaaatgtgtctgaacmtaggagatacttgggaaatgtgtctgaacataggagatacttgggaaatgtgtctgaacgtaggagatacttgggaaatgtgtctgaacctaggagatac

SEQ ID NO: 396455 - DNA, 201 bp, Homo sapiens
ataggagatacttgggaaatgtgtctgaatgtagttgatatttcggaaatgtgtctgaatataggagatacttgggaaatgtgtctgaacgtagttgatayttcggaaatgtgtctgaacctaggagatacttgggaaatgtgtctgaacataggagatacttgggaaatgtgtctgaacgtaggagatacttgggaaatg

SEQ ID NO: 396456 - DNA, 201 bp, Homo sapiens
tgtatctgaacataggagatatttgggaaatgtgtctgaatataggagatacttgggaaatgtgtctgaatgtagttgatatttcggaaatgtgtctgaayataggagatacttgggaaatgtgtctgaacgtagttgatacttcggaaatgtgtctgaacctaggagatacttgggaaatgtgtctgaacataggagata

SEQ ID NO: 396457 - DNA, 201 bp, Homo sapiens
atctgacagtcacattttaatttttttaaaattttaattagagacagggtcttgctgtgttgcccaggcttacctcaaactgggctcaagttatcctccckcattggcctcccaaagtggtaggatcacaggcatgagccaccatgcccagtcaacacattttgatttttttttttttttttttttttgagacagagtctt

SEQ ID NO: 396458 - DNA, 201 bp, Homo sapiens
taaatatatttcacaatgaaaaagttaaagtaacatgtagatattagtttaaaatatagaaatgcagattatttagattttatatacttaggattgtgaaytaaatctccaacttagtaagtttcttaattaaaataatagatgttgattgatgaaagtgaacaaaaatggaaatgccagttttgttttttgttcagatgg

SEQ ID NO: 396459 - DNA, 201 bp, Homo sapiens
aggccgaggtggaggattgcttgagcccaggagttcgagaccagactgggcaacattgtaagaccctgtctttattaaaaaaaaaaaaaaaaaaaaagaaaggtaagcaaaatgctttccagcagccatcatttgaatattttgtgctgttctcttcaaaaggaatggttttggcttaataaaactgttaatgttttatta

SEQ ID NO: 396460 - DNA, 201 bp, Homo sapiens
aattttgttttcctacctccatgttttttcttactctttttttttatagcacttattgtcatttgacataaatttacttgtgcattgtctttctcttgcastggaatgtttcatcacaagggcaaggaattagttttgtttactgcttatatcgccagtgcctagaatagtgcctgttttaaagtcttgcttccatttctg

SEQ ID NO: 396461 - DNA, 201 bp, Homo sapiens
tctaacaaacttctcataatggcaggtaatgtccaaggccttctattttgttcttaacgttctatcttcatcttcatcttctgttgtgctattttgtgctycttttcttggcacatgttttctttggtcatatttgccttttgaattcatgcatgagtatctcctctcttttctgttttctttcaatcgtcccttcccaca

SEQ ID NO: 396462 - DNA, 201 bp, Homo sapiens
gggaaaggaaggagagatttgacttttgttttatttattttttagtaattacaagaagataagtgttaaataacaataaagaagtattatgtggtcatcayagggaaggaactttagataaaaagaaaatttaagaattcctggctgggcgcgctggttcatgcctgtaatcccagcatcttaagtcaaggcaggaggatc

SEQ ID NO: 396463 - DNA, 201 bp, Homo sapiens
aattctgtaatacacctctgaaactgaatcctgagtaagctgtattaccttttacattctggagtagagaatttatactttctaaaaatgaagctgcttaytctaaattgaagcaaatctatttcatgtgtctttcttaccaattaaagatgccatttgcattttgtacttcttagtgtggtcctctttgatatctttgtc

SEQ ID NO: 396464 - DNA, 201 bp, Homo sapiens
aaaacaaaatgtataattccatttttaaaaggaaaaaacattactgttatatgtttacttaaattatagtttttcacgtattcatatatatgtacagaaaygattagggatggtattcagcaagctcatttctctggggaaaggaaggagagatttgacttttgttttatttattttttagtaattacaagaagataagtg

SEQ ID NO: 396465 - DNA, 201 bp, Homo sapiens
ctggctcactgcaacctccgcctcccgggttcgagtgattctcctgcttcagcttcctgagtagctgggactacaggcgtatgccaccacacaagctaatrtttgtattcttaatagagtcgggttttcgccattgttggccaggctggtctttaactcccgacctcaagtgatctgcccgccttggccttccgaagtgct

SEQ ID NO: 396466 - DNA, 201 bp, Homo sapiens
caaaaggagacatttcatgaaagacttgaaagaggtagagcagtcgggcacatactttatctgggtcaagggcccctaaggccaacagaacagcaagcacraaggccctggactgagagtctgttggcagtgtttaggaaacaacaataaagtcatttgtttagagcaaacagaatgaaggaagagtagtgggaaagaagg

SEQ ID NO: 396467 - DNA, 201 bp, Homo sapiens
atttactgttctcacccagtataagcctgggccaattaggaaaaaggcactaagggaggctggacttgggaggtatgtgaaacactctggggagagaaatkgaggtttctctgctgggaggagttgggctgatgggcagtatgttgaattacagatgcacatggaagaaccttgttttgacttccttcgaaccaagcagac

SEQ ID NO: 396468 - DNA, 201 bp, Homo sapiens
gcagtgtttaggaaacaacaataaagtcatttgtttagagcaaacagaatgaaggaagagtagtgggaaagaaggttggagaggtaaatgagaacgagatyatgttgagcattgtataggccatggtaaggattttggattttaagtatgatgggaagccaatgatgaattttgaaaagggaaatggccttgtattaattt

SEQ ID NO: 396469 - DNA, 201 bp, Homo sapiens
tgggaaagaaggttggagaggtaaatgagaacgagatcatgttgagcattgtataggccatggtaaggattttggattttaagtatgatgggaagccaatkatgaattttgaaaagggaaatggccttgtattaatttgctaaggctgccataacaaaatatcaaagacagagtagcttaaataacagctctggggtctag

SEQ ID NO: 396470 - DNA, 201 bp, Homo sapiens
accaaaagctaatttttttttttcttgagacagagtcgtgctctgtcacccaggctggagtacagcagtgcaatcttggcccactgcagcctctgcctccygggttcaagtgatccttctgcttcagtctcccaagtagttgggactacagacgtacgccaccatgcccagctaatttttgtatttttagcagagacaagg

SEQ ID NO: 396471 - DNA, 201 bp, Homo sapiens
  misc_feature (1)...(201): n = A,T,C or G
ctgctcctcctgattctcagggaaagaattttgttactcctattggaaaacatccatctccaaatgaatccttaagataagatgcgaatattattcctttngggttgactcaactatttgtatgtgttctaattactccagtctgcagcggctctttgtgttggagttgggagtttcgctgatccagatgacctgccgggg

SEQ ID NO: 396472 - DNA, 201 bp, Homo sapiens
tttcattgtgggtggtcggagaccctaaagtgtatctgaacataggagatatttgggaaatgtgtctgaatataggagatacttgggaaatgtgtctgaaygtagttgatatttcggaaatgtgtctgaatataggagatacttgggaaatgtgtctgaacgtagttgatacttcggaaatgtgtctgaacctaggagata

SEQ ID NO: 396473 - DNA, 201 bp, Homo sapiens
cacttgggaggccgaggtggaggattgcttgagcccaggagttcgagaccagactgggcaacattgtaagaccctgtctttattaaaaaaaaaaaaaaaaraaaagaaaggtaagcaaaatgctttccagcagccatcatttgaatattttgtgctgttctcttcaaaaggaatggttttggcttaataaaactgttaatg

SEQ ID NO: 396474 - DNA, 201 bp, Homo sapiens
aaactgagaggtcaagcagtactaggactgaatcccttttggagactcgagaaattattactggtgaaagcagtttcaaaggaatggtatggaggcagaarccaggttgtagtgagttaaggatgaatggagagtgagaaattgattgactgagatggagtcttgctctgtcacccaggctggagtgcagtggtgtgatct

SEQ ID NO: 396475 - DNA, 201 bp, Homo sapiens
ttctgtttatgaaaaatttaagctggaaaaaaaatgcaccttacaaagaccaagtaaagttccccttccctggctttttttttttttcccccaacctgagytgatatctgatacagatattgggactacctcaaactgcttctctatgattctgcatctctgagattcatcttagaatttatttctggacagattgttcat

SEQ ID NO: 396476 - DNA, 201 bp, Homo sapiens
tgcagaaggcaggatcctaccatagttatttgacacaagatgttcatagtgctgagattaagaaattatagggcattccttgagatattttagcatagacrttcctaaactattaattttaaagaggacagggaaaggtaaaggaggaaggaacaaccacacattcttgccatgtcactaggatggttgtgcctggtagtg

SEQ ID NO: 396477 - DNA, 201 bp, Homo sapiens
ttgaacccggcagtttgaggccgcagtgagcagtgattgtgccactgcattctagcctgagtgatagagtgagacactatatccaaaaaaaaaaaaaaaaaagtttactaaacattttaggaaattaattttttaaatcattctattttgctggaaaaacaccaatacaccaatctttgaataatttttaacaatttaatt

SEQ ID NO: 396478 - DNA, 201 bp, Homo sapiens
gcaagcaaaagttaaaagttttttaaagaagcctgagcaatatagggagaccctgtctctataaaaaatttaaagatttaaaaaaaaatggtagtgcacayctctagtctcagctacttcggaggttgaggcaggaggattgcttgaacccggcagtttgaggccgcagtgagcagtgattgtgccactgcattctagcct

SEQ ID NO: 396479 - DNA, 201 bp, Homo sapiens
ttagccgggtccggtggcgggtgcctgtagccccagctacttgggaggctgaggcaggagaatcgcttgaacgtgggaggcagagcttgcagtgagccgaratagtgccactgcactctagcctgggtgacagagcgagactctgtcacaaaaaaaaaaaaaaaaagaaataaaagacaaatttgaatatacttgcaagga

SEQ ID NO: 396480 - DNA, 201 bp, Homo sapiens
tcctttggacatattcctataaattggaagcatatgccactatttatttattttttttttggagacagtctcactctgttgcccaggctggagtgcagtgrtgtgatctcggctgactgcagcctcatgcctataattccagcactttgggaggccaaggtgtgtggatcacttgagcccaggaattcgagaccagcctgg

SEQ ID NO: 396481 - DNA, 201 bp, Homo sapiens
gtttgagaccagcttgggcaaaatagtaagaacctgtctctacaaaaataagtaaataaaaaattagccaagcatgatggtgagtgcctgtagtccttggyactcaggaggctgaggtggaaggattgcttgggtccaggaattcgaggctgtagtgagctacagtcacaccactgcactccagcctgggtgacagagttt

SEQ ID NO: 396482 - DNA, 201 bp, Homo sapiens
agaaggcctagcttcttatagtttttgggtgcctcagtgacccatactgattctcttgcagcaaactaaacttcaagcctctggagcaggagatgcctgtkcagttccaggtggtagagctgcccagtggccaccatctatgcaaagtgaaagctctgaacaagggtgatgccaactctgaagtcactgtgtactaccagg

SEQ ID NO: 396483 - DNA, 201 bp, Homo sapiens
agacgccttccctgactgcttgtttcttacattctgtatttatctctgtcattctgtattatactggctcatctcattattagacagtgaatgcctgatgrtgaggaattttgttttatcctttttatccttaatgcagcatgatatctgatatgtaaagggtgctaaataaatgtttattgaataaatacatgaaaaaat

SEQ ID NO: 396484 - DNA, 201 bp, Homo sapiens
cttctggtggtcttgaacattttaatccctctgtatccttacatgttgccctgccctcccaccccaacaagtagttagcttttttttttttttttttttttgagacaggtttttgctctgttgcccaggctggagtgcagtggcatgaacgtggctcacggcaacttccatgtcccgggcttaagccatcctcccacctca

SEQ ID NO: 396485 - DNA, 201 bp, Homo sapiens
accaagaacccaacaattccagacacaaaaagagtgaaaatgttttaagaattataaagtgtcggctgtgcacggtggctcatgtctgtaattcctgcackttgggagaccgaggcgggtggatcacttgaggtcaggaatttgagaccagcctggccaacatggtgaaaaccccgtctctattaaaaataaaaaaattaa

SEQ ID NO: 396486 - DNA, 201 bp, Homo sapiens
ttctggtgtcctctctttttaatttttcagaattaatctagtcagggaaaggtatagtctcattatttctttcttagacaacctatgtaggttagctgacwgcctcaaagaactcacttgacattcaatgtaagtatgttttagaagtgtcttaaggcttctcctaggagacaggttcaaaaatggtgaggccaggcgcgg

SEQ ID NO: 396487 - DNA, 201 bp, Homo sapiens
gtcctctggggaactctaagggaaatagtgggatgcataggggaagccttgagtgtgaaggtttgaaatagctaatgtagaaaatgggtgaagtgtatacrtggtaaatactaagaaaatttgtgggttcttgagcatgaaaatgataaaagtaaagcagtattttaagaataaagcagtagtttaaatctataggatgtg

SEQ ID NO: 396488 - DNA, 201 bp, Homo sapiens
tgatattcaaatttttattggtgttgagtggaaattctggttgggcaggattagtagtggtgtattctatttattttttatttttatttttatttttgagrcagggtctcactttgtaacccaggctggagtgcagtggcgccatcacggctcactgcagcctcgacctcccaggcttaggtgatccttccacctcaggct

SEQ ID NO: 396489 - DNA, 201 bp, Homo sapiens
taccaagtattgattcccttcccttctggaagggttaagggacttcaggttgggaattgatattcaaatttttattggtgttgagtggaaattctggttgrgcaggattagtagtggtgtattctatttattttttatttttatttttatttttgaggcagggtctcactttgtaacccaggctggagtgcagtggcgcca

SEQ ID NO: 396490 - DNA, 201 bp, Homo sapiens
  misc_feature (1)...(201): n = A,T,C or G
taaatgagatgagcttatattttgaggacctgaaagtattactctccctagtgggtgggtgtgggggttaaggctatagttgcagtgctaattttcatccntgtttgaatcgtgctctagtttaggagacccgtgcatagcgttacggtatttctaaacccagcttatgtagctagctgtgaatgggactgaaagcagctt

SEQ ID NO: 396491 - DNA, 201 bp, Homo sapiens
gggctcatttgctttacttagcctgctgagaattgacttgaggtgtgttggggcgtcgggggatggtggtggtggaggcgagtatagccagggtattgagrttagaatggaaacagagagttaggaggagattagacacgatgacaacatgctctaaggaaatagctgtagagttgatgagaagttatcagaattgtgatt

SEQ ID NO: 396492 - DNA, 201 bp, Homo sapiens
tacaaaaatgattgagccagtacctgcctttagggagcttacaatagtagagagggacacagacacataaaaaaaaaaattagagactgttgtggtggctyatgcctgtaatcccagcacttggggggccgtgttgggaggatcacttgagcgcaggatttcgagaccagcctgggcaacatagtgagcccctgtctctac

SEQ ID NO: 396493 - DNA, 201 bp, Homo sapiens
cacatcctgaggtagtagggtttaaggattcaacataggattttggggggaacacatttcagcccatagcagggctcatttgctttacttagcctgctgakaattgacttgaggtgtgttggggcgtcgggggatggtggtggtggaggcgagtatagccagggtattgaggttagaatggaaacagagagttaggaggag

SEQ ID NO: 396494 - DNA, 201 bp, Homo sapiens
attctagttctaaatttgttataagcccctacagcgttagcgcaagaaacaaccttatagataatcttttccacttcccaccacacctctttgacagatgrcacttagctccaagttcaggaccaacctaatttctcctttcacttcaagtctagatatattttctccaggctgccagagtcaagagatctttataaatga

SEQ ID NO: 396495 - DNA, 201 bp, Homo sapiens
ctcgtccaggaatatattagagagggcttaggtctcagttgggtgagttgtaaggtttcttctaaccttgaaattctctacttttggtttgtacaggagtyctctaaacatttctaataattggtgattcagtccccacctgagtattttccttcagaggtagcttatttcatggagtatcatgactatgatgtatcttgc

SEQ ID NO: 396496 - DNA, 201 bp, Homo sapiens
cagcctctggagtggctgggactgccaccacgcccagctaattttaagaaatttttctttttttttttgagatggagtcttgctctgtcgcccaggctgtkcagtggcaaaatcttggctcactgcaacctctgcctcctgggttctagtaattcttctgcctcagcctcctgagtagctgaaactacaggtgcctgccac

SEQ ID NO: 396497 - DNA, 201 bp, Homo sapiens
tttaaaaaatcataaatgaaattaatagattccagaattacataaaagaattagctctaatcaagaatttatatttgactgaatggtaaagaaatcaattwtttaaatgccatggatctccaggctttcctaacccccaaggctagactttaatgaaaacttcattgggtaggtaaatcatagttaataggtgggactgca

SEQ ID NO: 396498 - DNA, 201 bp, Homo sapiens
cagagacaacttactttttattgtattctttctggttttaggtttcctcttcatagaataatagcattgagaagaatcctagagatactttaacccaactmactcattttactatgagtaaacagattcaaaaagatttaaatgcaagtgattttctcaggtcatgtaagcacatatagcaagatagtggtaggactgaat

SEQ ID NO: 396499 - DNA, 201 bp, Homo sapiens
gaagaaactctgaacacatccgaacattggaaagaacaaactccaaacaagccgcttttaagaactgtaacactcaccgcggggctccgcggcttcattcytgaagtcagtgagaccaagaacccaacaattccagacacaaaaagagtgaaaatgttttaagaattataaagtgtcggctgtgcacggtggctcatgtct

SEQ ID NO: 396500 - DNA, 201 bp, Homo sapiens
tctattgcctatatgacttcagcagccttctaactgctctcttttcttccagtcttgcctttgcccccaccatccaatgtttttcatacatgagccagagygatctacttggaaaacacttgtgatcatactctctcttttcttttgttcaaccattatttactgagtaccacagtgtgccagaaactattctagaagctg

SEQ ID NO: 396501 - DNA, 201 bp, Homo sapiens; identical to SEQ ID NO: 87581

SEQ ID NO: 396502 - DNA, 201 bp, Homo sapiens
gcaggctcctggggtgataacccacttgggtcgagttccatcgctgttggcgataaatcttgttggtgttcactttttgggttctcactacctttatgagytataacactcaccctgaaggtctgcagcttcactcctgaagccagcgagagtacgaacccacaggcaggaagaaactctgaacacatccgaacattggaa

SEQ ID NO: 396503 - DNA, 201 bp, Homo sapiens
ggctatcacacatcaaccccccacttaccaaaagacatcttctcaggtgatttatttctaatgctgtgaaagtagaagcaccacaggccaacggtgtctgrttgcctgccaaatacacggatctgtccctgaataaaataattcaggcagctgctggattgggcccaagggtggctgcggccagggacttatgtggtacag

SEQ ID NO: 396504 - DNA, 201 bp, Homo sapiens
agaggcagagtctcattatttctggcaaatttgtttgaagcttcaagtgaagggacttccaaaataaaggaattcttttatataatatatatatatatatwtttttttggagacagtctccctctgtcacccaggctggagtgccatgtcttggctcactgcaacctccgcctcccaggttcaagcgattctcctgcctca

SEQ ID NO: 396505 - DNA, 201 bp, Homo sapiens
atagatctaaaaaagaagcaagtctgctttacccactggtttacattttatcaacattttatccaggatatcgttattttcactcttgaggcaggatagtrtttatgccaaaagtttagcagatttaattattcttgtgaattattcacctgagctttttatttgccttttttttttttttttttaaagacagggtttccc

SEQ ID NO: 396506 - DNA, 201 bp, Homo sapiens
aaaaaaaagaagaagagatttgattatctctgtggcagagtgagaccctgtctcaaaaaaaaaaaaaaaaaaagtaataccacttgggcagccgggtgcastggctcacgcctgtaatcctcatactttggaaggccaaggtgggtggatcacctgaggtcaggagtttgagaccagcctggccaacgtggtgaaacccca

SEQ ID NO: 396507 - DNA, 201 bp, Homo sapiens
cttgaacctgggaggcagaggttgcagtgagccaagattgtgccactgcactccagcctgggcaacagagcaagactttgtctcaaaaaaaaaaaaaaaaagaagaagagatttgattatctctgtggcagagtgagaccctgtctcaaaaaaaaaaaaaaaaaaagtaataccacttgggcagccgggtgcagtggctca

SEQ ID NO: 396508 - DNA, 201 bp, Homo sapiens
cttctaggctcaagtgatcctcctgcctgtgccgcccaaagtgttggaattacaggcatgagccactgcttctagatggatgtcttttattggcgggggggaaagccctatatacgtatatatgtattttttactaattctaaaactgctaacccaagcaggacaaaatttaattgaataccaagaaaataaccatgccag

SEQ ID NO: 396509 - DNA, 201 bp, Homo sapiens
tgaacttctctgaagaaattctacagtgatgtgatactttgttttaaattttctactttttctggttattgcttgtttttttttttttttttttttttttycctccacacagagtctcactctgtcatccaggctagtgtgcagtggcctgatttcagctcgctgcaaactctgcctcccaggttcaagcgattctcctgc

SEQ ID NO: 396510 - DNA, 201 bp, Homo sapiens
ataatttttcatactctggacaacttaattgggaaatattaacaaaagtaaaataggtctaattaataaagatgtttttaaggctgatagtgtcccacacyatctctcttgtaatattctagctactatattataaaggtggtggtaagaagagaaaggaaggttcttgtaggtagcacttctctgttccttattattcta

SEQ ID NO: 396511 - DNA, 201 bp, Homo sapiens
ccaccgtgcctggccctgaactgcacacttttaaaaatggttgagattggccaggcgcggtggctcacgcctgtaatcccagcactttgggaggccgaggkgggcggatcacaaggtcaagagatcgagaccaacctggccaacatggtgaaaccccgtctctactaaaaatacaaaaattagccgggcttggtggcacat

SEQ ID NO: 396512 - DNA, 201 bp, Homo sapiens
gatggggtttcctcatgctacccagcctggtctcgaattcctggatcctagagtcaagtgatcctcctgccttcatctcccaaagtgctggaattacgggyatgaaccactgtgcccagccagacagtactgttactacatgatagatttaagtgctattctatgaaaatacattactgaggaggtactaagcagtaatta

SEQ ID NO: 396513 - DNA, 201 bp, Homo sapiens
aaattaagtgttcatcagtcagttcatctgttaaatctgatttgtaatgagattttacataccttatctttgaaaatgtctttccacatagctaggtaccrccaatatattaatattgaaatactaatagcagtctatgagtacagatggtccctaatttatgttggttcaacttagggtttttccactttccatggtgca

SEQ ID NO: 396514 - DNA, 201 bp, Homo sapiens
gtagaagattttctgatttgcagttggttaaggaggcaaagctttttctaaaaatttgagatcagcagaaaagaatgttagcactggctcatgggtataaycttctccaggcccctcagaaagaaatttagaacaaagaaggggagtcagagttcagtccccagttcctctctatatgaggttgctgtgctggcagatcct

SEQ ID NO: 396515 - DNA, 201 bp, Homo sapiens
tggaatataaaagtactgatgagatggcaaaaaggagaggttaatgtaatatgggttagtacggaaaaaccttccaagaggatgtaagttttagaatgggygtaggatggttggcataatcttatctcttggtccttcacactagcctaatgctaaagatatatttttttgttaaacttgtgtgccttttctgactttacc

SEQ ID NO: 396516 - DNA, 201 bp, Homo sapiens
gggttgataaacattgggttagaaataggtatataggtaataaaactataaagaaaaggagagaaattactgctatacattcaggatatttcttgaggtargggtaggagctgggtgcttctagagtgttgactatggtctgtttcttcacctgggtgggccactcaggtgtagtttatatgttcatgttttgttaacttt

SEQ ID NO: 396517 - DNA, 201 bp, Homo sapiens
ccaggctggagtgcagtggtgtgatctcggctgactgcagcctcatgcctataattccagcactttgggaggccaaggtgtgtggatcacttgagcccagraattcgagaccagcctggccaacatggtgaaaccccatctctactaaaaatacaaaaattagctgggtgtggtggcgcaggcctgtaatcccagctgctt

SEQ ID NO: 396518 - DNA, 201 bp, Homo sapiens
cacgtttgagaatttatctagggcacatacctatgagtgaaatgatacctataagtgaaatgactgggcatactcatttttaacctcactagatattgccrttagtactcttctaatgggttgtgcttttttacattgacaccaatagaacatgagagttcctgcttctttacgttcttacatttttagcagttattgata

SEQ ID NO: 396519 - DNA, 201 bp, Homo sapiens
accatacaactttgaagaaaactgcatctttactcttgttacagagttctcagctcttaagttttacagaatccaaacaggtctttgtatgtgtgaagaawtcttaagcagaagacaagttgaatttttacaactttatatttagctttgtccatatacaaagaaggaaaaataactgattttattgggaaaaaggatagg

SEQ ID NO: 396520 - DNA, 201 bp, Homo sapiens
gcattatagaaatagaaaggtatcacattagatgtctcataatctttttttttttttggtttaacattgcttttgagatttatccatgtcaataagtgtarttctagttatttgtgttaaccaatgtttaatattttgttgatgaatacatcgttattatctattttcctattgtcatttggttacagttttctgttatat

SEQ ID NO: 396521 - DNA, 201 bp, Homo sapiens
tttttaaagaagcctgagcaatatagggagaccctgtctctataaaaaatttaaagatttaaaaaaaaatggtagtgcacatctctagtctcagctacttyggaggttgaggcaggaggattgcttgaacccggcagtttgaggccgcagtgagcagtgattgtgccactgcattctagcctgagtgatagagtgagacac

SEQ ID NO: 396522 - DNA, 201 bp, Homo sapiens
cctagaatagtgcctgttttaaagtcttgcttccatttctgtcttcttccttttctcctttggcttgttacataaggatatacttttcagtctttttttttggttactttatttcttgctttttgtctggatcaaaacataatgtttaggctgggcacagtggctcatgatgcctgtaatcccagtgctttggtaggctga

SEQ ID NO: 396523 - DNA, 201 bp, Homo sapiens
ttatttagattttatatacttaggattgtgaattaaatctccaacttagtaagtttcttaattaaaataatagatgttgattgatgaaagtgaacaaaaayggaaatgccagttttgttttttgttcagatgggcgcagttcttcatccacccactaatgatcagagatgcaattgaccgtgaagttgaagctgttgatag

SEQ ID NO: 396524 - DNA, 201 bp, Homo sapiens
tattagtaattattaattactaattattaatactgtctgtattcataataataatagattcttagatagttgtgaggtgacaggattaatcttaagaacakacccagagaggctcattttagagagacgagaaaatatcttcacttaaagtgaaggaagtaacgagtatggatgcaggcagtgaaaacttgaaagggtgac

SEQ ID NO: 396525 - DNA, 201 bp, Homo sapiens
gaactaaagtaaaaattctgttgtgcttttgttcatgatctgcctgcttcggcctcccagagtgctgggattacaggtgtgagccactgcgcccggctgakaaattatttttaataattgactttttattttaatgatggtttatactcacataaacatatataattgcctgcatagtatgtcttagtgattgagatgaaa

SEQ ID NO: 396526 - DNA, 201 bp, Homo sapiens
aggacacagaagaagagcaacctataaacaattgaaattgaaaaggagcagttgggaagcaggtgatagtggcttttttttttttttttttttttttttttaatgaaccagtggaggagaattcttgaagcaaggagtgatgatagataaaactgagaggtcaagcagtactaggactgaatcccttttggagactcgaga

SEQ ID NO: 396527 - DNA, 201 bp, Homo sapiens
ttttattatgtgtttatttaaaattgacagaatatcaacttgcaaggccttctgatgcaaacagaaaggaaatgttgtttggaagccttgctagacctggmcatcctatgggaaaatttttttggggtaagatactaaatacatcatcttatttcatattttctagttaagatttagaataagaaaagttgataaagaatt

SEQ ID NO: 396528 - DNA, 201 bp, Homo sapiens
gaatagggatatgtaaagtatgactttttgttttgtcatttgtgtttctagcttgctgtctactggttatgtgacctttagcaagttaactaatgtctctraggctaaggatcttcataaggacacagaagaagagcaacctataaacaattgaaattgaaaaggagcagttgggaagcaggtgatagtggcttttttttt

SEQ ID NO: 396529 - DNA, 201 bp, Homo sapiens
gttgcagtgagctgaaattgtgctactgcattccagcctgggcaacagagcaagactctgtctcaaacataaataaataaataaataaataaataaataawtaaataaaaattccatatattatagaaaataatgggtgggtgtgtgctgaataaggtacaggctatttctgaatattatgttgtttactattatatgctg

SEQ ID NO: 396530 - DNA, 201 bp, Homo sapiens
tcgtgggggaaacaatctgagtgtacttatattgagagttagaatgaaaccacacagaaaacttttaaactgtagatgtcactattgttgagctatgttawggccaacggatcaggagatgattgccattttctaggaaatgaccagtcctggggagggcagtcccttccagggttagcaaggcccccagccaaacatcag

SEQ ID NO: 396531 - DNA, 201 bp, Homo sapiens
gagaaaggaaagacttcaaagagtagataatgcttaagagttgttctttgaaaattgttgcgtttttgtctttatatggcttttgccaagtcattgtccttcttagtgtctcagcttattttaaaaacgaagggggttggttagaacagcagtgtttttcaataaccctcccctttcagaagagcagttcttccatattac

SEQ ID NO: 396532 - DNA, 201 bp, Homo sapiens; identical to SEQ ID NO: 87590

SEQ ID NO: 396533 - DNA, 201 bp, Homo sapiens
agcaatgaacacagaggcagctatgagtgtgaatgatagacataagtctgtatacaactgtagttaaactgtctccagataagaaagttctagagcaactrtcctatatttttgaagaaaaaacaattctatctggggaagttttattcttcagaaagaaaaacttacggaatgggaaaatcaaccctatctaaatcaacc

SEQ ID NO: 396534 - DNA, 201 bp, Homo sapiens
tgttgtggtggctcatgcctgtaatcccagcacttggggggccgtgttgggaggatcacttgagcgcaggatttcgagaccagcctgggcaacatagtgagcccctgtctctacacacaaaaaattagccgggtgtggtggtgtgtgcctgtagtcccagctacttgggaagctgaggtaggaagattccttagcctgaga

SEQ ID NO: 396535 - DNA, 201 bp, Homo sapiens
taatttataatataattggacaccactatggccaaagtaaaagacacggccaaatctggatcaccttacaattttcaagatgctttcaagatcccccttgycctgttatggctgagggaagcagtgatgggagtaggcaccatagtctgtaacccctccccttctgtctcggtacagacaaagcagataagctggggctct

SEQ ID NO: 396536 - DNA, 201 bp, Homo sapiens
gccctatttgccttttatgaagtcttttaataaagcaataaaaatattgaaatgtttttagaagcttctgcacatcaataggcatccttgaagactaattsaggacccctcatttttaagtgctgtgttgttcattaggaacggtccattgtaattttaagttacaaagattttgccatttctgtaagtagttatttcttc

SEQ ID NO: 396537 - DNA, 201 bp, Homo sapiens
gttatatatattggttttcatccactgttcctgtcttgtaactcccatagcccttgttaaagtctttttgttacaatgttgggtgtgtcaggtctcatgtrtctagacttaatttaacaaatgttacatatattggttttcatccattgttcctggcttgtaactcccatagcccttgttaaagtctttttgttacaatgt

SEQ ID NO: 396538 - DNA, 201 bp, Homo sapiens
ctggcttgtaactcccatagcccttgttaaagtctttttgttacaatgttgggtgtgtcaggtctcatgggcaggcctcaggaaacagaatttctcagacyttctcctatccatctctcatctgccccaagacaagaccctataatcttccctgcctttctgattgggagttataagaccctcctcagagggcgtcccacc

SEQ ID NO: 396539 - DNA, 201 bp, Homo sapiens
tttttgaggctggtgtacaaggcaattgaaaagttagaaggcctagcttcttatagtttttgggtgcctcagtgacccatactgattctcttgcagcaaaytaaacttcaagcctctggagcaggagatgcctgtgcagttccaggtggtagagctgcccagtggccaccatctatgcaaagtgaaagctctgaacaaggg

SEQ ID NO: 396540 - DNA, 201 bp, Homo sapiens
tgtaatatcctttacaataaaccagtaaatgtaagtgtttcccaaagttctgtgagccctccagcaaattaatcaaacccaaagaggaggtcgtgggaacyccaacttgaaagccggtaagtcagaagttccagaggtctggacttgaaactggtatgtttgtttgttggcagggcagtcttggggactgagccctcatcc

SEQ ID NO: 396541 - DNA, 201 bp, Homo sapiens
tttactatgagtaaacagattcaaaaagatttaaatgcaagtgattttctcaggtcatgtaagcacatatagcaagatagtggtaggactgaatttcagcyatgggtctcctgactcctagttttgtatcctttcttgcaagaagagatccatacacagcagcatttcatatcctcatagttcttttatccctgctttctc

SEQ ID NO: 396542 - DNA, 201 bp, Homo sapiens
ttctcccgtcgtcctccgcgccactctctccgcttcttctccctcgccccgcccactttgggtttcgaaatgttcgctggctgttccgagaatcagtccgsgtcacgttggtgcctctcctttcctgttctgattggttgcttacgtgagcgtgactactttcttgcctcatgattggctgaaatcagtagcgtcatcggc

SEQ ID NO: 396543 - DNA, 201 bp, Homo sapiens
tgtttatgaaaaatttaagctggaaaaaaaatgcaccttacaaagaccaagtaaagttccccttccctggctttttttttttttcccccaacctgagttgrtatctgatacagatattgggactacctcaaactgcttctctatgattctgcatctctgagattcatcttagaatttatttctggacagattgttcatatt

SEQ ID NO: 396544 - DNA, 201 bp, Homo sapiens
attgtagtagtatgagagaaaaagaaaaaccgtttgagagtttttcctagaaatgaaatacctagaaatgaaattactgaatgaaaagtattcagagtttmcattaaaaataaaaatggctgtatttccctacaagaatgtgataccatttgagattcatcagaaatgtgtgagaataatctgtccacttatcagcactgg

SEQ ID NO: 396545 - DNA, 201 bp, Homo sapiens
tagaaggctcgcttaaagccaggagtttgagaccagcttgggcaaaatagtaagaacctgtctctacaaaaataagtaaataaaaaattagccaagcatgwtggtgagtgcctgtagtccttggtactcaggaggctgaggtggaaggattgcttgggtccaggaattcgaggctgtagtgagctacagtcacaccactgc

SEQ ID NO: 396546 - DNA, 201 bp, Homo sapiens; identical to SEQ ID NO: 87591

SEQ ID NO: 396547 - DNA, 201 bp, Homo sapiens
gtgtatggtatttagctgtaattatagcatctgctaacctctcttgccattgtagatgattggtataaaatgtgaaggcatgccagagagcttcatcatcrttttggtctggaaggttaggggtaacctgagaataggaagaataaaatgaggtcttcagatgctaagcaggtccagggacatctgcctgggggttaggtt

SEQ ID NO: 396548 - DNA, 201 bp, Homo sapiens
aattctcctataacattgtagtccacccaatgccaacacacttaccctgccctatgttgtgcaccccaattgacatcccaaggaattttgatttggtccaratatgagcattgaattgtatcttcttgttaaaacactcagcataaaaggctgaaactgaatagaaattttcaattagtagattatatatacctacagcca

SEQ ID NO: 396549 - DNA, 201 bp, Homo sapiens
attccctcacacaggccacattgtttataagtatcttttaaataaacagctgaggaaatgactaaatttttactccagttaagtaagtgagcatggaagcygtctttaccatggtggcgtcttctattttcagtaaatttgaactttattttatcagtatttcatggtaagagtgacaaatatcaaagcttaggatgtcca

SEQ ID NO: 396550 - DNA, 201 bp, Homo sapiens
  misc_feature (1)...(201): n = A,T,C or G
atttcagccatgggtctcctgactcctagttttgtatcctttcttgcaagaagagatccatacacagcagcatttcatatcctcatagttcttttatcccngctttctctacctctgaaaccaaataaaaaagaaatttacaaaaattgcattattcgagttggaaaattggcaagttgaaacaataactgcattgtactt

SEQ ID NO: 396551 - DNA, 201 bp, Homo sapiens
acatgtatacctatgtaacaaacctgcacattgtgcacatgtaccctagaatttaaagtataataataaaaaaaggagagttatctgcaaccattgatacrgtgaatagccctgccaataactcatgaatactactttatttatttataaaaatacattattaaacacaaccttctattttattaaaattcaactcctgaa

SEQ ID NO: 396552 - DNA, 201 bp, Homo sapiens
ttttctgctctatttcctttattgactccatatccttatccctctacatgtgattgtatactaaggctttacacatatgtgggcagtccctttattttcaygcttctcttttattgttgatgcttctattgagaattttttaaacttttattctaggttcaggggtatatgtgcaggtttgttatgtaggtaaacttgtgt

SEQ ID NO: 396553 - DNA, 201 bp, Homo sapiens
ctgttgtggtggctcatgcctgtaatcccagcacttggggggccgtgttgggaggatcacttgagcgcaggatttcgagaccagcctgggcaacatagtgagcccctgtctctacacacaaaaaattagccgggtgtggtggtgtgtgcctgtagtcccagctacttgggaagctgaggtaggaagattccttagcctgag

SEQ ID NO: 396554 - DNA, 201 bp, Homo sapiens
agattcggaaaattgaggataatgaatttcattaccaagaacaggtactggaagtcaaattctttttgcatgttatctgtgactgagttgaagctggtgtmgacattgttcctctttttgaaagtgtcggtggagttttaattctgtcattctgtgtcatgtgagtctccaggtggccttgaagctatctgaaaattaact

SEQ ID NO: 396555 - DNA, 201 bp, Homo sapiens
actgttgtggtggctcatgcctgtaatcccagcacttggggggccgtgttgggaggatcacttgagcgcaggatttcgagaccagcctgggcaacatagtgagcccctgtctctacacacaaaaaattagccgggtgtggtggtgtgtgcctgtagtcccagctacttgggaagctgaggtaggaagattccttagcctga

SEQ ID NO: 396556 - DNA, 201 bp, Homo sapiens
atagttatttgacacaagatgttcatagtgctgagattaagaaattatagggcattccttgagatattttagcatagacgttcctaaactattaattttamagaggacagggaaaggtaaaggaggaaggaacaaccacacattcttgccatgtcactaggatggttgtgcctggtagtggctggttgtgtttttttctga

SEQ ID NO: 396557 - DNA, 201 bp, Homo sapiens
tagcactttcttagggcttgaggatgaaaccccaccactgtcgggccgactgtagggtagagaagagccaattagtatttgcggcgctcgggagcagcgtycatccggcgggtgtaggaaaatacttccggcgttctggttttttatgtgctgagtcacagccgaaggctcgccccgggtctgaggagtagggtacccaaa

SEQ ID NO: 396558 - DNA, 201 bp, Homo sapiens
gactgttgtggtggctcatgcctgtaatcccagcacttggggggccgtgttgggaggatcacttgagcgcaggatttcgagaccagcctgggcaacatagtgagcccctgtctctacacacaaaaaattagccgggtgtggtggtgtgtgcctgtagtcccagctacttgggaagctgaggtaggaagattccttagcctg

SEQ ID NO: 396559 - DNA, 201 bp, Homo sapiens
atgccagtgctgctaggaccacactttgagtagcacgattctagaatgcctggatatgtgtcagtcacagtattcctgagaaaggataattgatttgtaarccagttgataactagtttattattaagagaatgttgaacattgcattgtttattgggtcagtttatttttctcctttacagatattgaaaactcttgggc

SEQ ID NO: 396560 - DNA, 201 bp, Homo sapiens
atgtatacatactttacaatattactcataaaaagtgtagtactgatacatactataatggggaagaaccttgcaaacatcatgctaagtgaaagaagctmgacacaaaaggtcacagataagtccatgtatacgaaatattcagaatagataaatccagagacagaacatagattgatgattgctaggggctgaggtgag

SEQ ID NO: 396561 - DNA, 201 bp, Homo sapiens
gagacagatactcactccatcacccagactggaatgcagtggtgtgatcttggttcactgcaacctccgcctcccgggttcaatcagttctcatgcctcakcctgctgagtagctgggactacaggcacgcaccaccacacccagctaatttttgtatttttagtagagatggggtttctccgtgttggccaggctgatct

SEQ ID NO: 396562 - DNA, 201 bp, Homo sapiens
aggctgaggtgggtggatcacttgaagtcaggagttcgagaccagcctggccaacatggtgaaaccccatctctactaaaaatacaaaaattagttgggcrtggtggcatacacctgtagtcccagctacttgggaatctgaggcaagagaatcatttgaacctgggaggtagaggttgcagtgagctgaggctgtgccac

SEQ ID NO: 396563 - DNA, 201 bp, Homo sapiens
tgatagaattaagacctaaacaaacttaatgactgtcaagatcacacagcttttgagtgggtaaactaagatgacaagccaagtttccatagttcaaaatwtacaggcttgtaaatgtatatagtaagcaataattctgaaaaatttatgcctccttttacatttatttagagcttttctgtgatacgaaagaaaatacta

SEQ ID NO: 396564 - DNA, 201 bp, Homo sapiens
atgtttacattcaaaggctgagatttccacattttacatagaaagcctctatattttgttaatttgaatgtctgtagactgtcaatccaggaacattgatygggttaattttttccccacctgtagatgctgggctcttgcactgtttggtggaaatggtgagacaggatttgagcaaaattctacttattcagtgttcag

SEQ ID NO: 396565 - DNA, 201 bp, Homo sapiens
ttattgactccatatccttatccctctacatgtgattgtatactaaggctttacacatatgtgggcagtccctttattttcacgcttctcttttattgttratgcttctattgagaattttttaaacttttattctaggttcaggggtatatgtgcaggtttgttatgtaggtaaacttgtgtcacggtggtttgttgtac

SEQ ID NO: 396566 - DNA, 201 bp, Homo sapiens
agctactgatttttgtttatagttctttgattttggctactttgctgaattctatttattaataatagtttttgggttttgtttttggtaattctcttgtyctaggtaataatatgttttgcagtgatttgttttagctttcgatatttgtaccttattattattattattattttttgagacggagtctcgctctgtcat

SEQ ID NO: 396567 - DNA, 201 bp, Homo sapiens
gtatggtagattcttctgttcaaattgcttttaggttccttttacatttgctaaattaggcaattccatatttggtattccccaagttaattcacaatttytgattattgtgtttgcaaataattccatgtgtttttcttgaactagttattctgtttcttttgtattctcttcctctatgatggcagatataagagctta

SEQ ID NO: 396568 - DNA, 201 bp, Homo sapiens; identical to SEQ ID NO: 87589

SEQ ID NO: 396569 - DNA, 201 bp, Homo sapiens
taagttaaaagttaccttattgcaagcaaaagttaaaagttttttaaagaagcctgagcaatatagggagaccctgtctctataaaaaatttaaagatttwaaaaaaaatggtagtgcacatctctagtctcagctacttcggaggttgaggcaggaggattgcttgaacccggcagtttgaggccgcagtgagcagtgat

SEQ ID NO: 396570 - DNA, 201 bp, Homo sapiens
gccactcttgaaattgtggctgctatcctcccctttctctctatcttcattctgcaaccccagaaccagccttagtttctgtcttggccaccaaaagaatyttaagtctcagtccacaaagggaagagaagaaataggctgcctgtttttccgagcaccgttgaagtaccaggcaagggcttttgatacagagtccttagt

SEQ ID NO: 396571 - DNA, 201 bp, Homo sapiens
aagtgagccgagatcgcgccactgcattccagcctgggcaatagagcgaagactccatctcaaaaaaaaaatcaaaaaacctcaagtaaagaactatcagyggacattacattaactgataaaatgatgaacactgacatcagcaacaagccaagaataatccacaatcatctctattattctgttattgttttagaggtt

SEQ ID NO: 396572 - DNA, 201 bp, Homo sapiens
aaaaatcaaaaaacctcaagtaaagaactatcagcggacattacattaactgataaaatgatgaacactgacatcagcaacaagccaagaataatccacartcatctctattattctgttattgttttagaggttctggctattagagtaagatgaaaaaataaaaacttttttggaaaaaatatttttccttgcagatga

SEQ ID NO: 396573 - DNA, 201 bp, Homo sapiens
tcattattgactacttagctgagttcaattccacaccagctgtctttacaatgataactgagcagttgaagaagacctactttaacatcctcatcaagccygagactttggccaagtgggtataaatgagatgagcttatattttgaggacctgaaagtattactctccctagtgggtgggtgtgggggttaaggctatag

SEQ ID NO: 396574 - DNA, 201 bp, Homo sapiens
ttctaaacccagcttatgtagctagctgtgaatgggactgaaagcagcttactgtagagactaaaagtaaggaagggtgttttcaccaatcattatacctraatgttaaagaagtgctagttttaggccgggcatggtagcttatatctgtaatcccagcactttgagaagctgaggtgggaggatcacaagcctagaagt

SEQ ID NO: 396575 - DNA, 201 bp, Homo sapiens
agcaagaccctggtgtttttttttgtttgtttaaagaagtgcttaagaaatagaagatgatggaaattcactcagtgggagtgagagagaaggcagtctaraatgatgcccagatttctttcttgaagcagtgggttggtggaacaggaacagtagtaagagtgggagcatatgaggagtttgttctgatacgtatttagt

SEQ ID NO: 396576 - DNA, 201 bp, Homo sapiens
gggtaggtaaatcatagttaataggtgggactgcaaatggtatatgcagccatgttagcagaatgtttcctaagcattaaagcacctgtttaagtcacctrtagccaaataatagaaatacaattttagaatcaagactaatatattaaagtaattccttgtttgatttttctataaatgaatagtatgagaatggaagga

SEQ ID NO: 396577 - DNA, 201 bp, Homo sapiens
tttaagcttttgaaattcattgcaaaattgttttccagaaagtttgtcagtacaatagtagaagtttgagattacagggttgcagaccaaagtctaccccrgaaaaaagtagaaaagtagaaaaaagttatacctaattctagatatatgcaagattgaaatgtaaaagaaaaaagaaacctcacgtttgtctagtataat

SEQ ID NO: 396578 - DNA, 201 bp, Homo sapiens
tacatatgattggacagttgagttgtttccagttttctaatactgtgatgattatcctgatctctgtgaatatccttaattatttctattaagttctaagmagtgaaattgctgagtatatttgcaaatatatttttaagactttttttttctttaagcttttgaaattcattgcaaaattgttttccagaaagtttgtca

SEQ ID NO: 396579 - DNA, 201 bp, Homo sapiens
ctgggtacctggtaaaaaccaaagagaaacatttccctccctaatacctagtggatttccatgcttcttaaaatgcttccttctttttcttttagctactrtttcagctcattattgactacttagctgagttcaattccacaccagctgtctttacaatgataactgagcagttgaagaagacctactttaacatcctca

SEQ ID NO: 396580 - DNA, 201 bp, Homo sapiens
aatctgaggaagagggacggagggggtctctcagtaatgctggggaccctgagatcgtcaagtctcccagcgaccccaagcaataccggtgagggaggagrcttgcaatggggaggcgaacagtgtgccggcttctctgtcggtgccgccgtcacttcttgtctccatgtctcccaatggagcaacagggcacactttcca

SEQ ID NO: 396581 - DNA, 201 bp, Homo sapiens
tttctaataacaaaactttgagtgttttttttctgccctctgtacagagatgtacggcttttaatcttggaatatgcccgttggtctatgattgacaagtmccaggctttgatggacggcctttcccttgagtctctgctgagcttcgtcaaagaattcaaatcccagctctttgtggagggcctggtacaagggaatgtc

SEQ ID NO: 396582 - DNA, 201 bp, Homo sapiens
ccctgcaactgagacaggtaagtgcatttttgtactgctaagtaaatttgtttaaagtttgtgtatgtggttttcagtacttttttggttaatctgatacygttttcccatcttacattgtgataaaaatggtctctctttagaaacacatcctttatagaactttgaccaaacatttctttattctgaagattcatttct

SEQ ID NO: 396583 - DNA, 201 bp, Homo sapiens
tccttccatctcatagggtgatatttagtcatccaaacttttggaatttgtatctttgactgtaatcaggttttcagtttggtcaagtttcaagataagaraaaaggctagtttgtggtccccaattcaggagaggtatggacaccttaacatttttgggtcctgtttcaggacttccagttccaataaggatgggcagaa

SEQ ID NO: 396584 - DNA, 201 bp, Homo sapiens
ccactgagctcaaataagggcctagggcttactttgcaggctgttcatcagatatccctactgagcagcctgttagagcttccttccatctcatagggtgrtatttagtcatccaaacttttggaatttgtatctttgactgtaatcaggttttcagtttggtcaagtttcaagataagaaaaaaggctagtttgtggtcc

SEQ ID NO: 396585 - DNA, 201 bp, Homo sapiens
cgccggccagtttttgagctttgcagccccaccttcctcttacaatagtgtctccctagcttcatccgtgcctcttatactggcatgtccatcacaagccrggctggacagggcccagtgtgttctgtgggaagtggtatgttgcctcacctgagcatctttctttttggtgggaacaggtcacagctctcatcaagctga

SEQ ID NO: 396586 - DNA, 201 bp, Homo sapiens; identical to SEQ ID NO: 87592

SEQ ID NO: 396587 - DNA, 201 bp, Homo sapiens
ctggggttacaggcgtgagccaccccgcccagcccgtttgccgattttttacaaatttcttgcttatgtgaattgaaagctgaaggattctagttctaaakttgttataagcccctacagcgttagcgcaagaaacaaccttatagataatcttttccacttcccaccacacctctttgacagatgacacttagctccaag

SEQ ID NO: 396588 - DNA, 201 bp, Homo sapiens
attaaaaaaaattttgagacaggatttcaattcatcgcccaggctggagtacagaggcaccatcacaacctgccccaccatgtccggctaattttttgtaraaatggaggtggtggtgggggcaggtgtctcaccaagttgcccaggctggtctcgaactcctgacctcaagagatctgcctgcctctgcctctcaaagtg

SEQ ID NO: 396589 - DNA, 201 bp, Homo sapiens
ggattacattttgaaaacattttcctccaattataaaagtagtaaatgctcattatataaactaatggaatataaagaaaacaaaaatataaaaatcaccyatagctatatctctcagaggtaatcaacactcagaggtatttgaatttatgtgtatttgtatacattatatgttttaaaaacaaatactggtagatgagg

SEQ ID NO: 396590 - DNA, 201 bp, Homo sapiens
atgttgtacacatagctttcttttttttttaaattaggtgttagattttgtctcattttgtttcattaagtagatattaagtacctactatgtatcaggtyccctccaggcgttaacattcttttgtttattcaatatctgtttattaaatgtttggtatatatatgcctggtgttgtcccaggatatagctgtgaaggaa

SEQ ID NO: 396591 - DNA, 201 bp, Homo sapiens
ctgtagaaatggagaaccattaaaggatttaagaagatttgtggttaagaaatatccagagagacaagttatgaagctgttttaaagtacagatatgattycactcataggagttatctaaagtagtcaaattcatagaagcagaaaatataatggtggtttccagtagttggggagaagagggaagagacaagttatttt

SEQ ID NO: 396592 - DNA, 201 bp, Homo sapiens
ccaccccgccgtggtctcctgcactccccgagcctccccaacgagcgccgccccctgctccacggcgcccagtcccatccatcgcccaagggctgaggagygcgggcgcaaggcaggggattggcaggcagttccacctgctggcccggtgctggatccactgggtgaagccagctgggatcctgagtctagtggggactc

SEQ ID NO: 396593 - DNA, 201 bp, Homo sapiens
tcaaagaattcaaatcccagctctttgtggagggcctggtacaagggaatgtcacaagcacagtgagtgtgagatgctctgtaggccaggtctgaatgcarttgtgaactctggaattgccatagttctttcctaaaggggaagctgtagttttggcaggccagcattatcatattctgtttagaagggaacctgacccct

SEQ ID NO: 396594 - DNA, 201 bp, Homo sapiens
ctttgaccaaacatttctttattctgaagattcatttctaataacaaaactttgagtgttttttttctgccctctgtacagagatgtacggcttttaatcytggaatatgcccgttggtctatgattgacaagtaccaggctttgatggacggcctttcccttgagtctctgctgagcttcgtcaaagaattcaaatccca

SEQ ID NO: 396595 - DNA, 201 bp, Homo sapiens
tgaacctaggagatacttgggaaatgtatctgaacataggagatatttgggaaatgtatctgaacgtaggagatacttgggaaatgtgtctgaacgtagcrgatacttgggaaatgtgtctgaacctaggagatacttgggaaatgtgtctgaacatagcagatacttgggaaatgtgtctgaacgtaggagatacttggg

SEQ ID NO: 396596 - DNA, 201 bp, Homo sapiens
taaccagggctcaggagcccccctcctcccctgctgcgttaccttcctaaacaagccccaccagctccctcccttggtgctcaaggaggaggtccatgcamtccagtctggcgtgaaggcatctccagtctgcctctcccagtctccttcacgcctgtgcgcctgcacacatggggcgtcacacaggacagcacagcctgt

SEQ ID NO: 396597 - DNA, 201 bp, Homo sapiens
cacagcatgtagtgtagtacctgaattttagtgggaatttggtaacttctggtagttatgttgattagtctccttggaagaaagtaactttataagctacrgatgttaaatggtgagatcataaattggctgaatctccaggcatggtggctcacacctgtaatcccagcactttgggaggccaagggtggcggatcacct

SEQ ID NO: 396598 - DNA, 201 bp, Homo sapiens
aaaaagcaaaaatgtaaaatttctagaaaataattcgaaaaaatttcttcatgacctgaggctaaggagggatttctgaaataaaacaaaccctaaagcaraaagattgatatatttgtctctttcaaaattaagacattcagccaggtgcagtggctcccacctgtaatcccagcactttgggaggccaaggcaggtgaa

SEQ ID NO: 396599 - DNA, 201 bp, Homo sapiens
caattttacatcaaagatttgattcatcctttgctgttttgtccatggcatatttctctgatagcttttgctgctgtgattttgttcacaaagtgcgtgaktgtgtgtgtgtgtgggtgtgggtgtgtcctccctggagagtaacctgtgtccatttattgacaagaggattgaatgacctctattatcattcatcagttc

SEQ ID NO: 396600 - DNA, 201 bp, Homo sapiens
ggtggcggatcacctgaggtcaggagtttgagaccatcctggctaacgcggtgaaaccctgtctctactaaaaatacaaaaaattagccgggcgaggtggygggcgcctgtagtcccagctactccggaggctgaggcaggagaatggcgtgaaccccagggggcggagcctgcagtgagccgagattgcgccactgcact

SEQ ID NO: 396601 - DNA, 201 bp, Homo sapiens
gggaggtcccttccctcctctctgcccagaaattctgctcacacttcaagacccatttcaccccagtggcgcccttgccacctcatgttgcagttgctccktttatctttctctgacttctgtgtataccgggtggcacggagtcctggtttattcatgatggtgtcctcagtctctgacactttgtatttttcattgctg

SEQ ID NO: 396602 - DNA, 201 bp, Homo sapiens
actatccattcctaacttggcatttgaatgtatcagtcttctgtgggttttgtggatgtgagtcagatttctttgtcttgagctgcctctaaggaatgaaraacttgggtttctatccatcaaggctgaggaccagaccttgaatgccatcagcccccctgatgctctgtgatttttaaaatatacatagcaacaataata

SEQ ID NO: 396603 - DNA, 201 bp, Homo sapiens
tccagcctggaagacagaacaagactcggcctaaaaacaaaaatttcttttagttacagaaaaattcgttttctatacatctcctgccctccagaggcctrtgctctccttggacaaccaagaaaccaagatataagcaagttgagtgtttaaatagaatccaaagcagtgtgtgctaagtgccacatgggtaagagaggt

SEQ ID NO: 396604 - DNA, 201 bp, Homo sapiens
attgcaccattgcactccagcctggaagacagaacaagactcggcctaaaaacaaaaatttcttttagttacagaaaaattcgttttctatacatctcctrccctccagaggcctgtgctctccttggacaaccaagaaaccaagatataagcaagttgagtgtttaaatagaatccaaagcagtgtgtgctaagtgccac

SEQ ID NO: 396605 - DNA, 201 bp, Homo sapiens
tttatcccccgcctggggagcagagcagacttgatcaagcagtatggaagatgggccgttgtcagcggtaacctactttataatcaaaataatcttttctktgaagtcggatgcattattcaaggagctattgaatttaatgtggtgtttttatgggaacatgctgataaaaaaataaaacttatggctcctgccgtgatt

SEQ ID NO: 396606 - DNA, 201 bp, Homo sapiens
agacttgatcaagcagtatggaagatgggccgttgtcagcggtaacctactttataatcaaaataatcttttctgtgaagtcggatgcattattcaaggarctattgaatttaatgtggtgtttttatgggaacatgctgataaaaaaataaaacttatggctcctgccgtgattatgttcacatttcattttcttactgc

SEQ ID NO: 396607 - DNA, 201 bp, Homo sapiens
aaatctgattaaagcctaagatgagaattgtaaattctgactcttaagcctgacacttaataattttggttaagacactaaattttctttctttttttttytgagatggagtctggctctgtcacccaggctggagtgcagtggtgcgatctcagctcactgcaagctccgcctcccgggttcatgccattctcctgcctc

SEQ ID NO: 396608 - DNA, 201 bp, Homo sapiens
gcatatccagcagcaggagggttgtgggaggggtggtggcgcggcttcctctcatgcagatctggaaacaggtatgctcgttcgctacactgaagggggggccctaactttgaatatatttcaaaggattgtcaatcaaaggatttgggagcagtaaggggtattggtgactgctgtacggaagattgctcagaaaaaaga

SEQ ID NO: 396609 - DNA, 201 bp, Homo sapiens
ctttcgtatacacggtgttagaactttcattcggttctgaacaaatctgttagaggagtgtaggctttctccacctcagcactgttggcattgagagcagrtaattccttgacatggggagcgtcctgtgtattgtaggatgttgaacaccatcctgggcctccacccactagataccagtagcatccactcccagtgtga

SEQ ID NO: 396610 - DNA, 201 bp, Homo sapiens; identical to SEQ ID NO: 87644

SEQ ID NO: 396611 - DNA, 201 bp, Homo sapiens
ccttactctataggcttggagcaactcatttccccacaaatactgctttggctacaacccattgatcttgatatgtagtatctgttttttctttctttttwtttttttcttttttcttttttgagacggagtctccctctgtcgtccaggctggagtgcagtggcgcgatcttggctcactgcaagctctgcctccccggt

SEQ ID NO: 396612 - DNA, 201 bp, Homo sapiens; identical to SEQ ID NO: 87645

SEQ ID NO: 396613 - DNA, 201 bp, Homo sapiens; identical to SEQ ID NO: 87646

SEQ ID NO: 396614 - DNA, 201 bp, Homo sapiens
tgttgagctcagattacactgcagtggagtaggagggaattccccattctttctcaaacttaggctaatttgtgctgctattgttgggtattttcttagtrtccagacttttttttttttttctattttaaagggatttcttcaaaagttgccacccccagaagttttatatttctttttcttttggcttaaaatcatgtt

SEQ ID NO: 396615 - DNA, 201 bp, Homo sapiens; identical to SEQ ID NO: 87647

SEQ ID NO: 396616 - DNA, 201 bp, Homo sapiens
atctccaggcatggtggctcacacctgtaatcccagcactttgggaggccaagggtggcggatcacctgaggtcaggagtttgagaccatcctggctaacrcggtgaaaccctgtctctactaaaaatacaaaaaattagccgggcgaggtggcgggcgcctgtagtcccagctactccggaggctgaggcaggagaatgg

SEQ ID NO: 396617 - DNA, 201 bp, Homo sapiens
gagtgcagtggtgcaatcttggctcactgttacttccgcctgcttgattcaagtgattctccttcctcagccacccaagctgggcagtcaccaccataccyggctaatttttgtgtttttagtagagatcaggtttcaccatgttggccaggctggtcttgaactcctgacctcaagtgatctgcccacctcggcctccca

SEQ ID NO: 396618 - DNA, 201 bp, Homo sapiens
cggtgaaaccctgtctctactaaaaatacaaaaaattagccgggcgaggtggcgggcgcctgtagtcccagctactccggaggctgaggcaggagaatggygtgaaccccagggggcggagcctgcagtgagccgagattgcgccactgcactccagcctgggcgacagcgagactccgtctcaaaaaaaaaaaaaaaaat

SEQ ID NO: 396619 - DNA, 201 bp, Homo sapiens
agggcagcccgtggcaatgtggatgttccagggaacgctgcaggtggagctgaagaaggggtgtgcagagtgaggcagtgggaggcccaggtgaaacccaracaggcaccaggcagaaaaaggcaccgaggacagctgtggctgctctcttccccgatgccggcctggtgcctgggcggtgtttccccaagggctcctggg

SEQ ID NO: 396620 - DNA, 201 bp, Homo sapiens
acagcctaggggggctgcccccaaacactgtaggacgccttcctccctgccaccctgccaggagattagacaggtggtgggcacctgaactaaggtgggcragccagaatccctgccaggaatttggaaagagaagccagggcagcccgtggcaatgtggatgttccagggaacgctgcaggtggagctgaagaaggggtg

SEQ ID NO: 396621 - DNA, 201 bp, Homo sapiens
gggtactttgggtccattttaagggtcacaccgtgaaatacacatgctcacttttcctgacttgcatcctaggtgcaacagatgggattggaaaagcctaygctgaagagttagcaagccgaggtctcaatataatcctgattagtcggaacgaggagaagttgcaggttgttgctaaagacatagccgacacgtacaaag

SEQ ID NO: 396622 - DNA, 201 bp, Homo sapiens; identical to SEQ ID NO: 87641

SEQ ID NO: 396623 - DNA, 201 bp, Homo sapiens
gagccaaaatcgcaccactgcactccagcctgggcgacagggtgagactctgtctgatagatagatagatagatagatagatagatagatagatagatagdctgaaactgtgagccacgtacatttgaaaagttagtgttatttgaacgtacaattgacaagatctgatgccctcagctggatgtcttcactcagactgtg

SEQ ID NO: 396624 - DNA, 201 bp, Homo sapiens
acaagggggtgattacgccatctaccttactccataaatgtgcactaattaggagtatgcccacatacctggggccccgatcttccctgtcttctcttggrtgtgcgaagtgaccacctgacccattatcaccactctgtttctgctggctgtggtaggatgtgtcagaagaacccacacatatttccttaggatcattaa

SEQ ID NO: 396625 - DNA, 201 bp, Homo sapiens
ggagagtgtatagcatgcgcccttcacattcctcattcagcaacagtgtccttgacttgtagatactagaaccgacttgatttctagtgtgaatttttctstgactaaacctgacagggggtactttgggtccattttaagggtcacaccgtgaaatacacatgctcacttttcctgacttgcatcctaggtgcaacagat

SEQ ID NO: 396626 - DNA, 201 bp, Homo sapiens; identical to SEQ ID NO: 87639

SEQ ID NO: 396627 - DNA, 201 bp, Homo sapiens
cagtggagtaggagggaattccccattctttctcaaacttaggctaatttgtgctgctattgttgggtattttcttagtatccagacttttttttttttttctattttaaagggatttcttcaaaagttgccacccccagaagttttatatttctttttcttttggcttaaaatcatgttctttttagaatataagctgtg

SEQ ID NO: 396628 - DNA, 201 bp, Homo sapiens; identical to SEQ ID NO: 87640

SEQ ID NO: 396629 - DNA, 201 bp, Homo sapiens; identical to SEQ ID NO: 87642

SEQ ID NO: 396630 - DNA, 201 bp, Homo sapiens
ctctttcatttttagtttctttttgcacagtatatgcctgaatggctctgggtgtggggagcaaatattctcaaccgttcactacgtaaggaagccttatsctgcacagcctgagtctggatggccacttgagaagttttgccaactcctgggaacctcgatattctgacatttggaaaaacacatttaatttatctcctg

SEQ ID NO: 396631 - DNA, 201 bp, Homo sapiens
tttttataccgctagacagaatctttccacctgacgtgaagcacttcctctcttaggtccttacctttaaagtgtaaatacagcgtatcattcaatgctgkggtaatataaagcttgtgctgcttgcagagtttttgcagggaacttttagtcattctgttaaaatggaaaaatatgaataagcttattgcaaattgtcag

SEQ ID NO: 396632 - DNA, 201 bp, Homo sapiens
gaaaaaaggcataggaaaagggggcaccctccagctgtgcctgaggacgcatggactgtgcccccagcagacgccaggcgcttttcttattctgagaggasggtacttggtgcctagtacatggtttgctgcctctacagagattcatggcgtaagaattgttgtgttttcttaatttttgagcacttggatgttacttta

SEQ ID NO: 396633 - DNA, 201 bp, Homo sapiens
caaaggtagtggcttaaaatgacacagatgtctcttccttctggagatgggaatctgaagtcattgtgactgcgctaaagtcaaggtgtcagcagggctgygttcctctggaggctccaggggagaatccttttccttgcctctgccagcttctagaggccaccccccgtccttcactggtgacccacccctctctctatt

SEQ ID NO: 396634 - DNA, 201 bp, Homo sapiens
aatgccacagaacatttattaacagttgtttggtctgatttgttgaactctttgtcagcaactcacatatgcttatcctgtattttttcctgaattgatamtaagcaagtctttttttctcctgaattttcaagttcacccagaattaaaagtcttttcctcccctctgtctcaacaggcttatttagaccacttcagcag

SEQ ID NO: 396635 - DNA, 201 bp, Homo sapiens
agttgattgccctttacactgctaggtggagtccccttcactgtggagtgggatcatgttacaggccacagcagtggtgctttgaagaggtgactttgctmcttgcagttttgaccataattgtcccgtgacgcttttgtagttgtaacgtttcctgtaggtttttgatgactcctgccctgtagaagtagaaaatgctta

SEQ ID NO: 396636 - DNA, 201 bp, Homo sapiens
ccactaaactttgaaatttcctgcttagatacattctgagaactaaaggtgatccctgcaagtaattttttataccgctagacagaatctttccacctgaygtgaagcacttcctctcttaggtccttacctttaaagtgtaaatacagcgtatcattcaatgctggggtaatataaagcttgtgctgcttgcagagtttt

SEQ ID NO: 396637 - DNA, 201 bp, Homo sapiens
atacagacatgatggtgaagagtgttggatcttggatgagaatccaggtttctaattccatgttgctgctctttaggctcagcttcattgtgcgtttagtsctataccaaaaattggcagtgaaggtaaagacatcccaaaaagtcttgatacaccaatgctaactttgtcatagtgctgacgcagagtatgaaaagctta

SEQ ID NO: 396638 - DNA, 201 bp, Homo sapiens
gtctcaaaaaaaaaaaaaaaaattagccgggcgtggtggcatgtgcctgtagtcccagctacttgggaggctgaggcaggagaatcgcttgaacccgggargtggaggttgcagtgagccaaaatcgcaccactgcactccagcctgggcgacagggtgagactctgtctgatagatagatagatagatagatagatagat

SEQ ID NO: 396639 - DNA, 201 bp, Homo sapiens
attagccgggcgaggtggcgggcgcctgtagtcccagctactccggaggctgaggcaggagaatggcgtgaaccccagggggcggagcctgcagtgagccragattgcgccactgcactccagcctgggcgacagcgagactccgtctcaaaaaaaaaaaaaaaaattagccgggcgtggtggcatgtgcctgtagtccca

SEQ ID NO: 396640 - DNA, 201 bp, Homo sapiens
accatgatgaaaccccatctctactaaaaatacaaaaattagctgggcatggtggagggcacctgtagtcccagctactcgggaggctgaggcaggagaawcgcttgaacccaggaggcggaggttgcagtgagcagaaattgcaccattgcactccagcctggaagacagaacaagactcggcctaaaaacaaaaatttc

SEQ ID NO: 396641 - DNA, 201 bp, Homo sapiens
cctcgaatctgcaaggtctctccgggtggctgtgttctgccagggcctcccaggctccaagatcactgccttcagggagcccaggaagagctgcacatccrctgcctctgtgtggcaggcgtgtccgagactgcaactcctagttcccacctttcacacctcatctctctaacctcttatggaaaatttcaaacatatgta

SEQ ID NO: 396642 - DNA, 201 bp, Homo sapiens
agaacacacggtgtacagaacacacggtgcacaggagaacacgcagtgcacaggagaacatgcaatgcacgggagaacacagtgcagagaacacacacgcmctgcacagaacatgcagtggtgcacaggagaacagtacacaacaacacattccatgcacaggagaacacacgcaattcacaggacacaacagaacacacg

SEQ ID NO: 396643 - DNA, 201 bp, Homo sapiens
agcagcgggaggcggcggtgctgctgcaggccgaggaccggctgcgctacgcgctggtgccgcgctatcgcggcctcttccaccacatcagcaagctggayggcggcgtgcgcttcctggtgcagctgcgggccgacctgctggaggcgcaggccctcaagctggtggaggggccggacgtccgggtaaggggccgccgtc

SEQ ID NO: 396644 - DNA, 201 bp, Homo sapiens
cccgcctcggcctcccaaagtgctgggattacaggcgtgagccaccgcgcccggcctccatacaatttcagaacaatttcagaaagttcatggactgactrcgagacctcatctatgcagtctgagctaaacgctcctacttccagaatcgaaggtcgctggtagaagttaaaatagtttaaatgggttcttcaaaagtaa

SEQ ID NO: 396645 - DNA, 201 bp, Homo sapiens
cagccggatcacctgaggtcaggagttccagaccagcctggccaacatggtgaaaccccgtctctactaaaaatacaaaaattagccgggtgtggtggtgygcacctgtagccccagctacttgggaggctgaggcacaaatgagaatcgcttgccactaggcagaggttgcagtgagccgaggtcgtgccactgcactcc

SEQ ID NO: 396646 - DNA, 201 bp, Homo sapiens
gctggacggcggcgtgcgcttcctggtgcagctgcgggccgacctgctggaggcgcaggccctcaagctggtggaggggccggacgtccgggtaaggggcygccgtcgaccccccggcagcgcggactggccgccctcctcgagtagtcctcacttgccccctccaagtcccacacaccccgccttccctgcccgatagca

SEQ ID NO: 396647 - DNA, 201 bp, Homo sapiens
aattagctgggtgtggtggcacacacctgtagtcccagctactcaggaggctgaggcaggagaattacttgaacctgggaggcagaggttgcagtgagccragaccatgccactgcactccagcctgagtgacagagtgagactctgtctcaaaaaaaaaaaaaaaaatcaattgaccatagatgggtttatttctgaatg

SEQ ID NO: 396648 - DNA, 201 bp, Homo sapiens
agcctggcgaacgtggtgaaaccccgtctctactaaaaatataaaaattaggcatggtggtgcatgcctgtagtcccagctactcgggaggccgaggcagragaatcacttgaacctaggaggcggagattgcagtgagccaagactgcaccattgcgctccagcctgggagagacagtctcaaaaaaaaaaaaaaaaaaa

SEQ ID NO: 396649 - DNA, 201 bp, Homo sapiens
acttcccagtctagctcgtttcttagaatgcctcgcagggatgtctgcaaatgtgttaccatttaggaaaaacagaaatggcacaaaacccaaaaggtacrtgaaaaagtcaaacaaaggtatatttcctaaaagaaaattatataggactgcttatagcctcttgagaaatttgaaaaacctagggttcagagaaaagga

SEQ ID NO: 396650 - DNA, 201 bp, Homo sapiens
tagcccagcagctgtcctgagggtgtcgcttaactgcccctgggcggccagcctagaagtcctcaaagggagtctggaagggaacaaatggcccctctgcrtggaggcgctcgtcagggtttacaaaagcaaaacacagctgggcgcagtggctcacgcctgtaatcccagccgaggcaggcagatcacctggggtcagga

SEQ ID NO: 396651 - DNA, 201 bp, Homo sapiens; identical to SEQ ID NO: 87673

SEQ ID NO: 396652 - DNA, 201 bp, Homo sapiens
ggtgttacttcttttctcactgttcgacccctggggagcccctggtcgttttgcacgtggcactgactggtgacatctccagcaacatccaggtacctgcratggtcaattcgggacaagatgggcaccccatagagccccttgtgttttttgttttgttttgtttttacttgattttatcctccttttttttttttttaa

SEQ ID NO: 396653 - DNA, 201 bp, Homo sapiens; identical to SEQ ID NO: 87674

SEQ ID NO: 396654 - DNA, 201 bp, Homo sapiens
ttgagtccacatctgactgcccatgacttccaccagtcagtcctagatttccttccccggcccccatggggtcacacagaacaaatttgtggcctctttcrtgccctagtgcttaaacatgtaaaaggagacctcatctccttccgaaaacttctctgagccatcaccccaaaacctgcaactctttctcaggcgtcaaag

SEQ ID NO: 396655 - DNA, 201 bp, Homo sapiens
tgtgtatgttttatattggctaaaagctaatctatctccattcatatgtacagtttatttcaagtctaataaaatccaaacacagtatttgcaaatgctgyggctgtcaccacacatgatactaagattatggaggaagacgaaagggcaccaagagaaactgatatgtctgtcagtgacctgcgtgtgaggtcttatttg

SEQ ID NO: 396656 - DNA, 201 bp, Homo sapiens
taataaaatccaaacacagtatttgcaaatgctgcggctgtcaccacacatgatactaagattatggaggaagacgaaagggcaccaagagaaactgataygtctgtcagtgacctgcgtgtgaggtcttatttgtgtcctcttatttaaagcaaacacacccattttcgctcgtcccaagaccccgtgatcagagttgta

SEQ ID NO: 396657 - DNA, 201 bp, Homo sapiens
agtttgtctgtcatgtgaaagtctagaggtgggcagcccagagctgattctgctctttggtgctcttggtggattcagacttgaatcttgttgctctgccsagaaaaaccttcatctccaaagccacgtcgtggcccaggatggctgctccaatgccagccatcacaccgccttccagtctgcagtggaaaggacaaagaa

SEQ ID NO: 396658 - DNA, 201 bp, Homo sapiens
cctattaattcccttccccttcccttgttctacgtagttgttttctcatatatacacatatatatgtatgtgtatatgtgtgtgtgtgtgtgtgcgtgcgkatatatatatatatatatatatatatatatatatggttttttgttttgttgtttacggttttttgtttgtgtttatttttttgttcatgtttatgttttt

SEQ ID NO: 396659 - DNA, 201 bp, Homo sapiens
gctggggattacaggcatgtgccaccatgcccagctaatttttttttttttttgtatttttagcagagatgggatttcaccatgttggccaggctggtctygaactcccgacctcaggtgatctgcccgccgcggcttcccaaagtgctgggactataaaggcgtgagccaccgtgcccggctgatataggtattattatg

SEQ ID NO: 396660 - DNA, 201 bp, Homo sapiens
cggctcactgcagcctcgacttccccaggctcaagcaatcttcccacctcagcctcctgagtagctgggactacaggtgcaggccaccatgcccggctaawtttttttttttttttttttttttgtagagagggcgtttcaccatgtggcccaggcttaacctgcccttttaatgaacgaaaaatgacgtaaatgtttcag

SEQ ID NO: 396661 - DNA, 201 bp, Homo sapiens
gatacctgattcatacatagtttacctttacagcttttgttaaatgcctgtggggagttttgaaagatacttgattagaaaattgaaagaggcactccatyccttatgcttgatgtgggccgaggacactccttggcgagtggaggttatgggacttgtggttgatagccccgtctgtggcaagctgctctgctcctggat

SEQ ID NO: 396662 - DNA, 201 bp, Homo sapiens; identical to SEQ ID NO: 87668

SEQ ID NO: 396663 - DNA, 201 bp, Homo sapiens
cggcgtgcgcttcctggtgcagctgcgggccgacctgctggaggcgcaggccctcaagctggtggaggggccggacgtccgggtaaggggccgccgtcgaycccccggcagcgcggactggccgccctcctcgagtagtcctcacttgccccctccaagtcccacacaccccgccttccctgcccgatagcacgctcactt

SEQ ID NO: 396664 - DNA, 201 bp, Homo sapiens
aaagctctatttaaagaacttgtttgacttagacgaatagtatgaataggagtcagcagccgttgcttgtgaattatgcatttgtcttgtctctttataawttccgccccagggctgaggctgtgcatcctgtaaaaaactggatggacatgaagcgccgcgttgggccctacagaaggtgttacttcttttctcactgtt

SEQ ID NO: 396665 - DNA, 201 bp, Homo sapiens
aagaaaagacagtgttcaacaccaagcgtttgattaggtttcacgttaaaatctgcatgaatccttccccggagcctcacaaactccttttaaaactgggrttaaaactggagcacaattttgtgtgtaaaatggtcattcactgtagttcctctcagtgggtgctgtttctcatgaaaatgactttctttgaattttcca

SEQ ID NO: 396666 - DNA, 201 bp, Homo sapiens
catagcagaatgatgaatgaatcattgcaatagattcctgggtgtcctggcataagacacacttgacacactaatcattcagcatttgtgtggaggtgagwctgccccacactcagtcatagatttttgagcctgagagaaagccatgaaggacttgaaaggtttctgcccagctgagagggtcctcatatcagacatttg

SEQ ID NO: 396667 - DNA, 201 bp, Homo sapiens; identical to SEQ ID NO: 87675

SEQ ID NO: 396668 - DNA, 201 bp, Homo sapiens
tggtcaggtcagcgaacctcgtggggtgtcaggtgccatgagggacacagatgaagacaggagctaaagggaggggcagggggtagaaaaggtgccagagrccccttggcaactcctaggagccatgagtctcccagagagatgagaatgatgctgagagaggcctccaacccagctgcccagttgactgcaagacgcagt

SEQ ID NO: 396669 - DNA, 201 bp, Homo sapiens
tttacagtaaaggagaacatgctgaggttgtgttacttgtcctgaaattcagagcgaaaagctcttgctgatcacccaccctaatccagggttatttgcastacgctttatatcactgtcttaccgttaatcagatgtttattagaaactttcttttttggctacttagatgcataaaattgggcataattaagtatggga

SEQ ID NO: 396670 - DNA, 201 bp, Homo sapiens
ttcatatgtacagtttatttcaagtctaataaaatccaaacacagtatttgcaaatgctgcggctgtcaccacacatgatactaagattatggaggaagamgaaagggcaccaagagaaactgatatgtctgtcagtgacctgcgtgtgaggtcttatttgtgtcctcttatttaaagcaaacacacccattttcgctcgt

SEQ ID NO: 396671 - DNA, 201 bp, Homo sapiens
gacgaaagggcaccaagagaaactgatatgtctgtcagtgacctgcgtgtgaggtcttatttgtgtcctcttatttaaagcaaacacacccattttcgctsgtcccaagaccccgtgatcagagttgtagaaactcactggaccaagcgtttgcattcgtaatcaaaacagtatttagcccacctggtggttaagatttct

SEQ ID NO: 396672 - DNA, 201 bp, Homo sapiens
tttctcacatccggtccaattctgaattctctggttctgtgagatgctgtggaatacatccttttgttcttccccactcaagaaaactcttggttatcgcrtcattgggaaggaacacgttgcatggcaactgaagacactcacatccagacttgactgttgagagaaaggagctggcccctgggaaatacagaggctgct

SEQ ID NO: 396673 - DNA, 201 bp, Homo sapiens; identical to SEQ ID NO: 87671

SEQ ID NO: 396674 - DNA, 201 bp, Homo sapiens
gctgcagagcggccaggccacccttagaaccatcgttggtgttttccaggcaatcgtgaaggaacatcctccatcagaaacagaagagaagaacaaaatcrctgctgcgatcttttattccatcagcttgacccagcagggactccaaggggtggagctgggaacattcctcataaagcgagtcgtcaaggagttgcaggt

SEQ ID NO: 396675 - DNA, 201 bp, Homo sapiens
tcttatgtatcgtgcttgagtgttttcattccttgtgctgaccacaacacagagatgggcttgatctgtcgcacattggaggcctgggatttatcttctcyttttcaggaaatgaatggggtgctgaaaggaatgctctcagaatggttttcctccgggttcctgaacctagaacgggttacctggcattcaccgtgtgaa

SEQ ID NO: 396676 - DNA, 201 bp, Homo sapiens
ggtgagtctgccccacactcagtcatagatttttgagcctgagagaaagccatgaaggacttgaaaggtttctgcccagctgagagggtcctcatatcagwcatttggacagctttgtccctcattgatttctcacatccggtccaattctgaattctctggttctgtgagatgctgtggaatacatccttttgttcttcc

SEQ ID NO: 396677 - DNA, 201 bp, Homo sapiens
agtgacctgcgtgtgaggtcttatttgtgtcctcttatttaaagcaaacacacccattttcgctcgtcccaagaccccgtgatcagagttgtagaaactcrctggaccaagcgtttgcattcgtaatcaaaacagtatttagcccacctggtggttaagatttctccctgagttaaaatctctaaacaaactatatcatgt

SEQ ID NO: 396678 - DNA, 201 bp, Homo sapiens
cggcacttgtgcagtgcagtcgggaaagagaggaggggctgggccggtgcctttaggcggtcaggtgttaggaccggagtacaagccgccagccgcgcggragcaggccccgaggcagcccagccgcggggcagtaacctttagccacacttggcctccggccgccgccagagccgctccgcccccgccgcctcgccccca

SEQ ID NO: 396679 - DNA, 201 bp, Homo sapiens
gagaatcacttgaacctaggaggcggagattgcagtgagccaagactgcaccattgcgctccagcctgggagagacagtctcaaaaaaaaaaaaaaaaaaacagtggttcggggtgggggaaaaaccccgggagctaccacgaatgcccaacgagaggaacatggtgaggaaaatcataataggctgctttttttatatta

SEQ ID NO: 396680 - DNA, 201 bp, Homo sapiens
ctgccaccatgcccggctcattttttttgtatttttagtagagacggggtttcaccgtgttagccagggtggtctcgatctcctgacctcgtgatctgccygcctcggcctcccaaagtgctgggattacaggcgtgagccaccgcgcccggcctccatacaatttcagaacaatttcagaaagttcatggactgactacg

SEQ ID NO: 396681 - DNA, 201 bp, Homo sapiens
tcagcctccgtagtagctgggactacaggcacctgccaccatgcccggctcattttttttgtatttttagtagagacggggtttcaccgtgttagccaggrtggtctcgatctcctgacctcgtgatctgcccgcctcggcctcccaaagtgctgggattacaggcgtgagccaccgcgcccggcctccatacaatttcag

SEQ ID NO: 396682 - DNA, 201 bp, Homo sapiens
cctcccgggttcacaccattctcctgcctcagcctccgtagtagctgggactacaggcacctgccaccatgcccggctcattttttttgtatttttagtaragacggggtttcaccgtgttagccagggtggtctcgatctcctgacctcgtgatctgcccgcctcggcctcccaaagtgctgggattacaggcgtgagcc

SEQ ID NO: 396683 - DNA, 201 bp, Homo sapiens
aggcacaaatgagaatcgcttgccactaggcagaggttgcagtgagccgaggtcgtgccactgcactccagcctgggcgacagagcaagactccatctcaraaaaaaaaaaaaaaagaaaggagataagcctgggagtgatgtgaagtgagctccgtcctatgaacgacagagctcttccatagagcacggtgcaggacag

SEQ ID NO: 396684 - DNA, 201 bp, Homo sapiens
atcatccccccatgtaaatgatcagctcctcgaaaactgggaaacttgtctttaaatttcttgcatagcagaatgatgaatgaatcattgcaatagattcytgggtgtcctggcataagacacacttgacacactaatcattcagcatttgtgtggaggtgagtctgccccacactcagtcatagatttttgagcctgaga

SEQ ID NO: 396685 - DNA, 201 bp, Homo sapiens
acagatacctgattcatacatagtttacctttacagcttttgttaaatgcctgtggggagttttgaaagatacttgattagaaaattgaaagaggcactcyatcccttatgcttgatgtgggccgaggacactccttggcgagtggaggttatgggacttgtggttgatagccccgtctgtggcaagctgctctgctcctg

SEQ ID NO: 396686 - DNA, 201 bp, Homo sapiens
gaggctgaggcacaaatgagaatcgcttgccactaggcagaggttgcagtgagccgaggtcgtgccactgcactccagcctgggcgacagagcaagactcyatctcaaaaaaaaaaaaaaaaagaaaggagataagcctgggagtgatgtgaagtgagctccgtcctatgaacgacagagctcttccatagagcacggtgc

SEQ ID NO: 396687 - DNA, 201 bp, Homo sapiens
tccgccccagggctgaggctgtgcatcctgtaaaaaactggatggacatgaagcgccgcgttgggccctacagaaggtgttacttcttttctcactgttcracccctggggagcccctggtcgttttgcacgtggcactgactggtgacatctccagcaacatccaggtacctgcgatggtcaattcgggacaagatgggc

SEQ ID NO: 396688 - DNA, 201 bp, Homo sapiens
ctagggttcagagaaaaggaggaaaaacaattcagtggtgggaaacgtcagtcctttaggagaagctgaaggaactggagctgtttggtctcaaggatccrtgtgttatcgctgagtgttggccggagagtttatggagcaagtttttgtttgcacaaaggcctaaaagagacagaaaggggcatacattgctcttcaaca

SEQ ID NO: 396689 - DNA, 201 bp, Homo sapiens
cccacctcagcctcctgagtagctgggaatacaggtgcttgccaacacatctggctaatttttgtatttttaggagagatggggttttgctatgttggccrggctggtctggaactcctgacctcagatgatccgcccgccttggccttccaaagtgctggaattacaggtgtgaaccactgtgcctggctgtgttcttac

SEQ ID NO: 396690 - DNA, 201 bp, Homo sapiens
tatttaaagaacttgtttgacttagacgaatagtatgaataggagtcagcagccgttgcttgtgaattatgcatttgtcttgtctctttataaattccgcyccagggctgaggctgtgcatcctgtaaaaaactggatggacatgaagcgccgcgttgggccctacagaaggtgttacttcttttctcactgttcgacccc

SEQ ID NO: 396691 - DNA, 201 bp, Homo sapiens
gtaggtttatatggaaaaccagccttgacttactcttgagtagaagttcaggtttatagagtagcatgggtatggtgtggtcttatgaataatattaatartatctgttgagtagtgctctgtgcctgtcagtctgtgaagcacattttgtgtgttattgccctgagcaccctgtgatttaggtggtggtgttgtgttttt

SEQ ID NO: 396692 - DNA, 201 bp, Homo sapiens
ctattaattcccttccccttcccttgttctacgtagttgttttctcatatatacacatatatatgtatgtgtatatgtgtgtgtgtgtgtgtgcgtgcgtrtatatatatatatatatatatatatatatatatggttttttgttttgttgtttacggttttttgtttgtgtttatttttttgttcatgtttatgtttttt

SEQ ID NO: 396693 - DNA, 201 bp, Homo sapiens
gaacgaaagaaagcctgacttggtttgagataagatgtctgacagaggaatcttgggaaaagctgtttggagagttgtcttgcacaattgtcttatgtatygtgcttgagtgttttcattccttgtgctgaccacaacacagagatgggcttgatctgtcgcacattggaggcctgggatttatcttctccttttcaggaa

SEQ ID NO: 396694 - DNA, 201 bp, Homo sapiens
ctaaatagagcgttgaacgaaagaaagcctgacttggtttgagataagatgtctgacagaggaatcttgggaaaagctgtttggagagttgtcttgcacarttgtcttatgtatcgtgcttgagtgttttcattccttgtgctgaccacaacacagagatgggcttgatctgtcgcacattggaggcctgggatttatctt

SEQ ID NO: 396695 - DNA, 201 bp, Homo sapiens
tatatttgtgtatgttttatattggctaaaagctaatctatctccattcatatgtacagtttatttcaagtctaataaaatccaaacacagtatttgcaartgctgcggctgtcaccacacatgatactaagattatggaggaagacgaaagggcaccaagagaaactgatatgtctgtcagtgacctgcgtgtgaggtct

SEQ ID NO: 396696 - DNA, 201 bp, Homo sapiens
aaaagctaatctatctccattcatatgtacagtttatttcaagtctaataaaatccaaacacagtatttgcaaatgctgcggctgtcaccacacatgataytaagattatggaggaagacgaaagggcaccaagagaaactgatatgtctgtcagtgacctgcgtgtgaggtcttatttgtgtcctcttatttaaagcaaa

SEQ ID NO: 396697 - DNA, 201 bp, Homo sapiens
taaagccattcttataggtgttgcccattgtgttctttatgacccttgtagagagattcagaaggtcattcttgtatcagatgtcctgagatgtttactgktatttaataataatgttcagtggatctgttactatgtagtttatgagtaacaaagacccaaaataacagtgatttgaatatgacagaagtttgtctgtca

SEQ ID NO: 396698 - DNA, 201 bp, Homo sapiens
cctccccgcagggctggagcagccagaagtggaggccacgaagcaggccctgaccagctgtggctttgactgcttggaaaccagcatcggtgcccccggcrtctccatccactcagccacctccctggacagccgagtccagcaagccctggatggcctctgagaggagcccacgacactgcagccccacccagatgcccc

SEQ ID NO: 396699 - DNA, 201 bp, Homo sapiens
ggttctgacatctagagatctttgctcttctcattggctttcccttttaggattcccaggagccatgttgtcagaagtcctactggtgtctgctccggggwaagtcatccttcatggagaacatgccgtggtacatggcaaggtacaaagccgttagagcctttaaggattgggtaccccttctccctgatgctaattttg

SEQ ID NO: 396700 - DNA, 201 bp, Homo sapiens
tgcccttcccgccagccactcacctgtccccgtcttccacgccctgagggccgcggctctggaaacggggatacaggagcctggcggcgccgaagcaccckcgcaggccaagacggctccccaggccaagacggctccccaggccgcacacagccatgagccaggctgcttgacgggacctgaccccgccaggttcccgtc

SEQ ID NO: 396701 - DNA, 201 bp, Homo sapiens
ctggctgtatccttgaacttgagaacattcctccggcttcaaccccacagcaatgggaaagtggacctcagcttacccaacattggtatcaagcgggcctrggatgtggccaggcttcagtcactggacacaagctttctgggtgagtgcaaggaggagaaaccaggtgtgctaagagcctacagagagggcagctggcca

SEQ ID NO: 396702 - DNA, 201 bp, Homo sapiens
ggcagaatcacccttgccgccgacctttgcactccgcagaagccagtaggagcgtggaacagcttcctcgggttgctccagcagtcgtcaggagagcctcrggtgccgaggtgaagctggtctgccaccgccccggatccatgtggaaccagagctggatcatgtgggggagtctcaaatgcccgggccccggcctgtctt

SEQ ID NO: 396703 - DNA, 201 bp, Homo sapiens
cctggttcagtgctggcaccccactgccctgcgggagagtcacgtttcacaccctggtgtgtttcagggccctgccgagcctggatatcgtagtgtggtcrgagctgccccccggggcgggcttgggctccagcgccgcctactcggtgtgtctggcagcagccctcctgactgtgtgcgaggagatcccaaacccgctga

SEQ ID NO: 396704 - DNA, 201 bp, Homo sapiens
gcccttcccgccagccactcacctgtccccgtcttccacgccctgagggccgcggctctggaaacggggatacaggagcctggcggcgccgaagcacccgygcaggccaagacggctccccaggccaagacggctccccaggccgcacacagccatgagccaggctgcttgacgggacctgaccccgccaggttcccgtcc

SEQ ID NO: 396705 - DNA, 201 bp, Homo sapiens
tgggccccaccttcaccatgtggcttgtcgggggaagctggacagtctggagggagggggacccaggaatccaaggcctggcaagagcttcctggtggggmttcggggaccttttgccctcctgcaccttttgtaactgaagctgggctgactcattacttagcctctttcctgaatggggcaaaatgaacccaacccaaa

SEQ ID NO: 396706 - DNA, 201 bp, Homo sapiens
ggcaacgtgacacctggtgctcaggcgcagagagcggcccccagaagtcttctctcacatccagcccatcaggctggtgagaggcacccggggctgccacyaggccatcatgcctgtctgctcatttgtcaaaaatggtgagcttggcgcagagcgaggtatgaggcaggctgttggggagggccactccaaccctgcctg

SEQ ID NO: 396707 - DNA, 201 bp, Homo sapiens
aattctagtgtagaggttgtgacctggtactttgggtgtgatcaggcctgtgtgtgaatcccagctccacttctgctggacgtgtggcctcgctagagtgwcttaagaatgctcagattagacgggcgcagtggctcacctgtagtattagcactttgggaggccaaggcaggtggattgcttgagtccaggagttcgaga

SEQ ID NO: 396708 - DNA, 201 bp, Homo sapiens
ccatctccctggagtgtgagcgcgtgctgggagagatgggggaagccccagccccggagcagtacctcgtgctggaagtaagagcctgtctgcaggaaccrgggttactgagtccacaccactgtccaaggcagtggctctgcaatctggctgtgctcagaatcccccggaagctagcacatagaggtcaggacctgcctc

SEQ ID NO: 396709 - DNA, 201 bp, Homo sapiens
aacaggctgctcaaggtgactcttgttcccttcttgggcaggtttcaggaaggccaggacacaattacatctggattttcgaggtctccctctggctgatsggttatagggggtgtggtgggtggtgggggcccttagggaggtggttttggcagaaaagaaggtaccgtccgtgcccgtagcctggccaggaaaatgaca

SEQ ID NO: 396710 - DNA, 201 bp, Homo sapiens
ctcagaagagaggtggtttccccagaggatgggcacgggctgtgtgaacacctcctccctccaccccactgctggggcagctgtcctgcatctgcctgccyccaggcctcaccagccgttccttctttttttctccagttcccagagatcgtggcccccctcctgacctcaatagatgccatctccctggagtgtgagcgc

SEQ ID NO: 396711 - DNA, 201 bp, Homo sapiens; identical to SEQ ID NO: 87699

SEQ ID NO: 396712 - DNA, 201 bp, Homo sapiens
acctcctccctccaccccactgctggggcagctgtcctgcatctgcctgcccccaggcctcaccagccgttccttctttttttctccagttcccagagatmgtggcccccctcctgacctcaatagatgccatctccctggagtgtgagcgcgtgctgggagagatgggggaagccccagccccggagcagtacctcgtgc

SEQ ID NO: 396713 - DNA, 201 bp, Homo sapiens
ttgtggctttaggagggatttatgcagctcctctggggcaggtgaggaccacggggtcatgctagagagtcagctcaacgtggctgcctgggacacgtctrtgtgccagagggcagccaaggggatgactgactctacatctggttttagaccagggctgctcgtccgggcaccattgaggtagggcaagaatgggctcag

SEQ ID NO: 396714 - DNA, 201 bp, Homo sapiens
cctattggattttacaatcttgaactgtgaagacagcgaataaaggtatcaagggctctgcccgtctccagctgtctcgggccagagctcatccaaatccyccaccttccatcccagcctgcagccctctgaaaggcaggttggatggcaagaaatgtcagcttgagccctcgaagacggctcactacaaggacagttggg

SEQ ID NO: 396715 - DNA, 201 bp, Homo sapiens
ctggatgggtatgagccctggatctggtggggctggtgacaggcctgtctgcagaggacttgtctaagaaagatgaagatgcaacacccaaactcctcccrcctggctagatgggagcatggagcaaaccaacctttgctgcctgctgtggggtgccacgggagcagatggcggcttcacagagaagctgggggccagact

SEQ ID NO: 396716 - DNA, 201 bp, Homo sapiens
gcataggaccttggcctcaggcaggccaagtgggaacagatggaaccttctcccctaggagctcattgacatgaaccagcaccatctgaatgccctcggcrtgggccacgcctctctggaccagctctgccaggtgaccagggcccgcggacttcacagcaagctgactggcgcaggcggtggtggctgtggcatcacact

SEQ ID NO: 396717 - DNA, 201 bp, Homo sapiens
cttagcctctttcctgaatggggcaaaatgaacccaacccaaagttcaacctctctcccaagtagcacagatatgttagcttttcccacagctctgacccrctggtttttctctttaggaggagccctccgataccatcaagggaagatttcatccttaaagaggtaacctgggggtggagcagcacattcagccatggct

SEQ ID NO: 396718 - DNA, 201 bp, Homo sapiens
tcgggaggctgaggcaggagaattgcttgaacccgggagaaagtgagctgagattgcaccactgcactccagcctgggtgacagagtgagactccgtctcaaaaaaaaagaaaaaaaaagaggcaaagtaggaccacgggagtccaaagcccaggctgttttgactgcgccaggtgggcttcagagggaagggcgcacact

SEQ ID NO: 396719 - DNA, 201 bp, Homo sapiens
acccactagatgccagtagcaccctcagcgtggcaatcaaaaacatctccagacattgcttagtgtcccttgggaggcagaatcacccttgccgccgacctttgcactccgcagaagccagtaggagcgtggaacagcttcctcgggttgctccagcagtcgtcaggagagcctcgggtgccgaggtgaagctggtctgcc

SEQ ID NO: 396720 - DNA, 201 bp, Homo sapiens
ccctgcatttacgagcccgtgcgtggcactgcccgcaccagctagcctgggcatcttccctctgtgtgatccatttcagggcctgttgcttggtctttctraaactccagcttcgtgggggtgacccacacaagtgaaccttcgccccctccttgtactctgctatagccactttgaatttctcactggatgactgtgccg

SEQ ID NO: 396721 - DNA, 201 bp, Homo sapiens
gtcccagctcagtcatgcctccctttccaaggctgtacgtcagagttgtcagcattggcactattgagatttggggctgggttattctttgtggtggggcygccctgtgcattgtagccatccccagcccctacccactagatgccagtagcaccctcagcgtggcaatcaaaaacatctccagacattgcttagtgtccc

SEQ ID NO: 396722 - DNA, 201 bp, Homo sapiens
agcgccacacctgggcccccggctagttctctgggatctttctgtcccagctcagtcatgcctccctttccaaggctgtacgtcagagttgtcagcattgscactattgagatttggggctgggttattctttgtggtggggctgccctgtgcattgtagccatccccagcccctacccactagatgccagtagcaccctc

SEQ ID NO: 396723 - DNA, 201 bp, Homo sapiens
atggatgagtggcaggtcctggcctgcagcccccaccagctgggccactccattagtggctcagtaacctggcctgccacagcgccacacctgggcccccrgctagttctctgggatctttctgtcccagctcagtcatgcctccctttccaaggctgtacgtcagagttgtcagcattggcactattgagatttggggct

SEQ ID NO: 396724 - DNA, 201 bp, Homo sapiens
aaagtaggaccacgggagtccaaagcccaggctgttttgactgcgccaggtgggcttcagagggaagggcgcacacttggcacgctccgtagctggagagrttcagagtggacttgttctttctgagctcaagggcccaagctcctatgccccttggcctgcccagcacagccccaggtgacccctccccagccccactcc

SEQ ID NO: 396725 - DNA, 201 bp, Homo sapiens
ttgctcttctcattggctttcccttttaggattcccaggagccatgttgtcagaagtcctactggtgtctgctccggggaaagtcatccttcatggagaamatgccgtggtacatggcaaggtacaaagccgttagagcctttaaggattgggtaccccttctccctgatgctaattttgtaagaaggtaaaaggacaccc

SEQ ID NO: 396726 - DNA, 201 bp, Homo sapiens
tgctcttctcattggctttcccttttaggattcccaggagccatgttgtcagaagtcctactggtgtctgctccggggaaagtcatccttcatggagaacmtgccgtggtacatggcaaggtacaaagccgttagagcctttaaggattgggtaccccttctccctgatgctaattttgtaagaaggtaaaaggacaccct

SEQ ID NO: 396727 - DNA, 201 bp, Homo sapiens
caggtggaccaaggaggatttggagctaattaacaagtgggccttccaaggggagagaatgattcacgggaacccctccggagtggacaatgctgtcagcrcctggggtaggtgtggcctcaggtttattttattgttgttattttaaaaattcttattacaatggtaggtgcccaagagtctgtgctggtttgggaggaa

SEQ ID NO: 396728 - DNA, 201 bp, Homo sapiens
  misc_feature (1)...(201): n = A,T,C or G
gttcttagccatttaagtgagttaactaagatgacatcactggggagtggaagagctggcatttgaacccagatctgttggatgtgtccagttgactcctncattgcctttctggtacgtagcaagtgctggacggtaactaccttttttgttattatgatgggcttgaactaggtgttctaagatctcttcctgctggtt

SEQ ID NO: 396729 - DNA, 201 bp, Homo sapiens
cgtttcacaccctggtgtgtttcagggccctgccgagcctggatatcgtagtgtggtcggagctgccccccggggcgggcttgggctccagcgccgcctastcggtgtgtctggcagcagccctcctgactgtgtgcgaggagatcccaaacccgctgaaggacggggattgcgtcaacaggtaaccatggtccttacctg

SEQ ID NO: 396730 - DNA, 201 bp, Homo sapiens
tttcacaccctggtgtgtttcagggccctgccgagcctggatatcgtagtgtggtcggagctgccccccggggcgggcttgggctccagcgccgcctactyggtgtgtctggcagcagccctcctgactgtgtgcgaggagatcccaaacccgctgaaggacggggattgcgtcaacaggtaaccatggtccttacctggc

SEQ ID NO: 396731 - DNA, 201 bp, Homo sapiens
tctcccctaggagctcattgacatgaaccagcaccatctgaatgccctcggcgtgggccacgcctctctggaccagctctgccaggtgaccagggcccgcrgacttcacagcaagctgactggcgcaggcggtggtggctgtggcatcacactcctcaagccaggtatcccgggggtaggtgggccaggctgccagcctgg

SEQ ID NO: 396732 - DNA, 201 bp, Homo sapiens
agtcatccttcatggagaacatgccgtggtacatggcaaggtacaaagccgttagagcctttaaggattgggtaccccttctccctgatgctaattttgtragaaggtaaaaggacaccctgaggcacagcttgggagcagatcagagagatcaggttctccccagccaggcaaggaaaagatttcttatgcccactgaag

SEQ ID NO: 396733 - DNA, 201 bp, Homo sapiens
gcaggtttcaggaaggccaggacacaattacatctggattttcgaggtctccctctggctgatgggttatagggggtgtggtgggtggtgggggcccttagggaggtggttttggcagaaaagaaggtaccgtccgtgcccgtagcctggccaggaaaatgacagtggtcgggctcgttagacacactgactttgcagctg

SEQ ID NO: 396734 - DNA, 201 bp, Homo sapiens
ggagtggaagagctggcatttgaacccagatctgttggatgtgtccagttgactcctgcattgcctttctggtacgtagcaagtgctggacggtaactacsttttttgttattatgatgggcttgaactaggtgttctaagatctcttcctgctggttctgacatctagagatctttgctcttctcattggctttcccttt

SEQ ID NO: 396735 - DNA, 201 bp, Homo sapiens
aaagaaaaaaaaagaggcaaagtaggaccacgggagtccaaagcccaggctgttttgactgcgccaggtgggcttcagagggaagggcgcacacttggcaygctccgtagctggagaggttcagagtggacttgttctttctgagctcaagggcccaagctcctatgccccttggcctgcccagcacagccccaggtgacc

SEQ ID NO: 396736 - DNA, 201 bp, Homo sapiens
aagaaaaaaaaagaggcaaagtaggaccacgggagtccaaagcccaggctgttttgactgcgccaggtgggcttcagagggaagggcgcacacttggcacrctccgtagctggagaggttcagagtggacttgttctttctgagctcaagggcccaagctcctatgccccttggcctgcccagcacagccccaggtgaccc

SEQ ID NO: 396737 - DNA, 201 bp, Homo sapiens
ctcctttgaagactcaaatctgagccccctaaaaaacaaactgtgtagagcaggaggaagactcacatttgttgagagggccaggccctgggctaggtcarctgcctgagttaccttcccccgcctccatcactcacttcatcccaggcacgctgccacctgttggtccctgggaagggccagccagctctggtgtggttc

SEQ ID NO: 396738 - DNA, 201 bp, Homo sapiens
tgccccccggggcgggcttgggctccagcgccgcctactcggtgtgtctggcagcagccctcctgactgtgtgcgaggagatcccaaacccgctgaaggayggggattgcgtcaacaggtaaccatggtccttacctggccagtgtccctcccgcacggcaggacagggacgtggcttctctcactgagacctcaccacct

SEQ ID NO: 396739 - DNA, 201 bp, Homo sapiens
gatggacgaggcaggctcaggggtgggcataggaccttggcctcaggcaggccaagtgggaacagatggaaccttctcccctaggagctcattgacatgamccagcaccatctgaatgccctcggcgtgggccacgcctctctggaccagctctgccaggtgaccagggcccgcggacttcacagcaagctgactggcgca

SEQ ID NO: 396740 - DNA, 201 bp, Homo sapiens
tcttcaacctcctgggctcaagcgatcctcctgcctcagccttctgagtagctgggaccacaggtgtgcgccaccatgcctggctagtttttgtactttcygtagagttggggtttcgccatgttacctaggctggtctcaaactcctaggcacaagtgatctgcccaccttggcctcccaaagtactggggttacaggca

SEQ ID NO: 396741 - DNA, 201 bp, Homo sapiens
gtgcaaggaggagaaaccaggtgtgctaagagcctacagagagggcagctggccaggtattctgggctgtccccaagggagccaggggccagctatttccygggtgttttctaccctgacctcataaaattagcttcactcattttatttttttaaaatttataggtgtaaaacaatgcattggatctctgtgggctgttg

SEQ ID NO: 396742 - DNA, 201 bp, Homo sapiens
gtgattatggggaagtgattccttggtattgagaacctctgaaattttgcaggcagaaggcaaagtggattttaacttttagctgatcgatggtggctgtkcccaggcttagtgggagagcatgccaaggttgattagcagtgtctggcaagggcatggctaggagtggcctctgtgcttatgtttgctctcttcttagca

SEQ ID NO: 396743 - DNA, 201 bp, Homo sapiens
gctcctccatcttgagttcagtgtggacctgcctcctcttcaccctgcaggtcgccagctctccagatcctgctgaccaacaccaaagtccctcgcaataycagggcccttgtggctggcgtcagaaacaggctgctcaaggtgactcttgttcccttcttgggcaggtttcaggaaggccaggacacaattacatctgga

SEQ ID NO: 396744 - DNA, 201 bp, Homo sapiens
cgcttgtgcttggcccagccagctcctttctcctccacggctgttttcctccttgtttcctcagctagcgccctttggaagacacctggctcaggggcccrcacctcgcaggtgcttccttccccagcccttcctggtttccagctaattttggacaagttctttggctgtctcttagcacctactgtcttctaggaaggg

SEQ ID NO: 396745 - DNA, 201 bp, Homo sapiens
tgcactgatgtcgtctctgtcagtgaggagtccttttatttatttttagacagtctcactctgttgcccaggctggagtgcagtggcgccatcttggctckctgcaacctctgcttcccaggttcaagtgattctcccgcctcagcctcccaagtagctgggattacaggtgtgtgccaccacgcctgggtaatttttgta

SEQ ID NO: 396746 - DNA, 201 bp, Homo sapiens
ctcatcgggaaagtgggattcactaatacccaccttatggaggtttcgtggggatcaatgagaaaatatacagaaggcccttgacacagtgcgtggcacayggtaagtgctcaataaatactcattattataactgtcttatgctgagagataagggtgtcttccagagccccaaaacttcagaatggtgcacagagctgg

SEQ ID NO: 396747 - DNA, 201 bp, Homo sapiens
agtcacgtttcacaccctggtgtgtttcagggccctgccgagcctggatatcgtagtgtggtcggagctgccccccggggcgggcttgggctccagcgccrcctactcggtgtgtctggcagcagccctcctgactgtgtgcgaggagatcccaaacccgctgaaggacggggattgcgtcaacaggtaaccatggtcctt

SEQ ID NO: 396748 - DNA, 201 bp, Homo sapiens
tatacaatggaaggtgaaacctaggcccttgtgcgattgagccagcattctctgtgtgtgtctgtgtgtctgtgtgtgtttgttttaagactacaattttwtttttttttttttttgagacagggtctcactctgttatgcagcctggagtacagtggtgcgaccacagctcactgtttcttcaacctcctgggctcaagc

SEQ ID NO: 396749 - DNA, 201 bp, Homo sapiens
agcttgcaagattgttgcccagattcaagcaggaaagtgcacctagagagcctggtgcagggctgggctgtggctggggctcctgtcatcggggctgtccscacaagcttgggaagtaaccagggcattgtcactctccacgtctgcctaaccttgccccacttgtacccttgatgtggtcaggatgcggttgattttgct

SEQ ID NO: 396750 - DNA, 201 bp, Homo sapiens
aatggaaggtgaaacctaggcccttgtgcgattgagccagcattctctgtgtgtgtctgtgtgtctgtgtgtgtttgttttaagactacaatttttttttwttttttttttgagacagggtctcactctgttatgcagcctggagtacagtggtgcgaccacagctcactgtttcttcaacctcctgggctcaagcgatcc

SEQ ID NO: 396751 - DNA, 201 bp, Homo sapiens
aggtctcagctccgctgtgtggccttgggcaagttagttaacctctggtctttgcttcctcattggtaaaataaggatgagagtatctagcttgcaagatygttgcccagattcaagcaggaaagtgcacctagagagcctggtgcagggctgggctgtggctggggctcctgtcatcggggctgtccgcacaagcttggg

SEQ ID NO: 396752 - DNA, 201 bp, Homo sapiens
caggccgcacacagccatgagccaggctgcttgacgggacctgaccccgccaggttcccgtccagtccgcggggtgactccacccacagctggccgcgccrccgctcaggtttcaatttttattggttcgcagttctcaccccagggcgggacactcccagggacttgtttcccattggtttaacggaaggagcggggcgg

SEQ ID NO: 396753 - DNA, 201 bp, Homo sapiens
cccagcccctacccactagatgccagtagcaccctcagcgtggcaatcaaaaacatctccagacattgcttagtgtcccttgggaggcagaatcacccttgccgccgacctttgcactccgcagaagccagtaggagcgtggaacagcttcctcgggttgctccagcagtcgtcaggagagcctcgggtgccgaggtgaag

SEQ ID NO: 396754 - DNA, 201 bp, Homo sapiens
ccagcccctacccactagatgccagtagcaccctcagcgtggcaatcaaaaacatctccagacattgcttagtgtcccttgggaggcagaatcacccttgccgccgacctttgcactccgcagaagccagtaggagcgtggaacagcttcctcgggttgctccagcagtcgtcaggagagcctcgggtgccgaggtgaagc

SEQ ID NO: 396755 - DNA, 201 bp, Homo sapiens
cctgcatctgcctgcccccaggcctcaccagccgttccttctttttttctccagttcccagagatcgtggcccccctcctgacctcaatagatgccatctycctggagtgtgagcgcgtgctgggagagatgggggaagccccagccccggagcagtacctcgtgctggaagtaagagcctgtctgcaggaaccggggtta

SEQ ID NO: 396756 - DNA, 201 bp, Homo sapiens
cagcccctacccactagatgccagtagcaccctcagcgtggcaatcaaaaacatctccagacattgcttagtgtcccttgggaggcagaatcacccttgccgccgacctttgcactccgcagaagccagtaggagcgtggaacagcttcctcgggttgctccagcagtcgtcaggagagcctcgggtgccgaggtgaagct

SEQ ID NO: 396757 - DNA, 201 bp, Homo sapiens
cccccaggcctcaccagccgttccttctttttttctccagttcccagagatcgtggcccccctcctgacctcaatagatgccatctccctggagtgtgagygcgtgctgggagagatgggggaagccccagccccggagcagtacctcgtgctggaagtaagagcctgtctgcaggaaccggggttactgagtccacacca

SEQ ID NO: 396758 - DNA, 201 bp, Homo sapiens
gcccctacccactagatgccagtagcaccctcagcgtggcaatcaaaaacatctccagacattgcttagtgtcccttgggaggcagaatcacccttgccgccgacctttgcactccgcagaagccagtaggagcgtggaacagcttcctcgggttgctccagcagtcgtcaggagagcctcgggtgccgaggtgaagctgg

SEQ ID NO: 396759 - DNA, 201 bp, Homo sapiens
ccctacccactagatgccagtagcaccctcagcgtggcaatcaaaaacatctccagacattgcttagtgtcccttgggaggcagaatcacccttgccgccgacctttgcactccgcagaagccagtaggagcgtggaacagcttcctcgggttgctccagcagtcgtcaggagagcctcgggtgccgaggtgaagctggtc

SEQ ID NO: 396760 - DNA, 201 bp, Homo sapiens
cctacccactagatgccagtagcaccctcagcgtggcaatcaaaaacatctccagacattgcttagtgtcccttgggaggcagaatcacccttgccgccgacctttgcactccgcagaagccagtaggagcgtggaacagcttcctcgggttgctccagcagtcgtcaggagagcctcgggtgccgaggtgaagctggtct

SEQ ID NO: 396761 - DNA, 201 bp, Homo sapiens
gatgatgctaacgtacccataaaaatactaacagcacatatctcgtgccaggcattgaacagaaaactcaccttgtttcgtctcagggcaaagaagcagatttttttttttttttttttttttgagacagagtcatcttgctctgtcgcccaggctggagtgcagtggcacaatcttggctcattgcatcctcccaggttc

SEQ ID NO: 396762 - DNA, 201 bp, Homo sapiens
ggttgcaggcttgcctgacgactgtgctgtcaccgagcgcctggctgtgctggcctttctttacttatacctgtccatctgccggaagcagaggtgtgtgygtggtctggggaaggagtccagattcagcctcccatggagaaaaaggaagagtttctgtcattgctgctggagaatgcacatgctctcttctagagcagc

SEQ ID NO: 396763 - DNA, 201 bp, Homo sapiens
agggagccaggggccagctatttcccgggtgttttctaccctgacctcataaaattagcttcactcattttatttttttaaaatttataggtgtaaaacartgcattggatctctgtgggctgttgtggacagatcatcaaggcctattgttgagtgaaaaaaatgcaaaacagcaaacatacgtatttaagtataaatat

SEQ ID NO: 396764 - DNA, 201 bp, Homo sapiens
tgcaaggaggagaaaccaggtgtgctaagagcctacagagagggcagctggccaggtattctgggctgtccccaagggagccaggggccagctatttcccrggtgttttctaccctgacctcataaaattagcttcactcattttatttttttaaaatttataggtgtaaaacaatgcattggatctctgtgggctgttgt

SEQ ID NO: 396765 - DNA, 201 bp, Homo sapiens
gctctgaaatacctgggttctcaatgatgccatgacttggccatttgagtatatcattaatccattcaacacacatttacccagtacttaaccagtgcccraagtttcctaacacacgcatgcccaattccatttcccagtcccttgagaatgtgacctgaggctcagcgagtgatttgtaaaggtgagctggccagaaag

SEQ ID NO: 396766 - DNA, 201 bp, Homo sapiens
cagtcgtcaggagagcctcgggtgccgaggtgaagctggtctgccaccgccccggatccatgtggaaccagagctggatcatgtgggggagtctcaaatgyccgggccccggcctgtcttcaggagcccacggtctgatggggaaggcggtcactggaatcgtcagagagaagacacctgaagggttgtgaagctgctgtg

SEQ ID NO: 396767 - DNA, 201 bp, Homo sapiens
ttgcttttgtcatttattctataggtagcactggctgtatccttgaacttgagaacattcctccggcttcaaccccacagcaatgggaaagtggacctcarcttacccaacattggtatcaagcgggcctgggatgtggccaggcttcagtcactggacacaagctttctgggtgagtgcaaggaggagaaaccaggtgtg

SEQ ID NO: 396768 - DNA, 201 bp, Homo sapiens
gtgcgaggagatcccaaacccgctgaaggacggggattgcgtcaacaggtaaccatggtccttacctggccagtgtccctcccgcacggcaggacagggaygtggcttctctcactgagacctcaccacctccctgtgaggtgagaggtgtcatagtggccattttaacatgaggaagctgagccccgagaggtcaaatgg

SEQ ID NO: 396769 - DNA, 201 bp, Homo sapiens
tccatgtggaaccagagctggatcatgtgggggagtctcaaatgcccgggccccggcctgtcttcaggagcccacggtctgatggggaaggcggtcactgkaatcgtcagagagaagacacctgaagggttgtgaagctgctgtgggtgacagtgacaggcgtcttagatctggctgcgagcctggggaatcattcatgga

SEQ ID NO: 396770 - DNA, 201 bp, Homo sapiens
aactagccagatgtggtggtatgtacctgtggtcccagctacttgagaagctgaggtgggagaatcgcttgagcctgggaggtagaagctgcaatgaaccrtgattgcaccactgcactccagcttggatgacagagcgagaccctgccttaaaaaaaaaaaaaagacttagacattctccctatagtatgtggcagagct

SEQ ID NO: 396771 - DNA, 201 bp, Homo sapiens; identical to SEQ ID NO: 87777

SEQ ID NO: 396772 - DNA, 201 bp, Homo sapiens
  misc_feature (1)...(201): n = A,T,C or G
aagagcctataggaggtagggacttgtgccggagagctgttagcgctttggagggtgttgacaggtcctgagtatctctgctgcccaggtccctgcccacnctctgctcttgagcccctttctgtgtgtgtttttcacacaacaatctacaacacccacttgcccattttccttgcagggtttgtgcaagtttgcaaacat

SEQ ID NO: 396773 - DNA, 201 bp, Homo sapiens
caccctcagtgacttgagagtaggcagcatttcacttctcggagattcattttccccagctgtaaagtagtgaataacagttcctgcctgccatgaggatyaaacgaggtcacatctgttaagcacctggcaaattatagttgcccagtaaatgctatctccccttcttccttggccttggggccaggcagggtggagtat

SEQ ID NO: 396774 - DNA, 201 bp, Homo sapiens
cagcagttgcagttccatcatgcttttcttaccgtgacagtccaagtgttttctgagctgtagggagactcaaagccttgggcatactgggatggggtctstgtcagcttatagaccttccaccgagagagccagcctgctggagcccaccagcaacgacagagaaacctctctgaagatgtgccctgcctccttgacccc

SEQ ID NO: 396775 - DNA, 201 bp, Homo sapiens
gaccactggctgcgaaagtgagctccaggggtgaggagggctccatggaagccagcctgctccggcacgctgcccgagcactcagctctcatgttctaggrcagagaggactttttccctctgcttcattttgtctgttcatttgtgtaaagagagctgctgtccctgtgaagcacctgtcaggacgcttctgttaagaga

SEQ ID NO: 396776 - DNA, 201 bp, Homo sapiens
catgagcattctctcatgtcagtaaaatttcaaaactggtttttcatagctgcacagtatggcatcagcaactggaccatcactgacttgtccatttcccyagtgtatgtccccaatttcagccttcagttttctcagaaatcccacgcagaataatttctaggaatttgagcacgttggtggggttgtgcttttgttctg

SEQ ID NO: 396777 - DNA, 201 bp, Homo sapiens
aagtgagcagggtatttccctacctgcacgcgagccaggcagatccttgtttatctgctctctatgtgtacattccacaacagattgctctttgaggagargctcttctattttggacaaacaaaaaaagtttatgcaaagaaacagacgtcaggagaaaaagggccctgactctggagccaggaatatgtgaaattcagt

SEQ ID NO: 396778 - DNA, 201 bp, Homo sapiens
aactaccactatacggtgactccatgtaaattagagataggtacccagtcctcatatgtcagaaaattgtcacaatacattggttttgttggtacaagacygtgcctccaatctgctggaacatggttgtcataaacttaactacctacgatgtctgtgttatccatgccacagcctcccctgggcttgtatagtgcacag

SEQ ID NO: 396779 - DNA, 201 bp, Homo sapiens
cctaagggaaaagggaggcaagccagggggtatctcatttcttagggcctcggatgtgggacacaatttcctgtcccacataaacaggtcacattatggcwagagacttttttgttctcactgttttctttctttaggtgaaagtcttcgaccagcgatgaaccacatttgtgcaaatataatgggacatctcaaccagca

SEQ ID NO: 396780 - DNA, 201 bp, Homo sapiens
ggggtcaagaggaagccgaggagggtagtaggaactagagcaagacagccttagaaaccaaggctgggagcaagggctttctgcaaagccaccggagggcyggaagcttaggaggcacctggtcagagccatacttcaggaaggtcatcttggctgcagcgtggagggctggctagaggcaggggtgttaaagcaagctgt

SEQ ID NO: 396781 - DNA, 201 bp, Homo sapiens; identical to SEQ ID NO: 87737

SEQ ID NO: 396782 - DNA, 201 bp, Homo sapiens
caggaagcacacagtctactacggtggtttccatggaagtcacagagtcatcatctggctctgggatattctggcctccgacttcacaccggatgagagakctatgtttctgaaggtattttatttattacctatgcatgcatgcatgtattctcataaacctggaaggccagttgatgtaataatttacgctgaagaaac

SEQ ID NO: 396783 - DNA, 201 bp, Homo sapiens
atggttctcttttcatgtgccccactcagatcagagaggttagctcagttggttagcctcacctagacaagtggtgaacataggtactgatattttcagcwtttcagcttcataaaacatccttgtcccaaaaatggtactcttgaaagtgaaagtatatagtgtgaattctgagagcctaaataccactaacacctctgc

SEQ ID NO: 396784 - DNA, 201 bp, Homo sapiens
tgaggcaggaaaatcacttgaacccaggaggcagaggttgcagtgagccgaatcgcgccattgcactccagcatgggcgacaagaatgaaactccatctcaaaaaaaaaaaagaaaaagaaaaggccaggcgtggtggctcacatctgtaatcccagcactttgggaggccgagacgggcagatcacccgaggtcaggagt

SEQ ID NO: 396785 - DNA, 201 bp, Homo sapiens
ttctcttttcatgtgccccactcagatcagagaggttagctcagttggttagcctcacctagacaagtggtgaacataggtactgatattttcagcatttsagcttcataaaacatccttgtcccaaaaatggtactcttgaaagtgaaagtatatagtgtgaattctgagagcctaaataccactaacacctctgctcat

SEQ ID NO: 396786 - DNA, 201 bp, Homo sapiens
aaaaccaaacagctgccctcattagcggattccgttccattatcaaacccgagtggatccgaatgttctcaactcctgaactgcagcgtctcatctctggygacaatgctgagattgatctggaagatttaaagtaagaggcgggtggggggaagggtgaaattccttggcctcccagaaagccagctgctccctcgctgg

SEQ ID NO: 396787 - DNA, 201 bp, Homo sapiens
ctccccccataacctgggcgaggtggttggggagtcagacggagtgagaagtccagggcactgaggcagagccctgcaggacccgtcccacagagggccarcacgaggagggaaggagggaaaccaggagagtgccacacacccgggggatgagagagacttggggaggattgggctgtggcaggagcatccaggaaatga

SEQ ID NO: 396788 - DNA, 201 bp, Homo sapiens
caagaactcgacagggacagaaaacgggcacagttgatcctgcagtacatcccacatgtcatccctcacaaaaacgtgagttgcactcagagctgggcccygatgtgtctttctattcccccacgtggttcctgcctttccatccttgctatggcaattggaggtgactaagtgggatcattcattcagcacaaggaaacg

SEQ ID NO: 396789 - DNA, 201 bp, Homo sapiens
aatcttgctgtgtttattgtttccagcctgaaatcctgcaggactcccgactcatcaccctgtacctcacgatgcttgtcaccttcacagacacttcaacrtggaaaattcttcggggaaaaggtctgtgggacttgcttcaaaatgttctctaaccaacatttccatagagagctcagggaccttttttcctttgtaaga

SEQ ID NO: 396790 - DNA, 201 bp, Homo sapiens
catttgatttccgtgaagataaaacatgtgccagtgcacacttgagatgagagtccacctcccgaagtgtctccaattgctcaggacaaagctccttagayttaaaaggcccttcggatgacacactagtgggaggcagcatgagtgattttgtctgagaggtactcaggccctgcagacacttagcacttacccagggtg

SEQ ID NO: 396791 - DNA, 201 bp, Homo sapiens
tcacctcctcccttcctctccccctttctcagtaaagtggagcagtactcgtcacctgcttcaaagtatacctggaaggaggagcaatgataggaaaatcrtatttgtatgtattaatatacaggtttgctgctggaaaatttttttaaatagggatatttttgagattactaaagctttagcattgtaaaacatttattt

SEQ ID NO: 396792 - DNA, 201 bp, Homo sapiens
ccatgggcaccgccctccctaccatgaaaagtcggaggacgcaggagtctccaaacccggactgagagaggcaggaaacacccagctcacgccagccgggrgcggaggcggggccggagcgataacttccgctgtccgcaccccacttccgccccgcagagggcaacgtcttaagccgtccgttgtgcgcctaggggccag

SEQ ID NO: 396793 - DNA, 201 bp, Homo sapiens
tacatgtgctgaaagtgcaggtttgttacataggtatacatgtgctgtggtggtttgctgcacctgtcaccccgtcatctaggttttaagctctacatgcrttaggtatttgtcctaaggctctccctcccctttccccctacccctgatgatatcatatcattttatctgtagattttacagtaagtatctctacaagat

SEQ ID NO: 396794 - DNA, 201 bp, Homo sapiens
ttttcaacatattccctttaaactgtgaggattgaagagatacagtataacatttagatgagacattaaataaagaggacccagtggtgtttttaaaaaamcattggcattgtagttactacttttactcagtgaggaagatgtatgataccacacctataaaatttaaccctaagtctggatttttttcttctgcttctg

SEQ ID NO: 396795 - DNA, 201 bp, Homo sapiens; identical to SEQ ID NO: 87731

SEQ ID NO: 396796 - DNA, 201 bp, Homo sapiens; identical to SEQ ID NO: 87732

SEQ ID NO: 396797 - DNA, 201 bp, Homo sapiens; identical to SEQ ID NO: 87733

SEQ ID NO: 396798 - DNA, 201 bp, Homo sapiens
tctgcctcggcctcccaaagtgctgagattacaggcatgaaccaccgtgcctggccaggatcctgctttttgacttgtttcaaaggtttgatttcattacyaatgaagctggggaggtgaagcaggagacagcaaaattggttacatgaaacagagaggcaatgaatacttgagatactggctacggatctgattcaatca

SEQ ID NO: 396799 - DNA, 201 bp, Homo sapiens
aggtgtgacctatgggttttggggaggagtgaatgatgcagtgccctcaaaggcttgatgtgcacacagtggcgtatggtgtgcagttcgtgagtgctgtygtcattgtcgccattgtcattgttctgatgaaacactctggtactatttgtgttttttgtaaaatggttcagaaatgactagactgtctttcagcccatt

SEQ ID NO: 396800 - DNA, 201 bp, Homo sapiens
gccatacgctttgtctaatgggtaagtatccgtggctggaacttgattgtgtcctggccatcagggaaagcccgagtgttttgcctgtcactattctagakatttggttgttttctgtaacaattggaagtgcttacaataaaaaacacgtatttagatagacagttaaaatagacatgtaaataaaaatcacatggaaaa

SEQ ID NO: 396801 - DNA, 201 bp, Homo sapiens; identical to SEQ ID NO: 87736

SEQ ID NO: 396802 - DNA, 201 bp, Homo sapiens
gcttactaagtacctgctaagtgtcactagtatgtgtcttagatatcgaaaagattctgcagctttcctcagtaaacatcgactctcagtcaatgttcctwgatatgcagacatgaataaggaaggcgtgaattgaggtgtgaattaagaaagtgtcacagtcagatccttatgaataagaaaaatatagagtacagattt

SEQ ID NO: 396803 - DNA, 201 bp, Homo sapiens; identical to SEQ ID NO: 87739

SEQ ID NO: 396804 - DNA, 201 bp, Homo sapiens
gtcccttgtcctccccacccctcgcccatcctcctcccctcttgccaggagggagggccccctcctttccttcccagttgacctggcctttgaagcttccygcagagaccctgctttcttatatcgcattttagggtaattccccatttgtaacatggcttttcgttaccatggtgaggattagccgttacaaatggagga

SEQ ID NO: 396805 - DNA, 201 bp, Homo sapiens
acaccctgggcaagggatcacggattcaacctctctgagactcagttgactcatctgtaaatgggaatgacaatagcacataccttttaggcacatggtarggattaaaagacataattattgcaaagtgcttatcacagtccctggcacataggatgagttcagtacttgttggctcttattattatcaagccgaccctg

SEQ ID NO: 396806 - DNA, 201 bp, Homo sapiens
taccagcccctcagcaatgatttgttagttccactttttatttttgtaatcttctttgccatgttgagtgccaggtcctagctacagctccgagtggaagrccattaggaactgtgtgggctggccctggccctgcatcagatggaactgacagaccaggtctcctctgctctctcctagccttaacgagtcaatgcactt

SEQ ID NO: 396807 - DNA, 201 bp, Homo sapiens
cagcatacagagcagagcagggagcagagaccctggtctcagggccgcagcacgtctcctcccacggttccttctggcttttctctgtagcagcctccgcsccctttgattgtgtcctggtggaggtccctgcatgaggctctgggagtgcaggtccaagggccgctcaggagaaaccacgccatgagcttcttaatgcag

SEQ ID NO: 396808 - DNA, 201 bp, Homo sapiens
cactgggcttcagaaaatggaaagcaaacaatacatacggagtgcttagaatggtgcctggcacatagtcagcacccactgactactggctcttatcattrttactctcgtggtgataatgcttttctccataatcccaccttcttttcacgcacattaaatgttcatggataggtttaagtgttttgtttccccactgga

SEQ ID NO: 396809 - DNA, 201 bp, Homo sapiens
gcctgagtgtactgcacatataaaataaatatatttaaattgaaatatacagcactatgctttcctttccaataatcattttaccatgtcacaaattctaygaaaaccttatctttattggctacatagtatctcatcacatggatatgcccaacattttcctttttagcttaacatggaggaaagtcccctctgtgagca

SEQ ID NO: 396810 - DNA, 201 bp, Homo sapiens
tgcctgagtgtactgcacatataaaataaatatatttaaattgaaatatacagcactatgctttcctttccaataatcattttaccatgtcacaaattctwtgaaaaccttatctttattggctacatagtatctcatcacatggatatgcccaacattttcctttttagcttaacatggaggaaagtcccctctgtgagc

SEQ ID NO: 396811 - DNA, 201 bp, Homo sapiens
gtgatgtatgtgaaagtttagaaggatgccatacgctttgtctaatgggtaagtatccgtggctggaacttgattgtgtcctggccatcagggaaagcccragtgttttgcctgtcactattctagagatttggttgttttctgtaacaattggaagtgcttacaataaaaaacacgtatttagatagacagttaaaatag

SEQ ID NO: 396812 - DNA, 201 bp, Homo sapiens; identical to SEQ ID NO: 87748

SEQ ID NO: 396813 - DNA, 201 bp, Homo sapiens
aatgatgctgggagagcttcgcacagaggagagggaaccccgaattgtgtgcataaggctttgggcttcctaatgggctgtaattctgctcttggcaggayggctacgagcagcttaggcagctctcccagcacgccatgaagggggtcatccgtgtgaagtttgtcaatgacctcggggtggacgaagcagggattgatc

SEQ ID NO: 396814 - DNA, 201 bp, Homo sapiens; identical to SEQ ID NO: 87795

SEQ ID NO: 396815 - DNA, 201 bp, Homo sapiens
tgcagtgtggagtcaggcaaggaacccctggaatgcaaggaaacactgaggaggctgctgagtcatctagatttggccccccaccacctgcaagccagctrtgaggagggaggcagtgcagtgggtacaagattgtttttgtcacctgggtggtagcaagtgtcttcgagaagagtgtgactcatggagcttggggacctg

SEQ ID NO: 396816 - DNA, 201 bp, Homo sapiens
ctgctcgaggcatggggtccctggcagttacccttgcagcagaaaactaaaggcctggggaggaaatccccaaatttttcttttgttgtacctgagtgacrtccctgggtcctatctagttaaaaagactcattgctagggaacagcctgccccagcgtgacacctcagcctgaggaggatggggcggaggtgctgagagt

SEQ ID NO: 396817 - DNA, 201 bp, Homo sapiens
gctaaaacaagacaaatgattcaaagggaatagaaatcacccaaaatccttttcaagaggtggaatataaatttttaaaagtgtaattatgaacttaaaamcatgagaaacactagactagaagaagggagatcaagtaaggtgcagcttcatgaatttgaaatatctacctgagctgagataaagtggtttctggagagg

SEQ ID NO: 396818 - DNA, 201 bp, Homo sapiens
aacttgagtgaacatcctgtcagttttcctatctagaaatactgatccttttttacaaaattgaaatcctattattttgtattttgttccttccattcagytatggaccttatcaatgttttttcttcttcactgtcactttttgactagactgccatattttggagatgctaaaacaagacaaatgattcaaagggaata

SEQ ID NO: 396819 - DNA, 201 bp, Homo sapiens; identical to SEQ ID NO: 87727

SEQ ID NO: 396820 - DNA, 201 bp, Homo sapiens; identical to SEQ ID NO: 87728

SEQ ID NO: 396821 - DNA, 201 bp, Homo sapiens; identical to SEQ ID NO: 87729

SEQ ID NO: 396822 - DNA, 201 bp, Homo sapiens
tgattacctggcatttctgcgacacaggcaggtcctcaggtgagatctccagactttactgctggggcaggaagcgtaaatgattcagaagatggctaccrtttctctccaagccttttataagttggtgcaaaagtaattacgacttagtgtttttttaaaaaagttgaaacccacaattacttttgtaccaacctaata

SEQ ID NO: 396823 - DNA, 201 bp, Homo sapiens
cagactcgaatgctactcctaccccagcaggctgtgcacgtccaggctcgctgcttcatttcctcattggccaaaggagaaggaaagccttcagggttacrgagctctgtgtgtctcaagcctggcccactgtgggtgctcaaatgagagtcctactccccataaaaacccagtggccgcctctgggtgtagctgcctctc

SEQ ID NO: 396824 - DNA, 201 bp, Homo sapiens; identical to SEQ ID NO: 87730

SEQ ID NO: 396825 - DNA, 201 bp, Homo sapiens
ctccccataaaaacccagtggccgcctctgggtgtagctgcctctcatgatgcagtttgagcccgtgatgccaccttgtacaggaagctacacagtcctcrgcctccatgcttaagggaaagttggcccaagtcatggtctgccaccggccacagcaccggtgaggagggaggagtgcattcagaaatgtttgggcaccta

SEQ ID NO: 396826 - DNA, 201 bp, Homo sapiens
agcccgtgatgccaccttgtacaggaagctacacagtcctcggcctccatgcttaagggaaagttggcccaagtcatggtctgccaccggccacagcaccrgtgaggagggaggagtgcattcagaaatgtttgggcacctaacagtttttacagcattctactttttgtcaattggttaaccagtaattcgctgtgaacc

SEQ ID NO: 396827 - DNA, 201 bp, Homo sapiens
ttggggccagatccaccccgccactccatacggctggctagacagcagttacaacacggtaacagacagagcaaacacgtgctacacagctgcaagggccygtcctggaagagcaggagcctgccccgtccccactgaccctgctttgtgttgcagttcgtgaccagctgctccagacccccgctcctgggattcgcctac

SEQ ID NO: 396828 - DNA, 201 bp, Homo sapiens
aaccttaccttaggaaaatacagataagcaaaatactaaacaattgctgttcctccagtatggaattgtcaactctctacactcctactcaccagggactrtctctctatacccattttctcaatagcgtaagacacacatacacacccacagtgtcccaataaaacacacacaattgcttaggctgatatcaagatgtat

SEQ ID NO: 396829 - DNA, 201 bp, Homo sapiens
tggccttgataacatcttttttctttatttcctttcattatagaagtaaatgaccctctgcttggaaccttaccttaggaaaatacagataagcaaaataytaaacaattgctgttcctccagtatggaattgtcaactctctacactcctactcaccagggactatctctctatacccattttctcaatagcgtaagaca

SEQ ID NO: 396830 - DNA, 201 bp, Homo sapiens
tgaggtgggagaatcgcttgagcctgggaggtagaagctgcaatgaaccatgattgcaccactgcactccagcttggatgacagagcgagaccctgccttaaaaaaaaaaaaaagacttagacattctccctatagtatgtggcagagctagggactggctccaactctgtgtgactcccaaagcccgtgtgcccctcact

SEQ ID NO: 396831 - DNA, 201 bp, Homo sapiens
agttactgcagtgatagaggtgctgtgaataagaaagtcagggaaccgctgagataaattggaatgacttttaagtccagggtatatagtaatccccacattttttttttcttttgggaattttgcttaaatatgtcatcaaggttgtttgtccttagttcataaaatgtcctccctcaggaaaatggggccctcgtcatc

SEQ ID NO: 396832 - DNA, 201 bp, Homo sapiens
tgtgcaaacaatgtggctgtttaaattcttactgcacttggcaaactctcagaagtgaagggccttacggcaattacttaatcaaatgtgccttccttgarggagcccctgctatgatgtccctgaccttgcttccaatagaaaatgcacagctttgcaaaacaggctgttctgtggctttacttttccaaaagatagaac

SEQ ID NO: 396833 - DNA, 201 bp, Homo sapiens
taactgggctgattgtgcattttgtatagaatggcaatgtcatcaagcatctaaagaaatcatctcaatatgggagcctccgggggtcagtgctgtgtgctttaggctgctagcaaaagctgttcctttaggaaaaaacagttactggtgatttagataaaaacttagtatataatttagagctgctcttcagaaaagcac

SEQ ID NO: 396834 - DNA, 201 bp, Homo sapiens
agcccaggtctgtattgctttcaggaagcacacagtctactacggtggtttccatggaagtcacagagtcatcatctggctctgggatattctggcctccracttcacaccggatgagagagctatgtttctgaaggtattttatttattacctatgcatgcatgcatgtattctcataaacctggaaggccagttgatgt

SEQ ID NO: 396835 - DNA, 201 bp, Homo sapiens
aaacaggctgttctgtggctttacttttccaaaagatagaacattcttcctcatcatgaactgtgcttctctgtaacttctaccctttggtccttgaacarcccctaaaagtggcttcttttatcttctgtgatctgttggcagctcccgtttgcatgtggggcttgtgttttccaagtgtagtatccttagcctctccac

SEQ ID NO: 396836 - DNA, 201 bp, Homo sapiens
caccgcctgttccttgggagagtcctgtttcccaggaggaaggaaagctgcagcacaagcccagccagtctgtgtggccttcgcagtgggctccagagctkcagggaccctgcctgggtctcaggctctgctgagcttctggcccaagcacggaggaagcgagccacctgggcagcactcctcgcataccccaggaacctg

SEQ ID NO: 396837 - DNA, 201 bp, Homo sapiens
ggctgaagcaggagaatcgcttgaacctgggagcagaagttatagtgagctgaaattatgccgctgcactccaacctcagcgacagagtgagactatctcaaaaaaaaaaaaaaggaaaatgtcaaatataattttcagtagctctttaacattccatgacctctaagttattttgcttcccatcacagctgtaattcaac

SEQ ID NO: 396838 - DNA, 201 bp, Homo sapiens
aactcctaggctcaggtgatcctcccacgtcagcctcccaagtataatagctgggactacaggcgtgtactgccatgcctggctaattttttttttttttwaatttttgtagagatgggggccttaccttattgcccaggtttgtttccaattcctgacctcaagtgatcctcctacctcagcctcccaaagtgctggggt

SEQ ID NO: 396839 - DNA, 201 bp, Homo sapiens
gtaggcaacctcctacacttgggctccctcagccccagagtgttagaggaggagacagatgggttcgtgagtttgctcacccagacgctgtgctactgtcrgaagtatgtgtctcagaagaagtccaacctgacccactggcatcctgtccttggctggttctcccaatctgtggattatgggtgagtcccagatgcaaat

SEQ ID NO: 396840 - DNA, 201 bp, Homo sapiens
acatgtgctgtggtggtttgctgcacctgtcaccccgtcatctaggttttaagctctacatgcattaggtatttgtcctaaggctctccctcccctttccycctacccctgatgatatcatatcattttatctgtagattttacagtaagtatctctacaagataaagcttatttctcaacctcgtttattgtctagtaag

SEQ ID NO: 396841 - DNA, 201 bp, Homo sapiens
gtctccttgggctcgaacaatccacacgcctcagcctgcgagattacagacttgagataaaaacttccctggggccaaatttcatgaggagtttctggtgygaatgttcacacgagtgacgttgactaactggtgaacgttgaataacagcgacttcccacgacactcagatactcttcaaagaccatttcttatgttaac

SEQ ID NO: 396842 - DNA, 201 bp, Homo sapiens
tattttaccttcccaggagtagtgttgtgtgaggtctccagtttctccacatccttgccaatacttgttatctgtcttttttatttagccatcccagtggstgtacaggggtatctcactgttgttttgatttacaattccctggtagttagtgatgttgaacatcttttcatgtgcttattaaccatttgtgtatcttct

SEQ ID NO: 396843 - DNA, 201 bp, Homo sapiens
gggaaatcggtaataagaaattgagggagttgtaggagtgtttgcagtgtgtgtggttttttgagtctggcctcatgcggactaaaaagatcacacccctycaaacattgaggcagccctgcagtcctataatgcttccactgatacgtcgctcccagtcaggcaggcaggccaagttacttagggatatggcccaggatg

SEQ ID NO: 396844 - DNA, 201 bp, Homo sapiens
gagcccaggtctgtattgctttcaggaagcacacagtctactacggtggtttccatggaagtcacagagtcatcatctggctctgggatattctggcctcygacttcacaccggatgagagagctatgtttctgaaggtattttatttattacctatgcatgcatgcatgtattctcataaacctggaaggccagttgatg

SEQ ID NO: 396845 - DNA, 201 bp, Homo sapiens
tatgataccacacctataaaatttaaccctaagtctggatttttttcttctgcttctgccagaaaaaataacaagcttttctgaagtgagaagctgttctyagccacgagtcctgtgcaagatcactaatgattacctggcatttctgcgacacaggcaggtcctcaggtgagatctccagactttactgctggggcagga

SEQ ID NO: 396846 - DNA, 201 bp, Homo sapiens
agatgaccctgagtccactaaaagaagtgcactttgtattttcaagattgccaggaaactgctgttcctattcagaatcaaagaggataatgaggtaaaaygataatagcaaacatgtataatacttccatatgtcagatcttttataattattgatattaactcagttcttatagcagctttatgaggtaattactgtca

SEQ ID NO: 396847 - DNA, 201 bp, Homo sapiens
ttatttgtgagacaaggtcgtgctttgccatcaagggtggagtgcagtggcatgatcagagctcactgcagcctcaaactcccgggctcaagccatcctcycacctcagccttccatgtagctaggactacaggcacatgcccagctaatttttttatttttaaaatttttgtagagacagggtctcactatattgcccag

SEQ ID NO: 396848 - DNA, 201 bp, Homo sapiens
gccccctgcacaggtgggcatacctgttgtgctcggcactccgtcctcccctttgcctatgctggccttgataacatcttttttctttatttcctttcatyatagaagtaaatgaccctctgcttggaaccttaccttaggaaaatacagataagcaaaatactaaacaattgctgttcctccagtatggaattgtcaact

SEQ ID NO: 396849 - DNA, 201 bp, Homo sapiens
ggtaaaacgataatagcaaacatgtataatacttccatatgtcagatcttttataattattgatattaactcagttcttatagcagctttatgaggtaatyactgtcaccctcacatcctgtcccttttgttttcttgggacctgttttggagggattatgcccagtgcttttaggaatcttttcacattgaccattataa

SEQ ID NO: 396850 - DNA, 201 bp, Homo sapiens
actaaatcctgaaatatgaatagctaacattcatgggccacacattgttctaaaacttttacacgtattaactgactcctcaccacattctcttatctccrttttatttatttatttgtgagacaaggtcgtgctttgccatcaagggtggagtgcagtggcatgatcagagctcactgcagcctcaaactcccgggctca

SEQ ID NO: 396851 - DNA, 201 bp, Homo sapiens
gaaagtaaaatggcttctctgcttatttccacacctccctttaattgttctttgggaccagtggccgtgatagacacatttgtgttagtagcccaaagaastgggttcttgtctgtccattttcttcttggtgtttgctagcacatcctccataaccacgggtgatctgcaagtgatcaagttcactctctacaggaaact

SEQ ID NO: 396852 - DNA, 201 bp, Homo sapiens
tctataaaatcgtcagtggtgtgccaagatgtgatcactaaatcctgaaatatgaatagctaacattcatgggccacacattgttctaaaacttttacacrtattaactgactcctcaccacattctcttatctccgttttatttatttatttgtgagacaaggtcgtgctttgccatcaagggtggagtgcagtggcatg

SEQ ID NO: 396853 - DNA, 201 bp, Homo sapiens
tgcctctagaggctagaccctcacacagaagaacaggatgtaaccggttatgctatcattagttatggaagtataactatttatctaataaacaattgtgscttcatttcatacttctagggaagttatgtgagttgtatttaatgagccctaatgtctaggtacaaacaggttttcccagaagcctaagaaacagattca

SEQ ID NO: 396854 - DNA, 201 bp, Homo sapiens
gatgacacactagtgggaggcagcatgagtgattttgtctgagaggtactcaggccctgcagacacttagcacttacccagggtgccttttaattctgtcrgttccacatataattcagagcgagggagatcaaggacttgatgacaactgcggaagacaagagctgtcctccccttgctctctggctctgactcctcctc

SEQ ID NO: 396855 - DNA, 201 bp, Homo sapiens
acttttcataggaagagcttgatgcctgctgtcctcttcttccttcccctgccttgtctcacttgtgggtcaggtaaagggaggacagtggtgctgggatyccttgaatgctctacatttttggctgcaagggtaatccagtcttttgacatttaaactctggaaggagacctcagggcttgttccctcagattccttctt

SEQ ID NO: 396856 - DNA, 201 bp, Homo sapiens
gtggggaagagccttgacttccctcttggtggttgtctgctgtgcccactgtgcaaggcccttatctagtccatatctcagcaaggcaggcagctggaccsctcagagccaagtgaggagggccccacagttctcacggcaggagaaccagccagccccagagagactgcccacggactcagccctctctcggcagcccct

SEQ ID NO: 396857 - DNA, 201 bp, Homo sapiens
ctggtcatcttgttttctagggattctcaattctccattcccaagaataatggaatcccatgattccattatcaggcactagagtgccacattccctgttrtttaactcctggagtggtcattgcccaagagaaaaagaattaagactgacttataatcctgactcagtgattccaggctgagtgcccatagagcagttgt

SEQ ID NO: 396858 - DNA, 201 bp, Homo sapiens
cactatagtcttgacctcccaagtctcaaacgattcttctgcctcagcctcctcagtagctgggactgcaggtgtgtgccaccatgcacagcaagtttttrtattttttgtagagatagggttttaccttattgcccaggcttgtctcaaactcctgggctcaagtgatccacctgcctcagcatcccaaagtgctgggat

SEQ ID NO: 396859 - DNA, 201 bp, Homo sapiens
cttacacttggtgaaacaatgaactgtcatcaaaattagaacagcagccaacattacatggagttatctatgtgccagacactgttcttagtgcatcataygcattaatccatttatttctcacaacaaccctatgaggaaagcagtgttactatttctggtcaacagatgaggaaaccgaggcacagaaaggttaagaaa

SEQ ID NO: 396860 - DNA, 201 bp, Homo sapiens
ttcagtgctgttttccaagaagcagagcgtgggctctggaatcgcagagatgtgtgagcaaaccccaaccctccacttcctgccccacgtggagggcagcytccctgtgtgttccttatctagaacacaggaatcttgatgtcccctccagagcacgtgaggattaaatgcagttacatatgacgcacccagcgcagcacc

SEQ ID NO: 396861 - DNA, 201 bp, Homo sapiens
catccatgagaattacctgcagctcttcgagtttgtggggaagatgctggggaaggctgtgtatgaggtaggaacgttaagaaacagagaaatgtaaaataaaatgttaacggtaccatgggcttcttcacatacacatatgtgatcaggcttggccatgtaaactgtcactaggatacaagcgaggacaggggcaggaac

SEQ ID NO: 396862 - DNA, 201 bp, Homo sapiens
ttttgtgactcttactttaattatgaagtagaatttacttttaaaaagtttctgttttctgagtaaagaagcaaaaaagatagggttgcaaaaaaaaaagraaaaagaaaaccacttttaattccataatccaaaaacagtcaactgtgcctgagtgtactgcacatataaaataaatatatttaaattgaaatatacagc

SEQ ID NO: 396863 - DNA, 201 bp, Homo sapiens
ggctcttgatggctctaaaaagttgtaggattttttgtttttgtagctaacttatggattgagatgtgatcaaaggctttattaaatttgtacttcagcawatgatggctgcgttctgcatttcattccgccatatgcctggaccgttcacacttgggtatctgggcttagggagcatgtaggcttccacaatggagggaa

SEQ ID NO: 396864 - DNA, 201 bp, Homo sapiens
ccctgcctgggtctcaggctctgctgagcttctggcccaagcacggaggaagcgagccacctgggcagcactcctcgcataccccaggaacctggagaagycagatgctttccaaacagaaagagccagcagctgggccaagctgagagggaggtctcagggccaaactcctttcactctcgaataatccattgttctctc

SEQ ID NO: 396865 - DNA, 201 bp, Homo sapiens
tctcctgcctcagcctcccgagtagctgggactacaggtgctcgccaccacgcccagctaattttttgtatttttagtggagacggggtttcaccgtgttmgccaggatggtctcgatctcctgacctcatgatccgcccgcctaggcctcccaaagtgctgggattacaggcgtgagccaccgcgactggcccatcccct

SEQ ID NO: 396866 - DNA, 201 bp, Homo sapiens
cccaagcacggaggaagcgagccacctgggcagcactcctcgcataccccaggaacctggagaagccagatgctttccaaacagaaagagccagcagctgrgccaagctgagagggaggtctcagggccaaactcctttcactctcgaataatccattgttctctctgtctggaaacagtctatgtgcaccggcctcagtc

SEQ ID NO: 396867 - DNA, 201 bp, Homo sapiens
tttttgtatttttagtggagacggggtttcaccgtgttagccaggatggtctcgatctcctgacctcatgatccgcccgcctaggcctcccaaagtgctgkgattacaggcgtgagccaccgcgactggcccatcccctttcttcttaaggggctgttggtcattgctttttttgttacaatcatatttgcctaatagagt

SEQ ID NO: 396868 - DNA, 201 bp, Homo sapiens
aataaaacatgttagaataggaatagatcttgttaatactctttttaaaactttttttgatgcccgacacacataaactgtctttggatggtctcaggaayctcagaaccatttataacagacccaaaccctcaaattgcccctgagttttggaggacagcttgatgatgtaagtgacaagcccctgtatcccctagagaa

SEQ ID NO: 396869 - DNA, 201 bp, Homo sapiens
ggcatgtgccaccacgcccagctaattctatatttttagtagagttggggtttctccctgttggtcaggctggtctcgaactcccgacctcaggtgatccrcctgcctcggcctctcaaagtgctgggattacaggcgtgagccactgtgcccagctgttactgttcttatttgtatttaataaagttcttgactttgggg

SEQ ID NO: 396870 - DNA, 201 bp, Homo sapiens
tcactctccccacataggcactggctgctaagtagagcgcccagaggaggtaggtgggagcaggctgtgctggagggagagtcctgtcctgctgggaaacytcctatgtggaaacttgtttcacagattcttagcatttatagcataaagcctcaggtcagggtaaggatactcagttctgcatactaactcaaaaggcct

SEQ ID NO: 396871 - DNA, 201 bp, Homo sapiens
tgagccggcctaaattgggatgcacagatacttctgtgtctgtccccttattcttaaaacaggactaaccacagccccgacacacagcatccgtagagtgmttggatgaggttgcattcagggaatgctcgtcacagtgtggaaacacaaaaatgcttcctgcattgatgctgctatggtttttataaataaaacatgtta

SEQ ID NO: 396872 - DNA, 201 bp, Homo sapiens
tgaggcaggagaatcgcttgaacctgggaggtggaggttgcagtgagccaagatcgcaccagcgcactccagcctgggcgacagagtgagactccgtctcaaaaaaaaaaaaaaattgatttgcaaaataagaattgaccatttattttttgcagtagcacttctaaggtcagaggcacccaggccacggtgttcttagga

SEQ ID NO: 396873 - DNA, 201 bp, Homo sapiens
ttttcataatgattgaaatacaccggccttgctccttggccacagggcattagtttgaaaacttagaaggaacaaagtgcagattgggagggactgcctgsaagagtagagagggcccagccagggccagagagagagcatggtgagtcctgcccctgcctgccatgtaacctgtagccattcctttaggggggtgcttgt

SEQ ID NO: 396874 - DNA, 201 bp, Homo sapiens
gtccccttattcttaaaacaggactaaccacagccccgacacacagcatccgtagagtgattggatgaggttgcattcagggaatgctcgtcacagtgtgraaacacaaaaatgcttcctgcattgatgctgctatggtttttataaataaaacatgttagaataggaatagatcttgttaatactctttttaaaactttt

SEQ ID NO: 396875 - DNA, 201 bp, Homo sapiens
ttgtataaaacagtgttcttgagaagacaccgtgatgaattcaaatgccacagacggaggtccttagacatgggaattggagagactctgaggcccagcamctattgtcacagataaagggctctgcagaatctatcataaatgtcatcctttttggtccctagaagcaaaacctctcagtgcatggtctccactcggccc

SEQ ID NO: 396876 - DNA, 201 bp, Homo sapiens
cccagttatggtgtctgtaaaagttgtaaatgttcaaaatattcccctaatgccattgcattgttttttgttactgacatcagcagtgtgtaagtatttcytaggacgctgaatggcacacacgcttctctgtgtatgtgttatatatgtgtatatttctctaaaaatgggatcctatcatttcccaccagccttcctact

SEQ ID NO: 396877 - DNA, 201 bp, Homo sapiens
cacctgcacttggatttttacatttgcattcagcatacctggtgtcctcctcagaaacacttttcataggaagagcttgatgcctgctgtcctcttcttcyttcccctgccttgtctcacttgtgggtcaggtaaagggaggacagtggtgctgggatcccttgaatgctctacatttttggctgcaagggtaatccagtc

SEQ ID NO: 396878 - DNA, 201 bp, Homo sapiens
tggcagttgtataaaacagtgttcttgagaagacaccgtgatgaattcaaatgccacagacggaggtccttagacatgggaattggagagactctgaggcscagcaactattgtcacagataaagggctctgcagaatctatcataaatgtcatcctttttggtccctagaagcaaaacctctcagtgcatggtctccact

SEQ ID NO: 396879 - DNA, 201 bp, Homo sapiens; identical to SEQ ID NO: 87740

SEQ ID NO: 396880 - DNA, 201 bp, Homo sapiens
tatttcagccttgactttttatgagaaaggatggttcccaagcatgtgccatcttaattccatcattatcatggatgtttgtgctgggccctctcatctcygggaagctttatttccccattagagtcctccctattaattactcccatcttctcccccagcttgtttgccatgaactgattcctggagggaagaccattc

SEQ ID NO: 396881 - DNA, 201 bp, Homo sapiens
ctgacagtaattgtgctgacgagagaagatgggacctgctaggccctgcatgaggagtggcatggattaactcatttaccccttacggtcctctgacaggygtcatcaagtccgagtgactgtcccctctcagcctctccagtccacatgtctctctccaccctcctgccgctaccctggcacagtctgtcggcgttttcc

SEQ ID NO: 396882 - DNA, 201 bp, Homo sapiens
gtatgtcattttcacctgtagactttagtctgtattttcagagtcactatcaacgagagttgctagttgagccactgttctggaagagaggaattttgatkctgttatcaatatgagccctcctttggtgtgtgttggacccttaaactgcttgccacgccacagcctccatggcagggaatctgtcactttccttcccat

SEQ ID NO: 396883 - DNA, 201 bp, Homo sapiens
cccagcctcacactagaggatggtttccttcttttaattctcccaaacccatgtctttcttctcaagggatctcaaacctagcgtgctcttccaagaactygacagggacagaaaacgggcacagttgatcctgcagtacatcccacatgtcatccctcacaaaaacgtgagttgcactcagagctgggccccgatgtgtc

SEQ ID NO: 396884 - DNA, 201 bp, Homo sapiens
gctcatggagctcatagcccagcaagagagggaggactatgcaggcagtgaacacatgattacatagatgaggacagataagctggaggaggtgaacctcrtcttacagagaaggaaactgcagctcagggtggtagggcagcttgcccaatatcacatggtttaagggcggatccaggattggtatagccaaaatggaac

SEQ ID NO: 396885 - DNA, 201 bp, Homo sapiens
ggcccttgggaggaaacaggacgggcaagatctctacgctcatggagctcatagcccagcaagagagggaggactatgcaggcagtgaacacatgattacrtagatgaggacagataagctggaggaggtgaacctcgtcttacagagaaggaaactgcagctcagggtggtagggcagcttgcccaatatcacatggttt

SEQ ID NO: 396886 - DNA, 201 bp, Homo sapiens
aggagagaaggggcaagaccatacctggggtaccccagcgcctgagggtttgagcagcatcttgagtgagaggagtttggggttgtggtttgtgtccagctttttttttttttttcgagacggagtctcactctgtcgcccaggctgtagtgcagtagcgcaatctcggctcaactgcaggctccgcctcccaggttcacg

SEQ ID NO: 396887 - DNA, 201 bp, Homo sapiens
gcttttagggcacccatcacccgaatggtgaacattgtaccaataaataattgttcaatccttacccctgtcccatctcccaccttttggagtctccattrtcttattccactctgtttgtccatgtgggcccattgttttgctcccacttctaagtgaggtcatgcagtatttgcctttcagtttcagagttatttcact

SEQ ID NO: 396888 - DNA, 201 bp, Homo sapiens
aatgtttattttaataatttttaaatttctttgtatggatgtagggggtacaggtttcttatatgcatatattgtgtaatggtggagtctgggcttttagkgcacccatcacccgaatggtgaacattgtaccaataaataattgttcaatccttacccctgtcccatctcccaccttttggagtctccattatcttattc

SEQ ID NO: 396889 - DNA, 201 bp, Homo sapiens
actgacagaccaggtctcctctgctctctcctagccttaacgagtcaatgcacttgatcaccaaacagctgcagttcttgtggggggtgcctctgatccgsatcttcttctgtgacatcctgagcaagaagctactggagagccaggagccagcccacgcacagccagcatcccctcagaatgtgctcccagtgaagagtg

SEQ ID NO: 396890 - DNA, 201 bp, Homo sapiens
cgggaggcggagcttgcagtgagccaatatcgcgccactgcactccagcctgggcgacagagcaagactccgtctcaaaaaaaaaaaaaaaaatgtcaaayatggccgggcacagtggctcacacctgtaaccccaactgagatagggtatggtggcacacacctgtaatcccagctacttgggaggctgaagcaggagaa

SEQ ID NO: 396891 - DNA, 201 bp, Homo sapiens; identical to SEQ ID NO: 87800

SEQ ID NO: 396892 - DNA, 201 bp, Homo sapiens
gccgtgggaactacagatgaattaagttcagctattgggtaagggggacaggattggccttgaggttgcgtttgagtcgagtatgagtaaacgtaatgaaygtgaagctctcacgcatgctgggcagcagcctcggaggttgtcagcccttattgaactttcctcagccctgaagcacaggctggtcagctccacaaggct

SEQ ID NO: 396893 - DNA, 201 bp, Homo sapiens
ggtgctcagtgtttgcaaaacagagctgaaaacggactttgggaggccgaggcaggcagatcacctgaggtcaggagtttgagaccagcctggtcaacatrgtaaaaccccatttctgctaaaaaaaaaaaaaaaaaaaaaaaattagctgggcatggtggcgggtgcctgtaatcccagctattcaggaggctgaggcag

SEQ ID NO: 396894 - DNA, 201 bp, Homo sapiens; identical to SEQ ID NO: 87802

SEQ ID NO: 396895 - DNA, 201 bp, Homo sapiens; identical to SEQ ID NO: 87803

SEQ ID NO: 396896 - DNA, 201 bp, Homo sapiens
taagcagtaaggggtaagtgctgcctctgaggttacaagcagcaagctgggaccctctgaaggagctgaccctctgtgtaagccatccccactcaccagayactgatgtttatttctcattaggccacagccttcctcgaagacacccaggatccccaagatttacaccaaaacgggagacaaaggtagggtggggacagg

SEQ ID NO: 396897 - DNA, 201 bp, Homo sapiens; identical to SEQ ID NO: 87804

SEQ ID NO: 396898 - DNA, 201 bp, Homo sapiens; identical to SEQ ID NO: 87805

SEQ ID NO: 396899 - DNA, 201 bp, Homo sapiens; identical to SEQ ID NO: 87806

SEQ ID NO: 396900 - DNA, 201 bp, Homo sapiens; identical to SEQ ID NO: 87807

SEQ ID NO: 396901 - DNA, 201 bp, Homo sapiens; identical to SEQ ID NO: 87809

SEQ ID NO: 396902 - DNA, 201 bp, Homo sapiens
ttgaactcgggaggcagaggttgcagtgagccaagatcatgccactgcactccagcctgggtgacagagcaagactccatctcagaaaaaaaaaaagtctmagaaaaaaaaagtatgatatttgacagatctcaaaatatgttacaaaaatgtaatgtgaaatgaaaaacacccaagagatattaaatgacaaaagcctga

SEQ ID NO: 396903 - DNA, 201 bp, Homo sapiens
tgggagtttgaggcaggagtattgcttgagctcaggagttcaaaaccagcctgagcaacatggtgaaacccgtctctaccaaaaaaaaaaaaaaaaaaaaattagctgggtgtggtggtatacacccgtgctcccagctgctcgggaggctgaggtgggaggattgcttgagcctgggaggcagaggttgcagtgagccta

SEQ ID NO: 396904 - DNA, 201 bp, Homo sapiens
gacgggaacctggcggggtcaggtcccgtcaagcagcctggctcatggctgtgtgcggcctggggagccgtcttggcctggggagccgtcttggcctgcgmgggtgcttcggcgccgccaggctcctgtatccccgtttccagagccgcggccctcagggcgtggaagacggggacaggtgagtggctggcgggaagggca

SEQ ID NO: 396905 - DNA, 201 bp, Homo sapiens
aacccgtctctaccaaaaaaaaaaaaaaaaaaaaattagctgggtgtggtggtatacacccgtgctcccagctgctcgggaggctgaggtgggaggattgyttgagcctgggaggcagaggttgcagtgagcctagatcgtgcaactgcatttcagcctgggtgacagagtgagaccccatctcaaaataataataataat

SEQ ID NO: 396906 - DNA, 201 bp, Homo sapiens
tggccagctgccctctctgtaggctcttagcacacctggtttctcctccttgcactcacccagaaagcttgtgtccagtgactgaagcctggccacatccyaggcccgcttgataccaatgttgggtaagctgaggtccactttcccattgctgtggggttgaagccggaggaatgttctcaagttcaaggatacagccag

SEQ ID NO: 396907 - DNA, 201 bp, Homo sapiens
ggacgggaacctggcggggtcaggtcccgtcaagcagcctggctcatggctgtgtgcggcctggggagccgtcttggcctggggagccgtcttggcctgcrcgggtgcttcggcgccgccaggctcctgtatccccgtttccagagccgcggccctcagggcgtggaagacggggacaggtgagtggctggcgggaagggc

SEQ ID NO: 396908 - DNA, 201 bp, Homo sapiens; identical to SEQ ID NO: 87812

SEQ ID NO: 396909 - DNA, 201 bp, Homo sapiens
cagtgacagacgctgtcctccagttccccaagtccctccaggtcctcaccggtccctcccagccctgcccactctggagcagcgtgcccggtgggtgtgcygtggcagggctcctggaggcagaacactgcccggtttggggggcagggctggacttcagaggagctcctgtccgcagtgggcacacctttcccaccctgc

SEQ ID NO: 396910 - DNA, 201 bp, Homo sapiens
tccctccaggtcctcaccggtccctcccagccctgcccactctggagcagcgtgcccggtgggtgtgccgtggcagggctcctggaggcagaacactgccyggtttggggggcagggctggacttcagaggagctcctgtccgcagtgggcacacctttcccaccctgctcaggcaatgtccctttctcctttcagtcggg

SEQ ID NO: 396911 - DNA, 201 bp, Homo sapiens
caacagcccacagagatccaatgcattgttttacacctataaattttaaaaaaataaaatgagtgaagctaattttatgaggtcagggtagaaaacacccrggaaatagctggcccctggctcccttggggacagcccagaatacctggccagctgccctctctgtaggctcttagcacacctggtttctcctccttgcac

SEQ ID NO: 396912 - DNA, 201 bp, Homo sapiens
ccatccagccacacatcaacagaccttgtctgggcccctccactgtgccagacggggaccaggacagaccaagtccctgtcctcagagcaccatgttgtgragtggagacagtgacatgtgaccaaatagactatcagacaacacaattgcaccttgtttgtgagccctgtattctgagaacagcaggaagttattgctgg

SEQ ID NO: 396913 - DNA, 201 bp, Homo sapiens
tttccacagggttttctagtaccttcacaggagaaaggagacccaaagatgaccaagtgtttgaagccgtgggaactacagatgaattaagttcagctatygggtaagggggacaggattggccttgaggttgcgtttgagtcgagtatgagtaaacgtaatgaatgtgaagctctcacgcatgctgggcagcagcctcgg

SEQ ID NO: 396914 - DNA, 201 bp, Homo sapiens
tgaaaggcctgcatggctgtggggagcccaggtggacgttgtcagcagactagccaccacctcctccaaagctactgacagccttttcaaggaatctttaraagaaaatgagcaaagtctctatctacaccactcagagaccaggctgccagccagctttacagagaagagaaagcaagccctactttgatccaatggact

SEQ ID NO: 396915 - DNA, 201 bp, Homo sapiens; identical to SEQ ID NO: 87815

SEQ ID NO: 396916 - DNA, 201 bp, Homo sapiens
cacacacctggggcacctcgggtgaggaagctcctcgctgagcatgcggtgcccactagagacagcctggagctctgtgacaggcctgggtgcacaccctsctgggccgctagccgggtgcatggctttgggtggggatgagaaccctgaggctgggctttgggtagctggcttgccaacaaggggtatgccacagggtga

SEQ ID NO: 396917 - DNA, 201 bp, Homo sapiens
cccaggctggagtgcagtggcacgatctcagctcactgcaacctcctgggttcaagcaattcttatgcctcagcctcgcgaatagctgggactacaggcaygcatcaccatgcccaactaattttttctgtttttagtagagacggggatttgccatgttggccaggctagtctcgaactcctggcctcaagtgatctgcc

SEQ ID NO: 396918 - DNA, 201 bp, Homo sapiens
tccttcattcccttagtgtttatgaacatctgctctgtgccaggcaccacgccgggcacaggggaggcagtggtgaacaaggtgggccctgtgcctgtccygataagatttagatcttattgggagaggctgctgtaaaaaccaggaagaaaaacctaagtgcaaagtggcattgcgggggcaaagggcgttcttagaggc

SEQ ID NO: 396919 - DNA, 201 bp, Homo sapiens
gccgggcatggtggtacacacttgtaatcccagctacttgggagactgaggcatgagaatcacttgaacctgggagggggaggctgcagtgagccaagatmacgccgctgtactccagcctggatgacagagtgactgttcaaaaaagagaaagttctttaaaatctttgaaagtttaaaaaaaaaaaaacagcatatcag

SEQ ID NO: 396920 - DNA, 201 bp, Homo sapiens
tgtttgcttctctctctctgcccctccagactcagtgactatctcttcacgctagccagatatgcagccatgaaggaggggaatcaagagaaaatatacawgaaaaatgacccatcggccgagtctgagggactctgaaatcacagaaagtgggagcttggaggatccctccatggcgatggccgtggagagaggagcttg

SEQ ID NO: 396921 - DNA, 201 bp, Homo sapiens
atgcaggccccagtgagccaggctagcccagggagggcttcctctgcctcgcggccggcccatgaggctggagccacacctggcccaaagcctgctctgckggttcctgccccagccctggcttctgtggcatcagtgtgggcaaggccagagcctgggggcaggtagagagctgggggagcaggtctgcaccccaggagc

SEQ ID NO: 396922 - DNA, 201 bp, Homo sapiens
cagggagacggcaccttggctggtgtcacgcagagaggaagaagtccaacttggatttgaactcggatctgcctgtctccagcatgctccctgtgggcagmggcaaagccaagacaaggaccctactcttcaggtccccgtggggtggccgccctggcacagttggcagtgagggcgtgactggcaatcaagtgggtcagg

SEQ ID NO: 396923 - DNA, 201 bp, Homo sapiens
cacccaaactgatcacgcacctgagccctgatcactcaaaggtgcaaaaaccggctcagagaggagtccaaagtcatctgccccatggggtagggccgggrcaatggcctcatcctgcaggaatggccccagccttgacactggagtagagtccttggcattcacagcagctggcctcgtgtgccatccatcaagtgcaag

SEQ ID NO: 396924 - DNA, 201 bp, Homo sapiens
ccaggtccccagaaaccgctccccgcagggtcagcccttcccacttccgttctgaagcccaggctggagcctgctcaggcccctgggaacagacggagggkagtaggtggggctgccacaggctgtggctgcaggaggaagcctcagctgccagaacattctgtgtggtggaggaaggctttcaacctcctgaggagccgc

SEQ ID NO: 396925 - DNA, 201 bp, Homo sapiens
agggccggggcaatggcctcatcctgcaggaatggccccagccttgacactggagtagagtccttggcattcacagcagctggcctcgtgtgccatccatyaagtgcaagatggctgggcccccgccctccctgcacaatgtgcccagagtgcgtcatttatatctcctccttgtaggcggatatgggaagacccagttag

SEQ ID NO: 396926 - DNA, 201 bp, Homo sapiens
ctcccgggttcaagcgagtctcctcattattactattcttaacacttacctgttcctggctaccatttctccatggcgggcctgactaggtgagattttcrggacagataatgggaggtacagatagtcagccagccgggtagagaaggcaaacaaaccccttggtgtgtgtgggagggggtccagaagagggcagacaca

SEQ ID NO: 396927 - DNA, 201 bp, Homo sapiens
ccgccccgctccttccgttaaaccaatgggaaacaagtccctgggagtgtcccgccctggggtgagaactgcgaaccaataaaaattgaaacctgagcggyggcgcggccagctgtgggtggagtcaccccgcggactggacgggaacctggcggggtcaggtcccgtcaagcagcctggctcatggctgtgtgcggcctg

SEQ ID NO: 396928 - DNA, 201 bp, Homo sapiens; identical to SEQ ID NO: 87808

SEQ ID NO: 396929 - DNA, 201 bp, Homo sapiens
ccaggtccagtggtacaaaagctggctggctggggtgtggtgtaggccaggtggctccctcaactcaccagccatccttgatccctccttggccaggccgycctgcgatgtgctggtggaaagggggccgatggcctgtttaaacccacctgtgatggatttgtcatctccactgccggccgagcctgtgcaggttcaggt

SEQ ID NO: 396930 - DNA, 201 bp, Homo sapiens
acaacagcccacagagatccaatgcattgttttacacctataaattttaaaaaaataaaatgagtgaagctaattttatgaggtcagggtagaaaacaccygggaaatagctggcccctggctcccttggggacagcccagaatacctggccagctgccctctctgtaggctcttagcacacctggtttctcctccttgca

SEQ ID NO: 396931 - DNA, 201 bp, Homo sapiens
cgacagcccattcagttttatgatcgccctgtcccagtgatcactactgaacctttaagaatccagatgcatttcaagtttaattgaataaaattctttgyataataaattccgcatgaatgctacataaatcagtgcctggaaggatttgtggctcatccctcccctctggcggggcctgagaatcttctggcaatactg

SEQ ID NO: 396932 - DNA, 201 bp, Homo sapiens
ctttctggccagctcacctttacaaatcactcgctgagcctcaggtcacattctcaagggactgggaaatggaattgggcatgcgtgtgttaggaaacttygggcactggttaagtactgggtaaatgtgtgttgaatggattaatgatatactcaaatggccaagtcatggcatcattgagaacccaggtatttcagagc

SEQ ID NO: 396933 - DNA, 201 bp, Homo sapiens
ctcgacaccttccgacagcccattcagttttatgatcgccctgtcccagtgatcactactgaacctttaagaatccagatgcatttcaagtttaattgaayaaaattctttgtataataaattccgcatgaatgctacataaatcagtgcctggaaggatttgtggctcatccctcccctctggcggggcctgagaatctt

SEQ ID NO: 396934 - DNA, 201 bp, Homo sapiens
cttgatccctccttggccaggccgtcctgcgatgtgctggtggaaagggggccgatggcctgtttaaacccacctgtgatggatttgtcatctccactgcyggccgagcctgtgcaggttcaggttgagcggtggcaggatgtgaaatgctgctcaaggtttaggcccaggtcagagcctgttgagccccataatgtcacg

SEQ ID NO: 396935 - DNA, 201 bp, Homo sapiens
cacacctggtttctcctccttgcactcacccagaaagcttgtgtccagtgactgaagcctggccacatcccaggcccgcttgataccaatgttgggtaagytgaggtccactttcccattgctgtggggttgaagccggaggaatgttctcaagttcaaggatacagccagtgctacctatagaataaatgacaaaagcaa

SEQ ID NO: 396936 - DNA, 201 bp, Homo sapiens
gattccatgtttcaccctgaggacagtgcctagcacaagtaaaaataatgttagctattatcactcttcttttttttttttttccgagacggagtttcgcrcttgttgcccagactggagtgcaatggtgtgatctcggctcactgcaacctctgcctcccgggttcaagcgagtctcctcattattactattcttaacac

SEQ ID NO: 396937 - DNA, 201 bp, Homo sapiens
ctggggtgtggtgtaggccaggtggctccctcaactcaccagccatccttgatccctccttggccaggccgtcctgcgatgtgctggtggaaagggggccratggcctgtttaaacccacctgtgatggatttgtcatctccactgccggccgagcctgtgcaggttcaggttgagcggtggcaggatgtgaaatgctgct

SEQ ID NO: 396938 - DNA, 201 bp, Homo sapiens
ttcaaatcccttctcttcaccttctctttatgcatgggaggctgaccttatcacctggtggctgtgccacctcgattcgttggtcttctggcattcaggtrggtccagccagtgggaggcaccagtaggtgataggagagtgagtgcagagagctcatgagtgtgtgtgaccctgttccccagtggtgcatggctctggtg

SEQ ID NO: 396939 - DNA, 201 bp, Homo sapiens
cccaggtccagtggtacaaaagctggctggctggggtgtggtgtaggccaggtggctccctcaactcaccagccatccttgatccctccttggccaggccrtcctgcgatgtgctggtggaaagggggccgatggcctgtttaaacccacctgtgatggatttgtcatctccactgccggccgagcctgtgcaggttcagg

SEQ ID NO: 396940 - DNA, 201 bp, Homo sapiens
aatccctgcagcgcgccactgtctcctgctggggcactgactggtgcaggagggaagtgcagggttctgagggaggcagagccagggtcctgacctgtgtyggggggcagtttgctttctctgccttatgagggaagtcctccccagccttcaaagtctcccctccagcatcacctcctccaggaagccctccctgcctct

SEQ ID NO: 396941 - DNA, 201 bp, Homo sapiens
gtaacaccatctcacccaagctgggaatcttcagccccggtggccatcacgggactcagcatccagccaccagttactctttgtgtcacctggggctagtyactctccctctgtgagctccatttcttcatctgtaaaatgcggacaggccaggtatggtggctcacacctgcaatctcagctacttgggagactgaggca

SEQ ID NO: 396942 - DNA, 201 bp, Homo sapiens
gcccatctcacatagatcttgactgtcactttctgtcgccccccagatccagtgcacattgcaggacgtcggctcggccctggcgacaccatgctcctcgrcccgggaggctcacttaagtaattctcaaactcctgtgggtgttcagagggccctagggtcaggggactctcctagggtcaccatctgggatcccaggcc

SEQ ID NO: 396943 - DNA, 201 bp, Homo sapiens
gccatcacgggactcagcatccagccaccagttactctttgtgtcacctggggctagttactctccctctgtgagctccatttcttcatctgtaaaatgcrgacaggccaggtatggtggctcacacctgcaatctcagctacttgggagactgaggcaggaagatcacttgaggccaggagcctaggtaacataataaga

SEQ ID NO: 396944 - DNA, 201 bp, Homo sapiens
gatgggctggatattctccattggccctttcaaatcccttctcttcaccttctctttatgcatgggaggctgaccttatcacctggtggctgtgccacctmgattcgttggtcttctggcattcaggtgggtccagccagtgggaggcaccagtaggtgataggagagtgagtgcagagagctcatgagtgtgtgtgaccc

SEQ ID NO: 396945 - DNA, 201 bp, Homo sapiens
tgtgagggcggggacagtgtctggttcacctgggagccccgcctggcctggtagccgctcgcagggcctgtggatgaggccgggcagcaatgccactgctytcctcatatcacccatttcaccctcacagacacccgtgaggtggaagttaatgtccacagcttatagggagccaaactgagcctcagaaaggctgacttg

SEQ ID NO: 396946 - DNA, 201 bp, Homo sapiens
ctcccacccagccttggcactgtgagggcggggacagtgtctggttcacctgggagccccgcctggcctggtagccgctcgcagggcctgtggatgaggcygggcagcaatgccactgctttcctcatatcacccatttcaccctcacagacacccgtgaggtggaagttaatgtccacagcttatagggagccaaactga

SEQ ID NO: 396947 - DNA, 201 bp, Homo sapiens
tggcgacaccatgctcctcggcccgggaggctcacttaagtaattctcaaactcctgtgggtgttcagagggccctagggtcaggggactctcctagggtmaccatctgggatcccaggcccccagggacccacgggtgggtcagttagccttgctcgtagctcctgggagggaaggtaccttctgagccagtggaagcag

SEQ ID NO: 396948 - DNA, 201 bp, Homo sapiens
aggcccaggtcagagcctgttgagccccataatgtcacgtgactcagtgtctcctccctttctagtgtggtgcctcttgtccagatgggagagaccgatgygaacgtggccaagttcttaaacaggtactcgcgtggaacctgggggttcctctctgaaagccgaggctcatctgtgggaagtagcagcggtgcagcggtc

SEQ ID NO: 396949 - DNA, 201 bp, Homo sapiens; identical to SEQ ID NO: 87818

SEQ ID NO: 396950 - DNA, 201 bp, Homo sapiens
cagactgcaaaagagccacaccaggtccccctcagcagggctgggtgtccaacgaagatgttgtgctgaaagttcagagtttgctttcaaatgtcagccarttcaaggtctgatagcctgtattagtctgttctcgcactgctataaagaactacctgagaccggataatttataaagaaaagaagtttaatctgcacatg

SEQ ID NO: 396951 - DNA, 201 bp, Homo sapiens; identical to SEQ ID NO: 87819

SEQ ID NO: 396952 - DNA, 201 bp, Homo sapiens
cacatgggctctgaataaatccctcttttcacagtgacagacgctgtcctccagttccccaagtccctccaggtcctcaccggtccctcccagccctgccyactctggagcagcgtgcccggtgggtgtgccgtggcagggctcctggaggcagaacactgcccggtttggggggcagggctggacttcagaggagctcct

SEQ ID NO: 396953 - DNA, 201 bp, Homo sapiens
cttccaggaggtggctttgttccgtgcctccctgcccccatcgtcactaccaggtctggtacggagtcggtgctcagtgtttgcaaaacagagctgaaaayggactttgggaggccgaggcaggcagatcacctgaggtcaggagtttgagaccagcctggtcaacatggtaaaaccccatttctgctaaaaaaaaaaaaa

SEQ ID NO: 396954 - DNA, 201 bp, Homo sapiens
tactccttatcccactgtccagtttttatttgttttggcacttatttctatatctcagaataatgagcactaaaatatatttttaacttgtgacctgtcgyttattaacagttactttatctctataaaattatgaaatttattgtttatttcttgcactgcactatactctgctagtcatatatacttaattttagttct

SEQ ID NO: 396955 - DNA, 201 bp, Homo sapiens
aagataaggattcttttaaaatataaccacagtattattaatgcccttaaagaatttaacaataattctttattaccaattttatagtcagtgttcaaatwttcctggttgtctttaattttttgttgttgttggttggtttgaaccaggattcaaataagatagacacaaaaatttggttgatatgtctctttagttcct

SEQ ID NO: 396956 - DNA, 201 bp, Homo sapiens; identical to SEQ ID NO: 87830

SEQ ID NO: 396957 - DNA, 201 bp, Homo sapiens
agtcctttgtaaatcacaccgctctccttttccttataatctttcattattaagagccactaattgtgtgtgtgtgttttttttgtctctgccccccctttttttttttttttcatttttaggatctgcagaaaaggctgtcttggaacaatttggattccctttaactggaacagaggcaaggtgttacactaatcacgc

SEQ ID NO: 396958 - DNA, 201 bp, Homo sapiens
agttcaatgaaagccacttaaatagctttcttagttatgtaaatgtagggtgaagaatgagtggccttggtcccccacctggagttagtttattgttttgmgactagatccaaagcctcctctccctgagatctctggtatgcaaagctggtccctggaggaagcgcatcagttgacagagggagcccagaatctctgtga

SEQ ID NO: 396959 - DNA, 201 bp, Homo sapiens
tgaggtgggagaatcacttgagcccaggagtttgaggctatagtgagcggtgattgtgccactgcactccagtctggacaacagagcaagaccctatctcaaaaaaaaaagttcctgaacttaaaaaaagttggggtatagtttaatgtaactattaaccagtttttttgtttgttttttgtttttttgagacaaagtctc

SEQ ID NO: 396960 - DNA, 201 bp, Homo sapiens
tccctgcctgaaaagcactcagagcagagcctgtgtggaggctgggatagggtgctgtgggaggtctgttctccagataagcctcttcaaggctctggggmccaacgaggaggatttaagtgcctggtgaagtccactctctgtgtccacaagtcacagagacagtttaaaatgaaataactggagttcaatgaaagccac

SEQ ID NO: 396961 - DNA, 201 bp, Homo sapiens
tagtttgagactatattcctcatcaaacttatacccactagtttttgcccactaataattttttacaccatcattacttctaaacttactagttggcccawtcatactggctcctgtgtcttttgacatttatcttcatccgtctttaagcacttttttgctttctggcacaataagatgttccaggttttctggtgtttt

SEQ ID NO: 396962 - DNA, 201 bp, Homo sapiens
ccctgacagtccctggcttggagatttgtttctgctccatgtggcctcagccttctcagagatggtaggagacagacctccctcagtcctttctggcaaaktgccaaggaggatgaccacctcccacccccatcaggcccgttcctgcagtgactgctgatgctggggcctggcacacacagtgcttcttatcactgggca

SEQ ID NO: 396963 - DNA, 201 bp, Homo sapiens; identical to SEQ ID NO: 87826

SEQ ID NO: 396964 - DNA, 201 bp, Homo sapiens; identical to SEQ ID NO: 87827

SEQ ID NO: 396965 - DNA, 201 bp, Homo sapiens
gtggggagatagtttgagactatattcctcatcaaacttatacccactagtttttgcccactaataattttttacaccatcattacttctaaacttactawttggcccattcatactggctcctgtgtcttttgacatttatcttcatccgtctttaagcacttttttgctttctggcacaataagatgttccaggttttc

SEQ ID NO: 396966 - DNA, 201 bp, Homo sapiens
tactattttctctttctaagtaataagtaattgtggggagatagtttgagactatattcctcatcaaacttatacccactagtttttgcccactaataatkttttacaccatcattacttctaaacttactagttggcccattcatactggctcctgtgtcttttgacatttatcttcatccgtctttaagcacttttttg

SEQ ID NO: 396967 - DNA, 201 bp, Homo sapiens
gtggcagaaacttcaaatgaccagctaaaaagtttaggcaagaacttcaagataattttctagcaagcagggcctttgaaaagtaggcaattaattataamacaaatatagataaaatgatgtcctttaattattctgggaaaggggacacagcattgcccagtgctggagactggtctgtttctctcaagcaacgaataa

SEQ ID NO: 396968 - DNA, 201 bp, Homo sapiens
gagtttgttgtcaattcttatgaaaagagctttctgcatgtaacacatacggttaaagaacacagcaaaggacaaaatttgcaggaacagttttggaaccracagaaaatgtcaccttttatttgccatcttatatatatctatcagttttaccagctacttctaaatttgtacattatttgtaagggaaagaaggaaaac

SEQ ID NO: 396969 - DNA, 201 bp, Homo sapiens
tacagtactgtaaatttaacttacatcgagtttgttgtcaattcttatgaaaagagctttctgcatgtaacacatacggttaaagaacacagcaaaggacmaaatttgcaggaacagttttggaaccaacagaaaatgtcaccttttatttgccatcttatatatatctatcagttttaccagctacttctaaatttgtac

SEQ ID NO: 396970 - DNA, 201 bp, Homo sapiens
caccatcaccagcgacgtgtgggtgctgcctcaacaggtattgggaacttgctcttgtttacagcttggctcctcatggtagctgtaggaggcaggatctrggtggatgggacctgggattcattcttagaataggtccccaaatggtcatccattttgcttgccgagggctctgtggggcagacgtaggaggcctgaggg

SEQ ID NO: 396971 - DNA, 201 bp, Homo sapiens
gagatttcacataaatccagattttagcttctcttaaatcagatgactccgtaacaattggcatatactcccataggcagccagtttactagacaagagtmtcaaccttctccttagattgaacacacatcttcaaatcactgtagtctttacctgccccattttactcacttacatttcctgtctagcccttgttggtct

SEQ ID NO: 396972 - DNA, 201 bp, Homo sapiens
cagattcagcaattgtttatattttgcacatttattttatcattctctctttcctcatatatatgtgtgtgcttatgatgtactctgtattcgtatctacyatatatagtatatatacacatacgcacatgcacacacatatttttttcagagtcacgtgagaataagttgaatacatcatgccttttttgccctaaatac

SEQ ID NO: 396973 - DNA, 201 bp, Homo sapiens
ttatttcttgcactgcactatactctgctagtcatatatacttaattttagttcttccgttggtaaactttgcatcatatactttacataatatacttgarcctctaatcttgatctaccatttatacttgtcaaggtttgtagcatttacatttatgtttgctaacgataatgtagtctgagttttgcctgtagcagagt

SEQ ID NO: 396974 - DNA, 201 bp, Homo sapiens
tctttattaattttaaagcacaatttttgtagtcttctaagtcgatgcttttgagttcatgagttcatgttatgttaggagttgtgaaattagatacttayattaaacacggtttagtcttgatgcttttttttcgctcatggcattaaagtcataactggcaaactatctttccttgaaattaaacttgaaaaattttta

SEQ ID NO: 396975 - DNA, 201 bp, Homo sapiens
ttctctttcctccctttccctcttcatcatgacctcatttcccttttcttgatcaaaattcctctggagattccagctgtgggaacctctgaaaccacttktgcagctacacgtgtgataccagaggcagacaactatgtgacctttgtgtgtgaaaagccaaaggcaaagacaatttatgagaaagtttttgctgagaac

SEQ ID NO: 396976 - DNA, 201 bp, Homo sapiens
cgaactttcactcaatagttttagcatccattgatatttcctgcctgaattagttattactatgttagttgctaaatgatgactttctaattcttactccytaatttattagttgacattccactgttagagcttttccttgttatcaatgtagactcacagatttatttttattcaaagagttttaatgtttactgtgat

SEQ ID NO: 396977 - DNA, 201 bp, Homo sapiens
cttcgaactttcactcaatagttttagcatccattgatatttcctgcctgaattagttattactatgttagttgctaaatgatgactttctaattcttacyccttaatttattagttgacattccactgttagagcttttccttgttatcaatgtagactcacagatttatttttattcaaagagttttaatgtttactgt

SEQ ID NO: 396978 - DNA, 201 bp, Homo sapiens
gttgttgttggttggtttgaaccaggattcaaataagatagacacaaaaatttggttgatatgtctctttagttcctataaatctgtagattttcctttcyttttttttttcctccattcagattatctgttgaagatctaggatgtttgtcctagagtttcctttccatattctggatttgctgatcgcatacctgtgga

SEQ ID NO: 396979 - DNA, 201 bp, Homo sapiens
tctacctaggcaaggtgaagagatgagaagcgataggatatatgctgagaaaacagttaagttagagcgttcatgtagggaaggagacaaaaataaaaggraagtttggggcctggtggcagaaacttcaaatgaccagctaaaaagtttaggcaagaacttcaagataattttctagcaagcagggcctttgaaaagtag

SEQ ID NO: 396980 - DNA, 201 bp, Homo sapiens
caatgaagcatatatgtgtttttactttgggggaagtaaagcaaatgaactggcatttcttgagggccaggtataccaggcagtatgtaagtagctttatrtatgcatctcattcaatcttcactacacccttacaaaaaaagtagtgaccattttcttttatagacaagaaaatcaaggctttaaggatcgagtctcagg

SEQ ID NO: 396981 - DNA, 201 bp, Homo sapiens
ctggcatttcttgagggccaggtataccaggcagtatgtaagtagctttatatatgcatctcattcaatcttcactacacccttacaaaaaaagtagtgamcattttcttttatagacaagaaaatcaaggctttaaggatcgagtctcaggcatatagcttataattgtcaaagagggtatccaaacatgggtctgtctg

SEQ ID NO: 396982 - DNA, 201 bp, Homo sapiens
tagctttatatatgcatctcattcaatcttcactacacccttacaaaaaaagtagtgaccattttcttttatagacaagaaaatcaaggctttaaggatcragtctcaggcatatagcttataattgtcaaagagggtatccaaacatgggtctgtctgacaattgccagtcattcacagtgttactctttgaagcgctca

SEQ ID NO: 396983 - DNA, 201 bp, Homo sapiens
tcttgtagattttgaaaaatttttaactaacatgtcattgtatcttcataacaattctatgagagaggcatttataaaatacaaaatagcaatccacccayggggatggctgttacgtattttgtaaatgaagaaacaagaaatgggtggacgcgacttgcagcttagtggcaaagccaggtttgaccaggtctctgggct

SEQ ID NO: 396984 - DNA, 201 bp, Homo sapiens
ggcaattcagagtgcttggaaagtgttttgttttctcagatctagccatttaatatttactgcttgcttacaactatactctgaaccttattttaggaagktgtacccaataaaagggtttatttagttttctgtccaggcaatgaagcatatatgtgtttttactttgggggaagtaaagcaaatgaactggcatttctt

SEQ ID NO: 396985 - DNA, 201 bp, Homo sapiens
tgctttacatgtgttgtctcacaatgactctctgaggtaaatacactatccccattttacctgtgagaaaattgaggcttagagagcttagtgtcttaccygagtttcacttttccaaagtagtcatccacaaagtatgaggcagacagatctaagagaagaaagacagctgaggtagattcaaatcttttctgacatgga

SEQ ID NO: 396986 - DNA, 201 bp, Homo sapiens
agataagcctcttcaaggctctggggaccaacgaggaggatttaagtgcctggtgaagtccactctctgtgtccacaagtcacagagacagtttaaaatgwaataactggagttcaatgaaagccacttaaatagctttcttagttatgtaaatgtagggtgaagaatgagtggccttggtcccccacctggagttagttt

SEQ ID NO: 396987 - DNA, 201 bp, Homo sapiens
ctgctcctgggatttgaagtgaagagaatttgttgggatgaagtgaggtggccacaataaaggcgctgggccatggggcttctgaaatgagattaatatgrggaacacctgagtctagggtggtgcccggggcttacaacaagaacccacctgtgtttcctggggtaaggctgtccttagcatagtgtgaggctaactgct

SEQ ID NO: 396988 - DNA, 201 bp, Homo sapiens
gggatgaagtgaggtggccacaataaaggcgctgggccatggggcttctgaaatgagattaatatgaggaacacctgagtctagggtggtgcccggggctwacaacaagaacccacctgtgtttcctggggtaaggctgtccttagcatagtgtgaggctaactgctgggagctctggagactctgccatgctgacattgt

SEQ ID NO: 396989 - DNA, 201 bp, Homo sapiens
tccagttgactttgaggagtgatactgtccctgtgaggacgctatgagtgtcctcaatagtgatgtggtagtgctggtcagacccacaatccctattttcyttgtttttttgtgtgtttttttttgttttttttttttaaacacgaaaaaacaaacaaacaaaaacctcagaaagtgaaaatccctaaagggagggactgg

SEQ ID NO: 396990 - DNA, 201 bp, Homo sapiens
gatactgtccctgtgaggacgctatgagtgtcctcaatagtgatgtggtagtgctggtcagacccacaatccctattttccttgtttttttgtgtgttttkttttgttttttttttttaaacacgaaaaaacaaacaaacaaaaacctcagaaagtgaaaatccctaaagggagggactggacgtgtcatgtaaattcttg

SEQ ID NO: 396991 - DNA, 201 bp, Homo sapiens
agctttttatatagtttagtgttttgattggtgattgtttttacttaaaatactattcagaggagtttttctttaactggaaaggccagagtcaaaattayatgagatagctacactgtatgaaaagcattctttcctagactagtactttctaaattcagatgaagtatctgaactatcccaggaacttgagacatgcat

SEQ ID NO: 396992 - DNA, 201 bp, Homo sapiens
gagttgtctttaaagagacagctctaaaatattttacgattgatgttgttttaaaaaattgtcttaaattcaaggaagaaacggtgtgtttttctgaatayccaactaggacctgtccctatattagacagattaaagatgtttgcttcctaagaacaaagcagactgaatcagaaaagagattagtgagtggctaagttt

SEQ ID NO: 396993 - DNA, 201 bp, Homo sapiens; identical to SEQ ID NO: 87823

SEQ ID NO: 396994 - DNA, 201 bp, Homo sapiens; identical to SEQ ID NO: 87825

SEQ ID NO: 396995 - DNA, 201 bp, Homo sapiens; identical to SEQ ID NO: 87828

SEQ ID NO: 396996 - DNA, 201 bp, Homo sapiens
acactggcttcttgtgaagaacagaagaaagtgtggaacctggaaggccagttaagagactaatggaattgtctacatgagaaataataacttgaataggrtggtggtggtagaaatggtgagaagtggtatgatttaagatgtgcttggaagtggtcagcacactgatgatgttgaaagctatgatgagattatataagt

SEQ ID NO: 396997 - DNA, 201 bp, Homo sapiens
tgcctagcactaatgtttaaataagaaagtgtttttctgtgtctttttaataaaatatcttttaaaggggaaagcatttcagtgcaagttactatgtttcyttctttacagaaagccatggctgaaaccttttacctttctaacattgtgcctcaggattttgataataattctggatattggaacaggtgagggatgaga

SEQ ID NO: 396998 - DNA, 201 bp, Homo sapiens
cctctgtgtagttcctgtccacatgcactatatatttgtttcttttttctcctctcatgaatctgctcgtttctctacttctgtctacgtagaagcactcrgcaactagtttctgctcattaaatgtgttctatatactaggctcagtgctttacatgtgttgtctcacaatgactctctgaggtaaatacactatcccca

SEQ ID NO: 396999 - DNA, 201 bp, Homo sapiens
cattgttctccattttacacttctttgaataacagtctgagtatgtttcatttgttgtcataacttttgtagtttaagaaagtctcacctcacgatagtgmaataggtagtgttaggatttgctaatgttctctgtgacaaaccattctggaggtgtcagaaaataaataaaatctgagatttcttctctcctatgtggta

SEQ ID NO: 397000 - DNA, 201 bp, Homo sapiens
tcattgttctccattttacacttctttgaataacagtctgagtatgtttcatttgttgtcataacttttgtagtttaagaaagtctcacctcacgatagtscaataggtagtgttaggatttgctaatgttctctgtgacaaaccattctggaggtgtcagaaaataaataaaatctgagatttcttctctcctatgtggt

SEQ ID NO: 397001 - DNA, 201 bp, Homo sapiens
tgtgaaaattgatctctattgagaaactctttgccagaggcttaaaaccagaatttgcccttaagctttgtgttggaaatatttagttcttagaattcacrttataggtttggattttataattgataagcctacctgactacttactttatagtcctcattttgaataattattataagagctttctgtcctggaataat

SEQ ID NO: 397002 - DNA, 201 bp, Homo sapiens; identical to SEQ ID NO: 87840

SEQ ID NO: 397003 - DNA, 201 bp, Homo sapiens
aattttagatgtataattacaataatttttccaaaggaggtgattgcaagttagtgtagtataattaaggaacagtaaaaagtttgatgagaggctgggcrtggtggctcacacctgtaatcccagtactttgggaggctgaggcgtttgagctcaggagtttgagatgagcctggccaacatggcaaaaccgcgtttcta

SEQ ID NO: 397004 - DNA, 201 bp, Homo sapiens
cctgagtagctgggattacaggtatgtgccactatgcccaactaaaagtatatcttttaaaaaatggcttaagaaaaatgaagagccagcagcatagtggmgaattgctaggttagtgttggtgggagaaagcgagaatccaaagaggtaagcgcagtcttggcaaaccaaaaccacatttgcctttgaattcacagcatt

SEQ ID NO: 397005 - DNA, 201 bp, Homo sapiens
attacaggtatgtgccactatgcccaactaaaagtatatcttttaaaaaatggcttaagaaaaatgaagagccagcagcatagtggcgaattgctaggttagtgttggtgggagaaagcgagaatccaaagaggtaagcgcagtcttggcaaaccaaaaccacatttgcctttgaattcacagcattatggggtgaggagg

SEQ ID NO: 397006 - DNA, 201 bp, Homo sapiens
agaatccaaagaggtaagcgcagtcttggcaaaccaaaaccacatttgcctttgaattcacagcattatggggtgaggaggattgaaggaaagacctaagrctcacccaaggtagattgtcctgtaggtcttgcagtgtaggagacccttcctgtgttaccctggaactccaaagggctacatcctcagggaagagtgaac

SEQ ID NO: 397007 - DNA, 201 bp, Homo sapiens
agggctgggtaagggctgggtaaaggcttttcctctgggtgagatgaggctgctagagggctttcagtgagcgtgatccgacttgattttaataggaccaygctggctgctgtgttgagagcccgctggggacaaggaccagtgaggaggccactgcaagaatccaggagagagatgatggcggctcagaccagcgcagtg

SEQ ID NO: 397008 - DNA, 201 bp, Homo sapiens
ccttttaatggagaatgatatttagaaaccaagatttgggtgctgtaggtgctcattcatatggtgtgttattgcttccagttggtcctttttattatccrttcatttggatacaatggtgagggcgccactgaagaaagtgtggcttagggatggaaagggggaaaggagccagatgacctaggtagagactcccctctc

SEQ ID NO: 397009 - DNA, 201 bp, Homo sapiens
  misc_feature (1)...(201): n = A,T,C or G
ccttaagctttgtgttggaaatatttagttcttagaattcacgttataggtttggattttataattgataagcctacctgactacttactttatagtcctnattttgaataattattataagagctttctgtcctggaataattatggctttcatttattgaaacaagtagtcaataattgcctagcactaatgtttaaat

SEQ ID NO: 397010 - DNA, 201 bp, Homo sapiens; identical to SEQ ID NO: 87836

SEQ ID NO: 397011 - DNA, 201 bp, Homo sapiens
ccagtcctttgtaaatcacaccgctctccttttccttataatctttcattattaagagccactaattgtgtgtgtgtgttttttttgtctctgccccccctttttttttttttttcatttttaggatctgcagaaaaggctgtcttggaacaatttggattccctttaactggaacagaggcaaggtgttacactaatcac

SEQ ID NO: 397012 - DNA, 201 bp, Homo sapiens
aaggagatgagacaacttcttgatgtgatggaaatattgtatatcttaattatggtgatggctgtactgcttaaacatttgtcaaaactcatcaaactgtkcatttaagaagggtgccttttattgtatataagttatactttcctaaaactgattaaaaaataaaaacaatgggctgggaaagggaagaaaataggatgg

SEQ ID NO: 397013 - DNA, 201 bp, Homo sapiens
cagtcctttgtaaatcacaccgctctccttttccttataatctttcattattaagagccactaattgtgtgtgtgtgttttttttgtctctgccccccctttttttttttttttcatttttaggatctgcagaaaaggctgtcttggaacaatttggattccctttaactggaacagaggcaaggtgttacactaatcacg

SEQ ID NO: 397014 - DNA, 201 bp, Homo sapiens
tagcatcattgtttcttctctctctcaaccttcacctatggtgagcattactgagctttaccaatttaatgctcattttacttgtgtttattgattatcartgagggttaacatgctgtgaattagtcttttttggtaagttattctttacctatttcagttggggtattctcttttgaatttatttgtaaaagttctttt

SEQ ID NO: 397015 - DNA, 201 bp, Homo sapiens
atgtggtagaggggtagtgtatggcatttgggggtgggcaggcagcgacccaccaccttgtactctcatagtgtgcctgaggccttcatggcgtcctgtcygccctcaccgccacctgcaaaaggacagatcaatgaagtttcttaggtttttatttcttttgaaagatgctgcctggtcattgtggaaaatggagataag

SEQ ID NO: 397016 - DNA, 201 bp, Homo sapiens
ttcattgttctccattttacacttctttgaataacagtctgagtatgtttcatttgttgtcataacttttgtagtttaagaaagtctcacctcacgatagkgcaataggtagtgttaggatttgctaatgttctctgtgacaaaccattctggaggtgtcagaaaataaataaaatctgagatttcttctctcctatgtgg

SEQ ID NO: 397017 - DNA, 201 bp, Homo sapiens; identical to SEQ ID NO: 87832

SEQ ID NO: 397018 - DNA, 201 bp, Homo sapiens
ggctgcggttctcctcagtggtgtccatcatgctggtggaggagatgaacagctgcgcccagggctcagtggacctactcagcaccatggtcaggcccgcyacacccatcatgttcacatgctgcccttgttctgtgctccctggcccatgctcccatccttgggtttgcccaggatggaggctgtggcgcagagccattt

SEQ ID NO: 397019 - DNA, 201 bp, Homo sapiens; identical to SEQ ID NO: 87833

SEQ ID NO: 397020 - DNA, 201 bp, Homo sapiens; identical to SEQ ID NO: 87834

SEQ ID NO: 397021 - DNA, 201 bp, Homo sapiens
tcagtattcttgtgtgtctgaataggcaaagcgatttaattggctggtcttgcacgcaaattagttccaaagataagctctttgtaacacatttccagtcrctaatgctcaaatgtagaacattcctttaaatggcaggataaaaaacccactatccaccatagtgcattttgggaagatgtctgtagcatatgttgctgt

SEQ ID NO: 397022 - DNA, 201 bp, Homo sapiens
ggacgtgttccttttccctgcctgaaaagcactcagagcagagcctgtgtggaggctgggatagggtgctgtgggaggtctgttctccagataagcctctycaaggctctggggaccaacgaggaggatttaagtgcctggtgaagtccactctctgtgtccacaagtcacagagacagtttaaaatgaaataactggagt

SEQ ID NO: 397023 - DNA, 201 bp, Homo sapiens
gatgtgcctattagctgtttctgtctttgtttttcaaaagctaagcctctgaaggtaagtatgttgggccagttttctttgctgtgttttgggagtacagycttctacagaagatcagacttcaaaacgtagcctgcctttttgatcatgtttgccactgttcaaaagtcaagttttgaaagaaatgactcaaaataataa

SEQ ID NO: 397024 - DNA, 201 bp, Homo sapiens
gttcccgtcgttttctgagcggcttcgtggctggggctgtagtgggcgctgcgggagctgggctcgcggccctgcagttcttccggagtcagggcgctgarggagcgttgacagggaagcagccggatggtaagtctgtgggcccgtcctcccttcgctggcccagatttcgggctccgactcctacctggagtgtgaatg

SEQ ID NO: 397025 - DNA, 201 bp, Homo sapiens
gccaggctggtctcaaattcctgacctcaggtgatcctccagtcttggcctcccgaagtgctgggattgcaggcatgagccactgcgcctgtgagttttaygtcacagctttgctacccagagagactactagatcgaaaatccctaggaaggactctggttgatgtagcttaaccagtcagggtccttcagaagaggtat

SEQ ID NO: 397026 - DNA, 201 bp, Homo sapiens
tgggcgctgcgggagctgggctcgcggccctgcagttcttccggagtcagggcgctgagggagcgttgacagggaagcagccggatggtaagtctgtgggyccgtcctcccttcgctggcccagatttcgggctccgactcctacctggagtgtgaatggcagtccttgacggacagccttcaccgtttgctgggccccta

SEQ ID NO: 397027 - DNA, 201 bp, Homo sapiens
gtcagtgttcaaattttcctggttgtctttaattttttgttgttgttggttggtttgaaccaggattcaaataagatagacacaaaaatttggttgatatrtctctttagttcctataaatctgtagattttcctttctttttttttttcctccattcagattatctgttgaagatctaggatgtttgtcctagagtttcc

SEQ ID NO: 397028 - DNA, 201 bp, Homo sapiens
ggaattgatacaacgttgcattatataagaaatgttaacataagcccaattgtcctgcaagaggaatggttaaataaagtatatcatcttgttggaatgayacataattcttgaaagctggttgggaactatggcataaaaaaagttttaagttcatgaaatttgaattccagaatgtactctgagcgcacataaagaaaa

SEQ ID NO: 397029 - DNA, 201 bp, Homo sapiens
ttttgcattctactttttaatttcacttattcaacaatatttattgaacacctattaggaatgataggcatagggaatatagtgatggataaaagcaactrttgacttcaaggaactcacggtttagagtggaaaacagatgttaacaattaattacattaaagtgtgacatgctgtaatagaggtaaacacacacagtgt

SEQ ID NO: 397030 - DNA, 201 bp, Homo sapiens; identical to SEQ ID NO: 87850

SEQ ID NO: 397031 - DNA, 201 bp, Homo sapiens; identical to SEQ ID NO: 87851

SEQ ID NO: 397032 - DNA, 201 bp, Homo sapiens; identical to SEQ ID NO: 87852

SEQ ID NO: 397033 - DNA, 201 bp, Homo sapiens; identical to SEQ ID NO: 87853

SEQ ID NO: 397034 - DNA, 201 bp, Homo sapiens
tcatcttctcaatgcatgtctgcgattaggtagacttgtatagcttctgagcagatagcaaagggaactgacaccactactgggagaacaacctgtctgcrgggtcttttcacaagacgggggtgcacgatgcaggctttgagtctaacgtgacggccaccttggcttcatgaataaaatccggatcttcaaggggagatg

SEQ ID NO: 397035 - DNA, 201 bp, Homo sapiens
aatatcgcggttctctatagcttccaggtaacaccagggcccgcaccaccagggtcaagcttcaaatgagagttcaaacctttcagagccttgatgcagargatcaagagacctcactgccagaaaccacctttgcggggattgtgtccatgagtatggtctagcttccatcctgcatgccctcctctccagtgtggatct

SEQ ID NO: 397036 - DNA, 201 bp, Homo sapiens
gatgtgcaatttggagaaaacagttattatgttccctgaaaaataaacattcaacattgtcattatagttgacatttacagtttacaaagtgccctttacrgtgtccatcttgcttaatcattacaaaagtcttggcaactagttgttattactgtttcgatttcacaaaaggaaattgagagtcaaaatgttaaatgact

SEQ ID NO: 397037 - DNA, 201 bp, Homo sapiens
tggtgtgatcgtggctcactacaacctcagcctcccgggttaaagccattctcctgcctcagcctcctgagtaactgggattacatgcacgtgccaccacrcctggctaatttttgtatttttagtagagacggggtttcaccatgttggccagactggtctcaaactcctggtctcaggtgatccgctcgcctcagcctc

SEQ ID NO: 397038 - DNA, 201 bp, Homo sapiens
ccaccttccttggcctcccaaagtgctgggattacaggtgtgagccaccatgcccggcctgaaacctccagtttttaaatggtgataacaaatttgggggraaaaatttaactgtattaaccaaacgcaattcatttgtatacctatgggctgtctttgatagaatctgaccagagcctgattgaagaatgtgatatcctg

SEQ ID NO: 397039 - DNA, 201 bp, Homo sapiens
acctccagttttttgtttgtttgtttatttttctttttttttttttccttgttttgagacagggtcacactctctttcacccagtctggagtgcagtggcrcgatcttggctcactgcaacctccgcctcccaggttcaagcaattcttctgcctcagactcccaagcagctgggactacaggtgtgcaccaccacaccca

SEQ ID NO: 397040 - DNA, 201 bp, Homo sapiens
gctcgggcacacagggaggggggaaagtctcttgggtaaccaccaaacttcaaactcatacaatgggctccagtaaaacagtgggccttaataagcatatwcctttccctttagatgcacaaagatagggaagctaaaagcagacttgcggggtatgcctgcagctgcaagaaaatatatgggaacagacacaaaaactct

SEQ ID NO: 397041 - DNA, 201 bp, Homo sapiens
tgccgctgcactccatcctgggtaacagagccagaacctgtctcgaaaatacataaattaattcattaattaatttttttaaataaaaaagagttagccarttggtgtagtctgagcccctttctcttgctcagcctctgttttcttatctgtgaaatggagttggaactaaagggcatctcccttcagagacctgcagat

SEQ ID NO: 397042 - DNA, 201 bp, Homo sapiens
cactgagaatcatcttaggaaacgtcagaggccagcttgggcacttgtggattctgtgactcagagtgagagaattaacatctctgactctccagcatgtyattcatacagcagagattataagtactacagggagttgttaggaggatttaatgggatagtgtgtgtgtttaactctggaaaggaaacagcatccagccc

SEQ ID NO: 397043 - DNA, 201 bp, Homo sapiens
gtgggtggatcacgaggtcaagagatcgagaccatcctggccaacatggtgaaaccccatctctactaaaattacaaaacttagctggacatgatggtgtrcacctgtagtcccagctactttgggaggctgaggcaggagaatcacttaaacccaggaagcggaggttgcagtgagccgagatcacgacactgcactcca

SEQ ID NO: 397044 - DNA, 201 bp, Homo sapiens
agtgttacatatttaattttaatgtcaaatatataattagaatatatgatagtaatatttaatatactattaataaattaatattaatatcaaggacattrttgaactttaagatgagtatattattaatattattttctcccatgatttgaagaagcctagcaaaaaaaagataaaatcaaaattattttcaccagttgt

SEQ ID NO: 397045 - DNA, 201 bp, Homo sapiens
tttctttctttcctcttggaaacaggcttaatctcctgccacatctcttccattcccccatgggacgtccctgtagtttcaggatggtggcacttacgtgsgaggagaagtgatgtttactctaaagacagtcttatcccttcatcccaggaggaaggtggctccagcaggcagtggcagcaatacgagggggtttgggga

SEQ ID NO: 397046 - DNA, 201 bp, Homo sapiens
tgcgcagcgcgaagaggcagcctcggcgctgcccggctcggcgtcaggtgagttcctgatccaggcgtcccgcgccccttctccgtccccagggctccccrctcccgcccgagcccctggtgtgcgcggaaggctcgggctttgctgcgcgtcccaacttggttcgggcggcctcattttcctcctagcgggcggcctcag

SEQ ID NO: 397047 - DNA, 201 bp, Homo sapiens
ccagctagaaagagattctttccttcagcatggtggcatgggagctcccaccccctccaccgttttcctcacaccatagttctggtggaggaacagagcayggcccatcccttccaaccgctgctccattggccctggggaccttggcacggaggtaatctaccctgagcctcaagcagctgtcgccctgggtggcgccat

SEQ ID NO: 397048 - DNA, 201 bp, Homo sapiens
caggaacaaatagttgagattcccaggaatcagaaaatcctattgctggtggtgacctgcttttactgtgtcttgctctgtcgcctggagacaaaccaaamcaaatctcccttggtttaaaaggcagtttctcttgctgatacaatgggaactgctccttcaggttccacccagccaagccatgccttggactcgtcttca

SEQ ID NO: 397049 - DNA, 201 bp, Homo sapiens
cctgtgtggtttgcaaaactacagcagcaaacatcacgttcaacccacagttcagtatctttcctggagaggacaggaacaaatagttgagattcccaggwatcagaaaatcctattgctggtggtgacctgcttttactgtgtcttgctctgtcgcctggagacaaaccaaaacaaatctcccttggtttaaaaggcagt

SEQ ID NO: 397050 - DNA, 201 bp, Homo sapiens
cactccagcctgcgtgacagagtcaaattctgtctcaaaataaaataaaataaaataaaaaattaaagggacactaggcaagagaatatggctggaggaayggaagtcaatttcaaccccagagaatcagctcagttgtcggaggcagagaagaaagctccttctgtggcaagcctacgttttataattatgagtctggtc

SEQ ID NO: 397051 - DNA, 201 bp, Homo sapiens
aaaaaaaaaaaaaaaaaaattgaatgagtgagttcattagtctgtgaatgagttgattaattaattaagaaattcttggccaggcaaggtgcctcacgcckgtaatcccagcactttgggaggccaaggtgggtggatcacttgaggccaggagtttgagaccagtctggccaacatggtgaaaccccgtctctactaaaa

SEQ ID NO: 397052 - DNA, 201 bp, Homo sapiens
gaacccaagaggcggagcttgcagtgagccaagatcgtgccactgcactccagcctgggtgacagagcaagactccgtctcaaaaaaaaaaaaaaaaaaaattgaatgagtgagttcattagtctgtgaatgagttgattaattaattaagaaattcttggccaggcaaggtgcctcacgccggtaatcccagcactttgg

SEQ ID NO: 397053 - DNA, 201 bp, Homo sapiens
caagcaattcttctgcctcagactcccaagcagctgggactacaggtgtgcaccaccacacccagctaatttttgtatttttagtagagacagggttttaycatcttggccaggctcgtcttcaacttctgacctcaagtgatccaccttccttggcctcccaaagtgctgggattacaggtgtgagccaccatgcccggc

SEQ ID NO: 397054 - DNA, 201 bp, Homo sapiens
gcaagagtgcaatgacgcgatctccgctcactgcaagctccgcctcccaggttcacgccattctcctgcctcagcctcccgagtagctgggactacaggcrcccaccaccacgtccggctaattttttttgtatttttagtagagacggggtttcaccgtgttagcaaggatggtctcgatctcctgaccttgtgatccac

SEQ ID NO: 397055 - DNA, 201 bp, Homo sapiens
ccactgatttcaccaaagccattggtttgagttcatttccacagcccatcggccttccactcagcctttgcaagtgtgtttatgttgctcacatgcccatycttaaggtggaagaatgatgagcagcacctggcaatgctggaaaattgagcccattcgaatcttttaaatgaaaatgacgtgtcaacagaaagtgcccct

SEQ ID NO: 397056 - DNA, 201 bp, Homo sapiens
tgttttggagttttggttgcttgtttgtttggtctcagattttttgtttgtttctgtttgctttgttttgttttgccttgcctgagagcacaacttaccayttttggaggaaaacggagaaattggattttttttaatatcaaggttcctgagcctctcatgctgagatttgagtcccaaagacatcttccttcaccttcc

SEQ ID NO: 397057 - DNA, 201 bp, Homo sapiens
tgactctctctgtttgtgtgtgtgtgtgtgtgtctgtctgtctgtcttcgtctctcatctacacacacacacagagggcacctcatggtccctggctccayccgtgggctctgaggctctgtcttcccagatctctgtctcaagagctacattctaaggctttgcttttaatcgcaccagggcacctggaagtgaggagag

SEQ ID NO: 397058 - DNA, 201 bp, Homo sapiens
gaggttgcagtgagccaagatcgcaccattgcactccagcctgggcaacaagagcaaaactccatctcaaaaaaaaaaaaaaaaaagcactgtgtaaataytattctttttccctctttgagaacctacattcaaaatcagtgcaaggcagtcaggcatggtagtgcacacctatagtctcagctactctggaggctgagc

SEQ ID NO: 397059 - DNA, 201 bp, Homo sapiens
accctattagacagtgcagaacctttccatcatgataagacatcctattggccagagctgttttaaatttaaggccaccgggggataaatgaaccatgcayggccttctgtctgcatatgaggataactaaactggccattctggggtgggaggtggtaataaatgtagactgtgccagttttacccactccatcctagcc

SEQ ID NO: 397060 - DNA, 201 bp, Homo sapiens
gaattgatctagaattgggcccatgtgttgcttttttctttaagtctctccaattgactctaacgtgcagtcagatttgacaaatactgccctaacctcayattatctcatggcgtagtcacatactatgagataattttaggaagcacgtgggcagatattttatattacaatagttgtgtattcagtttaatgggttct

SEQ ID NO: 397061 - DNA, 201 bp, Homo sapiens
gatccgctgatggggtcatttactcttctccaaacctgcttctccatcaggctgttccccaatctaattcttttacagctggacatttggtcactttcatrccattacctcactcagccctcctgatgggaactgttctcccatttcacagatgggtagaccgagtctcaccaaggccaagtgagttactcaagactgcca

SEQ ID NO: 397062 - DNA, 201 bp, Homo sapiens
ttcatttcaaacacacaaggtactttgagaaaatgggagtgggtactataaaatcaagtgaacagttccagggcattgcaacttagcctgcaaattgtagrgtggagtcctaaataaagcacccagttaattgaggaggtgtgactcattgaataatctgttgaaatagctttggtgtgcagtcaacaggtaactagtaag

SEQ ID NO: 397063 - DNA, 201 bp, Homo sapiens
tggaatgtctccattttgcttcctggatccaggacatgctggtgtgtcttcagttttctgtagggtccttatgaaatccttaaaataaatcaggcatttgstttcatttcaaacacacaaggtactttgagaaaatgggagtgggtactataaaatcaagtgaacagttccagggcattgcaacttagcctgcaaattgta

SEQ ID NO: 397064 - DNA, 201 bp, Homo sapiens
cctgggctctgccccctgtcagatcagtggtggccttagattctcataggagctcgtaccctactgtgaactgcacctgcaagggatctaggctgcctgcrcttatgagaatctaatgcctgatgatctgtcactgtctcccatctcccccagatgggaccatctagttgcagaaaacaagctcagtgctcccactgattg

SEQ ID NO: 397065 - DNA, 201 bp, Homo sapiens
ttggcacctggggttcacatttgagttctggatggtggctgtaatctgaagtccatttgtaatgggtcttagttgtgaggtgtctgcagtctactggggcmaatattttggtatctgggtcacttcacagccttgtgcctcagtttccttttctatcaaatagagattatagcacctaccttgactttctaattagtaaga

SEQ ID NO: 397066 - DNA, 201 bp, Homo sapiens
gagacacaaacattcagaccataggagtgatgagctagtgaggaaaaattaaaagcaagttcaaaaacacaaatgagtgattgacagtgtcagcggtaatygaatatggcagacatcacaaacataaatcacagagattcaggaaacaacaccttaaccagaaggcatgactagtgctggaagttcccagatctgcactgg

SEQ ID NO: 397067 - DNA, 201 bp, Homo sapiens
aaaggaaggatctcctgtaatcccagcactttgggaggccaaggcaggtggatcgcctgaggtcaggagctcgagaccagcctggccaacatggtgaaacsccatctctactaaaaatacaaaaattagctgggcgtggtggtgtgcgcctgtagtcccagctgtgtgggaggttgaggcaggagaatcacttgaacctgg

SEQ ID NO: 397068 - DNA, 201 bp, Homo sapiens
ctcttgaacttgaaacacaaaaatcaatgcagaaaggttataacccggtggcatcaatgagtttccttctgtgttttctttttagatctctcaattttgtwatattgatgaatttatgcataggaggaacccaagcttaaagccaagtcttttttcctttaccataacaatacgaggaaccctggttgccaaagggggtgg

SEQ ID NO: 397069 - DNA, 201 bp, Homo sapiens; identical to SEQ ID NO: 87862

SEQ ID NO: 397070 - DNA, 201 bp, Homo sapiens
tggattagcacaggcctcttgaacttgaaacacaaaaatcaatgcagaaaggttataacccggtggcatcaatgagtttccttctgtgttttctttttagmtctctcaattttgtaatattgatgaatttatgcataggaggaacccaagcttaaagccaagtcttttttcctttaccataacaatacgaggaaccctggt

SEQ ID NO: 397071 - DNA, 201 bp, Homo sapiens
gccagaccacccactgggcaaggaccccccccctccccccaaccccgcatcccttcccccatggtggtcaccactgggcagaattcttcccttcagaggcygagggtcaggcagtcacaagtcccaggtggtcctgagcatccccaacaggaaccagatgccctcactgcagtgagtgaccatagccctctccttctcttc

SEQ ID NO: 397072 - DNA, 201 bp, Homo sapiens
agtgagtgaccatagccctctccttctcttcccagcctgatccctggaacacgcatgtctggaaaggcaccaacgggacccccacaaagcggcgagccatyggcttcaagaagctagcagagtaagtttcgtgcagtgggcgggtggggtggatgtccccacaaactcagagaacccagagaaggaggctgggcagactcc

SEQ ID NO: 397073 - DNA, 201 bp, Homo sapiens
tagatggcctcccagcaggttccctctcacccctccttcagggagagatagggcaccatcgattctcccctctaggtacccggaacccttgcgtttctttycccgtaaagggcctcccctccccaatggtgacacagaagtccacggtctggctgcagcccgtgacagccagcacaggtagagtgtgcatgtgtgtacacg

SEQ ID NO: 397074 - DNA, 201 bp, Homo sapiens; identical to SEQ ID NO: 87855

SEQ ID NO: 397075 - DNA, 201 bp, Homo sapiens
gagtggatattaacctacattaacttacacctgtgaggcacctggacccaccccaagttcatactccaatgatggagggtgcctttccaacttctcctacyttcttccttccttcccatctcaatctgttaccattttgtccccatcgtcctaaaaaagagattcaggggcagggcctgatcctgtatggagtaggttaag

SEQ ID NO: 397076 - DNA, 201 bp, Homo sapiens
gacacagccctccattttccatacttcagtcaaagtgtccccacctcaacatagagaaatagctcatgaatttgaccccactggttcaagcaccaatattytcttggtggcgtctatgcacagagggtctgtgaagcaaattaatttcatagaccttacaaggaatggaaccagaatacttataactatttcattcccttt

SEQ ID NO: 397077 - DNA, 201 bp, Homo sapiens
tagactgttgaaggtgacaccgttctcttctgtgatttttatttcaggggttatttgcagagctctgttcagtaaagctgactcaggtggggatgtgtccygcagtgtcgaggtagggtgtcctccaggggcttcccaggtgtgctggtgcaacacgagataaagaccaagccagttcaggtaacccccaggtagagtcac

SEQ ID NO: 397078 - DNA, 201 bp, Homo sapiens
caaacctaacatcttggcagtctaccaattttgacacgcctacccctcttgtactagatcttcactaaccaatatggtagccactagccacacatagccayttaaatttaaacttaaactaattaaaattcagtaggatgaatgggtaaataaaatgtggtacatcaatgcaatggaatattcttcatccataaaaaagaa

SEQ ID NO: 397079 - DNA, 201 bp, Homo sapiens
gagacattatgagttgtcacaactcacatgtactcctggcatctagtgggtggaagccggggatgttgctcaataccctaccatgcataggacagtgccaygacaaaggagtgttcaccccaagtgaccagggtgccagcgtagagataccctgggttgaatttgctgagctcagcagtgagaagaattggggaatggaga

SEQ ID NO: 397080 - DNA, 201 bp, Homo sapiens
tatttttcctcctagataaagcaattaaaatgcacagtgcccgtcccaggagcccagcaagccaccagaagcacccttcaatagggaaggattcgaatccracccacccctacccaatagaaccctgggtggttgcacaggcacgaagtcaccccagctataccatttcctcttgcccttcagaggaagggatcctgggga

SEQ ID NO: 397081 - DNA, 201 bp, Homo sapiens
tgtttgtgagcctctatccgcatggcacacgctaaggtctcagtaccccatccctggcacctcagccaccctgcacatcaggcagagagccatcggtgacrtaaggtcttcctggtccccaggaatgaacccctgccccatggtcctggtcttcgggtgccggcaatccaagatagatcatatctacagggaagagaccct

SEQ ID NO: 397082 - DNA, 201 bp, Homo sapiens
ggttgtaagtcagataacccaagctctgccctgtatttttcctcctagataaagcaattaaaatgcacagtgcccgtcccaggagcccagcaagccaccaraagcacccttcaatagggaaggattcgaatccgacccacccctacccaatagaaccctgggtggttgcacaggcacgaagtcaccccagctataccattt

SEQ ID NO: 397083 - DNA, 201 bp, Homo sapiens
ggagatccactaaaatctgaacacacttcacctccttcctcagtgcgtgcatatgtatgtgtgtgtatgtgtgtgcatgtgcgtgcatgtgagcacctgtstacatgtgtgtgcacgcatacatctgcctgtcctagtgtttgtgagcctctatccgcatggcacacgctaaggtctcagtaccccatccctggcacctca

SEQ ID NO: 397084 - DNA, 201 bp, Homo sapiens
tcccaggctggccttgaactcctagcctcaagtgatcctctctccccggccccccaaagcactgcaattacaagcatgagccactgcacctgccaactgtkacttttattttgccttcttcctggaccccctcaggtcctcatgggaagtatgtggcagctgggttcaagcttgtctctgtccatctccttggcacagggt

SEQ ID NO: 397085 - DNA, 201 bp, Homo sapiens
gacctcagcttgaggccaagcttagctcactccatggctgtgtgacctcaggttgatcacttaacctttctgagcttcagttctgttatctgtaaaatgasaacagtaactcccacacggggctgttttgaagactctgtgatgatgtatgtgaaaggggttctggaaacaatgctggtatgccaagactggtgattgtaa

SEQ ID NO: 397086 - DNA, 201 bp, Homo sapiens
acggggctgttttgaagactctgtgatgatgtatgtgaaaggggttctggaaacaatgctggtatgccaagactggtgattgtaaggaaggaagggaaccygaaacagagggaagagtgtcccatggagccatttggggccaatagtgtcatcgtggctttcagagcagcccgctttttgccctttctgtctcctctttat

SEQ ID NO: 397087 - DNA, 201 bp, Homo sapiens
acttggacataaaatggaagagggggattccagccaaggggatcagcagggacacagttctggacagaaatgtatatgtgagaagagatctataagcaagkagttggacccgagatgccatctttttgttgacacaagaagccaggaccatgtttgcatagcctgggatggggggccagcgaatccagctggcaagagctc

SEQ ID NO: 397088 - DNA, 201 bp, Homo sapiens
ttttatagatgaagaaacggaggcaccaagatgctgaagcccttgaccgagtcacgtgtcagtaaatgacagaatcaggatttgaatcccatgcctgtgaycctgaaccatgacattcccctttaacccttccttccaacctctgcgacatcagcttatagactgttgaaggtgacaccgttctcttctgtgatttttatt

SEQ ID NO: 397089 - DNA, 201 bp, Homo sapiens
gctcctaagtagtcaaggagcagaaggaaggattgagacctgggagggagatccactaaaatctgaacacacttcacctccttcctcagtgcgtgcatatrtatgtgtgtgtatgtgtgtgcatgtgcgtgcatgtgagcacctgtgtacatgtgtgtgcacgcatacatctgcctgtcctagtgtttgtgagcctctatc

SEQ ID NO: 397090 - DNA, 201 bp, Homo sapiens
atttcctcccagacaaagagagatgagataacggctttttatacccattgagataattctgttgcttgatttccatcagccaaccttgactgagcaaccasgaagcaaggcctgtgaaaagccactgtaccctttagctgtcaacctcctgtcctcccatcccacccccagctctcgaaaccacaaatctacttcctgtct

SEQ ID NO: 397091 - DNA, 201 bp, Homo sapiens
acgccttgtgcccacctcacacctccttagcccaccttttccttctgctatcgctacagcagccggctttgcagaggtggaagctggcagcccctcacctsacccccatctcttgctatcggcccagggcttccctggcactgtaacatagggtgcctgcaataaccagctgcacacctggaaatgtgcaggtgttaacac

SEQ ID NO: 397092 - DNA, 201 bp, Homo sapiens
tctttcatctgcaaacctatcattgagccaccgccaagcatgtgtgtatatgtgatgcttctggatgtggctagacataagtcacacagaggggacactcrgggggagaagggaatagggcccaaatggctgctgctgttccattgcctcttccccttctccctgtacttctcatatggcccatatgtgtcccaagcttga

SEQ ID NO: 397093 - DNA, 201 bp, Homo sapiens
accacatccagctaatttttcttaattttttgtagagacagggtcttactatgtttcccaggctggccttgaactcctagcctcaagtgatcctctctccycggccccccaaagcactgcaattacaagcatgagccactgcacctgccaactgtgacttttattttgccttcttcctggaccccctcaggtcctcatggg

SEQ ID NO: 397094 - DNA, 201 bp, Homo sapiens
cacctgggccacagcatctccagctgggcccccattggcctttggtaccccaaccagaccccatttctttgagcctgagagagtcagtgacttgcaagatkccagcatttcagggagaaagttaggagttaagaaaataactagaatataaatttgattttggcggggggcaggggagacagagtttcactctgttgccca

SEQ ID NO: 397095 - DNA, 201 bp, Homo sapiens
ccagaccacacttgatgtatctcagagcttggaatccctctgctggggcatatttcaattaaggaactaagcccagtaacttagccttcaacctgaatttycaccttttattctgatcttgcccacttgaacgtaagcagctccccatccacccttcctggggattactctcgctttgtaccctctccccatctgtgtccc

SEQ ID NO: 397096 - DNA, 201 bp, Homo sapiens
cccgagtagctgggattataggcatgtgccaccacgcctggctaatttttgtatttttagtagagacagcgtttcgccatgttggccaggctggtcctgarctcctgacctcaggtgatccgcccgtctcggcctcccaaagcgctgggattacaggagtgagccaccatgcccggccagcacccccatttcttaacacat

SEQ ID NO: 397097 - DNA, 201 bp, Homo sapiens
aaaccaacctgccaacatggtgaaaccccatctccactaaaaatacaaaattagccaggcgtgatggtgggtgcctgtaatcccagctacttgggaggctragccaggagaatagcttgaacccgggagacagaggttgcagtgagccgagatcgcaccactgcactccagcctggaccacagagtgagactccatctcat

SEQ ID NO: 397098 - DNA, 201 bp, Homo sapiens
ggccggagttgtgacatttctaccagaagtatctgtcttgtttgttttttacctactggggtttagcatcagatttagggcaagggtttcttctacaaaastgtttgaacgctgctcatttaggaaagtggggagaagaatgggatcgcccctggagctaggtggaggtctggcgctcagtttttgtgtcctttccaccag

SEQ ID NO: 397099 - DNA, 201 bp, Homo sapiens
ggaggctgagacgagcagatcacctgaggtcaggagttcgaaaccaacctgccaacatggtgaaaccccatctccactaaaaatacaaaattagccaggcrtgatggtgggtgcctgtaatcccagctacttgggaggctgagccaggagaatagcttgaacccgggagacagaggttgcagtgagccgagatcgcaccac

SEQ ID NO: 397100 - DNA, 201 bp, Homo sapiens
taggaaccttaaaatgctacttattgttccttaacatgactatgatcatatccaccaaggatttgaagctggtacttgagaaactgcctctgggaattaarggccagataaactcaaccatgagtacgagatccaagcccacagcctaacacctgccactcttgggtaaaaccaagcaataccccaaatctcttgatcttc

SEQ ID NO: 397101 - DNA, 201 bp, Homo sapiens
aggggagacagagtttcactctgttgcccaggctggagcgcaatggcgtaatctcagctcactgcaacctccgcctccttggttcaagcgattcttgtgcytcagcctcctgagtagctgggattacaggcacccgccaccacacccggctaatttttgtatttttagtagagacgaagtttcaccatgttggccaggctg

SEQ ID NO: 397102 - DNA, 201 bp, Homo sapiens
ctattaaaactatgtattatttttcaaaagtctacggattggctgggtagatcagtgattgatctggtccagactctgttgattttggtgaggctttctcwtgcatctgtagttacatctgaggggtcagctaaggtcagggtggtctaggatggtcctggctgagataactcaaccctgttccatgtggtctctcctctt

SEQ ID NO: 397103 - DNA, 201 bp, Homo sapiens
tcatgaccactctgggggtagagtaggatagatgaagagcttttcctgctagaaagcagatgatgcactcacagacctacatctctgttaaaatgctccagaggccgggtgcagcggctcacgcctgtaatcccagcactttgggaggccgaggtgggtggatcacgaggtcaagagatcgagaccatcctggccaacatg

SEQ ID NO: 397104 - DNA, 201 bp, Homo sapiens
gtttccctgcaaaccagaacccagcagcaagatgccgaaagacactcagccggttgacacccgggccacacacagcagagaaatgacacagcacgcgggcracgcatgaatacacagaaacacacacacagagcaacgccagatggagaacgcagcccaggctgagcccggggattcattatttcctcacccacacagagg

SEQ ID NO: 397105 - DNA, 201 bp, Homo sapiens
agaaacatgcaagaactcttgaggcttagactcagagttgtcacagggtcatttctgccacatcctaagggtcaaaaccagcccagagtcaaggggttaarggataggttccacttcttcatggagaattgttgtaaagccacatctcaaagggtgtgaatacagggaggggaaaaattagggtcctgttttgcaatcagt

SEQ ID NO: 397106 - DNA, 201 bp, Homo sapiens
ccattttgtaaaccaaaaatttttctaactttctaaaattgaattcattgccaacatttaaaaattataagagttccctttaaaactcagatttccagttyctctggaaagatttagcagtcctgggtccccactcctgtcaggtgacaactgacaggagtggagccgtggctgcccgctttggacaaggcctggctcact

SEQ ID NO: 397107 - DNA, 201 bp, Homo sapiens
ctctctgctccttgcagaagtacgtgcaggacatcctgcaggagcagctggcggagtctgtgtaccgagccctgaaggagcaagggggccacatatacgtmtgtggggacgtcaccatggctgctgatgtcctcaaagccatccagcgcatcatgacccagcaggggaagctctcggcagaggacgccggcgtattcatca

SEQ ID NO: 397108 - DNA, 201 bp, Homo sapiens
tccaggagcagacctgaacccccgacttggactcaagccctcccacacccacctgtcacctgccttgtacctccacaggtgtcatcagtaactggacagaygagctccgcctcccgccctgcaccatcttccaggccttcaagtactacctggacatcaccacgccaccaacgcctctgcagctgcagcagtttgcctccc

SEQ ID NO: 397109 - DNA, 201 bp, Homo sapiens
tggacaaggcctggctcacttgtttgccacagtccccacccagctggttgacttatatctacaatgttcagcctttgtggccatttgagtttacagtgtcwgctttatcttgcatccagaaatcaaactgttgcatccagaaatcaacttggaattttttgtagcttccagcctcttggaatagctctccccttccactaa

SEQ ID NO: 397110 - DNA, 201 bp, Homo sapiens
tctgtgattccccagatctattctaacatcgggatgacagccctgcagctctctccctgtgatgaaccagaccgtcctcctcatcccgccctagtggtgtygactcaccaccaagttctggggcctcagtgcttctggatgcatctttcatgtgccgtgttccgacaaactgaatcctgcttttgcagcattccgaaaagg

SEQ ID NO: 397111 - DNA, 201 bp, Homo sapiens
tggatgcatctttcatgtgccgtgttccgacaaactgaatcctgcttttgcagcattccgaaaaggagccaatgacagtcatcgactcccatgggagacargaccagtccacgtgtccgtaccttttacctggtctttcaacacaaagtgccttaagcagcacatccaccagacactacggatgctcaatagaaaaatgac

SEQ ID NO: 397112 - DNA, 201 bp, Homo sapiens
tccatccatgtggctgcaaatgatgagcttttgccaatgcagaggagctgcaggggggactattagagatcagaggtctctgattgtaaaatgaaccaaaygtagcctctaccaccttgcttagaaaccctgggatcacctgccccagcccactgcaaagccttgctcaataaaaattctacccaggagaaccacccatgc

SEQ ID NO: 397113 - DNA, 201 bp, Homo sapiens
ctaaagatatccccctttctcatgactgatcaaccttggcccaaccagctgagcaaataaatgcacatagtgccaggccattgatggctcaccattgaaaraagggggctgctaccttccttcattgactagacacggactttagcagtagccattcttttcactttccatcctcaccactagccctcaggaaaatctcta

SEQ ID NO: 397114 - DNA, 201 bp, Homo sapiens
catagggaaattccatctgtacaaaaaattccaaaattacccaggcatgacggtgcctgcctatagtcccagctacttgggaggctgaggtgggaggatcmttgagcttgggagatagaggctgcagtgagccgtgatcgcaccactgcactccagccagggtgacagagcaaaaccctatctcaccataataataataat

SEQ ID NO: 397115 - DNA, 201 bp, Homo sapiens
ctactcaggaggctgaggcaggagaatcgcttgaatgcaggaggcagaggttgcagtgagccaagatcacaccactgcactccagcctgtgcgacagagcragagtccatttaaaaaaaaagaaaagaaattatttcacgccactagccctgtccctcttcaatctgaaatccagagataccccagcctgtatatctgtgt

SEQ ID NO: 397116 - DNA, 201 bp, Homo sapiens
gcttccagatccagatgaaccctaggaaccagccactggatttgcagtgaggagttcactggtgaccttgataaaagcctcagtgtagaatgatggctgakcattgtggcccttacttgtaatcctagcactttggaaggccgaggtgggaagattgcttcagctcacaagtttgagaccagcctgggccacatagggaaa

SEQ ID NO: 397117 - DNA, 201 bp, Homo sapiens
ttgcagctctctggaggtgttgtctttttgctccccaggaaccaaagactggtgtgagctctgagaaggctcagtcgtgcaagttcccagacagggcaagrtctgcccatggagggccagtgggactccagactctaatactgccattcacaattatggtcgctaagttccccactatgctaagggcggggatgccttgct

SEQ ID NO: 397118 - DNA, 201 bp, Homo sapiens
catattgcacaggtctagctgaaagaacaagagagactatatgaggccgacatgatggctcatgcctataatcccagtgatttgggaggttgaggtgggarggtggcttgaggccaggagtttgagaccaccctggggaatatagtgagaccccatctctaaatttttttttttttttaattagcaggctgggcatggtgg

SEQ ID NO: 397119 - DNA, 201 bp, Homo sapiens
actgccctccagcctgggcaatagagtgagactccatctcaaaaaaagaaaagaaaagaaaagaaaagaaacaatagctctctgctgcacagaggggtccwggagaaatgggttgccagatccacggtgaaatgcaggggggtttatagatgcctggtgaggaggcagtgtttgatttacataggacgcaaaatattggtt

SEQ ID NO: 397120 - DNA, 201 bp, Homo sapiens
ggtagctagacagaaaccattctaacctaacttctcctgccccagaagctgcagcactgccccatgtagttgtgcaggttgggcactgcacaaagagatcygaggagaactgtggagccctctatatactcagtctctttagtgtgaccctctagacacacttttaaagattccccaggattttgcagaagagagtttaaa

SEQ ID NO: 397121 - DNA, 201 bp, Homo sapiens
atggaaactggacattcaaaaaccgggacaagcgggtgtccttatagcagcttaatttattcatctgtaaagttgggggacagccgaacctgatgttggtsaggacaaggatgaaaaataggatagatgaggatgttttgcaggaggaaaaggaggcagagaaagtgttgtggaattgttattaagataatgattgacggc

SEQ ID NO: 397122 - DNA, 201 bp, Homo sapiens
aagagagtgggatttcccaaagccttgacaacagagtgtgtgtcacattttaaacaatcattaatgctcgtgcttgtaactctaagctgagcctgttactrcctctgagatatgggcatcagaggtgggaagattgacatcatcataggcaaactgtagccatgaaactgggggaattccgtggctgaggagactcaggat

SEQ ID NO: 397123 - DNA, 201 bp, Homo sapiens
aggtgtgatatcagctactcaggaggctgaggcaggaggatcacttgaacctgggaggcagaggttgcagtaagccaagatcacgccactgcactcagccygggcaacagagcaagattacgtctcaaaaaagaataaaaataatagaaatttaaaaattaaaatacaaaaattagccaggagtggtggcgggtgcctgta

SEQ ID NO: 397124 - DNA, 201 bp, Homo sapiens
ctctactaaaaatacaaaaaaaaaaaaaaaaaaaaaaaatagccaggtgtgatatcagctactcaggaggctgaggcaggaggatcacttgaacctgggargcagaggttgcagtaagccaagatcacgccactgcactcagcctgggcaacagagcaagattacgtctcaaaaaagaataaaaataatagaaatttaaaa

SEQ ID NO: 397125 - DNA, 201 bp, Homo sapiens
tggaagcaggtaatgggaagggttgcataaccttgtggacgttcgacatgccacaggattgtgcatatttaaacagtgagttgtatgttatatgaattacrtttatacctatctatacagtacaaaattaaataaggctggacatggtggttgatgcttgttgtcccagcacttttggaggctggggcaggaggattgctt

SEQ ID NO: 397126 - DNA, 201 bp, Homo sapiens
caggtggatcacttgaggataggagttcgagaccagcctggccaacatggtgaaaccccatctctactaaaaatacaaaaaaaaaaaaaaaaaaaaaaaawagccaggtgtgatatcagctactcaggaggctgaggcaggaggatcacttgaacctgggaggcagaggttgcagtaagccaagatcacgccactgcactc

SEQ ID NO: 397127 - DNA, 201 bp, Homo sapiens
acttagctgggcatggtggcatgcacctgtggtcccagctactctggagactgaggtgggaagatcgcttgagcctgggaggcagaggttacagtgagccragatggcgccactgcattccagcctggacgatagagcaaaaccctgtctcaaaaaaaaaagtttgccaagaccaggcacagtggctcacacctaccatcc

SEQ ID NO: 397128 - DNA, 201 bp, Homo sapiens
gcaggtggatcacttgaggataggagttcgagaccagcctggccaacatggtgaaaccccatctctactaaaaatacaaaaaaaaaaaaaaaaaaaaaaaatagccaggtgtgatatcagctactcaggaggctgaggcaggaggatcacttgaacctgggaggcagaggttgcagtaagccaagatcacgccactgcact

SEQ ID NO: 397129 - DNA, 201 bp, Homo sapiens
tcctttcctttggataaatgcccactggtgggattgctggatctcgtggtagttctatttgcagttttttgaggatctgccataccgttctgcatactcckgtactagcctatattcccaccaacagtgtatgagagttcccttttctctgcaaccttgccagcatttgttattttttgtctctttataattgccgtccta

SEQ ID NO: 397130 - DNA, 201 bp, Homo sapiens
aatcccagcactttgggaggccgaggcaggtggatcacttgaggataggagttcgagaccagcctggccaacatggtgaaaccccatctctactaaaaatmcaaaaaaaaaaaaaaaaaaaaaaaatagccaggtgtgatatcagctactcaggaggctgaggcaggaggatcacttgaacctgggaggcagaggttgcag

SEQ ID NO: 397131 - DNA, 201 bp, Homo sapiens
gatctgccataccgttctgcatactccggtactagcctatattcccaccaacagtgtatgagagttcccttttctctgcaaccttgccagcatttgttatkttttgtctctttataattgccgtcctaactgtgatgaaatgttatcttattgtgggtttcgtttgcatatccctgatgttgagtgaagctgagcatttct

SEQ ID NO: 397132 - DNA, 201 bp, Homo sapiens
agtggctcatgtctgtaatcccagcactttgggaggccgaggcaggtggatcacttgaggataggagttcgagaccagcctggccaacatggtgaaaccccatctctactaaaaatacaaaaaaaaaaaaaaaaaaaaaaaatagccaggtgtgatatcagctactcaggaggctgaggcaggaggatcacttgaacctgg

SEQ ID NO: 397133 - DNA, 201 bp, Homo sapiens
gatatctcagacttgtttggccaggtgctccacactgctcgggggaggattagagaggaggttgagaagacttagtcagctctagccagatcattcccggmctaactggggtcaggaagaatccaagaccaattgactataagaatcccatgggattccatcaagctgtgtttctagtatctgccaatcccttgaaccatt

SEQ ID NO: 397134 - DNA, 201 bp, Homo sapiens
acatgtagttgcagggttctaagagaatgagcagaaacatgcaagaactcttgaggcttagactcagagttgtcacagggtcatttctgccacatcctaarggtcaaaaccagcccagagtcaaggggttaagggataggttccacttcttcatggagaattgttgtaaagccacatctcaaagggtgtgaatacagggag

SEQ ID NO: 397135 - DNA, 201 bp, Homo sapiens
tcaaaccctgcgctcaggcctaagaaaagcgcgcacgcagccaccacggagggagggtccccagggacgccgctaggcaagggtgcggtgcaggcgagcgygcccataggcgcctcatctcacctctggcggcccacgacattgggagacagcagaaaggagaccccagacctctcctcccgagaggaatgagggaaaatt

SEQ ID NO: 397136 - DNA, 201 bp, Homo sapiens
ctcctgagtagctgggactacagatgcgcaccaccacgcccggctaattttttgtattttagtagagatagggtttcaccatgttggccaggatgctctcratatcctgacctcatgatccgcccacctctgcctcccaaagtgctgggattacaggcgtgagccaccgcgcccggcccattgatcatttttaatgttgaa

SEQ ID NO: 397137 - DNA, 201 bp, Homo sapiens
tggggtagacatctagagaggagaggctctcacggagaaggcagccgaggagggcaggaacctttccagtgactcccctgggttctggtcctagatcgacsctttacttgttgcgtgaccttcggtaagtctcttcatctttcccagcctcagtttctcatctgtaaaatggagaaactacctttttcgtggggctgtcat

SEQ ID NO: 397138 - DNA, 201 bp, Homo sapiens
aaaaaaaagctaaaatcaaagaatggaacttctttccttaaaagcttcctgtctgatgctcacagtgaagttgcagctaatctagaagttgagttcaaaarataagataccttgtaagacaaaacatacctgtagtcaaaaatatgtttgtaatggaaccgcatctaatgtgggattgagttctaaaggtatttggtaaag

SEQ ID NO: 397139 - DNA, 201 bp, Homo sapiens
cggggtttcactgtgttggccaggctggtctcaaacacctgacttcctgatccacccgcctcggcctcccaaagtgctgggattataggcatgagccacckcgcccggcgtctagtgcattcttaaagggaaacaaggtctgatgtttccgtggaaatgactggctgcaaaagaactctttggaagactggctcaagtcaa

SEQ ID NO: 397140 - DNA, 201 bp, Homo sapiens
  misc_feature (1)...(201): n = A,T,C or G
ccagaaattcggctgtgctttgatggaaatgaggcaccccaactctgtgcaggaagaaaggaagtaagtgaatgacccctccgacgtcacccgccaccccngagggtaactggacattgacttttggcacctggggttcacatttgagttctggatggtggctgtaatctgaagtccatttgtaatgggtcttagttgtga

SEQ ID NO: 397141 - DNA, 201 bp, Homo sapiens
atctgggacctcaacagatggcctcttttattagtcctgttatctcgctcctccccctccctggtgatgaaaactgtcggctgccgcccacaggccacacyctgctcctcctcctcacgcctggccccccaccctctgagtcctgggcccagacccgatgtcatcaccacatctgtcatccccgccctgggatttcagctg

SEQ ID NO: 397142 - DNA, 201 bp, Homo sapiens
ttgcatcctgcatgcagggcccctgactgctatattaatctccccgtttctcccctcctgagtcatctaatattgctgctggctaattaaaacatcaaagygccaagtacaacagccctgccagaagcctcctaatgcctggtttcaagtgtgcaatccagtgaaacccagggcggagggtggcacggctcgcactcgggc

SEQ ID NO: 397143 - DNA, 201 bp, Homo sapiens
aagactggctacccataggtcacatctgttccccagaagtgcttttgtttcacctgcaaagggttgcttataatttgaaagatttcaagcaattccatgcytagatacataccctaaagaaattctcacacctgttcacaaggaaccatcagtaagaatgttcactgaaacattgtttatagcaggaaaaaattaaattaa

SEQ ID NO: 397144 - DNA, 201 bp, Homo sapiens
tgcaaaccaaggccaaggcacaaggcctctgccatacacagaggcttaagactggctacccataggtcacatctgttccccagaagtgcttttgtttcacytgcaaagggttgcttataatttgaaagatttcaagcaattccatgcctagatacataccctaaagaaattctcacacctgttcacaaggaaccatcagta

SEQ ID NO: 397145 - DNA, 201 bp, Homo sapiens
aggtagtgttaagtgctatggggaaaacaaagcatggtaagggtgattgggggcagagaatgacaaggaagtgacactgctttaaagaatgatcacagccrgcacagtggctcacatgtgtaatcctagcactttgggaggctgaggtgggcagatcacctgaggtcaggagttcgagaccagcctggccaacatggtgaa

SEQ ID NO: 397146 - DNA, 201 bp, Homo sapiens
aggaggcagaggttgcagccagccgagatcacgtcactgcacttcagcctgggcgacacagtgagactctcagtctcaaaaaaaaaaaaaaaaaaaaaaaagtccttttaaatgtttctcttcctggccagttgtacttgtgagcattcattcattcattcattctttcaaaacaagcccctgctaggtgccaggtcctgt

SEQ ID NO: 397147 - DNA, 201 bp, Homo sapiens
cccagcctaggcaacagagcaagaccctatctcaagagaaaaaaaaaggccgggcgcgatggctcacccctgtaatcccagcacttcgggaggctgaggcsggtggatcatgaggtcaggagatcaagaccatcctggctaacacggtgaaaccccatctctactaaaaatacaaaaaattagccgagcgtcgtggcaggt

SEQ ID NO: 397148 - DNA, 201 bp, Homo sapiens
aagatacaagggccaaaacataaacatgaaacttgttgtgcattttcaatatttgcatttagcaagttaaggctttcaacaaacaaacacagtacgatgcrgtatcatagggcaggccacgagataattacaggattgatgttaagattaattcctagtgtatatatacattctggtctggtaatgggaccaagctgaaag

SEQ ID NO: 397149 - DNA, 201 bp, Homo sapiens
aggattttgcagaagagagtttaaaactcaccccggctgggctcggtggctcacgcctataattccagcactttgagaggccaaggtgggaggatcacctraggtcaggagttcaagaccagcctgactaacatagtgaaaccctgtctcttctaaaaatacaaaaattagctggctatggtggcgggcacctgtagcccc

SEQ ID NO: 397150 - DNA, 201 bp, Homo sapiens
ttttctaagatacaagggccaaaacataaacatgaaacttgttgtgcattttcaatatttgcatttagcaagttaaggctttcaacaaacaaacacagtaygatgcagtatcatagggcaggccacgagataattacaggattgatgttaagattaattcctagtgtatatatacattctggtctggtaatgggaccaagc

SEQ ID NO: 397151 - DNA, 201 bp, Homo sapiens
cctcagaaaagctggggcgtgtagcaccagcctgacctacaggtgaagttcatggtgtaatccaaacagcctgtcccaggggcctgaaattccaggcccasaggacatttctttgactgttaagatgtgatctcttcaaaaaaaatccagtagcctggaaaagataggcattagtccttatcaaatggctatgcttatgta

SEQ ID NO: 397152 - DNA, 201 bp, Homo sapiens
gggaggctgaggtgggaggatcacttgagtctggaagttcaagaccagcctgggcaacatactgagaccctgtccttacaaaaaaaaaaaaaaaaaaaaaatttaagttagctgggcgtggtggcgtatgactgtggtcccagctccttgggaggctgaggcaggagggcagcttgaggtgggagggtagcctgggaggtc

SEQ ID NO: 397153 - DNA, 201 bp, Homo sapiens
tcatatccaccaaggatttgaagctggtacttgagaaactgcctctgggaattaagggccagataaactcaaccatgagtacgagatccaagcccacagcytaacacctgccactcttgggtaaaaccaagcaataccccaaatctcttgatcttccaggaaacgggatgcactgagtacatctgcatgggctccatcatg

SEQ ID NO: 397154 - DNA, 201 bp, Homo sapiens
ctgcagaggcagtgggtgtctcgggaagaagataccttttcttcccaatcaccagtccaggcaggagagtgggtgtctgttgctaacagcctatgagactraagatatccccctttctcatgactgatcaaccttggcccaaccagctgagcaaataaatgcacatagtgccaggccattgatggctcaccattgaaaaaa

SEQ ID NO: 397155 - DNA, 201 bp, Homo sapiens
tgggaggctgaggtgggaggatcacttgagtctggaagttcaagaccagcctgggcaacatactgagaccctgtccttacaaaaaaaaaaaaaaaaaaaaaatttaagttagctgggcgtggtggcgtatgactgtggtcccagctccttgggaggctgaggcaggagggcagcttgaggtgggagggtagcctgggaggt

SEQ ID NO: 397156 - DNA, 201 bp, Homo sapiens
ttttatagaaggaaggctccaacgggaagttgtgtgctgggggtagggagtccacacctgtagtcatttaaacagcaggtgtatccactgcgtctgtagcycaggcattactgtccagcctgagcccctgaccgctcctgacatcctggcctccgggcatcagtctcctctttgacagccaggaccccagaccctcagtat

SEQ ID NO: 397157 - DNA, 201 bp, Homo sapiens
tggtggaggctgatgaggaaagttagatgatgatgattacaataatcatgatggtaacaatgagaatgatggtggctatggtgatgattgtggtagtggtsgtgataaagatgatggtgatggtggtggtgatgatgatgatgatgatagtgacagcccctactttagaatggatgtgatgagtgggctggaatactaggc

SEQ ID NO: 397158 - DNA, 201 bp, Homo sapiens
actctagcctgagtgacagagtgagaccctgtctctaaaaaaatattgaaataaataagcaaaaagatacatgatgaaaagctctatctgttcctaatccyagtcacatagttttcctccccagaatcaagcaatattaatggtttttgtgtgttcttttagccgtgttttatgcattgacaaacacacacattaattttg

SEQ ID NO: 397159 - DNA, 201 bp, Homo sapiens
cccagtgcccctctttgcccagccccatcccccctggctttctttctagtccagaccgaagctgaaaggggaaaggggggcttggttcctgtcctcactgygggcttgggcagagtgagttccctcaaggagcaaaaagacctctttgaccagcctggggaccaccaccttttctgaatcatctcactcctaagccattaa

SEQ ID NO: 397160 - DNA, 201 bp, Homo sapiens
caccgtgttgcccaggctggtcatgaactcctgagctcagtcagtctgccccccggggcctcccaaagtgctgggattacaggtgtggcacacatttcacrtacaacgttcactacagtcacagctccactgagattccagaatccccagttatacctgaaattgcactggaacttcctagattgttaaataaaataaatt

SEQ ID NO: 397161 - DNA, 201 bp, Homo sapiens
gcatctctggtcggagtgactggaatagccacccaacttgtctcttggtttctaagcttgtgtctaaaaacatcattttccgaagagcagacggaagaatytttcctttttttctttcctttattttatgtatttatttatttgaggttaaaagtggaagtttaataggtgaaagaaagggccgggtgcagtggctcacag

SEQ ID NO: 397162 - DNA, 201 bp, Homo sapiens
gaaggatggatgcatggaaagatggatgggtgggtgggtggatggatgggtggatggatggatggatggaaagatagatacatggatgggagggtggaagsgtagatgaatggaagagtagatgagtggatgggtgaatggatggaaggaagacaacgaaagggtagagggaagaaaggaagggaaggaagaagggaagga

SEQ ID NO: 397163 - DNA, 201 bp, Homo sapiens
tttcaccgtgttgcccaggctggtcatgaactcctgagctcagtcagtctgccccccggggcctcccaaagtgctgggattacaggtgtggcacacatttyacgtacaacgttcactacagtcacagctccactgagattccagaatccccagttatacctgaaattgcactggaacttcctagattgttaaataaaataa

SEQ ID NO: 397164 - DNA, 201 bp, Homo sapiens
cagtgacacaatgttggctcactgcaacctccgcctcccgggttcaagcaattctcctgcctcagcctcccaagtagctggaactacaggtgcctgccgcmatgcccagctaattttttgtattttagtagagatggggtttcaccgtgttgcccaggctggtcatgaactcctgagctcagtcagtctgccccccggggc

SEQ ID NO: 397165 - DNA, 201 bp, Homo sapiens
agccatccgtcactcccatttggtgtacaggtacacaaagaaaacaagagatggtcaaccaaaccaaacctaacatcttggcagtctaccaattttgacamgcctacccctcttgtactagatcttcactaaccaatatggtagccactagccacacatagccatttaaatttaaacttaaactaattaaaattcagtagg

SEQ ID NO: 397166 - DNA, 201 bp, Homo sapiens
ttacaatagctgcaacgctaaggaagcaacttaagtgtccatcaacagatgaatagataaagaaaatgtggcacagatacacaatgaagtactatacagcygcaaaaaagaatgagatccagtcatttgtaacaacatggatggaactggagatcattatgttaagtgaaataaggcagtcagagaaagacaaacatcaca

SEQ ID NO: 397167 - DNA, 201 bp, Homo sapiens
ctacattccttgaaatcataagctgaagattgtgatggaaatgtgactagaagtaactgtagtctaggtcctcaggcccaccaagaagaatattaatgaakcaaccgcctgaatcatcatctgttggtgaacacaagagttgggagccttggtccattggggctactataccaaataccataaactggtggcttgtaaaca

SEQ ID NO: 397168 - DNA, 201 bp, Homo sapiens
actttatgggtctcaggtttcctgagttaagcatggccagaaacctttttagtaccagttaagaccaagtgcagatgaacagttaccactgtggtggacawgggtaagttggtagattatagaagaggccatgggagtgttatggtttgactcaacatacaagagaaggccctagaatcaggactggtcacttgaagatcc

SEQ ID NO: 397169 - DNA, 201 bp, Homo sapiens
tgggaggccgaggcaggtggatcacctaaggtcaggagtttgagaccagcctggcaaatgtggtgaaaccccgtctctactaaaaatgcaaaattagctgrgcatgttggcacatgcctgtaatcccagctacttgggaggctgaagcaggagaatcacttgaacccaggaggcagaggttgcagtgagacgaggccgtgc

SEQ ID NO: 397170 - DNA, 201 bp, Homo sapiens
tagcaagtccctggtgaaaatattgtcacctaagtgagctatttgtttgcagtggctgctcctatcattagcttgatgttccctgatgtagatgaggaacrtggggacaatatttttatagaaggaaggctccaacgggaagttgtgtgctgggggtagggagtccacacctgtagtcatttaaacagcaggtgtatccac

SEQ ID NO: 397171 - DNA, 201 bp, Homo sapiens
gcccaccaccacgttcggctaattttttgtgtttttagtagagacggggcttcactgtgttagccaggatggtctcgatctcctgacctcttgattcgccygcctcggcctcccaaagtgctgggattacaggcgtgagccaccgcacccggccagctcgatggttttcattgctgtggcaggacttcccagagcctgtaa

SEQ ID NO: 397172 - DNA, 201 bp, Homo sapiens
tagtagacctgtgttaaagtatgcttaattgttattattatgtttttaattttatcaattgagaatgttcaggaatttgttttctttcttgttttgtaagwacctacgtaatagcttcaattttgcttcttggcctgtaagcctaaaaatatttgctgtctgacccccacatataaaaagtttgccaacgccgggcacagt

SEQ ID NO: 397173 - DNA, 201 bp, Homo sapiens
cccacagtcccttagcatgaacattctgtcatctccttgacaggttctcagtttttggcctcggctcacgagcataccctcacttttgcgccttcggacaygctgtggacaccctcctggaagaactgggaggggagaggatcctgaagatgagggaaggggatgagctctgtgggcaggaagaggctttcaggacctggg

SEQ ID NO: 397174 - DNA, 201 bp, Homo sapiens
  misc_feature (1)...(201): n = A,T,C or G
gggagaggatcctgaagatgagggaaggggatgagctctgtgggcaggaagaggctttcaggacctgggccaagaaggtcttcaaggtaatctggatctcntggacctacaggaaaaagtaatgctccccacacccccaaagacagcacctaaaccatcaagaagagaataaacttgagagaaccctcagtacctctccca

SEQ ID NO: 397175 - DNA, 201 bp, Homo sapiens; identical to SEQ ID NO: 87891

SEQ ID NO: 397176 - DNA, 201 bp, Homo sapiens
aactcctatctccatcttagagggtggccagcctgtggaacctagctgagatcacctcatcctgagcctgttagagttcagggacaggaagccaggaaaayttagtgggtaagaagtcggattctggccgggcatggtggctcatacctgtaatcccagcactttgagaggccgaggcaagaggatcacttgagtttggga

SEQ ID NO: 397177 - DNA, 201 bp, Homo sapiens
agccacagggcaagctgcattgcccagttagggaacagacagaggccatggtcagagtcaaattggataggggagccaaaaggagaaaggctgttgggaastaggagggcagtattcagagagtagaaggactcagagagtgagacaggtctgatgaggccatctggattttggtgccaactcctatctccatcttagagg

SEQ ID NO: 397178 - DNA, 201 bp, Homo sapiens
gagggatagcattgggagatatacctaatgctagatgacgagttagtgggtgcagcacaccagcatggcacatgtatacatatgtaactaacctacacatkgtgcacatgtaccctaaaacttaaagtataataataataaatttaaaaaaaaaaagaatagaaatttattttctcatggtactggaagccacaagtccaa

SEQ ID NO: 397179 - DNA, 201 bp, Homo sapiens
gatataggatcagtagtttcagagctgaaagggaactgagtgacatttagagcagcactctcaacagaccatacttctgtttacgatcatgtaggtagccrttgacttgggaaatgcctgtaatcaagagccactctgggtatgttttggtgacattttaaagggtaaaacagaatgttccctctgatgaatgcaaacctc

SEQ ID NO: 397180 - DNA, 201 bp, Homo sapiens
acagctaaacactgttcttcttgagataccagatatattagttcaggctgtcataacaaaataccacagactgagtggtattggctgtaattctagaactsacagacaacttatctgacaaagggctaatatccagaatctacaatgaactcaaacaaatttacaagaaaaaaacaaacaaccccatcaaaattgggcaaa

SEQ ID NO: 397181 - DNA, 201 bp, Homo sapiens
ctggaggctgaggcgggagaattacttgaacctgggaggcagaggctgcagtgagccaagatcacaccactgcacttcagcttgggtgacaagagcaaaaytctgtctaaaaaaaaaaaaaaaaaaagtaaatggcaaaatgctatctaatcccacatactttatttggaaaggctctggaattctggggaaaggagggca

SEQ ID NO: 397182 - DNA, 201 bp, Homo sapiens
tgacaatatagacttaagccacatgtggctctttaaatttacatcaatccaagttaaataaaatttaaaatttagttcctccatgacaataaccacatttmaaatgctcaattgccacatgtgtctagtggctataacatgggattgtgcagatatgagacatttccatcatcacaggaagttctactagacagagatgac

SEQ ID NO: 397183 - DNA, 201 bp, Homo sapiens
acagaaatttatttctcacggttctagtggctgggaagtccaagatcaaggtgccagcagattcagtgtctggtgagggccctctctctggctcatagackgtgccttccagctgtgtccttacatggcagaagggaagaactctgatctcttcagccccttaagaggcactaaccccattcatgaggcttcaccttcatg

SEQ ID NO: 397184 - DNA, 201 bp, Homo sapiens
ggaggtaggagtctggaagggtagtagagaattatcgaattcctgggctctgtgaacaagacatggcagctcagaaagtatctgagtgtagacttccccaygtgtgccccagcccccagcaaagatgccccctggttggagccacgtgtgccttcaattcccagtctttggagacattaataggtttccagcggctgcact

SEQ ID NO: 397185 - DNA, 201 bp, Homo sapiens
gcactttgggaggccaaggtgggaggatcacttaagccctggagtttaagaccagcctgggcaacatattgggaccctgtgtctacaaaaaaaaaaaaaaatgaaaaaaattaattgattagctgggcatagtggcacatgtctttagtcccagctacttgggaggctgtggtggggggattgcatgagcctaggagatca

SEQ ID NO: 397186 - DNA, 201 bp, Homo sapiens
aaattacctaatctctctgggcatccgttttcttagttctaaatggaaatatacatcactcatgtttagttagtgccgattatgtgctaggcattttacaygcatgatctcattaaattcccgtgacaggtgggacatgaagtgggccgtcaaggctgagtaggagttggctctcagcagagggaacatgaaagagcaacc

SEQ ID NO: 397187 - DNA, 201 bp, Homo sapiens
tttagaactttcctgatgctggagcgaaaactttaaagaacatccagcttagaaaccctgctgctagaatgcacaatttcttttcttctttttctctcttyttttaattttctcatttctttttaattttttgtaattagatttgtgtgttgggtttgcttcttgagttttgggttttgttttggagttttggttgcttgt

SEQ ID NO: 397188 - DNA, 201 bp, Homo sapiens
atccaagtttgaggttcttctcagatatgaggtctaaccaaatgctgccctcccagaggccccccacataagccctatacacagtgactctcagctgggayaacagtgaagagacatctcatctgcaagctcttgttgcctgctgtgtgacctttgacaaattacctaatctctctgggcatccgttttcttagttctaaa

SEQ ID NO: 397189 - DNA, 201 bp, Homo sapiens
gtagtgcacacctatagtctcagctactctggaggctgagccagaaggatcacttggccccaggaatttgaggccagcctgaacagccagacctgtcaaawaaaaaaaaaaaaaaaaaaaaagctaaaatcaaagaatggaacttctttccttaaaagcttcctgtctgatgctcacagtgaagttgcagctaatctagaa

SEQ ID NO: 397190 - DNA, 201 bp, Homo sapiens
ccacctctctggaacattcctccaaagagaggaactcaaaacatccttttagggcaagggttgcaaacaaggttgaggaccacacacagttttcccatgarttttatttggcctgcagttttctagaaatgtgaatttgcggcaaaatcaagtttccaacctcttaaaaaaaaatccacagaactgttaacacagaatcta

SEQ ID NO: 397191 - DNA, 201 bp, Homo sapiens
ttctttccttcagcatggtggcatgggagctcccaccccctccaccgttttcctcacaccatagttctggtggaggaacagagcacggcccatcccttccraccgctgctccattggccctggggaccttggcacggaggtaatctaccctgagcctcaagcagctgtcgccctgggtggcgccatgtttagtatgttccc

SEQ ID NO: 397192 - DNA, 201 bp, Homo sapiens
gggaggccgaggcagatggatcacaaggtcaggagttcgagaccagcctggccaacatggtgaaaccccatctctactaataatacaaaaattaggcgggygtggtggcgcatgtatgtaatcccagctactcgggaggctgaggcgggagaatcgcttgaacctgggaggaggaggttgcagtgagccaagatcgcacca

SEQ ID NO: 397193 - DNA, 201 bp, Homo sapiens
gccaggacttgaccccaaattcgtactcttggcctctactgactttctggattgcattgttggccacagtgcacttggcttctagccatcacattttttargacactggaatattttctcagagtctgaaagggaaactgaggccttgggtgtcatctactaaagaaggtgcccctggcctgttgtagcgaatgcaggtca

SEQ ID NO: 397194 - DNA, 201 bp, Homo sapiens
gcatccagaaatcaacttggaattttttgtagcttccagcctcttggaatagctctccccttccactaacttctaattcagaagagggggtgatgttcccrtgtcccttcctcttcactcagatttggctccaaagcccacatggaaaggctggaagaggtgaacaaagagatcgacaccactagcacttaccagctcaag

SEQ ID NO: 397195 - DNA, 201 bp, Homo sapiens
gtgcccagtggtgcgatctcggctcactgcaacctccacctcctgggttcaagcaattctcttgccttagcctcccaagtagctgggactacaggcgcacrctgccactcccggctaatttttttgtattttagtagagacggagtttcaccttgttgcccaggctggtggcaaattcctgagctcaggcaatccacctgc

SEQ ID NO: 397196 - DNA, 201 bp, Homo sapiens
ttatagcacctaccttgactttctaattagtaagaatcaaatcacaaactagatgtaaaagcactgtgtgctgggcgtggtggctcacgcctgtaatcccrgcactttgggaggccgaggcagatggatcacaaggtcaggagttcgagaccagcctggccaacatggtgaaaccccatctctactaataatacaaaaatt

SEQ ID NO: 397197 - DNA, 201 bp, Homo sapiens
agtgatcctcccgcctcagcctcccaaagtgccaggatcacaggcatgagccactatgcccatcccataacttcttttgatagatatttatttagtgcctrttgggtatcaggctctgtgcaagacccttgacatgcattgctgaataaatcagacctggtccttcccttgtggaccaataaacctctaaatcccatcaaa

SEQ ID NO: 397198 - DNA, 201 bp, Homo sapiens
aggtggggggaagttagcgatttgtctgcactgagatttctagttacaacagggaggcttgttaaggagtcgagcctgggtatttctgagcctctggcctktctgctagtgcccctggaactcgccctgcccagtagagcagaaggaagagacactggtttgggcttctctgtttagttagaaagaggctggatttgatgt

SEQ ID NO: 397199 - DNA, 201 bp, Homo sapiens
ggttcacggagtttgggaggtcagggagggcttcctggaggaggtgacaattgagctaaagaatgagattaagaaagtttaagcaaagaggggaaggaagsgggttatggcctgagactactgaggagtgattttcctgaagaatgcctgaccagccagaggaccagctgacaagtaggatggggttaactaagttgattt

SEQ ID NO: 397200 - DNA, 201 bp, Homo sapiens
ctgctatcgctacagcagccggctttgcagaggtggaagctggcagcccctcacctcacccccatctcttgctatcggcccagggcttccctggcactgtracatagggtgcctgcaataaccagctgcacacctggaaatgtgcaggtgttaacacccggtgaccattggccaccaggagagagaagtgggtagtgaatg

SEQ ID NO: 397201 - DNA, 201 bp, Homo sapiens
gcctggccaacatggtgaaaccctgtctctactaaaaatacaaaaattagctgggcttggtggcgtgtgcctgtagtcccagctactcaggaggctgaggmgggggaattgcttgaacctgggaggcggaggttgcattgagctgagatcgtgccactgcactccagcctgggcattggagtgagaccctatctcaaaaaa

SEQ ID NO: 397202 - DNA, 201 bp, Homo sapiens
gaggtaatctaccctgagcctcaagcagctgtcgccctgggtggcgccatgtttagtatgttcccacagcgcaagtcccgccctgatgccgggtgttcccstctctccaccacaggtctgccatcaccatattcccccagaggacagacggcaagcacgacttccgagtctggaactcccagctcatccgctacgctggct

SEQ ID NO: 397203 - DNA, 201 bp, Homo sapiens
cagcctatgtgacagagcaagaccctatctcaaaaaaaaaaaaaaaaaaaaaagacagatgtaatccttatcagtgaggtctacaatgaatgggccaacaytggtcagcctgagatttatcccccctcacctactggccaaatcatttgcagagtgaagacaaatgggggactaaaggtccccataaagaggctcttccat

SEQ ID NO: 397204 - DNA, 201 bp, Homo sapiens
taaatattaaaggaagatggattgggaaattctgagatgtttactttcttctttaatgttaaacctctacacacatcagttttaggaataaatgacgcaayagaattatatcttaagtacaggttaggtcctaaagtcaatgtcaaatccgacgtgtccagcacatcgcagacactcaaaatatataggatggatggatgg

SEQ ID NO: 397205 - DNA, 201 bp, Homo sapiens
cagagtgagactccgtctcaaaaaaaaaaaacagaaaatcccttctgattttctttgtgcagagaacatgctgccgtattcacataagtttgatacccagragactgaccgttgctgagtcctttgtggtcagccctcgttctacgcccaactccagcatcttagtcctcactctccttacctctctccttcccaccccat

SEQ ID NO: 397206 - DNA, 201 bp, Homo sapiens
ttgaaggggttagaatagaattgcaatcccagagaagcccctggaaatgccaggggcatccatgtctttaacaacaatgaaaataacagcaaacacgcacrtagcacatagcacgtgctaacagcatccgaagcactgttgctgtgttccattctcatttcatcctcacctgaaccttgaggtatgagaatcccccttcga

SEQ ID NO: 397207 - DNA, 201 bp, Homo sapiens
cccttcccatgggcagctgaatcccagccgtatctaatatccatgcacttgattgcaattctcaactgggcatcaggtgggcatggaggggtgagtatcaragttctgaggggctctatttcagccacacccccagaactccaggagtctgaatctctgtatgcgatgtggagacgtcccccagaggatcccagtgcaccc

SEQ ID NO: 397208 - DNA, 201 bp, Homo sapiens
tccctccaacctactccttttttcctcggtacattccctggggacagcctggagtcctccctgcacctttggtcctcatccccaggaggaggaagaccaawagtcttggaccgaatacacacagcattgtgtgacgtctcagtgaggtagatgcatgcgtggggaactctgtggcattggatgtccatttccagagtgggt

SEQ ID NO: 397209 - DNA, 201 bp, Homo sapiens
gagtgcagtggcgcgatctcggctcactgcaagctccacctcccgggttcacgccattcttctgcctcagcctcccgagtagctgggactgcaggcgcccrccaccacgttcggctaattttttgtgtttttagtagagacggggcttcactgtgttagccaggatggtctcgatctcctgacctcttgattcgcccgcct

SEQ ID NO: 397210 - DNA, 201 bp, Homo sapiens
tttggtggcccctcagtctgtcacagcccacctcagcctgccagtgcatcagagttttcctaacttctcacacctggacaaaaatggggccaattccagtragacccaagagccccccaaggagtaagacaggggctccatcacaagtccctgggcagaggggaaaccagggtcactggcctccctttaagccccttccct

SEQ ID NO: 397211 - DNA, 201 bp, Homo sapiens
caggtagagagaagatcctgtgcagagtcctcaggtaggagtgtgcttaacgtgtttgaggcactgcttggcatgcaccttcctcccaaactgccctttgrtggcccctcagtctgtcacagcccacctcagcctgccagtgcatcagagttttcctaacttctcacacctggacaaaaatggggccaattccagtaagac

SEQ ID NO: 397212 - DNA, 201 bp, Homo sapiens
ctggaggacgcgccgcctgtcaaccagatggtgaaagtggaactgctggaggagcggaacacggctttaggtaacattcccggggacccttccctgctctrgggagctgcagaggcagtgggtgtctcgggaagaagataccttttcttcccaatcaccagtccaggcaggagagtgggtgtctgttgctaacagcctatg

SEQ ID NO: 397213 - DNA, 201 bp, Homo sapiens
aggcggctgaggcaggagaatcacttggacccgggaggcagaggttgcagtgagctgagattgcgccactacacttcagcctaggcaaaagagcgagagcragactgcgtctcaaaaaaaaaggaacaaaaaaaagcagggaaggatgggatcagaaatattgagaacttttaaatagggaggctagggcaggtctcacta

SEQ ID NO: 397214 - DNA, 201 bp, Homo sapiens
cagtcagagaataatgggtcaggagattaaacacagagagaagtttctctgtcccccttccatttgcatcttaggtctggcactgacgctacagcccccartgctgccagggtgggtctaggtatacccagagggaggctcagtctgaggccaccaaaaaatccaggccaagatttcccaaccctttccccaagaacccca

SEQ ID NO: 397215 - DNA, 201 bp, Homo sapiens
cttgtctctaaaaataataataataataaagcatacttttctgtttaacaagaacttcccactcctcccactccaagcatgatgaaatctagaagaaaagstttgcagagaccccagacccagcctccacagcctccaagtcttcctactttaactcagctcccagcattccagcccaggtggaggcagaaaccaaggctg

SEQ ID NO: 397216 - DNA, 201 bp, Homo sapiens
agctgggccaggcagtcagagaataatgggtcaggagattaaacacagagagaagtttctctgtcccccttccatttgcatcttaggtctggcactgacgytacagcccccaatgctgccagggtgggtctaggtatacccagagggaggctcagtctgaggccaccaaaaaatccaggccaagatttcccaaccctttcc

SEQ ID NO: 397217 - DNA, 201 bp, Homo sapiens
agttcgtttgatcctctcccccagccgacagtctgggacacgaggattggtgcagaactctaggcttgggtgtgatgtggaggacttcacgggagccctcrtgtcaccaagcaccaaggggctcctctccaaacgccatctcaggaagcaatgtcctgcctttgtttccccaaggaagagggagggacaagtcggcctgcc

SEQ ID NO: 397218 - DNA, 201 bp, Homo sapiens
ctgcatattgtgagcacagacaggtttggctgtgcctgttgcgctcacaatctgcagatgttttggggtgtcttatgacaagacttcatgtgttgcctgtyactcaggttctgtgggtctgtgcggggcttggaatgtggttaagagccacaggcaacaatccgtgctcgtgagaactggggctttttcccattagaaact

SEQ ID NO: 397219 - DNA, 201 bp, Homo sapiens
aggccgggggctccggtccgggggtctacgcgcccaggctccaactttgcaagaccctagtcgttcctcagccgcgcgcttggctccgagctgtgcgctgscggtaatggcggagcccttggcacagctcgctaccctcccgcgggcagcccgggctgggggatgccagtccctggggaccgttgtacctgcccaagctca

SEQ ID NO: 397220 - DNA, 201 bp, Homo sapiens
gcaccctggagtttgagaaccaccaaatgtgaccacctgatagccctggccacactggccaccacaatgccaagctcattgggggatggcttttccagagrgagaaggacacctgagaggggtgggtgagggccatttagtgaaggcgagctcctcaattacatctgggaacaagggacagctggtaaataagtccttgca

SEQ ID NO: 397221 - DNA, 201 bp, Homo sapiens
gggagcagggaaagagatggaagggttctctgatgtctcctacccatcttgctggtattgatgtttgtagtgtgaccaaacctatctttttgaacttgcamcaaactaataattacaagtagggacgggcggctacttcccaccctacccacacccacagatcacctgccccatcccagatgtgccacactgtgcatgtac

SEQ ID NO: 397222 - DNA, 201 bp, Homo sapiens
aaatttcttttgaacttgatccacaccagacctggtagagtttttttttaattattacttttaatttttgtgggtagatagtaggtgtatatatatatgtrtgtatatatttatgcggtacataagacgttttgatatgggcatgcaatgtgaaataagcacatcatggagaatggggtatttatcccctcaaacatttat

SEQ ID NO: 397223 - DNA, 201 bp, Homo sapiens
gtgaccctgggaagtcgctaaaagggaaatgaggaagtgagtgtcagtttgttagtcatggcagatgggggctccctcctggtgctgaagcatggtgaggwtgctggcaggaaggggctttgggacagagatggaagtagcacttgagtggggagcagggaaagagatggaagggttctctgatgtctcctacccatcttg

SEQ ID NO: 397224 - DNA, 201 bp, Homo sapiens
aataggaagccacttttctgagttctcactactgtatgacattgccaagttctctgcatttactgtttcatttaaccctccccgttactcagagacgaggygattacaaatgaccgcattttggaactgaggtttagagaaaataaacaactcacccagaaacacccggatagagccaggaaggaccttaaaactcttccc

SEQ ID NO: 397225 - DNA, 201 bp, Homo sapiens
agcaaggtaaatgcaataaatacacccgaagccactgaactacttgaatgaggcttgggtccaagtattgtttccatggtatgtaccctggcaagcatgcrtatgtgatttgtttaaaatcccagctcctgagggcggaggcagggctctcaggcaattctatccagcagccgtctctccctagacggtgccccccaccca

SEQ ID NO: 397226 - DNA, 201 bp, Homo sapiens
tctaagctgagcctgttactacctctgagatatgggcatcagaggtgggaagattgacatcatcataggcaaactgtagccatgaaactgggggaattccrtggctgaggagactcaggatgcttgtgtctttgggatccccaaggcaaagaatgtcaacttaacccccagatttgtggggacttgtgggtttgccgccat

SEQ ID NO: 397227 - DNA, 201 bp, Homo sapiens
aagaatagcaatctaatatgaaggaatatacaataaaaagtaagcttccttcccacccaatttctagccttccagccccctttcctagaagtaaccactgktactgatatcttgaataattttccagagctgttcagtgcatctccaagcttatgtggaaacatggatgaatgcatgatgaagctgtaggatggacttata

SEQ ID NO: 397228 - DNA, 201 bp, Homo sapiens
attatgttccctgaaaaataaacattcaacattgtcattatagttgacatttacagtttacaaagtgccctttacggtgtccatcttgcttaatcattacraaagtcttggcaactagttgttattactgtttcgatttcacaaaaggaaattgagagtcaaaatgttaaatgacttatccaagatcaaatagcttataaa

SEQ ID NO: 397229 - DNA, 201 bp, Homo sapiens
tgaacctgggaggaggaggttgcagtgagccaagatcgcaccattgcactccagcctgggcaacaagagcaaaactccatctcaaaaaaaaaaaaaaaaaagcactgtgtaaatattattctttttccctctttgagaacctacattcaaaatcagtgcaaggcagtcaggcatggtagtgcacacctatagtctcagcta

SEQ ID NO: 397230 - DNA, 201 bp, Homo sapiens
aagaatatctcagatattctcagggagggcaattgttggcttcagttcagctccactgtctctggggggaaaggggagggagaaatctaaaacattaattrcactattaagttttgggtagtaacaatgggaattaattatagatgcatctttatgctcaaattattcaaagggaaccctccaggtaccttttattccttt

SEQ ID NO: 397231 - DNA, 201 bp, Homo sapiens
ctcggtgctgggggctattatcattcaaagaggctgatggtgtcctttcagtcatgtattcattcaacaaatattcaccgagtccttcctcagtgtgtccraccctgttgaaccagagagaccacctttgagttcctgacccctctccccagagcagaatcctagaggctcttccatggtgtttctttccatgtaagtggg

SEQ ID NO: 397232 - DNA, 201 bp, Homo sapiens
catgaacattctgtcatctccttgacaggttctcagtttttggcctcggctcacgagcataccctcacttttgcgccttcggacacgctgtggacaccctyctggaagaactgggaggggagaggatcctgaagatgagggaaggggatgagctctgtgggcaggaagaggctttcaggacctgggccaagaaggtcttca

SEQ ID NO: 397233 - DNA, 201 bp, Homo sapiens
agagcaagaccctatctcaaaaaaaaaaaaaaaaaaaaaagacagatgtaatccttatcagtgaggtctacaatgaatgggccaacactggtcagcctgaratttatcccccctcacctactggccaaatcatttgcagagtgaagacaaatgggggactaaaggtccccataaagaggctcttccatggtttctttccat

SEQ ID NO: 397234 - DNA, 201 bp, Homo sapiens
ggccttgggattctgcattgctgacatgctcccaggtgatgctgctggtgctggtgcatggaccacgctttgggtagcaaagcattagaccatgttcatcrctggtggttttgcaaactccattaagacccaccccacattgtcgttcctttttctgaatccaagttttgtttttgtttttgttttctgagacagagtctc

SEQ ID NO: 397235 - DNA, 201 bp, Homo sapiens
tttttcttccctgagcaccttttgtcagccttttgactcagctcccctacaccagaaagcacccaaggatgccaggcatgagaggagaaatttgattgagyctcaagttaacactgatgtgcaatttggagaaaacagttattatgttccctgaaaaataaacattcaacattgtcattatagttgacatttacagtttac

SEQ ID NO: 397236 - DNA, 201 bp, Homo sapiens
tggtgctttagctccatgtggccagcaaatgtatactaggctcaggcctgccttaatgaatattttccctcctgtccttggtactagtttacacattcatrctaaggtagggcaactgcaaatacattttatacaattgaagagtcttgatcttttactcaagtttgacccaattgcatttattgttattactggtatatc

SEQ ID NO: 397237 - DNA, 201 bp, Homo sapiens
tgcccggcctgaaacctccagtttttaaatggtgataacaaatttgggggaaaaaatttaactgtattaaccaaacgcaattcatttgtatacctatgggytgtctttgatagaatctgaccagagcctgattgaagaatgtgatatcctggatctgaagcattttttgtgcagaacaggtgatagtttgagttgaagttg

SEQ ID NO: 397238 - DNA, 201 bp, Homo sapiens
aacttcatgtatttcaaggaaatcacctcccttctaacaacaagcagccagaaaaagcagatagtaaaacacagataagacagctcgggcacacagggagsggggaaagtctcttgggtaaccaccaaacttcaaactcatacaatgggctccagtaaaacagtgggccttaataagcatattcctttccctttagatgca

SEQ ID NO: 397239 - DNA, 201 bp, Homo sapiens
gagcaccacccctgacccataccccctagatgtcagtacgcccccttccaggttgtgacaaccaaaaatgtctctgacagagcaggagcactgccgtcttrggcaaacactgccattttaagttccagctccctttctaacttcatgtatttcaaggaaatcacctcccttctaacaacaagcagccagaaaaagcagata

SEQ ID NO: 397240 - DNA, 201 bp, Homo sapiens
ctcaaggtcaagaactgggagactgaggtggttctcactgacaccctccaccttaagagcacattggtaagtatcccagcagggtgtagatgagagggtgrcagcttcatcactatccacatttggagtcggataagtctttgttgtgggggctgtcctctgttgtagggtgttgagcaccacccctgacccataccccct

SEQ ID NO: 397241 - DNA, 201 bp, Homo sapiens
ttgggcaacttaacctctctgtgcctcagtttcctaatctgtaaaatggagataataaggttgttgcttggcacataatcagtgctcatttaatgttagtyttcagtattagtccttcgcagttctctgtgacttctatcctggactttgatccagctcatttgatcataattcacagctaccgtcaccagcctgagctcc

SEQ ID NO: 397242 - DNA, 201 bp, Homo sapiens
ctttccatcatgataagacatcctattggccagagctgttttaaatttaaggccaccgggggataaatgaaccatgcatggccttctgtctgcatatgagrataactaaactggccattctggggtgggaggtggtaataaatgtagactgtgccagttttacccactccatcctagccttggaatacattctcctcagca

SEQ ID NO: 397243 - DNA, 201 bp, Homo sapiens
cctcaattacatctgggaacaagggacagctggtaaataagtccttgcagatccttgggtgagcatagagcaaggatggggaggaacttggaagcattgcrttgagatgctcagccacatctaaaccactgagagtgcctctcaatggttaggagtacaattttgcctcccagggggcactttgcaatatctggaagcatt

SEQ ID NO: 397244 - DNA, 201 bp, Homo sapiens
acccgggccacacacagcagagaaatgacacagcacgcgggcgacgcatgaatacacagaaacacacacacagagcaacgccagatggagaacgcagcccrggctgagcccggggattcattatttcctcacccacacagaggggctgacagagttacgtaatgcaggctgcaaaggggaggctgaacttgctaattatcc

SEQ ID NO: 397245 - DNA, 201 bp, Homo sapiens
acccacattttcaattgagagaactgtttaaaactctataggatctgatgatcaagatagagttgtaaacagttctctcaattgaaatgcaaatcaaaacyacaatgagatagcatctcacctcagttacaatggcttatccgaaagacaggcaataacaaacgctggtgaagatgtagagaaaagggaacccttgtacac

SEQ ID NO: 397246 - DNA, 201 bp, Homo sapiens
atgacattgtgcacctggaacatgaaactctggtccttgtggtcaccagcacctttggcaatggagatccccctgagaatggggaggtgagatgagctttyacctgttcaagagtgtggttccatcatcaggaagaagtaggggccaaggttgagactcttcctacacctgctattcagtagcaaaccctcccagagcctg

SEQ ID NO: 397247 - DNA, 201 bp, Homo sapiens
gagccattggcttcaagaagctagcagagtaagtttcgtgcagtgggcgggtggggtggatgtccccacaaactcagagaacccagagaaggaggctgggyagactcctgtgccctctgacctctctacagaatatgatttcttcatcttcttcagccacctgggccttctttgcctctgagtctgagctgtgaatgtcgt

SEQ ID NO: 397248 - DNA, 201 bp, Homo sapiens
agaaaggtgggggacaggcttgcgggccgtttctttcccaatctttaggggatccaaggtcaccaggatgacaccaactggcctgctactgctggccttgstgaaaaccaaaagggtgtagccagccccagccagcctgggtctgaatgaaggcaaaccagtaaaatgctctgcctcttggagacaacctagcatgctcac

SEQ ID NO: 397249 - DNA, 201 bp, Homo sapiens
acgaagtgaccaaccgccttagatctgagtccattgccttcattgaagagagcaaaaaagacaccgatgagtaagctggctccatccctgggtgaggggcrggaagagccctctcttctaggtcccactgggcaggaatgtctggctttcccacggcagggtccccaaaacagcagcatcagcaccatctgggaacgtgtt

SEQ ID NO: 397250 - DNA, 201 bp, Homo sapiens
gtagacctgtgttaaagtatgcttaattgttattattatgtttttaattttatcaattgagaatgttcaggaatttgttttctttcttgttttgtaagtayctacgtaatagcttcaattttgcttcttggcctgtaagcctaaaaatatttgctgtctgacccccacatataaaaagtttgccaacgccgggcacagtgg

SEQ ID NO: 397251 - DNA, 201 bp, Homo sapiens
atacaattgtgttattattgactgtagtcagtatatataacatatcacacattttctttatatcacacagtatatataaaatatcacacatttctttatcmattcatccgttgttagacacctaggttgattccatatcttggctactgtgaatagtgcttcaataaacacagggttgtaggtatcactttgacatgttaa

SEQ ID NO: 397252 - DNA, 201 bp, Homo sapiens
tccctgcctccttttgagcctggctgcaggaccatttcctttcattccttcagggcctctgcaagcttcctaggcaaagaggtgttgacaaggctatgaaratgcccatgagatcatggcctcctttgcacacttaggggcgggtgtcccaggggtccacaaagagcgagccaatgtctcctcccacctaaaagcttccct

SEQ ID NO: 397253 - DNA, 201 bp, Homo sapiens
gttgaaggggagaaagaagggagaaaaggagaggggaaaaggaatcagagcttcagcagtccttggaagtggcattctcagctctggagcccaggctgacrtgaccgcacctccctgcctccttttgagcctggctgcaggaccatttcctttcattccttcagggcctctgcaagcttcctaggcaaagaggtgttgaca

SEQ ID NO: 397254 - DNA, 201 bp, Homo sapiens
gtgccataagagaaaatatacactggatctcgaagtctgggtccaaaaaagagagggaaataactcattgatcttggtttgttttttttggttttttttttgttttttgagatggagtctcactctgttgccaggctggagtgcagtggtgcaatctcagctcactgcaactctgagttcaagcaattcccctgcctctgc

SEQ ID NO: 397255 - DNA, 201 bp, Homo sapiens
actcaggaggctgaggcaggagaatcacttaacccagaagatgatggaggttgcagtgagccaagatcacaccactgcacttcagcctgggcgacagagtragactctgtctcaaaaaaaaaaaaaaaaaaaaagaatgatcaggaaagatctctaacatgacggcatttgagcaaacgcagtgatcggggtcagccactg

SEQ ID NO: 397256 - DNA, 201 bp, Homo sapiens
ccaatgtgaggtgagcaaggggataagggggtcgggggtcagggaagactaaggctcctggggagcttgacctacttacaaagtgagcgcttcgttgtggrgaggtagtgtccattcatttctcataaaaccagctgcatcctggctgtctgggacccctcccacccattaagtcacattgcctggtctccccgtgcacca

SEQ ID NO: 397257 - DNA, 201 bp, Homo sapiens
agttgagatgtgccataagagaaaatatacactggatctcgaagtctgggtccaaaaaagagagggaaataactcattgatcttggtttgttttttttggktttttttttgttttttgagatggagtctcactctgttgccaggctggagtgcagtggtgcaatctcagctcactgcaactctgagttcaagcaattcccc

SEQ ID NO: 397258 - DNA, 201 bp, Homo sapiens
atagatgtatatataaaggggagtttattaaggagtattaactcacacgaacacaaggtgaggtcccacaataggccatctacaagctgaggagcaaggargccagcccgagtcccaaagctaaagaacttggagtccaatgttcaagcgcaggaagcatccagcacgggagaaagatgtaggctcagaggctaagccagt

SEQ ID NO: 397259 - DNA, 201 bp, Homo sapiens
cccagttgagatgtgccataagagaaaatatacactggatctcgaagtctgggtccaaaaaagagagggaaataactcattgatcttggtttgttttttttggttttttttttgttttttgagatggagtctcactctgttgccaggctggagtgcagtggtgcaatctcagctcactgcaactctgagttcaagcaattc

SEQ ID NO: 397260 - DNA, 201 bp, Homo sapiens
ctgggcaacaagagcaaaactctatctcaaaaaaaagcccaccatccttccacttacccaatccatgtttactttatcctttgccccgatcctctcctacycagagactctcagttccacttccagagcccccaaccttcagttccctgcttccagtcctgctgcccctgcagctgcattccaaccccatggctactcctg

SEQ ID NO: 397261 - DNA, 201 bp, Homo sapiens
ttctggttttgtgagtctgtgggcctggaccctgagctgtcccagcttgtaaccaggttatgcttgctgcccgggagaggtggtacccacaggtgggtgcratgccgcccagggctgcagcaaagggcacagtgtgtggcgtctggcccatggtgtgaatggccctctgcccagctcagccccagtgtgctgccctcattt

SEQ ID NO: 397262 - DNA, 201 bp, Homo sapiens
aaagcttaaaaagttcagccttgatgcccctcggtcctccagaggtctccactatcaccctgaatccttaactgggtgagtctgactcccaagcacccccwtttttaatcaccttctacagactgttgaattacagaagagagagagagagagagaggcagagtaagcaatgtcaactttctttttttctttttttttttt

SEQ ID NO: 397263 - DNA, 201 bp, Homo sapiens
gcctgggtgacagagtgagactccatctcaagagaaatgaaattgagtatgatcactgccctggagcagttcacagccgagccatcccctcttctcatttratatgcacctcaacttctgaaaacttctactttcaagacaaactacagatggaaatacacacagtagtcatcatattgtgatatttggggtttcatagac

SEQ ID NO: 397264 - DNA, 201 bp, Homo sapiens
aggcaggaggatcgcttgaacctgggagacagaggttgcagtgagccaagatggtgccactacactccagcctgggtgacagagtgagactccatctcaaragaaatgaaattgagtatgatcactgccctggagcagttcacagccgagccatcccctcttctcatttgatatgcacctcaacttctgaaaacttctact

SEQ ID NO: 397265 - DNA, 201 bp, Homo sapiens
ctttaaacagctcagacaaatttgggtgtcctgaaaacacatattttctacccagaatccaacattctacattatgggcaaggagttagtccataaaaaamattatatagagtcttggaatgtcagggctgggaggaagccatccgtcactcccatttggtgtacaggtacacaaagaaaacaagagatggtcaaccaaac

SEQ ID NO: 397266 - DNA, 201 bp, Homo sapiens
tctctacaaaaaagagagtataaactattaactgggcctggtggcgtgcacctgtagtcccagctacttgggaggttgaggcgggagtatcgcttgagccrgggaagttgaggctacagtgagccctgttagtgccactgcactccagcctgggtgacagagcaagaacctgtctcaaaacaaaaacaaaacaaaaaaaag

SEQ ID NO: 397267 - DNA, 201 bp, Homo sapiens
ggggagaggatcctgaagatgagggaaggggatgagctctgtgggcaggaagaggctttcaggacctgggccaagaaggtcttcaaggtaatctggatctyatggacctacaggaaaaagtaatgctccccacacccccaaagacagcacctaaaccatcaagaagagaataaacttgagagaaccctcagtacctctccc

SEQ ID NO: 397268 - DNA, 201 bp, Homo sapiens
ggcaccatcatagcttactcactgcaacctcaatctcctagacttaagagatcctcccactgcagcatcccgagtaactaggactacaggctggtgccackagacctggctaactttttatatttttttgtagaaacgggatcttgctatgttgcccaggctggtctcgaactcctagttcaagcaatcctcccttctcag

SEQ ID NO: 397269 - DNA, 201 bp, Homo sapiens
ttggcctcggctcacgagcataccctcacttttgcgccttcggacacgctgtggacaccctcctggaagaactgggaggggagaggatcctgaagatgagrgaaggggatgagctctgtgggcaggaagaggctttcaggacctgggccaagaaggtcttcaaggtaatctggatctcatggacctacaggaaaaagtaat

SEQ ID NO: 397270 - DNA, 201 bp, Homo sapiens
gcacctttgtcttacctgtccagtaagctgatgggccaggccagggcaaccctagggaatcgtgtgaatttcaaacccatcctctgcattgcagtgaagtyggcgtgaccggtgggaggtcgaaacatgggggtggcctaggtgactcagcaagtgatgaccggcttcattttcctgatgcttggcctacagatggcagct

SEQ ID NO: 397271 - DNA, 201 bp, Homo sapiens
tgccggccaccctgctcctgacccagctgtccctgctgcagccccgctactattccatcagctcctccccagacatgtaccctgatgaagtgcacctcacygtggccatcgtttcctaccgcactcgaggtgggcggaggcactgggagagcctcctcagctgcattttcccccaaggggcctctggagggttccctaaac

SEQ ID NO: 397272 - DNA, 201 bp, Homo sapiens
cgccgtggctggagagcttgggaggccgaggtcaggagtgcttatcctcggatgtggatctcgactttgtttttgtgtggtttggtattgtttgtgagcttgccgtttttcacattttaattctgtttcttctgggaaaggcattcacatgattccaaatttaaaagatataaaagatacatggtagctggtcatagtgcc

SEQ ID NO: 397273 - DNA, 201 bp, Homo sapiens
aggaatggaaatggggcaagaaccccaccatcgtggaggtgctggaggagttcccatctatccagatgccggccaccctgctcctgacccagctgtccctrctgcagccccgctactattccatcagctcctccccagacatgtaccctgatgaagtgcacctcactgtggccatcgtttcctaccgcactcgaggtgggc

SEQ ID NO: 397274 - DNA, 201 bp, Homo sapiens
ggacagacagaagagcaaaaaaaggaggaagtagctgctggcccttgtcctatgattcctctgcaatttcctgcagtcggtcaactatcttcgtgcgtctscacaccaacgggagccaggagctgcagtaccagcctggggaccacctgggtgtcttccctggcaaccacgaggacctcgtgaatgccctgatcgagcggc

SEQ ID NO: 397275 - DNA, 201 bp, Homo sapiens
aatcatcaggcgatgggcccgacctcagagacaactttgagagtgctggacccctggccaatgtgaggtgagcaaggggataagggggtcgggggtcaggraagactaaggctcctggggagcttgacctacttacaaagtgagcgcttcgttgtggagaggtagtgtccattcatttctcataaaaccagctgcatcctg

SEQ ID NO: 397276 - DNA, 201 bp, Homo sapiens
ccacgagataattacaggattgatgttaagattaattcctagtgtatatatacattctggtctggtaatgggaccaagctgaaagttgtccagtaacatcyggctatactatgatatcactgcaatttggagaaagcttaaaaagttcagccttgatgcccctcggtcctccagaggtctccactatcaccctgaatcctt

SEQ ID NO: 397277 - DNA, 201 bp, Homo sapiens
gttaaggctttcaacaaacaaacacagtacgatgcagtatcatagggcaggccacgagataattacaggattgatgttaagattaattcctagtgtatatrtacattctggtctggtaatgggaccaagctgaaagttgtccagtaacatctggctatactatgatatcactgcaatttggagaaagcttaaaaagttcag

SEQ ID NO: 397278 - DNA, 201 bp, Homo sapiens
agagctcacaggttctctttggttttggcaggagctacaaggtccgattcaacagcgtctcctcctactctgactcccaaaaatcatcaggcgatgggccygacctcagagacaactttgagagtgctggacccctggccaatgtgaggtgagcaaggggataagggggtcgggggtcagggaagactaaggctcctgggg

SEQ ID NO: 397279 - DNA, 201 bp, Homo sapiens
tcagtgactcccaggtctttataggtcactgagccaagaggccagcaaccaaacttgctgtcctgggtggtcagagccagggtggagccaggaagtggtgsgtgaattgactagtgtttgggttcagccctgctggaatttccacatattttgctaactgtttgttttaagagtgagtatattcaatgcaggctgtcccaa

SEQ ID NO: 397280 - DNA, 201 bp, Homo sapiens
atcaacaggagaatgggtaagttatggtatattccagtgatggaatactataacaactgtaaaaatcaaagggattagcgctctgcatgttaatggaattkaagttcatgttcatagctaactttgagcaaaagaaaggataaattgtaaaaggatacatccagtatagcaccatttatatgaatttttttatggatttat

SEQ ID NO: 397281 - DNA, 201 bp, Homo sapiens
aacacagtgcttttgcaaaaatgaacttgcatatctcttggaagggagggcttatacttttcagttgaccgcagacctcaccactcccttttgtcttgcayctacttagcctatttatctgcctactccctgaaggcattagtttctgtgtcccttggttacgattttattttaggaaatagtttaaagttggaagtagat

SEQ ID NO: 397282 - DNA, 201 bp, Homo sapiens
cctagtaacctaacagaaaatgtaaccagcccatctaaaccccctccttcatttgccattcctttcccacattcactttcatgccgtgcctacttttaggsgattttttttttttttctggtcaaattggccttggttattaggatagaaaagagaaaatataaaatgcagcctgggactcagtaatgaggtgcccacttc

SEQ ID NO: 397283 - DNA, 201 bp, Homo sapiens
gaggatgaaatgagataatgtatgagataatgatgtcaaccataacaacaggacctaatatatttattgagcaatatcaggtactgtgctaagcactttargtccatggcttcattgaacccccagctcaacccaatgaaatactgtgattgtctccattttacagatgaggaaactgagaatcacagagggttttggtgc

SEQ ID NO: 397284 - DNA, 201 bp, Homo sapiens
actgccaaggactgggcaaaaggcaatagaatgcaattgaagcaggacgaatgcaggttagacatgaggaagaacttcctaacacaggagactataagttyctggaggaaatagtgaggtctgaccccttgggaatcccagaagggatccccaccctcttcgatgctcttgtttgtctagattcaaagaaaatcagcccta

SEQ ID NO: 397285 - DNA, 201 bp, Homo sapiens
ctctatgtgattttggcctccagcctggattctagactcaccctcagctgtgatgcatcaccccagcaggattacatgctacgttgtcttgtgtagagagyaagacctaaaaaccgtgctcagaaagaaggctctatgaaactagatgagacaggggttgctgtatggaggaagcagatttgaatcaggtcttgaacttgg

SEQ ID NO: 397286 - DNA, 201 bp, Homo sapiens
gtgagctgtgattgtattactgcaccactgcactctagcctgggcaacagagcgagaccctgtctcaaaaaaacaaaatagaataaattcctagaagtggrattgttgggccaaaattcacgtacatttgtgatttttgtggtacttgccatagtggttggatcaatcttaccggctaactaggagactgtttcttcacag

SEQ ID NO: 397287 - DNA, 201 bp, Homo sapiens
tctgttaagagatctttaagagcatctttgcctctatgtgattttggcctccagcctggattctagactcaccctcagctgtgatgcatcaccccagcagrattacatgctacgttgtcttgtgtagagagtaagacctaaaaaccgtgctcagaaagaaggctctatgaaactagatgagacaggggttgctgtatggag

SEQ ID NO: 397288 - DNA, 201 bp, Homo sapiens
accagcctgggcaacatggcaaaaccctatctctaaaaaaaataacaaaaattagctgggtatggtggcacatgcccgttgtcccagccaccctggagacygaggtgggagaatcacctgagcctggaaggtcaaggctgcagtgagctgtgattgtattactgcaccactgcactctagcctgggcaacagagcgagacc

SEQ ID NO: 397289 - DNA, 201 bp, Homo sapiens
tgtctcaaaacaaaaacaaaacaaaaaaaagcacctaacaacattcttcatttctacacacacaaaagtctttctttttaaatatgcaactaaatgtcctrtttggaagttacccagccttccttactgatttagcttacccacctaccacctccaggtatccatttgtaattcccggtctgcagtaatccttgagatctc

SEQ ID NO: 397290 - DNA, 201 bp, Homo sapiens
caggaatttgagaccagcctgggcaacatggcaaaaccctatctctaaaaaaaataacaaaaattagctgggtatggtggcacatgcccgttgtcccagcyaccctggagaccgaggtgggagaatcacctgagcctggaaggtcaaggctgcagtgagctgtgattgtattactgcaccactgcactctagcctgggcaa

SEQ ID NO: 397291 - DNA, 201 bp, Homo sapiens
catctaaaccactgagagtgcctctcaatggttaggagtacaattttgcctcccagggggcactttgcaatatctggaagcatttttttggttgtgacaaytttggggataggggtgctactggcatctagtgtgcagaggccaggaatgctgctcaaacatcctccaacgcacaagacagtcctggcaacaagaaattat

SEQ ID NO: 397292 - DNA, 201 bp, Homo sapiens
cctgggcgacagagcaagactccgtctcaaaaaaaaaaaaaaaaaaaaaaaaaaagagtaaaaagcagctgggtacagtggctcatgcctgtaatccctayactttgggaggctgaggcaggaggattgctcaagcccatgagttcaagaccagcctggacagcatggcaaaacctcttctctacaaaaatacaaaaatta

SEQ ID NO: 397293 - DNA, 201 bp, Homo sapiens
ctcttgcctccagagtgttcagtgccatgacatcggctcttgaacactgtattatgtatgcatgtatgtatgtatgtatgtatgtatgtatgtatgtatttctgagacagcgtcttactctgtcacccaggctggagtgcagtggcgtgatgatggctcactgcaacctcaactttcctggctcaggtgatcctcccacct

SEQ ID NO: 397294 - DNA, 201 bp, Homo sapiens
cctcctgcctcagcgtcccaaagtgctgggattacaggcctgagcccagcccaaaatgtggagatttagttttcgtttagaggagggctattttaaaaaaacaatatggtgtgatcaggattccctatctggttcaaaactgacatctaagtcaagcattgtgccccatgtacttcatcttgtgactctgatgatgggaac

SEQ ID NO: 397295 - DNA, 201 bp, Homo sapiens
gtaaatgatgtgggcagtccatcctatttagtcactaaaacagccacatggatcacattgggctctatgtcatttccaggaattttcagcataaaaaaaaagtaacctccggggataaatcagaatagtactcgatagcaactgacatattttgggcatatttttctctttaatttttttgaagcagtatctcagctctgg

SEQ ID NO: 397296 - DNA, 201 bp, Homo sapiens
ccctttctgtctcctctttatatttcccaaatggccaaagccagtccccaggagcctccatcttccttggggaaggaccgcacggagaagagtgagagggsgggggtattgtgatgggttaggctgctcccagtgggtctctgtgagtaagatgcaaagagttgtccgaggtaccattcagtcagttgtccagaaacttcc

SEQ ID NO: 397297 - DNA, 201 bp, Homo sapiens
tcagcacttcgggaggctggggtgggaggaccacttgaaccaaggagttcgagaccagcctgggcaacacagtgagaccctatctgtacagaaaataaaawaaaaaaaaattaggcagacatggtggtacacccttgtagtcccagctactcgggaggctgaggcaggaggatcacttgaacccagaagatcaaggctgca

SEQ ID NO: 397298 - DNA, 201 bp, Homo sapiens
ccccctcacgaccctcgctgagctcacggctcagtccctacatatttatgccgcgtttccagccgctgggtgaggagctacttagcgccgcggctcctccraggggcggccgggcagcgagcagcggccgagcggacggggtgagccaggggcgcgcgcggggcgcccagcactgcgccggggaagcccgcagcctccgtc

SEQ ID NO: 397299 - DNA, 201 bp, Homo sapiens
ttcagagagctgtacacggcttactcccgggagccagacaaaccaaaggtaacccccagcagcccaccccctagcccagcccaacacacatgcacacttgsacatcctactctcagaaacccctcaccctcactcttaagcttcctgattttccctctatgaagttgctctgtacttcagaaagcatgggtagggaaaata

SEQ ID NO: 397300 - DNA, 201 bp, Homo sapiens
tcacttgagcccaggaatttgagaccagcctgggcaacatggcaaaaccctatctctaaaaaaaataacaaaaattagctgggtatggtggcacatgcccrttgtcccagccaccctggagaccgaggtgggagaatcacctgagcctggaaggtcaaggctgcagtgagctgtgattgtattactgcaccactgcactct

SEQ ID NO: 397301 - DNA, 201 bp, Homo sapiens
aatccaacactttggaaggccgaggcaggaggatcacttgagcccaggaatttgagaccagcctgggcaacatggcaaaaccctatctctaaaaaaaatamcaaaaattagctgggtatggtggcacatgcccgttgtcccagccaccctggagaccgaggtgggagaatcacctgagcctggaaggtcaaggctgcagtg

SEQ ID NO: 397302 - DNA, 201 bp, Homo sapiens
tgtaatccaacactttggaaggccgaggcaggaggatcacttgagcccaggaatttgagaccagcctgggcaacatggcaaaaccctatctctaaaaaaawtaacaaaaattagctgggtatggtggcacatgcccgttgtcccagccaccctggagaccgaggtgggagaatcacctgagcctggaaggtcaaggctgca

SEQ ID NO: 397303 - DNA, 201 bp, Homo sapiens
ctcggctcactgcaagctccgcctcccgggttcaagccattctcctgcctcagcctcccgagtagctgggactacaggcgcccgccaccacgcccggctartttttttgtatttttagtggaggtggggtttcaccgtgttagccaggatggtcttgatctcctgacctcgtgatccgcccacctcggcctcccaaagtgc

SEQ ID NO: 397304 - DNA, 201 bp, Homo sapiens
taatttattgtatcagtccttcataatgagccactgtcaatattttgctatgacagtgccgtaatgagtgaccttgtgcccataccttatttggcacatgrgcaggcttatcaatagaataagttcctaaaggccaggcatggcggctcacgcctgtaatccaacactttggaaggccgaggcaggaggatcacttgagcc

SEQ ID NO: 397305 - DNA, 201 bp, Homo sapiens
aatgtcaactttctttttttcttttttttttttttggagacaaagtctcagtcgcccaggctggagtgcggtggcgcgatctcggctcactgcaagctccrcctcccgggttcaagccattctcctgcctcagcctcccgagtagctgggactacaggcgcccgccaccacgcccggctagtttttttgtatttttagtgg

SEQ ID NO: 397306 - DNA, 201 bp, Homo sapiens
tatcttgctttttcacttattaacatatcttatagattagtccccattagtgggtaaagaggatcttggttccttttttatagccatataatatttcattstgtgatcatcctgtaatttattgtatcagtccttcataatgagccactgtcaatattttgctatgacagtgccgtaatgagtgaccttgtgcccatacct

SEQ ID NO: 397307 - DNA, 201 bp, Homo sapiens
ccaagcacccccatttttaatcaccttctacagactgttgaattacagaagagagagagagagagagaggcagagtaagcaatgtcaactttctttttttyttttttttttttttggagacaaagtctcagtcgcccaggctggagtgcggtggcgcgatctcggctcactgcaagctccgcctcccgggttcaagccatt

SEQ ID NO: 397308 - DNA, 201 bp, Homo sapiens
atcccagtcacatagttttcctccccagaatcaagcaatattaatggtttttgtgtgttcttttagccgtgttttatgcattgacaaacacacacattaawtttgaatatttttacacaagtaagagcacattacacatgttgttttatatcttgctttttcacttattaacatatcttatagattagtccccattagtgg

SEQ ID NO: 397309 - DNA, 201 bp, Homo sapiens
caccctgaatccttaactgggtgagtctgactcccaagcacccccatttttaatcaccttctacagactgttgaattacagaagagagagagagagagagrggcagagtaagcaatgtcaactttctttttttcttttttttttttttggagacaaagtctcagtcgcccaggctggagtgcggtggcgcgatctcggctc

SEQ ID NO: 397310 - DNA, 201 bp, Homo sapiens
ggtagctggtcatagtgcctcatgcctgtaaccccagcattttgggaggccaaggcggaggatagcttgaggtccagagttcaagaccagcctgaccaacrtggtgaaaccccatctctacaaaaaatacaaaaattagcctggcatggtggcgggcgcctgtagtcccagctactcaggaggctgaggcaggagaatggt

SEQ ID NO: 397311 - DNA, 201 bp, Homo sapiens
gtgagcttgccgtttttcacattttaattctgtttcttctgggaaaggcattcacatgattccaaatttaaaagatataaaagatacatggtagctggtcrtagtgcctcatgcctgtaaccccagcattttgggaggccaaggcggaggatagcttgaggtccagagttcaagaccagcctgaccaacatggtgaaaccc

SEQ ID NO: 397312 - DNA, 201 bp, Homo sapiens
tgtaatcccagcactttgggaagctgaggcaggggcatcgcttgagcccaggagttagagatcagtctggccaacacagggagaacccgtgtctaatatarataaaataatattttttaaaaacccacatgtaaagtccttggcacatagtaagcgtttaataaatgctatctctccttattaatagtattattatttttg

SEQ ID NO: 397313 - DNA, 201 bp, Homo sapiens
gtggctcagagggagccgctggaggggtcactggggatcgtgctctcagagcttggactgtggcttctgattcatcccaggtgactgtcattgtaccagaytgggggatgggggagtcccctaagctaggaccatagaacagagggcaagacaagggccagtcttaatgcctgggacccaaaccaagatgagccacagggc

SEQ ID NO: 397314 - DNA, 201 bp, Homo sapiens
tgccctcatgagggcattgaacaagtaaatatcacagaacttgtatgttctgaagagggacatgcagagtgcttggggctgctcccaagtgggggagttcrcgctaagacttgaaggccgagtagagccagcccaggaagagggatgaaaattttgtgaaacacttacttagaatgtgccaggctctctctcatatcgttc

SEQ ID NO: 397315 - DNA, 201 bp, Homo sapiens
agccatccagcgcatcatgacccagcaggggaagctctcggcagaggacgccggcgtattcatcagccggatgagggtgagtgacaggctgacttcccagrtcccttttcctacatccactctcctatcccccctttttcatccaacctgtcttgatgattaggggagccacgatgatatccctgctcccattcgttgcac

SEQ ID NO: 397316 - DNA, 201 bp, Homo sapiens
gccgccgtggctggagagcttgggaggccgaggtcaggagtgcttatcctcggatgtggatctcgactttgtttttgtgtggtttggtattgtttgtgagmttgccgtttttcacattttaattctgtttcttctgggaaaggcattcacatgattccaaatttaaaagatataaaagatacatggtagctggtcatagtg

SEQ ID NO: 397317 - DNA, 201 bp, Homo sapiens
ttttttttttattttttattttattttatttatttatttttttttttttgagacagagtcttgctctgtcgcccaggctggagtacagtggcatgatctcsgctcactgcaacctctgcctcccaggttcaagcgattctcctgcctcagcctaccgagtagctgggacccaagcacccgccaccacacccagctaatttt

SEQ ID NO: 397318 - DNA, 201 bp, Homo sapiens
acttaaaacattgccaggcagggtggtgcacgcctgtagtcccagctactggaggggcagaggtgggaggatcgctcgagcctaggaggtcaaggctgcastgagctatgattgcaccactgcactccagcctgggtaacagggcgagactgtctccaaaaaaagtcaggcgctagcatccagaacaagcctgggtttgaa

SEQ ID NO: 397319 - DNA, 201 bp, Homo sapiens
atgcacctcatctcagggacacgggccaagctgggagaggtgtcctggcatcttttttttttattttttattttattttatttatttatttttttttttttgagacagagtcttgctctgtcgcccaggctggagtacagtggcatgatctccgctcactgcaacctctgcctcccaggttcaagcgattctcctgcctca

SEQ ID NO: 397320 - DNA, 201 bp, Homo sapiens
gaggccgaggcaagaggatcacttgagtttgggagtttgagaccagcttgcacaacacagtgagaccctgtctctacaaaaaaacttaaaacattgccagrcagggtggtgcacgcctgtagtcccagctactggaggggcagaggtgggaggatcgctcgagcctaggaggtcaaggctgcagtgagctatgattgcacc

SEQ ID NO: 397321 - DNA, 201 bp, Homo sapiens
aatgcacctcatctcagggacacgggccaagctgggagaggtgtcctggcatcttttttttttattttttattttattttatttatttatttttttttttttgagacagagtcttgctctgtcgcccaggctggagtacagtggcatgatctccgctcactgcaacctctgcctcccaggttcaagcgattctcctgcctc

SEQ ID NO: 397322 - DNA, 201 bp, Homo sapiens
gcagaagtggttttgatgtgggccacagggacagcatggaacactgcaggcaggggatctgggtggctcagagggagccgctggaggggtcactggggatygtgctctcagagcttggactgtggcttctgattcatcccaggtgactgtcattgtaccagattgggggatgggggagtcccctaagctaggaccatagaa

SEQ ID NO: 397323 - DNA, 201 bp, Homo sapiens
aaatgcacctcatctcagggacacgggccaagctgggagaggtgtcctggcatcttttttttttattttttattttattttatttatttatttttttttttttgagacagagtcttgctctgtcgcccaggctggagtacagtggcatgatctccgctcactgcaacctctgcctcccaggttcaagcgattctcctgcct

SEQ ID NO: 397324 - DNA, 201 bp, Homo sapiens
taagatgaaccatgtgatcatttccaagttgcctaggtaattgtagcttataatttttgtaaattggctgcacttagcaggagatgttgggttacttgctstgtagcctctggcttagaataagcatcctaaccagtttttcctacctctgttttaaaaaaggaaggatctcctgtaatcccagcactttgggaggccaag

SEQ ID NO: 397325 - DNA, 201 bp, Homo sapiens
cacctgagacacatgttgtgtttttgtggttttttttttgagatggagtctcgctctgtcgcccaggctggagtgcagtggcctgatctcggctcactgcragctccacctcccaggttcacgccattctcctgcctcagcctccccagcagctgggactacaggcgcacgccgccacgcccggctaattttttgtatttt

SEQ ID NO: 397326 - DNA, 201 bp, Homo sapiens
catccgttttcttagttctaaatggaaatatacatcactcatgtttagttagtgccgattatgtgctaggcattttacatgcatgatctcattaaattccygtgacaggtgggacatgaagtgggccgtcaaggctgagtaggagttggctctcagcagagggaacatgaaagagcaacctggggagcttaagtataaagg

SEQ ID NO: 397327 - DNA, 201 bp, Homo sapiens
tcggcggcctccttgtctggttggccggaacaggcagcagcccccgcctccctgtgcccagcacacaggcttggcccacctgctcccctctcaggtcctcrgggtccataagtggtcagcaacgggccaatcgacccaccttcaaacttcctggggaatcaagcccaggaccccttttccttccgtgcaagaggtcgggga

SEQ ID NO: 397328 - DNA, 201 bp, Homo sapiens
gaccggcttcattttcctgatgcttggcctacagatggcagctttcactgccagcgcacctaaacaaggcctcaaagttctctacacagcttcagcggggrggatgagacattctagagccttggtggtaactgctttccttagccgctgatggctggccaggaagataaggacatcagggattctgtggtaggtcagacc

SEQ ID NO: 397329 - DNA, 201 bp, Homo sapiens
gtactttaggaaagccctttgacttctttgggcatcagtttccccatctttacaaatgagatgtggaccaggtgagccttaaggtttctcctagaactagkgttcaggttccttgtgagggccagtggctggcacgctcatcacaggccaggccacacctggatcgtaggaactaccccattccacctctctggaacattc

SEQ ID NO: 397330 - DNA, 201 bp, Homo sapiens
tgtgaatttcaaacccatcctctgcattgcagtgaagttggcgtgaccggtgggaggtcgaaacatgggggtggcctaggtgactcagcaagtgatgaccsgcttcattttcctgatgcttggcctacagatggcagctttcactgccagcgcacctaaacaaggcctcaaagttctctacacagcttcagcggggaggat

SEQ ID NO: 397331 - DNA, 201 bp, Homo sapiens
tcagcctcctgagtagctgggattacgggcacgcaccaccacacccagctaatttttgtattttttgtagagacagagttttgccatgttggccaggctgrtctcaaattcctagcctcaagtgatccaccctcctcggcctcccaaagtgctgggactacaggtgtgagccaccatacccggcctgtatgcctatatgaa

SEQ ID NO: 397332 - DNA, 201 bp, Homo sapiens
gaaacatatacaggttcaagggtttaggacctgagatccttgggctgttattcagcctaccacactcatctaaccaatgccattgagcaatgctgtggccyggccctgggctaaccaatggctgtctctgttgccatccctatgaggtctcactggactaagtccactgaccttgcttctagcccctccttccactttacc

SEQ ID NO: 397333 - DNA, 201 bp, Homo sapiens
gtggatcacctgaggtcaggagtttgagaccagcctggccaacatggtgaaaccccgtctctactaaaaatacaaaaatcagccaggtgtggtggcacacrcctgtaattccagctacccaggaggctgaggcaggagaatcgcttgaactcgggaggcagaggctgccgtgagccgagaccgtgccaccgcactccagcc

SEQ ID NO: 397334 - DNA, 201 bp, Homo sapiens
gtggctaggtttggctggagatcagcagcacctttgtcttacctgtccagtaagctgatgggccaggccagggcaaccctagggaatcgtgtgaatttcamacccatcctctgcattgcagtgaagttggcgtgaccggtgggaggtcgaaacatgggggtggcctaggtgactcagcaagtgatgaccggcttcattttc

SEQ ID NO: 397335 - DNA, 201 bp, Homo sapiens
aaattcagtctgttttaaagccgtgtttatacaagagagagttgggatctcagcccgggaatataagcttgccttttatatgtgtgaagtcccagagatcrtgtggcatgcaagactctcttccttcatgttcctggcgttgcaggaggaccaccacccctaatgccacctccctactactacaatgccaggagcaccccc

SEQ ID NO: 397336 - DNA, 201 bp, Homo sapiens
ctgttcagatgtgttttgacagctaagtcaatatcatttccaaagagtggctaggtttggctggagatcagcagcacctttgtcttacctgtccagtaagstgatgggccaggccagggcaaccctagggaatcgtgtgaatttcaaacccatcctctgcattgcagtgaagttggcgtgaccggtgggaggtcgaaacat

SEQ ID NO: 397337 - DNA, 201 bp, Homo sapiens
agggtttcatcatgttgcccaggctggtctcaaactcctagcctcaaattatccgcccgcctcagcctcccaaagtgctgggattacaggcgtgagccacygtgcctggctggagcggtcactttaaaatgctgcgtgtaagagaatatccaggttactcagcttgctgccctgaaggagggttccaaagaggccaaggtc

SEQ ID NO: 397338 - DNA, 201 bp, Homo sapiens
ctgggtgacagagtgagactccgtctgagaaaaaaaataaaatataaaataaaataaaacaaggatttattgagcacctaatgagtgccaaacactattggaggcgttggggcatagcagtgaacaagacagaaaagcaactaaaatagaaatgaaaacctttccattgatttgagggatgattataaaaacaaatcaatc

SEQ ID NO: 397339 - DNA, 201 bp, Homo sapiens
cagtccagtggccacttggttcccacccccggacctggggaggtccagctgtgtctcagcagccctagagaacagtgaaggtgtctctccacggcatcacygcctcagaaaagctggggcgtgtagcaccagcctgacctacaggtgaagttcatggtgtaatccaaacagcctgtcccaggggcctgaaattccaggccc

SEQ ID NO: 397340 - DNA, 201 bp, Homo sapiens
gtttaaagctcttctatattttctttcttaattcaaaacaaagaggtatggccatcatatgagccctcacaagagaaagaaagacagcaagaggcagcctygggccagatctagcctgcagacctgatttgttaggtctaccccgtattgtattaagagataatttatagttatgttttaaatgtattgccaatgtttcaa

SEQ ID NO: 397341 - DNA, 201 bp, Homo sapiens
tttgggaggccgaggtgggtggatcacgaagtcaggagattgagaccatcctggctaacacggtgaaaccctgtctctactaaaaatacaaacaattagcygggcgtggtggcgggcaccggtagtcccagctactcgggaggctgaggcaggagaatggcgtgaaccccgggaggcggagcttacagtgagccaagatcg

SEQ ID NO: 397342 - DNA, 201 bp, Homo sapiens
gcgtcgccttggtgatgcaattttccaaaatagtgaatgactcctgataaaacgatgggtaaatcaatttttccttaatttacccagtggatttactgcayggaaaattcagtctgttttaaagccgtgtttatacaagagagagttgggatctcagcccgggaatataagcttgccttttatatgtgtgaagtcccagag

SEQ ID NO: 397343 - DNA, 201 bp, Homo sapiens
caacttagcttctctgtctcccttaccccttccataaaatggtgattaacaatcattcctggacaggttcagtggctcacgcctgtaatctcagcacttcrggaggctggggtgggaggaccacttgaaccaaggagttcgagaccagcctgggcaacacagtgagaccctatctgtacagaaaataaaataaaaaaaaat

SEQ ID NO: 397344 - DNA, 201 bp, Homo sapiens
ggtgtagctcatgcctgtaatcccagcactttgggaggcagaggcaggtggaacactttaggtcgggaatttgagaccagcctggccaacatggtgaaacygtttctactaaaaatacaaaaaatattagccaggtgtggtggcacacacttgtaatcccagctacttgggaggctgaggcaggaggatcgcttgaacctg

SEQ ID NO: 397345 - DNA, 201 bp, Homo sapiens
ttatttgccaggaggctttgggaagtgtccctcccgaaaggctgcccccaagcaccacctctgcctcccaatcctctaccaccctccctgtccctcagtgytccctgtccctcagtgctccctctcctgagaagagcagcaccagtgtggaatgggagctctgtcttactttatataagcagagtccccttcccatgggca

SEQ ID NO: 397346 - DNA, 201 bp, Homo sapiens
ggctggaacccgggcctcagggagctgccactgcccatgggtccctccagcagcacatccagtggaggtggcatcttgaggccttgctgtgtctcccagtmgtccagctcatgccatagagttaaatcctaaggcagctgtaggaaccagaacggaaggcattggccttatttgccaggaggctttgggaagtgtccctcc

SEQ ID NO: 397347 - DNA, 201 bp, Homo sapiens
tcatctttgtcactcattgaaatcaatgggacagatgtgatttatgcctcctgggggccgggctgtggaaacacacagagaaaagagcaggagggccttgrgtggaaagaggggaactttgagggcctggattccaagcccagctctattgcttgtttttcattaatttggggatagccacgtcacctctcacagcctcta

SEQ ID NO: 397348 - DNA, 201 bp, Homo sapiens
ccaagcaataccccaaatctcttgatcttccaggaaacgggatgcactgagtacatctgcatgggctccatcatgcatccttctcagcatgcaaggaggcytgaagacgtccgcacaaaaggacagctcttccctctcgccaaagagtttattgatcaatactattcatcaattaaaaggcaagtgtgtgtcaattccggg

SEQ ID NO: 397349 - DNA, 201 bp, Homo sapiens
ccacctcagctccccaagtaactgagaccatgcccagctaattgttttatattttttgtagaaacagggtttcatcatgttgcccaggctggtctcaaacycctagcctcaaattatccgcccgcctcagcctcccaaagtgctgggattacaggcgtgagccaccgtgcctggctggagcggtcactttaaaatgctgcg

SEQ ID NO: 397350 - DNA, 201 bp, Homo sapiens
tatactcagaagggaatgcagaccctgccagactacagcactaagagagggagagagcagagaaagaaataccctggcttctcggcttctccctcatctcmtgtctccacatcccattggccaaacccaatcagatgccagagggcaagagacttttttttttcttcttcttcttttgagacggagtcttgctctgtcgcc

SEQ ID NO: 397351 - DNA, 201 bp, Homo sapiens
ctcctggcctcaagcaatctgcctgcctcagcctcccaatgtgctgggatgacagccctgggttagattttaactgacacttggaagcaagattttggatrctggactattagcccaggggacattctactatgacctctctattcatatggttctgggtggattttctctctttccatgctacccccaccatgcctattc

SEQ ID NO: 397352 - DNA, 201 bp, Homo sapiens
ttgtagcgacggggtctcaccatgttgcccaaggtggtttcaagttcctgggctcaagcattccacccacctgggcctcccaaaatgctgggattacaggygtaagccaccatgctcagcaggttcttgaacactttagacccctctggatgatggagaagaggcaggattctgaagcccatcaaagctgggttcaaatcc

SEQ ID NO: 397353 - DNA, 201 bp, Homo sapiens
gtgccatagttgatttaatagtcttctattgatgggtacttaagattttctcaatctcttgatattcagatattcagaaccctgcaaagaagagttttgtrtgtgtttaaggatgttcctttcaggttacctgcaggagaaagtcctgacatttgaattgtcaggccaagatatatgtattttaaatttggaggtagatat

SEQ ID NO: 397354 - DNA, 201 bp, Homo sapiens
catcgactcccatgggagacaggaccagtccacgtgtccgtaccttttacctggtctttcaacacaaagtgccttaagcagcacatccaccagacactacrgatgctcaatagaaaaatgactgcttacgtgatgataattagtaatagtggtggtaaaaggatccatttcctgggcacttacctagtctatggtgcattg

SEQ ID NO: 397355 - DNA, 201 bp, Homo sapiens
ggagggtccccagggacgccgctaggcaagggtgcggtgcaggcgagcgcgcccataggcgcctcatctcacctctggcggcccacgacattgggagacarcagaaaggagaccccagacctctcctcccgagaggaatgagggaaaattgctgcctttctttagtgcttctctaattggggtcggggcaaacgcaagaaa

SEQ ID NO: 397356 - DNA, 201 bp, Homo sapiens
ccactttacagatgaggaatctgaggctaataggcagcagaggtgggtcacaaaccctggtttttctagctccaaattcatgcctttgacccccacacagyatttacagcaatggggcaggtatgtaggggcaagggtgggaggcagaagtgcatctgtgccacttttgtgcttttgtgccactgaagcgtccatggatag

SEQ ID NO: 397357 - DNA, 201 bp, Homo sapiens
tttcttctgtcaccccaatgccagctccatcctaccacagtgccttctcacacgctggtctctgtcctccatttctcacttcctccatccaccttcttatytggccaactctggatcctgactcttcctccaggaagccttccctgaccaccaccacccagaccatgttatgtcccttatgcaaggtctcgttagcaccct

SEQ ID NO: 397358 - DNA, 201 bp, Homo sapiens
gaggccaggagtttgagaccaccctggggaatatagtgagaccccatctctaaatttttttttttttttaattagcaggctgggcatggtgggtcacaccwgtgatcccagcactttgggaggccaaggcaggtggatcacctgagtcaggagttcgagaccagcctggccaacatggcgaaaccccatctctactaaaaa

SEQ ID NO: 397359 - DNA, 201 bp, Homo sapiens
tccagcagcacatccagtggaggtggcatcttgaggccttgctgtgtctcccagtagtccagctcatgccatagagttaaatcctaaggcagctgtaggawccagaacggaaggcattggccttatttgccaggaggctttgggaagtgtccctcccgaaaggctgcccccaagcaccacctctgcctcccaatcctctac

SEQ ID NO: 397360 - DNA, 201 bp, Homo sapiens
tcctgggaaggtttctttgaagagggatgaatggtatttgtgatcggtggggagtcctctgcgtaacctttcctggatcttctgtgttctctctccagatkctgtctcccatggccgaaggcttattccacaaagccgtcatggagagtggggtggccatcatcctttacctgaaggcccatgattatgagaagagtgagg

SEQ ID NO: 397361 - DNA, 201 bp, Homo sapiens
cccgggaaacggccctggctcttggcctatgaagactttacggtgctgtgttcgcaaaatataaaaggtaaggattagttcttctcttgatccactgctcratcacatgcccgcttgtgacactagccaattctgcaaacagagaatcttttggccactcctgggttttgccagggtctggctgcagcctctgaagccaat

SEQ ID NO: 397362 - DNA, 201 bp, Homo sapiens
acctgcataggccacagggctcacgagcatgggcacaccagggcccggtgggagcagctggagggagggttcagtcacccaggcctgcccagagctctgcycagggcccaggatgaactgatgggggcagcctgcaggcggtgccagcgagagtgggcgctccccacaacaggggggccctagccagcctcacccagagca

SEQ ID NO: 397363 - DNA, 201 bp, Homo sapiens
gatgtagtttatccagtctgcattttggttaattgtccacccaccaaaatattgactcaaatcctgcagctatttgatttcgggcttcaaactgatctggkattccccgtgggactccaattgcgcctaattagacgtgagagtcgaaagactcataagggacttctctcactttacgacgtcttatttttccttcctctg

SEQ ID NO: 397364 - DNA, 201 bp, Homo sapiens
aaattctgtgctcagaaaacccttgctttctagtacagaccaactctcaggaaaggattcatggattccagaccagcctgggcaacacaggattcacgcaytgggattcatggattctgaggagcctatgaatacttgaaattgcacctacagtattgtatgtgcgttcttctcgggtgcatagctttcatcaaattctca

SEQ ID NO: 397365 - DNA, 201 bp, Homo sapiens
ccttcatgcacaacagacactttaaggcacattgtcttcttcaagcctcacaaacacatcatgagttaggagctcagtctgatttcatggacaagatagcygtcactgggaaactttaaataaatcacccaagatcacatagtgagtaataatttgaggaaaactcctttatatttgtagaggagaaaccctagtattcaa

SEQ ID NO: 397366 - DNA, 201 bp, Homo sapiens
cacagaagaatggaggtaaaattggcagggcttgactcttgaccagatgcaggggactgggagagagaaggtggaggcagagccagctcagtggtcatggrtagaggagggaacccaggggaaggagcagtctggggaactggggaatggagtggagtagaatgtgccccaggatgacttgcactgatggtgtgcactgcg

SEQ ID NO: 397367 - DNA, 201 bp, Homo sapiens
agggcccttggatttccacccatatttcccaagaaaggatacagttccagaaaaggctctctctgatctcctggaatgaaatctgagaatgaaccacaggrcctcattgcttacctgtacctcctttttgtagtctccagctggcctggcacagactgacaaccccaaatggatggtcgaaatccactgttctccagtccc

SEQ ID NO: 397368 - DNA, 201 bp, Homo sapiens
gtgctttctttcctaatgagcctctagatctattgtctcagaaagcatttaaagcaattccttccatcatcggagtcaataaccccgagtgtggcttccckctgcctatggtaagaattgtggctgtccatactgccactccctcaaactgtgatgcagctcttggcttcaacagctgggcatttccacaggtgacatcca

SEQ ID NO: 397369 - DNA, 201 bp, Homo sapiens
aggttctgcctttaaatgccgagttctctgcttacctgctgtgtgacattagggaagttgcctaccctctctgagtctccattccttcatctgtgaaatasggctattcttagcacctacctcacagctatacatcaaacagtctggcatatagtcagtcctcagtaaatgctagatattggagttattcaactgacagaa

SEQ ID NO: 397370 - DNA, 201 bp, Homo sapiens
agaagaaattaactatctgagcagcacactgaggccacttccacacgtggctgcctgggctggagggctcctgcccttcccagcttcccctgtgaaagtcrggtgcccaggccctcagggagatgggtttaaccttctgatgaccagatggcttatggagggcactgcttctctccacagaaggaggctcctgagattctc

SEQ ID NO: 397371 - DNA, 201 bp, Homo sapiens
tgcctggtgggctgatgggacattcctgtctcctcctcgggttttgttgtggttcccaggcggtgccttcgagactggctcagcctccatcttcgatgggwcctccctggctgcctatgaggacatgctggttgtgatcgtccagtaccggctgggaatatttggcttcttcacgtgagtctcttcaaatgatcgacatcc

SEQ ID NO: 397372 - DNA, 201 bp, Homo sapiens
agagtgggcatatctgggggcttcaaatgaactcccccaaacctctccacctccatcaatttaccccagcagatatatggaaagcacatattagagcaggyattgggccacagcaagcccatgtcctactgggccccttactcagctttgtctgtgaaccatgggattgatcaggtgtagattttgtggtggagaacactg

SEQ ID NO: 397373 - DNA, 201 bp, Homo sapiens
cagttgggtaggacttgggagagtgggcatatctgggggcttcaaatgaactcccccaaacctctccacctccatcaatttaccccagcagatatatggamagcacatattagagcaggcattgggccacagcaagcccatgtcctactgggccccttactcagctttgtctgtgaaccatgggattgatcaggtgtagat

SEQ ID NO: 397374 - DNA, 201 bp, Homo sapiens
aacattttagctgtaaggagtaatggaactcctaaagtaatagacttcaaatcaattattttaaatgcagccgaatactccaccctgtaatatcagattcyacattcttctcaagtgcacatgcaatatcctccagaataaaccatatgttaggccaccaaacaaatcccaataaatataaaaggatggaaatcatgcaga

SEQ ID NO: 397375 - DNA, 201 bp, Homo sapiens
ggaaatgtcttccccaacatcttagccatacgtagtaatggaacaaacattttagctgtaaggagtaatggaactcctaaagtaatagacttcaaatcaaytattttaaatgcagccgaatactccaccctgtaatatcagattccacattcttctcaagtgcacatgcaatatcctccagaataaaccatatgttaggcc

SEQ ID NO: 397376 - DNA, 201 bp, Homo sapiens
gagggcattcccaggtgtgtgtggatggaactgtaccatggtgagctgtgccattcacctgcctttcagagtctgggaatgttgatcagttgttgtttccrttcctgcctgctcttcaggaccaggtagaaaattcccatctccctataattttctgggggccgtcccccaggattttttctttctggaaatgtcttcccc

SEQ ID NO: 397377 - DNA, 201 bp, Homo sapiens
cagtcttctggacttgcttggagatgtgttctttgtgatccctaagctgatcacagctcagtatcatagaggtgagtctctgagcaccccgcttcaggacsacagcccagcgaggttgatggccaaggagatccatgttgtctactgactggctgcctcctctgcctctgtttcctcatggagagggcattcccaggtgtg

SEQ ID NO: 397378 - DNA, 201 bp, Homo sapiens
gaatacttccatgacaagcactccctgactgaaatccgagacagtcttctggacttgcttggagatgtgttctttgtgatccctaagctgatcacagctcrgtatcatagaggtgagtctctgagcaccccgcttcaggacgacagcccagcgaggttgatggccaaggagatccatgttgtctactgactggctgcctcc

SEQ ID NO: 397379 - DNA, 201 bp, Homo sapiens
cttataattggccaggagcggtggctcacacctgtaatcccagcactttgggaggctgaggagggcggatcacaaggtcaggtgttagagaccagcctgamcaacatagtgaaaacccgtttctactaaaaatacaaaaattagctgggtgtggtggcagacacctgtaattccagctactgaggaagccgaggcaggaga

SEQ ID NO: 397380 - DNA, 201 bp, Homo sapiens
tttgtgaacaaggagcctgtcttcactttgcactgagctccacagatgatgcagccagtagtggctcattctgagacacaagagagaggccaggagcatgrgatttggatgcaaatacacttttgaaagaatcatggttcttccaggtgggcccaacgacttcacctctctaagactcagtttcttaatctgagaaatggg

SEQ ID NO: 397381 - DNA, 201 bp, Homo sapiens
ggacagagcaatggtaaggctatgtgacacaccaaaagaatctccttccgggtctcccatacagtgagtagagaactgaacttaaaggtcaagagacctgrgttcaagctccagttctgccatccaagttgtgtgactctggacaaatcacttaatcactttatgtatctacaaatctgtttcttctcctataaaaaagaa

SEQ ID NO: 397382 - DNA, 201 bp, Homo sapiens
gtagtcacagaggaccttgttgctcagaagggtcctacatttggttgaatgctccgctgtcaccatcttgaaattcttaatgatttgtgaacaaggagccwgtcttcactttgcactgagctccacagatgatgcagccagtagtggctcattctgagacacaagagagaggccaggagcatgggatttggatgcaaatac

SEQ ID NO: 397383 - DNA, 201 bp, Homo sapiens
actacagcctgagctccgcctcagcctcccaagttgctggcattacaggagcacatcaccatgcccagcgtttcctcttcattgctgtgtaatctgtattytaaaaaatctaaacctttatctgttaaaatttttatttggtaaatcagcccaaggttccagccttcaggatattttaaattctgactttgacttgaaacc

SEQ ID NO: 397384 - DNA, 201 bp, Homo sapiens
caatgttgtcatcagtgctggtatactttttgtttttgagatgaagtcttgctcttctcccccagtctggagtgcgacggcacgatcttggctcactgcarcctctgcctcccgggttcaagtgattctcctccctcagcctcccgagtaggtgggattatgggcacctgctaccacgcttggctaatttttgtattttta

SEQ ID NO: 397385 - DNA, 201 bp, Homo sapiens
gagcgtggtggcacatctcttaattccagctacttgggaggctgaggcaggacaatcgcttgaacccgggttgcagtgagctgggatcacaccactacacyctgtcctgggtgacagagtaagatttggtctcagaaaaaaaaaaaaaaaaaaaggatattctaaagctgtgcagatcataggaaaagttctattttacag

SEQ ID NO: 397386 - DNA, 201 bp, Homo sapiens
ccaagcggagaaaagaaacacagtcaaagctttaaagatgctgagatgcagactgctcaaggaggctggcagcttgagatcacttagaccgccggttcttwgccatatcagacccaaataccccctgcgcaccttttttttttgaaacagggtcttactctgttacccatgctgaagtccagtggtgcaatcatggctcac

SEQ ID NO: 397387 - DNA, 201 bp, Homo sapiens
atgggtcaataggtgcagcaaaccaccatggcacatgtatacctatgtaacaaacctgcatgttctgcacatgtatcctgtttttttttttttttttttttaataaagaacaaaaaaccaggaaggccacaaaggaccatgtattatatgattccatttatacaaattatctagcagaaacaaatccatagagataaaaag

SEQ ID NO: 397388 - DNA, 201 bp, Homo sapiens
caaatgtttgtccttttggctggcttatttcacatagcataaggtctcagggttcctatatgctatactatacatcagaatttccttcttttttaaggccraataatgttccattgtatgtatatattatgttttgtttatccatttattcattaacggacatttgcattgtttccaccttttggctattgtgcaatgaac

SEQ ID NO: 397389 - DNA, 201 bp, Homo sapiens
ccaaactgaaactcagtacctattacaaataactcctcacacctccttcccccagaccccaataaccaccattccactttctgtctctgtgactttttagytactttagtgactttggttacccaatgcaaatggaatcatacaaatgtttgtccttttggctggcttatttcacatagcataaggtctcagggttcctat

SEQ ID NO: 397390 - DNA, 201 bp, Homo sapiens
gttcaatggcattaaatacattcacattgttgtacaaccatcaccactatacattttcagaatgtttttatcatcccaaactgaaactcagtacctattamaaataactcctcacacctccttcccccagaccccaataaccaccattccactttctgtctctgtgactttttagttactttagtgactttggttacccaa

SEQ ID NO: 397391 - DNA, 201 bp, Homo sapiens
ctcttgtcctcagcacatgggatcagcacgctcccgggaactgggccttcaaggaccaggtggctgctctatcctgggtccagaagaacatcgagttcttyggtggggaccccagctctgtgaccatctttggtgagtccgtgggagccataagtgtttccagccttgtaagttctctgctttgtgatttgaatgaatctc

SEQ ID NO: 397392 - DNA, 201 bp, Homo sapiens
ccttaactcatggtttctaaagttgccataggtgtcaattccccatcacctggaacaggcaggagcagaagtgtgaccatggagcatttgtatgggccagrcctggctgtggcactcttcactcccactcagagtccattggtgagaacttattcacgtggtcaatctaattgcaaccaaggctggaaaatgtaatctggc

SEQ ID NO: 397393 - DNA, 201 bp, Homo sapiens
ctctggactaatagcctcacaccctaatcacaccagggctaggtaccagatggaacagccccgatgccacagagcccactgaaattgtttgaactaaccartcctgaacctgctcaccttgccttacctcttccttcctatggaaaccacagcaacacctcttgcaacatcccccatccccaccaccttctgacagactgc

SEQ ID NO: 397394 - DNA, 201 bp, Homo sapiens
agaaccctaaagattctacaaaaaaaactactagaaataataaatttagtaaagttgcaagatacaatatcaatatacaaaaatgagtagcacacacatgmaccaacagtgaaacacattaaaaaaaatcaagaaagctgtttaattacagtagctacccactcccgccctccaaaataatgatacctagggataaacata

SEQ ID NO: 397395 - DNA, 201 bp, Homo sapiens
tatgattccatttatacaaattatctagcagaaacaaatccatagagataaaaagaatatgagtgattgccaggggttggggtagggagtatagaggctgrctactaacggatacagggtttgtttttggagtgatgcaaagttctaacattagatcacggtgatagttgcacaatcctgtgaatatattgaaaaccacta

SEQ ID NO: 397396 - DNA, 201 bp, Homo sapiens
ctgtgaatatattgaaaaccactaaattttacactttaagtgcattgtatgacatataaattacatatcaataaagctaaaattcaaagacaaaaaacaasctaatgaacaacatcgaacaaacatttctggaaaatatatcccaacactgtgaaagacctgataagaagaaagactacggttttgcagaggtccaagcgg

SEQ ID NO: 397397 - DNA, 201 bp, Homo sapiens
ccccgagccttggcttgctcatctatgaacgggtgacatggtgcctgctgcacagcaggccacaagagcagagcgacaggacacagtgaggggcggtaagktgctgcctggtaagagagctgtgggctggcctcaaggggtagcctgtgtcctctcactgagaatagtgggaagcgagctgcgagcttgggcccacagtgg

SEQ ID NO: 397398 - DNA, 201 bp, Homo sapiens
ctgcctgtgtagtcacagaggaccttgttgctcagaagggtcctacatttggttgaatgctccgctgtcaccatcttgaaattcttaatgatttgtgaacraggagcctgtcttcactttgcactgagctccacagatgatgcagccagtagtggctcattctgagacacaagagagaggccaggagcatgggatttggat

SEQ ID NO: 397399 - DNA, 201 bp, Homo sapiens
agcgctggtaccggagcaggactggtttcatggatgttctgcctgtgtagtcacagaggaccttgttgctcagaagggtcctacatttggttgaatgctcygctgtcaccatcttgaaattcttaatgatttgtgaacaaggagcctgtcttcactttgcactgagctccacagatgatgcagccagtagtggctcattct

SEQ ID NO: 397400 - DNA, 201 bp, Homo sapiens
aagtatgtgctgagtatttattacaggcttataaaaactgagcagttggcagcgagcgtggtaccagctttctgagcgcttacactctagtggggagagayagaggagacacgaggttgagaagatgatttcggagagtgatagatgctatgaagggcacaagtggggagagaagttatctttagggagacaacaggtggt

SEQ ID NO: 397401 - DNA, 201 bp, Homo sapiens
agataggtttgaaaaacttcagtcctttaaacttttcatgtccagccttggttctagcatcttgacatccaagaatgctaaggttgtataagttgcaaaaytgttgaatcattttatttattcaacaagtatgtgctgagtatttattacaggcttataaaaactgagcagttggcagcgagcgtggtaccagctttctga

SEQ ID NO: 397402 - DNA, 201 bp, Homo sapiens
ggctggagtgtagtagcacaatcttggctcactgcaacctccatctcccgggttcaagcgattcttctgcctcagcctctagagtagctgggattacaggygcctgccaccacgactagctaattttttttgtatttttagcagagacagggtttcaccatgttggccaggctggttttgaactcctgacctcaagtgatc

SEQ ID NO: 397403 - DNA, 201 bp, Homo sapiens
tgggctcctttgaaatgctgaggatctgtttacacaggccaactccttacgaaagggtgttggatgaggagccctcagtgtcttgtaaattaagggatcarctggagtttgtccagccttcctagctggagagagtcttatttacatgagaagcaaggctaggtgattaaagagacaagcaggataaaattcaaagtaacg

SEQ ID NO: 397404 - DNA, 201 bp, Homo sapiens
cgggtgccagagcctacatgcttcaccctgggccttcaaaagatgaaacatcacaccctgcttagcaagtgggacatttatatttcatctgaagaacgtgkgccccaaactgcatggggaggggaggtggtgcctggtgggctgatgggacattcctgtctcctcctcgggttttgttgtggttcccaggcggtgccttcg

SEQ ID NO: 397405 - DNA, 201 bp, Homo sapiens
cacatttacagatgggaaaaatgagccttaggttaagtaaactgcccaaggtcacacagctagtcagtggcagagctgggaatcaaacccaggcactcggrtgccagagcctacatgcttcaccctgggccttcaaaagatgaaacatcacaccctgcttagcaagtgggacatttatatttcatctgaagaacgtgtgcc

SEQ ID NO: 397406 - DNA, 201 bp, Homo sapiens
tgaataagacctgctcccatgattcaattacctcccaccaggtccctcccacaatatgtgggaattatgggagctataatttgagatttgggtggggacayagccaaaccatatccgaggccactgtttttcttaggtagatattcccgtttagcagataagaaaataaggcacacacaagtttagcccccttgcccaggt

SEQ ID NO: 397407 - DNA, 201 bp, Homo sapiens
ctcagagtagtgtaccaggaacctccagagcagaacagaggctgagccaggggtgcccagctgcagatacggacccccaatgggaggcaccgtcttgatgygggccacggggtggttgaaccacaaaagcaatagctaacatgtatataacaggtgtatatgacatgcttattgtctgcctggcaccgtcaatcttcacaa

SEQ ID NO: 397408 - DNA, 201 bp, Homo sapiens
acaaacacatcatgagttaggagctcagtctgatttcatggacaagatagccgtcactgggaaactttaaataaatcacccaagatcacatagtgagtaayaatttgaggaaaactcctttatatttgtagaggagaaaccctagtattcaattaccagagcggtaattacttgtttaatagaaaactcagctaaagcatg

SEQ ID NO: 397409 - DNA, 201 bp, Homo sapiens
tagaggagaaaccctagtattcaattaccagagcggtaattacttgtttaatagaaaactcagctaaagcatgaaatatcaaaagatgcatataaatattwaattttaattttattttaacttaatttaaaccataaaatgtacattccctcaccaacagtttgatacagggccttatgtttgcagagctggtctgctgac

SEQ ID NO: 397410 - DNA, 201 bp, Homo sapiens
aaaattctgtgctcagaaaacccttgctttctagtacagaccaactctcaggaaaggattcatggattccagaccagcctgggcaacacaggattcacgcrctgggattcatggattctgaggagcctatgaatacttgaaattgcacctacagtattgtatgtgcgttcttctcgggtgcatagctttcatcaaattctc

SEQ ID NO: 397411 - DNA, 201 bp, Homo sapiens
ccagtctctggttcttctattgccccagaccctccaggccttgggtgaaccccctccaccatccaacttgacctgccatgttcctgggatctagcccaggrctacttcatccagcaattctcactaaagtgtgagtggctgcttggcactaccgtaatccttgccgcctcatgtgtttattggtgtgaagccttcagctgc

SEQ ID NO: 397412 - DNA, 201 bp, Homo sapiens
gctgccgtggtcacataatgccacctcccagtgcctgcggcaccacccctgggctccgcagccccagccagccgtccatgtggcccatcctgtcctctccrggcctgtctgtgtgcacccagtggagggtctcctgtctcctgtggctccctgaggctgctggtcacagggctgatgaggacactggagaccgctgcgggg

SEQ ID NO: 397413 - DNA, 201 bp, Homo sapiens
gcacatcaccatgcccagcgtttcctcttcattgctgtgtaatctgtattctaaaaaatctaaacctttatctgttaaaatttttatttggtaaatcagcycaaggttccagccttcaggatattttaaattctgactttgacttgaaacccattagtcttccttctaacaagtgctgtcttcaatctaagtcacttggcc

SEQ ID NO: 397414 - DNA, 201 bp, Homo sapiens
catcaggatcacctggaggactggttatgttgtatccaggtgagttaagggaacgccacactttgagaagaattaagagtcctttattaagccggcggccrgagagacagctaatgctcaaaattctctctgccacgaggaaggggctcaattaacttttatacctaggtttaggaaggggagggggactcaaatgtaata

SEQ ID NO: 397415 - DNA, 201 bp, Homo sapiens
cttcaaagtctagattaatcccatttcctgaaatttccatttctactaaaattacattttaaaaaatcctttatgtaaaatggaattcagttataggttcrgccttaaacagtttttttctatctacataagttattcatcaagatattctaggccaggcgcagtggctcatgcttgtaatcccagcactttgggaggccg

SEQ ID NO: 397416 - DNA, 201 bp, Homo sapiens
tatttgatttcgggcttcaaactgatctggtattccccgtgggactccaattgcgcctaattagacgtgagagtcgaaagactcataagggacttctctcrctttacgacgtcttatttttccttcctctggttgatgaattgccagggtgaaagggatatccagctggactaaagcacaagtgccacttcagttttccgg

SEQ ID NO: 397417 - DNA, 201 bp, Homo sapiens
ttgtggaaagacggggttgctctgggggaggggctctctcaagcacccttcactgtggctctgcactctatgaatccaggattctatgacattctccaccrcagcctaggcatatgcagtgtttctggaacctcagttattctcatactaatatcgtggttttttgccttatcagcgtatcatctgtacttctatgagcag

SEQ ID NO: 397418 - DNA, 201 bp, Homo sapiens
cgtcatggagagtggggtggccatcatcctttacctgaaggcccatgattatgagaagagtgaggacgtacgaatactgttaacaccttgccagcttcctytcctcagttaggggagaatgtgttcaggcaccttctcaccatgtgccatctatcccacgatatttgtcatctgtctcttaattatctactacagagtgag

SEQ ID NO: 397419 - DNA, 201 bp, Homo sapiens
gcacttttaaacaaccaaatctcatgggaactctatgacgagaacagcaccaaaggaatggtgctaaccattcatgagaaaccactcctatgatccaatcrcctcctaccaggccccacctccaacattagggattacaattcaacatgagatttggtgggggacacaggtccaacctatatcaataggcccacaatccca

SEQ ID NO: 397420 - DNA, 201 bp, Homo sapiens
ccacaaagccgtcatggagagtggggtggccatcatcctttacctgaaggcccatgattatgagaagagtgaggacgtacgaatactgttaacaccttgcyagcttcctctcctcagttaggggagaatgtgttcaggcaccttctcaccatgtgccatctatcccacgatatttgtcatctgtctcttaattatctacta

SEQ ID NO: 397421 - DNA, 201 bp, Homo sapiens
ccatttttaataaatataaatttcaatatgtaaattttcaggcagaatggtcagaaatccacatctctaagttgaatcactgaatttcacagctacaaacrctcttcatttgggtatgtcattttggcaactcagataccacactacctatcatgaatgctatcaataatgtgattgattcttcatttacctaaaaagatg

SEQ ID NO: 397422 - DNA, 201 bp, Homo sapiens
gtgggacatttatatttcatctgaagaacgtgtgccccaaactgcatggggaggggaggtggtgcctggtgggctgatgggacattcctgtctcctcctcrggttttgttgtggttcccaggcggtgccttcgagactggctcagcctccatcttcgatgggtcctccctggctgcctatgaggacatgctggttgtgatc

SEQ ID NO: 397423 - DNA, 201 bp, Homo sapiens
cactgctcagaaagctgtcgctgcccggctgcgcacaggcctgattttcttgggagtctgggctaagattctgactggccctcccacttaccacccacacsaccacgcagctagccagtaacagggccaggagtgatcaggagggggcccacctgaccacccacccggcgcctccagctggccaactctgcccgctcaggg

SEQ ID NO: 397424 - DNA, 201 bp, Homo sapiens
aggaatacgagaatgattcaataaacacaaataaatgtcatacatcacattcagcgaatcaagaacaaaaaccatttaatcatttcagtagatgctgaaaraaaaattcaacattctttcatgataaaaattcaaaatgagtacaaaagaaacatagcacaataaaggccatatatgacaaacccacagctaacatcgtaa

SEQ ID NO: 397425 - DNA, 201 bp, Homo sapiens
gcaccgtcttgatgcgggccacggggtggttgaaccacaaaagcaatagctaacatgtatataacaggtgtatatgacatgcttattgtctgcctggcacygtcaatcttcacaaccatgtggagtgggcactatccccattttagacatgagaaccattgaagcacagcaggttaagtgacttgcccaaggtcacccaga

SEQ ID NO: 397426 - DNA, 201 bp, Homo sapiens
gtcttgatgcgggccacggggtggttgaaccacaaaagcaatagctaacatgtatataacaggtgtatatgacatgcttattgtctgcctggcaccgtcartcttcacaaccatgtggagtgggcactatccccattttagacatgagaaccattgaagcacagcaggttaagtgacttgcccaaggtcacccagatgata

SEQ ID NO: 397427 - DNA, 201 bp, Homo sapiens
ttcacatttacagatgggaaaaatgagccttaggttaagtaaactgcccaaggtcacacagctagtcagtggcagagctgggaatcaaacccaggcactcrggtgccagagcctacatgcttcaccctgggccttcaaaagatgaaacatcacaccctgcttagcaagtgggacatttatatttcatctgaagaacgtgtg

SEQ ID NO: 397428 - DNA, 201 bp, Homo sapiens
caagtgggacatttatatttcatctgaagaacgtgtgccccaaactgcatggggaggggaggtggtgcctggtgggctgatgggacattcctgtctcctcstcgggttttgttgtggttcccaggcggtgccttcgagactggctcagcctccatcttcgatgggtcctccctggctgcctatgaggacatgctggttgtg

SEQ ID NO: 397429 - DNA, 201 bp, Homo sapiens
ggacacaacacagaaagaaaaccacaggcaaataaatatccctgatgaacatagatgtaaaaatcctcaacaaaatatttggagattcattggaggaataygagaatgattcaataaacacaaataaatgtcatacatcacattcagcgaatcaagaacaaaaaccatttaatcatttcagtagatgctgaaaaaaaaatt

SEQ ID NO: 397430 - DNA, 201 bp, Homo sapiens
tccccttgtcttgggatttgcaagtaacaaactactcttttcttttctttcttctttcttttcttttcttttgttttagatagagtttcactcttcttgcycaggctggagtgcactagcacgatctcagctcactgcaacctccatctcccaggttcaagcaattctcctttctcagcctcccaagtagctgggattaca

SEQ ID NO: 397431 - DNA, 201 bp, Homo sapiens
cagagcccacatccccaaccacctcctttatggggctctcccactctggactaatagcctcacaccctaatcacaccagggctaggtaccagatggaacarccccgatgccacagagcccactgaaattgtttgaactaaccaatcctgaacctgctcaccttgccttacctcttccttcctatggaaaccacagcaacac

SEQ ID NO: 397432 - DNA, 201 bp, Homo sapiens
tattttacagtcattttggtcacaatcgagggtttctggaattttcacatcccttgtccagaattcattcccctaagagtaataataaataatctctaacmccatttattgactgtctgcttcgggctcaggttctgtcctaagccctttaatatgcactctctcattaaatagtcacaacaatcccatgaggcattttta

SEQ ID NO: 397433 - DNA, 201 bp, Homo sapiens
tctcctgtcaatgatggatctcagaaataccccagccaaatctctggacaagttcattgaagactatctcttgccagacacgtgtttccgcatgcaaatcraccatgccattgacatcatctgtgggttcctgaaggaaaggtgcttccgaggtagctcctaccctgtgtgtgtgtccaaggtggtaaaggtgagtccagg

SEQ ID NO: 397434 - DNA, 201 bp, Homo sapiens; identical to SEQ ID NO: 87955

SEQ ID NO: 397435 - DNA, 201 bp, Homo sapiens; identical to SEQ ID NO: 87916

SEQ ID NO: 397436 - DNA, 201 bp, Homo sapiens
gtctgtttatattttcaagtgcctcgaagtattattgttttatagccaaatgtttagttaatctgctcacagatttaccactttcttcactattcattctktcttacacctctaacattccatctggggtaattttcctaaatgatcatgcatcctttgggatttcttttgatgatggtctattggtagtaaactctctca

SEQ ID NO: 397437 - DNA, 201 bp, Homo sapiens; identical to SEQ ID NO: 87902

SEQ ID NO: 397438 - DNA, 201 bp, Homo sapiens
ctgcgccagtttcaggcaggccgctcctccagggcccagccttgaccatttacctaactgatttttcctctactttccctcaatacctcatagggccgtgyagattaagtaaaatagtaagtgtgaaccacccagcataagctagtcctgggcatcgtaaaggacaatgggaaaagaacacagatcctggaagaaggcccc

SEQ ID NO: 397439 - DNA, 201 bp, Homo sapiens
agagtgaagttcacagaagaaattagggcacagctggaagtgttcaaaatgaggaaacgttcaatgtcaagtttgaggtccagggttgatgggtgaactckgcacgctcagcttcatgttaggtctcccagctcaacgagggggtgaattttggtgtactgctgtctttgaggccctgcgggaactctcccacaccctccc

SEQ ID NO: 397440 - DNA, 201 bp, Homo sapiens
ggagagttcatccaggaaattaggagacagctggaagcctgtcaaagagagagagcattttccgtgaagtttgaggtccaggctccacgctggggcaaccsccgtgcgctcagcttcgtactgagttcgctccagctcggggagggggtggagttcgatgtgctgcctgcctttgatgccctgggtgagagctcccagctt

SEQ ID NO: 397441 - DNA, 201 bp, Homo sapiens
ggcatcgtaaaggacaatgggaaaagaacacagatcctggaagaaggcccccaggtttgaattgtatttgccacctactagctgggtgatggggctgatayattatctcactgagcatccattttcccatctgtaaaatgggaactaatgataatggcatccaaatcatagcatcattgtgagcattataggagtttaaga

SEQ ID NO: 397442 - DNA, 201 bp, Homo sapiens
agctgacacctaagttgtagattttgcccgaacaggtcagttgactggcggctataaacctaacccccaaatctatgtcaagctcatcgaggagtgcacckacctgcagaaagagggcgagttctccacctgcttcacagaactacagagagacttcctgaagcagcgccccaccaagctcaagagcctcatccgcctagt

SEQ ID NO: 397443 - DNA, 201 bp, Homo sapiens
atctcccacagtttgagagctttttgccccaacagggcatctctctaaagcagggtgggaggagatcttaggatctgtcccggggcaagaatgaatacggkcatgatctatcacaggagagacattaaacagcaaattggcataatgtggggacaaagacatttcttacagaacatctgcaaggcttactggttctgttta

SEQ ID NO: 397444 - DNA, 201 bp, Homo sapiens
cctcatgctcactgcctgctggggaatagggcactggggacataccccagggagcccttcctcatgttctgagtcccagttcatcccatgctgctattttkctctcccaggagcatctggactccctagacagagccccagcttctcacctgtccctctctaaatgctgctctgcaggcctgtgatcctggacccggcgga

SEQ ID NO: 397445 - DNA, 201 bp, Homo sapiens
ctgcacttttcaatcaaaccccatggccagggagattgtcccctcagagtgactgaaggaaattcagagaagagctgacacctaagttgtagattttgccygaacaggtcagttgactggcggctataaacctaacccccaaatctatgtcaagctcatcgaggagtgcaccgacctgcagaaagagggcgagttctccac

SEQ ID NO: 397446 - DNA, 201 bp, Homo sapiens
ttgtagattttgcccgaacaggtcagttgactggcggctataaacctaacccccaaatctatgtcaagctcatcgaggagtgcaccgacctgcagaaagasggcgagttctccacctgcttcacagaactacagagagacttcctgaagcagcgccccaccaagctcaagagcctcatccgcctagtcaagcactggtacc

SEQ ID NO: 397447 - DNA, 201 bp, Homo sapiens
aatgttgagtgactccccttttccagtgtatcatcctctgaataaatggccataggtcctttgggggaaaccattactatatatgctatggtgtcacagcrtcctttcccaaggggactctgcctcctctttgttaatggggtctagtctgaaaactgggttggtcagttccaaaaatcaggaagggatgatgacttttta

SEQ ID NO: 397448 - DNA, 201 bp, Homo sapiens
tagctatatctaatttgctgtaattaattacagttgccatttttatcctaaaatttctatttcatatttttgtatctgccatggtacttcttatggctttkaattccctgctaactatttaaagttcttattttatcctgtgaatatgatattcctagttattttatttttaatttttattatttgttaatcttatgtttt

SEQ ID NO: 397449 - DNA, 201 bp, Homo sapiens; identical to SEQ ID NO: 87948

SEQ ID NO: 397450 - DNA, 201 bp, Homo sapiens; identical to SEQ ID NO: 87936

SEQ ID NO: 397451 - DNA, 201 bp, Homo sapiens
aatccagctgcaatgcaggaagactccctgatgtgatcatgtgtctcaccctttcaagctgaaagcaacagtacagacgatgagaccgacgatcccaggasgtatcagaaatatggttacattggaacacatgagtaccctcatttctctcatagacccagcacactccaggcagcatccaccccacaggcagaagaggac

SEQ ID NO: 397452 - DNA, 201 bp, Homo sapiens; identical to SEQ ID NO: 87909

SEQ ID NO: 397453 - DNA, 201 bp, Homo sapiens
  misc_feature (1)...(201): n = A,T,C or G
tcacagtgtctaccgtaaatgctcactgaatccagctgcaatgcaggaagactccctgatgtgatcatgtgtctcaccctttcaagctgaaagcaacagtncagacgatgagaccgacgatcccaggacgtatcagaaatatggttacattggaacacatgagtaccctcatttctctcatagacccagcacactccaggc

SEQ ID NO: 397454 - DNA, 201 bp, Homo sapiens
ggatccagatggcatgtcacagtgtctaccgtaaatgctcactgaatccagctgcaatgcaggaagactccctgatgtgatcatgtgtctcaccctttcargctgaaagcaacagtacagacgatgagaccgacgatcccaggacgtatcagaaatatggttacattggaacacatgagtaccctcatttctctcatagac

SEQ ID NO: 397455 - DNA, 201 bp, Homo sapiens
aagttgattccatgactttgctattgtgaatcgtactgcgataaacatacgagtgccggtgtcttttgatagaatgatttctttacctttgggtagatacygagtagtgggattgctgggttgaatggacattctacttttagttatttgaaaagtcccatgaggcatgttttctatcattcccatcttacagatgagaca

SEQ ID NO: 397456 - DNA, 201 bp, Homo sapiens
cgtatgcagcacgttgggagatagatatttataatttgcaggaacatttggacaggaagtgtaacctctcagaggctcccttgccacatcaggagaattgrtaaaaccacactacctgtatcatatcattattttaagtgataaatgatcatctacattcagctctgatgagtaataggtgttcaaaaataggaacttcca

SEQ ID NO: 397457 - DNA, 201 bp, Homo sapiens
  misc_feature (1)...(201): n = A,T,C or G
catggccagggagattgtcccctcagagtgactgaaggaaattcagagaagagctgacacctaagttgtagattttgcccgaacaggtcagttgactggcngctataaacctaacccccaaatctatgtcaagctcatcgaggagtgcaccgacctgcagaaagagggcgagttctccacctgcttcacagaactacagag

SEQ ID NO: 397458 - DNA, 201 bp, Homo sapiens
ttccggcgagtgacggtggtggcttggatggggtgatggcagtggagagggcaggagggaggatcaggaatggacctcaagacttcccagccctgggtctsctgcacttttcaatcaaaccccatggccagggagattgtcccctcagagtgactgaaggaaattcagagaagagctgacacctaagttgtagattttgcc

SEQ ID NO: 397459 - DNA, 201 bp, Homo sapiens
gcaggaagcagcatgatcagcagcattctctaggtgccaggttgagaacaggctgtgggggaacctgtaaagaggttgctgccatagttccggcgagtgayggtggtggcttggatggggtgatggcagtggagagggcaggagggaggatcaggaatggacctcaagacttcccagccctgggtctgctgcacttttcaa

SEQ ID NO: 397460 - DNA, 201 bp, Homo sapiens
tcgccggggagagttcatccaggaaattaggagacagctggaagcctgtcaaagagagagagcattttccgtgaagtttgaggtccaggctccacgctggsgcaacccccgtgcgctcagcttcgtactgagttcgctccagctcggggagggggtggagttcgatgtgctgcctgcctttgatgccctgggtgagagctc

SEQ ID NO: 397461 - DNA, 201 bp, Homo sapiens
gtgagcttggagcaaaagttcagtaagcaaaagaagaaagctgtctccactgtggagagggaagtctgagtggattgccagattgcagctgaatgcaaaamacttttataagaaaccactctcctccctgtaactgtttgagaaactttttatcagtaaagctgtgcaacttcccttaccttatgcagctgtgggtatatc

SEQ ID NO: 397462 - DNA, 201 bp, Homo sapiens
atgccattattttgttcctttttatggttgagtagtattccatggtgtgtttgtgtgtgtataacatttttctttatccactcattgattgatgggcattygggctggttccatatttttgcaattgcaaattgtgctgttataaacatgtgtgtgcaagtatcttttttgtataatgacttcttttcctctgggtagata

SEQ ID NO: 397463 - DNA, 201 bp, Homo sapiens
  misc_feature (1)...(201): n = A,T,C or G
gtaaaggacaatgggaaaagaacacagatcctggaagaaggcccccaggtttgaattgtatttgccacctactagctgggtgatggggctgatatattatntcactgagcatccattttcccatctgtaaaatgggaactaatgataatggcatccaaatcatagcatcattgtgagcattataggagtttaagacatgca

SEQ ID NO: 397464 - DNA, 201 bp, Homo sapiens
acacatttcaacacagcccagggatttcggacggtcttggaattagtcataaactaccagcaactctgcatctactggacaaagtattatgactttaaaamccccattattgaaaagtacctgagaaggcagctcacgaaacccaggtatgctatccccacatggcttagctcccctatgtaaatgaacacctggatacag

SEQ ID NO: 397465 - DNA, 201 bp, Homo sapiens
atgtgtatgtacatataaaatatcagacccatagtttcatggatatgatggcttaggaagaagctaaggtaggtattaaagtttaaaaatggagcctctttaaaaaatatattaattggccaggcatggtggctcatgcctgtaatcccagcactttgggatgccgaggcagctggatcacctgaggtcaggagtttgagc

SEQ ID NO: 397466 - DNA, 201 bp, Homo sapiens
tgggaaggctgggtgggtggacgtggctgtggctagaccccgggccaccccagctgcttcatcccccagagcccatccagaagcaggagcctgagccacayccatgggtcgcagagagagcctgagccctggagccagctgcccgagttcaaatcctgcctccctgcctcactcacagcgtgactttgggcaaattatgtt

SEQ ID NO: 397467 - DNA, 201 bp, Homo sapiens
tactcagatgaatgactgaccattcattcattcattaaatgtttattggacacctactatgtgccaatccctggaactttggcctcaaacaaaatagcatrtcctctgccttcacaaagcccttagagagggccattagagagcacttattagtgctatcagatgttagcagctggcagggtgaggcagggctgtggaacc

SEQ ID NO: 397468 - DNA, 201 bp, Homo sapiens
tgctgtgtaccaaactaccccaaaatgtgacttaaaacaacagcaagccaggtgctgtggctcatgcctgtaatcccagcagtttgggaggctgaggtggkcagaacgcttgaggccaggagttggagaccagcctggccaacatagcaaaaccccatctctactggaatgaatgaatgaatgaatgaatgaatgaatgaa

SEQ ID NO: 397469 - DNA, 201 bp, Homo sapiens
ctcaaacaaaatagcatgtcctctgccttcacaaagcccttagagagggccattagagagcacttattagtgctatcagatgttagcagctggcagggtgrggcagggctgtggaacccagagcaggcaccccgcctggccctggggggctggggaggcttcctggaggaggggaagtctgagtggagccaggagtcaggc

SEQ ID NO: 397470 - DNA, 201 bp, Homo sapiens
ggaactccagagcccccagtagagggtacgcagtcctgcctgggctcccagatgctcccgcactgacacgctctccacccccgaccctggcagcgggcaaygcaggcatggcggctgcatatgcggccaggcaactcggcgtccccgccaccatcgtggtgcccagcaccacacctgctctcaccattgagcgcctcaaga

SEQ ID NO: 397471 - DNA, 201 bp, Homo sapiens
gagaccagtctggccaacatggggaaaccccatctctactaaaaatacaaaaattacctgtacttggtgacacacgcctgtaatcccagctcctagggagrctaaggcaggagaatcgcttgaacccaggaggtggaagttgcagtgagccatgatcacgccactgcactccagcctgggcaagagagtgagactccatct

SEQ ID NO: 397472 - DNA, 201 bp, Homo sapiens; identical to SEQ ID NO: 87974

SEQ ID NO: 397473 - DNA, 201 bp, Homo sapiens
caccattagggcttcctctgtttgaggggtgcccttccaggagggttccttgggactgatcccagagccatcagtcgcctattttcctccaccctttcctragccagtctctttggagatgggaggtgcagtctcagacaagggtagaacaaattctgagtgaaggaaacgtccgtgtccactggaatcctggcaggtatt

SEQ ID NO: 397474 - DNA, 201 bp, Homo sapiens
tgaaaacaatggcagcagccaccaatttggaattccagggggaggccagcagtcgcccagggtggggaggtgaggggggaactccagagcccccagtagarggtacgcagtcctgcctgggctcccagatgctcccgcactgacacgctctccacccccgaccctggcagcgggcaacgcaggcatggcggctgcatatgc

SEQ ID NO: 397475 - DNA, 201 bp, Homo sapiens
tgggcctcagtttgtccatctgcgaaatgaacagaaggtgacttgcactttccttcttgcttcccaagacttttttctttcttctttttttttttttttttccttttttgagacggagtctccgtctgtcgcccaggctggagtgcggtggtgcgatctcggctcacagcaagctccacctcccaggttcaagtgattctc

SEQ ID NO: 397476 - DNA, 201 bp, Homo sapiens
agacactgtgggaaaagccgggggccatcgcgctgtcagtgggcggcgggggcctgctgtgtggagtggtccaggggctgcaggaggtgggctggggggaygtgcctgtcatcgccatggagacttttggtgcccacagcttccacgctgccaccaccgcaggcaaacttgtctccctgcccaagatcaccaggtgagcag

SEQ ID NO: 397477 - DNA, 201 bp, Homo sapiens
gaatcgcttgaacccaggaggtggaagttgcagtgagccatgatcacgccactgcactccagcctgggcaagagagtgagactccatctcaaaaaaaaaawcaaaaaaaaaaaaaaagaagaaacacacgttacacccaggtgcagcagcaagtgcacacatgtcaccaaatgcccattatccacggctgcacatgcaaca

SEQ ID NO: 397478 - DNA, 201 bp, Homo sapiens
ggccacctccacccagggtccctttcatgagtctccaatctgtaaatcaaaaagaatcaaaaagattgagacaggactcaatccatttagaaatttatttygccagggttaagaatgcacctgggagacaggtctgtgcttttctccagagatgactttaggtgtcagtatttaaaggagaaaagcaagctggaggggaaa

SEQ ID NO: 397479 - DNA, 201 bp, Homo sapiens
ccttgttatgtaaataatgcccctcaggtaatcaaaatccttgtctctctctctcttttttcttttgctggctgttttttctttttcctttttttttttttccagctgtgggtatttagccaattcatgagaccttgttcgccataatatgaaactttccttcagatttgaccaagtcaaatggagttggtccagtccaat

SEQ ID NO: 397480 - DNA, 201 bp, Homo sapiens
aggcttcctggaggaggggaagtctgagtggagccaggagtcaggcacagggagtgcaaaggtctggaaatgaaaaacatgatatattccagggtcagggwagtatccagtggggctgggagggagaaggcaggggtggggaagcaagtggggttgaggctggagatgtgggcagagatcagagtccacagggatgcctgt

SEQ ID NO: 397481 - DNA, 201 bp, Homo sapiens
tagtagagacggggtttcaccatgttagccaggatggtctcgatctcctgacctcgtgatccgcccgcttcggcctcccaaagtgctgggattacaggtgkgagtcaccgcgcccagcccaggttttttttaaatgtatgcatttaagtaagtaatagaggcacatggtaaaacatcaaactgtgcaaaaggtgggtgcta

SEQ ID NO: 397482 - DNA, 201 bp, Homo sapiens
tactggggacacagaggtgataaaatccagtttgtgccttgaagtggcccccagcatggaggggagaggaagacacccaattcggtagcaacaataacacytcctaagatgacagagggcagaaagtccccatagggtagctggggatggggcaagatcagggagggcttcttgaagtaggcagagactcagcacacagct

SEQ ID NO: 397483 - DNA, 201 bp, Homo sapiens
gtaggcagagactcagcacacagctcagactttgacaagaagcagactagctgcatttagtgcatgtctactgtacaccaacacgtgcatgctgtccagcrtaacccacactgtttatttgtttgtttgtttgtttgtttgtttgttttacaaacgaggtctcactgtgctgcccaggctgatcttgaactcctgacctca

SEQ ID NO: 397484 - DNA, 201 bp, Homo sapiens
atcagtcgcctattttcctccaccctttcctgagccagtctctttggagatgggaggtgcagtctcagacaagggtagaacaaattctgagtgaaggaaaygtccgtgtccactggaatcctggcaggtattccaggtggggaggaagagcacaggcaatgactgggaggtgggcctgagtgcctctcctgttgtctccac

SEQ ID NO: 397485 - DNA, 201 bp, Homo sapiens
tttctggcatgaacaagcagcatgcctagtagttaaaacacagacctgcagccaggctctgatacaaatacttgttctgccactttctcactgtgtgaccytgtgaccttttgtaagtcacttaacctctctgtgccttgttccctcaaatgtaagatggggataaaacactacttccctagtacagtggatgtgaggatc

SEQ ID NO: 397486 - DNA, 201 bp, Homo sapiens
gtgctgggattacaggcgtgagccactgcacctggccaaggaaacaattattataattattatttgtgacatgggaaaggtatatttttgtctgaagcacytctccgtctcggatattttacacgcagcatgagaacccaagcaattatttgctactcagatgaatgactgaccattcattcattcattaaatgtttattg

SEQ ID NO: 397487 - DNA, 201 bp, Homo sapiens
tattttgttttgttttttgagacagagtctcaccattcactctgtcgcccaggctggagtgcaatggcgcgatcttggctcactgcaaactctgcctcacrggttcaagggattctcctgcctcagcctcctaagtagctgggattacaggcttgcaccaccacgcctggctgatttttgtatttttagtagagacagggt

SEQ ID NO: 397488 - DNA, 201 bp, Homo sapiens
tcatgttggccaggcaggtctcaaactcctgacctcaggtgatccgcctgcctaggcctcccaaagtgctgggattacaagcatgagccaccacccgcagmcactgtatgcactttgagcaaggtctcccagagctcctcagtcacgatcattacaagagcccactgtcagagctactgcgatgctccccagccccatgcc

SEQ ID NO: 397489 - DNA, 201 bp, Homo sapiens
cccttccccaaagctggtgatggtgacttcccccacccacagctcaggccctagggaggaggcagcaccttcacatcgatacccccatgggagcgctgacrcagggcctggaaggggtaggagccattggccgggttgaggtcggagcgggcggagatagcattctccccattgggctgggggttgcaggctttgcacagt

SEQ ID NO: 397490 - DNA, 201 bp, Homo sapiens
ccggcaaccttggtccctcctcctttgttaaagagaaagctccagaccctaagcctccgggtgaagacggaggaggagaggggatgagagcaaccctcacygctttcccgggcactgcctatgactcatgcaccaccctgtctcatttgacagatgagcaaactgaaactcagaaaagggaacttatttggccaaagcttc

SEQ ID NO: 397491 - DNA, 201 bp, Homo sapiens
actgcgatgctccccagccccatgcctgcacagcacgggtgatcatttagcatttttcctcttcttcttcttatgcttctcagatattttgttcatttcasttggtaatgaattaaccgatgtttattgagcacttaccttatgccaggcactgttctaggcactgggaattcagcaggaaacaaaacaggcaaaaaccct

SEQ ID NO: 397492 - DNA, 201 bp, Homo sapiens
gaccagcgtggccccagctcctgccctccagcctgccagggaaccagctctttccaggaaccggctctgtccagcttcaggcagcttccggcaaccttggyccctcctcctttgttaaagagaaagctccagaccctaagcctccgggtgaagacggaggaggagaggggatgagagcaaccctcaccgctttcccgggca

SEQ ID NO: 397493 - DNA, 201 bp, Homo sapiens
ctggcaggcagaacccactctcgcccttcagggtccccagcacaacactttcttctgcagggcaccctgaattcaatcgacattcccaggagggcctagamcacgctcaggccctctcactcccacctgctcagcttggactttgcccaaagcctcccaaactcctgcagcctctcatcagcctctcattcacacacacac

SEQ ID NO: 397494 - DNA, 201 bp, Homo sapiens
cctctgtcctcttgcccttgaaaaggaaaggaatcagtgatcaagggagaagctgaagcacagaaaggttaagtaacttgctccagcttgcccagcaaatrggccatgggaccaatcttccagggaccccacatccaacctggatgctcttgtcccaacagatagaaattcacagccacagcgtctgagctgaaagaattc

SEQ ID NO: 397495 - DNA, 201 bp, Homo sapiens
cagctacttgggaggctgaggtgggagaattgcttgaacctgggaggtggagattgcagtgagccaagatctcaccactgttctccagcctgggcaacagwgtgagactgtctttaaaaaaaaaaaaagagagagagagagaataacatctgtcatttgttgagtccctattatgtgccagtcatcagctgagtcctctgg

SEQ ID NO: 397496 - DNA, 201 bp, Homo sapiens
gcttggacccaggaggcagaggttgcaacaacccaagatctcaccactgcactccaggctgggcaacagggtgactccatctcaaaaaaaaaaaaaaaaaaggaagtatctgaggcagttctcaatcgatttaaaagtttattttgccaaggttaagggcaagggcacaaccagaagacaggtccttgcctttctccatag

SEQ ID NO: 397497 - DNA, 201 bp, Homo sapiens
tgcttggacccaggaggcagaggttgcaacaacccaagatctcaccactgcactccaggctgggcaacagggtgactccatctcaaaaaaaaaaaaaaaaaaggaagtatctgaggcagttctcaatcgatttaaaagtttattttgccaaggttaagggcaagggcacaaccagaagacaggtccttgcctttctccata

SEQ ID NO: 397498 - DNA, 201 bp, Homo sapiens
tccaaaatggccggcaccagcgtctacctcaagatggacagtgcccagccctccggctccttcaagatccggggcattgggcacttctgcaagagggtacrggaccgggtcagcattatctgggcaggggtggcaggtcctccttcctcaacagggcagggccagtgctgtgtgaaattaaaggcgttgtaggataagcct

SEQ ID NO: 397499 - DNA, 201 bp, Homo sapiens
gtgcagcaggaacagcagagaggccagtgtggctgcagtagaatgaatggaggggacagtcggcgaggaagaggacagaaagagaatggagccacatcacrcagagccttggaggctgaagcaccgtcaggacttcagcttttattccaagtaagacgggagccatgggaggctcttgagcagagcagcaatgtgacctga

SEQ ID NO: 397500 - DNA, 201 bp, Homo sapiens
aaaaaataaattaattaaattaaattttaaaatagcagctgctattctttgagtccttactcggtgcctggccctaggctgccattatctataagactcayaatacctagtagctatcatcgttcccatctctccaggcaggaaactgaggctaagggaacttaggtgaccaccaccccaaggtcacacagcagggtagca

SEQ ID NO: 397501 - DNA, 201 bp, Homo sapiens
aatccccacctcctgccacaaaggacaggctgatctggccatcccccgggacacttccctggagggtatgatgtaactgatccaggaagtggagatgacasaggcacttgacaaagctccctggcgggactccaccatcctcctcctaggatttcaggcttgttttagatggagctgggcctcagtttgtccatctgcgaa

SEQ ID NO: 397502 - DNA, 201 bp, Homo sapiens
agccatcacctcttgagtgctgactatgtgctgggaactgtccttacagctttacatcaattaagctacttaagcctcataacaaatctaagaggtggaawctactcttagttgaagaaaccaaagcacagaaaggttaagtgacttgttcaaggtcacatagcaagttgatggcagaggttggatttgaacttgggcctg

SEQ ID NO: 397503 - DNA, 201 bp, Homo sapiens
atagcaagttgatggcagaggttggatttgaacttgggcctgtccgactgcacagcccatgctgtccaccacaaggttacacagcctctcagggaagtgayttgcttgctgtctggaaatgaacaagcctgggatactacaatcacaggtatgaactaatccctctgaggttcgagcctttccctgagacccctccagcag

SEQ ID NO: 397504 - DNA, 201 bp, Homo sapiens
tccgcacagctgggaacaaacaagaggcttggcatggggcatggagagttttcagatgcaagaccttccagttctgtgatgatgatgatgatgatgacgaygacgatggctgctaacttaccaaacactcagtcaattcgaggcccctctcacacatgcattgtcaagtcacctaagcctagaagggaggtaccattatca

SEQ ID NO: 397505 - DNA, 201 bp, Homo sapiens
gcccatccacatgacgggacaaagaaacacacatgtacggcatgtgtagggttttttgttgttattgttgcatatttaaaaattaagaggttgccaggctyagtggttcatgcctgtaatcccagcactttgagaggccaaggcaggtggatttgttgagcccaggagttcaaggccagcctgggcaacatggtgaaaccc

SEQ ID NO: 397506 - DNA, 201 bp, Homo sapiens
ctggtctcgaactcctgggcacaagtgatcctcccaccttggcctcccacagtgctgggattataggtgtgagccaccacgcccagcctgatacattcttrgtgaagcaaatggaacaacatgcagaggtctagagagttcgtcatcttgtccctaccagttgcagctccaaatccatctccccccccccatattcaatca

SEQ ID NO: 397507 - DNA, 201 bp, Homo sapiens
tattttcctccaccctttcctgagccagtctctttggagatgggaggtgcagtctcagacaagggtagaacaaattctgagtgaaggaaacgtccgtgtcyactggaatcctggcaggtattccaggtggggaggaagagcacaggcaatgactgggaggtgggcctgagtgcctctcctgttgtctccacagtgggccaa

SEQ ID NO: 397508 - DNA, 201 bp, Homo sapiens
agtctgaactccctgacttcgtgggtaacctcatgtggagatatcatcaaaaccctaaatctgagacctctgaaggttaccaggcaggcaagctctcccamccccttcctgctcaaccctttccactgaccctgtgtcctcaaaggactcaggattcctgagctgaccttcctctactgccattcactacctggtgctccc

SEQ ID NO: 397509 - DNA, 201 bp, Homo sapiens
actgtccttgagtagggggtctggggtggagccttacttgcacaggggctggagaaagtggagggtgtgcagaaacaccagtcctgcaaaaggaagggcaraaggcaaaaaacgttccaggggccttatcaagcactgagtctttagaacatttggggtgcttttgcatttagaatgatgaatgcgtgaaaactgggtagt

SEQ ID NO: 397510 - DNA, 201 bp, Homo sapiens
ccacacctgctctcaccattgagcgcctcaagaatgaaggtgccacagtcaaggtggtgggtgaggtgagtgccgacccagggcaaggaagagagagggcrcctggtggctggacagggtgccccctgtgcctcaccccctcctatctcccctgtggctttgcagttattggatgaagccttcgagctggccaaggcccta

SEQ ID NO: 397511 - DNA, 201 bp, Homo sapiens
gcttttcagggttttacagctgcagaggtgatacctgtccccctgcccccagatgcattgccttctctgtctcacatccatctccttctctccctccctgyccccatctctctcctgtttcccccactcccatcctcttctgggttcccacttctctcagtgttgccaaggccctgggcgtgaagactgtgggggctcagg

SEQ ID NO: 397512 - DNA, 201 bp, Homo sapiens
caatggcagcagccaccaatttggaattccagggggaggccagcagtcgcccagggtggggaggtgaggggggaactccagagcccccagtagagggtacrcagtcctgcctgggctcccagatgctcccgcactgacacgctctccacccccgaccctggcagcgggcaacgcaggcatggcggctgcatatgcggccag

SEQ ID NO: 397513 - DNA, 201 bp, Homo sapiens
agaccccacttggtttggggatccctgaggcttttcagggttttacagctgcagaggtgatacctgtccccctgcccccagatgcattgccttctctgtcwcacatccatctccttctctccctccctgcccccatctctctcctgtttcccccactcccatcctcttctgggttcccacttctctcagtgttgccaaggc

SEQ ID NO: 397514 - DNA, 201 bp, Homo sapiens
agactccgtctaaaaaaaaaaaaaaacaaaaaaacaacaaaaaaacaaacaaaacaaaaacccgcctgggcaacatagtgacactcagtctcaaaaaaattaaaaaaatgatactaaagaatatactatatgatgtcaattcaaacactctgcaccttattagaagaccccacttggtttggggatccctgaggcttttca

SEQ ID NO: 397515 - DNA, 201 bp, Homo sapiens
ccccgcctccccctaggtttgccacccctcatccccaaaactcacccatggatgctccactggggagggagcctgggagcgccatggaaggtcagagggggccagggagaggtgacagcttgtcccacagaggacgacggctgagcaggctgtttgtaccctggttgccctctgtctcatcaatattctcgtcctggccag

SEQ ID NO: 397516 - DNA, 201 bp, Homo sapiens
gatcgcaccactgcactccagcctgggcaacagagcaagactccgtctaaaaaaaaaaaaaaacaaaaaaacaacaaaaaaacaaacaaaacaaaaacccrcctgggcaacatagtgacactcagtctcaaaaaaattaaaaaaatgatactaaagaatatactatatgatgtcaattcaaacactctgcaccttattaga

SEQ ID NO: 397517 - DNA, 201 bp, Homo sapiens
gggaggcagagattgcagtgagctgagatcgcaccactgcactccagcctgggcaacagagcaagactccgtctaaaaaaaaaaaaaaacaaaaaaacaamaaaaaaacaaacaaaacaaaaacccgcctgggcaacatagtgacactcagtctcaaaaaaattaaaaaaatgatactaaagaatatactatatgatgtca

SEQ ID NO: 397518 - DNA, 201 bp, Homo sapiens
atctccgcacagctgggaacaaacaagaggcttggcatggggcatggagagttttcagatgcaagaccttccagttctgtgatgatgatgatgatgatgaygatgacgatggctgctaacttaccaaacactcagtcaattcgaggcccctctcacacatgcattgtcaagtcacctaagcctagaagggaggtaccatta

SEQ ID NO: 397519 - DNA, 201 bp, Homo sapiens
ttgcttgaacccgggaggcagagattgcagtgagctgagatcgcaccactgcactccagcctgggcaacagagcaagactccgtctaaaaaaaaaaaaaaacaaaaaaacaacaaaaaaacaaacaaaacaaaaacccgcctgggcaacatagtgacactcagtctcaaaaaaattaaaaaaatgatactaaagaatatac

SEQ ID NO: 397520 - DNA, 201 bp, Homo sapiens
atcacttgagcccaggagttcaagaccagcctggggtcgggcatggtggctcatgcctgtaatcccagcactttggaaggccgaggggggtggatcacctraggtcaggaattcgaggccagcctggtcaacatagtgaaaccccatctctactaaaaatacaaaaattagccgggtgtggtggtgggcacctgtagtccc

SEQ ID NO: 397521 - DNA, 201 bp, Homo sapiens
gagctcaggagttcgaggctgtggtgatctgtgatcgcaccactgtactctagcctgggcaacagggtgagactctgtctcaaaaaaaaaaaaaaaaagaragagagtcatatgaccagaggtcacaagatttgtgacttccccaattactcctatagaaacattgctattatagaaccttagattggtcttttgagatgt

SEQ ID NO: 397522 - DNA, 201 bp, Homo sapiens
caggaagagagccaagaggaaaagttcctacagagaacagcagccaggaccacctcgagggagaaatgcactttggggtgccgcggatgcagacagaaggrgtttgcggcaggaggtgagggtagggggtgagggcggagatgtggacaagggtgccagcagggggttcccgcccacggagaggagtttggttgttattca

SEQ ID NO: 397523 - DNA, 201 bp, Homo sapiens
tcaggtgcaaaggccctgaggcaggagggtgccccgagtgcagcaggaacagcagagaggccagtgtggctgcagtagaatgaatggaggggacagtcggsgaggaagaggacagaaagagaatggagccacatcacgcagagccttggaggctgaagcaccgtcaggacttcagcttttattccaagtaagacgggagcc

SEQ ID NO: 397524 - DNA, 201 bp, Homo sapiens
ctactgtacaccaacacgtgcatgctgtccagcgtaacccacactgtttatttgtttgtttgtttgtttgtttgtttgttttacaaacgaggtctcactgygctgcccaggctgatcttgaactcctgacctcaagcaatcctcctaccttagcctcccaaaatgctcggattacaggcaacagccactgcgcccagcccc

SEQ ID NO: 397525 - DNA, 201 bp, Homo sapiens
gagagccaagaggaaaagttcctacagagaacagcagccaggaccacctcgagggagaaatgcactttggggtgccgcggatgcagacagaaggagtttgsggcaggaggtgagggtagggggtgagggcggagatgtggacaagggtgccagcagggggttcccgcccacggagaggagtttggttgttattcaaattct

SEQ ID NO: 397526 - DNA, 201 bp, Homo sapiens
tagctgcatttagtgcatgtctactgtacaccaacacgtgcatgctgtccagcgtaacccacactgtttatttgtttgtttgtttgtttgtttgtttgttttacaaacgaggtctcactgtgctgcccaggctgatcttgaactcctgacctcaagcaatcctcctaccttagcctcccaaaatgctcggattacaggcaa

SEQ ID NO: 397527 - DNA, 201 bp, Homo sapiens
cacaggcacacgtcaccacgcctgattaattttttgtattttttgtagagacggggtttcaccatgttggctggtctcaaactcctgagctcaagtgatcygcccacctcggcctcccgaagtgctgggactacatccgtgagccaccgcgctcagccctttgagaggtttgaagccgaggagctgtgtgtgaatggacca

SEQ ID NO: 397528 - DNA, 201 bp, Homo sapiens
ctagctgcatttagtgcatgtctactgtacaccaacacgtgcatgctgtccagcgtaacccacactgtttatttgtttgtttgtttgtttgtttgtttgttttacaaacgaggtctcactgtgctgcccaggctgatcttgaactcctgacctcaagcaatcctcctaccttagcctcccaaaatgctcggattacaggca

SEQ ID NO: 397529 - DNA, 201 bp, Homo sapiens
actagctgcatttagtgcatgtctactgtacaccaacacgtgcatgctgtccagcgtaacccacactgtttatttgtttgtttgtttgtttgtttgtttgttttacaaacgaggtctcactgtgctgcccaggctgatcttgaactcctgacctcaagcaatcctcctaccttagcctcccaaaatgctcggattacaggc

SEQ ID NO: 397530 - DNA, 201 bp, Homo sapiens
caccatgttggctggtctcaaactcctgagctcaagtgatccgcccacctcggcctcccgaagtgctgggactacatccgtgagccaccgcgctcagcccwttgagaggtttgaagccgaggagctgtgtgtgaatggaccagtgggtaaggacgaaaagaagagatggaggaaatgagagggaggaaaaatagtagagaa

SEQ ID NO: 397531 - DNA, 201 bp, Homo sapiens
gactagctgcatttagtgcatgtctactgtacaccaacacgtgcatgctgtccagcgtaacccacactgtttatttgtttgtttgtttgtttgtttgtttgttttacaaacgaggtctcactgtgctgcccaggctgatcttgaactcctgacctcaagcaatcctcctaccttagcctcccaaaatgctcggattacagg

SEQ ID NO: 397532 - DNA, 201 bp, Homo sapiens
tcatccccaaaactcacccatggatgctccactggggagggagcctgggagcgccatggaaggtcagagggggccagggagaggtgacagcttgtcccacagaggacgacggctgagcaggctgtttgtaccctggttgccctctgtctcatcaatattctcgtcctggccagcttgacaagagagctttgttgagggggc

SEQ ID NO: 397533 - DNA, 201 bp, Homo sapiens
gtagccaattatgtatttgtcttgatctcaataaatcggcactttacataagataaggtgaacatagagtagcgacctgtggagatatttaactttttttyttctttctgttgtgaaggctggagtgcagtggcgagatctagtctcactgtaacctctgcctcccaggttcaagcaattcttgtgcctcagcctcctgag

SEQ ID NO: 397534 - DNA, 201 bp, Homo sapiens
aagatcagagagatcagggtctcttggccctgagtttgaccccacgcccttgtcagaatagccttgagaatcctcagggccccctcgggcagggcacagcytgagccacctcttcccagtcccacccagggcacctctcagcttcgggcatcaggggaaagaagcccatgggtcatcactgatccccaaatgccgcatacc

SEQ ID NO: 397535 - DNA, 201 bp, Homo sapiens
tatggtggacctaggctgtgtgatgcttttacagtgtactttgttgcaaagacatttctctaagggtctaaaccatactctctcttatctttaaaaaaaawttttttatatataactaggcccacacatccagaccctctcctgttttaaacattcaagagtagcccctgttgtaataaagattttagtcaaaaaagaagt

SEQ ID NO: 397536 - DNA, 201 bp, Homo sapiens
atctcaaaaaaaaaacagatcctaagagagaaaaaaatgcattaaggccctatgaataaataaataaataaatacacacacacacacacacacacacacaycttagatattcgcctttaattaagcttttaaccattgagctctttaaaaaatccttttaaatctcatcaccatattttagctgggacaaactgctaatat

SEQ ID NO: 397537 - DNA, 201 bp, Homo sapiens
agggtttcaccatgttggccaggctgctctcaaactcctgacctcaagtgatctgcctgccttggcctcccagagtggtgggattataggcatgagccacsgcgcccagctgctattgttttgtattgctaatataaaagaggtgatgggacaatatggcaaaagttgcaaaggtggcacgtaagcgttcaaagtaccatg

SEQ ID NO: 397538 - DNA, 201 bp, Homo sapiens
caaaagtaacacaaacatcaaaccagaaaggacttgatttaggaaccaagcccaggccacggtggtgaaaaaggaacagaatcttagctactgaactagcrtgaggtgacagccatgtagcctctttcagtttggcttggctagcaaaagatggccttgttatgtaaataatgcccctcaggtaatcaaaatccttgtctc

SEQ ID NO: 397539 - DNA, 201 bp, Homo sapiens
cagtttcttacatgactcagcttttagcttaattctttttcttttggcatagtgagttgggggtcccaattttttattttcctttcacgaaactgaggacrgaaaggggaagtggaaagagggaggaggagtgggttgtgggaaaggcaggaggaagctgccaaagaagaaagcttggccagattccacctcccttctgac

SEQ ID NO: 397540 - DNA, 201 bp, Homo sapiens
gagttcgagaccagcctgcccaatatggtgaaaccttgtctccactaaaaatgcaaaaattattcgggcgtggtggtgcacgtctgtgatcccagctactygggaggctgaggcaggaaaatcgcttgaacccagaaggcggaggttgcagtgagccgagatcatgccgctgcactccagcctgggtgacagagggaggtt

SEQ ID NO: 397541 - DNA, 201 bp, Homo sapiens
taggcctcagctcaaccctggaccccaagagcacaggctttggggtcgaccagaagcaaaagttagaaaccagctccgacttcctggctgtgtgacccaarcaagtgtcacaacctctctgtgcctgtttccccttctctaaaatggggataaaaacagtccccaactcacaggttgtggtgtaagttaataagaataaca

SEQ ID NO: 397542 - DNA, 201 bp, Homo sapiens
gatacattcttggtgaagcaaatggaacaacatgcagaggtctagagagttcgtcatcttgtccctaccagttgcagctccaaatccatctccccccccccatattcaatcatgacactggagtgtaaattaatttggtggtgtaagatagtgaattgctgtcttccttcagtctgaactccctgacttcgtgggtaacct

SEQ ID NO: 397543 - DNA, 201 bp, Homo sapiens
cttgcgattagagcccaggtctccaggatgctctctcgtctgaggccttgcttggcttgctgggaagcgaaggaagggatcactctggcagtgctggcacsggggctagctctcctaaccctctgggtttccttcctttctcccaggaatgatgtctggagaacccctgcacgtgaagacccccatccgtgacagcatggc

SEQ ID NO: 397544 - DNA, 201 bp, Homo sapiens
ggaggtggaagttgcagtgagccatgatcacgccactgcactccagcctgggcaagagagtgagactccatctcaaaaaaaaaaacaaaaaaaaaaaaaaagaagaaacacacgttacacccaggtgcagcagcaagtgcacacatgtcaccaaatgcccattatccacggctgcacatgcaacacacccaaggctgaaca

SEQ ID NO: 397545 - DNA, 201 bp, Homo sapiens
tgtcctcaggtgatctgcttgcctctgcctcccaaagtgctgggattacaggcgtgagccactgcacctggccaaggaaacaattattataattattatttgtgacatgggaaaggtatatttttgtctgaagcacctctccgtctcggatattttacacgcagcatgagaacccaagcaattatttgctactcagatgaa

SEQ ID NO: 397546 - DNA, 201 bp, Homo sapiens
gggcagaacgcttgaggccaggagttggagaccagcctggccaacatagcaaaaccccatctctactggaatgaatgaatgaatgaatgaatgaatgaatraataaaatttaaaagctgtgattagtcactgctataataattatgacaaaattaataattatgaaagagcttttcctaactgaatattgggcttcccaaa

SEQ ID NO: 397547 - DNA, 201 bp, Homo sapiens
gttgcggtgaggcgaggttgcagtgagccgagatcgcgccattgcactccagcctagagagtaagagggaaactctgtctcaaaaaaaataataaaaaatwaaaaattagacccgaaaaatgagaaccaaccaaccacacaacaaactgcaagaagagcgtgtacatggcaggactattgtgaggattcaatgagcctgca

SEQ ID NO: 397548 - DNA, 201 bp, Homo sapiens
cgggcatggtggcgcatgcctgtaatcccagctactcgggaggctgaggcaggagaattgcttgaacctgagaggcgaggttgcggtgaggcgaggttgcrgtgagccgagatcgcgccattgcactccagcctagagagtaagagggaaactctgtctcaaaaaaaataataaaaaattaaaaattagacccgaaaaatg

SEQ ID NO: 397549 - DNA, 201 bp, Homo sapiens
gtttatttgggaggtgattcagtgggggagtggggaagtaagccagggaaggaagggggctttgctgtttcttttttctttttctatcatccagtccaaaatgtcaggaagggggctttcaaaggcaggtggccgctgtgggtggctagagcttaatccctcggggaccctgggagccagtgcagaaggcgcacagcagtt

SEQ ID NO: 397550 - DNA, 201 bp, Homo sapiens
ttaaatgaaaaagccccaagttgccaacagccttatcaaccccagaccccatcaggcacctgaggtctgggactgagctgtcttggcccagggacacacasctcttgtcccgtatggcagccaccagggctgaaatgggggacctgggtctccctgctgtggaataacccaggggaaagcagggggctcaggctcaggtcc

SEQ ID NO: 397551 - DNA, 201 bp, Homo sapiens
gggaaaggagtttatttgggaggtgattcagtgggggagtggggaagtaagccagggaaggaagggggctttgctgtttcttttttctttttctatcatccagtccaaaatgtcaggaagggggctttcaaaggcaggtggccgctgtgggtggctagagcttaatccctcggggaccctgggagccagtgcagaaggcgc

SEQ ID NO: 397552 - DNA, 201 bp, Homo sapiens
catgccaaccttggccaagtcacttttgtcactgggccttacctgtcacatctatgagttgaggtaaggaccaccagtgctgtccacctcacttgtccccraagcctttccccagaggccaccttggtggcactccacagccaaatccctggtgccagggctgggacacctcgggctggccccttggctggcagaatgccc

SEQ ID NO: 397553 - DNA, 201 bp, Homo sapiens
aaccctggaccccaagagcacaggctttggggtcgaccagaagcaaaagttagaaaccagctccgacttcctggctgtgtgacccaagcaagtgtcacaayctctctgtgcctgtttccccttctctaaaatggggataaaaacagtccccaactcacaggttgtggtgtaagttaataagaataacattggccaggtgca

SEQ ID NO: 397554 - DNA, 201 bp, Homo sapiens
aaggtttcagggaaaggagtttatttgggaggtgattcagtgggggagtggggaagtaagccagggaaggaagggggctttgctgtttcttttttctttttctatcatccagtccaaaatgtcaggaagggggctttcaaaggcaggtggccgctgtgggtggctagagcttaatccctcggggaccctgggagccagtgc

SEQ ID NO: 397555 - DNA, 201 bp, Homo sapiens; identical to SEQ ID NO: 87987

SEQ ID NO: 397556 - DNA, 201 bp, Homo sapiens
atttagctatatagttgtggatcattcttttttgttgctgtatagtattccattgtgtgaatttatcaaaatatgttgtctattctactgatgatggacayttgagttctttcaacttggaactattacaaatagggccatcataaacattcttggacatgtttttttggtgcatatgcatatctgttggaaatataccta

SEQ ID NO: 397557 - DNA, 201 bp, Homo sapiens
ccaaaataaccccacttacacttttataattacagttgtgccttttcttaaatcttatttaaatggaatcatgccacatgtacttttgtgtctggcttctygttctgttctcaagattaagtctttgagatttagctatatagttgtggatcattcttttttgttgctgtatagtattccattgtgtgaatttatcaaaat

SEQ ID NO: 397558 - DNA, 201 bp, Homo sapiens
aatgctacatgtacatgttttaattcactggactcagcccagatgcacattagaattacctgggggagttttaaaaaatataccagtgcctggccccacawgttttatgcgtgaatgttttgctgatgtatagcagaaagtgcatgttctgatgactgtgtgaagaccgcatactttgaaaccaccacccagatcatggta

SEQ ID NO: 397559 - DNA, 201 bp, Homo sapiens
ctgcttatccttaattttttaaaatttcagtgactttttcacctctaaaagttatgtttctctctttcttaaatcaatcagttatttgttcataggcttcrattctttcactgtggtttcagtttctttgatgtcttcaataatttccaacatgcttattttagtgtctcagattgtcctattaactcaaattcttgaggt

SEQ ID NO: 397560 - DNA, 201 bp, Homo sapiens
ttgctagcccaggaggcagcatcctgctatgaccacccatgctttctgagggggatgggggacccagtgcagtcttggaaggggccggtaagtgagggggycccaggacccttgggttttgcactttgtttatgtgtccagtgtttcctgagcatctactatgtgccatatggtgtggaacaggctttaaaaagcaggggt

SEQ ID NO: 397561 - DNA, 201 bp, Homo sapiens
ttttcagtttcttggacctgtcttctggtttataaactctattcaaataatgtctactctgctgcttatccttaattttttaaaatttcagtgactttttyacctctaaaagttatgtttctctctttcttaaatcaatcagttatttgttcataggcttcgattctttcactgtggtttcagtttctttgatgtcttcaa

SEQ ID NO: 397562 - DNA, 201 bp, Homo sapiens
  misc_feature (1)...(201): n = A,T,C or G
aggacctaggacctggccagctgggcgtggttcggagagccgggcgggaaaacgaaaccagaaatccgaaggccgcgccagagccctgcttccccttgcanctgcgccgggaggccatggacttgtacagcaccccggccgctgcgctggacaggttcgtggccagaaagctgcagccgcggaaggagttcgtagagaagg

SEQ ID NO: 397563 - DNA, 201 bp, Homo sapiens
gccgggaatggccttggacctgtctcagatccccaccaaggagctggaccgcttcatccaggaccacctgaagccgagcccccagttccaggagcaggtgaaaaaggccatcgacatcatcttgcgctgcctccatgagaactgtgttcacaaggcctcaagagtcagtaaagtgagttgggccagtggagacacaggggg

SEQ ID NO: 397564 - DNA, 201 bp, Homo sapiens
cggcctcccaaagtgctgggattacaggcgtgagccactgcgcctggccccatttcttgtttttgtcaggtttgtcaaagatcagatggttgtagacatgyggtgttatttctgagggctctgttctattccattggtctatatctctgttttggtacagtaccatgctgttttggttactgtagtatagtttgaagtcag

SEQ ID NO: 397565 - DNA, 201 bp, Homo sapiens
tttgtttgttgttgttgttgttgttgttgtttgagatggagtctcgctctgttgcctaggctggagtgcagtgacgcgatctcggctcactgcaagctccrcctcccaggttcacaccattctcctgcctcagcttccctagtagctgggactacaggtgcccgccaccacatctggctaatttttttgtattttttagta

SEQ ID NO: 397566 - DNA, 201 bp, Homo sapiens; identical to SEQ ID NO: 88006

SEQ ID NO: 397567 - DNA, 201 bp, Homo sapiens
tgaactttgtttgttcattttcttttgatttccctttcagtggcttttaagactttctcttggttcatagtattcttcagtttctctttgatgtatctgtrtatagaattctttttttctatgatttttttattatactttaagttctagggtacatgtgcacaacatgcaggtttgttacatatgtatacatgtgccatg

SEQ ID NO: 397568 - DNA, 201 bp, Homo sapiens
ggtgaaaaaggccatcgacatcatcttgcgctgcctccatgagaactgtgttcacaaggcctcaagagtcagtaaagtgagttgggccagtggagacacaggggggaccctatcgagggatcagcgtggggaagggaaggagttacagcaatggagctgaggttgggctggggaactggacggcccaggaaggatgatttg

SEQ ID NO: 397569 - DNA, 201 bp, Homo sapiens
taatgatctgttttctgtttgcatgcatgaactttgtttgttcattttcttttgatttccctttcagtggcttttaagactttctcttggttcatagtatycttcagtttctctttgatgtatctgtgtatagaattctttttttctatgatttttttattatactttaagttctagggtacatgtgcacaacatgcaggt

SEQ ID NO: 397570 - DNA, 201 bp, Homo sapiens
ttagttctgctgtcttcttacctgttgttgctgatgagaagtctctgtcagttattgattttttgttgttaatgatctgttttctgtttgcatgcatgaaytttgtttgttcattttcttttgatttccctttcagtggcttttaagactttctcttggttcatagtattcttcagtttctctttgatgtatctgtgtata

SEQ ID NO: 397571 - DNA, 201 bp, Homo sapiens
gatataatgatcttcaagggtttgataatatcttggaactaaacttccagacactaataataggggagattatttcttttgttttttttttacaatctatrcaaattaaaccctattaatataattaacaaattttttcaccattgctacttgatttcctgttcttccttctggattcattttccttcttacagaaataca

SEQ ID NO: 397572 - DNA, 201 bp, Homo sapiens; identical to SEQ ID NO: 88010

SEQ ID NO: 397573 - DNA, 201 bp, Homo sapiens
ttctgtacctcatcagtgccaatatgaaccaacatatctttcttctcgttctccagtgtaccaagatctccaaggggagaggctccctacccccacagcaygggctggaactcctgactgtgtatgcctgggagcagggcgggaaggactcccagttcaacatggctgagggcttccgcacggtcctggagctggtcaccc

SEQ ID NO: 397574 - DNA, 201 bp, Homo sapiens
  misc_feature (1)...(201): n = A,T,C or G
acaccctgtggcctcccagtggatcccagaccacccttaggaaaacacccaagaggtaggagatctcagaagtcctttctaagttggccccactgggacancatgggagccggagtgatggtaaccatctccccatctccaggccagctggtctctggctccaggcccagctctcaagtctacgtcgacctcatccacagc

SEQ ID NO: 397575 - DNA, 201 bp, Homo sapiens
ctcaggtccttctgatgctacctcagaacctacccaccagctgagaaggaaagagggacatgggagacagtgggagtcttgtcctcagaggacatcaaggrgcagggcttgggtgagcactgggagtcccgtctcaagctggccccacctggattctctctgcagccagccctcctttaccaaaccccagctggggacctt

SEQ ID NO: 397576 - DNA, 201 bp, Homo sapiens; identical to SEQ ID NO: 87989

SEQ ID NO: 397577 - DNA, 201 bp, Homo sapiens
agccaccactgtcatggcaaccaccccagccaatcagttcctcctctacacccacatctcccctcctttgcttcttattggtcatccagagcagaaggacyggcctcctccatcctccatttcctgcccagatctggaagccactgttagaaaaaaatctcttctccatcaagtctaaagtcttcatttcttgtacctggg

SEQ ID NO: 397578 - DNA, 201 bp, Homo sapiens; identical to SEQ ID NO: 87991

SEQ ID NO: 397579 - DNA, 201 bp, Homo sapiens
ccttacagatgataatccactttactcaaaaaaaaagtctaccaatgtaaatgttaatcttatctttaaaaaataccttcacaaaaagatctaggataatktttgaccaaatatctgggtacctgggctcagccaacttgacacataaaattaaccatcccagtatggaagggccctggtcccccactacatcttggagat

SEQ ID NO: 397580 - DNA, 201 bp, Homo sapiens
tttgaaaatcataagtgtcatgagtaaggtttcttggtgttgatgtagaagaacaaaacagaattgtgaaatgagaatcactgcagctatcatgaagtccygcctacgtgcccagcagttgctagattggccaagttttcccgtgaagggcaatatagtaaatattttaggccttatggatcatccaacctcagctggact

SEQ ID NO: 397581 - DNA, 201 bp, Homo sapiens; identical to SEQ ID NO: 87997
  misc_feature (1)...(201): n = A,T,C or G

SEQ ID NO: 397582 - DNA, 201 bp, Homo sapiens
  misc_feature (1)...(201): n = A,T,C or G
cctggccagctgggcgtggttcggagagccgggcgggaaaacgaaaccagaaatccgaaggccgcgccagagccctgcttccccttgcatctgcgccgggnggccatggacttgtacagcaccccggccgctgcgctggacaggttcgtggccagaaagctgcagccgcggaaggagttcgtagagaaggcgcggcgcgct

SEQ ID NO: 397583 - DNA, 201 bp, Homo sapiens
aactatagcactgaggacccagccatgagaatgcaccttcttggccagcttcgaaaacccaggtgaagacccgcttccctttgcctggcttcattatcctmcccctccccactgtcaccctggagtcagtcatccaggaggagtccaaggtagggtttggggtggcaatcccactcctcactctgcttccctctggactct

SEQ ID NO: 397584 - DNA, 201 bp, Homo sapiens; identical to SEQ ID NO: 88004

SEQ ID NO: 397585 - DNA, 201 bp, Homo sapiens; identical to SEQ ID NO: 88005

SEQ ID NO: 397586 - DNA, 201 bp, Homo sapiens
tcgattttccaggtaccatctgtcatggcttcctttggataggaaagggaattccccgaccccttgcacttcccaggtgaggcgacgccctgccctgcttyggctcatggtccgtgggctgtacccactgtccaacaagccacagtgagaggagtgagaggaacccagtacctcagttggaaatgcagaaatcacccatct

SEQ ID NO: 397587 - DNA, 201 bp, Homo sapiens
ggttcaatgagatgagagtgtgcaaaacgtgcaggaagtgcccagcctgtaatattccctgttcccactttgtcagcagcccccagatggtgggagctggwagtaaaaggactggcataatcatcgggataagtagggggtcccagtttgaggcaagccttgctcctggagggctccatcctggttcttgctgtttactgg

SEQ ID NO: 397588 - DNA, 201 bp, Homo sapiens; identical to SEQ ID NO: 377720

SEQ ID NO: 397589 - DNA, 201 bp, Homo sapiens
ataacgttaataatagcaataattactgcttattgagcatatgatgtattctacatactgttctaagcacttcacatgtagatttcaattgattcttacartagccttagaaggataggtgctatttatgatctcccttttacagatgaggaaactagacccgaagaggtaaaaatcacacagcttggatttgaacccagg

SEQ ID NO: 397590 - DNA, 201 bp, Homo sapiens
ctgaaagtaatcatcaccatcaaatcttacaactatttagtgctttaactttacaaatattttaattatgaaatgtttcaagcatacagaaaactacagaygtcacacacccatgtagcccaattcagatttaacaaatgttaacagtaggcatatctgcttggtatttttttaaagaaatttctcatgttataattttct

SEQ ID NO: 397591 - DNA, 201 bp, Homo sapiens
cctgtatcatggatgcaggaggggagagttgtggaaccagtgttgtgattgattaacaatgcctcccctgaataaggaaggggtaagcggtagcaccgtgrttgattagtaatgtttgcctgaatgcagaatggcaaagtggccatgtgtgtcttattttctatacctgccctgtagtgtataggagcactgaggaatctc

SEQ ID NO: 397592 - DNA, 201 bp, Homo sapiens
ccttggacctgtctcagatccccaccaaggagctggaccgcttcatccaggaccacctgaagccgagcccccagttccaggagcaggtgaaaaaggccatygacatcatcttgcgctgcctccatgagaactgtgttcacaaggcctcaagagtcagtaaagtgagttgggccagtggagacacaggggggaccctatcga

SEQ ID NO: 397593 - DNA, 201 bp, Homo sapiens
tttgcctggcttcattatcctccccctccccactgtcaccctggagtcagtcatccaggaggagtccaaggtagggtttggggtggcaatcccactcctcwctctgcttccctctggactctttgctgaggaagtgtggacataaggagtcccaaaagaaaccagggccagttttattagcatgataaaatagtatttctc

SEQ ID NO: 397594 - DNA, 201 bp, Homo sapiens
ttgcctggcttcattatcctccccctccccactgtcaccctggagtcagtcatccaggaggagtccaaggtagggtttggggtggcaatcccactcctcactctgcttccctctggactctttgctgaggaagtgtggacataaggagtcccaaaagaaaccagggccagttttattagcatgataaaatagtatttctca

SEQ ID NO: 397595 - DNA, 201 bp, Homo sapiens; identical to SEQ ID NO: 87990

SEQ ID NO: 397596 - DNA, 201 bp, Homo sapiens
ccatgtgcgttagccatggccctcccacttcccctctctgagcctcagtcaccctgactgtacaaagggcgggagctggggagagaaggcattgggttgaygcagaaaccactgcgcctggctgaggcagctccttcaatgaccttccagggccttccacgtgctggatgctcaggtttgggccaccccatccagctagac

SEQ ID NO: 397597 - DNA, 201 bp, Homo sapiens
tcttatcaccaagctcaagctgaaactgcccgggggaaggagtcctttgtttttctgcagctatggtctggttaccagacctttctgcccatcacaagggyacccattttgcagtttatccctccagaaaggcacctttttcaactctgcccaaagatggccatgtgcgttagccatggccctcccacttcccctctctga

SEQ ID NO: 397598 - DNA, 201 bp, Homo sapiens
taaaaatacgaaaattagccaggcatggtggtgggtgcgtgtaatctcagctactcgagaggctgaggcaggagaattgcttgaactagggaggcggaggktgcaatgagctgagatcactccattgcactccagcctgggtgacagagtaagactccgtcccaaaaaaaaaaaaaaaaaaaaatgcacagggcatcaggc

SEQ ID NO: 397599 - DNA, 201 bp, Homo sapiens; identical to SEQ ID NO: 87995

SEQ ID NO: 397600 - DNA, 201 bp, Homo sapiens; identical to SEQ ID NO: 87996

SEQ ID NO: 397601 - DNA, 201 bp, Homo sapiens
ggctaaccagctagtagtgtccaaaggttgagcatcccaaatgcaaacattcaaaatctgaaaatggcccagaatttgaagctttttgaccaccaaaaaawatgctcaaggaaaatgcttattggagcattttggattttcaaattagggattcttaactggtaagtaaggcaaaggtccaaaatctgaaaaaatttgaag

SEQ ID NO: 397602 - DNA, 201 bp, Homo sapiens
tgatgtgttgaaaaagcttctaaggttgtgatttgactcagctggaaagagtaggctaaccagctagtagtgtccaaaggttgagcatcccaaatgcaaamattcaaaatctgaaaatggcccagaatttgaagctttttgaccaccaaaaaaaatgctcaaggaaaatgcttattggagcattttggattttcaaattag

SEQ ID NO: 397603 - DNA, 201 bp, Homo sapiens
ttctacagggcagctcagttctggcaccaaaccaaatccccaggtctactcgaggctcctcaccagtggctgccaggagggcgagcataaggcctgcttcrcagagctgcggaggaacttcatgaacattcgccctgtcaagctgaagaacctgattctgctggtgaagcactggtaccgccaggtgagttgcccctggct

SEQ ID NO: 397604 - DNA, 201 bp, Homo sapiens
cttcctgctgtgcccccagacccctggtcctggaccccgctgatcccacctggaacgtgggccacggtagctgggagctgttggcccaggaagcagcagcrctggggatgcaggcctgctttctgagtagagacgggacatctgtgcagccctgggatgtgatggtaagatggagggtcctggggggcagggggccctgca

SEQ ID NO: 397605 - DNA, 201 bp, Homo sapiens
agtgggccaggcgcagtggctcatgcctgtaatcccagctttgggaggccaagttagagactgcttgagcccaggagttcaagatcagccttggcaaaatrgcaagatctagtctctacaaataataataattttaaaaaatagccaggtgtagtagtacatgcctccctctgatcccagctactggagaggctgaggtgg

SEQ ID NO: 397606 - DNA, 201 bp, Homo sapiens
gtggccgaggcaggtggatcacttgaggtcaggagttcaagaccagcctggccaacatggtgaaaccctgtctctactaaaaatacaaaatgtagccgggygtggtggtacacacctgtaattccagttactcgggaggctgaggcaggagaatctcttgaacccaggaggcagaggttgcagtaagccaagattgcacca

SEQ ID NO: 397607 - DNA, 201 bp, Homo sapiens
ctggtctctggctccaggcccagctctcaagtctacgtcgacctcatccacagctacagcaatgcgggcgagtactccacctgcttcacagagctacaacrggacttcatcatctctcgccctaccaagctgaagagcctgatccggctggtgaagcactggtaccagcaggttcggcacatggataggccaccttcctaa

SEQ ID NO: 397608 - DNA, 201 bp, Homo sapiens; identical to SEQ ID NO: 88008

SEQ ID NO: 397609 - DNA, 201 bp, Homo sapiens
gcaggagaatctcttgaacccaggaggcagaggttgcagtaagccaagattgcaccactgcactccagcctgggtgacagagccagactccatctcaaggaaaaaaaaaaaaaaaaaagaggtctttccctgtcctgactttgtaaaatgactctttcatatttcctgccatcatattgtttcctattgtatttctgttca

SEQ ID NO: 397610 - DNA, 201 bp, Homo sapiens
gtgtctttctagcagcatgatttataatcctttgggtatatacccggtaatgggatggctgggtcaaatggtatttctagttctagatccttgaggaatcrccacactgtcttccacaatggctgaactagtttacagtcccaccaacagtgtaaaagtgttcctatttctccacatcctctccagcacctgttgtttcct

SEQ ID NO: 397611 - DNA, 201 bp, Homo sapiens
cggctggtgaagcactggtaccagcaggttcggcacatggataggccaccttcctaagttgccctgggatctgcctctggagcactttcctgggaggaagsagggcccagccctggccaagatcctgggttggtggagcagagcagaaagagtgctatatctcagctgtgggaccttagttttcttatctgtaagatgggg

SEQ ID NO: 397612 - DNA, 201 bp, Homo sapiens
tttgtataaggtgtaaggaaaggatacagtttcagctttctagatatggctagccagttttcccagcactatttattaaatagggaatcctttccccattkcttgtttgtctgtttgtttgtttgttgttgttgttgttgttgttgtttgagatggagtctcgctctgttgcctaggctggagtgcagtgacgcgatctcg

SEQ ID NO: 397613 - DNA, 201 bp, Homo sapiens
ggatacagtttcagctttctagatatggctagccagttttcccagcactatttattaaatagggaatcctttccccatttcttgtttgtctgtttgtttgtttgttgttgttgttgttgttgttgtttgagatggagtctcgctctgttgcctaggctggagtgcagtgacgcgatctcggctcactgcaagctccgcctc

SEQ ID NO: 397614 - DNA, 201 bp, Homo sapiens
gatacagtttcagctttctagatatggctagccagttttcccagcactatttattaaatagggaatcctttccccatttcttgtttgtctgtttgtttgtttgttgttgttgttgttgttgttgtttgagatggagtctcgctctgttgcctaggctggagtgcagtgacgcgatctcggctcactgcaagctccgcctcc

SEQ ID NO: 397615 - DNA, 201 bp, Homo sapiens
ggccagaaagctgcagccgcggaaggagttcgtagagaaggcgcggcgcgctctgggcgccctggccgctgctctgagggagcgcgggggccgcctcggtrctgctgccccgcgggtgctgaaaactgtcaaggtgaggtcccacctcggggtctttatgtgtccaaagggcaaaggggagtcctgggaggacgcttaagc

SEQ ID NO: 397616 - DNA, 201 bp, Homo sapiens
cgtgaagatcacttgagcccaggagttcaaggctgcagtgacctaagattgagccactgcacttcagcctgggcaacagagtaagactctgtctataaatwaattaattaattaatacaactatggagccagcctggttgggcgttagaaattctatcttgatctgggtggtgggtacacatgtgcacccacgcatgtttg

SEQ ID NO: 397617 - DNA, 201 bp, Homo sapiens
ccagactcttatgcactggggaaagtgtgcccagcctatgcctggagatgggggaacaggctcccccaaaatcttgcagcacatggaccagtcatcataarcaggtctctcaaggaagagattctggattccagttctggctcagccatcttcttgctgtgtgaccctggacaagttcctagccttctctgggcctctgtt

SEQ ID NO: 397618 - DNA, 201 bp, Homo sapiens
gttgtagaggttgcacagtacacaaccaggccacatctgttcgcatcattgcaggcattgtagttgtgtatgttcatcacaactttcctgcaaagtatctraagaagagggcccctttttctaatttgcgcaggcactctgtgggctaacagtggcctcaagctgggttccagtctgagcaattccaccaacatgctggat

SEQ ID NO: 397619 - DNA, 201 bp, Homo sapiens
gacatgtggctagcagtaggggcctggggacaaaaccagaattctgcaaaatcttgtattttatgttgaaaacatcaatgtgatttttgtgttctccttcrtaatacacgtatgcttgagttaagataaaaataggcctctgtgtcctcatctgtaaaatgaggataatactaatggggataatagtaatcttatagagtt

SEQ ID NO: 397620 - DNA, 201 bp, Homo sapiens
acttgcctcactcaagttgcctgccaggttgcaaggccactagaattggacagtatgaaattctgagttatttttctttgcccagggaggctcctcgggcyggggcacagctctcaagggtggctgtgattctgaacttgtcatcttcctcgactgcttcaagagctatgtggaccagagggcccgccgtgcagagatcct

SEQ ID NO: 397621 - DNA, 201 bp, Homo sapiens; identical to SEQ ID NO: 87993

SEQ ID NO: 397622 - DNA, 201 bp, Homo sapiens; identical to SEQ ID NO: 88019

SEQ ID NO: 397623 - DNA, 201 bp, Homo sapiens
ggccaaggaagctgcagcctgcacatctgccctgtgctgcatgggacggaatggcatccccatccagccatggccagtgaaggtgagagatctgtggtgcyaaaggaagtaccctttaggggtaaggggggagcatggtcaggggagggacatgattcccactaaaggggcagggcccagtgatggccccaggtatgcccc

SEQ ID NO: 397624 - DNA, 201 bp, Homo sapiens
taaatacagtctttcttaccatattaaagatctaacacagagaggttagatgacttgtccaaggtcacacagtaggttttctaactcacagtccagaaccracaggctaagccatgcttcaagggttgagccacctgccatgtcctctccagggtggctcttcagccaaaggcacagctctgcgaggccgctcagatgccg

SEQ ID NO: 397625 - DNA, 201 bp, Homo sapiens
atcacagatgcattcatcataataattccagacattttcatcaccctaaaaggaaaccctgaaacccattagcagtcattccccattcctccaacccattmtctccctaatccctagaaaccaccaatctgctgtgtatttcatctattgccaacatttcatataaatggcatcatacaatatgtggccttttgtgtctgg

SEQ ID NO: 397626 - DNA, 201 bp, Homo sapiens
gagatggaggttgcagtgagctgagatggtgccactgcactccagcctaggcaacagagtaagtctctgtctcaaaactaaaaataaaaataaaattacawgtatggatttagcccagcacggtggtgcatgcctatagtctcagacacttgggaggctgaggcaagaagatcactcgagcccaggaattccaagctgcag

SEQ ID NO: 397627 - DNA, 201 bp, Homo sapiens
tacagtttcagctttctagatatggctagccagttttcccagcactatttattaaatagggaatcctttccccatttcttgtttgtctgtttgtttgtttgttgttgttgttgttgttgttgtttgagatggagtctcgctctgttgcctaggctggagtgcagtgacgcgatctcggctcactgcaagctccgcctccca

SEQ ID NO: 397628 - DNA, 201 bp, Homo sapiens
cttgggcatcgttttcctctccgtgacacctcttaattaaggatatgtagagtggtgttttgaggaaggctcagggaggagagagttgccaggctgcaggyactgctgactcagctggaagcaactttcctgtttaaccatcttggaatgcagctgctcctctttgagctgttgctctagggactgcctggccatttggga

SEQ ID NO: 397629 - DNA, 201 bp, Homo sapiens
cttaccatgttgcccaggttagtctagaacttctgggctcaagtaatccacccaccttggcctcccaaaatgctagaattacaggcacaagccaccatgcsccagccttgttgcctcttttgagttgcactaaattctgaacatccttcggagctcccttactaaatacttctctgaattctgacttgtattcatgcatcc

SEQ ID NO: 397630 - DNA, 201 bp, Homo sapiens
tctgtcatggcttcctttggataggaaagggaattccccgaccccttgcacttcccaggtgaggcgacgccctgccctgctttggctcatggtccgtgggytgtacccactgtccaacaagccacagtgagaggagtgagaggaacccagtacctcagttggaaatgcagaaatcacccatcttctgtgtcactcacgctg

SEQ ID NO: 397631 - DNA, 201 bp, Homo sapiens
tcggctcactgcaagctccgcctcccaggttcacaccattctcctgcctcagcttccctagtagctgggactacaggtgcccgccaccacatctggctaawttttttgtattttttagtagagacagacagggtttcaccatgttagccaggatggtcttgatctcccgacctcgtgatccacccacctcggcctcccaaa

SEQ ID NO: 397632 - DNA, 201 bp, Homo sapiens
taaatgctgctgtcttcaattggagttgcacactcagggtgtttcaaacttctacagggcagctcagttctggcaccaaaccaaatccccaggtctactcraggctcctcaccagtggctgccaggagggcgagcataaggcctgcttcgcagagctgcggaggaacttcatgaacattcgccctgtcaagctgaagaacc

SEQ ID NO: 397633 - DNA, 201 bp, Homo sapiens
tcatcaattcttcacaacaaacttatgaggtctgtactgtttcagcttcaattttaccattggggaaactgaggctcagagacatacagtgacccacccawagccacacagcaggcaagcggtagcagcaacctcagggaattatggaaagtgtttacttctcccaagccatgcccatgggagtggtggcggaaaaggcgc

SEQ ID NO: 397634 - DNA, 201 bp, Homo sapiens
ctgagtgtggggtaggagtggtccctccaaagaacaccaggatgctgatcccaggtggaaaggacgctgggggtgtacaaaaggtcacactgtccacggcmctggatacagcctcagtccacagttggagagacaagtgagacccagatcagctcagaaagagtgttagcataaagccagccagtgaacagtgccagggat

SEQ ID NO: 397635 - DNA, 201 bp, Homo sapiens
tttttccaattctgtgaagaaagtcattggtagcttgttggggatggcattgaatctataaattaccttgggcaatatggccattttcacaatattgattyttcctatccatgagcatggaatgttcttccatttgtttgtgtcctgttttatttcactgagcagtggtttgtagttctccttgaagaagtccttcacatc

SEQ ID NO: 397636 - DNA, 201 bp, Homo sapiens
tgaaggacaagactcaattgtagcttcctctctgtgtcttgtttttctttttctggaagataacgttaataatagcaataattactgcttattgagcataygatgtattctacatactgttctaagcacttcacatgtagatttcaattgattcttacaatagccttagaaggataggtgctatttatgatctccctttta

SEQ ID NO: 397637 - DNA, 201 bp, Homo sapiens
agggcatccctgtcttgtgccagtttccaaagggaatgcttccagtttttgcccattcagtacgatattggctgtgggtttgtcataaataactcattatwttgagatgcctcccatcaatacctagtttattgagagtttttagcatgaagggctgttgaattttctcaaaggcctttttggcatctattgaaataatca

SEQ ID NO: 397638 - DNA, 201 bp, Homo sapiens
  misc_feature (1)...(201): n = A,T,C or G
ccccggccgctgcgctggacaggttcgtggccagaaagctgcagccgcggaaggagttcgtagagaaggcgcggcgcgctctgggcgccctggccgctgcnctgagggagcgcgggggccgcctcggtgctgctgccccgcgggtgctgaaaactgtcaaggtgaggtcccacctcggggtctttatgtgtccaaagggca

SEQ ID NO: 397639 - DNA, 201 bp, Homo sapiens
tctcccaagccatgcccatgggagtggtggcggaaaaggcgcaccctgcaaagtccactggctctgagctcaaatcctgcctccatcgcatgctggctgtrtaaccttgggcaaatcatggaatttctctgtgcctcagcttcctcagctatcaagtgggatgaagaactgtacttgcctcatagggttgtggtggggata

SEQ ID NO: 397640 - DNA, 201 bp, Homo sapiens
agtgaaggacaagactcaattgtagcttcctctctgtgtcttgtttttctttttctggaagataacgttaataatagcaataattactgcttattgagcayatgatgtattctacatactgttctaagcacttcacatgtagatttcaattgattcttacaatagccttagaaggataggtgctatttatgatctcccttt

SEQ ID NO: 397641 - DNA, 201 bp, Homo sapiens
ctttttttggttggtaggctattaattattgcctcaatttcagagtctgttattggtctattcagggattcaacttcttcctggtttagtcttgggagcgygtctgtgtccgggaatttatccattttatctagattttctagtttatttgtgtagaggtgtttatagtattctctgatggtagtttgtatttctgtgtaa

SEQ ID NO: 397642 - DNA, 201 bp, Homo sapiens
gccagtggacaaccttttgcagtcacttttcatgaagaaggcatttattttagaggccagccttatgaaagtgaaggacaagactcaattgtagcttcctytctgtgtcttgtttttctttttctggaagataacgttaataatagcaataattactgcttattgagcatatgatgtattctacatactgttctaagcact

SEQ ID NO: 397643 - DNA, 201 bp, Homo sapiens
ggctgcccttaacattttttccttcatttcaactttggtgaatctgacaattatgtgtcttggagttggtcttctcgaggagtatctttgtggtgttctcygtatttcctgaattttaatgttggcctgccttgctaggttgggaaagttctcctggataatatcctgcagagtgttttccaacttggttccattctccct

SEQ ID NO: 397644 - DNA, 201 bp, Homo sapiens
taacagtctgggatttcctcaccatgcagatactgtaaatttggacttcacatccacatctagcacaggatcggggtcccagtttctcacaggggattttmttttttcccccacccagagccctagcagcaagcttccttgaagcccctctctgccagtggacaaccttttgcagtcacttttcatgaagaaggcatttat

SEQ ID NO: 397645 - DNA, 201 bp, Homo sapiens
ccctttcttccacttgatagaatcggccactgaagcttgtgcatgcatcacgtagttcttgtgccatgattttcagctccatcaggtcatttaaggtcttytctatgctgttcattctagttagccattcgtttaatcttttctcaaggtttttagcttctttgtgataggtttgaacatcctcctttagctcggagaagt

SEQ ID NO: 397646 - DNA, 201 bp, Homo sapiens
cttctttgtgataggtttgaacatcctcctttagctcggagaagtttgttattaccaattgtctgaagccttcttctctcaactcatcaaagtcattctcyatccagctttgttccattgcttgcgaggagctgcgttcctttggaggagaagaggcgctctgatttttagaattttcagcttttctgctctggttgcccc

SEQ ID NO: 397647 - DNA, 201 bp, Homo sapiens
gttggagtttgctggaggtccactccagaccctgtttgcctggatatcaccagtggaggctgcagaacagcaaatattgcagaactgcaaatattgctgcytgatccttcctttggaagcttcgtctcagaggggcacccagccatatgaggtgtcagtcggcccctacggggaagtgcctcccagttaggctactcgggg

SEQ ID NO: 397648 - DNA, 201 bp, Homo sapiens
cagggggaaagggacagagcctcaaaagatgacctgtgcgcccctgcttctaagcactttgcaggtattatttaatcatcaagctaatcctacgagagagytgccattttcccccagcttacagatgggggaattgaggcgcgaagagggcaggcgatgtgctcaaggacagacatctagcaggtatgaagccctcacaat

SEQ ID NO: 397649 - DNA, 201 bp, Homo sapiens
ccccagacccctggtcctggaccccgctgatcccacctggaacgtgggccacggtagctgggagctgttggcccaggaagcagcagcgctggggatgcagkcctgctttctgagtagagacgggacatctgtgcagccctgggatgtgatggtaagatggagggtcctggggggcagggggccctgcaccctgccttctag

SEQ ID NO: 397650 - DNA, 201 bp, Homo sapiens
tgaataaggaaggggtaagcggtagcaccgtggttgattagtaatgtttgcctgaatgcagaatggcaaagtggccatgtgtgtcttattttctatacctkccctgtagtgtataggagcactgaggaatctctgagccctggctctagcccctgcaaagtgttagataaaaggggaaaatagtccaaccagtgccacagg

SEQ ID NO: 397651 - DNA, 201 bp, Homo sapiens
ccttccttccttccatttattcatccatctaaccatccttccacacatcaccctttctctctcctctctcccttctttccatccatccatccatccatccacccatccatccatccatcagatattgattgagcacatattcagtacctgctatgttagacattctagaaacacagagatagtaagacatggtctttacac

SEQ ID NO: 397652 - DNA, 201 bp, Homo sapiens
cttccttccttccatttattcatccatctaaccatccttccacacatcaccctttctctctcctctctcccttctttccatccatccatccatccatccacccatccatccatccatcagatattgattgagcacatattcagtacctgctatgttagacattctagaaacacagagatagtaagacatggtctttacact

SEQ ID NO: 397653 - DNA, 201 bp, Homo sapiens
ttaatttcagattcagggatacatgtgcaggtttgttacatgggtatatttcatgatggagaggtttgggcttctaatgattctattgtccaagtagtgarcatagtaccaacaggtagttgttttttttttttttgagacagagtcttattctgtcgcccaggctggagtgcagtggcatgatcttggctcactgcaacc

SEQ ID NO: 397654 - DNA, 201 bp, Homo sapiens
cctcccaaaatgctaggattacaggtgtgaaccactgtgcctggctgacaggtttgtttgtttgcttctttctttctttctttctttctttctttctttctttctttctttctttctttctttctttctctctcttctttctgtctctctgtctctctctctctctgtctctgtctctctctttctttcttttttttgaga

SEQ ID NO: 397655 - DNA, 201 bp, Homo sapiens
tttttggccccgcttgggtggcgtcttcatccttgaaccaatcatgggttgggggattaggttctgattggctcaacctaaattatgtgtccccctcttgrgtggaggaaggagtcaatggggcatatgaatgttggggacgagtgactctgaagggatatggagggggaggggaaggcatatcaaaggccaatcagctct

SEQ ID NO: 397656 - DNA, 201 bp, Homo sapiens
gtgtgaaccactgtgcctggctgacaggtttgtttgtttgcttctttctttctttctttctttctttctttctttctttctttctttctttctttctttctttctctctcttctttctgtctctctgtctctctctctctctgtctctgtctctctctttctttcttttttttgagacagtcttgctctgttgccaagctg

SEQ ID NO: 397657 - DNA, 201 bp, Homo sapiens
tctgaagggatatggagggggaggggaaggcatatcaaaggccaatcagctctgcccactgcccctttcctcctttctgcacagggggtaatgcgggcatygctgctgcctatgctgctaggaagctgggcattcctgccaccatcgtgctccccgagagcacctccctgcaggtggtgcagaggctgcagggggaggggg

SEQ ID NO: 397658 - DNA, 201 bp, Homo sapiens
caaagccctagaggtgggtgctattatccccatttcataggtgaggaaactgaggcacatcgaggtcaaacaacttgccccggatcacacagctaagtacrtggcagatacaaagggctgcagtcaggctggtcccaagtgatacacttgtcccctcttaaccacacattgccattgcctctttgcaaagttggggagggg

SEQ ID NO: 397659 - DNA, 201 bp, Homo sapiens
taatttttttttttttttttgagacgagtctcgctctgttgcccaggctggagtgcagtggtacaatctcggctcactgcaaggtctgcctcccgggttcrcaccgttctcctgcctcagcctcccgagtagctgggactacaggccagctactacagccaccacgcctggctatttttttttttttttttgtatttttag

SEQ ID NO: 397660 - DNA, 201 bp, Homo sapiens
ccagcacctggtattatctacttttaacatttttgctgttagataagacaagaagtatcaagatgatggcagcattagttctcattctgagaccaccccartagaaatggtatccactgagaaagatatcaccggttccctttgttaccaaagaaatagagacacagatacaaaatctgtctttccttctgtgaagaagga

SEQ ID NO: 397661 - DNA, 201 bp, Homo sapiens
cacagagtgggcactgcagagtccctgaggatgagcaggggctagttctgccccccttgtgaccctccatccctcccttgggagaggaggccattgtctaycatttagtttctgtatctggttcctgctgagatcggctggcatggggtccctctgaaatgctgtcttagtttggattctcccaaaagcggtccctgaaat

SEQ ID NO: 397662 - DNA, 201 bp, Homo sapiens
aatcctggaattgttttttttttttggccccgcttgggtggcgtcttcatccttgaaccaatcatgggttgggggattaggttctgattggctcaacctarattatgtgtccccctcttgagtggaggaaggagtcaatggggcatatgaatgttggggacgagtgactctgaagggatatggagggggaggggaaggcat

SEQ ID NO: 397663 - DNA, 201 bp, Homo sapiens
ctctcaccccagagctgggcccacacagggcagggacatgaggagggggatccagggtcaggcctggtcctccccaaccccatcctcagccttggcaggascccagttcagggcagagtaaattccccagcacctgctgaggatggtctgactctcatgtagggaaatgatggctcagactgacttcgtgtcttagtccat

SEQ ID NO: 397664 - DNA, 201 bp, Homo sapiens
tcagctctgcccactgcccctttcctcctttctgcacagggggtaatgcgggcatcgctgctgcctatgctgctaggaagctgggcattcctgccaccatygtgctccccgagagcacctccctgcaggtggtgcagaggctgcagggggagggggccgaggttcagctgactggaaaggtaagggctctgggaaggggag

SEQ ID NO: 397665 - DNA, 201 bp, Homo sapiens
tgtgaaccactgtgcctggctgacaggtttgtttgtttgcttctttctttctttctttctttctttctttctttctttctttctttctttctttctttctttctctctcttctttctgtctctctgtctctctctctctctgtctctgtctctctctttctttcttttttttgagacagtcttgctctgttgccaagctgg

SEQ ID NO: 397666 - DNA, 201 bp, Homo sapiens
gaggatcccttgagcctaggagtttgagaccagcctgggcaacatagtgagaccctatctctacaaaaaagtacaaaaattagccagacgtggtgatgtgygcctgtagtcccagctactcaggaggctgaggtgggaggactgcttgagcctgagaggtcgaggctgcagagagctgtgattacagtactgcactccagc

SEQ ID NO: 397667 - DNA, 201 bp, Homo sapiens
tgaataacaaccaaactcctctccgtgggcgggaaccccctgctggcacccttgtccacatctccgccctcaccccctaccctcacctcctgccgcaaacyccttctgtctgcatccgcggcaccccaaagtgcatttctccctcgaggtggtcctggctgctgttctctgtaggaacttttcctcttggctctcttcctg

SEQ ID NO: 397668 - DNA, 201 bp, Homo sapiens
agaatttgaataacaaccaaactcctctccgtgggcgggaaccccctgctggcacccttgtccacatctccgccctcaccccctaccctcacctcctgccscaaactccttctgtctgcatccgcggcaccccaaagtgcatttctccctcgaggtggtcctggctgctgttctctgtaggaacttttcctcttggctctc

SEQ ID NO: 397669 - DNA, 201 bp, Homo sapiens
tggtccattcacacacagctcctcggcttcaaacctctcaaagggctgagcgcggtggctcacggatgtagtcccagcacttcgggaggccgaggtgggcrgatcacttgagctcaggagtttgagaccagccaacatggtgaaaccccgtctctacaaaaaatacaaaaaattaatcaggcgtggtgacgtgtgcctgtg

SEQ ID NO: 397670 - DNA, 201 bp, Homo sapiens
ttctctactatttttcctccctctcatttcctccatctcttcttttcgtccttacccactggtccattcacacacagctcctcggcttcaaacctctcaawgggctgagcgcggtggctcacggatgtagtcccagcacttcgggaggccgaggtgggcggatcacttgagctcaggagtttgagaccagccaacatggtg

SEQ ID NO: 397671 - DNA, 201 bp, Homo sapiens
ggtatgcggcatttggggatcagtgatgacccatgggcttctttcccctgatgcccgaagctgagaggtgccctgggtgggactgggaagaggtggctcargctgtgccctgcccgagggggccctgaggattctcaaggctattctgacaagggcgtggggtcaaactcagggccaagagaccctgatctctctgatctt

SEQ ID NO: 397672 - DNA, 201 bp, Homo sapiens
cggggcattgggcatttctgccaggaggtgagggtgtgtgggaaggaggggagaagtgaggttgtgcaggagggagggaagagtgaggggtgtgggctggsgacgggttcgggcaggaggggaaacatgaactcgtgcagatgggaggggaaaggtaagggcagggctgtgggcaggatgaggggtaaaggcgtattggga

SEQ ID NO: 397673 - DNA, 201 bp, Homo sapiens
acgaagtccctgcatcctctagcaagagtgtgttctgtcttatctgtatcctcagcaccaggcactggctaggtgtgcagttactgtgcactaagtgcacrtcgagtagatggaagggggtgaggataaagaaggagtgtatcttgctgtctctagcccccagactttcatacatgctgctcctctctctggctggccctg

SEQ ID NO: 397674 - DNA, 201 bp, Homo sapiens
agtgatccctgtcctccacctgggctcagagacccacgaagtccctgcatcctctagcaagagtgtgttctgtcttatctgtatcctcagcaccaggcacyggctaggtgtgcagttactgtgcactaagtgcacgtcgagtagatggaagggggtgaggataaagaaggagtgtatcttgctgtctctagcccccagact

SEQ ID NO: 397675 - DNA, 201 bp, Homo sapiens
aataatggaaaacagatttttaaacctctcgaaattaaaactaaaagccaaactatggtacgttaaagctggtcccaaatacttcctgtatatagtttctkccctttcttctgtccttccttccctccctctcttcttctttccttccttcattatttccctccttccctcttccctccctccctccctccttccctccct

SEQ ID NO: 397676 - DNA, 201 bp, Homo sapiens
gcattgggcatttctgccaggaggtgagggtgtgtgggaaggaggggagaagtgaggttgtgcaggagggagggaagagtgaggggtgtgggctggggacrggttcgggcaggaggggaaacatgaactcgtgcagatgggaggggaaaggtaagggcagggctgtgggcaggatgaggggtaaaggcgtattgggagtgg

SEQ ID NO: 397677 - DNA, 201 bp, Homo sapiens
gaattctttcagctcagacgctgtggctgtgaatttctatctgttgggacaagagcatccaggttggatgtggggtccctggaagattggtcccatggccyatttgctgggcaagctggagcaagttacttaacctttctgtgcttcagcttctcccttgatcactgattcctttccttttcaagggcaagaggacagagg

SEQ ID NO: 397678 - DNA, 201 bp, Homo sapiens
gtgtgtgtgtgaatgagaggctgatgagaggctgcaggagtttgggaggctttgggcaaagtccaagctgagcaggtgggagtgagagggcctgagcgtgktctaggccctcctgggaatgtcgattgaattcagggtgccctgcagaagaaagtgttgtgctggggaccctgaagggcgagagtgggttctgcctgccag

SEQ ID NO: 397679 - DNA, 201 bp, Homo sapiens
cccaggccaaacttctttgaccagatggggaaactgaggcccagagagtcacagatacttgatgggggtctcacagctcagcagctggatgaagtgaaggrcacctaagccaagggctttctccaccttcccctccctgtcctggttaagggaactcttgatggggactgcctgggtggtgactttgtgtcctcctgcagg

SEQ ID NO: 397680 - DNA, 201 bp, Homo sapiens
ccagaggactcagctgatgactggcacataatagggactcaacaaatgacagatgttattctctctctctctctttttttttttttaaagacagtctcacwctgttgcccaggctggagaacagtggtgagatcttggctcactgcaatctccacctcccaggttcaagcaattctcccacctcagcctcccaagtagctg

SEQ ID NO: 397681 - DNA, 201 bp, Homo sapiens
cgggcaggaggggaaacatgaactcgtgcagatgggaggggaaaggtaagggcagggctgtgggcaggatgaggggtaaaggcgtattgggagtgggatgsggagactctaacgccattccacataggccttcatgacacctgcttgggttagccgctaaccccattccttctcttcccagatggccaagaagggatgcag

SEQ ID NO: 397682 - DNA, 201 bp, Homo sapiens
cactgcaaggtctgcctcccgggttcacaccgttctcctgcctcagcctcccgagtagctgggactacaggccagctactacagccaccacgcctggctatttttttttttttttttgtatttttagtagagacaggatttcaccatgttagccaggatggtctcgaactcctgacctcgtgatccacctgacttggcctc

SEQ ID NO: 397683 - DNA, 201 bp, Homo sapiens
tgttattcttattaacttacaccacaacctgtgagttggggactgtttttatccccattttagagaaggggaaacaggcacagagaggttgtgacacttgyttgggtcacacagccaggaagtcggagctggtttctaacttttgcttctggtcgaccccaaagcctgtgctcttggggtccagggttgagctgaggccta

SEQ ID NO: 397684 - DNA, 201 bp, Homo sapiens
acacactatttttgagcacctcctctgtgacttataatgctgagctccaaccagcccatggcaggatgggagggggtggctggggctggggagagacctgwttcaccagctcttccctgagcccctggtctccctgccccaccctgctctatcctgcagtgtggccaagagcctgggtgccaagacggtggccgctcgggc

SEQ ID NO: 397685 - DNA, 201 bp, Homo sapiens
acctgtagtctcagctactcaggaggctgagttgggaggatcacttgagcccaggagtttgaggccagcctgggcaacatagtaagagcatgtctctaaamatagtaactattaagccacatggcaaggtgtaggtgtatgattctaacagagggaggcagtggagaattgggcagtggtcaaaccaatgggctgtgcctt

SEQ ID NO: 397686 - DNA, 201 bp, Homo sapiens
gtaatgctgcataacaaacagcccccaaatagcagcagcttataagaaacatttgtttccgatgctttgggtctgtgggagggttagggtggttctgcttyggaatgtggggaaggattaaggtctgcagatgtcccctgtgtcttccccagccagtggccactgggggcacgttcttctcaagggcaatggcaagagggg

SEQ ID NO: 397687 - DNA, 201 bp, Homo sapiens
ggtggatcacttgaggtcaggagtttgagaccggcctggccaacatatagtgaaaccctgtctctactaaaaaaatacaaaaattacctgggcatggtagygcacgcctgtagtcctagctacttgggaggctgaaacggaaggtttgcttgagcccaggagtttgaggctattgtgtgctatgatcgtccctgtgaatag

SEQ ID NO: 397688 - DNA, 201 bp, Homo sapiens
ggttggtctcctcttaaaggcccagcctcatcaaggtcattgatgagatgactactgtgtacatcccatcctagccttctcccatagttcaggactcatgrtggtagcaagtgccagaaacccaattcatataggtttaagctacaggctctaagaatggaaaattcttgggataagtggctttcaggcacagggggatcc

SEQ ID NO: 397689 - DNA, 201 bp, Homo sapiens
tgcaggctcattgaatcctcacaatagtcctgccatgtacacgctcttcttgcagtttgttgtgtggttggttggttctcatttttcgggtctaatttttwattttttattattttttttgagacagagtttccctcttactctctaggctggagtgcaatggcgcgatctcggctcactgcaacctcgcctcaccgcaac

SEQ ID NO: 397690 - DNA, 201 bp, Homo sapiens
aggtgctgaataagtattttttgactgaggaatgaattctcccactctctcattcatttctcaccatatattggccactttctacatccccagcacagccmcacttatggaatgaaaggaccccaggccaaacttctttgaccagatggggaaactgaggcccagagagtcacagatacttgatgggggtctcacagctca

SEQ ID NO: 397691 - DNA, 201 bp, Homo sapiens
catttttcgggtctaatttttaattttttattattttttttgagacagagtttccctcttactctctaggctggagtgcaatggcgcgatctcggctcacygcaacctcgcctcaccgcaacctcgcctctcaggttcaagcaattctcctgcctcagcctcccgagtagctgggattacaggcatgcgccaccatgcccg

SEQ ID NO: 397692 - DNA, 201 bp, Homo sapiens
ggacctgagcctgagccccctgctttcccctgggttattccacagcagggagacccaggtcccccatttcagccctggtggctgccatacgggacaagagstgtgtgtccctgggccaagacagctcagtcccagacctcaggtgcctgatggggtctggggttgataaggctgttggcaacttggggctttttcatttaa

SEQ ID NO: 397693 - DNA, 201 bp, Homo sapiens
gggcattctgccagccaaggggccagcccgaggtgtcccagccctggcaccagggatttggctgtggagtgccaccaaggtggcctctggggaaaggcttyggggacaagtgaggtggacagcactggtggtccttacctcaactcatagatgtgacaggtaaggcccagtgacaaaagtgacttggccaaggttggcatg

SEQ ID NO: 397694 - DNA, 201 bp, Homo sapiens
  misc_feature (1)...(201): n = A,T,C or G
ctctatccaaaaaaataaaaataaagagaatgaatgaagctgagtgaagtaactgttgcaggacttcctctcccctcaccgtggatgggatggggatggtngggaggggtttatgtatatgagggggcagagaacccacccctggtaaattcccccaccacaggagccatctgggctggggtcctccctcactctgcttct

SEQ ID NO: 397695 - DNA, 201 bp, Homo sapiens
tgcacctggccaatgttattcttattaacttacaccacaacctgtgagttggggactgtttttatccccattttagagaaggggaaacaggcacagagagrttgtgacacttgcttgggtcacacagccaggaagtcggagctggtttctaacttttgcttctggtcgaccccaaagcctgtgctcttggggtccagggtt

SEQ ID NO: 397696 - DNA, 201 bp, Homo sapiens
ctccttccttccttccatttattcatccatctaaccatccttccacacatcaccctttctctctcctctctcccttctttccatccatccatccatccatccacccatccatccatccatcagatattgattgagcacatattcagtacctgctatgttagacattctagaaacacagagatagtaagacatggtctttac

SEQ ID NO: 397697 - DNA, 201 bp, Homo sapiens; identical to SEQ ID NO: 88041

SEQ ID NO: 397698 - DNA, 201 bp, Homo sapiens
tccttccttccttccatttattcatccatctaaccatccttccacacatcaccctttctctctcctctctcccttctttccatccatccatccatccatccacccatccatccatccatcagatattgattgagcacatattcagtacctgctatgttagacattctagaaacacagagatagtaagacatggtctttaca

SEQ ID NO: 397699 - DNA, 201 bp, Homo sapiens
aaatgagccctcttttgttgcctccctttaagtgtactatcaatcacattgttctttatgctgcttcgtaccctccctaatacacacacacacacacacamtcttttccttcctcttggccctttccattgtgtttcaggaatttctgtttctttgttagcaaattaccattcaccattaatattttcctggaaactttct

SEQ ID NO: 397700 - DNA, 201 bp, Homo sapiens
atagcttaaatgaaattactcatgcagagctaaaacttagttcaatatctggcacatggtaaacatgccataaatgttagtgcttttttttttttttttttcctgactctggaaatctaggacctctcccttcttccttcaaacctaacaaaacattgttgtgaactacaggattttttgaaatcaagggtaaatgtaatc

SEQ ID NO: 397701 - DNA, 201 bp, Homo sapiens
ggtactggcataataataggcacatagatcagtggaacagaatagagagcctagaaatcaatctatacatatatggtcaactaatttttgatcaaaaaaaatttgatgaaaaatctgcggatgatcaattcacttatataacatggcataatatttgtatataacctatccacatacttctgtatactttaaattatctct

SEQ ID NO: 397702 - DNA, 201 bp, Homo sapiens
ttagtaaacatctccgatgcctgtatcctttcttttttttcttgaaaacattgcatgatagtttacactgtaataacgaccactgcttacttgcctatccygtaaaatatttgtgcctttatagtcctttgaagtttattaggctatttgcatctatgttatttatttatcctatgtggctgtgttcactaagttttctgt

SEQ ID NO: 397703 - DNA, 201 bp, Homo sapiens
acttttagtaaacatctccgatgcctgtatcctttcttttttttcttgaaaacattgcatgatagtttacactgtaataacgaccactgcttacttgcctrtcctgtaaaatatttgtgcctttatagtcctttgaagtttattaggctatttgcatctatgttatttatttatcctatgtggctgtgttcactaagtttt

SEQ ID NO: 397704 - DNA, 201 bp, Homo sapiens
acaagtttacatttgtcttttactctttccagttctatcagtttttgcttcatgtattttcaatacctattgttaggtccttacacatttataattgaaarataataatacaaattacccaaaataaaacacagagagaaaaaagaccagaaaaaaaagagcaattagcaagctgtgggatacccccaagtggcctaatat

SEQ ID NO: 397705 - DNA, 201 bp, Homo sapiens
ggaggctaaatgggaggattgcttgagtccaggagtttgggatcagcctggataatatggcaagatcttgtatcttcaaaaaagttaaaaaaaaaaaaaaagttagctgggtgttgtggcacacacaagctactctggaggctgaggcaggaggatcatttgagactcaggttgagtctgcagttagccatgttcatgcca

SEQ ID NO: 397706 - DNA, 201 bp, Homo sapiens
ggttgatagagttgttcaagctttgtatattcacactgattttttttgtacttattctatcaattattgaaaaaagtatgttacagtctctgaatacaagwttacatttgtcttttactctttccagttctatcagtttttgcttcatgtattttcaatacctattgttaggtccttacacatttataattgaaaaataat

SEQ ID NO: 397707 - DNA, 201 bp, Homo sapiens
cccgttgagctcaatttaagaaacgtggcaataatcatggtgttactgtgtaggattcgtgccaagtagttgagcgggttgtttggggagtaaggaggcgktgctgtccattgaaatcacactgtgtagccgccgtcgtaacctcttctgtgttgttccatcgccgcatgcagaaaatgtcaggttttgggcgaagaggcg

SEQ ID NO: 397708 - DNA, 201 bp, Homo sapiens
taaatggtatgtggctagtgcctactgtattgtacagcataggtctccaataagctgtactctcgtgccagtttagtcctacacctaaggagtgacccttycgggatctttacaatgtctcaggtgttcaacgagctctccctggctggttagaacttgactttttcctagtccagtgcaagctccagcaattttcagcct

SEQ ID NO: 397709 - DNA, 201 bp, Homo sapiens
tggcaccctggctccggcgctggccccatgcgccttccttactaccaagacttgtcagaagtaggtccatatccccacaaggctcgctgattcctttctckggagttgacattccaagaccccgttgagctcaatttaagaaacgtggcaataatcatggtgttactgtgtaggattcgtgccaagtagttgagcgggttg

SEQ ID NO: 397710 - DNA, 201 bp, Homo sapiens
tgcctactgtattgtacagcataggtctccaataagctgtactctcgtgccagtttagtcctacacctaaggagtgacccttccgggatctttacaatgtstcaggtgttcaacgagctctccctggctggttagaacttgactttttcctagtccagtgcaagctccagcaattttcagcctatagttccccagtattct

SEQ ID NO: 397711 - DNA, 201 bp, Homo sapiens
tctagtggtgccatggcaggaggactagcctggtaccagttattccatcttttgtctgaaactagtagattacctcttactaacatctctacccatttcaragagagatgtgtacaagtttgctatgtttattttttaatagaatgaaatcactattttaagatatatttgtaccttctgttgtactatcactgcccagta

SEQ ID NO: 397712 - DNA, 201 bp, Homo sapiens
ataacaatgtgaagagtatacatatgagtaatttgaggtataaatatttatacttacatagtcacatataaacaagattcaatttttaaatcaataatgtktggcttacattagaatatggaaaaatctgtaatctgcataaacttttcaatctttaagggaactctagaggttacttaaggggaacaaaaggaagatact

SEQ ID NO: 397713 - DNA, 201 bp, Homo sapiens
ctggtgttgaactcttggcctcaagtgatctgcccgcctcggcctcccaaagtgctaggattacaggcatgagccacagaacctggcccttcaattccaamtatttacaagaccgtatttcctttcataaatgatttatgttctgtttaattttgcctggtaccagttatgtttttggtaccagttttgttttttcagaaa

SEQ ID NO: 397714 - DNA, 201 bp, Homo sapiens
aagagcacgtgggcacggaccaattcgggaacaaatactactacatcccgcagtacaagaactggagaggtgaggtggcggcgtgggcagcgattgcgtgstcagtgattgcgaggtcagtaaaggaaggaaaagtgagagcccctagtcaactaacgcatcatgcgacacttagggtgtcaccggagagaatttcccgag

SEQ ID NO: 397715 - DNA, 201 bp, Homo sapiens
aaatatttgtgcctttatagtcctttgaagtttattaggctatttgcatctatgttatttatttatcctatgtggctgtgttcactaagttttctgtcttmtttgtttttattttttctcttttcccgtgctattggcttacagatatcccttctatgttcatatatctcatgtactttcttatagcaaacatgatttcct

SEQ ID NO: 397716 - DNA, 201 bp, Homo sapiens
ctttttatttatgagccaggtaaaatttttctggtacgctgaataaaacaaggtactatccatcaaataaagggttatatccttggggcatcatgattagrataagataactaatttttatggcagtcccctatgtgaaatgtaaatagcaatacaccagaacttcagatatgttgaatcccagaaaaatatcctggatgg

SEQ ID NO: 397717 - DNA, 201 bp, Homo sapiens
ttatccctttgaataaactttccacttttatctctttctgcctcctcattaaggccagtaactcttaaatttgcccttttcaggctattttctagatcctrtaggcatacttcattgttttttattttttttcttttgtctcctctgattgtgtattttcaagtagcctgacttcaagctcactgattctttcttctgctt

SEQ ID NO: 397718 - DNA, 201 bp, Homo sapiens
ccataaatgtctgccagtactatttggcattctgttgaatgcacagattctctgcaatcaacgtttggaaggtacagttacaggctgatttttattgatcrttccgtactttagaaaactggctaagaaggcctttggaatatactgcttctgaagttttttaactcttagaattctaagaatattgtctcaagttttgtt

SEQ ID NO: 397719 - DNA, 201 bp, Homo sapiens
atggatggaactgaagaccattattcttagcaaactagcacaggaacagaaaaccaaatactgcatgtgttctctcttatgagtgggagctaagtaacaasgcacgtggacacaacaaagggaacaacagacactgggacaaacttgaggtcagagggtgggaggaggaacaggatcagaaaaaatacctatcgggtacta

SEQ ID NO: 397720 - DNA, 201 bp, Homo sapiens
gccaggaagaaattgaatccctgaacagaccgataatgagctctaaaactgaatcagtaataaatagcctaccaatcccccataaaagcccaggatgagawagattcttggctgaattccaccagatgtataaagaagagctggtaccattcctactgaagatattccaaaaaattgagaagggatttcttcccaactcat

SEQ ID NO: 397721 - DNA, 201 bp, Homo sapiens
gggtgcctgcaatcccagctattcaggaggctgaggcaggagaatcgcctgattccaggaggtggaggttgcagtgagctgagattatgccattgcactcyagcccgggcaataatagtgtgagactcttttgtctcaaaaaaaaaaaaaaaaaagaaacatggaaaaccatacaaggaccaatgaatccaggagatagtt

SEQ ID NO: 397722 - DNA, 201 bp, Homo sapiens
gcttcttgaagtctgacagttttcctgacatatcatgtgagtgaatcatatgggtaacatttttcataataaactccaatttgaaatccaggtatgaccaygtagatttgtcactaatacgctagagtcttttttagactatatttgtacttttggacttagaactattattttaaatacctaaattagcacagtaacttt

SEQ ID NO: 397723 - DNA, 201 bp, Homo sapiens
caaagtcacttatttccttgactacacaaaggaattgtggtattgctaagctggattttctaataaagatcaaaatcctgatagaacaaatatttttcacaaaatattcattcaataatttttaaagtaccacctcttttatagcatttaaaagagtaaataccccaaaagagtaggtacttaaaatgacagaaaaataaa

SEQ ID NO: 397724 - DNA, 201 bp, Homo sapiens
aaatacacacatacacaatgaaaattatatatacacaaattatgcaatttaaattatacacacacacacacacacacacacacacacacacacagtctgayatgtatagtctgatgagggacacttgggttgtttccatcttttggccctccgaaagttgaagaattatcacaattttggccattgtgaataatgctgcaa

SEQ ID NO: 397725 - DNA, 201 bp, Homo sapiens
catctgtactaaaaaaatacaaaaaataagccaggcgtggtggcgggtgcctgcaatcccagctattcaggaggctgaggcaggagaatcgcctgattccwggaggtggaggttgcagtgagctgagattatgccattgcactctagcccgggcaataatagtgtgagactcttttgtctcaaaaaaaaaaaaaaaaaaga

SEQ ID NO: 397726 - DNA, 201 bp, Homo sapiens
accctgtgatcaaacagtaattctcccggccaccttgaaaactgaagggatcaatttttagtcacactttctgggagctctggccaacagtaggtctaacrccttggcatactatgcaaggcttcctgatttgggcccagcccgactttctagctttgtctccttaggctaccctactcttctgtaccctactctacccta

SEQ ID NO: 397727 - DNA, 201 bp, Homo sapiens
cccaaagtcacttatttccttgactacacaaaggaattgtggtattgctaagctggattttctaataaagatcaaaatcctgatagaacaaatatttttcrcaaaatattcattcaataatttttaaagtaccacctcttttatagcatttaaaagagtaaataccccaaaagagtaggtacttaaaatgacagaaaaata

SEQ ID NO: 397728 - DNA, 201 bp, Homo sapiens
tatatacccagtaatgggatggctgggtcaaatggtatttctagttctagattcctgaggaatcgccacactgacttccacaatggttgaactagtttacrgtcccaccaacagtgtaaaagtgttcctatttctccacatcctctccaacacctgttgtttcctgattttttaatgattgccattctaactggtgtgaga

SEQ ID NO: 397729 - DNA, 201 bp, Homo sapiens
ccaacagtaggtctaacaccttggcatactatgcaaggcttcctgatttgggcccagcccgactttctagctttgtctccttaggctaccctactcttctstaccctactctaccctactcttcaaggaactccctgctgtttctcaagtttaatgtcttctccttctcccatcaactggcatactcctgcttatgtttaa

SEQ ID NO: 397730 - DNA, 201 bp, Homo sapiens
tcagaggttttgttcattctttttcattcttttttgactattcttgtctgcctgtcttatttcagaaagaccgttttcaaactctgagatcctttccttamcttggtctattctgttattaatacttgtgattgcattatgaaattcttgtattatggttttcagctctatcaggttggttacattcttctctatactggc

SEQ ID NO: 397731 - DNA, 201 bp, Homo sapiens
tatacaccatggaatactatgcagccataaaaaatgatgatttcatgtcctttgtagggacatgcatgaaattggaaatcatcattctcagtaaactatcrcaagaacaaaaaaccaaacaccgcatcttctcactcacaggtgggaattgaacaatgagaacacatggacagaggaaggggaacatcacactctggggac

SEQ ID NO: 397732 - DNA, 201 bp, Homo sapiens
ggtgttgggattgtttgagcccaggagttcgagattacaatgagctatgattgtgccattgcagtccagcctgggttatggagctgtctccaaaaaaaaaagaaaaaattgaaacaaacgacttttccttggttgttggagattggtatatattgtcatggaagatcaaaagtaaaattatgagcagagaggaggcagagc

SEQ ID NO: 397733 - DNA, 201 bp, Homo sapiens
atgtcttctccttctcccatcaactggcatactcctgcttatgtttaattccttttaaaaggccctttaaaatccttggttgttttcctcacctttttttycctcaacttcttaactgatagagctaatcactactttctcggtataactacactgctgtgtactcctgtataactctttaagttcaatattaaaattctg

SEQ ID NO: 397734 - DNA, 201 bp, Homo sapiens
tgtctggagattttgatgtgcagattatttaatcacccaagtattcagcctagtaccccattagttatttttcctgatcctctccctcctcccatcctccrccctccaataggcttcagtgtgtgttgttcctctctaggtgtccatgtgttctcataatttagctcccacttataagtgagaacatgcattatttggttt

SEQ ID NO: 397735 - DNA, 201 bp, Homo sapiens
ggaattttttgttttaatacgtctctaattctagtatcaaatgaagtagactttgattagaatgtatgtgcttttttttttttcttagcttctcttaatgmgtaagcttaaagcttttttaggctttatgtatgccctcagactcattcatttctttaaatttctcagactcttctaagctaatattcacatattatagtc

SEQ ID NO: 397736 - DNA, 201 bp, Homo sapiens
tctcattgtggttttgatttgcatttctcagatgattagtcatattgagtattttttcatgtttgttggccatgtgtatatcttttgagaagtgtttgttyatgccctttccccacttttaatgttgttttttttttctttttgatttattaaagtttcttacagattctggatattatactttgatgtcttacatttaag

SEQ ID NO: 397737 - DNA, 201 bp, Homo sapiens
gagatatctctttgatatactgttttcctgtcttttgggtatgtacctggtaggggattgccagatggtatgttagctcaatttttagctttctgaggaamctccaaactgttatccacagtgattgtactaatttacatttctaccaagagtatacaagggttcttttttctccacatcgttgccaacatttgttactgc

SEQ ID NO: 397738 - DNA, 201 bp, Homo sapiens
gagtaagttatctgtgcccaatattactaggttcattttataagttacagaattaaaatgtcttaaaattgccattttatgtatagaatcctacttcctgwtgacttaaattgcaaagagtgtatgtatgtatttatggttaaatggacctcccactcctcaccccaaacttcacaatatcacttttagtaacatagtgga

SEQ ID NO: 397739 - DNA, 201 bp, Homo sapiens
ttgatgttgaatattttcttcacatgcctgatggccatttatatgtcttcttttgagaaatgtcttcttagatcttttgcccaattatgaatcagttattrgttttttttcctgttgaattgtttaagttccttgtatattttggatattaaccctttatcaggtgtacagtttgcagatactttctttcattccaaaggt

SEQ ID NO: 397740 - DNA, 201 bp, Homo sapiens
aataaaggtttattcagtgattgtcctgaaattaaactagctcattaattactcttcctgtctttgcatacacacacacacacacacacacacacacacacacacgcactcacatacacacaaataggcataacttttgattttttaaatccttgggagaccttacatgaagttgatcgacctaagagtaggaatagaaag

SEQ ID NO: 397741 - DNA, 201 bp, Homo sapiens
gctctctatccttcagcccgctacagcttcttcaattcgttttctgtgtatcataggtctttacacatgttttgcttgcctctagctaccttctcctcctyctctcctttctgcattcaactcttccatttagctaacctctcatcctttatctctcatttaaatacatcttccctggggaggccttccctattttctaga

SEQ ID NO: 397742 - DNA, 201 bp, Homo sapiens
ataccaccttaactagatggtcagaagttgtactaagtagggcagatttatattatatgtgcttctttctatgatgcactgaggattaaacattattcacrtagtattctttttttaatttttgattttgtgggtacttagtaggtgtatatacttagaaggttcttgagatattttgatacgtgcatacaatgcgtaata

SEQ ID NO: 397743 - DNA, 201 bp, Homo sapiens
aaataaaggtttattcagtgattgtcctgaaattaaactagctcattaattactcttcctgtctttgcatacacacacacacacacacacacacacacacacacacgcactcacatacacacaaataggcataacttttgattttttaaatccttgggagaccttacatgaagttgatcgacctaagagtaggaatagaaa

SEQ ID NO: 397744 - DNA, 201 bp, Homo sapiens
ataactacctcttgattttctacctccaaccttgttctcctgtaatccaggcttcacactctggtcttggtgagatttctgagtttcaaatctgattataygactgtagctttaattcagtgactttgtaccatccttaggatcaagtctaagctgctgaatttaggaggcattattacaaggtgtctggtctctgccttt

SEQ ID NO: 397745 - DNA, 201 bp, Homo sapiens
ggcaggcttgtattcttttcttcagggaggtgagttccttggttccaggtggatctagagatgccaagcaggagccagggcctggagtctagaaccttagraatctatctgttgctctgttctactgtggctgagctggcaccggagccagaagaggaagttcttcccactcttctctcccctttccacaagctaaggagt

SEQ ID NO: 397746 - DNA, 201 bp, Homo sapiens
atttcaactatttctaaataaaggtttattcagtgattgtcctgaaattaaactagctcattaattactcttcctgtctttgcatacacacacacacacacacacacacacacacacacacgcactcacatacacacaaataggcataacttttgattttttaaatccttgggagaccttacatgaagttgatcgacctaa

SEQ ID NO: 397747 - DNA, 201 bp, Homo sapiens
actctaaatatggtggtatttagaaatatgggacctttgagaggtaattagagttagatgaggtcatgagggtgaggccttaatgatgatattagtgcccrtaggagaagaggcaccagagagctgtactctctccctgagcatgcacaaaaaaagaagtcatatgggtacacattgagaagatggctgcctacaagccat

SEQ ID NO: 397748 - DNA, 201 bp, Homo sapiens
gtgatatcatacatttagatatccagatgttgccctttaagtgacattttttgaaagttttgaaattttaaaaatacttgacagaacttttttttttttgktcagtgttgtcagatattagttacattaacattctaatttcacattacaaataacatattcttaaaaattagataatacaggtaagcaaaaagaacatta

SEQ ID NO: 397749 - DNA, 201 bp, Homo sapiens
ccaaagtcacttatttccttgactacacaaaggaattgtggtattgctaagctggattttctaataaagatcaaaatcctgatagaacaaatatttttcacaaaatattcattcaataatttttaaagtaccacctcttttatagcatttaaaagagtaaataccccaaaagagtaggtacttaaaatgacagaaaaataa

SEQ ID NO: 397750 - DNA, 201 bp, Homo sapiens
taatgctatagtgatgcttcttaaatgtgatggtcttttattcaaggaaatacagtaacaaaggattgattgtaattttgggtatagatcctcctagataraattctgaggaacagaactgcattgtacaatctgtttgcacagatttgagaaagtatttccaatagcaaagaacctctctgcaacagtgtctagggcatg

SEQ ID NO: 397751 - DNA, 201 bp, Homo sapiens
ggcttttcttacccaaatggtatacttatccgattcacttcaatagttgcctattttccctttcagaaatgtctgttctctcaccaggagactaaaacatygtgcagatgtacagttggatacaatgatgccaatataatatatgcactgttcaataatttattttgtatctggagtgatgcatctgtttccttcttgtgg

SEQ ID NO: 397752 - DNA, 201 bp, Homo sapiens
attttccccacctatgctattctaatagtcgagacatacagagtttgtctttaagatactgaatccttattaaatgtagtttgattagaaatcatgtctcrgaaaatattttatgactttagatatttagtaaaatcttattaccttgtgatggataacttaataaataaaaagtcggaatttttattattaaactataaa

SEQ ID NO: 397753 - DNA, 201 bp, Homo sapiens
ataaaaaggatgaagtactaatttatacttgctgccacatggatgaacctgtgaacatgttatcctaagtaaagaagccagacacaaaaggggacgtattrtatgattccatttatatgaaatatccagatcaagtaaattcactgatagagaagcaaattgccagggttaggggagggaagaaaacagtgtggctgctta

SEQ ID NO: 397754 - DNA, 201 bp, Homo sapiens
aatagtatatctggcaaaaatgtccttcaaacataaaggagaaatactttcccaggcaaaatacctgagggacttcattgatctcagacctgttgtatgaraaatgctaaagggagtttttaagtgtgaaagaaaaggacattaatgaacaataagaaatcatctgaagatacagaacttactggtaataatatgtacaca

SEQ ID NO: 397755 - DNA, 201 bp, Homo sapiens
agtaacgatttctagaactgagatacagggcaaaatccaaggaacaaaacccccttgctacttaattggtaccagcaacaaaagtgacttcatattgacaractgacttgggatatcttacatgttcctctgcttcaatgcaaaattcccacaggtaggaacttataggccttactcataaagatcagacaatttcaggga

SEQ ID NO: 397756 - DNA, 201 bp, Homo sapiens
acgttttccacagagcagtcttcccactagatattgattgtttgattgttcctcaagttaaacattgaattaccatgggaactagcaattccactcctagrtatatacaaaaattcaaacagatacttaaatgcctgtacacaaatgttcgtagcttcactatttacaatagccaaaaggcaaaaaacaacccaatcatct

SEQ ID NO: 397757 - DNA, 201 bp, Homo sapiens
cgccttttttccttcctttttgtgtgtgtttaagacatcttaactcatgttataatttagatatattcatagcagaatcacctaatattcatttttctgayattttgttaaatgttcacattttcaattatgaatatacttcatacattgtagacaatttagctttacaaaaaagtatagaatgtattaagtgagtgaagt

SEQ ID NO: 397758 - DNA, 201 bp, Homo sapiens
catgcactcctgccacttctgttcagcgtagtgctagaagtactagcaagatcaatcagataagaaacagaaataaaaggcatccaaatcagaaaagaagyagaattatctctatctgtagaaaacatgatcctatatataaaaaaaattttaagattttagcaaaaataaaaaacccgttagaactaataaatgaattca

SEQ ID NO: 397759 - DNA, 201 bp, Homo sapiens
ccaacattggtcactgctgaagatgctgcatggaatcacattactgtggtgacatagaaccagagccaccacattctgcttatctggtggcatccttggtmccatctacatgtgaaagtcttcacctataaaaaccactctgtaaagtttggaagaggtgactgtaccagcagatgtgcagatatatcaacacagatacac

SEQ ID NO: 397760 - DNA, 201 bp, Homo sapiens
acaattgctgaggtcagggaggggtggcactggcaattcaggactgattttttgtctcttcagtgcctctttccgggatatgaagttcaaaccaagtactrtgaaagctcacctgatttttggttctcatgaaggtatccttttcatgtgtgtagaaggttgttaaattgctgttcttgttggggggacaattggtggagc

SEQ ID NO: 397761 - DNA, 201 bp, Homo sapiens
agcatggggttaggagagaggtgatgccaacactcccttggcagccccacagtggactgtgcccttccagtccactgtcgctgagcctagttcaacaccakgattcatccaagagttgcaatccttatggcctagactgccttcaagcttacttggagacaagagtgctacaggccttggtggtgaggtttgcaagtactt

SEQ ID NO: 397762 - DNA, 201 bp, Homo sapiens
gtgaaagaaaaggacattaatgaacaataagaaatcatctgaagatacagaacttactggtaataatatgtacacaggaaaacaaagaatactgtcacacwgaagttacggtgtgtaaactacttatatcttaagtagaaagacaaaaagatgaactgatcaagaataataactaaaacaattttttaagacatagtacaa

SEQ ID NO: 397763 - DNA, 201 bp, Homo sapiens
caggtgcctgacaactctgaccattgcgcagtcttgccttgggtgaactgataccttagatgtaagacagagtcctcccgactcttccctctcctctcctyaaacagaaggaaggggtctattttggagcagggagctgtgtagcatggggttaggagagaggtgatgccaacactcccttggcagccccacagtggactg

SEQ ID NO: 397764 - DNA, 201 bp, Homo sapiens
aattagcagattatgaatgctgccaggatgtgtcattgtcttcaaggcagggggtttccttctggaccagggtgtatctagaaatgtcatctgggagctasgccctgaaacaggtgcctgacaactctgaccattgcgcagtcttgccttgggtgaactgataccttagatgtaagacagagtcctcccgactcttccctc

SEQ ID NO: 397765 - DNA, 201 bp, Homo sapiens
gatatcttatattagtcagaatggctattattttaaaaatcaaaaaattacagatgctggaggggttatagagaagagggaacacctatacactgctggtrggagtgtaaattagttcacccattgtggaaatcagtgtggcaattcctcaaagaacttagaactacttttaaacccagccatcacattattgggtatata

SEQ ID NO: 397766 - DNA, 201 bp, Homo sapiens
ctatactaatttacattcccaccaagagtgtgcaaggttttccttttctctacattgtcgacaacacttgttaccttttgtctttttgatactagccattygaataggtgcgaaggtatgtcttgttgtggttttaatttgcgttttcctgatgatgattgatgttgaatattttcttcacatgcctgatggccatttata

SEQ ID NO: 397767 - DNA, 201 bp, Homo sapiens
actgacctgagcccatacctaaagtaaatgatttcaaatctgacttgacatagctgagaacataattttcctccgactttattaaggtataattgacaaarattgtatatatttacagtgtacaatgtgatgttttcatatatgtatacattgtgaaatgattaaatcaagctgatgaacatatctacacctcacaggctt

SEQ ID NO: 397768 - DNA, 201 bp, Homo sapiens
aacttttatattctttggtagagacagggtttcaccatgttggtcaggctggtcttgaactcctgacctcaagtgatctgcctgccttggcctaccaaagygctgggattacaggtgtgaactaccgcgcccggccacataacgttgattaccattaccatgttgtacaatggaactcttgaacttactccgtcctgtcaa

SEQ ID NO: 397769 - DNA, 201 bp, Homo sapiens
taggactctcccttcagggcagtgggctttcttctggcccagggcaggtccaacattactttccaagagccaaggcctagaatcaaggaccccaggagacygcttgatgctctacctgactgtggctgaactgctgcctaagatgatttttgattcttatgaaggtgcttttttggtgtgaatagtttttcaatttggtgt

SEQ ID NO: 397770 - DNA, 201 bp, Homo sapiens
tatttcaactatttctaaataaaggtttattcagtgattgtcctgaaattaaactagctcattaattactcttcctgtctttgcatacacacacacacacacacacacacacacacacacacgcactcacatacacacaaataggcataacttttgattttttaaatccttgggagaccttacatgaagttgatcgaccta

SEQ ID NO: 397771 - DNA, 201 bp, Homo sapiens
gcatgagccactgcgtccagccttttttttttttttttttgctatttaaagaagtttccaaatatattaggaaacttgatttggtgttacttttattactsgtttctcatttctaactttgtggcatggtattagtttcctattgctgctgtcagaaattactgcaaatttagtggcttaaaacaacacagatttattatc

SEQ ID NO: 397772 - DNA, 201 bp, Homo sapiens
tttttgtatttttagtagaggcagggtttcaccatgttggtgaagctgggctcaaactcctgacctcgtgatccacctgccctggcctcccaaagtgctgrgattacaggtgtgagccactgcacccagccaagattgccttttaaagatgaggtagagattctaatattgagtagatatctaaatgtcccctgatataag

SEQ ID NO: 397773 - DNA, 201 bp, Homo sapiens
ctttgtaactgtcagacacttttaaggctccttggtttggcctatactatgaccataaacatcagcttaaagaatataaagtattgcttttgagaagaggsaactattatttgtcataacaagccttttagaatgaaatggccctacaataaaaagatgtataatttttttaagagacagggtcttgctctgttgcccaag

SEQ ID NO: 397774 - DNA, 201 bp, Homo sapiens
attttatgaggtcagcattaccttgatacctaagccagacaaagacatcaaaagaactacaggccaatttttctgatgaacattggtgtaaaaatcttcartaaaatattagcaaaccaaatccaacaacacatcaaaaggtgtatacaccaggaccaagcagggagatttattgctggcatgcaagactggtttaacata

SEQ ID NO: 397775 - DNA, 201 bp, Homo sapiens
aggagatcgagaccatcctggctaacacggtgaaaccccatctctactaaaaaatacaaaaaattagccaggcctggtggcacgcgcctgtagtcccagcyactttggagtctgaggcaggagaattgcttgaacccgggaggcggaggttgcagtgagccaagatcacaccgctgcactccagccaagtgacagagtgag

SEQ ID NO: 397776 - DNA, 201 bp, Homo sapiens
ttactgggagtacttattgctttctgaaactcttgttgtagatacacttgcacatatgttttgtttgtgaagttgtggtgtcaaatgtatttcttactgtrtaggttaattttgtgtcaacttggctagactgtggtacccagatatttggtgaaatactagcctagattttgtgtcaaagtatttttttaagtgagatta

SEQ ID NO: 397777 - DNA, 201 bp, Homo sapiens
acctaaatacattaagcaaatattaatggacatgaagggagaaatagatagcaatactataagagtaggagactttagtacccccacattcaaaaatgggyagattaatcagacagagaattaataaggaaatactggacttgaattgcacttttgaccaattggaactaacagacatcttcagaactttgcatccaacaa

SEQ ID NO: 397778 - DNA, 201 bp, Homo sapiens
tttttttttgagatagagtctcgctctgtcactcaggctggagggcactggcgcgatctcagctcactgcaacctctgcccctggggcctaagtgatcctmctaagtactgggactacagatatgtgccaccatgcccagctaatttttgtattttttgtagagatgagatttcaccatgttgcccaggctggttttaaac

SEQ ID NO: 397779 - DNA, 201 bp, Homo sapiens
gatagtacctagacatgcaatagatttttgtatgttgactttgtttttttttttttgagatagagtctcgctctgtcactcaggctggagggcactggcgygatctcagctcactgcaacctctgcccctggggcctaagtgatcctcctaagtactgggactacagatatgtgccaccatgcccagctaatttttgtatt

SEQ ID NO: 397780 - DNA, 201 bp, Homo sapiens
ccttccctggattacttgttcaacataagccataaaaaattcagaactgttgtctctaacagatatgaactcaaaatgtaaatagtaccaagtacagtcaygtgtcacttgatgacaggtaggtcatttcgtcgtcgtgcaaatatcagagtgtacttagggaaaactagatagtatagcctactacacaccctgtctata

SEQ ID NO: 397781 - DNA, 201 bp, Homo sapiens
accagaattgtaaaagaagcaagaaaaaagcatcaagtcacatattaagaaatctccattagactgtcagcagatttctcagcagaaaccttgcaggccargagagactgagaagatatattcaaagatgtatccaaagaaataaactgacagttaagaatactatacccaacaaagctgttcttcagaaatgaaggagaa

SEQ ID NO: 397782 - DNA, 201 bp, Homo sapiens
tgcactccagcctgggcaacagaacgacactctgtctccaaaaaaaaaaaaaaaaaaaaaaaaaaaatatatatatatatatatatatatatatatatatwtaggtgctatataaaaacttttgatggaattttctatcctgtctttccttttactgctggtaattggcctcagactacctaaatctttcccttcacagca

SEQ ID NO: 397783 - DNA, 201 bp, Homo sapiens
catgattgtttatataaattcatttttactctttacttttttccattattctttatatacttaatttctatacctacttctttgaatgggtattgtttctrgtttctaaagatttttattcaaatgtcagattatggaaagatttctattttggacatattactctcatgatggttctcaaattttatttttattataact

SEQ ID NO: 397784 - DNA, 201 bp, Homo sapiens
ccattgcactccagcctgggcaacagaacgacactctgtctccaaaaaaaaaaaaaaaaaaaaaaaaaaaatatatatatatatatatatatatatatatwtatttaggtgctatataaaaacttttgatggaattttctatcctgtctttccttttactgctggtaattggcctcagactacctaaatctttcccttcac

SEQ ID NO: 397785 - DNA, 201 bp, Homo sapiens
gttggccacaaggtcacattttccaaattcctgctactgtatcactttatatcctaggttatcctcttaatcccaccttctccaatcccataataagaagrgaaaagcttgcactgtcttcataatggtggcgggggtgggggcaatagagtcctgagatccattttaagtaaggggcacttgcctatctgccttcccaca

SEQ ID NO: 397786 - DNA, 201 bp, Homo sapiens
atcacgccattgcactccagcctgggcaacagaacgacactctgtctccaaaaaaaaaaaaaaaaaaaaaaaaaaaatatatatatatatatatatatatatatatatatttaggtgctatataaaaacttttgatggaattttctatcctgtctttccttttactgctggtaattggcctcagactacctaaatctttcc

SEQ ID NO: 397787 - DNA, 201 bp, Homo sapiens
agatgtaagcaacctctttccaagttttggtcagtcacaggcactatggatgatgtattgtaacccatcatatttgtatttgttattgtagttgtgctacrctgtgggtaaattccttaatgtgtactagacagggaatataaccaccattatagcactatttctttggggaaaaaaaagtgttttgggtccaaaatagtt

SEQ ID NO: 397788 - DNA, 201 bp, Homo sapiens
agatcacgccattgcactccagcctgggcaacagaacgacactctgtctccaaaaaaaaaaaaaaaaaaaaaaaaaaaatatatatatatatatatatatatatatatatatttaggtgctatataaaaacttttgatggaattttctatcctgtctttccttttactgctggtaattggcctcagactacctaaatcttt

SEQ ID NO: 397789 - DNA, 201 bp, Homo sapiens
gaaaccaattaacagtgagtaaacacagacagagccacattcattcatttcgcaaatatgtgttaagcaccgattatgtgctagacattgttgtaggcccygaattgtgggagacagaaaggcataaagggcaggcaaaaacctattttcatacagccagcataatacatacacttttaccctctgccctagcaatctaag

SEQ ID NO: 397790 - DNA, 201 bp, Homo sapiens
tttaaaaaacaattaaaaattttaattttggtaaaaaataaaacatatgaggtggtaggatcacttgaggccaggatcaagaccagtctgggcaacatcaygagaccccatctctacaaaaaatttaaaacttagctgggcacgttggcatgtgcctgtagtcctagctactccagaggctgaggtgggaggatttttaga

SEQ ID NO: 397791 - DNA, 201 bp, Homo sapiens
gaagtgaagaatgagacattagagttatgaaattaagattcttgttgaataagtaaatttgcctaaggttggggataatggaagtgtgtaatgatttgcaytgagaggttagtgttgtcagaagctatctcccaggcagctttcttcaagccattatacctgggccaataaccttgtttcccagtctcagcaaagttgatc

SEQ ID NO: 397792 - DNA, 201 bp, Homo sapiens
tatggttttaggtctaacgtttaagtctttaatccatcttgaattaatttttgtataaggtgtaaggaagggatccagtttcagctttctacatatggctwgccagttttcccagcaccatttattaaatagggaatcctttccccatctcttgtttttgtcaggtttctcaaagatcagatagttgtagatatgtggcgt

SEQ ID NO: 397793 - DNA, 201 bp, Homo sapiens
atggttttaggtctaacgtttaagtctttaatccatcttgaattaatttttgtataaggtgtaaggaagggatccagtttcagctttctacatatggctakccagttttcccagcaccatttattaaatagggaatcctttccccatctcttgtttttgtcaggtttctcaaagatcagatagttgtagatatgtggcgtt

SEQ ID NO: 397794 - DNA, 201 bp, Homo sapiens
aaattaaacaaattttataagcaaaacccaaacacatgaacagatgtttttcaaaagaagacatacatgcagccaacaagcatatgaaaaaatgctgtacrtcagtaataattagagaaatgcaaatcagaaccacagcgtgatatcttatattagtcagaatggctattattttaaaaatcaaaaaattacagatgctgg

SEQ ID NO: 397795 - DNA, 201 bp, Homo sapiens
gcttgttttacctctcccccagctccaggcagctctgcacacagagactctgttaagggaagaggacgaaaatgtctgccagggaatccagggaattctgsatattacccaagaccaccaacgtgtacctcaataagccagcaagcactacagcattactgggcttggggtacttcctaatgcagatattaccgcaatgac

SEQ ID NO: 397796 - DNA, 201 bp, Homo sapiens
cagcaagagaaaagaaacaaataacatacaatggagctcaatacatctggcagccaacttttcagtaaaaaccttacaggtcaggagacagtggcatgacrtatttaacatgctgaaagaaaaaatacatatattagaatagtatatctggcaaaaatgtccttcaaacataaaggagaaatactttcccaggcaaaatac

SEQ ID NO: 397797 - DNA, 201 bp, Homo sapiens
aagaggtactgaagagagtaggaaagactcgtcccccattccctggtagcagctgtgggccactgagatcatatctgtgtgcttggggaagggagagtgcmgggattatcagacattgcgttagaactcagtgccctgtcacagtggaatgcaacacagggtggaactcagctggtgcccattgagggagcattaagacca

SEQ ID NO: 397798 - DNA, 201 bp, Homo sapiens
attcaaaataactgtattgagaaaacccaaagacatgatgtaatcctattcctattccagagaaggaattcagtattctatgagataattttaacaaagaratacaaataattaaaaagatcaagcagggcaggtgcagtagctcatgcctataatcccagcactttgggaggctaagacaggtggattgcttgaggtcag

SEQ ID NO: 397799 - DNA, 201 bp, Homo sapiens
gaatcagcaaggggtgactgatcagctgctgatttcttggtcaatcagtagctgactccttggtcaaaaaagaatgagccataaagtagaaggaaaactaygaaagtcaggtgccctggaagccaaataattttttttttaacaagaagggagggagaatgttactgatgctactgatagttcaagtacgatatgccgtta

SEQ ID NO: 397800 - DNA, 201 bp, Homo sapiens
gcttctacttctggggaggcctcaggaaacttacaaccatggcggaaggcaaatgggaaacagaaacatcttacatgtccagagcaggagcaagcagttgrgggaggtgccatacacttgtaaacaagcaaatctcatgagaactcactattgcgatgatagcaccaagggggatggcgttaaaccatgagaaactgcttc

SEQ ID NO: 397801 - DNA, 201 bp, Homo sapiens
tcatccagtcacctccttctgggaacaccagattgaacaactatgcacatgaaaaagcacctttatgagaaccagaagcagagatgagtgatcatagtacytagttttaaaatcataataaggaaagaggtactgaagagagtaggaaagactcgtcccccattccctggtagcagctgtgggccactgagatcatatctg

SEQ ID NO: 397802 - DNA, 201 bp, Homo sapiens
agccaaagactgaggggaaaagttttaaaatacagaataaagacttctcttttttgtattgacaaagttgtggggaaacaggtattctcattcaccatagrtacaggtgtaagttgatgttaacttttttttcttttttttttttttgagacagggtctcactttctttcccaggctggagtgcagtggaaagatcatagc

SEQ ID NO: 397803 - DNA, 201 bp, Homo sapiens
cctctttgattctgtgagctttaggtggatgctcagttcttgatcccccacctcacatcagctatgggtatgttttcactcctgcaagtgatttaaaggtrtatgtccaagcacttagcccttaaagcctagagctgagtttgaaaccccggggattgctacagtgtctgtttaagcttatggctctggctttgacttcta

SEQ ID NO: 397804 - DNA, 201 bp, Homo sapiens
ttgtaaatgacaggattgccatctttttgaaagctgtatatatgtgtgtgtgtgtgtgtgtgtatgtgtgtgtgtgtgtgtgtgtatctacatctatattacattttctttattcaacatccattgatggacacttaggttgtatccatatcttggctattgtgctgcaataaacatgagagtgcagatatctcttcagta

SEQ ID NO: 397805 - DNA, 201 bp, Homo sapiens
gttgtaaatgacaggattgccatctttttgaaagctgtatatatgtgtgtgtgtgtgtgtgtgtatgtgtgtgtgtgtgtgtgtgtatctacatctatattacattttctttattcaacatccattgatggacacttaggttgtatccatatcttggctattgtgctgcaataaacatgagagtgcagatatctcttcagt

SEQ ID NO: 397806 - DNA, 201 bp, Homo sapiens
ctagcattaagtgactctaattattttttattaatgtttaactgctaaatttctttttcaattaaataattgtgtctttatgcttagaggccctttttgcrtatatatgggagttcatttattttagtaaaggaaataccacctgaaaaactgttaatgacttgagctctgtgattagttcattttagtgacattttgaga

SEQ ID NO: 397807 - DNA, 201 bp, Homo sapiens
tgttgtaaatgacaggattgccatctttttgaaagctgtatatatgtgtgtgtgtgtgtgtgtgtatgtgtgtgtgtgtgtgtgtgtatctacatctatattacattttctttattcaacatccattgatggacacttaggttgtatccatatcttggctattgtgctgcaataaacatgagagtgcagatatctcttcag

SEQ ID NO: 397808 - DNA, 201 bp, Homo sapiens
ccaggttcacaaagcttgagaagtttgcttggcagtatagtcatcactggcctcaaaatccgtattggtattttcaatggacagtgtaacaatgcttctcrtgtgctcagggaacttagatttggtggacgtagagttttagggtatccagcacctggcagagtgtccaaacctctggtgtttttcctctgcaatgaagtc

SEQ ID NO: 397809 - DNA, 201 bp, Homo sapiens
ttgttgtaaatgacaggattgccatctttttgaaagctgtatatatgtgtgtgtgtgtgtgtgtgtatgtgtgtgtgtgtgtgtgtgtatctacatctatattacattttctttattcaacatccattgatggacacttaggttgtatccatatcttggctattgtgctgcaataaacatgagagtgcagatatctcttca

SEQ ID NO: 397810 - DNA, 201 bp, Homo sapiens
taaacatctgaaaagcttaacccactgcttgagaagatagtgtattttttttttttttgagacagagtctcactctgtcgcccaggctggagtgcagtggygtgatctcagcttactgcaacctctgaaccccgggctcaagcgattctttcacctcagcctcccaagtggctgggattacaggcatgctccaccatgccc

SEQ ID NO: 397811 - DNA, 201 bp, Homo sapiens
cattctgatcatttccagtgctatttattctacaaggtttccatcttgtatcattttccttcagttgaagtatgtcctttaatttttcttatagtagatayttgtgacaaattcagcttttgtctgaaaatgttcttataataccttcatttttaagatgttttcactggatataggattctaagttgtttctgatgagaa

SEQ ID NO: 397812 - DNA, 201 bp, Homo sapiens
atgtgtgtgtgtgtgtgtgtgtatgtgtgtgtgtgtgtgtgtgtatctacatctatattacattttctttattcaacatccattgatggacacttaggttstatccatatcttggctattgtgctgcaataaacatgagagtgcagatatctcttcagtacactgatttcatgtcctttggatatataaccagtagtggga

SEQ ID NO: 397813 - DNA, 201 bp, Homo sapiens
gttgttgtaaatgacaggattgccatctttttgaaagctgtatatatgtgtgtgtgtgtgtgtgtgtatgtgtgtgtgtgtgtgtgtgtatctacatctatattacattttctttattcaacatccattgatggacacttaggttgtatccatatcttggctattgtgctgcaataaacatgagagtgcagatatctcttc

SEQ ID NO: 397814 - DNA, 201 bp, Homo sapiens
taatctcactaataagattttctgtagaatgatttccacactttaattaccaaattgatgttgttatcagtaaatttacatcacattgtgatttaaatgtrataatttttaaaagtcagtacgtattttcacaccagaataatacttgctaacaaaatttatttgcgtattggcaaaatacttacatgtaataagtccagt

SEQ ID NO: 397815 - DNA, 201 bp, Homo sapiens
ttaaactttaaaaaggagattgagtttaaaatgaggccactctttaatcaggtaggatgcctggaactatttcaaaggcatatatggtttttgtttttatrggaagtgaagaatgagacattagagttatgaaattaagattcttgttgaataagtaaatttgcctaaggttggggataatggaagtgtgtaatgatttgc

SEQ ID NO: 397816 - DNA, 201 bp, Homo sapiens
cttacttaccataatgtcttcaagtttcatccaagttgttgtaaatgacaggattgccatctttttgaaagctgtatatatgtgtgtgtgtgtgtgtgtgkatgtgtgtgtgtgtgtgtgtgtatctacatctatattacattttctttattcaacatccattgatggacacttaggttgtatccatatcttggctattgt

SEQ ID NO: 397817 - DNA, 201 bp, Homo sapiens
  misc_feature (1)...(201): n = A,T,C or G
ctgagttttagggcagaaatcagtgttaagcttaggaaatctttcatagagtgtctcaggcttctgtgtaatatttcacatttgtttgtttcattttttgngtagtaaatatttctactgtggggtgcttcatgtctattatagcataaaatcaggacagaactgtttatgtaacattagtatgtaatcatacagcttttt

SEQ ID NO: 397818 - DNA, 201 bp, Homo sapiens
caagttgttgtaaatgacaggattgccatctttttgaaagctgtatatatgtgtgtgtgtgtgtgtgtgtatgtgtgtgtgtgtgtgtgtgtatctacatctatattacattttctttattcaacatccattgatggacacttaggttgtatccatatcttggctattgtgctgcaataaacatgagagtgcagatatctc

SEQ ID NO: 397819 - DNA, 201 bp, Homo sapiens
gagtacatgtcattataaatttatctgaacccatagaaagtacatccccaagagtgaaccctaatattaatataaactaagtagtcaccatgatgtatagtctcttgaactttttcctcctaactggagctttgtgcactgtgatcaatatcttcccaaacccctcacccacagtttctggtacccacaatttagctctgt

SEQ ID NO: 397820 - DNA, 201 bp, Homo sapiens
tgagtacatgtcattataaatttatctgaacccatagaaagtacatccccaagagtgaaccctaatattaatataaactaagtagtcaccatgatgtatagtctcttgaactttttcctcctaactggagctttgtgcactgtgatcaatatcttcccaaacccctcacccacagtttctggtacccacaatttagctctg

SEQ ID NO: 397821 - DNA, 201 bp, Homo sapiens
gtgagtacatgtcattataaatttatctgaacccatagaaagtacatccccaagagtgaaccctaatattaatataaactaagtagtcaccatgatgtatagtctcttgaactttttcctcctaactggagctttgtgcactgtgatcaatatcttcccaaacccctcacccacagtttctggtacccacaatttagctct

SEQ ID NO: 397822 - DNA, 201 bp, Homo sapiens
ggtgagtacatgtcattataaatttatctgaacccatagaaagtacatccccaagagtgaaccctaatattaatataaactaagtagtcaccatgatgtatagtctcttgaactttttcctcctaactggagctttgtgcactgtgatcaatatcttcccaaacccctcacccacagtttctggtacccacaatttagctc

SEQ ID NO: 397823 - DNA, 201 bp, Homo sapiens
taaacttgggataagaaatgattactttgagagagaatacagatactccttaacttaccatgaggttatatcccgataaacccattgttaaatcaaaaatrcatttaatacacctaacttaccaaattcatagcttagcctagtcgaccttaaacctgctcaggacacttacattagcctgcagttgggcaaaatcatcta

SEQ ID NO: 397824 - DNA, 201 bp, Homo sapiens
tgatgatcagtgatgttggagcactttttcatatacctgtttgccatttgcatgtcttcttttgggaaatgtctatccagatcttttgctcatgttttaakctgttcattagatttttcctattgagttgtttgagttccttatatattctgattattaatcccttatcatatgggtagtttgcaaatatgttctcccatt

SEQ ID NO: 397825 - DNA, 201 bp, Homo sapiens
atttgcctaaggttggggataatggaagtgtgtaatgatttgcattgagaggttagtgttgtcagaagctatctcccaggcagctttcttcaagccattayacctgggccaataaccttgtttcccagtctcagcaaagttgatcttaatcctaacatccaaataagaattcttcctgtaacctttgtggtttttttcttc

SEQ ID NO: 397826 - DNA, 201 bp, Homo sapiens
tcccagtctcagcaaagttgatcttaatcctaacatccaaataagaattcttcctgtaacctttgtggtttttttcttcaagacatttgagtgaagaaccrccattcctctctatgacttagatgttactcatcttgttgctagaaggcagtcaggcagtggaaaatatcatctttgagaccatacaaacatcatggttct

SEQ ID NO: 397827 - DNA, 201 bp, Homo sapiens
tgttgaaactactaagctctgccattgtagtatgaaagcagttatagatggtatgtaaataagtaagtgtggctatatccaataaaacgttatttacagamacagttggcaggtggatcctagtttgtcaatcctggtaatgatcaatggttttcaaattgggatgcctataccactggatacacaaagacttcctatggg

SEQ ID NO: 397828 - DNA, 201 bp, Homo sapiens
atcatctttgagaccatacaaacatcatggttctgacctaagtggattaagatgggtgattggagaggggagtggtggtagaaccacattcacaatggggygcactttttcaggctgcgtggttatgtctcgttgtttttgacacaaacatgcaaggtaaacatgcatcttcatcatctgttggggccaaggtatatttta

SEQ ID NO: 397829 - DNA, 201 bp, Homo sapiens
ttcataagaataggaactaggttttaatctctgtatccctaggcccttaaattgtaggtgctcagtatatattaaatgaatgaatgaatgaatgaatgaatgaaaaacacatgaatgaataagtatatctttcagggccacagctcctgttgtcccctgcaacaagtcctagagggtgctgcctctgaccatattttttat

SEQ ID NO: 397830 - DNA, 201 bp, Homo sapiens
ttctttattaaatatctttttaaatcacaggtaaaagtttttagtccaaataatttaggatctcaaaaaggaccaaaaaagccgtataaggaataagacayggatttttaccctccgaaatttgaagaattatcagaacagggttacaaaatctgtagtttgtgaatttttatttagttgtggtaaaatacacataacata

SEQ ID NO: 397831 - DNA, 201 bp, Homo sapiens
ccatagtgctgggattataggcgtgagccactgtgcccagcccaatgcatatgattgacttttttttaaaaaaaaaagaatgttaaaaagcacatatacamtgatatggatgagcagtggcaatttttttcggcagggtatcagatagcaaatattttagggtttgtgacccaaatggtctctgttgaaactactaagctc

SEQ ID NO: 397832 - DNA, 201 bp, Homo sapiens
ggatcttattctggttgtcctacctatttgatcaccattcctccaacccaggagctcgtgtcaggtttgcttatatacaagggaacaactatctcagaagyatgtcacctcactcagcccagcctctctttcaaccccaaagtcacctccaaattccacttatctctcctcatgctaccccatcaatgtaaaatattgggc

SEQ ID NO: 397833 - DNA, 201 bp, Homo sapiens
tggtgagtacatgtcattataaatttatctgaacccatagaaagtacatccccaagagtgaaccctaatattaatataaactaagtagtcaccatgatgtatagtctcttgaactttttcctcctaactggagctttgtgcactgtgatcaatatcttcccaaacccctcacccacagtttctggtacccacaatttagct

SEQ ID NO: 397834 - DNA, 201 bp, Homo sapiens
cccacttcagcctcccaagtagctggggctgcaagtgcacactaccatgcctggctaactttttttgattttgtagagatggggtttcactatgttgcctrggtttatctgcaactgttagactcaagcgatcttcccacctcagcctcccatagtgctgggattataggcgtgagccactgtgcccagcccaatgcatat

SEQ ID NO: 397835 - DNA, 201 bp, Homo sapiens
ggttgaaaactatcaccaagaattatatatgcttgtgggttacagctctatagccctctacctttgatttggtactagtggaagaaaatccctcctccackgtcttagatattttatgagcgctgaaactctgaaatgtaaagattaaaggctgcccaaatatctctcctggcctgtgtgaatggattaggaaaggaatag

SEQ ID NO: 397836 - DNA, 201 bp, Homo sapiens
aattgtgaaatcataaagataggcaaaaagaggaagaaaagaacaaaggaactacaaaacaaccagaaaacaaatagcaaaatgacagtagtaagaacttrtttatcagtaataaacttgaatgtaaatggattaaattttccaatcaaaagtgatagaatggttagatggagttaaaaagaaaaacaagatccaactata

SEQ ID NO: 397837 - DNA, 201 bp, Homo sapiens
agattatggtcgactctaaatctaatgactggtatctttataggaagaggaaaggacacacacacacacacacacacacacacaccgcgcgcgcgcgcgcsaaagttgaaagcagagattggagtaatgcagctacaagccaaggaaggccaggagccactagaaaaggcaaagaaagattcttccctagagccttcagag

SEQ ID NO: 397838 - DNA, 201 bp, Homo sapiens
ggttttataaggggttttcctccttttgcttgtcacttcttcctgccatcatgtgaagaaggacatgtttgcttccccttccggcatgattgtaagttttytgaggcctccccagccatgctgaactgtgagtcaattaaatctctttcctttagaaattacccattctcaggcatgtctttattagcaacataagaacaa

SEQ ID NO: 397839 - DNA, 201 bp, Homo sapiens
cagattatggtcgactctaaatctaatgactggtatctttataggaagaggaaaggacacacacacacacacacacacacacacaccgcgcgcgcgcgcgcgaaagttgaaagcagagattggagtaatgcagctacaagccaaggaaggccaggagccactagaaaaggcaaagaaagattcttccctagagccttcaga

SEQ ID NO: 397840 - DNA, 201 bp, Homo sapiens
tcagattatggtcgactctaaatctaatgactggtatctttataggaagaggaaaggacacacacacacacacacacacacacacaccgcgcgcgcgcgcgcgaaagttgaaagcagagattggagtaatgcagctacaagccaaggaaggccaggagccactagaaaaggcaaagaaagattcttccctagagccttcag

SEQ ID NO: 397841 - DNA, 201 bp, Homo sapiens
ctatccatttcaaaactagaaatttactcatgggaaagagaaaatagtccagactatgtagcactgctttcctaatttgagagaagatataccattctgaraaacagaggaattaaatgaacatgtacatactgaaaatgagacctctagatctttttccctactgggttttcaaatgaagacaaacaggcctttatgctc

SEQ ID NO: 397842 - DNA, 201 bp, Homo sapiens
atcagattatggtcgactctaaatctaatgactggtatctttataggaagaggaaaggacacacacacacacacacacacacacacaccgcgcgcgcgcgcgcgaaagttgaaagcagagattggagtaatgcagctacaagccaaggaaggccaggagccactagaaaaggcaaagaaagattcttccctagagccttca

SEQ ID NO: 397843 - DNA, 201 bp, Homo sapiens
taagatgggatcagattatggtcgactctaaatctaatgactggtatctttataggaagaggaaaggacacacacacacacacacacacacacacaccgcrcgcgcgcgcgcgaaagttgaaagcagagattggagtaatgcagctacaagccaaggaaggccaggagccactagaaaaggcaaagaaagattcttcccta

SEQ ID NO: 397844 - DNA, 201 bp, Homo sapiens
gttaagatgggatcagattatggtcgactctaaatctaatgactggtatctttataggaagaggaaaggacacacacacacacacacacacacacacaccrcgcgcgcgcgcgcgaaagttgaaagcagagattggagtaatgcagctacaagccaaggaaggccaggagccactagaaaaggcaaagaaagattcttccc

SEQ ID NO: 397845 - DNA, 201 bp, Homo sapiens
aattaaaatgtcaacctcatctagaaaacaactttacagaaacatctgaataacgtttgtccaggaatctgggtatcatggcccaaacaaattgacaaaartgttaactattactctttccaagttacttagtttttctgttactgttattatcaatattatgtacttatttaactttctaatgtgtttaccaatatcttt

SEQ ID NO: 397846 - DNA, 201 bp, Homo sapiens
agttaagatgggatcagattatggtcgactctaaatctaatgactggtatctttataggaagaggaaaggacacacacacacacacacacacacacacaccgcgcgcgcgcgcgcgaaagttgaaagcagagattggagtaatgcagctacaagccaaggaaggccaggagccactagaaaaggcaaagaaagattcttcc

SEQ ID NO: 397847 - DNA, 201 bp, Homo sapiens
ccaaaaatgcagacttctgagggccattaggaaagacatgacagcatgacttggtggttgattgaatatgggtgatgggagggactgaatatgggtgatgrgacggggggtgggagggagggaggcgggggaagagagagagagagagagagagagagagagggagagagagaaagtcagcaatgttacaaactataactt

SEQ ID NO: 397848 - DNA, 201 bp, Homo sapiens
aatgtcaggttttgggcgaagaggcgtgggttagaatctcagctttgacacctgatagctcgggaatcacggaaaaagtacttgtcctctccaagtctcawcatcctcacttgaaagttagagataatataagatcagcaatgttgagaagcactaagacctttccaagattatgtgccattcatttcccacacatataaa

SEQ ID NO: 397849 - DNA, 201 bp, Homo sapiens
attgatcttttgttttttgagtcttatttttaagagatttattgaataatagtaataattatactaataacttagacttatgtgccaggcttcaaagtaarcatttatgtatattatcttatataattttcacaacaaccctgaagtgtagatacttttataatttccattttatagatgggaagcctgatgcttagaaaa

SEQ ID NO: 397850 - DNA, 201 bp, Homo sapiens
gttctctgtgccaatactcaagcttttgtggaaaagtttgagaaacactgaatctctttgtcttgtccaaatcatgctcttatgtttcccttaatattatrtatttaaatccatcaagtatccaaagaaactttaaaatacagaattagcaattattttataacagtaattattagttgactttttatttaaaactaaaaa

SEQ ID NO: 397851 - DNA, 201 bp, Homo sapiens
tctgttgcctattctgtcactactacaagccctgatgacaacataaatgggctccggtactcaatccccatttgttgggaagtggagtgctctagagcagrataatgatgatacctcaactggcatgcttatgtttatttgctccatacatttgtcatatactgaacccattaatgttcattcggccagggtctgactgag

SEQ ID NO: 397852 - DNA, 201 bp, Homo sapiens
caagagagtggaggacctttgtaatccatgtgtatttctctgtacctgaccatcatttttatgtttgccaacatccaagccagtctaccttactgatggtmgagattagaacctggaatatggtcttctcctttcaatgctttcccaaattttagctttccagttctttgacttcatccatactagtatccctgcctcaag

SEQ ID NO: 397853 - DNA, 201 bp, Homo sapiens
gcttcttttttttatactaacacaataggaaaagtgtaaagttttttgtttgaacaagtggttacatttattgccaatttttgacaaattatatggtttaktataggtttacaggcagtagaaaaaagttacaatattagagttcagcctacttcatttttaatatacatactccataaaaaagaaagaggagattctaga

SEQ ID NO: 397854 - DNA, 201 bp, Homo sapiens
aatatcacttttagtaacatagtggaaatgaataagaaaattgcagcatgttcatacctgttaaacatcattcattaaaatgaatgaaaaaaaaaacttamgaatgaactggagctgtatgttttaacatggataaatctcagaagcaatgatactgagcaaaaaaaaaaaaaagcagctacagaagatgtcatacaatat

SEQ ID NO: 397855 - DNA, 201 bp, Homo sapiens
acataaagtttgaaagcaaggaaagtataaagggctttcaagtaaagatagtgggtcaaacatgtaagttcactctcaagtctaatgaaaatgatagtgarggaatttattttaaaagacataaacccacaaggtcatagaaacgtgagtatgcaaaccatcaataaagttttggaggcaggaaagcagatggacaagagg

SEQ ID NO: 397856 - DNA, 201 bp, Homo sapiens
agttttctagtggtgccatggcaggaggactagcctggtaccagttattccatcttttgtctgaaactagtagattacctcttactaacatctctacccayttcaaagagagatgtgtacaagtttgctatgtttattttttaatagaatgaaatcactattttaagatatatttgtaccttctgttgtactatcactgcc

SEQ ID NO: 397857 - DNA, 201 bp, Homo sapiens
ctggactcaagaaatccacccacctcagcctcccaacgtgctaggattacaggcgtgagccaccacgtacggctagaatcttacttttaagttttgttagrgtagatctagagcagtgcagtccaatccaaatttttgcaatgatggaaatgttttataactgtactttccaatatagtggccattagtcatatttggcta

SEQ ID NO: 397858 - DNA, 201 bp, Homo sapiens
atacaaagtcatttttgccatgtaaggtaacagtctcaggttccaggaattagtacatagacatctttaggacgcccttattctgtctattcacattattyatatcattttccttcccccacctttcccactctgttgttttggatgttatacattctgtttcttttccttggtattgatattatttatgtgtttaacagt

SEQ ID NO: 397859 - DNA, 201 bp, Homo sapiens
aggttgcttccaagtcttcactatcctgaatggtgctgcagtaaacatgggagtacaggtatctcttcgatattctgatttcctttcctttggataaatayacacacacacacacacacacacacacacacacacacacacacacacacacacatatatgcctagcagtagaattgctagatcatatggtagttccatttt

SEQ ID NO: 397860 - DNA, 201 bp, Homo sapiens
tgcatgaaccaatcagttagtgaatgggaaagtaggaaaggacccataagcattagccacataattggccattggagcttacccagctcttccctatggtrcctcctttgaccatcctctttgttcctcaaagatgcttcataagaataggaactaggttttaatctctgtatccctaggcccttaaattgtaggtgctca

SEQ ID NO: 397861 - DNA, 201 bp, Homo sapiens
tgcttttatatgtgaattcatgtatgtgtacatatttgggtttttttaggtaggcaaatatatatgtgtgtgtgtgtgtgtgtgtgtgtgtgtgtgtgtgkaacaaatatgttctcttttgttaacattcctctgtctaaatatgaatattaaatatccacgtggagctaaaacattgggagcataaacatctgaaaagct

SEQ ID NO: 397862 - DNA, 201 bp, Homo sapiens
taaacaagattcaatttttaaatcaataatgtttggcttacattagaatatggaaaaatctgtaatctgcataaacttttcaatctttaagggaactctakaggttacttaaggggaacaaaaggaagatacttccatttggtattgttggtttattcatttattttttgagacagagtcttgctctgtcacccaggctgg

SEQ ID NO: 397863 - DNA, 201 bp, Homo sapiens
aaaagtctcaaatgacacaaaatagctgtctgcttttatatgtgaattcatgtatgtgtacatatttgggtttttttaggtaggcaaatatatatgtgtgtgtgtgtgtgtgtgtgtgtgtgtgtgtgtgtaacaaatatgttctcttttgttaacattcctctgtctaaatatgaatattaaatatccacgtggagctaa

SEQ ID NO: 397864 - DNA, 201 bp, Homo sapiens
aggggcgggactggaacagcagagtctcccattggtcagtcggtgatatatccggccaatggtgagcgccgttactagaagggctccaggatggaggccgrcctgacttctccgcctcggtgggctgggtcggcggctggagcattacccctactgcgggtcccgctgctggcagcgctggaaactgggtggacggcatgg

SEQ ID NO: 397865 - DNA, 201 bp, Homo sapiens
tatgtaaaagtctcaaatgacacaaaatagctgtctgcttttatatgtgaattcatgtatgtgtacatatttgggtttttttaggtaggcaaatatatatrtgtgtgtgtgtgtgtgtgtgtgtgtgtgtgtgtgtaacaaatatgttctcttttgttaacattcctctgtctaaatatgaatattaaatatccacgtgga

SEQ ID NO: 397866 - DNA, 201 bp, Homo sapiens
tttttttttttttgctatttaaagaagtttccaaatatattaggaaacttgatttggtgttacttttattactggtttctcatttctaactttgtggcatrgtattagtttcctattgctgctgtcagaaattactgcaaatttagtggcttaaaacaacacagatttattatcttacagttctagaggtcagatagccaa

SEQ ID NO: 397867 - DNA, 201 bp, Homo sapiens
gatatgtaaaagtctcaaatgacacaaaatagctgtctgcttttatatgtgaattcatgtatgtgtacatatttgggtttttttaggtaggcaaatatatrtgtgtgtgtgtgtgtgtgtgtgtgtgtgtgtgtgtgtaacaaatatgttctcttttgttaacattcctctgtctaaatatgaatattaaatatccacgtg

SEQ ID NO: 397868 - DNA, 201 bp, Homo sapiens
ataagttttaattatcttataatttccattctgtcttctttgacccatgaattattttgaactgtgtgggttttgttatgtgtgtgtgtgtgtgtgtgtgkacacatgcacgcatgtgtgtgtttaagagatgaggtctcgctgtgttgccctggcaggcctccaactccagggcttaagcaatcctcctacttcagcctc

SEQ ID NO: 397869 - DNA, 201 bp, Homo sapiens
ttgtcaattttggcttgtgttgccattgcctttggtgttttagtcataaagtcgttgcccatgcctatgtcttgaatggtattgcctaggttttcttctarggtttttatggttttaggtcttatgcttaagtctaatccatcttgagttaatttctgtacaaggtgtaaggaaggggtccagtttcagttttctgcatat

SEQ ID NO: 397870 - DNA, 201 bp, Homo sapiens
gatttgcatttctctaatgaccagtgatgatgaactttttttatatatgtttgttggctgcataaatgtcttcttttgagaagtgtctgttcatatccttygcccactttttgatgaggtttttgtttttttcttgtaaatttgtttaagttccttgtagattctggttattagacctttgtcagatggatagattggaaa

SEQ ID NO: 397871 - DNA, 201 bp, Homo sapiens
attgatgggcatttgggttggttccaagtctttgctattgtgaatagtgctgcagtaaacatacgtgtgcatgtgtctttatagtagaatgatttataatsctttgagtatatacacagtaatgggattgctgggtcaaatggcatttctagttctagatccttgaggaattgccacactgtcttccacaatggttgaact

SEQ ID NO: 397872 - DNA, 201 bp, Homo sapiens
gcaaaggacatgaactcatgcttttttatggctgcatagtattccatggtatactgcatagtattccatggtatactgcatagtattccatggtatactgcataaaatggtaccacattttctttatccagtctatcattgatgggcatttgggttggttccaagtctttgctattgtgaatagtgctgcagtaaacatac

SEQ ID NO: 397873 - DNA, 201 bp, Homo sapiens
tgcaaaggacatgaactcatgcttttttatggctgcatagtattccatggtatactgcatagtattccatggtatactgcatagtattccatggtatactgcataaaatggtaccacattttctttatccagtctatcattgatgggcatttgggttggttccaagtctttgctattgtgaatagtgctgcagtaaacata

SEQ ID NO: 397874 - DNA, 201 bp, Homo sapiens
ctcttgtgccctacctcacatccttttgtatttttactccagccttgctgcagcaaccagctgctaacaggtgtaacctcattacagctctacagaatatrttttgctttcttctctgacactgtggcatgggatgtctgtggggaatcaacttggaagtgtgagagggttaacataccagataaaccttgatacctggta

SEQ ID NO: 397875 - DNA, 201 bp, Homo sapiens
gtttaacctttataaacatattgtatgagaatgaattttaaaaagaagaaaattatgaaatatgccataatgatctgaccctgttattttaggtatttttwaaataaagggactctttgtatgtagaaaaaagactggaaggaaacataaatacaaaattataataattatttgggtggtgagttgatttttattttgttg

SEQ ID NO: 397876 - DNA, 201 bp, Homo sapiens
gtattctgcactaagtgtgccccaagtcctatgcatccaatcatattgttagcatagaaattcaattatacagaaagagaaataatacagtagtaccaaasgaaagatccatttctgagggaaggtgtggaaagatcttctgcttaaaataagtgtcataaatctaggtatttgcttaacttgatttcttttttatttaaa

SEQ ID NO: 397877 - DNA, 201 bp, Homo sapiens
cctaaatttgttgtatggcatgtaattcattttgaaaagggaacagtagattttgaaaccatcaaaattcttgagaaacaggatttggatgcactcttggytatcatgaaagcaacattacaggttattgaaccggaagaatttccccagagatcttatataacttgcctgactcacttgccatattgcagtgttcagtca

SEQ ID NO: 397878 - DNA, 201 bp, Homo sapiens
cattcactagctgtgtgatttgtctatttatagtttgtttcttcctactagaatctaagcttcatgaaagcaggactgtgttttggtccctgccatctctmgaggatttagaacagtacctggctcagagttcatgctcaataatattgagtgattgtgtacatgaataagtgaaagaaagagggcttcagcctaggtctt

SEQ ID NO: 397879 - DNA, 201 bp, Homo sapiens
gtcatgtattctctgtactgttggttgtgcatcactggagactcagccaagatatcttttggtcctaatgttcctaactttatctccttttttttttttttggtagagttaggaattcctagtttaggtgaaaaagaatgtgtgataataaaataagcattcaacatagtagtttagagaaaacaaagatagaaatttgga

SEQ ID NO: 397880 - DNA, 201 bp, Homo sapiens
acccatccctctggcttcagttgctgtatgtgatgatgattttcagaccttatctccacccagacctctctcttgagctttaaatcagtgtatccaactgctactcagtatttccaccaagatcttctacagaactctcaaattcaacattttttacatgtttaaaattaaatgaattttgttgtttcttcccaacagaca

SEQ ID NO: 397881 - DNA, 201 bp, Homo sapiens
taaagatcagacaatttcagggactagatgctaagctcagtattacaggaagatacagaactctgtgtagcagaagtataaagacatacaagtagagagcrttgctttaaacaaaagtttatgactggagctcattgagtggttagagttatagatgtaatcctgttagtttccatcgctgagataaagttaaaataatga

SEQ ID NO: 397882 - DNA, 201 bp, Homo sapiens
ggatgtttagttcactaaggcaggaaaaaaagaactctaaagtatttttaaattcttttcattaaaacaatcagactgagaatatttgcttttcaaaggarttggcttcatttatctaaaaaatgctatcatatggattagctgattttccagtgacgcagaaaagatgacatatggtacagagtagcatatattcaagtg

SEQ ID NO: 397883 - DNA, 201 bp, Homo sapiens
tctctcgaggatttagaacagtacctggctcagagttcatgctcaataatattgagtgattgtgtacatgaataagtgaaagaaagagggcttcagcctasgtcttttggtgggttccttctttacccttgattctccgtctcctttgttcttatttcccagtgatctttttgcttccctcccccacctcctttgagaatt

SEQ ID NO: 397884 - DNA, 201 bp, Homo sapiens
tgctactgtatcactttatatcctaggttatcctcttaatcccaccttctccaatcccataataagaagagaaaagcttgcactgtcttcataatggtggygggggtgggggcaatagagtcctgagatccattttaagtaaggggcacttgcctatctgccttcccacagtatccttgcctcttttgagaaacaacacca

SEQ ID NO: 397885 - DNA, 201 bp, Homo sapiens
ttcattcatttcgcaaatatgtgttaagcaccgattatgtgctagacattgttgtaggccctgaattgtgggagacagaaaggcataaagggcaggcaaamacctattttcatacagccagcataatacatacacttttaccctctgccctagcaatctaagttctagtagaaatctactaaaaattatctggtgaaaata

SEQ ID NO: 397886 - DNA, 201 bp, Homo sapiens
tgcctggaatgttaacagtgaactatacatattcctggcccttggagtttatattctagtcaagccatataaacaaatacataaataataaggattatgaratatgataagtgctacaaagtaaactgggtgttgttcttatgtctggttggaaagatcactttacatagattagccagggaagttctctttaagttattg

SEQ ID NO: 397887 - DNA, 201 bp, Homo sapiens
tgtaagtcagggaccgtctgtatagtaaaaaagagggctagaattgagtccttgaagcatttcagtgttctgaagtttggccaagaaggagctaacagttkgataaaaagatatttggatattttacagacaacttaaatttggtatgtttaaagcagaactctttttctgtttcctaccatggttaatggcattatctgt

SEQ ID NO: 397888 - DNA, 201 bp, Homo sapiens
taaataagctatggttttgttcccacagaagactgaaaaagaacccagttacatgggcctaagactgactcctgagccttaacttgctcttgaaaatagtraactttctaacaatgaagcactgttgaatttattttaaattatatttagattttgtcttggcatgtgttttgaacttcagtttgaacatagttatatatg

SEQ ID NO: 397889 - DNA, 201 bp, Homo sapiens
tttgttacataagtaaatgtgtgtctggagattttgatgtgcagattatttaatcacccaagtattcagcctagtaccccattagttatttttcctgatcytctccctcctcccatcctccaccctccaataggcttcagtgtgtgttgttcctctctaggtgtccatgtgttctcataatttagctcccacttataagtg

SEQ ID NO: 397890 - DNA, 201 bp, Homo sapiens
tcattgaaaatgaagctaaaagaagtcccctgacagtaaatagactaggcaatatttattataatacattcagtatttaagttctattacattcttatatyaatggatgaattttataaacttatgcaaaaccagtaagctttagaaaacatataacagagtttctccaacctctttaactactttggaatttttttaatg

SEQ ID NO: 397891 - DNA, 201 bp, Homo sapiens
cttaagagtatcactcattgcctggggactatgggtaggataaggtgggtgtttccatgtaaacagactggggaacttttataggtgatggaaatgttctrtctgttgattgtggtgctaattacaggattgtaaatatttttgttagaagttgtggaattgcacacttgaaatggctcacagtattttgtaaattatacc

SEQ ID NO: 397892 - DNA, 201 bp, Homo sapiens
tgtaatcacatgagcacatatatcccatcacctttgccgtgttcttataattagaattcatgggtcctaccctcactcaaggagaagagataatacaaatrtatgagtaccaggaggtggtggttgtgtaggctaccttaagagtatcactcattgcctggggactatgggtaggataaggtgggtgtttccatgtaaaca

SEQ ID NO: 397893 - DNA, 201 bp, Homo sapiens
agatgagcaccataatcttatataatgtaatcacatgagcacatatatcccatcacctttgccgtgttcttataattagaattcatgggtcctaccctcaytcaaggagaagagataatacaaatatatgagtaccaggaggtggtggttgtgtaggctaccttaagagtatcactcattgcctggggactatgggtagga

SEQ ID NO: 397894 - DNA, 201 bp, Homo sapiens
tatatttttttgcctttttttttgtacaaatttctatcatttactaagctatgaagtacttgagaggagaactgtgtcacactcattctatacctgatttyagaaccccacaagtatttattagcatataactgtgggatagtcttattttttaagattcacaaatatattcttcatgagaacacgttagtttttattaag

SEQ ID NO: 397895 - DNA, 201 bp, Homo sapiens
atttcttgccaatggtgtttcccaatatggccacattttccttacagccagccagggggaaaaatactccagccaagatgagcaccataatcttatataaygtaatcacatgagcacatatatcccatcacctttgccgtgttcttataattagaattcatgggtcctaccctcactcaaggagaagagataatacaaata

SEQ ID NO: 397896 - DNA, 201 bp, Homo sapiens
tgttgaagccctaactctaaatatggtggtatttagaaatatgggacctttgagaggtaattagagttagatgaggtcatgagggtgaggccttaatgatratattagtgcccgtaggagaagaggcaccagagagctgtactctctccctgagcatgcacaaaaaaagaagtcatatgggtacacattgagaagatggct

SEQ ID NO: 397897 - DNA, 201 bp, Homo sapiens
taaaagtctcaaatgacacaaaatagctgtctgcttttatatgtgaattcatgtatgtgtacatatttgggtttttttaggtaggcaaatatatatgtgtrtgtgtgtgtgtgtgtgtgtgtgtgtgtgtgtaacaaatatgttctcttttgttaacattcctctgtctaaatatgaatattaaatatccacgtggagcta

SEQ ID NO: 397898 - DNA, 201 bp, Homo sapiens
cctcccaaagtgctgagattacaagcacgagctactgtgcccagccctaaaatctgtacttttagtaaacatctccgatgcctgtatcctttcttttttttcttgaaaacattgcatgatagtttacactgtaataacgaccactgcttacttgcctatcctgtaaaatatttgtgcctttatagtcctttgaagtttatt

SEQ ID NO: 397899 - DNA, 201 bp, Homo sapiens
gggatgaaatagaagccaagagtgtacatatatactttattttttagagatggggatcttgctctgtggctcaggctggtctcaaactcctggcctcaagyaatcctcctgcctcagcctcttaagaagttgggactacagacacacatcaccatgcctataagtacactttacttttttctttctttcttttttaaattt

SEQ ID NO: 397900 - DNA, 201 bp, Homo sapiens
ttgattactgaggctttgtaacaagtcttgaaataaatcattttgagtctgccaacttctttcccaaaatttttgtcttggttagtcagggcccatataaygtttttacactttaaatatgtgcagtttattgtacatcagttatacctcaataaagctgtaaaagaataacatagtcatcttggaaaaataagttactga

SEQ ID NO: 397901 - DNA, 201 bp, Homo sapiens
aagttgttcatcatcttctccagccattgctgttgtcagtttcattacatttgagccattctaattggtgtgttttgatatctcattgtggttttaatttytatgtctctaatgactaatgacctagatcatcttttcatgaacttatttgccatctgtatatcttctttggtgtacttttatatctttttgcccagaatt

SEQ ID NO: 397902 - DNA, 201 bp, Homo sapiens
tgtgttcttggcacttttgttgaaaatgagttcactgtaggtgtatggatttatttatgggttctctattctgttccactgacctatgtatctgttgttakgccagtaccatgccattttggttattatatctctgtagtataatttgaaatcaagtaacatgattcctccagttttgttcatcttgcttagaatagcttt

SEQ ID NO: 397903 - DNA, 201 bp, Homo sapiens
aaatattaccagagtactttccaaaaagaccttagcagttcacattctcaccaacaatgtaggtgagtgtctttttccccacagctttattagcactaggkaactttgttttatattttgtgtattatctctgacggtttttaatccatctgtcatctatcttcctgatgctcagtttatgtgtacactaggcttactctt

SEQ ID NO: 397904 - DNA, 201 bp, Homo sapiens
ctgtaggttgcctgttcactctgatggtagtttcttttgctgtgcagaagctctttagtttaactagatcccatttgtcaattttggcttttgttgccatkgcttttggtgtttcagacatgaagtccttgcccatacctatgtcctgaatggtattgcctaggttttcttgtagggtttttatggttttaggtctaacat

SEQ ID NO: 397905 - DNA, 201 bp, Homo sapiens
tactaccaagacttgtcagaagtaggtccatatccccacaaggctcgctgattcctttctcgggagttgacattccaagaccccgttgagctcaatttaaraaacgtggcaataatcatggtgttactgtgtaggattcgtgccaagtagttgagcgggttgtttggggagtaaggaggcggtgctgtccattgaaatcac

SEQ ID NO: 397906 - DNA, 201 bp, Homo sapiens
taataaacattttttatgagaaccctaaaatacatacaaagcagaatatagttggaggaggcagaaaggccctgatccagttaagctttacttatcacatrtactcattaaaatagaagattaatgcctcagaagagaaataaaaattactttttaggtatattagaccatacctgtctatcattaacactgttaataatt

SEQ ID NO: 397907 - DNA, 201 bp, Homo sapiens
ggtacagttacaggctgatttttattgatcattccgtactttagaaaactggctaagaaggcctttggaatatactgcttctgaagttttttaactcttakaattctaagaatattgtctcaagttttgttgctgaaatggcaaaaatgtttcttttttattactatcaatattccaatttaaaatttaaataaggagaac

SEQ ID NO: 397908 - DNA, 201 bp, Homo sapiens
ttctcaaactattccttgttatctgtcagctctcacatctttatgttcctccagatttctttcttcagctcacccatccctctggcttcagttgctgtatrtgatgatgattttcagaccttatctccacccagacctctctcttgagctttaaatcagtgtatccaactgctactcagtatttccaccaagatcttctac

SEQ ID NO: 397909 - DNA, 201 bp, Homo sapiens
tgagactggaagccattgtagggttttgaaaagagtagtcatatgttctgaggtatatttaacaggatcactatggctgctgcattgcaaatagacttagrggaacataggcaaaatatggagacaggaagctcttgtaataatttaggcaagagattaattgtgacttgggccagagtaacagtgggagtggaaagaaga

SEQ ID NO: 397910 - DNA, 201 bp, Homo sapiens
atttagtcacatatacaaagtcatttttgccatgtaaggtaacagtctcaggttccaggaattagtacatagacatctttaggacgcccttattctgtctrttcacattattcatatcattttccttcccccacctttcccactctgttgttttggatgttatacattctgtttcttttccttggtattgatattatttat

SEQ ID NO: 397911 - DNA, 201 bp, Homo sapiens
atgctcagatgtttgaaaaacagcaaggaagtcagtgtgattgggatagaatgagagagaaattaatagataaggttagagagttaataggattgtgaatstggggggccttgtaggccattttaaagactctggcttttactgtgagactggaagccattgtagggttttgaaaagagtagtcatatgttctgaggtata

SEQ ID NO: 397912 - DNA, 201 bp, Homo sapiens
ccttttggctctctttcggttctcatttaagacctggaactcctacctgccttttgccctgtagatgaggaattttcacctggctcctttgtctatcagcyacttttgttagtcttatgaccagtgactgctggagatagagcacctggtatatgtagcatgttttctgaaatattttgctttaggttatcaattaatgaa

SEQ ID NO: 397913 - DNA, 201 bp, Homo sapiens
ggcaacaagagcgaaactccgtctcaaaaaagaaaagaaaagaaaagaaatacctgaaactgggtaatttataaaggaaaaaggtttaattgactcacagytccgcatagctggggaggcctcaggaaatttacaatcatggcagaaggcgaaggggaggcaagcaccttctttgcgtggcagcgggagagagaataatga

SEQ ID NO: 397914 - DNA, 201 bp, Homo sapiens
catgctaaatgccactgaattgtacacttcaaaatggtaaattttatgttatgtggattttccctcaagtttttaagaaagaataactagttacactagtwtgtaggatgaatgctgtcaatatcagtgtctttacatacagtatatttttgaaaatgtttgctatggagtcagagtaccttattccagaattagagaaag

SEQ ID NO: 397915 - DNA, 201 bp, Homo sapiens
ccagtcatagagagagacatggaaggagctgtttcagatccaagacacatacaaaagaagttaaaacttttctgagataaagtgaattactcatagcattsacccaaaatagtccatttaagcccctagaactcttaatccagcaactggaatactaaatcctatatggctataaaatgtactttcacttcaacagggctt

SEQ ID NO: 397916 - DNA, 201 bp, Homo sapiens
ttgaacccaggaggcagaggttgcagtgagccgagattgtgccaccacactctagcctgggcaacagaaggagactctgtctcaaaaaaaaaaaaaaaaaatttactatgtaattgcaaccttagctaattattagaattaagaatgaatcagtatctgtggtcctacttaggaagctttggtagcaggatcgcttgagct

SEQ ID NO: 397917 - DNA, 201 bp, Homo sapiens
catgtaattcaatctgtaagttcaaggacattggaatcaatataatttatggttctttcttctcctcaacatgaataacttcaaattcagtgaagtgttcrgcttttcttacccaaatggtatacttatccgattcacttcaatagttgcctattttccctttcagaaatgtctgttctctcaccaggagactaaaacatt

SEQ ID NO: 397918 - DNA, 201 bp, Homo sapiens
agcagcaaataaaaaagaagtagactatgaagcaggggatattccaacagaatgggaaggtaagtttctgcttttagtagaatctcatgggaggtaagttrtataacagtatacaaattcaataagagcatatatagttatatactgtttctctttgcaaaaaagttttagttctgaatgtttgaaactttgtttttttaa

SEQ ID NO: 397919 - DNA, 201 bp, Homo sapiens
tggactcagtcccaaacttgcttcaagataggagcaggcactaggagcgggagcagacacttctgagcctgttggggcaggaggagccttctcagtctccygagagtgcacagatgcccggctctgtaactgtggcttgggtggctgtagctgcacctggcagggtgtggctcctgcctgctccaggagtgggaggcccgg

SEQ ID NO: 397920 - DNA, 201 bp, Homo sapiens
ttgcttcctctaagatatatacatgtaagtcagaagaagttgaacttgctgttgattattaaaatattttttattggccattagtgctctataggattaaytggttgctctttttctgtacattaaatctagatttatttatttatctatttatttatttattttttgagatggagtctcactctgtagcccaagctggag

SEQ ID NO: 397921 - DNA, 201 bp, Homo sapiens
tagccctcagcagataggaggccctggagtgggtagttcctctctgcgggtggtcatcccaacatctgcagctgtcaacagagaggaggccctggaatggmtagctcctctctgcagctgatcaccccgatgtctgtagctctcagcagagaggagttcctggagtgggtagttcctctttgcagcttgttgtcctggtgt

SEQ ID NO: 397922 - DNA, 201 bp, Homo sapiens
acacacacacacacacacacacacacacgcactcacatacacacaaataggcataacttttgattttttaaatccttgggagaccttacatgaagttgatygacctaagagtaggaatagaaagttattttttttgttgcagatatgcctgtagtatatatgcatttagtagtgctactgagaacgatagacctgtctatc

SEQ ID NO: 397923 - DNA, 201 bp, Homo sapiens
atggtttttagccatcattctgttaatatggagtatcacatttattgatttgtgtataatgaactgttcttgaatgcttgggataaatctcaacttgatcwtgtgaatgatccttttaatatgatgctgaatttggtttattagtattttgttgaggaattttgcatttgtgttcatcaggaattggcctgtgttttcttt

SEQ ID NO: 397924 - DNA, 201 bp, Homo sapiens
aaaaaaaatgcattgtagaattgagttttgtatagggatggtgttagaattgtggtacaataaaactattataagatcattctcttccttcttccagaaargatgtaagattgaagactcaaagatagaggcataaaattgcagtgaaaggaggaatgtaaagtcagggtggggaaaaagtagaaccagatatgaggcact

SEQ ID NO: 397925 - DNA, 201 bp, Homo sapiens
gcacttgtggtcatacccctaagcttcttggtagtcagtccagaaaaggaaacagttggtcgcacaactcatactgctcaatttatattccaaacagtatragagcttgttaattttcctacactcttaataacactgggtctgtgttgttaatctttcctggtcctataagagaaaaattatatttgttattttctcttt

SEQ ID NO: 397926 - DNA, 201 bp, Homo sapiens
ggtttttaattcagtaaaaccagtttttctggggcgaatatgatagtgttcgttattcaacctttttgttgatttggctttattcaggaacatatttgtgrtagagaccactagcttcctaccaaaatcactttttccttcttcgtggatacacaaactacctttagcagctccatttgaaattaagtgtgctatgtgact

SEQ ID NO: 397927 - DNA, 201 bp, Homo sapiens
aagatggattttagtgcacatgatcatttaagaacaattgttattgcagtaatacaggcacatggtgcaggtctgaagtgaagggtagtagttgagctgcmaaaaatgcagacttctgagggccattaggaaagacatgacagcatgacttggtggttgattgaatatgggtgatgggagggactgaatatgggtgatgag

SEQ ID NO: 397928 - DNA, 201 bp, Homo sapiens
taattgaaaattttcttaatgccattaatatgtgttgcagtctgatgcatttataaagtttcacctgtttttcttttatttatttattttaaattaaaaamatgtttttaaaaatgtttgtgggtacatagtaggtgtatatatttatggggtacatgagattatgtatacaggcatgcaatgtgaaataagcacatcatg

SEQ ID NO: 397929 - DNA, 201 bp, Homo sapiens
atagattattgaccattactaccttcctgaattcaaaccctgtgtttcaattaaatataatattgtttagtattaaataaaacaactgtgtactgttttayttaataatactcattgagtccaccaatgtcaattatttttgttgtattaggacttattgaacctacacatatattggattaaatgtttttgtcaccaagt

SEQ ID NO: 397930 - DNA, 201 bp, Homo sapiens
agcaattcataaggtattaaatgtagaagtagaatatataaatgttatgtacatttttaaattattttatgtatttattaaaatagcatttagctatgttrcccaggctggtcttgaattacttggctcaagtaatcctcctgcctttatctttaatgttttcacatgagaggattgactttgtacttgtagttttctata

SEQ ID NO: 397931 - DNA, 201 bp, Homo sapiens
aagagaaatttttttaaaaaagaaaatgtggtacatatataaaatggagtactattaagccataaaaaagaatgagatcctgtcatttgcaacaacgtagmtggaactagaggacatttattaagtgaaataagccaggcacagaaagacaaacttcatatattctcacttatttgtgggagctaaaaattaaacaattga

SEQ ID NO: 397932 - DNA, 201 bp, Homo sapiens
aaatctaccatcctcctaaggcaattagctcaacagcagctagctttttctttttttaaagtttggaaaaatatactgttatatctacagtctttaaatayatagattattgaccattactaccttcctgaattcaaaccctgtgtttcaattaaatataatattgtttagtattaaataaaacaactgtgtactgtttta

SEQ ID NO: 397933 - DNA, 201 bp, Homo sapiens
ttgtggctgagctggcactcaaaccacaagattcagtccttcccaatgtccctccccatttcaaaggccaccgccaccccaggccacaaggaagtactatwagactacccctgatgtttcttttaggcccaaggtctcttaagtctgcttttgttaaatgctgcctggcctaggactcacccttcaggacagtgggctccc

SEQ ID NO: 397934 - DNA, 201 bp, Homo sapiens
tttggtatgttatgtttccatttttgttttttgaaaaatttttttatttaaaaatatttttagtttttaatttttgtgggtacatagtaaatgcatatatktataggttacatgagatattttgatatagctgtgcaataaataataatcaaatcaggggtattcatcacctcaagcattcatctgtactgtgaacaattc

SEQ ID NO: 397935 - DNA, 201 bp, Homo sapiens
attgtggctgagctggcactcaaaccacaagattcagtccttcccaatgtccctccccatttcaaaggccaccgccaccccaggccacaaggaagtactaytagactacccctgatgtttcttttaggcccaaggtctcttaagtctgcttttgttaaatgctgcctggcctaggactcacccttcaggacagtgggctcc

SEQ ID NO: 397936 - DNA, 201 bp, Homo sapiens
gataacagtacggtctttgactcttttatggtctgtgattaatgaccaagtatttgatttctatgaaaccatttgggtctagaagtcaatcacataatcarctgtatctgctacatttcgaatctgaaaataagtttgggcttggcccaagcttttcacatactataattttataattctctaaattctagtaatatttgc

SEQ ID NO: 397937 - DNA, 201 bp, Homo sapiens
tgctgtctttctgggtgtagtttaagaccttttatcttttcagatctgaaaagctaaatcatattatataaagcatttcagaataaccaagcattttgatrtaatattggattttctgtgatagaacaagttgagattccttataggacacttgtaaatatgaggaagctaataagattttaggtaattcattgaactagt

SEQ ID NO: 397938 - DNA, 201 bp, Homo sapiens
catgtggatatctagttttcccaataccatttatttgaagagattatcttttcttcactgtgtgttcttggcataattgtcaaaactcacttgtcctcatktgtgggtttattactaggttctgtcttctgttccaatagtttatatgtctggttttatactggtaccatactgttttgattactgtagcttttaaacgta

SEQ ID NO: 397939 - DNA, 201 bp, Homo sapiens
tctgtttgtgcttgagaaaaatgtattatctattttgctatttggggttgaatgttctgtaaatgtcagttagcccaagctggttgatagagttgttcaarctttgtatattcacactgattttttttgtacttattctatcaattattgaaaaaagtatgttacagtctctgaatacaagtttacatttgtcttttactc

SEQ ID NO: 397940 - DNA, 201 bp, Homo sapiens
cagttaacattataatccatggggaaaaactgaaaacgtttccactgagatctggtgcaaggcaaggacatgcactcctgccacttctgttcagcgtagtrctagaagtactagcaagatcaatcagataagaaacagaaataaaaggcatccaaatcagaaaagaagtagaattatctctatctgtagaaaacatgatcc

SEQ ID NO: 397941 - DNA, 201 bp, Homo sapiens
ccttaatatcatcagatatccagccattcacattttcttggttatcgtataatgttataatgttcttgtttattggctgatctgtttacttttttttttttaacagtttatgtctctatagattctccctttatctttttaaaagctgttcttctgattcctgattaccctccttagatgtcttttgcagcatagccctca

SEQ ID NO: 397942 - DNA, 201 bp, Homo sapiens
aaaggactgaattttgttaaatgcgtttcctgcatctattgagatggtcatacagtttttgtccttcattttgttgatttggtatatcacattgatttgtrtatgttatctcaattttttgaagtgttacttatacgtttataaaagttgtgagccaagaaaaatttgtgctgaggtttttatgaaaacatttactgccaa

SEQ ID NO: 397943 - DNA, 201 bp, Homo sapiens
ttggaattcacaagtacttgaagctaaatggagaccatttataaatactaaactttagaggagcctggagccagaacattaaagatgaaatggcatatttktgtgtgtgtgtgtgtgtgtgtgtgtgtgtgtgtgtgtgtgtgtgtgtgttcaacctgccttttttctacctggattcataacatttttaaagcaaagttc

SEQ ID NO: 397944 - DNA, 201 bp, Homo sapiens
tttctttaatcagaacaatatttaagttttaaaaaggaaattaagaatgctagctgaatagtttctttttctcagtaactgactgacagatggtgcaaagsacatgacaaagaagaggcccatcataataactacctcatttcaattcagcaaatatttataaagtgctgttgtgctctttttatcagataattaatgctt

SEQ ID NO: 397945 - DNA, 201 bp, Homo sapiens
aagagtaggagactttagtacccccacattcaaaaatgggtagattaatcagacagagaattaataaggaaatactggacttgaattgcacttttgaccamttggaactaacagacatcttcagaactttgcatccaacaacaacagaatacacattttgctctagcacacatgcatagaacattcttcaggatagacctt

SEQ ID NO: 397946 - DNA, 201 bp, Homo sapiens
aacggaaataacagtacctacttagcctcacaaagtatttttgctactcaagagagacaaattggataacgtagcatttaagagaatgggatttaatgtcraaatcagtttgacttaattcacagagaccttttacttggtcatttttaaaaatttatcactgatttgtagttttcagcatagagatcatgatatgttttg

SEQ ID NO: 397947 - DNA, 201 bp, Homo sapiens
gtttattttttaatagaatgaaatcactattttaagatatatttgtaccttctgttgtactatcactgcccagtagccagttctttcccaacctttacaayagcccattgaagaagacaacattatctccatttcacacaacatgaaagtgagacacagggaagttaaataatattcatagagtcacacagctggtaaatg

SEQ ID NO: 397948 - DNA, 201 bp, Homo sapiens
gtttgctattagttggtttttttagattctatttttaaaatacagtaaaattaacttttaaaattggtgtatagttctataaatttgaacacatgtgattsatgtaaccaacaccaaaatcaggatacagaacagttccgtcaccctgaataactccctcatgctacctttttgtagttacaatctctcctcatccctaac

SEQ ID NO: 397949 - DNA, 201 bp, Homo sapiens
cgggtcccgctgctggcagcgctggaaactgggtggacggcatgggttggtctcaggatttgttccgcgccttgtggagatcgctgtcaagggaagtgaargagcacgtgggcacggaccaattcgggaacaaatactactacatcccgcagtacaagaactggagaggtgaggtggcggcgtgggcagcgattgcgtggt

SEQ ID NO: 397950 - DNA, 201 bp, Homo sapiens
ttgggccagtgggaatagccttctccccatttgaccttgcaagaagagagccaacaaaataaattctctaatgttactgtccttctggtctcctgttggtmttgcctattagctggatcccactggaagccagagggcaagggaggctgttgatgtaatttatgtaggttacctttctggggcaggggtcagaagggtgga

SEQ ID NO: 397951 - DNA, 201 bp, Homo sapiens
gtgatccgtctgcctcggcctcccaaagtgctgggattacaggcgtgagccactgcacccagccaatagtgtatttttaatggctggcagagaataagacmactctctttctctcttgctctgttttttttttttttttttttttttttttggtaaagggcttttaaaacaatatttaaaaaacaaaaccaagatggtatt

SEQ ID NO: 397952 - DNA, 201 bp, Homo sapiens
aaagggagtgctttgactaactagtacagttatgtgtcacttaatgatggggataaattctgagaaatgtgttattaggaaattttgtcagattgtatttmcacaaaccaaatgcacctaggctatagggtatagcctgttgcccctgtacaacgtgatactgtacagaatgctgtaggcacttgtaacacaacggtattt

SEQ ID NO: 397953 - DNA, 201 bp, Homo sapiens
atggctaaagggagtgctttgactaactagtacagttatgtgtcacttaatgatggggataaattctgagaaatgtgttattaggaaattttgtcagattrtatttacacaaaccaaatgcacctaggctatagggtatagcctgttgcccctgtacaacgtgatactgtacagaatgctgtaggcacttgtaacacaacg

SEQ ID NO: 397954 - DNA, 201 bp, Homo sapiens
agtggagttgttaatggttgcaaaaatatacagaatgactaggacctagtatttgatagcaaaatagcatgactacagtcaactataatttattgtacttytcacaataactaaaagagtataactggattgtttataacacaaaggataaatggtcaggtgatggatatcctatttattgtgatgtgattgttacatatt

SEQ ID NO: 397955 - DNA, 201 bp, Homo sapiens
tatgggatataccattatgaatagctttaaaaaattaatttcctcattctctctttctatatggagtccttcctaaaaactatctacctgagaactctttstggtctgccagttctcctttctcacttctttcaaaatcatctgtctcccacttttcagaagaaaagcttaccccttttccgtactaaatcttactatggt

SEQ ID NO: 397956 - DNA, 201 bp, Homo sapiens
ttgttaaatgcgtttcctgcatctattgagatggtcatacagtttttgtccttcattttgttgatttggtatatcacattgatttgtatatgttatctcarttttttgaagtgttacttatacgtttataaaagttgtgagccaagaaaaatttgtgctgaggtttttatgaaaacatttactgccaaactatattttcta

SEQ ID NO: 397957 - DNA, 201 bp, Homo sapiens
ttgaaacactaagactgataaactttctattgtcagttatccatataacagatctttggttttataagttttagaaagttgttaaactcttaactatatayagggagaagagaatatcttttgcatatgtttaatatttattcaacacccatgatataggcattaaataataatgcagaatttttgtttctcctttttctt

SEQ ID NO: 397958 - DNA, 201 bp, Homo sapiens
tatacatatgtaactaacctgcacattgtgcacatgtaccctaaaacttaaagtataataaaaaaaaagaatggattttcacatctctcaaaccttgatarttgatgttactacaaagaatagtctttgtaagaaagattaacaagcaagtgtatacagatagcaaaggcatttattcacattcttagttaataacatcca

SEQ ID NO: 397959 - DNA, 201 bp, Homo sapiens
gtctttaaagctttgataatgctatttcttccttattctcattttaccattcacactgttttgttttgttttgttttttaggtttctcaaactattccttrttatctgtcagctctcacatctttatgttcctccagatttctttcttcagctcacccatccctctggcttcagttgctgtatgtgatgatgattttcaga

SEQ ID NO: 397960 - DNA, 201 bp, Homo sapiens
aaatacaacctgtttcatttgataaattaatagctgacgttattttcatatcagaaggagaactagacatctgtgacttatggcctaattctgatcatcarggagaaaattgactggtaaagtagaatcttgagagaaatcagtatgtaatttctgagtttattacagccaaggaaggcagtgctatagggatttggatgc

SEQ ID NO: 397961 - DNA, 201 bp, Homo sapiens
ttttttcttggaaagtgttttggttcaaatatatttttagaagtccgaacagggataaaccgaagctgtactaagatgactacttagaaggagttacaacytcaaacaaaaaaaagttgtagtgagaagttaggcaaacaaaagagatgcttttatagttgactctcttgggaaaaactatacataaataaatacaacctg

SEQ ID NO: 397962 - DNA, 201 bp, Homo sapiens
gcaatacctaattaagttagtacagtaataacatagatgttaaagacatcatttcaagtaggggctttattacatatcatccctcatggtataaatgtttygtcttattccacatgaaacctattttgtgatatagatttaatttttattaaagaattgtttacattttcatttaatggaagctgtaattagtaaacctag

SEQ ID NO: 397963 - DNA, 201 bp, Homo sapiens
ggtgacccagcaaaagcctgggtgaccatggaagtagtctgtattagcgcctggacaccagagaaaagggaaaatgtgatcctcattcagccctggttgayagagatcatgcctttaaatggtcagtctcaaagacattcagttgtcacaagtgcagatttaccagttggcagttcagattgttactgtacagtgagtgtg

SEQ ID NO: 397964 - DNA, 201 bp, Homo sapiens
tctgaggatgtggcatttgaaaagaaacctgagtgaaataagaaagtgagtaacattatagagttctacatattttcctttttctttatagcatgaacatyccccccaccacaatttgctatgtgcatatttgttttcgacttatccccttctcttatcacattcaatattagaagtctgaaatgatgcttctacagctcc

SEQ ID NO: 397965 - DNA, 201 bp, Homo sapiens
gattgttttaacttttcttttccctccagtgcgtttttcaaacattttttgttttgtgtgtatctggtacctaataaatattcagtaaatgttttctaagygaaaataagtcaaatgtttagtttgtgccaaaggacgttctaggtgattttaataagtttatttgttttaggcctcatatatgttaagttagactgatag

SEQ ID NO: 397966 - DNA, 201 bp, Homo sapiens
gagagtgcacagatgcccggctctgtaactgtggcttgggtggctgtagctgcacctggcagggtgtggctcctgcctgctccaggagtgggaggcccggrtccacagccacaactctgtcacttgggcagctgcagctgcacctggggaactcccgctccaccaacgtggaaagagcagggctcccactttttcccagct

SEQ ID NO: 397967 - DNA, 201 bp, Homo sapiens
gctttttaaaaattctgttttgggattgttttaacttttcttttccctccagtgcgtttttcaaacattttttgttttgtgtgtatctggtacctaataartattcagtaaatgttttctaagtgaaaataagtcaaatgtttagtttgtgccaaaggacgttctaggtgattttaataagtttatttgttttaggcctca

SEQ ID NO: 397968 - DNA, 201 bp, Homo sapiens
tggatacacaaagacttcctatgggatataccattatgaatagctttaaaaaattaatttcctcattctctctttctatatggagtccttcctaaaaactatctacctgagaactctttctggtctgccagttctcctttctcacttctttcaaaatcatctgtctcccacttttcagaagaaaagcttaccccttttccg

SEQ ID NO: 397969 - DNA, 201 bp, Homo sapiens
aagcggattaaatgagaagtatatggcaacacagccagtcacctatttacttacattcactagctgtgtgatttgtctatttatagtttgtttcttcctamtagaatctaagcttcatgaaagcaggactgtgttttggtccctgccatctctcgaggatttagaacagtacctggctcagagttcatgctcaataatatt

SEQ ID NO: 397970 - DNA, 201 bp, Homo sapiens
tggaactcagctggtgcccattgagggagcattaagaccagccctagtcagaagtgaatcgtctatctcagcagtgggaacctgagttgtggcaagccttwctctggggtccttgataaacttgacagacagttgtattagtctgttctcacactgctataaagaaatacctgagactgggtaatttatggagaaaagagg

SEQ ID NO: 397971 - DNA, 201 bp, Homo sapiens
ggcaagcggattaaatgagaagtatatggcaacacagccagtcacctatttacttacattcactagctgtgtgatttgtctatttatagtttgtttcttcmtactagaatctaagcttcatgaaagcaggactgtgttttggtccctgccatctctcgaggatttagaacagtacctggctcagagttcatgctcaataat

SEQ ID NO: 397972 - DNA, 201 bp, Homo sapiens
tttttgtattgacaaagttgtggggaaacaggtattctcattcaccatagatacaggtgtaagttgatgttaacttttttttcttttttttttttttgagrcagggtctcactttctttcccaggctggagtgcagtggaaagatcatagctaacagtaacctcaaactcctaggctcaagcaattcatcctcttcagcct

SEQ ID NO: 397973 - DNA, 201 bp, Homo sapiens
ctcaaagtctactaattaaaatgtcaacctcatctagaaaacaactttacagaaacatctgaataacgtttgtccaggaatctgggtatcatggcccaaayaaattgacaaaaatgttaactattactctttccaagttacttagtttttctgttactgttattatcaatattatgtacttatttaactttctaatgtgtt

SEQ ID NO: 397974 - DNA, 201 bp, Homo sapiens
aacaggggaagagaaaactaataaaaactgtacactttaacatgtcccctctgtttcttaagttttgttgtttcaatttatatcttactctactgtcttgraagattattgtagttattatttttgatcagttcatcttttagtctttctcctcatcttatgaatagttcacaaatattacagcaaaattggagttttaca

SEQ ID NO: 397975 - DNA, 201 bp, Homo sapiens
aaaccaaaatggcaagcggattaaatgagaagtatatggcaacacagccagtcacctatttacttacattcactagctgtgtgatttgtctatttatagtktgtttcttcctactagaatctaagcttcatgaaagcaggactgtgttttggtccctgccatctctcgaggatttagaacagtacctggctcagagttcat

SEQ ID NO: 397976 - DNA, 201 bp, Homo sapiens
tggaccaggcgtggtggctcatgcctgtaatcccagcactttgggaggctgaggcgggcagatcacctgaggtcaggagttcgagaccagcctgaccaacrtggagaaaccccgtttctactaaaaatacaaaattagctgggtgtggtggcacatgcctgtaatcccagctactcgggaggctgaggcaggagaatcact

SEQ ID NO: 397977 - DNA, 201 bp, Homo sapiens
ctaactactttcttatcaattccaaatattttcattgttgttgtttgggggtttttttgttttgttttatttgagatggagtcttgctctgtcacctaggytggagtgccgtggtacaatctcagctcactgcaacctccacctcccaggttcaagtgattctcctgcctctcagcctcccgagtagctgggactacaggc

SEQ ID NO: 397978 - DNA, 201 bp, Homo sapiens
tattgtacagcataggtctccaataagctgtactctcgtgccagtttagtcctacacctaaggagtgacccttccgggatctttacaatgtctcaggtgtkcaacgagctctccctggctggttagaacttgactttttcctagtccagtgcaagctccagcaattttcagcctatagttccccagtattctttagtgaga

SEQ ID NO: 397979 - DNA, 201 bp, Homo sapiens
tcttgtttctttgctaaaccaaaatggcaagcggattaaatgagaagtatatggcaacacagccagtcacctatttacttacattcactagctgtgtgatktgtctatttatagtttgtttcttcctactagaatctaagcttcatgaaagcaggactgtgttttggtccctgccatctctcgaggatttagaacagtacc

SEQ ID NO: 397980 - DNA, 201 bp, Homo sapiens
tttcaaattgggatgcctataccactggatacacaaagacttcctatgggatataccattatgaatagctttaaaaaattaatttcctcattctctctttmtatatggagtccttcctaaaaactatctacctgagaactctttctggtctgccagttctcctttctcacttctttcaaaatcatctgtctcccacttttc

SEQ ID NO: 397981 - DNA, 201 bp, Homo sapiens
ggtgacagtgggcatccttgttgtattccagatcttagaggaaaggcttttagtttttctccattctctccattattgagatgtaaagttcaatatgtagsctgttaaactcttcatcattgattatgttatttggttgtttatatccttatatatatatttttgtctacataatttgtctcatattaaggaggattattt

SEQ ID NO: 397982 - DNA, 201 bp, Homo sapiens
ttggcaggtggatcctagtttgtcaatcctggtaatgatcaatggttttcaaattgggatgcctataccactggatacacaaagacttcctatgggatatmccattatgaatagctttaaaaaattaatttcctcattctctctttctatatggagtccttcctaaaaactatctacctgagaactctttctggtctgcca

SEQ ID NO: 397983 - DNA, 201 bp, Homo sapiens
tgtttctttgttagcaaattaccattcaccattaatattttcctggaaactttctctaccacagaacctcaactgaaatccgtctgtgcctgcaagatagwgagttcctttttttccttgaagtaagttgtgctcgctttcccacgccccacataaagaaagtgagttcaactgcttcttgcttccccaaatagtctttgt

SEQ ID NO: 397984 - DNA, 201 bp, Homo sapiens
cactttgacattttcaattaattgttttgaaaattgtaacaataatttggtttaatcaaatttgtatcttgcttgaactctctaagtagcaattgtgtgartagcatgacagggcaatttcagttaaaaacttctccaacagtttggttaccttggaataaaaaaaaattatcttcatattggggtactattaagtcacat

SEQ ID NO: 397985 - DNA, 201 bp, Homo sapiens
ttttcactagatatgctattcaagtttaaaaattttttcctttagtgctttaaatatatcaggccactctctcctgtcctgtaaggttttcactgaaaagytggctgccagacatcttcttgcaggatccttaaggtgtcacttttctggccagaaacctctttggcctgtggcacctttgcctgagtttttcttgggact

SEQ ID NO: 397986 - DNA, 201 bp, Homo sapiens
ttgaggatataaaagcccttgagatagtttcactttaagcttaaaagattttcttgtcattttacctctaaaatttgattttcatgtttctttttagtatrtattttctgaaccctcctcttgtgcattttaaatgaacctatatttggtaactgttcccagcaatgcctttttctttttcataaggaacctgatacgtta

SEQ ID NO: 397987 - DNA, 201 bp, Homo sapiens
gtaagttatgcagtagttttgtttggaggccttgagtatttttgtttttggagtcttataattttagtagaatatgtcttggagttgatctttctaggtgwtaaatcacatgcattcttaagttctttattaagtcctctggtttttcaagatcctttttaatactttttacaaaaggatgaactttttcttcccggaggt

SEQ ID NO: 397988 - DNA, 201 bp, Homo sapiens
tataagttttggtatgttatgtttccatttttgttttttgaaaaatttttttatttaaaaatatttttagtttttaatttttgtgggtacatagtaaatgyatatatttataggttacatgagatattttgatatagctgtgcaataaataataatcaaatcaggggtattcatcacctcaagcattcatctgtactgtga

SEQ ID NO: 397989 - DNA, 201 bp, Homo sapiens
tttcaattgaattgggtttggtagagatagtatcttcagaactatatgtcagacttcactgtttgattgtttgaataaatttccattcttataaaatgaaytggaaatgtacctgattttttttaaaattaggtttgttatttttacacttaaaaggctgtttttttgcttttatctttatttccgtttaggtgactggtg

SEQ ID NO: 397990 - DNA, 201 bp, Homo sapiens
gagtgactaagctgggttatgtttctaagtgaggttgaaaatatttcatgtaagagaaaaagagttatttgtctccttttgttttgagggttttgtaattkctttatattaagaatagtagtgtcaataataacaataatgagaattagtatttcttaaatactgtgtataggcactatgcctagcatttgttgtgactcg

SEQ ID NO: 397991 - DNA, 201 bp, Homo sapiens
taaaaattataatgaattagtatgcagttaagtagttattaaggatcaaaacaaatgaaatggtcagaattataagtcaagtctcttgtttttagtagctmttggaagatcatgatatatagctcttttcaatgtgatattttctctttaacatttgggaaattatgaagacatttcagatttttccagtagatggcagaa

SEQ ID NO: 397992 - DNA, 201 bp, Homo sapiens
tgtattagtgataaccaggactccctgtagtagcactagtggcatttttgaattttttggacttgactgttaacatttgccacttgctcttagccttgctyctccaattttggggttttctcagaacctatttttggaaaactatattgattctttctaagcaagtctgttcacttgtgctaattcacaggccagtcagca

SEQ ID NO: 397993 - DNA, 201 bp, Homo sapiens
tggaactgtgcccagaagattattaaacatttatcattataccactggtttaagttcatcaaattttattaatgttttaattaacaaattagaatttaacrtaagtattttaagctatataaatggcaataaaatgtatttttatttattcaataccagtttaccacttagaacatgagatgtatttatgcatttataata

SEQ ID NO: 397994 - DNA, 201 bp, Homo sapiens
ctcagagaattaagcatgggagtcctttctgtattaatctaaatttaaaaatctttgtagaagctttgaactaaaaatgtaaacaaatagattattgattygggttttctttgggcacactttttttttaattaattgacttttgctaaattagataactttgtagaatgtttgagacaaaaaaatgaatgtatgatttta

SEQ ID NO: 397995 - DNA, 201 bp, Homo sapiens
aaattcaaaaaggaccaaaggcggcagaggaagggagtggtatgttatataagatgaaaaagcaaaagactgaaattacaaaactatatattgggggacawaaggctagtttcaaagaaatcctgttggatgattgctttcattgtatgcgtattgaaattataatgcatttctggtaggtggcagccatgtagcatgaaa

SEQ ID NO: 397996 - DNA, 201 bp, Homo sapiens
acgtttatttgaattttaaaattaagtcagactttttctgacagatagtaagtcagatttggctggttgagtttgacaatgaggactagccttgccaattmagttatattgttatattctctgtgtattgaataagctgaactgcagctccaaggctttgacaaagatatacttaaagcatgcattcagtatacaataagc

SEQ ID NO: 397997 - DNA, 201 bp, Homo sapiens
tacagaaacagttggcaggtggatcctagtttgtcaatcctggtaatgatcaatggttttcaaattgggatgcctataccactggatacacaaagacttcmtatgggatataccattatgaatagctttaaaaaattaatttcctcattctctctttctatatggagtccttcctaaaaactatctacctgagaactcttt

SEQ ID NO: 397998 - DNA, 201 bp, Homo sapiens
ataagaataggaactaggttttaatctctgtatccctaggcccttaaattgtaggtgctcagtatatattaaatgaatgaatgaatgaatgaatgaatgaaaaacacatgaatgaataagtatatctttcagggccacagctcctgttgtcccctgcaacaagtcctagagggtgctgcctctgaccatattttttattct

SEQ ID NO: 397999 - DNA, 201 bp, Homo sapiens
cataagaataggaactaggttttaatctctgtatccctaggcccttaaattgtaggtgctcagtatatattaaatgaatgaatgaatgaatgaatgaatgaaaaacacatgaatgaataagtatatctttcagggccacagctcctgttgtcccctgcaacaagtcctagagggtgctgcctctgaccatattttttattc

SEQ ID NO: 398000 - DNA, 201 bp, Homo sapiens
ttttgaattctctgtctgaaaggtcacatatctctgtctctctaggattctttactggtgctttatttagttcctttgatgaggttttgttttcctggatrgtcttgatgcttgtggacattcatcgggtctgggcattgaagaatttggtatttattgtaatcttcacagtctaggcttgtttgcacctgtccttcttgg

SEQ ID NO: 398001 - DNA, 201 bp, Homo sapiens
tcataagaataggaactaggttttaatctctgtatccctaggcccttaaattgtaggtgctcagtatatattaaatgaatgaatgaatgaatgaatgaatgaaaaacacatgaatgaataagtatatctttcagggccacagctcctgttgtcccctgcaacaagtcctagagggtgctgcctctgaccatattttttatt

SEQ ID NO: 398002 - DNA, 201 bp, Homo sapiens
ccttaacctttgggagtttgattattaaatgtcttgaggtaatcttatatttgggttaaatctgcttggtattctataacctttttatacttgaatattgwtatctttctttgggcttgggaagttccttgttattttacctttgaataaactttcttcccctatctttctacctcctatttgagaccagcaactcttaga

SEQ ID NO: 398003 - DNA, 201 bp, Homo sapiens
tcttcagggaggtgagttccttggttccaggtggatctagagatgccaagcaggagccagggcctggagtctagaaccttaggaatctatctgttgctctrttctactgtggctgagctggcaccggagccagaagaggaagttcttcccactcttctctcccctttccacaagctaaggagttctccccatggccaccac

SEQ ID NO: 398004 - DNA, 201 bp, Homo sapiens
cggtggctcacgcctgtaatcccagcactttgggatgccaaggcggacgggtcacgaggtcaggagatcgagaccatcctggctaacacagtgaaaccccrtctctactaaaaatacaaaaaaattagccggacgtggtggcacgtgcctgtagtcccagctacttgggaggctgaggcaggagaatggcatgaacccagg

SEQ ID NO: 398005 - DNA, 201 bp, Homo sapiens
agtctttctcctcatcttatgaatagttcacaaatattacagcaaaattggagttttacaatattctatattattctgtttatttactattactagtgagyttgttaccttcagatgatttgttgttgctcattaacatgcttttctttctgattgaagaactcccttttacattttttgtaggagaggtctggtgttgaa

SEQ ID NO: 398006 - DNA, 201 bp, Homo sapiens
aagatcatagctaacagtaacctcaaactcctaggctcaagcaattcatcctcttcagcctggcacaggccaccacgcccagctaattgtgttgttttttkggggggttttttggtttgttttttatgtttgttgtagagacagggtctcactttgttgcccaaaatggatgttaactctttagagagcaattttccaaat

SEQ ID NO: 398007 - DNA, 201 bp, Homo sapiens
ttaagttttgttgtttcaatttatatcttactctactgtcttgaaagattattgtagttattatttttgatcagttcatcttttagtctttctcctcatcwtatgaatagttcacaaatattacagcaaaattggagttttacaatattctatattattctgtttatttactattactagtgagcttgttaccttcagatg

SEQ ID NO: 398008 - DNA, 201 bp, Homo sapiens
ggatctaattaaactaaagagcttctgcacagcaaaagaaactaccatcagagtgaacaggcaacctacagaatgggagaaaacttttgcaatctactcawctgacaaagggctagtatccagaatgtacaaagaactcaaacaaatttacaagaaaaaaacaaccccatcaaaaagtgggcaaagtatatgaacagacac

SEQ ID NO: 398009 - DNA, 201 bp, Homo sapiens
atgggatctaattaaactaaagagcttctgcacagcaaaagaaactaccatcagagtgaacaggcaacctacagaatgggagaaaacttttgcaatctacycaactgacaaagggctagtatccagaatgtacaaagaactcaaacaaatttacaagaaaaaaacaaccccatcaaaaagtgggcaaagtatatgaacaga

SEQ ID NO: 398010 - DNA, 201 bp, Homo sapiens
tagtattttgttgaggatttttgcatcagtgttcatcagggatattggcctatagttttcttttcttcttcttcttcttctttttttttttaaatgtatcyttgtctgcttttgatatcagacaaagatttggtatattgacctactagagtgagtttggaagtattccctcctccatttttcggactagtttgaggaaga

SEQ ID NO: 398011 - DNA, 201 bp, Homo sapiens
gccaaaattgacaaatgggatctaattaaactaaagagcttctgcacagcaaaagaaactaccatcagagtgaacaggcaacctacagaatgggagaaaayttttgcaatctactcaactgacaaagggctagtatccagaatgtacaaagaactcaaacaaatttacaagaaaaaaacaaccccatcaaaaagtgggcaa

SEQ ID NO: 398012 - DNA, 201 bp, Homo sapiens
gtcatagaactacttttgttacacgctataagttttggtatgttatgtttccatttttgttttttgaaaaatttttttatttaaaaatatttttagttttkaatttttgtgggtacatagtaaatgcatatatttataggttacatgagatattttgatatagctgtgcaataaataataatcaaatcaggggtattcatc

SEQ ID NO: 398013 - DNA, 201 bp, Homo sapiens
aaaggacattaatgaacaataagaaatcatctgaagatacagaacttactggtaataatatgtacacaggaaaacaaagaatactgtcacactgaagttayggtgtgtaaactacttatatcttaagtagaaagacaaaaagatgaactgatcaagaataataactaaaacaattttttaagacatagtacaataagatat

SEQ ID NO: 398014 - DNA, 201 bp, Homo sapiens
gccactactctttcattgttaagtgtggtgttagctataattttttagataccttttattaaattaacaaagttccctgtctgtacctcgtttgctgagcrctttctcttatgaatcgatgttgaattttgtcaattttgtcacatgcttgcttgctgggttttttttttttttttggttctgttggaatgatcatgtggt

SEQ ID NO: 398015 - DNA, 201 bp, Homo sapiens
catccctaacctcagcaaccactgatttgttctctgccattatacttttttccatttgagactgtcccacatgtatacttataccatatgtaaccttttgracctggcttcttctattcagcataatgcctttgagattcattacgtatatcagtagtttgctcctttttactgctgattagtattccatgttaatggatg

SEQ ID NO: 398016 - DNA, 201 bp, Homo sapiens
agttccagaccagcctggccaacatggtgaaaccccatctctactaaaaatacaaaaattagctgggcatggtggcacgcgcctgtaatcccagctagtcrggaggctaaggcaggaaaatcacttgaacctgggaggcggatgttgcagtgagccgagatcacaccactgcactccagcctgggtgacagagtgagactc

SEQ ID NO: 398017 - DNA, 201 bp, Homo sapiens
ggaacaaatactactacatcccgcagtacaagaactggagaggtgaggtggcggcgtgggcagcgattgcgtggtcagtgattgcgaggtcagtaaaggarggaaaagtgagagcccctagtcaactaacgcatcatgcgacacttagggtgtcaccggagagaatttcccgagttcgttctcccctgtcgaccccttcac

SEQ ID NO: 398018 - DNA, 201 bp, Homo sapiens
caagggaggctgttgatgtaatttatgtaggttacctttctggggcaggggtcagaagggtggatccttgatctggagaagcaaatagcacaccatcctarattttttttcatctatttggccagtattattgaggccctgctaattgcaaagctgtaaatagtataagaccatatacaaaagacatgacttttctttcag

SEQ ID NO: 398019 - DNA, 201 bp, Homo sapiens
gaaggagaactagacatctgtgacttatggcctaattctgatcatcagggagaaaattgactggtaaagtagaatcttgagagaaatcagtatgtaatttstgagtttattacagccaaggaaggcagtgctatagggatttggatgcatattctaatttagacattagaagaggagccttcagaaagttttgcagaaaaa

SEQ ID NO: 398020 - DNA, 201 bp, Homo sapiens
catttacaacagtattagaaaacatagaatactgtggaatttagtgagcaaaacatgtgcaagatctgtgtactcaaaactacaaaatgttggtaagatayattaaataagacctaaataaatggggagaagtatctgttcatggattggaatgtacaatattgctaatgtattcattcttcccaaactgatccacagtag

SEQ ID NO: 398021 - DNA, 201 bp, Homo sapiens
ttccctcaacttcttaactgatagagctaatcactactttctcggtataactacactgctgtgtactcctgtataactctttaagttcaatattaaaattstgtgttttatttgtccatatttctaactattagctgtttggcacagggattataacttattcatttgtgtgtcataagcacctaacacagagcctgattc

SEQ ID NO: 398022 - DNA, 201 bp, Homo sapiens
tccatgtgtatttctctgtacctgaccatcatttttatgtttgccaacatccaagccagtctaccttactgatggtcgagattagaacctggaatatggtyttctcctttcaatgctttcccaaattttagctttccagttctttgacttcatccatactagtatccctgcctcaagtgaacaaccacttcattaggcaca

SEQ ID NO: 398023 - DNA, 201 bp, Homo sapiens
tggtgctgggaaaactggctagccatatgtagagagctgaaactggattccttccttacaccttatacaaaaattaattcaagatggattaaagacttaawtgttagacctaaaaccacaaaaaccctacaagaaaacctaggcaataccattcaggacataggcatgggcaaggacctcatgtctaaaacacaaaaagca

SEQ ID NO: 398024 - DNA, 201 bp, Homo sapiens
cttcttgcttccccaaatagtctttgtttgtggacccaagagagtggaggacctttgtaatccatgtgtatttctctgtacctgaccatcatttttatgtktgccaacatccaagccagtctaccttactgatggtcgagattagaacctggaatatggtcttctcctttcaatgctttcccaaattttagctttccagtt

SEQ ID NO: 398025 - DNA, 201 bp, Homo sapiens
gtgattctggcctcatagaatgagttagggaggagtccctcttttttaattttttggaatagttttagtaggaatagttccagctcttctttgtacatctrgtagaattcagctatgaatctgtctggtcctgggcttttttggttggtaggctatttattactgcctcaatttcagaacttgttattggtctgtttaggg

SEQ ID NO: 398026 - DNA, 201 bp, Homo sapiens
gcacaagacagggatgccttctctcaccactcctattcaacatagtgttggaagttctggccagggcaatcagacaggagaaagaaataaagggtattcarttaggaaaagaggaagtcaaattgtccctgtttgcagatgacatgattgtatatctagaaaaccccattgtctcagcccaaaatctccttaagctgataa

SEQ ID NO: 398027 - DNA, 201 bp, Homo sapiens
ttgcatatattgaaccagccttgcgtcccagggatgaagccaacttgattgtggtggataagctttttgatgtgctactgtattcaggttgctagtacttygttgaggatttttgcattgacattcatcaaggatattggcctgaagttttccttttttgtggtatcaaacactgccaggttttggtatcatggtgattct

SEQ ID NO: 398028 - DNA, 201 bp, Homo sapiens
ctctgaatttaagaaggaaaagcactactgaagcagatagagacacaaaaaaacccttcaaaaaaatcaatgaatccaggagctggttttttgaaaagatmaacaaaattgacagaccactagcaagactaatgaagaaaagagagaagaatcaaataaacacaataaaaaataataaaggggatatcaccaccgatccca

SEQ ID NO: 398029 - DNA, 201 bp, Homo sapiens
taagttgtgctcgctttcccacgccccacataaagaaagtgagttcaactgcttcttgcttccccaaatagtctttgtttgtggacccaagagagtggagsacctttgtaatccatgtgtatttctctgtacctgaccatcatttttatgtttgccaacatccaagccagtctaccttactgatggtcgagattagaacct

SEQ ID NO: 398030 - DNA, 201 bp, Homo sapiens
tggtcaatatagtgggttgaatagtgtccccccaaaaaatgtatatccatttgaaacctcagaatgttatcttatttggaagtagggtgtttgtctatacrgttaagttaagatgggatcagattatggtcgactctaaatctaatgactggtatctttataggaagaggaaaggacacacacacacacacacacacacac

SEQ ID NO: 398031 - DNA, 201 bp, Homo sapiens
caaacagggataatttgacttcctctcttcctatttggatgccctttactttttttctcttgcctgatttccctggccagaacttcctatactatgttgawtacaagtagtgagagagggcatccttgtcttgtgccacttttcaagggaattgtattagtcagagttctctaaagggacagaactaataggatatatgaa

SEQ ID NO: 398032 - DNA, 201 bp, Homo sapiens
atttttgggcagtggtttgtagttctccttatcgagatctttcacctccactgtattcctaggtacttaattctttttgtggcaattgtgaatgggagttwgtttgtaatttggctctctgcttgagttttgttggtgtataggagtgctagcaatttttgcacattgattttgtatcctgagactttgctgaagttgctt

SEQ ID NO: 398033 - DNA, 201 bp, Homo sapiens
gaaaagaggtttaatggacgcacagttccccatagctggggaggcctcaggaaacttaacaatcatgacagaaggcaaaggggaaataaggcacatcttasatggtagcaggagagagagcaaggagggaagtactatacttttaaaccaccagattttgtgagaactcactcacaatcatgagaacagcatggggaaatc

SEQ ID NO: 398034 - DNA, 201 bp, Homo sapiens
ttttctgttcctgtgttagtttgctaaggataatggcttctggctccatccatgtccctacaaaggcatgatcttgttcttttttatggctgcatgtattycatggtgtatatttaccacattttctttatccagtgtatcgctgatgaacattcaggttgattccatgtctttgctattgtgaatagtgctgcaataaac

SEQ ID NO: 398035 - DNA, 201 bp, Homo sapiens
aaaaaggaaattaagaatgctagctgaatagtttctttttctcagtaactgactgacagatggtgcaaaggacatgacaaagaagaggcccatcataataactacctcatttcaattcagcaaatatttataaagtgctgttgtgctctttttatcagataattaatgctttttgtctttaacatgattgtttatataaat

SEQ ID NO: 398036 - DNA, 201 bp, Homo sapiens
taaaaaggaaattaagaatgctagctgaatagtttctttttctcagtaactgactgacagatggtgcaaaggacatgacaaagaagaggcccatcataataactacctcatttcaattcagcaaatatttataaagtgctgttgtgctctttttatcagataattaatgctttttgtctttaacatgattgtttatataaa

SEQ ID NO: 398037 - DNA, 201 bp, Homo sapiens
atcacttgaacctgggaggcggaggttaaagtgagccaagatcacaccattgcactccagcctgggcaaaaacagcgaaactccgtctcaaaaaaaaaaaattaattaataataataataataattgggacactagcttttcttctgcattctcataacattctttgttttatatgattgcagaatttatcatattataat

SEQ ID NO: 398038 - DNA, 201 bp, Homo sapiens
ttaaaaaggaaattaagaatgctagctgaatagtttctttttctcagtaactgactgacagatggtgcaaaggacatgacaaagaagaggcccatcataataactacctcatttcaattcagcaaatatttataaagtgctgttgtgctctttttatcagataattaatgctttttgtctttaacatgattgtttatataa

SEQ ID NO: 398039 - DNA, 201 bp, Homo sapiens
tagagatgaggttttaccatattggccaggctggtctcaaactcctggcctcaagcaatctacccaccttggcctcaccaaagtgttgggattacaggcaygagccactgcgcccggcctgaagactgctttctgatttcaactctttcctgggtctccagcctgccagcctaccctgcaaatttgagcttggacttgcct

SEQ ID NO: 398040 - DNA, 201 bp, Homo sapiens
tgcctgaagactggtttcttttcttttctttccttttattttcttttttttttctttttttttttgacagtcttgctctgttaccaaggctggaatacagkggcatgatctcagctcactgcaacctctgcctcccaggttcaagcaattcccgtgcctcagcctcccaaaaagctgggattacaggcatgtgccaccaca

SEQ ID NO: 398041 - DNA, 201 bp, Homo sapiens
cgggttcaagcatttctcctgcctcagcctcccaagtaactgagattacaggtgcacaccaccacatccagcttattttttagtagagacgaggtttcacyatgttggccaggctggtcttgaactcttgacctcaagtgatctatctgccttggcctcccaaagtgctgggattataggtgtaagtcaccatgcccagcc

SEQ ID NO: 398042 - DNA, 201 bp, Homo sapiens
attaaaatgaatgaaaaaaaaaacttaagaatgaactggagctgtatgttttaacatggataaatctcagaagcaatgatactgagcaaaaaaaaaaaaaagcagctacagaagatgtcatacaatataccatttacataaagtttgaaagcaaggaaagtataaagggctttcaagtaaagatagtgggtcaaacatgta

SEQ ID NO: 398043 - DNA, 201 bp, Homo sapiens
agaattggctacaattttcaattctatctctgtattagaaatagccttacgaattgtaatagaaaaattgccaggtgctggttaagcctccttttcccatrgacagtgtttttatggattgccagcatttgtctctgtgattctatttttttctttgcttctcggttctggttgacatatttcctatgccatgacagtagt

SEQ ID NO: 398044 - DNA, 201 bp, Homo sapiens
gtcccttacttaggatagttcagcttaggattttttaacttcatgatggtgaaaaagcaatatgcattcagtagaaactatacttctgagtacccatacarccattctgtttttcactttcaatacagtattcaataaattacatgagatatttaacactttattattaaataggctttgtgttaagataattttgcccaa

SEQ ID NO: 398045 - DNA, 201 bp, Homo sapiens
tatgaagattacttacaattcttcatataactaatgaggtcttctgcagcaaaaggccaaccagtttacataatataatctttttattttagatgagaacrttgctatttcctgaacctacttctgctcaacacctatttctcttttagttaccatcatcctttgccttaggtatcccacctttctattttgttaactttt

SEQ ID NO: 398046 - DNA, 201 bp, Homo sapiens
agatgttcctaagtgtcctggaaaatttaacagttagatattctggtcttggtgttttttacagaaagatttttgactacaaattcaatgtctttaatagyagcagattctatttagtttctctaattcttctttgatccattttgataatatatgtattttggaaaattatactgtttaagttttcaagtttatttgtat

SEQ ID NO: 398047 - DNA, 201 bp, Homo sapiens
cctgcaaaggacatgaactcatgcttttttatggctgcatagtattccatggtatactgcatagtattccatggtatactgcatagtattccatggtatactgcataaaatggtaccacattttctttatccagtctatcattgatgggcatttgggttggttccaagtctttgctattgtgaatagtgctgcagtaaaca

SEQ ID NO: 398048 - DNA, 201 bp, Homo sapiens
tgtccctgcaaaggacatgaactcatgcttttttatggctgcatagtattccatggtatactgcatagtattccatggtatactgcatagtattccatggtatactgcataaaatggtaccacattttctttatccagtctatcattgatgggcatttgggttggttccaagtctttgctattgtgaatagtgctgcagta

SEQ ID NO: 398049 - DNA, 201 bp, Homo sapiens
atgtccctgcaaaggacatgaactcatgcttttttatggctgcatagtattccatggtatactgcatagtattccatggtatactgcatagtattccatggtatactgcataaaatggtaccacattttctttatccagtctatcattgatgggcatttgggttggttccaagtctttgctattgtgaatagtgctgcagt

SEQ ID NO: 398050 - DNA, 201 bp, Homo sapiens
gcctcatccaatcagttgaggactttaagggaaaaaaacattccctctaggaggagggaattctgcctgaagactggtttcttttcttttctttccttttmttttcttttttttttctttttttttttgacagtcttgctctgttaccaaggctggaatacagtggcatgatctcagctcactgcaacctctgcctcccag

SEQ ID NO: 398051 - DNA, 201 bp, Homo sapiens
ttttgttatgtttaattatatttgagaccatctaatttataaactattgtaattggaaaagaagagtatatatttctgctacctgtgcttaaaaggtacaygtggactttttttttttttttgagtttcagaattttctttaggtgttaaataagcataatcaggctagattacaagaatgtgcttattcttctaggagtc

SEQ ID NO: 398052 - DNA, 201 bp, Homo sapiens
ggatacacaaagacttcctatgggatataccattatgaatagctttaaaaaattaatttcctcattctctctttctatatggagtccttcctaaaaactatctacctgagaactctttctggtctgccagttctcctttctcacttctttcaaaatcatctgtctcccacttttcagaagaaaagcttaccccttttccgt

SEQ ID NO: 398053 - DNA, 201 bp, Homo sapiens
ttttagtagagacggagttttgccatgttggccaggctggtcttgaactcctcacctcaggtgatctgcctgcctcagcttccctaagtgctaggattacmggcgtgaaccaccatgcccggcctgcctttagtgtgttacattttcactgtactttatttaggtatgagtttcttttcttttaatttatttattctgatt

SEQ ID NO: 398054 - DNA, 201 bp, Homo sapiens
aagcgatcttcccacctcagcctcccatagtgctgggattataggcgtgagccactgtgcccagcccaatgcatatgattgacttttttttaaaaaaaaaagaatgttaaaaagcacatatacaatgatatggatgagcagtggcaatttttttcggcagggtatcagatagcaaatattttagggtttgtgacccaaatg

SEQ ID NO: 398055 - DNA, 201 bp, Homo sapiens
acccagctaatttttttgtatttttagtagagatggggttttgccatgttggccaggctgatcttgaactcctgacctcaagtgattcgcccacctcggcstcccagagtgctgggattacaggcgtgagccactgcatcctcatattaacttatttaattataagtacatacaaaggtagtaaatacttaaaactcagta

SEQ ID NO: 398056 - DNA, 201 bp, Homo sapiens
gttagactcaagcgatcttcccacctcagcctcccatagtgctgggattataggcgtgagccactgtgcccagcccaatgcatatgattgacttttttttwaaaaaaaaagaatgttaaaaagcacatatacaatgatatggatgagcagtggcaatttttttcggcagggtatcagatagcaaatattttagggtttgtg

SEQ ID NO: 398057 - DNA, 201 bp, Homo sapiens
ttttacttgctgatatagctgttcttcatatgaggtttttcctgtgttttcgtaattctgtgccttatgagtatttttgttaggaggcagagctctccccrctgcctccccagaggaagaactgtgtactcatgcctccagcttcccttgtagccaggccatggacatatgatctagactcaaccaatgagaagtgtctgc

SEQ ID NO: 398058 - DNA, 201 bp, Homo sapiens
tgaacataccaagtggggctgaattatcgataagtacatgagaaataaacaaaattcatttatttgcggaaaaaacttgggaaggaaaaggaaaaataatyattttctactacataactcacttgttgacagtgtttactcataatatgtgaatccacaactatactagggtattagggaacacaaagaataaggcaaacc

SEQ ID NO: 398059 - DNA, 201 bp, Homo sapiens
gaaaaaggagatgaaaattaaagggctaatactgtctgactttaagaattactttaaaactatagttatctagacagtatgatactggcattaggatactrggtaaataaatcaatggaaaaaacaaaagtccaaaaagtagatactgtacaaccagttggtttttaacaatgacatcaaaacaacacaattaggaatgga

SEQ ID NO: 398060 - DNA, 201 bp, Homo sapiens
agatatacctaatgctaattgacgagttaatgggtgcagcgcaccagcatggcacatgtatacatatgtaactaacctgcacattgtgcacatgtaccctraaacttaaagtataataaaaaaaaagaatggattttcacatctctcaaaccttgataattgatgttactacaaagaatagtctttgtaagaaagattaac

SEQ ID NO: 398061 - DNA, 201 bp, Homo sapiens
aagcacttgaatgttgtaatctaagtttttagtcactgcatctgtatctgcattagtggggactcaaagcccagtaatgctctggttcttgcagacttgtmgaagtattgtcttggtggtcttggataagatttggaagaattctctggattaccaggcaaaggctcttgttgtcttcccttactttctctcaaacagtct

SEQ ID NO: 398062 - DNA, 201 bp, Homo sapiens
ggtagggcctgaatatttgcatttataacatgttgctggatgatgctgatgctgatggttcatagcccatattttgtgaaccactgatttatagatttaayaaaatgaatatccagttaaaaccatgtcagacttttttgatagaaatcaacatgctgatttgaaaatatatttggaaatgtaaaagacctagaatagctg

SEQ ID NO: 398063 - DNA, 201 bp, Homo sapiens
acagaggaaggggaacatcacactctggggactgttgtggggtggggggaggggggagggatagctttaggagatatacctaatgctaattgacgagttartgggtgcagcgcaccagcatggcacatgtatacatatgtaactaacctgcacattgtgcacatgtaccctaaaacttaaagtataataaaaaaaaagaat

SEQ ID NO: 398064 - DNA, 201 bp, Homo sapiens
gtactgctttctctgtatcccataggttttggtatgttgtgtttccattttcatttgtttcaagaaatttttcaatttcccttttaaattcttcattgacscactgatctttcaaggagcatattaatttccatgtgtttgtatagtttccaaaattcctctagctattgatttctagttttattccattgtggtcagaga

SEQ ID NO: 398065 - DNA, 201 bp, Homo sapiens
gggaattcttgtcatgttttagatcttagaagaaaggctttcactgtttctctattcagtatggttaggctttgtgtccccacccatatctcatcttgaaktgtaatccccaggtgtttaggaaaagacctagtaggaaataattggattatgggggttgttttccccatgctgttctcatgatagtgagtaaattctcat

SEQ ID NO: 398066 - DNA, 201 bp, Homo sapiens
gacccatttctagctttgtatgttgcttctgccttggcctacttttcgcagacccttctttccaacattgataaaatttggaataaaagctgttttgggggaaaaaataaaaggcaatatgatccaggattcagaagtatgcccagtagtttacagtgaaggatggattgaagagccttctgattctccttctcttggtca

SEQ ID NO: 398067 - DNA, 201 bp, Homo sapiens
atattatattgaataacaatagtaaaagtgggaattcttgtcatgttttagatcttagaagaaaggctttcactgtttctctattcagtatggttaggctktgtgtccccacccatatctcatcttgaattgtaatccccaggtgtttaggaaaagacctagtaggaaataattggattatgggggttgttttccccatgc

SEQ ID NO: 398068 - DNA, 201 bp, Homo sapiens
tcttctttgactatttacatttcacatcatcttggaaattcttgtcaatgcaataaagcaataaaaataaatgaaatgaatacagataagaaacagatgayatgattacatgtagacagtctacaaaaagtacgtaaaaattaagtgaattttgtaacttttcaagatacaggggaatataaaatcaattatatgtctaca

SEQ ID NO: 398069 - DNA, 201 bp, Homo sapiens
atctcactttggacctcctccaatcatgacatttaacacactatagggggttccttgtttacttatctgcatcctccgccctaaactggaagattttttasaataggatccttaccttattcatttttgtattctcagggcctagctcaatagtttaagtaaatataagctcagtcaacatttgttgaatgaatgcatttc

SEQ ID NO: 398070 - DNA, 201 bp, Homo sapiens
ttcttgttaagtatatgtataataacagataatattcctaaaaaatattttgtatatatacttagatctgcatctaaatatttgattccatttaatagtayagactgaggaatgttcactcccacacctctggtctgagtgtggctccagagaagcagaatggtggatacctgaggttgaaaactctttgggtaacctttg

SEQ ID NO: 398071 - DNA, 201 bp, Homo sapiens
ttcctcatctgtaaaataaagacattatgctagataatctttgaggtagaaatgatgattatcaaaacgttacctttcatttatagggattaatttttagkgctgcttctgaatccactgagtatcttatcccacaagaaaattgaaggattgtaatttttttcacttgtttctttagttgtattatggggataacaatag

SEQ ID NO: 398072 - DNA, 201 bp, Homo sapiens
gtggtatgtgcctatagtctcaactctgtgaaacacacaggcaggagtagaggattgcttgagcgcaggagtttgagtttagcctgggcaacacaggggaraccctgtctctttgtatttatttatttatgtttttttttgcgatggagtctcactctgttgcccaggctggaatacagtggcttgacctcggctcactgc

SEQ ID NO: 398073 - DNA, 201 bp, Homo sapiens
ctctacttttcactcttgcttttttctattcgaatgagatagaggtacgcgtcaaacagcttacaataggtagtaagttctaaaataactgattatgtccyaataagatgattttggaataagacaaattcatactgatgttatgttgacagggtatattagggcaaaataaacacctcagactcagagaattaagcatgg

SEQ ID NO: 398074 - DNA, 201 bp, Homo sapiens
tcttcttcatttttaaactcaacatttgcctcaaatcaaaagcatattcctttctctacttttcactcttgcttttttctattcgaatgagatagaggtasgcgtcaaacagcttacaataggtagtaagttctaaaataactgattatgtcccaataagatgattttggaataagacaaattcatactgatgttatgttg

SEQ ID NO: 398075 - DNA, 201 bp, Homo sapiens
tttttttaaaaaattgaaaatcgaaagacaacattctgatattttctacattttgtaaaaactctttaacagcgttttcagatcacagaatattttaggtrttataagttaaatgtattctgaagccaaataagttgagggaacaatttgttgaacagagttaaataggttatctaacaaaatgcagaacctattggagca

SEQ ID NO: 398076 - DNA, 201 bp, Homo sapiens
gtcgccatgacagagctcaggggcgggactggaacagcagagtctcccattggtcagtcggtgatatatccggccaatggtgagcgccgttactagaaggsctccaggatggaggccggcctgacttctccgcctcggtgggctgggtcggcggctggagcattacccctactgcgggtcccgctgctggcagcgctggaa

SEQ ID NO: 398077 - DNA, 201 bp, Homo sapiens
gggaattgaacaatgagaacacatggacagaggaaggggaacatcacactctggggactgttgtggggtggggggaggggggagggatagctttaggagakatacctaatgctaattgacgagttaatgggtgcagcgcaccagcatggcacatgtatacatatgtaactaacctgcacattgtgcacatgtaccctaaaa

SEQ ID NO: 398078 - DNA, 201 bp, Homo sapiens
attctcagtaaactatcgcaagaacaaaaaaccaaacaccgcatcttctcactcacaggtgggaattgaacaatgagaacacatggacagaggaaggggarcatcacactctggggactgttgtggggtggggggaggggggagggatagctttaggagatatacctaatgctaattgacgagttaatgggtgcagcgcac

SEQ ID NO: 398079 - DNA, 201 bp, Homo sapiens
aacgagataccatctcacaccagttagaatggcagtcattaaaaagtcaggaaacaacaggtgctggagaggatgtggagaaataggaacacttttacacygttggtgggactgtaaactagttcaaccattgtggaagtcagtgtggcaattcctcaaggatctagaactagaaataccatttgacccagtcatcccatt

SEQ ID NO: 398080 - DNA, 201 bp, Homo sapiens
cctccgtgttgactctgctctccgaaggcgaagagggtcctccaaacccgtttggcgtgcggacaaaaaccccagcatatcgtgtcctcacaccggctggmgcactggacgtcgccatgacagagctcaggggcgggactggaacagcagagtctcccattggtcagtcggtgatatatccggccaatggtgagcgccgtt

SEQ ID NO: 398081 - DNA, 201 bp, Homo sapiens
gggactggaacagcagagtctcccattggtcagtcggtgatatatccggccaatggtgagcgccgttactagaagggctccaggatggaggccggcctgayttctccgcctcggtgggctgggtcggcggctggagcattacccctactgcgggtcccgctgctggcagcgctggaaactgggtggacggcatgggttggt

SEQ ID NO: 398082 - DNA, 201 bp, Homo sapiens
tccataataattttagaattttttttctatttctgtgaatgtcattggtattttgataggatttgcattgaatctgtagattgctttgggtaatatggacrtttttaacaatatttattcttccaattcatgaacatataatatccttcccttttgcctgtgtcctcttcattttcttgcatcaatgttttataggtttca

SEQ ID NO: 398083 - DNA, 201 bp, Homo sapiens
ggctagccagttttcccagcaccatttattaaatagggaatcctttccccatctcttgtttttgtcaggtttctcaaagatcagatagttgtagatatgtrgcgttatttctcagggctctgtgaaaacaaacaaccccattaaaaagtgggcaaaggatatgaacagacacttctcaaaagaagacctttatgcagccaa

SEQ ID NO: 398084 - DNA, 201 bp, Homo sapiens
ctcctcattaaggccagtaactcttaaatttgcccttttcaggctattttctagatcctataggcatacttcattgttttttattttttttcttttgtctyctctgattgtgtattttcaagtagcctgacttcaagctcactgattctttcttctgcttgatcagttctgctgtcaagggactctgctgcattcttcagt

SEQ ID NO: 398085 - DNA, 201 bp, Homo sapiens
tctgtggacttactatatccagtgagttttgtaccttctggtgattatttattgctcattaatgtcctttttgatagaagtattccctttagcatttcttrtaggaagctctggtattgatgaaacccctcagctttttttttgtctgggaaattatttcttcttcatgtttgaaggatcttttcactagatatgctattc

SEQ ID NO: 398086 - DNA, 201 bp, Homo sapiens
ccagtaatgggatggctgggtcaaatggtatttctagttctagatccctgaggaatcgccacactgacttccacaatggttgaactagtttacagtcccamcaacagtgtaaaagtgttcctatttctccacatcctctccagcacctgttgtttcctgactttttaatgattgccattgtaactggtgtgagatggtatt

SEQ ID NO: 398087 - DNA, 201 bp, Homo sapiens
accagagcttccaaaaatactagtggcactaagtctctggttttggaacaatatagtagaaagaagctgtcaatatttatctcttaaagaacggatttttyttcttgtaaatttgtttgagttcattgtagattccggatattagccctttatcagatgggtaggttgcaaaaattttctcccattttgtagattgcctgt

SEQ ID NO: 398088 - DNA, 201 bp, Homo sapiens
gtgaaagccagccaaggctgtgtccttcccttcagagtggcaaggtccagaagtaccgtctgggagtcagggaatagagtgaaaaaccttagaagtctccytggggttcttttgtattgtggctgagctggcactcaaaccacaagattcagtccttcccaatgtccctccccatttcaaaggccaccgccaccccaggcc

SEQ ID NO: 398089 - DNA, 201 bp, Homo sapiens
tttggttttttgttcttgcgatagtttactgagaatgatgatttccaatttcatccatgtccctacaaaggacatgaactcatcattttttatggctgcayagtgacatgaactcatcattttttatggctgcatagtattccatggtgtatatgtgccacattttcttaatccagtctatcattgttggacatttgggtt

SEQ ID NO: 398090 - DNA, 201 bp, Homo sapiens
tgtaaaagcgttcctatttctccacatcctctgcagcacctgttgtttcctgattttttaatgatcaccattctaactggtgtgagatggtatctcattgwggttttgatttgcatttgtctgatggccctcaatgatgatgagcattttttcatgtgtctgttggctgcataaatgtcttcttttgagaagtgtctgttc

SEQ ID NO: 398091 - DNA, 201 bp, Homo sapiens
gtgatatctcgttgtagttttggtttgcatttctatgatgatcagtgatgttggagcactttttcatatacctgtttgccatttgcatgtcttcttttggraaatgtctatccagatcttttgctcatgttttaagctgttcattagatttttcctattgagttgtttgagttccttatatattctgattattaatccctt

SEQ ID NO: 398092 - DNA, 201 bp, Homo sapiens
tcattcttctttatggctgaatagcacttcactgtgtgtatatatcacattttctttatcagttgatctgttggtggacatttaggttgcttccaagtctkcactatcctgaatggtgctgcagtaaacatgggagtacaggtatctcttcgatattctgatttcctttcctttggataaatatacacacacacacacaca

SEQ ID NO: 398093 - DNA, 201 bp, Homo sapiens
tattccacaaagtaggtgaaacctttctctggcttccttctcaatgtatgacctaactgcataaaaatttttatcaattgttcataacttttaaatttattttttggctagctaacttgttgttaaggtgagatttttttccatataggagacccattatattcagagatttattttttttaatttttgagaatttgagga

SEQ ID NO: 398094 - DNA, 201 bp, Homo sapiens
tagtttgattagaaatcatgtctcagaaaatattttatgactttagatatttagtaaaatcttattaccttgtgatggataacttaataaataaaaagtcrgaatttttattattaaactataaaatatttttatattgaagacatttgttctcttgctcctttctcttttaggtactaacctcagggtttggcatctcag

SEQ ID NO: 398095 - DNA, 201 bp, Homo sapiens
gtattccacaaagtaggtgaaacctttctctggcttccttctcaatgtatgacctaactgcataaaaatttttatcaattgttcataacttttaaatttattttttggctagctaacttgttgttaaggtgagatttttttccatataggagacccattatattcagagatttattttttttaatttttgagaatttgagg

SEQ ID NO: 398096 - DNA, 201 bp, Homo sapiens
gcattatgttacttttatgccagcatgtgaatgtaaacatcatttcagtaaaaatatttttccatttctgcttactactagaactatgaggaaaaaaaaamccataaaaataagtagataccaaaggttttttgaagaaatacagaatataaattggcaacttctaggaggggtaattgagctttcttattttagcagact

SEQ ID NO: 398097 - DNA, 201 bp, Homo sapiens
agtattccacaaagtaggtgaaacctttctctggcttccttctcaatgtatgacctaactgcataaaaatttttatcaattgttcataacttttaaatttattttttggctagctaacttgttgttaaggtgagatttttttccatataggagacccattatattcagagatttattttttttaatttttgagaatttgag

SEQ ID NO: 398098 - DNA, 201 bp, Homo sapiens; identical to SEQ ID NO: 88082

SEQ ID NO: 398099 - DNA, 201 bp, Homo sapiens
actgaggcctcatggacattttgcccagccccaggtcaggggcacctgcctggtgtggggctgattccagaattcaccccctacaggtgctggctggccayggtcacctgtattcccgcatcccaggcctgctcagcccccatcccctgctgcagctgagctacacggccaccgaccgccacccccaggccctggaggctg

SEQ ID NO: 398100 - DNA, 201 bp, Homo sapiens
gcgggcagggtgctgaccaccgcccccacaggacgcgtgggagagcctcttctccagggtgtcgctgcgcctggtgggcctgaagaagtccttctacggckccacgctcttcctgtgccgccggcccaccccgcaggacagccccatcttcctgccggtggacgataccagcttccgctgggtggagtctctgaaggtcag

SEQ ID NO: 398101 - DNA, 201 bp, Homo sapiens
acccaagtatgccgcactcacccagcctgtccccacagtggctgacgtggtggtgagcaggtggctgagggtcacagtggcgggaggcgtccacatctccsggctccacactgagtcggccccgcggcggcagcaggagcagcaggtgcccatcctggagaagttttgcttcactccccacacggaggaggggtgcctgtc

SEQ ID NO: 398102 - DNA, 201 bp, Homo sapiens
gccccagcccagtgcccccacccaagtatgccgcactcacccagcctgtccccacagtggctgacgtggtggtgagcaggtggctgagggtcacagtggcsggaggcgtccacatctccgggctccacactgagtcggccccgcggcggcagcaggagcagcaggtgcccatcctggagaagttttgcttcactccccaca

SEQ ID NO: 398103 - DNA, 201 bp, Homo sapiens; identical to SEQ ID NO: 88088

SEQ ID NO: 398104 - DNA, 201 bp, Homo sapiens
agccccacatggtcctgagcagctttgtgctggctgagaaggctgcggcctatagggacagggacagccagcgggacctggtggaggccgtggcacacatyctgggtgagcactcccagtaggagccgcgccaggtgtttcccctgctggcatcagggtcttgggacatagcagtcgtgcccctgtgcgcctcagtttccc

SEQ ID NO: 398105 - DNA, 201 bp, Homo sapiens; identical to SEQ ID NO: 88065

SEQ ID NO: 398106 - DNA, 201 bp, Homo sapiens
agttgccgacccggcgcatcccttccaggcatccgcgacttggctgctgtcaacctggacagctcactggcggacctgggcctggactcgctcatgagcgyggaggtgcgccagacgctggagcgtgagctcaacctggtgctgtccgtgcgcgaggtgcggcaactcacgctccggaaactgcaggagctgtcctcaaag

SEQ ID NO: 398107 - DNA, 201 bp, Homo sapiens
ctctcggttcccttggggtgaggtgggtgcgccctacctctccgagcctgaggtgggtgcccagccaggatgcttatccaggctcccacgatgtccaggcyccggtgtttgagttcgtggagcagctgaggaaggagggtgtgtttgccaaggaggtgcggaccggcggtatggccttccactcctacttcatggaggcca

SEQ ID NO: 398108 - DNA, 201 bp, Homo sapiens
gggcaggacgggaggggaggaggggtctcagtggggctgtgtgggggccataggggcttctttcctatcaggagacctgggagggtcgatggggcgcgggrgtggagatggcctagtggggccgggggccgcccccaacagctgcacctgctggaggttgcaacctgagtgtcctgttcccaccccagataggcctcatag

SEQ ID NO: 398109 - DNA, 201 bp, Homo sapiens
ctggggaaaggcaggcgaactggagctggtggtcccctgaggtgctctctgggacggggatgggcacacagtggcacgggatggggctgagcctcgtgacrtgctctctgggacagggatgggcacacagtggcgcgggatggggctgagcctcatgcgcctggaccgcttccgagattccatcctacgctccgatgaggc

SEQ ID NO: 398110 - DNA, 201 bp, Homo sapiens
gatgaggccagcggtgcgtgtgggcggccaggcgggagtggggtccccgggcctccccagcccttcctccttgttgtctggaccgtgtcccggcaggcatmccgcccttcgtcacgggtgccattctgagcgttcccaccccgactcccacctgacgtagcaccgtggggacctgcgtgcgtgtctgtgtgtccttgcgtg

SEQ ID NO: 398111 - DNA, 201 bp, Homo sapiens
gatccatccatctcagcttcccaaagtgctgggattacaggcatgagccaccacgcccagccatgccatttcttaagatccaggtgctccctccccgggcrgagaaggacctcctgagggggaggctgagccctgggctgcccttgggtgtgagcggttcacacacccacccaccctagggcagagccagcccaccagggg

SEQ ID NO: 398112 - DNA, 201 bp, Homo sapiens
gctcaacctggtgctgtccgtgcgcgaggtgcggcaactcacgctccggaaactgcaggagctgtcctcaaaggcggatgaggccagcggtgcgtgtgggyggccaggcgggagtggggtccccgggcctccccagcccttcctccttgttgtctggaccgtgtcccggcaggcatcccgcccttcgtcacgggtgccatt

SEQ ID NO: 398113 - DNA, 201 bp, Homo sapiens
tggggctgattccagaattcaccccctacaggtgctggctggccacggtcacctgtattcccgcatcccaggcctgctcagcccccatcccctgctgcagmtgagctacacggccaccgaccgccacccccaggccctggaggctgcccaggccgagctgcagcagcacgacgttgcccagggccagtgggatcccgcaga

SEQ ID NO: 398114 - DNA, 201 bp, Homo sapiens
cccagcctgtccccacagtggctgacgtggtggtgagcaggtggctgagggtcacagtggcgggaggcgtccacatctccgggctccacactgagtcggcsccgcggcggcagcaggagcagcaggtgcccatcctggagaagttttgcttcactccccacacggaggaggggtgcctgtctgagcgcgctgccctgcagg

SEQ ID NO: 398115 - DNA, 201 bp, Homo sapiens
gggccaggggacccacaacccagcactgacctggcccctcatgcaggtgatccgggagccgaagccacgttcagcccgctggctcagcacctctatccccraggcccagtggcacagcagcctggcacgcacgtcctccgccgagtacaatgtcaacaacctggtgagccctgtgctgttccaggaggccctgtggcacgt

SEQ ID NO: 398116 - DNA, 201 bp, Homo sapiens
gcccctgagcccttctctgcagcccaccattgtgggctgtcacggtgcctggggtctgtccccctccatcttgtggggggcttgctggatggggctctgcrgctgctccccacttccccagcccggcgtgtagggaagagaccgtaccctggcccagtccagcccacagtcctgtgtcccgcaggctaccaggccaagcag

SEQ ID NO: 398117 - DNA, 201 bp, Homo sapiens
acctttctcatgaaggctccaaggctgccattaccacacttgtcattactgcccccagctgcaggcagtgtctgggtgggtgggtggctgggagtggctcrgtgtccacgctaagcctctgaggctggctctgccataggcttgtcctgggaggagtgtaaacagcgctgccccccgggcgtggtgcccgcctgccacaac

SEQ ID NO: 398118 - DNA, 201 bp, Homo sapiens
ggcccctgagcccttctctgcagcccaccattgtgggctgtcacggtgcctggggtctgtccccctccatcttgtggggggcttgctggatggggctctgyggctgctccccacttccccagcccggcgtgtagggaagagaccgtaccctggcccagtccagcccacagtcctgtgtcccgcaggctaccaggccaagca

SEQ ID NO: 398119 - DNA, 201 bp, Homo sapiens
tgacaccaggggccaaaggcgtcgcctggggacaatgctgccctctgtccttcctggagccactctggccgtgcctggtgccctcccctgggcccgcctgycccctccgcctcgttccctctgtgacctggttcctgttccaggcctcacctgggctggctgctggccacaggctctgttctggcccctctgcaggacacc

SEQ ID NO: 398120 - DNA, 201 bp, Homo sapiens
gagcagctttgtgctggctgagaaggctgcggcctatagggacagggacagccagcgggacctggtggaggccgtggcacacatcctgggtgagcactccyagtaggagccgcgccaggtgtttcccctgctggcatcagggtcttgggacatagcagtcgtgcccctgtgcgcctcagtttccccatctgcagagccagg

SEQ ID NO: 398121 - DNA, 201 bp, Homo sapiens
tgagagatggcttgctggagaaccagaccccagagttcttccaggacgtctgcaagcccaagtacagcggcaccctgaacctggacaggtgggtaccgcayagccctgctcccgcctctgccgggctctgggctcagggccgtgggagccaaggtggtttgttgacagccctctctggcgtttcctggggatgggacgttg

SEQ ID NO: 398122 - DNA, 201 bp, Homo sapiens
tcctgttcgacggctcgcccacctacgtactggcctacacccaggtgagagccaggctggtcctagaggcctacggcaaacgtctgggctccccacctgtrccctggctttgggggaccgtcgcttaggaggccccgccccttccatctgctcagcagtccctccttcctctcagagctaccgggcaaagctgaccccagg

SEQ ID NO: 398123 - DNA, 201 bp, Homo sapiens
tgcacacactgctccgggggcaccccctcggggacatcgtggccttcctcacctccactgagccgcagtatggccagggcatcctgagccaggtgcggccrccgggcagggggacagggtgggggccgggtgagggccaggcgggcagggtgctgaccaccgcccccacaggacgcgtgggagagcctcttctccagggtg

SEQ ID NO: 398124 - DNA, 201 bp, Homo sapiens
tgccacccacaggcagaagctgtacacactgcaggacaaggcccaaggtagccccgccccagccccagcccagtgcccccacccaagtatgccgcactcayccagcctgtccccacagtggctgacgtggtggtgagcaggtggctgagggtcacagtggcgggaggcgtccacatctccgggctccacactgagtcggcc

SEQ ID NO: 398125 - DNA, 201 bp, Homo sapiens
ccctcatgcaggtgatccgggagccgaagccacgttcagcccgctggctcagcacctctatccccaaggcccagtggcacagcagcctggcacgcacgtcytccgccgagtacaatgtcaacaacctggtgagccctgtgctgttccaggaggccctgtggcacgtgcctgagcacgcggtggtgctggagatcgcgcccc

SEQ ID NO: 398126 - DNA, 201 bp, Homo sapiens
tgctgcaccaggccaccatcctgcccaagactggtgaggggtaccccaggaccaaggcgggggtagctggggggcgggtgctgccctctgatctccaactytcccgctctgcagggacagtgtccctggaggtacggctcctggaggcctcccgtgccttcgaggtgtcagagaacggcaacctggtagtgagtggtaagc

SEQ ID NO: 398127 - DNA, 201 bp, Homo sapiens
tgccagactgaggcctcatggacattttgcccagccccaggtcaggggcacctgcctggtgtggggctgattccagaattcaccccctacaggtgctggcyggccacggtcacctgtattcccgcatcccaggcctgctcagcccccatcccctgctgcagctgagctacacggccaccgaccgccacccccaggccctgg

SEQ ID NO: 398128 - DNA, 201 bp, Homo sapiens
ttggggtcagcaaccctagcccaaccctccggccggagctcacgatggcggcctccctccctcccccagcccccagccttcctcgtccctggtcactgttyctcagtcttgaaagggtacttgggggcaaagatgacagattcagcctaaggtcacaccttggctaggcacagagtagcccctgcagctgaatgcggcccc

SEQ ID NO: 398129 - DNA, 201 bp, Homo sapiens
cggtgacaccaggggccaaaggcgtcgcctggggacaatgctgccctctgtccttcctggagccactctggccgtgcctggtgccctcccctgggcccgcytgccccctccgcctcgttccctctgtgacctggttcctgttccaggcctcacctgggctggctgctggccacaggctctgttctggcccctctgcaggac

SEQ ID NO: 398130 - DNA, 201 bp, Homo sapiens
tcaggcccttccgcacctccctttccacagggaaggtgtaccagtgggatgaccctgaccccaggctcttcgaccacccggaaagccccacccccaacccyacggagcccctcttcctggcccaggctgaagtttacaaggagctgcgtctgcgtggctacgactacggccctcatttccagggcatcctggaggccagcc

SEQ ID NO: 398131 - DNA, 201 bp, Homo sapiens
ccacccaagtatgccgcactcacccagcctgtccccacagtggctgacgtggtggtgagcaggtggctgagggtcacagtggcgggaggcgtccacatctycgggctccacactgagtcggccccgcggcggcagcaggagcagcaggtgcccatcctggagaagttttgcttcactccccacacggaggaggggtgcctg

SEQ ID NO: 398132 - DNA, 201 bp, Homo sapiens
ttgccgacccggcgcatcccttccaggcatccgcgacttggctgctgtcaacctggacagctcactggcggacctgggcctggactcgctcatgagcgtgsaggtgcgccagacgctggagcgtgagctcaacctggtgctgtccgtgcgcgaggtgcggcaactcacgctccggaaactgcaggagctgtcctcaaaggc

SEQ ID NO: 398133 - DNA, 201 bp, Homo sapiens
gtgggctgtcacggtgcctggggtctgtccccctccatcttgtggggggcttgctggatggggctctgcggctgctccccacttccccagcccggcgtgtrgggaagagaccgtaccctggcccagtccagcccacagtcctgtgtcccgcaggctaccaggccaagcaggtccgccggtggaggcgccagggcgtacagg

SEQ ID NO: 398134 - DNA, 201 bp, Homo sapiens; identical to SEQ ID NO: 88066

SEQ ID NO: 398135 - DNA, 201 bp, Homo sapiens; identical to SEQ ID NO: 88068

SEQ ID NO: 398136 - DNA, 201 bp, Homo sapiens
cgggcctgaggtgctgctctacccagggaatgggtactgccgctcggagggtgtggtggccgtcctgctgaccaagaagtccctggcccggcgggtgtacrccaccatcctgaacgccggcaccaatacagatggcttcaaggagcaaggtgggctctgccggggttccggggtgctggggggcaggtgggagccggggct

SEQ ID NO: 398137 - DNA, 201 bp, Homo sapiens
ctcttcctgttcgacggctcgcccacctacgtactggcctacacccaggtgagagccaggctggtcctagaggcctacggcaaacgtctgggctccccacytgtgccctggctttgggggaccgtcgcttaggaggccccgccccttccatctgctcagcagtccctccttcctctcagagctaccgggcaaagctgaccc

SEQ ID NO: 398138 - DNA, 201 bp, Homo sapiens
gccccgggcctgaggtgctgctctacccagggaatgggtactgccgctcggagggtgtggtggccgtcctgctgaccaagaagtccctggcccggcgggtstacgccaccatcctgaacgccggcaccaatacagatggcttcaaggagcaaggtgggctctgccggggttccggggtgctggggggcaggtgggagccgg

SEQ ID NO: 398139 - DNA, 201 bp, Homo sapiens
ggtggctgggcttgcagtgggtgtgattgtctggcccctctggccccctaggcgttgacctggtcttgaactccttggcggaagagaagctgcaggccagygtgaggtgcttggctacgcacggtcgcttcctggaaattggcaaattcgacctttctcagaaccacccgctcggtgaggccggcagcgcctgggcggggg

SEQ ID NO: 398140 - DNA, 201 bp, Homo sapiens
cccagcccccacccacaacagcctcttcctgttcgacggctcgcccacctacgtactggcctacacccaggtgagagccaggctggtcctagaggcctacrgcaaacgtctgggctccccacctgtgccctggctttgggggaccgtcgcttaggaggccccgccccttccatctgctcagcagtccctccttcctctcag

SEQ ID NO: 398141 - DNA, 201 bp, Homo sapiens
gctgagccccgggcctgaggtgctgctctacccagggaatgggtactgccgctcggagggtgtggtggccgtcctgctgaccaagaagtccctggcccggmgggtgtacgccaccatcctgaacgccggcaccaatacagatggcttcaaggagcaaggtgggctctgccggggttccggggtgctggggggcaggtggga

SEQ ID NO: 398142 - DNA, 201 bp, Homo sapiens
cgcttgtgcaggccggcatccgggatggggtggtacggcccctcaagtgcacggtgttccatggggcccaggtggaggacgccttccgctacatggcccargggaagcacattggcaaagtcgtcgtgcaggtgaggggaggagtcccggcgcctcgggcaccccaggctctggtccccaggcagtgcctgagccggtggg

SEQ ID NO: 398143 - DNA, 201 bp, Homo sapiens
cgacatcgcggctgtccccgccaccgccatgcccttccgtggctacgctgtgctgggtggtgagcgcggtggcccagaggtgcagcaggtgcccgctggcragcgcccgctctggttcatctgctctggtgagcccacactctgcccccaaggtggtcccttccctggggaaaggcaggcgaactggagctggtggtcccc

SEQ ID NO: 398144 - DNA, 201 bp, Homo sapiens
ggtcttggaccaagctgagggcagggccatggcggctcagtcctcggacccctgtgccatggcagaattaggttggggacaggaagtgcatcggagagggmcctggaaccctggccccacatgagagtctcggggaggtgcctgcccccagctcaggcagtggtagagggagtggggcggctgcccatccaccacgtaccc

SEQ ID NO: 398145 - DNA, 201 bp, Homo sapiens
cactggacacagcctgctcctccagcctgatggccctgcagaacgcctaccaggccatccacagcgggcagtgccctgccgccatcgtggggggcatcaaygtcctgctgaagcccaacacctccgtgcagttcttgaggctggggatgctcagccccgagggcacctgcaaggccttcgacacagcgggtgagtgtgcgg

SEQ ID NO: 398146 - DNA, 201 bp, Homo sapiens
aagactaaggttatgctccccgggggtgaccggtgtccctctctccttcccgagcctggacacttggcctttgtctcctcggttccttatcacggcctgtyctggtgcaggctgcccttggcgctggagaggccactggccgacgggctcatcagagctgccggtgacaccaggggccaaaggcgtcgcctggggacaatg

SEQ ID NO: 398147 - DNA, 201 bp, Homo sapiens
gcgccaagacgggtggcgcctacggcgaggacctgggcgcggactacaacctctcccaggtgcgcaaggggcctgacgggaacggggacagggacaggagyggggtgggacggcagctgatcgcatcccctgcaggtatgcgacgggaaagtatccgtccacgtcatcgagggtgaccaccgcacgctgctggagggcagc

SEQ ID NO: 398148 - DNA, 201 bp, Homo sapiens; identical to SEQ ID NO: 88080

SEQ ID NO: 398149 - DNA, 201 bp, Homo sapiens
gcagagccagcccaccaggggcgaggaggggccctgctggccgagaggtggaagcccttctcctgcgcccttcctgctgccagaccccaccccaagactamggttatgctccccgggggtgaccggtgtccctctctccttcccgagcctggacacttggcctttgtctcctcggttccttatcacggcctgttctggtgc

SEQ ID NO: 398150 - DNA, 201 bp, Homo sapiens
cggtgttccatggggcccaggtggaggacgccttccgctacatggcccaagggaagcacattggcaaagtcgtcgtgcaggtgaggggaggagtcccggcrcctcgggcaccccaggctctggtccccaggcagtgcctgagccggtgggtgctgcttggacgcaggtgcttgcggaggagccggaggcagtgctgaaggg

SEQ ID NO: 398151 - DNA, 201 bp, Homo sapiens
ccttggcggaagagaagctgcaggccagcgtgaggtgcttggctacgcacggtcgcttcctggaaattggcaaattcgacctttctcagaaccacccgctyggtgaggccggcagcgcctgggcgggggtgggcatggatgggtgtgggtggacctgtggaaggccctgggtgagcacggcccctgcccgcaggcatggct

SEQ ID NO: 398152 - DNA, 201 bp, Homo sapiens
tctgcacggtctactacgcctccctcaacttccgcgacatcatgctggccactggcaagctgtcccctgatgccatcccaggtatgggtggcatggggccrtgggagtggactgggccggggagcagagaccccagcagctaggacctgcctgggagcccctcgggagggaagggcaggcggtgaggggctcagtgccgtc

SEQ ID NO: 398153 - DNA, 201 bp, Homo sapiens
ttttagtttcaccatgttggccaggctggtcttgaactcctgacttcaagtaatctgcccgccttggcctcgcaatgtgctgggattacaggtgtgagccsccgcacctggccttgttttttcattttaaaaatacctgtctttttttggaatggagaagatacatcatcactaatacagttttatcatttttcttccctt

SEQ ID NO: 398154 - DNA, 201 bp, Homo sapiens
gaaatgtctcttccagtccctggcccagtttttaatcaagttagttgattttttgctgttgaattgtaggggtttcttatatattttggatattaaccctkatcagatacagtcctatgccacatttcagtcagcaacggaccacatatatgacagtggtcccataagaacctccgggttcacgccattctcctgcctcag

SEQ ID NO: 398155 - DNA, 201 bp, Homo sapiens
acaactttaaccctctgtcaatttcattttctttcttctgctgttgctatagtatttttcttatcccttgactctgatagtaaacctggccctctcagcarttgacgcctgtgttattttatggatatcctttcagtaatgcctgttgattgggtaattagggttatataaaaaacatactctatataaactcctggaaac

SEQ ID NO: 398156 - DNA, 201 bp, Homo sapiens
agaagggaagaatgattaggtgtcaaatgttctttttattttctttcagttcaatgcaaaaactttccagtgattatgtaaatgcagaatcatgtggtggkttcttctctgtgcctctctagacatctgtttttcaccacttctttttctttgtctgcaggcccagactgatcttgcttccttggcctttatccccttggc

SEQ ID NO: 398157 - DNA, 201 bp, Homo sapiens
ctgaagtgggagaatcacttgaacccaggaggctgagatagtgtcaatgcactccagcctgggcgacgggagtgaaacttggtctcaaaaaaaaaaaaaaagggataattgatgagcagatgaattaattggtaattgaaggaagagttccgcttttattataacttagattttatggtcttggagggaaaagaaaatagc

SEQ ID NO: 398158 - DNA, 201 bp, Homo sapiens
tattgtgagataaactgataagattttccctggtctttgaaaggtcttgaaaatagtagatctgaaaaaagttaagctgtacatgccaacaagcgtgtacrcgagtgtgttttgtgcttttctatgtgtagctgtatttcacagtttttaaaaatgggggaaattgtctcgatgctacaaactgtccatatagggtgaggt

SEQ ID NO: 398159 - DNA, 201 bp, Homo sapiens
tttttttttttgagatggagtctcactctgtcacccaggctggagtgcagtggcgcgatctcagctcaccgcaacctctgcctcctgggttcaagtgattstccagcctcagcctcccaagtagctgggattacaggtgtctgccaccacacccggctaatttttgtatttttagtaaagatggggttttgccatgttggc

SEQ ID NO: 398160 - DNA, 201 bp, Homo sapiens
tagcatactattattattatgaaaatagtttttttttttttgagatggagtctcactctgtcacccaggctggagtgcagtggcgcgatctcagctcaccrcaacctctgcctcctgggttcaagtgattgtccagcctcagcctcccaagtagctgggattacaggtgtctgccaccacacccggctaatttttgtattt

SEQ ID NO: 398161 - DNA, 201 bp, Homo sapiens; identical to SEQ ID NO: 88112

SEQ ID NO: 398162 - DNA, 201 bp, Homo sapiens
acttttatcttaatatccagctctttttgcatgtattatttcaataccttatgtttggagaaaggatggtctttgagtatctcagtttagggtacgaaatraataggatataggttaacagcttaggaaaaatgctttgttggggaattatcttttgttaacaaagatttcttcttttgtagttgatggagaaccttgtga

SEQ ID NO: 398163 - DNA, 201 bp, Homo sapiens
gaaaatataaaaatatttattagtttattttaaagtagcaataataaacttattgcatgttaatataaataactgtttttcccagaaaaccacacagaagrgtaggattgttttgtatttttgtaaatttgtttactatctggcataacagaagatcactgtattcttatattccctccttcactcagtctgttgcaataa

SEQ ID NO: 398164 - DNA, 201 bp, Homo sapiens
cacacacatatatatatacatatgagagcattcgctcttgaggacaagttcatatgtagtcttctctgctcaagacaagataatgctttcatattagttartgttaagctccaaaggaagaattatttcttaactagaaggtagaatatatttttgtaacttgttaagactgtatattgattcaggacaggcgctgtggct

SEQ ID NO: 398165 - DNA, 201 bp, Homo sapiens
aaagtactcgtgtgaactttattttcttctcttgtttttctggtgtttacattgcatatatacactatgtagacattatatattagtatatataatgtatwtattaatatatatgctgtatatactacattgaatattcagtcacatctcagtcgaattacatttacagttgatactttctgagaaaagcatccttaggtg

SEQ ID NO: 398166 - DNA, 201 bp, Homo sapiens
acagtgcatgctaagtcttaacaacctgagggttcaggtaagcagttttttttgtttctatttttttaattttaaaaatcaaattggaaattggtgactgkggaccgagctcgagataaaatcttttggcttttttcttttaagtgagcatttcatcttgattttgcacttcttgtttgtgtacctaatcatttagtgtta

SEQ ID NO: 398167 - DNA, 201 bp, Homo sapiens
aattaaaaatgtatgtgtaaatctgatttgtccaactataggcaaatttcagtcatttaggaactgcctagctttattttgtgattatgcctttccccccmacctcatttgcatttagacggttaagagcttatattaaacacccataccaccaaagaaggaaaagggtagcatgatataaatgactaattttataaccag

SEQ ID NO: 398168 - DNA, 201 bp, Homo sapiens
cggaggttgcagtgagccgagatcgcaccgctgcactccagcctgagtgacagagtgagaccctgtctcaaaaagaaaagaacattgaacgtgagagcagrtaccatttttagtagtcaccaattcccctcctgtttttctctggcaacttctacttgagaataatgttctgaaaatggagagtcattgcttttggaagca

SEQ ID NO: 398169 - DNA, 201 bp, Homo sapiens
attgcagtgagccaagatcatgccactgcactctagcctgggtaacagaacgagactccatctccaaagttaaataaataaataaataaagtcatgagackggatttggtcaccaaggaagtgagtatatatagagaagaggtccaagggctgggcccttgaatatttaatattatttagaagtctgtaagatgaagtagt

SEQ ID NO: 398170 - DNA, 201 bp, Homo sapiens
ttatcttaatatccagctctttttgcatgtattatttcaataccttatgtttggagaaaggatggtctttgagtatctcagtttagggtacgaaataaatrggatataggttaacagcttaggaaaaatgctttgttggggaattatcttttgttaacaaagatttcttcttttgtagttgatggagaaccttgtgacctg

SEQ ID NO: 398171 - DNA, 201 bp, Homo sapiens
gtcaaggctgcagtgagccgtgattgtgccactgcactctagcctgggctagaccttgcctcacaaaaaaaaaaggaaaagaaaataaaatgatgactttsttattcatcttgaggtgtttgtgagattaagtgagaataagagagctataaggcctctgagagatctataagtttattggcatgaccccagatccttaaa

SEQ ID NO: 398172 - DNA, 201 bp, Homo sapiens
  misc_feature (1)...(201): n = A,T,C or G
accacaagaatcctatttcaaagttagtactactttgttattattttaaatgagcaagttatactcatgaaaatacaagatactgaaaaataattaaaagnataggaataatccgcaaacaaaattaattgggtttattcattcagatgacatttctgcttagaaagatttagctatgtagtatatcttaaaatgaatggg

SEQ ID NO: 398173 - DNA, 201 bp, Homo sapiens
tgtaagtgactttatattatttaacctcagtattggatggttttgggttcaaagattgtcccatgttttgtggcagtattctttttaatgaattgttcctrtgcaattcagaaaatgttgcttgtagtcctggatttatttcttattagactgggactttgagagagtcagtatacccttgtgtgcctcattttcttatcc

SEQ ID NO: 398174 - DNA, 201 bp, Homo sapiens
tcctgacttcaagtaatctgcccgccttggcctcgcaatgtgctgggattacaggtgtgagcccccgcacctggccttgttttttcattttaaaaataccygtctttttttggaatggagaagatacatcatcactaatacagttttatcatttttcttcccttcatcgaaacctttaatggatggctccccattgcctat

SEQ ID NO: 398175 - DNA, 201 bp, Homo sapiens
aataactgatagagttgtgatgtatttgggggttcggggtgtgtgggattccacttaaccggaaatgggggaatgtaattggggatgtaaaccagcattcrtactctgacctggtttttcatttactgttagcatccattgtgtttatcatctggacaaccatgaagttcagaatagtgacatgtcagtcggtgagttata

SEQ ID NO: 398176 - DNA, 201 bp, Homo sapiens
cgagcatggcagtgcacacctctaatcccagctactcgggaggctgaggcacaagaatcgcttgaacccggagacagaggttgcagtgaggcgagatggckccactgcactccatcctgggtgacagagtgagactgtctcaaagaaaacagaagatataattgtatcacttacactgagtctctcctgtctagtgtctag

SEQ ID NO: 398177 - DNA, 201 bp, Homo sapiens
aaaaatgtatgtgtaaatctgatttgtccaactataggcaaatttcagtcatttaggaactgcctagctttattttgtgattatgcctttcccccccaccycatttgcatttagacggttaagagcttatattaaacacccataccaccaaagaaggaaaagggtagcatgatataaatgactaattttataaccagaccc

SEQ ID NO: 398178 - DNA, 201 bp, Homo sapiens
ggagctgagttgagcgcacccagattgccatacatagacatgagtaagattgtgagtggcatcagcttgtatcctgtaaaaactgtggaagaggtattctrttttagcaggactaatatcaatgcttattctgaagagtgtagaaagcagcagtctagtattgacatctggcctgttgccaaacctagattatggtgccat

SEQ ID NO: 398179 - DNA, 201 bp, Homo sapiens; identical to SEQ ID NO: 88111

SEQ ID NO: 398180 - DNA, 201 bp, Homo sapiens
aatgtggtaaccagacacaagatctcaagttgtagtgttccctatcttgttttaagaccataaggtcttagtttttttctcttaggtgaatcaagtgtatrttatttattgctttaaattgttggcctatattaattaacacaagttcctgttacttagcttgtttcggcatttgtcccatatgtactcaaatatctcctt

SEQ ID NO: 398181 - DNA, 201 bp, Homo sapiens
ttctccaattctgtaggttgcttttcattctgttgtgtgcttcccttgctgtgcagaagctttttagtttgatgtagtcccattggtctgttttgctcttsttttgtgcttttggtgtcttagacaagaaatcactgctaagaccaatttcaagaaacttaggttgtcttctaggagttttgtggtttcaaatcttatgtc

SEQ ID NO: 398182 - DNA, 201 bp, Homo sapiens
gcttattttggcagtggcaggtaagtctgggactttcttcttggagttcaaatgtgatctgtttagaatggacattcttaacctgaaaggccatgggtggrcatagaaagttttgtatatttcacttggaaaagggttcttagctcttgtcaaattctcagaaggatctatggtttttaaaaagttgagaaccatttattt

SEQ ID NO: 398183 - DNA, 201 bp, Homo sapiens
ggacattcttaacctgaaaggccatgggtgggcatagaaagttttgtatatttcacttggaaaagggttcttagctcttgtcaaattctcagaaggatctrtggtttttaaaaagttgagaaccatttattttatgtacagtagctggaaatcaacctcatatttcagctcttcatttatccctcttctatttgcattctt

SEQ ID NO: 398184 - DNA, 201 bp, Homo sapiens
  misc_feature (1)...(201): n = A,T,C or G
cacgtagcaggctcttagtaaacataacttgaatgaacaaataagtgatttttgttctatgccaaaggctttatgaacaaggggttaagataatgtgtatnaatgttgtacttctcccctgtattgtaggactggcgggagctgtgggtagacgatgccatctggcgcttgctgttctccatgatcctctttgtcatcatg

SEQ ID NO: 398185 - DNA, 201 bp, Homo sapiens
gttcatgtatggaatcttacattactcttgtgacagtacattgtggagattccttccagtgtaacaggtttaactgaactcattcattttcatggatagcwtaaatatgggacatgtgtagtacagttaaattaacatattctcttattaatgggcatttgggatatttccagtttgaggtgtgtcagggtcctcaagacc

SEQ ID NO: 398186 - DNA, 201 bp, Homo sapiens
agcattcatactctgacctggtttttcatttactgttagcatccattgtgtttatcatctggacaaccatgaagttcagaatagtgacatgtcagtcggtragttataagcacatttatgaataatgtactgtcttataaacaactgatggtgttgatgacagtggtaaggttcttctaagttatataccttataaaaaat

SEQ ID NO: 398187 - DNA, 201 bp, Homo sapiens; identical to SEQ ID NO: 88114

SEQ ID NO: 398188 - DNA, 201 bp, Homo sapiens
gagatgttttgatctagttactatatttattttccttacctgtaaaatgcgatcttgttacagtctctgaaaatgtttttatctacagcttcatcttcaasactaaataaaaagacattttgagaaatttatttcacacagggcttgtgaatccaacttttgtaccttctctaacgacagtatgaacatgcaaaataaacc

SEQ ID NO: 398189 - DNA, 201 bp, Homo sapiens
atccttcactgggtcttcaagtgaaattcctgaattagaggagttacacatttttattaaagcctaatcttatgtaaatatttgtttacataagatcttarctgactctatacatttccttctgagtgctgattttctgtccagaagcctagagcttttgatttagttgttcttgggtgaggtctggacatctgtatgttc

SEQ ID NO: 398190 - DNA, 201 bp, Homo sapiens
aaaaaattagccgggcatggtggcgggtacctgtaatcccagctactcgggaggctgaagtgggagaatcacttgaacccaggaggctgagatagtgtcartgcactccagcctgggcgacgggagtgaaacttggtctcaaaaaaaaaaaaaaagggataattgatgagcagatgaattaattggtaattgaaggaagag

SEQ ID NO: 398191 - DNA, 201 bp, Homo sapiens
gtgagccattgtgcccagccatgaaaatagttttgactatggttcaacggccacacttttgagaattgccataatctagaatacttgagcgttgaaaatayattgctcaaagaataaagctggaagcatcacattacctgacttcaaactgtactacagggctacagtaaccaaaacagacacaaagaccaatgaaacaga

SEQ ID NO: 398192 - DNA, 201 bp, Homo sapiens
tattctctgtagaaaatacttccatctcaccttacttgcttcattgatgatttggaacctggtgctgtcttcatctgttgtgactgaatccaataatgccygataggtggacttcttggaaagccactgtttctgacgcctatagatacggagtatgcagatgcttgataattatttgtgattgtcagtatccaaaagact

SEQ ID NO: 398193 - DNA, 201 bp, Homo sapiens
tagaaggtagaatatatttttgtaacttgttaagactgtatattgattcaggacaggcgctgtggcttatgcctgtaatcccaacactttgggaggcagaratgggaggattgcttgagtccagaagttcaagaccatcctaggcaacatagcaaatccccatctcttaaaaaaaaaaaaaaaagtatatattgattctaa

SEQ ID NO: 398194 - DNA, 201 bp, Homo sapiens
caaatcaaccctcctaaccattctaaagtgcaaagtgctaactaggtgcacgtctttgccctcatccttcactgggtcttcaagtgaaattcctgaattaraggagttacacatttttattaaagcctaatcttatgtaaatatttgtttacataagatcttagctgactctatacatttccttctgagtgctgattttct

SEQ ID NO: 398195 - DNA, 201 bp, Homo sapiens
tttttctgccgactttgattcagctggtttcatgctttcctatagtgcagaagaccctcaactggtttctggatttcccacaaagggaatttttccatgtrttattgaatcagtgtgtctgtagagggaaggagtgtccagggcttcctattctgtcatcttgctgacatcactttctccaaggcctttttttcccttaaa

SEQ ID NO: 398196 - DNA, 201 bp, Homo sapiens
taataaaatggagctaataggaatgatattaccaagaattgtggagtagtgaggtccaggtctccatgcctccacaaaagcaactagtaagctgatgaaarctatcacattcaactttcacagaactttgaaatctaaccaaaacttaataaggaaaaagttcaacaaagaaagaagctgctacattacattaagaaagtg

SEQ ID NO: 398197 - DNA, 201 bp, Homo sapiens
  misc_feature (1)...(201): n = A,T,C or G
tcagggctgtgtcatatagtggaaggaacactgggcctggaatcagaagaactgggttcctatctcagctctcctcttaacttcatgatttttggcatgcngcctctccacctctctggccttagtttcctttctatatactgagggggaattaaacccagcaacatgaagttcctttcagctctgacattttgtgataaa

SEQ ID NO: 398198 - DNA, 201 bp, Homo sapiens
actttgaaattaaaaatgtatgtgtaaatctgatttgtccaactataggcaaatttcagtcatttaggaactgcctagctttattttgtgattatgccttycccccccacctcatttgcatttagacggttaagagcttatattaaacacccataccaccaaagaaggaaaagggtagcatgatataaatgactaatttta

SEQ ID NO: 398199 - DNA, 201 bp, Homo sapiens
cataccaggcccaatttgtaggaatttctgatatattttgtatgccaatattttgtttgttctaagtattgcatatattttctgccagttaataatcttaygatttttatgctgtttttaatcatacaaaatctcagaaatatggagtagtttttcccttcaaggattgtacattttgcatcttattttgacaaattctta

SEQ ID NO: 398200 - DNA, 201 bp, Homo sapiens
catctctaaggagggagtgctgcacctggggagcaggcttccccagtggctacaggaacttgggcagctaaaaacaagaagttctgaattaattattattwttttttaatgtttaaaggctaaggagaatggaacaaaccttacctttattggagacaaaaccgtaagtatatttggggatttggggcattgaacacatat

SEQ ID NO: 398201 - DNA, 201 bp, Homo sapiens
ctaataggaatgatattaccaagaattgtggagtagtgaggtccaggtctccatgcctccacaaaagcaactagtaagctgatgaaaactatcacattcarctttcacagaactttgaaatctaaccaaaacttaataaggaaaaagttcaacaaagaaagaagctgctacattacattaagaaagtgcagtgatattgta

SEQ ID NO: 398202 - DNA, 201 bp, Homo sapiens
cagaatcactatgactctgacttttgtttttaatcttatgagttcagtgatgtaagactaattttactgaaatatgctcacaaaagtcacaacagtagtgrccattttgggaatgattattaacatcaaatctcaatttctgttgatttctaaggcaccattatacatctaagaaaaaaagtaaagctgtaaatttaattg

SEQ ID NO: 398203 - DNA, 201 bp, Homo sapiens
gacagctatcaatgttgggttatggtttttacaaagctgattaaagtttttaattttataacaactttatgaaggtataatatacatattacagaagttaygttttgtttcgttttttgagacaaggtctcactcttgcccatgctggagaacagtggtatgaacatggctccctgcagccttgacgtcttgggctcaagt

SEQ ID NO: 398204 - DNA, 201 bp, Homo sapiens
aacagtagtggccattttgggaatgattattaacatcaaatctcaatttctgttgatttctaaggcaccattatacatctaagaaaaaaagtaaagctgtmaatttaattgtaaaatgtcactgattgtaagacacaccttgatttaaaaaacctcaaaatgtggtgggaaagtgcatctaactgataaaatatagtcata

SEQ ID NO: 398205 - DNA, 201 bp, Homo sapiens
tatttcaaagttagtactactttgttattattttaaatgagcaagttatactcatgaaaatacaagatactgaaaaataattaaaagaataggaataatcygcaaacaaaattaattgggtttattcattcagatgacatttctgcttagaaagatttagctatgtagtatatcttaaaatgaatgggatactccttttga

SEQ ID NO: 398206 - DNA, 201 bp, Homo sapiens
taattgtaaaatgtcactgattgtaagacacaccttgatttaaaaaacctcaaaatgtggtgggaaagtgcatctaactgataaaatatagtcatatcaasaaaataggagagtgcttatggtttagtaaggtgaactggtaatgacagaagttgttttatactgtagttttttgtgattgcttcagttttttcttgtcag

SEQ ID NO: 398207 - DNA, 201 bp, Homo sapiens
gtccaaacttccactttgatttcagcaacttccaacctgggccctttgtttttagctctcggactcaggcaagacagaaaacagtctctcgtgcaggttcyagaaaagtcagaatgttggatgtacattccagtcatttccttccctctgcaaaaagaagctgggagctgagggtttcctctctatcatgtggtactgtgc

SEQ ID NO: 398208 - DNA, 201 bp, Homo sapiens
attggtgagtaaagggaatgaactgattaaggggtacgtcccataaagatttaagttaagttggaatttctagcagtcttagatagttatatgatgcttcrgtaattgaagccatctgaggctaattatctttcctttatgtttgcaggggaaaaattattttagttttggaaagatcctcttcagaaataccactatctt

SEQ ID NO: 398209 - DNA, 201 bp, Homo sapiens
gaatgtgagttagtatagccattatggaaaatagtatggagcttcctcaaaattaaaaatagaactaccttatgatccaggattcatgtcactgggtatayacctaaaggaaatgaaatcagtatgttaaagagatacttgcactgtcatgttcattgcagcattaatcacagtagccaagatacagaatcaacctgcatg

SEQ ID NO: 398210 - DNA, 201 bp, Homo sapiens
agagtgcagtggcgtaatctcggctcactgcaagctccgcctcctgggttcacgccattctcctgcctcagtctccgaagtagctgggactacaggcgccygccaccacacccagctaatttttttgtattttttagtggagacggggtttcaccgtgttagccaggatggtttcgatctcctgaccttgtgatccgcctg

SEQ ID NO: 398211 - DNA, 201 bp, Homo sapiens
gtctcaaactcctgacctcaggtgatccacctgcctcagtctcccaaagtgctgggattacaggcgtgagccattgtgcccagccatgaaaatagttttgwctatggttcaacggccacacttttgagaattgccataatctagaatacttgagcgttgaaaatacattgctcaaagaataaagctggaagcatcacatta

SEQ ID NO: 398212 - DNA, 201 bp, Homo sapiens
agcttgtatcctgtaaaaactgtggaagaggtattctattttagcaggactaatatcaatgcttattctgaagagtgtagaaagcagcagtctagtattgrcatctggcctgttgccaaacctagattatggtgccatttcttcccttctttttcatagtccagggtgctttgatccttgcagagctgctttcagcagtga

SEQ ID NO: 398213 - DNA, 201 bp, Homo sapiens
ttctttgaggcattgttctaggccctggggatatggcaagtaaacagaagattttgagcttacatttgtggagggaggggacaaagacaaaatttaagtgrgtaaaatattttaatatgtcagtggaaagtgcagtggagcaggtaatgcaggagctagagcttgcagttgtacatagggtgatcaaggagggcttcactt

SEQ ID NO: 398214 - DNA, 201 bp, Homo sapiens
cgacagagcgagactccgtctcaaaaaataaataaataaataaaaaataaaacaaataaataaaagctaaagcattctaggaattacatgtctgggagctrctttgctgaatctcttggaagttgttaaggaaaggcatctgagatataccagatcagaccttcatcttctgagcttcccacttgtaaactgaaattttaa

SEQ ID NO: 398215 - DNA, 201 bp, Homo sapiens
aaggagctggaggccattaaccttagcaaactaacacaggaacagaaagcgaaataccacgttttcacttataagtgggagctgaatgatgagaacacatkatcacaaagaggggaacggcagacactgggcctacttgagggtggagggtgggaggagggagaggatcagaaaaaataactcttgagtactaggcagtac

SEQ ID NO: 398216 - DNA, 201 bp, Homo sapiens
agaatttacttaactctatttgatacatatccttatgaatgaacatttgttgactgtctactgaatgtgacaggtattgttctaagcactttatttgtaaygacttacttttacaaaacacccctatgagtaatgttctattgtccccttatttacagttgaggaaactgggtacagagagattaagtaactagtctgatg

SEQ ID NO: 398217 - DNA, 201 bp, Homo sapiens
tgcggtgagccatgatcatgccattacactccagcaacagagtgatacctcttccttaaaaaagaggagaaaagaaatttatgttaccactggattaataygaagaagtataaggttctctaggccatttcaattaattttcttattttttaaaaaaagactccacagcaacctattagattcaatattgtaaaaactata

SEQ ID NO: 398218 - DNA, 201 bp, Homo sapiens
aatagtaatctataataccatgcagtgatatatttatcttcctattcttttgtatatgggcatgtttatattattttaaaaagggaatcttagagtatgtrttatatgacttttttttgtagcttagcaatataacatggacatgtcgtcagtttggtaaatattgtattgcatcgttacttaaatgcttgtatagggtct

SEQ ID NO: 398219 - DNA, 201 bp, Homo sapiens
gtggtttcccccttgtttcttctttgtgtttttgcaatttcctttcctcccctgctttctttttatttatttatttatttatttatttatttatttatttatttttgagatggaatctcactctgtcgcccaggctagagtgcagtggcgtaatctcggctcactgcaagctccgcctcctgggttcacgccattctcctg

SEQ ID NO: 398220 - DNA, 201 bp, Homo sapiens
ctgtgcaagattttccaggtatacataaggcttttttgtggtaagaaaacataacaatgagatctactctcttaactcctttagtgtacgttacagtattrttacgtataagcacaatgttgtacagcagatctctagaacattttcatctcatttaaatgaaattttatacctgttgaatagcaactcttgctttccccc

SEQ ID NO: 398221 - DNA, 201 bp, Homo sapiens
gagtatgtgttatatgacttttttttgtagcttagcaatataacatggacatgtcgtcagtttggtaaatattgtattgcatcgttacttaaatgcttgtrtagggtcttattgtatgagtacattgcaatttgttcaattctctgttcttgaacttttatgagtttcattatcttggaattttatgcagtgttgtgatta

SEQ ID NO: 398222 - DNA, 201 bp, Homo sapiens
gaattcaacagcccttcatgctaaaaactctcaataaactaagtattgatggaacgtatgtcaaaataataagagctatttatgacaaacccacagccaayatcatactgaatgggcaaaaactggaagcattccctttgaaaactggcagaagacagggatgtcctctctcactactcctattcaacatagtgttggaag

SEQ ID NO: 398223 - DNA, 201 bp, Homo sapiens
ttttatgcagtttgtctagttaagcaacaatttgttcttgtaaattgtatttaaaaagttatcgttaagccaggcgctgtggctcacacctgtaaccccarcaccttgggaggccacagcaggcagatcgctagagcttacgagtttgagaccaccctgggcaatatggtgaaacctcgtctctacaaaaaatggaaaaat

SEQ ID NO: 398224 - DNA, 201 bp, Homo sapiens
ttcgatcaagtggaagaaagggtatcagtgattgaaaatcaaatgaatgaaatgaagcgagaagagaagtttagagaaaaaaagagtaaaaagaaatgaamaaagcctgcaagaaatatgggactgtgtgaaaaggccaaatctacatctgattggtatacctgaaagtgatggggagaatggaaccaagctggacaacac

SEQ ID NO: 398225 - DNA, 201 bp, Homo sapiens
catctggtcctgggctgtttttttgttgggatgtttttgattactgatggaatcttgttgtaggtcttaccaggttgtgtgttccccccccggattttctrttccttgatgattcagtcttggtagattgtatacttctaggaattatatattttgttctaggttatccagtttcttggcatatttttaaaaatgttttgt

SEQ ID NO: 398226 - DNA, 201 bp, Homo sapiens
ggaggttgctgtgagctgagatcgcgccattgcactccagtctggacaacgagtgaaactctttctcaaaaaaaacaaccaaaaaaacatttggccaggcrtgatggctcacacctgtcattccagcactttgggaggtctggccgggaggattgcttgagcccaggagtttgagaccagccctggcaatatagcaagatc

SEQ ID NO: 398227 - DNA, 201 bp, Homo sapiens
atgttttgcaataaattgcctcttaaatcaaacactttgtggatgcacatttgcttttcaaatcacactgtcctctgtatgtaattctcttagacttctarcaactttaaccctctgtcaatttcattttctttcttctgctgttgctatagtatttttcttatcccttgactctgatagtaaacctggccctctcagcag

SEQ ID NO: 398228 - DNA, 201 bp, Homo sapiens
taaatgtgtaaagacatcttcacctttgtagtatcatacagaatagtttcagtgcctaaaaatcctctgtgctctgcctgttcatctctcccttccccttsaactcctggcaatcattgatctttttactatcttcatagttttgccttttccagaatgtcatctagttggaattgtacaaatatgtgacctctttagatt

SEQ ID NO: 398229 - DNA, 201 bp, Homo sapiens
cagcatctcttctcctccaaaggattgcagctccccgcgagcaacggaacaaagctggacagataatgaatttgacgagttgacagaagtaggcttcagarggttggtaataacaaacctctctgagctaaaggaggatgttcaaacccatcacaaggaagctaaaaaccttgaaaaaagagtagatgaatggctatctag

SEQ ID NO: 398230 - DNA, 201 bp, Homo sapiens
gcattctctttcaaataattcctatacctctgtttcactggggttggtttccagagatttatcttcttcctttgtttgggccatgtttcactgattctctrttttccttaattctttgtgttggtttcattgcattagaaaaaaaaacagttacctttccagtgttcatggactggcattgtacaggagaacaccctcatc

SEQ ID NO: 398231 - DNA, 201 bp, Homo sapiens
gccataaaaaaggatgagttcatgtcctttgtagggacatggatgaagctggaaagcatcattctgagcaaactctcgaggacagaaaaccaaacactgcwtgttctcactcataggtgggagttgaacaatgagaacacttggacacagggtggggaacatcacacagtggggcctgtcgtcgggtcgggggctgggtga

SEQ ID NO: 398232 - DNA, 201 bp, Homo sapiens
gcatgaacctgggaggcggagcttgcagtgagccgagataacaccactgcactccagtctgtgcaacagagcaagactccgtctcaaaaaaaaaaaaaaaagaatattaggtttaaatcctatttctttgtctaaagctttgtagttttgagccacattttactcatctgtagaatgaggggaaatgatctaagcttcttc

SEQ ID NO: 398233 - DNA, 201 bp, Homo sapiens
aggtaacctcttacaaagttggaacattttcacagtccatctctcctccctagggaaaagctaggatttggggatgttggggattctacctgcttactctrcactgagctgggggagcggctgtagtgagctcatgcttgctagtccaaacttccactttgatttcagcaacttccaacctgggccctttgtttttagctc

SEQ ID NO: 398234 - DNA, 201 bp, Homo sapiens
ctttatgaaggtataatatacatattacagaagttacgttttgtttcgttttttgagacaaggtctcactcttgcccatgctggagaacagtggtatgaasatggctccctgcagccttgacgtcttgggctcaagtgatcctcctgcctcagactccaagtaactggggccacaggcacataccaccatgcctggttaat

SEQ ID NO: 398235 - DNA, 201 bp, Homo sapiens
tctctcctccctagggaaaagctaggatttggggatgttggggattctacctgcttactctgcactgagctgggggagcggctgtagtgagctcatgcttrctagtccaaacttccactttgatttcagcaacttccaacctgggccctttgtttttagctctcggactcaggcaagacagaaaacagtctctcgtgcagg

SEQ ID NO: 398236 - DNA, 201 bp, Homo sapiens
gattggtgagtaaagggaatgaactgattaaggggtacgtcccataaagatttaagttaagttggaatttctagcagtcttagatagttatatgatgcttyggtaattgaagccatctgaggctaattatctttcctttatgtttgcaggggaaaaattattttagttttggaaagatcctcttcagaaataccactatct

SEQ ID NO: 398237 - DNA, 201 bp, Homo sapiens
tgccctcatccttcactgggtcttcaagtgaaattcctgaattagaggagttacacatttttattaaagcctaatcttatgtaaatatttgtttacataaratcttagctgactctatacatttccttctgagtgctgattttctgtccagaagcctagagcttttgatttagttgttcttgggtgaggtctggacatctg

SEQ ID NO: 398238 - DNA, 201 bp, Homo sapiens
tcatagtccagggtgctttgatccttgcagagctgctttcagcagtgaaacgctcactggctcgaaccctggtcatcatagtcagtctgggatatggcatygtcaagtaagtattaacttcctgtatggaagagcaaattaaaatgctgattaaattaaaacagtattgcatgttcccaatgtagtagttctgaaatagtt

SEQ ID NO: 398239 - DNA, 201 bp, Homo sapiens
ctgttctggtatctggtattggtttagagactgttaataagggacatcacaaggtgatgggattcatttgaagcactctatttctgttttaatggttttayccaattttgccttcccaagatttttgttctacataaaaagttcatgccactttttaatataaaaaaatttaacaaaattaatgtatttttctcatttttt

SEQ ID NO: 398240 - DNA, 201 bp, Homo sapiens
gcgggtacctgtaatcccagctactcgggaggctgaagtgggagaatcacttgaacccaggaggctgagatagtgtcaatgcactccagcctgggcgacgrgagtgaaacttggtctcaaaaaaaaaaaaaaagggataattgatgagcagatgaattaattggtaattgaaggaagagttccgcttttattataacttag

SEQ ID NO: 398241 - DNA, 201 bp, Homo sapiens
tatcagttccaaaaatttaataagcatcaattttgaaatactgtcagagatgttttgatctagttactatatttattttccttacctgtaaaatgcgatcytgttacagtctctgaaaatgtttttatctacagcttcatcttcaacactaaataaaaagacattttgagaaatttatttcacacagggcttgtgaatcca

SEQ ID NO: 398242 - DNA, 201 bp, Homo sapiens
ggcgggtacctgtaatcccagctactcgggaggctgaagtgggagaatcacttgaacccaggaggctgagatagtgtcaatgcactccagcctgggcgacrggagtgaaacttggtctcaaaaaaaaaaaaaaagggataattgatgagcagatgaattaattggtaattgaaggaagagttccgcttttattataactta

SEQ ID NO: 398243 - DNA, 201 bp, Homo sapiens
tatccacaagggccatgactgggaaaaggtatgggagcagaaggagaattgggattttagggtgcagctacgctcaccctaaacttttggtggcctggggyatgtcttgaggcccagactgttaaccaggctctgctggcctgtttactcgtcaccacctctgcacctgctgtcttgagactccatccagccccaggcacg

SEQ ID NO: 398244 - DNA, 201 bp, Homo sapiens
aggctatactcaacacacgtgcaattgaaagcaggcgaggcaaaaccagggcagaggaaaggaaaggggtgtgtgtgtaggtatggatttatgggtaggtrggtcggtaggttagttgaagaggaggttctaagcagtataacctaagcctcttttctctttcttctgcttcaaacaccttaagaactgctcagggtagac

SEQ ID NO: 398245 - DNA, 201 bp, Homo sapiens
cgacctttagggctctggtttcctgtaagcagtgaattatttacctctgctcatagatatcaaattggcccttcccaggttgcagcagggtggggcggggmggcggccttgttcagtctgttaataggaggagcaacctccttgttcaaacagcacttacaggtggggacctgtttttgctaagtcatcctggggatgctc

SEQ ID NO: 398246 - DNA, 201 bp, Homo sapiens
ccaaagctaggtcaagccccattgctagttttactgatgaagaaatcaaggcatttttaaaagagtaacttgttgagttggcgggtgcttgggtcttttcrgtttctgtggcttccaggggtgggcctctgagatggcccttagcagatgtcctgcgatgcactgcacgcctcttgttgaaagcatcaggggtgacctgcc

SEQ ID NO: 398247 - DNA, 201 bp, Homo sapiens
gaagtgctaaatcttgaagagcagccaaagcatgggcaacaaagtgagaccccatctctacaaaaaaaaaaaaaaattagccgggcatggtggcctgtgtytgtagtctcagctactaaagaggctgaagcaggaggaatgcttgagcccagaagttcaaggctgcagtgagcaacacctcgtctgtcttgtctctctctc

SEQ ID NO: 398248 - DNA, 201 bp, Homo sapiens
attagccaagtggaaagaaaataagcaggaaagagaaaggttttcaaaaggcacgtgcctctgggcattacatgcacctatttctgattaatgggtcaagytgttatagatcttcagcccacacacctcgagttctcttttagggattcttctatttccacctatgattttaacgtacaagcagggagaatgaacccaagc

SEQ ID NO: 398249 - DNA, 201 bp, Homo sapiens
aaactagatgttcttggatgggggtcttccttcatcaaagcttcttcccatttgtacttcagttctaggacaaggcaagaagaaagcaagaagctgtaaaycccattcctctgggtctcaatttcaccctcagttcaaggagctgagtaggcagaggcaaaggctatactcaacacacgtgcaattgaaagcaggcgaggc

SEQ ID NO: 398250 - DNA, 201 bp, Homo sapiens
tggcagtggggagggaaaggcagggaccaggttttgagccaaagcatgcgtagctgagagcagtgagtggataggaggtgcagcagtctttgggtagcagmctactcaagaaaagaatgataattacatactcacaatctttagccatcaagcacttatttcctcaactccccctccccctggcctattgccaaaccctaa

SEQ ID NO: 398251 - DNA, 201 bp, Homo sapiens
aagaggctgaagcaggaggaatgcttgagcccagaagttcaaggctgcagtgagcaacacctcgtctgtcttgtctctctctctttcacagtgaaaaagartgaccctggggagggagtgtaggagggtgaaagagtttcatgttgtggatctttctcttcccccacccactgtccacgcactttgtctttttcctcccct

SEQ ID NO: 398252 - DNA, 201 bp, Homo sapiens
gccaaccacactgtggctacaggtggagggaagaggactccttcctccagagtgctatgttcaggaagtttctttaaccccatatggcccaagagtagctygtaggaggccctttaaagacggaacaagtaatttaccagttctactggggttcctgcccaccgtcccaaggtgggcgaggcctaggaagagggtcattct

SEQ ID NO: 398253 - DNA, 201 bp, Homo sapiens
cctctgcacctgctgtcttgagactccatccagccccaggcacgccacctgctcctgagcctccactatctccctgtgacgggtgaacttcgtgtactgtstctcgggtccatatatgaattgtgagcagggttcatctattttaaacacagatgtttacaaaataaagattatttcaaaccaccggtgtggctgcctgga

SEQ ID NO: 398254 - DNA, 201 bp, Homo sapiens
gctgagtcctgtgtggggcaccccacacgacacccctcttccctcaggaggcccgtgggcagacaggggagccggggctttgccctgctgctgtcctctcrtgtgatgaccctattgagtatcagtagccactactccccctgcctggccctgagagcggctctgctgtcatctcaagcagcccctgtccccagcccgtcc

SEQ ID NO: 398255 - DNA, 201 bp, Homo sapiens
caaagctaggtcaagccccattgctagttttactgatgaagaaatcaaggcatttttaaaagagtaacttgttgagttggcgggtgcttgggtcttttcgrtttctgtggcttccaggggtgggcctctgagatggcccttagcagatgtcctgcgatgcactgcacgcctcttgttgaaagcatcaggggtgacctgcct

SEQ ID NO: 398256 - DNA, 201 bp, Homo sapiens
ctgaagcaggaggaatgcttgagcccagaagttcaaggctgcagtgagcaacacctcgtctgtcttgtctctctctctttcacagtgaaaaagaatgaccytggggagggagtgtaggagggtgaaagagtttcatgttgtggatctttctcttcccccacccactgtccacgcactttgtctttttcctcccctaggaga

SEQ ID NO: 398257 - DNA, 201 bp, Homo sapiens; identical to SEQ ID NO: 88122

SEQ ID NO: 398258 - DNA, 201 bp, Homo sapiens
caaaagtgttgggttggtgtagctcaggtgggataaaaggagaggctgaatgaccatgttttggagtgtctggaataatggggtatgttttgttaagctargtctttaggtgcatgtgacataccaagagaaggtatatattttttaagattaaacactgaggctgtgtgatttttatagtttactgtctttctactatat

SEQ ID NO: 398259 - DNA, 201 bp, Homo sapiens
tttggacatcaggtgaggggtccctccttgtaatgcaccaaaagtgttgggttggtgtagctcaggtgggataaaaggagaggctgaatgaccatgttttkgagtgtctggaataatggggtatgttttgttaagctaggtctttaggtgcatgtgacataccaagagaaggtatatattttttaagattaaacactgagg

SEQ ID NO: 398260 - DNA, 201 bp, Homo sapiens
ggtgcttcttcctcttcccccacccccactgtccctcatgtgccatgggcctgcctccccagtgacctgcgaaagtggagcatcgaggtaggagggaaacrgcaaccagggagtcctcgagcctggggctgccctacctctacccattccccgaccagagctttgcccttgcttggctgcccgcctgcctctttggggaac

SEQ ID NO: 398261 - DNA, 201 bp, Homo sapiens
gctctgggctcatgatgtcatgatggcctggaactgactgaactagttagttctcacaggtcagaagcaggaactttctcccagaggaaggtatctgtctsttaaattggaaaggtagaggtggaaaagaagggttcccataggccttttggattgtcatgaatggtgatgctgagagggaataggacagggatggcagtg

SEQ ID NO: 398262 - DNA, 201 bp, Homo sapiens
cacccagctcaacgagctgcaatgccgctttcccaggcgcctggtggtccttggcttcccttgcaaccaatttggacatcaggtgaggggtccctccttgwaatgcaccaaaagtgttgggttggtgtagctcaggtgggataaaaggagaggctgaatgaccatgttttggagtgtctggaataatggggtatgttttgt

SEQ ID NO: 398263 - DNA, 201 bp, Homo sapiens; identical to SEQ ID NO: 88124

SEQ ID NO: 398264 - DNA, 201 bp, Homo sapiens; identical to SEQ ID NO: 88125

SEQ ID NO: 398265 - DNA, 201 bp, Homo sapiens
tgtttgttttatcttggtggtgggacatgtgctttgcctaaacttcaaacttcttatccttctgcctccataattgcaatcatctcactctccacactggstacattttatttaaaccttccaactgtggaggaaaaaaaaggagcatctaacccaagacaggtgtcacctagacaggaactatctgagagctaagagaat

SEQ ID NO: 398266 - DNA, 201 bp, Homo sapiens; identical to SEQ ID NO: 88126

SEQ ID NO: 398267 - DNA, 201 bp, Homo sapiens
ggatatacttatactaaaaacattttgtattaattgtttatctgaaattcagatttaactgggtgtcctgtactttattcagcaggcctacccctgccatscccccagtgcccccaagcctttcactgccatagcactgccctgctccttctccccttcccccggctccacctctctatctcctacccaaggcctagccca

SEQ ID NO: 398268 - DNA, 201 bp, Homo sapiens
gtgtgcaagtgtgtgtgcgcatgtgcatgtgtgtggaaagtatggtctgggtggctgtaagactggcccctcttgtcccctctgcaggcccagcccaatargaagcacctgatccacactctttctagccccagggatgctcaggaaagcagcctttctttagggctgtcatctgttctggggatctgttgctgtttcttg

SEQ ID NO: 398269 - DNA, 201 bp, Homo sapiens; identical to SEQ ID NO: 88127

SEQ ID NO: 398270 - DNA, 201 bp, Homo sapiens
atactaaaaacattttgtattaattgtttatctgaaattcagatttaactgggtgtcctgtactttattcagcaggcctacccctgccatgcccccagtgsccccaagcctttcactgccatagcactgccctgctccttctccccttcccccggctccacctctctatctcctacccaaggcctagcccagaacccacca

SEQ ID NO: 398271 - DNA, 201 bp, Homo sapiens; identical to SEQ ID NO: 88128

SEQ ID NO: 398272 - DNA, 201 bp, Homo sapiens
aggcctccagggctttgcactggcagtgccctctgccagggatgcccttccttctatctatgccgtcctggggagccacctgtgccttcgaggggcaaatragaccctttctatgaactcttttaatgcccctcctctctctccttgctcaaggctaaaccatctgctaaggccacactggaccttgaaaagatactaatt

SEQ ID NO: 398273 - DNA, 201 bp, Homo sapiens
agaagcaggatttgaaccaggctgacttacaggatctcatgacacctttgcctctgtcagggatgtgcctgtgtaagatagtcatttccctgattccttcrttggctaggtcttgagtacttgggggacatagcctagtgcagagcagagtcctgggctgagagtcaagcatgatggtgtctaagcctcaattatgtcatt

SEQ ID NO: 398274 - DNA, 201 bp, Homo sapiens
gaggctgaggttggggtactgcttgagcccaggaggcagaggttgctgtgagccaagatgtgcctctgcactcaaccctgggcaacagagtgagaccctgyctcaaaaaaaccaaaggccgctgtggtatgagccctgggtttatgtgtcagagtttctatcttccctcactacaaacttaattaagaactatttctgctg

SEQ ID NO: 398275 - DNA, 201 bp, Homo sapiens
cccaagtagctgggtttacaggcgcctgctaccacgcccagctaatttttgtatttttagtagagacaaggtttcgccatgttgactggcgaaccttgaastcgttcgctgggctcgaactcttgaactcaagtgatccacctgcctcagcctcccaaagtgctggggttgcaggtatgagccacctagcctgggcccatt

SEQ ID NO: 398276 - DNA, 201 bp, Homo sapiens
actcatatggggttttctcttggcttaggtatccctggattactgactccttgctactctgggtctgagccctctggcacctttggaccagtgaatcccaktctcaataatacctatgagttcatgagcacattcttcttagaagtcagctctgtcttcccagatttttatcttcatcttggaggagatgaggttgatttc

SEQ ID NO: 398277 - DNA, 201 bp, Homo sapiens
tagaggctaagtaacatgcccagggttacacagcttgtagggatggagcagaaattccagtcatgcataaattttgcttttgtcactgtacagtcttgtartatactcatacacgtctttgtcagtccagttagcaatttggaaaactactggcctctggcaggattaagctctaatcacatcttagtgttaattacttca

SEQ ID NO: 398278 - DNA, 201 bp, Homo sapiens
taaccagccagttttagaccaatataggggaaggacactggatttggagtcaggagacttgagttcaagtccaaaactttgccgataatttgccttgtgamcttcaggagagaatctcttctggccttattccctttttatgtatttatattctgttaaatggacatagtattaatacctaccatgattatctcactggca

SEQ ID NO: 398279 - DNA, 201 bp, Homo sapiens
agttcaagaccagcctggccaacatggtgaaactccatctctactaaaaatacaaaaattagccaggcgtggtggcaggcgcctgtaatcccagctactcrggaggctgaggcaggagaatcgcttgaacccaggaggcagaggttgcagtgagccaagatcatgccactgtactccagcctgggcgacagagcaagactc

SEQ ID NO: 398280 - DNA, 201 bp, Homo sapiens
tagctggggtgagggccacattgggaaggtggttgagagggaccctggagttaccccaccatcaccagactgttgttgcttgttttccctcaggtaccccygagcagaaggctctggtgattggtggagaggcttgtatgtggggagaatatgtggacaacacaaacctggtccccaggctctggtaagggttttcggggg

SEQ ID NO: 398281 - DNA, 201 bp, Homo sapiens
tggagtagcagtgctctagagctgcctttcattcagaagcagttgttgaggtcatggagttgtttgtttggtacaggccaagggcagtcagaaatatagasccctggttaagaagagctgtcacccagagcattcagacatgggtcagggcagctactgaggagaagaggggcacaacgagagtgagacagctgaacagat

SEQ ID NO: 398282 - DNA, 201 bp, Homo sapiens
ggtccctgcagggttcccttgtcctttgtcccatcctttcagatttggagtggttggttttcagcccaggggaaagacactgcttaatgaggaataggccmctggccaggctcaacccctagagcactggcacaaacagtctagaacccatctgagctaagcagacacttactagacactcctctcctctccaggctgctg

SEQ ID NO: 398283 - DNA, 201 bp, Homo sapiens
aactctctgggagccatccaacctggctgtggctcataacaaggtattgatcacttcctttggcctgagtgagtccagggtgcctagacaagaggtagcarcctgtggatgtccagcacctttgcagggaatacagggcccaatctggcacatgccccttttcctccaggcccagagcaggggctgttgccgaaaggctgt

SEQ ID NO: 398284 - DNA, 201 bp, Homo sapiens
gttcaagaccagcctggccaacatagcaaaaccctcatctctacaaaaaatacaaaaatcaggaggctgaggttggggtactgcttgagcccaggaggcasaggttgctgtgagccaagatgtgcctctgcactcaaccctgggcaacagagtgagaccctgcctcaaaaaaaccaaaggccgctgtggtatgagccctgg

SEQ ID NO: 398285 - DNA, 201 bp, Homo sapiens
  misc_feature (1)...(201): n = A,T,C or G
cacctaagtcccccagtgccaccatatttacagcattttagagtcaggaacagagggctaagtagaccaagagcattggctgcctttcagacatccatctntattctaaagggattgagttatttggggttagggtacagagatgggcaggatataaatagatgtcgccaacgtttctggatctccaagacctgtatcaga

SEQ ID NO: 398286 - DNA, 201 bp, Homo sapiens
acctgaagggtgtcttgtgcctttcaggggtcctacaaccctgtcacccacatctacacagcacaggatgtgaaggaggtcattgaatacgcacggctccrgggtatccgtgtgcttgcagagtttgacactcctggccacactttgtcctggggaccaggtaagaatgatgtctgggaccagagggactctgcttgttat

SEQ ID NO: 398287 - DNA, 201 bp, Homo sapiens
cataccgagtcaggccctgcttggccactgtctggtccctgcagggttcccttgtcctttgtcccatcctttcagatttggagtggttggttttcagcccwggggaaagacactgcttaatgaggaataggcccctggccaggctcaacccctagagcactggcacaaacagtctagaacccatctgagctaagcagacac

SEQ ID NO: 398288 - DNA, 201 bp, Homo sapiens
agcacaggatgtgaaggaggtcattgaatacgcacggctccggggtatccgtgtgcttgcagagtttgacactcctggccacactttgtcctggggaccargtaagaatgatgtctgggaccagagggactctgcttgttatgctcagagtgaagcttcagggcactggctcatggaagtggcatatcccagccttggtcc

SEQ ID NO: 398289 - DNA, 201 bp, Homo sapiens
agagggaccctggagttaccccaccatcaccagactgttgttgcttgttttccctcaggtacccctgagcagaaggctctggtgattggtggagaggcttrtatgtggggagaatatgtggacaacacaaacctggtccccaggctctggtaagggttttcgggggggaggtggagggttgggcctgagagcaggagttct

SEQ ID NO: 398290 - DNA, 201 bp, Homo sapiens
aatacctatgagttcatgagcacattcttcttagaagtcagctctgtcttcccagatttttatcttcatcttggaggagatgaggttgatttcacctgctrgtatgagccctttgatcttcccactgtggcctgatcagttgcttactcagaatagaagttagcacccgaggggctgcttagctcagctgctgctctcagg

SEQ ID NO: 398291 - DNA, 201 bp, Homo sapiens
cccaggaggcagaggttgcagtgagccaagatcatgccactgtactccagcctgggcgacagagcaagactctgtctcaaaaacaaacaaacaacaacaaycaaaaaaaaaccctgaagatatcttgtgacctcagcgtcaggaagtagtctctgggccaagggagatatcccttagcaaatgtaaaaagattctgggtga

SEQ ID NO: 398292 - DNA, 201 bp, Homo sapiens
ttatagggggccaggtgactaatccccaggcattaggctttcaggatgttgaaagattaatcttcattttctcttgggattcaggaagtccaacccagagwtccaggactttatgaggaagaaaggcttcggtgaggacttcaagcagctggagtccttctacatccagacgtgaggaaggaaggagggtgggtggggtcc

SEQ ID NO: 398293 - DNA, 201 bp, Homo sapiens
taagtgaaggaaggaaggaggctgaggcatgagaagcacttgaacctgggaggtggaggttgcagtgagctgagattgtgccactgcactccagcctgggygacacagcaagactctgtctcaaaaaaaaaaaaaaaaaaaaaaagcctttcctggggaagttcctaactctcttgagtttaatgtgcagtcttatctgac

SEQ ID NO: 398294 - DNA, 201 bp, Homo sapiens
tccagacatttaataagcatggtgtggagcatggtgcttgatggagctgataaagtccaaatttttccaagtaaagtggctaagtctaattctgccattaractgcatttttttttttttttgagatggagtcttgctctgttgcccaggctggaatgcagtggtgtgattttgactcactgcaacctccacctcctgggt

SEQ ID NO: 398295 - DNA, 201 bp, Homo sapiens; identical to SEQ ID NO: 88146

SEQ ID NO: 398296 - DNA, 201 bp, Homo sapiens
tgtcccatgttgcctgtgtatgaataaggcccaggaatctcctcagctttgtgtccttactgccatttgaccttttataacagattcagccagacacaatsatacaggtgtggcgagaggatattccagtgaactatatgaaggagctggaactggtcaccaaggccggcttccgggcccttctctctgccccctggtacc

SEQ ID NO: 398297 - DNA, 201 bp, Homo sapiens
tgagtccagggtgcctagacaagaggtagcagcctgtggatgtccagcacctttgcagggaatacagggcccaatctggcacatgccccttttcctccagscccagagcaggggctgttgccgaaaggctgtggagcaacaagttgacatctgacctgacatttgcctatgaacgtttgtcacacttccgctgtgaattgc

SEQ ID NO: 398298 - DNA, 201 bp, Homo sapiens; identical to SEQ ID NO: 88148

SEQ ID NO: 398299 - DNA, 201 bp, Homo sapiens
ataaactatgttaacaggaaaatccagaatttgtaggctgagtggtgtttgggacagttgtattaggctggcgttggacaattgctctctgggaaggtggstgcttatggtcatttatagaggtggggagcatttagggagagagcgaccctgagaacagtcacagattggctttttaagaatcctgggagagttgtcttc

SEQ ID NO: 398300 - DNA, 201 bp, Homo sapiens
cttttcctccaggcccagagcaggggctgttgccgaaaggctgtggagcaacaagttgacatctgacctgacatttgcctatgaacgtttgtcacacttcygctgtgaattgctgaggtaagcaagctgtggggccttcgcaaggcggagcaggccagatccagggctggggaaccccttagagagaggaagacaataatt

SEQ ID NO: 398301 - DNA, 201 bp, Homo sapiens
aaaacaaaacaaaaaaaaaacagtgaaattaagaggttgagaggtagagtgagaatcatgaaaagtaaatttgattttgacgtgttgactatgaggtatcwagcaaacagttagctatgtagtactagagcttgggagaatgagtttgaacacttccgaggagaagaaggtccaaaaggcaaccacaggagggtggttgag

SEQ ID NO: 398302 - DNA, 201 bp, Homo sapiens
ttttcctccaggcccagagcaggggctgttgccgaaaggctgtggagcaacaagttgacatctgacctgacatttgcctatgaacgtttgtcacacttccrctgtgaattgctgaggtaagcaagctgtggggccttcgcaaggcggagcaggccagatccagggctggggaaccccttagagagaggaagacaataatta

SEQ ID NO: 398303 - DNA, 201 bp, Homo sapiens
caatgagataagaagcatatgtaccagaatgtaagactgatctcttcatcaagaaaatcttgtatgaaaaaatgttagaactagacagtgtgtttactctsacataattgatttacattcaggcttcatataagttttctatatagtgaccagccagtaacacagtttgcaaattggcagctaatctgcagaccatacttg

SEQ ID NO: 398304 - DNA, 201 bp, Homo sapiens
agtctgtggagggtgaagaatcttggaacttacaggaggaggtaccatgatctagactaaattcagcagcactaaggagaaggccccagctcagggcagtyggcttcacagactcccactttactgggataagaagtttgacaaggttggccttgacttctctcctagctacaccaattcacttcccaggcttggaatacc

SEQ ID NO: 398305 - DNA, 201 bp, Homo sapiens
gatccttctgtcatctgctccattagctcctaggcttttgcaaaactggaaacccttcatctggagccctcaagagcagtactacttaatatgccaatctkcaatgagataagaagcatatgtaccagaatgtaagactgatctcttcatcaagaaaatcttgtatgaaaaaatgttagaactagacagtgtgtttactct

SEQ ID NO: 398306 - DNA, 201 bp, Homo sapiens
caggaatctcctcagctttgtgtccttactgccatttgaccttttataacagattcagccagacacaatcatacaggtgtggcgagaggatattccagtgractatatgaaggagctggaactggtcaccaaggccggcttccgggcccttctctctgccccctggtacctgaaccgtatatcctatggccctgactggaa

SEQ ID NO: 398307 - DNA, 201 bp, Homo sapiens
tctgagccctctggcacctttggaccagtgaatcccagtctcaataatacctatgagttcatgagcacattcttcttagaagtcagctctgtcttcccagwtttttatcttcatcttggaggagatgaggttgatttcacctgctggtatgagccctttgatcttcccactgtggcctgatcagttgcttactcagaatag

SEQ ID NO: 398308 - DNA, 201 bp, Homo sapiens
agttcagtctctcattattctctacctccaataaaaaggggcctcctaactggtttcttatgcaactactcaacatggtatttctaaaatgcagatctttygggatgattttcaattgctcagagaataaattccttgactttctacgtaaggccctgcaggaccaggcccctgtcattatctctgagcactctccatctt

SEQ ID NO: 398309 - DNA, 201 bp, Homo sapiens
ccatagtaagcttcctttgaaactgacatgttcaatgtttgttctgcacagttctttatcaacaagactgagattgaggactttccccgctttcctcaccrgggcttgctgttggatacatctcgccattacctgccactctctagcatcctggacactctggtaaccaggccttaaggccttcttcacacttaagagttc

SEQ ID NO: 398310 - DNA, 201 bp, Homo sapiens
acttccgctgtgaattgctgaggtaagcaagctgtggggccttcgcaaggcggagcaggccagatccagggctggggaaccccttagagagaggaagacartaattaacaatagctaacacttacagaggcttatagtcagccctcatccacggattcaaccaactgcgataaaaagtattcaggaaaaaaaaaatacaac

SEQ ID NO: 398311 - DNA, 201 bp, Homo sapiens
cccatagtaagcttcctttgaaactgacatgttcaatgtttgttctgcacagttctttatcaacaagactgagattgaggactttccccgctttcctcacyggggcttgctgttggatacatctcgccattacctgccactctctagcatcctggacactctggtaaccaggccttaaggccttcttcacacttaagagtt

SEQ ID NO: 398312 - DNA, 201 bp, Homo sapiens
gagacaggtgcattttagagatagacactgaagcacagagttcaggaccttgcccaaagtcactaagaagcaggatttgaaccaggctgacttacaggatstcatgacacctttgcctctgtcagggatgtgcctgtgtaagatagtcatttccctgattccttcgttggctaggtcttgagtacttgggggacatagcct

SEQ ID NO: 398313 - DNA, 201 bp, Homo sapiens; identical to SEQ ID NO: 88157

SEQ ID NO: 398314 - DNA, 201 bp, Homo sapiens
tggcttaggtatccctggattactgactccttgctactctgggtctgagccctctggcacctttggaccagtgaatcccagtctcaataatacctatgagytcatgagcacattcttcttagaagtcagctctgtcttcccagatttttatcttcatcttggaggagatgaggttgatttcacctgctggtatgagccctt

SEQ ID NO: 398315 - DNA, 201 bp, Homo sapiens; identical to SEQ ID NO: 88166

SEQ ID NO: 398316 - DNA, 201 bp, Homo sapiens
gagagactgtgatgggttcacagtgtgcactttaacctacaggatgtcatggcgtacaataaattgaacgtgttccactggcatctggtagatgatccttycttcccatatgagagcttcacttttccagagctcatgagaaaggtatgttcccgtttcactcagaccaagtttatgggtcaatgtctgaatctggctgtg

SEQ ID NO: 398317 - DNA, 201 bp, Homo sapiens; identical to SEQ ID NO: 88172

SEQ ID NO: 398318 - DNA, 201 bp, Homo sapiens
agggctccagacccaacctggtcacagaagagcctctcccccatgcatactcatccacctccctcccctagagctattctcctttgggtttcttgctgctkcaattttatacaaccattatttaaatattattaaacacatattgttctctaggcactgtggtagtgggtttttttgttgtttttgtttttgagactgtct

SEQ ID NO: 398319 - DNA, 201 bp, Homo sapiens
catgcatactcatccacctccctcccctagagctattctcctttgggtttcttgctgcttcaattttatacaaccattatttaaatattattaaacacatrttgttctctaggcactgtggtagtgggtttttttgttgtttttgtttttgagactgtctcaaaaactctgtcgcccaggctgacagtgcagtggcacaat

SEQ ID NO: 398320 - DNA, 201 bp, Homo sapiens; identical to SEQ ID NO: 88177

SEQ ID NO: 398321 - DNA, 201 bp, Homo sapiens
tgatcactttctcacaatttattctgggaccccttttctcagctctcttagctcctgataggggttatccatgaaaagtccaactcttgcaggctgagttktctctgtgtctgtcctcatgagtatatgtcttggcctctcttctcaatattcttgtgaaggcacaggaaatatagataagaggtatgtgggttttgaagg

SEQ ID NO: 398322 - DNA, 201 bp, Homo sapiens
tggctcacgcctgtaatccaagcactttggtaggccaaggcagggggattgcttgagcctaggagttcaagaccagcctggccaacatagcaaaaccctcrtctctacaaaaaatacaaaaatcaggaggctgaggttggggtactgcttgagcccaggaggcagaggttgctgtgagccaagatgtgcctctgcactcaa

SEQ ID NO: 398323 - DNA, 201 bp, Homo sapiens
catgttacccaggctggtcttgaactcctgggctcaagcaatctgcccaccttggcctgccagagtggtagaattacaggcatgagtcactacacctggcyggcagagctaactttagttagaacaaggtcataggagagagacgttcaaagccttaacttggggccaggtgcagtggctcacacctgtaatcctagcact

SEQ ID NO: 398324 - DNA, 201 bp, Homo sapiens; identical to SEQ ID NO: 88178

SEQ ID NO: 398325 - DNA, 201 bp, Homo sapiens
  misc_feature (1)...(201): n = A,T,C or G
tgggaggcaggaaggtctgggccagacatttccagttagtaaatgaaacaacttagctggggtgagggccacattgggaaggtggttgagagggaccctgnagttaccccaccatcaccagactgttgttgcttgttttccctcaggtacccctgagcagaaggctctggtgattggtggagaggcttgtatgtggggaga

SEQ ID NO: 398326 - DNA, 201 bp, Homo sapiens
catagcaaaaccctcatctctacaaaaaatacaaaaatcaggaggctgaggttggggtactgcttgagcccaggaggcagaggttgctgtgagccaagatrtgcctctgcactcaaccctgggcaacagagtgagaccctgcctcaaaaaaaccaaaggccgctgtggtatgagccctgggtttatgtgtcagagtttcta

SEQ ID NO: 398327 - DNA, 201 bp, Homo sapiens
ggagctggaactggtcaccaaggccggcttccgggcccttctctctgccccctggtacctgaaccgtatatcctatggccctgactggaaggatttctacrtagtggaacccctggcatttgaaggtgaaagcagagagctctccttgctaaccaaaggaggctgggttggggcacaggatgggaggcaggaaggtctggg

SEQ ID NO: 398328 - DNA, 201 bp, Homo sapiens
ttttggtatccacgggggtcctgaaacaaatcccctgtggatactgagggacaactgtattttgtggcaaacactgtgctaagtttgttacaaatattgtytcatttagtcttcaccacagccccatgagacaggtgcattttagagatagacactgaagcacagagttcaggaccttgcccaaagtcactaagaagcagg

SEQ ID NO: 398329 - DNA, 201 bp, Homo sapiens; identical to SEQ ID NO: 88132

SEQ ID NO: 398330 - DNA, 201 bp, Homo sapiens
gtgtcttgtgcctttcaggggtcctacaaccctgtcacccacatctacacagcacaggatgtgaaggaggtcattgaatacgcacggctccggggtatccrtgtgcttgcagagtttgacactcctggccacactttgtcctggggaccaggtaagaatgatgtctgggaccagagggactctgcttgttatgctcagagt

SEQ ID NO: 398331 - DNA, 201 bp, Homo sapiens
gcccaacatcgcaagtttgaggctgaaaccggagagactgtgatgggttcacagtgtgcactttaacctacaggatgtcatggcgtacaataaattgaacrtgttccactggcatctggtagatgatccttccttcccatatgagagcttcacttttccagagctcatgagaaaggtatgttcccgtttcactcagaccaa

SEQ ID NO: 398332 - DNA, 201 bp, Homo sapiens; identical to SEQ ID NO: 88135

SEQ ID NO: 398333 - DNA, 201 bp, Homo sapiens
atcctcctggtttggattgggctttaatggtcggagcactctccttttctctctagaaaggccacagagtgctgggtgcagtggctcacgcctgtaatccmagcactttggtaggccaaggcagggggattgcttgagcctaggagttcaagaccagcctggccaacatagcaaaaccctcatctctacaaaaaatacaaa

SEQ ID NO: 398334 - DNA, 201 bp, Homo sapiens
tccctgcctctacagagactgatcctcctggtttggattgggctttaatggtcggagcactctccttttctctctagaaaggccacagagtgctgggtgcrgtggctcacgcctgtaatccaagcactttggtaggccaaggcagggggattgcttgagcctaggagttcaagaccagcctggccaacatagcaaaaccct

SEQ ID NO: 398335 - DNA, 201 bp, Homo sapiens
caatcatacaggtgtggcgagaggatattccagtgaactatatgaaggagctggaactggtcaccaaggccggcttccgggcccttctctctgccccctgstacctgaaccgtatatcctatggccctgactggaaggatttctacgtagtggaacccctggcatttgaaggtgaaagcagagagctctccttgctaacca

SEQ ID NO: 398336 - DNA, 201 bp, Homo sapiens
tgaagggtgtcttgtgcctttcaggggtcctacaaccctgtcacccacatctacacagcacaggatgtgaaggaggtcattgaatacgcacggctccgggdtatccgtgtgcttgcagagtttgacactcctggccacactttgtcctggggaccaggtaagaatgatgtctgggaccagagggactctgcttgttatgct

SEQ ID NO: 398337 - DNA, 201 bp, Homo sapiens
tttcactttgaaactggggactctgataattttcatggggcttctgcagggtttccagaagaggggccccagctgttgagaacatacaatactctgggttyaacatacctgtgtgtgggccttgctagactctaggagacagtgtcagtggactaggggagtccttctggggcagttgctgtccaccacacctcagctccc

SEQ ID NO: 398338 - DNA, 201 bp, Homo sapiens
ttaggtatccctggattactgactccttgctactctgggtctgagccctctggcacctttggaccagtgaatcccagtctcaataatacctatgagttcakgagcacattcttcttagaagtcagctctgtcttcccagatttttatcttcatcttggaggagatgaggttgatttcacctgctggtatgagccctttgat

SEQ ID NO: 398339 - DNA, 201 bp, Homo sapiens
atgtagtaattatttgtaaaatatattaacgttaaagagctactttgtgtaaacatttgtaagaaggctttatgggtttgggttttgttttcttttttttyttttttttttttcttttagagacagggtcttgttttgtcacccagtctggagtgcagtggcacaaacacagcccactgcagcctcgacctccgaggctca

SEQ ID NO: 398340 - DNA, 201 bp, Homo sapiens; identical to SEQ ID NO: 88158

SEQ ID NO: 398341 - DNA, 201 bp, Homo sapiens
ccttaaccaactaaatgagttcatttctgtcatttcagataccctgaccataaatgatgaccagtgtttactcctctctgagactgtctggggagctctcygaggtaacaaattggggctgattaaaagagagagagaaaggatgatgtgggaaggttggtgttggtggagtgcagtggcccagtccctgctcactgcaac

SEQ ID NO: 398342 - DNA, 201 bp, Homo sapiens; identical to SEQ ID NO: 88160

SEQ ID NO: 398343 - DNA, 201 bp, Homo sapiens
gtgtgtggagcggcctgagagctcgcccaacatcgcaagtttgaggctgaaaccggagagactgtgatgggttcacagtgtgcactttaacctacaggatstcatggcgtacaataaattgaacgtgttccactggcatctggtagatgatccttccttcccatatgagagcttcacttttccagagctcatgagaaaggt

SEQ ID NO: 398344 - DNA, 201 bp, Homo sapiens; identical to SEQ ID NO: 88167

SEQ ID NO: 398345 - DNA, 201 bp, Homo sapiens
agactgtgatgggttcacagtgtgcactttaacctacaggatgtcatggcgtacaataaattgaacgtgttccactggcatctggtagatgatccttcctycccatatgagagcttcacttttccagagctcatgagaaaggtatgttcccgtttcactcagaccaagtttatgggtcaatgtctgaatctggctgtggcc

SEQ ID NO: 398346 - DNA, 201 bp, Homo sapiens
ctgaagggtgtcttgtgcctttcaggggtcctacaaccctgtcacccacatctacacagcacaggatgtgaaggaggtcattgaatacgcacggctccggrgtatccgtgtgcttgcagagtttgacactcctggccacactttgtcctggggaccaggtaagaatgatgtctgggaccagagggactctgcttgttatgc

SEQ ID NO: 398347 - DNA, 201 bp, Homo sapiens
cctgagagctcgcccaacatcgcaagtttgaggctgaaaccggagagactgtgatgggttcacagtgtgcactttaacctacaggatgtcatggcgtacartaaattgaacgtgttccactggcatctggtagatgatccttccttcccatatgagagcttcacttttccagagctcatgagaaaggtatgttcccgtttc

SEQ ID NO: 398348 - DNA, 201 bp, Homo sapiens
aacctgaagggtgtcttgtgcctttcaggggtcctacaaccctgtcacccacatctacacagcacaggatgtgaaggaggtcattgaatacgcacggctcyggggtatccgtgtgcttgcagagtttgacactcctggccacactttgtcctggggaccaggtaagaatgatgtctgggaccagagggactctgcttgtta

SEQ ID NO: 398349 - DNA, 201 bp, Homo sapiens
gagagctcgcccaacatcgcaagtttgaggctgaaaccggagagactgtgatgggttcacagtgtgcactttaacctacaggatgtcatggcgtacaatamattgaacgtgttccactggcatctggtagatgatccttccttcccatatgagagcttcacttttccagagctcatgagaaaggtatgttcccgtttcact

SEQ ID NO: 398350 - DNA, 201 bp, Homo sapiens
ctcagatattaaagaagtgactaaattaataaatggcatagttcattataatctggatctcctaaaataccttctttggccatttcttctgtatctggaaygttgtagatatgtagtaattatttgtaaaatatattaacgttaaagagctactttgtgtaaacatttgtaagaaggctttatgggtttgggttttgtttt

SEQ ID NO: 398351 - DNA, 201 bp, Homo sapiens
ttctgatatctggggagtcttgtgggcattttgagtatcttctactctgctagctttcaggaagtgtgaacctgaagggtgtcttgtgcctttcaggggtyctacaaccctgtcacccacatctacacagcacaggatgtgaaggaggtcattgaatacgcacggctccggggtatccgtgtgcttgcagagtttgacact

SEQ ID NO: 398352 - DNA, 201 bp, Homo sapiens
agtgtgaacctgaagggtgtcttgtgcctttcaggggtcctacaaccctgtcacccacatctacacagcacaggatgtgaaggaggtcattgaatacgcayggctccggggtatccgtgtgcttgcagagtttgacactcctggccacactttgtcctggggaccaggtaagaatgatgtctgggaccagagggactctgc

SEQ ID NO: 398353 - DNA, 201 bp, Homo sapiens
acacttgtcttgctttgtgtgactcgtgtccttacgtgtaggactgtgcgtgggggtttatgtatttgtgacactcatatggggttttctcttggcttagrtatccctggattactgactccttgctactctgggtctgagccctctggcacctttggaccagtgaatcccagtctcaataatacctatgagttcatgagc

SEQ ID NO: 398354 - DNA, 201 bp, Homo sapiens
gggttgcaggtatgagccacctagcctgggcccatttttattttaaaaattaataaatttatgtatttacaaaaaaattggaaaattgtgcaaaatgttayaactaaagttatcccttgagatctagaattttagggagatgttctctttccagtggggatagggttgggagggacagatcagttttaaaagtaggggaaa

SEQ ID NO: 398355 - DNA, 201 bp, Homo sapiens
taaaaggaaaatagagctgtttcttaattaggggagatgtggcgggaaggcaaagtttgtttcaattggaggaagcaatatgtgcaaagaaaaatatggaraaaatatggcattttcagggttctgttaagagttcattgttcattgtgagagttcctgcacaggagcagaaaaagacaaggcattttcttatgattaccc

SEQ ID NO: 398356 - DNA, 201 bp, Homo sapiens
tatttttagtagagacagggtctcaccgtgttggccaggctggtcactaactcccgaccttaagtgatccgcctgcctcagcctcccaaagtgctgagatyatggacctgagccaccgcaccaggcctatacaactgttttgattttaaaaaaagatacaaagttttcagtgaacccaaagagaagagtaggtttacatga

SEQ ID NO: 398357 - DNA, 201 bp, Homo sapiens
ctgtggaattgtccctggaagttgacaggttttaccctgtgcagcatcagcaactgctgctgccctagtcaggggctctgggaagcagtaggagagtctgygggctgatgttctaggtgccagcaggggacaggtagctgggggcagggggaatgatgctaccacagacactgtctgtccagctcttgctaaagacatgta

SEQ ID NO: 398358 - DNA, 201 bp, Homo sapiens
tttttatcttctaggtccagccatgaacccaggctccttggaaacccaagcttatgatcactttctcacaatttattctgggaccccttttctcagctctyttagctcctgataggggttatccatgaaaagtccaactcttgcaggctgagttgtctctgtgtctgtcctcatgagtatatgtcttggcctctcttctca

SEQ ID NO: 398359 - DNA, 201 bp, Homo sapiens; identical to SEQ ID NO: 88179

SEQ ID NO: 398360 - DNA, 201 bp, Homo sapiens
agtttgaggctgaaaccggagagactgtgatgggttcacagtgtgcactttaacctacaggatgtcatggcgtacaataaattgaacgtgttccactggcrtctggtagatgatccttccttcccatatgagagcttcacttttccagagctcatgagaaaggtatgttcccgtttcactcagaccaagtttatgggtcaa

SEQ ID NO: 398361 - DNA, 201 bp, Homo sapiens
ctgagtggaggctttgtagtgagggattttcattacagggattttcttattccttaggctttctgaagtatgattatcccagtgttattgatgaggaaacygaggttcacccagctattaaagtggcagacattttaacacaggtttaactaagacccacccatctcacccttttggtttctctctcttgatgcctcatgt

SEQ ID NO: 398362 - DNA, 201 bp, Homo sapiens
catttcccctgccctcctccctgggagaagcactcaggccttacatagaggtctcctcctctggaagcctttctagacagccccataggagtctccagtcyccaaatctcatcttcatacattcagcgagtactttccagctccttgtttgattgtagaacctaactttattgtaattaactgccttccttgtctattttt

SEQ ID NO: 398363 - DNA, 201 bp, Homo sapiens
ttcttgaagacaccatgttgtacaccttaaatatatatacaatttttatttgttaattaaaaaataaataagtgaggccaggcgcagtgggtcacgcctgkaatcccagcactttgggaggccgaggcaggtggatcacgaggtcaggagttcaagaccagcctggccaatatggtgaaaccccgtctctactaaaaatac

SEQ ID NO: 398364 - DNA, 201 bp, Homo sapiens
gtccccaagtggacctcttctacctacacgcacctgaccacggcaccccggtggaagagacgctgcatgcctgccagcggctgcaccaggaggtgaggggsccctccgagctccaaaggtgggctcctgctcctttctttatcctgatcctactcatgagagcagaggcaccagggcagtcccagggtggggcagggaata

SEQ ID NO: 398365 - DNA, 201 bp, Homo sapiens
tctcacccttttggtttctctctcttgatgcctcatgtcttcctggttaaaacttatttcctgatcagtggcagtgacccacacctgtaatccagcacttygggaggccgagatgggaggattgcttgatctcaagcatttgagtctagcctgggcaagaaaatgggaccctatctctacaacaaatcaaaaacattagcc

SEQ ID NO: 398366 - DNA, 201 bp, Homo sapiens
agggaatagccccattccctggggccccaccctggcctccccttcctggtctgggctacactgcgttctgactggagcctcacccatgcagggcaagttcrtggagcttggcctctccaactatgctagctgggaagtggccgagatctgtaccctctgcaagagcaatggctggatcctgcccactgtgtaccaggtgag

SEQ ID NO: 398367 - DNA, 201 bp, Homo sapiens
gggcagtcccagggtggggcagggaatagccccattccctggggccccaccctggcctccccttcctggtctgggctacactgcgttctgactggagcctyacccatgcagggcaagttcgtggagcttggcctctccaactatgctagctgggaagtggccgagatctgtaccctctgcaagagcaatggctggatcctg

SEQ ID NO: 398368 - DNA, 201 bp, Homo sapiens
tgaggcaggaggattacttgagtctaagaggttgaggctgcagtgagccataatgatgccactgcactccagtgtaggcaacagagtaagaccatgtatcmaaaagcaaaaagagagcccaggagggaatcctgccccatctgagcagccttcgtgtccctagggaagtccctaggctactgagtcctcaggagtaaagat

SEQ ID NO: 398369 - DNA, 201 bp, Homo sapiens
gagagcagaggcaccagggcagtcccagggtggggcagggaatagccccattccctggggccccaccctggcctccccttcctggtctgggctacactgcrttctgactggagcctcacccatgcagggcaagttcgtggagcttggcctctccaactatgctagctgggaagtggccgagatctgtaccctctgcaagag

SEQ ID NO: 398370 - DNA, 201 bp, Homo sapiens
taatttttatttttgtagagggagggtcttgctacattgtccaggattatctcaaactcttgggctcaagtaattctccctactcagcctcccaaagtacycccaaactaggtttacagacttgagccactacatctggaccaacagctggggttctttataggggaaagaatagtgcagaattaactcatttccaagctg

SEQ ID NO: 398371 - DNA, 201 bp, Homo sapiens
ggcctggggctcgggctgggcggtggcgactgcagaggtaacagtagctgcagatcctccccatgcatcgtgtagagctgagcctgtccccagccgtgcaycaccccgctcgggcccggccgcgggcagcaccgacggattcgtccctcgctccccaccccaggtccaccccgcagctctgggaaccccgggacaactaga

SEQ ID NO: 398372 - DNA, 201 bp, Homo sapiens
tttttagtagagatggggtttcaccatattggccaggctggtcctcaactcctgacctcaagtgatctgcccacctcagcctcccaaagtgctgggattayaggtgtaagccaccacgcccggccacgttacatactattaataatgaagattttgttcctgagttggtttttcttctctaacccttccccgcttccgtct

SEQ ID NO: 398373 - DNA, 201 bp, Homo sapiens
gcctcccaagtaactgggattacaggtgcacaccgccacgcccagctaatttttgtatttttagtagagatggggtttcaccatattggccaggctggtcytcaactcctgacctcaagtgatctgcccacctcagcctcccaaagtgctgggattataggtgtaagccaccacgcccggccacgttacatactattaata

SEQ ID NO: 398374 - DNA, 201 bp, Homo sapiens
aatcttgctctgtcacccagggtggagtgcagtggcacgatctcagctcactgcaacctctgcctcagcctcccaagtaactgggattacaggtgcacacsgccacgcccagctaatttttgtatttttagtagagatggggtttcaccatattggccaggctggtcctcaactcctgacctcaagtgatctgcccacctc

SEQ ID NO: 398375 - DNA, 201 bp, Homo sapiens
aggcccacgctgtttctagttcacctggctgcatgttgttgtttttgttattattattatttgagacggaatcttgctctgtcacccagggtggagtgcartggcacgatctcagctcactgcaacctctgcctcagcctcccaagtaactgggattacaggtgcacaccgccacgcccagctaatttttgtatttttagt

SEQ ID NO: 398376 - DNA, 201 bp, Homo sapiens
accccgcagctctgggaaccccgggacaactagacagtgctttgccctgactcctttcccccactctccttcccttgggagttgcagcgcgagagtctccscccagcctggtctgacccatcgcttcccacctccattgatgcccccgcctccaaacctgccaggtgcccacaaccggtccccacccaggctctccccctt

SEQ ID NO: 398377 - DNA, 201 bp, Homo sapiens
agacgtcattgaagaggctgcagtgtccccaagtggacctcttctacctacacgcacctgaccacggcaccccggtggaagagacgctgcatgcctgccascggctgcaccaggaggtgagggggccctccgagctccaaaggtgggctcctgctcctttctttatcctgatcctactcatgagagcagaggcaccagggc

SEQ ID NO: 398378 - DNA, 201 bp, Homo sapiens
actggacacggccttcatgtacagcgacggccagtccgagaccatcctgggcggcctggggctcgggctgggcggtggcgactgcagaggtaacagtagcygcagatcctccccatgcatcgtgtagagctgagcctgtccccagccgtgcaccaccccgctcgggcccggccgcgggcagcaccgacggattcgtccctc

SEQ ID NO: 398379 - DNA, 201 bp, Homo sapiens
ttgggatggaaaatcactaaagcctgacagtgtccggtcccagctggagacgtcattgaagaggctgcagtgtccccaagtggacctcttctacctacacrcacctgaccacggcaccccggtggaagagacgctgcatgcctgccagcggctgcaccaggaggtgagggggccctccgagctccaaaggtgggctcctgc

SEQ ID NO: 398380 - DNA, 201 bp, Homo sapiens
ctcctgtgcttaccatattgtaccatcatcctctagggctccaggagggcagagatccattgtgttcagttcatctctgcatactcagtctctagtgcaargcctggcacagccagcaggttggtgactaatgatagttattctaataggtgaacattgagaactcacatatatgacattatttaatccccaggacctccc

SEQ ID NO: 398381 - DNA, 201 bp, Homo sapiens; identical to SEQ ID NO: 88181

SEQ ID NO: 398382 - DNA, 201 bp, Homo sapiens
actcacagctgcaggtaaccagcgaccctgggtgctcagcttcttcccttccagggggaccagcgtcacctttaggtgaagcccaaagcatttgatttctsaattcctctgaaatttttctttcttccaattctcataagcactcttcccactggtctttgatggtatctgagtggaggctttgtagtgagggattttcat

SEQ ID NO: 398383 - DNA, 201 bp, Homo sapiens
caggagtaaagatccattgaggtctctgctgaggggcccagcatcctgggtggttctgatgcccagcaaagtgggagacctatgactagagaggacacccrcccctcagggctgcagggtgtggggtggggcagtggtcctggatggctatttggttgcggctcccagtgtgacccccatggtactgacccctgtgctaac

SEQ ID NO: 398384 - DNA, 201 bp, Homo sapiens
ggggctgattgctgccttcccgcagggggcctgctgactggcaagtacaagtatgaggacaaggacgggaaacagcctgtgggccgcttctttgggaatarctgggctgagacctacaggaatcggtgagccgggggtgggcttggtgaggatggctggggtggggtcaaatctatgtggaatgaagtcctgggctgttcc

SEQ ID NO: 398385 - DNA, 201 bp, Homo sapiens
cggctgcaccaggaggtgagggggccctccgagctccaaaggtgggctcctgctcctttctttatcctgatcctactcatgagagcagaggcaccagggcrgtcccagggtggggcagggaatagccccattccctggggccccaccctggcctccccttcctggtctgggctacactgcgttctgactggagcctcaccc

SEQ ID NO: 398386 - DNA, 201 bp, Homo sapiens
ctctggggccaggggctgattgctgccttcccgcagggggcctgctgactggcaagtacaagtatgaggacaaggacgggaaacagcctgtgggccgcttytttgggaatagctgggctgagacctacaggaatcggtgagccgggggtgggcttggtgaggatggctggggtggggtcaaatctatgtggaatgaagtcc

SEQ ID NO: 398387 - DNA, 201 bp, Homo sapiens
gaatttatgaagcagggagggtttgacaagaggctgggctgtgttcttcagcccctcctgggtccctgcccctcccctagaccagagccctgagggatgtsgcagcttctggggcactctggggccaggggctgattgctgccttcccgcagggggcctgctgactggcaagtacaagtatgaggacaaggacgggaaaca

SEQ ID NO: 398388 - DNA, 201 bp, Homo sapiens
gaagtcctgggccggtgttgctttagaggtttgaaagtggaaggcaacagttccttctcttgacatgtccaccctgtccccggggtccctctccctgcagrgcatgtacaacgccaccacccggcaggtggaaacggagctcttcccctgcctcaggcactttggactgaggttctatgcctacaaccctctggctggtac

SEQ ID NO: 398389 - DNA, 201 bp, Homo sapiens
gcttggcctctccaactatgctagctgggaagtggccgagatctgtaccctctgcaagagcaatggctggatcctgcccactgtgtaccaggtgagggccrgggctgcagaggccaaggtctccaggactcctgctaatcctgggctctctttgcccccctgactgccccctgtgccgtctgcatagcagccactcccctg

SEQ ID NO: 398390 - DNA, 201 bp, Homo sapiens
gatttctgaattcctctgaaatttttctttcttccaattctcataagcactcttcccactggtctttgatggtatctgagtggaggctttgtagtgagggrttttcattacagggattttcttattccttaggctttctgaagtatgattatcccagtgttattgatgaggaaaccgaggttcacccagctattaaagtgg

SEQ ID NO: 398391 - DNA, 201 bp, Homo sapiens
ttcctggtctgggctacactgcgttctgactggagcctcacccatgcagggcaagttcgtggagcttggcctctccaactatgctagctgggaagtggccragatctgtaccctctgcaagagcaatggctggatcctgcccactgtgtaccaggtgagggccggggctgcagaggccaaggtctccaggactcctgctaa

SEQ ID NO: 398392 - DNA, 201 bp, Homo sapiens
gtagcacaatctggactcactgcaacctctgcctcccaggttcaagtgattctcctgcctcagcctcctaagtagctggggttacaggcacgtgccaccamgcctggctaatttttgtatttttagtagagacagagtttcaccatgttggccaaggctggtctcgaactcctgacctcaggtgatccacccacttcagcc

SEQ ID NO: 398393 - DNA, 201 bp, Homo sapiens
aaagcagagaatggagatcaagcccaggcccacgctggcctcgtcccagccgtcctgggcacattcacccaacacatcccatatccactggatggagccaytggggcagctggagaagttgcgggagcccagtttcttccagaccatggctgtggaggaggggcccccggccaggcagggctgcaccggagggagggcgct

SEQ ID NO: 398394 - DNA, 201 bp, Homo sapiens
cacagctgctgggggcagaactgggctgtgaatgtagttctgtgtggaagcgtcgtgcggcagtaggggaaaggatgcgggtttcaagtcacgtgggtacwgctatccaaggcaccttaagtcctttctggacatacaagatataaatataaacagagaccccagatctcagcagggaggtggctgggacggctgtgagtg

SEQ ID NO: 398395 - DNA, 201 bp, Homo sapiens
acaccgcactacctcccacccccttttgtgtacaaaacacaaggaaaaatatttttgtttgaaaaaaaaaaagatcgaatgtcaaaacaagcttaataacrtagcctgctttttaatttttttgagacagagtctcactctgttacccaggcggtagaacagcagcacactcatagctcactgcaacctcaacctcctggg

SEQ ID NO: 398396 - DNA, 201 bp, Homo sapiens
tcagcctcccaagtaactgggattacaggtgcacaccgccacgcccagctaatttttgtatttttagtagagatggggtttcaccatattggccaggctgstcctcaactcctgacctcaagtgatctgcccacctcagcctcccaaagtgctgggattataggtgtaagccaccacgcccggccacgttacatactatta

SEQ ID NO: 398397 - DNA, 201 bp, Homo sapiens; identical to SEQ ID NO: 88189

SEQ ID NO: 398398 - DNA, 201 bp, Homo sapiens
ggctctctcacctttacattctctgtatacgctcatccttttttgactttccagttccccacttaggcccttccccaccttatgcctcttaccagtagggmcgagggcatgcaatccgttgggatgtcactttgcagataaggagacagttacaggggcatcgaacatattttttccctgggggtgcattcttgattggct

SEQ ID NO: 398399 - DNA, 201 bp, Homo sapiens; identical to SEQ ID NO: 88192

SEQ ID NO: 398400 - DNA, 201 bp, Homo sapiens
atgttcccataggacagacctttcaggggtcattaccattactctaagaaatatactcgaaatgactcttagtctcctttcccctccccttcccaataccscttcctcaccagaaaagtattcttgcaatgtccacagataaccctgacacccatgggttggggttctggactcagaggtccgggatgcacaggccccagg

SEQ ID NO: 398401 - DNA, 201 bp, Homo sapiens
gaaaccaccagctttttgtcagtatatattactcattttatagagccagaggccaagaagagtaagacggccgcaaagaaaaatgacaaagaggcagcagragagggcccagccctgtatgaggaccccccagatcagaaaacctcacccagtggcaaacctgccacactcaagatctgctcttggaatgtggatgggctt

SEQ ID NO: 398402 - DNA, 201 bp, Homo sapiens
aagaaaaatgacaaagaggcagcaggagagggcccagccctgtatgaggaccccccagatcagaaaacctcacccagtggcaaacctgccacactcaagayctgctcttggaatgtggatgggcttcgagcctggattaagaagaaaggattagatgtgagtggaatttgagggaaagagacattttttagtattgaatgg

SEQ ID NO: 398403 - DNA, 201 bp, Homo sapiens; identical to SEQ ID NO: 88249

SEQ ID NO: 398404 - DNA, 201 bp, Homo sapiens
ggcacttctatcaggttgctcagaacccccttccgtccctaggctgtggtcgcgattacggagggaaggaagcctcgcccagtcacaggtgcagcagtccsgcacctggcgactgggacccgcctccgccctcggtcccgccccctccccggctttcagagtaccccggggagcacctcggacccgccccggcttaccctg

SEQ ID NO: 398405 - DNA, 201 bp, Homo sapiens
aaagaaaaatgacaaagaggcagcaggagagggcccagccctgtatgaggaccccccagatcagaaaacctcacccagtggcaaacctgccacactcaagrtctgctcttggaatgtggatgggcttcgagcctggattaagaagaaaggattagatgtgagtggaatttgagggaaagagacattttttagtattgaatg

SEQ ID NO: 398406 - DNA, 201 bp, Homo sapiens
cagtgcccactcaaagtttcttacggcataggtgagaccctattgatgcctaatgcctgaactcttcaaaaccaattgctaattctctatctctgccccayctcttgattgctttcccttttcttatagttttttatgctaattctgtttcatttctataggcgatgaggagcatgatcaggaaggccgggtgattgtggc

SEQ ID NO: 398407 - DNA, 201 bp, Homo sapiens
ccttatgcctcttaccagtagggccgagggcatgcaatccgttgggatgtcactttgcagataaggagacagttacaggggcatcgaacatattttttccytgggggtgcattcttgattggctagagaataatagggtcatcagcaagcaaacctctaatcccaatcccctccacttccctccaaaaacactttatgaga

SEQ ID NO: 398408 - DNA, 201 bp, Homo sapiens
atacatcaattaccagctcaatccctaatcacttacactttcctgcagtgaggacaacgtgccaaagtgcggtctgtgaactctgtccactatggagaaasaaaacaaaaataatagcacaagcagggtctccctcaatgagaaccttggggtggggatgcagaacatgttcccataggacagacctttcaggggtcatta

SEQ ID NO: 398409 - DNA, 201 bp, Homo sapiens
gggcctgctttcccgccagtgcccactcaaagtttcttacggcataggtgagaccctattgatgcctaatgcctgaactcttcaaaaccaattgctaattytctatctctgccccacctcttgattgctttcccttttcttatagttttttatgctaattctgtttcatttctataggcgatgaggagcatgatcaggaag

SEQ ID NO: 398410 - DNA, 201 bp, Homo sapiens
ctagtccgcgctgggccgcagctttccggagcgcagaggaagctggccagcctgcagatagcactgggaaagacaccgcggaactcccgcgagcggagacmcgccaaggcccctccagggacctgtcttcctaactgccagggacgccgagccaactctgtgccttacattcgtatccgttttcctatctctttcccgtgg

SEQ ID NO: 398411 - DNA, 201 bp, Homo sapiens
gtctccgtcacgtggtgtcagacagaccaatcacgcgcattcttcggccacgacaagcgcgcctctgatcacgtgaccaggtccgctacccacgtgggggmtcagcgtgcacccttctttgtgctcgggttaggaggagctaggctgccatcgggccggtgcagatacggggttgctcttttgctcataagaggggcttcg

SEQ ID NO: 398412 - DNA, 201 bp, Homo sapiens; identical to SEQ ID NO: 88245

SEQ ID NO: 398413 - DNA, 201 bp, Homo sapiens; identical to SEQ ID NO: 88196

SEQ ID NO: 398414 - DNA, 201 bp, Homo sapiens
ttatagagccagaggccaagaagagtaagacggccgcaaagaaaaatgacaaagaggcagcaggagagggcccagccctgtatgaggaccccccagatcasaaaacctcacccagtggcaaacctgccacactcaagatctgctcttggaatgtggatgggcttcgagcctggattaagaagaaaggattagatgtgagtg

SEQ ID NO: 398415 - DNA, 201 bp, Homo sapiens
tcaaaaccaattgctaattctctatctctgccccacctcttgattgctttcccttttcttatagttttttatgctaattctgtttcatttctataggcgakgaggagcatgatcaggaaggccgggtgattgtggctgaatttgactcgtttgtgctggtaacagcatatgtacctaatgcaggccgaggtctggtacgac

SEQ ID NO: 398416 - DNA, 201 bp, Homo sapiens; identical to SEQ ID NO: 88200

SEQ ID NO: 398417 - DNA, 201 bp, Homo sapiens; identical to SEQ ID NO: 88199

SEQ ID NO: 398418 - DNA, 201 bp, Homo sapiens
tcacatacaacacggttgggctggtggctccagtgatgaggcggcccatctcaatgtggcctatacagtggttcacacccaccaatggcttattccacagytgggccacagtacgggccacaacagccacagaaaccagtggggcacccatgccagggcctagggagatagaaatggaagttataatcctagagattggaa

SEQ ID NO: 398419 - DNA, 201 bp, Homo sapiens; identical to SEQ ID NO: 88201

SEQ ID NO: 398420 - DNA, 201 bp, Homo sapiens; identical to SEQ ID NO: 88203

SEQ ID NO: 398421 - DNA, 201 bp, Homo sapiens; identical to SEQ ID NO: 88202

SEQ ID NO: 398422 - DNA, 201 bp, Homo sapiens
cgctgttggtgagaaggggaatttggctggaagcttgaagagggaggggtttagcaaaatgggaaggggaaggagtaggaaataacaggcctcattggacwgagaggatctgatttcagggaagggtgaattaaactgacttattgaaatacaaactggtgagatttggtgtagcatcaaatctccctacgaagcaccaag

SEQ ID NO: 398423 - DNA, 201 bp, Homo sapiens
gcagcaaaggatgaagaagggcaaaatgatgaaaggtgaggtggaaagaggttatgagatggtaaagaaaagttaacttctggcacttgattgccacttcygtcaggctggtcctgcctctctcccttgccttctgattgtttcatttcctgtttatttgatcatatctgaattagttcactggttagcctcttccttagt

SEQ ID NO: 398424 - DNA, 201 bp, Homo sapiens; identical to SEQ ID NO: 88273

SEQ ID NO: 398425 - DNA, 201 bp, Homo sapiens
gtttgggttcctgaatggcagggcctgtgtgatgatgcagggcaggttccacatgtatgaagggtacccactctggaaggtaagtcagagggataggtccrgttggatctggaagaggcaggagagaactatctagcctctttcactacctagctatctgggctaggtggatttttggtcctctccttccttttctttcac

SEQ ID NO: 398426 - DNA, 201 bp, Homo sapiens
ccggcccgcgtgctcgcttgccattggctggggactccagggcaagggatataagccagagcctagaccagtgagccaactgtgcgaaccagacccggcarccttgctcagttcagcatagcggagcggatccgatcggatcggagcggatcggagcacaccggagcaggctcatcgagaaggcgtctgcgagaccatgga

SEQ ID NO: 398427 - DNA, 201 bp, Homo sapiens
ggtgtttgggttcctgaatggcagggcctgtgtgatgatgcagggcaggttccacatgtatgaagggtacccactctggaaggtaagtcagagggataggyccggttggatctggaagaggcaggagagaactatctagcctctttcactacctagctatctgggctaggtggatttttggtcctctccttccttttcttt

SEQ ID NO: 398428 - DNA, 201 bp, Homo sapiens
tccgcctgtcttgggctcccgaagtgctgggactacaggtgtgagacaccgcacctggcctatttttaattttaatttttatagatttacaggggtacaaygcagttttgttatatggatatactgcgtggtggtgacgtctgtgctttagtgtaaccatcacctgagcagtgaacattgtacttattaggtaatttctca

SEQ ID NO: 398429 - DNA, 201 bp, Homo sapiens
ttggctcactgcaacctctgcctcccgggttcacaccattctactgcctcagcctcccgtgtagctaggactacaggggcccgccaccacgcccggctaawttttttttttttttttttttttttgtatttttagtagagacggggtttcaacatgttagccaggatggtctcgatctcctgacctcgtgatccgcccacc

SEQ ID NO: 398430 - DNA, 201 bp, Homo sapiens
ggcaagattactcacctcctttgccagttgcactcctcccttccttccagactggcagtatgattaactcggtgggaagtgactgctaagtggagacggamatcagtcaccgaactgagcaacagtcctgtgctcacttcccccaccccacgcctttgaaaactcttctctcggcttgggtcctggatatcccagtccaag

SEQ ID NO: 398431 - DNA, 201 bp, Homo sapiens
gttgttagtggtataatacggaagagatattttgcacaggctgctttggagaactttcaaattatcctttgtttggtaactgacctacttaactgcccaayacaaagaaaaagcatcttggagtggctctgtctccttttttttttttttttttttttttgatacagggtctcactgtcacccaggctgcagtgcagtgct

SEQ ID NO: 398432 - DNA, 201 bp, Homo sapiens
gatcttggctcactgcaacctctgcctcccgggttcacaccattctactgcctcagcctcccgtgtagctaggactacaggggcccgccaccacgcccggstaatttttttttttttttttttttttttgtatttttagtagagacggggtttcaacatgttagccaggatggtctcgatctcctgacctcgtgatccgcc

SEQ ID NO: 398433 - DNA, 201 bp, Homo sapiens
gggttcacaccattctactgcctcagcctcccgtgtagctaggactacaggggcccgccaccacgcccggctaatttttttttttttttttttttttttgkatttttagtagagacggggtttcaacatgttagccaggatggtctcgatctcctgacctcgtgatccgcccacctcggcctcccaaagtgctggggttac

SEQ ID NO: 398434 - DNA, 201 bp, Homo sapiens
tgatgcccttggaatgggagcagaattcaccttgatattttttctcccccagatacacctatgaagattataagaacactgcagaatggcttctgtctcayactaagcaccgacctcaagttgcaataatctgtggttctggattaggaggtctgactgataaattaactcaggcccagatctttgactacggtgaaatcc

SEQ ID NO: 398435 - DNA, 201 bp, Homo sapiens
aaggtgacattcccagtgagggttttccaccttctgggtgtggacaccctggtagtcaccaatgcagcaggagggctgaaccccaagtttgaggttggagrtatcatgctgatccgtgaccatatcaacctacctggtttcagtggtcagaaccctctcagagggcccaatgatgaaaggtatgtatgttactccgttttt

SEQ ID NO: 398436 - DNA, 201 bp, Homo sapiens
gatcgtttccctgccatgtctgatgcctacgaccggactatgaggcagagggctctcagtacctggaaacaaatgggggagcaacgtgagctacaggaagkcacctatgtgatggtggcaggccccagctttgagactgtggcagaatgtcgtgtgctgcagaagctgggagcagacgctgttggtgagaaggggaatttg

SEQ ID NO: 398437 - DNA, 201 bp, Homo sapiens
tctgtctcacactaagcaccgacctcaagttgcaataatctgtggttctggattaggaggtctgactgataaattaactcaggcccagatctttgactacrgtgaaatccccaactttccccgaagtacaggtactggcaagggaaagtggggaatgggactgagggatgttcttggaattctgtggaacacaaccaagga

SEQ ID NO: 398438 - DNA, 201 bp, Homo sapiens
ttccctgccatgtctgatgcctacgaccggactatgaggcagagggctctcagtacctggaaacaaatgggggagcaacgtgagctacaggaaggcacctrtgtgatggtggcaggccccagctttgagactgtggcagaatgtcgtgtgctgcagaagctgggagcagacgctgttggtgagaaggggaatttggctgga

SEQ ID NO: 398439 - DNA, 201 bp, Homo sapiens
gacctcaagttgcaataatctgtggttctggattaggaggtctgactgataaattaactcaggcccagatctttgactacggtgaaatccccaactttccycgaagtacaggtactggcaagggaaagtggggaatgggactgagggatgttcttggaattctgtggaacacaaccaaggaggccaatgtttctactcctt

SEQ ID NO: 398440 - DNA, 201 bp, Homo sapiens
tttgcataagctcctctatctttgagaatttctcagctcttcctcttggttctagtccctctcccattccctaagggataggttggccgtctattagaagwgactgccagataaaagaaatggtaataatggctgttatgtctgtggggagttatctttgcactcccacgcacccctccgtgggcatgtgttcccatagga

SEQ ID NO: 398441 - DNA, 201 bp, Homo sapiens
catttcactgaagacaaatgttgtaagagaggagaaaagcccaccatgagtcagagtgactttaggagatgcctctagcagacatcccataagagacaggrcatgtgtgtgtcagtggactgaggctaagactcagaagagggccaggtgacaggggccaagtaaagggcaagggttgtttatttggtttacgtaatttct

SEQ ID NO: 398442 - DNA, 201 bp, Homo sapiens
actgttccgtgggtcataaggaaagagacacttgcatgcgttcaaattctttcccccttgttcagtagcctcttctttaagaagccagagtaagtatactrtgagcttgcttgctggactgaggaggcaggtaattaagttagggcaatagataagaatacatgttttgagaactttgaaaaatttgaagaggtctataat

SEQ ID NO: 398443 - DNA, 201 bp, Homo sapiens
ttgaaatttctttaaaaagcccttccttctttgtgtgttcatgctgaacatgctgaacgcaccccatatctctaatcttgggttgtatttgtataattatkagtaatgcctggctctctcaccagacttaaactttctgaaagcagagataataatgagtcttttacttaattacaacctaacattttgagcagagcgagt

SEQ ID NO: 398444 - DNA, 201 bp, Homo sapiens
ggaatgggagcagaattcaccttgatattttttctcccccagatacacctatgaagattataagaacactgcagaatggcttctgtctcacactaagcacygacctcaagttgcaataatctgtggttctggattaggaggtctgactgataaattaactcaggcccagatctttgactacggtgaaatccccaactttcc

SEQ ID NO: 398445 - DNA, 201 bp, Homo sapiens
ctttatgttgcccaggctggtctcaaactcccgggctcaagacatcctcctgccttggcctcccaatgtactgggattacaggtgtgaaccactgcacccrgccatctttggatgttttttgagatttttaattcttgttgaaagcgaggctaaagggcaaggaaaagagttatttgaggatcctgacagttggtttccat

SEQ ID NO: 398446 - DNA, 201 bp, Homo sapiens
aaagagttatttgaggatcctgacagttggtttccatctttctcactatcaggcatgagtacagtaccagaagttatcgttgcacggcactgtggacttcsagtctttggcttctcactcatcactaacaaggtcatcatggattatgaaagcctggagaaggccaaccatgaagaagtcttagcagctggcaaacaagct

SEQ ID NO: 398447 - DNA, 201 bp, Homo sapiens
ttaaaattccgtttatgtgagataattcaacctgtgtcctaggtttggagatcgtttccctgccatgtctgatgcctacgaccggactatgaggcagaggsctctcagtacctggaaacaaatgggggagcaacgtgagctacaggaaggcacctatgtgatggtggcaggccccagctttgagactgtggcagaatgtcg

SEQ ID NO: 398448 - DNA, 201 bp, Homo sapiens
ttctgttttgtatacagtgccaggtcatgctggccgactggtgtttgggttcctgaatggcagggcctgtgtgatgatgcagggcaggttccacatgtatraagggtacccactctggaaggtaagtcagagggataggtccggttggatctggaagaggcaggagagaactatctagcctctttcactacctagctatct

SEQ ID NO: 398449 - DNA, 201 bp, Homo sapiens
tggccgactggtgtttgggttcctgaatggcagggcctgtgtgatgatgcagggcaggttccacatgtatgaagggtacccactctggaaggtaagtcagrgggataggtccggttggatctggaagaggcaggagagaactatctagcctctttcactacctagctatctgggctaggtggatttttggtcctctccttc

SEQ ID NO: 398450 - DNA, 201 bp, Homo sapiens
tggagatgcccaggatttgactcgggccttagaactttgcatagcagctgctactagctctttgagataatacattccgaggggctcagttctgccttatytaaatcaccagagaccaaacaaggactaatccaatacctcttggattttatttaatgtcataatgttgtcagaataaagagaaagatgaaataatttcat

SEQ ID NO: 398451 - DNA, 201 bp, Homo sapiens; identical to SEQ ID NO: 275074

SEQ ID NO: 398452 - DNA, 201 bp, Homo sapiens; identical to SEQ ID NO: 275075

SEQ ID NO: 398453 - DNA, 201 bp, Homo sapiens; identical to SEQ ID NO: 54683

SEQ ID NO: 398454 - DNA, 201 bp, Homo sapiens; identical to SEQ ID NO: 54684

SEQ ID NO: 398455 - DNA, 201 bp, Homo sapiens; identical to SEQ ID NO: 88299

SEQ ID NO: 398456 - DNA, 201 bp, Homo sapiens; identical to SEQ ID NO: 275078

SEQ ID NO: 398457 - DNA, 201 bp, Homo sapiens; identical to SEQ ID NO: 275082

SEQ ID NO: 398458 - DNA, 201 bp, Homo sapiens; identical to SEQ ID NO: 275084

SEQ ID NO: 398459 - DNA, 201 bp, Homo sapiens; identical to SEQ ID NO: 275086

SEQ ID NO: 398460 - DNA, 201 bp, Homo sapiens; identical to SEQ ID NO: 275085

SEQ ID NO: 398461 - DNA, 201 bp, Homo sapiens; identical to SEQ ID NO: 275088

SEQ ID NO: 398462 - DNA, 201 bp, Homo sapiens; identical to SEQ ID NO: 275087

SEQ ID NO: 398463 - DNA, 201 bp, Homo sapiens; identical to SEQ ID NO: 275089

SEQ ID NO: 398464 - DNA, 201 bp, Homo sapiens; identical to SEQ ID NO: 88301

SEQ ID NO: 398465 - DNA, 201 bp, Homo sapiens; identical to SEQ ID NO: 275091

SEQ ID NO: 398466 - DNA, 201 bp, Homo sapiens; identical to SEQ ID NO: 275092

SEQ ID NO: 398467 - DNA, 201 bp, Homo sapiens; identical to SEQ ID NO: 275093

SEQ ID NO: 398468 - DNA, 201 bp, Homo sapiens; identical to SEQ ID NO: 275096

SEQ ID NO: 398469 - DNA, 201 bp, Homo sapiens; identical to SEQ ID NO: 275095

SEQ ID NO: 398470 - DNA, 201 bp, Homo sapiens; identical to SEQ ID NO: 275097

SEQ ID NO: 398471 - DNA, 201 bp, Homo sapiens; identical to SEQ ID NO: 275099

SEQ ID NO: 398472 - DNA, 201 bp, Homo sapiens; identical to SEQ ID NO: 275102

SEQ ID NO: 398473 - DNA, 201 bp, Homo sapiens; identical to SEQ ID NO: 275104

SEQ ID NO: 398474 - DNA, 201 bp, Homo sapiens; identical to SEQ ID NO: 275103

SEQ ID NO: 398475 - DNA, 201 bp, Homo sapiens; identical to SEQ ID NO: 275105

SEQ ID NO: 398476 - DNA, 201 bp, Homo sapiens; identical to SEQ ID NO: 275106

SEQ ID NO: 398477 - DNA, 201 bp, Homo sapiens; identical to SEQ ID NO: 275109

SEQ ID NO: 398478 - DNA, 201 bp, Homo sapiens; identical to SEQ ID NO: 275110

SEQ ID NO: 398479 - DNA, 201 bp, Homo sapiens; identical to SEQ ID NO: 88300

SEQ ID NO: 398480 - DNA, 201 bp, Homo sapiens; identical to SEQ ID NO: 275112

SEQ ID NO: 398481 - DNA, 201 bp, Homo sapiens; identical to SEQ ID NO: 275113

SEQ ID NO: 398482 - DNA, 201 bp, Homo sapiens; identical to SEQ ID NO: 275114

SEQ ID NO: 398483 - DNA, 201 bp, Homo sapiens; identical to SEQ ID NO: 275116

SEQ ID NO: 398484 - DNA, 201 bp, Homo sapiens; identical to SEQ ID NO: 275119

SEQ ID NO: 398485 - DNA, 201 bp, Homo sapiens; identical to SEQ ID NO: 275118

SEQ ID NO: 398486 - DNA, 201 bp, Homo sapiens; identical to SEQ ID NO: 275121

SEQ ID NO: 398487 - DNA, 201 bp, Homo sapiens; identical to SEQ ID NO: 275122

SEQ ID NO: 398488 - DNA, 201 bp, Homo sapiens; identical to SEQ ID NO: 275124

SEQ ID NO: 398489 - DNA, 201 bp, Homo sapiens; identical to SEQ ID NO: 275125
  misc_feature (1)...(201): n = A,T,C or G

SEQ ID NO: 398490 - DNA, 201 bp, Homo sapiens
  misc_feature (1)...(201): n = A,T,C or G
cactttggggacaggaagaaaaggaaatgcgaccccagagtggcagcagaggggcctgtgggttgagacactatagagtgtgtcataaccgagaccggatnggggagtagttacttctcttcttttcttacaggaaacatggttccaaaactgttcacttcccaaatttgtctgcttcttctgttggggcttatgggtgtg

SEQ ID NO: 398491 - DNA, 201 bp, Homo sapiens
ttatttaaacagttccaagtaggggagaccagctgcccctgaaccccagaacaaccagctggatcagttctcacaggagccacagctcagagactgggtamgtcaacaatccccagagctgggacaggaggggcagcgacagggcagcacctgagggagaggtgagctgaagttagtgcttaggagatgtggcacactttg

SEQ ID NO: 398492 - DNA, 201 bp, Homo sapiens; identical to SEQ ID NO: 88308

SEQ ID NO: 398493 - DNA, 201 bp, Homo sapiens
ccagaaatcattaattatttaattaattattaatctgggcacccacaggcccaggcaacttgaaatataaaattcaccatcatgatgacctatggtttccmaggtgcaccagtagatgttaccaaaatggcaccaccagccagaacccacatacattcaccaggtcagtgcacttctcaattcgccggagattcattttct

SEQ ID NO: 398494 - DNA, 201 bp, Homo sapiens; identical to SEQ ID NO: 88309

SEQ ID NO: 398495 - DNA, 201 bp, Homo sapiens
tggcacactttggggacaggaagaaaaggaaatgcgaccccagagtggcagcagaggggcctgtgggttgagacactatagagtgtgtcataaccgagacyggatcggggagtagttacttctcttcttttcttacaggaaacatggttccaaaactgttcacttcccaaatttgtctgcttcttctgttggggcttatgg

SEQ ID NO: 398496 - DNA, 201 bp, Homo sapiens
ctgtggctctatttctcctaactactatgcctgccttcgtgtcatttagtcatttaggggcctgccagaggacagttataaaatctgtggtcattctgccrgcagcgtatagttttcacccagagtccagatcccaccggcaaaactctgtctaacacaggatgacttggaattagagtccgtatagcagaaagagcagca

SEQ ID NO: 398497 - DNA, 201 bp, Homo sapiens
tggtcaaccctctatatccatggattcaatgaactgagaatcaaaaatgtttgaaaaattgcttctgtactgaacctgtacagcctttttttccttgcttstcattattccctagacagtgcaatataaaaactttacaaagcatttacattgtataatattgggtgttataaggaatctagagatgatttcttagattgt

SEQ ID NO: 398498 - DNA, 201 bp, Homo sapiens
ctctgggaactcacctccccgaagctcagggagagccctgttagggccgcctctggccctagtctcagaccttcccaagggacatgggagtggagtgacargacgcactcagctcgtggccccactgatgagcttccctccgccctatgggaaaaagtggtctcatacagaacttataagattcccaaatccaaagacatt

SEQ ID NO: 398499 - DNA, 201 bp, Homo sapiens
gtcttggcctcccaaagtcctgagattacaagcatgaggcaccacacctactcctgtttcttcttactcagggtaaagcagaatagcttagatcattcctrgactgggacaggccaggatatcttgaatcctttctacttctcacctcaggggtgctctcactgatctttgtaatcccaaagggacagtaagaatgaggat

SEQ ID NO: 398500 - DNA, 201 bp, Homo sapiens
agttgaactgctagtagtgctcatagactatggcagttagcaagtaacttgtatcaacatgattagttccctaaatcctttcacctttcccttctcccttwcctgcctgtttgtcagatgttaagcagagagatcttggagagctggcctgttactcttagggaactatcttatgtgtggcatttcctttgcagttgggaa

SEQ ID NO: 398501 - DNA, 201 bp, Homo sapiens
tcttgaatcctttctacttctcacctcaggggtgctctcactgatctttgtaatcccaaagggacagtaagaatgaggatagaatgtgcctttctagtctyggctctgttatttactaaggttctttttttttttttgagctggagtttgattcttgttgcccaggttggagtgcaatggctcagtctcagctcgctgcaa

SEQ ID NO: 398502 - DNA, 201 bp, Homo sapiens
tttaatgtataagccctatttcttctttatatctttaatcttacaggaatctaattttcttgcctgatgctatccttttccttatggaaataactggcacstgtgacgaaggatgagtcattggtttatgtgatttccatttgcaaaactccttttttttgtttttgttttcactcaacatagaccaatctccagttcaac

SEQ ID NO: 398503 - DNA, 201 bp, Homo sapiens
  misc_feature (1)...(201): n = A,T,C or G
tctacttctcacctcaggggtgctctcactgatctttgtaatcccaaagggacagtaagaatgaggatagaatgtgcctttctagtctcggctctgttatntactaaggttctttttttttttttgagctggagtttgattcttgttgcccaggttggagtgcaatggctcagtctcagctcgctgcaacctccagctccc

SEQ ID NO: 398504 - DNA, 201 bp, Homo sapiens
acagagcaagactctgtctcaaaaaaagaaaatatcttaggctcctttttgttctaacatctaatgaccttttttttttcaccagtgggctaaggtcgtayaatggctttagaatgtgagcaagcaggagatagaggtaggaaggggcagcatgcttaacaaaaaagaatgcctccatatccagggctcggccatacaaca

SEQ ID NO: 398505 - DNA, 201 bp, Homo sapiens
cggagcccaggaggttgaactgcatttagctgtgtttgtgccacggcactcagcctgggcaacaggagtgagaccccatcttaaaaacaggaaaaaaaaaagttgaaagatgaaagtcttttttagggaaggatgttaagtacagttcactagatgggatcctagtttggagtctgatctctgggtgggcctgcagggaag

SEQ ID NO: 398506 - DNA, 201 bp, Homo sapiens
gcttcccaaagtgctgggattacaggcgtgagccatcacgcccggcctactaagtttcttataaaatcttaggccctatttccagacgtttattgtttttktcgtttttttgtttttgtttttttttgatacggagtctcgctctgtcgcccaggctggagtgcagtggcgcgatctcggctcactgcacgctccgcctct

SEQ ID NO: 398507 - DNA, 201 bp, Homo sapiens
agtctggcatggtggcgtgtgcctgtaatcccagctactagggaggctgaggcacaagaaattgcttgaacctaggacacagaggtggcaatgagcggagrtcgcaccactgcactccagcctgggcgacagagcaagactctgtctcaaaaaaagaaaatatcttaggctcctttttgttctaacatctaatgacctttt

SEQ ID NO: 398508 - DNA, 201 bp, Homo sapiens
tgtaaagaaatacctgagactaggtattttataagaaaagaggttcctagaggctgtacaggaagcatagcagtatctgctcctcaggagaccttaggaarcttttactcatggcagaaggtgaagcgggaataggcacgtcacatggcaaaagcaggggagagagagagagacagagagaaagggagagagagagattgg

SEQ ID NO: 398509 - DNA, 201 bp, Homo sapiens
ccactatgcccagctaattttttttgtatttttagtagagacagggtttcatcatgttggccagtctggtcttgaactcgtgaccttgggtgatctacccrcctcagcttcccaaagtgctgggattacaggcgtgagccatcacgcccggcctactaagtttcttataaaatcttaggccctatttccagacgtttattg

SEQ ID NO: 398510 - DNA, 201 bp, Homo sapiens
tttatagtaaggttacacccaggttactggtagaacataggtttgcaattctttccttgggagatgaatgttgatgttgctgtagaatgatgacttgagcsataagaaaatttagagcctcatttaggatgtcagggctgaacctatactaatgttgattttttctctctctccctttctaggctcatgtgtattgtgaag

SEQ ID NO: 398511 - DNA, 201 bp, Homo sapiens
gagtgcaatggctcagtctcagctcgctgcaacctccagctcccgggttcaagcgattcttctgcctcagcctctcaggtagctgggattacaggtgcccrccactatgcccagctaattttttttgtatttttagtagagacagggtttcatcatgttggccagtctggtcttgaactcgtgaccttgggtgatctaccc

SEQ ID NO: 398512 - DNA, 201 bp, Homo sapiens
gtggcatatgactgtaatcccagctactcgggaggttgaggcacgagaattgcttgaacctgggagacggagtttgtggtgagccgagatcgtaccattgyactccagccctgggcaacaagagcaaaactccttctcaaaaaaaaaaagaaaagaaggaaaataccttaaggcagccaggtgtggtggctcatgcctgtc

SEQ ID NO: 398513 - DNA, 201 bp, Homo sapiens
ggctcaagtgatcctcccacctcagcctcctcagtatcaggaactacaggcacgtgccactctgcccagctgattttttttcttttttttttttttttttkgtaaagatgaggtttcactatgttgcccaggctggtctcgaattcctgggctcaagcagtcctcttgtcttggcctcccaaagtcctgagattacaagca

SEQ ID NO: 398514 - DNA, 201 bp, Homo sapiens
ccaggtgtggtggcatatgactgtaatcccagctactcgggaggttgaggcacgagaattgcttgaacctgggagacggagtttgtggtgagccgagatcstaccattgcactccagccctgggcaacaagagcaaaactccttctcaaaaaaaaaaagaaaagaaggaaaataccttaaggcagccaggtgtggtggctc

SEQ ID NO: 398515 - DNA, 201 bp, Homo sapiens
tgaggcaggaggattgcttgaagctaggagtttgagaccagcctgggcaacaaagcgagacccctgactctcccccaaaaaaaaggaaagaaaaaaagagaatattcagttagaatttttaaaactttatgatatagatgaagaactttctggagaattggagaacatgtttctttcagggaaagagattagatggatatc

SEQ ID NO: 398516 - DNA, 201 bp, Homo sapiens
ttactcattgctctgagggttattcagtatcctgttcttagtggcatctgtgcattgagggacactaatgggggcgctaatgcttttacctgtttaattcmatttttctgcaaactggaatttgttgagtattatcacaggaagggtagaggcaacaaaggctaagtcgtgtttttctttcccatgcatatgtattcactt

SEQ ID NO: 398517 - DNA, 201 bp, Homo sapiens; identical to SEQ ID NO: 88311

SEQ ID NO: 398518 - DNA, 201 bp, Homo sapiens
ttgaggcaggaggattgcttgaagctaggagtttgagaccagcctgggcaacaaagcgagacccctgactctcccccaaaaaaaaggaaagaaaaaaagagaatattcagttagaatttttaaaactttatgatatagatgaagaactttctggagaattggagaacatgtttctttcagggaaagagattagatggatat

SEQ ID NO: 398519 - DNA, 201 bp, Homo sapiens
gctttgcctctcgcctaaagaatacaggactgctgctcttatcagaggtgagacaggagtatgtctgtgatctctagtttattaattccagtttttttccratgagaaaagtttgaccccagaaccaagaggtttacctgggatagcttgagagaggaccaagtacaatttctagtacattggattcctctgctggagtag

SEQ ID NO: 398520 - DNA, 201 bp, Homo sapiens
tctggcatggtggcgtgtgcctgtaatcccagctactagggaggctgaggcacaagaaattgcttgaacctaggacacagaggtggcaatgagcggagatygcaccactgcactccagcctgggcgacagagcaagactctgtctcaaaaaaagaaaatatcttaggctcctttttgttctaacatctaatgacctttttt

SEQ ID NO: 398521 - DNA, 201 bp, Homo sapiens
ctgggtgggcctgcagggaagctgacagtggcacaaatcaaggcaggttaccagtctcttaagaagattgaggattgtattcgggctggccagcatggacragctctcatggaagcatgcaatgaattctacaccaggattccgcatgactttgggtaaggcctgtgctgttacttcactttgttcttctacctatacata

SEQ ID NO: 398522 - DNA, 201 bp, Homo sapiens
caggttaccagtctcttaagaagattgaggattgtattcgggctggccagcatggacgagctctcatggaagcatgcaatgaattctacaccaggattccrcatgactttgggtaaggcctgtgctgttacttcactttgttcttctacctatacatatcccctgtatccatcagcagcagctataatcttttaaatcttt

SEQ ID NO: 398523 - DNA, 201 bp, Homo sapiens
cttttattcctaagaaaatgatcgtcttgaataggtacagaaacaaaatgatatataggtagcctatttaatcagcttacaaatatgggatgcaatctccyggcttgaccacagccatattctctgacaaagtggaagttaccaacccaagagagaatgggtctagctatccaaccacccaagtaaaacaccttcaggcat

SEQ ID NO: 398524 - DNA, 201 bp, Homo sapiens
caccatttctgtgaactcaagtgatattagatagacaaaataacattttacatttgttgattctgttttctggtttacatccgatttctatttcttttatwgctttatagagccccgtgacctagaaataaccctgagtggtcaacaggtctacctgtgcttctagatagaactgtatccaactgttccctgttgatatca

SEQ ID NO: 398525 - DNA, 201 bp, Homo sapiens
taagtggagactatcctgggatagataatattcaactaggggctgagcacggtggctcatgcctgtaatcccagcactttgggaggttgaggcaggaggaytgcttgaagctaggagtttgagaccagcctgggcaacaaagcgagacccctgactctcccccaaaaaaaaggaaagaaaaaaagagaatattcagttaga

SEQ ID NO: 398526 - DNA, 201 bp, Homo sapiens
gtctgagtctagctttgcgtttggaaagacactccttgcccgaaagtacagctgtagaacttataagagggagtcagaggaaggtgttggcttttttatgyttatggcctatctgtgcagaacaacagagtacaataatattggcttttccttaggatgcttctatggcatggttccaggatgagtaactgggtgggaatc

SEQ ID NO: 398527 - DNA, 201 bp, Homo sapiens
tggcatggttccaggatgagtaactgggtgggaatcttgagccatgggcttcgaattgccccacctgaagctcccatcacaggttacatggtgagtgaaaytgaactctgggaggagcacaggggaaagggatacagtaatgttctcagtgctttttttcctagattaggattagatggttcccctccccaagagttaagc

SEQ ID NO: 398528 - DNA, 201 bp, Homo sapiens
tttttcctagattaggattagatggttcccctccccaagagttaagccagctcactgataaccttgtcatctcttactgtgtccctctttctttaaattcytaaagatacctcacctttccctcagaaggcggaaattcacaggggcttctaccctctctagaacagaattgtgaggggaaatggagaagggtctatattg

SEQ ID NO: 398529 - DNA, 201 bp, Homo sapiens
ttttagccacatgtcagaaagctcattatgggttatatctctgttcttagactccgtactcctccactaatccggacacagaaggaactgtcagaaaaaayacaattactagaggtgagatatgtatgatttgagaagtattatatcccttataccagtgtcctcccacattgattctatatctcatcttctcaggctttg

SEQ ID NO: 398530 - DNA, 201 bp, Homo sapiens
  misc_feature (1)...(201): n = A,T,C or G
ggctctgaagtctgggagagccttaggaatcaagttgagcatcttgaaattggggaatggcaggcatcctccttagagttcccactggaaaaactaagagnagcccattgagtctgaaaactcttctatagttgaactgctagtagtgctcatagactatggcagttagcaagtaacttgtatcaacatgattagttccct

SEQ ID NO: 398531 - DNA, 201 bp, Homo sapiens
atggcaaaagcaggggagagagagagagacagagagaaagggagagagagagattggagaaggtgtcacagagagagaaagagagaatggggaggtgtcayacgcttttaaactaccaaatcttgtgtgaattcactcactatcaagaggacagcagcaagacagtggtgctaaaccattcatgagaaatccacttccatg

SEQ ID NO: 398532 - DNA, 201 bp, Homo sapiens
tcatggacttctctctcttcactctgagtgatttacttacagatacctctttttagatactggccatattctctctcagtatctccaagtcaggtcaggtyaggtatgggacggatgtggcagtggttttgcgtatcccttgtcccctcccattattgccctgctctcagctcattgtcaaatttctgcagctgacaaaca

SEQ ID NO: 398533 - DNA, 201 bp, Homo sapiens
tatacaaactatatcacatgcgtaccttttgtggttgccatcagccttctacacctcattctctttttaaaccagaaaatggtatcattgttaagggaaarctgttttcttgttctaatgagaaactgtaccctggaatggcatgagttactgatgaatggggaaaaaagaaggctacctctggaataagttttctttaac

SEQ ID NO: 398534 - DNA, 201 bp, Homo sapiens
ctctttttaaaccagaaaatggtatcattgttaagggaaaactgttttcttgttctaatgagaaactgtaccctggaatggcatgagttactgatgaatgrggaaaaaagaaggctacctctggaataagttttctttaactcagttagaatcttttttttttttttttttttttttgagatagagtctcactcggtcacc

SEQ ID NO: 398535 - DNA, 201 bp, Homo sapiens
cactttgggaggccaaggcgggcagatcacttgagttaggggttcaagaccagccttgccaacatgttgaaactccatgtctactaaaaatacaaaaaaaattagtctggcatggtggcgtgtgcctgtaatcccagctactagggaggctgaggcacaagaaattgcttgaacctaggacacagaggtggcaatgagcgg

SEQ ID NO: 398536 - DNA, 201 bp, Homo sapiens
tcgagaaaagtttgagaaggtgcctggaaaatatgatatgctacagatggactatgccaccaatactcaggtaactctcactatacttttcgaaagaaacrcatcttctttttttattttattttttagaggcaaaactgtgctctgttgcccaggctgggtggcacaatcatggctcactgcagcctcaagatcctcagg

SEQ ID NO: 398537 - DNA, 201 bp, Homo sapiens
atgttgctgtagaatgatgacttgagccataagaaaatttagagcctcatttaggatgtcagggctgaacctatactaatgttgattttttctctctctcyctttctaggctcatgtgtattgtgaaggaaatgatgtctatgatgtcatgctaaatcaggtaagaggcaagaagaggtggcaccattatatttatgagac

SEQ ID NO: 398538 - DNA, 201 bp, Homo sapiens
gttaaagggcaaagctcctgtggacccagagtgtacagccaaggtggggaaggtaagagactctggaaccgatcttcagtccatggatatctcagagagcrtcctttgttataaggactcctgtctgggatgctgttagtactcattttaggaatcctctccaaaatatgatgagtgagtagttttctctaatggcaagag

SEQ ID NO: 398539 - DNA, 201 bp, Homo sapiens
aagatgcctgtggctggaggaaaagctaataaggacaggacagaagacaagcaagatggtatgccaggaaggtcatgggccagcaaaagggtctctggtargagtggatctggggatgatatcttgttatttcaactcctatttcgtccttctttcagggaataattaatttctctatcctttgggcataccacagcacta

SEQ ID NO: 398540 - DNA, 201 bp, Homo sapiens
aggaagagatcaaatacttctccaagtttccacagagaaaagcagcagagctaggctctaaattaggcacagacccttgagcacttaactaacctttatcmcatacggcctcatgtatgaggtgggtatttgggggacattgggacacaagtaaaacagataagcaggcctcaatctatgagcttacaagactcctgggac

SEQ ID NO: 398541 - DNA, 201 bp, Homo sapiens
ggaggcatccgccgggcccctccccgaagggcggggtccacggcatctcctgcccagtctgacctcgcgcggagccccgttctctgggaactcacctcccygaagctcagggagagccctgttagggccgcctctggccctagtctcagaccttcccaagggacatgggagtggagtgacaggacgcactcagctcgtggc

SEQ ID NO: 398542 - DNA, 201 bp, Homo sapiens
ttaagctggtgaaaacagagctacaaagcccagaacacccattggaccaacactatagaaacctacattgtgccttgcgcccccttgaccatgaaagttaygagttcaaagtaagaaaaatgatcatttattttcatattcttgcacccttaaccacctcccccatcccactgttctctaactacttcttgtcaagagcaa

SEQ ID NO: 398543 - DNA, 201 bp, Homo sapiens
ttattccctagacagtgcaatataaaaactttacaaagcatttacattgtataatattgggtgttataaggaatctagagatgatttcttagattgtcttktgttttgtttgttttttgctataggatgaagaggaaacaaagaaagaggaatctcttaaatctcccttgaagccagagtcacagctagatcttcgggtac

SEQ ID NO: 398544 - DNA, 201 bp, Homo sapiens
tctttcctcagaatctgtgaaggccttgctgttaaagggcaaagctcctgtggacccagagtgtacagccaaggtggggaaggtaagagactctggaaccratcttcagtccatggatatctcagagagcatcctttgttataaggactcctgtctgggatgctgttagtactcattttaggaatcctctccaaaatatga

SEQ ID NO: 398545 - DNA, 201 bp, Homo sapiens
aagatcctcaggctcaagtgatcctcccacctcagcctcctcagtatcaggaactacaggcacgtgccactctgcccagctgattttttttcttttttttyttttttttttgtaaagatgaggtttcactatgttgcccaggctggtctcgaattcctgggctcaagcagtcctcttgtcttggcctcccaaagtcctgag

SEQ ID NO: 398546 - DNA, 201 bp, Homo sapiens
aagccccacttggtaggacttcacattttcttctgcattctctccttataattcctagctcctttaatggatactttattatcattatgatttaaagcttkctcatagtactgaatgaagaaaatgggatttggggtgacaggttgtatggagggaagaggaactattttgaaagttgaggctgggtgtgatgggtcatgc

SEQ ID NO: 398547 - DNA, 201 bp, Homo sapiens
atggtgagaccccatctctactaaaaatagaaaaattagccaggcatggtggtgtgtgcctgtgatctagctacttgcgaagctgaagtgggaggatcacyggagcccaggaggttgaactgcatttagctgtgtttgtgccacggcactcagcctgggcaacaggagtgagaccccatcttaaaaacaggaaaaaaaaaa

SEQ ID NO: 398548 - DNA, 201 bp, Homo sapiens
ggatttgggaaggccaagcttttcctagctgccttgtaagactgtttgggagcagaaaggtctgccaagttatatcagaatccccaaattcttcagttcakctcagtctcttgtagagtctacatcagcctttttgtcttatttttcacaggtgatttcccagtacctacaatctacccatgctcccacacacagcgacta

SEQ ID NO: 398549 - DNA, 201 bp, Homo sapiens
gcctgtgctgttacttcactttgttcttctacctatacatatcccctgtatccatcagcagcagctataatcttttaaatcttttattcctaagaaaatgrtcgtcttgaataggtacagaaacaaaatgatatataggtagcctatttaatcagcttacaaatatgggatgcaatctcccggcttgaccacagccatatt

SEQ ID NO: 398550 - DNA, 201 bp, Homo sapiens
tttcaggagacatattttattttctggatgttgtcacctctcaaatctctttaataatgctaattaaaaaaattaagttcctgatccagcaatctcacatstgggtatttaccccaaagatttgaaatcagtttgtaaaagagatgtctgtatttccatattcatttcagcactattcacaatatctatattggaatcaat

SEQ ID NO: 398551 - DNA, 201 bp, Homo sapiens
actcagctgagacatcagtttacattggaccagctgcttttataattgatttttagaatccatttgccccaactcctctacaaaggagaatcatttttttytattggctggaagaatattgggtcgattttttcaaagagcccttcattaattgggaaaagttccctgttctattcttagtgagcgccaagccaagcctaa

SEQ ID NO: 398552 - DNA, 201 bp, Homo sapiens
gctaaggtttgagatataaatgattctatcacacaggtactgatagcatagtacctgataggtactttttaagcccttgcccctctctcccttccctcttmtagtagccaccaatgtctactgttcccatctttatgtccataagtactcagtgtttagcttgccgttataagtgagaacatgtggtatttggttttctgt

SEQ ID NO: 398553 - DNA, 201 bp, Homo sapiens
tggctcagttttgacctctgcctgtcagcttcaacccacagttggcaagccacccaccctgtctccccttgctacagggtcccctcgctcattgagtggcycttttgggagtgcttaaatccatctgtacactgacatctgattgacatataggaaaatctccatatgcttgccatggttaattgtgggggtgcagtctgc

SEQ ID NO: 398554 - DNA, 201 bp, Homo sapiens
tttcaatcatgtcaccccattaaactcctacttcctgatcaactactcttctttggaattctcagtgtttcctctcagtctttcattgattatatcaaggwagtagtaaaacttgttttgaataaaagtcattcagaaaattgtttttgatattctcccttttaaaatttattgccaatatactacaaataacttttcttc

SEQ ID NO: 398555 - DNA, 201 bp, Homo sapiens
taagcccttgcccctctctcccttccctcttctagtagccaccaatgtctactgttcccatctttatgtccataagtactcagtgtttagcttgccgttayaagtgagaacatgtggtatttggttttctgtttctgtgttaatttgcttaggatgatggcctccagctacatccaacttgtagcaaaggacataatttca

SEQ ID NO: 398556 - DNA, 201 bp, Homo sapiens
gtcccctcgctcattgagtggctcttttgggagtgcttaaatccatctgtacactgacatctgattgacatataggaaaatctccatatgcttgccatggktaattgtgggggtgcagtctgccccataccactgcctgccttacctctgctgcccaactcctgcatttcgccctacatatttgcagcattaagcactctg

SEQ ID NO: 398557 - DNA, 201 bp, Homo sapiens
gccctgtaatttgctttccttcactgactggctgtcactcttctgtgtggcaggttcccaatgggctgcctcttttgggtgctcatagtacagccctcttyacacttgccctacacagtctgctggcccagaatcatggctcagttttgacctctgcctgtcagcttcaacccacagttggcaagccacccaccctgtctc

SEQ ID NO: 398558 - DNA, 201 bp, Homo sapiens
actctgaagatcccattgctcagcccttcaggcaagaaatgatcaccagtccctgacttagtggaggtggggagaacatttgggtcccctcaatattatakaaggcagtggtggagaagtccaagaagaaaggatgtcagctgctccaaaaaactgttataaggtgacctctctacgcctcttattctagccagatctact

SEQ ID NO: 398559 - DNA, 201 bp, Homo sapiens
tcatgtgctctgaaagaagcatgcctcctgtgaaaggggccaagtcactcagctttaccactctgttgttctaccaccattatcctagatcctgcccaaaggggaaactgtaacatgtagatcatttgtcccaagtgacacagtttattgctgccacctctttgtaccccatgtgtttcttctataaaatggggctaacaa

SEQ ID NO: 398560 - DNA, 201 bp, Homo sapiens
ttatctcttttttgtggaaaagggggatagagaacaggttttgtcttctcccactgtgatctcctgcagagaaggagaaagagacccagactgctcatcartgattttgtctgtgttctcatcaggccttcccagaaatgataattttctttttttttaaatttcagctatccaacttgataaagtcaatcttcaagtata

SEQ ID NO: 398561 - DNA, 201 bp, Homo sapiens
tgtctaagtctatggattagcacccctgtttataattcaactttttcatgaagatgtaacctcagaaaaactaagtggcatgcccatggaatcacagttaraaaagtagaggcagtttaacaccattctgattatcctccaacagagaaggacatttcttaggttattcatatatatgattaaaaataaattgtaaatttt

SEQ ID NO: 398562 - DNA, 201 bp, Homo sapiens
cagcctctccttttgtaacagagggtggcattgactcctctgagaatgtcttttaagaggcatttaatataatttattcagtatttattgcacatatatawatatgtatatatacacaaatagcagttattgacaagagacttggttttgaagtccagtgatcacaagaagatgttctgtttcctaacatagaaaatgggc

SEQ ID NO: 398563 - DNA, 201 bp, Homo sapiens
agttattcttgtactatatattgttgagaaaatcctaatagaaacacttaaaaaatttatatcaattcatattttatttaacacattatctacatatattmtaaatatttgagcatctttgtactagactgaacagtcaacctatagactgtacatatcagatacagctctttcagttaccaaaacttagaatctggttta

SEQ ID NO: 398564 - DNA, 201 bp, Homo sapiens
aataaggctgggactatgttatgcctacctgagagagggagagaatgtacgtagtacagcaagggaccactaaagatacttgcatagaagatcaaagggartcaagctgtgctttcagccaattagcctggcagccatgggtctagtggtttgaagtggaagaggctgaaagagggggacacagttagcaggttactctca

SEQ ID NO: 398565 - DNA, 201 bp, Homo sapiens
ttgatctcggctcactgcaacctccacctcccgagttcaagcaattctcctgcctcagcctcacgagtagctgggactacaggtgcatgccaccacacccrgctaatttttaattttttagtagagatggggtttcaccatgttagccaggctggtctcgagctcccgacctcaggtgatccacccgccttggcctcccaa

SEQ ID NO: 398566 - DNA, 201 bp, Homo sapiens
aagaacaagtcccagaaccaagactgatatattcctgtcagaatttatcacttctctaaattaccaggtcagtagttaaattataatcacattctgttatrtattatactggttcagtcaacaaatgagacttttaggaaatccttataaaaggaactttgtttctgtttcccaatgtccctttacacttgcttggtggag

SEQ ID NO: 398567 - DNA, 201 bp, Homo sapiens
gactttggacaggtagcctaacctcttacactgaatttcttcatttgtaaaatcgggatgacatagagacagaatgcaaatttgttgttgccatgggctgsatgaagggaagagtgagcagttaagaattaactgcttaatgggtatgacatttccttttgggacaatgaaaacatttgggaactagatagaggtggtggt

SEQ ID NO: 398568 - DNA, 201 bp, Homo sapiens
aagaaagtctctgagttgggatctggcttgacatggcccagggacagcaagggagcccctgtggctcaagtggcgtgggtaagggggaagagtatgagtgmgcagtgagaggtcaccagtgggagagaggaaacctggatgatgagattccagaggaccaggcagacctttaacaacaatggcctctactttgaaatagga

SEQ ID NO: 398569 - DNA, 201 bp, Homo sapiens
tttagtagagatggggtttcaccatgttagccaggctggtctcgagctcccgacctcaggtgatccacccgccttggcctcccaaagtgctgggattaccrcagtgagccaccgtgcctggccaaaatgaactatttctatatacaagtagatcaatattcttatggactaaaaagtggtagctatttcaaagtgtgtatc

SEQ ID NO: 398570 - DNA, 201 bp, Homo sapiens
aatgactgagaaataactttagaacatttctagtctggtggtttttaaatgtgttttgacgtggcaaagccaggttttcaagcaaatctaacaaggtcttyttgatcattgccgatggaacccttctttatgctgacaatctattgtcagatatgcaggattaaccatatgtagctacttttatcagtgtttagcatgaaa

SEQ ID NO: 398571 - DNA, 201 bp, Homo sapiens
caatttataaatttatgatttaaaatacaactgtcaaggacataggacatttatgtcagttagacatatctttctggaagacgtctatatacgtgagcagragtcaaaaaatggccagatgatcacggcaggacagactaagagcattgtaatcttgcagtcagatgcacccatctctgttttatggttatttctacttgg

SEQ ID NO: 398572 - DNA, 201 bp, Homo sapiens
cctatatgattgttttgtagattgctcatgctttgataaagcctgccataggctgtgttttctgatgacggggttaatggcagaacctgaagccttatgtygtgatgcacgtaaactgctaggctaaggaattagtattagcatcatgtgcattagctatttgacagccataaaatatacttagtcaaagggtgtaataca

SEQ ID NO: 398573 - DNA, 201 bp, Homo sapiens
tgcaataatttttcatttgccaccagtcagcttcagggatcaaggacagctaaacacataatccgctcatgcatgttattttaaaggcttatattttaaaggttataaatatggtacattgagttaatgaggtatgttcttttggtgacaaatatttacattccacatatgcctcttgatgtcaagagtgtaactgtttca

SEQ ID NO: 398574 - DNA, 201 bp, Homo sapiens
gttcctcagtcttaactaagtaattctctacttcaatgttcctgcaatgaaaatgcacagacattcaccagtgtcactcgggcagtttagtgcctgctgcrgaactcctggcagttaacaatgaaattgtcaagatttcctttttgttcccttccaagcaggcaaggcatcgtttttgtccagtggtttagcacatgaatc

SEQ ID NO: 398575 - DNA, 201 bp, Homo sapiens
ctcattgggtcattagcagttgaggcagtttctttctttttttttctttgagatggagtcttagtctgtcgcccaggctggagtgcagtgacgtgatctcrgctcactgcaagctctgcctcctgggctcaagcaattctcctgcctcaacctcccaagtagctgggactataggtgcctgccaccactcccggctaattt

SEQ ID NO: 398576 - DNA, 201 bp, Homo sapiens
cagttgaggcagtttctttctttttttttctttgagatggagtcttagtctgtcgcccaggctggagtgcagtgacgtgatctcggctcactgcaagctcygcctcctgggctcaagcaattctcctgcctcaacctcccaagtagctgggactataggtgcctgccaccactcccggctaattttttgtgtttttagtag

SEQ ID NO: 398577 - DNA, 201 bp, Homo sapiens
agtgaatacaaagcaagcagaaaaacatgaagagacaagacaggcctagcctcccagcctacgtctctctcccatgttggatgcttcctgccctcaaacaytggactccaagttcttcagttttgggactcagactggctctccttgctcctcagcctgcagacagcctattgtgggaccttgtgatcatgtaagttaata

SEQ ID NO: 398578 - DNA, 201 bp, Homo sapiens
ttgcagctcttacattctatacagtgttttgacttttggctactttgaagaaatcacaatatttcaacctataaaggactcttctatgcttctgattatartggaagttgatcctttgcaatgaaattaacctgatgacctgtatggctctggtagtttgaaggatatgagcaaaagggatgatacctggagggtccaccc

SEQ ID NO: 398579 - DNA, 201 bp, Homo sapiens
tgtgcgtgtgtgcgcgcatgtgtagagtacaacactagcatagggttttttttttttttggcagagtgtcactctgtcacccaggctagagtgcagtggtrcgatcttgtctcactgcaacctctgcctcctgggttcaagaaagtcttctgcctcagcctcccatgtagatgggactacaggcacatgccaccatgcctg

SEQ ID NO: 398580 - DNA, 201 bp, Homo sapiens; identical to SEQ ID NO: 88324

SEQ ID NO: 398581 - DNA, 201 bp, Homo sapiens; identical to SEQ ID NO: 88326

SEQ ID NO: 398582 - DNA, 201 bp, Homo sapiens; identical to SEQ ID NO: 88327

SEQ ID NO: 398583 - DNA, 201 bp, Homo sapiens
tggggcagtggagggtttgcgtcttttatagttttaggtcctcaaggtgcatcactcatcctctctctgatgcctgtattcatggtaagtttattcttcargaaattgtttttcaaaagcctcatactgtgatggttaatattgagtgtcaacttgattggattgaaggatgcaaagtattgttcctgggtgtgtctgtga

SEQ ID NO: 398584 - DNA, 201 bp, Homo sapiens
gaaccatttagactacagtgcaattcaaagggaagttcatcaggatctttggagagtccttgatccaaagtcacctgtcagaagagtcgcacatcctccasgaacaggcctactttcttagctttgccacactcagcattgactgagatcagcctggggaactgtggtgtcagtagaaatgctgtgacatgtttcagtgct

SEQ ID NO: 398585 - DNA, 201 bp, Homo sapiens
tctagggaactcttcccaattcaaggtccataccttaattgcatctgccaagtcccttttgccatggaaggtaacatgttcacccgtttcacggattagasaacggacatctctggggagaggatgagttattctgctaccaagtgagaaatagcacagaagtgtgtcttccaaatatggagttgttatgcatgattcaca

SEQ ID NO: 398586 - DNA, 201 bp, Homo sapiens
agacttacagaattatgttgcacagacgtgttgagatttggcatccttgtcttgttccagtccttaaggggaatggtttcagcttttgcccattcagtatratgttgcctgtggggttgtcatagatagtttttatgattttgaggtctgttccttcaatgcctagtctgttgagggtttttatcatgaagggatattgga

SEQ ID NO: 398587 - DNA, 201 bp, Homo sapiens
gttttctcatttttaaatgggaataaaaacacctatctctagagcttagcgcttggatttggcaaaatgcatagtacgagttcaataaatgaaagctaatrttattttcatgttcaaagtcaatggaaagagttggctatgaaaaccctcacacataccaatacccagattattttatcattttatctttagatatctcat

SEQ ID NO: 398588 - DNA, 201 bp, Homo sapiens
gaggcagatgatgatgaagacctgaatttgggtgtcaggaacagaatggagaaaaaaagagtaaaaaaacattgagggaaaaccaaaaggatatgttcatraatgcaatttagggcataaaggaaataggaggaagactaaggtgacttttgtgattatggtttaggtaactggctggctgaggatgccatgaagagaagt

SEQ ID NO: 398589 - DNA, 201 bp, Homo sapiens
tcaaagaagaaaaaagttagccataaacactgcccaaggacttaatggatcttactgagccacaccatgcagatgtattggaacataaataggtataggakataagaggcacaaaagcaatttgtttggattgggtcactgcttaatccagatgggttcagcaaaagaattcatgaaacgtgacagtgggccaagaagaac

SEQ ID NO: 398590 - DNA, 201 bp, Homo sapiens
tttcaggtgctaatatcaggatataacccatatctcttcatacacagttcttcaaatctacctgttcgcagcccttctttcttctcttgagaaatagaaamtaggatttaaacctcagaattatgcctcagtatctacagcactgtagtgcctcataaatattagttgaaatggtaaaagaaagatacaattgcccctaat

SEQ ID NO: 398591 - DNA, 201 bp, Homo sapiens; identical to SEQ ID NO: 88329

SEQ ID NO: 398592 - DNA, 201 bp, Homo sapiens
ctcatcctaccacacacaagtgtgtgaattctttgtcctccttgagtctcagtttcttcatctgtgaaataggaagatgagctttacttttctaaaacacrtatgtccccccttcccctccacaaagggagttagagattgttaatagctaccatggagaaaatatttatttggtcaaataagtatatgaaaccctggatt

SEQ ID NO: 398593 - DNA, 201 bp, Homo sapiens
atacgtttaatatttggcaaaccatatgtatattattgggctattttgaattttctgggaactatgattttgagctttgctgtgtttgaatgatcaattgmaatgctttgttgaatagacttctttacaaaatgttacattttcataaatatagcataagatcacctggtaaacaaatgaatttgtgttaatagaaagtgt

SEQ ID NO: 398594 - DNA, 201 bp, Homo sapiens
ataatggacttaacagcatcactctttaagggttgttgtgaatagcatgggttttagcaacaaataagagctgttctttcttctatgtgcaagggaagtaycatgtgcaagggaagtatcaggtgccatctttggcaatcttctcatgttctccttgaatctgaaaagcattgaaagatagtatcatggctacatatttgt

SEQ ID NO: 398595 - DNA, 201 bp, Homo sapiens
gatgaggatactgaggtgtagagagaccagtgatttatccaagatcctttgactgagttttctgggtctggggctctcctcttaaaaatcccactctggcygggtgcggtggctcaagcctgtaattccagcactttgggaggctgaggtgggtggatcatgaggtcaggagatcaagaccatcctggctaacacaatgaa

SEQ ID NO: 398596 - DNA, 201 bp, Homo sapiens
gcattattcgtgagtaacttatgtgattccctatatagaacaacccttgatgacaattcctagatgggcttgtgcacttgaaaagctcattttatttaagktgggataatcttcacatcatgaaatagaattgcaactcatgaactcacgtgtagtatcagccctagagtagcttctccaaaatagggacagtttaggatc

SEQ ID NO: 398597 - DNA, 201 bp, Homo sapiens
agctgcattaaagatgtttattttcttaaaataacattagtaacacatttttccttaaaattattttgcttttatttcctgcttaatctaagatttacttmagagttttttaaaattccaagcacatagattggagaagatggtacgtagacttatttttttattgttaatctttcttcctcttttctcctttcctctcgc

SEQ ID NO: 398598 - DNA, 201 bp, Homo sapiens
gctacagggtcccctcgctcattgagtggctcttttgggagtgcttaaatccatctgtacactgacatctgattgacatataggaaaatctccatatgctygccatggttaattgtgggggtgcagtctgccccataccactgcctgccttacctctgctgcccaactcctgcatttcgccctacatatttgcagcattaa

SEQ ID NO: 398599 - DNA, 201 bp, Homo sapiens
attcaaggtccataccttaattgcatctgccaagtcccttttgccatggaaggtaacatgttcacccgtttcacggattagagaacggacatctctggggrgaggatgagttattctgctaccaagtgagaaatagcacagaagtgtgtcttccaaatatggagttgttatgcatgattcacagtacattccagtttgcaa

SEQ ID NO: 398600 - DNA, 201 bp, Homo sapiens
gttagaaacatttttattgtcgtatggaaaatgtgagttgtgttttaagataatgttattttagtatctcttttccctccatggaattcttttcatatgarttcttaacatatttgaaaacagtcatgaaggaataacctttaactggtaacacacatttctaggcaagttagcacctcctctcctattatttgttgcttc

SEQ ID NO: 398601 - DNA, 201 bp, Homo sapiens
gccagggggaatgtttgcaaggaggagatgttttcaactcagatattcataagccagggcctgcctctgtttaccagctgggaggtcttcagataatgaamcatgaaagcctgctatgcagcggcgctatgcaataatttttcatttgccaccagtcagcttcagggatcaaggacagctaaacacataatccgctcatgc

SEQ ID NO: 398602 - DNA, 201 bp, Homo sapiens
tgttttaagataatgttattttagtatctcttttccctccatggaattcttttcatatgaattcttaacatatttgaaaacagtcatgaaggaataacctytaactggtaacacacatttctaggcaagttagcacctcctctcctattatttgttgcttcccaaatttaattcctctttttttttttttgagacagagtc

SEQ ID NO: 398603 - DNA, 201 bp, Homo sapiens
ttccttctatcttcctatctccactactacatgaaagattccaacaccataatcctccccaaataatcagattttaattgtatttagatcagtggtcaggrtttacctcattgtaaccactgaaacttatttacacctgaaccacatagtatactatcattatttttattttccagaacaacattttcacacaaagttaat

SEQ ID NO: 398604 - DNA, 201 bp, Homo sapiens; identical to SEQ ID NO: 88321

SEQ ID NO: 398605 - DNA, 201 bp, Homo sapiens
ttaaataagatgttcatatttaactgacaaacagaatcaatctaccgtgcctagttcatagaatagattcggggagtcaatttttgtgcttaattgtttgwacaaagaaaatctttgacttatgaatgataagaaaataatgaaaattgagttagtgcttataaaattctcgaattcttttgcttttgcaatcaagccagg

SEQ ID NO: 398606 - DNA, 201 bp, Homo sapiens
agatagcgtgattcaatgcataaatgactgaatgcaaggaggcttaattgaaagataaaagaataattgctgtagaatagcagaggcaaaagcagctatgrtaaaaagtcgcctgtcttaaacagagtgaaaataaatgaagagggggtttgagaagtctttgtagcaaaagatcataagaaaataaacaccagtgcaagg

SEQ ID NO: 398607 - DNA, 201 bp, Homo sapiens
atgcataaatgactgaatgcaaggaggcttaattgaaagataaaagaataattgctgtagaatagcagaggcaaaagcagctatggtaaaaagtcgcctgycttaaacagagtgaaaataaatgaagagggggtttgagaagtctttgtagcaaaagatcataagaaaataaacaccagtgcaaggcaggagtccagaaga

SEQ ID NO: 398608 - DNA, 201 bp, Homo sapiens
atactgattgaaaggctggagagcacagactttgttcagtcacatctgacttacaattttagttctgccgactgctagatctatgaccttctctaaatccytgaactcaaggaaacttcagattcctcgtatttaaatggaagggagggaacatgagtagttatgaagcatgtaaagtgcttagcacagtgcttaccccat

SEQ ID NO: 398609 - DNA, 201 bp, Homo sapiens
cttgggatcattgtaaatataaatgtgttcataagtaacaaatgcatagaacaatgctgtgcaaatcttaactgttcagtaaatgtcaacaattgttaaaraacttgaaatgtcttctgaccttctgcaggataatttctgaactttttgaatagcagaagaaaaccctgcaattttctctctgactgcaactccagtttc

SEQ ID NO: 398610 - DNA, 201 bp, Homo sapiens
acagcattgtagcaaatacttgttgaataagacaattgaatatatggaacttgagagatactttgattcttgaagatgatatccatgataatctttgggaaaaaaaaaagagcattttcaggagaaaatgaaagttattaaaaggtaaaagaactcataggcagaagaagtgtacctaaagattttattcaccatttttaa

SEQ ID NO: 398611 - DNA, 201 bp, Homo sapiens; identical to SEQ ID NO: 88328

SEQ ID NO: 398612 - DNA, 201 bp, Homo sapiens; identical to SEQ ID NO: 88320

SEQ ID NO: 398613 - DNA, 201 bp, Homo sapiens
taaagccagcagtagtgggttgagtttctctcaagctgccacttctcctcctcttcttccgttgttgcatctctctgacccactcttctgtcttactcttscacttctaaaaactcatgtagttatattggatccacctggacactctagggaactcttcccaattcaaggtccataccttaattgcatctgccaagtccc

SEQ ID NO: 398614 - DNA, 201 bp, Homo sapiens
ctttggaggctcttgtcctgtcaggattagtttagggcacagagtgctgcttgcagatcaaggcatctttgcttaccacagcctcaaagctttccataccrtacttatgtgtaatactcttaatgaatgttagttgtaaaaataaacaaaattttcttctgaaagaacaccaaatcacaacttatacgggcattgacttga

SEQ ID NO: 398615 - DNA, 201 bp, Homo sapiens
gatctgcctaaatgtatccatttcaatacgtttatctttcaatcatgtcaccccattaaactcctacttcctgatcaactactcttctttggaattctcartgtttcctctcagtctttcattgattatatcaaggaagtagtaaaacttgttttgaataaaagtcattcagaaaattgtttttgatattctcccttttaa

SEQ ID NO: 398616 - DNA, 201 bp, Homo sapiens
tcctcaatacttaagagccaatgggcaattttggcttcatatgtagatgcacacaaatggatacctctccagtctaagtgctttcatggagatgaggaagratggggagccaggggccattgctccgatggctgatactgcccccatcacctaaattatcttgaaaggggatccgagcggtgctcaacctgtttctcatac

SEQ ID NO: 398617 - DNA, 201 bp, Homo sapiens
gtgtgtgtgtgtgtgtgtgtgttagttagggagggtggtgggagggaatgtcctggtaggaagaacagggaaaggccaatcttaaatgaatagttgtccaycaagtcaatactttcaaaatatttaagacgagtttggacacttatatctcatgaagtaactatgtaagttgtctaatttcacacagtcacccagtcaccc

SEQ ID NO: 398618 - DNA, 201 bp, Homo sapiens
tcactgtgtatctattgttttattgcttctcagaggacatctttgtcaccttggcccctaggaagcagttcatgtcataactcctgttaaatataactgtrtggctttggggccacgtggggtgggatttggattgactcaatactgctaaccaggctgctcctggctgcactggatggctgctagccacaaggggccagg

SEQ ID NO: 398619 - DNA, 201 bp, Homo sapiens
ttagtgcttataaaattctcgaattcttttgcttttgcaatcaagccaggcagatttctaggagttgaggtttcttagggtattttatgtttcacatgacstcaccaagaagttacggatcaatagaactttgtaatgttcatgtagcagagggatgaaagagttaaaggatttaggtgttgcaaagggtgcttcttctgg

SEQ ID NO: 398620 - DNA, 201 bp, Homo sapiens
tcctatcttatttttttcaataatgagcctgatactatgtagacaaaaatcagcaatattatgattgaaaacattaaaaattgatgccatgaccactgcakaggcttctaactacagcattgtagcaaatacttgttgaataagacaattgaatatatggaacttgagagatactttgattcttgaagatgatatccatga

SEQ ID NO: 398621 - DNA, 201 bp, Homo sapiens
gttctcctagcccccaccagattagctagataagtgctgattggtgcatcaacaaacctggagctagacacagaatgctgactggtgcatatataatcctscagctagacataaaagttctccaaggccctatttaactcaggatcccagctgacttacccttgtggatcctgtgctggggccatgggcggagctgcctgc

SEQ ID NO: 398622 - DNA, 201 bp, Homo sapiens
gtgtcagtagaaatgctgtgacatgtttcagtgctcagtggctgaaggctcagtcagttatgctccctgagcttggaggtaggttttgtagtgtgtttctrtaggtgtcacagacaaaattgtgggtgattaaaaaatatcccattttttggtattttattaattatctatatgtaacctgcatttaatatttgagggaag

SEQ ID NO: 398623 - DNA, 201 bp, Homo sapiens
ttcagggaaatgaacatcagggaaaatggggagggagccaggaaaggctatcatgcatgtctgacaagcaaaggagagagtaaaggaagaaagggagttgrggtgaaccatttagactacagtgcaattcaaagggaagttcatcaggatctttggagagtccttgatccaaagtcacctgtcagaagagtcgcacatcct

SEQ ID NO: 398624 - DNA, 201 bp, Homo sapiens
ttactatctgcctcttagtcatcttgggagcgaaaaatcactgcctttgaatgaagccagtagagttccactttagtgtgattcacaggcgttgcctggaygactgtgttaaggattctgttggatagctatgggctcatggaaagaatcaaaggaagtagatggtcaaatgctatctatttctgctcatgaaacttaaca

SEQ ID NO: 398625 - DNA, 201 bp, Homo sapiens
ggcagattatttattctattataaacaatttgtatgtattagaatatgcatgaacactaattatatccttttgatattaaacttctgtttgggacaacaayaatttaaatatatgctagagttttaaagctctcatgtataaattctcttaagcgctccatgcttcagtttctttaattgaaaataaaagggctgaactag

SEQ ID NO: 398626 - DNA, 201 bp, Homo sapiens
agaggcaggtacatgactacagtaggatgtgacagccccaacaatagaacagacaaaagggtattttgcggcagaggtgggcaggatggggaaataagaayaaagtgtgtgaggccggatgtggtggctcatgcctataatcccagcactttgggaggctgaggcaggcagatcacgaggtcaggagttcaagaccagtct

SEQ ID NO: 398627 - DNA, 201 bp, Homo sapiens
gttcctttgttatatagtctggggccctagctatttcttctattggctgaagtttctttgtgtgtgtcagcttttcatttatggaccctgaaattaatccrgtttaaaattatgctcttcaaatatagttcaaataattctgttttgaggaagaaatgtagtacagagggagtctttcatgaaaacaactttcccaagcca

SEQ ID NO: 398628 - DNA, 201 bp, Homo sapiens
ccatttttacgttgggaattgccaagctcagccttaacgtctcccacaacacctatgaataatcatttaaatacaggctttgagacttggggaaaaaagcrtattatttactctaaagacaataatcttccttggagtcattgtagtccatcatgcagatgcatacttggggatctttggaaaagcaacattttctcttga

SEQ ID NO: 398629 - DNA, 201 bp, Homo sapiens
agaaaatatgtttaattgactcacagtttcacatggctggggaggcctcacaatcatggtagaaggtgaatgaggagtcaaggcacatcttagtcttacayggtggtaggcaaagagagaatatgtaggggaactcccctttataaaaccatcagatctcatgagacttattcactatcatgagaacagcatgggaaagac

SEQ ID NO: 398630 - DNA, 201 bp, Homo sapiens
aatgctgctttatcagtgttaactcgttagttttgataaatatacgacagttaccattagggaatgcttggtgcagaatatatagaagtctgtgtactctsttgaaactcttctgtaagtacaaaattatttcaaaatgaaaaattaaaaatgtatatggaagagttaatatatttatgtaatacattagatataggatat

SEQ ID NO: 398631 - DNA, 201 bp, Homo sapiens
ccaacccagcttcagttttcctttgcttcttctttctttcatcatctttgtttctttcctcttgttctcttcctgggttcttgattcattcagtagaagtkaagactccaattcatcatattcctttaactgaagggactcataccatgacctgtgagtagttcatttgagtgctgaattagtcttccagggctgctctag

SEQ ID NO: 398632 - DNA, 201 bp, Homo sapiens
gcagactttcaatgcaacacacttctacatatgacttcataatttttatccaggaaacaacttcttaaaacagggcagcttctcttgtctaagcttaggtygcctccatatttttaaatataaaaccacatgaaatactaacatcagcctcttcccagaaagcctcttccaagctaatcgtcatcattaagctagactcag

SEQ ID NO: 398633 - DNA, 201 bp, Homo sapiens
acagcctctccttttgtaacagagggtggcattgactcctctgagaatgtcttttaagaggcatttaatataatttattcagtatttattgcacatatatrtatatgtatatatacacaaatagcagttattgacaagagacttggttttgaagtccagtgatcacaagaagatgttctgtttcctaacatagaaaatggg

SEQ ID NO: 398634 - DNA, 201 bp, Homo sapiens
gggagtatgtaaactactgaaatatattaaggtaaatgcatgattttttgtgtgtccatgtacacccaattatgtgaaggtgggcaagacaggcatatgtrtatatatatatatatatatggacctgaaaaaagaattactttaggtaatagcatatacatttgctggcctgggaagagcagattaggatttgagttgatg

SEQ ID NO: 398635 - DNA, 201 bp, Homo sapiens
catatcacatattatcaccaataccgaatgttgtttttaaaacatacaggcacacaacacacactttgctaatttgacatgatacatacattaaaagtatrtttttattttcatttacattaaattacagagaaggcaaaatattttatttattagtttatttgaatttcttctgtcgggtttttgtccatgttatttgac

SEQ ID NO: 398636 - DNA, 201 bp, Homo sapiens
tgttttaaaattataggcttttagagctggaaggagccatggaaatcatagagtccatccttcttgttttatggattaaaagtgagcgtgcaatcattctrtcataggtaaaggctgctccgtgtactctggggcttgcttcatatatcttgcctaccttatttcctcagattaagtttagccagagttagattaaagtat

SEQ ID NO: 398637 - DNA, 201 bp, Homo sapiens
ataaatgagattttaaaaatcctttagattttaataatagaaaaaagttttttttaaatctgaaagagcttattttatatttcaaaactgtaaatttattyggctttaaattacttcaaaataggaaaatatttcatatgatgcacccatttaaaacctatttaaaatgtatactaattacaatatgcacttaatggagtt

SEQ ID NO: 398638 - DNA, 201 bp, Homo sapiens
ccttcattttaccaattcctttttattctatctcctctaaacctcttgattatacccatcttcttcattgctactacctttccttctggaacttagcattycttatcttcttaaagtttccttctgtcctctccactctcctccaatttctcttgcatattacttctagcatggtcttttacaaatctgaccacattattc

SEQ ID NO: 398639 - DNA, 201 bp, Homo sapiens
tataatctgtgagttcagggctctctgagttaaagtgtttatttgtcccaccacacagaaacttttccttatgtttggttactttgggtttgcatgtattytttcaaagtgcttcatgctgtctttgaagaagagccgacaggttctgtgaccttgagcaaagctcagacgccctatatcctagttctcatcaaaagagca

SEQ ID NO: 398640 - DNA, 201 bp, Homo sapiens
agggctcatttgttccctggctgtggatgatccctgttctttgttgtctgaggccaaatgtcttcaatttcactgtgtcctatattttgtttggttttcarttgttttaggtgagagagtaaatctagaccctgttactacatcttggcagggagaagacattcaggtcttttgtattcatttttaggagttctttatgtg

SEQ ID NO: 398641 - DNA, 201 bp, Homo sapiens
ccatctatcaaccaggaaggcatcttcaccagaacttgactgtagtggcaccttgatcttagacttccagcctctagaactgtgaggaataaatttctttyctttttttcgtttttttaaattttactttaacttctgggatacatgtgattaacgtgcaggttacatgtgccaggtatacatgtgccatggtggtttgct

SEQ ID NO: 398642 - DNA, 201 bp, Homo sapiens
tgtgtccccacccaaatcttaccttgaattggagatcccataattcccacatgttgtgtgagggacctgataggagataattgaatcatgggggcagtttyccccatactgttctcgtggtaatgagtaagtctcacaaggtctggtggtttgataaggggtttcccttttcacttggttctcattctctcttgcctgcca

SEQ ID NO: 398643 - DNA, 201 bp, Homo sapiens
gagagttactgtttaaccatttctcccaccatcgactggattacagtgcaggaagttcactcgtggctttatcaaatcagcatggcttggatttaaagccragaacagcctgtctctttttgattttgataatctttgcagttttgtgctgccctggccttggaaggtctgtagatgcattggaagtcaggagacactcag

SEQ ID NO: 398644 - DNA, 201 bp, Homo sapiens
aattctttgtcctccttgagtctcagtttcttcatctgtgaaataggaagatgagctttacttttctaaaacacgtatgtccccccttcccctccacaaagggagttagagattgttaatagctaccatggagaaaatatttatttggtcaaataagtatatgaaaccctggattaaacaaagcaaagtgagttattgtgg

SEQ ID NO: 398645 - DNA, 201 bp, Homo sapiens
aagaaatgtagtacagagggagtctttcatgaaaacaactttcccaagccattgctctggagttgctaagggtgatcagccagcaaagcccaaagtgttcmtttagtatgacatgcaagtattttaaaaagatcttagctggaaaagcaatataattggcaaattaaaaatattaaaatgaaagtttgcaccttctgacta

SEQ ID NO: 398646 - DNA, 201 bp, Homo sapiens
ttgaaaagagttcaggttctgattattccatttactatgattgggagcttgggcaagtcacttactctttcagcttagagttctcatccgaagtgagaaamacaccaacttcacagggctgtttaaaggaatagtcacaaaataattaacatctatcaatttcatttgcaaactgtaaagcttcatgttcattatcatcat

SEQ ID NO: 398647 - DNA, 201 bp, Homo sapiens
acttactagcagagtgactttgggcaaataatatatttaagcctcagttttcttatttgtgaaatttgaaacatagtcatactctctctgtagattggttmtagggactgaagaggtaagcatatgtaactgtggtataagagtgcccccatgtagtgctcaccaaatactaatattaatgccaatactattattattttt

SEQ ID NO: 398648 - DNA, 201 bp, Homo sapiens
tggggtgctgcatgggcattggggattttacaagatctacaggagattctaatatacagataatgcaaagaatgattgatttgagtgctttgatcttctamtattaaaaagaaatctaaaaatttctctgttattatttgtggagtatgatttgcatggaacctagactgcctgtgaatttaagagttgaaaaagtctcag

SEQ ID NO: 398649 - DNA, 201 bp, Homo sapiens
agcaaggactttaaggaggagtgtgcttgattttaacttttgtgtttcctttctgcacgtcctttcaagttcatgtttttagctctagagtttgttctgctttttttctatggcctcagtacccatgataggagtcctccccagtcacacgtctcacttttatgaagcatttcttaggacttcaacatggggtaaaggcag

SEQ ID NO: 398650 - DNA, 201 bp, Homo sapiens
accaggaaggcatcttcaccagaacttgactgtagtggcaccttgatcttagacttccagcctctagaactgtgaggaataaatttctttcctttttttcktttttttaaattttactttaacttctgggatacatgtgattaacgtgcaggttacatgtgccaggtatacatgtgccatggtggtttgctgcacctatca

SEQ ID NO: 398651 - DNA, 201 bp, Homo sapiens
ggagaatctagtaaacccgaagggcagaggttgcagcaaaccaagatcatgccattgcactctagcttccagcctggtcaacagagagagactctatctcwaaataataataataataataataataataataataataaagtgtgtgagattacttgtggtatctaaattgggttttatgaagacatgttttctgttttg

SEQ ID NO: 398652 - DNA, 201 bp, Homo sapiens
tgaagctgcgtgctgacccttgactcttttcattttggaggctctgtctccagaattataagacatgtctcagtttgaccatggggacagcaggtaagctytgaggcttcctcaggcatgctactgttatctcttccaattttctagtggactttctggaatacctggaggctgtacttacaaacggaacagtgtctttac

SEQ ID NO: 398653 - DNA, 201 bp, Homo sapiens
gtaaacccgaagggcagaggttgcagcaaaccaagatcatgccattgcactctagcttccagcctggtcaacagagagagactctatctcaaaataataataataataataataataataataataataaagtgtgtgagattacttgtggtatctaaattgggttttatgaagacatgttttctgttttgttttgtttcc

SEQ ID NO: 398654 - DNA, 201 bp, Homo sapiens
agtcatggctgaagctgcgtgctgacccttgactcttttcattttggaggctctgtctccagaattataagacatgtctcagtttgaccatggggacagcrggtaagctctgaggcttcctcaggcatgctactgttatctcttccaattttctagtggactttctggaatacctggaggctgtacttacaaacggaacag

SEQ ID NO: 398655 - DNA, 201 bp, Homo sapiens
aaggaagaaagggagttggggtgaaccatttagactacagtgcaattcaaagggaagttcatcaggatctttggagagtccttgatccaaagtcacctgtyagaagagtcgcacatcctccacgaacaggcctactttcttagctttgccacactcagcattgactgagatcagcctggggaactgtggtgtcagtagaaa

SEQ ID NO: 398656 - DNA, 201 bp, Homo sapiens
aaccccgcacaaattcatattgacaccttagctcccggtatcccaaaggtggggcctttgggtggtgattaagtcatgtggatggagcccccataaatggratatgtgcccttataagtagagtatgagagcgctccctggccccttctgccatatgaggacacagcaagaagacactcatctgtgaacaggatacagtcc

SEQ ID NO: 398657 - DNA, 201 bp, Homo sapiens
acattaaaaaataattaaaagtataattggattgtttacaacacaaaggataatgcttaaggggatggatacatgagatacttcgatatagacatgcaatktgtaataataacatcatgataaatcacatcagttaccgtgtggtcgtggttggtgtcacagtgaggacagccttatggttgacactgtaccccgtgccat

SEQ ID NO: 398658 - DNA, 201 bp, Homo sapiens
tcagaaaactgcattcagggagccatgttgatacaccagaagaaatctgccaggactaaagaccgacccaataattcccgaggtaccttcaggaaagtcartttatttttgagtcaaaggaatctcaaattatcctaaatggcattgcttccaccagagttctgttcttaatttaataagctgctacaagttccaagccaa

SEQ ID NO: 398659 - DNA, 201 bp, Homo sapiens
ctggccagaccattttgattcttagagatatgccatccagtacttaaactgggttcttaaaaaaataaattatataaaacattgatatttccagattatawctgacatagcaaatgtggacaggtaggagaaaaagggatatctagtaatgcttttattcatgcacagcttaatgtgcttattgctatatttcttatttct

SEQ ID NO: 398660 - DNA, 201 bp, Homo sapiens
tgtagctacttttatcagtgtttagcatgaaaatttcagaaaactgcattcagggagccatgttgatacaccagaagaaatctgccaggactaaagaccgwcccaataattcccgaggtaccttcaggaaagtcaatttatttttgagtcaaaggaatctcaaattatcctaaatggcattgcttccaccagagttctgtt

SEQ ID NO: 398661 - DNA, 201 bp, Homo sapiens
attagctccaaaattggagtaaacttaatccttcattcaagatagttgctattagacgtggtcagtgaaattggtgggagagctggtctatggattccctygaccccactgaagtagctcataatagaatgcatttactaaaatccaacaaggtaaatataaggtaaaacaatggaactcacagccttaaagagtcctggc

SEQ ID NO: 398662 - DNA, 201 bp, Homo sapiens
aaatctttgacttatgaatgataagaaaataatgaaaattgagttagtgcttataaaattctcgaattcttttgcttttgcaatcaagccaggcagatttytaggagttgaggtttcttagggtattttatgtttcacatgacgtcaccaagaagttacggatcaatagaactttgtaatgttcatgtagcagagggatga

SEQ ID NO: 398663 - DNA, 201 bp, Homo sapiens
ctttagagacaagtgtgttagagtcccattaatgcacataatggctcctgcagctcactgatgcacatgctatcacagtgacctgaagagttaaggtgcgyactccttaggctacttcacataacattgaagccactttgacccagagtagactaaaaccccatatattcaatatttgctttcattaatatattcataaat

SEQ ID NO: 398664 - DNA, 201 bp, Homo sapiens
gtaaggggaagattgattaggattctcttgttaaaatgtagaagccttctttggtcatgtgtgggtgggtgtccggtgagaatcggaagcctgggtgtctmgccaggaagcaacaattagcattctactctaattctgtgatttctctgatatggagctcactgggtagctgcatttcagttggtcagtcaggttgcctgt

SEQ ID NO: 398665 - DNA, 201 bp, Homo sapiens
ctggggaaattgttttcttcagaaacggtgtgttgcaagtaaagaacacaaggaaagtgtgtaaggcttttgatttttcccaggttacaaggccagtggcwggcccaagtgatgttgtaagggagaccttatccatcagttttcccctttccagaatacagccctcaagactgtctatgtagacatgtatacagtgcgggc

SEQ ID NO: 398666 - DNA, 201 bp, Homo sapiens
gtccagtagagaatataaataaataaatgtatggaacagttttgagattagatctggatattatattatgaaggtaacattttggtctgaattctctggcytatgctgaagacacgaccttggctgcctcatggatatggcctgtctttcacacactttagagacaagtgtgttagagtcccattaatgcacataatggct

SEQ ID NO: 398667 - DNA, 201 bp, Homo sapiens
caaatgcaaatttcaaatccctgacagaaaagccagctcctctcttaattttgacacaatagttttgactgtttccattttcgtaaggaataactagggarctgtacaaatgatgagaagccctgtgggcatttggtaccatacatcatttcttctttgctgctagggctgttattgcattccacatttttactcccacac

SEQ ID NO: 398668 - DNA, 199 bp, Homo sapiens
cctagtccctggtaaccaccattttactctctacttctatgagacccacttgtctagattcaacatataagtgagatcacttggtatttgtgtttctgtgyccgaaatatttcacttaacataatgttttccaggcttattcatgttgtcccaaatgacataattttgttctttttaaaggctgaatagtattccattg

SEQ ID NO: 398669 - DNA, 201 bp, Homo sapiens
cacaatagccaagatttggaagcaacctaagtgttcatcaatcaatgaatagataaagaaaatgtggtacatatacacaatggagtactatttggccatamaaaagagtgagatccagttatttgcaacaacatggatggaactgaaggacattatgttaagtgaaataagccaggcatagaaagacaaacttcacatgtt

SEQ ID NO: 398670 - DNA, 201 bp, Homo sapiens
ggtatcttatatataagtcctagaccatcgtgaaaacaaagactacctctgtttataaattgtggaaaaataaattccattgatgctgagcttccaatttmtagagttttgtaatgtgacaaacacaagcataattaggatgtttcataaaccagcaacttaaaaagattctgccccttgtcataaaataatgagtttcta

SEQ ID NO: 398671 - DNA, 201 bp, Homo sapiens
tccaattagtctgttacagagtcatccataagcatgccttgcttttaaacaaaacaaacaaacaaaaaaacacacacaaaaaaattttttttgaaacaacaaaaaaaaaactagtactaatcacttttctgacaatacaattactcaaaattaactagtactgggagggggaagggggggccatacctatgggccttgtct

SEQ ID NO: 398672 - DNA, 201 bp, Homo sapiens
ctcagatattcataagccagggcctgcctctgtttaccagctgggaggtcttcagataatgaaacatgaaagcctgctatgcagcggcgctatgcaataawttttcatttgccaccagtcagcttcagggatcaaggacagctaaacacataatccgctcatgcatgttattttaaaggcttatattttaaaggttataaa

SEQ ID NO: 398673 - DNA, 201 bp, Homo sapiens
ccttggtgttccttggcttgcagatgtatcactccaatctctgcctctgtctccacgttgtcttctttcctgcgtgtctttgccctttctcttatcttctraggacacttgccattggatttagggcacactgtcttccaggatgatctcatcttgagatccttaatttaattacattctcaaagacccttttcccaaata

SEQ ID NO: 398674 - DNA, 201 bp, Homo sapiens
gtttgatttaaacattgcttttagtatgatgccgacaccagctgtgcagaaagggctctggagagatgttcatagcagcacacacctgcggctctttttcrgttctggaggctccagggcagccaatattgcttcgtcaaatacattctttaggcctttctttgtaagtgcagaacactccacatacttgacagccttcag

SEQ ID NO: 398675 - DNA, 201 bp, Homo sapiens
tttctttcacattttcaaatgaagatggagagaccactgaaaaacagactagaaatacatctgtttgtggataactcagcggtcgtaatctgtcataatcmtcttgccctgcagtatcaaaaagtccaagagtatatggttctccaccaatcataactgtgactgcatagttgtcaaaaacagtcggtacatattccgatg

SEQ ID NO: 398676 - DNA, 201 bp, Homo sapiens
aatacgcaccacaatcctatgaaaatgatactataaccccattttgcagaagaggaaagtaagtcccagaggagaaaaacaaaagaaagaaaggaaagtakagagaaagggagggaacggggtaaggaaggcagcttttccaatagaagagaaattcccttgctgagaagaaatttcattcccataaaagaaacttctcta

SEQ ID NO: 398677 - DNA, 201 bp, Homo sapiens
ctcctaagtgggagctgaacaatgagaacacatggacacagagcgaggaacagcacacaccagggcctgttggggggtgggggtgaggggagggaacttaragtacaggtcaataggtgcagcaaaccaccatggcacacgtatacccatgtaacaaacctgcacattcttgtacgtgtatcccttttttttttttagaag

SEQ ID NO: 398678 - DNA, 201 bp, Homo sapiens
attgctaaataaatctaatactttttatttctatacattttctctcattctaacatactagatagccctactcattagtgatgtaaggaatctttcatgtrcttatcactactaatcattagggaaatacaaatcaaaacaacaatgagacattgcttcacacataatatgatggctactattaagaaaaaaaaaagcaac

SEQ ID NO: 398679 - DNA, 201 bp, Homo sapiens
tatttaatacgcaccacaatcctatgaaaatgatactataaccccattttgcagaagaggaaagtaagtcccagaggagaaaaacaaaagaaagaaaggaragtagagagaaagggagggaacggggtaaggaaggcagcttttccaatagaagagaaattcccttgctgagaagaaatttcattcccataaaagaaactt

SEQ ID NO: 398680 - DNA, 201 bp, Homo sapiens
ctttatatgatttttatccaatttcagttataattgttagttatcaatttgaagattagttttttttagaaacaatgttgtttagttctgctttgtctagcctagtacatgtggagaataagcgactccacctcagtacatgttcctgctaagtgacattgacctgttaaaattgtcaaaacttgtttgagttatgttact

SEQ ID NO: 398681 - DNA, 201 bp, Homo sapiens
tgacccgttcttacagagcacaaaccctgtcccagatgctgaacttgccctctatgccctgatttctctgcttctcagcaccgatcattttgtgctgactmtataccctctgaaagctgtttgaagccagatgggagaaagagataaaacagatttcattcattgccctcccagactctgagggaaataaaaacaatagca

SEQ ID NO: 398682 - DNA, 201 bp, Homo sapiens
cagcggcgctatgcaataatttttcatttgccaccagtcagcttcagggatcaaggacagctaaacacataatccgctcatgcatgttattttaaaggcttatattttaaaggttataaatatggtacattgagttaatgaggtatgttcttttggtgacaaatatttacattccacatatgcctcttgatgtcaagagtg

SEQ ID NO: 398683 - DNA, 201 bp, Homo sapiens
atcaccccgagctccttgtttttgctgattatttcttgtgacccacaactgacccgttcttacagagcacaaaccctgtcccagatgctgaacttgccctmtatgccctgatttctctgcttctcagcaccgatcattttgtgctgactctataccctctgaaagctgtttgaagccagatgggagaaagagataaaacag

SEQ ID NO: 398684 - DNA, 201 bp, Homo sapiens
tgctttttggggaacatgtggaaaccatagcattacttaataaaaatttgtggatataatggagaatgaaagtaagaagaagaaagtgtaaagattatttygttaattcaggctacagtttaataaattataatttgaaatacctaaattagttttatggtaaaactacatatttttcttttgccgccacattcagtgttg

SEQ ID NO: 398685 - DNA, 201 bp, Homo sapiens
agcggcgctatgcaataatttttcatttgccaccagtcagcttcagggatcaaggacagctaaacacataatccgctcatgcatgttattttaaaggcttatattttaaaggttataaatatggtacattgagttaatgaggtatgttcttttggtgacaaatatttacattccacatatgcctcttgatgtcaagagtgt

SEQ ID NO: 398686 - DNA, 201 bp, Homo sapiens
tgcctccagtctctagtctgctggcaggatgattgttcaaaagtacaaattcagtcttgccattccctttcttaaaactccctagtggttcctcattgccytcagtgtaaagttctgatgtcttagcatggcaagcaaggccttccatgccatggcttccattaacttccttagggttgctgataccttttacctttgtca

SEQ ID NO: 398687 - DNA, 201 bp, Homo sapiens
gaaaggagaactaggtattctccaggatgcggaaattgaattttttccagatccatcttggaaaaatgtggattggatctacgtggtaccatggggagtaygtaaactactgaaatatattaaggtaaatgcatgattttttgtgtgtccatgtacacccaattatgtgaaggtgggcaagacaggcatatgtatatatat

SEQ ID NO: 398688 - DNA, 201 bp, Homo sapiens
actgttcctctagctgtggcacacctctatttagctactgcaaatacgtttaatatttggcaaaccatatgtatattattgggctattttgaattttctgrgaactatgattttgagctttgctgtgtttgaatgatcaattgcaatgctttgttgaatagacttctttacaaaatgttacattttcataaatatagcata

SEQ ID NO: 398689 - DNA, 201 bp, Homo sapiens
tctagcaactctcaagacaatgatatagaaaccaaaatgtcaatttataaatttatgatttaaaatacaactgtcaaggacataggacatttatgtcagtwagacatatctttctggaagacgtctatatacgtgagcagaagtcaaaaaatggccagatgatcacggcaggacagactaagagcattgtaatcttgcagt

SEQ ID NO: 398690 - DNA, 201 bp, Homo sapiens; identical to SEQ ID NO: 88322

SEQ ID NO: 398691 - DNA, 201 bp, Homo sapiens
aagcaggggagcttcagcagtatccagtgttcctggcagaatcaccccgagctccttgtttttgctgattatttcttgtgacccacaactgacccgttctyacagagcacaaaccctgtcccagatgctgaacttgccctctatgccctgatttctctgcttctcagcaccgatcattttgtgctgactctataccctctg

SEQ ID NO: 398692 - DNA, 201 bp, Homo sapiens
gctctgtgtatcaattcctttacctataaaatagcgacactgataataactatctaactcataggttgattgtaaagactaaatggatgaatgcatacatkaaatccttaaagtggtaactaaatgttcaataattgttaactaaaatgttctcacattacccacttctttcttttcacactacttttcacagacagtaat

SEQ ID NO: 398693 - DNA, 201 bp, Homo sapiens
tacaaaaagacaaatactgtgtaatttcacttttctgaggtacctagagtagtcaaaaccagaaagtagaatggtggttactaggggcttggaggaggaargaatgttgagtaattgtttaatttttgcaatgttttagttttgaatatttaaaaaactctggagaaatgatagtgttgatggttgctaaacaatatgaat

SEQ ID NO: 398694 - DNA, 201 bp, Homo sapiens
ctctcattctaacatactagatagccctactcattagtgatgtaaggaatctttcatgtacttatcactactaatcattagggaaatacaaatcaaaacamcaatgagacattgcttcacacataatatgatggctactattaagaaaaaaaaaagcaacagaaaatttcaagtgtcagctaggtcgtggaaaaatagggc

SEQ ID NO: 398695 - DNA, 201 bp, Homo sapiens
ttttcgcctcatctgtattgtttgcctgctcataacttgcagatgaagctattgtgggacatgatttggaagactgatcttgactatgtctttcaaatgtsagttaatggtggctgtagaggctgctaatttaggaatatgattcggatagtgtggatgatgcacctgttgttcagactaaggctctgcttgaggctatca

SEQ ID NO: 398696 - DNA, 201 bp, Homo sapiens
tgtttttccattttttcatgtaatctctaacttctttaagcagtgttttatagtttccttgtcgagatcttcaccttaattggttacatgtattcctaggyattttattctttttgtggctattttaaatgaggttatgtccttgatttggctctgagcttgaacattattggtgtataaaaatgctactgattttgtatg

SEQ ID NO: 398697 - DNA, 201 bp, Homo sapiens
ctccttaaagggcatatttcccaatataattacattgggggttaaggtgtcaaccatatacatttctgggagatccagtttaatctacaacaggtagtatrttggttaattttatatgtcagcttggcttggctatggtgcccagatgtctggtcaaacactagtgtagatgttgctgtaaaggtgtactttagatgtgac

SEQ ID NO: 398698 - DNA, 201 bp, Homo sapiens
ggctggagtgcagtggcatgatcttggctcactgaaagctccgcctcccgggttcacgccattctcctgcctcagtctcccaagtagctgggactataggygcccgctactacaactggctaattttttgtatttttagtagagaccatagccaggatggtctcgatctcctgacctcatgatctgcccgccttggcctcc

SEQ ID NO: 398699 - DNA, 201 bp, Homo sapiens
gcgcaccctccacagctgctggccgggtgctaacctcctcactgcccagggctggccgcagcagccggctgttccgagtgtggggcctgctgagcccacayccacccggaactcgcgctggcccgcgagtgccctgcgcccgcgcctcttcctccacacctccccgcaagcagagggagccggctccagcctcagccagtc

SEQ ID NO: 398700 - DNA, 201 bp, Homo sapiens
ggcatgatcttggctcactgaaagctccgcctcccgggttcacgccattctcctgcctcagtctcccaagtagctgggactataggtgcccgctactacamctggctaattttttgtatttttagtagagaccatagccaggatggtctcgatctcctgacctcatgatctgcccgccttggcctcccgaagtgctgggat

SEQ ID NO: 398701 - DNA, 201 bp, Homo sapiens
ttggagttttagagcaaacctccaactgggtgcttttaatgtcctaagcctctggctgtctgtccttgtaacccagattctggggcagatgctgagctctygttcattctcagtaggtctcttttcctagacttgtgagactagttgacctggaaaagcattaaggcagtcatctggatcaattcctttactttatattta

SEQ ID NO: 398702 - DNA, 201 bp, Homo sapiens
ggggccaggtcagaacacagaggaagaatgaggttgaaggctgggcatgagaatggctagtgggtgctagtatatagagtgtgcaatttttgttttttaattttttaattgacaaaaattgtatctttattgtgtacaacatgttatgaaacatgtatacaatctaaaatgccttaaacacatgcattacctgacatatta

SEQ ID NO: 398703 - DNA, 201 bp, Homo sapiens
tgttgatatctctagcatctggccacttcttcctattccgttgcaacttccttaagatagggctttagcagcctcctaattggcctcctgcctccagtctmtagtctgctggcaggatgattgttcaaaagtacaaattcagtcttgccattccctttcttaaaactccctagtggttcctcattgccctcagtgtaaagt

SEQ ID NO: 398704 - DNA, 201 bp, Homo sapiens
cccagcacactaaagcaggggagcttcagcagtatccagtgttcctggcagaatcaccccgagctccttgtttttgctgattatttcttgtgacccacaaytgacccgttcttacagagcacaaaccctgtcccagatgctgaacttgccctctatgccctgatttctctgcttctcagcaccgatcattttgtgctgact

SEQ ID NO: 398705 - DNA, 201 bp, Homo sapiens
caatgacacaactattaaactaggagtcatcttaagctcttttttcccattagttggcccttaagatttgttgatatctctagcatctggccacttcttcmtattccgttgcaacttccttaagatagggctttagcagcctcctaattggcctcctgcctccagtctctagtctgctggcaggatgattgttcaaaagta

SEQ ID NO: 398706 - DNA, 201 bp, Homo sapiens
tacagcattgtagcaaatacttgttgaataagacaattgaatatatggaacttgagagatactttgattcttgaagatgatatccatgataatctttgggaaaaaaaaaagagcattttcaggagaaaatgaaagttattaaaaggtaaaagaactcataggcagaagaagtgtacctaaagattttattcaccattttta

SEQ ID NO: 398707 - DNA, 201 bp, Homo sapiens
cagaagtatgtcacggatcacattttattagaactcttgataatttcgtaggctataaaatttagtccaaggaattataattaatggtctttttttatacaaaaaaaaaagcctctcttcattcttcttatccagctacctaatttgaaatttaacacctttcttatatggacataaaattagaccttgcttttcaatgcg

SEQ ID NO: 398708 - DNA, 201 bp, Homo sapiens
gaattctcttttgtattaacccaatgacacaactattaaactaggagtcatcttaagctcttttttcccattagttggcccttaagatttgttgatatctmtagcatctggccacttcttcctattccgttgcaacttccttaagatagggctttagcagcctcctaattggcctcctgcctccagtctctagtctgctgg

SEQ ID NO: 398709 - DNA, 201 bp, Homo sapiens
tccagggcacctctgcttttattggttgtgtatattaggaatccataaaaattttcatttgaaaggaagactctggtgctaaaaaaaaaaaaaaaagaaamattggaaaaccactgaataatagggatctcattatcagaggggcagaaacatggtagctcctttggggaaataaagcacaactttctttctctttcactt

SEQ ID NO: 398710 - DNA, 201 bp, Homo sapiens
agtcaagcctgcagttgtttatcccactccaggatcacacattaatgctgctggaaaatgattctctatttaaaactcaaactgggtgaacagagcctggytctagctttctttctttcttttttttttttcttccaacttttaggttcatggggtacatgtgcacgtttgtcacatcggtagattgtgtgtcatgaggtt

SEQ ID NO: 398711 - DNA, 201 bp, Homo sapiens
ttagagacaatgatgattccaatatatgaaacaaagtcttcaatttttaaatatttttaaatattgaatccattataatcttggctacagttgtacatactttttaaagcttaaaataatattttaagatgcctttatatgaatgacatcatatgaagacagctaaatgagaatgaagtgaaggagaggggctcggagttc

SEQ ID NO: 398712 - DNA, 201 bp, Homo sapiens
ttgtagactgtaaaattatttgatcaagttgcatagcttcagtgacaattccagttaattcaggcaggattttaatttactattctacatcttaggctaastgttgcccaactccagtggagttaagactatgaggctttagtatacatatacttcgattttgttttgaagtcctcataaaataagccacctttggctcag

SEQ ID NO: 398713 - DNA, 201 bp, Homo sapiens
ggttaaggagcagtgacaatcaacagatgctgatggaagaaagatatttctgtcttctcattataataagagtcatttgactgtcttcatggacatttgcrcagttttgcgtttccattgttagttataaaaggtcagtgcatggaaaattaagttaatagggtcagtgcaatttgatgaaaactagttttggggttgtag

SEQ ID NO: 398714 - DNA, 201 bp, Homo sapiens
cggatctcctttgaagctagcaatgcaatgtgtgttcaagaatgtatcatttccaggttaactgtggtgtaggaagcttctttaaaacacttagatattcrtaattatgccccattctgtttttgaacccattctatagggcctttgcacccactgcttcaacaaagcatctcttacaagaaaaccaatgacctctaattg

SEQ ID NO: 398715 - DNA, 201 bp, Homo sapiens
ttaaggcaggagaatcgcttgaactcaggaggtggaggttgcagtcagctgagatcacaccactgcactctagcctggtgacagagcaagacttcatctcaaaataataataataataataataataataataataacaataataataaaagatgtagtatacaagtacaccacaagctagctcctgcaatttaaatgggt

SEQ ID NO: 398716 - DNA, 201 bp, Homo sapiens
cccagtggtaggtcaagcctggattgctactttttttattcttcctgttgctctaattctgactctatttgtatggccctactattggcattttggactargttctgggcattccagcctgtgtcctgggaactcccacagtggccgtcacagttcctacagccgcttctttctgctcagttctcctttgtgtatatgaga

SEQ ID NO: 398717 - DNA, 201 bp, Homo sapiens
ggccttgtactcatgttatatgaatgttattgctaattcttaaatctgaactgcaagatgagtatttttcgtgtttttatgatatggcagtggaagcataragaggtttcataactttctgaaggttttatatccaacaaatttggaagtcagagcctatttccactatatttactataatatttcttaagaaattggaat

SEQ ID NO: 398718 - DNA, 201 bp, Homo sapiens
gttgcagtcagctgagatcacaccactgcactctagcctggtgacagagcaagacttcatctcaaaataataataataataataataataataataataayaataataataaaagatgtagtatacaagtacaccacaagctagctcctgcaatttaaatgggtgttttgtagtctgtctacttgctttcatatgggagta

SEQ ID NO: 398719 - DNA, 201 bp, Homo sapiens
tgggctttctctcaggccttgtactcatgttatatgaatgttattgctaattcttaaatctgaactgcaagatgagtatttttcgtgtttttatgatatgrcagtggaagcatagagaggtttcataactttctgaaggttttatatccaacaaatttggaagtcagagcctatttccactatatttactataatatttct

SEQ ID NO: 398720 - DNA, 201 bp, Homo sapiens
tagataagtgctgattggtgcatcaacaaacctggagctagacacagaatgctgactggtgcatatataatcctgcagctagacataaaagttctccaagkccctatttaactcaggatcccagctgacttacccttgtggatcctgtgctggggccatgggcggagctgcctgccaatcccgtgccttgtgcctgcactc

SEQ ID NO: 398721 - DNA, 201 bp, Homo sapiens
acatttgggtcccctcaatattatagaaggcagtggtggagaagtccaagaagaaaggatgtcagctgctccaaaaaactgttataaggtgacctctctaygcctcttattctagccagatctactgagctggatggaggttgaggtggtgatcatggtggtgagtgttgaacaaagctcccaaatgaagcaagctctgtg

SEQ ID NO: 398722 - DNA, 201 bp, Homo sapiens
gaaccacatagtatactatcattatttttattttccagaacaacattttcacacaaagttaatacttgttttctatttgttcattttgttttctgtgtgtktattgctaaataaatctaatactttttatttctatacattttctctcattctaacatactagatagccctactcattagtgatgtaaggaatctttcatg

SEQ ID NO: 398723 - DNA, 201 bp, Homo sapiens
ctatctccactactacatgaaagattccaacaccataatcctccccaaataatcagattttaattgtatttagatcagtggtcagggtttacctcattgtraccactgaaacttatttacacctgaaccacatagtatactatcattatttttattttccagaacaacattttcacacaaagttaatacttgttttctatt

SEQ ID NO: 398724 - DNA, 201 bp, Homo sapiens
aaattaaatatggtactgaagcaaataaaccactaatagctgaaaaaaaaatttagtctgacaatgtttgttttttcaccgagtttacttcattgacttarattgttagaatggatcagttttattgtgtcctaccatcttactttatgctttttattttgctaactatgtatttttcatttttttattttcttgctcttt

SEQ ID NO: 398725 - DNA, 201 bp, Homo sapiens
aaccactgaaacttatttacacctgaaccacatagtatactatcattatttttattttccagaacaacattttcacacaaagttaatacttgttttctatwtgttcattttgttttctgtgtgtttattgctaaataaatctaatactttttatttctatacattttctctcattctaacatactagatagccctactcat

SEQ ID NO: 398726 - DNA, 201 bp, Homo sapiens; identical to SEQ ID NO: 88325

SEQ ID NO: 398727 - DNA, 201 bp, Homo sapiens
tggattttcagtcagtccaaactcagctgagacatcagtttacattggaccagctgcttttataattgatttttagaatccatttgccccaactcctctayaaaggagaatcatttttttctattggctggaagaatattgggtcgattttttcaaagagcccttcattaattgggaaaagttccctgttctattcttagt

SEQ ID NO: 398728 - DNA, 201 bp, Homo sapiens
aacagcagtattcgtattttatgtgaagcacaccccacaaaaagcattttactgagcgtgcactattttgatacatgattcttactactggagggacacasacaggtcagtaaaacatggaccctgctttgacagagctcaaactaaaggaggccaaagaaaaatgtttttaaaatgactcagccaggcgtggtggctgac

SEQ ID NO: 398729 - DNA, 201 bp, Homo sapiens
taaagaattttcaattacttacgagcacgacaaagataacttctgcacgtgtctgtgaagcaatgagacagtaaacagcagtattcgtattttatgtgaarcacaccccacaaaaagcattttactgagcgtgcactattttgatacatgattcttactactggagggacacagacaggtcagtaaaacatggaccctgct

SEQ ID NO: 398730 - DNA, 201 bp, Homo sapiens
acgctacagcatgaatgaagcttgaggacattatgctgtgcaaaataaatcagttacaaaaagacaaatactgtgtaatttcacttttctgaggtacctakagtagtcaaaaccagaaagtagaatggtggttactaggggcttggaggaggaaggaatgttgagtaattgtttaatttttgcaatgttttagttttgaat

SEQ ID NO: 398731 - DNA, 201 bp, Homo sapiens
ctctataagaaaacagagttctatataagttggtgggatctattgacagtcagttgtctcacaaaagattatgcgtgtgagtggaaacagccaaaatttaraccttgataactgccatatagcaaggactttaaggaggagtgtgcttgattttaacttttgtgtttcctttctgcacgtcctttcaagttcatgttttta

SEQ ID NO: 398732 - DNA, 201 bp, Homo sapiens
aaagtagaactctgtaactaagagctggttgtttgcaataaaagagataagttgctagctaacttaaagattgaatggagctaacgtgcatactcaaaaamtaagaggggaaaacaccacagataaagagaaaatataagaatcgaaatggactattttgcttgaccccaaaaatatatttgaacacttgtatgatccaga

SEQ ID NO: 398733 - DNA, 201 bp, Homo sapiens
agataagttgctagctaacttaaagattgaatggagctaacgtgcatactcaaaaactaagaggggaaaacaccacagataaagagaaaatataagaatcraaatggactattttgcttgaccccaaaaatatatttgaacacttgtatgatccagaaaattttcttaaaaattacagtttatcagaactgaatgtagaaa

SEQ ID NO: 398734 - DNA, 201 bp, Homo sapiens
tatatttttggtttataacacctcttttacttatatgatttaaaaggcaaatgcatgtaacaataattatgtctgtggtaatgggcacacacatataaagrtgtaacttgtgataataacaataggaaggaggaggattggagatgcatacgagcagtgtttgtatactattgaaattaaattggtattattcaaactagg

SEQ ID NO: 398735 - DNA, 201 bp, Homo sapiens
atattgatatttgtataaagaaatgtacaattgtatttggagtctccagcctaccccctaacattcactgaatttagtaaaataagagaattcgaaaaatrtaactgttagaagttttaaatagggggcataatgggacgttttagtgggagagggacattaaaaatgattagattgttagaagtatctctaatgaaatta

SEQ ID NO: 398736 - DNA, 201 bp, Homo sapiens
gaacactggtaaaggttactacacaagtaaatatataaaccagtgttatatttttggtttataacacctcttttacttatatgatttaaaaggcaaatgcrtgtaacaataattatgtctgtggtaatgggcacacacatataaagatgtaacttgtgataataacaataggaaggaggaggattggagatgcatacgagc

SEQ ID NO: 398737 - DNA, 201 bp, Homo sapiens
attgggctatgcccgagtatcctcagagtttagatgggcagtgtatttttgcttaagtagaagaatgtagttgtgccactgagaaggataaccagaaaagrttagatatatttgtcagttcacttttactcaaatttccattgagttacttaagaaatcagttcttcaaagtggatatgtacattacagactctgtcacct

SEQ ID NO: 398738 - DNA, 201 bp, Homo sapiens
tgtgtcaggcctcaggagcaggcctcaagaaaaacaatttctctgaccttctcctgccctcctttcacctgccccaaggcaggactctaatgtctgcccayttttctgattgtgggtcctaagaccttccccagagagagtcttgccctataccttgggggaaggaatgctgacattatgaagcttccataaaaacccaag

SEQ ID NO: 398739 - DNA, 201 bp, Homo sapiens
ggaatggacacaggaaaaggcacttgctagactagtattacaaccagcaatctggactagcacagagaccaaacttaatgctccttccaaatgtggaaacrtttgagtaaaaataaatgacaagtggagaaaaggaggactaataactgagggtaaataaatgagtaagtgggttataaattgagggaaatcaaatattac

SEQ ID NO: 398740 - DNA, 201 bp, Homo sapiens
ggatgctgatatgactataaattcttgccaagggagaagtgcactagtataacaactgtagtttttttctttcttccccaaatcacctaaaaacatttttkcccccttacctgatacagtagtcctaggactacaagtgctggaaacaaggattatttctaagcaagaaagtataactgtatttttaagccttatgccaga

SEQ ID NO: 398741 - DNA, 201 bp, Homo sapiens
ggactgatgcagatgttttcacaagatttggccctcttggcctcaggggtttcccccagtggcatctgtcaggagatttaaggagatagtactgtcctgascccctcacccccattttggagccagacacttaaggaaatctgtgccacatcactggctgactgcagagatactggaacagaaacttcagtgattacatac

SEQ ID NO: 398742 - DNA, 201 bp, Homo sapiens
accccagagatttcaagaacaggtaccatagctaatttcattttgtgtatccaacttctcttgcacagtgcttcacaaataataaatgatgaatacatgtktgttgagttgaattttgtatcatatttaattgtcatgtattataatgtgtatttttttttctagaggcgtggagctatttcctatgacagttctgatcag

SEQ ID NO: 398743 - DNA, 201 bp, Homo sapiens
atatgtacagtttattataagcaacgtttgggtttatattatgaagatacattctcctgtgagccagctgatatctaagatacctgaccagttaaggagcrattataggcctcaaaattaacaaaagaaggacctcaaccattttattatgtagatgccacaatatttcctaccatgaattattgtggtttggattgtttt

SEQ ID NO: 398744 - DNA, 201 bp, Homo sapiens
agtgatgttacatatatttattggcatgaaaagataatagatacatttttgttttgttttgttttgaggagtctcactcttgcccaggctggagtgcagtrgcacgatcttagctcactgcaacctctacttcccaggttcaaatgattctcctgtttcagcctctcaagtagctggtattacaggcgaccaccaccacac

SEQ ID NO: 398745 - DNA, 201 bp, Homo sapiens
agcaggaaagccagtggattgtcctttcctttcttttctattaatatttggcaactcctatcgatcccttttgagtcaacacagatgtcaccccaaaaccyttactgacttactcaaacagattaaatttccaaagagaggctgcatgtgtctctctttgtatccatttttatggtagttcttaaccatactgtattacaa

SEQ ID NO: 398746 - DNA, 201 bp, Homo sapiens; identical to SEQ ID NO: 88343

SEQ ID NO: 398747 - DNA, 201 bp, Homo sapiens
attcttgagacatcagtaagaatgtgtagggacactcggggcctcggaggaggattacctctcccagtaacaaatgaccccaaaacttattggcataaaayaaccactatttttaatgctcatgattccgagaatcaggaattcagtcagggtatatatcaagtttggcttgcttgtgctctacagtgtcttggtctttga

SEQ ID NO: 398748 - DNA, 201 bp, Homo sapiens
ttgtgtaatacagccagagggtgagctttttagtaattgttcggatgaaagtactagttaaattctcatagtcactcttgttcccagttcctcatgtatcytctctcctgtattcctaaatgatgttaattattcagcttgatatcctttcctctctgtagtggcctctatttgcttttttcactcaggtttcgctaacct

SEQ ID NO: 398749 - DNA, 201 bp, Homo sapiens
agactcctaagaagttttccttgctccctagtagaagagagagattatgcagcgggcttttgattgatccaatgggaattacattgatctggtgtctggcyttggttcttatcaagtggatcacctctaaggtaggccatctttatttttaggatggtgacattcatcattagtttacatatttgataggaattaaatagc

SEQ ID NO: 398750 - DNA, 201 bp, Homo sapiens
aattcttacatctaaaaataggagaattatatttctggcttatttatttatatttatggttaatccagtccttgcacttggttctttggtattattgtcargtgtgtatatatcttaaaacaatattaatgttttgtttgctagatggctttgaaatgtgctgatatttgtaacccatgtcggacgtgggaattaagcaag

SEQ ID NO: 398751 - DNA, 201 bp, Homo sapiens
gaaaacatccaaatctggaaggttattcagtataatgttaacagtgcctatctttgggtagtgagatttctggtaatttttaccatcttcctacttttctkatttttttttttaaacaatgaaaatatatctatttcagaaatcgacaaagctattttttgaaatagtccctttaaaaaagtaacatgtctgttagagtat

SEQ ID NO: 398752 - DNA, 201 bp, Homo sapiens
atctcttctgttgaatgtttctgattttgactattcagccttatggaacacttttggagcgggaaggttaccacttggtaaggcaatgcattgtggtgttyaatggtgtagtggggttgaatagtgtttaccaacaattcttgttcaccaggaatctcagaatgtgaccttatttggagtaagggtctttgcaaatgtagt

SEQ ID NO: 398753 - DNA, 201 bp, Homo sapiens
cgcaaatttggttatagttttctacagacactacatttgtataaagaactctgtgatagactatttctgtccatgggattccaaaattatagacactgatrtcaatgcagatgaggttagcctaatttgggcaagagagggacatgccgagtctctgtatggatagctaaaggctattgccaagattgacaggtgtcctgt

SEQ ID NO: 398754 - DNA, 201 bp, Homo sapiens
aactaaccattacttggcaactttatacaaggttagtgcaattttatcatcaagatttattatttttgcattctagaaaatctttcatattttgaagaaaygaaagtaatgaaaataaattctcaatgaatgttagaattttaaccagattaatattgctaacagtattgttagtaatgatatgtccagaaagagacgtat

SEQ ID NO: 398755 - DNA, 201 bp, Homo sapiens
aaaagaaataaaccaaaaccttactctgatttattacttgttattaaagtgggctggaattcaaaacaatgagagcacagttggagggtttttactatagygttcacattttttctgtcgcaaatttggttatagttttctacagacactacatttgtataaagaactctgtgatagactatttctgtccatgggattcca

SEQ ID NO: 398756 - DNA, 201 bp, Homo sapiens
tgtccactgatctgttccgacttcagtatgtttggttagaatatgtgcttcttaagagtggatactgtttatttcacttttgtaagcccagtgcttcacaycaagtagatattagcaaatatagaaagtgaatcaaaccattatcaagtcctgtcagtgacccagtcctacggagagtccagctgtctgctctacccacac

SEQ ID NO: 398757 - DNA, 201 bp, Homo sapiens
gaaggactagagtgcttataacctaccctcaaatgttcagaaaaaagaattaggtgtggcacacacacacacacacacacacacacacacacacacacacagaagtatactgcaagtaataagacaaatgttaacaatgcatatctgagaatagagtgttctttatactatttatttttgtaactttttgtatgtgttttg

SEQ ID NO: 398758 - DNA, 201 bp, Homo sapiens
tgaaggactagagtgcttataacctaccctcaaatgttcagaaaaaagaattaggtgtggcacacacacacacacacacacacacacacacacacacacacagaagtatactgcaagtaataagacaaatgttaacaatgcatatctgagaatagagtgttctttatactatttatttttgtaactttttgtatgtgtttt

SEQ ID NO: 398759 - DNA, 201 bp, Homo sapiens
ctagcactttgggaggccaaggcaggtggatcacgaggtcaggagttcaagaccagcctggccaacatggtgaaaccccatctctactaaaaatacaaacwttagctgggcatggtggtgcgtgcctgtaatcccagctactcgggaggctgaggcaggagaattgcttgaatcaggacctgggaggcggaggttgcagtg

SEQ ID NO: 398760 - DNA, 201 bp, Homo sapiens
ttatcaagaagggaaatatatttgaaatataaaatattaaaattatgctcatttctatttttaaaaataatttaagaaattttacccttgttttcccttgktatggctcttctaattctcatttaattttaggatgtaaaaagtatatttttgcagaacaggcagcagcaataacttgtttctgttcttatgtaaataaga

SEQ ID NO: 398761 - DNA, 201 bp, Homo sapiens
agattagcactgctgtactgaattgcattaggacacagagcattctgccccatgtatgtgcagtttttaaaaaaactttcacctagtttccaggtgattcrtaagtgcctacatttaagaaccactaatctttgtttcttgtttgtcctaaagttgaaagaacagaatgttctgtcttctaaatatcttccttaactcgat

SEQ ID NO: 398762 - DNA, 201 bp, Homo sapiens
ataaatagatattacacatttccatactcagctgaataaaaccttaaggtctaggtataaaggtaaattggatggaatgtaaacattctattacattaaayagattcattaaaatctgttcccagaagttttcaaaactgacaagaaagtaaagagagtgccttatgtcctcaatagcataatcctggagtcacacttcta

SEQ ID NO: 398763 - DNA, 201 bp, Homo sapiens
tttgctgcattgatggactttccctttcatgaaagatttttctgtggcatgtgatagtgtttaatagcatttttatccacaggcagaacttccaaaattgragtcagtcctctcaaaccctgctttatcaaccaagtttatgtaacatcctgaattctttgttgtcatttcagcagtgttcacagcatcttcaccaggagt

SEQ ID NO: 398764 - DNA, 201 bp, Homo sapiens
gattatcctctcgatctcatcatgctgttcataaaaggtgacaaatgtgtaagttgtagttgaaaatggactcttgctatagacttggtcctatagttatkacaaaacaagaatatgtctctttaagccaccatggtaatataatttagaggagttttttttaatagagaaaaatgcattattctttgctgcttataatag

SEQ ID NO: 398765 - DNA, 201 bp, Homo sapiens
tgtataactctacatagaaaactgtaagtgattacatagaaaaattaaagataacttaaatagaaatatatatactgttatttatggattggaggattcartatttaaagatgccagtttttcttctttcctaaattgatctgtataggtttagtgaaatcacagtgaaaaaatcccagctccaagaatagccaagacaat

SEQ ID NO: 398766 - DNA, 201 bp, Homo sapiens
cctttgtactagctttgtggcatggagcatgctatttaacttctcaaagtcaagtttttgaatctgtaaaatgaggattaagattcctatctctgagggtygatgagagaagaaaataaaataatgcctgtaaaacacgaaaaagagtgtctagaacatggttgctatggttatgttgctgtatagaaaaataaatctgga

SEQ ID NO: 398767 - DNA, 201 bp, Homo sapiens
agactcccaagttcttcagttctgggactcagacttgctttccttgctcctcagcttgcagatgccctattgtgggaccttgtgatcgtgtgagttaatamttaactcccctttagagggacagaactaatctagagaaccctaatataacataccatgcagataataaccaaaagagatctggggtgactatattattat

SEQ ID NO: 398768 - DNA, 201 bp, Homo sapiens
tgtacgtgtaaggagccgagcaggatttgaatcagaaagaagaggttctcacccatatattgattttcgtattttccactgtaagtgttggtagacatgawgtttctcggattttcactacaaattttaataaaattacacagttttccaagggaaaaagaataccagaaaaaaaactctattatgtttggaatgttttta

SEQ ID NO: 398769 - DNA, 201 bp, Homo sapiens
taactcctattcctttttgtcctctttattttatcttgtgtgtcttacctgcctcagttcttttctactccagtacatatttttcccccacaaatgtgcakcctttttctccttgctgtctccatctttctctaacaaacatgttcaggattccgctgtccttaagacagagctttggattcatattttctttaactctgt

SEQ ID NO: 398770 - DNA, 201 bp, Homo sapiens
cataagaaaattccttttgatttactttcacatacttctcctgaagttactgctttgactgaaaatcacagacttccttcacaagaatgagatctagctgratcaagtttctgaatctggctgtgtttcagagtgcaacagctagagaattgggtggttgttgagagagaggctggagaagcccaagcaagggccaggtca

SEQ ID NO: 398771 - DNA, 201 bp, Homo sapiens
ctgggcgacagagcgagactcagtcttaaaaaacaaacaaaacaaaacaaaacaaaacaaaaacaaagtcttggagcaagagacaacattatctcttagcycaattattccagatgccggaaagaataacactgtatgtttgccaaactactgccacttttggaacctgacaagatctaaaaaaaccctacaaacctgagt

SEQ ID NO: 398772 - DNA, 201 bp, Homo sapiens
atttgtaagacagttaaaatttttttttttggtgggaggatagtagaggaaaattagccctttgtcatatcagttgaactcacttttctgggtttgaagtktatcctttactttgtttgtgataacttttaccatcataatttaacttttaagtggccaaatttgtcagtgtttcatgacttagggatttttataggacag

SEQ ID NO: 398773 - DNA, 201 bp, Homo sapiens
agtggaaattaggaagtggatgctgggggaagcattttagggagccaacctattaactagcgtgagaaatgaaagccaagagcctaatcctgctgagaatsggaggtttctcagggcacttgcaaacacagtgcaagttcccttcatggaccattgtgattgcagttaggtctagagttaaggtgaagctggagtgtttag

SEQ ID NO: 398774 - DNA, 201 bp, Homo sapiens
ggagccagttgaaaaagtcatgattaaaagaaaaatgatacttgtattttttaaagtaaatcaatcactttacattttctttaacttctctatggaatatmtccaaaagacaatgttattgaaattaaattacagtagaaatgtttggttttcatttcagtgtatgctggaaaaagttggaaattggaattttgatatctt

SEQ ID NO: 398775 - DNA, 201 bp, Homo sapiens
taaggatatgagacaactacgaaaacagttaatgtaaaagaatacatttgttgttagtgtaaaagaggtaactttatagaataataaactacatgatccamctctggaaaaataaacttttaggagaattatctaagttataagcataatatttatggtaaaagagattttatagtaatttgaaacagcatttgtttttat

SEQ ID NO: 398776 - DNA, 201 bp, Homo sapiens
tattttatgttacagcagtttaacacctattctgtctttctttttgtttctttgcctaaagcttcagttttaaaactattccttatattgtatccctgtcsacattaaaatatgcatgtaatcatgcatcatctgcagtggtattcagaactgaattcattcttatgtggcccgtattgaagatagtggagcatccttgat

SEQ ID NO: 398777 - DNA, 201 bp, Homo sapiens
ctttgttgcatatggaagcttcttcccgaatgacaaccttctaaacttatgttttattcttgattctgtccaggagatgtacgtgtaaggagccgagcagratttgaatcagaaagaagaggttctcacccatatattgattttcgtattttccactgtaagtgttggtagacatgaagtttctcggattttcactacaaa

SEQ ID NO: 398778 - DNA, 201 bp, Homo sapiens
gttgagttgaattttgtatcatatttaattgtcatgtattataatgtgtatttttttttctagaggcgtggagctatttcctatgacagttctgatcagastgcattatacattcgtatgctaggtaagcattatttattttataccaatatcagttaattttgttattacctgttgttatttgagtttgaggtatctttc

SEQ ID NO: 398779 - DNA, 201 bp, Homo sapiens
gttttggcctttggccctcccagtccttttctgtctgtgagcctaaaggttttgattttagctgtcttcacttctctccttgggtaatcctacttagcagkcttgattggcagaggattactccaggtccctctctccagcccagctctctttccaggccgtgagacccatgcccagccatgagtgaatatttccactcag

SEQ ID NO: 398780 - DNA, 201 bp, Homo sapiens
gtgaaggactagagtgcttataacctaccctcaaatgttcagaaaaaagaattaggtgtggcacacacacacacacacacacacacacacacacacacacacagaagtatactgcaagtaataagacaaatgttaacaatgcatatctgagaatagagtgttctttatactatttatttttgtaactttttgtatgtgttt

SEQ ID NO: 398781 - DNA, 201 bp, Homo sapiens
atctggactccaggtgccagtggatctgttaggtggggggtccgagcctctgaaagacaattcagggacatatgttcagatgttatttttagtttctatarggaaagcaaacatctctggagctttaacttctttggctgttgttttaggctactattaccttcttgttctagttagtagttacctctggggctagctaga

SEQ ID NO: 398782 - DNA, 201 bp, Homo sapiens
ggtgaaggactagagtgcttataacctaccctcaaatgttcagaaaaaagaattaggtgtggcacacacacacacacacacacacacacacacacacacacacagaagtatactgcaagtaataagacaaatgttaacaatgcatatctgagaatagagtgttctttatactatttatttttgtaactttttgtatgtgtt

SEQ ID NO: 398783 - DNA, 201 bp, Homo sapiens
cagaggttgcagtgagcccagatcatgccactgcacttcagcctgggcgacagagcgagactcagtcttaaaaaacaaacaaaacaaaacaaaacaaaacraaaacaaagtcttggagcaagagacaacattatctcttagctcaattattccagatgccggaaagaataacactgtatgtttgccaaactactgccactt

SEQ ID NO: 398784 - DNA, 201 bp, Homo sapiens
ttagtctatggttttattttcttgtaatgtcattgtctgcttttggattttcagcatttgattgctatgtatctaggtatagttttctttgtgtttttttrtgtttggagttcgtttaacctgctttgacatatggattgatagttgttatcagatgagaaaaatatttcatcattattgcttcaagtatgtttgctatct

SEQ ID NO: 398785 - DNA, 201 bp, Homo sapiens
cttggtgacagtgagtgtgagaccctgtctcaaagaaaaaagaaaacaacatctgatagtgttgttcttagtaataaaagagtgagtaacttataacagtmcctggaatacagtaaatactcagtagtgtcacttatttttattagattgtttgcaatttagtttctaaaccatacaacatttgaaccacacttctgtgat

SEQ ID NO: 398786 - DNA, 201 bp, Homo sapiens
acccgagaggtagaggttgcagtgagccaagattacgccactgcactgcactccagcagcctgggtgacagagcgagactccatctcaaaaaaaaaaaaatatatatatatatatatatatatatatgcacacacacacacatgtatatatttctggatactaattcttttattctgcctttttttggtacaagttcttta

SEQ ID NO: 398787 - DNA, 201 bp, Homo sapiens
catacctcagatattgtgggttcagactatcacagtaaagctaatatcacaataaagcaagtcacgtgaatcttttggtttccccatgcatataaaagttatgtttgcgctgtactgtagtctattaagtgtacagtagcattatgtctaataaaaacaatgtacacactttaatttaaaaatactttattgctgaaaaag

SEQ ID NO: 398788 - DNA, 201 bp, Homo sapiens
aacccgagaggtagaggttgcagtgagccaagattacgccactgcactgcactccagcagcctgggtgacagagcgagactccatctcaaaaaaaaaaaaatatatatatatatatatatatatatatgcacacacacacacatgtatatatttctggatactaattcttttattctgcctttttttggtacaagttcttt

SEQ ID NO: 398789 - DNA, 201 bp, Homo sapiens
ttagcaattccccagagttaagcaatgtttatagtttcctgaatgctttttctgaaaatttgttcacatataaagatagacatcttcgtatgtattatatrtgtacgtattatatatatacacatatgaaagtccttttttttttttttttttttttttgagacggagtctcgctctgtcgcccaggctggagtgcagtgg

SEQ ID NO: 398790 - DNA, 201 bp, Homo sapiens
agcaattccccagagttaagcaatgtttatagtttcctgaatgctttttctgaaaatttgttcacatataaagatagacatcttcgtatgtattatatgtrtacgtattatatatatacacatatgaaagtccttttttttttttttttttttttttgagacggagtctcgctctgtcgcccaggctggagtgcagtggcg

SEQ ID NO: 398791 - DNA, 201 bp, Homo sapiens
cagttttgattactcctgtggtctcaaccctcttgttgctcccaatttaactttaaattctattagtaattatgctaaatttcctctgggggttgggggtrgggtggattttgctcctctttctgaaattcagttttttgagggataattgacatacagtttgattaattttaacaagcaggtacactcatgcaactagta

SEQ ID NO: 398792 - DNA, 201 bp, Homo sapiens
tatttccaataatttattggtgtctaatgtaataccataacctgttctcccaagctccatttctgtggttattttctccttttccttcttccttctcctttgatacacaataccatcacatgttgctgatctttccactgcactgccttttttgttcaataaaaatgtaaggtccccagctcacatgtatgcttcagtgtg

SEQ ID NO: 398793 - DNA, 201 bp, Homo sapiens
atgatataatgatcagtatccctaatctttggagaaatgcaaattaaaaccacactaagacatcatcatacaccagtcagaatggctattattaaaaagtygaaaaacaatagatgtttgtgtggatgcagagaaaaggaacacactgttggtgggaatgtaaattagttcagcctctatggaagacggtatggaaatagc

SEQ ID NO: 398794 - DNA, 201 bp, Homo sapiens
gttatcttagctcaggaactgccaagccagtgcaagaggcccagatccaaggggtactgagctagtgactgatgatgattggatttagattggtcatggaytaggttgttaaagcatgctttctgtgtgcactaggatcactatgtctgattcattctctttagatttcttaaccattccattgcctcttcgttcaggaat

SEQ ID NO: 398795 - DNA, 201 bp, Homo sapiens
ctatttccaataatttattggtgtctaatgtaataccataacctgttctcccaagctccatttctgtggttattttctccttttccttcttccttctcctttgatacacaataccatcacatgttgctgatctttccactgcactgccttttttgttcaataaaaatgtaaggtccccagctcacatgtatgcttcagtgt

SEQ ID NO: 398796 - DNA, 201 bp, Homo sapiens
tctatttccaataatttattggtgtctaatgtaataccataacctgttctcccaagctccatttctgtggttattttctccttttccttcttccttctcctttgatacacaataccatcacatgttgctgatctttccactgcactgccttttttgttcaataaaaatgtaaggtccccagctcacatgtatgcttcagtg

SEQ ID NO: 398797 - DNA, 201 bp, Homo sapiens
ctctatttccaataatttattggtgtctaatgtaataccataacctgttctcccaagctccatttctgtggttattttctccttttccttcttccttctcctttgatacacaataccatcacatgttgctgatctttccactgcactgccttttttgttcaataaaaatgtaaggtccccagctcacatgtatgcttcagt

SEQ ID NO: 398798 - DNA, 201 bp, Homo sapiens
agttctatgccttttttcctgtttacaaaaaaatgttcctagagctgcgtagtatacttattatatatataaacaatttagaagaatgctaaatctgcccytaatcacatagccaaggggatgttataatattgttgtatttttggccctttacatgcattttgaaatataatagggatcatactacatatagttttggat

SEQ ID NO: 398799 - DNA, 201 bp, Homo sapiens
ggtttcgccatattggctgggcctggtgtcgaactcctgaccccaggtgatctgcctgccttggcctcccaaagtactgggattacaggcgtgagccaccrcaccaggccggatagtatgattatcttaaaatgcctgtagacacaacagttatttggggttgctgatgtgctgccacttacaagggtgtctatattatct

SEQ ID NO: 398800 - DNA, 201 bp, Homo sapiens
tagattgtgtgaacatcctggtgtgggcagtgttttagataatcaagtgcttgataatagcaaacttgctctatgtagaagcactgaggaagtaaatggtrcttgtggtctgaccaagttaatgtgcataccatttctcatattccaccagggagtctcttaggcaagggaaagatattgtgagtagattttaacaaaccg

SEQ ID NO: 398801 - DNA, 201 bp, Homo sapiens
agcctcaggtcttttgaaaggaggcagaaatagaactagataagcctttcaaatagttggtatggagtatggagtttgttttttttttttaacagaaagaraaaaaaaagagtgtaaaatgtgtcagtgtaatactcacttctgctctcctcctgcttgaaaagatcgctgtagtaattagaatctcaaacggacagtctt

SEQ ID NO: 398802 - DNA, 201 bp, Homo sapiens
ctggatcaatatgatatttcttctgctggctgaaaatatggaagaacagcattatgactgtttcctttttattcttcccaagggagaatctgattttcttkttttttttcctcaagacacagggtcttgctctgttgtccaggctggagtgcagtgtcaccatcacagcttactacagcctcaacctcctgtgctcagggg

SEQ ID NO: 398803 - DNA, 201 bp, Homo sapiens
ttaatattggatagctttttatgctgtcatcaaagggcaacttcgtgcttctctctttttcccttaccaaattccataattagtgtcatcgcctcatatcyagtcgggcatatttcagccctctgcttaatataaggtcctttgacgatcagagagagcccagatgaggactgttgtagttgcctatgacagtgcaatggt

SEQ ID NO: 398804 - DNA, 201 bp, Homo sapiens
gatatcagtgattgaagatcaaattaatgaaataaagtgagaatacaagattagagaaaaaagagtaaaaagaaattaacaaagccttcaagaaatatggkactatgagaaaagaccaaatctacgtttgatcggtgtacttgaaagtgacagggagaatggaatccagttagaaaacactcttcaggatattatccagga

SEQ ID NO: 398805 - DNA, 201 bp, Homo sapiens
aagaacttatgatcatacaaaaacctatactggaatttgcatgacagctttattcatattggctaaaaaccaaaagcaacccagatttccttaactgggtraatggttaaacagcctgtgttacatccagatggaatactactcagccataaagaggatggagctattgatgcatgcaaaacttggattcatctgtagaga

SEQ ID NO: 398806 - DNA, 201 bp, Homo sapiens
tttttgctatgcagaatatttttagtctgatgtaatcccacttgctaatttttgcttttgttgactgtgttgttgttgtatccaaaaaactcattgctaargccagtgtcacagagctttgtccttatgtttttagctaaaagttttacagttttgggactcacatttgtgtctttattccattttgagttgatttttctg

SEQ ID NO: 398807 - DNA, 201 bp, Homo sapiens
ttagtgtaagtatgtttttagcgaataacttttatacataaatgcatacctgcatttctgattattagcttagttgacttggtgactcaaaggatgtgaayatatctacgtttcttaatatacactgttcatttgattttcaaagaatttatgccaatttaccttccaaagaccaggaatgaatgtgcccacaaagttgtg

SEQ ID NO: 398808 - DNA, 201 bp, Homo sapiens
ttatagcagtgcaagcgaactaagacaatgtgtttgtgtgtttcatagattagtacaaattgtgttaaaatatttgattgcttttatatatatatatatawcttttgaaaaaaattccacaacataagcaaaacatcaacttacatttgtaactgtgtatagaatgctggtactgtgtctaaaaccaacatgttttcctag

SEQ ID NO: 398809 - DNA, 201 bp, Homo sapiens
tcgtgatctgcctgccttagcctctcaaagtgctgggattacagacgtgagccaccacgcccggctgatagtgggtaagctttttgatttgttgctggatkcagtttgccagtattttgttgaagaattttgcatcagtgttcatcaaggatgctggccctaagttttttttctttttttattgtatctctgccaggtttt

SEQ ID NO: 398810 - DNA, 201 bp, Homo sapiens
ttcatttaaacttcattgtactagtcagggctctctagagggtcggaactaataggataaatgtataaaggagagtttattaagaagtattaactcacacratcataaggtgaggttccacattaggacatctgcaagctgaggagcaaggaagccagtctgagtcccaaagctgaagaacttggagtctgttgttcgaga

SEQ ID NO: 398811 - DNA, 201 bp, Homo sapiens
agaagtccctttgtgacttactctttgtctttcaaaatactttatactgttgcaaaattccaaatacccatgaaacatttttactcttctcatattttcartttttaaaatattatctttatttattttctcttgtaattatttctcttctcagattttcaatttttaatatatttatttaattttccttgtaattatttc

SEQ ID NO: 398812 - DNA, 201 bp, Homo sapiens
gagttagggaggagtccctcctcaattttttggaatagttttagtaggaatggtaccagctcttctggtatgaaacgtaaatgagtttagtataagatatrtaaaaaccaaattttattggtgttctaaaggaatcaaatgtattattctgctgaggactggggatactttcagaaaagatgtggcatgagaggtggactt

SEQ ID NO: 398813 - DNA, 201 bp, Homo sapiens
tctagcatcctatcatcatgatagacataaatgagaaaaggtagtaaaataaatagtacggtagatagtaagtgctaaggagaaaaataaaacttggaaaaggaatcaagaatggtgaaagttgttgtaatattagatgggtatatggattcactgcttctgagcattttcttaatgcattctgtggactgttagatcaca

SEQ ID NO: 398814 - DNA, 201 bp, Homo sapiens
aaggaatcaaatgtattattctgctgaggactggggatactttcagaaaagatgtggcatgagaggtggacttggaagcatgtgacaaatttgacttctgraagagggactaggggaggccttttttaaatctatatttattctgaaaataaaagatagtaattccgtagatatataaaaattgtaggatttatgggttaa

SEQ ID NO: 398815 - DNA, 201 bp, Homo sapiens
tatgtaattatatataaattatataataattgccatacgagtttttaaaaaaagtcctgggtagagagaattcaagtctggcattatctttcttcttcttmttattattattatactttaagttctgggatacatatgcacaatatgcaggtttgttacataggtatacacgtgccatggtgttttgctgtacccaacaac

SEQ ID NO: 398816 - DNA, 201 bp, Homo sapiens
actactgaatttacagcgagataatcaccatgtttccttcatgttcttgaataaactttttaccttgcccaggattaaaattaggcaatgttctagccacrttttacaaaatgtttttttatctcctgctgatagactgtcagttgcacaatgtggcacttttacatgtgttgtcgttttttagtggttgccctagatttt

SEQ ID NO: 398817 - DNA, 201 bp, Homo sapiens
aggccttttttaaatctatatttattctgaaaataaaagatagtaattccgtagatatataaaaattgtaggatttatgggttaagatggtctcctttaaraaatgaattattgaggggtggatcaagatggcagaacagaagtttccactgactgtctccttcacagggacaccaaattcaacaagcacgtgtgcacatg

SEQ ID NO: 398818 - DNA, 201 bp, Homo sapiens
ttttatttttgcttaggccccttggagattttcctcacctattttaagcccagcagtgttatgaaaattatattttatgcaaaatctactttttttgtttrtttttcatgaggatccttccagcctactgccagaagctgaatgatagatattttttgcctatagcacaatgacagtctggaaattatcaagttgttttga

SEQ ID NO: 398819 - DNA, 201 bp, Homo sapiens
gtggcttaaggggtttcagcttgtaatgctcaaatgcctttccaacaagcagttatgagatttaaaatgcacaaatagtgtgaaatcttaaaatcagacawagttctttttcacttggtttacgtggctcatttatattaaaattgggttgaacgaagaagcaccctttttctatgatctctgtaagtaacttagaaatgc

SEQ ID NO: 398820 - DNA, 201 bp, Homo sapiens
gacaaagggctaatatccagaatctacaaagtactcaaacaaatttacaagaaaaaaacaaccccatcaaaaagtaggcgaaggatatgaacagacacttmtcaaaaaaaagacatttatgcagccaacagacatgaaaaaatgctcatcgtcactggccatcagagaaatgcaaatcaaaaccacaatgagatatgatct

SEQ ID NO: 398821 - DNA, 201 bp, Homo sapiens
tacacatctctgccttcagaattagggatgtatttattatcctaagaacatccctttaacttgctaaccatagctgtaatgactcttagtgatagagcccmaacttgtttctgaagcttggtgctttggggaagatgattatttcagaactgaaagttgatgggaacatggctgacaaatgggaagtttataagtaaaaag

SEQ ID NO: 398822 - DNA, 201 bp, Homo sapiens
agttgtccttgtgagtaaagcagtggaggtaacatctaactcacttacttttggtagataaactccatgaagagtaagctcagattttaagaaatgaaatrtggcttctctgtagtgtgaactcatgttattctcttctcttcacactgttctagccactctattttccttttatttcctcagatatgtaaaccttttttc

SEQ ID NO: 398823 - DNA, 201 bp, Homo sapiens
gccccggtgtgtgatgttccccttcctgtgtccaaatgtcctcattgttcaattcccacctgtgagtgagaacatgtggtgtttggttttttgtccttgcratagtttgctgagaatgatggtttctagctttatccatgtccctacaaaggacatgaactcatccttttttatggctgcatagtattccatggtgtatat

SEQ ID NO: 398824 - DNA, 201 bp, Homo sapiens
tggtgctttggggaagatgattatttcagaactgaaagttgatgggaacatggctgacaaatgggaagtttataagtaaaaagtcctagcaacaaagagasacctatccacatcaatatgggaaaaaagaatactgatttgttattgagtacacacaacagactacgtgcatgtagacagcacacaaaacctttgaagaca

SEQ ID NO: 398825 - DNA, 201 bp, Homo sapiens
ttctttgtgaaggaattggagaaggaaactgggactaggagaatggtatggtcataatgggtcaaggaagagttctaaaagatttatttaaagcacatttytagtaaaagagtagcagtttttttttaaactagaattgttttagtcctttaatcatttttgaagccttttttggaccacattttgtcttaagatcacatg

SEQ ID NO: 398826 - DNA, 201 bp, Homo sapiens
cacatgtagaatcataaatatatatgtgagtatatatataagcagaaacaatccttataaaaaccacaattttttatatatatatatatatttttttttttgagttttgcaatatcactataacaaatgtgtatcttggtgtactgccaggcagatgttgagtatccaattaaatattggtggaatgagtgaatggattta

SEQ ID NO: 398827 - DNA, 201 bp, Homo sapiens
aaaaaagtctatctatgttcagtacagatgcagtttattttcaagtggtttaaattcacaattggttgaatccatggatgtggagcccacagatacagagrgctgactgtacgttctcgaaaaaactgaatcatttggcaaaggcaaggtgacctacaatagagggaggagttagaataaaggtcaggtcagttgaaggtt

SEQ ID NO: 398828 - DNA, 201 bp, Homo sapiens
aaaagaaacccatgaagtatagattttttaaaaacatatatatatatatatgttcgtgtgtgtgtgtactcacaatttaataagagaggcatataaacaartatatgtatttatatacaaatatatagttgaatatatacatatatatttgtttctgtgtctgtcttttattaaattgtgagtttcttaaggacatgaatt

SEQ ID NO: 398829 - DNA, 201 bp, Homo sapiens
tcttcattttatcatatgtcattttatcacatgtagaatcataaatatatatgtgagtatatatataagcagaaacaatccttataaaaaccacaattttwtatatatatatatatatttttttttttgagttttgcaatatcactataacaaatgtgtatcttggtgtactgccaggcagatgttgagtatccaattaaa

SEQ ID NO: 398830 - DNA, 201 bp, Homo sapiens
ttttttatattatattcaagaaataataaatgtaataggatatagaggaatgaaactttctagttacagaaatatttaacatagtttcactttatcttcaraattaatccttaaaaacagatagaactgatggtcttatctctgagttgtagataaggaaaataagattgccaaaactcgtatagcttcagattcagaaaa

SEQ ID NO: 398831 - DNA, 201 bp, Homo sapiens
aaggaatctcttatcattaactactcatatatatttaaattaaccactcatatatttattaaattgtgagtacatatatatatatatatatatgtagttamcaaagcactgaattaccattatttgagagtaattataataaggacaatttgaataaaagaaacccatgaagtatagattttttaaaaacatatatatata

SEQ ID NO: 398832 - DNA, 201 bp, Homo sapiens
tttgcaacaacatgaatgagcctggaggacattatattaaacacaactaatcaggcatagaaagatcaataaccacatgttgtcacacatatgtgggtgcyaaaaaaacattttgagcttatggaaatggagagtagaattgtgggtgaggttgggaagagtaggggatagagaaagatgggacgaggttagttaacagat

SEQ ID NO: 398833 - DNA, 201 bp, Homo sapiens
aaaatatttgcaaactatttatccaacaagggactaatacacagactatacaaggaactcagacaaatcaacagcaaaaaacaaaacaaaacaaaaaaaaacccatttaaaaagtgggcaaagaaactaaacagacatttctcaaagggagacatacaaatggccaagaaatatatgaataaagcattcaacatcactaat

SEQ ID NO: 398834 - DNA, 201 bp, Homo sapiens
gtaagctgaggtcacaccactgctctccagcctgggtgatggaatgagaccctgtcaccaaaaataaataaataaataaataaataaataaataaataaakaaataaaatacaagagacccaaacagataaaacacccttgaactatgaaggactaatactttctgatttcaaaatttattttaaaactacagtaattaag

SEQ ID NO: 398835 - DNA, 201 bp, Homo sapiens
atgtttttatcatacaagttcagtgatttgaaaatatctaaggatagacctggattccagtttggcacatttggatattttagtctgaatgaattagtatkatttgatcatatgatgttttaaatacaaattgtcacatatgtatattatatgtatgtttaataattgctacccattttgaagtcctttagaatggaagaa

SEQ ID NO: 398836 - DNA, 201 bp, Homo sapiens
ggctgcagtgagctgagatcatgccactgcactccagcctgggtgacaagagtgagactctgtctcaaaaaaaaaattatttgagaatgatagaaagatgmacatttattcaatatgacgaaatcaggtggtttaggaaattaataatgtttttatcatacaagttcagtgatttgaaaatatctaaggatagacctggat

SEQ ID NO: 398837 - DNA, 201 bp, Homo sapiens
tcccctttgggaaatctggattataaattataaataattgatgaaaagacaccagaaataaatcttaaaatatttgggtttaaatgaacattttgtccctmaggtaaaatattttaaaaagtcaacattaaaatagataataaaatgtaaagaaaaataaaccatgattttttatgtttagtaatatgctttcagtgatta

SEQ ID NO: 398838 - DNA, 201 bp, Homo sapiens
cacaagtactgcaagttttagtgctgagctgggcctggagccagtggacttgtgggagacacaacttactgagataccaacttgggcagctaagggaatgyttgcagcacccctccctcaaccccaggcagtgcaacttacatctccaaaagagacttcttcctttcgcttaaggagaagagagggaaaagtaaagaggac

SEQ ID NO: 398839 - DNA, 201 bp, Homo sapiens
ggagaagagagggaaaagtaaagaggactttgtcttgcatcttggataccagctcagccacagtaggatagggcaccagtcagagtcatgaggcccccatktcaggcactagttcccagacatttctagacacaccatgggccacaaggggaacctactgtattgaagggaaggatccagtcctagctggacccatcacct

SEQ ID NO: 398840 - DNA, 201 bp, Homo sapiens
tattgttaccatcccccttttatatgtcaatatttgctaaagtaaaaattaaaaaaaatctttctcctaatgtacctttttgtcatatgttttaaaaaaaattgctgcaatattgcattaaacttgtacataatgtcatattgacaatggcatgtttacggggatgtgtgattgtgggccttgcaaaggagtccttggagt

SEQ ID NO: 398841 - DNA, 201 bp, Homo sapiens
catttcaggcactagttcccagacatttctagacacaccatgggccacaaggggaacctactgtattgaagggaaggatccagtcctagctggacccatcmcctaaagagcccttgggccctgaataaccaccagcgatacccagctactattctgtgggccttaagcaagactctaagatgcactggcttcaagtgagac

SEQ ID NO: 398842 - DNA, 201 bp, Homo sapiens
aatgaaactttctagttacagaaatatttaacatagtttcactttatcttcaaaattaatccttaaaaacagatagaactgatggtcttatctctgagttrtagataaggaaaataagattgccaaaactcgtatagcttcagattcagaaaaaaaaaggcagatcttttttattctctgtggttctttctgtcatattac

SEQ ID NO: 398843 - DNA, 201 bp, Homo sapiens
ttttcatatattgttaccatcccccttttatatgtcaatatttgctaaagtaaaaattaaaaaaaatctttctcctaatgtacctttttgtcatatgtttwaaaaaaaattgctgcaatattgcattaaacttgtacataatgtcatattgacaatggcatgtttacggggatgtgtgattgtgggccttgcaaaggagtc

SEQ ID NO: 398844 - DNA, 201 bp, Homo sapiens
gtgagactcagcaatctcagttgtggaggctacagtgagcgacttcatctggttgagaaaagcagaggggaaagtaaaagggcctttgtcttacaccttargtaccagctcagccccagtaaggtagagcaataagtaggccattgaggttcctgattctaggccttgctcttgtgtagcatttctggacctgccctgggc

SEQ ID NO: 398845 - DNA, 201 bp, Homo sapiens
ttcttatttttatggagtctaggatcaattttgggaatgagatataaatatatgtagagatcatgattaatgcagaaggtataaagaagttgtccattgarctataatcagtgtgagcttgtaatgttcttcctttgagataagctgaattaaaaaatgttacatttaagtaattattttgcttgtcctatggacacaagt

SEQ ID NO: 398846 - DNA, 201 bp, Homo sapiens
agtaagctgaggtcacaccactgctctccagcctgggtgatggaatgagaccctgtcaccaaaaataaataaataaataaataaataaataaataaataaataaataaaatacaagagacccaaacagataaaacacccttgaactatgaaggactaatactttctgatttcaaaatttattttaaaactacagtaattaa

SEQ ID NO: 398847 - DNA, 201 bp, Homo sapiens
tggaggggttgcagagagcccacatcatgccaccgtactccagtctaagtaggcagagtgagaccctgtcttaaaaaaacaaaaaaacaaggtgaatgcayagctctaatatatttatttacaccacctttatttctggaataatgtaaagattttgattctgaagttttgagaaaagataaactgagataggcaaattct

SEQ ID NO: 398848 - DNA, 201 bp, Homo sapiens
atagagcctgtgccacaatgcgtggcctgaaataaacttcactagtgtattcttctgaaagaatatcacacaacatttattgcaaaaaagtattatgatargctctgtataaagttcttatttttatggagtctaggatcaattttgggaatgagatataaatatatgtagagatcatgattaatgcagaaggtataaaga

SEQ ID NO: 398849 - DNA, 201 bp, Homo sapiens
atgcagattcctgggtctcatcctcagaggatctggttggatagttccagggaggggcccaaactacattttgaacaaaactccaggtaattgctcagcaygctgaaggtatgtctagaggtgactgaattccagaccttgaggactactgagcagtgagctctatgggctgatttttgggaagaatgatcctgaaagtcg

SEQ ID NO: 398850 - DNA, 201 bp, Homo sapiens
atagatagattttcaaagtgtatacaaatatgaacgggtgggataatgtgaagattagcaaagaacattgtcttattaggggtaaaatggtaaataggcayattttagatgtttattctttgatgggtgtcttcctcagtgagaattatttccaggaagtatattttagtctttggaataaaacttttgccaactcatatt

SEQ ID NO: 398851 - DNA, 201 bp, Homo sapiens
ccactgtcttctaaaatttcagcatgtatctccaaagaagatgattcatctacatagtcacagtaccccccaaaattaactttgaaagtatattaccaaaratgtagtttatattcacattttcccaattttctcaacaattttatttatagattgtctctcctaggatccaattgagtattacacattgcatttagtttt

SEQ ID NO: 398852 - DNA, 201 bp, Homo sapiens
tgcagtaagctgaggtcacaccactgctctccagcctgggtgatggaatgagaccctgtcaccaaaaataaataaataaataaataaataaataaataaataaataaataaaatacaagagacccaaacagataaaacacccttgaactatgaaggactaatactttctgatttcaaaatttattttaaaactacagtaat

SEQ ID NO: 398853 - DNA, 201 bp, Homo sapiens
ttttataatcttcaatttactgtcctttaaaaatatttatggagaaacttctgttcagaaagtttcattcatagaaatgtaagtctgggctttatcggtcracactgtttacatatttcagtatctccttcagttgcacttgactttatcctttctattgatatcttaggttgaaataacagttttcctctggatatattc

SEQ ID NO: 398854 - DNA, 201 bp, Homo sapiens
ttatagaaatataggaatatagaatgcagggttttattttatttagtagacagtccagtggtctgtttattctacaacactgactcaaagaaagggactayatagtggcctttatgtatattagcatatcagtcagggccccagcaggaacttaatgccacactcagtgggagacttcttaacaaagttgtgggcaatctt

SEQ ID NO: 398855 - DNA, 201 bp, Homo sapiens
gaaagctgcaacaccacaatgacagctaaatctggcattgtggcttggtccccaggattctggcctatgcagtgcactacaccctggggaacaggtgatakagcacaccagggtggctgcccccagtactgatactccccagagccttagagctgcctgttctgggctgctgcaactcagaacaacctcccctccactcca

SEQ ID NO: 398856 - DNA, 201 bp, Homo sapiens
aggctgcagtaagctgaggtcacaccactgctctccagcctgggtgatggaatgagaccctgtcaccaaaaataaataaataaataaataaataaataaataaataaataaataaaatacaagagacccaaacagataaaacacccttgaactatgaaggactaatactttctgatttcaaaatttattttaaaactacag

SEQ ID NO: 398857 - DNA, 201 bp, Homo sapiens
ttgcagttgttgcatcatatagtaagtacatgtttaatttttaaagaagttgctgaactgtttttcaaagagcttatgccatttcccatttgactggcagygtaagaaggttcagcttttacactcacacctggtattgtcggtctttttcatcatagccttcctaatgagtgcaaagtggtgtcttaggttttaagttat

SEQ ID NO: 398858 - DNA, 201 bp, Homo sapiens
atttccaggaagtatattttagtctttggaataaaacttttgccaactcatattgcattgtctttctattcttatagtataattttattttcatttttctkgcatcagaaaacaggtcttaaagtgaaatttttgaatataatgatagatctgggggtatttgaatcagttttaatgcatatttcctgatgatcaagtgat

SEQ ID NO: 398859 - DNA, 201 bp, Homo sapiens
gtactcctcatctaggcattccatccaagatcctagggactggtctgcccagcctacaaacactacttctggtgtcttcactcccacgggcccaaggctgycctgccactgctattgtcactgccagtgctatgcacactgtccaggggcccaaacacatgccaacctggccctcctcagctaccactaatgtccaagcat

SEQ ID NO: 398860 - DNA, 201 bp, Homo sapiens
agttgaggctgcagtaagctgaggtcacaccactgctctccagcctgggtgatggaatgagaccctgtcaccaaaaataaataaataaataaataaataaataaataaataaataaataaaatacaagagacccaaacagataaaacacccttgaactatgaaggactaatactttctgatttcaaaatttattttaaaac

SEQ ID NO: 398861 - DNA, 201 bp, Homo sapiens
tagtatgcatcagcagattgttaatttttcctgatgaacagtattctattgcatagatacactacggtttgtttatccattcaccagttgatggacattggattttccagattttggctattatgaataatgttgcaatgaacattcacatacaagagtttgtgtggatatgttcccatttctcttgaactgatttgcagt

SEQ ID NO: 398862 - DNA, 201 bp, Homo sapiens
catccatgtgacacatgggatgctataaagtaaacagatatatttggattttcagaaggagaagagatgggcaaagctatagaaaacctatttaatgaaayaataactgaaaatttcccaagtcttttggaagatatagacatccagatacagaaaggtgaaagattcctaaacatatttcatctaaaaagatcttttctg

SEQ ID NO: 398863 - DNA, 201 bp, Homo sapiens
tggcacatgtctgtagtcccagctacttgggaggctgaggtgggaggatcacctgagcccaggaagttgaggctgcagtaagctgaggtcacaccactgcwctccagcctgggtgatggaatgagaccctgtcaccaaaaataaataaataaataaataaataaataaataaataaataaataaaatacaagagacccaaa

SEQ ID NO: 398864 - DNA, 201 bp, Homo sapiens
tttggtttgccatcatgtttttgagcttatctgtagtgtagtatgcatcagcagattgttaatttttcctgatgaacagtattctattgcatagatacactacggtttgtttatccattcaccagttgatggacattggattttccagattttggctattatgaataatgttgcaatgaacattcacatacaagagtttgt

SEQ ID NO: 398865 - DNA, 201 bp, Homo sapiens
atacatcaatataataagggtcatatatgacaaacccatggctaacatacatactgaatcgggaaaagctgaaagcctttcctctaagaactgagacaagrcaaagatgtctgctttcaccactcttattcaacatagtactggaagtcctagtcagaaatcaggaaagagaaagaaatataaggtatgaaaattggagaa

SEQ ID NO: 398866 - DNA, 201 bp, Homo sapiens
cgggctcaagcaattttcctgcatcaggctcccaagtagctgggattataggcacccaccacaatgcctggctaatttttgtagttttaactctgtctccmaaaaaaaaatacaaaaaaaaatttagccaggtgtggtggcacatgtctgtagtcccagctacttgggaggctgaggtgggaggatcacctgagcccagga

SEQ ID NO: 398867 - DNA, 201 bp, Homo sapiens
tcttttggtttgccatcatgtttttgagcttatctgtagtgtagtatgcatcagcagattgttaatttttcctgatgaacagtattctattgcatagatacactacggtttgtttatccattcaccagttgatggacattggattttccagattttggctattatgaataatgttgcaatgaacattcacatacaagagtt

SEQ ID NO: 398868 - DNA, 201 bp, Homo sapiens
cagcaaaggaaagaatcaacagttatgagacaacctgtagaacgggagaaaatatttgcaaactatttatccaacaagggactaatacacagactatacarggaactcagacaaatcaacagcaaaaaacaaaacaaaacaaaaaaaaacccatttaaaaagtgggcaaagaaactaaacagacatttctcaaagggagac

SEQ ID NO: 398869 - DNA, 201 bp, Homo sapiens
gggatgctgagcatggttaaatgatgatgatgatgatgatatcagctaccatttaacctccttgtttgtactagaaacttatctattgatgtgttttttttatatctcattcaattctcataacaattatatgaaagtagtagtattatcttcattttaccaatgagaaacttaggaacttgtttgaggtcagtgagtaat

SEQ ID NO: 398870 - DNA, 201 bp, Homo sapiens
tgctggttctgggtttttaaaaattagtataaggttaaaattgctgtatggtattttttttaaatgaaccacacaggaggcttaatggcattgttcctgtrtagttactttattgtgtatagtaagaggacactgtacatgattacatgatgaattatgtattcccaatagtcatctataggcttaaagtgcttattttgc

SEQ ID NO: 398871 - DNA, 201 bp, Homo sapiens
ggcaaagtctctagataataccttttgtcatggttcgtgtttagtgctcttatgctttttatgggaaatatttccaacatttttgggcatatgacatttcrgggttatactgtaggggtaatatacttataaaagatgttctctttcagaaatcttaaaaacaaatgcgatcttaccaggttcttgtttattcactcattc

SEQ ID NO: 398872 - DNA, 201 bp, Homo sapiens
cgtccctacaaaggacatgaactcatccttttttatggctgcatagtattccatggtgtatatgtaccacattttcttaatccactctatcattgttggayatttgggttggttccaagtctttgctgttgtgagtagtgctgcaataaacatacatgtgcatgtgtctttatagcagcatgatttatattcctttgggta

SEQ ID NO: 398873 - DNA, 201 bp, Homo sapiens
tttttcattgtaatatccagcactataaggtggaactcttttgccagggcatcagggagtgattatatatggagaaaacttaacaataacctttaattctrtctcatcagattcctcctccatgcttggctgcccttacttttgtgggtgaaagaatgtaaatcattccagagttctgtcattattattttcttgtttttt

SEQ ID NO: 398874 - DNA, 201 bp, Homo sapiens
tgggtgcagcaagccaccatggcacatgtatacctatgtaacaaatctgcacgttctgcacatgtgtagctgaatttaaagtaaaattttaaaaaagaaawaaaagaacagcttttgtgttggtatgtgtgtgtgtgcacatgcaccattctgaagaattgggacttaaattggtcatccagacagcatgcttatatccag

SEQ ID NO: 398875 - DNA, 201 bp, Homo sapiens
tttttcaggaatccaaccagatattcttaggggtgtgtgtgtgtgtctgtgtttcttatcattcctggttgcaatttatgctttttccatctgtagatgtrggattttccatggttcaggggaaattctctctgtaattcatttagttatagtccttcttccattggtttcttttttctcattctacattatagtgttttt

SEQ ID NO: 398876 - DNA, 201 bp, Homo sapiens
gatgctgcatgttagacctttgtcagattcgtactttgcaaaaattttctctcattctgtagtttgtctgtttactctgttgatagtttcttttgatgtgmagaagctcttcagtgtaattatatcccatttgtcaatttttgcttttgttgaaattgcttttgacatcttcaacatgaaacctttgtccattcctgtgtc

SEQ ID NO: 398877 - DNA, 201 bp, Homo sapiens
atctttgccagatactcttctgggtgataaacttttaggtttcagttctctcagtatctcacctgtatttttctctcatcatctagctttcattgttgcaratgaaaagtaaattttttttaattacctgttttctcttgcaacttaaaagatcttctttatctctctctctcttttttttttttcaggaatccaaccaga

SEQ ID NO: 398878 - DNA, 201 bp, Homo sapiens
ttgtgttggctgttactttgttcttccttaactcttctttttagtcccttctgtgctagcttctgtagaaaagaggatttaacatactcacgtgcactacygctgttaccaccatcatttttgctttggaatggtgatgatttaagaacttaaaaccaaaggcttaccagtatccagtccgcattttctacattatctaca

SEQ ID NO: 398879 - DNA, 201 bp, Homo sapiens
gaaattaaaaattttaagcaaacatatgcaggacataatcaggtattctgtctatgtgatttaactccccccacctactcccacaattcctgcacacactmatatacagactttcatttctagtttttttttttttttgagatggagtcttgctctgttgcccaggctggagtgctgtggcatgatctcagctcactgcaa

SEQ ID NO: 398880 - DNA, 201 bp, Homo sapiens
tataaccaacagggtcccatttgttgaaggtgttgaaatataagatgtccacaaatggtctttgttaatatcgttatgctctcctaacccccagcttgccwgagttaagattcctttcaacactatcaacagccagtgagtcaaactcacttaactaaagctcctttactcaatacattctcataacaaaattctcaaatt

SEQ ID NO: 398881 - DNA, 201 bp, Homo sapiens
ttatatgtagtatacagaaaatagatcaaggaattaaattgacttaatagcatttagtccagaaaataattttcttcataataattcttcagtattattawatttcattcaatctttgtactcctttgttggggtgcaaatgtcttgaactataactgttttattagcctaaggaattatttgatgaattaacagaagctg

SEQ ID NO: 398882 - DNA, 201 bp, Homo sapiens
acttatagtattctccatttcttttattgtgttttctcatctttctcttactctaaattgcatattcataatcttgtccttttgaaaaatactaaacttakcccatgctcatattttaccccagcactcaaaatacaaattagtaattttgctacccaaagtataatgaagtaaagtagacctgcctcattacaccagtga

SEQ ID NO: 398883 - DNA, 201 bp, Homo sapiens
tccttatagattttggttattagacctttgttagatgcatagtttatgaatattttctcccattttttaggttgtttactctgttcatttactttgcttttcagaagctctttagtttaattaggtcccacttgtcaatttttgttttgttttgttgcttttgggacttagtaacaaattctttcccaaggccagtgtcca

SEQ ID NO: 398884 - DNA, 201 bp, Homo sapiens
gtatcagccacaaacaatcatggcaaagcttcccttttaaacttggtgcttcaagggttgtttatgccttcaaaaatttgctccaaaattactaattcctrttttacactgggaaagttattagtgtgttcaagtagattgatatttagatttaaaaattatctcaggcaaacatatttctatccatctctatggcaatgt

SEQ ID NO: 398885 - DNA, 201 bp, Homo sapiens
atatttattccttcttctaacattgagggctctcataatttaactgttttgtttgtgcatttaataccaatgaaccactacgtctgccataaaaaaaaaaatcaagagcaagcatgtcaccgaggggcatctgacgcagttatcagtggcaggattcaacagtcttgaggttagaaaaaaactcttccagatggcttgacc

SEQ ID NO: 398886 - DNA, 201 bp, Homo sapiens
cctgttttacactgggaaagttattagtgtgttcaagtagattgatatttagatttaaaaattatctcaggcaaacatatttctatccatctctatggcawtgttttgatggccaatttatgccagattctagagccaaatgtatttgcctgaggtctccagatgttttctgacttgctgctggtgtctgaaaaaacgttg

SEQ ID NO: 398887 - DNA, 201 bp, Homo sapiens
aaacagcttattttgattagtttttagagtaagcagatttgaagagaattttgaaaagccaggactttgcccaactatactgttttttttaacacctaaaratacaaggcattagtgacatcactttatttttttcttttcagttttccccacctcaggactgtgagagattgatgtgcggatacatactttccctacaga

SEQ ID NO: 398888 - DNA, 201 bp, Homo sapiens
agatgttttctgacttgctgctggtgtctgaaaaaacgttgcaactatgactgtaaattcaccctttttgctttactgaactggggctaagacacccatcyttcttttcttgtggtttagcttagccagaaatgcaccagagataatttacaaaaggataattatatagtagcttaggaaatttggttgtgaataactaac

SEQ ID NO: 398889 - DNA, 201 bp, Homo sapiens
aagaaagacacggacatgtgctttgtgatttgaaaggaaggagtaacactgatagttttgtagtgtatgtttatgatactgcacttgttagatgtggttaytaggtgaaaaaattcgtttcagagtactcacatgggggttggcttcatcttcattataccacatttctcattgttaaaatttatttctgatgtatgtttt

SEQ ID NO: 398890 - DNA, 201 bp, Homo sapiens
tatctaactagttagcaataggatctgaacatgtgaaattcaccagggaagctaatgaagaagataaggccagaagaaggagaaataatattgtagttttkctttttctggcaattgttcatcatgatagaagaagtataatttggaaagtgtgttttgaggttattatatgaaagaggtggaaaattgcacaaatctgtg

SEQ ID NO: 398891 - DNA, 201 bp, Homo sapiens
ccagaattaaggaattggcagagctgcattacttctggaagctccagggaaaaatccatttgcttcccctttccaacttcttcttttttttttttttttttaacttttaagttgaaaggtacacgtgcaggtttgctatataggtaaactcatatcatgggggatttgttgtacagattattttcttgaccatgtattagg

SEQ ID NO: 398892 - DNA, 201 bp, Homo sapiens
gttagcaataggatctgaacatgtgaaattcaccagggaagctaatgaagaagataaggccagaagaaggagaaataatattgtagtttttctttttctgkcaattgttcatcatgatagaagaagtataatttggaaagtgtgttttgaggttattatatgaaagaggtggaaaattgcacaaatctgtggcagaaggtc

SEQ ID NO: 398893 - DNA, 201 bp, Homo sapiens
aatatttatattgatgacttactccttttttgttgaattgtacttctggttttataacctgaaatcatctacaagcttgtccaactctagcccacgggtcraatgcagcccaggacagctttgaatgcagcccaacacaaatttgtaaactttcttaaaacttgagatttttcttgcaatttttttttaagcttatcagct

SEQ ID NO: 398894 - DNA, 201 bp, Homo sapiens
aaattatcttattgttctgtaggtcagaagtctgaaatgagttttacaaagccagaattaaggaattggcagagctgcattacttctggaagctccagggraaaatccatttgcttcccctttccaacttcttcttttttttttttttttttaacttttaagttgaaaggtacacgtgcaggtttgctatataggtaaact

SEQ ID NO: 398895 - DNA, 201 bp, Homo sapiens
gagaggaagtcaagttgtctctgtttgcagatgacatgattttatatttagaaaaccctggctgggtgcggtgactcatacctgtaatcccagcactttgrgaggctgagataggcagatcacctgaggtcaggagttcgagaccagactggccaacatggtgaaaccctgactctactaaaaatacaaaaattagccagg

SEQ ID NO: 398896 - DNA, 201 bp, Homo sapiens
gaatcacccaacaaacttaactcttccatatctaaactcctaaagcttttctttcttgactctaattttacttaccctgttctggattttcctttagtttyttgagtacatgttttatcactcccaagatattattctagaggacaaggacagtagcttgttttactaagttccacaggtactgggcaattactttgtatg

SEQ ID NO: 398897 - DNA, 201 bp, Homo sapiens
agcataagcacatgatggatattcatttccctttttgttggaatagacaaaagatcagtttcaaaaatggtgttcatttcagattatacatatatgtgtayatatattttatatatatatataaatatatataattccttaaaactttaattgttgcataaaaatactgaggcttatgtaaattattctcacatttcaaat

SEQ ID NO: 398898 - DNA, 201 bp, Homo sapiens
tcccgagatcaacgtgttggccgttttatttgaagacatgttttatttgaagacactagggaaggagctgtccaggtctctctactattactagattctgrtagttccttggcagcataaaatccaatctttacatggcattctccctgtgggcatggatgtatctgtgtccagatttctccttttcgtttttttgagaca

SEQ ID NO: 398899 - DNA, 201 bp, Homo sapiens
tgtcctggaggttatttttgaatcacccaacaaacttaactcttccatatctaaactcctaaagcttttctttcttgactctaattttacttaccctgttmtggattttcctttagttttttgagtacatgttttatcactcccaagatattattctagaggacaaggacagtagcttgttttactaagttccacaggtac

SEQ ID NO: 398900 - DNA, 201 bp, Homo sapiens
actgctctcactcatatttctactacatgattcctactggtctatggctcacaaaaatggattgccatggcagggtagacgaagcacagatttcttcagtraactactatgagagatgtgataatctttctgagatatagtgttcactcactatatattttaaacaataaagaataaagaaatatgtattcagaaccatgc

SEQ ID NO: 398901 - DNA, 201 bp, Homo sapiens
aatcctataaaactaagtgtgtgttcatgcagagaacatttaaatcagtaaaatccatacatcaaattaatctggacaagtctttctaattggttgcaatyggcatttactgtagagctttctttacattctcattttatttactgttgaaagtactgtggattacctctggggagaagaggaagaatgtagcataggtga

SEQ ID NO: 398902 - DNA, 201 bp, Homo sapiens
catgtgattttcataagcaaggatactgaagtaattcctgactcctacataatggtcaggattgaacattgtccagagccagataagtaaaagaggaaaarccaactctgaaaatatcaattttaattttgatatttatacatttatgcttttattcttcctagggaaatatgattgcattattgatttgaatcctaatcc

SEQ ID NO: 398903 - DNA, 201 bp, Homo sapiens
ggatttttgattgatactttttaaaaatattacgataatatttgtatcattgcctagtcatttatgtatgaattctataataatatccctttattagtackcaacatttcagaaatcctataaaactaagtgtgtgttcatgcagagaacatttaaatcagtaaaatccatacatcaaattaatctggacaagtctttcta

SEQ ID NO: 398904 - DNA, 201 bp, Homo sapiens
atcacttcatatgtcaaactcatagcttattttgttgccatctcatggagcagatttatagtgacttgtcacatttgctttttgaaatactgtttttttttgtctttatttctttgaatcttttagctcaagtgagcataccaccttcctttctcccccaacccttttcttttgtgttagaagacttttgttaagtaaatg

SEQ ID NO: 398905 - DNA, 201 bp, Homo sapiens
tcagaatgagaactgataaaatcttaatatcacgtctctaattattatgtaagttgactatattcttatatttcactaccaaatatactactcctttcccwctggggacaaattttcttcttttggggacacattttgatggcaataagtgcatatttttgacatgtgtaactttctgtgaaataatgctggggaaattac

SEQ ID NO: 398906 - DNA, 201 bp, Homo sapiens
atcatatagtatatagccttttcactggctccttttgtttagaaatgtgaatttaagattaatccatgtctttggcagagagctcattcctttccccccamccccctgaaaaatattccatttaacatgtaccacagtttgcttatccattcattaattgaaggataccttggttccttacatgtttggttattatgaatt

SEQ ID NO: 398907 - DNA, 201 bp, Homo sapiens
cgtttatagttgtttcagaattgttaacagaaactcccaggggaaacaattttatcaactaaaatacagtgcctatgggcagtttgggagtatgtagttaygtataaagctttatagtgtccactcatatccagggttacttaggtaagcacctttctaccccaccacttccagtaagatttttttcatatatttgtaata

SEQ ID NO: 398908 - DNA, 201 bp, Homo sapiens
ctaaacacaggctcgtatgtagaagatgacatagagatattggaacacctgctacttaactaaatgaccctcaaaattcaattttcatgtgtttttctgawgagaatctgaatgatgggatgaggaattggggaacttctaacatgggttggttttatagtttcagaatgagaactgataaaatcttaatatcacgtctct

SEQ ID NO: 398909 - DNA, 201 bp, Homo sapiens
ctaattttagttgtccaaaaaatagaaaatcttttctagccctaatctgcaaagcctatttttagctcaaattaaatagtagaaatgtgtttatgctctaygaggcaacatttagtattttcttggaaattgtaatggttgaatggtatgatgaagcatgtattaaagcatgtgtaccatgttttctgctgaaatgttgct

SEQ ID NO: 398910 - DNA, 201 bp, Homo sapiens
attaatacaaagtacttttagcctcttatctttgagagtaaattttctgaaggtatatttgtgttaagaatagcatatacaagcctaaattttattattaratttaaattagacctaaatgtaattatcatttgttcagagaagccttacctgaattctgatttataaaaattgcctggtatatctctcatagcatcctct

SEQ ID NO: 398911 - DNA, 201 bp, Homo sapiens
agtgagttggagaagacctgttatgcctctgtcactcatttgttctctcacctcttccatgggactccctgggagcacatgttgtgccctacaaggtgttwcatgcctctggagtaatgggaaagaactgcttccagatatcaaaatgtttgatgtctgtttccctttcgttggtttagaaactggttgtttctattttct

SEQ ID NO: 398912 - DNA, 201 bp, Homo sapiens
taataccattattgaagactctctacttcttgaaataccttctttctttggtttctgtaactttactctttccttttctctttctaaccccttttcctgtkttttcttagtttactttgcaggcttgtgttcatccacccagccttccacgtggcttgttcccagcccttcctttcctctgtacacctctcaaacttccta

SEQ ID NO: 398913 - DNA, 201 bp, Homo sapiens
acattatgaatccgagtacataaaatatgtgtgagtatgcacaaaaactggaggggacactgaaaaaatgaatatggctctgttacaaaagaaaagagaakccatgagagcataatcctttcaccaaataaacaatgaaaccaaacagatgatagtttcctctaaaataatgaaagaattcatgtatatattttcccctcc

SEQ ID NO: 398914 - DNA, 201 bp, Homo sapiens
ttcaggttgaagtttgcatttagagggtggcatggaataaaaacgaggacctgaggagagggagaaagtgagttggagaagacctgttatgcctctgtcaytcatttgttctctcacctcttccatgggactccctgggagcacatgttgtgccctacaaggtgtttcatgcctctggagtaatgggaaagaactgcttcc

SEQ ID NO: 398915 - DNA, 201 bp, Homo sapiens
tgtggaatatgttagagtgggataatgacataatgacaaacatagctcagtgttctgtgagatctactttgagaccgtaacgaatatgaatagttgctcckcttggcatgcttttaatctttcctagggttgcctcacccacgatgctaaagaagcagtgcttatgagttcagtaagtacatgcaccactgatactcattt

SEQ ID NO: 398916 - DNA, 201 bp, Homo sapiens
gggttatgccagaattatgtctcaaagcttcacttattttaaaatgtgactatgatgaaagcatagactgcgtgtgcttgtgcgtgtgtatatgagttgcrttcgcagatgctttcaaaaatttctccttatgctaattttgttttcttcttagttacagggatgcagaaaagaatttccacaatatctctaacagatgct

SEQ ID NO: 398917 - DNA, 201 bp, Homo sapiens
tacaggcattgtgttatttagtcctcacaagaactctagaaggtacctccattttatgagagaggaaatttagactaacagagattaggttacttgctcargatctcacagatagaaaatggtaagaccatgactcaaattctgccaggtgtatgttatttatacaccatactgctatcttcttctttttttttttttttt

SEQ ID NO: 398918 - DNA, 201 bp, Homo sapiens
atggaaaatttcattggggttgtagcagtcctctcttggctgtcatgccctcactagggtgcatgtatgagttccgccctgacacttttggatgccccagmtcctgcacctaaggacttcactctcgtggtcttgctagtgggagccctgtccctggctggcagcctctagattggaagagcaccatgacaaccagacaac

SEQ ID NO: 398919 - DNA, 201 bp, Homo sapiens
acaagaaaaatacaaacaaccccatcaaaaagtaggcaaaggatatgaacagacacttctcaaaagaaggcatttatgcagccaacagacatatgaaaaartgctcatcatcacttgtcattagagaaatgcaaatcaaaaccacaatgagatactatctcatgccctcatgcctgttaacatcatgatcattaaaagtca

SEQ ID NO: 398920 - DNA, 201 bp, Homo sapiens
acacctggccatttctcctttttataaggatactagtcatattggattggggggtcccccctactctggtaggaactcatattaataattttcaatttgaytaattatatcagcaattaccctacttctaattaatgttaaattctgagatactgaggattaggaactcagtatatgaatttaagggggtagggcacaatt

SEQ ID NO: 398921 - DNA, 201 bp, Homo sapiens
tgacattctttccacacccctccccaacactattctttcttcaaatatcttctctgcctttcatctctcccctttgactggccccagtgtgtcaacaaaayctcctctgtaattaatgcaaaaatgtcattttctttgaaagcttccctctctaactatgctacatgctgctgctttgtttatgatcaaaaaataatggaa

SEQ ID NO: 398922 - DNA, 201 bp, Homo sapiens
ttttcatatatttgtaatacagctagattcttttattatagtcttccatcctgtgatactttgacctcctaaacacacacacacacacacacacacacacatttaaatttgtatacagtaagtttagctcttctgctgtaaagttctatgggtattgaaaaatgcataatgtcatatatctgccattataacatcatacca

SEQ ID NO: 398923 - DNA, 201 bp, Homo sapiens
tggatgatttctgcatttccaactgaggtacctggttcatctcattgagactggttggacagtgggtgcagcctatggagggcgaaccgaagcagggcagkgtgtggcgttgcttcacctgtgaagtgtaaggggtgggggatttccctttcctagccaagggaagccatgagagtctatactgggaggaatgatacactc

SEQ ID NO: 398924 - DNA, 201 bp, Homo sapiens
ataaaaccctcatctccctgggacagagcacctggggaaaggggtagctgtgggcaaagcttctgcagacttaaacatccctgcctgacagctctaaagayagcagtggttctcccaacaccacattcgagctctgttaacagacagactgtctcctcaagtgggtccatgacccccatgtagcctaactgggagacatct

SEQ ID NO: 398925 - DNA, 201 bp, Homo sapiens
tttttcatatatttgtaatacagctagattcttttattatagtcttccatcctgtgatactttgacctcctaaacacacacacacacacacacacacacacatttaaatttgtatacagtaagtttagctcttctgctgtaaagttctatgggtattgaaaaatgcataatgtcatatatctgccattataacatcatacc

SEQ ID NO: 398926 - DNA, 201 bp, Homo sapiens
ttttttcatatatttgtaatacagctagattcttttattatagtcttccatcctgtgatactttgacctcctaaacacacacacacacacacacacacacacatttaaatttgtatacagtaagtttagctcttctgctgtaaagttctatgggtattgaaaaatgcataatgtcatatatctgccattataacatcatac

SEQ ID NO: 398927 - DNA, 201 bp, Homo sapiens
tttttttcatatatttgtaatacagctagattcttttattatagtcttccatcctgtgatactttgacctcctaaacacacacacacacacacacacacacacatttaaatttgtatacagtaagtttagctcttctgctgtaaagttctatgggtattgaaaaatgcataatgtcatatatctgccattataacatcata

SEQ ID NO: 398928 - DNA, 201 bp, Homo sapiens
tttttttttttttttttgagacggagtctcactctgtcacccaggctggagtgcagtggcgcagtctcggctcactgcaagctccgcctcctgggttcacrccattcttctgcctcagcctccagagtagctgggactacaggcgcctgccaccacttccggctaattttttgtatttttagtagagacggggtttcaccg

SEQ ID NO: 398929 - DNA, 201 bp, Homo sapiens
tcacagatagaaaatggtaagaccatgactcaaattctgccaggtgtatgttatttatacaccatactgctatcttcttctttttttttttttttttttttgagacggagtctcactctgtcacccaggctggagtgcagtggcgcagtctcggctcactgcaagctccgcctcctgggttcacaccattcttctgcctca

SEQ ID NO: 398930 - DNA, 201 bp, Homo sapiens
tatgttgtggaaagattgtgttttgtaagtagacatatgaaacttactagacatatagtcaggttttgctatgaataatcttgggaaggttacttaaaatmcctgagcctcagttttctcattttaaaaatgggaataataacagggttgtggtgaagtttaaatgaaatcttaatgataataatgtatgaagtcatataa

SEQ ID NO: 398931 - DNA, 201 bp, Homo sapiens
ttaaattagttagtatacttaaaatagttcctcgtatgtggtgagcactacatacctgtttgcttttatgtttatcgttattattaatatttttatgacaatatccatcatcaaagtctaattttctgggattatgaatgctctttcgctttcgaaataaaataactgatgaaatattctcatttttgaactaaagtatac

SEQ ID NO: 398932 - DNA, 201 bp, Homo sapiens
agtagttagcatagtacctggtacacaaagataatcaataaatgaattgaattattattactactgttagtaaatgactcttttgcaattcaacttttgtkgattgtcttcagtttatcctcctgctgcaaccttttcctgtcttccttgggccttttaaagtttagaatctgttgtttagcatctggtggtgaacatgcc

SEQ ID NO: 398933 - DNA, 201 bp, Homo sapiens
attaaattagttagtatacttaaaatagttcctcgtatgtggtgagcactacatacctgtttgcttttatgtttatcgttattattaatatttttatgacaatatccatcatcaaagtctaattttctgggattatgaatgctctttcgctttcgaaataaaataactgatgaaatattctcatttttgaactaaagtata

SEQ ID NO: 398934 - DNA, 201 bp, Homo sapiens
gaggtacacctctaattggctgtggcagaaagcagctggcaagtatgaaagcctaaatttacctactcatgcaatctagcttttagattaaatttattgayattagaggcaatgtatatattttaatttaccttgttagtattctttatatggtacagtgatttatctttgtaagattttaagaacttttgagaagtcaag

SEQ ID NO: 398935 - DNA, 201 bp, Homo sapiens
gacaagcctgtttactaaaattaaactcttaaagattccaaccatcttctatattgtagagaagctcattcacaccatcatttaccttagcaaggattcargcttgaggttttgagggaatggagttaggattcctcttgagcatcatcttagaacaaggtagtaaggggatttggaattttgatgagggaaagaaaggga

SEQ ID NO: 398936 - DNA, 201 bp, Homo sapiens
tcttcttctttttttttaatggagaatagctatgcttcattttaaaaatgtcaattctagtataaacacagcactcttcatattgagagcttttgaacccygctcctgaacagaaatacaaaggaaacccttgaaagcaaagcagatgttgtactggctatatctaggccttgatttgtttatagtttaaaaatccatggg

SEQ ID NO: 398937 - DNA, 201 bp, Homo sapiens
tacataccagacttgaagactttctccaaaataagaatatttaaaaagtcattaatgatttttaatttgattacagtttgaactgataatactttgaatgyattaaataaaatgctatttaattagttggacttttttgtttttaacatgcctattagaaattttgaaattgtgtacatctcctacatctgaggcctacat

SEQ ID NO: 398938 - DNA, 201 bp, Homo sapiens
atcaaaatagattaaagatttaaattcttagacctcaaactatgaaactactaaaaggaaccattgtagaaactctgcaggacattggagtgggaaaagaktcaattagtagtagctcaaaaacactggtgaccaaagcaaaaatggaccaataggatcacatcaacttaaaaagcttctgtacatcaaaggaaacaatca

SEQ ID NO: 398939 - DNA, 201 bp, Homo sapiens
ttatattttctttttatgtgtgactagaatgaatataataaaaaatatatctaaatcagtcaaatattttagcagttgttaaaggaaatactaagatatgmaaacatgtcatggtttaattttttcctggtggtacacaaaatactcataccttttgctattgatggagtcttacattctatgaaatacatttattttttt

SEQ ID NO: 398940 - DNA, 201 bp, Homo sapiens
gagaacatgcggtgtttggtatttgtccttgcgatagtttcctgagaatgatggtttccagcttcatccacgtccctacaaaggacatgaactcatccttytttatggctgcatagtattccatggtgtatatgtaccacattttcttaatccactctatcattgttggacatttgggttggttccaagtctttgctgttg

SEQ ID NO: 398941 - DNA, 201 bp, Homo sapiens
tccagaaagaacctttgcttgaattctcttgggacatggaggaagtcaggctgactgctgtgacagtcatggctgtggggccctggatcacctgcttcccrtcctactctgcctttttgttagtctcctcaaagaacggggaaaaaaagatcatttaagtttaaaaatatcttttattataaagttgactcttttaactca

SEQ ID NO: 398942 - DNA, 201 bp, Homo sapiens
tcctatgtatacatagatccaattgtttctgcccctctggagaaccctaatacaatcatatttactggtgtatttagtgctagatgtttacatgatataayggtgtgagttctcaagaatctgagataaggtcttgggtgtaggtagtttacttggaaggagatcccagggtcaggaatgagagtgaagagtgagaaggag

SEQ ID NO: 398943 - DNA, 201 bp, Homo sapiens
tgtgttctcaagaaaaaaatcaattgtttgaatacacgtgattttgtaattttatgtaacattaaaaaactacttacttattgaagacagtttcctaagaratgacatgttctggccgggcgtggtggctcatgcctgtaatcccagcactttgggaggctgaggtgggcagatcacgaggtcaggagatcgagaccatcc

SEQ ID NO: 398944 - DNA, 201 bp, Homo sapiens
agcccaaaggagaacttgacacccaaatagcaccaaaaacaatagatttcaaatattttctcttgtggacaatacatacattacagttatttatgtgtcgyttaatgacagggatatgatctgagaaatgaatcattaaatgatttcatcattatgcaaatgtcacagagtgcacttacacaaacctagatggtacagcct

SEQ ID NO: 398945 - DNA, 201 bp, Homo sapiens
ttagtgcccggttctcctattgcaaaccctaagctctttctaccatgctattatttctcagcatagccacgaagaggtctaaccttaatatatagtcttgytcgggtggggggggggttccctatcttgcttcccctatggctcctactttgttgacttgttaaggagtggtggtagcgatttttgtgggccttgtacctc

SEQ ID NO: 398946 - DNA, 201 bp, Homo sapiens
atctgagaaatgaatcattaaatgatttcatcattatgcaaatgtcacagagtgcacttacacaaacctagatggtacagcctgctgcaaatttaggctayctgatacagcctagtcctcctaggctacttaacctgtaccggatgtgactatactgaatactgtaggcagttgtaacatgatggtaagtatttatgtatc

SEQ ID NO: 398947 - DNA, 201 bp, Homo sapiens
tgactatatagcagtgatgcttctgggatctctcagtcagccatctggagatctcctttgcgacggtaaattatttaatgttcttggtctgtagtgataasatggatacattgggaagtaaaaacaaaataataatatatagcatttttgatgatgtggcattatacttttaaattttggattataaactgtttttttttt

SEQ ID NO: 398948 - DNA, 201 bp, Homo sapiens
attaaatgatttcatcattatgcaaatgtcacagagtgcacttacacaaacctagatggtacagcctgctgcaaatttaggctacctgatacagcctagtsctcctaggctacttaacctgtaccggatgtgactatactgaatactgtaggcagttgtaacatgatggtaagtatttatgtatccaaacaagaaaaggta

SEQ ID NO: 398949 - DNA, 201 bp, Homo sapiens
gcctcccaaagttctgggattacaggcgagagtcactgtgcctgggcaataaatattttttaaatgagtaaatttagagtgaatgtaaagattttttttttaagtataccacacaaatgttgtaagaaccaaaaaagggaatacaaatccacttaagaaaaataaaatcaacaacagcaaaaacaaagtagaaaaacagag

SEQ ID NO: 398950 - DNA, 201 bp, Homo sapiens
atgactgtatatgattctactgggcatacagagacaaaaatttatgaaataatacccttgctgtgcacaatgaggtctgatgttttctattctgttctacrctgtgttattctgttctatttaattaaacactgctcttcataactccctaaagtaatttttaaatccatggtttggaaaacattggccgaaaagataatt

SEQ ID NO: 398951 - DNA, 201 bp, Homo sapiens
ttgttttacttataaaagtgttttatatatatatgtagttataaaagtttatatatttatgcgagttgtgtatggacacacacacacacacacacacacamacctgttcttattctctccatgtctgatatgactttgttcagtgttagagctctttttgacacttttttgatactggtagaaaggtcactaatggaggga

SEQ ID NO: 398952 - DNA, 201 bp, Homo sapiens
acaagtaagggaatagtaaccctcgcacaagccataactttccatcagatccctcatgcttacaagctccacctttgctgttgtgtacacagctcctcctrgaagcccgacctccccatcccaccccagcactcctgtaaatctgtctcatgggaaagataacacaggagtgtgtgctcacaggttaccaatcaatatcaa

SEQ ID NO: 398953 - DNA, 201 bp, Homo sapiens
tagattcaagtgacaaaaaagcataaattattattttggggaaggaaattatcttaatacatgtcaaggaaagaatgaaaaggcataaaatactttatttagcttctgttgatattaaataaaatgagctctctgacatgtataaaccttgaaaaaaaaccttagaaagtatgtgtgtaactaacatgtagacaatgaaaa

SEQ ID NO: 398954 - DNA, 201 bp, Homo sapiens
ttagattcaagtgacaaaaaagcataaattattattttggggaaggaaattatcttaatacatgtcaaggaaagaatgaaaaggcataaaatactttatttagcttctgttgatattaaataaaatgagctctctgacatgtataaaccttgaaaaaaaaccttagaaagtatgtgtgtaactaacatgtagacaatgaaa

SEQ ID NO: 398955 - DNA, 201 bp, Homo sapiens
cttagattcaagtgacaaaaaagcataaattattattttggggaaggaaattatcttaatacatgtcaaggaaagaatgaaaaggcataaaatactttatttagcttctgttgatattaaataaaatgagctctctgacatgtataaaccttgaaaaaaaaccttagaaagtatgtgtgtaactaacatgtagacaatgaa

SEQ ID NO: 398956 - DNA, 201 bp, Homo sapiens
tatttaacttttcaaacctagaatttctcacatttattatttcatgggccgggcgcggtggcttacgcctgtaatcccagcactttggcaggccgaggcgrgcagatcacgaggtcaggagatcgagaccatcctggctaacacggtgaaactccatctctactaaaaatacaaaaaaaatagctgagcatggcggcaggc

SEQ ID NO: 398957 - DNA, 201 bp, Homo sapiens
ctcatggtaaatttaacctgtttttctctcttaaatctaataatttttattcttttccttcataattaacagtgttttagatagtattttaaataattttmtacaaagtagtttacactcacaagattttttttaaaattcaaaatatttgatgaggcagccttttcagaaatgtcaaagtagtaatgcttaactaaagta

SEQ ID NO: 398958 - DNA, 201 bp, Homo sapiens
ttgggctgggcgcggtggctcacgcctgtaatcccagcactttgggaggtcgaggagggcagatcacaaggtcaggagatcgagaccatcctggctaacamggtaaaaccctgtctgtactaaaaatacaataaattagctaggcgtggtggcgggcgcctgtagtcccagctactcggaaggctgaggcaggagaatggc

SEQ ID NO: 398959 - DNA, 201 bp, Homo sapiens
aatgtcaatgcctctgataatgctaatttaagctaagactattttcaacaacttacatgaggagtagataaaagaaactgagaaatgcagtattttctgcyagaataagaggaaggaaatagtctctgatggttacttttataagttaaatttgaatgactggctttttgctggatgaaaagaatgtatccagagaatggt

SEQ ID NO: 398960 - DNA, 201 bp, Homo sapiens
agacatcataacagtagctggctttgtttacatagtgatgtattaaaaaaaaaaaaaactctgccagccatacaagtctgtgcattttggtggtgactcaragtttttgtagtctttttcacagtttatgatgatccttagtgattaacaaggtctgaggaatgaaatcatttcaactactgcatacactgaagcttactg

SEQ ID NO: 398961 - DNA, 201 bp, Homo sapiens
gcttagattcaagtgacaaaaaagcataaattattattttggggaaggaaattatcttaatacatgtcaaggaaagaatgaaaaggcataaaatactttatttagcttctgttgatattaaataaaatgagctctctgacatgtataaaccttgaaaaaaaaccttagaaagtatgtgtgtaactaacatgtagacaatga

SEQ ID NO: 398962 - DNA, 201 bp, Homo sapiens
tcacattagctatttaaaccgctctgtacttcttgcacctgcacctcatcctttactctctcttcaattgattctctagtgctttctctctcattttttgrtggcttctttatattaggcccttcctaaatatttgtggaatgaataaatgcctctccaaacttgtggtcatcttgggatgtctgtatcagcagtttcagg

SEQ ID NO: 398963 - DNA, 201 bp, Homo sapiens
gataggaaaataaatgcactgtcatttgacacatacattgttgatcatgagttactaggaaggtataattttcttttttgagatttcacacacatgtaggyacataggccgggagaatatttgcaagggctatctattgagcaggctttcttcacaggccctttgttcgatgcatgaggcagtgggttaatttaacattta

SEQ ID NO: 398964 - DNA, 201 bp, Homo sapiens
taagtgaaagatctctacaatgaaaggtatataacattgattcaagaaattgaagaagacacaaaaaatggaaatatatttcatgttttgaagaagacacmaaaaatggaaatatatttcatgttgatggattggaagaatcaatattgttaaaacatccatactacccaaagcaaactacagattcaatgcaattcctat

SEQ ID NO: 398965 - DNA, 201 bp, Homo sapiens
ataaatatatgtagagatcatgattaatgcagaaggtataaagaagttgtccattgaactataatcagtgtgagcttgtaatgttcttcctttgagataarctgaattaaaaaatgttacatttaagtaattattttgcttgtcctatggacacaagtgtagattatagtaattgccagtagattatactactgacaattt

SEQ ID NO: 398966 - DNA, 201 bp, Homo sapiens
tttaacttgagaagtagaagggtctgacaaattgagtctgatgaataaactcttgtgttggccaattctgcctgccatgtgcccttagactgcttgcaggrctgaggcccacagtagctgtcctggccttttgctgtgttactggttcctggtgtacatctctgaaagggctcaggccacccttagataattccacaaggc

SEQ ID NO: 398967 - DNA, 201 bp, Homo sapiens
gttaccataatatttatttgtgtgcgcagcagtttattgaaagaatgtgaaggacacatgctatttagtatatttaatactaactaaaatcctataattckaaagaacttgactattatataatcagtaccaaagaagagaactaggaactccaatcctttatgctgattgatactgtgtagcagaaatattaaacaatta

SEQ ID NO: 398968 - DNA, 201 bp, Homo sapiens
aatcttttcatatttttcctatttatggaattagaggaatgaacacaagactgtcttcaatttatctattactataatggattatttctttatttcactarcaataaatgttgggggattcctggggtatttataaggagtaagagatagttttgctaaaagaatctttaaagattttattgaatgtgagatatccagtaa

SEQ ID NO: 398969 - DNA, 201 bp, Homo sapiens
ttgcttatcacttgagaataatgtgcctgtttatgccaatgtagaaaatagactctaatttttcattcaacctatgcattccacaaagataattcctgagkgttagaaatgtacatagacacaagaagattacaatcaagagaggaaacaggtttataaaaaataattaaaatacaatgtgatcccttagctagaccttga

SEQ ID NO: 398970 - DNA, 201 bp, Homo sapiens
ctaaaacaacaaatgaagacttatttctgtttatactctgagcacttagaacagagtctgtgattaagattggatgtattttagatgaggcaatcaataasagtaaaagctcacaggcttgaatgcagcaagcagtttagggagtgtgctgagtagagcagtcaggaaatatttagtgtagaaaagcatgaacagtaagat

SEQ ID NO: 398971 - DNA, 201 bp, Homo sapiens
ggttgctgaaggttgggtggctctaacaatttcttaaagtaagacagcaatgaagtttgctacatcgattgactcgtcctatcacaaaacatttccttatrgcttgcaatgctgtttgatagcattgtattcacagtagtattgctttcaaaatttgaatatgtcttctcaaactctgtgctgctttatcaactaatttta

SEQ ID NO: 398972 - DNA, 201 bp, Homo sapiens
ttgactctttctaccatactgaattttcaaataaattttagagtcaattttttaaaagtaggtgaaaaggttataaggggatgcagctaggtcacattagyttcaacctatctttttatgagttgatatatgcagaagtctccagccccaatacaagggttgttctcagactgacttttttccttacaaccagagtggcaa

SEQ ID NO: 398973 - DNA, 201 bp, Homo sapiens
aataaaatatccatgatcctaccatagttaaacactttatattttgcttcagatatttcttaataaaaatgaacaaaacattttctttgtaattttctcartctttcattgtgacatcctaatgagtttggtgtgtttcaaaggcccgtgttttgtttttccttcttttttttgagacgagtcttactctgtcgcccagga

SEQ ID NO: 398974 - DNA, 201 bp, Homo sapiens
taatcagtttattcctatgtgtttttattaacaaaagtcccttactgatgactgtctaaatcatagacagctctagctcatcattttaatcgctgtatgayatttcagtgtatgactccaccatattttaatatttcatacatatattcctctgttgatcaacacttcggtatattttctattttttaattatcacaaagt

SEQ ID NO: 398975 - DNA, 201 bp, Homo sapiens
atatatactaatattactttactgcatataatatatattttaaaataatgcatatattataaacaactgtcttaacatcatgctgctgatctataaaacasaaataattgcttatatgaaggatggctttagcaaattttgaaataaatgatttatctcagcataattattttttcttgctacagtgcaaactaaaagtgt

SEQ ID NO: 398976 - DNA, 201 bp, Homo sapiens
gtagaaagacttgaattactttggtatgaaatttttcttaatctttaaacatttttgcttttctcattttacaattgatctacttccagatgttttagaaygcctatttttaattgactgtgaaaggcttctttctgttaaaaccaagcttcttcctaaccactgctacctgaacagctcattgtatgagagcatgtacag

SEQ ID NO: 398977 - DNA, 201 bp, Homo sapiens
cttctgttcctttgtcaatataattattatacaaggatgagatactatgttataaatatttactcttcttcctatggacgcttaatgtggggaaagatccmaagaaacttcaagaaattcttatctagtagtttttctgtagccttttcttaaaaaaaaaaatcaacatgctcatctgcactagtgatttgatatttaaaa

SEQ ID NO: 398978 - DNA, 201 bp, Homo sapiens
acagtggctcatgcctgcaatcctagcattttgggagtctgggggagaggatcacttgagttcaggagtttgagaccagtctgggcaacacagtgagaccytgtctctactaaaattaaaaaaaaaaaatccccagacatggtgcatgtgcctaaagtctcagttgctcaagaggctgaggcagggggatcacttaagcct

SEQ ID NO: 398979 - DNA, 201 bp, Homo sapiens
atgtgtacatatacacagccagctagatgttaccctataggtagagcttcctagtgccctatctcaggatccttttgcatcttatgtttgtttcaggtttattgttttgacagttgtcacttttaagcttcttttctcttttcatagagaaagagctttcagtctcctaagaggatagctctattatcataatcacctttt

SEQ ID NO: 398980 - DNA, 201 bp, Homo sapiens
cttgccctagttaaggattcaccagctactatatttctttagaaaacttgctttaatattacatgtacaattcctgtgaattgccagatttatgtaaagawtgacagggagaaattcttcagtcttctatcaggatagagctctgctccagggaacgcttatgcaaatcttgcagattttcttgctggagtgttagatgaa

SEQ ID NO: 398981 - DNA, 201 bp, Homo sapiens
tcagacacttactacctaagtgactttgggcaagttttttaaacttctctgggtttcattttttcacattcataaaaccggggtaatacttctgactctcktgtaagattattttgaacatcaaattacttgatgcatgtgacacgtagggtccagtgttgcactcagcacaaagctggttgctattacagtgaataaccc

SEQ ID NO: 398982 - DNA, 201 bp, Homo sapiens
cagtggctcatgcctgcaatcctagcattttgggagtctgggggagaggatcacttgagttcaggagtttgagaccagtctgggcaacacagtgagacctwgtctctactaaaattaaaaaaaaaaaatccccagacatggtgcatgtgcctaaagtctcagttgctcaagaggctgaggcagggggatcacttaagccta

SEQ ID NO: 398983 - DNA, 201 bp, Homo sapiens
aatattaatttttaaaaataattgtgcatattttcttctttccacttctttatcttttatacagaaagaccagcacaatgatgaacttgtttttaagaaasacttttggtcagagaagtgaaaaatgtgaggaaattatttaacttacaagaactggttacagttatcttttctaatctctcacttatctctttttaaagt

SEQ ID NO: 398984 - DNA, 201 bp, Homo sapiens
tcctacccctgtgctcaccacgggaactgtaatagtctaggtcaggagccgtggccacagccataccagcctttggacgtcaggaaactgaaaaatggatrcctaaatatgcattcccatgattatgaagttagatgttagactaacgtgtcaccagtactgggccattttcttgacacttaggaagctaaaaactggagc

SEQ ID NO: 398985 - DNA, 201 bp, Homo sapiens
ccctttctcctgtagaatttcttcctttagattgtatcagatgttgtatcattgtattgctaatttgtttcaatgagcatttcttgtctttttagttataytaacttattctgcaagtccccacttactcgtctccattcagaggactatttacaatgtcataaccactaaaaaaaagtttgattgattgacatcaatgat

SEQ ID NO: 398986 - DNA, 201 bp, Homo sapiens
agtatccatctcagaagcttacttctcttgatacttgaattaagagcctattctcattaatgccgacttattcagataaagttcacagtgtttttgtcttkttcatcatatttatatcttaagtgaaaggtttcaaccgtaacgacacattggaagcaactgggtccccccgcaccaattcaactggaaaatctgggggtg

SEQ ID NO: 398987 - DNA, 201 bp, Homo sapiens
gcaggtgaacagtgtgaagtgtgtgtgtgtgtatgtgtgtgtgattttccaggttagggatccagaaaaacttgccctagttaaggattcaccagctactrtatttctttagaaaacttgctttaatattacatgtacaattcctgtgaattgccagatttatgtaaagattgacagggagaaattcttcagtcttctatc

SEQ ID NO: 398988 - DNA, 201 bp, Homo sapiens
aggtgccatggtgttttgctgtacccaacaacctgtcatctacattaggtgtttctcctaatggtatccctcccctatcaccctcacccgctgacaggcarggtgtgtgatgctcccctccctgtgtccatgtgttcttattgttcaactcccacttatgagtgagaacatgcggtgtttggttttctgttcctgtgttag

SEQ ID NO: 398989 - DNA, 201 bp, Homo sapiens
tgatatttttttaaaaaataaatagccctatgggggaaagttggttttatttcaaagcaccttatttttttggaataattgtgtgttaagaatcaaaacamacatacacatcgaatgattaaacaaataagcaaggaaaacaaataagcaaggaaaacaaacttcttctacattatttttatttatttatgttttaactga

SEQ ID NO: 398990 - DNA, 201 bp, Homo sapiens
aaggtgagctagaggatgacagaaagctaagaaaggggaagtggaattatttaaaataaaatttaattcctgattttgcttataggttttcttgttgatayggctttgatttaaagaatgttgtgtgttctcaagaaaaaaatcaattgtttgaatacacgtgattttgtaattttatgtaacattaaaaaactacttact

SEQ ID NO: 398991 - DNA, 201 bp, Homo sapiens
gtctggcatgattcaaataggcctattaacatatttttgcttgggtgttggctgatttcttggacttgaagtacctttgctcactgactttatttgcattyatgctgatgcagacaaagggggcctgttggcagcaattttgtcacgtttgcctttcttgactgtattcccctttcttgccttttttctcattgatgactt

SEQ ID NO: 398992 - DNA, 201 bp, Homo sapiens
ctggcatgattcaaataggcctattaacatatttttgcttgggtgttggctgatttcttggacttgaagtacctttgctcactgactttatttgcattcaygctgatgcagacaaagggggcctgttggcagcaattttgtcacgtttgcctttcttgactgtattcccctttcttgccttttttctcattgatgactttc

SEQ ID NO: 398993 - DNA, 201 bp, Homo sapiens
aattaaaaataaccctgtggttgcctgtgtttaacatctgtgctccctgttccacctcttgagtgactcctgcattctggaaactgtagtaagcattttgyctaactggtttattggagtctgatctcaatgaggtgtacaaacatgaaacctttttatttttccctccactcacatcaagcatgctaggatacatcccct

SEQ ID NO: 398994 - DNA, 201 bp, Homo sapiens
ggaagcactaaacatggaaaggaacagctgttaccagccactgcaaaaacatgccaaattgtaaagaccatcgatgctaggaagaaactgcagcaactaaygagcaaaataaccagctaaattcataatgacaggatcaaattcacacataacaatattaaccttaaatgtaaatgggctaaatgctccaataaaagacac

SEQ ID NO: 398995 - DNA, 201 bp, Homo sapiens
ttctttgggatcctggcattaggcacagaacataagcttacactgtattgtctttacatttgtgtgcaccataactgtgaggaccttttcaatgttatgaraaatgcaagttagaagaacttctctttttctcttcaatgcacatggacctgaagtcttttgaaaatacagttcttcaaagtttagaagcaatccatggaa

SEQ ID NO: 398996 - DNA, 201 bp, Homo sapiens
aatgctaactgaacatagaaggaccaacttgcagaatgaccttgggaactggcgattttcagtggctcatccgcattctcttccttgcatctgcctgagcrcagaatagttcattctctctccaaatctctttcaatttactaaaatttgtctttagttgaatagcagcagcgacgtccacactgtctcaagtcatgcatt

SEQ ID NO: 398997 - DNA, 201 bp, Homo sapiens
ggggaccgccttcgggggagagaacgcggatctgtaaagttggcgctgggcgagccggggcgcgagcgcagagcccgaccgctggggggcggcccggcctyaccctgcacggcctagggttccagtggctccggcgacagaggatcccctaggctagggcggaagaggggactacagcactgggaaggaataagattccac

SEQ ID NO: 398998 - DNA, 201 bp, Homo sapiens
agttcatgtcatgtgttttccttttttcccctgcaagcattgctgtattacatcacagcaaaaaaaaaaaaatcaatgttcatactattactcttagtttkgagaaatgtttatgtctgggtactctggaaaacagcagagcactgtgtgtatacattattagctctttttaacccaatatgttaaaactgaaacatattt

SEQ ID NO: 398999 - DNA, 201 bp, Homo sapiens
cttcctaataacatctaggttctaggatcttggtgtcccattcatggctctctaagtctgaaactccaagttcagtctctgttgcttaatttcttgatctrggattaagaacctctgtcttaagccatcgtggagaagagattatgaaatgtggtcatgagctgcttagatatttgttgcagactccatattttgcctgaa

SEQ ID NO: 399000 - DNA, 201 bp, Homo sapiens
cagaagttgtgcccatttcttttttctggtttgctgagatttttatgccaataataaggtcggcattcttctttggaaaagaaagttgtctaaattctacrtataagtggcactatagaaatatttggaaaataacaatggcatactaaaattacttggaaacaacaaatgaacagagcagtcactatgcagtgtctgcaa

SEQ ID NO: 399001 - DNA, 201 bp, Homo sapiens
gaggccagggttaattttaatttacagttttcagattttataacctatgtatcttatatgtgatcaaggcatccagaattattgaatggcccctgctccartgtttcaattttaaatcagctatttgtaatcaaaacacaattatctgcttatgtgacatatttcttattatgttctcaggttactttctgaaaacctgtt

SEQ ID NO: 399002 - DNA, 201 bp, Homo sapiens
tccatttgtctgacaaaatttttcataccgtttttatttattttcttgaataaatcatctgtaatgattgtaaatgcttctcctggtaagtcagtctccaraactcctgcagtctattacatcatttgttctttcacttaattttcagtcatgttacttgtttcctgtgtgactaattacacttttttttgtttgaatgct

SEQ ID NO: 399003 - DNA, 201 bp, Homo sapiens
atcaatggatgaatggttaaagaaaatgcagtacatatacacaatgaaataaaaaaagaatgcatccgtgtcatttgcaacaacatgaatgagcctggagkacattatattaaacacaactaatcaggcatagaaagatcaataaccacatgttgtcacacatatgtgggtgccaaaaaaacattttgagcttatggaaat

SEQ ID NO: 399004 - DNA, 201 bp, Homo sapiens
aatcactgagttagagggaataggaggtgttcaaagataatgattatattggggtgctaaaggcagttggactgtggcttgtaaatgagtgtgcacaattyccacggagagaaaccctgggtcaaacaatttgaaatggttttcaggggacactgttggcccagcacagcttagttgcccttcgaaggttgccctaagatg

SEQ ID NO: 399005 - DNA, 201 bp, Homo sapiens
atattcattcttttatagattcaccacagacaaggcacggtaccaaagattagggttactatagtggtcttcatttagtttctctaaaactccatagtttstctttctggaccttagcatatatgtttcttcagtctggaatggtttccttcctcccctatctatctactcttttttggtggcctagttgacatttccttt

SEQ ID NO: 399006 - DNA, 201 bp, Homo sapiens
tctgagtgatttcttgatcgattaatgtgttttttttgttttgttttttttgtttttgttttttttcattttctaaggtgtttcactgagtgatggaatcyctgaatctttgccagatactcttctgggtgataaacttttaggtttcagttctctcagtatctcacctgtatttttctctcatcatctagctttcattgt

SEQ ID NO: 399007 - DNA, 201 bp, Homo sapiens
atggttagatgctaagtagatataagacattataagaagcaaagatgaaggaaatgtatcagatgtacagttcagaacaagtagtgtcgaagaggtcagarcgtctgggaaacccaatcaaaatgtttcccctgaagatctccgtattgtgtcagccatcatagactccctacaatagtacaaatagaacactgctccttc

SEQ ID NO: 399008 - DNA, 201 bp, Homo sapiens
tctccgtattgtgtcagccatcatagactccctacaatagtacaaatagaacactgctccttcttaatcgttttttaagttagtatttaaccctcatttartgtgtctttaccatgtgctaagtcctgtaaagacaaaagatattaatgctttagtctaaaatctagatttttttccaccaactttggattttaaaaagtt

SEQ ID NO: 399009 - DNA, 201 bp, Homo sapiens
aggcgttacaatttttaagagtaagaaagaacagacctgacgaaaaattacagatatatctaaaagtgtggaacaattttcttcaggtggaaaaactgggraaaaaatgctttccaaaggaatacttgaaagttggaaggagatgaagggatggctctggaaaaggcgattatttggaaattatctaggcaaaatactgac

SEQ ID NO: 399010 - DNA, 201 bp, Homo sapiens
atgtttgaggccagactggtctcgtctcaaactcctgacctcaggtgatccacccaccttggcctatcaaattgctgggatcacaggcgtgagccaccgcrcttggccatgaagctttctttcatctctatgtttcagtgaattcagatgcattttaaaagagaggtgcggagaatctgacttacctaccatgaagggatc

SEQ ID NO: 399011 - DNA, 201 bp, Homo sapiens
gcattttatttacatactatcattgttttaaaatctctggtctctgtcagattgatgaaggtttggaatcgagttttcattacctgtatctactaatgtcktttatgttcatttatcagagcattgtgcagtaacttccaaaataaaatggatgtgttaacttaggcacaacctgaagcagcaacggattttgagaaacaa

SEQ ID NO: 399012 - DNA, 201 bp, Homo sapiens
tattttgtctatttttccaatagttaataatctttacttacggttgattaagttcatataagttaaccattccattaatatctatagagtgcctacatggygtgtactgttccacatggtagaaaacatagcaaggaacatgtagatagaaatcgctactcttatggatctagcatcctatcatcatgatagacataaatg

SEQ ID NO: 399013 - DNA, 201 bp, Homo sapiens
ttgccatatttaatttttgttaacaagaaatattgtagccctgagcataacaggaggtacctcctattggagatcagatttttatttagttctattaaagktttgtaggttctcagggataaaaatcaatccctttagttaaaaatcatacagaatcttcctttaactgttccttttgtttttaagttagaatcattttag

SEQ ID NO: 399014 - DNA, 201 bp, Homo sapiens
tgggtcgctgtgtccagccccgaagtactttcaaaacaggaaaagatatcaaaggcatggcaacataacacactaggtttcttttcttattattttgttayagttttacttttcaaggattttgagatttggtataattgagttccagaacttagacatcaacttagtattttttcctatagcaacttttgaatcatgact

SEQ ID NO: 399015 - DNA, 201 bp, Homo sapiens
agtagttgttgtgtacatgtatatgtgggtactggcctatgcttttgatatgtattatttcatttaaacttcattgtactagtcagggctctctagagggwcggaactaataggataaatgtataaaggagagtttattaagaagtattaactcacacaatcataaggtgaggttccacattaggacatctgcaagctgag

SEQ ID NO: 399016 - DNA, 201 bp, Homo sapiens
tgctttctccaagttcccttggaatattctctcatcccttcaaatgacagagcttcctatgccagataatttttttattgtaccaccaatgtcaacctcartgacattggccataaactacaaaatcatggctatatgtatatgcaaataaaaaatgtcacagtactgattttttatttttgtcccttgattcacttggtg

SEQ ID NO: 399017 - DNA, 201 bp, Homo sapiens
tataaaatatctatgaaattcttttaaaaactattgtctaactacaaaaatagtggcatatacatgcataaaccatctttaattagaaaatttagtaacaktcatgtcaggcatcatcgatttttcttttcttagctcctgtattcttagaaccagattgctgaagcatgtttgcagccttcttctggaagttgcctgaat

SEQ ID NO: 399018 - DNA, 201 bp, Homo sapiens
gccagctgctggggactgcttcctcccactcttcagggatcatttctctggctctgttgggactatttcgtggttggctgttcggatctcatgacctttcwtgagcataacatttagtctgtggggttcagtcactgttggtcaagtatagtgaagctgttagtgagactagagatgaagatggctttttgccgccatatg

SEQ ID NO: 399019 - DNA, 201 bp, Homo sapiens
tgattaacagctctgagtaagccctccgaggatcggtccatgtggaaatcatgctttcctgctgcctcttctgtggccgccaatttgaacagggctagtcrtcatcagcaaaagccagaatctatgtacgtcacagtaatcccctcccccaccttcttcaccagcgggtaagagactggtaaaaagtaaaggcgtgagaag

SEQ ID NO: 399020 - DNA, 201 bp, Homo sapiens
ttaatttgtgtatgaatcatgtcttgattttaaatgttgtcttaccaattatttgctttttggcttaaggagtttgttattttctaaaaaggaaaggatasagagagtcttacaaattgtgtttttatcatagtatttacacatgtaaacccaaatttattttaataggatatttgaaggatctgtatttatctatttata

SEQ ID NO: 399021 - DNA, 201 bp, Homo sapiens
ataatgtctttttagaactcttgatatattgactctctgaggacagcgttagcggtcatattcaataaaagctttgtttttaagaagtcactgagctatgrttaatcttggcttgtttagatttttatctttttttaaagttgtgtttaaattctcttctgtaatcatatatgagaatgaaagaattggtcagcttactgg

SEQ ID NO: 399022 - DNA, 201 bp, Homo sapiens
gtgtctctgtcaccaactagctagaaactttgggtaaaccatcttacctattgacttcacttgcaaaatgaacattaggctgtatttcaataatttccaartgtttgaagaagtagaacctttatcaataaagtatagtatagaaaactttctttcctccacttttaaattattcctgaagttctgaccctttttcctatt

SEQ ID NO: 399023 - DNA, 201 bp, Homo sapiens
gtaagataaggacaaaacagtatgtattgatttaagtatttatgaaagcagtttcaacagagcagttggaacaggagactaatggcagtgaatattgtctrtctttgttttctcttctacactagagaactggacagataagtactattattgtctattctggctgacattattgttagtgaatgcaacacatgttgaaga

SEQ ID NO: 399024 - DNA, 201 bp, Homo sapiens
aagttgttgttggctgatgttaaaaatgcttgtaataacatgtgtaggttcttcaaaggattgagatttcaagcttacatgtctcaaaattttgagtgaakcagtgactcttttttggccattgaacaccagcttcagaaatccttccatccactgtagaagaggtgtgagggaatctctttctctctgtgaacatatatg

SEQ ID NO: 399025 - DNA, 201 bp, Homo sapiens
tgaggtgcacaaatctcttgagcccaggagttcgagactagcctgggcaacatggtgaaaccctgtctctacaaaaattaaaaaaaaaaaaaaggcaggcwtggtgacatgcgcctgtagtcccagctacaagggaggctgaggtgggaggattgcttgaacccgggatggaggggttgcagagagcccacatcatgccac

SEQ ID NO: 399026 - DNA, 201 bp, Homo sapiens
tgggcgacagagcgagactccatctcaaaaaaaaaaaattataaaagtgacattgattggtgtgaaaaggacaaggcattcaataaatgcttgggggactmttggctattcatgaagaaaactaattgaaattggtattgtactttatgaatctttatataaatcaatttttggtgtgggaggtaaatgtaaaaattcata

SEQ ID NO: 399027 - DNA, 201 bp, Homo sapiens
agggtcgactgtatttggtaacctaattaattttctaagattctttgataattatttatttataaaactcaagttagtactttttaatcacattgagattraaaacatataaggagaaaaacctaaggggtcagaaaaaactacataggcattatataaaattactgttaagatactgatcccagttatcctcatttctca

SEQ ID NO: 399028 - DNA, 201 bp, Homo sapiens
gttccttatgttgatttttgtttacttagctgtcattttcatcagtgttgctagactttactgattttattgatgttttttcaaagaaaccattttttttkgctcattttctttattgttttcctgtttgtaatttcattgattacctctcttatggtttttgtttcctcccttctgcttgctttgggtttattttgctct

SEQ ID NO: 399029 - DNA, 201 bp, Homo sapiens
ctagttaacatactctgtacaatttcaacttttgaaatttattctggtgtttttttatggcctaggatttggtcggtatatgttccatgatctccttgggktttttttttttttttttttttaaagaaagagtattctgctgttgttggattgtcaaattattttagatattaattagatcgtatttgtagattttgttgt

SEQ ID NO: 399030 - DNA, 201 bp, Homo sapiens
tttatatgaagggaatcaagtacttttagtataaatagttgtgagctgcaggttttattttcttctttactaatacatattgaccagctacttatttttayagtatgatcttcacataagcagatttggaaagaacttgtctgattcactttgtaaattttatattatcatccagaaggtgtttttatgaaggtgtgtctt

SEQ ID NO: 399031 - DNA, 201 bp, Homo sapiens
tcacataagcagatttggaaagaacttgtctgattcactttgtaaattttatattatcatccagaaggtgtttttatgaaggtgtgtcttcttggggaaakgagctctttagtttcattatgtagactatgtagccaatgttaaatattttaattgaatctcttctgagtggtaaacattcagtatgaagtatgtataagg

SEQ ID NO: 399032 - DNA, 201 bp, Homo sapiens
ccctcaggtactctgattaatttagattttcacattctatatcatatattacttgatctcctcatattttctactctttagctctttgttctacatgttayggtatttttagatcttccagttctagtttatttactttctttagtggcatctaatattttatttaacccatctgctgttttgttttactttcaaccattt

SEQ ID NO: 399033 - DNA, 201 bp, Homo sapiens
actctaagggatctcctgtattccacacatattcttccttacctccattttgaagtagtggactgatttcatcttgatagtccaggtcagtcaccccaacsaaacactgtaactcccttcttagcctccctaacttaccttctaaaggtaggaggagctcaaaatatccaggtggcaatcttaacttccagcttaatagaa

SEQ ID NO: 399034 - DNA, 201 bp, Homo sapiens
aattctagttatttgttttaaatatttaatgcaagtcagccagaatgccaaaacactatccttattactaagcaatatattaaacaaacacccctgacttkttcctcacccttaatccacagaattgaaacgaggaatggaagaacaaataaattttaacgtaaaataataataatttaatgataacataaaataatacac

SEQ ID NO: 399035 - DNA, 201 bp, Homo sapiens
atatttattgcttcatcttttgcattgtacgatcttaattgatctggaatttgattttgtttgaggcatgagatgggatttaattttattgttctccagayggctagtgccatttattaagtaaaccattcttttccctttgaattgaaatactgttctgtggtatattaaaacttctcatatacacagatttacttcagc

SEQ ID NO: 399036 - DNA, 201 bp, Homo sapiens
ttctaaaatatttattgcttcatcttttgcattgtacgatcttaattgatctggaatttgattttgtttgaggcatgagatgggatttaattttattgttytccagacggctagtgccatttattaagtaaaccattcttttccctttgaattgaaatactgttctgtggtatattaaaacttctcatatacacagattta

SEQ ID NO: 399037 - DNA, 201 bp, Homo sapiens
ataaaagatagtaattccgtagatatataaaaattgtaggatttatgggttaagatggtctcctttaaaaaatgaattattgaggggtggatcaagatggmagaacagaagtttccactgactgtctccttcacagggacaccaaattcaacaagcacgtgtgcacatgcacacacacacacacaaatacctccataagaa

SEQ ID NO: 399038 - DNA, 201 bp, Homo sapiens
cctattctttctaagtaattgcaactggctttttctccaggtgtgcttagtttaaccttagtccaatccaaatagttatagttgtagccataccccagctycaccttccttttctactggtgttcattgttcatgccctctgaaggtgttcattaggctactgggcataagcttgtgttcactaagtttcccattaaatct

SEQ ID NO: 399039 - DNA, 201 bp, Homo sapiens
tgtgtaaaataaaatcattttttatctttgctctgaaatttcttcaggtttcaaaggtcctgtaataaatgtgttagcactggatttttccttgctgtggragtgagctgtgagacaattgaaatagattttggaatgcttgagacgtgaggggttggatttaagcagatctgagataggaagtcaggattctctatggtc

SEQ ID NO: 399040 - DNA, 201 bp, Homo sapiens
gattccaaccatcttctatattgtagagaagctcattcacaccatcatttaccttagcaaggattcaggcttgaggttttgagggaatggagttaggattyctcttgagcatcatcttagaacaaggtagtaaggggatttggaattttgatgagggaaagaaagggaatatgcaaagaatggcttttggaaagtttagat

SEQ ID NO: 399041 - DNA, 201 bp, Homo sapiens
gctctctattacactgaggaggtttcgttcattcctgtgtgacactgtgttagtgctttgtgcagaattgtttttgtaatatttccttgaaaaaagtgtakaattttctgtctttgcagaacattgaatggtggtgctatatatttattatagcttcttgaagtgtagttatatacaccagatatgtagaaatagaaccca

SEQ ID NO: 399042 - DNA, 201 bp, Homo sapiens
gtcatttgacttttgtctgatttgtcttgaagcttctatctccacaacttttctgggcacttttttaaacacacaggaacttaccttggagaacatttttwaaaaatataccaaaaatactgtgtctaaacttctgagaatgtataatgtgattgtcttctgaaaagtaggagttaaagtacgtttttatccttgggaata

SEQ ID NO: 399043 - DNA, 201 bp, Homo sapiens
gtggccagcaggaaaaattttggtaagtgtggcaggttaaggtcatgaaccgtcacatacaggaagaagtcagaatcgtgaatttcccaaatagtgagtasagaaggcatgtagcaatggccatttactgagccttcttgactagaacttaagtttcaggtggaagaagtaaagtcagtcaaagagccagaaccagcatcc

SEQ ID NO: 399044 - DNA, 201 bp, Homo sapiens
tttacttccaactatgtggttagttttggaataactgcgatgtggtgctgagaagaatgtatattttgttgatttggggtgtagagttctgtagatgtctrttaggtccacttggtgcagagttgagttcaattcctggatatcctttttaactttctgtctcgttgatctgtctaatgttgatcagagcgcctctccccc

SEQ ID NO: 399045 - DNA, 201 bp, Homo sapiens
gggacagggactgatattagttgaatgcctaatatgtgctaggtaccatgctaaattttttatatgtttattcattactttcattttcaataaataattaycagtcacatactgtgtttaagtgctaatctaggcattgggtaataacactattgagatatttattttattagatttggattttatttattggattttatg

SEQ ID NO: 399046 - DNA, 201 bp, Homo sapiens
agagtcttgggagaccaaggaggctaaaggtcatagacagagtatcagagaagtaagagttgcaaaaagaccctctgacatcttccaaggatcctcattaygtattctgcagggtagtgattagtgcacatatgtgaagaaactacttgagccctggtgtgagggagatacccaaaagatcagatggaaaagcacctagca

SEQ ID NO: 399047 - DNA, 201 bp, Homo sapiens
ccagaaatattagagtatttggttgttttgccatcaaaaatataatctaaatatgtaccataactttgaattttattttagaaacttctaaattctcaagmtaaatacaaatttgatatatttatgtatagttttcaatagtttgctttaaaaaggactttaaaaagcatgtatttccaaagcattgttcatgtttgtgca

SEQ ID NO: 399048 - DNA, 201 bp, Homo sapiens; identical to SEQ ID NO: 88355

SEQ ID NO: 399049 - DNA, 201 bp, Homo sapiens
ttttaatatcttgaatatagaggactacttatagaattcagtgaagtcaccaaaggttgaataattagctatttctgccctttactagttgttagatttawcattatcaacctttgcagtgaaaagtagaaaaaatacaaactgcaccaacagttgggctagtcatacattttacacagtgacaatatcccattaaaatgg

SEQ ID NO: 399050 - DNA, 201 bp, Homo sapiens
aatagcatttatcttctttgagccctataatgatccagctattaggctcacaaaaatgaccaggactcagttcctgtctttgaggagctcatagttttttwttattattattattattaattagcagtgcctttcattaaaataattgcataccaaatggaaacaaatatgttccttttcctctttcattcttctttagat

SEQ ID NO: 399051 - DNA, 201 bp, Homo sapiens
taggcaagctgcttaccctctctgactttcaattccctaatctgtaaaaagtaaagtctaagaattagaaacaaggtaaaacatagtgtctggcactctgyaagtgttaaataaatgttaattttatgttcgaccactgtttgctaaataattttgaaatgtatccttttttggttgattccctgggaattcagttaggaa

SEQ ID NO: 399052 - DNA, 201 bp, Homo sapiens
gataaaaggcaatcctgtactttctacctttaaaaactacagactttaaaaaaaattgaagacacacaagaaatggaaagatatttaatattaatggatcrgaaggatcaatattattaaaatgttcatactacccaaagcaatctacagattcaatgcaatcactatcaaaatactaatgacattcttcacagaaataga

SEQ ID NO: 399053 - DNA, 201 bp, Homo sapiens
tggtaatatgcagaatttgcaatataaaatacttcagggatttgactaattagtttaattcacctaaaccagctaatattttcctgtctatactcctaatwcataatgagtctgttaaatatcttctaaatcaaagtacattacatctttgacattacccagatcaaatagtataataaccttaaagcaaatagaaatcgt

SEQ ID NO: 399054 - DNA, 201 bp, Homo sapiens
agagagaagaatcggacacaataaaaaatgataaaagagatatcactactgatcccagagaaatacaaactaccatcagagaatactataaacacctctaygcaaataaactagaaaatccagaagaagtgaataaattcctggacacatacaccctcctaagactaaaccaagaagaagtcaaatccctaaatagaccaa

SEQ ID NO: 399055 - DNA, 201 bp, Homo sapiens
tctgttcatatgagaaactcagagagttatttggattccacataagtgagatcatatagtatttatctttctgtgtctggcttatttcacttagcttaatktcctccagattcatccacaaatggcaggattttgttctttattatggctgaatatttctttacatacatctgtgtgtgtgtgtatcacattttcttcatt

SEQ ID NO: 399056 - DNA, 201 bp, Homo sapiens
attgaggcagtaattagtagttgaccagacagattcacgggcaaattctaccagaggtacaaagtggagctgataccattccttctgaaattcattccaarcggtagaaaaagaaggactccttcctaattcattttatgaggccagcatcatcctgataccaaaacctggcagagacacaacaaaaaaagaaagcttcag

SEQ ID NO: 399057 - DNA, 201 bp, Homo sapiens
ttttatgtaattatatataaattatataataattgccatacgagtttttaaaaaaagtcctgggtagagagaattcaagtctggcattatctttcttcttmttcttattattattatactttaagttctgggatacatatgcacaatatgcaggtttgttacataggtatacacgtgccatggtgttttgctgtacccaac

SEQ ID NO: 399058 - DNA, 201 bp, Homo sapiens
gtatgatattggctttgggcttgtcatttgtgatgcttattattttgaggtatgttccttcaatacctattttattgggagtttttaacatgaatggatgytgaattttattgaaagcctttttctgcatctcttgagataatcatgtggtttttgtctttagttctgtttttgtgatgaatcacatttattgatttgtgt

SEQ ID NO: 399059 - DNA, 201 bp, Homo sapiens; identical to SEQ ID NO: 88359

SEQ ID NO: 399060 - DNA, 201 bp, Homo sapiens
actgtctaccccgtttgtgattagaaccaagcctgaggcttctggctctgaaaataaagacaaggtaagtgctatggacttgagatggtgatgggaactasaagagtggataattatttcagtaaattacatggtggctgtacttgtaattatttaggcaagagagcttaaagtgccatttagaagattactggtccctgg

SEQ ID NO: 399061 - DNA, 201 bp, Homo sapiens
accaatggaacagaacagaggcctcagaaataacaccacacatctacaaccatctgatctttgacaaacctgacaaaaacaaacaatgggaaaaggattcmctatttaataaacagtgttgggtaaactggctagttatatgcagaaaactgaaactggaccccttccttacaccttatataaaaattaactcgaggtgga

SEQ ID NO: 399062 - DNA, 201 bp, Homo sapiens
tctgattgctgcaggtggaaacaataggtgatgcctactgtgttgcagcagggctccacagaaaaagcctctgccatgctaaacccattgctctgatggcyttgaagatgatggaactttcagaagaggtgctgacacctgatggaagaccgattcaggtaaccctcccaacaatctagtttgagtagtaagtgcaccatt

SEQ ID NO: 399063 - DNA, 201 bp, Homo sapiens
tgtttgttttttacagagttaaataaaatccagaagctgttcaggagcaagatgcttctggctgggatgctgagcatggttaaatgatgatgatgatgatratatcagctaccatttaacctccttgtttgtactagaaacttatctattgatgtgttttttttatatctcattcaattctcataacaattatatgaaagt

SEQ ID NO: 399064 - DNA, 201 bp, Homo sapiens
ataaacctaactttcctgctgaaggagaatggatgggattctccagcagcttattgcaggtggctaactatatgaattgtggtggaggaggctgctgcctrctgattttctaaggacttaggcactttatctccttattcagctgcattcttgggttgcgggtgagggaaaaatggaaggaataaaatattaaattaagtt

SEQ ID NO: 399065 - DNA, 201 bp, Homo sapiens
tagttcaacctctgatatattatggattaaggttacgaaaatgttaagtgggggcatttacttttagtaatccttattctctctctctgtctttattcctrtatcagaacctcatgccacaaaaatctgctgtaagactctcccagataaattgtactatgtacattttaaatacctaatgtaaaattattaattcaaaag

SEQ ID NO: 399066 - DNA, 201 bp, Homo sapiens
ccccatactgggtttgccttggaaattccagttaagagtcgttatgcatgcaaggaagttaaaatgtttttagaagctggaaaatagtaagtgatatccartcagtaccttcttttcaagcatcataacattaaaattccggtgtgaatatatgcacatgcttacttatataacttgtgcaggacaacgtttgacagatat

SEQ ID NO: 399067 - DNA, 201 bp, Homo sapiens
ttattttatttcacataacagtcccttactgtctgaatttgaagataagaaacatttttaacaataagaaacattttgttggccaggcgcggtggctcackcctgtaatcccagcactttgggaggccgaggcaggcagatcacctgaggccgcgagtttgagagtagcctgggaaacatggcaaaaccccgtctctacta

SEQ ID NO: 399068 - DNA, 201 bp, Homo sapiens
ggctgactgctgtgacagtcatggctgtggggccctggatcacctgcttcccatcctactctgcctttttgttagtctcctcaaagaacggggaaaaaaakatcatttaagtttaaaaatatcttttattataaagttgactcttttaactcaatttatcactgcttgctagaccatccttgaaaaccttgttaaaatgta

SEQ ID NO: 399069 - DNA, 201 bp, Homo sapiens
tcaaaaagtttcagattttggagcattttggactttgggattttgaatgctctgctataccaggtacagagtaaaacattaaattctttttatcttaaagrtaatctttgacaacactacacatttttgcctcctgaattcattcttattttgtgtctggtagaaatttcccctattagatattaagccctgtatatgggc

SEQ ID NO: 399070 - DNA, 201 bp, Homo sapiens
gtgtgtgatgccctgtctcaaagatgcccaaaatctccttcagctgataaacaacttcagcaaagtctcaggatacaaaatcaatgtgcaaaaatcacaarcattcctatataccagtaatagacagccaaatcatgagtgaactcccattcacaattgctacaaagagaataaaatacccaggaatacaacttacaaggc

SEQ ID NO: 399071 - DNA, 201 bp, Homo sapiens
tgtacatctcctacatctgaggcctacattgtttttctattggacagcattgcaataaaggacactagagttaaagagggcatgctctctgctccaagacygtgcagctagactaactataatatcataaattggagccaggcttggtggctcatgcttgtaatcccagcactttgggaggccaagacaggtggatcacct

SEQ ID NO: 399072 - DNA, 201 bp, Homo sapiens
aaaaatgtaacacatttaagtcagaatgggagcaatgcttatcatgggattattttattgggagagggctagtaaggaggatagaggaaatgacctttggrgcttattcctcacaatattttcttagtatcagggatcctgaaatactgtgaaatcatttataagatgccactgattccacaatctttagctggtatggaa

SEQ ID NO: 399073 - DNA, 201 bp, Homo sapiens
atgactgtctaaatcatagtcatatgattaaaaattggctgtgtacatgggaaattcccaaatttaagctaaggtacataattaattcaattaatcacatkattaattgaattatgtacctctgcttaaatgtgggaatcatatatgtatatctatatacatatgattactaagtaatcattacttaataagtaatcatat

SEQ ID NO: 399074 - DNA, 201 bp, Homo sapiens
acacacacacacacacacacacatttaaatttgtatacagtaagtttagctcttctgctgtaaagttctatgggtattgaaaaatgcataatgtcatatawctgccattataacatcataccaaatacttgcactcttctaaaaaaaatcccgtgtttcacttgttcaaccgcatgtcacctccaaatccctggcaagtac

SEQ ID NO: 399075 - DNA, 201 bp, Homo sapiens
tgttttctggttttgtcattctaaatacttttcctgatattatgactgaatttagaaactgcttaaaaatttattagtgatagcaatgattgcccatgatwctactgtaataggtagactctttctcttttgcttagtaacaataagttcctggaatgaagttattcagcatttattcactgggaaatgaaatattttagg

SEQ ID NO: 399076 - DNA, 201 bp, Homo sapiens
tgggtcatgtcaactctgtgttttttctgaggatactgataaggttcattaaaagtgtatttgaaaggtgccataaaatactattaaatcattctttcttytttgcctgttttacaaacagaaaagaaactcagtatagtttgtctcaagggagattactatattgttacctattcacatccacagtcatacactgtgact

SEQ ID NO: 399077 - DNA, 201 bp, Homo sapiens
gtgctgtgtgtatcaaataagaatatagactttcagaatgtgaaaggtaagagggagcctcaaaggcatctagtgcaaaaggatacactttgaagtcagtwctgttttggagtgatttatttacttactgggtgtgtaatcttgtgacacttgcttaacctccctgagctgcagcttcttcatctctgtaaaattgagaca

SEQ ID NO: 399078 - DNA, 201 bp, Homo sapiens
tttctcttaaattgatgttatcattcagcttccattaagaaatgacttctgcatccatttgccttgtgtgtatatgttcacaaatgagtcaatcatatttyattccttaatttctgtagtgagaaaaactgtccatcctaaaggaagaacttgaagaatttcttgctctcctaatggtttttcactaaatccaattctact

SEQ ID NO: 399079 - DNA, 201 bp, Homo sapiens
aaatttgggttaaaatggatataaataagttttgatgcatttttcaagctttgaaatgggtaacatgactttcaagttggaaaaagataaatcagttgaarcaaaatcgctgtgagactgctgatttagctgtgagtatgtgttgggatggagggcatgcacatgcataggtgcacatgtgttggagtctatgaaagctgt

SEQ ID NO: 399080 - DNA, 201 bp, Homo sapiens
catctataaaatgggagcagtattataggtctcacatatttgttgcagttgacacaaaaaacttgttcagcaaatgattgtttggaatttgtctattcatmattcaaaataacgatatatatgtggaaaattgttgtaaattaatcaacagtatcagcaattgactccatctggagttattcatatgaaagaagaccaaga

SEQ ID NO: 399081 - DNA, 201 bp, Homo sapiens
acatccccttcgatattagcttagacagattgctctgttttccaagtatttccaagaattatgaagttcactctagaccaatttaaatttttactctcatrtctagtctgactctaatgttgctttctctgtctgggtcaggacttggcctaagagacttggaatacaggacagagtgtatgatgtgggttttcactcctc

SEQ ID NO: 399082 - DNA, 201 bp, Homo sapiens
tccttaggaattaaatagtgttgagggaatcttaaaagtttatgggaaaaaataaaagatccacattcagacatctttgttttatatctcttttagctcaracagccctaagtctacctattaagctatttataagaataaactaagtctctggtgctgttttcttcctgcttctgcttgtgtttttaacattcctatgtc

SEQ ID NO: 399083 - DNA, 201 bp, Homo sapiens
acatactcacgtgcactaccgctgttaccaccatcatttttgctttggaatggtgatgatttaagaacttaaaaccaaaggcttaccagtatccagtccgyattttctacattatctacatttccccattaatgagccctcttgaatttaaattaaaatgtaaaggaacctgaatatgcatttattcattcaaatatctat

SEQ ID NO: 399084 - DNA, 201 bp, Homo sapiens
aatttatatatattatataaaatatataaatttatatatatatttatataatatatataaatatatataaatataaaaatatataaatatatataaatttwtatatataaattaatatatttatatatattatatacaatatagtatacaattattaataactatatataatatacatgtatattatatatagttatatat

SEQ ID NO: 399085 - DNA, 201 bp, Homo sapiens
tttaatgctatgaaaggaacaaataaggttttatttaagaataactggagggagaaagtggagaaaaatatacttttcaagttagaccatattacatacaratgaaatctgatttaacctgtaacataaccagatttatgtagcaaattaaacataaattttttcatatacttaatctatttatttgtgtattcaatagca

SEQ ID NO: 399086 - DNA, 201 bp, Homo sapiens
ggattttgttctttattatggctgaatatttctttacatacatctgtgtgtgtgtgtatcacattttcttcatttatctgttgatagacacaggttgatgwtacatcttggctattttgaataatgctgcaatgaacatggaagtgcagatatctcttcaaaatcctgatttcatttcctttggatatgtatccagaagtg

SEQ ID NO: 399087 - DNA, 201 bp, Homo sapiens
aaagtttttcactaaaattttatttttatcaaggttttcttttatcttcattgttctgttgtatataattttaatttctctatgattttgctgatctattygttacatagcttggtactgagagacatgtattagtgtttcctactataattatagttgtatagatttcttctttcattctttttttttttttgtgagatg

SEQ ID NO: 399088 - DNA, 201 bp, Homo sapiens
atttaaaataaaatttaattcctgattttgcttataggttttcttgttgatatggctttgatttaaagaatgttgtgtgttctcaagaaaaaaatcaattrtttgaatacacgtgattttgtaattttatgtaacattaaaaaactacttacttattgaagacagtttcctaagagatgacatgttctggccgggcgtggt

SEQ ID NO: 399089 - DNA, 201 bp, Homo sapiens
gccagaataagaggaaggaaatagtctctgatggttacttttataagttaaatttgaatgactggctttttgctggatgaaaagaatgtatccagagaatkgttttcagaataagcaatttaaaaataattgtgatgatcaaataaatgcaacagctctatatactttccatgccatagttgttttctattatgaaaaggg

SEQ ID NO: 399090 - DNA, 201 bp, Homo sapiens
tttgtttttgtttttgtttgtagccttgtcagtaaatccttaaacctgtttccatttgaattgctaaatcattatgtacaatgagcttgggtgtgtttaaytgagctcaacaaactttctttggatcattgaatgcctactgtgccagattctcagcatgtgtggtgtgtacgtgtgtgcatgtgcacatttggactggtt

SEQ ID NO: 399091 - DNA, 201 bp, Homo sapiens
aaagcatttaatagaactcttatgggcatcctgatactgtactcaggtccagggatataaagttaagtaaatatctagtaggcggagaggagtataaacayacacacacacattaacatgatacatactgtgagagtgatagaaatttgtccatcaggtatggttgtaagaaagttacagatacccccttgccaaacaaaa

SEQ ID NO: 399092 - DNA, 201 bp, Homo sapiens
tctttttttgaacaaacctctacttcagaaacaaggtaatcattaaacaatatggggttagatcctctggacaagtgggatttcctttcattccagtcacwtggcaaggatcccatgccccagtcctgtaggagcaggatatcacctataggttcttcatctggtcctcagactgtagccttccagaacctgataagattg

SEQ ID NO: 399093 - DNA, 201 bp, Homo sapiens
tggcaacacagggacataaacagtggcaagttgctgtgtatgtctgaagtgaaggataaaaagtagagggcctcttaatgtacccaagaccatagtttttsctgctcttctgttactagtaagtatccatgaaagtctgggctatggttttgtgtgtgtgtgtgtttgtgtttcctggccaaccttttggatattcttgtg

SEQ ID NO: 399094 - DNA, 201 bp, Homo sapiens
gagagaaagagagaaaggtctcgttctcgctttgtcacccagtctggagtgcagtggtgaaatcatagcccactgcagccttgatctcctgggctctagcrattccaagtagctgggactataggtaaggtccaccttacctggataatttttatttttgtaaagattgaggtctcactgttgcccaggctggtcttgaac

SEQ ID NO: 399095 - DNA, 201 bp, Homo sapiens
ctcctgtgtacccctgttgtagcccaaccataatgtaatttactgttttgtaggggcccatgagagaaagtcatgtgtctttttgttttcatatccttagrtgtggcacaagtgcaaccttaaaaggttagtaatattcaccaaacaaatacttagatgaatgcttaatttctatgaaacaatgcttattctccaggtgtc

SEQ ID NO: 399096 - DNA, 201 bp, Homo sapiens
ttttgagctgtgactaagagctgagatagtaatcagtttattcctatgtgtttttattaacaaaagtcccttactgatgactgtctaaatcatagtcataygattaaaaattggctgtgtacatgggaaattcccaaatttaagctaaggtacataattaattcaattaatcacatgattaattgaattatgtacctctgc

SEQ ID NO: 399097 - DNA, 201 bp, Homo sapiens
aaacatataaggagaaaaacctaaggggtcagaaaaaactacataggcattatataaaattactgttaagatactgatcccagttatcctcatttctcacrtttatcaattaggagtatttaaatttgcttttaatctcctagataatgcatatagtggcagttttcataagtcagtgttctattgtaacagtaatatgga

SEQ ID NO: 399098 - DNA, 201 bp, Homo sapiens
ggctctagcagttagcgatcaggggatttaaagctgggttttggtctctgtgaggacctgtctacttctggttcacctctatgttttggtattacccttakacctgtggtcatgttcccatctcaaagtggggagggctttctaaggtctttgccctaggaattcttaggctccagtttatgttctcttggccctggctgt

SEQ ID NO: 399099 - DNA, 201 bp, Homo sapiens
tgaatgcttaatttctatgaaacaatgcttattctccaggtgtcaggcattatgccagtgatagatacgcagacataaatagggcaaggtccttgtcctcragaaatgccatctgaggtggggtgggatagcagatgagagacaacagggccagatcatgaaggaacagatcgtatttcatttacagctaaaggatgccag

SEQ ID NO: 399100 - DNA, 201 bp, Homo sapiens
gcaatagagtttaggtagaagctgtctttaatatgcaggccaaaatcttttgtatgtgttatagtcctctttggcacataaattccctcatttttcctcakatcatcctcaagggggggatcttgtgatcacatgtgatcctgcttcttattacgatagaatacattgtgcacacttatttatttttcattgtaatatcca

SEQ ID NO: 399101 - DNA, 201 bp, Homo sapiens
tcattcagttttatctgtctagctgtatgcactatgtggaagtgaatgcaagtcaaattcatgaagtaattatctagattaagaactaaaaggattcagtrcacttgattgttgacattttatttaatggtaaaatctatcatcttcatgataattgcttgtgactgcaaaatgaggaaaggttacatgtatttgtcttct

SEQ ID NO: 399102 - DNA, 201 bp, Homo sapiens
cctactcccactgagaaaaaaaggttcctctcaggccgggcatggtggctgacacctgtaatcacagcacattgttgggaggccaaggcacgtgggtcacstgaggtgaggagtttgagaccagccagaccaacatggtaaaactccgtctctactaaaaaatacaaaaattagccggacatggtggtgggtgcctgtaat

SEQ ID NO: 399103 - DNA, 201 bp, Homo sapiens
tactcccactgagaaaaaaaggttcctctcaggccgggcatggtggctgacacctgtaatcacagcacattgttgggaggccaaggcacgtgggtcacctraggtgaggagtttgagaccagccagaccaacatggtaaaactccgtctctactaaaaaatacaaaaattagccggacatggtggtgggtgcctgtaatcc

SEQ ID NO: 399104 - DNA, 201 bp, Homo sapiens
aattccctaatctgtaaaaagtaaagtctaagaattagaaacaaggtaaaacatagtgtctggcactctgtaagtgttaaataaatgttaattttatgttygaccactgtttgctaaataattttgaaatgtatccttttttggttgattccctgggaattcagttaggaagagaggaagtcaaattgtctctgtttgtag

SEQ ID NO: 399105 - DNA, 201 bp, Homo sapiens
ccactttgagtgtaccatctgtttcttgctgggatactgagtgataaaactgataaatttttgttctttttttgtacttgttttaaaaatcaaaatgtgcrtctacaatgaaaagcaatgacagtttgagttaccaaagtgctaagggatttgctactaggatgggtaccaacaatgttagtaaagtcagtggagctgccc

SEQ ID NO: 399106 - DNA, 201 bp, Homo sapiens
ttatctaggcaaaatactgacagtcctgttttcgtgggggataattattttatattatagttgttcctaatttcaatgatcatctctagtgataatgttawtgaacaaccctggagtgagatgtcagtatttgactgtggctgtttgcaaactctgctgtgattataaacagtagtctaattgcttaatttattgatgttt

SEQ ID NO: 399107 - DNA, 201 bp, Homo sapiens
ggcctgcttcctcagtctttctccccagctgttgagggctgtattccctgtccaagctcctcctcctttccaaattagttccaatcagttcccctggcctrtccccaccactcggtcagctcgctcagtacttctaaacctcatgtgtctgctccgtatctctgttcttcagagccagtctttctgtatcttcagtctagt

SEQ ID NO: 399108 - DNA, 201 bp, Homo sapiens
gcaaccagcagtttaaaaaaccgtgatacataacatgtccttttggcaagtttgaacagcaatgtgtttggtggtttatgttactcgctggaaaacaagcrtttttgaaaccattatagtgttgaaagaaagtataacaaataatcttagattacagttgtctgtgattattccaaatctgaattttccattcctgtgtta

SEQ ID NO: 399109 - DNA, 201 bp, Homo sapiens
ggaaactgagaaaaggaatataggcctgtgcctagaaagaagcggggaatgaattctgatacatgtacattgtcgtggagccatagtcatggatgagccaraactaactagtagttttcacaaagatattctggttttaatttaaaaaccttaaaaataagttctatgccttttttcctgtttacaaaaaaatgttcctag

SEQ ID NO: 399110 - DNA, 201 bp, Homo sapiens
cattaaataaaagcatgttaaataacatttatattgtcaaatcttcctattgccttgaatattccattaaagttagacttttcatggctttagtcttcaakaaatttaaatgtatgttagatgtcctctttgaaaaagtagaagtaagttctctattttaaaggtattccatccaaaaataaaataatttgtttttaaatt

SEQ ID NO: 399111 - DNA, 201 bp, Homo sapiens
atataatttgatcaaggttatgtagctagccaattgcagaactaaatttgaatccagatatatctgtttggaaaaaagaaaaaagctttgctttttttcaktataggaaactggagaatgcccagagtagaattttattacctgagtacttaataacaagagttacttctcacctagtgcttactacgtgctcagcattat

SEQ ID NO: 399112 - DNA, 201 bp, Homo sapiens
cactgccccccactctcgggacccctcagtctccatttctctctcaatttcctaaaagtgacatcaattttccatgaattacctaagaacgacttaccaamaaaaattacattgttatgaataatgtacgcaaaactgttgatactggctaacttaggggaaagagctttttccatttttaatcttacagttttatatctg

SEQ ID NO: 399113 - DNA, 201 bp, Homo sapiens
agacagaaactctaacaaatattaaaatatacattttagtacatatttaatatgtaaaatgtttgataaatactagacacttagttcatgtcatgtgtttyccttttttcccctgcaagcattgctgtattacatcacagcaaaaaaaaaaaaatcaatgttcatactattactcttagttttgagaaatgtttatgtctg

SEQ ID NO: 399114 - DNA, 201 bp, Homo sapiens
ttcaaatgttcatacaaaaataccaagccttaacacaggattggattcaggtttaaagttatcagttcactgacaatcttggttcacagtttggtgcctgwtaattgaattgtagatgtaagattatttataattactgcactcttacccttcattttaatctgaattcattaattttacataatgtcagtagtaggtcaa

SEQ ID NO: 399115 - DNA, 201 bp, Homo sapiens
caccacacctggctaattttttgtatttttagtagagacggggtttcatctttttagccaggatggtctccatctcctgacctcgtgatctgccctcctcrgcctcccaaagtgctgggattataagcctgagccactgcgccctgcctcagtcccatgttctatatattaactttctacatatgtatccatgaacaatat

SEQ ID NO: 399116 - DNA, 201 bp, Homo sapiens
tgatgcagcaatgatttggcactgaaaagaaacttaaggtaatggttctcaaaatttgagaaatctgtgaacttctttgaaaaggtgataggtactatggrtgcaacataggcatatctgtgctcataacttcagtggggctgaggaggatgccttgaagcccaccattggattccttgggacttatgaattttgcttagc

SEQ ID NO: 399117 - DNA, 201 bp, Homo sapiens
cacattattcaaaccatagtaattttatttccctttattattttattagctaggacttcagtacaatatttaaaaggagtagtgagatggtacattcttgycttgctcctcatcttagtgggaaagctagttttttaccattaagaataatgttagctgtagagattttgtagatattctttattaagttgatgaagttcc

SEQ ID NO: 399118 - DNA, 201 bp, Homo sapiens
ggaggattaaatgacataatccatgtaaaattcttagcatctttgaccccagggataagcactgcataaatgttcattattacttctactgctattattakttgtgttcctttccacctataacagtctccgtatttattcccctattcacttactgccttatagatgaaagcaccaggtatcagtaggtttgataatttt

SEQ ID NO: 399119 - DNA, 201 bp, Homo sapiens
tgttgtgggtgtttcagttgttgtagagctttaaggagctaccagatgggggagttggggtgtaggaaaaagacttcccacagtagtttagagaacaaatrgaaatgagagctctaggttaattcatttactgaggagttatagcatataaagatttgcaggtttaggaagcatcagttatttgctaagtattgctcaaag

SEQ ID NO: 399120 - DNA, 201 bp, Homo sapiens
tttggcaatgctttttacacaaacaggtaattaggaacactgaaaagacttaaaagatcctcaatctgaagtgataacgctcagagtatgtattggataayggcagtaagacagcagtccccaccaattcttccttctagcttcaatccccatatcttcctcccacctaattccttcccaggttttaaaaagaataaaaga

SEQ ID NO: 399121 - DNA, 201 bp, Homo sapiens
atacttcctaagcgattttagtgtacaaagtctagtttctgaatataagttgtttttccttttatttttaagaaacctgtgattttttttccataaatgtrtatatcttttttcactgaattctttttaaatgactggagcaaaggagtccttgaaaaatgtgacctgagtaccgtgtttagtagattgaaaattcttcag

SEQ ID NO: 399122 - DNA, 201 bp, Homo sapiens
cctctatttccaataatttattggtgtctaatgtaataccataacctgttctcccaagctccatttctgtggttattttctccttttccttcttccttctcctttgatacacaataccatcacatgttgctgatctttccactgcactgccttttttgttcaataaaaatgtaaggtccccagctcacatgtatgcttcag

SEQ ID NO: 399123 - DNA, 201 bp, Homo sapiens
aacctgtgattttttttccataaatgtgtatatcttttttcactgaattctttttaaatgactggagcaaaggagtccttgaaaaatgtgacctgagtacygtgtttagtagattgaaaattcttcaggggcataagaaattaagaatgtggttttcttccaagatcaagaagctaaggtcatctaatggagaagttcatg

SEQ ID NO: 399124 - DNA, 201 bp, Homo sapiens
ctcctctatttccaataatttattggtgtctaatgtaataccataacctgttctcccaagctccatttctgtggttattttctccttttccttcttccttctcctttgatacacaataccatcacatgttgctgatctttccactgcactgccttttttgttcaataaaaatgtaaggtccccagctcacatgtatgcttc

SEQ ID NO: 399125 - DNA, 201 bp, Homo sapiens
ctctgcctcccaggttcaagcgattctcctgcctcagccccccaagtagctgggattacaggtgcccgccaccatgactggctaatttttgtgttttttastagagacgaggttttaccatgtcggtcaggctggtctcaaactcctgacgtcaggcaatctgcctgcttcagcctcccaaattgctgggattacaggcgt

SEQ ID NO: 399126 - DNA, 201 bp, Homo sapiens
cttacctcctctatttccaataatttattggtgtctaatgtaataccataacctgttctcccaagctccatttctgtggttattttctccttttccttcttccttctcctttgatacacaataccatcacatgttgctgatctttccactgcactgccttttttgttcaataaaaatgtaaggtccccagctcacatgtat

SEQ ID NO: 399127 - DNA, 201 bp, Homo sapiens
atgactggctaatttttgtgttttttagtagagacgaggttttaccatgtcggtcaggctggtctcaaactcctgacgtcaggcaatctgcctgcttcagsctcccaaattgctgggattacaggcgtgaaccaccacgcccagcctgatctgctttttatgtgtcaggcactgtgggaggatgcagtgttatcacaataa

SEQ ID NO: 399128 - DNA, 201 bp, Homo sapiens
gaacccaggaggtggagcttgcagtgagctgagattgcaccactgcactccagcctgggtgacagagcgagactccgtctcaaaaaaaaaaaaaaaaaaaagcatttatgttgatgattgatgagacacagaaagatatttgctatactagaagtttacagagtttctcatatcctcctcaactttcttgttttcagtact

SEQ ID NO: 399129 - DNA, 201 bp, Homo sapiens
tacattatcattatgcatcgttcatctctaataatgaaaaaaaagggttaagaaagaggattatcaaaatgtttaacttgccaagattgccaatataatayaataaataaatgatgggtcagattccaaagcctatgacaccttccaaaaagctaacacatcttttggcgtgcataagcttaaaatgccctccaccccagc

SEQ ID NO: 399130 - DNA, 201 bp, Homo sapiens
aaaatgtaaggtcaaaaggataagggtggggaaagcttgtacaagataaaagttaaattctttgggaaggcaaccattccgatgatttaaaaagcatttaygtaacatggtgaaaccctgtctctactaaaaatacaaaaattagccgggtgtggtggtgggtgcctgtagtcccagctactcaggaggctgaggcaggag

SEQ ID NO: 399131 - DNA, 201 bp, Homo sapiens
tgtttaacttgccaagattgccaatataatacaataaataaatgatgggtcagattccaaagcctatgacaccttccaaaaagctaacacatcttttggcrtgcataagcttaaaatgccctccaccccagcaccatgctgctgcaagggcttctggaatgaccaacgcccaagacaaagtcgtttgcctttggagtccca

SEQ ID NO: 399132 - DNA, 201 bp, Homo sapiens
gaaaataaggttttgcccagcgtgccattttttatcacgtgggtgcctttacactcctttttctacgatgctttctccaagttcccttggaatattctctcatcccttcaaatgacagagcttcctatgccagataatttttttattgtaccaccaatgtcaacctcagtgacattggccataaactacaaaatcatggct

SEQ ID NO: 399133 - DNA, 201 bp, Homo sapiens
gcaattatacaatatagacgtctttattactaactaaaatatcacagaatgatttgattaatgctataaatgtgattagtagaataagtgtatccttagtsccattggttagatagccaaagactggatgtcagagaaaggtttccaattcttttctacatatgagaatcaaaatcaaattatagaaaaaagtcacaattg

SEQ ID NO: 399134 - DNA, 201 bp, Homo sapiens
ggaaaataaggttttgcccagcgtgccattttttatcacgtgggtgcctttacactcctttttctacgatgctttctccaagttcccttggaatattctctcatcccttcaaatgacagagcttcctatgccagataatttttttattgtaccaccaatgtcaacctcagtgacattggccataaactacaaaatcatggc

SEQ ID NO: 399135 - DNA, 201 bp, Homo sapiens
gcggcaggcgcctgtagtccgagctatttgggaggctgaggcaggagaatggcgtgaacccgggaggtggagcttgcagtgagccaagattgcgccactgyactccagcgtgggcgacagagcgagactccatctcaaaacaaacaaacaaaaaaaacccacatcttttgattcttaaaggacagtgactatttgcacaac

SEQ ID NO: 399136 - DNA, 201 bp, Homo sapiens
cgaggcgggcagatcacgaggtcaggagatcgagaccatcctggctaacacggtgaaactccatctctactaaaaatacaaaaaaaatagctgagcatggyggcaggcgcctgtagtccgagctatttgggaggctgaggcaggagaatggcgtgaacccgggaggtggagcttgcagtgagccaagattgcgccactgta

SEQ ID NO: 399137 - DNA, 201 bp, Homo sapiens
agtaactttcgcaaagtgttgcctactacagattctgaaaagtatcaaggttaaaaaatttatttaacttttcaaacctagaatttctcacatttattatttcatgggccgggcgcggtggcttacgcctgtaatcccagcactttggcaggccgaggcgggcagatcacgaggtcaggagatcgagaccatcctggctaa

SEQ ID NO: 399138 - DNA, 201 bp, Homo sapiens
aggaaatccttatgtattaggaatccgtgatacagacagtgctcaggaatttcagaaacagcttactaaagctaaaagaataatgatcttagggaacggtkgtatcgcacttgagttagtgtatgaaattgaaggctgtgaagtgatttgggccattaaagataaagctatagggaatactttcttcgatgcaggagcagc

SEQ ID NO: 399139 - DNA, 201 bp, Homo sapiens
attttccatgaattacctaagaacgacttaccaacaaaaattacattgttatgaataatgtacgcaaaactgttgatactggctaacttaggggaaagagstttttccatttttaatcttacagttttatatctgttcacattttccaaatatacgtatgaattatttatgtattgccttttagtatccatagaaattata

SEQ ID NO: 399140 - DNA, 201 bp, Homo sapiens
actgaatactgtaggcagttgtaacatgatggtaagtatttatgtatccaaacaagaaaaggtatagtgaaaatacagtattataatcttaagggattgcyattgtatatgtgagcccatcattatccaaaatgtcattatgtgacacatgactgtatatgattctactgggcatacagagacaaaaatttatgaaataat

SEQ ID NO: 399141 - DNA, 201 bp, Homo sapiens
aagtgcctgtcctttagccaaagagaaaatacttttgtttttgccccagtttttttgtcctggtagtggggctaaagatggaaattcgccatttgtttctrtaatagatactgataaggaccaccaaaatgatggaaaatgtgcaagcttcaaagcaaaagcctacaagaagggagtataaactgaaaaagttacattaga

SEQ ID NO: 399142 - DNA, 201 bp, Homo sapiens
ccttccagggtttcaggtataatccaagaatctcattttcagcttatcttccttgctgctaaggtaaagctaaatctccaaaccacagtgcagagactggyatttaccctcaagctatcctatcttaagtatgcgctttcagctcatagttaagcttttagctcaacgtttatgcttttatttttgcttaggccccttgga

SEQ ID NO: 399143 - DNA, 201 bp, Homo sapiens
ctgaaccaaaaataaaagtttaaaaaaatgtagatactagtctgtttcatcatttactactataaaatatatacaaatatattgcaaaaagttgaaatttrtaaaaaaacttatgcacaaaaacactgactctacccggcactaccacttgcagttgagagaaatgtaaacaaatgtaaagatgtagtattacatcataac

SEQ ID NO: 399144 - DNA, 201 bp, Homo sapiens
cttttgcaagtgacaaaataaataagctggcataaacaattaaaggaatccactgactcaaataacagaagcccagaagtaggactagctctctaagaggmtagatatagctgcaaaattgatattaccatgaacttggcatctctgttgttctctttggtttcccttcccagcattggccttatcctcaggctctacaag

SEQ ID NO: 399145 - DNA, 201 bp, Homo sapiens
gcaagcagtttagggagtgtgctgagtagagcagtcaggaaatatttagtgtagaaaagcatgaacagtaagatggagaagggatggaaggtttctggtgytggatttaataattgtgtaactagtattttctgagtttcaattggaatatgctaactcttctgtgtagatgaagtaggtaaaaccagattaaatctgatt

SEQ ID NO: 399146 - DNA, 201 bp, Homo sapiens
cagtctcatctttaaaaaaactttttaaaatcaggacaaaacatacaaaagaacagttttcatgacagtggacattagacaatggaagatagtgattcctkagagataagaaacaaattaaatgagccctatgattgtcctagctaaatgccttgagaggcatccaggctgtggctcagggaggggcaaaccaggagatac

SEQ ID NO: 399147 - DNA, 201 bp, Homo sapiens
aaaatatgttgaatgtgattaataacaaattagacattgcaaaagaaaatattataaatttgaagacatagcaatagaaattatcccaaataaatggagamaattattttaaatgaatagatcatcagtggactttggaagtaattcaagctcctaacatatgtgtaattggaatctctgagagggagaggtagacagaaa

SEQ ID NO: 399148 - DNA, 201 bp, Homo sapiens
aagtaactttcgcaaagtgttgcctactacagattctgaaaagtatcaaggttaaaaaatttatttaacttttcaaacctagaatttctcacatttattatttcatgggccgggcgcggtggcttacgcctgtaatcccagcactttggcaggccgaggcgggcagatcacgaggtcaggagatcgagaccatcctggcta

SEQ ID NO: 399149 - DNA, 201 bp, Homo sapiens
cactggcaagcaaattcgagtcgggaagtcaccctcggcgcatcaatgtcagcccaaccacttaccagtaagtgttctctggcctcctccttcctgtcttkgcctttgttttgggctgctatgctgtcatctgtgagtccctgttctttttcttgatcctgtcattctccaagatattatgagtagaactgcccaaaccca

SEQ ID NO: 399150 - DNA, 201 bp, Homo sapiens
aaagtaactttcgcaaagtgttgcctactacagattctgaaaagtatcaaggttaaaaaatttatttaacttttcaaacctagaatttctcacatttattatttcatgggccgggcgcggtggcttacgcctgtaatcccagcactttggcaggccgaggcgggcagatcacgaggtcaggagatcgagaccatcctggct

SEQ ID NO: 399151 - DNA, 201 bp, Homo sapiens
tggtaaagtaactttcgcaaagtgttgcctactacagattctgaaaagtatcaaggttaaaaaatttatttaacttttcaaacctagaatttctcacatttattatttcatgggccgggcgcggtggcttacgcctgtaatcccagcactttggcaggccgaggcgggcagatcacgaggtcaggagatcgagaccatcct

SEQ ID NO: 399152 - DNA, 201 bp, Homo sapiens
gtgtacatatacacagccagctagatgttaccctataggtagagcttcctagtgccctatctcaggatccttttgcatcttatgtttgtttcaggtttattgttttgacagttgtcacttttaagcttcttttctcttttcatagagaaagagctttcagtctcctaagaggatagctctattatcataatcaccttttag

SEQ ID NO: 399153 - DNA, 201 bp, Homo sapiens
tgtgtacatatacacagccagctagatgttaccctataggtagagcttcctagtgccctatctcaggatccttttgcatcttatgtttgtttcaggtttattgttttgacagttgtcacttttaagcttcttttctcttttcatagagaaagagctttcagtctcctaagaggatagctctattatcataatcacctttta

SEQ ID NO: 399154 - DNA, 201 bp, Homo sapiens
tatgtgtacatatacacagccagctagatgttaccctataggtagagcttcctagtgccctatctcaggatccttttgcatcttatgtttgtttcaggtttattgttttgacagttgtcacttttaagcttcttttctcttttcatagagaaagagctttcagtctcctaagaggatagctctattatcataatcaccttt

SEQ ID NO: 399155 - DNA, 201 bp, Homo sapiens
atttcgcaagagaaaagaaagaaatattatagaaaaaaaaaaggaaatcgcatgtctaattaagagcttaatttgtgatgaaaatacataattttttttttacatccactatggtgctaaaacaactacactggaaaaatcccttagttatggggtaattggtatgaatcaaatatctttcttatttagaaaccatttata

SEQ ID NO: 399156 - DNA, 201 bp, Homo sapiens
gacaagtaggatccatcaagtgtgtttctattcttgtaatccagggacaccttgaaaagatttcgcaagagaaaagaaagaaatattatagaaaaaaaaaaggaaatcgcatgtctaattaagagcttaatttgtgatgaaaatacataattttttttttacatccactatggtgctaaaacaactacactggaaaaatcc

SEQ ID NO: 399157 - DNA, 201 bp, Homo sapiens
tcaagacactaccatgtgcttaatacaaggtactaaataaactgaaatttattttataatttaattctacaaataaatccactctggtagcatttggggamtataatattgactttatattttaaaataaaaatatgaaagtttattttattttattttattttgagaaaatactggcaaattagaaaatactggcaaatg

SEQ ID NO: 399158 - DNA, 201 bp, Homo sapiens
tctccttatgctaattttgttttcttcttagttacagggatgcagaaaagaatttccacaatatctctaacagatgctcctatgcagaccactccaacaargaagaaattgaagatgtctcaggaattcttcagtgtactgctaatatactcggtatattaactatatatatttatatggatgagagagaatgaaagagag

SEQ ID NO: 399159 - DNA, 201 bp, Homo sapiens
  misc_feature (1)...(201): n = A,T,C or G
ttctttgttcactcagtaaaacaggttttatatggctcttcaaataactcctaaaacaaacttattataagacatgacaagtaaaccttcctgcttattanttttcataagcacatcttcaaaaatgtccaaaaaaatgtaaggtcaaaaggataagggtggggaaagcttgtacaagataaaagttaaattctttgggaa

SEQ ID NO: 399160 - DNA, 201 bp, Homo sapiens
  misc_feature (1)...(201): n = A,T,C or G
tctttgttcactcagtaaaacaggttttatatggctcttcaaataactcctaaaacaaacttattataagacatgacaagtaaaccttcctgcttattatntttcataagcacatcttcaaaaatgtccaaaaaaatgtaaggtcaaaaggataagggtggggaaagcttgtacaagataaaagttaaattctttgggaag

SEQ ID NO: 399161 - DNA, 201 bp, Homo sapiens
atttctccttatgctaattttgttttcttcttagttacagggatgcagaaaagaatttccacaatatctctaacagatgctcctatgcagaccactccaayaaagaagaaattgaagatgtctcaggaattcttcagtgtactgctaatatactcggtatattaactatatatatttatatggatgagagagaatgaaaga

SEQ ID NO: 399162 - DNA, 201 bp, Homo sapiens
aattgaagaaaacattcctaggaaatactatcataattgaaattgggaagttctgggtaattgccgagtgcctcatattagtttctgtggggaaaatacayggcatgatgcaaaatgggttaatactgtagaaggaaaactctcaagagataaatcagaagcttcacctgtctgcctacgatactcacagtgggaatggta

SEQ ID NO: 399163 - DNA, 201 bp, Homo sapiens
taaaaagctataaattcaattatttatattagacttcactaacatttgcttcccatttacctctaggtttgaagtttgaggaaattcaaaaaagatttggkgaagagttctttaatatatgctttcatgagaatgagagagtccttcgagctgtaggtggcactttgcaggacttttttaacggctttgatgctttgttgg

SEQ ID NO: 399164 - DNA, 201 bp, Homo sapiens
gccagtggacttgtgggagacacaacttactgagataccaacttgggcagctaagggaatgcttgcagcacccctccctcaaccccaggcagtgcaacttwcatctccaaaagagacttcttcctttcgcttaaggagaagagagggaaaagtaaagaggactttgtcttgcatcttggataccagctcagccacagtagg

SEQ ID NO: 399165 - DNA, 201 bp, Homo sapiens
cagccaactgtgggtcaaaaatgtaggtaggccaatgatagttgcttcagtattgaacatgtatagacatttttttcttgtcattctctaaataatacagsctaacaactatttactcattatttacaacacgttacatattataagtaatctacaggggatttaaagatttaaagaatgtggtaggatgtccataggttg

SEQ ID NO: 399166 - DNA, 201 bp, Homo sapiens
tctaatattggttaagctatttgatgtcctagatgagctctcatgcatcttttagctccaatatctcatcatagtcacagcaaacatttattgaattactkacaatttatttatattgtcatttaatccttacagcaagagtgtgagttctgaattgtgattatctttgtttttcagatgagaaaaactgaaacttaggtt

SEQ ID NO: 399167 - DNA, 201 bp, Homo sapiens
aaactgaaacttaggttaaataagtcactaagaacattgagctaaataagtgcgggagtcataattcaaacccgtagctgccctactctaaagcctgagatcttatctgtggccaagctgtcccatgggttgataactacttgaaataacatggaaaaaaacaataattactttttaaattttttagctgacacattatag

SEQ ID NO: 399168 - DNA, 201 bp, Homo sapiens
attaataaatctcttagaaggaaacatgggaatatggttccatttatatgaaacatcagaatgggcaaatctgtgaagactagattagtagtttgcctatsactgacgcagggagggagagagatgaagactgactgctaatggaatacaaagtttcttcgtggggtgatgaaactattctaaaagggtttgtgatgatga

SEQ ID NO: 399169 - DNA, 201 bp, Homo sapiens
tactgggaatataggcttgcttttaggaatttactttataaacaatttggaggaatgcatatctttctggtaaattcagagaaagacgaatggaataattraagaatgatgacattccttgggtatagtttttatttcattaaactataccttcgatatagtttaataatcagtaatactagtcaaaaacactagctagaa

SEQ ID NO: 399170 - DNA, 201 bp, Homo sapiens
actagattagtagtttgcctatgactgacgcagggagggagagagatgaagactgactgctaatggaatacaaagtttcttcgtggggtgatgaaactatyctaaaagggtttgtgatgatgattctgtaattctctgaatcgtctgtaaaatccactgaattgtatactttgaatgggttaattctatggtatgtgaatt

SEQ ID NO: 399171 - DNA, 201 bp, Homo sapiens
aaatatatgtcataaataacgtttacaaagaatgccaagcttaagtaaattttccacattatctaaaatactataaggtgaaaattagttactaaggtaaktaagcatgatttaaagcaaaagaaaaagtcactccttacattttcctttccctttctccattaaaaatggcaccatttctagtggcctggaggtcaatat

SEQ ID NO: 399172 - DNA, 201 bp, Homo sapiens
gcttttgacctatttatattgacatacattctgttgatttttatatagctctaattgcaaaaataaaaattgaacaacatgtaaaaagaaactcgttccarcattttcaccagctttccatgccttctctgttatgattggtagagctctgtgatgtcttcagcctattttcaaatttctgcgtaataaacttcattgggc

SEQ ID NO: 399173 - DNA, 201 bp, Homo sapiens
tattatttgtgaattaaacagatttatcaatgtagaaatatataaaattctgcagcaaaatatggaaaattatatcctgatatacgtttgttaattctttwttcatttttcatacattggttttacatataaaatattatcaagacactaccatgtgcttaatacaaggtactaaataaactgaaatttattttataattt

SEQ ID NO: 399174 - DNA, 201 bp, Homo sapiens
tagagtaaaatctttctttttccacaaggaaattaagaaaccagagaatttaagcgacttaactaatgccatcaactaatttgtctctatctaacctgtaygggggaaagaaaaactctaaaatgtaagagattagatatactgagcctacctatacctcttctcctctcttagtttctctccacaaaaatgagtatttct

SEQ ID NO: 399175 - DNA, 201 bp, Homo sapiens
aagtttaataaccttttcccctgatacatggtgtgccatttctaccttactattgaattctctatttcacagaaacgttcctgtattatatctttgaatamttttctatttcatttgttcagttctctagtttaggaaaataagaggaaaatatgaaatggttagatgctaagtagatataagacattataagaagcaaag

SEQ ID NO: 399176 - DNA, 201 bp, Homo sapiens
actatcacaaggacggaaaaccaacactgcatattctcactcataagtgggagttgaacaatgagaacacatgggcacagggaggggaacatcacacaccrgggcctgctggggggtcggggcttgggggaaggatagcattaggagaaatacctaatgtaaataagttgatgggtgcagcacaccaacatggcacatgta

SEQ ID NO: 399177 - DNA, 201 bp, Homo sapiens
aagaaaccagagaatttaagcgacttaactaatgccatcaactaatttgtctctatctaacctgtatgggggaaagaaaaactctaaaatgtaagagattrgatatactgagcctacctatacctcttctcctctcttagtttctctccacaaaaatgagtatttctgagaagcataattttagtggaatttgcaaggaat

SEQ ID NO: 399178 - DNA, 201 bp, Homo sapiens
tttgttttattttaattaagaagaaaacattaattctatgaaacataagccatttgctttccatatatttggcctggagtagactctggacattgataatktttcaaaacatctccaggtgattctaatgtacagccaggattgagaaatttttgaagaacaggtaactccatcttgaaagatgggtggaattaggacatg

SEQ ID NO: 399179 - DNA, 201 bp, Homo sapiens
cacacgtatgtttattgtggcactgttcacaatagcaaagtcttggaaccaacccaaatgtccatcagtaatagactgcataaagaaaatgtggcacatakgcaccaaggaatactatgcagccataaaaaggatgacttcatgtcctttgcagggacatggatgaagctggaaaccatcattctcagcaaactatcacaa

SEQ ID NO: 399180 - DNA, 201 bp, Homo sapiens
tctttcagaaccgtcgtccttctcctacacccaaaaatgcagtgcccaatgctattacaatagaatccaaatgcattccttagcaaaaaaagatattcagrtgaataatttgtaacaacagaaatttctaattaagcaaattgaggccctgagtttatcattacccttttcggaagttaataattaatcttttttgaaacg

SEQ ID NO: 399181 - DNA, 201 bp, Homo sapiens
gtgagaatcataggcaaaagctttcctgtgatattagagaagagtaagatattgttcttgataacatcctgcaactcatcatttatagcataataagcccwtccactctgattctgttagacaggcccatccatggcaagatattaaacaaaacaggatttattgaaaacatgtctgataatagcaatgatattgaaaaag

SEQ ID NO: 399182 - DNA, 201 bp, Homo sapiens
gaaccagaattaccatttgacccagcaatctcattactgtctgtctacccaaaggattataaatcatgctactataaagacatatgcacacgtatgtttaytgtggcactgttcacaatagcaaagtcttggaaccaacccaaatgtccatcagtaatagactgcataaagaaaatgtggcacatatgcaccaaggaatac

SEQ ID NO: 399183 - DNA, 201 bp, Homo sapiens
ccattgtggaagacagtgtggtgattcctcaaggatctagaaccagaattaccatttgacccagcaatctcattactgtctgtctacccaaaggattatamatcatgctactataaagacatatgcacacgtatgtttattgtggcactgttcacaatagcaaagtcttggaaccaacccaaatgtccatcagtaatagac

SEQ ID NO: 399184 - DNA, 201 bp, Homo sapiens
aaatggtatcttattgtggttttgatttgcatttctctaatgatcagtgatgttgagctttttttcatatacgtgttggcttcatgtgtgtcttattttcrgaaatgcctgttcatgtcctctgctcactttttaatggggttgtgtttttttcctgtaaatttatgtttcttatagatgctagatattagacctttgttg

SEQ ID NO: 399185 - DNA, 201 bp, Homo sapiens
ctacaggtatatttctgtgcctttcagtagccctctatgttcatctactttttaattttttttatttcaataggattttgggaaacaggtggtagttggtkacatgcatagattttggtgcacccatcacccaagcagtgaacactgtacccagtgtgtagtcttctatttctcaccaacccccatcctttcccctgagtc

SEQ ID NO: 399186 - DNA, 201 bp, Homo sapiens
atggaacagaacagaggcctcagaaataacaccacacatctaaaatcatctgatctttgacaaacctgacaaaaggaaaaggattccctatttaataaacrgtgttgggaaaactgactagccatgtgtagaaagctgaaactggatcccttccttacaccttatacaaaaattaattcaagatggattaaagacttaaat

SEQ ID NO: 399187 - DNA, 201 bp, Homo sapiens
aagctttgtggtcctcccactgcaaatactttttttcttctagacttctgcaattttcgtgtctacttttctgatggcatctagcctattacgttctataytttgatattactctgtgttttgttcatttattgggtttttttaaaaattcttttattctgtttctatatctgttgacaaaactgtgagctttttagatgt

SEQ ID NO: 399188 - DNA, 201 bp, Homo sapiens
aatggaacagaacagaggcctcagaaataacaccacacatctaaaatcatctgatctttgacaaacctgacaaaaggaaaaggattccctatttaataaayagtgttgggaaaactgactagccatgtgtagaaagctgaaactggatcccttccttacaccttatacaaaaattaattcaagatggattaaagacttaaa

SEQ ID NO: 399189 - DNA, 201 bp, Homo sapiens
acattgatgtgaaaatcctcaataaaatactggcaaaccaaatccagcagcacatcaaaaagcttatccaccatgatcaagtcagcttcatccctgggttrcaaggctggttcaacatatgcaatcaataaatgtaatccatcacaaaaacagaaccaaagacaaaaaccacatgattatctcaatagctgcagaaaagac

SEQ ID NO: 399190 - DNA, 201 bp, Homo sapiens
ctcattttatgaggccagcatcatcctgataccaaaacctggcagagacacaacaaaaaaagagaatgttaggccaatatccctgatgaacattgatgtgmaaatcctcaataaaatactggcaaaccaaatccagcagcacatcaaaaagcttatccaccatgatcaagtcagcttcatccctgggttgcaaggctggtt

SEQ ID NO: 399191 - DNA, 201 bp, Homo sapiens
tacttttagcttttgcatacaactatattatgtgaataaaatgggataaggcttttgaaagaattttgaaatgttagaaggagacttgttttttatatacygaatgaatatcatcattttgtggttttttttaactgccattatatcctttagcaatcaaaatactatagctctagtttttaaaattaaatatagactgtt

SEQ ID NO: 399192 - DNA, 201 bp, Homo sapiens
ggagctggtaccattccttctgaaactattccaatcaatagaaaaagagggaatcctccctaactcattttatgaggccagcatcatcctgataccaaaasctggcagagacacaacaaaaaaagagaatgttaggccaatatccctgatgaacattgatgtgaaaatcctcaataaaatactggcaaaccaaatccagca

SEQ ID NO: 399193 - DNA, 201 bp, Homo sapiens
tggctgaactaatttacattcccaacaactgtgtatacatgttcctttttctccaaaaccttgccagcatctgttatttttttacttttttttttttttttgagactgagtctcgctctgtcacccaggctgtagagcagtagtatgatgtcagctcactgcaacctccacctcccggttcaagtgattctcctgcctcag

SEQ ID NO: 399194 - DNA, 201 bp, Homo sapiens
cttcctacaagaagggaaaatttaaatgctaaaacctgcctggaaatatagccccaatcttacttctgcatacttgtctttgaggatttgaaaaaaaaaaaccatataaattatgtaagcaaaatctagggaggaaaaagaactttcacaaatgagacctctggcctgtaaaggatttttactgggacttaagatatagat

SEQ ID NO: 399195 - DNA, 201 bp, Homo sapiens
aggccttcattctttgctgaaagttctaggtgataacatgctttcttgccttttccagctttgaggccactctcattcctctgttcagaaccttcttcttccatcatcaaagccaataatagttcatctttctaattctacttctatcatcacatatcttttactgactcttcctccctcttctacttttaaggactcttt

SEQ ID NO: 399196 - DNA, 201 bp, Homo sapiens
gaggccttcattctttgctgaaagttctaggtgataacatgctttcttgccttttccagctttgaggccactctcattcctctgttcagaaccttcttcttccatcatcaaagccaataatagttcatctttctaattctacttctatcatcacatatcttttactgactcttcctccctcttctacttttaaggactctt

SEQ ID NO: 399197 - DNA, 201 bp, Homo sapiens
aatatgacacagagacatgagatgagcatatgatgttggaaaaatatcaccagtagatttgttcaacagaaggttgtcacaaactttcaatttgtaaaacmatgcaatatctgcaaagggcaataaagtgaagcacaataaaatgaggtatgcttgtatataccacaatccataccacaattatccattcatctgttgatg

SEQ ID NO: 399198 - DNA, 201 bp, Homo sapiens
ttttggtagtttgggtttttttcaagggattggttcatttaaactgtcaaattttttaatgtaaagctgtttgtgatatccccttattattcttgtaatgkctatattatctatagtgataacccctatcttgttccttatgttgatttttgtttacttagctgtcattttcatcagtgttgctagactttactgatttta

SEQ ID NO: 399199 - DNA, 201 bp, Homo sapiens
tctagattctatttaaaatttttattttaacagtcaattcctctatttaggtttggcatgtaggtcctggcctacttttgtgggttttagttgcaatgackgtgtaattttcagaggttatgtggtgctattttcatcttggtttatttcatgcctcatggctcccactgtccttggtaatgctgcttgagggtgcagagc

SEQ ID NO: 399200 - DNA, 201 bp, Homo sapiens
atgcaggggtgatgccttaccatggtcataggactttaacagagaacatcaagaacctatgtctctaacctcatcttgtactctatatactcatggttctrtgatgcactccttgaatatgctaagcaagcatcattttgccttaggactattgttcggttcctcatgtcagaaatgtcctctacccacatcctttgcttg

SEQ ID NO: 399201 - DNA, 201 bp, Homo sapiens
gtatatgtcactaagcagaaatgagaagtttgattgtttttaaattatgtgtgtggctttttttggcatgatgaagtgctgtgtgtatcaaataagaatayagactttcagaatgtgaaaggtaagagggagcctcaaaggcatctagtgcaaaaggatacactttgaagtcagttctgttttggagtgatttatttactt

SEQ ID NO: 399202 - DNA, 201 bp, Homo sapiens
actaacactgtcaatcttgatggagcaagggaagggatggaacctagggaaagctttaacagtgggaagggcccactgtgggatctcttgccttaggtggragaataagccactgccaaatcacagatcagcagagagcaaaccaagagaatgaataaaccagactttctctcctctcccactctggtcacctgccatcgt

SEQ ID NO: 399203 - DNA, 201 bp, Homo sapiens
ttatctagcacatacccttttgtaggcactgctaaggacactcaagtataaaacatggtccctccctcagagaactatgatcttggttgaagggcaaaaayatcaaatatgtttataatatgcacatggaatggaatgctttatttcgttcattcagccaatatttattaagcacctgctatataccaggcaatgtcttta

SEQ ID NO: 399204 - DNA, 201 bp, Homo sapiens
aatatgtttataatatgcacatggaatggaatgctttatttcgttcattcagccaatatttattaagcacctgctatataccaggcaatgtctttaagtcragtcagaaattcaaaacaaattccctgtggacagggaatttgtaatcttgtttgaaaggtggactttaattatacatttcaagcatgataagtgttttga

SEQ ID NO: 399205 - DNA, 201 bp, Homo sapiens
ggtgttttgagctggtgacgtacattgctcaaaaggacatagtttataatttctactccagggggcattcagattagtacaaagtacttttagcctcttaycgttgggagtaaattttctgaaggtacatttatcttaagaatagcaaagaaaaaagagagctattgagtggctgactaggccgggaattgagctacctct

SEQ ID NO: 399206 - DNA, 201 bp, Homo sapiens
ctatataccaggcaatgtctttaagtcgagtcagaaattcaaaacaaattccctgtggacagggaatttgtaatcttgtttgaaaggtggactttaattayacatttcaagcatgataagtgttttgaaaagagaaatacggagttgtttaggaatttgtatcaaatacacctaacatattggggagccaaaaaagcctcc

SEQ ID NO: 399207 - DNA, 201 bp, Homo sapiens
ttatttcaaattaaacatgaacaaatttatatttcatatagtataaatatttgtatatatttatgtttataaacagttgtacagatcattgtagataacayaagcacacactttgtatatgtgtatacaaatacatatacaaatatcatatacatatgtggtatccagataggatgaggtttgtgcatgagtcactgaaga

SEQ ID NO: 399208 - DNA, 201 bp, Homo sapiens
ttatgctctcctaacccccagcttgcctgagttaagattcctttcaacactatcaacagccagtgagtcaaactcacttaactaaagctcctttactcaayacattctcataacaaaattctcaaatttcttagaaactcttctatttttgttttctcaaagatagtattactgccatttaaaatctgcaaaactccttag

SEQ ID NO: 399209 - DNA, 201 bp, Homo sapiens
caaaacaaattccctgtggacagggaatttgtaatcttgtttgaaaggtggactttaattatacatttcaagcatgataagtgttttgaaaagagaaatayggagttgtttaggaatttgtatcaaatacacctaacatattggggagccaaaaaagcctcctcgaagcatttaagaagtataagtaggaagttattcagg

SEQ ID NO: 399210 - DNA, 201 bp, Homo sapiens
cccaacccccactcttcagagagagactttgtcaggcaagttttgaagtgatttatccaggatcactgtggtaataaccttcaaagactggtaaagaactrggtaggactctagccctactggccaaagatgaagttgacattataaattgcaaccgttgacaatctctgatgtaataatgggaatataaggctggaatta

SEQ ID NO: 399211 - DNA, 201 bp, Homo sapiens
aggagctggtaccattccttctgaaactattccaatcaatagaaaaagagggaatcctccctaactcattttatgaggccagcatcatcctgataccaaarcctggcagagacacaacaaaaaaagagaatgttaggccaatatccctgatgaacattgatgtgaaaatcctcaataaaatactggcaaaccaaatccagc

SEQ ID NO: 399212 - DNA, 201 bp, Homo sapiens
aaagtttttctgagaaataagcacaagaatgaatttttctcaaaattttttccgaagtttattttttacttctaatttaagaaaatagctgaattgttcgsaattttctgtcatgttttgctgtatattaaagtaataacatcttttaaaaggaaattggcaagtgttctttattagcaattttataaagatagaaccatt

SEQ ID NO: 399213 - DNA, 201 bp, Homo sapiens
aagctccgcctcctgggttcacgccattctcttgcctcagcctcctgagtagctgggactacaggcacccgccaccacgcccggctaatttttttttttttgtatttttagtagagagggggtttcacggtgttagccaggatggtctcgatctcctgacctcatgatccacccgccttggcctgccaaagtgctgggatt

SEQ ID NO: 399214 - DNA, 201 bp, Homo sapiens
ggttgcaatcctagtctctgataaaacagacttcaaaccaacaaagatcaaaagagacaaagaaggccattacataatggtaaagggatcaatgcaactasaagagctaactatcctaaatatatatgcacccaatacaggagcacccagattcataaagcaagtccttagaaacctacaaggagacttagactcccacac

SEQ ID NO: 399215 - DNA, 201 bp, Homo sapiens
gtggtcatttattttctgtcatttgacttttgtctgatttgtcttgaagcttctatctccacaacttttctgggcacttttttaaacacacaggaacttaycttggagaacattttttaaaaatataccaaaaatactgtgtctaaacttctgagaatgtataatgtgattgtcttctgaaaagtaggagttaaagtacgt

SEQ ID NO: 399216 - DNA, 201 bp, Homo sapiens
cctgtttatgtataagtgggcatacctagttctagataaatccctccctttattcatcccatgtcattaattccacaatgacatgcaatagggttttgttsaaactaatgtcagaaatagtgggtcatgcattgttttcataaaatgcctggttactgctagatttttttacttgagagctttagataacactttcctgtc

SEQ ID NO: 399217 - DNA, 201 bp, Homo sapiens
tcaccatggttgaaatgaaggaaaaaatgttagggacagctagagagaaaggtcgggttacccacaaagggaagctcatcagactaacagcagatctctcrgcaaaaaccctaaaagccagaagagagtgggagctaatattcaacattcttaaagaaaagaattttcaacccagaatttcatatccagccaaactaagct

SEQ ID NO: 399218 - DNA, 201 bp, Homo sapiens
aggtgacattgggaaagcatctcccagaatggataggacagagacatagcaggattggagaaaagcacatttttccagcctgtgaggaaagtattagcatrgagtgtgtgctcagaatagagaagatgcaaagcatggagtaagacaggatcttgaaaaggcttggaatggtgaccagactgcatgttctgcaaatggaaa

SEQ ID NO: 399219 - DNA, 201 bp, Homo sapiens
atgttctctatttatattttgtcatcattgcaatgtggtggaacttcagtagtttctctaggcttaaacttaaagagtcatcttgaatagaagtctaatgytttttaaatgatattttctgcagtgtttatgcagtacagtgagctgtgaagattgcagttatatccgaggtggttgtgtgtaatcaactagatgaaattt

SEQ ID NO: 399220 - DNA, 201 bp, Homo sapiens
gaatgcatatgttttgaactcaactgggccttaaatctgtagggatcttgtttcaccatcccctagctatgactgttgcaaatacttgcttttttttttttcaataatttcaacttttattttagattaaggggtacatgtgcatgtttgttacatgggtatgttgtgtgatgctgaggtttgggatacaaatgatcccat

SEQ ID NO: 399221 - DNA, 201 bp, Homo sapiens
tgaggccttcattctttgctgaaagttctaggtgataacatgctttcttgccttttccagctttgaggccactctcattcctctgttcagaaccttcttcttccatcatcaaagccaataatagttcatctttctaattctacttctatcatcacatatcttttactgactcttcctccctcttctacttttaaggactct

SEQ ID NO: 399222 - DNA, 201 bp, Homo sapiens
gaaacaatagacactggggcctccttgagtgtgcaggttgggaggtgggagaggatcagaaaaaaataactattgggtagtttgcttagtacctgggtgaygaaataacctgtacaacaaacccctgttacaaaagtttacctgtataacaaacctacacatgtacccctgaaccaaaaataaaagtttaaaaaaatgtag

SEQ ID NO: 399223 - DNA, 201 bp, Homo sapiens
ttacaatgacttttaaagcattctttactacaaggaggaaataaagaaatttttgaacatcatttactaaaatcaggaaaaacgatacacaactattttttggaacattctttgttgaaggaggaagggcaataaataaacttggaaactcctgtgggtgcgacgctagggctagctaacttgatataagttgtaagaaca

SEQ ID NO: 399224 - DNA, 201 bp, Homo sapiens
tatgtcaaataggtaatagcatatatttagttatttcaatagtacttggcatcttacatatgaaaaggtacagttatggagggaagaaaacacaggttctrttcctcccacctccatcaagcttttaacagatttaatgttgttttctgccttctatactgtttgccttcctttttgaattggtctcacccatctctcact

SEQ ID NO: 399225 - DNA, 201 bp, Homo sapiens
gaatgggcccaacctgtgtgaggaggttcatgccctgttgcttagacatcataacagtagctggctttgtttacatagtgatgtattaaaaaaaaaaaaaactctgccagccatacaagtctgtgcattttggtggtgactcagagtttttgtagtctttttcacagtttatgatgatccttagtgattaacaaggtctga

SEQ ID NO: 399226 - DNA, 201 bp, Homo sapiens
ggtgggagaggatcagaaaaaaataactattgggtagtttgcttagtacctgggtgacgaaataacctgtacaacaaacccctgttacaaaagtttacctrtataacaaacctacacatgtacccctgaaccaaaaataaaagtttaaaaaaatgtagatactagtctgtttcatcatttactactataaaatatatacaa

SEQ ID NO: 399227 - DNA, 201 bp, Homo sapiens
taagaattctcttgtatgtaaataatggctttaaccaagtttgctgaatacaagtttcttgcaaaccccaaacattttctacacattggataattttcatkccaagacccccatcacacaatatatttttacaatgacttttaaagcattctttactacaaggaggaaataaagaaatttttgaacatcatttactaaaat

SEQ ID NO: 399228 - DNA, 201 bp, Homo sapiens
acaagattatagaggaaaaaatgcatactggacactttccagatgtcagacttgtgccatgtctttatgcactatttattcctgccccccaacccccccccaaaaaaatctgcaaagtaagtttcgttaatcttattttacatttaaagaatttgagatttagaaagtttatataatttgatcaaggttatgtagctagcc

SEQ ID NO: 399229 - DNA, 201 bp, Homo sapiens
gtttgtgtaacttagtgtagatttatgtcttctgtgacaacttcacttaaaaaaaaaaaaaaaagatgtgtaaaagaatgggcccaacctgtgtgaggaggttcatgccctgttgcttagacatcataacagtagctggctttgtttacatagtgatgtattaaaaaaaaaaaaaactctgccagccatacaagtctgtgc

SEQ ID NO: 399230 - DNA, 201 bp, Homo sapiens
tgtttgtgtaacttagtgtagatttatgtcttctgtgacaacttcacttaaaaaaaaaaaaaaaagatgtgtaaaagaatgggcccaacctgtgtgaggargttcatgccctgttgcttagacatcataacagtagctggctttgtttacatagtgatgtattaaaaaaaaaaaaaactctgccagccatacaagtctgtg

SEQ ID NO: 399231 - DNA, 201 bp, Homo sapiens
ctctaaacacatttaatggactggtgaactaaatacaattatttaataatcacttctaggaataattacttttcagtgttggaaaggactttaagaattcycttgtatgtaaataatggctttaaccaagtttgctgaatacaagtttcttgcaaaccccaaacattttctacacattggataattttcatgccaagaccc

SEQ ID NO: 399232 - DNA, 201 bp, Homo sapiens
cattaaagttagacttttcatggctttagtcttcaagaaatttaaatgtatgttagatgtcctctttgaaaaagtagaagtaagttctctattttaaaggtattccatccaaaaataaaataatttgtttttaaattagaaagtaagagacattctagctgcatgtggtggtaggggggcatacctgtagtcccagatact

SEQ ID NO: 399233 - DNA, 201 bp, Homo sapiens
tgaagtggtgacttccaagtttcttacatgtgggaccagaaactggaggccaccaccatatattttaaaattatatagttatgttgtaccctataattttrtatttcagtataggtggtatatatatatttggcctatgtgtgacagaaataagaaacaaacagaatttattggattatttatttccccaatcctttaagt

SEQ ID NO: 399234 - DNA, 201 bp, Homo sapiens
tattacatcatttgttctttcacttaattttcagtcatgttacttgtttcctgtgtgactaattacacttttttttgtttgaatgctggagattgtatatmaaatattatagaaataatttaagacttaggatgattttgcagggaaattttagtgtgcttcttgaaagagactaggggctctagcagttagcgatcaggg

SEQ ID NO: 399235 - DNA, 201 bp, Homo sapiens
catgtttgtgtaacttagtgtagatttatgtcttctgtgacaacttcacttaaaaaaaaaaaaaaaagatgtgtaaaagaatgggcccaacctgtgtgagkaggttcatgccctgttgcttagacatcataacagtagctggctttgtttacatagtgatgtattaaaaaaaaaaaaaactctgccagccatacaagtctg

SEQ ID NO: 399236 - DNA, 201 bp, Homo sapiens
atatgatatttcttctgctggctgaaaatatggaagaacagcattatgactgtttcctttttattcttcccaagggagaatctgattttctttttttttttcctcaagacacagggtcttgctctgttgtccaggctggagtgcagtgtcaccatcacagcttactacagcctcaacctcctgtgctcaggggatcctccc

SEQ ID NO: 399237 - DNA, 201 bp, Homo sapiens
atttattcccatcatggtattgatacttattttccatgtttgtgtaacttagtgtagatttatgtcttctgtgacaacttcacttaaaaaaaaaaaaaaaagatgtgtaaaagaatgggcccaacctgtgtgaggaggttcatgccctgttgcttagacatcataacagtagctggctttgtttacatagtgatgtattaa

SEQ ID NO: 399238 - DNA, 201 bp, Homo sapiens
aatgctgtagtattattccacttaactaaagtttaaaactggaaaaatggaaacaattctatttagaaatacttgcattgatggcaaaaagtgtaaaaaawaaaaggaatgattaacacaaaattcaagctggtgcttatctctgagggaaagatatgggaagtaagaggatacaatagggaagataaacatagtataaaa

SEQ ID NO: 399239 - DNA, 201 bp, Homo sapiens
tctgcattataatagaaatctcaatattttcaaaatgtttctgtttataaaaatggaagaaatacaatagaaaaggtggttggactgtttttttgaataawtaaataaagtctttaaatttatatatatataaattataccttactcaaaatgcttgggaccacaagtgttttacggtttgaaattttttgagttttggaa

SEQ ID NO: 399240 - DNA, 201 bp, Homo sapiens
cattaagaacatggaagcttctcagactgggcactgtctcctgcttttttagctagagctagttctttgaaagcaaatgttgctctgtgagagcagtggcycttctggaagcccctttaattattgaagcacccgggacatatcattctgtttgtgctttcataaattacattgcagggatctgaaagaccagaaaccaaa

SEQ ID NO: 399241 - DNA, 201 bp, Homo sapiens
tatatatacacacacacatataataattctagttcacaacttttcttaaactaaacttgtttaggaaattttgcaattaattacaactaaagattccaggscttggtgttcttaacatatcttcaatgctagtgtattaatcagggttctctagagggatgggactaataggatagatgtatatatgaaagggagtttatt

SEQ ID NO: 399242 - DNA, 201 bp, Homo sapiens
aattttcagtaaaagtcaacataaacaacatacgtaatattttgcttctcagattgttctcacatgaacataaagaaccagtatctaattttgtaaatcartggcatataaatagtaacaataataatggcattgactattgaagcaaattcatgtacattttgctttgttttacatttgtctttgggaaagcctttgatt

SEQ ID NO: 399243 - DNA, 201 bp, Homo sapiens
ttttcaaagtgttttgaggtttttgtccctatcgatatttaatttctgaagagtggtggcaactgcaaacagattggtgtttttgatttttacaaacagtrtgaactgaatatttatgaccccccaaaattcatagttgaagccctacttaatgtgatattatttagaggtagagtattttggagttaatcaagtttagat

SEQ ID NO: 399244 - DNA, 201 bp, Homo sapiens
acaagactctgccacgtagtgatgactatatagcagtgatgcttctgggatctctcagtcagccatctggagatctcctttgcgacggtaaattatttaaygttcttggtctgtagtgataacatggatacattgggaagtaaaaacaaaataataatatatagcatttttgatgatgtggcattatacttttaaattttg

SEQ ID NO: 399245 - DNA, 201 bp, Homo sapiens
ggatctctcagtcagccatctggagatctcctttgcgacggtaaattatttaatgttcttggtctgtagtgataacatggatacattgggaagtaaaaacmaaataataatatatagcatttttgatgatgtggcattatacttttaaattttggattataaactgttttttttttaatgaactattactgctactttagg

SEQ ID NO: 399246 - DNA, 201 bp, Homo sapiens
tattattccattgtgttctggtttctattacttctatatagtgtcagtcttctctctctgcttttatgatctctgtgctatctgtggattcatgactaagygtctaattctggattttgttttatttatatttcttggtggatgctgtgcttgatatcgtgagttcatatttttcattacttcagggagtttcacaatctg

SEQ ID NO: 399247 - DNA, 201 bp, Homo sapiens
taacaatactaatgtaaatgggctaaatgccccacttaaaagacagactgggccgggcatggtggctaacacctgtaatcccaacactttgggaggctgasatgggtggatcacctgaggttgggagttcaagaccagcctgaccaacaaggagaaaccccatctctactaaaaatacaaaattagttgggcatggtggca

SEQ ID NO: 399248 - DNA, 201 bp, Homo sapiens
cttggagattttcctcacctattttaagcccagcagtgttatgaaaattatattttatgcaaaatctactttttttgtttgtttttcatgaggatccttcyagcctactgccagaagctgaatgatagatattttttgcctatagcacaatgacagtctggaaattatcaagttgttttgatcaatataggtaagccaaac

SEQ ID NO: 399249 - DNA, 201 bp, Homo sapiens
tatctgcctgtctttctctccagttttaggggcagtggtttgcccagtgacatcatttctcttatagatttaagaagagttgctaatttttcagtttattstgctttttacttattgttaggatgaagtggtgacttccaagtttcttacatgtgggaccagaaactggaggccaccaccatatattttaaaattatatag

SEQ ID NO: 399250 - DNA, 201 bp, Homo sapiens
aacatgtagatagaaatcgctactcttatggatctagcatcctatcatcatgatagacataaatgagaaaaggtagtaaaataaatagtacggtagatagyaagtgctaaggagaaaaataaaacttggaaaaggaatcaagaatggtgaaagttgttgtaatattagatgggtatatggattcactgcttctgagcattt

SEQ ID NO: 399251 - DNA, 201 bp, Homo sapiens
gaaccacgttttgttttcattgacttttctctgtttatttcctgttttcaatttcataggtttctattctgactttatttcttttctcaggccgactttgratttaattttttcttctttttgtagctttctaaagtgaaagcttaggtaattgatcttagatcttttctccttatatatgcattcagtggtgttactctc

SEQ ID NO: 399252 - DNA, 201 bp, Homo sapiens
aaattagagttatgctgctgcaagccaaggaactaccagaacctaggagagagaatggagatctgtcaacaccatgatctcagactcatagcctccaatayatatggcagtaaatttctgttgtgtaagccactcaattcgtgatacttccttacagcagccctagcaaactaatatagacagcttaatagtatgtaggac

SEQ ID NO: 399253 - DNA, 201 bp, Homo sapiens
cctttataaagccatcagatcttgtaagacttactatcatgagaacggcatggaaaaaacctgcccccatgattcatttacctcccatcaggtcccttccwtgacacatggggattatgggagctataattcaagataagatttggtggggacacagccaaaccatatcacaagtattctcatcacttctatattatggga

SEQ ID NO: 399254 - DNA, 201 bp, Homo sapiens
agcttcaaccatgtccctgcaaaagacatgaactcatcctttttcatggctgcatagtattccatggtgtatatgtgccacttttttttttttttttttttgagaccaagtctcactctgtcaccaggctggagcgcagtggtgcaatctcggctcactgcaacctccgcctactgggttcaagcgattctcctgcctcag

SEQ ID NO: 399255 - DNA, 201 bp, Homo sapiens
cttgggacttgcctttaattaatttatggcatagaacctaaaaatgggaagtatattaattaaaatgagagtgaatatagtcagactgggttgggaaagamtcttgatggattcttttcaccacattcttagtatggaggaggtgcgagtctagatcacatctcaagtgtatgatggagttgggggaaaatgatttcttac

SEQ ID NO: 399256 - DNA, 201 bp, Homo sapiens
ttataaagaaaaagaggtttaatgaactcacagttccacatggctggggaggcctcacaatcatggcagaaggtgaagcaggaacaaaggtatgtcttacrtggcagctggcaagagagcatgtgcggaggaactgccctttataaagccatcagatcttgtaagacttactatcatgagaacggcatggaaaaaacctgc

SEQ ID NO: 399257 - DNA, 201 bp, Homo sapiens
tatctttttaatattgtagtgttggaatgcttttacatggaaatttaatttttgatattaaaaataacagaatattttataataattcttggtatatttawgctggaagcatctccatcactgacgcatatttttcctatacagatctacatagcacacagatctagatggcgctcataaaatgaatggtgaaaataagca

SEQ ID NO: 399258 - DNA, 201 bp, Homo sapiens
gttgatgaagttccccttcattactagtttactgagagatttaattgacgttggattttgtcagatgctttttatgcatctgttgatatgatcatgtgatktttttcttctttagcctattgatgtgatggattacattaatttatttttaaatattaaactagacttgcatgcttgagaaaaatactacttggttgtggt

SEQ ID NO: 399259 - DNA, 201 bp, Homo sapiens
aagattagcaaagaacattgtcttattaggggtaaaatggtaaataggcacattttagatgtttattctttgatgggtgtcttcctcagtgagaattatttccaggaagtatattttagtctttggaataaaacttttgccaactcatattgcattgtctttctattcttatagtataattttattttcatttttctggca

SEQ ID NO: 399260 - DNA, 201 bp, Homo sapiens
ctcctcatcttagtgggaaagctagttttttaccattaagaataatgttagctgtagagattttgtagatattctttattaagttgatgaagttccccttyattactagtttactgagagatttaattgacgttggattttgtcagatgctttttatgcatctgttgatatgatcatgtgatgtttttcttctttagccta

SEQ ID NO: 399261 - DNA, 201 bp, Homo sapiens
ctgttgtatttaaactatataaaaacactgaggcaattataaaggaattcagaacaaagtcaacttttagacagtttttctttttttttttttttttttttgtagtctgtttaccatgtccacttgtttcattttggtttagctcaaggaaataaactcaggagcaatggaattgatacatgacactttcacttttcctgc

SEQ ID NO: 399262 - DNA, 201 bp, Homo sapiens
attattattgagtcacagattgactttgttcgtcgagcagactcttggcaaatattaaggatatgcccagagcactcaaatctccaaattggaaacaaagmaatcatataattcctcttataaaatatagcagtgcgactgaaaatgtaagggcccctttacatctctaatgttttcacgaatgttggaggaaaatcatta

SEQ ID NO: 399263 - DNA, 201 bp, Homo sapiens
ttccctttattattttattagctaggacttcagtacaatatttaaaaggagtagtgagatggtacattcttgccttgctcctcatcttagtgggaaagctrgttttttaccattaagaataatgttagctgtagagattttgtagatattctttattaagttgatgaagttccccttcattactagtttactgagagattt

SEQ ID NO: 399264 - DNA, 201 bp, Homo sapiens
aaaagaaaaatatattatttatgataactactgcaaggctattgaaaggtgaacagctagattagcaacatttaaaaagctgatgctctgggagttagggrgaaggaagggataaacaggatttttagggcagtgaaaatgctctaagtgatatgataagtgtatacatatcattatacatttgtttaagcccacagaata

SEQ ID NO: 399265 - DNA, 201 bp, Homo sapiens
tgggaggctgaggtgcacaaatctcttgagcccaggagttcgagactagcctgggcaacatggtgaaaccctgtctctacaaaaattaaaaaaaaaaaaaaggcaggcatggtgacatgcgcctgtagtcccagctacaagggaggctgaggtgggaggattgcttgaacccgggatggaggggttgcagagagcccacat

SEQ ID NO: 399266 - DNA, 201 bp, Homo sapiens
gtgaaggaaatccttatgtattaggaatccgtgatacagacagtgctcaggaatttcagaaacagcttactaaagctaaaagaataatgatcttagggaayggtggtatcgcacttgagttagtgtatgaaattgaaggctgtgaagtgatttgggccattaaagataaagctatagggaatactttcttcgatgcaggag

SEQ ID NO: 399267 - DNA, 201 bp, Homo sapiens
aactatattatatacatgtatataatatatataactatatattatatatataactatattatatacatgtatataatatatatactatatattatatatamctatatattatatacatgtatatattatatataactatatactttatacatgtatataatatatataactattatatataactatatattatatacatgt

SEQ ID NO: 399268 - DNA, 201 bp, Homo sapiens
tgaagaacagaaatttatttctcacactttggaggctgggaaattcaagatcaagacagtggcaggattggtgtctggtgagggatgctctctgctttcartatggtgcttccaatattcctctttgagaggagaagaatgctgcatcctcatgtggcagaagggatggaatagcaagagagcacttttttcacccttgag

SEQ ID NO: 399269 - DNA, 201 bp, Homo sapiens
atggagtggagaacagagaaggagtacatgggaatagctggggtcaggttagaagtgcttttctcctttctgaaagccactgctctttaaaaaaaaaaaaaaggtggatatcggggtgaatattgtactatttttaactcacttcatatacagaagtcttcagactttgggaatcatttaaaacaactgaagcttgtgaat

SEQ ID NO: 399270 - DNA, 201 bp, Homo sapiens
ataacacagtcttgataatttatgaagaacagaaatttatttctcacactttggaggctgggaaattcaagatcaagacagtggcaggattggtgtctggygagggatgctctctgctttcaatatggtgcttccaatattcctctttgagaggagaagaatgctgcatcctcatgtggcagaagggatggaatagcaaga

SEQ ID NO: 399271 - DNA, 201 bp, Homo sapiens
tatataaaaattgtaggatttatgggttaagatggtctcctttaaaaaatgaattattgaggggtggatcaagatggcagaacagaagtttccactgactgtctccttcacagggacaccaaattcaacaagcacgtgtgcacatgcacacacacacacacaaatacctccataagaaccagaatcaggtgaatactcaca

SEQ ID NO: 399272 - DNA, 201 bp, Homo sapiens
atattatatacatgtatataatatatacactatatattatatataaaaatatattatatacatgtatataatatatataactatatattatatatatatamctatattatatacatgtatataatatatataactatatattatatatataactatattatatacatgtatataatatatatactatatattatatataac

SEQ ID NO: 399273 - DNA, 201 bp, Homo sapiens
ttttgttattttcttcataatgatcttgtacatattttttaggtctataagtattttattttggggtatgctaatgtaaatgtattgtatttttaattttwaattttacttgttcagtgctgttatacagaaaagtaatgggattttgtatattaaccctatacactgaaattttgctataatcattttattagtctcagg

SEQ ID NO: 399274 - DNA, 201 bp, Homo sapiens
atatataaaaattgtaggatttatgggttaagatggtctcctttaaaaaatgaattattgaggggtggatcaagatggcagaacagaagtttccactgactgtctccttcacagggacaccaaattcaacaagcacgtgtgcacatgcacacacacacacacaaatacctccataagaaccagaatcaggtgaatactcac

SEQ ID NO: 399275 - DNA, 201 bp, Homo sapiens
tcctaatcagtggtttgtagggttttatccttcctcatcagaaaatgtaaacaagattacaaacccactttcttccccaactgtaaaatattaattatttaaaattttaccgtgttttattttatacaagtgataatagctcatattatatggtctgaaattaccagtgatgagaataattatttggtcagatactttctg

SEQ ID NO: 399276 - DNA, 201 bp, Homo sapiens
gatatataaaaattgtaggatttatgggttaagatggtctcctttaaaaaatgaattattgaggggtggatcaagatggcagaacagaagtttccactgactgtctccttcacagggacaccaaattcaacaagcacgtgtgcacatgcacacacacacacacaaatacctccataagaaccagaatcaggtgaatactca

SEQ ID NO: 399277 - DNA, 201 bp, Homo sapiens
ctcctaatcagtggtttgtagggttttatccttcctcatcagaaaatgtaaacaagattacaaacccactttcttccccaactgtaaaatattaattatttaaaattttaccgtgttttattttatacaagtgataatagctcatattatatggtctgaaattaccagtgatgagaataattatttggtcagatactttct

SEQ ID NO: 399278 - DNA, 201 bp, Homo sapiens
agatatataaaaattgtaggatttatgggttaagatggtctcctttaaaaaatgaattattgaggggtggatcaagatggcagaacagaagtttccactgactgtctccttcacagggacaccaaattcaacaagcacgtgtgcacatgcacacacacacacacaaatacctccataagaaccagaatcaggtgaatactc

SEQ ID NO: 399279 - DNA, 201 bp, Homo sapiens
cctcctaatcagtggtttgtagggttttatccttcctcatcagaaaatgtaaacaagattacaaacccactttcttccccaactgtaaaatattaattatttaaaattttaccgtgttttattttatacaagtgataatagctcatattatatggtctgaaattaccagtgatgagaataattatttggtcagatactttc

SEQ ID NO: 399280 - DNA, 201 bp, Homo sapiens
ccctcctaatcagtggtttgtagggttttatccttcctcatcagaaaatgtaaacaagattacaaacccactttcttccccaactgtaaaatattaattatttaaaattttaccgtgttttattttatacaagtgataatagctcatattatatggtctgaaattaccagtgatgagaataattatttggtcagatacttt

SEQ ID NO: 399281 - DNA, 201 bp, Homo sapiens
attgcttgaacctgggaggtggaggctgcggtgagccaagatggcaccactgcactccagcctgggtgacagagactctgtctcaaaaaaaaaaaaaaaaatttgcaaatatgtcctttttattggtggagaagcatatgacttacatttttaaataaatttttgattttagaatgtttttcgtttttcagaataatttgc

SEQ ID NO: 399282 - DNA, 201 bp, Homo sapiens; identical to SEQ ID NO: 88358

SEQ ID NO: 399283 - DNA, 201 bp, Homo sapiens
aaaacaaaccagtgctaaccattctggttctatatgcaaagggattccttaaaattgacattgtgtgcacacacacacacacacacacacacacacacacagaactggtctttgatgactattttgtataagttcttcatttagcaggtgctctttctgaaaaagaaaatttcctatttttttttcttttgtttgcttgaa

SEQ ID NO: 399284 - DNA, 201 bp, Homo sapiens
atctaaatcagataatgtaggcagtgcgttgggaccagattggcatgaaggcttgaatcttaaaggaacaaaagagttttctcataagattcaccttgaarctatgtgtgaagtaaagaaaatctaccttcaggatgagtttagaattttgaagaaaaagtccttcacttttccaagagaccatacgtcagttacaactaa

SEQ ID NO: 399285 - DNA, 201 bp, Homo sapiens
acttctgtgtcatggtcaattaaaattttaatatttagcaaagcaaagaaaaaaattgttcgtatggtaatgtaaaaagataagtcttgaatttctacatraatcctaaaatttgcaaaataaataaaactaagtttagcagctctctgtatttctttagccatagactaagcaactgttctattattcctttagaaaatt

SEQ ID NO: 399286 - DNA, 201 bp, Homo sapiens
gataatattgtatctttctatttatgaacatagactctctctccacttatgtagtttttctttaatttctttcatcagagttttgttattttcttcataawgatcttgtacatattttttaggtctataagtattttattttggggtatgctaatgtaaatgtattgtatttttaattttaaattttacttgttcagtgct

SEQ ID NO: 399287 - DNA, 201 bp, Homo sapiens
ttaaggctttatcagaatattctgtgttaaattggctgggtcagaatggccaataagattttacacatccaaatggctctctattacactgaggaggtttygttcattcctgtgtgacactgtgttagtgctttgtgcagaattgtttttgtaatatttccttgaaaaaagtgtagaattttctgtctttgcagaacattg

SEQ ID NO: 399288 - DNA, 201 bp, Homo sapiens
ttttgtgaaagatatgaggtctgtatctagattcaatttttttttttgtaattcgatgtccagttgttctagcaccatttgttgaaaaaaggtatcttttyttcattgcattgcttttgctcctttgtcaaagatcagttttactatatatatatatttgtagttctatttctggggtctttattctgttctattgatcaa

SEQ ID NO: 399289 - DNA, 201 bp, Homo sapiens
ttgcagaacattgaatggtggtgctatatatttattatagcttcttgaagtgtagttatatacaccagatatgtagaaatagaacccacatctcccatggkatgtgtgaatgacagtgtggtgacaaaagcaccccaggggttcaggctaactgttggttttaaagcaaggaaaacttttagttctgtgcctttaatgtgt

SEQ ID NO: 399290 - DNA, 201 bp, Homo sapiens
ttttatagttttgcatttaacatttggtctgtgatccattttgcattttttgtgaaagatatgaggtctgtatctagattcaatttttttttttgtaattygatgtccagttgttctagcaccatttgttgaaaaaaggtatctttttttcattgcattgcttttgctcctttgtcaaagatcagttttactatatatata

SEQ ID NO: 399291 - DNA, 201 bp, Homo sapiens
ttgcccaggctggagtgcaatggtgtgatctcagctcactccaacctctgcctcctggattcaagtgattgtcctgcctcagcctccccagtagctgggaytacaggcacccaccactgagcctggctaatttttgtatttttagtagagatggggtttcactatgttggccaagctggtctcgaactcctgacctcgtga

SEQ ID NO: 399292 - DNA, 201 bp, Homo sapiens
ttaatgaataaacaatatgaattatacagtatctcatctcaacaaaggcaacatttcaatctattgaataaacagtagcataattagccttgagttaatawcccctcctcacacatacacttttctatggttcacttcagtaaaaaggcaaatcttttctgctttagttcctgcatatttagagtgcttaggctaggccag

SEQ ID NO: 399293 - DNA, 201 bp, Homo sapiens
aagttcccactgctgcctacccttgtcagcatttgatgttgtcagtgttctggattttggccattctcataggtgtgtagtggtatctcattgttttaatytgcatttttccctgatgccatatgatgtggaacatatattcctatagttatttgacatctgtgtatcttctttggtgaggtattttttaagatatttgtt

SEQ ID NO: 399294 - DNA, 201 bp, Homo sapiens
atcacatttattgatttgtgtatgttgaactaaccttgcaacccagggataatgcctacttgatgatagtgggtaagcttttttttttttttttttgagayggagtctcactctgttgcccaggctggagtgcaatggtgtgatctcagctcactccaacctctgcctcctggattcaagtgattgtcctgcctcagcctc

SEQ ID NO: 399295 - DNA, 201 bp, Homo sapiens
ggagctctgaggagagggagaagaactgggaacagctcgttggtggggcactcagaacacacacgatgttgactgattaagttcactgtcttatacgggtktggtttgtggtgccccaaaacaattaccatagtaacatcaaggatcactgatcacaggttaccataacacatataataatgaaagagcttgaaatattat

SEQ ID NO: 399296 - DNA, 201 bp, Homo sapiens
gcttgatagcttgatagcccatttctttttagcactgaataaaatttcattgcctgcatgttcagagtgtatttactcacctatagaaggacatcttggtwgctttgagttttggcaattatgaataaacctgctataaacatccattgtgcaggtttttgtgtgcatacatgttttcaacctatttgggtaaataccaag

SEQ ID NO: 399297 - DNA, 201 bp, Homo sapiens
tcattttcttaatttctttttcaatactgtgttgaataggataggcaagagaaggcatccttgtcttctgctgcttttcaaggagaatgcttccagcttttgcccattcagtatgatattggctttgggcttgtcatttgtgatgcttattattttgaggtatgttccttcaatacctattttattgggagtttttaacat

SEQ ID NO: 399298 - DNA, 201 bp, Homo sapiens
gagctctgaggagagggagaagaactgggaacagctcgttggtggggcactcagaacacacacgatgttgactgattaagttcactgtcttatacgggtgyggtttgtggtgccccaaaacaattaccatagtaacatcaaggatcactgatcacaggttaccataacacatataataatgaaagagcttgaaatattatg

SEQ ID NO: 399299 - DNA, 201 bp, Homo sapiens
ataaatattttaattctgtggggaggaaaatatgatttttaatgtaagttagactaaacaacaggttgcttgaattttctctctgtagttgttgttctgayattatgtagacaaaggctaagtcctttaattatgtctaaattaatttacaatacatgaaattcacccacacttgttttatttatctctccatggaaacag

SEQ ID NO: 399300 - DNA, 201 bp, Homo sapiens
tatcacattttcttcatttatctgttgatagacacaggttgatgttacatcttggctattttgaataatgctgcaatgaacatggaagtgcagatatctcytcaaaatcctgatttcatttcctttggatatgtatccagaagtggagttgctgaaaattataattttacttttaattttttaggaacctccattgtgttt

SEQ ID NO: 399301 - DNA, 201 bp, Homo sapiens
tgccactttctattctaccattctcactcatcactgtgatgtataagcctttatccattcttaggtttccagtctattttgagtatattagttttctatgyctgacataacaaagaaccaacaaactaagtggcttagaacaacagaaatttgttgtctcactgttctggaggctagaatcccgagatcaacgtgttggcc

SEQ ID NO: 399302 - DNA, 201 bp, Homo sapiens
caaaacaaaccagtgctaaccattctggttctatatgcaaagggattccttaaaattgacattgtgtgcacacacacacacacacacacacacacacacacagaactggtctttgatgactattttgtataagttcttcatttagcaggtgctctttctgaaaaagaaaatttcctatttttttttcttttgtttgcttga

SEQ ID NO: 399303 - DNA, 201 bp, Homo sapiens
acagctcgttggtggggcactcagaacacacacgatgttgactgattaagttcactgtcttatacgggtgtggtttgtggtgccccaaaacaattaccatrgtaacatcaaggatcactgatcacaggttaccataacacatataataatgaaagagcttgaaatattatgagaattgccaaaatatgacacagagacatg

SEQ ID NO: 399304 - DNA, 201 bp, Homo sapiens
taataaaattatgtttgttttgtgaaaacatttttgcagttatcaggcatcttacattgattggctacatatattatagattgttttttttttttttttttgagacggagtctcgctctgtcgcctaggctggagtgcagtggcctgatcttagctcactgcaagctctgcctcccgggttcacgccattctcctgcctca

SEQ ID NO: 399305 - DNA, 201 bp, Homo sapiens
tttggctatagtgtttaatgctgcagtgaacatggggtgcagattactgtcatttgatttcattttttaaatatatactcagtagtgagattgctggatcrtatagtaattctatttttactttcttgaagaatgttgatactgtttgtcatcatggctgtactaatttccactcccaccaacagtgtacaggggttctct

SEQ ID NO: 399306 - DNA, 201 bp, Homo sapiens
tattgtaagtgaactaacacaggaacagaaaaccaaatatcacatgttcactctcacttttaagtgtgagctaaacatcatgtacatacagaggggacaayagacaccagggcctactttagggcagggggtaggaggagagtgaggatcaaaaaactacctatcaggtactatgcttgttacctgggtgatgaaattatc

SEQ ID NO: 399307 - DNA, 201 bp, Homo sapiens
tgtttgtcgcttttttagacataatggtattgcacacttaatagactacagtatagtgtaaacataatttgtatatgcactaggaaaccaaaaaaattcatgtgactccctttattttagtattcaggaacctaacttacaatatctctgagctatgcctgtacagaaaaactggatatatagaagatagtttcagaaatt

SEQ ID NO: 399308 - DNA, 201 bp, Homo sapiens
catcgatgctaggaagaaactgcagcaactaacgagcaaaataaccagctaaattcataatgacaggatcaaattcacacataacaatattaaccttaaakgtaaatgggctaaatgctccaataaaagacacagactggcaaattggataaagagtcaagacccatcagtgtgctgtattcaggagacccatctcatgtg

SEQ ID NO: 399309 - DNA, 201 bp, Homo sapiens
taaaatagtgtagtatttgcatataacctatgcacatcctcctgtatactttaagtcatttctagattatttataatatctaatataatctaaatgctacrgaaatagttgtattgttagggaacaatgacaaggaaatagtctgtacatgttcagtacagaaacaggtttttaaaaaatattttcagactatggttggtt

SEQ ID NO: 399310 - DNA, 201 bp, Homo sapiens
caacatcactaatcattagagaaattcaaatcaaaaccacagtgagataccatttaacaccagtcagaatggctatgattaaaaagtcaaaaaataacagmtactggcgaggttgtggagaaaaacgaatgcttatacactgttgatgggaatgtaaattagttcagccattatggaagacagtgtggtgattcctcagag

SEQ ID NO: 399311 - DNA, 201 bp, Homo sapiens
gaattttcaacccagaatttcatatccagccaaactaagcttcataactgaaggagaaataaaatcctttacagacaagcaaatgctgagacatcctgaargaagcactaaacatggaaaggaacagctgttaccagccactgcaaaaacatgccaaattgtaaagaccatcgatgctaggaagaaactgcagcaactaac

SEQ ID NO: 399312 - DNA, 201 bp, Homo sapiens
tatctgtgggagattggttccagggcctcccatgggtgccaaaatccacggatgctcaagttcttgctgtaaaatagtgtagtatttgcatataacctatkcacatcctcctgtatactttaagtcatttctagattatttataatatctaatataatctaaatgctacagaaatagttgtattgttagggaacaatgaca

SEQ ID NO: 399313 - DNA, 201 bp, Homo sapiens
ccaataagcatatgaaaaaatgcccaacatcactaatcattagagaaattcaaatcaaaaccacagtgagataccatttaacaccagtcagaatggctatkattaaaaagtcaaaaaataacagctactggcgaggttgtggagaaaaacgaatgcttatacactgttgatgggaatgtaaattagttcagccattatgga

SEQ ID NO: 399314 - DNA, 201 bp, Homo sapiens
ccacaaagggaagcccatcagactaacagctgatctctcagcagaaactctataagccagaagagagtgggggccgatattcaacattcttaaagaaaagrattttcaacccagaatttcatatccagccaaactaagcttcataactgaaggagaaataaaatcctttacagacaagcaaatgctgagacatcctgaagg

SEQ ID NO: 399315 - DNA, 201 bp, Homo sapiens
tatctggaatctgtaaagaacttaaacatatttccaagccaaaaacaaacaacttcattaaaaagtgggcaaaggacacaaacagacacttttcaaaagamgacatacacatggccaataagcatatgaaaaaatgcccaacatcactaatcattagagaaattcaaatcaaaaccacagtgagataccatttaacaccag

SEQ ID NO: 399316 - DNA, 201 bp, Homo sapiens
tttctaaatatacaatcatgtcatctgcaaacagacaatttgacttcctctcttcctaattgaataccctttatttctctctcctgcctgattgccctggscagaacttccaacactatgttgaataggagtggtgagagagggcatccctgtcttgtgccagttttcaaagggaatgcttccagtttttgcccattcagt

SEQ ID NO: 399317 - DNA, 201 bp, Homo sapiens
tactatcttgaataggagtgttgagagagggcatccttgtcttgttccggctttcaagggaaatgtttccagcttttgcccatgcagtatgatgttgattrtggatttgtcataggtggctcttattattttgaaatatgttcattcaatgcctagcttgttgaggtttttaacatgaaaggatgttgaattttatcaaaa

SEQ ID NO: 399318 - DNA, 201 bp, Homo sapiens
ggttgtcttggctatgagggctctcttttggttccatatgaactttaaagtagttttttccaattctgtgaagaaagtcattggtagcttgatggggatgscattgaatctagaaattacctcgggcagtatggccattttcatgacattgattcgtcctacccatgagcatggaatgttcttccatttgtttgtgtcctc

SEQ ID NO: 399319 - DNA, 201 bp, Homo sapiens
ctttgctgaagttgtttatcagatcaaggagttttagggtagagactatggggttttctaggtatagaatcatattgtctgaaaacagggttagtttgacrtcctctcttcctatttggatgccttttttttctttctcttgcctcattaccctggccaggacttctagtactatcttgaataggagtgttgagagagggc

SEQ ID NO: 399320 - DNA, 201 bp, Homo sapiens
ttgcaaaaattttctcccattttgtaggttgcctgttcactctgatggtggtttcttttgctgtgcagaagctctttagtttaattagatcccatttgtcmattttggcttttattgccatagcttttggtgttttagacatgaagtccttgcccatgcctatgtcctgaatggtattgcctaggttttcttctagggttt

SEQ ID NO: 399321 - DNA, 201 bp, Homo sapiens
tacttaaaattgaagaatatgaatataaaaatatactatatttaatccatctttagttaatttttgtaaggaagaggtctagtttaagtcttctgcatatrgctagccagttatcccaacaccatttattaaatagggagtcctttctctattgcttgtttctgtcgactttgtcaaagatcagatggttgtaggtttgcg

SEQ ID NO: 399322 - DNA, 201 bp, Homo sapiens
tttgttttgttttatttcaaggatatgcttcatcatcatcattaccaccatctaaatgcattgttggcagtatggaaaggcaacaataatctttaacattyaaatattttctagtaggttacagatgcattaaatattccattttgtcttagtgaacaaattcaataaatgaggctaaatgtcttatgaagctaactttat

SEQ ID NO: 399323 - DNA, 201 bp, Homo sapiens
aaaaaaataaaactcctagccttacaactcactaaaagattgcaaccagcagtttaaaaaaccgtgatacataacatgtccttttggcaagtttgaacagsaatgtgtttggtggtttatgttactcgctggaaaacaagcgtttttgaaaccattatagtgttgaaagaaagtataacaaataatcttagattacagttg

SEQ ID NO: 399324 - DNA, 201 bp, Homo sapiens
agttttttttttatcatttcagaagatgtaataattattagataatatttatttagcattctgctgttgggactttggtggcatctttaaaaaaagattttacatatttattttatccttagaagtttacattctaaagaataaaatcagtgtttgagcacagtaagtcattggacatatttgaagttcagttagagttct

SEQ ID NO: 399325 - DNA, 201 bp, Homo sapiens
actaaataattgacaactctttaatttagaaattttatagataatacaggtatttcttctttatgagtaaactttcaatatgagttcgtttgtgttgacayagataactgtgaagaatcatgatattgctcagtaaggaaaaattctatatagctactcctctaagtttatttttattaaaaaattaaacttgttgaattc

SEQ ID NO: 399326 - DNA, 201 bp, Homo sapiens
gtggaccctgaccaaagacttcaaggtaaattctatgggtttattagttgtcttggttttatgttttggtggaatataatccacaagacatgtaaagctgmaatgtaatataaagaaattccatatcattgtttctctagagatagttcagtaaaggtcaaagtaaattgaatcaagatagtgaggcaatacagttgaact

SEQ ID NO: 399327 - DNA, 201 bp, Homo sapiens
acaagaaggcttgcaagcagttgtagacaattttattttttgtgaccattctgtggcttgatggtaaattacaagagaggtaataacacttcacagaaatktctttatcactttctatcatcttccctgcccttggcagtctcctttgctatttagatgacaatatatactcagagtttgtattttaaaaagcatgactct

SEQ ID NO: 399328 - DNA, 201 bp, Homo sapiens
atatattttgctgctttgtggataattagccgcagctttgttcagaaaaggtggaggtaagtgaggaataggtatcagacatctatatattgttttataawtttttttgtaaaacattattatcagtagctctggctttgtggctgctgtcaaataaatttggttacttataaataactttaggttagactatgatagcta

SEQ ID NO: 399329 - DNA, 201 bp, Homo sapiens
ttcatatccttcgcccacttgttgatggggtggttcttttcttgtaaatttgtttgagttctttgtagattctggatattagccctttgtcagatgagtarattgcaaaaattttctcccattttgtaggttgcctgttcactctgatggtggtttcttttgctgtgcagaagctctttagtttaattagatcccatttgt

SEQ ID NO: 399330 - DNA, 201 bp, Homo sapiens
taggagaaatgcattaggagggatataaattagaaaacttctatttgaccagcctgatttgtaatcttcataaacattctagtgtattttctagaaaatayacacagtgctattttaaaccatgaactatttgccagatttttaatggctattgaaacaaagaatcccagaggtggtagaattttttgtaaggaccacaag

SEQ ID NO: 399331 - DNA, 201 bp, Homo sapiens
ttcctgtcttttctgacactcaggatatgaaattattttgccatgtaattcaattaggtcactgaaacactttgtgagttagacttctgtaatgcaaaatmgtgttgcttatatatcttcattttttttcagagcaggagtcatttcaagagtcagaactacctagaaagtaagataattacacttaattattttttacca

SEQ ID NO: 399332 - DNA, 201 bp, Homo sapiens
agaagtgtctgttcatatccttcgcccacttgttgatggggtggttcttttcttgtaaatttgtttgagttctttgtagattctggatattagccctttgycagatgagtaaattgcaaaaattttctcccattttgtaggttgcctgttcactctgatggtggtttcttttgctgtgcagaagctctttagtttaattag

SEQ ID NO: 399333 - DNA, 201 bp, Homo sapiens
gacttttctccagttctataccccataaaataaagatattcagtgcatcagtctcacagttacatcataagcatttcagtgagctttcctataaagagttkagaataccatctggtacatagtagtaaatgtaaatattagctgccattagaacttctcagacaggtgtatctatctagacatacagggatgtgtgttatg

SEQ ID NO: 399334 - DNA, 201 bp, Homo sapiens
ttgctattgtgaatagtgccgcaatgaacatatgtgtgcatgtgtctttatagcagcatgatttataatcctttgggcatatacccagtaatgggatggckgggtcaaatggtatttctagttctagatccttgaggaatcgccacactgtcttccacgatggttgaactagtttacagtcccaccaacagtgtaaaagtg

SEQ ID NO: 399335 - DNA, 201 bp, Homo sapiens
gggctacacagctttatgcctcaagaattttgatttgtcttgccacttgataggaagctactaaagccctctcttcttcgctggaccttcagccagcctcyagaaaatgcagtagattctcaaggatatcacttcagcatgaaatagatttcacagaaaaatgaaatgcttcacttccaccttgttttgttgcctttcaaa

SEQ ID NO: 399336 - DNA, 201 bp, Homo sapiens
ttctccacagcctcaccagcatttgttgttgcctgactttttaatgatcaccattctaactggtgtgagatggtatctcattgtggttttgatttgcattkctctaatgaccagtgatgatgagatttttttcatatgtttgttggctgcataactgtcttcttttgagaagtgtctgttcatatcgttcgcccagttttt

SEQ ID NO: 399337 - DNA, 201 bp, Homo sapiens
aggttccttctcctggcctgcttcctcagtctttctccccagctgttgagggctgtattccctgtccaagctcctcctcctttccaaattagttccaatchgttcccctggcctgtccccaccactcggtcagctcgctcagtacttctaaacctcatgtgtctgctccgtatctctgttcttcagagccagtctttctgt

SEQ ID NO: 399338 - DNA, 201 bp, Homo sapiens
atttatacgtttgcctttggcgagcactttggttggagataaggaagaggcaagggtaagatatgtttctttcaatccattcagacaaggctgtggaatcscagtgctatcttgagtgcactagttggatttctcatcattccacctttcatgggttatttaatctctctgcctcattttatcatctgtaaataagagact

SEQ ID NO: 399339 - DNA, 201 bp, Homo sapiens
tcattcattccgcactattcctggttggtatttaaatgttctgagaccttttcttgtttccctgcccaaattttcttcttttactttttagtaattattgygtacaacagcaattccaaaaatatttcttcaccttcttctagcctttttgtggaacatatgatcccaaatatttcattgacctattttgtagggtagctc

SEQ ID NO: 399340 - DNA, 201 bp, Homo sapiens
tataattcacatacaactataaaataaaatatatttataaactaaataccaaagaactcccacaaaactaatcaaattcaatttaacagtgttaaattatrtgaatgtaaatgtttgctgaaactaagttgcacctgctatggtgtagtttttttatagatatattttttttattatactttaagttctagggtacatgtg

SEQ ID NO: 399341 - DNA, 201 bp, Homo sapiens
gccaaagactgtgaaggaaggatagagaaataaaaggagggagggagataaatagctttccgaaatgcattatttgtgtcatcttcatggggcctcaaagwttcttaaagatgcttccatctgcatactctgaattacaatatggaatttataaagatgacaatatttctgaaagccagaatgactcgtgggatgtctgtg

SEQ ID NO: 399342 - DNA, 201 bp, Homo sapiens
gtaaacttttctgtaattgtaattaggaaattatccctttcattcattccgcactattcctggttggtatttaaatgttctgagaccttttcttgtttccmtgcccaaattttcttcttttactttttagtaattattgcgtacaacagcaattccaaaaatatttcttcaccttcttctagcctttttgtggaacatatg

SEQ ID NO: 399343 - DNA, 201 bp, Homo sapiens
atacaactggaatctttataactcaaataaatgattaatgtttgcagtgatggatatctcatttaccctgatgtgattattacacattgtatgcctgtatygaaatacttatgtaccccataaatatatataccttctatatagccataaaaataaaaaattaaaaaaataaaaattaaaagaaaatactaggagagtatt

SEQ ID NO: 399344 - DNA, 201 bp, Homo sapiens
gtacagtttttaaaggtgtaaccattggagaaatgagtaaagggcatccaagatctctgttatttcttgcaactaactgcatgtgaatttataattatctsaaaataaaaagtttgattaaaatgtagtgcacaaaatttattatatagcttattatcttttatataataaggttctgttgtttgatgatgtaaacttttc

SEQ ID NO: 399345 - DNA, 201 bp, Homo sapiens
gggtagtggttgctgaaggttgggtggctctaacaatttcttaaagtaagacagcaatgaagtttgctacatcgattgactcgtcctatcacaaaacattyccttatagcttgcaatgctgtttgatagcattgtattcacagtagtattgctttcaaaatttgaatatgtcttctcaaactctgtgctgctttatcaact

SEQ ID NO: 399346 - DNA, 201 bp, Homo sapiens
tgaactcatggagatagagagtagaatgatggttaccagagactggaaagggtactggaaaggagagaggaaaatggggttggctaatcggtacaacaatrtacttagatacaatgaataagatgtagtatctgatagcacaacagggtgactagtcaggaataattttttgtacattttagaataactgagggaatacaa

SEQ ID NO: 399347 - DNA, 201 bp, Homo sapiens
caacaccaggactctttggtaagggaacttttctgtctcttgattatggtggtggatatgcaaacctacacatatgaaaaagttgcagagaatgaaaagcrtacacacacacacacacacacacacacacacacacagatgagtaccaccaggaaaatcagatagatgatagattttatcaatgtcaatattgtttccaat

SEQ ID NO: 399348 - DNA, 201 bp, Homo sapiens
ttaccttgatgtaaatggctactgactgatcagggtagtggttgctgaaggttgggtggctctaacaatttcttaaagtaagacagcaatgaagtttgctrcatcgattgactcgtcctatcacaaaacatttccttatagcttgcaatgctgtttgatagcattgtattcacagtagtattgctttcaaaatttgaatat

SEQ ID NO: 399349 - DNA, 201 bp, Homo sapiens
gacaaacagcgagccaaatcatgagtgaactcccattcacaattgctacaaagagaataaaatacctaggaatccaacttacaagggatgtgaaggacctkttcagggagaactacaaatcaccgttcaaggaaataagagaggacacaaacaaatggaaaaacattccatgctcgtggataggaagaatcaatatcatga

SEQ ID NO: 399350 - DNA, 201 bp, Homo sapiens
cacttactacctaagtgactttgggcaagttttttaaacttctctgggtttcattttttcacattcataaaaccggggtaatacttctgactctcttgtargattattttgaacatcaaattacttgatgcatgtgacacgtagggtccagtgttgcactcagcacaaagctggttgctattacagtgaataacccagaaa

SEQ ID NO: 399351 - DNA, 201 bp, Homo sapiens
attaggataatatatattaaaaatacaaactgtaaagtgctcaaccaaataaaaaacattaaatattgtgtgcagtaaaggttgaaggttacatgcttagrtttgggagccatattacctacctgggtttcaatcctggctttgtccctttttatctgtgtgacacagggcaacttaaagtttgtgtctcagtattctcct

SEQ ID NO: 399352 - DNA, 201 bp, Homo sapiens
gtactccaaaagcagggaaggcaggagggctctgaggaatgaaaaattacctcttgggtacaatgttcaatatttgagtgatgggtacaccagaagcccartcctcaacattattcaaaatacccatgtgacaaacatgtacatgttccccctgaatctacatttttttttcagaagaaaataagtgattgtttttatttt

SEQ ID NO: 399353 - DNA, 201 bp, Homo sapiens
ttgaacctgggaggcggaggttgcagtgagctgagatgtgccattgcactgcagccggggtgacagagcaagactccatctcaaaaaaaaaaaaaaaaaaagtgcctctcaatgaggtgtaaaggtagtggtacttacggcagactagaaagatgctatgtcagtcgtgctgctagggacctctgaggagctaaactctgg

SEQ ID NO: 399354 - DNA, 201 bp, Homo sapiens
tgattttattttaaaaatgtggtatatgcatgccaagtaatactatatggccatgaaaaagaatgaaatcatatcctttgcagcaacatagatggacctgraggccattatcttaagtgaactaactcagaagcagaaaatcaaatatcacctgttctcacttataagtctgcactaaacagtgggtacacatggacataa

SEQ ID NO: 399355 - DNA, 201 bp, Homo sapiens
cttgaacctgggaggcggaggttgcagtgagctgagatgtgccattgcactgcagccggggtgacagagcaagactccatctcaaaaaaaaaaaaaaaaaaagtgcctctcaatgaggtgtaaaggtagtggtacttacggcagactagaaagatgctatgtcagtcgtgctgctagggacctctgaggagctaaactctg

SEQ ID NO: 399356 - DNA, 201 bp, Homo sapiens
ctcaataattcacttgctagtcacctaattggaaaagtttatagaataggttaacagatgtcaagtacgaaaaaaaaaaaaaaaagtaataagaagcactktattttgtcggcatagcccagacaatccattaaaaaaattaaaactggagtccctttttggcccctgggtatgactcatgtgtgtacacagacatataaa

SEQ ID NO: 399357 - DNA, 201 bp, Homo sapiens
ccagcaacggcaccgcaagagacgacaactgcgcttactcaccacaccgaagggaaagaggcgctcctccgcctgcgcatggcttatataggcggtctgtytgcgcgcgtaagaaccatagagtcctgtcgaagacgggtggacgctctgtcagacgtcatgaccatagacgcagccgctcttggccttgcgcccgggcgt

SEQ ID NO: 399358 - DNA, 201 bp, Homo sapiens
gagccgcttttcagccaccatgtcttcaaattcatcagcattgaacttggtgaagccccacttctttgagatgtggatctaaggagcaatggaaagaactsagtcaggaggcctggggcaaaggtgggagaagggggctgcagcactacataccttctggcggccaggaaacttgaacttggccctgcgcagggcctcaat

SEQ ID NO: 399359 - DNA, 201 bp, Homo sapiens
ggaggctggtgctgggcagcagctagtgccacttcctctgtcccatatttcagcgcctccagagccagaactgagcccagtgagagcgcaccctggggcarcctggattcctggggtgtccccggcagccacacacagccatgcactacccaactgcactcctcttcctcatcctggccaatggggcccaggcctttcgca

SEQ ID NO: 399360 - DNA, 201 bp, Homo sapiens
aaaatcaaagacgtggggccactgctgcccatccctttgtcctcccaggtcacacaaaacacaggtcctgagttcctacgtgtacaacgatgaggatgacrtctttgcccgggagccatttgtggcccagttctctttgcccagcaatggtaggaagggaagggtgggcttggtatgtgggagcagaaggggagttctggc

SEQ ID NO: 399361 - DNA, 201 bp, Homo sapiens
ccttctgcctggggagggtttgagagggagagggaagcctagggctcccaccaaggctgatattgacagccagggtttggggctgaagccaggaaccgtcrctctctctggttcttactggtagccctcatgggggtccctgacgccagagcctccaaggctgcatgtgccagcccagggctgcccacatacccatgtata

SEQ ID NO: 399362 - DNA, 201 bp, Homo sapiens
ttgcaggggctggggggaggggagaatggagagtaactggtaatggatgttatgtttttattaggagtaatggataccaatgttttaaaattgattgtagmaatagttgcacagccttatgaatgtacaaaagaaccgtgttgtatacttgaagcaggtgaattttatggcatatgaattatgcctgatttttgaaagttc

SEQ ID NO: 399363 - DNA, 201 bp, Homo sapiens; identical to SEQ ID NO: 88360

SEQ ID NO: 399364 - DNA, 201 bp, Homo sapiens
gagcgacgggcctggcgagcgaagctcggggtctcactcaggcaccagcccctccttgccccaggcttgagtgactcacaggtctgtcatgtcccgctggyccgggaaggcggggtctgggtgggaaggtgggcgggcaggtcagcagttcccaggcctggtgctggtcctccttgttggcggcgaggcggagacggggcg

SEQ ID NO: 399365 - DNA, 201 bp, Homo sapiens
ggtccctccaaaacagagacactggccaccagctttcctgccccagaagtgcctccctgcactcgctggaggagcagctcacctcggcacacaggcacacrcttgcccaagctgaagaagtgggagtgtagctccttggtgaagcagatgtctgcagctgcaggggtcctaagcagggacagatgcaattagtcctgcccc

SEQ ID NO: 399366 - DNA, 201 bp, Homo sapiens
acctaaaaggtgtgagaaccagcaacggcaccgcaagagacgacaactgcgcttactcaccacaccgaagggaaagaggcgctcctccgcctgcgcatggyttatataggcggtctgtctgcgcgcgtaagaaccatagagtcctgtcgaagacgggtggacgctctgtcagacgtcatgaccatagacgcagccgctctt

SEQ ID NO: 399367 - DNA, 201 bp, Homo sapiens
ttgaattctaatgccaaggctccaggtccacaggatccctgggcagttgcagagagttgaggactttccaaggacccatccctcctcccacagcctctgtyccctctgctggcatgtgatggagctgggcctcatgttggctcccgggatgcctacccccataggtccctccaaaacagagacactggccaccagctttcc

SEQ ID NO: 399368 - DNA, 201 bp, Homo sapiens
cgctctgtcagacgtcatgaccatagacgcagccgctcttggccttgcgcccgggcgtagcccagcacatgcgcagatcagagaggtgaccgggtaccagrgccgcgggcggccagctgacgaatggggcttcgccacatggtcgcgagaagcccgcttccggctggccatcttgggcgtagaactcttgccctaggcttt

SEQ ID NO: 399369 - DNA, 201 bp, Homo sapiens; identical to SEQ ID NO: 88361

SEQ ID NO: 399370 - DNA, 201 bp, Homo sapiens; identical to SEQ ID NO: 88362

SEQ ID NO: 399371 - DNA, 201 bp, Homo sapiens
actgggaggctggtgctgggcagcagctagtgccacttcctctgtcccatatttcagcgcctccagagccagaactgagcccagtgagagcgcaccctggrgcagcctggattcctggggtgtccccggcagccacacacagccatgcactacccaactgcactcctcttcctcatcctggccaatggggcccaggccttt

SEQ ID NO: 399372 - DNA, 201 bp, Homo sapiens
actgcctcctctcagggcagttggcactgagtcaggctggccttcctgatgtcccacagatactggctcgctgtgacatcatggtgctgcaggaggtggtrgactcttccggcagcgccatcccgctcctgcttcgagaactcaatcggtgaggaagattctgtgggtctaatcaggggcacacccagaggcttgaggccc

SEQ ID NO: 399373 - DNA, 201 bp, Homo sapiens
cgcaagccaccacacctggctaatttttgtatttttagtagaggctgggtttcttcatgttggtcaagctggtctcgaactcccggcctcaggtgatctgyctgcctctcctcccaaagtgtgagtcatcctacctggcctgttttttatttttaaaccataatttattgatttttttttttgagatggagtctcgcactg

SEQ ID NO: 399374 - DNA, 201 bp, Homo sapiens
catttgccaagacactgtggcctctgcttgttcctttacagagacagaagttcctttacagagacagaagtagcctccaaaagcagcagaaagagaaaccrctccagggggctgcttctgaggagtggggctagggaggtgaggggcaggcactgcagctttccattaaaagcccctctttgttatttgctgttactttat

SEQ ID NO: 399375 - DNA, 201 bp, Homo sapiens
gaaggtggaggttgcagtgagctgagatcacattactgccctccagcctgagcaacagaatgagactatcaaaaaaaaaaaaaaaaaaaagggggggggcygggcgcggtggctcacgcctgtagccccaactactcaggaggctgaggcaggagaatcacttgaacccggaaggcagaggttgcagtgagccaagatcac

SEQ ID NO: 399376 - DNA, 201 bp, Homo sapiens
cactggcccgggtaccccagagatgagggtcgtccatgcaggactggtgattggacacggtgatgaggggcgtggccgggcctcgcttctcgatgagctcstacagcacctccctgttgtgcacggtcaggtggttcatgtactctggcggggaaggagaggtcaggcgctccgggctcgcccgctaggtcggggccgcgg

SEQ ID NO: 399377 - DNA, 201 bp, Homo sapiens
cttgaattctaatgccaaggctccaggtccacaggatccctgggcagttgcagagagttgaggactttccaaggacccatccctcctcccacagcctctgycccctctgctggcatgtgatggagctgggcctcatgttggctcccgggatgcctacccccataggtccctccaaaacagagacactggccaccagctttc

SEQ ID NO: 399378 - DNA, 201 bp, Homo sapiens
tgctggcctcagtctcctcctctgtgaaacaggtgacatgtgggtgggatgagtcttttcctggggcatttccagtcccactgctttctgtgggctgcagycagtgagccttaacactctgggccacaacagtgccagtcccctgggcccactgcctcctctcagggcagttggcactgagtcaggctggccttcctgatg

SEQ ID NO: 399379 - DNA, 201 bp, Homo sapiens
ggaacggccactttcacgtgcagaggccaccccacccgaccgccggccgggctcccagcgccccgggccgacctgtggaacgcctctaggctgcgacctckaccgcctcgacacactggcccctgactggcccgcgcacggacggacgggggcgcggcgcaacagggtactggaccgaggtcccttcgcaggtcaggccgg

SEQ ID NO: 399380 - DNA, 201 bp, Homo sapiens
ccgacctgtggaacgcctctaggctgcgacctctaccgcctcgacacactggcccctgactggcccgcgcacggacggacgggggcgcggcgcaacagggkactggaccgaggtcccttcgcaggtcaggccggagcagcgcccggccccgctctctcgtcactggggagcggtctccgaagtcacaggccgtgggcgcgc

SEQ ID NO: 399381 - DNA, 201 bp, Homo sapiens
tgcctcaggatgcaaaagccacatggacagggcgtggagcaaggagccgagccctgcaaggtcaggtgagtgtgagacaaagataaactgagagagggggsctccagctggtgagatgaacaagaagggctccccagtggtggcaggggcatgggaaagagtccccatcacaggttgcaatggggatgatttggccatatc

SEQ ID NO: 399382 - DNA, 201 bp, Homo sapiens
ggacgccacctcctgggcagagcaggaggagggcaaatctgggcagaggcaggtggggccggcccggcccacttcgaggggcccattcctcctcaccaacdcatcaacttcaggttccagatgtggcggagtttcaggatccctagaggacaggaaaggcttcatgccccaacttcccatatccccagggagtgcccttcc

SEQ ID NO: 399383 - DNA, 201 bp, Homo sapiens
ccctcggccccgggcactgacactgccccaccacccattcccaggccctcaacatcagtgaccactaccccgtggaggtggagctgaagctgagccaggcrcacagcgtccagcctctcagcctcactgttctgttgctgctatcactcctgtcccctcagctgtgccctgctgcctgagcgtccccctacccccccaggg

SEQ ID NO: 399384 - DNA, 201 bp, Homo sapiens
gtggacaggaagtagaatttattggtgagtattaagaggggggcagcacattggaagccctcatgagtgcagggcccgccacttgtccagagggccacgaytggggatgtacttgaccccacagccatctgggatgagccgcttttcagccaccatgtcttcaaattcatcagcattgaacttggtgaagccccacttctt

SEQ ID NO: 399385 - DNA, 201 bp, Homo sapiens
gtcaggccggagcagcgcccggccccgctctctcgtcactggggagcggtctccgaagtcacaggccgtgggcgcgctgcggaacgggaggaaacgggaargcgggcgctggcaccccggcccggtgcaaccgccggaaagcgaacctgcgccggtgcccagcccgaccgactgtcgaaagcgcgcacgggccgcttgacg

SEQ ID NO: 399386 - DNA, 201 bp, Homo sapiens
gctgcaacgaaaaagagagagtcggaacggaagacgagaacagacctaaaaggtgtgagaaccagcaacggcaccgcaagagacgacaactgcgcttactyaccacaccgaagggaaagaggcgctcctccgcctgcgcatggcttatataggcggtctgtctgcgcgcgtaagaaccatagagtcctgtcgaagacgggt

SEQ ID NO: 399387 - DNA, 201 bp, Homo sapiens
taatgccaaggctccaggtccacaggatccctgggcagttgcagagagttgaggactttccaaggacccatccctcctcccacagcctctgtcccctctgstggcatgtgatggagctgggcctcatgttggctcccgggatgcctacccccataggtccctccaaaacagagacactggccaccagctttcctgccccag

SEQ ID NO: 399388 - DNA, 201 bp, Homo sapiens; identical to SEQ ID NO: 88364

SEQ ID NO: 399389 - DNA, 201 bp, Homo sapiens; identical to SEQ ID NO: 88365

SEQ ID NO: 399390 - DNA, 201 bp, Homo sapiens
cactgagtcaggctggccttcctgatgtcccacagatactggctcgctgtgacatcatggtgctgcaggaggtggtggactcttccggcagcgccatcccsctcctgcttcgagaactcaatcggtgaggaagattctgtgggtctaatcaggggcacacccagaggcttgaggccctgaccccgcctccccttttcttgg

SEQ ID NO: 399391 - DNA, 201 bp, Homo sapiens
ccccgccgcgccccgcccatcgtggccagagcttcaagttccgcagccccagtgcggagggcggagactgcgccgacatggagctgttcctcgcgggccgycgggtgctggtcaccggggcaggcaaaggtgggcggcggggaaaggtgggcaaaggccggcggcgggcagaggcgggcaggggacgccttcactgagccc

SEQ ID NO: 399392 - DNA, 201 bp, Homo sapiens
cacaatgtaatgagcatagacacagcaccctgaagtctaatctgcattttatcatctgaagtctagacaagtaaccataagtcaagcctcctcccaccacrgctgatttcaagctaccagttagatgtcatttaacgtggagctggaggagatgccctcagcaccctgttatgtggtgtttgtgtccataggtcccacaga

SEQ ID NO: 399393 - DNA, 201 bp, Homo sapiens
agccagggtccactacgtcgatttcaagcacggaagatgggtcacaccaggcacttcaaaagacccgtccctgaggcagcggagaccccgccccgccccgscgcgcccactcctttcggccaatcactgcagcggggagcagctatttgaatgtccccaccgcctatctgaaggccgccctgccattggccccgccgcgcc

SEQ ID NO: 399394 - DNA, 201 bp, Homo sapiens
gcgtgggccccgtggacctgctggtgaacaacgccgctgtcgccctgctgcagcccttcctggaggtcaccaaggaggcctttgacaggtgagcctgtgarggcggaggaacctcagggaggggctgtcctggaggacgcagcagccctaatctctgaccagggtctgtccctcggcctctagatcctttgaggtgaacct

SEQ ID NO: 399395 - DNA, 201 bp, Homo sapiens
cccccacaaggccaagactatgctgaaccgaatcccacttggcaagtttgctggtgagtcaggtgggagcccagccagcgtggtgccagcagtccctgtgygtgccctgggtaggggtgggagggaaagatgggcggcagcctccttcctctatgcccctgacccccgccctgcccacagaggtagagcacgtggtgaacg

SEQ ID NO: 399396 - DNA, 201 bp, Homo sapiens
ggagtgacccccacaaggccaagactatgctgaaccgaatcccacttggcaagtttgctggtgagtcaggtgggagcccagccagcgtggtgccagcagtycctgtgtgtgccctgggtaggggtgggagggaaagatgggcggcagcctccttcctctatgcccctgacccccgccctgcccacagaggtagagcacgtg

SEQ ID NO: 399397 - DNA, 201 bp, Homo sapiens
tagggcgcggcacggtccaggcgctgcacgcgacgggcgcgcgggtggtggctgtgagccggactcaggcggatcttgacagccttgtccgcgaggtaggycccgccgggtcccagcgctgcgaggcggcgagccaggagggggcggcagcgagcgggggcggtacctctgtgcgcgactccgcctcccctcgcgggcgct

SEQ ID NO: 399398 - DNA, 201 bp, Homo sapiens
tgagcatagacacagcaccctgaagtctaatctgcattttatcatctgaagtctagacaagtaaccataagtcaagcctcctcccaccacggctgatttcragctaccagttagatgtcatttaacgtggagctggaggagatgccctcagcaccctgttatgtggtgtttgtgtccataggtcccacagatgtacataac

SEQ ID NO: 399399 - DNA, 201 bp, Homo sapiens
accttcggaactcctaactcctttacttgtccggctgaaaggtcaccagccccagtccccagctgtgccgcttgctgggcacagagcctctggtaactgcyccctgatacacacagtgcccggggatagaacccgtgtgcgtggacctgggtgactgggaggccaccgagcgggcgctgggcagcgtgggccccgtggacc

SEQ ID NO: 399400 - DNA, 201 bp, Homo sapiens
gagatgccctcagcaccctgttatgtggtgtttgtgtccataggtcccacagatgtacataaccgaggggcagagaaaacagtcgtgtatgcagaaataastaggaagtgacgtttgccgattttgcttttaataacacaaattgtaagcttctataatttgttaatgatcattaacaactggctagcaaaattgttgaga

SEQ ID NO: 399401 - DNA, 201 bp, Homo sapiens
ggctgtcctggaggacgcagcagccctaatctctgaccagggtctgtccctcggcctctagatcctttgaggtgaacctgcgtgcggtcatccaggtgtcrcaggtgagctgccctgtgggctggacgggaattctcgtgagtgatgccagctctgcctcacggtctcgctgcgattccagattgtggccaggggcttaat

SEQ ID NO: 399402 - DNA, 201 bp, Homo sapiens
gtgctggtcaccggggcaggcaaaggtgggcggcggggaaaggtgggcaaaggccggcggcgggcagaggcgggcaggggacgccttcactgagcccgctytcggcaggtatagggcgcggcacggtccaggcgctgcacgcgacgggcgcgcgggtggtggctgtgagccggactcaggcggatcttgacagccttgtcc

SEQ ID NO: 399403 - DNA, 201 bp, Homo sapiens
gcgccgacatggagctgttcctcgcgggccgccgggtgctggtcaccggggcaggcaaaggtgggcggcggggaaaggtgggcaaaggccggcggcgggcmgaggcgggcaggggacgccttcactgagcccgctatcggcaggtatagggcgcggcacggtccaggcgctgcacgcgacgggcgcgcgggtggtggctgt

SEQ ID NO: 399404 - DNA, 201 bp, Homo sapiens
tgtgccctgggtaggggtgggagggaaagatgggcggcagcctccttcctctatgcccctgacccccgccctgcccacagaggtagagcacgtggtgaacrccatcctctttctgctgagtgaccgaagtggcatgaccacgggttccactttgccggtggaagggggcttctgggcctgctgagctccctccacacacct

SEQ ID NO: 399405 - DNA, 201 bp, Homo sapiens
tgcccacagaggtagagcacgtggtgaacgccatcctctttctgctgagtgaccgaagtggcatgaccacgggttccactttgccggtggaagggggcttytgggcctgctgagctccctccacacacctcaagccccatgccgtgctcatcctacccccaatccctccaataaacctgattctgctgcccagactatgtg

SEQ ID NO: 399406 - DNA, 201 bp, Homo sapiens; identical to SEQ ID NO: 88430

SEQ ID NO: 399407 - DNA, 201 bp, Homo sapiens
tgaatcctctgagagtttctttatgcatttacaaacaaatacaattattatgcttatagtcttcattttcccagccttcccaagtgtatagactacatttytaggagaggaacagattggataaagcatgtacacagtttgaattttgatgcatctccaacactaagtattacttttaacaaagagatttctttttgacag

SEQ ID NO: 399408 - DNA, 201 bp, Homo sapiens; identical to SEQ ID NO: 88431

SEQ ID NO: 399409 - DNA, 201 bp, Homo sapiens; identical to SEQ ID NO: 88432

SEQ ID NO: 399410 - DNA, 201 bp, Homo sapiens; identical to SEQ ID NO: 88433

SEQ ID NO: 399411 - DNA, 201 bp, Homo sapiens
gcatcagtcttgagattaggggaaaagagtggagttagcaaaggtagtagtagttaaaattaggaaagaaggtgacattttctagatggagcatgaagackgagaagagagttaagggtagaacactgggaataccatcagttttagagaagaaagatacacccacaaaggagactgagaaggaacagccagagatgggga

SEQ ID NO: 399412 - DNA, 201 bp, Homo sapiens
agtatacgtaacgactcttgctaattgggagtaaaagtaactacagagaaagtatttccaggtcctatctcagtgaatagtttggtacacctttctctcaagagattaaaattttagaaatttacacttttgccattttttctttccttttaatcctgttttatggtaaaggaactttgcaacagtgaacaacaggaaggg

SEQ ID NO: 399413 - DNA, 201 bp, Homo sapiens
tgttcatactaagggaggtaagtgatgattatcagtatcttcatatcagttcagggcatgctttgccattaaatgagtttttaacttaaaagatacacttycaggttttagagttttttggattttggaattgtacataaggaagttaagggatgatgggcttatattaactctgtttcaagcccaggatgagggtagata

SEQ ID NO: 399414 - DNA, 201 bp, Homo sapiens
tgagtgagattgaacatcttttcacatgtttaagggtcattttatgtctttgtgacatgttttactttaaaagtttattttggatgcacacttttttttttgttatcattgttaggttattcaccttcaacttgtcagaacagtagcactctaaaaacgccagactttattatgactctcctctttcagatcttccatggt

SEQ ID NO: 399415 - DNA, 201 bp, Homo sapiens
tcctgccttcagccccccaagtggctgggattacaggcatgtgccaccaccccctgctaattttttttttttctattttttgaagagatggggtctcactrtattacccatgctggtcttgaatacctgggcttaagcaatctgcctacctttacctcccaaagtgctggggattataggtgtgagcccctgcacctggcc

SEQ ID NO: 399416 - DNA, 201 bp, Homo sapiens
ctggatgagtcagtgagtgaatgtgaaggcctaggacattatcgtacactactatagactttataaacatcatacatgtaggcgacactgactttaaaatyttttctttcttttttaaaaatttttttgggtttttatttttatttttttatgagacgggatctttccttgtcacccaagctggagtgcagtgtcatgacc

SEQ ID NO: 399417 - DNA, 201 bp, Homo sapiens
ctgcagtgagccatgattgtgccactgcactccagcctgggtgatggagtgagactctgtctccaaaataagtaaataaataaaattaaaaaataaaaatmcaataatgaataaaccacattttaagtgtaacgtgcaattataaaacaaaacaatactaaggtgtgcaagcagaggaaataaccgcctcccacactcatc

SEQ ID NO: 399418 - DNA, 201 bp, Homo sapiens
tctagcctagatggtggagtgagaccctgtctctaaaaaagaaaaattaaaaacctgtataagggtatgaagaatctgtaatggtttaaacaatgaggacwtagttgttgcttctttagaaaaaaaataccctttaaagttatataggcttatgttccatgtctgcatatcttatttgcgtatctcattgccttaatggat

SEQ ID NO: 399419 - DNA, 201 bp, Homo sapiens
attaaaatcataatttgtaatgtcgatatgaaatgaatccagagcaaatcagggcaagaagatgtaaactaggaagggccttcctctgtgtgtgtgtgtgkatgtgtgtttgtgtgtgtgtgtgtgacccacagagagagagagaaagagaggtccttgagtcataaagatttcttgtttattttttttttagagacatag

SEQ ID NO: 399420 - DNA, 201 bp, Homo sapiens
aattgttaaatgtcccaaatcttttaaaatcaggtaacccacaggacatataagaaaatggaagtcttactcctgtctccccccactatctgaatttgagycacactgggatgtgtatagataaccttagttaaggtgctgcagattcccatttacagtcagagatgtctttgctgattgtacagatggtggctgtgctag

SEQ ID NO: 399421 - DNA, 201 bp, Homo sapiens
tctaactcaggtttttaacccaaagcccatggggtttcttctttactttctagatttggaattcttttaaagacaagtacagagtcattggaaaaaaaaaagttgaacatcatagaagactgagtcattcattgataactgttgggcctaagtggtgggtggatttggtttgattatattgctctctctacttttatgtat

SEQ ID NO: 399422 - DNA, 201 bp, Homo sapiens
ctttgtgagaattcagtaaagctttggtttttaaaatattgttttagaggggtttttattctcttataaactacgtgaaaacttttctgagaagtaggctrgatatataaataatcttataatgtcatagtttgcactttcagatatattttagtgtagtgtaactggaaaaaaaatcagatctttgacttagcatttcat

SEQ ID NO: 399423 - DNA, 201 bp, Homo sapiens
ctctcaacttagttggtattctttgtgagaattcagtaaagctttggtttttaaaatattgttttagaggggtttttattctcttataaactacgtgaaarcttttctgagaagtaggctagatatataaataatcttataatgtcatagtttgcactttcagatatattttagtgtagtgtaactggaaaaaaaatcaga

SEQ ID NO: 399424 - DNA, 201 bp, Homo sapiens
tttattttctgtatgctctaaatgaaagttctgtggtgcttttcatgtagatattagacctttcttttattcatttgtttgttcgttttgtttttttttttctttctttcttgagactgggcctggctattttgcccaggctgatcttgaacccctgggctcaagcaatccctctgccttggcctcccaaagtgctggaag

SEQ ID NO: 399425 - DNA, 201 bp, Homo sapiens
gaacccgggaggcagaagttgcagtgagctgagatcacgccactgtactccagcctggcgacagagggagactcagtctccaaaaaaaaaaaaaaaaaaaactccctagaagtcccataagaattttgattgaaattgcattaaatttctatattaatttgagagataccaacaagtttgaaatgttgaacctgtgcatcc

SEQ ID NO: 399426 - DNA, 201 bp, Homo sapiens
gagtccacctgtgtagatgatattcacccacgatttctagtggctctcatttcacgccgaagtaggcacagagcaggtgagtggagggctgtaatagcatkcaaatcaaatccaggcgagaatggaaaagctgcagatgtgttgaaatgctaatgacaataatggatttgggaacacagttggcttcaaagtgcttgggga

SEQ ID NO: 399427 - DNA, 201 bp, Homo sapiens
tgaacccgggaggcagaagttgcagtgagctgagatcacgccactgtactccagcctggcgacagagggagactcagtctccaaaaaaaaaaaaaaaaaaaactccctagaagtcccataagaattttgattgaaattgcattaaatttctatattaatttgagagataccaacaagtttgaaatgttgaacctgtgcatc

SEQ ID NO: 399428 - DNA, 201 bp, Homo sapiens; identical to SEQ ID NO: 88423

SEQ ID NO: 399429 - DNA, 201 bp, Homo sapiens
ttgaacccgggaggcagaagttgcagtgagctgagatcacgccactgtactccagcctggcgacagagggagactcagtctccaaaaaaaaaaaaaaaaaaaactccctagaagtcccataagaattttgattgaaattgcattaaatttctatattaatttgagagataccaacaagtttgaaatgttgaacctgtgcat

SEQ ID NO: 399430 - DNA, 201 bp, Homo sapiens
ttttacaattgccttatctttttattattgatttataccagatagatgaattgtaaatattttctcctgttctaggggttatcttttcacttttgtgatgktgccctttgaaacacagtttttaatttttatgatgtccagtttgtctgttttttcttcttttattgcttatgattttagtgtcatatcttaaaaatcatg

SEQ ID NO: 399431 - DNA, 201 bp, Homo sapiens
gtctcactctgttgctcaggctggagtgcagtggcgcgatctcggctcactgcaagctccatctcccgggttcacacgccattctcctgcctcagcctccygagtagctgggactacgggtgcccgccaccacgccgggctaattttttgtattttttagtagagacagggtttcaccatgttagccaggatggtctggat

SEQ ID NO: 399432 - DNA, 201 bp, Homo sapiens
ttttcacttttgtgatggtgccctttgaaacacagtttttaatttttatgatgtccagtttgtctgttttttcttcttttattgcttatgattttagtgtsatatcttaaaaatcatgcctaatccaaggttacaaagatttatgcttgtgttttcttccaagagctttacagttttaggtcttacattctcttttgtttt

SEQ ID NO: 399433 - DNA, 201 bp, Homo sapiens
aaatatgcttttgatttaaatcctcttttaacttcatttccttttatctagttatgatgatgaagttgataaagtaaaccagtatcaacgactaagtctasaaaacctggaaaaaattgaaataggtaagttttaacatactaatcaagtcatcaaaagcaaatgctgttgtttccaagagggggtcaaattatttaagca

SEQ ID NO: 399434 - DNA, 201 bp, Homo sapiens
atttatgttattaagcttctaatcagtagtaggcttttcatagttaagttttgggggtgttaaaagttgtatgtggatattgtttttgtttttgagacagrgtcttgctttgtcacacaggctggagtgaagtggcgtgatctcagctcactacagcctcgactgcctaggttcaagcgactctcatgcttcagcctcttg

SEQ ID NO: 399435 - DNA, 201 bp, Homo sapiens
gtttgtattttgtgtgctgtcatttatattatgaagaaaaatgtgttgggtctttttaagataatagaagaaaatgttatgtgaaacatttaactttataygtattcatttgggattttaggccctgaacccactctttttggtaagccaaagttctcctgcatgcgactgcactacagatacaaagaagcgagtggctat

SEQ ID NO: 399436 - DNA, 201 bp, Homo sapiens; identical to SEQ ID NO: 88442

SEQ ID NO: 399437 - DNA, 201 bp, Homo sapiens
agatctttacaagctgtgttactatgtctctgtgtgtctttttgtaaacggttcttttcctgttcaaatatattttaaaacataacctttagaaatctacmtttgcaaacagaagtttgagaagtagcagcaatgtcacagagcctttagtcaatctaagtccttagctgatgtaagtcataatcattatgtgtcagctgc

SEQ ID NO: 399438 - DNA, 201 bp, Homo sapiens
tgtttggaagatctgcagtttgggaagggaatagatacaggggagatctttgagcagatgcattgacatgtgtactcattgggaactatttcctccagtgrtgagcaacctgaagcctttctcagtgtagcttttcaagagtcctagatccaatttcatagacatcctttcagagcatgcacagcagaggtgaaatggagg

SEQ ID NO: 399439 - DNA, 201 bp, Homo sapiens
aataaaggaggcctggcaagggttaagtcacacagctggcagaggtggggcctggatctagactcaggctgcctggtcctatataattctgctgagctgcygccctgttacctgaacatcaggtaacagcaaagcacacactgccccacaactcaacacatgtttttccatgtagagttcttggggaggaactttggggac

SEQ ID NO: 399440 - DNA, 201 bp, Homo sapiens
gccaggtgggccctgtgtattacatagatgataatatttagtccccaagacccccctatgaggtagacattactacaaataaaggaggctaggtgggtggytcctgtctttgacaggctgaggctggaggattgcttgagctgaggggttcgagaccagcctgggcaacatagccagaccttgtcttgtggaaaaaaaaaa

SEQ ID NO: 399441 - DNA, 201 bp, Homo sapiens
aattgtatgttgtatacttttctatcactagcagtgcagtaggtttataccagaatcacacaaatgtgaaatgtgtcatgctacatttatgatgtcactaygtgataggaatttttcagctccatgataattttaaggggccattactgcatatgtagctcatcgttgactgaaacatcattatgtggtatgtgactgtat

SEQ ID NO: 399442 - DNA, 201 bp, Homo sapiens
gtacagctgtgcaaaaatattttctttttacccttatttaactttttttataagtaggagtatacctaaaataatggtaaaaagtacagtatagcaaatakgtaaaccagtaacagtcatttattattatcaagtcttatgtatagatgtaattgtatgttgtatacttttctatcactagcagtgcagtaggtttatacc

SEQ ID NO: 399443 - DNA, 201 bp, Homo sapiens
ccgttgttctaagagtcagaattctactcagagaccagtcatttgccagggcatactcagagaattgtcatttccccttcatctcttttatcctattcccrtccccctcttctctgtaccccgtttccacctactctgtggagataactaatctcactgacttctggttctctcctcttcttgtttttgtacaaatgggtg

SEQ ID NO: 399444 - DNA, 201 bp, Homo sapiens
ctacaccagctcctggcaaccactaacctcagctcctaatctaccttctgtctctagggattttcctgttctcaatatttcacataaatgaaatcatacartatgtgcacctttgtgattgttttttttcacttagcacaatgtttttaaggattgtccatgttgaaacatgtatcagcacttcattcctttatagctgaa

SEQ ID NO: 399445 - DNA, 201 bp, Homo sapiens
tatatatatatatattttttttttttttttttgagatggagtctcactctgttgctcaggctggagtgcagtggcgcgatctcggctcactgcaagctccrtctcccgggttcacacgccattctcctgcctcagcctcccgagtagctgggactacgggtgcccgccaccacgccgggctaattttttgtattttttagt

SEQ ID NO: 399446 - DNA, 201 bp, Homo sapiens
ctatctcctacagtttagttctattcttaatttttaatagagttggatttgcagtttgaggttctcccacattctggttgatttgaactatttattttaayggatatgtgaaacattaccgttgttctaagagtcagaattctactcagagaccagtcatttgccagggcatactcagagaattgtcatttccccttcatc

SEQ ID NO: 399447 - DNA, 201 bp, Homo sapiens
tattttatttcattattgctgagcttaattatatttttaatgtttatcatccatactccataaagtatggagatatatatatatatatatatatatatatatatatatatatattttttttttttttttttgagatggagtctcactctgttgctcaggctggagtgcagtggcgcgatctcggctcactgcaagctccat

SEQ ID NO: 399448 - DNA, 201 bp, Homo sapiens
caataactattgaatgagtgcctgttatgctggactgcaggtatgtagtggtaaactgtaaatagccatagaattaaataaactgatggagggattcagasttaatagtctgtctgtatttatttctttattttttttgagatagggtcttcatttgccacccaggctggagtgcagtggcgtgatcatgggtcactgcat

SEQ ID NO: 399449 - DNA, 201 bp, Homo sapiens
cctggccaatatggtgaaatcccgtccctactaaaataacaacaacaaaaaaacccacaaaaattagccaggcgtggtggcgggcgcctgtagtcccagcyacttgggaggctgagacaggagaactgcttaaacctgggaggcagaggttgcagtaagccgagattgcgccaccgcactgcagcctggcaacagcacgag

SEQ ID NO: 399450 - DNA, 201 bp, Homo sapiens
cctattttatttcattattgctgagcttaattatatttttaatgtttatcatccatactccataaagtatggagatatatatatatatatatatatatatatatatatatatatattttttttttttttttttgagatggagtctcactctgttgctcaggctggagtgcagtggcgcgatctcggctcactgcaagctcc

SEQ ID NO: 399451 - DNA, 201 bp, Homo sapiens
cagtcagactaagaccaagttactaatacaggtccttcccagtgacctatatataatcatttagaccagtgattctcaagctggctgtacagtagaatcamcagggggagatttaaagaatacctattccagggccccgccctaaccaattgagaccatctctgatgctcagggattagtattataaagctcctagatgat

SEQ ID NO: 399452 - DNA, 201 bp, Homo sapiens
aaattttatatttttggtactatacctttagatggtttattggaaagatactatatttgataatgtacattgtatttttgttattgaatttattaaaatcrtaatttgtaatgtcgatatgaaatgaatccagagcaaatcagggcaagaagatgtaaactaggaagggccttcctctgtgtgtgtgtgtgtatgtgtgtt

SEQ ID NO: 399453 - DNA, 201 bp, Homo sapiens
ttcctattttatttcattattgctgagcttaattatatttttaatgtttatcatccatactccataaagtatggagatatatatatatatatatatatatatatatatatatatatattttttttttttttttttgagatggagtctcactctgttgctcaggctggagtgcagtggcgcgatctcggctcactgcaagct

SEQ ID NO: 399454 - DNA, 201 bp, Homo sapiens
aacattcagcattacagtaccttcacaagacatactggtagtaccttaattaaatcacatgtttttaggatgactcattttctggttgttggagactcttragggatctgctttcattcacaaaatagcatccacacattctttctttggtaagtctgaaatacaggttgattttaggtcagtgttccctgatattttttt

SEQ ID NO: 399455 - DNA, 201 bp, Homo sapiens
tctggcttctctattctagtgattcatttatcttttcctttacctagtatcaagttttaattaccatgcttttttaaatccccctcttgctctgtctccartgttgggtttcactctgtcccccatgctggagtacagtgatggaatcgtagctcactgacaacttcttgaacttctgagctcaatcagtcctcttgcctc

SEQ ID NO: 399456 - DNA, 201 bp, Homo sapiens
tcttcctattttatttcattattgctgagcttaattatatttttaatgtttatcatccatactccataaagtatggagatatatatatatatatatatatatatatatatatatatatattttttttttttttttttgagatggagtctcactctgttgctcaggctggagtgcagtggcgcgatctcggctcactgcaag

SEQ ID NO: 399457 - DNA, 201 bp, Homo sapiens
gccttcccaagtgtatagactacatttctaggagaggaacagattggataaagcatgtacacagtttgaattttgatgcatctccaacactaagtattacytttaacaaagagatttctttttgacagtctgatacaaagtgatcttcctattttatttcattattgctgagcttaattatatttttaatgtttatcatcc

SEQ ID NO: 399458 - DNA, 201 bp, Homo sapiens
ttagaaatctacctttgcaaacagaagtttgagaagtagcagcaatgtcacagagcctttagtcaatctaagtccttagctgatgtaagtcataatcattatgtgtcagctgcccataattgagctgaggagaacatttgaatcagtatgtttaacaacatagggaactaataattgttaaaggttatcagtagctattga

SEQ ID NO: 399459 - DNA, 201 bp, Homo sapiens
taggacacagcttagactatggtttaaaaccacagaaatgtgtgtgggttccagattgcagatgtgtgtagttgactcttttctgaaatggttggctaagscagggccaggtaatgtgactcaagcaggccacacattacatcagagggagagggggctgtgtgggcctgaggaggagtgtgtgctctctctggaggggcc

SEQ ID NO: 399460 - DNA, 201 bp, Homo sapiens
atcattagtttattgtgaatcctctgagagtttctttatgcatttacaaacaaatacaattattatgcttatagtcttcattttcccagccttcccaagtstatagactacatttctaggagaggaacagattggataaagcatgtacacagtttgaattttgatgcatctccaacactaagtattacttttaacaaagag

SEQ ID NO: 399461 - DNA, 201 bp, Homo sapiens
atatattttaaaacataacctttagaaatctacctttgcaaacagaagtttgagaagtagcagcaatgtcacagagcctttagtcaatctaagtccttagytgatgtaagtcataatcattatgtgtcagctgcccataattgagctgaggagaacatttgaatcagtatgtttaacaacatagggaactaataattgtta

SEQ ID NO: 399462 - DNA, 201 bp, Homo sapiens; identical to SEQ ID NO: 88435

SEQ ID NO: 399463 - DNA, 201 bp, Homo sapiens
cttcattcctttatagctgaataatattcccttgtatagatagactatgttttgtctgttccttcatcccttgatggatgtttgggttgtttccgcagaaggagcttttttttttaatttaaatttttaggtagtacaagtgcgtggtttaacaacaatgtaaatagtagtaaaagctattcagcgaagcctccctcactc

SEQ ID NO: 399464 - DNA, 201 bp, Homo sapiens
tgctattgattcaatacattctcagaatcatagtccaaccttgttttggcatggttttatggggaattaaatgcatgagatctttacaagctgtgttactrtgtctctgtgtgtctttttgtaaacggttcttttcctgttcaaatatattttaaaacataacctttagaaatctacctttgcaaacagaagtttgagaag

SEQ ID NO: 399465 - DNA, 201 bp, Homo sapiens
tccacctcccgggtcccggttcaagcaattctcctgcctcagcctcctgagtagctgggattataggcacgcaccaccatgcccagctaatttttgtattkttaatagagatggggtttcactgtgttggccaggatggtcttgaattcatgacctcgtgatccgcttgccttggcctcccaaagtgctgagattacaggt

SEQ ID NO: 399466 - DNA, 201 bp, Homo sapiens
acttcattcctttatagctgaataatattcccttgtatagatagactatgttttgtctgttccttcatcccttgatggatgtttgggttgtttccgcagaaggagcttttttttttaatttaaatttttaggtagtacaagtgcgtggtttaacaacaatgtaaatagtagtaaaagctattcagcgaagcctccctcact

SEQ ID NO: 399467 - DNA, 201 bp, Homo sapiens
cacttcattcctttatagctgaataatattcccttgtatagatagactatgttttgtctgttccttcatcccttgatggatgtttgggttgtttccgcagaaggagcttttttttttaatttaaatttttaggtagtacaagtgcgtggtttaacaacaatgtaaatagtagtaaaagctattcagcgaagcctccctcac

SEQ ID NO: 399468 - DNA, 201 bp, Homo sapiens
ttacaaaatctttctgatcatttttgttgttgaataaccaggttttttcttagtgtatttagtcttcagtttttataatgggttactagttttatatcttrtactactttttactccatattttatattgctgacaggctaacagttgggttgaatagatctgtatgtttatttttatgcatgtacatatttgtatgacta

SEQ ID NO: 399469 - DNA, 201 bp, Homo sapiens; identical to SEQ ID NO: 88437

SEQ ID NO: 399470 - DNA, 201 bp, Homo sapiens; identical to SEQ ID NO: 88440

SEQ ID NO: 399471 - DNA, 201 bp, Homo sapiens; identical to SEQ ID NO: 88441

SEQ ID NO: 399472 - DNA, 201 bp, Homo sapiens
aggacacagcttagactatggtttaaaaccacagaaatgtgtgtgggttccagattgcagatgtgtgtagttgactcttttctgaaatggttggctaaggmagggccaggtaatgtgactcaagcaggccacacattacatcagagggagagggggctgtgtgggcctgaggaggagtgtgtgctctctctggaggggcct

SEQ ID NO: 399473 - DNA, 201 bp, Homo sapiens
ccacactgggcttttaaaatatctttttggtagtattccttactttcctctttaacattatttaaactttttcaggttttttttctcctagttaaaaaacsaagtattgttttttttctggtgtttctaatttttttaagggtaatgagtaatctgtattcatatatagcagttttttgatagatgcttagatgcttatgt

SEQ ID NO: 399474 - DNA, 201 bp, Homo sapiens
gagagataattctccactcagaaaatttatttttaaaccatttgttgtattgaagcaccatctccttatgcccttgggattattttcacttctgtcttagsaatttatgtgttatccccagactactttacatttaatttctgtagtaatagtagattaatttcttataggttaaggaaagtaaagagaaggagaagttgg

SEQ ID NO: 399475 - DNA, 201 bp, Homo sapiens
tataaaggctaacctgcgcctagattcttggatgaagccatgcagtttggattactgtttgttcaaagtccatgtcagaaggcaaatttaaaacttttttkggggaggaaagtagctatagcctttgcacttgagattggcatactttttagaatatagcgggccacagaccaagtagaccaaatgtctggaggaaggaag

SEQ ID NO: 399476 - DNA, 201 bp, Homo sapiens
ttcgagaccagcctgggccacatagcaagaccctgtctctatgaaaaatttaaaaattagctgggcatatttgtgtgtacctgtagtcacaggtactcagraggctgaggcaggaggattacttgagtcctggagtttgaggctgcagtgagctgtgattgcaccacagcactctagcctagatggtggagtgagaccctg

SEQ ID NO: 399477 - DNA, 201 bp, Homo sapiens
gtgctgctaatgcttgtgtgttttctattgttacatgctttccctcgttgatgtgcatttattgaatgcctcctgttgtcaaacttctaatagggaatacraaaacagaagacgcctccgcttggctgtgggcctggctggggatgaacccctgtagccaggccccggggtctcgcctggtttcggtacgggcaggcagcg

SEQ ID NO: 399478 - DNA, 201 bp, Homo sapiens
taacttaaaagatacactttcaggttttagagttttttggattttggaattgtacataaggaagttaagggatgatgggcttatattaactctgtttcaarcccaggatgagggtagataaaagaaataaaaatagaaaagaccaggtgtggtggctcaagcctgtaatcccaacactttgagaggccgaggcaagcagat

SEQ ID NO: 399479 - DNA, 201 bp, Homo sapiens
ctaagactggggtctctggcagtttgatttagagatgggaaccagcccgcccagcactttatccatctgccagtcatgatttgcatatttggcactcccarttcttcggaaattaaatgtcacacatcatccagaaaaggttgggacctttgttaggcctttcagggaggtgttctgatgtccttcatggccaccaatctg

SEQ ID NO: 399480 - DNA, 201 bp, Homo sapiens
tatattttattggctgggcacggtggctcatgcctataatcccagcactttgagaggccaaggctggcagattgcttgagcccagcagtttgagaccagcyggggcaacatggcaaaaccccatctcttaaaaaaaagtacaaaaattagctgggcatggtggtgtatgcctgtgttcccagctacattagaggctgagat

SEQ ID NO: 399481 - DNA, 201 bp, Homo sapiens
aatagcatcatgaattatacaaattgttaatcctcatagccattctctgaagtaggcagctttatcccagttttcatatgagaaaactgagaattggagcwgctaagtattatgctttgaagtatacaagaagcaaatgatggagctaaaatttgagtccaatttctgacctcaaagtctaggacacttgaagcctccttg

SEQ ID NO: 399482 - DNA, 201 bp, Homo sapiens
tttcttcactcagattctctttaggtttccttagggggaaaaatcaatcaaagaaaaattttatatatttgattatactagaatctaaaattttttttgcyatttatttctggaagaaactggattatcaaatataattcttttttctttttttgaggcagcatctctcattctgttgcccaggctggagtgcagtggtgt

SEQ ID NO: 399483 - DNA, 201 bp, Homo sapiens
taatgatttaaaaacttaatccaaaagaaggcaagaaaaggtatgtatggaacaaatgggacaaatagtaagatgatagtttgattcctaaatatgtcagwcattacataacaaatgagtagacttaatgcttcaattaaaaaccaaagatgtttatactagaaaaacaataaaatccatctacatgcttactttcaagac

SEQ ID NO: 399484 - DNA, 201 bp, Homo sapiens
gatgtttgggttgtttccgcagaaggagcttttttttttaatttaaatttttaggtagtacaagtgcgtggtttaacaacaatgtaaatagtagtaaaagstattcagcgaagcctccctcactcctctgtccctatctgccctatttccactgcttcatccaacctagcaccatcattagtttattgtgaatcctctgag

SEQ ID NO: 399485 - DNA, 201 bp, Homo sapiens
actttctaagtcaagcaattgaatcttttccaggactattgttttagcttgccctactggtcatgcttttcaagataatcacttcctaatcagtttttttwatcttgctggggaagtcaggtttccttgtctctcttttccaggaagaggcacggttacaaaattgactttttcccccattgtaatatgtttaaaaagttg

SEQ ID NO: 399486 - DNA, 201 bp, Homo sapiens
tctttctgaataaaaataaatgggacccatagacatctttgtttttttccaaaccggcccttgtgcagagaaggttgttgttgctaattttagtccttgtratgtatggtggaatttattcatgtatttgcagataatactggactactggaaaatcaaactagtttgatcaaactagtttggggtatatcccaacacatt

SEQ ID NO: 399487 - DNA, 201 bp, Homo sapiens
atgctgcccaggctggtctcaaactcctgagctccagtgatgctcctacctcagcctcctgagtagctgggactgcaggcacacaccaccggatctggcartgatgtttaattttttgtgttaacttgactgggaagggatgcccagaaagctggtacaaaatgatttctggtcatgtgtgtgagggtgtttccagaagat

SEQ ID NO: 399488 - DNA, 201 bp, Homo sapiens
tggcttctatagtcacatgagcaattccaataataaatctcctctcatttatatatcctcttagttctgtttctctagagaaccgtaatgcaggagaaaaatttttttttctaaagtggtatgaaaatctttatcctacagttgctcatctccttttaagtgagtcactttctaagtcaagcaattgaatcttttccagga

SEQ ID NO: 399489 - DNA, 201 bp, Homo sapiens
cttgtgccgcagcctcctgagtagctgggactacaggcgcctgccatcatgcctggctaattttttgtatttttagtagagacagggtttcgccacgttgsccacactggtcttgaacttctgagctcaggtattctgcctgcctcagcctcccaaagtgctaggattgcaggcgtgagccaccacgcctggtaggagtac

SEQ ID NO: 399490 - DNA, 201 bp, Homo sapiens
aaacaataaaatccatctacatgcttactttcaagacaaatgccttagagatatgaatacagaaagtaaaagcatagaaactgtgtgaatattagcctaaygaaaactggtgtcactgtgctaatatcaaagtagactttaaggcaggaagtagagagaatcatttcaaaaataacaaaatgttcaagtcaccagaaagaa

SEQ ID NO: 399491 - DNA, 201 bp, Homo sapiens
gtgagccaccacgcctggccccttgtggttttcttaataacattttcttttctctagcttactttatttattcatttatttatttattttttgagacagagtttccctcttgtcgcccagactggagtgcagtggcacgatctcagctcactgcaacctctgcctcctggattcaagcgattctcctgcctcaacctcccg

SEQ ID NO: 399492 - DNA, 201 bp, Homo sapiens
ccacctgtattggtgagggcagtctttattcagtttaccaattcaaatgcaaatctcttctggaaataccctcagaaataatgttttactagcaatctggkcatcccttcccagtcaagttgacccacaaaattaaccatcacagggtcatttacggatatttcatacactttaaaaacgagatcaagaaaactagtcaga

SEQ ID NO: 399493 - DNA, 201 bp, Homo sapiens
tgtgagccaccacgcctggccccttgtggttttcttaataacattttcttttctctagcttactttatttattcatttatttatttattttttgagacagagtttccctcttgtcgcccagactggagtgcagtggcacgatctcagctcactgcaacctctgcctcctggattcaagcgattctcctgcctcaacctccc

SEQ ID NO: 399494 - DNA, 201 bp, Homo sapiens
ccaaaatctcgattagggctttccagaaccaatagtgtatacgcgcgcatgtgcttgcatacacaggcgtgtgcacacacacacacacacaaacacacacmgttgacccttggacaacacaagtttaaactgtgtgggttcatgtatagtgtattttcttttgcctctgccacccctgagacctcaagaccaacccgttct

SEQ ID NO: 399495 - DNA, 201 bp, Homo sapiens
ttggtaccaaaatctcgattagggctttccagaaccaatagtgtatacgcgcgcatgtgcttgcatacacaggcgtgtgcacacacacacacacacaaacacacacagttgacccttggacaacacaagtttaaactgtgtgggttcatgtatagtgtattttcttttgcctctgccacccctgagacctcaagaccaacc

SEQ ID NO: 399496 - DNA, 201 bp, Homo sapiens
agctcatctctcttctttctgagtcctcaccagaatcacctttaaaggttcacacagggcagtgtaggctttttctaatagtatgcacctccaaactcttycagcctctacccattacctggttccaaagctgcttccacatctttagatgtttgttatagcagcacccctgctgcttggtaccaaaatctcgattagggc

SEQ ID NO: 399497 - DNA, 201 bp, Homo sapiens
gatgtgtgttgttccctgaaatataatcagggatatatggtgctctacttccattaggggggacaaaacatttctcttaatgtagttttttttttttttttaagacatggctttaaatgtaaaacagaaaaattcactaaacatactgtgaattcatatttttagttgaaatttaaattcatgcataaatgtgcataaaac

SEQ ID NO: 399498 - DNA, 201 bp, Homo sapiens
gagaattgcttgaacccgggaggtggatgctgcagtgagctgagatcttgccactgcactccagcctgggtgacagagtgagactccatctcaaaaaaaaagaatggtagtcaatttcatatcacaattgtaattacatattaattttttctttttcttttttgtctgtcttctcatggaaataacctccaagaagacagc

SEQ ID NO: 399499 - DNA, 201 bp, Homo sapiens
acaagcagttaaaaaagattgagtagtgagtccacgttagacttctaggtaagagacttatttgcccatcttgggccaggggactcctggccagggtcacgtagatcagaccgtgctccagagtcccagtcccctaggtgggaggcagagcaggagggtttggacttggcagacagcccagaagctgtctcctacaaataa

SEQ ID NO: 399500 - DNA, 201 bp, Homo sapiens
gtagttccttattttcactgtttatgaatatattgtgatttgtcctttttcctctcactgggtaattgagttgtttctttttttttctttcttttttttttgctattagaactaatactgctatgagcattgttgtatattctgtatttggtaggtttttaaaaaaattctttcaacacagaggagaaaagcacttagtcg

SEQ ID NO: 399501 - DNA, 201 bp, Homo sapiens; identical to SEQ ID NO: 88422

SEQ ID NO: 399502 - DNA, 201 bp, Homo sapiens
tgtttgggtttaagaaagtagcagtgctgtacagaatagaaacgatatcatgttcattttgttttcagactccagatgtggacttttggattatccccatratccaaggttttgtgcagattgaagaacttgtggttaattataccgaatcatctgatgatgagaaaagcagcccagagaccccccctcaggagtccacct

SEQ ID NO: 399503 - DNA, 201 bp, Homo sapiens
taagtcaatgaaagatataaagaaaaattaggaggcatgaacaagaaaatcatagaagatgacatgacatataagcagccaaattttttttttttttttttgagacagagtcttgctctgtcgcccaggctgcagttgagtgcagtgatgtaatctcagctcacggcaacctctacttcccggattcaagcgattcttgtg

SEQ ID NO: 399504 - DNA, 201 bp, Homo sapiens
ggctcttaggctgtgttcaccataaagaaaaggaaagacctcctctgtccgttccttacgtggtgttcttcaataagcagaaaatatggttgaataatggraggtttctgcttctaataaactgagaaatatgtgctgactactgtttgggtttaagaaagtagcagtgctgtacagaatagaaacgatatcatgttcatt

SEQ ID NO: 399505 - DNA, 201 bp, Homo sapiens
atactgttctgcttggcagttgcacactgaatccccaaggctatcctggaagacatacatttgattaggaagcataatctagccagactaaataaattttytaaaatgttgctgttttctgttttaattttctttcaggaatgcgctataaacgaagaggagtggataaaaatggaaatgttgccaattatgtggagactg

SEQ ID NO: 399506 - DNA, 201 bp, Homo sapiens
tctgcttggcagttgcacactgaatccccaaggctatcctggaagacatacatttgattaggaagcataatctagccagactaaataaattttttaaaatrttgctgttttctgttttaattttctttcaggaatgcgctataaacgaagaggagtggataaaaatggaaatgttgccaattatgtggagactgagcagtt

SEQ ID NO: 399507 - DNA, 201 bp, Homo sapiens; identical to SEQ ID NO: 88427

SEQ ID NO: 399508 - DNA, 201 bp, Homo sapiens
gctgtgtctctgtgtgctggcccactgcagggcaattcagaaatattcagtgagtacttatggatttaacaagtatctatggagtacctactgtgtcccayggcctgtactcagtgctggggctgtaggttgaacaagctggggctgcaggtcgaagcttgtagaaacctagactcagaatctgagtgatagatgttaatt

SEQ ID NO: 399509 - DNA, 201 bp, Homo sapiens
tgtgccttttcccaaatgtttccaatttccttccccttaaaggaacctgctattttgaattttgtattcccttggttttcgtttttgcttttattatatakgtattcctaaagatgttgctaagggttgtattttggggattttatataaatgatattaagttgtttttgttctttcacttatttttatttatatttttga

SEQ ID NO: 399510 - DNA, 201 bp, Homo sapiens
gcctgatgcgccacttcttctacatgactctccgtgactgctttaactctgttttttccttccttttctgtattcctaaagcttatttggtacccaagggwtagagtcctacaactgtggtctgttcatctaaggtcaaggtggtagggttctgggtagctggagctctttccttagcaggggcatctgtgttggcagatg

SEQ ID NO: 399511 - DNA, 201 bp, Homo sapiens
tgtatagtgtatatatatactatatagatatacactatatactatatataaatactaattaatctctctgtatacactatatactatatatatatatatakatagagagagagacggagatttaacatctataccaaaattattacttacagagatctgttatttaaagataattattataagggattggctcatgtgatt

SEQ ID NO: 399512 - DNA, 201 bp, Homo sapiens
atagttcaggatgactgaaggctaggttgctgggggcggggggcgggggcggggatggaaaggactagcctatgcagggtctcacaagcctttccaaggartttggactttattcccaaggctgtgggaggtggacaggtagttagcaatattcatatttatccctttttaatgcctaatgtgtttctttcacaatattaa

SEQ ID NO: 399513 - DNA, 201 bp, Homo sapiens
gaagggcaggcagaagtgggtggggagtcggattccaggcccaggctgcacatagttcaggatgactgaaggctaggttgctgggggcggggggcgggggsggggatggaaaggactagcctatgcagggtctcacaagcctttccaaggaatttggactttattcccaaggctgtgggaggtggacaggtagttagcaat

SEQ ID NO: 399514 - DNA, 201 bp, Homo sapiens
tgtaagatgagagaaaatccatgtcagtgcattgcatgaactgaataacgcactcagacctggcacacagctattaaactcaattgccaagaattttggtygctaagcattttttccttttataaagaagtcatgacagatacctttgtcatgtattactttttcatgtttaggatgatttctttagaatagcatcctcag

SEQ ID NO: 399515 - DNA, 201 bp, Homo sapiens
ttttagtagagacggggtttcgccgtattggccaggttggtcttgaactcctgacctcagatgatctgcctgcctcagcctcccaaaagtgctggcattamaggcgtgagccaccgcaactggcctgtaatctcagctgcaactgagcacttttctgagccagacactgttccatgacctttacatgtattatttcatttc

SEQ ID NO: 399516 - DNA, 201 bp, Homo sapiens
tagtggctaggaaagtattgaagctttcaataaacatataggaaaacattttagtactttagggggataagctgtagttgtctgaaaaatacatttttatrtagaaaatcattttgcccaacagtacttaataatttagacttttctagttttctaagtcttttctatttcttatagttacaagagtttatatttttttag

SEQ ID NO: 399517 - DNA, 201 bp, Homo sapiens
gcagctctgctcttgtctgttgtgttggctggggtcattcacgtagcaacattcaccaggagtttgcctgggtggtcttagttctccttcacctggccccyctctccatgtctctcatctcacaatgcctgtcttgagtcctcctctctctcctggataacctggacgtcctttcagggtagtggctgggtgctgagaagg

SEQ ID NO: 399518 - DNA, 201 bp, Homo sapiens
ggtgccttacccttcagggagctttttaaaattagagatgggttcttgctacgttgcccagactggtctcaaactcctggcctccagcagttcccctgccytgggctcccaaagtcctgggattacaggcatgagccaccatgcctggcctaaatgaaatattttaagcactacatttaaataaatatttttcctttggta

SEQ ID NO: 399519 - DNA, 201 bp, Homo sapiens
aataaatttcttattttgctttaattcttgcaataaaaacagtatcgcactgttgcctgggctggagtgccgtggtgcgatcttggctcgctgcaaccttyacctcctaggttcaagtgattctcctgcctcagcctcctgagtagctgggactacaggcgcgtgccaccatgcctggctaatttttgtagagatgaggtt

SEQ ID NO: 399520 - DNA, 201 bp, Homo sapiens
ggcacccgaagtccagagggggctgaggcggcagggagctggtgtgacagcagtgtccaagcctgtgcacacccgactcggtcgtgacggtccccaggctmggccacaacttgctctgcaccagagcaggtgctgggagcagggagagaggccagggagtgggagcaggcacttccgagcctgtggggaaagagggtcttc

SEQ ID NO: 399521 - DNA, 201 bp, Homo sapiens
gaacctgcagctcagaccccaggcttcaggttgtccctggcttgaaggtggggttttacctgtgatctgcccctttctggacaggaacctgtgtctgtctscctccactgcccaggctgtttgggctgaggggtgcctgcaggcccacttggagctgccctcacccctgctggcctctctcccacgcttatcggcacccga

SEQ ID NO: 399522 - DNA, 201 bp, Homo sapiens
atgtcctctgtacagacagactctttaatgccaacttgttttatttctttagtgaagagccacagattttaaatacacacacacacacacacacacacacattttgaagtgtcagctgtatgccaggcgctataccaggcagcgaagtcagagcagctcgacacaacacacacagtctcccttcttgtgtcagttacagta

SEQ ID NO: 399523 - DNA, 201 bp, Homo sapiens
gctcacggactccacccggaacctgcagctcagaccccaggcttcaggttgtccctggcttgaaggtggggttttacctgtgatctgcccctttctggacrggaacctgtgtctgtctccctccactgcccaggctgtttgggctgaggggtgcctgcaggcccacttggagctgccctcacccctgctggcctctctccc

SEQ ID NO: 399524 - DNA, 201 bp, Homo sapiens
catgtcctctgtacagacagactctttaatgccaacttgttttatttctttagtgaagagccacagattttaaatacacacacacacacacacacacacacattttgaagtgtcagctgtatgccaggcgctataccaggcagcgaagtcagagcagctcgacacaacacacacagtctcccttcttgtgtcagttacagt

SEQ ID NO: 399525 - DNA, 201 bp, Homo sapiens
cctcccgcagctggtggtctggacatctgtgagtctggctgagtccgggatttttaatgggctcagaatggaggaagtgtgtgctgattggtccatgggargccacggacggcctggagaaagcaccctgagttcttactccagctcacggactccacccggaacctgcagctcagaccccaggcttcaggttgtccctgg

SEQ ID NO: 399526 - DNA, 201 bp, Homo sapiens
cacatgtcctctgtacagacagactctttaatgccaacttgttttatttctttagtgaagagccacagattttaaatacacacacacacacacacacacacacattttgaagtgtcagctgtatgccaggcgctataccaggcagcgaagtcagagcagctcgacacaacacacacagtctcccttcttgtgtcagttaca

SEQ ID NO: 399527 - DNA, 201 bp, Homo sapiens
agcccctaggtctggtgttcccgaagggccgcagccctttcctccttgttgcccacaacctggtgagcagggggcgtgttttggtcctgtttgtgttacasctttttcagtcccaccattcaggggtcccgtgtccaggaagaatgaggtatgcaaggtatgtggacaactggagggggagcaaggcagagagcagcttca

SEQ ID NO: 399528 - DNA, 201 bp, Homo sapiens
acacatgtcctctgtacagacagactctttaatgccaacttgttttatttctttagtgaagagccacagattttaaatacacacacacacacacacacacacacattttgaagtgtcagctgtatgccaggcgctataccaggcagcgaagtcagagcagctcgacacaacacacacagtctcccttcttgtgtcagttac

SEQ ID NO: 399529 - DNA, 201 bp, Homo sapiens
gcctcagcctcccaagtagctgggattataggcgtgtgccaacacgttcagctaatttttgtatttttagtagagatggggtttctccatgttggccaggstggtctcgaactcctgacctcaagtgatcctcccgcctcggccttccgaagtgctgggattataggcatgagccaccatgcccggccataagcagccaat

SEQ ID NO: 399530 - DNA, 201 bp, Homo sapiens
tacacatgtcctctgtacagacagactctttaatgccaacttgttttatttctttagtgaagagccacagattttaaatacacacacacacacacacacacacacattttgaagtgtcagctgtatgccaggcgctataccaggcagcgaagtcagagcagctcgacacaacacacacagtctcccttcttgtgtcagtta

SEQ ID NO: 399531 - DNA, 201 bp, Homo sapiens
tagaaatctacctttgcaaacagaagtttgagaagtagcagcaatgtcacagagcctttagtcaatctaagtccttagctgatgtaagtcataatcattatgtgtcagctgcccataattgagctgaggagaacatttgaatcagtatgtttaacaacatagggaactaataattgttaaaggttatcagtagctattgat

SEQ ID NO: 399532 - DNA, 201 bp, Homo sapiens
cctcccggcaccaagctattcctcccacctcagtcccccaggtagctgggactacatgtgtgtgctaccacacctggctaattttttttttttttttttttggtagagatggagtctcactatatggctcaggctgatcttggcctcctgggctcaagcgatcctcccaccttggcctcacaaagtgctggaattatgggc

SEQ ID NO: 399533 - DNA, 201 bp, Homo sapiens
ctcagtcttatgggtttaactggttttcattctcgactactaatgactattgtttttagtcattagaccacaacacagacatttttatagttttttttctwtttttttttaagtcgaaatcttattttcttgactggatgatgcatttacatggttcacaatgccaaagatggaaaagggtattgaatgaggaggttctca

SEQ ID NO: 399534 - DNA, 201 bp, Homo sapiens
gatgtggactaattctgaaagatcacacaattgcctcgaatcaggtgacctcatttaagcctcagttgccatctataagacaaagctcatggttccttgayacagttattgcgaagatttaataaaactcacataaagtgagttcttggtaataataagcatttcagccaggcgtggtggctcacgcctgtaatcctagca

SEQ ID NO: 399535 - DNA, 201 bp, Homo sapiens
agtagagagaatcatttcaaaaataacaaaatgttcaagtcaccagaaagaatagtttgaaatttgtatgcatctaagtataaccttaaaaccaactatawatatatataaaaagcaacgagtcatttggtttacattttttagtttagactgtcaatttgaaatgacagaggaacgtgagtattcctgttggcaatgtta

SEQ ID NO: 399536 - DNA, 201 bp, Homo sapiens
agagaatcatttcaaaaataacaaaatgttcaagtcaccagaaagaatagtttgaaatttgtatgcatctaagtataaccttaaaaccaactataaatatwtataaaaagcaacgagtcatttggtttacattttttagtttagactgtcaatttgaaatgacagaggaacgtgagtattcctgttggcaatgttacagag

SEQ ID NO: 399537 - DNA, 201 bp, Homo sapiens
agaatcatttcaaaaataacaaaatgttcaagtcaccagaaagaatagtttgaaatttgtatgcatctaagtataaccttaaaaccaactataaatatatwtaaaaagcaacgagtcatttggtttacattttttagtttagactgtcaatttgaaatgacagaggaacgtgagtattcctgttggcaatgttacagagaa

SEQ ID NO: 399538 - DNA, 201 bp, Homo sapiens
ggcgagcagacttttccccttttcagattatctttttccttctttaccaacatgtctccatcctctgatgtatccagtgcaaatatagactcttctgtggmgttttgagcataatctgcagaagtccttcaagaaatgtttgtatttaaatattatgctacaaaagactttggagtatatagtatgcacctctgtctttgg

SEQ ID NO: 399539 - DNA, 201 bp, Homo sapiens
ctacaaataaaggaggctaggtgggtggctcctgtctttgacaggctgaggctggaggattgcttgagctgaggggttcgagaccagcctgggcaacatarccagaccttgtcttgtggaaaaaaaaaattaatgagtgaatggattttagaaaataaaataaaaacaaataaaggaggcctggcaagggttaagtcacac

SEQ ID NO: 399540 - DNA, 201 bp, Homo sapiens; identical to SEQ ID NO: 88429

SEQ ID NO: 399541 - DNA, 201 bp, Homo sapiens
aagctttttattaattacagaaagtaaactttggaagtcctggtaaagaccaggtacagtggctcaaccctgtaatcccagcactttaggaggctgaggcrggtggatcacctgaggtcaggcattcaagaccagcctggccaacaaggtgaaaccctgtctctacaaaaatataaaaattagctgggcatggtggcgtgc

SEQ ID NO: 399542 - DNA, 201 bp, Homo sapiens
aaagagacactgtcttgctatattgcccaggctggactcaaactgctgggctcaagcaatcttctctcctcagcctcccgagtagctgggactgcaggcaygtgccactgtgcccggcagggtcagctactttagactgtgtttggatagcgtgaagaggttagattgctatcaattaattataacaatctaagaagcatc

SEQ ID NO: 399543 - DNA, 201 bp, Homo sapiens
ttgatagattcctggggggaaatttttgctggcttgagtgctcttaaagaatgattttgttggccgggcgcagtggctcacgcctataatcccagcacttygggaggccgaggcgggcagatcatgtgaggttgggagttcgagaccagcctgaccaacatggagaaaccgtgtctctactaaaaacacaatattagtcag

SEQ ID NO: 399544 - DNA, 201 bp, Homo sapiens
gcatttttttttgttcgttttgcttcccagttcctattcttttcaagagaatgttgctgacccttaggcaggtggtgttagctttgaacagggagagggtrtgaaatggtcaggccaaatgaagtgaaacgctctgactgttctttaaggacatgaatttattccttctcatgccccacggtccacattttctctttctcc

SEQ ID NO: 399545 - DNA, 201 bp, Homo sapiens
taaaacatgccatcatgctctcaattttagtaatttgcaggtataatattgatgtttcacagtatcattatatattgtttttatgccagatataaacattstcttatttccagcttaaagaatgtcccttcccccagggagcaactgtggtgggtggacccgggagttgagcagagtaacagtctcttttctaggcaggga

SEQ ID NO: 399546 - DNA, 201 bp, Homo sapiens
cttgggaggggagacgaccaggttgcctgaggaggagtgaactggcccagatcagaaatggagcaggtcagaactcccacgctgtgatcagtagtggggtygtgcctgtgaatagccactgcactccagcctggccaatataatgagatcctgtctcttaaaagggagagaaagaaaaggaaaaaaattatgaattctcct

SEQ ID NO: 399547 - DNA, 201 bp, Homo sapiens
atatatatactatatagatatacactatatactatatataaatactaattaatctctctgtatacactatatactatatatatatatatatatagagagasagacggagatttaacatctataccaaaattattacttacagagatctgttatttaaagataattattataagggattggctcatgtgattatggaggctg

SEQ ID NO: 399548 - DNA, 201 bp, Homo sapiens
gacccacttccacttaatgagtagtaaatacattttctcttccttatggttttctttttttttttttttgagatggagttccgctgttgttgcctaggccrgagtgcagtggtgcgacctcggctcactgcaacctccgcctcccgggttcaagcgattctcctacctcagcctcccaagtagctgggatttcaggcatgc

SEQ ID NO: 399549 - DNA, 201 bp, Homo sapiens
tgttagtttttgctgaaactgtaataagaacaagtcacaggcccgacatggtgactcacgcctgtaatcccagcactttgggaggtcgaggcgggtggatygcttgaggtcaggagttcgagacaagcctggctaacatggtgaaaccccctctcaactaaaaatacaaaaattagctgggtgtggtggcgggcacctgta

SEQ ID NO: 399550 - DNA, 201 bp, Homo sapiens
tgtgccaacacgttcagctaatttttgtatttttagtagagatggggtttctccatgttggccaggctggtctcgaactcctgacctcaagtgatcctccygcctcggccttccgaagtgctgggattataggcatgagccaccatgcccggccataagcagccaattttataattaagtgtttaatcttatcagcaatag

SEQ ID NO: 399551 - DNA, 201 bp, Homo sapiens
tcagcctcctgagtagctgggactacaggtgcgtgccgccacacctggttaatattttgtagaggcaggggatcttgctgtcttgcccaagctggtctcamacccctgacctcaagtaatcatcctgcttcagcctcgtaaaatgctgggattacaggcatgagccactgagcctagtccctcctctcgttcttaaatcca

SEQ ID NO: 399552 - DNA, 201 bp, Homo sapiens
gctgtccttatgcctgatgcgccacttcttctacatgactctccgtgactgctttaactctgttttttccttccttttctgtattcctaaagcttatttgrtacccaagggatagagtcctacaactgtggtctgttcatctaaggtcaaggtggtagggttctgggtagctggagctctttccttagcaggggcatctgt

SEQ ID NO: 399553 - DNA, 201 bp, Homo sapiens
tctttttctttttttgttttttgtttttaaatctttttttgttattttttcttttttttttctcgatctctttttttccatgacctttcatgtcatttcargccaagacttttgcagtaacccaagtgggtttcttactcccaatctccacctcttttcaaatactatttcatgaaacttttgtttctggtacttacatac

SEQ ID NO: 399554 - DNA, 201 bp, Homo sapiens
ttctggggcatatctaggcattaagatatttgcgtgaagcatttattactctgagaaggctttcaggaattatggtcctaccatgaggtttaataattgawaaatgtattgaagttgggttttttctttcatacttttttctttttttttgagacggagtttcactctttcgcccaggctggagtgcagtggtgccatctt

SEQ ID NO: 399555 - DNA, 201 bp, Homo sapiens
gctgtatacgctatcctttctgccatgctccctcttgttctttcccattcaggagagaataggtgtctcagtgagtgtcatctttgatttcccctctcccyatcctccacatagcttcttttgaggactttcatgttcatctcctcctgtggattcttcacccactaccagctcactccctaagctctttttctttttttg

SEQ ID NO: 399556 - DNA, 201 bp, Homo sapiens
ataaaaaaaaaattaaaaaacaaaaaacaaaaaacaaagttaagccacctggactgctgacctgcaacattagcagcctccaggcaggctgggggagggggaatatatttatataaatataaatctcttcttttgggagatttctcatagacaagactgaagaaagttatcacagacaacaaacaagactatggacaagta

SEQ ID NO: 399557 - DNA, 201 bp, Homo sapiens; identical to SEQ ID NO: 88438

SEQ ID NO: 399558 - DNA, 201 bp, Homo sapiens
ggccacaagtgatacatttttaactcctaagtaaactgatgagaggaaacattgaaattttttctaaatactttgtagagaaaatagtatgttttaaacaytaggcttttgaatttggaaaaagaatgcctatcaacagattatttcatatttaaaaagtgtggcttttctttctaatgagcatctgtcaggttttgtggt

SEQ ID NO: 399559 - DNA, 201 bp, Homo sapiens
cattttccacattactgtagaattcataactaccatttaaatagatgcctcctgtgatcagtttggaaatgtattgtgtgggttcagaacatggactctgwgactcctggttctatcaattactctttaaccttggaaaacatactcctttacttcagttttgttatctgtaagatgagagaaaatccatgtcagtgcatt

SEQ ID NO: 399560 - DNA, 201 bp, Homo sapiens
gaatattttgtttcttctagtattttaactttggtcttggaatagctaagtcatttaaatctaattagattactgaatgagcttgattttaaaaaaaatgktaaagtaaatttctctctcaacttagttggtattctttgtgagaattcagtaaagctttggtttttaaaatattgttttagaggggtttttattctctta

SEQ ID NO: 399561 - DNA, 201 bp, Homo sapiens
ttttctttcataactttgacattttttaagagtactggtcagctgttttgtagaacatccctccatgtaggtttgtccagtgttctttcctgatgaagctraggttatgcatggtcaggaaggacaccacagaagccacgtgcacttcttagtgcctcgtgctgtggggagggagggcgtgatggcctgtgtagtattgtt

SEQ ID NO: 399562 - DNA, 201 bp, Homo sapiens
ccagaagtttgtattttgtgtgctgtcatttatattatgaagaaaaatgtgttgggtctttttaagataatagaagaaaatgttatgtgaaacatttaacyttatacgtattcatttgggattttaggccctgaacccactctttttggtaagccaaagttctcctgcatgcgactgcactacagatacaaagaagcgagt

SEQ ID NO: 399563 - DNA, 201 bp, Homo sapiens; identical to SEQ ID NO: 88424

SEQ ID NO: 399564 - DNA, 201 bp, Homo sapiens; identical to SEQ ID NO: 88425

SEQ ID NO: 399565 - DNA, 201 bp, Homo sapiens; identical to SEQ ID NO: 88426

SEQ ID NO: 399566 - DNA, 201 bp, Homo sapiens; identical to SEQ ID NO: 88428

SEQ ID NO: 399567 - DNA, 201 bp, Homo sapiens
tactgctaatttgggacgttttatttattggaaaggttctttcaagggaacttttctgcaagaccaagcaatgtatgtatttttctttggtaaattacaakttacattggcacaaaaaacacatggtgactaatgtactttgctctaggacaattaaagaaaatgtattttatcctcacaaatccagtgaagccttcattt

SEQ ID NO: 399568 - DNA, 201 bp, Homo sapiens
cgcaagtttgagaccagtctgaccaacatggtgaaacctcgtctctactaaaaatacaaaattagcccggcgtggtggcacaggcctgttatcccagctasttgggaggctaaggcaagagaattgcttgaacccgggaggtggaggttgccatgagccgagatcgcgccattgcactccagcctgggcgacaagagtgaa

SEQ ID NO: 399569 - DNA, 201 bp, Homo sapiens
ttacaggcatagagccactgcgcccggcccgacgacagctttttatttgttattttacttatttatttatttatttatttattttttgagacagagtctcrctctgttgtccaggctggagtgcagtggcgcgatctcagctcactgcaacctctgcctcccgggttcaagcaattctctgctttagtttcccgagtagct

SEQ ID NO: 399570 - DNA, 201 bp, Homo sapiens
ttcaggttcttaaggtaatgagtttggaaagttgtaatttaagctgtactttttcattcccaaaccatgacttttctattttttaaataatagagatgggktctcactatgttggccaggttagtcttgaacttctggcctcaagcagtcctcctgcctcaacctcccaaagttctcggattacaggcatgagccactgca

SEQ ID NO: 399571 - DNA, 201 bp, Homo sapiens
gccgcagcctcctgagtagctgggactacaggcgcctgccatcatgcctggctaattttttgtatttttagtagagacagggtttcgccacgttggccacrctggtcttgaacttctgagctcaggtattctgcctgcctcagcctcccaaagtgctaggattgcaggcgtgagccaccacgcctggtaggagtacaaagt

SEQ ID NO: 399572 - DNA, 201 bp, Homo sapiens
aagcaagccatgggatcggatttacccataattgagaagaaacttgagaggtgagtatactgcttctctcaagaataaaggcattcttatccaaggtcttatttgtttaaaattatttgcagggggaaaggggaggagatcacattatggtaaggtgttggtatttagagaggtaaggatcaaatttctgcagatcaaaat

SEQ ID NO: 399573 - DNA, 201 bp, Homo sapiens
ctgtttgtagctaggcatggtggctcgcgcctgtaatcccagcactttggaaggcagaggtggatggaccgcaagaggtcactagatcaaaaccagcctakccaacatggtaaaaccccgtctctactgaaaatacaaaaattagctgggtgtggtggcgggtgcctataatcccaactactcgggaggctaagccacaag

SEQ ID NO: 399574 - DNA, 201 bp, Homo sapiens
cttaaaaaaaaaaaaggattttgaactttatctttttaaaaaattctgtttgtagctaggcatggtggctcgcgcctgtaatcccagcactttggaaggcmgaggtggatggaccgcaagaggtcactagatcaaaaccagcctatccaacatggtaaaaccccgtctctactgaaaatacaaaaattagctgggtgtggt

SEQ ID NO: 399575 - DNA, 201 bp, Homo sapiens
tttcctcactgttaggtattaaattacttacaattttttgttactaccaatgatgcagttgtctttatgcaataacgtgtgtgtgtgtgtgtgtgtgtgtkcatgtgcctgcgcacttctttggttacaagggtatgatgaattatgacttttgtggtttgttgtcagattgatctccagaaagactctcaatgaacagtg

SEQ ID NO: 399576 - DNA, 201 bp, Homo sapiens
aaaggtgatactctaagtgatgaatcccagtgaactttttttttttttgagattgagtctcgctctgttgccaggctggagtgcagtggcgtgatcttggygcactgcaacctctgcctcccaggttcaagcaattctcctgcctcagcctcccgagtagctgggactacaggcacgcgccaccacgcccagctaattttt

SEQ ID NO: 399577 - DNA, 201 bp, Homo sapiens
tatactttaagaattttcttattggtaattttacaaggatgtacattttactgtagttttggtttcatggttcatgaacactacctggattctaattcttrttttcatcattgattttagaatgggtataaatatggcaaaatggaataaggaagtgtttgtttattgaaagccaaataatctataatgacaaaaatgcaa

SEQ ID NO: 399578 - DNA, 201 bp, Homo sapiens
ttttcttttttttctttcttttttgagacagagttttgctcttgttgcccaggctggagtgcaatggtgcgatctcggctcactgcaacctccacctcccrggttcaagcgattctcctgcctcagcctcctgagtagctgggattataggaacctgtcaccacgcctggcaagtttttgtatttttactagagacagggt

SEQ ID NO: 399579 - DNA, 201 bp, Homo sapiens
ctttcttagatggtcagttgccaagagtgattgtgagagtattctttacctgtgttacgtgccagagcctccactgccatccttatcttcttccttgtggtcattggtatccaaaatagacccgtcagagtcactggctcagtgattccctttgatcttcatcctttgggacactgaaagattctgaagatcttcccatca

SEQ ID NO: 399580 - DNA, 201 bp, Homo sapiens
tctttcttagatggtcagttgccaagagtgattgtgagagtattctttacctgtgttacgtgccagagcctccactgccatccttatcttcttccttgtggtcattggtatccaaaatagacccgtcagagtcactggctcagtgattccctttgatcttcatcctttgggacactgaaagattctgaagatcttcccatc

SEQ ID NO: 399581 - DNA, 201 bp, Homo sapiens
ttctttcttagatggtcagttgccaagagtgattgtgagagtattctttacctgtgttacgtgccagagcctccactgccatccttatcttcttccttgtggtcattggtatccaaaatagacccgtcagagtcactggctcagtgattccctttgatcttcatcctttgggacactgaaagattctgaagatcttcccat

SEQ ID NO: 399582 - DNA, 201 bp, Homo sapiens
gtaagattaaccaaagtacagatttcactaggtgttcactagcatcctttttctgttccaggatccagtctgggattccacactgcatttagttgtctctrtagtttaatgttatttcctcaatcttgtcttttctttcataactttgacattttttaagagtactggtcagctgttttgtagaacatccctccatgtagg

SEQ ID NO: 399583 - DNA, 201 bp, Homo sapiens
ttaggtattaaattacttacaattttttgttactaccaatgatgcagttgtctttatgcaataacgtgtgtgtgtgtgtgtgtgtgtgtgcatgtgcctgygcacttctttggttacaagggtatgatgaattatgacttttgtggtttgttgtcagattgatctccagaaagactctcaatgaacagtgctagtagcaaa

SEQ ID NO: 399584 - DNA, 201 bp, Homo sapiens
cttccacatgaatgtaaagatatcctgaatgtatagtgtgttattttgaagattagataatgtgagatagtttagatgatttctcccttctcactctcacrtatttctttcttcttcccttaactgcttctctatcatcctccaataccaccagtcccccacctcaaattatcccatttcctgagggactccttcctcctt

SEQ ID NO: 399585 - DNA, 201 bp, Homo sapiens
aggagctaggatgaaagtaacactgtaattagtagtagaatttatttcatattaaaatgtgtcatgacgtaatttttatggcttggctcaagcaacaattytcagagtgcacgtaagtatcaacgcgtaaaacttaacattttacagtgttatttggtattattctctatgaagctgtctggatcggtctccttttcccat

SEQ ID NO: 399586 - DNA, 201 bp, Homo sapiens
atttaaaatatataattcagtggtttgtagtatattcagagttgtgcagccatcaccatggtcaattttaggacattttcatcaccacaaagagaagcccygtactttttagctgtcacttccttaccctccacactaccatccctaagcaaccactaatctacttcgtctctgcatttgcgtattctagacatttcattc

SEQ ID NO: 399587 - DNA, 201 bp, Homo sapiens
gaacagaggctcctggtggaggacaagaggtggccctggaagtggaagtggggttgcgggtctctggagagccaggcagcggaaggctcagctcccagacytggggacttgctctcactgcctgcctgaaccatccactcctggaatatgtgtgtgtgtttaaacagttttattgagacatataattcatataccatataa

SEQ ID NO: 399588 - DNA, 201 bp, Homo sapiens
ctcgtgatccacccgcttcggcctcccaaagtgctgggattacaggtgtgaaccactgtgcccagccctctacttctttattgttttgggatagcttccaytgggggcctctaagtctcccaattactttccaatttgttgtcggattccctgactctcttgctcagatgttgctaaacagtgttttttcctctgattctt

SEQ ID NO: 399589 - DNA, 201 bp, Homo sapiens
ctttgggaggccaacgtgggcggatcacgaggtcaggagtttgagaccaccctggtcagcatggtgaaaccctgtctctactgaaaaaaaaaaaaaaaaaattaaccaggcatggtggcttgtgcctgtaatcctagcttctcgggaggctgaggcaggagaattgcttgaacccaggaggcagaggttgcagtaagccaa

SEQ ID NO: 399590 - DNA, 201 bp, Homo sapiens
tagtttgcactttcagatatattttagtgtagtgtaactggaaaaaaaatcagatctttgacttagcatttcatttttaaatgatggttttagacaatcttagttcatttgggctgtcaataaattatttaaaagtaagaataaagatggagtagacactaatatgtcttaaacatgggaaggaaaaaaagattttgtatc

SEQ ID NO: 399591 - DNA, 201 bp, Homo sapiens
atagtttgcactttcagatatattttagtgtagtgtaactggaaaaaaaatcagatctttgacttagcatttcatttttaaatgatggttttagacaatcttagttcatttgggctgtcaataaattatttaaaagtaagaataaagatggagtagacactaatatgtcttaaacatgggaaggaaaaaaagattttgtat

SEQ ID NO: 399592 - DNA, 201 bp, Homo sapiens
ggaatagctaagtcatttaaatctaattagattactgaatgagcttgattttaaaaaaaatgttaaagtaaatttctctctcaacttagttggtattctttgtgagaattcagtaaagctttggtttttaaaatattgttttagaggggtttttattctcttataaactacgtgaaaacttttctgagaagtaggctagat

SEQ ID NO: 399593 - DNA, 201 bp, Homo sapiens
tggaatagctaagtcatttaaatctaattagattactgaatgagcttgattttaaaaaaaatgttaaagtaaatttctctctcaacttagttggtattctttgtgagaattcagtaaagctttggtttttaaaatattgttttagaggggtttttattctcttataaactacgtgaaaacttttctgagaagtaggctaga

SEQ ID NO: 399594 - DNA, 201 bp, Homo sapiens
ttggaatagctaagtcatttaaatctaattagattactgaatgagcttgattttaaaaaaaatgttaaagtaaatttctctctcaacttagttggtattctttgtgagaattcagtaaagctttggtttttaaaatattgttttagaggggtttttattctcttataaactacgtgaaaacttttctgagaagtaggctag

SEQ ID NO: 399595 - DNA, 201 bp, Homo sapiens
ggttttcatttgaacacctgtctctattaaatagttcttttgggtggaaatggccagattatctgataatcctgtttaacttttgagaaactgccaaactrttttctacagtggccacgccgttttacgtttccaccagcaatgtatttcagtacattccagtttggagggttccaatatctccaatctttgccaacactt

SEQ ID NO: 399596 - DNA, 201 bp, Homo sapiens
cttggaatagctaagtcatttaaatctaattagattactgaatgagcttgattttaaaaaaaatgttaaagtaaatttctctctcaacttagttggtattctttgtgagaattcagtaaagctttggtttttaaaatattgttttagaggggtttttattctcttataaactacgtgaaaacttttctgagaagtaggcta

SEQ ID NO: 399597 - DNA, 201 bp, Homo sapiens
cacacatttttgctgctgaagcctcgttcttcttaaagactctagctgctttgctctcagccatcgttctcttgacagcgttgtctgaccagcactgagasacagacacctggtttgaaacacagaaacaaatttaagtctagagctgggatagtaagttttaaattttttttaagacctaggaatactttgtgaaaacac

SEQ ID NO: 399598 - DNA, 201 bp, Homo sapiens
agccaatatttgtagaagcaggaactatcttaagatggaatctaccaaaaatcaataagatgcctttactcaaatatttttctgtgaaagtttttttttttgttttgtttttcttttttaatcgaatattttgtttcttctagtattttaactttggtcttggaatagctaagtcatttaaatctaattagattactgaat

SEQ ID NO: 399599 - DNA, 201 bp, Homo sapiens
cctggcacctcgggaggccaaggctggcggatcactcgcggttaggagctggagaccagcccggccaacacggggaaaccccgtctccaccaaaaaaataygaaaaccagtcaggcgtggcggcgcgcgcctgcaatcgcaggcactcggcaggctgaggcaggagaatcaggcagggaggttgcagtgagccgagatggc

SEQ ID NO: 399600 - DNA, 201 bp, Homo sapiens
aggagaaaggagtgagaggttattagtaactcgttcggggtcacagcctagagttgagacactgacacagggcagttctgtgacctccagaacacttttgsgcaggccccactgctttcttaggaaggcctactagttgctttgccagagcagtgaaggataacttatttttttcctcaggctctgtctatattttcttgc

SEQ ID NO: 399601 - DNA, 201 bp, Homo sapiens
ctttttaggcctgtttttttgggggagggggaaagggcggggcgggcagtggacagagtcttgctctgttgcccaggctggagtgcggtggcgtgttctcrgctcactgcaacctctgcctcctaggttcaagcgattctcctgtttcagacttctgagtagctgggactacaggtgtgtgccacctcacccagctaattt

SEQ ID NO: 399602 - DNA, 201 bp, Homo sapiens
aaaaggaaaagttcatttccgtttttagaattctgcctcagttactgctgaataactcagaagacatatacacaagcttaccgaaacagcaataatggacrtgcgccacttaccgagccaccacgagcagctggtgaagatcatcagcagtgatgctctgagggtcgttcttccgcatttccacaaagtcatcttcaactg

SEQ ID NO: 399603 - DNA, 201 bp, Homo sapiens
gtatctctctgtcacccaggctggagtgcagtggcacgatctcagcccactgcaacttcacctcccgggttcaagtgattctcctgtctcagcctcccaartagctgggattacagcttgcgccccaggcccagctaattttttgtatttttagtagagacggggtttcaccatgttggccaggctggtctcagactcctg

SEQ ID NO: 399604 - DNA, 201 bp, Homo sapiens
caacttcacctcccgggttcaagtgattctcctgtctcagcctcccaagtagctgggattacagcttgcgccccaggcccagctaattttttgtatttttrgtagagacggggtttcaccatgttggccaggctggtctcagactcctggcctcaagtgaatagcccacctcagcctcctaaagtgctgggattacaggca

SEQ ID NO: 399605 - DNA, 201 bp, Homo sapiens
tagtagtattaacctcatatatgtacagcaacaattctttttaatttttcgaagctacattaaatagcatatcttaagttttaaaaaaatctatgattaarttaaagattttttctttcttttggcatggattttagccgaggaatgaagtttgagaatgttcagacactaacagatgccatttatgacattattcttgat

SEQ ID NO: 399606 - DNA, 201 bp, Homo sapiens
gctgctgggaggtggaggttgtagccagccgagatcatgccactgcactccagcctgggcaccattgagcactgagtgaacgagactccgtctgcaatccyggcacctcgggaggccaaggctggcggatcactcgcggttaggagctggagaccagcccggccaacacggggaaaccccgtctccaccaaaaaaatatga

SEQ ID NO: 399607 - DNA, 201 bp, Homo sapiens
aatgttcagacactaacagatgccatttatgacattattcttgatatgaagtggtgttggtaagtattttacaagaactcctttttacagactctgggatstgtaaaatagtaccactgagcattaaactgatagcagcatgcagagacagcatttttttttgttcgttttgcttcccagttcctattcttttcaagagaa

SEQ ID NO: 399608 - DNA, 201 bp, Homo sapiens
ttttctttcctcaaaatttatgtcttctgtgactaatattttacagaaaccagcttcattaacataattcatattttgtaatatacttgtgtttctgtatygagcatcttacccaatatatcaaattcaaatttttacaagattagaatttgacaaatatttttggctggagcaacaaaagaaaccatctattttccatgc

SEQ ID NO: 399609 - DNA, 201 bp, Homo sapiens
ctcacaaatccagtgaagccttcattttatttctaaaagtttaaggaaggtctagtctaccagttataaaaatgaaaaccagttcaactctaatataaacmttatttacatttgtttataaaaatagatttgagtttaggaaaagttgaacaactagttatttttacttcagttattaggtacaatgaattccttgatttt

SEQ ID NO: 399610 - DNA, 201 bp, Homo sapiens
tacctcactattttcaactttagccaccttcctaagatcctatctgcaggctgcataaaacaaaacaaaacaaaacaaaacaaaacaaaacaaaacaaaactgagataggacctggagtgtttggtgatggaagaagaggtggatttgaagtggatgctgagattaaggctgggtacacttacggagataagagagaaagg

SEQ ID NO: 399611 - DNA, 201 bp, Homo sapiens
gccattcttctgcctcagcctcctgagtagctgggactataggcacctgacaccacgcccggctaattttttgtatttttaatagagatggcgtttcaccstgttagccaggatggtctcgatctcctgacctcgtgatccacccgcttcggcctcccaaagtgctgggattacaggtgtgaaccactgtgcccagccctc

SEQ ID NO: 399612 - DNA, 201 bp, Homo sapiens
ttacctcactattttcaactttagccaccttcctaagatcctatctgcaggctgcataaaacaaaacaaaacaaaacaaaacaaaacaaaacaaaacaaaactgagataggacctggagtgtttggtgatggaagaagaggtggatttgaagtggatgctgagattaaggctgggtacacttacggagataagagagaaag

SEQ ID NO: 399613 - DNA, 201 bp, Homo sapiens
ttccgcctcctgggttcacgccattcttctgcctcagcctcctgagtagctgggactataggcacctgacaccacgcccggctaattttttgtatttttartagagatggcgtttcaccctgttagccaggatggtctcgatctcctgacctcgtgatccacccgcttcggcctcccaaagtgctgggattacaggtgtga

SEQ ID NO: 399614 - DNA, 201 bp, Homo sapiens
tttacctcactattttcaactttagccaccttcctaagatcctatctgcaggctgcataaaacaaaacaaaacaaaacaaaacaaaacaaaacaaaacaaaactgagataggacctggagtgtttggtgatggaagaagaggtggatttgaagtggatgctgagattaaggctgggtacacttacggagataagagagaaa

SEQ ID NO: 399615 - DNA, 201 bp, Homo sapiens
aatcactggctgggcacagtagctcacacctgtaatcccagtgcttggggacgctgagtttggagggtcacttgaggccagcagttcaagaccagcctggrcaatgtagtgagacactgtctcttaaaaaaagtcaccattgggtgattagagtctcaaatcttttaagtcctcagctaccaaatatctgcctcagaaatg

SEQ ID NO: 399616 - DNA, 201 bp, Homo sapiens
ctttacctcactattttcaactttagccaccttcctaagatcctatctgcaggctgcataaaacaaaacaaaacaaaacaaaacaaaacaaaacaaaacaaaactgagataggacctggagtgtttggtgatggaagaagaggtggatttgaagtggatgctgagattaaggctgggtacacttacggagataagagagaa

SEQ ID NO: 399617 - DNA, 201 bp, Homo sapiens
tactactgcctgatgatgagaagttccatgggggctgggccctcattgactgtgaccctaggtgagttggagtggtgtccaggtgaccagcttgcttaacygatgttgggaagttgtcatgattaacactggcagttgtccctaaagctgtgggcatggatgcatggcgcgtgactatttcctctatgagctggtagtgag

SEQ ID NO: 399618 - DNA, 201 bp, Homo sapiens
cctttacctcactattttcaactttagccaccttcctaagatcctatctgcaggctgcataaaacaaaacaaaacaaaacaaaacaaaacaaaacaaaacaaaactgagataggacctggagtgtttggtgatggaagaagaggtggatttgaagtggatgctgagattaaggctgggtacacttacggagataagagaga

SEQ ID NO: 399619 - DNA, 201 bp, Homo sapiens
attccgtttgttttctcattactcaaggctgagcaatgtaaccagattatttttcctgtatattatttgttctgtgttcttgctgtggacaaatataccarccttttccataagcatggtttatcagaatattagggtaccagatttagagattaccctaaccaactcatcatttttttggaagaggaaatggaaggatag

SEQ ID NO: 399620 - DNA, 201 bp, Homo sapiens
atcacttttaagagacagagaaaaccttccagtgaaggtgtttccatgagtttgaactttgttatacagatccacaatccttatctgaacttcttggggggccatatttgttttagaattcaagttttttggggttttcaaaaggttattccctgtattttctaccctctaaagtggttctggagcattaccccacgataa

SEQ ID NO: 399621 - DNA, 201 bp, Homo sapiens
aaattagctgggcatggtggcgtgcgcctgtaatcccagctactcactcagatggctgaggtgtgagaatcacttgaacccgggaggcagaggttgcagtragccgagattgtgccattgcactccagcctgggcgacagagcgagactctgtctcaaaaaaaaaaaaaaaaaaaaagcctggttcaagttagtgattaaa

SEQ ID NO: 399622 - DNA, 201 bp, Homo sapiens
aatcacttttaagagacagagaaaaccttccagtgaaggtgtttccatgagtttgaactttgttatacagatccacaatccttatctgaacttcttggggggccatatttgttttagaattcaagttttttggggttttcaaaaggttattccctgtattttctaccctctaaagtggttctggagcattaccccacgata

SEQ ID NO: 399623 - DNA, 201 bp, Homo sapiens
aaatgtgtgtgggttccagattgcagatgtgtgtagttgactcttttctgaaatggttggctaaggcagggccaggtaatgtgactcaagcaggccacacwttacatcagagggagagggggctgtgtgggcctgaggaggagtgtgtgctctctctggaggggcctatgttgccagaccctccagtttttcaagggattc

SEQ ID NO: 399624 - DNA, 201 bp, Homo sapiens
acacaggctggaatgcagtgacgcaatcatcctgccttcagccccccaagtggctgggattacaggcatgtgccaccaccccctgctaattttttttttttctattttttgaagagatggggtctcactatattacccatgctggtcttgaatacctgggcttaagcaatctgcctacctttacctcccaaagtgctgggg

SEQ ID NO: 399625 - DNA, 201 bp, Homo sapiens
aatgtgacggccaacattttaaagtccattgggtggcattgtgtggtcatttaccttttccctctcacctccaagcccacccttctgtgtttggggctggragtcttgatactgcatttcttttttttttttttgagatgcagtcttgctctgttgcccaggctgttggggagggagctgctgacgggaggaacacaggtg

SEQ ID NO: 399626 - DNA, 201 bp, Homo sapiens
ccttgttgcattaaaatctggaaagcacaacctgcactgaaaatcagttaaataaagtgagattttcttaatcactcatttcaaaaatgtgacggccaacrttttaaagtccattgggtggcattgtgtggtcatttaccttttccctctcacctccaagcccacccttctgtgtttggggctgggagtcttgatactgca

SEQ ID NO: 399627 - DNA, 201 bp, Homo sapiens
tgccaccacacccgactcattttttgtatttttagcagagatggggtttcactgtgttagcctggttagatggtcttgatctcctgaccttgtgatccgcycgagagagagagagagagagagagagagagagagagagagagagagagagactgagactgactttgcctgtaatatcagcactttggcagggggccgagg

SEQ ID NO: 399628 - DNA, 201 bp, Homo sapiens
gtaatttaagctgtactttttcattcccaaaccatgacttttctattttttaaataatagagatggggtctcactatgttggccaggttagtcttgaactyctggcctcaagcagtcctcctgcctcaacctcccaaagttctcggattacaggcatgagccactgcacccagcccaaaccatgacttttaaatgtgtagg

SEQ ID NO: 399629 - DNA, 201 bp, Homo sapiens
atagcatataaagatacaccaagcaaattacagccagtgctgctgttttattgatatactttaaagaattgtgtcttttgaaaaccctattattttatatwgtaaaataattctgtattatttttaaaaagggttgatgaagctggggtaatatgtaagcaggaagggatttttcgtgttaattgtatggactgcctggat

SEQ ID NO: 399630 - DNA, 201 bp, Homo sapiens
atagtatgatcctgcacattaaaaattgtaccaaaacagtataaatatttcattatatttattcaacttgtagcaatttataaagccatctttcaagcacyactttattaaaaatgagtctgaaaagaccatttctcttatttaagggtcctaaattgtatatgaatatgtttcctttttctgcagtacacattttttgct

SEQ ID NO: 399631 - DNA, 201 bp, Homo sapiens
agggtgtgaaatggtcaggccaaatgaagtgaaacgctctgactgttctttaaggacatgaatttattccttctcatgccccacggtccacattttctctytctcctctttctcactgttcctaacacaggaaggaagtcttagaggtactttgtctcagttttcaggcatttcaaaattatcagagacggaaaatgattc

SEQ ID NO: 399632 - DNA, 201 bp, Homo sapiens
ttgtgtcttttgaaaaccctattattttatattgtaaaataattctgtattatttttaaaaagggttgatgaagctggggtaatatgtaagcaggaagggrtttttcgtgttaattgtatggactgcctggatcgcaccaacgtggtccaagctgccatcgcgagagtggtcatggaacagcaggtaatttggagtctgtt

SEQ ID NO: 399633 - DNA, 201 bp, Homo sapiens
aatatacatgcatttcaagcacacatagaacacttgcaaattgacttgtcaaattcctttcccacacctagcctccagtgccccattatcctccatccttycccttgctaaaacaaagacgactttgactcctgtttttactgagtcaagggcataggatacacgcatctgcttctcttctccatttctgtgtttagcctt

SEQ ID NO: 399634 - DNA, 201 bp, Homo sapiens
tgtattgagcatcttacccaatatatcaaattcaaatttttacaagattagaatttgacaaatatttttggctggagcaacaaaagaaaccatctattttycatgcatatttgtcagtttattactcaggtaatagaaagcagggtttgaagctcctggagtgtggaataaggtgccctaaaacctcaacaattaaaaact

SEQ ID NO: 399635 - DNA, 201 bp, Homo sapiens
tatatactatatataaatactaattaatctctctgtatacactatatactatatatatatatatatatagagagagagacggagatttaacatctataccraaattattacttacagagatctgttatttaaagataattattataagggattggctcatgtgattatggaggctgccatctgcaatctggagaaccagga

SEQ ID NO: 399636 - DNA, 201 bp, Homo sapiens
gcctgaacccaggaggtggaagttgcagtaagccgagatcgtgccaatgcactccagtctgggtgacagagcaagactccgtctcaaaaaaaaaaaaaaaagtttatgtggtaaaattattatctatgtcaatattcagcagtcatggttttaaataaaaatttctttttttaacaaagttaaaaaccaaaatgaatacat

SEQ ID NO: 399637 - DNA, 201 bp, Homo sapiens
tcagtaaaatacttgatagtacagttatactcatttgagtccctcttctcaggaaaatatatataaacacataactataaatagactataaatatgcagtrtaagagaatttcatctatccctggagttcattcagtgccctcttgttcttttggatgaagggaaataatatgcccttagatttagaagcagagaaattag

SEQ ID NO: 399638 - DNA, 201 bp, Homo sapiens
tacttttcattgtgtggatgtggaaaatcagtaatgtgaaactttcatttttgtcttacggctttttaatggaattgtaatgattctaaagcattgacatsctctggtctttgaaagattaataaaaggggggaaattttccagttatttatatttgctgtacttcactttaaaaactagatgtgcttggggattgagaaa

SEQ ID NO: 399639 - DNA, 201 bp, Homo sapiens
tcttactatttcatttttacggataaatattcttagtcttttattattatagtcttaacataagcggttaatgtagatacttcttttattttggggtactrctgttgcttttatttcatacaagggacaaaataatctctcaagcatgttgttttcttttatattttgtaagtatgttttatcacacacaggcatacctca

SEQ ID NO: 399640 - DNA, 201 bp, Homo sapiens
ccatgggtgtgtggtgaggataaaattatgtgcttagaggaaacgttcattccatggtagctattttttattaattctatacttttgaacctattatgctrcctataatgccctattttttttttctttttaatcattggcaaacttctcattccctgagacccagcttgtcacacctctgaagactgctgatatcctcaa

SEQ ID NO: 399641 - DNA, 201 bp, Homo sapiens
ttggtatttgctaaaggttggggtagctgtggcaatttttgataaaatacaagacaggaccaggaacggtagttcacatttgaatcccagcactttgggargtggaggtgggaggatcacttgagcccagaaggttgaggctgcggtgagctatgattatgctactgtactccagcctgggcagagggagactccacctat

SEQ ID NO: 399642 - DNA, 201 bp, Homo sapiens
ttggaatactgcaagagtttccaaaatgtgacacagacctgaagtgagcatatgctgttgaaaaaatgataccgatatacttgcttggtgcagggttgccrcaaaacttcaatttgtaaaatatgcagtgtctgagaaacacagtaaaatgaggtatgcctgtacttaacaataattaattaggtattgttacttagtaaa

SEQ ID NO: 399643 - DNA, 201 bp, Homo sapiens
agagctcttcactagttttagtattgttttagaatcagagcatgctctgtatttctgccagttagctttgttgagtaggtattagggcttttgttattaaygcctagataagtaataatttttaattagcataaggcggttcttaaatacctattctgtgcaccatatccagtaaacacaaagtaatagcagtcatcaaaa

SEQ ID NO: 399644 - DNA, 201 bp, Homo sapiens
acaggaaaatgagttgtgaggaattggggtcaccagatttcattaaaaatttgaaaatatcactgtttctctaaactttaatttttatttgttgtattttwagcggttaagaagattgtctaccaaatatagaacagaaaagatatatcccacagccactggagaaaaagaagaaaatgttaaaaagaacagatacaagga

SEQ ID NO: 399645 - DNA, 201 bp, Homo sapiens
cttacctatcagtgaactttggtagtgacacatacagactggtatttataacgtgcaggcaaaataagtactgtgaccttgaaagatttttttttttttttgagacttgcactcaaaagattttttttttgagtcttgcactgtcacccaggctagagtgcagtggcaagatctcggctcagcctcccaagtagctgggat

SEQ ID NO: 399646 - DNA, 201 bp, Homo sapiens
ttgggaatatcataacagttaattcatgaataggtcagaactttctaatgttgtatgaatattatgtgacctggtaatctgagacactttaatggcgcttrcctgcaactagctgttctttttgatactggataggacatttaattctgtacaaacaactactaagggtttctttcccttaaaaaattttttttaattgtg

SEQ ID NO: 399647 - DNA, 201 bp, Homo sapiens
tcgcttgaacccaggaagcgaaggtgccagtgagccaagttcatgccactgcactccagcctgggtgaaaaagcgagactttgtctcaaaaataaaaaaasaaaaataaagtacatgttggctgggcatagtggctcacgcctgtagtcccaacattttgggaggctaaggtgggcggattgcttgaatccatatatatat

SEQ ID NO: 399648 - DNA, 201 bp, Homo sapiens
tggcggcattggtagtgatgggataaaatgtgtaaacatgatggatattaaaggcaagaatgacaagtactatatgactaggacatgtttttggaatatawgcctcattagagcagggattttgtcctgttcatctcttatcactagcacctaaaacagtccctgggcataggataggttaggtggagttaatgtgaagcc

SEQ ID NO: 399649 - DNA, 201 bp, Homo sapiens
gccaccgcgcccggcctcgaatgtgttttttgtttgttttgtttgattggttttttttgttttttggttgttggttttttttttgatgacgaagtctcacyctgtcacttaggctggagtgcagtggcgcaacctctgcctcccgggttcaagcgattctcctgcctcagcctcctgaatagctgggattacaggcatgta

SEQ ID NO: 399650 - DNA, 201 bp, Homo sapiens
ctcaacagatccgcctgccttagcctcctaagtagataggactacaggcatgagccactgctccctggtggattacttttaaagtatgtttttttttttttgaaaatgcaacttaaactagaagtacaggatgaatatttaaccaatacatttaatttcttgtcattgctttattagatgctgtttttgtattgtttataa

SEQ ID NO: 399651 - DNA, 201 bp, Homo sapiens
tagagtccattttcatccattgttttttaaaataaatgttcttaagctgtctatttaaccttacttacgcttcattagaaaatacctgtgtgtcaaccatrcatattttatgaatttttttctcgtagttgatcacagccgagttaaattgacattaaagactccttcacaagattcagactatatcaatgcaaattttat

SEQ ID NO: 399652 - DNA, 201 bp, Homo sapiens
acatattttccatgaactttctgaagaccccttgtatgaatgccaaggagaaacatagggtgggtggttattagtaataggattttgcaactgaaataatyaaacatgttcagatatttatctccacacccattcactgacattattagatggtgcacaaaagtaaaaagtttattttaaaattactttataatttagata

SEQ ID NO: 399653 - DNA, 201 bp, Homo sapiens; identical to SEQ ID NO: 88464

SEQ ID NO: 399654 - DNA, 201 bp, Homo sapiens
tagctgggattacaggtgtgcgccaccacacccagctaatttttgtatttttagtatagacaaggttttgccatgttgtccaggctggtcttggactcctkacctcaggtaatccacccgccttggcctcccaaagtgctgagattacaggcatgacagtttaacatttccattgaaagctctgctcttgtctgtagctat

SEQ ID NO: 399655 - DNA, 201 bp, Homo sapiens
agaagccacagatattggtaatttgtttaataaataatttttagtaagtagttaacactggcaggaatgagaaaagctcatttgccattgtgaaatgacasttgccaagaataaaacatgattttccaaagttgcttggactagtcatgaaataaatgaaatacttaattctatttcacattgagattaaaaactaaaata

SEQ ID NO: 399656 - DNA, 201 bp, Homo sapiens
tatggtgcccaggagagaaagttttctcttttcatgcttgccaacatttaaaaaattaaagagttatatatatatgatgctacaaaggatggtgattaacraaggctttgtgttgctacttagatcatccagcgggaggtattcactatgaaatgtgcatagaatgtccacctactttcagtgacaagagagaacaaatat

SEQ ID NO: 399657 - DNA, 201 bp, Homo sapiens
aaattagccggttgtggtggcacacgcctgtggtcccagctactcaggaggctgaggtgggaagatcacttgagcccagaaggtagaggctgcagtgagcygtgattgcaccactgcacactccagcctgggtgacaaagtgagaccctatctaaaaaaagagagaatttaatttaatcattttctgtaaacatctcttgg

SEQ ID NO: 399658 - DNA, 201 bp, Homo sapiens
aataatattctattgtatagataccacattttgtttatccattcatcgtgttgatgggtatttgaattgtttccactttttggctaatgtgaataatgcarctatgaacatttgtgtacaagtttctgtgtggacacattttcaggtctcttgggtatatatctaagtgtggaattgctcagtcacgtggtaacactatgt

SEQ ID NO: 399659 - DNA, 201 bp, Homo sapiens; identical to SEQ ID NO: 88459

SEQ ID NO: 399660 - DNA, 201 bp, Homo sapiens
ctttccattttttttaacattttgaaagtagatggtaggagctagaggaagattggttgaaggagagtgtgccccttccactgccttttttttttttttttaaagagagaactagagaatatttttcttattatttcttgtctatgtgtatatcctctttagcctgggaagatcttatgttgcagtcttgataaatataaa

SEQ ID NO: 399661 - DNA, 201 bp, Homo sapiens
cataattttatgacttagttatactcatgacttctgaattcctctcatacatacccaaagtttagtgctttctaggttgacataaaaaaggacaggactgwatctgtattatgctgtctactttataaatcaatgttgtttttataatgttaactataactcaccattgaactttttggatgtagtatttagtcaatattc

SEQ ID NO: 399662 - DNA, 201 bp, Homo sapiens; identical to SEQ ID NO: 88461

SEQ ID NO: 399663 - DNA, 201 bp, Homo sapiens
gctcagaaaattgctgatggagtggtaggtgttcttggtctattaattttaggaaacttttactctttgttaagatgtaatatttagccttttttttgttrtcttgtgttttgtctaacatgagaagaatatccaggacacttaacatttttacttaaactcatttccttcttattcgtatctgtattatgatggctattt

SEQ ID NO: 399664 - DNA, 201 bp, Homo sapiens
cagactggaatgcagcgacgtgatcgcagctcactatatagccttggcctcactgctgggcttagtgatccacctacctcagcctcccaagtagctgagascacaggcttacgcctcaatgtccagctagtttttgtatttttttgtagagacagggttctgctatattgttcaggctggtcttgaacccctaggctaaag

SEQ ID NO: 399665 - DNA, 201 bp, Homo sapiens
gagtgtaatatttagtcttgacatttatgcttatcacattacataaaaagtaatattaattataacataccctaaatttgttaaatttggaatagttatascttctttgcagcaaatatttttattctattgcagtaagcaggttattgcattgtttatataattattaccctgttttactggtttacaatttgttaaaga

SEQ ID NO: 399666 - DNA, 201 bp, Homo sapiens
ttaaacacctgcaataaccattctcaaaacatttgacatcagtactcctttacattcttcaaagttattgaggatcccaaagtttttgtttctgggggttrtatctttcagtatatactatatttgaaattaaaactgagaaatttttaaaaaacatgaatacataagcatatattgtattggctgttaaagaataaggca

SEQ ID NO: 399667 - DNA, 201 bp, Homo sapiens
ctttcagtatatactatatttgaaattaaaactgagaaatttttaaaaaacatgaatacataagcatatattgtattggctgttaaagaataaggcacgtracattttagtattattctgagaattatttaaagctcatagactccctcaaaagggttgaggggagggggtacccagaccgtatattgagaaccactaatc

SEQ ID NO: 399668 - DNA, 201 bp, Homo sapiens
ggttttgcaaaattactcgtttggatgtgttaagaaatcatgtaaactcttcctttgactttgggggaatgaacatgagatttgtttattcttggggggcrgttaattttgtattctagaaggggggttaatgtataatatattttagctaagagaaatcagtttaagataaccaacttttcttaatctaacattttggct

SEQ ID NO: 399669 - DNA, 201 bp, Homo sapiens
agcctcccaagtgctaggattacaggcatgagccaccgcgcccggcctcgaatgtgttttttgtttgttttgtttgattggttttttttgttttttggttkttggttttttttttgatgacgaagtctcaccctgtcacttaggctggagtgcagtggcgcaacctctgcctcccgggttcaagcgattctcctgcctcag

SEQ ID NO: 399670 - DNA, 201 bp, Homo sapiens
cgaactcccaacctcaggtgatccgcctgcctcagcctcccaagtgctaggattacaggcatgagccaccgcgcccggcctcgaatgtgttttttgtttgytttgtttgattggttttttttgttttttggttgttggttttttttttgatgacgaagtctcaccctgtcacttaggctggagtgcagtggcgcaacctct

SEQ ID NO: 399671 - DNA, 201 bp, Homo sapiens
tactgcagcctcgacctcccaggctcaagcaatccttctgccttggcctcccaaagtgctgggacaacaggcatgagccactgcgcccaaccccttaaaaatgaaatgtttaaaagatagaagacaataggccttccttattcaagacttcactgtcctcagtttcagttactcatagttcaaaaatatcaaatggaaaat

SEQ ID NO: 399672 - DNA, 201 bp, Homo sapiens
ttactgcagcctcgacctcccaggctcaagcaatccttctgccttggcctcccaaagtgctgggacaacaggcatgagccactgcgcccaaccccttaaaaatgaaatgtttaaaagatagaagacaataggccttccttattcaagacttcactgtcctcagtttcagttactcatagttcaaaaatatcaaatggaaaa

SEQ ID NO: 399673 - DNA, 201 bp, Homo sapiens
cttctatagattgaaatgatgtaccatttcctcctgtactctaaaacaagagccatcttttttttttttttttttttttttttgagttggagttttactcytgctgcccaagctggagtgcaatggcacgatcttgggtcactgcaacctccacttccccggttcaagtgattctcctgcctcagcctcctgaatagctgg

SEQ ID NO: 399674 - DNA, 201 bp, Homo sapiens
tgatccgaccgcctttgtctcccaaagtgctgggattacaggcatataatcccatgtaatccaccgcaccaggcctgaatatcttgattagtctgtttgttaataccacagtatgttttgtttgtttcctatcttcaaaactgagagaagataatttcttaccctgattttctaacattggtatttttatgctatgtcgaa

SEQ ID NO: 399675 - DNA, 201 bp, Homo sapiens
taggagtgctttggtgactagaaaaaacagtttgggttggggtatgggaagaagctagattatagggtgaagggtgggtttagtgtctttccattttttttaacattttgaaagtagatggtaggagctagaggaagattggttgaaggagagtgtgccccttccactgccttttttttttttttttaaagagagaactag

SEQ ID NO: 399676 - DNA, 201 bp, Homo sapiens
gtgatccgaccgcctttgtctcccaaagtgctgggattacaggcatataatcccatgtaatccaccgcaccaggcctgaatatcttgattagtctgtttgttaataccacagtatgttttgtttgtttcctatcttcaaaactgagagaagataatttcttaccctgattttctaacattggtatttttatgctatgtcga

SEQ ID NO: 399677 - DNA, 201 bp, Homo sapiens
tatctctacttttaatatttacaaaatgagagataaatgtataaagtagggtggtgcacattcatgtttgacagacctaggttttactccacacagactcyctctgatggctgggggttggggaggtggtcctggaccatactttgagaaccagtgagctaatacatggtaaatgataaaggtaatgctgggaaagttagg

SEQ ID NO: 399678 - DNA, 201 bp, Homo sapiens
ggtgatccgaccgcctttgtctcccaaagtgctgggattacaggcatataatcccatgtaatccaccgcaccaggcctgaatatcttgattagtctgtttgttaataccacagtatgttttgtttgtttcctatcttcaaaactgagagaagataatttcttaccctgattttctaacattggtatttttatgctatgtcg

SEQ ID NO: 399679 - DNA, 201 bp, Homo sapiens
gaatttgatctcaattatctctacttttaatatttacaaaatgagagataaatgtataaagtagggtggtgcacattcatgtttgacagacctaggttttactccacacagactccctctgatggctgggggttggggaggtggtcctggaccatactttgagaaccagtgagctaatacatggtaaatgataaaggtaat

SEQ ID NO: 399680 - DNA, 201 bp, Homo sapiens
aggtgatccgaccgcctttgtctcccaaagtgctgggattacaggcatataatcccatgtaatccaccgcaccaggcctgaatatcttgattagtctgtttgttaataccacagtatgttttgtttgtttcctatcttcaaaactgagagaagataatttcttaccctgattttctaacattggtatttttatgctatgtc

SEQ ID NO: 399681 - DNA, 201 bp, Homo sapiens
tccctgggctcaggtgatcctcccacttcagcctccagagtagctggggctatgggcccaccccaccaagccctgctgatttttgtattttttgtagagayagggtttccccatgttgcccaggctggtctcaaactcctgggctcaagcaatccacctgcctcagcctcaaagtgctggggttacaggtgtgagccaccg

SEQ ID NO: 399682 - DNA, 201 bp, Homo sapiens
aactcttcctttgactttgggggaatgaacatgagatttgtttattcttggggggcagttaattttgtattctagaaggggggttaatgtataatatattktagctaagagaaatcagtttaagataaccaacttttcttaatctaacattttggcttatttctgtcatctggtcattctcatacaaataatacaaagcta

SEQ ID NO: 399683 - DNA, 201 bp, Homo sapiens
tccatttgtataggaaggcttttcatcaaaaactaaattgaccgttaaatatttttagacaatcaaaacagtacgttaactgtaaggacttagaaaacacrtccataaaagcaagaaaattcttttgctttccactagttccactggagataaccattgttaaaactcgagaatgtgtcctttcagtgtgtgtatgtgtac

SEQ ID NO: 399684 - DNA, 201 bp, Homo sapiens
ggtacagacagggtttcaccatgttggccaggctggtctcgaacttctgacctcaggtgatccactcatctcggccttccaaagtgccgggattgtaggcrtgagctacggtgcctggcccattgccttttatgtttactctaggtataagtgtatttcactcagtatgtatttatgcctgctggagacattatagtattg

SEQ ID NO: 399685 - DNA, 201 bp, Homo sapiens
aactataatcatctaattctcaaatgaaaatgcttaagtgaacaaaatttaactggaattcgatcacattttaacataaaagtcaaagattaaaattggartgagaagggacacataaatgaatgctagcaaacaaaacaaacatttggtcattttaaaagttgtgtattttggataggtgccatggcttatgccataatt

SEQ ID NO: 399686 - DNA, 201 bp, Homo sapiens
  misc_feature (1)...(201): n = A,T,C or G
taaatgtttgcagtaaaccagcaggtatttaagttttatgtgaaaagctgaagaagattttactattttctgaatagatacacaaagttgatgtattaaantttctgttttagaaaataccagaggaatttaatgtatttaatttaatacaagaaatgagaacacaaaggcattctgcagtacaaacaaaggtatagttgt

SEQ ID NO: 399687 - DNA, 201 bp, Homo sapiens
ataattgcattgttctctttactcttcccttccacccccacccaagtaattctgcattgattctacttgaatttcattttgtataaagtgttttagttatytgtgtatatgcttttcttttcttttcttttttttgagacagagtttcactcttgttgcccaggctggagtgcaatggcacagtctcagctcactgcaacc

SEQ ID NO: 399688 - DNA, 201 bp, Homo sapiens
aaattttagtttgatatactagttggttgtttaagactttaaaatgaatagtgttttttagagatatttataactacagtgacttcctggagtgagagatstaaagagaaaatttattctgtaagcctgtatcatattgactgaggatttagaggtaccttaataagcaaacatctgttaagttgtgcagtgtgccttttt

SEQ ID NO: 399689 - DNA, 201 bp, Homo sapiens
cctcagcctcccaagtagctgagactataggcacatataccacacctagctaattaaaaaaaaatttttttttgtagagatgttgtagagatgttgccagsttggtcttgagctcctgggctccaacagtcctcccccacctcagcctcccaaagcactgagattacaggcatgagccattgtgcccagctattgttgtat

SEQ ID NO: 399690 - DNA, 201 bp, Homo sapiens
gtttgacctacttaatttttgtgtgtttcctggagtagctcttttaatgtcctccaaaaacttttcctttttgttctaaacttggctgataagtacaagakgcctacctttctgcctatctcagttttcaacatgccttctttactaagcttaatcatttttagcttttttatttaaagtgaaaagtttgtgacccttttc

SEQ ID NO: 399691 - DNA, 201 bp, Homo sapiens
caataaggctgtttgacctacttaatttttgtgtgtttcctggagtagctcttttaatgtcctccaaaaacttttcctttttgttctaaacttggctgatwagtacaagaggcctacctttctgcctatctcagttttcaacatgccttctttactaagcttaatcatttttagcttttttatttaaagtgaaaagtttgt

SEQ ID NO: 399692 - DNA, 201 bp, Homo sapiens
aggctttggcttgtagaaatgttgcagctggtttgatcttctatctagaccactaaaactttctccatgtaagcaataaggctgtttgacctacttaattkttgtgtgtttcctggagtagctcttttaatgtcctccaaaaacttttcctttttgttctaaacttggctgataagtacaagaggcctacctttctgccta

SEQ ID NO: 399693 - DNA, 201 bp, Homo sapiens
tataaggatgtttcatccatactgaaaatatgtcatttagtatagcttgtttcatcagtgctcttagcttagatctttggataacttgctgcagcctctamatcagaatttggtgcttcatctcgcacttttatgttatggggacagcttctttccttaaacttcgtgaaccagcctttgctagcttctaactttccttct

SEQ ID NO: 399694 - DNA, 201 bp, Homo sapiens
tcactgcaacctccgcctcccaggttcaagcgactctcctgccttagccttctgagtagctgggattataggcatgtgccaccacaactggctaatttttrtagttttagtaaagatggggtttcaccatgttggccaggctggtttcgaactcctgacctcaggtgttctgcccacctcggcctcccaaagtgctaggat

SEQ ID NO: 399695 - DNA, 201 bp, Homo sapiens
ttaaaatgataatattgcagtaaacatctttgttgttttgaataatttcttaggataaattactaggggtgggattactggataatactgatttaaaattmtagaacatagctttaaatgtaaaacttttggcagttgtcactgtttcaggtggcaacccaaaatccaagattaaatagtctcttttataacctttgtttg

SEQ ID NO: 399696 - DNA, 201 bp, Homo sapiens
gaaaagctcatttgccattgtgaaatgacacttgccaagaataaaacatgattttccaaagttgcttggactagtcatgaaataaatgaaatacttaattmtatttcacattgagattaaaaactaaaatagaaaactgcagtataaaaaatcttttgtgttggaaagactaaattatcatggatatttttcttacattgt

SEQ ID NO: 399697 - DNA, 201 bp, Homo sapiens
aggccaagctgggcagattatttgagctcaggagttcaagaccagcctgggcaacatagcaaaactcaacacacacacgcacgcacgcacgcacacacacatactctctctttctctctctcgtgtgtacacttgtggtcccagctactcagtaggctgatgtgggaggatcacttgagaccaggaggtcaaggctgcagt

SEQ ID NO: 399698 - DNA, 201 bp, Homo sapiens
gaggccaagctgggcagattatttgagctcaggagttcaagaccagcctgggcaacatagcaaaactcaacacacacacgcacgcacgcacgcacacacacatactctctctttctctctctcgtgtgtacacttgtggtcccagctactcagtaggctgatgtgggaggatcacttgagaccaggaggtcaaggctgcag

SEQ ID NO: 399699 - DNA, 201 bp, Homo sapiens
cactttaggaggccaagctgggcagattatttgagctcaggagttcaagaccagcctgggcaacatagcaaaactcaacacacacacgcacgcacgcacgcacacacacatactctctctttctctctctcgtgtgtacacttgtggtcccagctactcagtaggctgatgtgggaggatcacttgagaccaggaggtcaa

SEQ ID NO: 399700 - DNA, 201 bp, Homo sapiens
gcactttaggaggccaagctgggcagattatttgagctcaggagttcaagaccagcctgggcaacatagcaaaactcaacacacacacgcacgcacgcacgcacacacacatactctctctttctctctctcgtgtgtacacttgtggtcccagctactcagtaggctgatgtgggaggatcacttgagaccaggaggtca

SEQ ID NO: 399701 - DNA, 201 bp, Homo sapiens
tccatctcaaaaaaaaaagtacataagccaataactattttctttatcattattatcaaggattgtgtcctgtacgtaattacatgtgctgtgcttttatrtgactgacagcatagtagctttgtttataccagcatcacaacaaacgtgaatgacgcattttgctacaaattcatgggaatttttcagctccattataac

SEQ ID NO: 399702 - DNA, 201 bp, Homo sapiens
aagaaaagctgagtaactgatgatgcatagagagctaagccatcagaaatccaaggcagtcattaggggaaaacaagacactatagaagaaaagatacgawatcatggtgtcatagatgggaatactatctgcagtcatacgactgaggtaatgaaaaattacaatataacagtattggaaagatagagaaggacacttcc

SEQ ID NO: 399703 - DNA, 201 bp, Homo sapiens
atacagaggtgtaaattttagaagcagctataaaaaaatgttgaaagttgatgcctctggctaacaggagggctgcggggcagagactatgtttttcattmaaagtcttgtatttgactttttaaacagtatatgtgtattaccttgatgaacattaaattttcttagtctgaaaaactgcagtttttattcgcaaccaga

SEQ ID NO: 399704 - DNA, 201 bp, Homo sapiens
aaacaatttagttgaaacatgaagaggaaaaattatttttctcttaaccttagtgaagtattttttcccttggcagaatgaaattaacactgaaaacatgrtcagctccatagagcctgaaaaacaagattctcctcctccaaaaccaccaaggacccgcaggtattgtatgtcttcgaacattttctttaaaagcatact

SEQ ID NO: 399705 - DNA, 201 bp, Homo sapiens
tactgtattttttaacttgagagagtgtatttggtagactagatgacagtctttttgagacagagttttgctcttgttgcccaggctgaagtgcagtggcscaatcttggctcactgcaacctccgcctcctgggttcaaggaattctcctgcctcatcctccctagtagttgggaatacaggcatgcgccaccatgcctg

SEQ ID NO: 399706 - DNA, 201 bp, Homo sapiens
ggatttggtgagggccagaaagatgtatgatgtgatatgcttattaaaagttactactacatgacgagtctgttggtggctcatgcctgtaatcccagcaytttgggaggctgaggcaggaagttcacttgagcccaggagttcataaccagtctgggtgacatagtgacacccaatctctacaaaagataaaaaactagc

SEQ ID NO: 399707 - DNA, 201 bp, Homo sapiens
gtagtctcatttttaatgtgttgccaaatatttaccatatggattatttactttatagattgtttatttaccttatagattattatttcctttgtagatcwttatcttatagagccattggcaccagaattagagttttggggggttttttggtcctagaacttgttagtgaattacagtcacacatttcttaatggcagg

SEQ ID NO: 399708 - DNA, 201 bp, Homo sapiens
atcagcctgggcaacctggtgagacccccttctctaccaaaaataaataaataaataaataataaatttttaaaatgtattagctgggcttggtgacgtastgaggcaggaggatgccttgagcccaggagttcaaggctgcagcgagccgtgatcatagcactgcactttggcatgggagatagagcaagaccttagctc

SEQ ID NO: 399709 - DNA, 201 bp, Homo sapiens
ttacacaaacctagatggtatagtatatactacacatctgggccatacaatgtaacctcttgctcctaggctacaaacttgtatagcatattaccatactsaacaattgtaacacaatggtaagtatttgtgtatctaaacatagaaaaggtacagtaaaaatatggtatcataatcttacaggaccgctgttgtttatgc

SEQ ID NO: 399710 - DNA, 201 bp, Homo sapiens
gggtaaacttgcattataagtttgtattttctcacgaagggacaggagagaagaaaaaaatcatttgcttattgtctaggctatgcaaaaaaaaaaaaaaagaacagccttgtttttttattacattttttcatttagtttatgatttgccatatttattattttaaaacatgaagtctgtagtacaaggttttatttaaa

SEQ ID NO: 399711 - DNA, 201 bp, Homo sapiens
agggtaaacttgcattataagtttgtattttctcacgaagggacaggagagaagaaaaaaatcatttgcttattgtctaggctatgcaaaaaaaaaaaaaaagaacagccttgtttttttattacattttttcatttagtttatgatttgccatatttattattttaaaacatgaagtctgtagtacaaggttttatttaa

SEQ ID NO: 399712 - DNA, 201 bp, Homo sapiens
tcggaggtaaagagaattgatgtaattgtggcttaatatgttaatactagaacttaatattctcaattttactgtatgtttttaattaattaattaattawttttatttatttatttatttatttttgagacagagtcttgctctgtcgcccaggctggaatgcagtggcacgatctcggctcactgcaagctccgcctcc

SEQ ID NO: 399713 - DNA, 201 bp, Homo sapiens
cttgaacccatgaggtggaggttgcagtcagccaagatcacgccactgcactccagcctgggcaatagagcaagactccatctcaaaaaaaaaaaaaaaaagaaaaagaaaaaagaaagaaaaagaaaatggtaaggatatagaaaactagtgtttctaggtccattaaggggagggtaaactggtgaagcctgttttgga

SEQ ID NO: 399714 - DNA, 201 bp, Homo sapiens
actacagatgtatgcaaccacacttatctatttttaaattttttgtagaggtggggtctcactgtgtttgcctaggctggtctcgaacccctgggctcaasaggtcctcccgcttccacctcccagagtacttggattacaagtatgagccactgcatccagcctcccctggagattttaaccctcatagttgttcacact

SEQ ID NO: 399715 - DNA, 201 bp, Homo sapiens
ccattcacgttcagagtgattactgatagcattggattaatgtctaccatatttgccactattttctgttgtcattgttctttgttcctattttttttttttgtcttccactgtttttctgccttttgcagttttaattcaaaatatcatatgactgtcctttcttagcatgtcagttttacttcttttttttttactttt

SEQ ID NO: 399716 - DNA, 201 bp, Homo sapiens
gagtttcctttttcttccatgatacctaggtatagctaggtgattctacattagagatttgatgactaaggctattcttttatagggctttttttttttttaatttcctgacttgataagcaatagctgtaattaagacagccggtagttggtgctgctttttcccctgactggaaggctggagaggaactatgttctcct

SEQ ID NO: 399717 - DNA, 201 bp, Homo sapiens
gtagctgagattacaggcgcatgccaccacgcctggctaatttttgtatttttagtagagatgggatttcaccatattggccagactggtcttgaactttsatctgactgactttgtgatctgcccgcctcagcctcccaaagtgctaggattacaggcatgagccaccgagagttcatttctccaagagtaaatgagttt

SEQ ID NO: 399718 - DNA, 201 bp, Homo sapiens
tttcatctatccctggagttcattcagtgccctcttgttcttttggatgaagggaaataatatgcccttagatttagaagcagagaaattagaatactgcraagagctaccctatactgctctgtagtattcttgaaacctaaccatgtgcattgatacttttcattgtgtggatgtggaaaatcagtaatgtgaaacttt

SEQ ID NO: 399719 - DNA, 201 bp, Homo sapiens
gtttgtgttagcaagtgaacatagtgagtgtctcttttgcttttacatttacttcatattctaataataaactccgaaaaacatacctgattttaatctaktagctattgtgctacataattaaattcaaaaacaagtaaattgatgttgacatgcttttaattctttgtttgaaaaatgcttttaaattatattttttac

SEQ ID NO: 399720 - DNA, 201 bp, Homo sapiens; identical to SEQ ID NO: 88463

SEQ ID NO: 399721 - DNA, 201 bp, Homo sapiens
ttgcacatagatgaagatacagaagctttaagaagttaaatagcttacctgaagttatttaggaaatggccaaagtaggaatttgagtatggtttgcttarattccgagtattgctctttctgttaaacacctgcaataaccattctcaaaacatttgacatcagtactcctttacattcttcaaagttattgaggatccc

SEQ ID NO: 399722 - DNA, 201 bp, Homo sapiens
gagacaaggtgtcgcttagttgcttaggctggaatgcagtggcatgtcatagctcactgtaacctcaaacttctgggctcacgtgatcctcctgcctcagyctcctgagtagctaggactacaagtgtgtgccaccaaccctcaagtaatgttttttattttttgtagagagaaggtcttaccatgttgcccaggctgtca

SEQ ID NO: 399723 - DNA, 201 bp, Homo sapiens
caattctggacagtctgcattgtaactcctagagacatggagaaagtagggaggtgttaagaaaatagacatgctggtccactccagcgtcattcccccayctcaccttctccagcctgctccttgagttgtactctgaaccttcacttacttagataggttctggtagaaaaggtgagaatcattagtctgggtttctgg

SEQ ID NO: 399724 - DNA, 201 bp, Homo sapiens
tgactccacctaacatgatgatttcaagtttcatccatgttatagtattgatccgtagtacttttggcctttttatggctgaataatattctattgtatarataccacattttgtttatccattcatcgtgttgatgggtatttgaattgtttccactttttggctaatgtgaataatgcaactatgaacatttgtgtaca

SEQ ID NO: 399725 - DNA, 201 bp, Homo sapiens
ctgaactcctgtactggagaagtggccttagggttcatgctttggggatgagtcagggattcctattggagagttcatttctttctttctttctttctttyttttttttttgagatgtaacacctcgctgtgtcgcccaggttggagtgcagtggctcaatctcggctcactgcatcctccacctcccaggttcaagcgat

SEQ ID NO: 399726 - DNA, 201 bp, Homo sapiens
aaccactaatctgtaagaagactagtgagtttggcattggacaaattcatctctccattctttttcagtttaatgttctgttagtcttctgattacaatgratactactctaacctactctaacatggtgcttacggtatattgctcatccatttaatagtgtagattagttaaatagtatatatagtgttatgtttacag

SEQ ID NO: 399727 - DNA, 201 bp, Homo sapiens
aagaataatcacttaattctgaaatctgattatgagaaggatacacagttaatgcctgtaaaatgaatgggcagcaaacattggctagtttttattttttrtttaaaaagtacagtagtttttatggtggaggtgatatgacttagtagtgaatactttttcacgttttaaagagactggtctagtaaagctttagcgtta

SEQ ID NO: 399728 - DNA, 201 bp, Homo sapiens
tctgtgccgggcgggcgggcggcgggggggccagcgaccgcagccggggggacgcgggaggatggagcaagtggagatcctgaggaaattcatccagaggrtccaggccatgaagagtcctgaccacaatggggaggacaacttcgcccgggacttcatggtgagtctctcccctcgctgtcgcgttttcttgccggcgcc

SEQ ID NO: 399729 - DNA, 201 bp, Homo sapiens
cctcccaaagtgctgagattacaggcatgacagtttaacatttccattgaaagctctgctcttgtctgtagctatctgggtgcaatcattttggcaccaaytgagtggcaatttgttcagctttaatttttcagtcagaattgtgtaagctgagcaacttaagatgtctgtggtgttggctattgtttatgctgttaattg

SEQ ID NO: 399730 - DNA, 201 bp, Homo sapiens
cacgtggtaacactatgtttaacattttgcggaactgccagactgttatccaaagctgctgcacatattacattccaatcaggaatatatgagggttccasttcctctacatcttcaccgatacttgttgctgtctttttgattataggcatcctactgggtgtgaagtggtatcttcttgtggttagcttgtaagatttt

SEQ ID NO: 399731 - DNA, 201 bp, Homo sapiens
attttccagtccttgcatttgagctaatcttagtgcttacccagtgccactggtttagttatggttttcttatccatcctttgatgagtattcacctaaayatatttacatcaactaacttcagaagtggaagtgaacttttaagtaactctccagacatggttcactgagacagtaaactaaaaatttactttaagcatt

SEQ ID NO: 399732 - DNA, 201 bp, Homo sapiens
ggttcaccaggaagtgtagtttctctttagaaagtttggtcagctgaccacagcactgtggcagtctccggccttgcaaaaataacttttttccatatagyggtcaataagtattgaggtctcttaaactacacaagtgactcttcctgtgctatatttgtttttgcagagagaagtgtgaattctgaatctctgctacta

SEQ ID NO: 399733 - DNA, 201 bp, Homo sapiens
tcttccccagactgaacgcctcccaggctagagactgggacttaattatccctgtatccccattgcttaatatagtgcttggcatttaataggcactaatrtccattgcatgtgcagacattgtagacaaacttaatgctgtaagacagatttattcttcaggtgaattcttcagtggtccaagggtttgtcttctagacg

SEQ ID NO: 399734 - DNA, 201 bp, Homo sapiens
tacctgtttaaaataggaaggtaagaggagaaattatttgactacactttctgtaatctctaataaaattgaatagttaatacatcatgtttgtgtagggsttttaccatctgtggtacatttgaaatacactgttatttaacaaacatgcaacaactctgtaagataaggattattattcctatttttacagataaagaa

SEQ ID NO: 399735 - DNA, 201 bp, Homo sapiens
gaaagtcaattcaaaacatatgatccaagtgctgctcctttttcaaactgtaattatgtctgtctctctttccagagagatttgattccctgatttttccsttctcagctccctccaattttaaatatatatatatagttttttttaataattaaaaaaaaatacttcacctggaagttttcatccaattttgtaactttg

SEQ ID NO: 399736 - DNA, 201 bp, Homo sapiens
tattgtagggtctgtagctggcctatggcagatataagaagcaaacagtagttgctccctaaaagttttttttggagaaagtggagtgtggactgtattartccattttcacactgctatgaagaactgcccgagactgggtaatttataaaggaaagaggtttaattgactcacagttcagcatggctggggaggcctca

SEQ ID NO: 399737 - DNA, 201 bp, Homo sapiens
tatgtcctgcttgcaagataaatcatcccatggtccagtgtgtacacactgtagactctaccagcccattagtcacatagtagatactgcagttaccagayggactgtcatggtgtcccagtggttatgttcacatgacccttattttacttataatggcccaaacctcaacagtagtgaggtagtgactagtgatagatt

SEQ ID NO: 399738 - DNA, 201 bp, Homo sapiens
aaaagataaggaaattagaaagcaaaactagaagatctgtcactgaactaataatagtctaaaaggagagtagggaagaagaaattagcaaaaaaaaaaaagaagaaaaaatgtgttagaattaaagggcataaatttttatatagagcgtatacaccaagcttgatatacaccaccaaatgtgatggataaaaataaaat

SEQ ID NO: 399739 - DNA, 201 bp, Homo sapiens
gtctactattctcagcagtctgaatatgtgcctctaagtatatgtcttagactgattgcattacattctaatgatattttatttatttatttatttatttrtttgtttgtttgtttgtttagaggtgggggttctcactgtgttccccaggctggtctcaaactcctgagctcatacgatcctcccacctcagcctcccca

SEQ ID NO: 399740 - DNA, 201 bp, Homo sapiens
caccttcttcacaaggtggcaggaaggagaatgaacatgggaggaactaccaaacatttgtaaaaccatcagatcttgtgagaactcactatcaggagaayagcatgggggattataattacatagggattataattcaagatgagatttggtggggacacaaagcctagtcatatcgtggaccatgataatctcagaggc

SEQ ID NO: 399741 - DNA, 201 bp, Homo sapiens
tctaatacggtaaatagattatacaaggggacttcaaaaagctcatggaaaaatggaattaagtaaataaatgttatttattaataaatttataaatagaytaaaattaaaatataaagttaatttctgaacataaactccatcagtttacttttataagtgatgatacaccaaccattttgtttatccctaagaactgag

SEQ ID NO: 399742 - DNA, 201 bp, Homo sapiens
gttctatcagttttggctcacatatttttatgcacaattgttagacacatatggattaaggattatgctgtcttcttggagaactgacccctttatcatgwtgtaaagccaccctatccctgataactttacttgccatgaaatctgctttatctgaaattaataactagtctcattttatttttgtgttagctgatatat

SEQ ID NO: 399743 - DNA, 201 bp, Homo sapiens
ttggctggtgtctgggaacttagacttttgggagaatttccattatcccctgataagagtggttcactgtgcccaaactgtacaaacaatgtggtttatgrgctgggcccagtggctcaattgtgtaatctcagtgctttgggaggccgaggcaggaggattccttgaggccagcttgggccacatagtaagacctcatct

SEQ ID NO: 399744 - DNA, 201 bp, Homo sapiens
attaaaccaccctctttattccaaactcattctcctccttcctccaacctgtagcaccattctattacactttctgtctgtatggatttgacaattctagrtgcctcatataattaggattataaaatattgtctttttgtgactggtgtatttcagttagcataatgtcctcagggttcatccatgttgtagtatgtgtc

SEQ ID NO: 399745 - DNA, 201 bp, Homo sapiens
ccagtttctcactctttcagactgtcctcttccttgatacaaaaattgtgtgaatatcagatcttctcatgtcaacattgcctattgcagtagtcgcaatkccatatacacaaaagaattgtctaggtcgtttcataattagttccccaacttggagccaaaggatctatatttttacctaggtcttttagctggtcctta

SEQ ID NO: 399746 - DNA, 201 bp, Homo sapiens
atttaaacacaggcggttttaaagccttcactagggtgattttgcctctcaagggacacttagcaatgtctggagagatttggttgtcacaactggggtaygggagtggacaggctgctaatggcatctaacaagtagaggctaggaatactgctacacatcctgcagtgcataggatgcagcccccttccccaaacaaag

SEQ ID NO: 399747 - DNA, 201 bp, Homo sapiens
acaatgtgttatggactcattgcagaaggctgaggagcagtaaaggagggaaggttcaagaaagccttcaaaaaggaaataacactttagccagagccctrctcaccagtaagagcaaaaattgtgcaactttgatatttaagaaatggagggttactgctagtcgtagtggtggtgagtaattctatatgactaaagcat

SEQ ID NO: 399748 - DNA, 201 bp, Homo sapiens
cccaaccctaggtagtcattatttttactgtctccatagttttgcctttttcagaagtcatatagtttgtttttgtttgtttgtttgtttgttttgagacrgagtcttgctctgtcgcccaggctggagtgcggtggcactatctcagctcactataacctctgcctcctgggttcaagcaattctactgcctcaacctcc

SEQ ID NO: 399749 - DNA, 201 bp, Homo sapiens
acatttaacaccactggagtagactgagcacattggctcatacctgtaatcgcagcactttgggagtccaaggcgcgaggattgcttgagcctaagagttwgagaccagcctgggcaacacagtgatacctcctctcttctaaaaataaaataactgtccagttgtggtggtgggcgcctgtaatcccagctgcttgggag

SEQ ID NO: 399750 - DNA, 201 bp, Homo sapiens
ttctgttttggggaagtagaagtaagcagaacctcaggacacaaaatatttataacagtttaagaaaaacttacatgaattacttactaatttttttttttggatgacagaaaaaatgtgagcgctattggcctttgtatggagaagaccccataacgtttgcaccatttaaaatttcttgtgtaagtatccatttttgta

SEQ ID NO: 399751 - DNA, 201 bp, Homo sapiens
tgtagactctaccagcccattagtcacatagtagatactgcagttaccagacggactgtcatggtgtcccagtggttatgttcacatgacccttattttayttataatggcccaaacctcaacagtagtgaggtagtgactagtgatagattgttataattgttctaatgtattattagttattgttgttaatctcttgtt

SEQ ID NO: 399752 - DNA, 201 bp, Homo sapiens
cttcaaaaaggaaataacactttagccagagccctgctcaccagtaagagcaaaaattgtgcaactttgatatttaagaaatggagggttactgctagtcrtagtggtggtgagtaattctatatgactaaagcatcaaactctaataagagcattataaaaagaggctagaaaattggacaggcaacattcaacatatct

SEQ ID NO: 399753 - DNA, 201 bp, Homo sapiens
tgagacacagagaggttaaatatgttaattgtcacacagctaagaaagtaccagatccagaattttaatttatgtagcttactataaagctgacatttttyggtgggaaataagttccaacttgtagatacctttttaaagtacaaaacaaagtttttacttgttttatggaccacttttgtatctctgatgggcatgaaa

SEQ ID NO: 399754 - DNA, 201 bp, Homo sapiens
cttaaataagataaatatttggacgcaaaagttctcaaggttcattatgagaaatgtagtcatttcacataaaagctttgttttgcacatttctcaataaygtaatttgtcatgtaaaagaagaaaagtctggagtgggccaggcatggtggcttacacttgtattccccagcactttggaatgttgaggcaggaggattg

SEQ ID NO: 399755 - DNA, 201 bp, Homo sapiens
aaattttttctcgctgacattgacctaagatatattcctttcccctctgtgtttctgcaactatttaagttgatatccttctctaagtcagattcaaaatratattttgaaatgcactgatactataagtatctaaaaatacatcttttcagatgcttaatctttgagcagagaaaatacaaacattctaattaaatgtgc

SEQ ID NO: 399756 - DNA, 201 bp, Homo sapiens
attgtttcctgctttttacatttatacttaatatgtatttttcagatactgtcatcttactatatataaaaagctaactcatttgtttttcagctctctcwtatttgatggtatgaataaaacaaatttagccagttttgtattaagaggtttctttgattgtagttttttgctgttactaacaatgctgcagtggttggg

SEQ ID NO: 399757 - DNA, 201 bp, Homo sapiens
caggtgcctgccaccatacccagctaattttttgtattttagtagagacagggtttcaccatgttgcccagggcccagtggctttttaattgccagatttsgtggtctttttttactgtttattctaacaggaagaatattgattattcaagaatgttgaactattttgatgccattgatcaatccctatttttgaaattt

SEQ ID NO: 399758 - DNA, 201 bp, Homo sapiens
tgcttattaataacagacatttgtatcttcaaattctagagactgggaagtccaagatgaaggcaccagcagatatgctgtctagtgaagggtcactctgsctcatagatggtgccttctcactgcacttcacatggtggaaggggcaaacaagctctctcgggcctctttagtaaaagctggtaatcccattcacaaggc

SEQ ID NO: 399759 - DNA, 201 bp, Homo sapiens
tgtttttgactttgttttccatgattaaacgaaatataatttctgtggttttacttgtcattgctgagttcttgaactccataattttatgacttagttayactcatgacttctgaattcctctcatacatacccaaagtttagtgctttctaggttgacataaaaaaggacaggactgtatctgtattatgctgtctact

SEQ ID NO: 399760 - DNA, 201 bp, Homo sapiens
ctgttaaggtttaggatgtatttctcttttcattatattagtaagctcatagtatgtatcaagttattgatgaaaaatcaagtagcattgagtacataatkttttgaagcgaaaggtttttgtgattcactgtgtcttattagtaatagattatgagcaagttaggaactatgaaattatctgataaccttgactttgatc

SEQ ID NO: 399761 - DNA, 201 bp, Homo sapiens
tggagtgcagtgtgggatctcggctcactgcaacctctatctcccgggtttaagcaattctcgtgcctcagcctcccaagtagctgggattacaagcaccygccaccatgcccagctaattttttggtatttttagtagagacagggtttcaccatgtcggccaggctggtctcaaactcctgacctcaggtgatccaccc

SEQ ID NO: 399762 - DNA, 201 bp, Homo sapiens
caaaaacagtgtcacagaaataactagaataatgtttgaccaaatattctgggcacactgtggcccagccaagttgacagataaaattaaatatcacattscttattcagagtttcttgtttttgactttgttttccatgattaaacgaaatataatttctgtggttttacttgtcattgctgagttcttgaactccataa

SEQ ID NO: 399763 - DNA, 201 bp, Homo sapiens
tctcgtgcctcagcctcccaagtagctgggattacaagcacctgccaccatgcccagctaattttttggtatttttagtagagacagggtttcaccatgtyggccaggctggtctcaaactcctgacctcaggtgatccacccgcttcagcctcccaaagtactaggattactggtgtgagccactgcacctggcctggaa

SEQ ID NO: 399764 - DNA, 201 bp, Homo sapiens
gtggtgtagtgttaaactggtcctctgaaagttctgatttgtattgtttgctgatttctgtgataaatggattatttaccataatcatcacagcaaaactstgaggtaagtactgttatgtgccattttgcaaacaggaaactgagacagagaggttaaaaagcttgtcacacagttaaatattgtggggtaagaatttaa

SEQ ID NO: 399765 - DNA, 201 bp, Homo sapiens
tataaaaattatgttctagattggccgcgtggggtggctcatgcctgtaatcccagcactttgggaggccgaggtgggcagatcacgaggtcaggagatcragaccatcctggctaacacggtgaaaccctgtctctactaaaaatacaaaaaattagctggacgtggtggcgggcgcctgtagtcccagctactcagcag

SEQ ID NO: 399766 - DNA, 201 bp, Homo sapiens
actttctgggagacttactcagttttatcttttaccttgctattgaattttttatttctactataacatttctaatattccaaagctcttttttgttctcygaattttcatttgttataacatcttatttgtgttagaagattgcaatgtcctctcttatctttatgaagatactaataacagtttttaaaaactttctcc

SEQ ID NO: 399767 - DNA, 201 bp, Homo sapiens; identical to SEQ ID NO: 88477

SEQ ID NO: 399768 - DNA, 201 bp, Homo sapiens
catcttgttctcaaacaaaaagtaaaacaataatgcccaataatatacagaagaaacacaaacaaaaaccccacagagtttgaatcacccacacaggtcawatttcatatcatattctgccagtggagttaaattctgctgctttattactggctccttccaggaaatgagtcagcgaggcattaagtcttcctccaggca

SEQ ID NO: 399769 - DNA, 201 bp, Homo sapiens
tttgatgttcaaattgtccaagattagctgagtaggagccccttcaaactgctcttgtgtctttttgatatgttcacttgatttgcttttttttttttttwaagcacttttttactttggggcacaacaaaattccacacaccccaaatttggagaagaaaaacattttcttttcatgaatattttccaccacctttccct

SEQ ID NO: 399770 - DNA, 201 bp, Homo sapiens
ttttcttggccgtgtggtattctttacctgtctgctgatgtttatgagtggaccctgaacagcagatgggaatttctgagtgtttgcacagggcttgttgycagtgagctcactggagtaagagggcagggccatttatttggggacatctgtgatgtcattcagtttaagtttttcttcttgggcgggtcctgtttccca

SEQ ID NO: 399771 - DNA, 201 bp, Homo sapiens
actgggccctggaagctcctgaggtgtttgttcatcagatcatcacctaatttttgttcctgggttccttttctttatttcctggaagtagttgatcaggwcgctaacaaatattcacttcatggcctctcttccgtaggataaagggaagtggaggctggacactcactcggcgaatagaagacctgtgggaacttcatc

SEQ ID NO: 399772 - DNA, 201 bp, Homo sapiens
cactattttgtttttaaggtttggggtgagaacagggagttgcattttaatacaacctcacacagtggcatagattgttgggtaaagtctatttgaggccraatttagttctctctgcagcttattatttatttattccttatttctaaagcagcatccccactgtgaaattttggaatatagtgttaatttcacatgggc

SEQ ID NO: 399773 - DNA, 201 bp, Homo sapiens; identical to SEQ ID NO: 88482

SEQ ID NO: 399774 - DNA, 201 bp, Homo sapiens
ctacaggcatgagccaccacgcccggctaatttttgtatttttagtagagacaaggttttgccatgttgaccaggctggtctcaaactcctggcctcccartcctcccactggtggggcatggtggctcacacctgtaatctgctggcatgccccaccaatgcattgatttttgaacatgtccatgcgtcctttcctttct

SEQ ID NO: 399775 - DNA, 201 bp, Homo sapiens
cagttgatgagccaagtagaaaaaacattttctttgatttacggtcacactctttgtccaaatccaacatgagtccgtctaattcacaaattttggctctwagtaatttttggaaacagccatgtccagaattaaaatcccctgtgcatctttggcgtaagtatatagccttactcatctatttattccttcaaaacaaca

SEQ ID NO: 399776 - DNA, 201 bp, Homo sapiens
attttctttgatttacggtcacactctttgtccaaatccaacatgagtccgtctaattcacaaattttggctctaagtaatttttggaaacagccatgtcyagaattaaaatcccctgtgcatctttggcgtaagtatatagccttactcatctatttattccttcaaaacaacatattcagcattcttcagtatcaggtt

SEQ ID NO: 399777 - DNA, 201 bp, Homo sapiens
aaaatgcaggtctcttgaaaccaaagtttgtgctttggttaagggcttgagctttggctgggcacagtggctcaagcctgtaatcccagcactttgggaarccgaggcgggcagatcacgaggtcaggagatcgagaccatcctggctaacatgttgaaaccccgtctctgctaaaaatacaaaaaattagccaggtgtgg

SEQ ID NO: 399778 - DNA, 201 bp, Homo sapiens
caaaaggaagaggctagggtgctatggaagcatatgtctggagaagaaacttgctctgggaagtgatgagaagccatccagatcaaggtgtttcatccgasaccatcaggaagagtgtaagttagtctggtgatgttgtagaggtgaagtgggggcggggcagggtgggagacgaaggagacagcattccaggtggaggaa

SEQ ID NO: 399779 - DNA, 201 bp, Homo sapiens
attttctgagttaggtaggattgggaaaagagtggatgtgtgtgtgtgcatgcatgcgtgcatgtgtgtgtaaatgcatgagacttctaagtggacttatstagtggggagtaggtaacatgggtccggatctgtttttggagctcaagagagagaatggactggagatataaccttctaagtgctcaggactggaaatgt

SEQ ID NO: 399780 - DNA, 201 bp, Homo sapiens
tcaatttacttctcagtgtcatcatatgatgtaacatacatgtcattggtgcatgttacacttgtaacatacatgtgttatcctgtgtgataacacagtcyttctgcggccttctgaaaaaatgtgtcttatctcctcttttgatgtcaggctgcccactggggttttttgctagtctagtgtacacacttgcattgggtg

SEQ ID NO: 399781 - DNA, 201 bp, Homo sapiens; identical to SEQ ID NO: 88479

SEQ ID NO: 399782 - DNA, 201 bp, Homo sapiens
atatcatattctgccagtggagttaaattctgctgctttattactggctccttccaggaaatgagtcagcgaggcattaagtcttcctccaggcagcccayctaaatcaatcctcccagagggaccaggattgtcctgcctttgacaacattcaggaaactgggtggcccatttctgtgctgggccctgtaacatggacac

SEQ ID NO: 399783 - DNA, 201 bp, Homo sapiens
aaacattttctttgatttacggtcacactctttgtccaaatccaacatgagtccgtctaattcacaaattttggctctaagtaatttttggaaacagccaygtccagaattaaaatcccctgtgcatctttggcgtaagtatatagccttactcatctatttattccttcaaaacaacatattcagcattcttcagtatca

SEQ ID NO: 399784 - DNA, 201 bp, Homo sapiens
tgaacaatgtcttcttcctgcttccaaagcatcgccttctagaagacaggccccgtagttccatcatctctgtgttttcagacctgacccctgactgcggsaggaaggcctgggtcaaccctgccaccccgtcctgggctgcgggcctgcggtcagcatttcccgccacttaaaatgacccccagccagggggcttggggc

SEQ ID NO: 399785 - DNA, 201 bp, Homo sapiens
ttatcctaacttctaagcctgtataagaacaattatcaatatgtttgtaatcagtcaatcataattagttaatatgtattaagacctgaagatgcatggatttttttttttttttaagacagagtcttgccctgtcacccaggctggagtgcagtggcacgatcctggctcactgactcactgtaaccttcacctctgggg

SEQ ID NO: 399786 - DNA, 201 bp, Homo sapiens
atggtggctcacacctgtaatctgctggcatgccccaccaatgcattgatttttgaacatgtccatgcgtcctttcctttctgtattttccacttgaaatggggggaggaagaaaatagcattaaatagaaaccaaaatcacgctgcagtaatgaagtttatactcactgtccccatttcctcatttccactctatttttc

SEQ ID NO: 399787 - DNA, 201 bp, Homo sapiens
cttatctttatgaagatactaataacagtttttaaaaactttctccctgaatagtatctgagtatctgtcatctccaaattgtgggaggtttttgtttttkttttttgattttctcatttttcatgatagaggtttttcttggccgtgtggtattctttacctgtctgctgatgtttatgagtggaccctgaacagcagat

SEQ ID NO: 399788 - DNA, 201 bp, Homo sapiens
tggttttataaggggctttccccactttgctgagctcagctctcattcttctcttcctgccaccatgtgaagaaggacttgtttgcttccctttccaccaygatcgtaagtttcctgaggtctcccagtcatgctgaaccgtgagtcaattaaacttctttcctttataaattaccctgtctcgggtatgtctttattagc

SEQ ID NO: 399789 - DNA, 201 bp, Homo sapiens
gacaagttatggtattagactttttaacaataaacaacaatcagagtttctcatcacaaatacgattgattttgggtttcctcagagaccatgcagtgatytgcaaatttggttaaaaaaacacgcaggaggtaaatgctggatttgggtgatgtggggatggtacagccgatggaaagcaaacaggtatgatgttgggat

SEQ ID NO: 399790 - DNA, 201 bp, Homo sapiens
ttgggtttctttcctagacactattcagatgagccccagtcataactatctcctgtgctcataaatgtcaataccatatggagaccatgcctgtcccatagggttgttgtggggattaaatgagttgatacatgtaaagcatttagaacagtacctggcacatagtaagtgctatatcagcatttgctattgttctcacca

SEQ ID NO: 399791 - DNA, 201 bp, Homo sapiens
atcccccccatcattttgatgttcaaattgtccaagattagctgagtaggagccccttcaaactgctcttgtgtctttttgatatgttcacttgatttgctttttttttttttttaagcacttttttactttggggcacaacaaaattccacacaccccaaatttggagaagaaaaacattttcttttcatgaatattttc

SEQ ID NO: 399792 - DNA, 201 bp, Homo sapiens
aggtgggaggatcacttaagccaaggaagtcaaggctgcagtgagctgagatcacgccactgcactccagcctgggtgacagagtgagaccccatctcagaaaaaaaaaaatattctgaagatggatagtgcatatggatggtgatggcggttgcacaacaaggtaaatgtgcttaatactactgaactttacacttaaaa

SEQ ID NO: 399793 - DNA, 201 bp, Homo sapiens
gaggctaaggcaggagaattgcttgaacctgggaggcggaggttgcagtgagccgagatctcgtcgctgtactccaggctgggcaacagagcaagaccccmtttcagggggaaaaaaaagggaagggtgaagaatgagtagaaaactcctccaaatgcagacctacttactggctaggtgttctaaaggcaaatccaagcc

SEQ ID NO: 399794 - DNA, 201 bp, Homo sapiens
gtctcccagttggcctggtgccgccctgcctcgtgggcagcgtcctcctctgcgggggctggaggtccccacgcgggcccgtgatggggcgccagtccccsccccggcccgctcctgcgcaccctcccagctcccactactccgagagagagtgttttagctccgggcagcccccgtcatttccacaccgaatcaaatgtt

SEQ ID NO: 399795 - DNA, 201 bp, Homo sapiens; identical to SEQ ID NO: 88481

SEQ ID NO: 399796 - DNA, 201 bp, Homo sapiens
ttggtcaggcttttacaaccctgaaatgtgaatgccctgcctacctcccgtggttggagaaaaggtcagttgaaatgctccctgatatttccttatctgtyatagccataaatcacttcgtagctattcataaaatacatactgaaaagtctctggcatccctcagagctctttcgcgttgccttgccactcacaaatggc

SEQ ID NO: 399797 - DNA, 201 bp, Homo sapiens
tgagttggcagatatttcagagcactccgactgaagaagtgccattctgggctgacgtggttctgggatttcgaaagatgactgaggctgagctgaagaarttcccccagtatgtgtttggtcaggcttttacaaccctgaaatgtgaatgccctgcctacctcccgtggttggagaaaaggtcagttgaaatgctccctg

SEQ ID NO: 399798 - DNA, 201 bp, Homo sapiens
agagattttggtggcttccaagactgctttttcagagacaggtacttgaattcttgctttcagctgaggggtcgttccgtccatgctctgggagtttgggrgtgtgtctgaatagggtcaggggacagtgatggacaggccactgtgccaggacacaccacattgctcgctcactcctcctccctggcagctggttattct

SEQ ID NO: 399799 - DNA, 201 bp, Homo sapiens
gcagcaaaggggcccaggagcatgccgggaagcaccctcgctctatccatatcttccctgaagacagttgtccttggccactccttgggctccggggtgcmcacagtggcacagtctgcccccgggaggaagacagtgcaggtcctggaagaggacagggaatatggggatcctgggtccccagaagacgggctggaagtg

SEQ ID NO: 399800 - DNA, 201 bp, Homo sapiens
ggcggctgagatgtgagtgcctcagacagaaggcacagggtgtgctgcggcgggaagacttcagagcctctgctcctcactcccttgtgctcctgagaccyggctccctcctgaccccggtgtggggcctccacagacagcgcccggtggcccctggccatgcagattagctccctgcagcccggagcctgcgtccgacca

SEQ ID NO: 399801 - DNA, 201 bp, Homo sapiens
tgttatttcacaaatttcaggaaaaaatgttcacttaatacgtttgagttggcagatatttcagagcactccgactgaagaagtgccattctgggctgacrtggttctgggatttcgaaagatgactgaggctgagctgaagaaattcccccagtatgtgtttggtcaggcttttacaaccctgaaatgtgaatgccctgc

SEQ ID NO: 399802 - DNA, 201 bp, Homo sapiens
catggaatctacaatgtaagaatttaaaaaacccacaaaatcaaaataatattcaaataatgatcagttaaaacttttcaaaattgaaatatcatccttawtgaaacataagtgatatacaggtatggaggataagaatacacatagataatgcactgggtcttgtattttacagtagcatgaaaaacccctaagcacttt

SEQ ID NO: 399803 - DNA, 201 bp, Homo sapiens
ttttcaaaattgaaatatcatccttaatgaaacataagtgatatacaggtatggaggataagaatacacatagataatgcactgggtcttgtattttacartagcatgaaaaacccctaagcacttttttaaaaataaaaggtctttattgagcagctatagtgtgttagacacagtgttatgctttttccagatgtgtct

SEQ ID NO: 399804 - DNA, 201 bp, Homo sapiens
gatataagattaaagtttagagaagtggaataacttggccgaggtcatatgaatggtaaagggtagaggcctcctaagctctttttaaagttcttttcttygtgttcactttttggaagattataaacacacagaaacatgctgctcagtattactacaaaactccaatttacttttctttctatgccaatgttaagggga

SEQ ID NO: 399805 - DNA, 201 bp, Homo sapiens
ccagatgtaggttataggataattgattcatataattcattaattacacaacttttgttgaacgcttatatatatctggcattatgctagaagctggtaaraaagaaggataaaatatgatttctttttaaaataatttcatggtctattgtggatgactgtgtgtgtatgtgtttgcatattaattaacaatgatggtaa

SEQ ID NO: 399806 - DNA, 201 bp, Homo sapiens
tgatcacttctgctctcttaggggcatgcaggatacaagcattctgcctccattttcaaggtcagcccttcccagtttctccctgaaacggcttggattgyggcagtcagagagagaagatgccaaagttctgccaccctgtatctctctccagacaaaaagaatgaataggatgtgtaagatcggcagggtgagttggca

SEQ ID NO: 399807 - DNA, 201 bp, Homo sapiens
taatttcatggtctattgtggatgactgtgtgtgtatgtgtttgcatattaattaacaatgatggtaacacacatggtaaaataaagtacagacttatgcrggttagaatgggagcagaaaggaggaagcctagatctgctaggcacatgtcagtggcatcgtaatctagttttgtagcttttcaagtgctcttctcactt

SEQ ID NO: 399808 - DNA, 201 bp, Homo sapiens
cttctgtataactaaatctggagccagttgatgagccaagtagaaaaaacattttctttgatttacggtcacactctttgtccaaatccaacatgagtccrtctaattcacaaattttggctctaagtaatttttggaaacagccatgtccagaattaaaatcccctgtgcatctttggcgtaagtatatagccttactca

SEQ ID NO: 399809 - DNA, 201 bp, Homo sapiens
agaagatgccaaagttctgccaccctgtatctctctccagacaaaaagaatgaataggatgtgtaagatcggcagggtgagttggcaggcaagcaggagasccaggagagccaatggtgtagctctagtccaaaggccagcaggcttgagactcaagaagagccaatgtttttgttccagtccaaaaagaggaaaaagcca

SEQ ID NO: 399810 - DNA, 201 bp, Homo sapiens; identical to SEQ ID NO: 88476

SEQ ID NO: 399811 - DNA, 201 bp, Homo sapiens
ttagcaatttatatgggacattttgcttctgtaagttctagtttcataaaacccatgccttttctggccttgttcaccagcccataaaccactgttcataygccaagtttggacttgtctacatcagctgataaacgtatattttgagctatcacatgatggagttgcccaccagccaacaagcaaattttagcagcatca

SEQ ID NO: 399812 - DNA, 201 bp, Homo sapiens; identical to SEQ ID NO: 88478

SEQ ID NO: 399813 - DNA, 201 bp, Homo sapiens
agcaatttatatgggacattttgcttctgtaagttctagtttcataaaacccatgccttttctggccttgttcaccagcccataaaccactgttcatatgmcaagtttggacttgtctacatcagctgataaacgtatattttgagctatcacatgatggagttgcccaccagccaacaagcaaattttagcagcatcacc

SEQ ID NO: 399814 - DNA, 201 bp, Homo sapiens
gatttcatattgtctttagtattggctaatacttacttccagtccacttggtgtggggcacttagctaggtcatagggatggtaagaaacataagatacartctctccccttgaggaattcgtgatttattgatatcggtcctctaagatgtattgtgattgacgactgttcaaagttgtggccattattttattgtaacc

SEQ ID NO: 399815 - DNA, 201 bp, Homo sapiens
cctcctaagggtgctgggcacagtacaagccctcaacaaatacttgttgaataatcagtgagtctaatccagaggtttcaaactgttcttgaaactgctcrgtggacatacttcagaggtctctgcagagggagggagtgtgaagagactgagcagatggagctctgcccagcagcttgaccttcagtcagatgcagagaa

SEQ ID NO: 399816 - DNA, 201 bp, Homo sapiens
catctttcctgagtggcaatagtgtgtagtgttgaattttcccccttctaaaaatgactagaaatacaaaattagaagcattgatgctagtgataaggaaytgaggcatcatataacttatcttaataaaatccagaataaaataaaataaaataaacaaaaaaagttaaaacatgtggaaaaaggcaataaaataaaata

SEQ ID NO: 399817 - DNA, 201 bp, Homo sapiens
cccaagaaagaggccctctgtccttggtcctattgtctcaactgtgtggccagctggatcccacagccatgaactaagctctgctcaggttggttatagamctgccaaggacctctggaatatacctagtaccaaaaaccaccttccaactagctcgcatgccgggttttgcccttattggcctgttttccctccattgat

SEQ ID NO: 399818 - DNA, 201 bp, Homo sapiens
aaaaagccctgactataagcattcctgcttaagcaaaccaatctctctttaccccaatcttctcatttggaaattcaggattatcatacaatgtccctctrggaatgggaaaattaaatgaaataatatatcaacaccatttaacgccactctgcacagtcccgatattttacaaggctatttctccattcactgtatgtg

SEQ ID NO: 399819 - DNA, 201 bp, Homo sapiens
aggagtcctcataagtctcccagttggcctggtgccgccctgcctcgtgggcagcgtcctcctctgcgggggctggaggtccccacgcgggcccgtgatgrggcgccagtccccgccccggcccgctcctgcgcaccctcccagctcccactactccgagagagagtgttttagctccgggcagcccccgtcatttccaca

SEQ ID NO: 399820 - DNA, 201 bp, Homo sapiens
tgtctgaagtctacagtgcaccaacgtttcactggcaactgcttgttctctaagtaaacttttttttaattcccagcctctctctgggctcacccatgccrgttggtgtcagccattctgctgaaattgaggatctgaagaacatcttaagcaattcttgggtaaaagatccactgtcagagattttatctgtaggaacaa

SEQ ID NO: 399821 - DNA, 201 bp, Homo sapiens
gctgaatctttcccctgaatcactgttaaaaggtgtgttgttagggaggttcatactcaaaatatgctccgaatgtactcaattaaatgctctgttctgargggcccacctgtgccctttctctcattcctatcaaatatgtaacgaaaacatactaagtgcaaaatggtgtaggcaaagcaggtacttaataaattcttg

SEQ ID NO: 399822 - DNA, 201 bp, Homo sapiens
ggtgctcaataaaatatgtataccacctgtgatactgggaactatgtatttggtcttcattcccatttcctgacatatagctcctaaaacccttggaatcytcagagtgataagagtgtcttttgtatgctaatgagatatctggtggctggagccctgtagtaagcttcaggatgggagctggtcatctggaaatgacaa

SEQ ID NO: 399823 - DNA, 201 bp, Homo sapiens
tcaggacacctggcccgggctccgggatgtctgtcccctgcatttccattcagactctcccaaggagccccctttatgagaccgcctcactgggtctctcytatttaccacccaaaggagcaagtaatccatctgttctgtgttacagatgagggagtggaggctaggagaccacggactgctcctcaggttacagaacct

SEQ ID NO: 399824 - DNA, 201 bp, Homo sapiens; identical to SEQ ID NO: 88475

SEQ ID NO: 399825 - DNA, 201 bp, Homo sapiens
tgaggagtcctcataagtctcccagttggcctggtgccgccctgcctcgtgggcagcgtcctcctctgcgggggctggaggtccccacgcgggcccgtgakggggcgccagtccccgccccggcccgctcctgcgcaccctcccagctcccactactccgagagagagtgttttagctccgggcagcccccgtcatttcca

SEQ ID NO: 399826 - DNA, 201 bp, Homo sapiens
ctcgtgggcagcgtcctcctctgcgggggctggaggtccccacgcgggcccgtgatggggcgccagtccccgccccggcccgctcctgcgcaccctcccakctcccactactccgagagagagtgttttagctccgggcagcccccgtcatttccacaccgaatcaaatgttatctgaacaatgtcttcttcctgcttcca

SEQ ID NO: 399827 - DNA, 201 bp, Homo sapiens
agaccaaactttgtctggatgggaaaatccttaaaacaaggggtatagctcccatttccctcctcacaggctcatggacacagcacggattgcagttgtcrgggcaggtgtggtggggctctccacggctgtgtgcatctccaaactggtgccccgatgctccgttaccatcatttcagacaagtttactccagataccac

SEQ ID NO: 399828 - DNA, 201 bp, Homo sapiens
gttatatatatctttggttaatgaaaagtggaaaagaaattcatctagtaaacatgtattggctaagctctggggatacagatgtgaggaagacagagctrcctgtaagcagcatgtagtccgtgggagagagacaaggagatccattcagtgcactcaaattagccatgctgctttgagtattggctccatgtagccttg

SEQ ID NO: 399829 - DNA, 201 bp, Homo sapiens
aaatttgggttaatcccttgtgtcttattttggggtggggtgtcatcccccccaccattgagcttgtcatttccacatgttttaatataatatgattgcaratgtgtgaaactagacacacaaagaagcattaaaacttattttcttcctcaggtcttggtggcacttgtgtaaatgtaggttgtattcctaagaaattga

SEQ ID NO: 399830 - DNA, 201 bp, Homo sapiens
tctgctagaaaaaattttctggcagatttttttcacataaagtgtaaaaatcaatttttaaaattcaaacttactcagaaagttatagcctagaattttawgtacaaaagctaatctacttcgatttttctcataatgttcttgtggtgtgtgaacacttgttttctgtccctcaccctggcctctttcctctttttctcc

SEQ ID NO: 399831 - DNA, 201 bp, Homo sapiens
aatgacctcatcttacataggtacagagccacaaccttctaggttatttgacacattcctagctgtcaggtgtaagaagggacaaaaacatatgtactttrgtataagttctaactagttggaccctgtttttaaatagcatccagataaatttacaactccaacttagatgaattatagatttttcctaagatttttata

SEQ ID NO: 399832 - DNA, 201 bp, Homo sapiens
tgagtcccatgacatatttggacaactctgattattggaatttttttaagtgaagcaaaatctgcctctctgaaatatttattcattcttggaggtgagcrttgctccagtgggcagaattaagaaccttgcttctgcttggaaggcagatcttcccgtactttcgccaagtgtttttcttgcttgactgagtagcctgct

SEQ ID NO: 399833 - DNA, 201 bp, Homo sapiens
tcaggaaagtgacaagatctttatacgtaatttttgttgttgttcgtttgtaggaagctgccattttgggaaagaaagttatggtgctagactttgttgtyccgtcacctcagggcacatcctggggtaagttgtttttctctgttgttcctctctgctctttacatatgttgtttgctttatgtaatctcatttaatcct

SEQ ID NO: 399834 - DNA, 201 bp, Homo sapiens
tgcttaggcgtgtatttcatccaggtggttttggagctgggcaggcaggaacaggttatggagctagtgggtgagtccagccggctgcccctctcctctawctgggtctggctttgttgctggctatttgtggtctcatattcatggggtgagtagcaggggtttttaaagtaagcacttcagggtttgcaaagctagagt

SEQ ID NO: 399835 - DNA, 201 bp, Homo sapiens
cggtgtattagcacccccctccagacacactcacacatgtaccatccccctttgatggtcaagaacacttagtccagcaccgttgagctgcatatttgcckcacctctcagtggcataaggaatatgaaatggccaagaggtggtctcagcttccactgaagtagcataattcaaggttgcctggaagaagtgctccagga

SEQ ID NO: 399836 - DNA, 201 bp, Homo sapiens
tcatttcctgttttctggcaaagttcatgtaacattagaattggttccttgtatgtttcatagaatttactgatgcaactgtctatacctataattttctmtggagatatatttgaccactgattaatttctttaatagtcaaaggacttttaagactttttattttttccttgatttacttttgattagttatatttttt

SEQ ID NO: 399837 - DNA, 201 bp, Homo sapiens
cacacagatgtacagctcctgaatgtctgacacgtaaacgacagccttggccagggccgggaagatgaggcacaagtcataggtcatgatgctggtcgagycagggagcaaagggtatacctgcaaggttcggggctggggtagaggggtgggtggtggattacgtggctgcagagccccccctctgctcaggtccgtgag

SEQ ID NO: 399838 - DNA, 201 bp, Homo sapiens
ctcactctccgttcctgcaggtctgctgagggggccccatcatgaagcttccactgaccttatcaatcacacagatgtacagctcctgaatgtctgacacrtaaacgacagccttggccagggccgggaagatgaggcacaagtcataggtcatgatgctggtcgagccagggagcaaagggtatacctgcaaggttcggg

SEQ ID NO: 399839 - DNA, 201 bp, Homo sapiens
ttaaaccaggggtgtccaatcttttgacttccctcggccacattggaagaagaattgtcttgggccacacataaaatacactaacaatagctgatgagctaaaaaaaaaaaaaaatcacaaaagaaacctcatgttttaagaaaatttacaaatttgtgttggtccacatttgaagccatcctgggcctcctgcagcccat

SEQ ID NO: 399840 - DNA, 201 bp, Homo sapiens
atagctgtaaaactttaaattctgcagtgttctttctcctgtaattaaaccataggcatatcagagtggtttgttacagaagctccttcaggaagatttgscatatgattatgatctcatcatcatcggtggtggttctggaggcctttcatgtgcgaaggtatgaatatagaaatgaaactcgtagataattttcctgat

SEQ ID NO: 399841 - DNA, 201 bp, Homo sapiens
ttaggagactggtacattggcatcatagaaagggccgtgtgtgttgacattggctaagcttctctgtgcactgactgtcccctccagtcgactccctttcytgcatggtaacatcccatgtccctggatgagtaggggggcatttcttgacagtgatagatggggtaattttccagatgttacccttgacctcaggttgtt

SEQ ID NO: 399842 - DNA, 201 bp, Homo sapiens
ttgggactgcaggggtaggaatggctacgggtggtaaggtgggaagttccagggttgtctgcctgtgggctcttcagatttccaaaaggacgccctctacrcacctttattgctacctcttgtttaccccccaaccctgtccaattataaccttaaaaatattttcttacatcatttcttgctgggaagtttgattggctt

SEQ ID NO: 399843 - DNA, 201 bp, Homo sapiens
cattaagaaatacattttttgttgcagttttttgttcaggtaaacaaacacacacctcttcacatagcacatacgtacatacatctccaaaacaaacaggtttttttttttatcacatgtaatgtagtctgatattttctatactattttattttttaaaaaatcttgcttgtggtctgatttagaaaaatctgaggtata

SEQ ID NO: 399844 - DNA, 201 bp, Homo sapiens
taggtaacagaacatttctgtgagtccagaaagcgctctgtgctttttcccagtcatcgacccccaagcaaccactattctgattctgtcactacagactyattttgtttggtttgcctctaaatctcatataagtggaattgtacagtatgtattccttgtatctgacttcttttattcagattgatgtttttaggactc

SEQ ID NO: 399845 - DNA, 201 bp, Homo sapiens
catttctgtgagtccagaaagcgctctgtgctttttcccagtcatcgacccccaagcaaccactattctgattctgtcactacagactcattttgtttggyttgcctctaaatctcatataagtggaattgtacagtatgtattccttgtatctgacttcttttattcagattgatgtttttaggactcatccatgttgtg

SEQ ID NO: 399846 - DNA, 201 bp, Homo sapiens
tcaccatgttggccagcctggtcttgaacttccaacctcaggtgatccacccaccttggcctcccaaagtgctgggattgcagacatgagccaccgtgccyggctaaaatgctttctaagtctttggggtgctgactaagaaatacttagctagccaacacatggtgtatttaggtatagactcaataaagggccaagaga

SEQ ID NO: 399847 - DNA, 201 bp, Homo sapiens
gttgctgaaagaaaatgggagatgttggtgttgtaaaggaagctcacctgtgtaactacaaaagttagatcgatttatgagaagccatgacaaaatttgckgataatgcataagaattgttttcaaaatgaagactagcacaagtgagctaatgaaaaatgatacttggctattccactgcacttgactataatattttga

SEQ ID NO: 399848 - DNA, 201 bp, Homo sapiens
tcaaatgtaattgtaagaagtattttctgggttattgttacagcgattttatcttgattcttgctctttaaagagggctcttatctgtcttggcatagtcrctgaataatatgtcaaaatctaattttgaagggtttatctttgaaggaatcagtagatctttattttttaagattttctttgaaagcaaggatgttttcc

SEQ ID NO: 399849 - DNA, 201 bp, Homo sapiens
tctcctttccccattgaatggtcttggcacccttgtaaaaaatcatttccctgtatatgtgaggctttatttctgtcctttctggtctcttccttggtccrtaagcctgtctttatgccagtacggcactgttttgattactgtatctttgtagtaagttttgttgttcttctttacaagattgttctggttattcagggt

SEQ ID NO: 399850 - DNA, 201 bp, Homo sapiens
tgaggtgctatttgtctgttgtttcttttgttgcttgtgcctttgagatcatatccgtaaaatcattgtcaaagccagtgtcgtgacacttttgccgtatrttttcttctaagagttttgtagttttagctctgacatttgggtctttgacccatttcgagttaatttccatacatggcgttaggtaagggtccagtttca

SEQ ID NO: 399851 - DNA, 201 bp, Homo sapiens
gagtagataactgtcctttgatgaacaagagtttcaaatttttgtgaggtgctatttgtctgttgtttcttttgttgcttgtgcctttgagatcatatccrtaaaatcattgtcaaagccagtgtcgtgacacttttgccgtatgttttcttctaagagttttgtagttttagctctgacatttgggtctttgacccattt

SEQ ID NO: 399852 - DNA, 201 bp, Homo sapiens
attattgtggttttgattcacgtttcactaaagattagtgatgatgaacaacttttcacgtgcttattattggccatttatatctcttatttgaagaaatmtatattcaagtgctttcccatttttaagttggggttttaacttttttgttcttgagttttaggagttctctatataatccagatattaatcccttatcat

SEQ ID NO: 399853 - DNA, 201 bp, Homo sapiens
aacagactaatacaaggatctattcattaactgaagtttgtaagtttaatgtatttgcttctatcgttcttttccttttatggcttgcttttggtgtcttwtttaagaaatctgtttctattcagagatcataaagatattctcctgttttagctcctgaaaattgaatagtatgcttttcatacctacattcttgacgtc

SEQ ID NO: 399854 - DNA, 201 bp, Homo sapiens
aatggtattttttttgaaaatgtcactatctttaagtgtttctagtgtatacaaatgctgctcatttttgtgttttgatttagtattcagtaatcttgctraactcttactgaaaaatttatccttagattgtttcagatttcctgtgtacacatttatttatttgtgaataataacagtttgtttcttcctttttactgg

SEQ ID NO: 399855 - DNA, 201 bp, Homo sapiens; identical to SEQ ID NO: 88524

SEQ ID NO: 399856 - DNA, 201 bp, Homo sapiens
ttaaacctcttttctttatatattacccagtctcatatttctttatagcaatgggagaacagactaatacaaggatctattcattaactgaagtttgtaartttaatgtatttgcttctatcgttcttttccttttatggcttgcttttggtgtcttatttaagaaatctgtttctattcagagatcataaagatattctc

SEQ ID NO: 399857 - DNA, 201 bp, Homo sapiens
cttattattggccatttatatctcttatttgaagaaatatatattcaagtgctttcccatttttaagttggggttttaacttttttgttcttgagttttargagttctctatataatccagatattaatcccttatcatatatgtgatttgcaaataccctattcagttccttgggtcacctctctactcagttgataatg

SEQ ID NO: 399858 - DNA, 201 bp, Homo sapiens; identical to SEQ ID NO: 88525

SEQ ID NO: 399859 - DNA, 201 bp, Homo sapiens
tatcttgaagctgagttgctgggtcataaaggatgcatgatttctaccttagcaaggtaatgcccaactgagtttccaagtagtgataccaatttactctsctcctagtttggaacaattcatcttgctctacatccttgctaacagttgatatttttaatttttgccattctggcagttttgaaatggcattccattatg

SEQ ID NO: 399860 - DNA, 201 bp, Homo sapiens
atgatgtccaagaataaatctgtagatgcagagagagcaattctattatttcaagacagaaagatatttcttggatggcagattctgaggaggtggatttccctaagggcacctaaaagtaaggaggccatagggaccctttttagaatgtccctaaaaccttcttgggcacccattcttcatggggacacatggcatttg

SEQ ID NO: 399861 - DNA, 201 bp, Homo sapiens
tgagggtgggtgctcatgtgctgggctatatcctgattctttgggacagagttatctgaggtcaatttttggcagttgtgggcggcctttccaaagggagyagggagagactgtacacattgttaccctctgaaagtgagagggttggggtttgatgggagagccgctgctgaaggtgggacttgcagctgtcatgctagt

SEQ ID NO: 399862 - DNA, 201 bp, Homo sapiens
gcattctagtgaatgtgtagaggtatcttataactttaatttgcatctccctgatgactaatgatgtagagcaattttcatgtgtttattggccattcatktatattttctttgaagtgtttgttcaagtcttcagcccttttttattggatcgtttgaatttttattgaattgcagggcttctatatatcttgggcatat

SEQ ID NO: 399863 - DNA, 201 bp, Homo sapiens
gtaggcgcggccctcgccggttccaccgcgcgcgaccgggcccgccacgcggacgccacccggggcagggcgggtccgggccggggcgcccgcgggtccckggctgcggcggtgaggtcagccgtccgtcctctcctctccccggtcgtcccctgaggtgggcttgtgatagtttatcaaaacagaaactctcctaattgc

SEQ ID NO: 399864 - DNA, 201 bp, Homo sapiens
tgaggcaggagaatggcgtgaacccgggaggcagagcttgcagtgagccgagatcacgccactgcactccagcctgggtgccagagcaagactccatctcaaaaaaaaaaaaaagaaagaccatttaactgtgggtctatttctgtgctcttctcatagaccgtttgtctgtcctttccccagtaccacattgttttgatt

SEQ ID NO: 399865 - DNA, 201 bp, Homo sapiens
gacttactgagctaattcctgatgctttcactaaagcagcagcccattattggaggctttcctcctcccagttatgaggggtgagcatgaaaatggttaayagccttcctcagtagcgtagtttaaagcacagtttgtttataatttgctttataaagaattctgaatgtagaaagcagtgttaagacttggttcttctct

SEQ ID NO: 399866 - DNA, 201 bp, Homo sapiens
ttgaccttgtagcttcttaggattcatatctacaaataaaaacaattttgtttcttcctttccagtctgcatgcttttaatcttttttttttttttttttkgccttgtttcactggctaatacctccaatacagtgttgattagaaatggtgagaatgggcatgcctgtctggttcctggtgttaggggtgaagcattgag

SEQ ID NO: 399867 - DNA, 201 bp, Homo sapiens
ggtagaagagtttatttctcttctgttaaaaacaagttaaatcaattttgtttttggctacaagtaactgtatattgtgatacctccttaataaaaatttygttttaactctacatgcaccagcaattaatgcttttccctaacatttaaaatggttatttctgggtggtatttttaaatttaaatccatccatcgtggat

SEQ ID NO: 399868 - DNA, 201 bp, Homo sapiens
tgaacctttcacccagattccccagttattcacatcctgctgtttttgttctgtctctccttttctgaatatgtgtatgtgtagttcatattccttttttsttttgctgagctttttgctgccactttttgaagtggcaggcatcaatgacatttttctctaactacttcagtatatatctcctaagtacaaggatgttta

SEQ ID NO: 399869 - DNA, 201 bp, Homo sapiens
tattactatcatgctgttttgggtactataacttgtagtatattttgaaatcaggtagtgtaatgcctccagcttgattctttttgttcagtattactttygctatttggcttcttttgtggtttcataaaaattttaagattgttttttctactactgtgaagaatgtgattggtattttgatagagattggattgcatc

SEQ ID NO: 399870 - DNA, 201 bp, Homo sapiens
gaagttgaatccacacttcacatccactttgaaccagaagggtaagaaatttaaatatagtaaaatcttcaaagtgctagaaggaaaaaccacatttgacraaaccagtgaaagaatgaaaggaaatgagggtaagtgtgagtgtttacctccttccttcatagcagaagtgatagaacacatcagaaatagtagcttgct

SEQ ID NO: 399871 - DNA, 201 bp, Homo sapiens
acctccgtaactgcagttctgttgccatatctgagaagttcaacaaaagtactataatattcaatttccccagttgttccttaagagtgtttgtgtgtgattttttttttttttttttttttgagacagagtctcgctctgccgcccaggctggagtgcagtggctcgatctctgctcactgcaagctccgcctcctgggt

SEQ ID NO: 399872 - DNA, 201 bp, Homo sapiens
attgtaggaaatcatattcctattttaggaaaattaggaattaatttaaatcctgtctgtctagcaaagaagaggaatatggttgggaaagagggaagtgyaatctataagtcaggacacttgaattacaagtaacaaaaatctatttgagcaaacttgtacaaggaagctcaaagttattttaagatcttttgggactgc

SEQ ID NO: 399873 - DNA, 201 bp, Homo sapiens
cctccgtaactgcagttctgttgccatatctgagaagttcaacaaaagtactataatattcaatttccccagttgttccttaagagtgtttgtgtgtgattttttttttttttttttttttgagacagagtctcgctctgccgcccaggctggagtgcagtggctcgatctctgctcactgcaagctccgcctcctgggtt

SEQ ID NO: 399874 - DNA, 201 bp, Homo sapiens
cagcttatgtgttggctcttgtgagatcagatggctgtccccagtctaatcacttgtggccattggcagggattggggaacatacagtgctgtggatggtkgtgtcttttgaaggggctgtggctgagcaggcaccttccaccttttctctgccacctacacacagctttctctccatgcacatggtttcatggttcaccc

SEQ ID NO: 399875 - DNA, 201 bp, Homo sapiens
acttctagtactgtgttgaataagactggtgccagtgggcatccttgtcttgctccagttcttaactctgacttttttatgaatccaggttacttttcttrtagaatgtcccactttctgaatttctccagttgtttttgcatgagtgtgttcagatgaagaggtttgggcacggattctccatgaggaatgccatgttct

SEQ ID NO: 399876 - DNA, 201 bp, Homo sapiens
  misc_feature (1)...(201): n = A,T,C or G
ctcactcctgtcgccatacagtcaggcaagctgctagctcagagactttttggggcctctttagaaaaggtaagtttcttactgtttttgagataatgtcntgatcaagatcatgatttttaaaactaatacaagtaaaacttgtgtgcctgttttccaagtaaagggttcctcagagatataatttgcagtagacttact

SEQ ID NO: 399877 - DNA, 201 bp, Homo sapiens
ggtattcatatttttatagttgagttcgtaattcatttaatgaacattcattaggaagctactgtgtcagccaggcacagaggatgcaaaagggccccccrctcttgtgggcctcaccacctagagagggaattgtctcagctgcagcaattccacacccttagcagaatgtaaaagattaagtaatcgctattttcagac

SEQ ID NO: 399878 - DNA, 201 bp, Homo sapiens
gattagtgatactaagcattttttcatatacttgttgcccatgtgtatgtcttatgagaaacatctgttcagatcctttgcccatttttaaatcaaattctttttttttttttttttttttggctctgagttgtttgagttccttgtgtagggatattagcaccttctcagatggatagtttacaaatattttctcccatt

SEQ ID NO: 399879 - DNA, 201 bp, Homo sapiens
acagtcttttacggaagacaaagattgagggagtgtcaggaaagtgacaagatctttatacgtaatttttgttgttgttcgtttgtaggaagctgccattytgggaaagaaagttatggtgctagactttgttgtcccgtcacctcagggcacatcctggggtaagttgtttttctctgttgttcctctctgctctttaca

SEQ ID NO: 399880 - DNA, 201 bp, Homo sapiens
ggttttgttagctattggtcgtgactcctgtacaaggaaaataggcttggagaagattggtgtcaaaattaatgagaagtaagtatattgggatcactgcrctgttgctgcacaaagcaacaggtttctgcagatcacctctaagaaattctcatttaattactgagatatgtcttaatttatcttataagttcagtgcca

SEQ ID NO: 399881 - DNA, 201 bp, Homo sapiens
tatttctttctcatcctgactgctctggctaggacttctagtactgtgttgaataagactggtgccagtgggcatccttgtcttgctccagttcttaactstgacttttttatgaatccaggttacttttcttgtagaatgtcccactttctgaatttctccagttgtttttgcatgagtgtgttcagatgaagaggtttg

SEQ ID NO: 399882 - DNA, 201 bp, Homo sapiens
gggtgaagcattgagtcttgtatcattgccaggatgtgacctgtaagtttgctacacttgccttttatctggtgacgaaaattgtcttttcttttattccraagattttaattatgaaagagtgttttaattttgtgaaacgctttattgcatctattgagatggttgaattgttttctcctttattctgttaatatgatg

SEQ ID NO: 399883 - DNA, 201 bp, Homo sapiens
ctccaaacaatgtgaaataacccatggaatactttggaggccaacaattcttttgtaattagtttatagttttgacagaaactatacatttatgttttatrtactctttttatgtagaaattttttcagttaaaaaaatgcagcgtagagaaagaacatcaacaaagcaaaaaaacatgtaacaaaaccaaaatccaaaaa

SEQ ID NO: 399884 - DNA, 201 bp, Homo sapiens
tttgttttcctctgggtccctcttcacttctgtgcacttgcattacctggatgatcttctctaggcccatagttttaaacattatctaaatgctaatgatyctcagatttatatctcctatttaagagtctctcctgaattccatactcatttatactactgcctactagaaattgccacttgaattcctcataagcattt

SEQ ID NO: 399885 - DNA, 201 bp, Homo sapiens
atggtaaggctgcatggcatttgcaattttttttctctaacttttcactttatctcaccttacttcatttcattacataaattagtctgtattcaaataaygttaaaacagtgtttccactcccaagtctacagagccaaccccattttccccctcgtcccctcttctgatataggaggtgtccttgctcttctcagaggc

SEQ ID NO: 399886 - DNA, 201 bp, Homo sapiens
ctcatgagggtgtgggctgcacctctgtggctgtcagccccgtttcccatctctgagcccctctgctatgtcccacgccacccttctggctcccgcccagrtccctaggccacactcttgtccttgctctttaactatggggagcatgccccttccctttaccctggccacatgcctatttcttgagcagaaccctcgaac

SEQ ID NO: 399887 - DNA, 201 bp, Homo sapiens
gcttgtggtctgatttagaaaaatctgaggtatacttcttgttccacattctctccacagcagactcaattacaaatttcaaaaggctgttgcttcattcmagcactaaattataattcagtcatcacaagaccattatacactgaaacatgaataactcatttcattcttgctgcctaggtattctttttttaattttta

SEQ ID NO: 399888 - DNA, 201 bp, Homo sapiens
ttaattctgccctttttctctcttttatcttccagatatatcatactttgttctggcctcttgaatggacagtagctggcagagagaacaacacttgttaygcaaagataatctgcaataaattcgaccatgtatgtaataccactagaagccaaaatgctgtgatttttaaatgtagcttttatttttagtatttggatt

SEQ ID NO: 399889 - DNA, 201 bp, Homo sapiens
ttttgtttttggctacaagtaactgtatattgtgatacctccttaataaaaattttgttttaactctacatgcaccagcaattaatgcttttccctaacawttaaaatggttatttctgggtggtatttttaaatttaaatccatccatcgtggattattgttcatactacatttccaattctgtcactcagcattaactg

SEQ ID NO: 399890 - DNA, 201 bp, Homo sapiens
ttatctcagaaatgtgtgaggtatggtccatttaaagctgcccttcaatgcttattttcagcattttatttaaatttttttaatttaacaggaaattgggmgtataacacagtaaatatccaaatattcaattcctaggtttaacggttgttatcatttgccatataatctatattttggatgatgtgctttattcagtta

SEQ ID NO: 399891 - DNA, 201 bp, Homo sapiens
ataactgtattgggaagatggggatggaggagggcaagaaggagctagagtgagtgctaggggacagggaagagagctcatcttgctcttgcatagagccraatcaataaataaagcctaaaataggaaagtcaggcagtaacaatataagcatgttatttagaaacatagaggtaaatacccaaatgattaaataaaaga

SEQ ID NO: 399892 - DNA, 201 bp, Homo sapiens
aagctcaaagttattttaagatcttttgggactgcaggggtaggaatggctacgggtggtaaggtgggaagttccagggttgtctgcctgtgggctcttcrgatttccaaaaggacgccctctacacacctttattgctacctcttgtttaccccccaaccctgtccaattataaccttaaaaatattttcttacatcatt

SEQ ID NO: 399893 - DNA, 201 bp, Homo sapiens
aagttccagggttgtctgcctgtgggctcttcagatttccaaaaggacgccctctacacacctttattgctacctcttgtttaccccccaaccctgtccarttataaccttaaaaatattttcttacatcatttcttgctgggaagtttgattggcttttttctgcctactctcccaactaggagggagagggaggataaa

SEQ ID NO: 399894 - DNA, 201 bp, Homo sapiens
ggtaagtagaccagttacaacatagtgttgtttataataaatgccagcgagattgacttctttccatttactttgttcaattcagattactcttgtcttcrggttaaatgaggcatttttgtctacattcagccatgcagaaaatgaaccctaatgtggcagataaattggtgtagtttttttatttatacattttccata

SEQ ID NO: 399895 - DNA, 201 bp, Homo sapiens
ctctttttttcttgtataaatgcattagttaggacctccagtacagtcctgacaagaaatggcaatagcaggcactcttgtcttatttacaatatcaaaaraaaagacgtttcactaaaaagcaatgttttctgtagggttttgttatatgctgttaatcaagttaaggagctcgttttctattttttgttacctaagtgt

SEQ ID NO: 399896 - DNA, 201 bp, Homo sapiens
atttgttgaacatcataaaataaaggtagtgcttgagtttcttgtcttgttcatctcctttctttacaattgtttatacttgccttcaactaaaatttcaygttgcatgttaaggggtgtaacaggcgtgcgtgcacacacacacacacggccatgcatgtgtgtgtgtttctcccctattgtttgctaattctacatgtt

SEQ ID NO: 399897 - DNA, 201 bp, Homo sapiens
gtgccaccttgcaatgtccattcttctctgactcagtctgataaaggctctggagatggttctttcttaacccctggactatagagatgacctgtggtcayccttgtccctgcggtgtattagcacccccctccagacacactcacacatgtaccatccccctttgatggtcaagaacacttagtccagcaccgttgagct

SEQ ID NO: 399898 - DNA, 201 bp, Homo sapiens
tttgcaacaagaacaagaaacaaaaggacacatgaactgttagttgagctgacaggattcttaggataaatagtttaagggttggaagaaaagcttttctrggggatggggaggaagtatctttaggatgtgaggatatgtgccattgtggtgacgtggtcactgctgggacaggttcgggaatcataaccaacatcacag

SEQ ID NO: 399899 - DNA, 201 bp, Homo sapiens
tgactggggaagggccctgctgcattagtgggtggggtcaggaatgctgagtataccatctcatgcaaagaaaaattgtcccaaacacaatgcaatagaasattttgcaatgtgtgtaggcagagtagttggtgatagggaagtacaattgggaaggaggctggaaaactaatttggtgccagatcatcaaaaatctttgc

SEQ ID NO: 399900 - DNA, 201 bp, Homo sapiens
taagatctccatgagactttttttttctttttggagattggctgattattttaaaattcgttttgaaaaatacatatgtgaaaatagctaagcaacctttragaaagtatagagggtgacctttctcagtatttaaaaatattatactgttgcaggactaaacacatcaataaaacagtagaacaggtggtttcaaagtgc

SEQ ID NO: 399901 - DNA, 201 bp, Homo sapiens
ctcatgtgtggttatatgtaatttaccattaaaggtaaaattcacctaacatcttcaccctgattatttcttcttagtgaggcacaactgggagacaatgrcaaaagcgattcagaaccacatcagctctctaaactggggctacaggttgtctctgagggaaaaggctgtggcctatgtcaattcctatggagaatttgt

SEQ ID NO: 399902 - DNA, 201 bp, Homo sapiens
ttttatattgaccttgtagcttcttaggattcatatctacaaataaaaacaattttgtttcttcctttccagtctgcatgcttttaatctttttttttttyttttttggccttgtttcactggctaatacctccaatacagtgttgattagaaatggtgagaatgggcatgcctgtctggttcctggtgttaggggtgaag

SEQ ID NO: 399903 - DNA, 201 bp, Homo sapiens
atttacactgttctggaaaagctagacttagaaaagccacctttttttggaggctgaaataaccatgatacagaaagatagtctaaaaatagaaaactatrccccatagaggtgcccaaactctagggcaagcattggcaaatcctctctggtagtgtctcgaaggaacaaatgtgagtgggtagggctcgccgtggggtg

SEQ ID NO: 399904 - DNA, 201 bp, Homo sapiens
aattggttccttgtatgtttcatagaatttactgatgcaactgtctatacctataattttctatggagatatatttgaccactgattaatttctttaatartcaaaggacttttaagactttttattttttccttgatttacttttgattagttatatttttttccaggaattagtccatttcatctgagttttcaaatgt

SEQ ID NO: 399905 - DNA, 201 bp, Homo sapiens
aaaaacaagcaaacagaaaaactcagaaattaatgttagctcccttcccaaatagaactgataaacaaaaccaagactgtatttgaaaatacaaataaaakaggcaaatgtttggcaaatccaattaaggaaataaggggggaaactcatacagatatgcagcatcagacattagaaaagaagtataactacagatgggga

SEQ ID NO: 399906 - DNA, 201 bp, Homo sapiens
cagagaatataaggtcaggtaaataaggccagtggcaaaatttatgtacaaaaatatgccgtgtgtgtctcggtgattcctagaagtagcctgggagtttygttctaaacttcttacaggccaaaacaaagaagtaaatacagttagctctaggggttagtgtccttatgataaaaatgagccagctggggaggagcagca

SEQ ID NO: 399907 - DNA, 201 bp, Homo sapiens
tttatatatgtatacaatatgagtaatcagtggttgattaaatagttgtatttgagactttaattaagaattatatttttgtggagaaaaaagattgtctmtgttgtgtgttaatctatgatcagcatccttatgcagtaacaatctgctttattagtcctagaatttataacctagttcacatagtggtaagtcctgtaa

SEQ ID NO: 399908 - DNA, 201 bp, Homo sapiens
agctaagcaacctttgagaaagtatagagggtgacctttctcagtatttaaaaatattatactgttgcaggactaaacacatcaataaaacagtagaacargtggtttcaaagtgccagttcattgatttggcatatcaaaaactccaggaggagctttttaactgtacaggttctggggtcccactcctgattccatagt

SEQ ID NO: 399909 - DNA, 201 bp, Homo sapiens
acgcaggtggaaaatagatactgcctatttgagttcagaaaagagatttgggccaaagttgtagatttgaaagtcataagagacagtaaaaagaaggcaarggatggcctgagattattctgggaagatgtgtagaggaaaggaaaaaatcaaaaacaaaaacaaaaaccacacgttggctagaactcctgttcctccaga

SEQ ID NO: 399910 - DNA, 201 bp, Homo sapiens
aaccatgatacagaaagatagtctaaaaatagaaaactataccccatagaggtgcccaaactctagggcaagcattggcaaatcctctctggtagtgtctygaaggaacaaatgtgagtgggtagggctcgccgtggggtgcagggagggggtcagcccaggatagcacagcaggagtgcacagaatcagcatgatggcca

SEQ ID NO: 399911 - DNA, 201 bp, Homo sapiens
ttacattgatgtgtatagtttcttaaaacatatattatgcatatatatttttaagaataataaagtgacactagtactgtagaagcttccttggctgtctyctccctccctcagggttaaccactatgcaaaatttcctttttttttttttacatttttaccaaatatatatattattcatcaatatttggttccttttgg

SEQ ID NO: 399912 - DNA, 201 bp, Homo sapiens
ttgtgttggtccacatttgaagccatcctgggcctcctgcagcccatgggccacaggttggacaagtttgatttacactgttctggaaaagctagacttaraaaagccacctttttttggaggctgaaataaccatgatacagaaagatagtctaaaaatagaaaactataccccatagaggtgcccaaactctagggcaa

SEQ ID NO: 399913 - DNA, 201 bp, Homo sapiens
  misc_feature (1)...(201): n = A,T,C or G
gagataaagaatactgtattactaggtaaggttaaatagactattttaactttaatgttaataaattgaattatattgacatgtttccagtttacttcctntcttattccacaaaagatttgaattaacaaatgaaaatatatacaatgcaagaagctaaatagttaaaagtaatgaaacagagaatataaggtcaggtaa

SEQ ID NO: 399914 - DNA, 201 bp, Homo sapiens
taaaaccaaaagaaataattgttgaaaatatggaaattttacattttaagtaggaaattaagaatttcctatttaaaattttagatgagaaatttttaaasaggaaaatgatatagcaggaaaatgtaaataatatcagtggtagttaatatcagataggttgaatataagcaaaaaacaagcaaacagaaaaactcagaa

SEQ ID NO: 399915 - DNA, 201 bp, Homo sapiens
gttgaggtcacagtgtatgtactgtgtcgtggtcacgtaagtttgccagaaacacttttctttgtttctgtgtcggtttcataattgactatattagctgmacaatagctgatggagtgagtgtatgtaataattacagtttagcttaacaaggagaccaatgaccagccctgtgactctgctgtctactgtagactagag

SEQ ID NO: 399916 - DNA, 201 bp, Homo sapiens
tgccaaaatcatgttctgggagaatgttctagatacttgcattcttgatattgataaagacatataggctaggctggacgtggtggctcacgcctgtaatsccagtcctttgggagaccgaggcgggcggatcacgaggtcaggagatcaagaccattctggctaacacaatgaaaccctgtctctactaaaaatacaaaa

SEQ ID NO: 399917 - DNA, 201 bp, Homo sapiens
gttatcagggtcagctttgacgtcaggatctcagtcttcaactctgcagcccacacgagagcctgtgcctagtgctctgccttgggttgctggtactctayacatgtttgaaaactgaattttgtttgtggatttttgcttggactaacagccaaacaagcaaaacaacagtcaacacacatatgcagctagcatttcagg

SEQ ID NO: 399918 - DNA, 201 bp, Homo sapiens
gctaggctggacgtggtggctcacgcctgtaatcccagtcctttgggagaccgaggcgggcggatcacgaggtcaggagatcaagaccattctggctaacmcaatgaaaccctgtctctactaaaaatacaaaaaattagccaggcatggtggcatgcgcctgtagtcccagctactcgggaggttgaggcaagagaatcg

SEQ ID NO: 399919 - DNA, 201 bp, Homo sapiens
aaatagaaagggaagcaacatgaaactacaagttaaaacaaacaaaaatagcaacagaaaataagataccttacataagagtagtcatattacttactagrataaagctgaatgagtcagatttttgggttagtagatggcaaaattcttccatatgctatgtttaagacaaatacctaaaaccaaaagaaataattgttg

SEQ ID NO: 399920 - DNA, 201 bp, Homo sapiens
attgctgctgcaatagaagttcatgaagtactgttaccaggactacagaagttacatgatgctcttgatgcaaaatccaaagagtttgcacagatcatcargattggacgtactcatactcaggatgctgttccacttactcttgggcaggtataggagtttgactaatttgattcaatttagagcttggtacaaatggcc

SEQ ID NO: 399921 - DNA, 201 bp, Homo sapiens
caggtaatcacatagctagtaaatgttggagctaaaacttgactaggtcctaggcattcttagctatggaccatgtctctctttgtttaaagttatcccgmagctggatgcgcaaggcgcactgttccagcatgtctgtggtcctctggtcaggactgctgggcacgtcacctgacaagataggaagaaagaatctgactt

SEQ ID NO: 399922 - DNA, 201 bp, Homo sapiens
ttgttaatgtttctttagaaagataattgtttctagttaaacatgttgtttgaaaaatatacccagatgtatatttttatgtcgtggtgctataatttctrcttttttccccttcaaaatatctaagttactggaaaatttcaacttaggaacaaatctgttggagaaagtgaggtatgtttaagtgtttatttcttaagg

SEQ ID NO: 399923 - DNA, 201 bp, Homo sapiens
accattctcaggtccaaaatctctgttggttttgttaaaagttcttcctgttgctaatgttgagaatttcacataacccttgatgccctaaggtaccttttatttaaaagaacacatacaaattcattcaatagaaagatactgtttattgagtgccttccacttaccaggccctgtaaataagacagtccatatggggat

SEQ ID NO: 399924 - DNA, 201 bp, Homo sapiens
tttggtcatatttctctgatcttgttttttttctcccgcattggtttcattttcattcctgctttttcttcttgacatatatatatatatatatatatatwtatatatatatatatatatatatgttaagacagcttgcagaactgccctgcccccacttttattaatttgaaaagcaaataactctgaagtaaacagtat

SEQ ID NO: 399925 - DNA, 201 bp, Homo sapiens
aaccattctcaggtccaaaatctctgttggttttgttaaaagttcttcctgttgctaatgttgagaatttcacataacccttgatgccctaaggtaccttttatttaaaagaacacatacaaattcattcaatagaaagatactgtttattgagtgccttccacttaccaggccctgtaaataagacagtccatatgggga

SEQ ID NO: 399926 - DNA, 201 bp, Homo sapiens
ttattaagttaccagaataatcctagataatagaaattagttgacttttaacctaagcaatttgatgttttttttaatagcccgtttaagaaaaataaaaygcctccctacaagcctgtctccttctcatgctgctgctttcttcttcaaattcagtcttcttggaaggatagcacatactcactttcatttatgctgtag

SEQ ID NO: 399927 - DNA, 201 bp, Homo sapiens
cttttggtcatatttctctgatcttgttttttttctcccgcattggtttcattttcattcctgctttttcttcttgacatatatatatatatatatatatrtatatatatatatatatatatatatgttaagacagcttgcagaactgccctgcccccacttttattaatttgaaaagcaaataactctgaagtaaacagt

SEQ ID NO: 399928 - DNA, 201 bp, Homo sapiens
gtcatagttctttcaaaactagatctattatgcctcattttatttgaaatgtatcgagaagtagtagttcaaacttattttgattttaatggaattcagaygccaaatattctatgcagaccattggggaaggttatttgtaagaccttcagtgggtaatgtcactaggtggcactgctgattagcaacattgaatgaact

SEQ ID NO: 399929 - DNA, 201 bp, Homo sapiens
ggtaccttttatttaaaagaacacatacaaattcattcaatagaaagatactgtttattgagtgccttccacttaccaggccctgtaaataagacagtccmtatggggatagggttttacaggcagtgttttattcttgtctttagtggagattaaataagcaaagcagttaaataagcaaataaatcacacatgaataat

SEQ ID NO: 399930 - DNA, 201 bp, Homo sapiens
taaccattctcaggtccaaaatctctgttggttttgttaaaagttcttcctgttgctaatgttgagaatttcacataacccttgatgccctaaggtaccttttatttaaaagaacacatacaaattcattcaatagaaagatactgtttattgagtgccttccacttaccaggccctgtaaataagacagtccatatgggg

SEQ ID NO: 399931 - DNA, 201 bp, Homo sapiens
ttattttacagtgactggagtattcgttaaagcatagaaaacctagaaatttggtgatcattagattttgccctgactttactaattgcctcacactcatrctgaactttcgaacctctgcatctttgctcctcttccttctgcgtggaagattctttttccttctctggccaagtcctctccataaaataggatttcacc

SEQ ID NO: 399932 - DNA, 201 bp, Homo sapiens
ctaaccattctcaggtccaaaatctctgttggttttgttaaaagttcttcctgttgctaatgttgagaatttcacataacccttgatgccctaaggtaccttttatttaaaagaacacatacaaattcattcaatagaaagatactgtttattgagtgccttccacttaccaggccctgtaaataagacagtccatatggg

SEQ ID NO: 399933 - DNA, 201 bp, Homo sapiens
tggtactttttgccctctaaccattctcaggtccaaaatctctgttggttttgttaaaagttcttcctgttgctaatgttgagaatttcacataacccttsatgccctaaggtaccttttatttaaaagaacacatacaaattcattcaatagaaagatactgtttattgagtgccttccacttaccaggccctgtaaata

SEQ ID NO: 399934 - DNA, 201 bp, Homo sapiens
aaaggcctgactctagatttttatggaaattatggatctgtagaataagaagagatgaaattttgttttaaagtacttcatgttgaagaatgacataaagrtttagttgattgcaaatccagggtgattgccaaaagaaagagaactgggggagtcacagataaaggcaataatccacccaataatctttccagtgtgtta

SEQ ID NO: 399935 - DNA, 201 bp, Homo sapiens
ctctctctctctctctctctctcactcactcaaagattaaaaatgtgttacactcagccaggctgctgggggatgcttcagtttcctttacagaaaactgygtggtgggaatccaggccaatacagaaaggatcaacaagctgatgaatgagtctctaatgttggtgacagctctcaatcctcatataggtaagtgtttaa

SEQ ID NO: 399936 - DNA, 201 bp, Homo sapiens
atagctagtaaatgttggagctaaaacttgactaggtcctaggcattcttagctatggaccatgtctctctttgtttaaagttatcccgaagctggatgcrcaaggcgcactgttccagcatgtctgtggtcctctggtcaggactgctgggcacgtcacctgacaagataggaagaaagaatctgacttagcagcaagta

SEQ ID NO: 399937 - DNA, 201 bp, Homo sapiens
tgcttaagtaaaattgtaaatttgaaatatttttctgattaattttagaccccagttattaaagcttttggcatcttgaagcgagcggccgctgaagtaamccaggattatggtcttgatccaaagattgctaatgcaataatgaaggcagcagatgaggtaggaggtgataagtgtgtttgcttaataacctcagaccca

SEQ ID NO: 399938 - DNA, 201 bp, Homo sapiens
agtggttatgttcaacaagtaaaatatgcaatgacaagaataaaagctgccatgccaagaatctatgagctcgcagctggaggcactgctgttggtacagktttaaatactagaattggctttgcagaaaaggttgctgcaaaagtggctgcacttacaggttagtgatcacgtgaattatttctcattttcatttctcat

SEQ ID NO: 399939 - DNA, 201 bp, Homo sapiens
acactttactggtgactgagggtgaaggaagagaatacatgctaatcatattaacagttaacaaagttgggatagcaatactatggatgacagaactgagwtccataaaggccactgtagcttgggctaaaactgacaatgtaacttttaatagtgagaaaggcctgactctagatttttatggaaattatggatctgtag

SEQ ID NO: 399940 - DNA, 201 bp, Homo sapiens
ttctgtttcacttgctaatggtagaaaaatgtttagtttaacttgttcacccatctaggatatttttcttttctttaggcttgccttttgtcactgctccraataaatttgaagctctggctgctcatgacgctctggttgagctcagtggagccatgaacactactgcctgcagtctgatgaagatagcaaatgatattc

SEQ ID NO: 399941 - DNA, 201 bp, Homo sapiens
gcaatagaagttcatgaagtactgttaccaggactacagaagttacatgatgctcttgatgcaaaatccaaagagtttgcacagatcatcaagattggacrtactcatactcaggatgctgttccacttactcttgggcaggtataggagtttgactaatttgattcaatttagagcttggtacaaatggccaatgtgtca

SEQ ID NO: 399942 - DNA, 201 bp, Homo sapiens
actgtcaaccagaaaataatatgttattggacaaaaaacatgttgccttagtaatgtctctctctctctctctctctctctctctctctctctctctctcwctcactcactcaaagattaaaaatgtgttacactcagccaggctgctgggggatgcttcagtttcctttacagaaaactgcgtggtgggaatccaggcca

SEQ ID NO: 399943 - DNA, 201 bp, Homo sapiens
ggcgtggccacagccgcccagaaattctacccaagctccctcagcaccatgtaccgagcacttcggctcctcgcgcgctcgcgtcccctcgtgcgggctcyagccgcagccttagcttcggctcccggcttgggtggcgcggccgtgccctcgttttggcctccgaacgcggctcgaatggtgagcgcaggccgccatccc

SEQ ID NO: 399944 - DNA, 201 bp, Homo sapiens
gagctatagtgttactgttttattgttattgttttatgtatagcttttgcatctgccaaaataataaacttccatgcttaagtaaaattgtaaatttgaawtatttttctgattaattttagaccccagttattaaagcttttggcatcttgaagcgagcggccgctgaagtaaaccaggattatggtcttgatccaaaga

SEQ ID NO: 399945 - DNA, 201 bp, Homo sapiens
ggtaggtttatacactgaaattgtatggagaatatttctatgtttgcatttttttgggggagatgagttactattttttcttacaccaaagttgtctgagrcatcccaaaaaataagaaatcacttcagtttctttagtagactgcaagtaaaccaataatttagtgtagtaaagttgttctttttaaagtgtatttcctg

SEQ ID NO: 399946 - DNA, 201 bp, Homo sapiens
tgcactgtataattgtaagatattcaattataagattttataagaatatataattcaataattgatgtaatttgatataattataagatattcaactacaytgaagatactactgctgtcttcaagtgcagttgttaactatacttctctgtattttgctgtcatttattagcaggcagatataatacgtaatacataata

SEQ ID NO: 399947 - DNA, 201 bp, Homo sapiens
tgaaaaagggtagtgaccaatcctaaaataatctcatattattcaactccagagactaaggaggaggtcagccccagctagtgttggtgggagtgagcatrgctgccgttttcattgatctgtgtcaccagcatgttttgtggttctggtggggcatggttcctgctgctgctgctccagagacagcacagccattgggat

SEQ ID NO: 399948 - DNA, 201 bp, Homo sapiens
tcccccactaatttaaaactgagattttttaaaattacactttgtattttggtttcagtttcctaaaaagtgtatagtacacaaacacatcaaagtattastcttaaccatgtctgacatataatagataatatataagtatttattcaattccatatgaatgattaaatgatgagaaaactttctaccacattcaattaa

SEQ ID NO: 399949 - DNA, 201 bp, Homo sapiens
acgtgattggctacatgttgataattatgtaaactatttgaattcaggtgacaggtacataagtgtttattataccattcatcctacttctttcgtaagtmctttatattttgcatagtaaacgtcaaaatatataaataatgtatctttttaaatgacagtatacttttatatatatctgtgtgtgtgcatgcgtgtgtg

SEQ ID NO: 399950 - DNA, 201 bp, Homo sapiens
caggtttctttctctttaacagctgataagatgcgattacttttgatcctgggtttcttttcaacttgtaatagtgttgtattcttgtctttaggcaagcyaaaattccttccggatagaatatgatacctttggtgaactaaaggtgccaaatgataagtattatggcgcccagaccgtgagatctacgatgaactttaa

SEQ ID NO: 399951 - DNA, 201 bp, Homo sapiens
actcagacaaatatgaatgtaaatgaagtcattagcaatagagcaattgaaatgttaggaggtgaacttggcagcaagatacctgtgcatcccaacgatcrtgttaataaaagccaggtcagtatgtgagctttgctgttttttggttataaattgaaaagcatacctgagattgttcttgtaaaacaagcattcactttt

SEQ ID NO: 399952 - DNA, 201 bp, Homo sapiens
ataacttgtatggtgtcatagttctttcaaaactagatctattatgcctcattttatttgaaatgtatcgagaagtagtagttcaaacttattttgatttyaatggaattcagacgccaaatattctatgcagaccattggggaaggttatttgtaagaccttcagtgggtaatgtcactaggtggcactgctgattagca

SEQ ID NO: 399953 - DNA, 201 bp, Homo sapiens
aatgtaaatgaagtcattagcaatagagcaattgaaatgttaggaggtgaacttggcagcaagatacctgtgcatcccaacgatcatgttaataaaagccrggtcagtatgtgagctttgctgttttttggttataaattgaaaagcatacctgagattgttcttgtaaaacaagcattcactttttgacaagaagtgttc

SEQ ID NO: 399954 - DNA, 201 bp, Homo sapiens
gaataaatttgaagctctggctgctcatgacgctctggttgagctcagtggagccatgaacactactgcctgcagtctgatgaagatagcaaatgatattygatttttgggttctggtcctcggtcaggtctgggagaattgatcttgcctgaaaatgaaccaggaagcagtatcatgccaggtaatcacatagctagtaa

SEQ ID NO: 399955 - DNA, 201 bp, Homo sapiens
cacgtcacctgacaagataggaagaaagaatctgacttagcagcaagtatttcgaatcccacattagaaaatgtagagcaggctgttaaagtgatcagcgygggttgaataaaaagaagtcataccaaacttcacttatttcattttttgcattccgttatatgcctgttagatatagcaagtgacacaacagtgtatgtc

SEQ ID NO: 399956 - DNA, 201 bp, Homo sapiens
tatttttcttttctttaggcttgccttttgtcactgctccgaataaatttgaagctctggctgctcatgacgctctggttgagctcagtggagccatgaayactactgcctgcagtctgatgaagatagcaaatgatattcgatttttgggttctggtcctcggtcaggtctgggagaattgatcttgcctgaaaatgaac

SEQ ID NO: 399957 - DNA, 201 bp, Homo sapiens
agaagaaaagcagagtatactggctataagtcagattcagtcagactgctcgggttcaaatcttagctttgctgtgtacaagctatgggaccataggaaartcatttagcctttctgtgcctcagttttctgagctacaaaatgaggaaaataatttccctttcataggatagttgtgaagctctagtaagttgatttatg

SEQ ID NO: 399958 - DNA, 201 bp, Homo sapiens
agtgattctattccaatagagaatacaaatttgcacaacattgtaagtcagaatttcatcaaataatttttctcaaatgtggagatttttcaagttaaatmtcatgcatgatttgacctctcaccatttactttgttcggttcttgtttttgttgagacagatttcaatgtcttcctgttggcaagctttttctcaatcat

SEQ ID NO: 399959 - DNA, 201 bp, Homo sapiens
ctcctaatactattaccctaggggttaggatttcacatagcagtgaccttgacactttgaaagcagtggtcaggtattttgtagaatgtccctcaattctkgtgtgtctgacgttttctcattagattgagacttttgaatttttgagaaaactatcacagaaataaagggcccttctcattgcatcatatcaggggttca

SEQ ID NO: 399960 - DNA, 201 bp, Homo sapiens
acctgagattgttcttgtaaaacaagcattcactttttgacaagaagtgttcattatttaatggataaggcttcttatggttcttatttcttgaaggaatsttggttttatgtttcaatccttataaaaattatttttaggacacctgaatttagtgtatgtatttttttattgtttaaaactctattttgaaataatttt

SEQ ID NO: 399961 - DNA, 201 bp, Homo sapiens
gcaaaaatatatgtattttacgatcctaattttgtttaggaaaaaatgaacagaaagtgtgtgtttctcatatacacacacacacacacacacacacacaccctcattgcatgagatagagactggggatgccaacatgctaatagtcataattactgagcaatagaactatagtgactgttttacttttctcagttctca

SEQ ID NO: 399962 - DNA, 201 bp, Homo sapiens
tgcaaaaatatatgtattttacgatcctaattttgtttaggaaaaaatgaacagaaagtgtgtgtttctcatatacacacacacacacacacacacacacaccctcattgcatgagatagagactggggatgccaacatgctaatagtcataattactgagcaatagaactatagtgactgttttacttttctcagttctc

SEQ ID NO: 399963 - DNA, 201 bp, Homo sapiens
gatattcctgctgagcaccagcaacaaatatatctagagactaaacgtatttgccagccttaacaggtggtcctctgttagaggaggctgtgggagagagrtaagaaagatacctttgattcccttttcatttgaaaccagtgaattgtcataccattcactatagataatatttcactttttaaagtatctgtggttgga

SEQ ID NO: 399964 - DNA, 201 bp, Homo sapiens
tagtgctactcaaaagctaatttcaaaaataattatctccaggttgaggtgggagggttgcttgagcccaggagttggaggctgcagtgagctatgatcaygtcactgcactccaacctgggtgacagagggagaccttgtctctaacaacaaaaaacaccagttttctctccagtagggtcttaatattttcacttcttc

SEQ ID NO: 399965 - DNA, 201 bp, Homo sapiens
agcctatgagaaatagggaggaaagtttgcaaaaatatatgtattttacgatcctaattttgtttaggaaaaaatgaacagaaagtgtgtgtttctcatayacacacacacacacacacacacacacaccctcattgcatgagatagagactggggatgccaacatgctaatagtcataattactgagcaatagaactata

SEQ ID NO: 399966 - DNA, 201 bp, Homo sapiens
ggcatgcacaaagcctagcctatgagaaatagggaggaaagtttgcaaaaatatatgtattttacgatcctaattttgtttaggaaaaaatgaacagaaartgtgtgtttctcatatacacacacacacacacacacacacacaccctcattgcatgagatagagactggggatgccaacatgctaatagtcataattact

SEQ ID NO: 399967 - DNA, 201 bp, Homo sapiens
ccatactctggatgacgatatgctctggcagaaggaaaggggaactgtgaattcttgaattaatgaatttcaggggagggtggtagcattatttttagtgrtgatattaatatggtgcttaaaacgttacattgtgacaaaatttctggatgattttataccttttgtttttaagccttttgactttccttaatttatata

SEQ ID NO: 399968 - DNA, 201 bp, Homo sapiens
gagtgagactccgtctcaaaaaaaaaaaaaattaatttaattttaagttccgggatacacatgcaggatatgcagttttgttgcataggtaaatgtgtgcyatggtggtttgctgcacctctcaacccatcacctagatattaaaacccggcattagctattttttctgctgctccccctccgcccacaggcccctgtgtg

SEQ ID NO: 399969 - DNA, 201 bp, Homo sapiens
ataaacttccatgcttaagtaaaattgtaaatttgaaatatttttctgattaattttagaccccagttattaaagcttttggcatcttgaagcgagcggcygctgaagtaaaccaggattatggtcttgatccaaagattgctaatgcaataatgaaggcagcagatgaggtaggaggtgataagtgtgtttgcttaataa

SEQ ID NO: 399970 - DNA, 201 bp, Homo sapiens; identical to SEQ ID NO: 88545

SEQ ID NO: 399971 - DNA, 201 bp, Homo sapiens
taacttgtaagctattaggaattacttattcttaccttaattttcttttcttttcaggaatttagtggttatgttcaacaagtaaaatatgcaatgacaakaataaaagctgccatgccaagaatctatgagctcgcagctggaggcactgctgttggtacaggtttaaatactagaattggctttgcagaaaaggttgct

SEQ ID NO: 399972 - DNA, 201 bp, Homo sapiens
aataaaacttgattagcttgtaatttagtattctgaaaggtatttttaaaaatttctatttaatgcagttagagtaacttgtaagctattaggaattactwattcttaccttaattttcttttcttttcaggaatttagtggttatgttcaacaagtaaaatatgcaatgacaagaataaaagctgccatgccaagaatct

SEQ ID NO: 399973 - DNA, 201 bp, Homo sapiens; identical to SEQ ID NO: 88547

SEQ ID NO: 399974 - DNA, 201 bp, Homo sapiens; identical to SEQ ID NO: 88595

SEQ ID NO: 399975 - DNA, 201 bp, Homo sapiens; identical to SEQ ID NO: 88597

SEQ ID NO: 399976 - DNA, 201 bp, Homo sapiens
acataattaatgtgtacaacttgatgagtttggtccttaattttttcactttgtgtgatctcaggcattttacctttacttccagaatcttagttactccytttttaagatgaaggattttgaactaaatcatctctgaagtctattccagctctaacacctgtattctgatttatacctttaagaacaataaataggcta

SEQ ID NO: 399977 - DNA, 201 bp, Homo sapiens
tttgtattcttttttgttgcattatttttattgttttttaaaaaatacttccaatcaaaacttgactgagtccatatatccagaacttgggtatatgtggytgaccatatagtattctgttcagttagaaaaaatgtacctatagctcaaaatttggaaacttggctatcagcaattcaagacttaattttttaaatatat

SEQ ID NO: 399978 - DNA, 201 bp, Homo sapiens
atttgtattcttttttgttgcattatttttattgttttttaaaaaatacttccaatcaaaacttgactgagtccatatatccagaacttgggtatatgtgsctgaccatatagtattctgttcagttagaaaaaatgtacctatagctcaaaatttggaaacttggctatcagcaattcaagacttaattttttaaatata

SEQ ID NO: 399979 - DNA, 201 bp, Homo sapiens
aaaaatacttccaatcaaaacttgactgagtccatatatccagaacttgggtatatgtggctgaccatatagtattctgttcagttagaaaaaatgtaccwatagctcaaaatttggaaacttggctatcagcaattcaagacttaattttttaaatatattttttctaggcactatgcataaatatgtaacattagcctc

SEQ ID NO: 399980 - DNA, 201 bp, Homo sapiens
gttgcggtctaagtttatggtcactgcagctgtatcagtactaggaggtgccctaagcccaggaatgctacaactcttgccaagtcctagaggcacaatgrtgcttctaaatgaagcattgtcctaaagggagaattccttgggttactaggcaaagtatctcagtctcttttcttttgttccttgaaccacaaggagttt

SEQ ID NO: 399981 - DNA, 201 bp, Homo sapiens
aattgcatcactgcattccagccctggtccacagagcaagacatcaactctaaaaaatcaaaacaaaacaacaacaagaaaactccacaaaacagcttttrcaaaaagcagtacagcagacctatgacactgtctttcaaaaatcctctcaatctatcaagataaaactaatagcaaacattcatcgaagcaccaagctgt

SEQ ID NO: 399982 - DNA, 201 bp, Homo sapiens
aactcttgccaagtcctagaggcacaatgatgcttctaaatgaagcattgtcctaaagggagaattccttgggttactaggcaaagtatctcagtctcttytcttttgttccttgaaccacaaggagtttttctccccatgctaggctgcctggagttgggggaggagtgacacaagcactcctgtggccaccacagctgg

SEQ ID NO: 399983 - DNA, 201 bp, Homo sapiens
ttgtttctccacaatctcctcaatatatctactgaatgtaattgaacgtaatgggattcaactgggaggaggaggcctatgaggaatttcactttagttgrttcaccagatacaagaaagagggtttagtattattattaattgtatttccttagttatatttgtcagactgccttttggatggatagatgggtggagtgg

SEQ ID NO: 399984 - DNA, 201 bp, Homo sapiens
tacaggtgcacaatgtgcaggtttgttacatatgtatacatgggccatgttggtgtgctgcacccattaactagtaatttacattaggtatttctcctaakgctatccctcccccatcccccaaccccatgacagcccccggtgtgtgatgttccccttcctgtgtccatgtgttctcattgttcaattcccacctatgag

SEQ ID NO: 399985 - DNA, 201 bp, Homo sapiens
taactaaaaaaagcctacgtgttcatggaaaagccactggattacaaattaaatttgtggtttgcgtagttgatccagtcacaccctatgtatcccttacyaagtctaagcctacactgtagttgcttttcctcccttcagcatttgcattcaacggatttattcccagcaaagcatgccacttaatatttctactatctt

SEQ ID NO: 399986 - DNA, 201 bp, Homo sapiens
tgggccatgttggtgtgctgcacccattaactagtaatttacattaggtatttctcctaatgctatccctcccccatcccccaaccccatgacagcccccrgtgtgtgatgttccccttcctgtgtccatgtgttctcattgttcaattcccacctatgagtgagaacatgaggtgtttggttttctgtccttgcaactca

SEQ ID NO: 399987 - DNA, 201 bp, Homo sapiens
tgtgcactaatagcttcataatcattaatcatatattattttggtcactggcatatattccaagtaaaaatagcttttgaatctaatcaattatattctcyatgaagcagtggtaaacatattgttttataaaaacataagacattaactgtagcacagtggataagtgcccaggacctgacattagaatacttagtttta

SEQ ID NO: 399988 - DNA, 201 bp, Homo sapiens
gacagggggtggggggagatggtttcaggatgaaactgttcctgctctgatcttcaggcgttagttggattctcataaggagcgtgcaagctagatgtctygcctgtgcagttcacaatagggttcacgctcctatgagaaactaatgccactgctgatctgacaggaggcggagcttgggcggtaatgccatctcaactg

SEQ ID NO: 399989 - DNA, 201 bp, Homo sapiens
tgacaggaggcggagcttgggcggtaatgccatctcaactgccactcacatcctgctgtgcggcccagttcctaacaggccatggaccgagggttggggayagtcaccctacaacacatcctcagaaacacttagaagctccagtgttttttgccctatcaaagattgcatctaatacttttttttttgagatggagtcac

SEQ ID NO: 399990 - DNA, 201 bp, Homo sapiens
tctttctaaagcctccgttctttttcatctataaagtggggatgatactctcaacttcagagttgtgaacactgaataatttctataaagttttaaaaagraaaaaaaagcctaccgtaaagtaagttcatagtatatgtttgctgtggtgttttagaaagtccaagaatactggtgcctgggtctgaagagatcatagaa

SEQ ID NO: 399991 - DNA, 201 bp, Homo sapiens
atggactcatctgtcattcaaaggaaaaaagtagctgtcattggtggtggcttggtaagaattttcagatggattactattgttggtggtattatattaastattattactcgtaatgattattattcgtcacttctgcaaattgttaattttcttgtgaaaactctgatatttaaatacagctattttgtttattttttt

SEQ ID NO: 399992 - DNA, 201 bp, Homo sapiens
ctggaagatcaggtacttaatgtatctttcttacagaagataatacctggtatttttcaacaattgcatggtttgatttcatcctggcttaaaaagtaccrtttaataccaagaatctctgcatgaaaactcattctactaaagcttttaaaattcgaaatttggcaagagggtgaacattggacactcgaggcacccgag

SEQ ID NO: 399993 - DNA, 201 bp, Homo sapiens; identical to SEQ ID NO: 88596

SEQ ID NO: 399994 - DNA, 201 bp, Homo sapiens
tatttgtattcttttttgttgcattatttttattgttttttaaaaaatacttccaatcaaaacttgactgagtccatatatccagaacttgggtatatgtrgctgaccatatagtattctgttcagttagaaaaaatgtacctatagctcaaaatttggaaacttggctatcagcaattcaagacttaattttttaaatat

SEQ ID NO: 399995 - DNA, 201 bp, Homo sapiens
aaaaagaaaagaaataggccaggatgccatgggaaagcacctgactcaggctggaatgagcctcaggccactgtttacagctggtgtttagtctccacatragtcttagtcacagaggccaccaggccaccactcttctcctggagacttttgggaagcttctgagaaggaatgaatgatgtgtggccccagcacagcagt

SEQ ID NO: 399996 - DNA, 201 bp, Homo sapiens
ttatttgtattcttttttgttgcattatttttattgttttttaaaaaatacttccaatcaaaacttgactgagtccatatatccagaacttgggtatatgwggctgaccatatagtattctgttcagttagaaaaaatgtacctatagctcaaaatttggaaacttggctatcagcaattcaagacttaattttttaaata

SEQ ID NO: 399997 - DNA, 201 bp, Homo sapiens; identical to SEQ ID NO: 88598

SEQ ID NO: 399998 - DNA, 201 bp, Homo sapiens
tttggggcactagagaacaaagataaagcaataatatagattaattttgttgtaatttttatttaatcacaacaggaaatgctctgtgtattgtcaatagtcatagattgttggttatacagaatggttatttatagtttaaaaaaattagcgagagcattggtagtgaacgtaccatttaatttgacctgtgtagagttc

SEQ ID NO: 399999 - DNA, 201 bp, Homo sapiens
ttggggcactagagaacaaagataaagcaataatatagattaattttgttgtaatttttatttaatcacaacaggaaatgctctgtgtattgtcaatagtcatagattgttggttatacagaatggttatttatagtttaaaaaaattagcgagagcattggtagtgaacgtaccatttaatttgacctgtgtagagttca

SEQ ID NO: 400000 - DNA, 201 bp, Homo sapiens
tttgttttgtggttaccatgaggcttgcaaataacatcttacaaccaagtattttaaactgatgacaacttaacccggattacaaagaaaaagaaagaaaraagaaaaaaagagaaaagaaaagaaaagacaaacaagcaaagagaaaactaaacaactctacactttaactccatccccctggcattttgacattttgtt

SEQ ID NO: 400001 - DNA, 201 bp, Homo sapiens
attaattttgttgtaatttttatttaatcacaacaggaaatgctctgtgtattgtcaatagtcatagattgttggttatacagaatggttatttatagttyaaaaaaattagcgagagcattggtagtgaacgtaccatttaatttgacctgtgtagagttcagcacatttttatagaaggttttggaaagatgtattatt

SEQ ID NO: 400002 - DNA, 201 bp, Homo sapiens
tggggcactagagaacaaagataaagcaataatatagattaattttgttgtaatttttatttaatcacaacaggaaatgctctgtgtattgtcaatagtcatagattgttggttatacagaatggttatttatagtttaaaaaaattagcgagagcattggtagtgaacgtaccatttaatttgacctgtgtagagttcag

SEQ ID NO: 400003 - DNA, 201 bp, Homo sapiens
aagttgtgaatttgtgtaactaaaaaaagcctacgtgttcatggaaaagccactggattacaaattaaatttgtggtttgcgtagttgatccagtcacacmctatgtatcccttactaagtctaagcctacactgtagttgcttttcctcccttcagcatttgcattcaacggatttattcccagcaaagcatgccactta

SEQ ID NO: 400004 - DNA, 201 bp, Homo sapiens
tagtaatgtggctggagagtagagtgtagattcatgatatttgtaagagaacaaatcgagagataggggatatagaaagttgagaaagagaaaggtgtaartagaaccctgaagttgtgaatttgtgtaactaaaaaaagcctacgtgttcatggaaaagccactggattacaaattaaatttgtggtttgcgtagttgat

SEQ ID NO: 400005 - DNA, 201 bp, Homo sapiens
aatgattttcactatagctatgttagttatgctaagctactgtccaatctcttgtgatgtgtaacttttacatgtgagtattcaagtagatttctctgtcaaaaaaaaaaaaaagaaaagaaataggccaggatgccatgggaaagcacctgactcaggctggaatgagcctcaggccactgtttacagctggtgtttagt

SEQ ID NO: 400006 - DNA, 201 bp, Homo sapiens
tgtggcgattcctcaaggatctctttcttttctactttttctttccaaaggaaagcaaaacctgattgacaaggttgagtaaaactatgagctgattagaygttgaacactactgccttcatggaaatgttactattttggccagaaaaagaattcagaaaagaaatagcgtttaaaagttgaacattcatttcaaggaat

SEQ ID NO: 400007 - DNA, 201 bp, Homo sapiens
gctttttaaaagttagatagacagaaaactcagaaacattcatgattcttaaggattagggaaggtgttatacgcttcattaagtcaaaagtagttgacamatgtttaatattgcactatcagattaatttcaaatatattatatcaaaagacataaaatgtacggaatttttataatcctgtttcctcttcctaatagga

SEQ ID NO: 400008 - DNA, 201 bp, Homo sapiens; identical to SEQ ID NO: 88636

SEQ ID NO: 400009 - DNA, 201 bp, Homo sapiens
ttctatccatcctattgttcaagtccatgcttacgcatcatgtttgattcctattgtcattttgtgcaaacgcttattcttctttcactccatcagtaagmcttgaggctctatatccaaaatacatttaaattctagccattacaaccatcctggcccaagccattatcatccgccatccttattcctgcaacaagctcc

SEQ ID NO: 400010 - DNA, 201 bp, Homo sapiens
atagcgtttaaaagttgaacattcatttcaaggaatcctaatttgtgtgtgtgtgtgcactaatagcttcataatcattaatcatatattattttggtcaytggcatatattccaagtaaaaatagcttttgaatctaatcaattatattctctatgaagcagtggtaaacatattgttttataaaaacataagacattaa

SEQ ID NO: 400011 - DNA, 201 bp, Homo sapiens; identical to SEQ ID NO: 88637

SEQ ID NO: 400012 - DNA, 201 bp, Homo sapiens
gctttttacttcgtagatctaaagattattttatctttggctcctgctacctttataaaggtttcccagtgccttataatgtgagccacactaaaatattytctgtgcatgagtttgatttcagaacaaagtggagaatcactcctttagaagttatgggaaatttttaaagagttttttttttaacacaattatgtcatg

SEQ ID NO: 400013 - DNA, 201 bp, Homo sapiens
gccaccgttttcccatagcaacaactaacacccagaaaaagaaacatagtttcttttgaagtttctatgtggaggtccatgaagtgattcactcagagatwaaagctcagagtacccgtgcttggcagaaataggctgctttctctcccttttcagcctaggtaacaccctctgcctgcgcctcctagcaacagtcccaac

SEQ ID NO: 400014 - DNA, 201 bp, Homo sapiens
ttccacctcaccacttactcttcactcagcttcatgggatggaaaaaacattattcattgaggggactgggaatagcagagtttgcaaccagctggacackcaggaaatcttaccctatgggtctcagtttcttcctcttggactaaaactagattgctagtcttttaacactaaaattctactgcttctttttcacactt

SEQ ID NO: 400015 - DNA, 201 bp, Homo sapiens; identical to SEQ ID NO: 88603

SEQ ID NO: 400016 - DNA, 201 bp, Homo sapiens; identical to SEQ ID NO: 88602

SEQ ID NO: 400017 - DNA, 201 bp, Homo sapiens
tttttgcaaatattaatgagctataccatgaaaaagacataattactgttaacctttattgttattattttatcaatgtgaaaataaactaagctctattygctctactcttgttttgataccaaactaggcttgttctgcccagcatgcagtaagtcagttactgagataacaagtgtattaatccgttttcatgttgct

SEQ ID NO: 400018 - DNA, 201 bp, Homo sapiens; identical to SEQ ID NO: 88641

SEQ ID NO: 400019 - DNA, 201 bp, Homo sapiens
tgcttgttatagtagtcggtccatcatgaccagtaaaacataaatcaaaagttaatgtaattgttatcccattatttagagcgaaataaatgttgaatatrtggactttctcagattaggaaataccaattaaaaatataataaatagctacattgatttctgtcttttttgtttgttttttgttttgttttgttttacag

SEQ ID NO: 400020 - DNA, 201 bp, Homo sapiens
acaattcaagatgagatttgggtggggacacaaccaaaccatatcaacaagttttgcagtaaagagaagattttattcacaggacagcccagcaaggagayggaagaacagctttcaaatccacctctccaaagatagggcttagagatatttatggggtaaagaagcagggtggtctaaggtgtggggaaggtgattagc

SEQ ID NO: 400021 - DNA, 201 bp, Homo sapiens; identical to SEQ ID NO: 88606

SEQ ID NO: 400022 - DNA, 201 bp, Homo sapiens
ggagccaacggggcagatagaaggagggtgtggagctcggaattggccagtgtttcaatcccttttattcaaaattgccctttggtgggccatttcattagtgagattttatcaaaagaaacgtgtatgcgtcatacaattgtctataacgctaaagaattaaaataacttgaatatccaaatataagcacactgcctaca

SEQ ID NO: 400023 - DNA, 201 bp, Homo sapiens
ccctcccttcctacctcctcctttccataaaccatatcccagtaccttatactgtctaacacattaaaggctctcccctggcccctagaaaaaaaaatgasagttgagaacctttacttagacatccaaaaaatatagtgaacttccctcaattcttatcagtggtagcttaccatgtctagtaaacttgcctaatgaaaa

SEQ ID NO: 400024 - DNA, 201 bp, Homo sapiens
gacatccaaaaaatatagtgaacttccctcaattcttatcagtggtagcttaccatgtctagtaaacttgcctaatgaaaagtcaccctgagaagttattmttgctctgatgtagtgatcatctgatattgggttaaaccagttgatttcctttctttgaagacatgttcagtcaaagagatcaacaaaccagtaaaaaaa

SEQ ID NO: 400025 - DNA, 201 bp, Homo sapiens
aaatactgcttttgataactgttttcagtgtttacaggtatgacgaaagtgatcagagcaaaaaggcaccatttcagtgacagctaaagctactcaagacmccattttttgactgaagccaagagccttggtaagagggctattaagcattccagtctcagctgactcctgctgttgcaatgtatgtccactattctagca

SEQ ID NO: 400026 - DNA, 201 bp, Homo sapiens
gacaccattttttgactgaagccaagagccttggtaagagggctattaagcattccagtctcagctgactcctgctgttgcaatgtatgtccactattctmgcatgtattttggagatgtattttaggatatcattcaaatatttcttctgttcctttctgcaaaaaagaaaccccactgtagagagctttgtgatctact

SEQ ID NO: 400027 - DNA, 201 bp, Homo sapiens
gtatatgtagatgatttgtgactaaatttattatatatttttaaacaatccatgttagaaattcaaataatataaaagaatctgcaaatttttaatgtaaraagtgggcctccatactcaaaagtggttcattaaacattgatacatttatacctttgtctctttttactaaatagggtgtttactgggcacaaggactta

SEQ ID NO: 400028 - DNA, 201 bp, Homo sapiens
gagccaacggggcagatagaaggagggtgtggagctcggaattggccagtgtttcaatcccttttattcaaaattgccctttggtgggccatttcattagtgagattttatcaaaagaaacgtgtatgcgtcatacaattgtctataacgctaaagaattaaaataacttgaatatccaaatataagcacactgcctacaa

SEQ ID NO: 400029 - DNA, 201 bp, Homo sapiens
tatacaacctgttaccattttgaaaagaaatatcatgtattttatatacatagaaaatgttaatattggttgccattggtggtaaaattgtgaggaattayttttttcttcacatttacctgtattttctaattcattagaatttgtggtttatatcagagataaaaagacaaaatacaagccatgcaaatattattcctc

SEQ ID NO: 400030 - DNA, 201 bp, Homo sapiens
ggtggtaaaattgtgaggaattacttttttcttcacatttacctgtattttctaattcattagaatttgtggtttatatcagagataaaaagacaaaatayaagccatgcaaatattattcctctctgggaatttactgcctggtggaagtcagacaagactataaataaataattcaatgtacttgagacattaaaacac

SEQ ID NO: 400031 - DNA, 201 bp, Homo sapiens
aattgtgaggaattacttttttcttcacatttacctgtattttctaattcattagaatttgtggtttatatcagagataaaaagacaaaatacaagccatrcaaatattattcctctctgggaatttactgcctggtggaagtcagacaagactataaataaataattcaatgtacttgagacattaaaacacatctatat

SEQ ID NO: 400032 - DNA, 201 bp, Homo sapiens
aacatcttatttagaagataattagtgattgggcatgatggttcatgcctataatctcagctgtttggggggccgaggcagaaggatcacatgaacccagrggtttgagaccagccttggcaacatagcaagatcctgtctctacaaaaattaaaaaaattagccaggcatagcagcacacctgtaatcacagctacttgg

SEQ ID NO: 400033 - DNA, 201 bp, Homo sapiens
cttgggaggccaaggcaggagatcacttgaacccaggagttcaaggttgcagtgaactatgatctcagccttgcatgcctgcctgggtgacagaacaagamcctgtctaaaaagaaaataaaaagaagatgactagttctagtgcagagtacagattgaatgcatacagactggggaaagagggttattagaaaacggttg

SEQ ID NO: 400034 - DNA, 201 bp, Homo sapiens
aaacttttatttttaatgtgattaacattgttgcagaccaagaaggtaattagaataatggaattttaggactggaaaaacttcagtttttcccttttctsttttcttcttggcattcttgtttttcaacaaaacttcgtgatagttaatttagtaaacctgaaagaatttagcaggatttaatacctaatttgatgtctt

SEQ ID NO: 400035 - DNA, 201 bp, Homo sapiens
gaccctgtctaaaaagaaaataaaaagaagatgactagttctagtgcagagtacagattgaatgcatacagactggggaaagagggttattagaaaacggwtgcagtagcctggtaaaagctaatgagggccccatgtaaggacagagctgtgggtagcagaagatctgctgtgagagagactgaagaggaacaatcaata

SEQ ID NO: 400036 - DNA, 201 bp, Homo sapiens
aattgctattctctaagatatgaaatatataaggaggaagaaagtttatggaatacagaatacagaagaaggagaatgagagggctgaggaatgggaatawgtcaacttttagctatgttgagagggagatgcctatagacaggttcagtagtcacagatggagttcaggacgaagatcaagactagagtaaaagtcataa

SEQ ID NO: 400037 - DNA, 201 bp, Homo sapiens
cagcacatgacctgtaaataaggaagtatgacgagacagaagaaagtggagaagcgagataatgatacattgggtaaatccataattatgtaaccaaggamtgtcctcaaagtcttgtacacacaaacaggttagactggttattcataaaaatgtttaatttgcaaaattattttgtgagcaaacatctcactatcgtga

SEQ ID NO: 400038 - DNA, 201 bp, Homo sapiens
cgagacagaagaaagtggagaagcgagataatgatacattgggtaaatccataattatgtaaccaaggaatgtcctcaaagtcttgtacacacaaacaggytagactggttattcataaaaatgtttaatttgcaaaattattttgtgagcaaacatctcactatcgtgaacgtttggtgcttcgaaacaaatacagaaac

SEQ ID NO: 400039 - DNA, 201 bp, Homo sapiens
cattcaaaggaaaaaagtagctgtcattggtggtggcttggtaagaattttcagatggattactattgttggtggtattatattaactattattactcgtratgattattattcgtcacttctgcaaattgttaattttcttgtgaaaactctgatatttaaatacagctattttgtttatttttttaatatttttatttt

SEQ ID NO: 400040 - DNA, 201 bp, Homo sapiens; identical to SEQ ID NO: 88611

SEQ ID NO: 400041 - DNA, 201 bp, Homo sapiens
tgcaagatgtgccttttgctccatttgttttaattattccaaattcaaataaaggttatgcacctgatttcagtttgggttaaacacgatggatcatgcaktaacctggacagaaacctacattagagcaaaagtctaagtggatattgtgctgtgagcaggaattctgaaaaacacccttgacgtggccagttcctccgg

SEQ ID NO: 400042 - DNA, 201 bp, Homo sapiens
aatctgaatctctttcgtgtgctttgcagttattccaaaagcaagacaaaggaagattgagcaggctcctcttacgctctagaccatcaatattctctccscagctcacttcagactctcttctttccctctttgttttctcattcccctgttatccttactccattcccccactagtaataaggcccaggagccaacggg

SEQ ID NO: 400043 - DNA, 201 bp, Homo sapiens
tcacttcagactctcttctttccctctttgttttctcattcccctgttatccttactccattcccccactagtaataaggcccaggagccaacggggcagrtagaaggagggtgtggagctcggaattggccagtgtttcaatcccttttattcaaaattgccctttggtgggccatttcattagtgagattttatcaaaa

SEQ ID NO: 400044 - DNA, 201 bp, Homo sapiens
ttgatgccaaactgtccccaaatggtgtttctgttctgttcttcttaggatttttccacctcaccacttactcttcactcagcttcatgggatggaaaaarcattattcattgaggggactgggaatagcagagtttgcaaccagctggacactcaggaaatcttaccctatgggtctcagtttcttcctcttggactaaa

SEQ ID NO: 400045 - DNA, 201 bp, Homo sapiens
gtcctgtctctattaaggctttaccctcagaaccagaatcaaaaaatagttttgtttctcccagctgtctaaccctgcccaatttcttctctcctgtgctrtcctccttcactatttatgctcaggaacccagctgtgccttaaccaagagtgtgtggtgcgcttagcatgctttacacaccacattttctttccacttat

SEQ ID NO: 400046 - DNA, 201 bp, Homo sapiens
gcctgggtgacagagcgagactctgtctcaaaaaaaaaaaaaaaagtgctcaacttctttagtaattaagcatatgcaaagtaaaactacattcctctccracttaccagctcccaccctcccactccacaataatgaaaagtttgagaacatcaagtgctggcaaagataaattttcagaagctgctggtgttacaacca

SEQ ID NO: 400047 - DNA, 201 bp, Homo sapiens
ctcagaaccagaatcaaaaaatagttttgtttctcccagctgtctaaccctgcccaatttcttctctcctgtgctgtcctccttcactatttatgctcagsaacccagctgtgccttaaccaagagtgtgtggtgcgcttagcatgctttacacaccacattttctttccacttatatatttctgtcttagtccttcctgc

SEQ ID NO: 400048 - DNA, 201 bp, Homo sapiens
tcaagatggcactggcagttattcccaattaagcactttttacagaaagtgagaggggaaagaaaattacagtctgaaagctatattgttagccacgcccwttactaccccttctggctgaaccgacgtaacacctactattgtattttttctttaaatttatttgaacctccgttacacagaattgcggtcatatttata

SEQ ID NO: 400049 - DNA, 201 bp, Homo sapiens
taccccttctggctgaaccgacgtaacacctactattgtattttttctttaaatttatttgaacctccgttacacagaattgcggtcatatttatacgagmtctatttccttacacagtattatgactggtcttggagaaaacacttttacttccttgtttgtttgtttattaataataataacaataagcggccatgaat

SEQ ID NO: 400050 - DNA, 201 bp, Homo sapiens
tgtgtaggagatcccattaggcctcatcttctctagcacttaatattttcatgagcctaagttagatttaatcttaatgtgcccacactacccgagatccyttattctcccataaaaacaattaatacatgttcagttggcaaacacgtaagcgttggaaaggtatgaattggcatctgccaaccttagaagtattgaggc

SEQ ID NO: 400051 - DNA, 201 bp, Homo sapiens
ttggggtctatcactgtctttagttctaataatatttgctttctatatctgggtgctcctgtgttggatgcatagatatttactattatattctcttaccraattgacctttttgtcattatataatgaactcatttgtttgtctttagagtttttgtcttgaaatccattttgtctcatataagtatagcaactcctgct

SEQ ID NO: 400052 - DNA, 201 bp, Homo sapiens
ccgagatcccttattctcccataaaaacaattaatacatgttcagttggcaaacacgtaagcgttggaaaggtatgaattggcatctgccaaccttagaartattgaggcagaatctccaccttggtcagccctcctcctctgagatcctggaatcaattttcatcaaagaaaaagaacgtaacaaacccatgcaaccaga

SEQ ID NO: 400053 - DNA, 201 bp, Homo sapiens
gtcattatataatgaactcatttgtttgtctttagagtttttgtcttgaaatccattttgtctcatataagtatagcaactcctgctcttttatgatttcyatttgcttggaatatctttttccatccttttattttcagtcgatgtgtgtctttataggtgatgtgaatttcttgtaggcagcatatagttgagtcttat

SEQ ID NO: 400054 - DNA, 201 bp, Homo sapiens
ttggcatctgccaaccttagaagtattgaggcagaatctccaccttggtcagccctcctcctctgagatcctggaatcaattttcatcaaagaaaaagaamgtaacaaacccatgcaaccagaccattggcccatcattggcttagagctgatcctattccaacacagtcactgagagctttgtttgcagcattatatatt

SEQ ID NO: 400055 - DNA, 201 bp, Homo sapiens
tttccctacattagattttcactgatcacttgttgtttagattgtggctttagtgtcctacttgcctttctccctacctgttttctcagtaagagagactyatttctattaggttgatgcaaaagtaattgtggttaacggtaaaaaccgtgattccttttgcaccaatctaataaatgaacctcctgtgtcttcattcca

SEQ ID NO: 400056 - DNA, 201 bp, Homo sapiens
ttagtgtcctacttgcctttctccctacctgttttctcagtaagagagactcatttctattaggttgatgcaaaagtaattgtggttaacggtaaaaaccrtgattccttttgcaccaatctaataaatgaacctcctgtgtcttcattccaactctcacgacctgttgtcttttgtgataattgacttcctaaaagaaag

SEQ ID NO: 400057 - DNA, 201 bp, Homo sapiens
aagaaagaagcagaagcttctggacaagttaaggactacgcttggaaatggctcaagggtaacttctactgcatttttttggtcaaagctaccacaggccyttctagatttaagagattgtagaaataaaccccatgtgttgatgaaggagtatcaagatcacactggagaagagcatgtaggataaaggatatcatcatg

SEQ ID NO: 400058 - DNA, 201 bp, Homo sapiens
gtgtttcaatcccttttattcaaaattgccctttggtgggccatttcattagtgagattttatcaaaagaaacgtgtatgcgtcatacaattgtctataaygctaaagaattaaaataacttgaatatccaaatataagcacactgcctacaatcaaatgtaatgcaagtattaaatgcttttacttcagacatcttttga

SEQ ID NO: 400059 - DNA, 201 bp, Homo sapiens
gtgaattagtgaatgcaattgctattctctaagatatgaaatatataaggaggaagaaagtttatggaatacagaatacagaagaaggagaatgagagggytgaggaatgggaataagtcaacttttagctatgttgagagggagatgcctatagacaggttcagtagtcacagatggagttcaggacgaagatcaagact

SEQ ID NO: 400060 - DNA, 201 bp, Homo sapiens
attcttttttgttgcattatttttattgttttttaaaaaatacttccaatcaaaacttgactgagtccatatatccagaacttgggtatatgtggctgacyatatagtattctgttcagttagaaaaaatgtacctatagctcaaaatttggaaacttggctatcagcaattcaagacttaattttttaaatatatttttt

SEQ ID NO: 400061 - DNA, 201 bp, Homo sapiens
ttgttgcttatcagttcaatgtaagattcaagggtcaacatttataaatttaaatggtttacagttttctcatgatcattggctacttgaacaattgctgytagaggggtcacatgggaactgacagaaaagctcagcaacggaagactggagaagcatacctcaacatttatagaaaggaaatattcaaataatattttt

SEQ ID NO: 400062 - DNA, 201 bp, Homo sapiens
tattctctaagatatgaaatatataaggaggaagaaagtttatggaatacagaatacagaagaaggagaatgagagggctgaggaatgggaataagtcaamttttagctatgttgagagggagatgcctatagacaggttcagtagtcacagatggagttcaggacgaagatcaagactagagtaaaagtcataaattttc

SEQ ID NO: 400063 - DNA, 201 bp, Homo sapiens
tattcttttttgttgcattatttttattgttttttaaaaaatacttccaatcaaaacttgactgagtccatatatccagaacttgggtatatgtggctgascatatagtattctgttcagttagaaaaaatgtacctatagctcaaaatttggaaacttggctatcagcaattcaagacttaattttttaaatatattttt

SEQ ID NO: 400064 - DNA, 201 bp, Homo sapiens
aaggatagactagagaactggccttaaacttacacccagtttcaagtcctgacttgccaacttattaactgtgtgatcttgagcaaatcacttcatctttytaaagcctccgttctttttcatctataaagtggggatgatactctcaacttcagagttgtgaacactgaataatttctataaagttttaaaaagaaaaaa

SEQ ID NO: 400065 - DNA, 201 bp, Homo sapiens
agagggagatgcctatagacaggttcagtagtcacagatggagttcaggacgaagatcaagactagagtaaaagtcataaattttcttaagagcactcagraatgtgcatcattcaccttctcataagagggaaaatcaagaccactgcttggctttagagatcaattccagatgacacagattagagaactcagggtaag

SEQ ID NO: 400066 - DNA, 201 bp, Homo sapiens
aggttaggcatccctatacagcacatgacctgtaaataaggaagtatgacgagacagaagaaagtggagaagcgagataatgatacattgggtaaatccayaattatgtaaccaaggaatgtcctcaaagtcttgtacacacaaacaggttagactggttattcataaaaatgtttaatttgcaaaattattttgtgagca

SEQ ID NO: 400067 - DNA, 201 bp, Homo sapiens
gtattcttttttgttgcattatttttattgttttttaaaaaatacttccaatcaaaacttgactgagtccatatatccagaacttgggtatatgtggctgrccatatagtattctgttcagttagaaaaaatgtacctatagctcaaaatttggaaacttggctatcagcaattcaagacttaattttttaaatatatttt

SEQ ID NO: 400068 - DNA, 201 bp, Homo sapiens
gacgtcaaactatagtttcatgaccaaatatggatttcaacactattaacaagctttttaaaagttagatagacagaaaactcagaaacattcatgattcytaaggattagggaaggtgttatacgcttcattaagtcaaaagtagttgacaaatgtttaatattgcactatcagattaatttcaaatatattatatcaaa

SEQ ID NO: 400069 - DNA, 201 bp, Homo sapiens
caataagcggccatgaatctactactcaacacaagaagtgacagagtgccagtgacttcatcaactctgtactcgtcccccacccattagaagcattatgycaagtcttatttgtcactcccttgcctctttatatatagttttatcctatattatttacatatttatctcatgtatacacgtacatatgaatactactta

SEQ ID NO: 400070 - DNA, 201 bp, Homo sapiens
ttcaaaaactatgtatttgcatatgtctatagtttagttctgattgttttcattttgtatcatgcagtataaaattatctgagtcttattttttcacttayagtcttgctaatatattcatatcatatctcactgtgtgaatatgccataatgtgttcgttcattccactctgatagtcattcgggctattccccgctttt

SEQ ID NO: 400071 - DNA, 201 bp, Homo sapiens
tataaaattatctgagtcttattttttcacttatagtcttgctaatatattcatatcatatctcactgtgtgaatatgccataatgtgttcgttcattccwctctgatagtcattcgggctattccccgcttttttgtttgtctattttagttatgaaaggcactacactgaacaacctggcacatgtcacccaatataca

SEQ ID NO: 400072 - DNA, 201 bp, Homo sapiens
cctcctgtgtcttcattccaactctcacgacctgttgtcttttgtgataattgacttcctaaaagaaagaagcagaagcttctggacaagttaaggactaygcttggaaatggctcaagggtaacttctactgcatttttttggtcaaagctaccacaggcccttctagatttaagagattgtagaaataaaccccatgtg

SEQ ID NO: 400073 - DNA, 201 bp, Homo sapiens
aaacaactcaagtgtcctttgacagtagggcagataatctgtgatctttcatttaatgaagaatcatatagaaacaaaaaaaaagatgaccttaagtttayatgtaaccatataaatgaatcccacaatgttgccttagagaagcaagatgcaaaaacaaacaaaacacacacacacacacacacacacacacacacacac

SEQ ID NO: 400074 - DNA, 201 bp, Homo sapiens
aagacacaagtcatattggactaaggcccaccctaatgatatcatcttaacttgattacctatattaagatcctatctccaaataatgtcacattcttacrgtactgggggttaggacttgaacatatgaagttggaaggatgcaatttaccccaaagataaagttcaaagcactgtgagaactcataattgcaggatttg

SEQ ID NO: 400075 - DNA, 201 bp, Homo sapiens
ctgggggttaggacttgaacatatgaagttggaaggatgcaatttaccccaaagataaagttcaaagcactgtgagaactcataattgcaggatttgaggwagggtggcccaggaaatctttttttagagagtgaagctgagtggagacctggaggatgaaaggaagtttactatgtaaagaagaaagataacacttctgg

SEQ ID NO: 400076 - DNA, 201 bp, Homo sapiens
tcaaagcactgtgagaactcataattgcaggatttgaggtagggtggcccaggaaatctttttttagagagtgaagctgagtggagacctggaggatgaawggaagtttactatgtaaagaagaaagataacacttctggccatggatataatacacgctaaacccctcagcaaggggcagcatggcaaatacaatggcta

SEQ ID NO: 400077 - DNA, 201 bp, Homo sapiens
gcatggcaaatacaatggctaaaagaaggatagcaaggctggggcagaagggtgacatgatcagatttgtatattttaaaatgtggggaaaatctgaggcytatggtgatgtcattttttttccagagaggatttatgtttgtttctgttgggtggctgtgattaccagcaatcaaaaattaatgcaatctgatcaggact

SEQ ID NO: 400078 - DNA, 201 bp, Homo sapiens
atttgtaattgcattaaaaataaaatgactattgtaattgcattaataataaaataaaagattggtgaatatggttacattaaaataaacagcttctcatmctcaaaatagactatagcatttaagaagcaagacacagaatggaagatatttttaatgtttaaaaatgacaaagactctatattcagactctatgaacaa

SEQ ID NO: 400079 - DNA, 201 bp, Homo sapiens
agatgcaaaaacaaacaaaacacacacacacacacacacacacacacacacacacacagtgtgattctaactatagggttttaaaaaatgggtaaatggckgggcacagtggctcatgcctataattctagcactttgagaggccaaggtgggagaatcacttgagcccaggagtttgagaccagactgggcaacatagtg

SEQ ID NO: 400080 - DNA, 201 bp, Homo sapiens
taaagtatattgcttagaaatatgtatacctaaaggctaaaatgtaaaaaagcaagaatgggttatcacaaaagtcagaataatgtttacgtctatgtgaraggaagaggactgtaactggggaggaggtggggggagttttggaggaatgacgctattctactttttgaccaaagtagtggttataagggatataaggct

SEQ ID NO: 400081 - DNA, 201 bp, Homo sapiens
taagggatataaggctataaagaattgctttctaattattctgtaagatatatatgttttatgttctttctgtttgaaaattacctcactataaaaaagtaaaaaaaaaaaaaactacttctaaaatcatattacttaatcttgaataaatattgctatttttgccactgatacttttcagcagaaattgagtaaatcaat

SEQ ID NO: 400082 - DNA, 201 bp, Homo sapiens
gtaaaacatagcctcacatgatgtttcattttgctgctaaaaattccctatatttgtggaatcagataaatatttaatttttttttaatttctaggttggrtcattacaagcatgctttcttgcaaagaggaatttccagattgatgtatatgaagctagggaaggtacgtccatggtgaaaaaagcaggatgaacgctgg

SEQ ID NO: 400083 - DNA, 201 bp, Homo sapiens
gagggtgagaattccagagaagaaaaagacaaggaagaagaaaacaaataagacaatttcagttaaagagaagcactatgaaagaaacgaaaacagggtartgctgtagagagtatctttgggagtacctgtttagaatgtggtcagggacagctgctctgctgaagggacatgtgaccagagacctgaatgatcagatag

SEQ ID NO: 400084 - DNA, 201 bp, Homo sapiens
taacgagcttccgggtgtttacttctttcactgagttgagagtgaaatcaacgtaatcgtctcactgttcacttgtattaacaaggaatgtcctgaggaaggccaagtcatcatagccgcccccgcttcagagactgaaccagtaatgtatccatagataagatacggttcaaatatcagaaaagctaaatgaggagaggg

SEQ ID NO: 400085 - DNA, 201 bp, Homo sapiens
aaaacttaaaaaatttttaatgggtaaaattaaagtatattgcttagaaatatgtatacctaaaggctaaaatgtaaaaaagcaagaatgggttatcacaraagtcagaataatgtttacgtctatgtgagaggaagaggactgtaactggggaggaggtggggggagttttggaggaatgacgctattctactttttgac

SEQ ID NO: 400086 - DNA, 201 bp, Homo sapiens
gttgtgaatttgtgtaactaaaaaaagcctacgtgttcatggaaaagccactggattacaaattaaatttgtggtttgcgtagttgatccagtcacacccyatgtatcccttactaagtctaagcctacactgtagttgcttttcctcccttcagcatttgcattcaacggatttattcccagcaaagcatgccacttaat

SEQ ID NO: 400087 - DNA, 201 bp, Homo sapiens
tacggttcaaatatcagaaaagctaaatgaggagagggacttggagatgacaccatcaccccaccaccttgtctgtgtgtgtgtgagtgtgagtgtgtgtgagagagagagagagagagagagaaagagcgtgcatacattccccaagagagtgaaagcgttggtgtgagttccctttttgcggccttcaatgcattacaa

SEQ ID NO: 400088 - DNA, 201 bp, Homo sapiens
acggttcaaatatcagaaaagctaaatgaggagagggacttggagatgacaccatcaccccaccaccttgtctgtgtgtgtgtgagtgtgagtgtgtgtgagagagagagagagagagagagaaagagcgtgcatacattccccaagagagtgaaagcgttggtgtgagttccctttttgcggccttcaatgcattacaag

SEQ ID NO: 400089 - DNA, 201 bp, Homo sapiens
taaatgaggagagggacttggagatgacaccatcaccccaccaccttgtctgtgtgtgtgtgagtgtgagtgtgtgtgagagagagagagagagagagagaaagagcgtgcatacattccccaagagagtgaaagcgttggtgtgagttccctttttgcggccttcaatgcattacaaggaggaaacggcccctcccgcat

SEQ ID NO: 400090 - DNA, 201 bp, Homo sapiens
aatcccagcactttgggtggccaaggtcggtggatcacctgaggttagaagttcgagaccaggctggccaacatggcaaaaccccatttctactaaaaatmcaaaaaaaaaaaaaaaattagctgagtgtggtggcaggcacctgtaatcccagctagttgggaagctgaggcaggagaatcacttgaacctggaaggtgg

SEQ ID NO: 400091 - DNA, 201 bp, Homo sapiens
cctggaaggtggaggttgcagtgagctgagatctcaccattgcactccaacctgggcaacagagcaagactctgtttcaaaaaaaaaaaaaagtattgtasgcccataggcgctgtgtctaccttgcctcaagggagggtcagctttgctgaattgtcctataaagtcagaaacaaccaacacatgttccatgcaaggact

SEQ ID NO: 400092 - DNA, 201 bp, Homo sapiens
tggcacatgccggtaatcccagctactcgggaggctgaggcaggagaattgcttgaacccaggaggcggaggttgcagtgagccgagatcatgccactgcmctccagcctggctgacagagcgagactcagtcccaataaaataataataataataataataataaagatttgtcttttagagagatgaaaagccatagtg

SEQ ID NO: 400093 - DNA, 201 bp, Homo sapiens
tctatttgtgacaacttcaatcagaattccagaaaactagctaaaaagagatatagagacatgcgtaatatgaggaaaggagtttgactgaatatttccartcacaacaaagcctcggattagaggcgacttctgaaatatgtgatgcttgcttctttcccagggtgctaataattacagcaatgcaagagtttgcacaat

SEQ ID NO: 400094 - DNA, 201 bp, Homo sapiens
acgtgaccctccactgctctcctcctgttctctttccaggtgctatttctctgcctttccttggatgattctatttcctctaaggttccaagcctcatatsccactcttgcgatatgctatggatccacgctcatgggttcaacaaccacatctctaagatgaacatttccagtccaagcctctttcttcattctaaatcc

SEQ ID NO: 400095 - DNA, 201 bp, Homo sapiens
ctcaactggacatgtactagctcttctgactaattgtgggcttatttctgatcctcaatgatcacaaacctgtgatgtataatgtatattatctccccagrattacatatttttctactaatagtctatgccaccgttttcccatagcaacaactaacacccagaaaaagaaacatagtttcttttgaagtttctatgtgg

SEQ ID NO: 400096 - DNA, 201 bp, Homo sapiens
aaatgaggagagggacttggagatgacaccatcaccccaccaccttgtctgtgtgtgtgtgagtgtgagtgtgtgtgagagagagagagagagagagagaragagcgtgcatacattccccaagagagtgaaagcgttggtgtgagttccctttttgcggccttcaatgcattacaaggaggaaacggcccctcccgcatc

SEQ ID NO: 400097 - DNA, 201 bp, Homo sapiens
ggttcactgatattctaacaagtgttcttttctttttctttgcttcagcccccatctcatgcatgctatataagaatacctacagataagaaaacacacayacacatagcattccttagacttgggtggattgtgactctggccagtggcaatgaccaatacacattatctctatctacactttaaggacgtttaggaggt

SEQ ID NO: 400098 - DNA, 201 bp, Homo sapiens
aacgctggtttggggcactagagaacaaagataaagcaataatatagattaattttgttgtaatttttatttaatcacaacaggaaatgctctgtgtattrtcaatagtcatagattgttggttatacagaatggttatttatagtttaaaaaaattagcgagagcattggtagtgaacgtaccatttaatttgacctgtg

SEQ ID NO: 400099 - DNA, 201 bp, Homo sapiens
aaaaattgttccagacttaagaagaactgtgcttgctaaagtagatttaagaaagccctttattttctaggtatacataataaatagtaataattgatggytttaaaaaatgtctccactcttttaagaacattgtttaggcatggcaatgtgactcagacatgggagcattttgacatggcccaaaaacaagcttatgag

SEQ ID NO: 400100 - DNA, 201 bp, Homo sapiens
tagaggcgacttctgaaatatgtgatgcttgcttctttcccagggtgctaataattacagcaatgcaagagtttgcacaatggaatcagttggatgttttytttttgagatgaggataattgatttttattcatctgttttactaccaaattatactgaaatagttaccaaacagttgtcaaattaccatttaagtgaact

SEQ ID NO: 400101 - DNA, 201 bp, Homo sapiens
cttacaggtgataaacaaaggactctttttcttgggatcactgatagccatcagcagtacctacctacttatacactacatgtcaccacgatctttcctcygcttgagaagaccatggaactggatagctcacttccggaatacaacatgtttccccgcaaaggccgtggactccctagaacaaatttccaatctcattag

SEQ ID NO: 400102 - DNA, 201 bp, Homo sapiens
gagttgggggcaagagattgggtaaatggctttctaccactagtattactgttaaagcgaagtaattgcttttcatatgtattcctcttgcctattggackgcactgtaaggtcaagagttatgcacgtactcatttctgtgtctgtgtgttgggctttctttgggagtctgaggctaaaaaaacaaggaagacacagtcc

SEQ ID NO: 400103 - DNA, 201 bp, Homo sapiens; identical to SEQ ID NO: 88608

SEQ ID NO: 400104 - DNA, 201 bp, Homo sapiens
tagagcaaaagtctaagtggatattgtgctgtgagcaggaattctgaaaaacacccttgacgtggccagttcctccgggaaagatgagccaccaatgtccygaggcttttgtgcatcttatgcaggctcctcaggctccttggggcttggcgtgccacaggaactggctgaacttttttctactggtagatacacaaatct

SEQ ID NO: 400105 - DNA, 201 bp, Homo sapiens
acttttttctactggtagatacacaaatctttggcacagcagatacatccggcagcctcagatcttggatcctacacttactagacacgtaagctttcccrtattccactcgtgggaaaaggttgataaataatagaacctatcccaaagggttgtcatgaggactaaatgagatcgtgtctataaatcattcagcacaag

SEQ ID NO: 400106 - DNA, 201 bp, Homo sapiens
  misc_feature (1)...(201): n = A,T,C or G
attccaaattcaaataaaggttatgcacctgatttcagtttgggttaaacacgatggatcatgcagtaacctggacagaaacctacattagagcaaaagtntaagtggatattgtgctgtgagcaggaattctgaaaaacacccttgacgtggccagttcctccgggaaagatgagccaccaatgtcccgaggcttttgtg

SEQ ID NO: 400107 - DNA, 201 bp, Homo sapiens; identical to SEQ ID NO: 88609

SEQ ID NO: 400108 - DNA, 201 bp, Homo sapiens
tatttgttgaaccatccttgctaccctgggatgaatcctgcttaatcataatgactgatttttaatgtgttattgaatttggtttgcttgcattttgttgrtaatctttgcatctatgtttatcagagatattggcatgcagtttcctttttttgttacgtctttgtctagttttggtattatggtaaggctggcctctta

SEQ ID NO: 400109 - DNA, 201 bp, Homo sapiens
gttagtcccttctatgcctagtttgttgaaggttttcatcataaagtgattctggattttatagaatgctttttctgcaactgtagagatgatcatatggtttttttttttaattctgtttatgtgatgtatcacatttattgacttacatatgttaaaccattcctgtatccctaggatgaaatccacttgaacatagtg

SEQ ID NO: 400110 - DNA, 201 bp, Homo sapiens
agaattatttccttcatgttgactttagatagcttgataaccatacaccttggtgatgttctttttgtaatgaatctcccaggacttctttgagcttcttrtatttgcatatctcaatctgtagcagggtcagaaaagtattccctcaaattagtttccaaactttttactttcttttctccctcaggaacatcaattatt

SEQ ID NO: 400111 - DNA, 201 bp, Homo sapiens
ctaattatttttaaatttatttttgattcaactgtgtttttctttaatttcctttttaccctgttaaggatgtgattttaatgtttatagtttattgtagsctaattcggctcttggtgctttcagagttgaagactctgtgggttccttggttatggagagtctttgtttgatgactggctttctcagatgctggttgta

SEQ ID NO: 400112 - DNA, 201 bp, Homo sapiens
tatataatgaactcatttgtttgtctttagagtttttgtcttgaaatccattttgtctcatataagtatagcaactcctgctcttttatgatttccatttkcttggaatatctttttccatccttttattttcagtcgatgtgtgtctttataggtgatgtgaatttcttgtaggcagcatatagttgagtcttatctttt

SEQ ID NO: 400113 - DNA, 201 bp, Homo sapiens; identical to SEQ ID NO: 88594

SEQ ID NO: 400114 - DNA, 201 bp, Homo sapiens
gatttccatttgcttggaatatctttttccatccttttattttcagtcgatgtgtgtctttataggtgatgtgaatttcttgtaggcagcatatagttgastcttatctttttatacatccaactgctctatgtatttttattagggaatttattccatttagtttcagtattactaatgataggtatggacttactgctg

SEQ ID NO: 400115 - DNA, 201 bp, Homo sapiens
ttgtcactcactcccctctcgttcaccattctgagtcaccaaagcccattatattactctgcgtttctgtactcataatttagctcccacttataagtgaraacatacagtatttgattttctattcttgagtcatttcacttaaaatattgggctccagctccatccaagttgctgcaaaaatattatttcatacttttt

SEQ ID NO: 400116 - DNA, 201 bp, Homo sapiens
tcccttttctgtgtctagctaaaggtttgttgattttgtttattttttaaaaaaccaactttttgtttcattgatcttttgtattatattttagcctcaasttcatttttgctctgatctttattattttttaaagaaactttaaaaaattcctattgagattattttctttttaaattaatgtatatattttatttcaat

SEQ ID NO: 400117 - DNA, 201 bp, Homo sapiens
ctgtccaaagatatggagtagactagaaagggacattctggtgttcctgcagggatgacaagtctatcagttcccagatgactgatgtggaaagaaaataktttccccatgtaaattaatcttcataatttgggccaagcacagtggctgacacctgtaatcccagaactttgggaggccaaggtaggtggattgcttgag

SEQ ID NO: 400118 - DNA, 201 bp, Homo sapiens
tccttccttccttccttccttccttccttccttccttcctcccttctttctttctagacagagtctcactcactctgtcatccaggctgaagtgcagtaaygtgatctcggctcactgcaacttaggcctctcgggttcaagcagtcctgcctcagcttcctgtgactacaggcacgcgccaccagacccggcttgttttt

SEQ ID NO: 400119 - DNA, 201 bp, Homo sapiens
cttctgaaatgatattgccccagtcaatctgaatctctttcgtgtgctttgcagttattccaaaagcaagacaaaggaagattgagcaggctcctcttacrctctagaccatcaatattctctccgcagctcacttcagactctcttctttccctctttgttttctcattcccctgttatccttactccattcccccacta

SEQ ID NO: 400120 - DNA, 201 bp, Homo sapiens
agtgtcactcagtgacagaagcaacaataattgtgaaaaatacttcagcagttatggactcatctgtcattcaaaggaaaaaagtagctgtcattggtggyggcttggtaagaattttcagatggattactattgttggtggtattatattaactattattactcgtaatgattattattcgtcacttctgcaaattgtta

SEQ ID NO: 400121 - DNA, 201 bp, Homo sapiens
ctctcattcctgcacatgtaatataatgtgttgccatcacctcatccctgttttctgctccctttggcattcggccttctcttcaaactgccaaggaagtyttcttaaattgcaactcttcatacatcattcccctaatagataatttcagtttcccttttgccagaataatgttttaaaatcttttatcttgacattcaa

SEQ ID NO: 400122 - DNA, 201 bp, Homo sapiens
acatcattcccctaatagataatttcagtttcccttttgccagaataatgttttaaaatcttttatcttgacattcaagattctcttcttttccccttcckttctctccctaccttgtattcttttcttaagcttttcttctaatacctgtgctcaagacaaatgtattgttcttagaaaatcctgtggttgttcatacat

SEQ ID NO: 400123 - DNA, 201 bp, Homo sapiens
tacaaaacatgaggagttgagtttgggggaagaagctactgatacctgtgttaaaaaacctagtttctttccagtcattggggggcagcagaggtccaggwgggtttagatgctgggttgggggttgctttacattctggccagaagtgggcaatgtcgagttaggaacaaaagggcatagaaccctaaagtggccctaga

SEQ ID NO: 400124 - DNA, 201 bp, Homo sapiens
tatagtaatctagaaaattacctcgggaaggggaacttgatgttattctgtgggctttgctgccacctagtggatggtatgtttcatgtgttgagcggctrctacaaaacatgaggagttgagtttgggggaagaagctactgatacctgtgttaaaaaacctagtttctttccagtcattggggggcagcagaggtccag

SEQ ID NO: 400125 - DNA, 201 bp, Homo sapiens
taaagtatagtaatctagaaaattacctcgggaaggggaacttgatgttattctgtgggctttgctgccacctagtggatggtatgtttcatgtgttgagmggctactacaaaacatgaggagttgagtttgggggaagaagctactgatacctgtgttaaaaaacctagtttctttccagtcattggggggcagcagagg

SEQ ID NO: 400126 - DNA, 201 bp, Homo sapiens
aaaaaattcagtgtttgatcctagctggaacaagggggctacagggttgggcagaacattttaaactctgactggcagcactgtttacaaacatgaaattrtgttggcttttcgaattcagttaaagtatagtaatctagaaaattacctcgggaaggggaacttgatgttattctgtgggctttgctgccacctagtgga

SEQ ID NO: 400127 - DNA, 201 bp, Homo sapiens
tgccttgttagcattgttttgtttttataatggagaccattctctcacaagtcttaaaaaattcagtgtttgatcctagctggaacaagggggctacaggsttgggcagaacattttaaactctgactggcagcactgtttacaaacatgaaattatgttggcttttcgaattcagttaaagtatagtaatctagaaaatt

SEQ ID NO: 400128 - DNA, 201 bp, Homo sapiens
ttcctgtcaccacttggaaagctgtcatttttatactaaccagcagaaatctagtataagagttagagcatctatgtgcaaagtggatgcaataatgtggmagtgactatacttccttttctgacatgaattagtcatttacttataatatgttacctaaatcctttcctttgatactgcctcaaaaacagttctgttagt

SEQ ID NO: 400129 - DNA, 201 bp, Homo sapiens
actgtcctgctctcagtttttaaaaatatacatttatttgctccttttatgtgcttctaactcagctatatgtgcactgtgccacagcactttaaaaatarttccaagtaaattctcaatatttataccagctcagaaggtagaacaaaacagattgaatgtctttatattttccaactaagttgagagtttgatattaaa

SEQ ID NO: 400130 - DNA, 201 bp, Homo sapiens
gccattgcgcagacgcattaacttttctgagttgtagttgagtctgttgatgcagtccgcgtctgcgcattagttgttacgcgccctggccggcctcagckcctgcgcaaattggcacaccggggagggcggagttaggtcacgagggtgcgcatgcgcaaacagcacatccggtgtggtcgacgggtcctccaagagttt

SEQ ID NO: 400131 - DNA, 201 bp, Homo sapiens
cttcctgtcaccacttggaaagctgtcatttttatactaaccagcagaaatctagtataagagttagagcatctatgtgcaaagtggatgcaataatgtgraagtgactatacttccttttctgacatgaattagtcatttacttataatatgttacctaaatcctttcctttgatactgcctcaaaaacagttctgttag

SEQ ID NO: 400132 - DNA, 201 bp, Homo sapiens
ccaagatcaaacctgctcatccagccatctgcctcttcaccagttagtacgtggtgtcaatgttggttgtggttttttttttttttttttttgagacatartctcactctgtcacccaggctggagtgcagtggcacaatctcggctcactgcaacctccatctcccgggtttaagcaattctcctgcctcagcctcctga

SEQ ID NO: 400133 - DNA, 201 bp, Homo sapiens
gctctttgggtcctaagtaattcttctgcttctttttattttttatatttttgagacggagtctcgctctgttgcccaggctggagtgcagtggcgcgatytcggctcactgcaagctccgcctcccgggttcacgccattctcctgcctcagcctcccgagtagctgggactacaggcacccgccacaatgaccggctaa

SEQ ID NO: 400134 - DNA, 201 bp, Homo sapiens
tatgcaggagaaaagcccagagttcactgtgtgtcagaacaactttctaacaaacatttattaatccagcctctgcctttcattaaatgtaaccttttgcyttccaaattaaagaactccatgccactcctccatatgcctctggctctgtttttattctttgctggtatcagaatcctttttttctcttcagtcctctgt

SEQ ID NO: 400135 - DNA, 201 bp, Homo sapiens
gctggagtgcagtggcgcgatttcggctcactgcaagctccgcctcccgggttcacgccattctcctgcctcagcctcccgagtagctgggactacaggcrcccgccacaatgaccggctaattttttttttttttttgtattttttagtggagatgggtctcaccatgttagccaggatggtctcgatctcctgaccttg

SEQ ID NO: 400136 - DNA, 201 bp, Homo sapiens
ggccctgtctctagtatcataagacatttaaccttgctgcttttttcttctaggttcactctttgaatttcctggataagagttctggagatggcagcttrttggacacatggattttcttcagatttgcacttactgctagctctgctttttatgcaggagaaaagcccagagttcactgtgtgtcagaacaactttcta

SEQ ID NO: 400137 - DNA, 201 bp, Homo sapiens
gtactaaactaggatttcttttatatttctaaaagtgtcaaggctttgttcactgaaaatggcattatgatctagtcctctctcaccttggccattagaamtgtaatgtagccaggcatggtggcctgtgatcccagcactttgggaggctggggcgggtggatcacctgaggtcaggagttcgagaccagcctgaccaac

SEQ ID NO: 400138 - DNA, 201 bp, Homo sapiens
gtgttgaactcctgtcctcgtgatccactcgccttggcctcccaaagtgctgggattacaggcgtgagccactgcacctggcctgtgaaactctttttttwaaaaaaaaaaaaaaatctcagtccatctcaggtgttctgaagggtaatgaggaaaagaaggacagaactgtattggatcacagtttgagaattaaagttc

SEQ ID NO: 400139 - DNA, 201 bp, Homo sapiens
aaagaatttgtgggccagggaagtcagtgacttatgtgaagtcttgcggctaattaatggtagagctggagttaggacacatgtctcacagttcctagttsgttttgctttgatgtgcttgaaattcagttttgacattaatttttctggatactactcccataaaatgttctttgaaaaatacttgcttctttctagttt

SEQ ID NO: 400140 - DNA, 201 bp, Homo sapiens
ggtgttgaactcctgtcctcgtgatccactcgccttggcctcccaaagtgctgggattacaggcgtgagccactgcacctggcctgtgaaactcttttttwtaaaaaaaaaaaaaaatctcagtccatctcaggtgttctgaagggtaatgaggaaaagaaggacagaactgtattggatcacagtttgagaattaaagtt

SEQ ID NO: 400141 - DNA, 201 bp, Homo sapiens
cactagccacatgtggttattgaacatttgaaatgtggctaacagactgaagaactgaatttttaatttaactttgactaagtttaaatagtcacctgtgwctagtggctgtggtgttggacagcacagctctggacagatttgtcaacactatcaggttacagttttctcatctctgtaatgaaaggattaaagaagctg

SEQ ID NO: 400142 - DNA, 201 bp, Homo sapiens
tggagtttcgctcttgttgcccatgctagagtgcaatggcacgatcttggctcacctccacctccacctccaccaattctcctgcctcattgcctcagccygccaagcaactgggatcacaggcatgcgccaccatgcccggctaattttgtatttttagtagacaaggggtttctccatgttggtcaggctggtcttgaa

SEQ ID NO: 400143 - DNA, 201 bp, Homo sapiens
tgactttggctagggagggtgatcctggaccagcactgtccaacagagctttttgcagtggggaaacattcagggtctgcaccgcccattatggtaaccastagccacatgtggttattgaacatttgaaatgtggctaacagactgaagaactgaatttttaatttaactttgactaagtttaaatagtcacctgtgtct

SEQ ID NO: 400144 - DNA, 201 bp, Homo sapiens
aatttatcacaggcataaagatacttcggaagagtgtattcctggaactgcctgtttttttttttttgtcaatggtgactgttagaatcttcaaggggatrgagtgtggcagtggagagttctcatgaattatctctcttaggtcttctgccttttttgagacaaataagcagctgctagaacttcgagatcaaagatagt

SEQ ID NO: 400145 - DNA, 201 bp, Homo sapiens
tttcttaagcaatgtaataatttatcacaggcataaagatacttcggaagagtgtattcctggaactgcctgtttttttttttttgtcaatggtgactgtwagaatcttcaaggggatggagtgtggcagtggagagttctcatgaattatctctcttaggtcttctgccttttttgagacaaataagcagctgctagaac

SEQ ID NO: 400146 - DNA, 201 bp, Homo sapiens
ccggggagggcggagttaggtcacgagggtgcgcatgcgcaaacagcacatccggtgtggtcgacgggtcctccaagagtttggggcgcggactggagtaycttgcgtgcagttatgtcggcgtcggtagtgtctgtcatttcgcggttcttagaagagtacttgagctccactccgcagcgtctgaagttgctggacgcg

SEQ ID NO: 400147 - DNA, 201 bp, Homo sapiens
ttgtctcagctactcagggggctgaggtgggaggattgtttgagcccaggaggtcgaggctgcagggagccatgattgcaccactgcactccagcctgggygatggagtgagaccctgtctcaaaaaaaaaaaaaaaaaaaggattggctttttttcacttaataagtcttagatatgtttgctgtcaatgtacagagaat

SEQ ID NO: 400148 - DNA, 201 bp, Homo sapiens
gcctcccaaagtgctgggattataggcgtgagccactgtgcctggcctaatctgttttaaaacttatatacagatgtcacagaccctatcaggaggcttcyggataatttttagtctagagaaattggaattttgaataagaaaagcatctggactttgagacacgggttgaaaactgggaataatagtaattttatgaag

SEQ ID NO: 400149 - DNA, 201 bp, Homo sapiens
ccctacccttaggcaagcagaggcgggaggattgctgggcaacatagggagaccttgtctttaccaaaaacaaacaaaaaaattagctaggcatggtggtkcatgactgttgtctcagctactcagggggctgaggtgggaggattgtttgagcccaggaggtcgaggctgcagggagccatgattgcaccactgcactcc

SEQ ID NO: 400150 - DNA, 201 bp, Homo sapiens
tccctacccttaggcaagcagaggcgggaggattgctgggcaacatagggagaccttgtctttaccaaaaacaaacaaaaaaattagctaggcatggtggtgcatgactgttgtctcagctactcagggggctgaggtgggaggattgtttgagcccaggaggtcgaggctgcagggagccatgattgcaccactgcactc

SEQ ID NO: 400151 - DNA, 201 bp, Homo sapiens
tacagcagtggttctcaaagtttggcatgtctcaagattacctaggaacttggtgaaaagcttgggcctgtatgtttcttattagctctctgcctaactgrtaacacactgagtcaggagtccgcaagcttttccttaaacaaatgggcatggctatattccactatcactttatttataaaaattggttgtggctatgtg

SEQ ID NO: 400152 - DNA, 201 bp, Homo sapiens
ataattatgtatatcattatatgtaaataaaatattttactttttttttgagacggtcttgatttgtctcccaggccagagtgcggtggcatgactgtggytcactgcagcctgcaacctctacctcctgggctcaagcaatcttcccatctcagcctcccgagtagctggggccataggtgtgtgctaccacacctggct

SEQ ID NO: 400153 - DNA, 201 bp, Homo sapiens
atagaaaaatctttctctctgggggattgcccagattgtttttcatagagatccttcatttgaattatactatactgtcctgctctcagtttttaaaaatatacatttatttgctccttttatgtgcttctaactcagctatatgtgcactgtgccacagcactttaaaaatagttccaagtaaattctcaatatttatac

SEQ ID NO: 400154 - DNA, 201 bp, Homo sapiens
gtgtactgcagaccatattaacaacctaggaccacctgctcagctgggaattatgggcccaaagcatagcaaaatcctcaatcccagattgcagtgttaartctttctatggagagtatgttcatagaaaaatctttctctctgggggattgcccagattgtttttcatagagatccttcatttgaattatactatactgt

SEQ ID NO: 400155 - DNA, 201 bp, Homo sapiens
ttggaggaggactctactgcagagagcttagtatttcaaaattatgacaaaagcaaagacaaaaaagcagtctcagcagaaactgtgtactgcagaccatrttaacaacctaggaccacctgctcagctgggaattatgggcccaaagcatagcaaaatcctcaatcccagattgcagtgttaaatctttctatggagagt

SEQ ID NO: 400156 - DNA, 201 bp, Homo sapiens
tggaaaattatttcttagggctgtcatgattggaggaggactctactgcagagagcttagtatttcaaaattatgacaaaagcaaagacaaaaaagcagtytcagcagaaactgtgtactgcagaccatattaacaacctaggaccacctgctcagctgggaattatgggcccaaagcatagcaaaatcctcaatcccaga

SEQ ID NO: 400157 - DNA, 201 bp, Homo sapiens
ttaggaaggggacacagcaaacatttcaaggatgttttctaggctcagggagataccaaatcatggaaaattatttcttagggctgtcatgattggaggasgactctactgcagagagcttagtatttcaaaattatgacaaaagcaaagacaaaaaagcagtctcagcagaaactgtgtactgcagaccatattaacaac

SEQ ID NO: 400158 - DNA, 201 bp, Homo sapiens
tgttgttgcctcaagtgcatccccatctaggtataattagaaacctttaaatcagcagataagagagctttgtgggttttttggttatatatttttttctytgagaaagcctctaggtttcagtgtaactctgagaagtaatattttttttcctttaacagagtgcgaaatttaattgtacaacttgataaatttttaaat

SEQ ID NO: 400159 - DNA, 201 bp, Homo sapiens
ggaaaggtcatgtcttctgattgcttactctagatttctgaagttctttttttctagatgagtcatggtgtgtacttaggaaggggacacagcaaacattycaaggatgttttctaggctcagggagataccaaatcatggaaaattatttcttagggctgtcatgattggaggaggactctactgcagagagcttagtat

SEQ ID NO: 400160 - DNA, 201 bp, Homo sapiens
tcggctcactgcaagctccgcctcccgggttcacgccattctcctgcctcagcctcccgagtagctgggactacaggcacccgccacaatgaccggctaattttttttttttttttgtattttttagtggagatgggtctcaccatgttagccaggatggtctcgatctcctgaccttgtgatccgcccgccttggcttcc

SEQ ID NO: 400161 - DNA, 201 bp, Homo sapiens
cggctcactgcaagctccgcctcccgggttcacgccattctcctgcctcagcctcccgagtagctgggactacaggcacccgccacaatgaccggctaattttttttttttttttgtattttttagtggagatgggtctcaccatgttagccaggatggtctcgatctcctgaccttgtgatccgcccgccttggcttccc

SEQ ID NO: 400162 - DNA, 201 bp, Homo sapiens
tggctgggcgtggtggttcatgcctataatcccagcactttcggaaggcgaggtgggcgattgcttgagctcaagaatttgagaccagcatgggcaacatrgcaagaccctatctcaattaaaaaaaaaaacccaaaagtgtggcttctgccttcaagacatgtacagtctagtaggggagaatacgtaaacataacagtt

SEQ ID NO: 400163 - DNA, 201 bp, Homo sapiens
cggctaattttttttttttttttgtattttttagtggagatgggtctcaccatgttagccaggatggtctcgatctcctgaccttgtgatccgcccgcctyggcttcccaaagtgctgggattacaggtgtgagccactgcgcctggcctatttttatttttatttttatttttttgagacgcagtctcactgtgtcgcca

SEQ ID NO: 400164 - DNA, 201 bp, Homo sapiens
tttgttagttaatttttttctgattttgatctcagatgacttttaatgctggaccattgttttcatagcacttaaatttgatagcatccagtgtatgttgratgaatgactgtgggcatttgctaatatgtgccttaaagtagaaataaatggggaaattgggttaacttgggagaagactttaaaatataagatgggatg

SEQ ID NO: 400165 - DNA, 201 bp, Homo sapiens
cactattaatagttttctatttcttcagatttttttctagattctaactgaaatgacaagataattatgtatatcattatatgtaaataaaatattttactttttttttgagacggtcttgatttgtctcccaggccagagtgcggtggcatgactgtggctcactgcagcctgcaacctctacctcctgggctcaagcaa

SEQ ID NO: 400166 - DNA, 201 bp, Homo sapiens; identical to SEQ ID NO: 88651

SEQ ID NO: 400167 - DNA, 201 bp, Homo sapiens
ctgcaacctctacctcctgggctcaagcaatcttcccatctcagcctcccgagtagctggggccataggtgtgtgctaccacacctggctaattaaaacattttttttgtagagacagggtctccctatctttcccaggctggtctcaagctcttgggctcaagcgatcctcccaccttggtttcacaacatgctggggtt

SEQ ID NO: 400168 - DNA, 201 bp, Homo sapiens
tttgtggatcctcatttgggctttgctttctgttttctccttaatcgttgctttttattcatattttcagattcccattatccatttataggaggcagaamgttaaatgattataacaagatgcacatatttgtatgaagccttttacaaaaagtaaacatttgtaaaatgtcttctagttcccacgttaacaggcttgta

SEQ ID NO: 400169 - DNA, 201 bp, Homo sapiens
ggaatgggctgggtgtgggggctcatgtctgtaatccctacccttaggcaagcagaggcgggaggattgctgggcaacatagggagaccttgtctttaccaaaaacaaacaaaaaaattagctaggcatggtggtgcatgactgttgtctcagctactcagggggctgaggtgggaggattgtttgagcccaggaggtcga

SEQ ID NO: 400170 - DNA, 201 bp, Homo sapiens
tgaggtgggaggattgtttgagcccaggaggtcgaggctgcagggagccatgattgcaccactgcactccagcctgggcgatggagtgagaccctgtctcaaaaaaaaaaaaaaaaaaaggattggctttttttcacttaataagtcttagatatgtttgctgtcaatgtacagagaatttaccttattcttttgaataat

SEQ ID NO: 400171 - DNA, 201 bp, Homo sapiens
atgatgctagcctgaagcgagtttaggttttcttaagcaatgtaataatttatcacaggcataaagatacttcggaagagtgtattcctggaactgcctgtttttttttttttgtcaatggtgactgttagaatcttcaaggggatggagtgtggcagtggagagttctcatgaattatctctcttaggtcttctgccttt

SEQ ID NO: 400172 - DNA, 201 bp, Homo sapiens
cagcgtctgaagttgctggacgcgtacctgctgtatatactgctgaccggggcgctgcagttcggttactgtctcctcgtggggaccttccccttcaactyttttctctcgggcttcatctcttgtgtggggagtttcatcctagcgggtaatggttctataagtgatcataataataatgtgttactttggtgtgctgct

SEQ ID NO: 400173 - DNA, 201 bp, Homo sapiens
cttgtattgtaggctttgctctgttaactagttgaatggacaaataaacttacctctgagcctcagtttctctgtctgtgttgtgagaggattggtctggrtgttcatcaaagtctcttgccactgttaatgcctctcagcatgattcttgatggttcttttgtgtttgaggaggattgtactgtttttgtggatcctcat

SEQ ID NO: 400174 - DNA, 201 bp, Homo sapiens
ctcaagaatgagcgtgctatctttataaactctgctacccattaaatgaatattctattagaaaataattcacatttttataactttttatcattcagccyggaccctttgttgttgcctcaagtgcatccccatctaggtataattagaaacctttaaatcagcagataagagagctttgtgggttttttggttatatat

SEQ ID NO: 400175 - DNA, 201 bp, Homo sapiens
cttgaactcctgaccttaggtgatccacccaccttggcctcccaaagtgcggggattacaggagtgagccaccgtgcctggcccttgttttattttttaatttttttttttttagatggagtttcgctcttgttgcccatgctagagtgcaatggcacgatcttggctcacctccacctccacctccaccaattctcctgc

SEQ ID NO: 400176 - DNA, 201 bp, Homo sapiens
accagcctggccaacatggtgaaacctcgtctctactaaaaagacaaaaattagctgggcgtggtggccggtgcctgtaatcccagctactcgggaggctraggcaggagaatcgtttgaacccatgaggcggaggttgcagtgagcccgaattgcaccattgcactccagcctggcaagagtaagactctgttttctaaa

SEQ ID NO: 400177 - DNA, 201 bp, Homo sapiens
gcccaggctggagtgcaatggcacgatctcggcttactgcaacttccgcctcccgggttcaagcggttcttctgcctcagcctcctgagtagctgggattrcaggcatgcaccaccaagcctggctaattttttgtatttttagtagagacggggtttctccatgttggtcaggctggtctcgaactcccgacctcaggtt

SEQ ID NO: 400178 - DNA, 201 bp, Homo sapiens
ccaggagcctgccactgcacccggctaattttttgtattttatttttagtagagatggggtttcaccttcttgaccaggctggtcttgaattcctgacctygtgatccacccacctcggcctcccaaagtgctgggattacaggcgtgagccactgcgcccggccttctgcctctttttaaccttgcgaaccattatactg

SEQ ID NO: 400179 - DNA, 201 bp, Homo sapiens
ggtttcgccatgttggccaggctggtcacgaactcctgacctcaggtgattcacccacctcggcctcccaaagtgctgggattacaggcgtgagccgccaygcccggccggttgtgtttttaaatgaagaaatttaagtttccggggtcccttgatttctcttatctcctgcatctgtttcatcagcaagctctgtcttct

SEQ ID NO: 400180 - DNA, 201 bp, Homo sapiens
cagtggcacaatctcggctcactgcaacctccatctcccgggtttaagcaattctcctgcctcagcctcctgagtagctgggattacaggcacgctccccsatgcccggctaatttttgtatttttagtagagacgaggtttcgccatgttggccaggctggtcacgaactcctgacctcaggtgattcacccacctcggc

SEQ ID NO: 400181 - DNA, 201 bp, Homo sapiens
tctgatatgtaccttgaacttaacatgtccaagatcaaacctgctcatccagccatctgcctcttcaccagttagtacgtggtgtcaatgttggttgtggttttttttttttttttttttgagacatagtctcactctgtcacccaggctggagtgcagtggcacaatctcggctcactgcaacctccatctcccgggttt

SEQ ID NO: 400182 - DNA, 201 bp, Homo sapiens
tgacccaatataccaaataaggtagtgccctttttcctcctggggcagcccggttcttctgaaaggtagtatttcccagcctcttttgagtcatggtacacgtaggagattgcagtatttttatggcacactgggaaaatcagttgcttatagctggagacattggagcccctaaggctggaggtcactttccaaccagag

SEQ ID NO: 400183 - DNA, 201 bp, Homo sapiens
acttacttgacccaatataccaaataaggtagtgccctttttcctcctggggcagcccggttcttctgaaaggtagtatttcccagcctcttttgagtcayggtacacgtaggagattgcagtatttttatggcacactgggaaaatcagttgcttatagctggagacattggagcccctaaggctggaggtcactttcca

SEQ ID NO: 400184 - DNA, 201 bp, Homo sapiens
ctttccatcattacagaatttcttgaaagaataattaatgttcctacttcctcccttaactattcattccttaacccactcttggtattggtctgtcctcrctacttcactgaattacttcactgaaactactcttgccatgttgcaacgtttagcatttaatgtaggtattggcttctgtgtaaaaggaaagttttttct

SEQ ID NO: 400185 - DNA, 201 bp, Homo sapiens
caccttttgcttcctgttattgctctttcttttatacatttcttataataccactgattcaggaatgttctgcaattatgtagcatttctgtaaataccaktgttagtgaaataaaagcattctggctgaaagtccaaaatctctcctttaagttctgatgccagaatctccaggttacttacttgacccaatataccaaa

SEQ ID NO: 400186 - DNA, 201 bp, Homo sapiens
aacatggtgaaaccccatctctactaaaaatgcaaaaattagctgggtgtggtggcacacgcctgtaatcccagctactcagcaggttgaagcagagaatygcctgaacccgggaggcggaggttgcggtgacccgagatcacgccattgcactccagcctggacaacaagcacaaaactctgtcttgaaaaaaaaaaaag

SEQ ID NO: 400187 - DNA, 201 bp, Homo sapiens
tgccttgtctttctgttcttcaaatcattaaggtaatagaaaattaatgtttgtagctagtacaataatttctgtaccaataactccacgaaaataactcrgagattttggaagagacataaatggtaggttttgcctttagatttgttagttaatttttttctgattttgatctcagatgacttttaatgctggaccatt

SEQ ID NO: 400188 - DNA, 201 bp, Homo sapiens
gtagccaggcatggtggcctgtgatcccagcactttgggaggctggggcgggtggatcacctgaggtcaggagttcgagaccagcctgaccaacatggtgraaccccatctctactaaaaatgcaaaaattagctgggtgtggtggcacacgcctgtaatcccagctactcagcaggttgaagcagagaatcgcctgaacc

SEQ ID NO: 400189 - DNA, 201 bp, Homo sapiens
tgctactgctcttggtcattgccttgtctttctgttcttcaaatcattaaggtaatagaaaattaatgtttgtagctagtacaataatttctgtaccaatractccacgaaaataactcggagattttggaagagacataaatggtaggttttgcctttagatttgttagttaatttttttctgattttgatctcagatga

SEQ ID NO: 400190 - DNA, 201 bp, Homo sapiens
atcatggttggccaggctcccatactgctattgacatttgcagaattttccattggtctgcaaagtatgcattaatatcatcataattcatcagtgctacygctcttggtcattgccttgtctttctgttcttcaaatcattaaggtaatagaaaattaatgtttgtagctagtacaataatttctgtaccaataactcca

SEQ ID NO: 400191 - DNA, 201 bp, Homo sapiens
ttaattgaggagtaggagactaaaagaatgtaagtgatgatcatagtccttgtcctataatgttgattttaggaagagaaattggatgggactggttttgwtcatggttggccaggctcccatactgctattgacatttgcagaattttccattggtctgcaaagtatgcattaatatcatcataattcatcagtgctact

SEQ ID NO: 400192 - DNA, 201 bp, Homo sapiens
caaagcggatttccaaggcatctccccagagcgagcctttgctgattttctctttgccagcaccatcctgcaccttgttgtcatgaactttgttggctgamtcattctcatttacttaattgaggagtaggagactaaaagaatgtaagtgatgatcatagtccttgtcctataatgttgattttaggaagagaaattgga

SEQ ID NO: 400193 - DNA, 201 bp, Homo sapiens
aacaaagcggatttccaaggcatctccccagagcgagcctttgctgattttctctttgccagcaccatcctgcaccttgttgtcatgaactttgttggctraatcattctcatttacttaattgaggagtaggagactaaaagaatgtaagtgatgatcatagtccttgtcctataatgttgattttaggaagagaaattg

SEQ ID NO: 400194 - DNA, 201 bp, Homo sapiens
ggctgaggtgggaggatcgcttgggttccagtccggcctgggcagcaccaccagaccctgtctcctgccgagttctcagtggctctgtgtggctgcatccyagaatattcctcatctaattgagggggtacatttgttcccccagcatatacacttaggctctgccctgtggtctctgtgtgggagctgggcttttttgtc

SEQ ID NO: 400195 - DNA, 201 bp, Homo sapiens
ttgaactcctgaccttaggtgatccacccaccttggcctcccaaagtgcggggattacaggagtgagccaccgtgcctggcccttgttttattttttaatttttttttttttagatggagtttcgctcttgttgcccatgctagagtgcaatggcacgatcttggctcacctccacctccacctccaccaattctcctgcc

SEQ ID NO: 400196 - DNA, 201 bp, Homo sapiens
tcttggtcattgccttgtctttctgttcttcaaatcattaaggtaatagaaaattaatgtttgtagctagtacaataatttctgtaccaataactccacgaaaataactcggagattttggaagagacataaatggtaggttttgcctttagatttgttagttaatttttttctgattttgatctcagatgacttttaatg

SEQ ID NO: 400197 - DNA, 201 bp, Homo sapiens
gctcaggaggctgaggtgggaggatcgcttgggttccagtccggcctgggcagcaccaccagaccctgtctcctgccgagttctcagtggctctgtgtggytgcatcccagaatattcctcatctaattgagggggtacatttgttcccccagcatatacacttaggctctgccctgtggtctctgtgtgggagctgggct

SEQ ID NO: 400198 - DNA, 201 bp, Homo sapiens
tgcctataatcccagcactttcggaaggcgaggtgggcgattgcttgagctcaagaatttgagaccagcatgggcaacatagcaagaccctatctcaattaaaaaaaaaaacccaaaagtgtggcttctgccttcaagacatgtacagtctagtaggggagaatacgtaaacataacagttaaaatacagcccatttaggg

SEQ ID NO: 400199 - DNA, 201 bp, Homo sapiens
acactaaaaataccatggagctaggcagatgtgttcacccgtgcctgtggtcccagctgctcaggaggctgaggtgggaggatcgcttgggttccagtccrgcctgggcagcaccaccagaccctgtctcctgccgagttctcagtggctctgtgtggctgcatcccagaatattcctcatctaattgagggggtacattt

SEQ ID NO: 400200 - DNA, 201 bp, Homo sapiens
agcactttcggaaggcgaggtgggcgattgcttgagctcaagaatttgagaccagcatgggcaacatagcaagaccctatctcaattaaaaaaaaaaaccyaaaagtgtggcttctgccttcaagacatgtacagtctagtaggggagaatacgtaaacataacagttaaaatacagcccatttagggcctcgctataggt

SEQ ID NO: 400201 - DNA, 201 bp, Homo sapiens
tagttccaagtaaattctcaatatttataccagctcagaaggtagaacaaaacagattgaatgtctttatattttccaactaagttgagagtttgatattaaaaaaaaaattctgtaatatagctgatcttacatgaatttgggggtgacaaactctaacctactctgaaagaggcaggtcaaaagaaaatggcattgggt

SEQ ID NO: 400202 - DNA, 201 bp, Homo sapiens
cagatgaggaactgaagttgagagagcctggctaggatggctgagcacggtggctgatgcctgtaatcccagcattttgggaggccgaggtgggtggatcmcctgaggtcaggagttcgagaccagcctggccaacatggtgaaacctcgtctctactaaaaagacaaaaattagctgggcgtggtggccggtgcctgtaa

SEQ ID NO: 400203 - DNA, 201 bp, Homo sapiens
ggtggatcacctgaggtcaggagttcgagaccagcctggccaacatggtgaaacctcgtctctactaaaaagacaaaaattagctgggcgtggtggccggkgcctgtaatcccagctactcgggaggctaaggcaggagaatcgtttgaacccatgaggcggaggttgcagtgagcccgaattgcaccattgcactccagc

SEQ ID NO: 400204 - DNA, 201 bp, Homo sapiens
agaccagcctggccaacatggtgaaacctcgtctctactaaaaagacaaaaattagctgggcgtggtggccggtgcctgtaatcccagctactcgggaggstaaggcaggagaatcgtttgaacccatgaggcggaggttgcagtgagcccgaattgcaccattgcactccagcctggcaagagtaagactctgttttcta

SEQ ID NO: 400205 - DNA, 201 bp, Homo sapiens
acatggtgaaacctcgtctctactaaaaagacaaaaattagctgggcgtggtggccggtgcctgtaatcccagctactcgggaggctaaggcaggagaatygtttgaacccatgaggcggaggttgcagtgagcccgaattgcaccattgcactccagcctggcaagagtaagactctgttttctaaaaaaaaaaaaaaaa

SEQ ID NO: 400206 - DNA, 201 bp, Homo sapiens
ctcgggaggctaaggcaggagaatcgtttgaacccatgaggcggaggttgcagtgagcccgaattgcaccattgcactccagcctggcaagagtaagactytgttttctaaaaaaaaaaaaaaaaaaaaaaagagccccttgctagaaatcttacaactaatgtatctatccaggtgatcaagaaagactcaatatttttt

SEQ ID NO: 400207 - DNA, 201 bp, Homo sapiens
gtgctgatggagaattattggtgagaatgggaacacaatgtgcatccaaccctgcctagtggtcctgcaataatatttctcttatacattcgccttcctamagtaggcttcataaatcactctatttttcctcttttcctttattcttagttggtgatcttgcttttattttttcactaaaaaaaagaagtagataagaat

SEQ ID NO: 400208 - DNA, 201 bp, Homo sapiens
acccttcttttgacagcattgactttcctaaatcctgcctcttctgccatttgttagcctagatcatcaactggagactggttttaatgggaaatttggaygcttatcctttgttttgattgttggcaaaggtagccttgttcctttttatggtgctggggtttctaactttcctgtggaatttcctgttgcaagagaatg

SEQ ID NO: 400209 - DNA, 201 bp, Homo sapiens
ttaaagttacagacctatagaatgcttattgtacatttacattgttctgacacaccagagatatttcttagaatttaaaacaggtctgaggatctaatgayttgtgtactgaagttgcagattagccttttgattggatatttagttaccatctttgacttttgtcctagatgaccaagacctagttgtctgtggtggcgt

SEQ ID NO: 400210 - DNA, 201 bp, Homo sapiens
ttgcacttcagcttgggtgagagtgaggctcagcctcaaaaaaaaaaaaaaaaagtctggtgacagtggtgctgtgcttaaagttacagacctatagaatrcttattgtacatttacattgttctgacacaccagagatatttcttagaatttaaaacaggtctgaggatctaatgacttgtgtactgaagttgcagatta

SEQ ID NO: 400211 - DNA, 201 bp, Homo sapiens
tcaccttggccattagaaatgtaatgtagccaggcatggtggcctgtgatcccagcactttgggaggctggggcgggtggatcacctgaggtcaggagttygagaccagcctgaccaacatggtgaaaccccatctctactaaaaatgcaaaaattagctgggtgtggtggcacacgcctgtaatcccagctactcagcag

SEQ ID NO: 400212 - DNA, 201 bp, Homo sapiens
catgttctttatccgtaaagagtttatggtctagttggggtacagacaaaatacagcattggaattgtctggaggcctggcacagtggctcatgcctgtawtcccagtactttgggaggccgaggtaggcagatcacttgaggtcaggagttcaagaccagcctggccaacatggtgaaaccccatctctactgaaaatac

SEQ ID NO: 400213 - DNA, 201 bp, Homo sapiens
acttaatatggtccaggagaaatggaggagaatgcaggtcaggagacctgactttggctagggagggtgatcctggaccagcactgtccaacagagctttytgcagtggggaaacattcagggtctgcaccgcccattatggtaaccactagccacatgtggttattgaacatttgaaatgtggctaacagactgaagaac

SEQ ID NO: 400214 - DNA, 201 bp, Homo sapiens
gccccttgaagttatgagaagagcctgcattgcccttttgttgtgaatggggaaattgaggctcagaaagcttagattatatgcctaataccaaacggctscgtaggagttggacttaaaagtctaaagaaaccaccttcgtgccgctactccacttggtgatccacttcacttaatattggtccggggaaaaccctattc

SEQ ID NO: 400215 - DNA, 201 bp, Homo sapiens
ctgcatagttggccatacttaatatggtccaggagaaatggaggagaatgcaggtcaggagacctgactttggctagggagggtgatcctggaccagcacygtccaacagagctttttgcagtggggaaacattcagggtctgcaccgcccattatggtaaccactagccacatgtggttattgaacatttgaaatgtggc

SEQ ID NO: 400216 - DNA, 201 bp, Homo sapiens
tggcacaccggggagggcggagttaggtcacgagggtgcgcatgcgcaaacagcacatccggtgtggtcgacgggtcctccaagagtttggggcgcggacyggagtaccttgcgtgcagttatgtcggcgtcggtagtgtctgtcatttcgcggttcttagaagagtacttgagctccactccgcagcgtctgaagttgct

SEQ ID NO: 400217 - DNA, 201 bp, Homo sapiens
cattcgacagctgtccctcccttcaccagctcttttaaggctgcaaatatatctgattcacgtgagagtccctacaagttagtacaacgtcaggccccaargaggcgcccaataaatgttggcattgcagggccagatcccgagttccagttcagaaccctgctgaggtcaggcttcctccctgcctcccgcccctcacca

SEQ ID NO: 400218 - DNA, 201 bp, Homo sapiens
gaggaggggctggtgcggtggcttaggcctgtaatcccagcacttggggaggccaaggtgggaggatcgcttgagcccaggagtttgagaccagcatgggygatatagcaagaccttgtctctaccaaaaatcaaaagaattagaggggcgtggtggcgtgtgcctgtggtcccagctactcagaaggctgaggtggaagg

SEQ ID NO: 400219 - DNA, 201 bp, Homo sapiens
ccagtatggtctctatcttttgactttgtgatctgcctaccttagcctcccaaagtgctggaattacaggcatgagccactgtgcccggccaaataaacamtttttaactgcaagaaaaagttatgttattaagttacttggatgctaaaacatggaaagtggtacgaaagaaaaaaagccaaggcaaagattcataggag

SEQ ID NO: 400220 - DNA, 201 bp, Homo sapiens
tggctcactataacctccgcctcctgggtttaagcagttctcctgcctcagcctcttgagtagctgggactacaagtgtgtgctcccacgcctggctaatwtttgtatttttaggagagacatggtttcaccatgttggccagtatggtctctatcttttgactttgtgatctgcctaccttagcctcccaaagtgctgga

SEQ ID NO: 400221 - DNA, 201 bp, Homo sapiens
tgagacggagtctcgctttgttgtccaggctgtagtgcagtggcatgatcttggctcactataacctccgcctcctgggtttaagcagttctcctgcctcrgcctcttgagtagctgggactacaagtgtgtgctcccacgcctggctaatttttgtatttttaggagagacatggtttcaccatgttggccagtatggtc

SEQ ID NO: 400222 - DNA, 201 bp, Homo sapiens
tgtcttgtgggttagaatttagatggaaggatttggggccctgtctctagtatcataagacatttaaccttgctgcttttttcttctaggttcactctttsaatttcctggataagagttctggagatggcagcttattggacacatggattttcttcagatttgcacttactgctagctctgctttttatgcaggagaaa

SEQ ID NO: 400223 - DNA, 201 bp, Homo sapiens
ggctaaggcaggagaatcgtttgaacccatgaggcggaggttgcagtgagcccgaattgcaccattgcactccagcctggcaagagtaagactctgttttytaaaaaaaaaaaaaaaaaaaaaaagagccccttgctagaaatcttacaactaatgtatctatccaggtgatcaagaaagactcaatattttttatttttt

SEQ ID NO: 400224 - DNA, 201 bp, Homo sapiens
gcaggagaatcgtttgaacccatgaggcggaggttgcagtgagcccgaattgcaccattgcactccagcctggcaagagtaagactctgttttctaaaaawaaaaaaaaaaaaaaaaagagccccttgctagaaatcttacaactaatgtatctatccaggtgatcaagaaagactcaatattttttattttttagactat

SEQ ID NO: 400225 - DNA, 201 bp, Homo sapiens
tgttgaactcctgtcctcgtgatccactcgccttggcctcccaaagtgctgggattacaggcgtgagccactgcacctggcctgtgaaactcttttttttaaaaaaaaaaaaaaatctcagtccatctcaggtgttctgaagggtaatgaggaaaagaaggacagaactgtattggatcacagtttgagaattaaagttcc

SEQ ID NO: 400226 - DNA, 201 bp, Homo sapiens
cgcaggtttcccgtttgatttctttttttcacctccttagtttgagagcttctttttttggtttgttctacgtcttttattctcaatggtgacctcccackcaataatctttaattttttgttggtggaggggcccatttagtttttatttcattttctctttgatatttccaccttatattgaattaggtcctgccgcca

SEQ ID NO: 400227 - DNA, 201 bp, Homo sapiens
gaggtggaaggattgcttgagcgtgggaggtcacggctgcagtgaactgtgatcatgccacttgcactccagcctgagtgacagagtgagaacctgtctcaaaaaaaaaaaaaaaaaaatcagaagacttgtattgtaggctttgctctgttaactagttgaatggacaaataaacttacctctgagcctcagtttctctg

SEQ ID NO: 400228 - DNA, 201 bp, Homo sapiens
caatggaaatctgtgcttcataagcattttagattccagaaagctctttaggttaaactacaaccctctcacctcaaagaatttgtgggccagggaagtcrgtgacttatgtgaagtcttgcggctaattaatggtagagctggagttaggacacatgtctcacagttcctagttcgttttgctttgatgtgcttgaaatt

SEQ ID NO: 400229 - DNA, 201 bp, Homo sapiens
gtagtaaatgtatttttaaaataaacttataatggaaaacctgaatcattatccctaaatagaaggtcacactaaaaataccatggagctaggcagatgtrttcacccgtgcctgtggtcccagctgctcaggaggctgaggtgggaggatcgcttgggttccagtccggcctgggcagcaccaccagaccctgtctcctg

SEQ ID NO: 400230 - DNA, 201 bp, Homo sapiens
gcctatggatatccagttttcccagcatcgttggttgagaagactgtttccccattgagtggttttgtcagtttggttgaaaatcatttgattttgtataygagggtttttgtgtgtttcttaaaaaacaaagcaattaaattgattcattttttaactgtagtaaatgtatttttaaaataaacttataatggaaaacct

SEQ ID NO: 400231 - DNA, 201 bp, Homo sapiens
ttcaagtcctttgcccattttaaaatctggttattattttgttgttaattgcattgtaggggtactttaatatattctgatattaaccctttatcagatawgtgatttgcaaatatttttccccattccgtaggtgccttttcactgttgtgccctttattgtacctttatcacagaagttttaaactttgatatagtcca

SEQ ID NO: 400232 - DNA, 201 bp, Homo sapiens
gctaccctatttgattttcccacttgttagtgcacaagggtttcagtttctctgcattcttgccaactcttgtttttttgatactagacatcctaatagaygtgaggtgatatctcgttgtaattttgatttgtattgccctagtgattaatgatgttgagcatcttttcatatgcttgttggccattcctatatcttctt

SEQ ID NO: 400233 - DNA, 201 bp, Homo sapiens
cgagatcctgctttcacttcttttggatatgtacccagaagtggaattgctggattatatgatatggcaattctgtttttaatttttttgaggaaacgcartactgtttttcacactggctaccctatttgattttcccacttgttagtgcacaagggtttcagtttctctgcattcttgccaactcttgtttttttgata

SEQ ID NO: 400234 - DNA, 201 bp, Homo sapiens
tttggtcaagataaaacatgacaaaatttaccattttaaccatttttaagtgtatagttctgtggcattaagtacatgtacattgttgtaaaatcatcatcactatccatatccagaacttttttgtcttccgcaactgaaattcagttcccattaaacagtaactcctcatcctcctctctgtcagtccctggcatctac

SEQ ID NO: 400235 - DNA, 201 bp, Homo sapiens
ggcacgatcttggctcacctccacctccacctccaccaattctcctgcctcattgcctcagcctgccaagcaactgggatcacaggcatgcgccaccatgyccggctaattttgtatttttagtagacaaggggtttctccatgttggtcaggctggtcttgaactcccgacctcaggtgatccgcctgcctcggcctccc

SEQ ID NO: 400236 - DNA, 201 bp, Homo sapiens
aagcaaattctcctgcctcagcctcctgagtagctgggattacaggtgcgtgccaccatgcccagctaatttctgtagtttttattagagatggggtttcmccatgttggccaggctggtcttgaactcctgaccttaggtgatccacccaccttggcctcccaaagtgcggggattacaggagtgagccaccgtgcctgg

SEQ ID NO: 400237 - DNA, 201 bp, Homo sapiens
ttatcctctccctgtgaaagataaaaaccactatcttgccatagattggttttaccaagttttaagctttttgtacatggaatcatatagcatatactttyttgttttgttttgttttgagacggagtctctcttgcccaggctggagtgcagtggcgcaatctcggctcactgcaacctccacctcctgagtttaagcaa

SEQ ID NO: 400238 - DNA, 201 bp, Homo sapiens
attcacatttttataactttttatcattcagcccggaccctttgttgttgcctcaagtgcatccccatctaggtataattagaaacctttaaatcagcagrtaagagagctttgtgggttttttggttatatatttttttctctgagaaagcctctaggtttcagtgtaactctgagaagtaatattttttttcctttaac

SEQ ID NO: 400239 - DNA, 201 bp, Homo sapiens
ggggaagaccaagactgtgcacatagacccgcaggtttcccgtttgatttctttttttcacctccttagtttgagagcttctttttttggtttgttctacktcttttattctcaatggtgacctcccacgcaataatctttaattttttgttggtggaggggcccatttagtttttatttcattttctctttgatatttcc

SEQ ID NO: 400240 - DNA, 201 bp, Homo sapiens
  misc_feature (1)...(201): n = A,T,C or G
ggcaagtggggaaccctgtggggcctgggcctgaggtttgggctctcctggctctacccatctgctcatgtgcaggggtttccttcgggaacacaggcagngcactgagagtgaaccctttttctgcccaagctgggcttggagaggtgagctcagatgaactggatgatagtggatctagaaatgcacacagagcttcct

SEQ ID NO: 400241 - DNA, 201 bp, Homo sapiens
aaaggaatgcctagaagaatgtcttctagaatgtcaggctagaaaggaatgatatgatggggatgggagtcttgactgtggtggggctggccatcagggcytggctgcagctacgtggtgtcccattggccctctgtccacgtgcacagccacccacatggcaaggggttgttgctgaggggcagtggtgtcctgtggaac

SEQ ID NO: 400242 - DNA, 201 bp, Homo sapiens
ggttgttgctgaggggcagtggtgtcctgtggaacatagctaccctggggaccaggatgctgacctcaggttggagatcggtttcgcactggctgcagtcscctctgacgggggcaggccagagctctctggagtcaggaatctagaatgacgtcctttttcctgtgtggatgttttccactccctatcggcacatgcttt

SEQ ID NO: 400243 - DNA, 201 bp, Homo sapiens
ggaagcctgaaacctgaacaccagcctctcagtcacacgttccaaagtgatgccaatcagagcctcaaagcctaaaagcatgaagtcagacttaagggaaycgacactgcaccacggcagctgggcagcctcagagccctctatgtgcatccctcacgctccctgtcacctaccctgctcacggtctctctatcctggccc

SEQ ID NO: 400244 - DNA, 201 bp, Homo sapiens
gatattttggtacagcaggtgtttatcttgaccgacgtcttgcctctaactgcctgtccccgctcttaacatccttctctttctcactcccccttaccccrtctccagactatagaatatgcagggaggcctaacaacaaatccttcagccgatcttaaatctcaaaacgcaaactctaaggtcattccttagtgacctct

SEQ ID NO: 400245 - DNA, 201 bp, Homo sapiens
tcccatgtggctggggacatgcacgatggagaaggtgagaggcggtgataccaagtaactgagtgagataaacagcagttcctctctctctccctccggarggccccggggggacggagagttcctgatggatttttctttttgttgcactgcgaacatttcgtgcacactcagcgggctggtggaatacttacaccctct

SEQ ID NO: 400246 - DNA, 201 bp, Homo sapiens
atcagatggtatatgtatggctccaggaatgttttgtagatccacagcagaactggaatgacaatacaaggaatgcacaccattgtcccagacttcagctyctaaatgtgagagcgaagtggggtgcaccgtgagagcacagggtgggcctcgaggtgccgacgagggcagacagcagagctgggcaccacagggagctag

SEQ ID NO: 400247 - DNA, 201 bp, Homo sapiens
ttaccggcacgagccactgcaccgggcctctgtagacatcttgatgggctagggaattattaggaggattttgctgggctcatgcaatgccagatagaccmaggtggtgtcacttcccagctgaaatccatctgcttagccaactcagcagggaggaaggcacgttggtaggttgatgctgacggcagttaaagtgtgtgc

SEQ ID NO: 400248 - DNA, 201 bp, Homo sapiens
ccacggtcatgttcaacgggcaggtatgcagaggatcaggggctggtgcgatgggcatgggatcctggcagcaaatgcagtctctgtggagcagtatctgytgccttctttgcagaccagccaagttcttttgtctgttcgtcatcccttccccaggactctgggctgttctgtggtgtgggtactgatgagcacatcttt

SEQ ID NO: 400249 - DNA, 201 bp, Homo sapiens
gtttagtcagggtgactgtgccctcttcctagacagtgttctcatcagtcagaaatgcgttatttgattttctggtctggaagaatgctcaaattaccatyagccgtttgttgtctctcccctgctttccctcattgccttttccgttttcacttctcctgaatgttcaataggcagctgagcctccacccagaccgaaaa

SEQ ID NO: 400250 - DNA, 201 bp, Homo sapiens
tccaacgagggatgctctactaccagacagagaagtaagtggttcaatgttgcaccaactggaggatttcagagagaaacccaaggggtctcagtgttgcrggcttggtgtttgagcagtaccttcccaacctctgttgggaaatgtgactggcccttctggggacagttatgcaataaatcagcaggtgaggcagaagct

SEQ ID NO: 400251 - DNA, 201 bp, Homo sapiens
tggggaggcaaggcaggtctgccaccagattataaatcagctgtgtcataggcacaatgagcctaggtaaccaccatgggcctgatactcagctggtgtgrcaccccaccagtgtccctgatggggtcacccatgtaggtctcctatgaggtactgagctgtcacagaatggggatgatcatgaaactgcatcaaaacctg

SEQ ID NO: 400252 - DNA, 201 bp, Homo sapiens
acctgtacctggggagctggtgggaggtgttatttcccagtgtttagtcagggtgactgtgccctcttcctagacagtgttctcatcagtcagaaatgcgktatttgattttctggtctggaagaatgctcaaattaccattagccgtttgttgtctctcccctgctttccctcattgccttttccgttttcacttctcct

SEQ ID NO: 400253 - DNA, 201 bp, Homo sapiens
ccctgccttctgcagaacactcacggggcttgggtgaatgcagctggttcctgagtgactcacgtagtcaccaaaccccttgatcattaggtagggaaacsatgtctcaggaagaaaagttgaagtaactatacctgcttatctctgaggggcatggagtggctgttttcaaatgtctgaggcactgtatctggaaaagaa

SEQ ID NO: 400254 - DNA, 201 bp, Homo sapiens
catcagggcctggctgcagctacgtggtgtcccattggccctctgtccacgtgcacagccacccacatggcaaggggttgttgctgaggggcagtggtgtyctgtggaacatagctaccctggggaccaggatgctgacctcaggttggagatcggtttcgcactggctgcagtcgcctctgacgggggcaggccagagct

SEQ ID NO: 400255 - DNA, 201 bp, Homo sapiens
attgccattgggtagggggcttcaccttttcagacctttcaaaaaaacaaaacccaaacaccatgtcaaactaaaagagcaataatgtaagcatacggggsggggggggggggctccaaccactctctctgaagagcaatgagcgttatctcaccccttttcattgctggggttgcccagactgcagtgacaactggggct

SEQ ID NO: 400256 - DNA, 201 bp, Homo sapiens
ctggggagattgaaaagaacaaaagttgcccaagctccacccctagacagcctgatttaactggtctgggaggggccccaggcagccagttttaaaagctytccaggtggagagcaggtgaggggcagccagggttgcctctttctccatcttctaaattaaaatcattctacaagtgtctttaacacctttgtgaaggct

SEQ ID NO: 400257 - DNA, 201 bp, Homo sapiens
cttgaactcccgacctcaggtgatctgcccacctcagccccccaaagtgctgggattacaggcatgtgccaccacgcccagccagatgttaaatttaaaamcagatttcaaaacagttcatatagcatagtcccatttctgtatcacagaataaagtctggaaggccatagatcaaaatgttatcaataattctctctgga

SEQ ID NO: 400258 - DNA, 201 bp, Homo sapiens
tgaccttgtgatccacccgcctcggcctcccaaagtactgggattacaggcatgagtcactgagcccagcctaataaagaactttctgacagtgaaaatgrtctgtgcatggtgtgggtggggtgagggtgaggccgggcgtggatggagcagcagggaggttgtagacaatgtccagacatcagagagagggctgggctc

SEQ ID NO: 400259 - DNA, 201 bp, Homo sapiens
accccatctctactaaaaataaaaaaattagccaggcgtggtggcgtgcacttgtagttccagctccttgggaggctgaggcaggagaatcacttgaactrgggacatggagcttgcagtgagtcaagattgcacctttgcaccccagtctgggcaacagagtgagattctgtctcaaaaaaaaaaatatgagtagtagta

SEQ ID NO: 400260 - DNA, 201 bp, Homo sapiens
acagagaagaggactcaagccagtctttatatgtctatcctcatcagcaaacacccatccaagggagcactgtcatgagccttgcttgatcccgggccagmcttgtcgtggtggtgccctctacaccatgagagaaccccacggacagcacacagagtgggagaggagcagttcctctgggaaaagagggtgctgaatagc

SEQ ID NO: 400261 - DNA, 201 bp, Homo sapiens
gagagtatacaacaagtgtgtagcaattaattaaaaatatgagtagtataggctgggcgtggtggctcatgctggtaaccccagcactttgggaggccaargtgagtggatcacttggggtcaggatttgagaccagcctggccaacatggtgaaaccccatctctactaaaaataaaaaaattagccaggcgtggtggcg

SEQ ID NO: 400262 - DNA, 201 bp, Homo sapiens
ctaccaatgcaaagcagtgaaaaactaccatcaattataacagaaaatccaacagacaaagagagggggaaattttaaagttaatgagggtaggctgggcstggtggctcacacctgtaatcccagcactttgggaggctgaggtggtggatcacttgaggccaggagttgaagaccaacctggccaacatggtgaaaccc

SEQ ID NO: 400263 - DNA, 201 bp, Homo sapiens
ttctagcctcaatttcaggtgaggtaactgaggttctgagaagttacactgcttgcttagggacacagagctggtaagcagtggaggtgggatacaaaccyttctctgtggactctctagggccatttccacctcattgtattgcctctcaataaaaatataccaacgttcaacaaacaacattaagaagctagaacttat

SEQ ID NO: 400264 - DNA, 201 bp, Homo sapiens
atcacagcactttgggagactgaggtgggcggatcacttgagatcaggagttcgagaccagccgggccaacgtggcaaaaccccatgtctactaaacatgmaaaaattagctgagtgtggtgactgacatgtgcctgtaataccagctacttgggaggctgaggcaggaggctcacttgcactcaggaggtggaggttgca

SEQ ID NO: 400265 - DNA, 201 bp, Homo sapiens
gggggcaggatccaggcaccagtgccttaatgtctgatctagatgtacaaagacaaacttctgaactggctgtgtggtcaggtaggtgggctttggagatyatacctaagttgtctgatttttactggcagaatggctctgaacaaactattcatctctctgggtctccttttccttagtaaaatatggatacctacaagt

SEQ ID NO: 400266 - DNA, 201 bp, Homo sapiens
tgaaatcacagcactttgggagactgaggtgggcggatcacttgagatcaggagttcgagaccagccgggccaacgtggcaaaaccccatgtctactaaamatgaaaaaattagctgagtgtggtgactgacatgtgcctgtaataccagctacttgggaggctgaggcaggaggctcacttgcactcaggaggtggaggt

SEQ ID NO: 400267 - DNA, 201 bp, Homo sapiens
cactccagcctgggtgacagtgagaccctgtcaaggttgggggtggggaaaggacagaaattctatttaaggattcgttgttcaatttctttgacccttcwtctctatctggtaactttttgaaaaacataatttatccttcttcattttgctcattatcatgtttaagacagatcaataagatggttaaaccctgtgttc

SEQ ID NO: 400268 - DNA, 201 bp, Homo sapiens
tccagatctagattccttgatctctttcttcacaataaagctgatgaaagccttgctgaagtcccttgagcttcagttcagccagaggccatgaggggaaygcagcccaggtaactggattccatggtattcagtgtagaacaggggaggagattcttgcccagtcagtggatcctgtgtcaattttaaatactcagaagt

SEQ ID NO: 400269 - DNA, 201 bp, Homo sapiens
gaggcaggagaatcacttgaacctggaaggcagaggttgcagtgagctgagatcacgccactgcactccagtctgggtaacagagcgtgactccgtctcamaaaaaaaaaaaaaaaaaaaagataatttgatgttatacaaattgcacctcaataaaaacatttcttttttaagagagaagaaagcaagcctgtgttagca

SEQ ID NO: 400270 - DNA, 201 bp, Homo sapiens
taggtaaaggtttctgcaaaacaacttcttttctctattatcaaaagggagagacatgactggctttgactttgcaggttcatttactttttccggttggyccttcccacccctcccacttccaaatatatactagcagttttgaaaaccaaaattcctgtaaatgtcaaagacctttctttagaaaaatcactgacaaaa

SEQ ID NO: 400271 - DNA, 201 bp, Homo sapiens
caccaccatgcccagctaatttttatttttttatttttttatttttagtagagatggggtttcaccattttagccaggatggtctcgatctcctgacctcrtgatccacccgcctcggtctcccaaagtgctgggatttcaggcgtgagccactgcgcccggccttattattctcttattctaaagatggggaaacagact

SEQ ID NO: 400272 - DNA, 201 bp, Homo sapiens
gtgattagaaagatcttggaaacttctaaaagtaagacccaggattcaattaatctgtgattggtaatattaatagttacacctgagagaaaaatctaccragttttatctgtaattcaacaatgaggaaattatacaaatgaggcactaatctcaacctcaagcaggccctcttgcgcaattccctaggtgttggtattc

SEQ ID NO: 400273 - DNA, 201 bp, Homo sapiens
tgcatttatttctccatccactagactgctgtattttctccctctgtcctgcagatatgatttggctatcaaagaccttaaagaagccttgattcagcttygagggaaccagctgatagactataagatcctggggctccagttcaagctgtttgcctgtgaggtaaggagaacagggcctggcctgggcaggaggggatc

SEQ ID NO: 400274 - DNA, 201 bp, Homo sapiens
cctcaatgagggaggcagaggttgcagtgagccaagatcgcgccactgcactccagcctgggcgacagagtgaaactccatctcaaaaaaaattttttttwaattaatttaaaaatactcagaagtgtcatgtgacatagtagacattaattacagaacagagcttttggaaactgtcctgggaaaaggacagagctcaag

SEQ ID NO: 400275 - DNA, 201 bp, Homo sapiens
acatagctaccctggggaccaggatgctgacctcaggttggagatcggtttcgcactggctgcagtcgcctctgacgggggcaggccagagctctctggartcaggaatctagaatgacgtcctttttcctgtgtggatgttttccactccctatcggcacatgctttctgaagaagtaaagaggaaggactgaagaaaag

SEQ ID NO: 400276 - DNA, 201 bp, Homo sapiens
agaagatgttctatcactgccaattgccagaccccagggaaggatagagtaaattctttcaattttgcctggcaatgaaatgtagatctcacctggcttawcagttttccaccgatctgcagtccttctatccctgttatctggagtcccaatgggtccaaaattggagaatggaacagaattatggttgtgtgttggagg

SEQ ID NO: 400277 - DNA, 201 bp, Homo sapiens
ccctgcaactaccttgaaccagttgagctgcggatccaccctcagcagcagccccaggtaatgtgatgccaaggcctgacccatttcctctcaccctttarggatctctccctggaggggagaaaagcagtgtaaaagaggtgttgtcaggacccctggagaaagattcactagtcttgagcccgccttgagatggcacca

SEQ ID NO: 400278 - DNA, 201 bp, Homo sapiens
caatgtccagacatcagagagagggctgggctctgatcctgtgccaccctgaaaggctttgatcctatggtttggtcagaaacagagcctgtaaaacccaygtatgcagctgttgctaagggcaaccacaagatgctcaaaggaccttaaagatgtagatgcagttagttacctgaagaagtgaaagtagaagtgaagtct

SEQ ID NO: 400279 - DNA, 201 bp, Homo sapiens
agaggctccatagcaaagccttcttcctgctgacttggaaacaggaaagggagtgggcccaaacctctgtcacagcagccactgcagcatcccaaagatgyctgaagttttgacttctttcagcttgctgagattccattgtcctgggtgcaggtgtatgagctgtggactctggacgcatggggcactggcagcatggga

SEQ ID NO: 400280 - DNA, 201 bp, Homo sapiens
actcagattttccttgaagaaaagactgagatggattatttcaggctcatcaaggcattgtcatcagttacctgggggcatacattttattaatgtgaagygcaaaggaccatgcaaaaatgagccccctgggctctctgaagggaggctggacacgagtgtgttggcttgtggaaatattcatgataatttgcatgtttt

SEQ ID NO: 400281 - DNA, 201 bp, Homo sapiens
gacagatcaataagatggttaaaccctgtgttcactctcaaaccactttgcaatactgtcttttccctgttgatcacaattaggggtggggaagggtgacmgataacaaattctgtgtggaatagccagacagggtaatcttcctacagtggttttagaaatccatgtgtacttttccttttatcagtgaatgaagaatgg

SEQ ID NO: 400282 - DNA, 201 bp, Homo sapiens; identical to SEQ ID NO: 88671

SEQ ID NO: 400283 - DNA, 201 bp, Homo sapiens
ctgctggaccccatgctgttgcttcttggggagatgtgatgttgcacacattaggaataaaaacaattactagcatacagcattgggtaaaagaagggatrgagatggggcaggagggtgggaagtagaatgggggcacaaaaaccaaccaaagaaaaaataaccacactgaaagcttctacctattagaacgtgtcaggc

SEQ ID NO: 400284 - DNA, 201 bp, Homo sapiens
tgcccgccactacgtccagctaatttgtgtatttttcagtagagacagggtttcaccatgttggccacgctggtctcgaactcctgaccttgtgatccacycgcctcggcctcccaaagtactgggattacaggcatgagtcactgagcccagcctaataaagaactttctgacagtgaaaatgatctgtgcatggtgtgg

SEQ ID NO: 400285 - DNA, 201 bp, Homo sapiens
aggacaagcatcgtcacccccattttcacataagggaatgctacgttttctgtgttacagaagcagaagctatatgagccagtggtgatccctgtgggcargctgtttcgaccaaatgagagacaagtggctcagctggccaagaaggattacctaggcaaggcgacggtaggtgggattgctcagcttcccctgagtctc

SEQ ID NO: 400286 - DNA, 201 bp, Homo sapiens
acccagctaattttgtatttttagtagagatggggtttctccatgttggtcaggctggtcttgaactcccgacctcaggtgatctgcccacctcagccccmcaaagtgctgggattacaggcatgtgccaccacgcccagccagatgttaaatttaaaaacagatttcaaaacagttcatatagcatagtcccatttctgt

SEQ ID NO: 400287 - DNA, 201 bp, Homo sapiens
aaagtttgcagtagatgttaattttttttctttttccgagacagagtttcactcttgttgcccaggctggagtgcaagggctcgatctcagctcaccgcarcctccgcctcccaggctcaagcgattctcctggcttaccctcccgagtagctgggactacaggcatgcgccaccacacccagctaattttgtatttttag

SEQ ID NO: 400288 - DNA, 201 bp, Homo sapiens
gggctctgtgagccgtggctcatctcacacctcctcactgccttgcatcatggccatgtctggacccttctctcctcaggcctttaccagaagcattaacygagacaagcacttggcagtggcttacttccaacgagggatgctctactaccagacagagaagtaagtggttcaatgttgcaccaactggaggatttcaga

SEQ ID NO: 400289 - DNA, 201 bp, Homo sapiens
  misc_feature (1)...(201): n = A,T,C or G
ttaggacgttatctgcatgtggctcctttacatggggtctctgtaggggtgtttccccacatccacccctgcctgggaactttgaatgaaggttctgaccntcgctccctgttgccttcaggaggaaagctctccgcagtccgacatcccagctcctcctagttccaaagcccctggaagaccccagctgtcaccaggtga

SEQ ID NO: 400290 - DNA, 201 bp, Homo sapiens
tctcagagtatacgtgtgagcctttccctggcaccttgatttggagtagtctcaagttttatgttgcggtctgtacttttctaggtgttatataacattgytttcatgtatgccaagaaggaggaatggaaaaaagctgaagaacagttagcattggccacgagcatgaagtctgagcccagacattccaaaatcgacaag

SEQ ID NO: 400291 - DNA, 201 bp, Homo sapiens
cctgagttcctctccctgccttccaggaaattctggtttcttcttctcccaacatgtcactcagctaatgaccacgcagccccagaatccccctttcctgmaccacccaccccaaacatgaaatcagtgccctctctccctgccttctgcagaacactcacggggcttgggtgaatgcagctggttcctgagtgactcacg

SEQ ID NO: 400292 - DNA, 201 bp, Homo sapiens
cagtgggaaccttgtgctggcctggaggagggaagaggaggatggtttttgtgatgatgttctttgactggattcttactcattatccccacccagctatyggcctcgggacagcaatgagctggtgcccctttcagaagacagcatgaaggatgcctggggccaggtgaaaaactactgcctgactctgtggtgtgagaa

SEQ ID NO: 400293 - DNA, 201 bp, Homo sapiens
ggaataaaaacaattactagcatacagcattgggtaaaagaagggatggagatggggcaggagggtgggaagtagaatgggggcacaaaaaccaaccaaaraaaaaataaccacactgaaagcttctacctattagaacgtgtcaggctgtgaatggactagcctgccttctgtgagactgcttgctgtgcgactgtaaaa

SEQ ID NO: 400294 - DNA, 201 bp, Homo sapiens
gcagtctcctgcataatcacaatagaatcatggtatctaggacactaaacattcatatgatagtattatataatgtatattccatattcaaatttctcccrttgctcctgctcaatgtccttgacaggttttttgttgttatcttttgtctagaggctcatcaaggatcacatataaacctaggatgattttgtgaataca

SEQ ID NO: 400295 - DNA, 201 bp, Homo sapiens
gtgtaatgggaaaagagctgtgtgtcaaagcggaacccccttcagggctgcagctctgggtaaacaagtggagaggccgaaaagaggcctgcagcagggarcgagggggctgggaagcaggccggtgctttcagagacatgtttaaaaacgacacttagttggcgaggcgaggtggctcacgcctgtaatcccagcacttt

SEQ ID NO: 400296 - DNA, 201 bp, Homo sapiens
gtcaagcaaggttggaatgaagtcatatcatagcttaaggctcagctcatagccattcttcaccttttttttttttttttgagatggagtctcactctgtygcccaagctgggtgtgatcttggctcactgaaacctctgccgcccaggttcaagaaattctcctgcctcagcctcctgagtagctgggattacaggcacc

SEQ ID NO: 400297 - DNA, 201 bp, Homo sapiens
attccaacttttaggacgttatctgcatgtggctcctttacatggggtctctgtaggggtgtttccccacatccacccctgcctgggaactttgaatgaargttctgaccatcgctccctgttgccttcaggaggaaagctctccgcagtccgacatcccagctcctcctagttccaaagcccctggaagaccccagctgt

SEQ ID NO: 400298 - DNA, 201 bp, Homo sapiens
tcagaaaaaaaaaggagggtcttgggagtgttcttggcttccagctgaataaatacatgcaacagtagtttgtagtgttaaccaatcatatgcaaatcttrcttatttggaattttggaataattttgaaaatatcgagatgaaactgagttacccaaccaatgcctcaacaaattttatttaacaagtaatgtttattga

SEQ ID NO: 400299 - DNA, 201 bp, Homo sapiens
ttatgctgcatttatttctccatccactagactgctgtattttctccctctgtcctgcagatatgatttggctatcaaagaccttaaagaagccttgattyagcttcgagggaaccagctgatagactataagatcctggggctccagttcaagctgtttgcctgtgaggtaaggagaacagggcctggcctgggcaggag

SEQ ID NO: 400300 - DNA, 201 bp, Homo sapiens
  misc_feature (1)...(201): n = A,T,C or G
catttccactgagccacttcctcaacaatttgaaatttatcaagcaccttctgtgtactaggcactatatgtggtgttggggatatggtgtgtaataagtnacagctctgcctcccttttacctgcatcctcaccccatttgcagcagggagagagtttcccacaagagaacagcaggcccagcagggcaggagctcacag

SEQ ID NO: 400301 - DNA, 201 bp, Homo sapiens
tcagaaaggtgacagttgtatgcagtcaatagagaagaaactccctgtgactgtccaagacgaggcactcagggttgctttgaggcacagccctggggggracaccattcccaaggagttgtatagaatacttggactcagggttgctgaaaactagaacaggtcaaaaggaactgaaaggcttcttgtcccagtgaaata

SEQ ID NO: 400302 - DNA, 201 bp, Homo sapiens
cagagcagaagcattttggggaactgatccttcaggcagcagctgatgtacttcctctctcctccacactccacccctactcgccctctctctctctgctkctttccttttctctctcatggtagggttatgagtcagttgccaaaaggtggggacatttcctgatgcatttgcaacactgagaagttatcttaagggagg

SEQ ID NO: 400303 - DNA, 201 bp, Homo sapiens
gccttactttgttgcccaggctggagtgcagtggtgccgtcacagctcacggcagtctccacctcctgggcttgagcgattgacctacctcagtcccccargtagctgggaccacaggcatgtgccaccacatctgactaatttttaaatttttcgtagagatggagtctcactattttgcccaggttggtcttgaactcc

SEQ ID NO: 400304 - DNA, 201 bp, Homo sapiens
accctgtctttaaaacaaagcaaaccctctgaataatttgtcagttctttctctctctctcctaccaggcccaaatctgtagacaccttttttttttttttgagttggagtctcgctctgtcaaccaggctggagtgcagtggcatggttttggctcatttcaacctccacctcctgggttcaagtgattctcctgcctca

SEQ ID NO: 400305 - DNA, 201 bp, Homo sapiens
tcttactcattatccccacccagctatcggcctcgggacagcaatgagctggtgcccctttcagaagacagcatgaaggatgcctggggccaggtgaaaawctactgcctgactctgtggtgtgagaacacagtggtgagtgcaatgaggggcatctaaagttacatttccactgagccacttcctcaacaatttgaaatt

SEQ ID NO: 400306 - DNA, 201 bp, Homo sapiens
ggggtctcagtgttgcgggcttggtgtttgagcagtaccttcccaacctctgttgggaaatgtgactggcccttctggggacagttatgcaataaatcagyaggtgaggcagaagctctcactggggaggcaaggcaggtctgccaccagattataaatcagctgtgtcataggcacaatgagcctaggtaaccaccatgg

SEQ ID NO: 400307 - DNA, 201 bp, Homo sapiens
actggaatgacaatacaaggaatgcacaccattgtcccagacttcagcttctaaatgtgagagcgaagtggggtgcaccgtgagagcacagggtgggcctsgaggtgccgacgagggcagacagcagagctgggcaccacagggagctagggctctgtgagccgtggctcatctcacacctcctcactgccttgcatcatg

SEQ ID NO: 400308 - DNA, 201 bp, Homo sapiens
gatggattatttcaggctcatcaaggcattgtcatcagttacctgggggcatacattttattaatgtgaagcgcaaaggaccatgcaaaaatgagcccccygggctctctgaagggaggctggacacgagtgtgttggcttgtggaaatattcatgataatttgcatgttttgattggcacttcagattgacaagctattt

SEQ ID NO: 400309 - DNA, 201 bp, Homo sapiens
gccttcagtgccgtccaggacccccactcccggatttgcttcaacattggctgcatgtacactatcctgaagaacatgactgaagcagagaaggtgagtgsaggtgcctctttccgggcctcctctgtgcatttgttattatgattctcaaccccattgcatttcggaaacctaacctctggggagattgaaaagaacaaa

SEQ ID NO: 400310 - DNA, 201 bp, Homo sapiens
agggacctgcccctatctgcctaggcatttggctgcctcctgtcattatcaccagggaggtgcctctacctgccaaggttaccctggctctagaagcagarctttggccagaagctgccacagaacaggggtgggagagagaagaggagctgggtgacagagcagaagcattttggggaactgatccttcaggcagcagct

SEQ ID NO: 400311 - DNA, 201 bp, Homo sapiens
tgagagtttctggacattttgaggcaaaagctagatcgtacgagggaataagagattctacagaaataaataagggttaaagtttaaaatgaaactgggcyggtgcagtggctcatgcctacaatcccagcactttgggaggctggcgtgggaggatcacttgaggccaggagttcaagaccagcataggcgatatagtgc

SEQ ID NO: 400312 - DNA, 201 bp, Homo sapiens
aagtgctgggattacaggcatgagccaccgcgtctggccccctaacttcttaaaagccagcaagccgggccagactggaccaggcgggtgcagtggctcaygcctgcaatgccagcactttgggagaccaaggtgggaggactgcttgagcccaggagtttaagacccacctgggcaacatagtgagagccccctgccctc

SEQ ID NO: 400313 - DNA, 201 bp, Homo sapiens
aggttaagccgcctagagacaaagtcaggatggcttgatctggacactgctggagtttttcttatctgaagcctatgaatgaccagtgtcagtgtgaaatrgtgctttcaagcaaaacgatctttcttaaggctctttgaattatcaaaatgggaagtggtacattttcattgtcactgctgaagacactcagttggttac

SEQ ID NO: 400314 - DNA, 201 bp, Homo sapiens
ggcaggtgaatgagcgagtgcaagaaagagcagggaaacctgccttataaaaccattagatcttttgagagctcactgccatgagaacagcatgggggaamctgtcccggtgatacagtcgcctcccaccaagtctctcccttgacacctggggattacaattcaagatgagatttggctggggacacaaagcctaaccat

SEQ ID NO: 400315 - DNA, 201 bp, Homo sapiens
ttcagtggttgattatcccctttaagaaaaaagcagacgaaattaaaatttgtgttcctgaaaatgatataagagatattttcagccttttttttttattsttcaagaaaggatgcttaggcagaaatagcacatctgagaaactggcttctgtctcagatttagccctttttgaccccttcttctgtgagagggcttttt

SEQ ID NO: 400316 - DNA, 201 bp, Homo sapiens
ggttgcagtgagccgggaggttgcagtgagctgagatcgtgccactgcactccagcctgggtggcagagtgagactctgtctcaaaaaaaaaaaaaaaaaagaatccggggctgctgaacatcccacacttgtgcccacttgcacatgccgagtaagtggaacgttttaattatgtttcataaagtctctagaattaagta

SEQ ID NO: 400317 - DNA, 201 bp, Homo sapiens
ttttctattgagatcttcatctttgtgtaatggcttcataaaaactcattgtatgttaagtatattaactctgtcatatgtttgtttgtcattttcttttytttttttttttgaaacggggtctcgccttgtcgcccaggctggagtccagtggtgtgatcttggctcagtgcaacctctgccttccgagttcaagcagtt

SEQ ID NO: 400318 - DNA, 201 bp, Homo sapiens
aggagttcaagaccagcataggcgatatagtgcgactccatttctacaaaaaagtttaaaaattagctgagtgtggttatgtgtgcctgtggttttagctrttggggaggtgagacaggaggatcacctaagtccaggagctcgaggctacagtgagctgtgatcgtgccactatactccagcccaggtgacagcgtgaga

SEQ ID NO: 400319 - DNA, 201 bp, Homo sapiens
gcctattcatctctgaaatctttcaaatcttctctgcacctgtttctgtctctctagttgaaggtgtagtggaaattgtggttgactccccagcattcatyccacctctcctcctcttccatagcagtcatatggtccccattgtagcagtggccatgcctaggaatggcaggaatggcccctcccctgccccccaattac

SEQ ID NO: 400320 - DNA, 201 bp, Homo sapiens
ttcacattcaggtgtgtcttcctcatgaggactgagatgaagaggggtcagactaaagcactgtttgcacgggatttttttaaatagaatttgttatagcsatatcagtaaagcaagagttatgccaaatgctcatagtaggagtttacttcgacctctttttttttccccactcaatactgccaccagttaagacttaga

SEQ ID NO: 400321 - DNA, 201 bp, Homo sapiens
tgtatggcttcttctagggcctcaaacttctgtattgttgtgtgtcaagttctttctctctttcaggtctttgcatatgctactccctttgcatgaattgwcatcttttaggtcttacctcagatgtcattttttcaagggagtctcctctgacctcctgggctatattagtgccatcctgcattttttcctagcacctaa

SEQ ID NO: 400322 - DNA, 201 bp, Homo sapiens
gagcagtgggggacaccctcctgtcccagcgttgagcaccctgttccccactggcttcgtgtagcagagtgctaaagccattgactatgcataaaaggatygctgttgatgtaggaacaacagagcaaatcgagtgtcatctttatgatgacgcttagggtttgcaggtgggacgctctgacctgtagccacttgcctcag

SEQ ID NO: 400323 - DNA, 201 bp, Homo sapiens
tttcagagggaactgaaattagtaatatattgtgtattttattcattcagctaggtcattaggttgtaatttgttttctaccctggaggagccccatcctstagctggagaaacacaatgacaattgcagtgatggagtctcacccagaataccaaccatgcagaaaggaggactagctaatccagcttagaggtgtcagg

SEQ ID NO: 400324 - DNA, 201 bp, Homo sapiens
ttgtttctaaaataaaataaaactgaactaaagattcagtgaggccagagggctaataatcttccatggaaagaaccacactaaagttagatgcattgatygcaagttgacaaggtgggtcatgtttatgtgacttctttcaatagtcttcattgcctgagagccagaatagaagaaggggattatactttaggggtagag

SEQ ID NO: 400325 - DNA, 201 bp, Homo sapiens
aatgcagagtgtaaggtaaagagaggggccaatgatgactccaattattttgacttgagtacttgaaagatagactcctgattttcttttatttcctcctytccttcttcctcccctcccctcgcttcccctcctttggtgtggtcttgccctgttgccaggctagaatacagtgatgcaattgcatctcactgcagcctg

SEQ ID NO: 400326 - DNA, 201 bp, Homo sapiens
aaaagtagtcagaaagcaaaatgaaggcaaagcatttcgatttaatattaataaattctgacttgatacttttatctaccaagtcactgagcccctaaaakgggcttagcaagtgttgagtactgaagacgtagcagcaaactgagaatttctttttttattcattcaacaaatcaccttttgagccacttccatatgcca

SEQ ID NO: 400327 - DNA, 201 bp, Homo sapiens
cttgggcgcaccccgtcgcatgttcaaccccacccacttcctgtctgacgatctccttacgtcaacggtgcgctggagcgagtgagcagcgatacctaggrcggaagtgctctcggcggaagtgatcgctgtgtgaatcgtgggtgggatggccgcgggccgcctctttctaagtcggcttcgagcacccttcagttccat

SEQ ID NO: 400328 - DNA, 201 bp, Homo sapiens
tgtgtttttctccagccaaatccgaaacattgaaaggaatgggaagggagagtcctgctatttgcctgatgatgttattatttaaatatgatgttttgtaytgtactttgagaaacacacccctaaaggaagctctgtcctcaaatcccagagagagaacagggtatgtcacaaagtaagtacttaggacaggtcatcaga

SEQ ID NO: 400329 - DNA, 201 bp, Homo sapiens
ccctgatttgggaagcatcccaatacatgctatttgcattgcagctgtgggaaagtccacgtttgtgaagttactcacgaaaacttacccagaatggcacrtagctacagaacctgtagcaacatggcagaatatccaggctgctggcacccaaaaagtaagtttttagttgtggtgggtagttggcaggcatgggtgaat

SEQ ID NO: 400330 - DNA, 201 bp, Homo sapiens
acggggtttcaccatgttagccaggatggtctcaatctcctgacctcgtgatccgccagcttcggcctcccaaagtgctgggattataggcgttagccacygtgcctggccgactcgacataattttcatactgtgtggtgagatttgtgattgggcatggaaagccagaatctctggggtaggaattcccaagaggaaga

SEQ ID NO: 400331 - DNA, 201 bp, Homo sapiens
gtcttttaacttttcgccgtaacaaccctatatatagttgaaggtaatgattttcctgttctttctccccctcaagtctctctccttttttttttttttttgacagtctcattctgtcacccaggctggggtgcaatggtgtgatctcggcccactgtaacctccaactcctgggttcaagtgattctcatgcctcagcct

SEQ ID NO: 400332 - DNA, 201 bp, Homo sapiens
ggcgtttgtggcagagtttagtagcagccttctccttcagccctgatttgggaagcatcccaatacatgctatttgcattgcagctgtgggaaagtccacrtttgtgaagttactcacgaaaacttacccagaatggcacgtagctacagaacctgtagcaacatggcagaatatccaggctgctggcacccaaaaagtaa

SEQ ID NO: 400333 - DNA, 201 bp, Homo sapiens
agtctgacaatggtacggctgctgagtttgaaattcagaaaactaatacttgttcccttgagtttgggcgtttgtggcagagtttagtagcagccttctcyttcagccctgatttgggaagcatcccaatacatgctatttgcattgcagctgtgggaaagtccacgtttgtgaagttactcacgaaaacttacccagaat

SEQ ID NO: 400334 - DNA, 201 bp, Homo sapiens
tgtgaaagagcctggcctgttccccaggaaagaggtcaaatctggctaaagcagtgagtccaggggaagagctaaggcagttgagaagtaggaggggtagytttgtgtgacaggtaaagaagatgtcattttctgagccagtgtgcatcaaacttcactaccagatgaatgcagaatagaattatgtacactctgcaaagc

SEQ ID NO: 400335 - DNA, 201 bp, Homo sapiens
ttaaatcttaaaaggaatttttcctccctattggctgtattcattatggtagttctggttagcatgaattgatctgttatcagtctgacaatggtacggcygctgagtttgaaattcagaaaactaatacttgttcccttgagtttgggcgtttgtggcagagtttagtagcagccttctccttcagccctgatttgggaa

SEQ ID NO: 400336 - DNA, 201 bp, Homo sapiens
agcaaggaaagtcatgtcattatattgccgtactacagacgggtggagtgaaggggaaaaactggaaggagggaacagcttttgccaggagctcaatacarcttacctcagtgacctgtggatgggtagacaatgaggaaatagaagcccacaaggactgcactgctagtaccttatgaaggcaggaatttactcctggac

SEQ ID NO: 400337 - DNA, 201 bp, Homo sapiens
catctacttttacattttcaactgttattaaatgctctgcctctggaaggttgagacatggaaattgcaaattaaatcttaaaaggaatttttcctccctrttggctgtattcattatggtagttctggttagcatgaattgatctgttatcagtctgacaatggtacggctgctgagtttgaaattcagaaaactaatac

SEQ ID NO: 400338 - DNA, 201 bp, Homo sapiens
ttaagttttttttaagcctgctgactgatttttattaactttgcctagaatgcctttaagcttggagcctgtatgatcctgggtactcagtcttggggttrgaatataacttgagggcaagctctcagcctagatcatcatttcagttatagtacttacctctgagtagctactccataaacatttgttgattgaatgagt

SEQ ID NO: 400339 - DNA, 201 bp, Homo sapiens
aagacagcagaagcaaaggcatggcttgtaatgcccaagatagacattatgggtgggcctcagagcccccgaagactgcattgtagcagccaaaacagcaragagctcatcagggcttggggactgtcttttaggtttgtttgaagagactgtaccagagggccagggaggaggagaaaggaattgagctggcctatctag

SEQ ID NO: 400340 - DNA, 201 bp, Homo sapiens
agctggagcccttccctgagaaactcttacaggccaggaagccagtacagatctttgagaggtctgtgtacagtgacaggtaaaatgccaagccctccacsagtcacaagccccatgctcagtgctgcctgtttgatcttgcacagatcctgcactgctatggtcactgatgattataatttgaaaaattatcttcttttt

SEQ ID NO: 400341 - DNA, 201 bp, Homo sapiens
tactggaaatggttggaaatgtcaagcattttccaactcagaagtttaatattgctggacaccgtggctcacgcctgtaatcccagcactttgggaggctraggcagtcacctgaggtcaggattcaagaccagcctggccaacatggtgaaaccctgtctctactaaaaatagaaaaattagccaggtgtggtgtcaggc

SEQ ID NO: 400342 - DNA, 201 bp, Homo sapiens
tggcaggtgaatgagcgagtgcaagaaagagcagggaaacctgccttataaaaccattagatcttttgagagctcactgccatgagaacagcatgggggamactgtcccggtgatacagtcgcctcccaccaagtctctcccttgacacctggggattacaattcaagatgagatttggctggggacacaaagcctaacca

SEQ ID NO: 400343 - DNA, 201 bp, Homo sapiens
gcagctgcatggccaacacgaagcctggcttattcacaagacaacgaagtaagtggggagaaaagaatgtatcagagacagagacctggctcccaacagcyagttgttaaaaacaagttcagcatgcagccccctgtaggaaggttcagaatatactggaaatggttggaaatgtcaagcattttccaactcagaagttta

SEQ ID NO: 400344 - DNA, 201 bp, Homo sapiens
aaataaggatacatttgtaaatgacaagtgatttttctgactttaccctaaaatcatgtaagatatgtaaaacaaaccctataggctatccgttccttgtktacgtaccccgagagagcctactttttataaaagctaaatatgtgaattacaaatggctgggctataggttttacttctttttcagctgttggatatccc

SEQ ID NO: 400345 - DNA, 201 bp, Homo sapiens
ttctatttcttagtgcttccggaaagcctcctagaagaaaaaaaataaggatacatttgtaaatgacaagtgatttttctgactttaccctaaaatcatgkaagatatgtaaaacaaaccctataggctatccgttccttgtttacgtaccccgagagagcctactttttataaaagctaaatatgtgaattacaaatggc

SEQ ID NO: 400346 - DNA, 201 bp, Homo sapiens
  misc_feature (1)...(201): n = A,T,C or G
ctgttattaaatgctctgcctctggaaggttgagacatggaaattgcaaattaaatcttaaaaggaatttttcctccctattggctgtattcattatggtngttctggttagcatgaattgatctgttatcagtctgacaatggtacggctgctgagtttgaaattcagaaaactaatacttgttcccttgagtttgggcg

SEQ ID NO: 400347 - DNA, 201 bp, Homo sapiens
tccaaaccccttgccttgtttttttctattgagatcttcatctttgtgtaatggcttcataaaaactcattgtatgttaagtatattaactctgtcatatrtttgtttgtcattttcttttctttttttttttgaaacggggtctcgccttgtcgcccaggctggagtccagtggtgtgatcttggctcagtgcaacctct

SEQ ID NO: 400348 - DNA, 201 bp, Homo sapiens
aaaaataatctatttctttttgttgcttttatggttttatgttttatgtggctttacaagttataagactttagttttttcacaaatggttatctacttakccagtagtattcttgtttattcctgagcagaatatatattttgtttttattgtgactgagatcttttttccacatcatcttctgaaactggttattgctg

SEQ ID NO: 400349 - DNA, 201 bp, Homo sapiens
agttcaagaccagcctggccaacatggcgaaaccctgtctctactaaaaatacaaaaattagtcaggtgtggtggcacgtgcttatagtcccagttactcrggaggctgagaggctggagaatcagttgaacccgggagttggaagttgcagtgagccgagatcaccccactgcactccagcctgggcaatagagcaagac

SEQ ID NO: 400350 - DNA, 201 bp, Homo sapiens
aacttaaacataaagcagtagagggcttccctaataacatgtttcctccagcattcaaaattagtgacttcacatcactaatatgtgtcttacttattttragtataaatgattgggcaaagaatccttgggaaaaaatagcctatttatttcaaatactgtatagtggattctctgtgcctgtgactcacctccttccct

SEQ ID NO: 400351 - DNA, 201 bp, Homo sapiens
gagagatgaaagagaattgagtgacttcccagatatagtagggagaaggaaaaacaaggaaaattccaggtccgtggcttggatgactggatggatgatgktcatcattaaccgacttaggatacttcagaggaagagcaggtttaaggtggagatgggaaaagaatggtgtagatcctctgattgcataagaaaacaaga

SEQ ID NO: 400352 - DNA, 201 bp, Homo sapiens
ctgattgcataagaaaacaagacagcagaagcaaaggcatggcttgtaatgcccaagatagacattatgggtgggcctcagagcccccgaagactgcattrtagcagccaaaacagcaaagagctcatcagggcttggggactgtcttttaggtttgtttgaagagactgtaccagagggccagggaggaggagaaaggaa

SEQ ID NO: 400353 - DNA, 201 bp, Homo sapiens
aatttgtgtaaatcatcagattgagtcattttcctactttaaaacttccattttcttccgatattaaaataaaaaccagacaacaagcacctgggggggggaaatcccctcttaaaattacaatttctatttttaattttgtcttcagttataaaatttattttaaagttatacaaaaatgaagtggttggattgtggaat

SEQ ID NO: 400354 - DNA, 201 bp, Homo sapiens
caactcacaactaagtaggagaaaacagattcgacataattttcttttttttttttttttttttttttttgagacagagtcttgctctggcacccaggctrcagtgcagtggtgtgatcttggctcactgcagcctccgcctcccaggttcacgccattctcctgcctcaggcctccaagtagctgggactacaggcgccc

SEQ ID NO: 400355 - DNA, 201 bp, Homo sapiens
acacattccagacattttcctttttgagccgcctgaaagtacagctggagcccttccctgagaaactcttacaggccaggaagccagtacagatctttgaraggtctgtgtacagtgacaggtaaaatgccaagccctccaccagtcacaagccccatgctcagtgctgcctgtttgatcttgcacagatcctgcactgct

SEQ ID NO: 400356 - DNA, 201 bp, Homo sapiens
caatagggtgtgtcatatagcataggtgtgtagcaggctatcccatctaggtttgtgtgagtacattttctgatggtcacacagtgacaaaattgtctaaygacacatttctcagaacatattcctgttgttaagtggtacatgattgcatgtccacaattgtttgatattcctcccttctagaagtagagcgtaattctt

SEQ ID NO: 400357 - DNA, 201 bp, Homo sapiens
ggaccattgaaaattctgttaaaaatgtgaaattaaacttctgattttctccttcccacaggtaaacacctttgtaaagaatctgtaaccaataccatgawgttcaggctgtgatctgggctccctgactttctgaagctagaaaaatgttgtgtctcccaaccacctttccatccccagcccctctcatccctggagcac

SEQ ID NO: 400358 - DNA, 201 bp, Homo sapiens
gaagtagagcgtaattcttgccttgaatgcagctggactttgtgatttgtttctagtaaatagaaagtagcaaaaataagaaatacctttctagggtaggwcataagagacactgtagcttccatcttgttctgggggaagccagctgccatgtcaggaagcagccttttcaagggggccacacggaaggaactgaggcct

SEQ ID NO: 400359 - DNA, 201 bp, Homo sapiens
cttagtattagtcatagatttaataatggtaccatcctcacatttctagaatgaacttttttttggtcatgatgtactattccattaatttggtaatgtgytgtttggaattttgcatgtatatttatttatacagttggttggtattattatttgtgtgtatggtgatttttgtttgttttgacttgtgggttcttttta

SEQ ID NO: 400360 - DNA, 201 bp, Homo sapiens
atttggtaatgtgttgtttggaattttgcatgtatatttatttatacagttggttggtattattatttgtgtgtatggtgatttttgtttgttttgacttktgggttctttttaggcagggtcttcctctgtcacccaggctggagtgtagtggcatgatcatagctcactgcagccttgaagtcctggactcaggtatct

SEQ ID NO: 400361 - DNA, 201 bp, Homo sapiens
ttgttttatcagcaaggccgtatcttttgttttctcctgtttctgacaacagccctgtctgagcacagagactagtcctctccttttgaattgctaagtawttttgtgtccaattattgttcatctgtttgcttatatttttggaaggatgtttgcatttgttctgtagctgagatgggttctttcagaaattgtgttggt

SEQ ID NO: 400362 - DNA, 201 bp, Homo sapiens
agaaactccctgagattccttccaccatcagtaatcgtcccttcatcacatgttctgccttacattccagcttcgtacatcctcatcaccctcttcctttytgcactgtgagctctttgagttcaggaactgtcttgttcacctttagatggagggtgttggaatgatgaggttagaggaagccaggtttgagtcccttca

SEQ ID NO: 400363 - DNA, 201 bp, Homo sapiens
ctacctccagctcttagtcaggggccacgtgtgaggctggtatgtgtgggcttgcggggtcagaaggagggaaatcccgaaaatacctctgagttaaatgyttttctggtccactctgctctatatgtgttgtttctgctgaagcctttcaaagggctaagacccttctttggaatctaatagtgctattttgccaaattg

SEQ ID NO: 400364 - DNA, 201 bp, Homo sapiens
cagtgattggtgattgaataaaaaatacagatccaaagtgcttttgtacaaaattcacttttgcattgttgagtcaatggcagatccagaaaagaatctgrggctgggcgtggtggctcacgcctgtaattccagcactttgggaggacaggagttcgagaccagcctggccaacatggtgaaaccctgtctctactaaaa

SEQ ID NO: 400365 - DNA, 201 bp, Homo sapiens
gtgttaattctatatatggttcttcctctgcttttgttatattgaagtggcatgtcatctccctttagagagtcttatttaataggtaggaaaatctcatmcctgattatgaaattttgactaagctggggatctgattctacctttttggtggaaggaaacttttgtaatttcttctttcattgattattaaacctgttt

SEQ ID NO: 400366 - DNA, 201 bp, Homo sapiens
  misc_feature (1)...(201): n = A,T,C or G
agccctccaccagtcacaagccccatgctcagtgctgcctgtttgatcttgcacagatcctgcactgctatggtcactgatgattataatttgaaaaattntcttcttttttaaagacaacactatacagatttgtccagagttgtacttctaccagattgtcatctatgtcaagaaaggaaattgggtttttcatcaact

SEQ ID NO: 400367 - DNA, 201 bp, Homo sapiens
tttctggcatggagcaagctggtagccacctaatgtaaccatcacatgctaaaaggcacataatagacacttaagtagcagtgtatattctaagaaatcaratgattcagtggttgattatcccctttaagaaaaaagcagacgaaattaaaatttgtgttcctgaaaatgatataagagatattttcagccttttttttt

SEQ ID NO: 400368 - DNA, 201 bp, Homo sapiens
gaaaagtgtttcagccatagaaagcaacatgtgccaaggtggtgaagcctgaagaaacacatgcagttttttgggggtttttttgtttgtttgtttgtttktttgatggagtctcattctgtcacccaggctggagtgcagtggtgtgatctcatctcactgcaacctccgcttcccaggttcaagtgattctcctgtctc

SEQ ID NO: 400369 - DNA, 201 bp, Homo sapiens
ctgcagccttgaagtcctggactcaggtatcttcccacctcagtctcttggtgagttgggactataggtgcataccactgtccccatctacttaaaaaaawtttttttttttttttgtagagatagggtctcactttgctgcccaggctggtctcgaactcctgggctcaagcgacccttccacctcggactcccaaggtg

SEQ ID NO: 400370 - DNA, 201 bp, Homo sapiens
actgcagccttgaagtcctggactcaggtatcttcccacctcagtctcttggtgagttgggactataggtgcataccactgtccccatctacttaaaaaawatttttttttttttttgtagagatagggtctcactttgctgcccaggctggtctcgaactcctgggctcaagcgacccttccacctcggactcccaaggt

SEQ ID NO: 400371 - DNA, 201 bp, Homo sapiens
tacaaatggctgggctataggttttacttctttttcagctgttggatatcccacctgcctgttttcctctcttctctcccaagccatgcctctcggactcmgaagttgaattacatataaccacatgggttgtttggaaacatagtcagtctttatttctagccgcttcatgaagtaggtgtgtgagaccctcagaggaaa

SEQ ID NO: 400372 - DNA, 201 bp, Homo sapiens
cactgcagccttgaagtcctggactcaggtatcttcccacctcagtctcttggtgagttgggactataggtgcataccactgtccccatctacttaaaaawaatttttttttttttttgtagagatagggtctcactttgctgcccaggctggtctcgaactcctgggctcaagcgacccttccacctcggactcccaagg

SEQ ID NO: 400373 - DNA, 201 bp, Homo sapiens
agctcctcctttactctgactgggtcatcagagtgtgtagtctcagtggtttccttagtaagatgtgaggaggaagaggagaattttctcacctcatcatratactgccctaatttatagcccttttttgaactgtgatgccattgggaaggcaggatggactatagcagttccattctgtgactctctggctggtgccat

SEQ ID NO: 400374 - DNA, 201 bp, Homo sapiens
gagctgtggcttctgctgactggtagtgaccttgggcagcccctggagacctttccactggagagatccttgcctgtaaaatccactggttcaatctagaygatctctaagggctcttctggagtgggattctgagtcaaggtgagttttttttttttagagatgtactgctctcagcttttgagatatacatccaatata

SEQ ID NO: 400375 - DNA, 201 bp, Homo sapiens
cagtcacctgaggtcaggattcaagaccagcctggccaacatggtgaaaccctgtctctactaaaaatagaaaaattagccaggtgtggtgtcaggcgccygtaataccagctactcgggaggctgaggcaggagaatcgcttgaacctgggaggcaaagattgcggtgagccgagatcgcaccactgtactccagcctgg

SEQ ID NO: 400376 - DNA, 201 bp, Homo sapiens
ggtctcaaactcctgggctcaagtgatccacccaccttggcctccaaagtgctgggattataggcatgagccaccatgcctggtcaagtcttctctctttsaagccaaacacctccagttttcctccaggctattctttactctgaagtaactttacctaagtgatgagtcctagtttgttcactttccactttgaattta

SEQ ID NO: 400377 - DNA, 201 bp, Homo sapiens
ttcttgacattttgaacaaagaattggacaaaacgtacaaagcaaggaaacaatgaagcaacaaaagcacagatttattgtacatcaaagaacactccttscggtaggaagggcccaagcaagcagcaattacagaattttctggggtttaaataccttctagaggtttcccattggttacctggtgtacaccctatgtaa

SEQ ID NO: 400378 - DNA, 201 bp, Homo sapiens
catcatatgctatcttgctgctagattttagcattacatagctatggtaggcattgtcagtttatagaaaattttgtggggagaaaaaaacatgccttagraaaagatgagtggtaacaacagaactctttgtcccagcttgtggaatgagaatagtggagctaatgaaaatcaacatgttgaagtaatatactcttaaga

SEQ ID NO: 400379 - DNA, 201 bp, Homo sapiens
tccagcccaggtgacagcgtgagaacttgtttctaaaataaaataaaactgaactaaagattcagtgaggccagagggctaataatcttccatggaaagamccacactaaagttagatgcattgatcgcaagttgacaaggtgggtcatgtttatgtgacttctttcaatagtcttcattgcctgagagccagaatagaag

SEQ ID NO: 400380 - DNA, 201 bp, Homo sapiens
tccttctctgtaaaatggagatgatggtagtatctccctcaaaggtgtaagtgaactgtgacacatttagagtgcttggcatatggtggtcaatgtgggakctgttatgatccatatggccatggcagccactgctgaagatgtgttctggtatgacagtctgaactggggcacccagcaggtatgatgagggcaagggct

SEQ ID NO: 400381 - DNA, 201 bp, Homo sapiens
atttctttatcactttgattggagctatgttaaatgtagattaatcacaaagagctgtgttgtatgagcaacaacaaaaaacagtcctatccaaaaaagcrcttttgttctccaaattctggcattttctatgctaggcaggcctgctctgctttgctggctggctttttgggggttcatgttactgagcagcgatgaaag

SEQ ID NO: 400382 - DNA, 201 bp, Homo sapiens
acaccagcctgaccaacatagtgaaactctgtctctaccaaaaatacaaaaatcagctgggcgctacttaggaggctgaggcaggagaattgcttgaaccygggaggcagaggttacagtgggccgagatcaggtcactgcactccagcctgggggacaaagcgagtctccgtttcaaaacaaaacaaaattaaattaagg

SEQ ID NO: 400383 - DNA, 201 bp, Homo sapiens
cataccttaggccccagagactaaggtgtgcaaaggacacattagattcattgaggaagaaacactaataaactctctggggctggagagtggcactgctrgaaattgggggtcctaggcagaaagagaaggaagaaggcagaaaaatgaatggcaggctttgcttacagctttgtgaggctctatttaccatccctcatc

SEQ ID NO: 400384 - DNA, 201 bp, Homo sapiens
tgggagaccaaggggggcagatcacgaggtcaggagatcgaaaccatcctggctaacacggtgaaaacccgtctctactaaatatacaaaaaaattagccrggcatggtggcgggcgcctgtagtcccagctactcaggaggctgaggcaggagaatgccctgaacctgggaggcggagcttgcactgagccgagatcgtg

SEQ ID NO: 400385 - DNA, 201 bp, Homo sapiens
gaagcgttggtgtctggtgccaatggggctgaagcattgaacacggttgtattcactgtggatgagcacatgacacggggcagggtcagcagctgtggggmtgggagctgcattcccaaccccttcccatctccttccagttccttagagccaaggcctggcttccattgtgagggcagctccctctccaccttcctcact

SEQ ID NO: 400386 - DNA, 201 bp, Homo sapiens
aagtccagcctgggcaacatagtgggaccccatctcttaaaaagcattacaaatatgtataattttttatttttatttatttatttatttatttattttawttttttttttttaagacagagtctcactctgtcacccaggctggagtgcaatggcatgatctcgactcactgcaacctctgcctcctgggttcaatcgat

SEQ ID NO: 400387 - DNA, 201 bp, Homo sapiens
gctgccagcagcttacaggccccttccctcatccggatctcatggtctagcttcctctgcaactccgtgtcctagccagggttgggggaagggtgagaagkaaatgtcagtcagtggacaggctaaagcactccccagtccccaggtgggctgtggccagtaaaactgacaagaaactaatgttttaggcagttcaagagc

SEQ ID NO: 400388 - DNA, 201 bp, Homo sapiens
tttttttaagcaaattggcataacatccagaacctgcttttggaagcaaagtttgggacttggaacactggcttttcccagaaccctgtgtccttaacttyagtatatgattttatctgaatgtgctaataccattttctctaagtttactgctttcaaaagaaactttttatgaggtgcaagctaagtcattctcactga

SEQ ID NO: 400389 - DNA, 201 bp, Homo sapiens
gaggcaggagaatcgcttgaacccaggaggctgaggttgcagtgagccgagatggcgccactgcactccagcctgggccacagagcaagactccgtccccmaaaaaaaaaaaaaaaacaaacaaactcatcttccctgctttgattttctccctacactgatgcacctccctccaggtccactggtgtgtcctccccttcc

SEQ ID NO: 400390 - DNA, 201 bp, Homo sapiens
ggagactcccacctgctctcactccctcactccccttcagactgctttgaggcctaacttgaaaaaaattctcccaatgttgccaagagactgaaagaatwaataagtactcctccgattctgcagatggggagactgaatgtaggttaaccccaggcaccattaagccttgtagatgggaaggaactggcaacgactttc

SEQ ID NO: 400391 - DNA, 201 bp, Homo sapiens
gactcagcccgctcttcagccatctccttgtccaaagtggccatctcaatggcatcagcagtatcagccatctcctccatatagcgttcctttgcctccakcgcctccttggcttcctgaggaagaagtggaggtgggagggggtaccagcacagagatgccccaggcctttctcacagtatgttccaggctccagctcca

SEQ ID NO: 400392 - DNA, 201 bp, Homo sapiens
tgagagttatccctcagactcaagtgatgccagggacatctagttggcaagggatcagtggacaaggagcataccacctacagtgttcactgacgctgcamagaaacctatacaccccaaattaagagaatcaccacctaccggccctctgagcttgggagatgaggtcagaggcaaggaatggggatgggaaggtaggtg

SEQ ID NO: 400393 - DNA, 201 bp, Homo sapiens
gagagttcatctaagagcaaaccaggcctcaagcagcaagcatgggacatacaaccttgaatatattagtaagagcccccatcaagtgaaagcttccctgyctcctgccccaagcccaaattcttgccccacacctgatagtacttgatggccttggtgagaggctccacattgacagtctcatccagctgatccttgtgc

SEQ ID NO: 400394 - DNA, 201 bp, Homo sapiens
ccagttccttagagccaaggcctggcttccattgtgagggcagctccctctccaccttcctcactttgccccagttagggaagggctggtgggacagagcmtgggccacagctctgacagaccagctgggccaggacagcacctgcctgaccacgaacagctggttttaaaaactgaaataaggaatctggagccaagaca

SEQ ID NO: 400395 - DNA, 201 bp, Homo sapiens
cttccattgtgagggcagctccctctccaccttcctcactttgccccagttagggaagggctggtgggacagagcctgggccacagctctgacagaccagmtgggccaggacagcacctgcctgaccacgaacagctggttttaaaaactgaaataaggaatctggagccaagacaaagtgctaagacaaactggaggata

SEQ ID NO: 400396 - DNA, 201 bp, Homo sapiens
cacacagttcatactcggagccatgatcccatcccagaaaggctggcccagagcctataaacttcccagctctacaccatgaacttccctgccctgttcayctccacagatacgtcccttcccttccagcctctttttttgcccaggctggagtgcagtggcgtgatcttagctcactgcaatctctacctcccaggttca

SEQ ID NO: 400397 - DNA, 201 bp, Homo sapiens
cccccgagggacaccgagggaagtccttcccgaacatctccgccccggcggtggtggccgctgaggggtgtggcggggcgacgtggcaccgagcgccgccrcagctctcgactggggcgcttcctcggcgcggagggctggtacccgaagcccgcctttcggagggagccgctctcctgcgactcggggcgtcgccggggc

SEQ ID NO: 400398 - DNA, 201 bp, Homo sapiens
cctgtcggtggaccagaaccctctctgggggactcagcagctgtctgactgcaggtcccctcctaactgcagggtgagcttaccttggtaggaaaatagcrgctgaatttgaacttcttcagggtcagggtcatggagtatgtcccaaagaaaaggatgaaggacatgagcgccaggtctgggataaacttgcaggaattc

SEQ ID NO: 400399 - DNA, 201 bp, Homo sapiens
cccaggaaattttcaagacacagcgggtagccacaagcctctgggtgtcttgattctcctttacccctaccccaggccttaccttggatggggaaggaagmggggggactgctccaggagaggtgaggaccggcgtggggatgatgggtgctgccagcggagtctgagccggggtgctgggctcactgctgctcagctcac

SEQ ID NO: 400400 - DNA, 201 bp, Homo sapiens
ggttagagcagtcttcatgacaccaaggacagagatctaaagggaaaggctttttttaatgggatcattttacttaaggaagagatgctcatctattttaktttagtttagtttagtttagtttagtttagtttagtttagtttagttttttgagatgcagtctttctctgtcgcccaggctagagtgcagtggggtgata

SEQ ID NO: 400401 - DNA, 201 bp, Homo sapiens
caatggaagcaaaagcaaattgaaagagagtgcccccaaacaagcttttatgatgaagagtgacaaagagtgagagtatactatagtaagactgggcttcrcagtaaaactaggaatatgggcccattactaagtaggtggcccatggaccgggaaagaaaccctccacagttctcccccctcatcccagtctcctaaatg

SEQ ID NO: 400402 - DNA, 201 bp, Homo sapiens
tgtgtgcagagatacttgagaaaatgtttttaaagaaacaaagctagggaaggtcatcactggaaaactattaacaagcttaatatttaaaaaaaaaaaaaccaactatgtttcaaacaaaaacaaaattaaaatcctaaagttaaatcttaaaaaaaatgtttaaaatagtacataagtgttttagtctgttctcacacc

SEQ ID NO: 400403 - DNA, 201 bp, Homo sapiens
aaaaatgtcaatcctcccaagtatatctatagattcaatgcaatccccaacaggatgtgtgtgtgtgtgtgtgtgtgtgtgtgtgtgtgtgtgtgtgtggtgaaattcaaagagctgattctaaaatttatatacatgaacaaagatcccagaaaaggagcaatggactcatactccctaaattaactggattttatgact

SEQ ID NO: 400404 - DNA, 201 bp, Homo sapiens
taaaaatgtcaatcctcccaagtatatctatagattcaatgcaatccccaacaggatgtgtgtgtgtgtgtgtgtgtgtgtgtgtgtgtgtgtgtgtgtggtgaaattcaaagagctgattctaaaatttatatacatgaacaaagatcccagaaaaggagcaatggactcatactccctaaattaactggattttatgac

SEQ ID NO: 400405 - DNA, 201 bp, Homo sapiens
atgatcctatggcccttgttcctagagcaccccgggtttgttttttcctgtgtatagatgattctcagaatggccaaagtggccaggcacggtggctcacycctgagttcccagcactttgggaggccagggcaggcagatcacgaggtcaagagatcgaaaccatcctggccaaaatggtgaaaccctgtctgtactaaa

SEQ ID NO: 400406 - DNA, 201 bp, Homo sapiens
gaattgcgtgaacctgggaggcggaggttgcagtgagctgagattgcgccattgcactccagcctgggcaacaagagcgaaactcagtctcaaaaaaaaawaataataataataataataatatctgatttgtgagattaataaaatagtagaattaaaatatagggttacaaaaatgtataaattcaaagagaattatta

SEQ ID NO: 400407 - DNA, 201 bp, Homo sapiens
cagcttgtcttttcatccaccctttacagtgcttggcacacagtaggcgctcatataattgttcaacgaatgaatgaatgaacttttctcttgtgttgtccggccttcggtgacactagcggcgtcaggcaggagtttgacttcctcagcctatcatggcacgttgccgaggcttcagcgccttacaggacctcgctccag

SEQ ID NO: 400408 - DNA, 201 bp, Homo sapiens
tcagcttgtcttttcatccaccctttacagtgcttggcacacagtaggcgctcatataattgttcaacgaatgaatgaatgaacttttctcttgtgttgtccggccttcggtgacactagcggcgtcaggcaggagtttgacttcctcagcctatcatggcacgttgccgaggcttcagcgccttacaggacctcgctcca

SEQ ID NO: 400409 - DNA, 201 bp, Homo sapiens
ctctgaaggcaggacatctttatcttccacaaggcctaaagtagggcatacaataattgtgcagcaaatattttcgattgacttatgattttttttacccrtagtaatgtattaaggggctgaacccactatccacttatttccttcaactcaatcggggtatagatttggaaaccccacaggagtcccaggagaccacca

SEQ ID NO: 400410 - DNA, 201 bp, Homo sapiens
cagagagctgcactggcctggggagccggctgggtccgagggccgcgggaaatcggaggagccagggcgccagcatagctgcaccgcctccagctgcagcrctcaggacgccggtgacatcagctcccaattgccgcgagagcaactgaggggtaccagggcgctggaggtccctccgggcacctggctgggcttggctca

SEQ ID NO: 400411 - DNA, 201 bp, Homo sapiens
tacgtactagaagagaaagattcagttctattagatgagaacaagatagaactaacttaccatggtgtcagacagaacaagtttcctgtcatttctgttamtttggagtggttttgcacccaaaaacctcaaggccagggtgataaaaacagtataatttttaaaggaaaaccaaatatcctatactcatttggaagattt

SEQ ID NO: 400412 - DNA, 201 bp, Homo sapiens
aaaaatccactccaagtcacatcattatgaagcattaggacttcatggataaagaaatcttaaaagcttccagaaaaaaataagtcatctaccaagaatcygaaacaagaattgatatcagatttctcaatcactacagtggaagctacaagacaatgaagtcatgcttccaaaagtgagacaaaattatttccaacctag

SEQ ID NO: 400413 - DNA, 201 bp, Homo sapiens
acttcccttccctatactgcattgtttaagcaagctgcaatttgagataagcagtagacactagcacttagaggtaagtagttccactctaagggcttagyatatttgggtcttccaacagcaagttcctattctccacccttgaggccaggaatggaaatgaaaagaagcaggtatatcagaaaggccccaacccaagag

SEQ ID NO: 400414 - DNA, 201 bp, Homo sapiens
tgggtgtcttgattctcctttacccctaccccaggccttaccttggatggggaaggaagcggggggactgctccaggagaggtgaggaccggcgtggggaygatgggtgctgccagcggagtctgagccggggtgctgggctcactgctgctcagctcacctgctgacgctgagccagaggggcccagggagctactggcc

SEQ ID NO: 400415 - DNA, 201 bp, Homo sapiens
aaataactttgcttgactagcgaatagtaaagaaccctagcttagctgaagtaacgaattgtagatggttattctatcaaactataagccttttgaagcayagcccacaccttttcctctttatgatccaatagccagtaagtagctcatggtcaaatatttattgaataaacatttattgaataacattgcaacatactg

SEQ ID NO: 400416 - DNA, 201 bp, Homo sapiens
acgtttagaggtgcctttgagaacactaacagtcaacagcactgcttgctgactgcactgctgactggctacctgagagtggcgtggggacaggtttcaayggctctcacctggtggggacaggcacctcggtcactcctcccagcatggccgactggatgaggcgcacgaacgcgatgaatggctggtctaggaagtcca

SEQ ID NO: 400417 - DNA, 201 bp, Homo sapiens
atctccaggtgcaagatattttctccaaggagctctgacatgatccagagagcaactttgcagcaaggggctgctttccatgtagcgcatggagccagtasaagaaggacaaggatgcctgggctggcctctttcctgcccctgacctgctgtgggaatgaggaccagcagttacttgggcctcaactagagttaaagcag

SEQ ID NO: 400418 - DNA, 201 bp, Homo sapiens
catttttgtttaagtgaaaaagatacggtgagagagacatagtggaaaatgggaagtttggaggaagatgggaaggaagaagccagtgagtaggaagtgasaatcgggagtggagggagtgagggacgcggtgctgagcgatggggaagagaagcatgccaggaaggcgcagcgtctctgggcacccagcatggggcctgg

SEQ ID NO: 400419 - DNA, 201 bp, Homo sapiens
ctgtcttcttaattagaaaggacccaagaaagtttgctagagttaaaagacttggttactatgaatgaataattgaaatgagctagaaaagcatctgacaragtcaactatgattttgacaccttttgtacgttctgaagctccattattttctgggacaaccatatatagtaactaaatatttctacagtaaggtcccga

SEQ ID NO: 400420 - DNA, 201 bp, Homo sapiens
tgaacccgggaggcggaggtttcggtgagccgagatcgcgccattgcactccagcctgggcaacaagagcgaaactcccatctcgaaaaaaaaaaaaaaaagaaaagaaaaaaaaagcaatactatatttaacaggattaaaaaaaacacacaaaaactgtcggccgggcgcagtggctcacgcctgtaatcctagcactt

SEQ ID NO: 400421 - DNA, 201 bp, Homo sapiens
agtaacatcctccatagagtgaaaaacaacaaaaaagagtcccttccagagggaaacagtaagggtaaaagcctatcttagtggtgaggaaaagaaatctyctctgattattcaaataataaacttgtactcatagaagtttaggaccagaatatatatatatatatatatattttttttttttaaagtcccaaaacaaaa

SEQ ID NO: 400422 - DNA, 201 bp, Homo sapiens
gaaagatgtcccttctggtcagtttttctttgagggtaagtgggtactggaagcccaatgtggataggagggcattctgtggacacggcacaaaagacagsggaggcagggttactgaaaattggcattttttcataatattcatcagttacaaagagattgggctgcagaagcaaaatggaagacatggagtgccaggat

SEQ ID NO: 400423 - DNA, 201 bp, Homo sapiens
gtaagaggaacagaaacagaatatgagaatatggcaagggaaggagacagaaaagggaaaaagcagaaagagagtatcaaagcacagtgagaaaagaagaatgaaggggacaaggaaaatgatacagagaggcagagagagatagtgacaaaggacagggggaggatggaggcagaggagagagggaggaaaagataagag

SEQ ID NO: 400424 - DNA, 201 bp, Homo sapiens
atactcgggaggctgagacaggagaattgcttgaacccgggaggcagaggttgcggtgagctgagattgcgccattgcactccatcctgggcaataagagygaaactccatctcaataaataaataaatttcatgagacctgatggttttataaagagcagttcccctgcacattctctcttgcgtgctgccatgtaaaac

SEQ ID NO: 400425 - DNA, 201 bp, Homo sapiens
agtaagaggaacagaaacagaatatgagaatatggcaagggaaggagacagaaaagggaaaaagcagaaagagagtatcaaagcacagtgagaaaagaagaatgaaggggacaaggaaaatgatacagagaggcagagagagatagtgacaaaggacagggggaggatggaggcagaggagagagggaggaaaagataaga

SEQ ID NO: 400426 - DNA, 201 bp, Homo sapiens
aatggcatcagcagtatcagccatctcctccatatagcgttcctttgcctccagcgcctccttggcttcctgaggaagaagtggaggtgggagggggtacmagcacagagatgccccaggcctttctcacagtatgttccaggctccagctccagtctagtttccagcatgcttccttaggtctcaggctgccccagccac

SEQ ID NO: 400427 - DNA, 201 bp, Homo sapiens
tgggtgtggtggtgcatgcatgtaatcccagatactcgggaggctgagacaggagaattgcttgaacccgggaggcagaggttgcggtgagctgagattgygccattgcactccatcctgggcaataagagcgaaactccatctcaataaataaataaatttcatgagacctgatggttttataaagagcagttcccctgc

SEQ ID NO: 400428 - DNA, 201 bp, Homo sapiens
tagtaagaggaacagaaacagaatatgagaatatggcaagggaaggagacagaaaagggaaaaagcagaaagagagtatcaaagcacagtgagaaaagaagaatgaaggggacaaggaaaatgatacagagaggcagagagagatagtgacaaaggacagggggaggatggaggcagaggagagagggaggaaaagataag

SEQ ID NO: 400429 - DNA, 201 bp, Homo sapiens
ttcaagaccagcctgaccaacatggagaaaccccatctctactaaaaacacaaaaattagctgggtgtggtggtgcatgcatgtaatcccagatactcggsaggctgagacaggagaattgcttgaacccgggaggcagaggttgcggtgagctgagattgcgccattgcactccatcctgggcaataagagcgaaactcc

SEQ ID NO: 400430 - DNA, 201 bp, Homo sapiens
taaagaagacatatgatatggtttggctgtgtcaccacccaaatctcatcttgaattgtagctcctataatccccatgtgtcatgggagggacctggtggyaggtaatttaatcatgagggtgggtttttcccatgttctcatgatagtgaataaatctcgccaggcgcagtggctcatgcctgtaatcccagcactttgg

SEQ ID NO: 400431 - DNA, 201 bp, Homo sapiens
tttcctgaccttggcatgggccttagtctcagcaaacttgattttgaagtcaaaggtctctggaggtggctgctgttgcctctccacagatgcttcctgckggtttgtcagttcccgattcacatcctaggaggagagacagtgaagcacagctgggtcataaggaagccctggggtgatggtgggcagagagcaaacagt

SEQ ID NO: 400432 - DNA, 201 bp, Homo sapiens
cgagtgggcactacagaccatggttgggaaaagtccctagagggcagctgagaagggagaagtctaaaggacagcagggtcactgggaggcctggggtggrcaccttcctgtccagataagttcctccccgatttcatgcatggctggcatctctccatcatccccgctgcttgttccgccggccccgccactgccagccc

SEQ ID NO: 400433 - DNA, 201 bp, Homo sapiens
aggtaagagatccctccgtctttcccatctgagtcccctacgccactctggacctaccaggcctgggaagggcaacaacctcagtgtgaaatcagaaaggycccgagcattataagacccaacagcaaaaagagaacaacgacatccatctcattggcgcacaagggaaggagaatcagacgtttctggaaaaccaaaagg

SEQ ID NO: 400434 - DNA, 201 bp, Homo sapiens
aggctggagaaggcctaagtatgttgggggtcaggggagactcagtcaaggctagctgagaaattcaggtaagagatccctccgtctttcccatctgagtyccctacgccactctggacctaccaggcctgggaagggcaacaacctcagtgtgaaatcagaaaggccccgagcattataagacccaacagcaaaaagaga

SEQ ID NO: 400435 - DNA, 201 bp, Homo sapiens
aagcagagggggcagggatggggggattcgggtgactccaggccactgactattggggactgggagagggaacccaaaggagccaaaaccattcttgccarctgtgtgaagtaggtcttggaggccctgagtcctagtttcatgggcaataacattctttttctagaaggctgtatacaaactccaagtgtgccctctgag

SEQ ID NO: 400436 - DNA, 201 bp, Homo sapiens
tagcatgtccctcacccagccaccccgaccccagccacagcagaccacatccctgaagaggagggcatgctactccttgggcccctgtgcctgccattccmtaagtctggaatcccctttccccttcaaggccagacaagaaggcaaataaatggacaggtcctggagagaggagacaggcagagagcaggatgcaaacca

SEQ ID NO: 400437 - DNA, 201 bp, Homo sapiens
tgcaaaaataataataaaagtgagacatttcgtggggaaaagttatctcagggtaaagcctgcagccgcaagcaccgccagtgagtattcttggcacaaayggaaaaagagttaaagtcctctaggctccccatcactctggggacagagtgtgactcagctctgcttacaggctctgtgtagtctctggctcacctctcc

SEQ ID NO: 400438 - DNA, 201 bp, Homo sapiens
gctgtcccgacctcagagggaccggaacgttcgttggaaggatcctcgtttctcagggacgattttggacgcgaagcgtgccccgcacaaggatggttgcmatgaaccggaagtaactggttgttttgctggctccagtttttccgcggggcggaaaaggcgtgtctgcgtgtgtcccaaccatttctagtcccctttcct

SEQ ID NO: 400439 - DNA, 201 bp, Homo sapiens
agctgggtgaaccacggtatcacctgctgtgctggggaagggcagggagcagcacgtcaggagggaagataagggacgcaatgtcagctgtgtgaactggkggatcctgaggggcagccatggggaatcctgaggggcagccatgtggacatgcccaaaaggcagcttgacaaatgggtcttctccttggggtactgagct

SEQ ID NO: 400440 - DNA, 201 bp, Homo sapiens
ggctgtcccgacctcagagggaccggaacgttcgttggaaggatcctcgtttctcagggacgattttggacgcgaagcgtgccccgcacaaggatggttgycatgaaccggaagtaactggttgttttgctggctccagtttttccgcggggcggaaaaggcgtgtctgcgtgtgtcccaaccatttctagtcccctttcc

SEQ ID NO: 400441 - DNA, 201 bp, Homo sapiens
tgggcaacagagcaaggctccgtgtcaaaaaaaagaaaagaaaaaggaggtatttcacagttggtgaaatttgaatggggtctggattaatgatgtatcargttaatttcctgattgggacagttgcacaaagcttatagaaaactgtgcttgtttgagggaagtacacactgcatgatttaggggtgaaatgacatcatg

SEQ ID NO: 400442 - DNA, 201 bp, Homo sapiens
gaaatcaattttttgtgtgtgtggtgttcttgccaagaatttataagtctaggccaggcgtggcggctcatagtgtaatcccagcactttgggaggccgamgtgggcagatcacttgaagccaagagttcaagaccagcctgaccaacatggcaaaaccccatttctaccaaaaaatacaaaaattagctgggcgtggtgg

SEQ ID NO: 400443 - DNA, 201 bp, Homo sapiens
aataaatatgaggagaagagaaagctcttacagtagaatgctaactaatacgtgtaactgcaataatgggaatagatcaccatttggcaattattatactrgagttgattcatacagtagtcatcaatggatacaaagcctggtgggtggaggtttgacggggaatgggatattagggtagttgcagagtatttcccagaa

SEQ ID NO: 400444 - DNA, 201 bp, Homo sapiens
tttctcaggcaacgaggccctaggtgacagtgcaggacctcacctttaggatgggagccaggaagacagagattcccgtcaggatgaagacgatgatgccrgttactctctgttccctggcagagaagaacacatggtcagggtgtaccaggaaatgcctggcaactactctggccctcctgcccctctgtgggcacctga

SEQ ID NO: 400445 - DNA, 201 bp, Homo sapiens
tgacagccctgtgaggttggtggcattcttcaactagatgaggcagcttgaggcttagagaggttaagaaacttgcccataatttataggtggaaagtggrggagtttgaatttgaacccatatctatgtccaaaatcagtattctgttcactacccaaaggttctcaaactgcttctcagagtctcagtggtcccatgcg

SEQ ID NO: 400446 - DNA, 201 bp, Homo sapiens
tatagaattgtctgtaaaatgctgaacatcagttcagtcctgcatgttcagaatgaggagaatatataaaaagactttgtctcaaaaaacaaacaaacaaacaacaacaaaaaaaaccttaaagacagggagggtaagttctagaatctggactccctactctggtgagatcgttggtgctcttttttttttctttctttc

SEQ ID NO: 400447 - DNA, 201 bp, Homo sapiens
acacactttcctgaccttggcatgggccttagtctcagcaaacttgattttgaagtcaaaggtctctggaggtggctgctgttgcctctccacagatgctkcctgctggtttgtcagttcccgattcacatcctaggaggagagacagtgaagcacagctgggtcataaggaagccctggggtgatggtgggcagagagca

SEQ ID NO: 400448 - DNA, 201 bp, Homo sapiens
gccttgctccagtagatcccttgcttctagggcaagcccaggccagagtcttccaaaccaccacacaaagcaccccttcccccaggaatctgaagcccagaccccataccagttcatcccaggcagggctccctcagacccacacactttcctgaccttggcatgggccttagtctcagcaaacttgattttgaagtcaaa

SEQ ID NO: 400449 - DNA, 201 bp, Homo sapiens
agaaagaaagcagaggataggggtagtaagaggaacagaaacagaatatgagaatatggcaagggaaggagacagaaaagggaaaaagcagaaagagagtrtcaaagcacagtgagaaaagaagaatgaaggggacaaggaaaatgatacagagaggcagagagagatagtgacaaaggacagggggaggatggaggcaga

SEQ ID NO: 400450 - DNA, 201 bp, Homo sapiens
ctcttttgtctctggaaaaagcctgtcttcagtgggagagagaaaagccaatacacagaatggcagaggggtgtccatttgtgtgtgtgtgtgtgtgtgtgcgtgtgtgtgcgcatgtatgtgcatgaaagagagagagagatgaggagggagagaaagacctagtcctgtgatgtgtatggccaacctcatccctgccct

SEQ ID NO: 400451 - DNA, 201 bp, Homo sapiens
gagagaaagacctagtcctgtgatgtgtatggccaacctcatccctgcccttccctgtggtttagttttgtaagccaaaaaatgttgagagaagatatggytaccccttttctctctgctccctgtcctctggcctccttccatgttacagccaaggacatgccaagccagccactcagctgtggcactgaagtaaatgct

SEQ ID NO: 400452 - DNA, 201 bp, Homo sapiens
actcttttgtctctggaaaaagcctgtcttcagtgggagagagaaaagccaatacacagaatggcagaggggtgtccatttgtgtgtgtgtgtgtgtgtgtgcgtgtgtgtgcgcatgtatgtgcatgaaagagagagagagatgaggagggagagaaagacctagtcctgtgatgtgtatggccaacctcatccctgccc

SEQ ID NO: 400453 - DNA, 201 bp, Homo sapiens
caagataacatatcttcattccagtgggagacacaggtaagtaaccaggcaattcccatatagcagggtttctcaacctcggcacaatggacattttgggmtagatgattctttgctgtggagggtctgtcctgtgtattgtagtgtgtttagtagcatccacagcctctacacattagataccagtaggaaccctcctcc

SEQ ID NO: 400454 - DNA, 201 bp, Homo sapiens
tatgtcctgtgataccagaagggagcattgcaatgacctattaaacctcaaaccaagctgaatccatttctgagtaagagactcttacagggctcctgtcytcaaaactatataaaattgctcaaattatgtacttctgagataataaattagcagaagaagcacatagcccacctcttaagatagggaagtagatctgaa

SEQ ID NO: 400455 - DNA, 201 bp, Homo sapiens
ctaggtgaggagccctgactatactgagtgactagacaaaggtcaaaacacaagccccaagtgaaactgggataattcagcagtggaagatatgaccacaycataaaatgaagccacatgaactcagtgagaaaacacagtgtccaagcagagaagcaatcaagagcaggtatcgggcagggctggatgccccaggagagt

SEQ ID NO: 400456 - DNA, 201 bp, Homo sapiens
ctaaattaaccaataacaattaaaatgattgtaggaaagacaccacaatcagtcatgtattgataattattgaagctaggttatgctacaaaagagttgtwaaaaaaaaaaaaaaaaaaaaaaaaaagagttgtaaactaaaaataaaatcctaagcctccccaccaactgaacagactccctcttggccaaggggatccc

SEQ ID NO: 400457 - DNA, 201 bp, Homo sapiens
tagacaaaaaaccaacaattgagaaaataaccttattttttcttaaaattgagaaaactgtgactgcttgattctgaggggccataccaattctccctggsatcagaaatcagtaactactcttttaaaatgtagatttgatgtaccttggaggatggcatgaaaaagaaaataaaatataaaataaaataaaatgtagat

SEQ ID NO: 400458 - DNA, 201 bp, Homo sapiens
taggcacagagttgctcataatattcctttattatccttttaatgtccatggaatcaataatgatcacctttcatttctgatattaatgtatgtcttctcycttttttccttggttagcctggctaaagattcatcaattttattaatctttttaagagatagcttcagtttcattgattttctctattgtttcctatttc

SEQ ID NO: 400459 - DNA, 201 bp, Homo sapiens
acgttatttgtggtgtcattttataaatgaggtcacccttgtgtccaggcaatacacccatgtgtattgaacattccaactgacaattggactgctccttytggaagctcggcagccttctcaagtcaacctcaacatattcaaaacagctctgcatcccttctcccatcaacccagccctgctctcctctgtttttatta

SEQ ID NO: 400460 - DNA, 201 bp, Homo sapiens
catacttcctaaagtagtggtctgtgctcatggtctccatctcctccttgcccaatcagttcccggcctgctgccactggctcagcccccaccacgctaargacattgacaaaggcagaggtttcaaactgacagttcaaaggtgtgtttaattcaggcctcgcagagtatgaaattttttgaaagtattgctaagataaa

SEQ ID NO: 400461 - DNA, 201 bp, Homo sapiens
ccctctattcctagtttactgcaagtttttattatgaataggtgttggattttgtcaaatgctttttctgcatctattgacattattgtgtgatttttctyctttggcctattgatatgatgaattatcttaattgacttttgaatactaaaccagccttaaatacctgggataaatccttttgggtcatggtgtataatt

SEQ ID NO: 400462 - DNA, 201 bp, Homo sapiens
gcaggactgctgggaggaatacaacaggtaagagaatgaaatgcctgacacagggcttggaaggtaacagctgcttagcccctcaccaccaacacccacayccaggcccatgagccccactgtaagggtttcccctcagcaagtctcaagtgcggcatccttccatgcatccttgtcagcgccctcactgtgtccctcaag

SEQ ID NO: 400463 - DNA, 201 bp, Homo sapiens
ttgtgtgggtccatttctgggctatttattctgttccactgatcaatttgtctgttcttttgacaatatcacacttgattgtagtagctttacagtaagtyttgaagttgagtagtgtcagttcttcaactttgtactttttcagtgttatgttgtctattctgggtcttttgccttaccatatacactttagaatcaata

SEQ ID NO: 400464 - DNA, 201 bp, Homo sapiens
tttgaggatgaagaggaattcataaggttctgtttgctccttagttctggacaccaaggaaggcagctgggagggtctttgtggaccaggaagctctcaargtacaaggtgccacttcccaccaggagggtcaggcaagcccaggctgtgtgagactgaagtgcccacctccctcgtggggccccgcctcacctggctgac

SEQ ID NO: 400465 - DNA, 201 bp, Homo sapiens
aggcttcagaacacagaacttgagaaagggtgagactcctacatggcaggctggctggacccagagacataccagtcttgagctcttagagagtccagatkagaaatgttttgctatggcaaatcatttcaacattcttttggaaaagctgactgaaaagtactaaagcaaaaggggaaatgcatcggctcctggaactga

SEQ ID NO: 400466 - DNA, 201 bp, Homo sapiens
ttaatttatttgaggatgaagaggaattcataaggttctgtttgctccttagttctggacaccaaggaaggcagctgggagggtctttgtggaccaggaarctctcaaggtacaaggtgccacttcccaccaggagggtcaggcaagcccaggctgtgtgagactgaagtgcccacctccctcgtggggccccgcctcacc

SEQ ID NO: 400467 - DNA, 201 bp, Homo sapiens
gggatgcaaaacctgcatatatgggccattgtttcatataggtagttccacagggccaactgggagacttgaatatatgcggattttgccatcagcaggcrgtcctggaaccagtgccctatggatatggagggacaatggtatatgcccttgtattactctcagagtttcatggatgactgttctatcttcccacttgaa

SEQ ID NO: 400468 - DNA, 201 bp, Homo sapiens
gtggcccccatgcagagacagacctgggcacggttgagtctatgcactctcaacttgggcataattgcccccaagggggcaaaaactgtttcttcgaggartgaaaatattttagatattacaatggtttgtggtactctagagctacactcgacctgacaaatcttattcctttttttttttttttttgagacagagtct

SEQ ID NO: 400469 - DNA, 201 bp, Homo sapiens
tcagggcgggcagtggcttcaggccctggcccctcagaggtgttaagacataataacccagggtgggtcctggtcatttgaaatgtcccccttccctgtcratcttggataggcatcctgggctctgcagctctccccatgtatctctgaccccaacagaattgcttccagacctatgttcttccctggaagtcaaaacag

SEQ ID NO: 400470 - DNA, 201 bp, Homo sapiens
agtttttgattggggaatctttgacttggagtcctggggcagagagaatcatccctaatgagtgctacctgggtatggacactgagcctgatgttcttgcmcccttcaaaggaactctgaaagccaaggccaccatttcctctggccatcccagcccaaggtcacacacacatgcatgcagcagcccagggacatgcagga

SEQ ID NO: 400471 - DNA, 201 bp, Homo sapiens
cctgaataaagctgccacagagcggcagagcacacactcacacagacgtccgtaatttgcactctgccgcatccgcaggtcttccgtggagtggtgtagaytcgggccagcaccagggctccgggcaggactgcgatctgggaggagaatcagaagggacttggcttcgacagccttgctggtgtagcgaagcctcttggg

SEQ ID NO: 400472 - DNA, 201 bp, Homo sapiens
gagcttcacatgctcctgcttctctgaggaagaaagatcccgcatcctgcagggatgtgaggaaggcagaaggaggaaagcacgtgtcagagtctctggcratgggtgctctaacacatttggagacacaagagtaagcatcagaggcaagcactgaagaccctacctcaccagggcatccttcaggcgggcattctgctc

SEQ ID NO: 400473 - DNA, 201 bp, Homo sapiens
ccagtaacatctactatgatccagggagtgggggcagggcttgaggggggacagcacatacaatatcctgccattcctgatctagactctttgcagtcctrcctctgacctctcagcagcagcccctgcctggtccaggcagtcacttccacaacttcctccatcttccccatctccgtaaacagccacaccacccagttg

SEQ ID NO: 400474 - DNA, 201 bp, Homo sapiens
ctcatctctacctgggcctagcacatattttaaaataagccccctttacttgcaacttgagtcacttcctccagaaagtcttcttggatttactcttccaygactatctcttttgccattccctgaaacatcaatgggtctctcttttgaggacctgctgaacttggttgagaaagaacacagcaccctcagccactctcc

SEQ ID NO: 400475 - DNA, 201 bp, Homo sapiens
tggggatacataatctgacaagggagttttgaggccctcctggtgtcaaaagtcacggaaggtgtttaggtgctaaaatattggaatttcaaagcactgtragcacttctgagttacttgtaagtaaaatttggccagataacccaaggtatgcagttgttagacctgagactccaaaggcctcctccaattctggaggag

SEQ ID NO: 400476 - DNA, 201 bp, Homo sapiens
cgcttgaacccaggaggctgaggttgcagtgagccgagatggcgccactgcactccagcctgggccacagagcaagactccgtccccaaaaaaaaaaaaamaaacaaacaaactcatcttccctgctttgattttctccctacactgatgcacctccctccaggtccactggtgtgtcctccccttccgagtgctgctggt

SEQ ID NO: 400477 - DNA, 201 bp, Homo sapiens
taagaaaacagatcagagattagaaaccttgccaaagtcacaaagcaactaaatccaagcacacctggaaaaaaggtcggtatcttttgctgcctcaagargaggagcacctaacaggccatagggattggaaatttcctgagatggcattgccagagctatcttaataaatggacaggatgtcagctgaggaatggggat

SEQ ID NO: 400478 - DNA, 201 bp, Homo sapiens
ttaaaaaaaaaaaccctctgtatccttttgtacactttcaattttgtactttggatatgtattacctgaccaaaagaaaaattgcttttcttttaaggagrctatcacattgcaaggggatgagtaattaaaaaataataataataataaaggggctattatacaatctaggagaaaatgtcagagagaatgttcctgcca

SEQ ID NO: 400479 - DNA, 201 bp, Homo sapiens
agcacgggggaactgcccccatgacccaatcacttcccaccaggtccctccctctacatatggggattacagctggagatgagatttgggtggggacacaragccaaaccatatcaataagtatacaaaaaagtctggattggctgggtgtggtggctgatgcctgtaatcccagcactttgggaggccaaggcgagagtt

SEQ ID NO: 400480 - DNA, 201 bp, Homo sapiens
cagaggaaactggagtagggggacacagcagaacaaaatcgcaacactactacaggaaaacctcgtcattccgttacttgtcctttgctatgttggaatasttatagattagtttcaacaatcaggttactccttatctttgctctaagtcttgtacaggcctttagcaaaaagcaataaaattctcatctgactcttggt

SEQ ID NO: 400481 - DNA, 201 bp, Homo sapiens
aacaaataaaactgaggaagtttattatattagatcttatattagttttctattgctacataacaaattactataaattcagtgggtgaagcaacataggycaggcatgatggctcatgcctgtgatcccaccactttggaggccaaggcaagaggatcctgtgaggccagcaatttgagaccagcctgggcaacataaca

SEQ ID NO: 400482 - DNA, 201 bp, Homo sapiens
atggagaacagagactcaggaatatagtactcagagcttaactatgtggggagcatggacacacatgggagagaaagcagaaatagctcttacctgggtgrggaatcttgcatggggaaagggtagtgatgtgattactggaggttgtgaggagtcaggatgtgaaaatgaaagggtagtgggaccggtggaatcaaggtc

SEQ ID NO: 400483 - DNA, 201 bp, Homo sapiens
atcccctcatttgtcccccactcctcctgatactgtcatgtgaaggaaagtggcatccagagaagtatacaggggcatgagggatcttctgggagtgatgkaaatgttctaaaattggattatggtgacagttgcacaattccatacattttctaaaaatcatttaccagtacacttacaattagagaattttaagttatt

SEQ ID NO: 400484 - DNA, 201 bp, Homo sapiens
cacttcccagaacttgattgccctctgagctgctcaatctctctcctcccttggctctgtgacaatgctttctacaggggccctatgcttgcagtggatgycccttcaggctgcaggctctttaactctcagggcttcccagggctctaccttcccttccctctgaatactctcctgaggtaacttgctgcttcagattct

SEQ ID NO: 400485 - DNA, 201 bp, Homo sapiens
agcagcaatgacagatgtcaaagaatggaacattgaaccaaaaacaaaacaactgtccagaggtagtttgtgaacaaaggaaaaatggaaccagaacctgsgggggtggcaggagcaggagggctgggagtgggaagggtgagctccttgttattggtgccccatctgaggagaggaaaatggccaagtggtagaagcaaa

SEQ ID NO: 400486 - DNA, 201 bp, Homo sapiens
accaggaagctctcaaggtacaaggtgccacttcccaccaggagggtcaggcaagcccaggctgtgtgagactgaagtgcccacctccctcgtggggcccygcctcacctggctgactccttccactccatctggtctccgtcatgctgcagagtatccatctctgtaaagagggtggggttgggagcctcatcttcctcc

SEQ ID NO: 400487 - DNA, 201 bp, Homo sapiens
agaatagcttcactactctaaatatcctgtatttcacctcttcatcccaccccttcctccctccaactcccttttctttcctttttttttttttttttttttgagacggagtcttgccctgtcgcccaggctggaatgcagtggcacaatcttggctcactgcaacctccccttcccaggttcaagcaattctcctgcctc

SEQ ID NO: 400488 - DNA, 201 bp, Homo sapiens
agcctgaccaacatggagaaaccccatctctactaaaaacacaaaaattagctgggtgtggtggtgcatgcatgtaatcccagatactcgggaggctgagrcaggagaattgcttgaacccgggaggcagaggttgcggtgagctgagattgcgccattgcactccatcctgggcaataagagcgaaactccatctcaata

SEQ ID NO: 400489 - DNA, 201 bp, Homo sapiens
ttgaacctggagcggaggttgtagtgagccgagatcgtgccactgccctccagcttgggtgacggagcaagactctgtctcaaaaaaaaaaaaaaaaaaaagaaagccagttgtctttgctcccatgtttgaaacgtggcctgcctcagggactccttagtgcaggagatgttttagagataaacttattttctatcctaa

SEQ ID NO: 400490 - DNA, 201 bp, Homo sapiens
gagttagctgggcctttcctgatggtttctgggagacagagctggtaaatggaagaggcagaaagggctgggctgcaaagagaggaagcagcctagaggcraagctgtgggaaagggctgtgtacacccagagagggggctgagaaggcactgcgctcacccacttgagcccggctcttcgttttgctttgggactgtgag

SEQ ID NO: 400491 - DNA, 201 bp, Homo sapiens
tgctctgctttcacagtgcccccattaccaaatgcccccttatttgcctcagtgtccaattagactgagagcccaagagagcaggggcagcatctgccatrttccatttttatatctctagcaggctcagggcttgcagataataaatattagttgatgaatgaaccaagtttgttgatttctgcactgggagctcagcat

SEQ ID NO: 400492 - DNA, 201 bp, Homo sapiens
attcccctcctaacctcctggttgccccttctcagtctctttcgtgggttcctcttcctctgcccatcctgcaaatactgaagttcctaggggctctgttytgggctctcttctcacttcacagacctcaggggcaaccttatccttttctgtgggcttgatttccacctagatgctgatgcctcacaaatttatgcttct

SEQ ID NO: 400493 - DNA, 201 bp, Homo sapiens
tgttgcccaggctggagtgcaatggcacgatctcggctccctgcaacctccgcctcccaggttcaagcaattctcctgcctcagcctcctgagtagctggkattacaggcacccaccaccatgcctggttaatttttttgtatttttagtagagatggggtttcactatattggccaggctggtcttgaactcctgacctc

SEQ ID NO: 400494 - DNA, 201 bp, Homo sapiens
ttaaatctgtctcatgaggtaggtctgtgactatttcattgtacaggtgaggagactgagacccttagaggatgaggagcctgcccaaggtcatgcagctyataagagacagggtttgaaggcatgtctttagattctagagcctgttctcaccactttgcacataccaccctgggttttagttagctgtgtgtatgagca

SEQ ID NO: 400495 - DNA, 201 bp, Homo sapiens
tgggaaatgatgttaagagggcattatacaggattttttttttttttttgagacagagtttcactcttgttgcccaggctggagtgcaatggcacgatctyggctccctgcaacctccgcctcccaggttcaagcaattctcctgcctcagcctcctgagtagctggtattacaggcacccaccaccatgcctggttaatt

SEQ ID NO: 400496 - DNA, 201 bp, Homo sapiens
aacacctaagcaaattctggcccattcttacaatttatttggctaattcatgctacataaaatcacatgcatgaaaatatgtatgtgagatagtacaacaagttgtttctacaacggattatgactttgcataccatgtatatgttaataaaccaaacttggcagtaaatttgaaagattataaagtataaaagactgagg

SEQ ID NO: 400497 - DNA, 201 bp, Homo sapiens
gatgcataaacctgaaggccaatttatttaatttacagtgagatttacaatcgttataggggtttgttatgttcatcctctagcctttgcattctctcctyatgggcagatatacagggtaagccaaattatcaccaaaaagttgctgaatatagaatcagaatgagttaatcattagttaagtgattccagtgtttaata

SEQ ID NO: 400498 - DNA, 201 bp, Homo sapiens
acagagcaagactctgtctcaaaaaaacgggagaaacacctaagcaaattctggcccattcttacaatttatttggctaattcatgctacataaaatcacrtgcatgaaaatatgtatgtgagatagtacaacaagttgtttctacaacggattatgactttgcataccatgtatatgttaataaaccaaacttggcagta

SEQ ID NO: 400499 - DNA, 201 bp, Homo sapiens
tatgcctgtagtcccagctactcaggaggctgaggtaggaggattaagtccaggagtttgaggctgcagtgagctgtgatcgcaccactgcaatgaagctkaagtgacagagaaagaccctatctctaaaaagaaagaaagaggccttatcttttagagacataatgaaatatttacagatggaatgatgtggtgtctggg

SEQ ID NO: 400500 - DNA, 201 bp, Homo sapiens
ctaggccagacagtctcaggcagctctctcccctgacatcccattcttcagtcttctgcccatacaaatgcaactccacctgaaggagtgataagagcaawgcttcctctttgaaacatcctctactaactccagatagcagatagcaaagacatgcagtcctctccacctctcaggacttcaactatttgtactgtgtta

SEQ ID NO: 400501 - DNA, 201 bp, Homo sapiens
ctcaagaccatgatgcagagcgggctgaacacaggggagatggtggaaaatcttcataaggagttctgaggttaaatcctcaggtctctcctctaggctcyagtctcctataatgccctttctactcagaatatggaggggccctgtaggagactaaagccaggacagaagatccctggacagctgagggcaaaaaggagt

SEQ ID NO: 400502 - DNA, 201 bp, Homo sapiens
ccagaggccccgcccagccaccactcccaaggactttcccaggtcagcctcttccttcaagtgctagactctacacagaactccctagaaaccccatgtgmcgagcgtaatctaagcccagaaatgggagatcaggtccctagggtagaacaatgctgctgtcctccctcccccaacccccttccccagaaccagatcctg

SEQ ID NO: 400503 - DNA, 201 bp, Homo sapiens
tgctccaggtctatgccctccacccctagacggaaaaagtacaatctaatttccacagaaggttgggccaaaagtgggggtgccaggctctctacccctgytaagccctctttgggagtcaagctgaatctccctctctcagtctatttcagaggaccctgcaggtaaaagggccaaggtgaaagttgtacccctagactc

SEQ ID NO: 400504 - DNA, 201 bp, Homo sapiens
tcagtcacaccctgctcacctctaaatcaaatctctaattgtgctctctcacagaacctatctctccttgaaaacacaccatttgtaatatatattaatcrgtgactttgctgtgttcctccactataccataaactctttgtgggcagagactctgttgtcttcactcagcatcttcaatgcctggttcatggcaagttc

SEQ ID NO: 400505 - DNA, 201 bp, Homo sapiens
atacagacagtaacctcacccaaaccatgccttcaaccaccattgatacactcccaactcactccccaaacttttcctatcttcaatctggacatccctgmtgagctccagacccagcaggttccaactgccaaagggacatctctgcttgtacattctcacaagcacctcaaactcatgtccaaaataaaagtcatcttc

SEQ ID NO: 400506 - DNA, 201 bp, Homo sapiens
ctcagaccaccaggtattagttagatcctcataaggagcccacaagatcccttgcattgcagttcacaatagggttcacacttctatgagaatctaatgcygctgctgatctgacaggaggcagagctcaggcggtaatgctcccttgcccgttgctcacctcctgctgtgcggccaagttcctaacaggccatgcaccca

SEQ ID NO: 400507 - DNA, 201 bp, Homo sapiens
catcacctagagcagtggtccccaacctttttggcaccagggactgatcatggaagacaattttcccatggaatggggaggagggggaggatggttttgaracgaaactgttctacctcagaccaccaggtattagttagatcctcataaggagcccacaagatcccttgcattgcagttcacaatagggttcacacttct

SEQ ID NO: 400508 - DNA, 201 bp, Homo sapiens
gagtgctaatgtttgtttcaagagtgctaaaaacaacacaaagtagtaatcctggaaactctctccaaagaacacagagctgtctgtaccacaagagcctmaagtcaagaaggtacttggtcacctcccaagatcaaggggtgtcagtaacagagactttgtcaaagactctatgtaggtgaggtcagctgacaagactca

SEQ ID NO: 400509 - DNA, 201 bp, Homo sapiens
agtagtaatcctggaaactctctccaaagaacacagagctgtctgtaccacaagagcctaaagtcaagaaggtacttggtcacctcccaagatcaaggggwgtcagtaacagagactttgtcaaagactctatgtaggtgaggtcagctgacaagactcaggagcagctgggaaagtctggaggccctaagggtttaattc

SEQ ID NO: 400510 - DNA, 201 bp, Homo sapiens
cttgaggttagagcagtcttcatgacaccaaggacagagatctaaagggaaaggctttttttaatgggatcattttacttaaggaagagatgctcatctaktttattttagtttagtttagtttagtttagtttagtttagtttagtttagttttttgagatgcagtctttctctgtcgcccaggctagagtgcagtgggg

SEQ ID NO: 400511 - DNA, 201 bp, Homo sapiens
ggcattctatggggccagggcatcactggggagggacacatggcctctctgctccagcagtctctctcatcatactcacattctgcccccgccacccaccyacccacagccccattaactccacttctgtctcttatacaacctggcaacacccttacagtctctcatctggcacacacatctagagtgcccctccagcaa

SEQ ID NO: 400512 - DNA, 201 bp, Homo sapiens
tctgggatctcatatccccttgctgattatattttgggctgaatgattcttctatcagccttctaatactgacttgtgccagctgggcttccctgatgtgygacacaaaaagtgtgttgggtcaccactcagcaaacagctgggtgccaagaggcaagaggtggtcctgggagacagttactagaatgccaggggtatagg

SEQ ID NO: 400513 - DNA, 201 bp, Homo sapiens
aaacacctaagcaaattctggcccattcttacaatttatttggctaattcatgctacataaaatcacatgcatgaaaatatgtatgtgagatagtacaacaagttgtttctacaacggattatgactttgcataccatgtatatgttaataaaccaaacttggcagtaaatttgaaagattataaagtataaaagactgag

SEQ ID NO: 400514 - DNA, 201 bp, Homo sapiens
aactactctactggtctggctagaactaggggatgggagaaggaggtctgggatctcatatccccttgctgattatattttgggctgaatgattcttctaycagccttctaatactgacttgtgccagctgggcttccctgatgtgtgacacaaaaagtgtgttgggtcaccactcagcaaacagctgggtgccaagaggc

SEQ ID NO: 400515 - DNA, 201 bp, Homo sapiens
ccccgtgctgctgagaatgatgagaggctgtcccgagaagaggcagaacaaggagccagccatggcagtgcccaggaagctctccatcactccctgggggyacaaggaatgtgtggttcagcataggaaggagaagcggtctctccacacaggctgcagccccagcgatctctccacgggcccaggccacagtgtttatcc

SEQ ID NO: 400516 - DNA, 201 bp, Homo sapiens
agatcaggatggtcaccagcagggcgggcaggatgcttgctgggtatacccaccacgggttcttcccaaagggggccacgaaccagcctcggtcaggccgygttggctgagtgggagcaaacagagaggggccctttcctctctcccttgtcccagggcacttgtcgcctggcctgctgtcccacctcctcaactttccct

SEQ ID NO: 400517 - DNA, 201 bp, Homo sapiens
gaaacacctaagcaaattctggcccattcttacaatttatttggctaattcatgctacataaaatcacatgcatgaaaatatgtatgtgagatagtacaacaagttgtttctacaacggattatgactttgcataccatgtatatgttaataaaccaaacttggcagtaaatttgaaagattataaagtataaaagactga

SEQ ID NO: 400518 - DNA, 201 bp, Homo sapiens
aacccttggctcctttcttatcagaaaagaaagacaacatgaaacatgtctttggtcctaaggctttggaaccttgtgaggttccagtgtcttaatagaaagcctttctctcctttacttctcatcttagggtaattttgatcttttggtgatcccagcgctgctcaatacctggcaaatagatgaaggcttgaatatttt

SEQ ID NO: 400519 - DNA, 201 bp, Homo sapiens
ttgatcccgcttctttcatctgacagaggccagtggggacggagaaaggagagaagaaaatttaaaggcctctcagttttttggattttttttttttttttgagacacagtcttgctctgtcgcccagtgtactgacgcaatctcagctaactacaacctccgcctccagtgttcaagcaattcttgtgcctcagcctcct

SEQ ID NO: 400520 - DNA, 201 bp, Homo sapiens
gacagctggcgcctcatttaatcatgttctctgtcccacacccccagggcctgacacagagccagcacctgggactccgtcattccccgactactggcctwggcaaagtcccccaggcagcccagagtccccactggggatcttcctggaactcccactcctttgtaggagtggaactctgcccataggggatccctgctc

SEQ ID NO: 400521 - DNA, 201 bp, Homo sapiens
catgggagaccacaggaagaagatgcactattggacagtctaattaactaccactgttctcgccacagggagattcttttctgtctctctgccagccccartccctatcccatctttaaaggtgcttgtggatcacaggatagatgaagccatgtgtgctggtcttctctctccaacaaatcccaagctcaaggacagctg

SEQ ID NO: 400522 - DNA, 201 bp, Homo sapiens
cttgctctgttgcccaggctggggtgcaatagcatgatctcggctcactgcaacctctgcctcccgggttcaagtgattctcctgcctcagcctcccgagkagctgggattacaggcgcgtaccaccacacctggctaatttttttgtatttttagtagagacggggtttcaccttgttggccaggctggtctcgaactcc

SEQ ID NO: 400523 - DNA, 201 bp, Homo sapiens
gctttggatcggcctctgcctggggcggcccttggccaccctgttctggatgacagtggctcctgaccacagaggcagctaggaaactggatatttggggraacagagagtcagcagaactgggatgtgggcaggggtgaagatgagggtcactggggctgtactgccccttctctggctggggtagctggcccagcatgc

SEQ ID NO: 400524 - DNA, 201 bp, Homo sapiens
gcttatgtcagtgcccactgccaccaatgagatcttacatttccctaaagtctcccagactttggtattttcattctttttcacctttgttcatttggtarttgaaaaattatctcacatttgcactcttctgattactagtgagattgaacatcttttccttcatcagatttcctcttcacgtaactgtatattttgcat

SEQ ID NO: 400525 - DNA, 201 bp, Homo sapiens
ggacaggtgcagccttgaggggacaggtgcccacagaaagacttcatttccagggctctccattaaacccctggcttagaggggtctccagtctttatttwttttttttttaacaataggaaagctgcttatttcccaccatcccatcacttctttgatataggagggtactgggtcagaaaataatttggccaacatttg

SEQ ID NO: 400526 - DNA, 201 bp, Homo sapiens
agtcccagctactcgagaggctgaggcaggaagatcacttgagctcaggaatttgaggctgcagtgatgatacgatcacaccactacattccagcctgggyaacagagcaagaccccatctcaaaaaaaaaaaaaaccctaatctttgaaaaatattaagttaaattgccaactaggatgtgtgtaggcagagcagtcaat

SEQ ID NO: 400527 - DNA, 201 bp, Homo sapiens
ttctctcatgagtaaaatgggaatgaaaatagtgcctttgtgattcacagaaaatgcctggcacagtgtagtgcatgtggtgtggagcttaaatattgatkgattttgttactgttgttattaatttatttgtgcccgggacactgacatgaggggctgactttgtttttgccttccaccaaacttaggggtggctggaag

SEQ ID NO: 400528 - DNA, 201 bp, Homo sapiens
ttctagaatctggactccctactctggtgagatcgttggtgctcttttttttttctttctttctttctttttttttttgtttttgagacagagtcttgttmtgttacccaggctgcagtgcagtggcgtgatctccgctcactgcaagctctgcctcccggattcacgccattctcctgcctcagcctcccgagtagctgg

SEQ ID NO: 400529 - DNA, 201 bp, Homo sapiens
tccagggcgctgagatactgtctccttgaggacctcatcctagggaaggggagaggaagacaagggttcatttatgggacccccacaggctagcacaagamcacgtggtttcacagagacactaataccaggggggcagggacttagtcctctatatcaacatacttttgctctcatctccaaccccatccccacaccagc

SEQ ID NO: 400530 - DNA, 201 bp, Homo sapiens
ctttcttatcacagttgcactgtctgtatgcatgagtaaaagtggttttcctctccaaataatgttccagaatactgactagttcctaaattacttccaarttaagggctctggagttagactgcctaggtcaaatcaaagttctgtctttcagctgtatagactttggtgtgttatttaactgctgtaagcctcagtgtt

SEQ ID NO: 400531 - DNA, 201 bp, Homo sapiens
aaaatgctgaacatcagttcagtcctgcatgttcagaatgaggagaatatataaaaagactttgtctcaaaaaacaaacaaacaaacaacaacaaaaaaaaccttaaagacagggagggtaagttctagaatctggactccctactctggtgagatcgttggtgctcttttttttttctttctttctttcttttttttttt

SEQ ID NO: 400532 - DNA, 201 bp, Homo sapiens
ggactacaggcatgtgccaccacgcccggctaatttttgtatttttgatcgagatagggtttctccatgttggccaggctggtctcaaactcctggcctcratccatcagcctcagcctcccaaactgctggaattacaggtgtgtgccaccacacctggccatccaaccaacccacttgtaatacagaagataagagaaa

SEQ ID NO: 400533 - DNA, 201 bp, Homo sapiens
taaaatgctgaacatcagttcagtcctgcatgttcagaatgaggagaatatataaaaagactttgtctcaaaaaacaaacaaacaaacaacaacaaaaaaaaccttaaagacagggagggtaagttctagaatctggactccctactctggtgagatcgttggtgctcttttttttttctttctttctttctttttttttt

SEQ ID NO: 400534 - DNA, 201 bp, Homo sapiens
ggagacttccatgcccccacattacccccaggggacctcccaaggaaattcatcacttctggaattttccagcagagactatcaaggtggcctctctccartctctctggctagtgtcacttcatgggaggaaggtcacacaggcagagccagtggggtctgatgtgagaggtactggagacaagccctccacccaaatgt

SEQ ID NO: 400535 - DNA, 201 bp, Homo sapiens
cacagcctgaataaagctgccacagagcggcagagcacacactcacacagacgtccgtaatttgcactctgccgcatccgcaggtcttccgtggagtggtrtagactcgggccagcaccagggctccgggcaggactgcgatctgggaggagaatcagaagggacttggcttcgacagccttgctggtgtagcgaagcctc

SEQ ID NO: 400536 - DNA, 201 bp, Homo sapiens
gacctcatcctagggaaggggagaggaagacaagggttcatttatgggacccccacaggctagcacaagaccacgtggtttcacagagacactaataccargggggcagggacttagtcctctatatcaacatacttttgctctcatctccaaccccatccccacaccagcactcctccttactttgcaagtcctcatcct

SEQ ID NO: 400537 - DNA, 201 bp, Homo sapiens
tgaccttggcatgggccttagtctcagcaaacttgattttgaagtcaaaggtctctggaggtggctgctgttgcctctccacagatgcttcctgctggttygtcagttcccgattcacatcctaggaggagagacagtgaagcacagctgggtcataaggaagccctggggtgatggtgggcagagagcaaacagtgggca

SEQ ID NO: 400538 - DNA, 201 bp, Homo sapiens
tccagaaattcatcaattcctgcgatcagatcttcccgattgcgggctttgtaggccacgtcactgaagagctggcgaggagagaggagggagaaaagaawgatcgggtctgtttctgaaatgcctgggagcatatcacatctagtttttaaaggaatccctttgaaccacatctcccactgccaactcactctcagtttt

SEQ ID NO: 400539 - DNA, 201 bp, Homo sapiens
cagtgatccctagccatgtggggaccccctccctgcctaaggcatccgctctgctttctcaggcaacgaggccctaggtgacagtgcaggacctcaccttyaggatgggagccaggaagacagagattcccgtcaggatgaagacgatgatgccggttactctctgttccctggcagagaagaacacatggtcagggtgta

SEQ ID NO: 400540 - DNA, 201 bp, Homo sapiens
aaaccctgccttctaggcaggatggtgctctccagatgccttcctcctgtctccccgtcctcccacaactagcagtagctctgcaagtcttactcctacargcctctgcaacttctccaaggaaatctccacctaccttgctggggggccgctctgcatcatactccccctcctgcatggctgtggccagcttgttcatgg

SEQ ID NO: 400541 - DNA, 201 bp, Homo sapiens
ctgtagatgggcggtcagctggcggtacttcttgatggtctgctggtagtctgcaaccgtctcctgggctgcctccacacgcttctgggcctcacgaaccygcgcgcctgccatgtccagctgctcccgcagctccagttctgtctcacgtgcattctcctgcagctcatcgttcatctcattcatcgcttcctaggacac

SEQ ID NO: 400542 - DNA, 201 bp, Homo sapiens
  misc_feature (1)...(201): n = A,T,C or G
gagcgctcatgggcactcatctcagggtacaggctgcccactttcttatacacatccacactgcactgagagagggcactagagaccagagaagggcactntgaggctagagtctgccaggcaatctcagttctggccaatcctggacccccaccctggggtgagggagtcaggagtcacttactgctcatagcggtgtag

SEQ ID NO: 400543 - DNA, 201 bp, Homo sapiens
gcagtgacaatcaggcagccttgatcacgcctgccttagaagaatgagcttgtggggcttttgctgagccctctcatttgcctcctactgaccagagtagraaggaatggcaaaaaagggctggggatgagacagccagtcctgagtcaggggaggaggagcagcttgagacagggaaaaagggattgagcaaggcaggga

SEQ ID NO: 400544 - DNA, 201 bp, Homo sapiens
ttgtctgtaaaatgctgaacatcagttcagtcctgcatgttcagaatgaggagaatatataaaaagactttgtctcaaaaaacaaacaaacaaacaacaacaaaaaaaaccttaaagacagggagggtaagttctagaatctggactccctactctggtgagatcgttggtgctcttttttttttctttctttctttcttt

SEQ ID NO: 400545 - DNA, 201 bp, Homo sapiens
tgggggagggggtgacccgagtcttctcaggctcacaggctgggtggggagttgcagagaccaggaaggctaaggaagttcctctgcctcagtgttctaggctgagcccctgtcaggatctgctgattctcataagaactcgaggtcactttgggaaagacagagagcctgtgcccagtggcccagcctagtttggtcctg

SEQ ID NO: 400546 - DNA, 201 bp, Homo sapiens
catgttggtcaggctggtcttgaactcctgacctcaggtgatccgcctgcctcggcctcccaaagtgctgggattataggtgtgagccaccatgcccggcyaagactgtgcctttcttagggggctgataggccagtgatccctagccatgtggggaccccctccctgcctaaggcatccgctctgctttctcaggcaacg

SEQ ID NO: 400547 - DNA, 201 bp, Homo sapiens
aattctcaagccagaaatattttccattgtaaatacatcagccagaatcatcattctttagcgtttgtttcttacaaggtcacctctgaatgaggtttttkttttttttttttgagaagaggtctcactctgttgcccaggctggagtgcagtggcatgatcatggctcactgcagcctcgacctcctggactcaagtgat

SEQ ID NO: 400548 - DNA, 201 bp, Homo sapiens
caggccctccgaggtggacgcgtgcagcacgggcactgaaccctgagcccaggagtccgtcgtgcatgccgaaggctcctcgtcctcaccccatgtggggkcctcagctactgcagattctccctcgtcccgggccaggaagcgccactcggtgatctgcagcatggcctcccgggcctggctgatggtgaatggaatgca

SEQ ID NO: 400549 - DNA, 201 bp, Homo sapiens
agggcgctgagatactgtctccttgaggacctcatcctagggaaggggagaggaagacaagggttcatttatgggacccccacaggctagcacaagaccaygtggtttcacagagacactaataccaggggggcagggacttagtcctctatatcaacatacttttgctctcatctccaaccccatccccacaccagcact

SEQ ID NO: 400550 - DNA, 201 bp, Homo sapiens
tgcccaggctggagtgcagtggcgtgatctcggctcactgcaagctccgcctcccaggttcacgccattctcctgcctcagcctcccgagtagctgggacyacaggcgcccaccaccatgcccggctaattttttgtatttttagtagagacagggtttcaccatgttagccaggatggtctccatctcctgaccttgtga

SEQ ID NO: 400551 - DNA, 201 bp, Homo sapiens
tttgtagtcctgcctgcttagtttgccccatccattgcagtgttctttgctctttggaggtgtgtgtgtgtgtgtgtgtgtgtgtgtgtgtgtgtgtttgtgtgtgttttcaaatggtacttcgggcctgtgtccactgcctgaaatgccttttcttttctctgccccgctctatgtctggcagattccagtttccctttc

SEQ ID NO: 400552 - DNA, 201 bp, Homo sapiens
gtttgtagtcctgcctgcttagtttgccccatccattgcagtgttctttgctctttggaggtgtgtgtgtgtgtgtgtgtgtgtgtgtgtgtgtgtgtttgtgtgtgttttcaaatggtacttcgggcctgtgtccactgcctgaaatgccttttcttttctctgccccgctctatgtctggcagattccagtttcccttt

SEQ ID NO: 400553 - DNA, 201 bp, Homo sapiens
tgtttgtagtcctgcctgcttagtttgccccatccattgcagtgttctttgctctttggaggtgtgtgtgtgtgtgtgtgtgtgtgtgtgtgtgtgtgtttgtgtgtgttttcaaatggtacttcgggcctgtgtccactgcctgaaatgccttttcttttctctgccccgctctatgtctggcagattccagtttccctt

SEQ ID NO: 400554 - DNA, 201 bp, Homo sapiens
gtgtttgtagtcctgcctgcttagtttgccccatccattgcagtgttctttgctctttggaggtgtgtgtgtgtgtgtgtgtgtgtgtgtgtgtgtgtgtttgtgtgtgttttcaaatggtacttcgggcctgtgtccactgcctgaaatgccttttcttttctctgccccgctctatgtctggcagattccagtttccct

SEQ ID NO: 400555 - DNA, 201 bp, Homo sapiens
ctggtctctgtctccatcttgaggctgtcgatgtgggcgatggagatgaccgtggcagccacgtaccaggggagccccataaaggagcacaaagccatgasgatgcccacccagaacaggtccagatggtagccggcagccttctgcaggagcggggttgggggagggagaagtttctggggagccagttcctcctggatg

SEQ ID NO: 400556 - DNA, 201 bp, Homo sapiens
tcggtggccttttccaatcacctctacacgggagcccacccgcagaggccgggcgcttgcctccgcactcatcctgctgccgctgggcgtctgaaagacamaggtaaacacagacagttagaggcctcagatcaaaggtggcattcttatgtataagaaatgcctcagccaagatgctggactgaaaaacaaccagagtca

SEQ ID NO: 400557 - DNA, 201 bp, Homo sapiens
acaggagtgcggggcccgagtccaagtcacggaaaggaatgcctggccggagagggaagaacgctgccggggagacacgggtgccggggccgagggcttgrggttcggcccgggccttggtcttctcgccccgctggcgtccgcggtaggcttccaaggggcgtgtttgagagtctgggaccaggacctcagccagagggc

SEQ ID NO: 400558 - DNA, 201 bp, Homo sapiens
cttgttaacatcttggcattttagtaaaagtacctgaaggaaaatagtccttcactgctttttctttttcacttcactttctaagttcgctcctttctttyccccagctcgcctgtctgtgtatccctgacgaggtgcatgtaaaacctgtctgtcacctctcacctcaaacccacaccccgccccctaccagccattccc

SEQ ID NO: 400559 - DNA, 201 bp, Homo sapiens
tggggagcatggacacacatgggagagaaagcagaaatagctcttacctgggtggggaatcttgcatggggaaagggtagtgatgtgattactggaggttstgaggagtcaggatgtgaaaatgaaagggtagtgggaccggtggaatcaaggtctttcctgacttaaagctgccactcctgctatctctccacctagaat

SEQ ID NO: 400560 - DNA, 201 bp, Homo sapiens
gactcttagccagagctgaaagagccccaaaattcccatgccttgctccagtagatcccttgcttctagggcaagcccaggccagagtcttccaaaccacsacacaaagcaccccttcccccaggaatctgaagcccagaccccataccagttcatcccaggcagggctccctcagacccacacactttcctgaccttggc

SEQ ID NO: 400561 - DNA, 201 bp, Homo sapiens
atcatacatattagaaaacctttgtagagcccagtccaaggagctcagatatttcacaaccattttttacttccagcccttcgcccttggaggctcaggcygtgttcttcacactgtctccagagtgtgctttctgacttacagattcgatgggactatgctcacatttaaccctttcccatttaggcaaaaaaaaaaagt

SEQ ID NO: 400562 - DNA, 201 bp, Homo sapiens
gttccacatgctcacaccaggggccagcttcagggcttctggcagcaacacgggcttccacatcacctgggaagtggcttcaaggaccgggggtgtggttmgaggccatctgccaggatcctggccctccctgtctgccagctccagaccctgtggaggcacgcgggtccggccagcccacagctcgcccagcagctcggc

SEQ ID NO: 400563 - DNA, 201 bp, Homo sapiens
ggcaagtgaggggtcagaagaagagacaggaatccacatgcagaaagggaaacagaaaagaagaaattaggaaagaaattaatgaaatgatcctggctcaytggggttttgttttgaactttggtggaggtggttctaaaaagagttggagaggagaaaagaacacacaagattgggtgagacttgggtccccagagatct

SEQ ID NO: 400564 - DNA, 201 bp, Homo sapiens
cacttgagctcaggaatttgaggctgcagtgatgatacgatcacaccactacattccagcctgggcaacagagcaagaccccatctcaaaaaaaaaaaaaaccctaatctttgaaaaatattaagttaaattgccaactaggatgtgtgtaggcagagcagtcaattgcctaggcaggaataacttaagaagcaaccttgg

SEQ ID NO: 400565 - DNA, 201 bp, Homo sapiens
gcatccgggccgcgtaagccacctaacagtcgcctgggcaaccacgggctcggggtcgctcgccccgcccacagttgccccggcaaccgcgccgcccgcgrcacgttccggccgctcaccccgcccaagggccgtgcgtacgtgcgtcgtctctatggtggcggcggatttggagggaccctacgaaccaggagtcaggcg

SEQ ID NO: 400566 - DNA, 201 bp, Homo sapiens
ttccttttgtttcctgtcaggagccaaaataaaaaaataataaaagtaaatagttccttagttaatatttttaacaggttttaataaaacatgttgattakttcttcagggtctcttgaaattgaagttagacaagaatctgacaggtagactgttttcagtactaagttgatctttcctttctccatttccaggtattcc

SEQ ID NO: 400567 - DNA, 201 bp, Homo sapiens
aacaggtggatggctttgggcaaatctacattttcctagtcttcagcaaccaggttcagtgataaagccagagatactttacatttatgtagtattttatrgttaattaagactttataatactgatgtgaaatgaggagttggaacaaatggtttctaagatactttccagctctgaaatgtgcagcttccttctctagg

SEQ ID NO: 400568 - DNA, 201 bp, Homo sapiens
tgaacccaggaggctgaggttgcagtgagccgagatggcgccactgcactccagcctgggccacagagcaagactccgtccccaaaaaaaaaaaaaaaaamaaacaaactcatcttccctgctttgattttctccctacactgatgcacctccctccaggtccactggtgtgtcctccccttccgagtgctgctggtactc

SEQ ID NO: 400569 - DNA, 201 bp, Homo sapiens
ctgggaagagcttctgtggtgggggaaccacctgagcaggggctaaatccctgggccaagtggagggggcagttttattcatcttgggggttggcaggtayataccagggctggtgcgagtgatgtctactacgtgcgtgtgtgtgctcaattgattcaatgtctccagcagctggctggtcttacgatacagcgctccag

SEQ ID NO: 400570 - DNA, 201 bp, Homo sapiens
gccactaaacaggtggatggctttgggcaaatctacattttcctagtcttcagcaaccaggttcagtgataaagccagagatactttacatttatgtagtrttttatagttaattaagactttataatactgatgtgaaatgaggagttggaacaaatggtttctaagatactttccagctctgaaatgtgcagcttcctt

SEQ ID NO: 400571 - DNA, 201 bp, Homo sapiens
gccaaatattccaaagatggtctagtgacataaaagtatattacaagtttgtttgagaacatctatatttaaatctaacctttaaacaattttaaattgatatttgttttaaatatgaattgactattgcccctttatcttagctatggtttggggaaacaagcatttttttatttccaaagaaatgttagaatttctatg

SEQ ID NO: 400572 - DNA, 201 bp, Homo sapiens
tgccaaatattccaaagatggtctagtgacataaaagtatattacaagtttgtttgagaacatctatatttaaatctaacctttaaacaattttaaattgatatttgttttaaatatgaattgactattgcccctttatcttagctatggtttggggaaacaagcatttttttatttccaaagaaatgttagaatttctat

SEQ ID NO: 400573 - DNA, 201 bp, Homo sapiens
ttgccaaatattccaaagatggtctagtgacataaaagtatattacaagtttgtttgagaacatctatatttaaatctaacctttaaacaattttaaattgatatttgttttaaatatgaattgactattgcccctttatcttagctatggtttggggaaacaagcatttttttatttccaaagaaatgttagaatttcta

SEQ ID NO: 400574 - DNA, 201 bp, Homo sapiens
tgtaaggtaaaattacagtgatcaatttacaacaaagaaattaacagtagttttccagcttgtttgattaatcaagcaggtttactcttgaatccatagcrtttctacaatttaatttggacaaagttctattccagatcagccaggttttaaaactgaaatgtgttaagggtggattgttagcttccccaggattggtgt

SEQ ID NO: 400575 - DNA, 201 bp, Homo sapiens
tgaccagacaggattaaattttattgaattacagttacaagtggaaaaaatgactgacttactgcatggagaagtattatgtcaacctgttaaaagctatrgaaattaaaatgttcatgtatatacaaaatataaatgacatgtaaggtaaaattacagtgatcaatttacaacaaagaaattaacagtagttttccagct

SEQ ID NO: 400576 - DNA, 201 bp, Homo sapiens; identical to SEQ ID NO: 88712

SEQ ID NO: 400577 - DNA, 201 bp, Homo sapiens
gcctcccaaagtgctgggattacaggcatgagtcactgcacccagcccatatgtgctttttattaaaggtcagctaggcctgaaataacttgttgctttgrtatcttttctaatctgccaaatgcaagttgaggaaagttaaaccaaagtccaggtcctgaagcagaatcgggaacccaaaggtgctgctctcagcggctc

SEQ ID NO: 400578 - DNA, 201 bp, Homo sapiens
ttttttttttttttgagatgggagtctcactctgttgcccaggctggagtgcagtggcgcgatctcggctcactgcaacctctgcctcctgggttcaagckattcttctgcctcagcctcccgagtagctgggactcccaaagtgttgggattataggtgtgagccactgcgcccagtcagtatgcttttccctccctctc

SEQ ID NO: 400579 - DNA, 201 bp, Homo sapiens
caccaaggcgcaggcaggcagttctactggattaagggttaggggtgcaggtataagactctctaacagaacaagtacttgagagagagtgggtgaatcaracaaactgaacagtgaagccaaagaacactgctgggaagagcttctgtggtgggggaaccacctgagcaggggctaaatccctgggccaagtggaggggg

SEQ ID NO: 400580 - DNA, 201 bp, Homo sapiens
tggatggctttgggcaaatctacattttcctagtcttcagcaaccaggttcagtgataaagccagagatactttacatttatgtagtattttatagttaaytaagactttataatactgatgtgaaatgaggagttggaacaaatggtttctaagatactttccagctctgaaatgtgcagcttccttctctagggcaagt

SEQ ID NO: 400581 - DNA, 201 bp, Homo sapiens
tgagaaggtcactttgcccatgtagactgtgtcatcctgctgctcctccttggcctggtggttgatgaggagaaaaagactccaggtcaggggctcacttsagctgtgggccactgaaggggtccctgagcactgagaccaaggcagctcctgggtgactagggcttctgagatcctgggctattgtgaccacatttttca

SEQ ID NO: 400582 - DNA, 201 bp, Homo sapiens
gagccaacactatgcaagaggaatacggggcctcagagatgtgtggcttcgggcttagttactccttcacccagaaggtgctcagccagggctagggggtrtgaggcatgggagggccagggaagagagaaataggagtgggggaggagtctgagaaactcaagatcttgaggtacctatgatggacagtgctgatgggaa

SEQ ID NO: 400583 - DNA, 201 bp, Homo sapiens
tggtccggctggtgcttggctggcatcaggaagagcttgcagcgttcccagaactagggggacagcgggggctcagccaggcagccagaccccgagggccygctgggtcctgggactaggggaaggggtgcctgggtggggtctcagagaggggaagccccctgctcaggccttaaggatgcacgggaggggggctggagg

SEQ ID NO: 400584 - DNA, 201 bp, Homo sapiens
aggagcaatggcagaggagtccggagaggctcctgaggagtgtacttcgccttggaagttctccaggccctccgaggtggacgcgtgcagcacgggcactsaaccctgagcccaggagtccgtcgtgcatgccgaaggctcctcgtcctcaccccatgtggggtcctcagctactgcagattctccctcgtcccgggccag

SEQ ID NO: 400585 - DNA, 201 bp, Homo sapiens
ggcactgccctcaaaagacaactcttgtctccccaagtaatttgcaaacctcttgagaacagggtgtatattttcttattcatattctccattgtacctgkcatagggctaggcccataggttgtgttggctgcctggtgttgggggtgcaggggcccagggtctagtcatgactgtgactggttcactacgagacctcca

SEQ ID NO: 400586 - DNA, 201 bp, Homo sapiens
cacctcatgatccgcccacctcggcctcccaaagttctgggattataggcgtgagccaccgcacctggccggttggtgctcttatgagggagtagggctgrgtttagctacaagcatatgtcaccagttctaactagtgggtaatttctaagcagtggttctcaaacttgagcatactccaagtcacctgaagggcttgtt

SEQ ID NO: 400587 - DNA, 201 bp, Homo sapiens
agtgcaatcttttcccttaaacaccttaggtagctgcaactttagactaaattcagacatgggaaggagcatgcatgcagacagtgtctgtaaaactaagraggtaatttgctgcaacagccctggggtttgtcaggaaacatggaggtgaaggtcagagggcagccaggagagagagcacagtcacctgctgcaaataac

SEQ ID NO: 400588 - DNA, 201 bp, Homo sapiens
gcaggtctagaccaggcagagagaggcaccctgtcctcaggagccaggtgaaggctgctgttaaataactttaatggttgatgtgggagtcacaagggagktatgtttgctccaagggttcttcagtgccatcctcaaagctggttagtgcagggaggtagggcagagttggttccagttttcttccaggaagggtttagg

SEQ ID NO: 400589 - DNA, 201 bp, Homo sapiens
tggtcttctggactggcttcagcccagctctggggcgtgggctggaatgcctcccagctacgtggccactgctcattcatatctgtctgcacatcctggcrgcaatgcaaaatgggttctgcacactcaacacagttcaaaggtcacctgtgggcagaatacaggcagctgagggtggtgtcggtgtgcaaggccttaccc

SEQ ID NO: 400590 - DNA, 201 bp, Homo sapiens
aggtgtggctggagcccagtggcgcctgacatggagcctctggagggcagagaacctcagctggatgggaaaggaaggtaaggtaaagggcaggtggggcrtcaagagagggtcaggtgcttggtagttaataggacagtggcgagatcagagtagaatgtttgaatttaatatttcagagatggagcagctaaggataat

SEQ ID NO: 400591 - DNA, 201 bp, Homo sapiens
tctgaattatttaatatatttcttcctcttgaaattctcgaaatagattttttctgttatcttccctctctaaatgctcatccatttaaatacgcaccacyatgtaagagacttactacattcattagctgtttcaaaatccacttcctgttctcgggctctacaccacccactgaccctttccctcatggcttgagtgta

SEQ ID NO: 400592 - DNA, 201 bp, Homo sapiens
atagctcttacctgggtggggaatcttgcatggggaaagggtagtgatgtgattactggaggttgtgaggagtcaggatgtgaaaatgaaagggtagtggraccggtggaatcaaggtctttcctgacttaaagctgccactcctgctatctctccacctagaatgctatcctgcccatcatccccaaggttaacccctag

SEQ ID NO: 400593 - DNA, 201 bp, Homo sapiens
cactcagggacttaagctgagccacttgctccataagttgggccgacgggctcttggcagctgtggggagagaaagctggtgaggcccaccaaggcgcagkcaggcagttctactggattaagggttaggggtgcaggtataagactctctaacagaacaagtacttgagagagagtgggtgaatcaaacaaactgaacag

SEQ ID NO: 400594 - DNA, 201 bp, Homo sapiens
ccgcagctccagttctgtctcacgtgcattctcctgcagctcatcgttcatctcattcatcgcttcctaggacaccacaccatagtttgggctaaagaaargcagggtcggccagcggcggtggttcacacctgtaatcccagcactttgggaggtcaaagcaggcggatcatgaggtcgagatcgagatcatgctggcca

SEQ ID NO: 400595 - DNA, 201 bp, Homo sapiens
gccagctgatgagtctcactctgcgctagtgctgctctagacttgtcaggaaccgtgctagcctctgggtcctagtgcccccctgcttcacgtgggccagraactaagggctgggcatacgccacagaccctcagcactcaactcttgaatacactgtcctagggctggaagcagtcttgacacgtcctcctagtctgtac

SEQ ID NO: 400596 - DNA, 201 bp, Homo sapiens
cgccagtccggccgggaatctcccgctgcggggctccaaaccccgcccccggagacgacacctgggccgggcagggcgcggcaacctcctcttccaccccmgccaaaggcccagcccgtccggccagtccctgggcgccaagccgacctggcccgacggccccggagcccccaggggcgcactgcacctcgcgagcactgt

SEQ ID NO: 400597 - DNA, 201 bp, Homo sapiens
acctgccttggcctcccaaagtgctgggattacaggtgtgagccatcgcgcgtggcctctatttttctttttaattttttctttaagagtcagaggtttcrtcatgctgcccaggctggtctcaaactcctggcctcaagcaattctcctaccttagcctccctggcctcaagcaatcctccctcctgctgggattacagg

SEQ ID NO: 400598 - DNA, 201 bp, Homo sapiens; identical to SEQ ID NO: 88714

SEQ ID NO: 400599 - DNA, 201 bp, Homo sapiens
  misc_feature (1)...(201): n = A,T,C or G
ggggccagagaggttaggctgagccatgtggagcgttacccacattctccagaaaatcccccctgccctgctgggtcccatctggacacaccagcaggatngctccccagaatgtacccctcaaggaactcacgagtcctgctgataagatccatgctgctgtcctggctgcttgccccactccctgggccagtcagttcc

SEQ ID NO: 400600 - DNA, 201 bp, Homo sapiens
tggtgactggagccaagtgcgaggttggcctttgctgcagaggcctctggtccgtggggatcgctgaggtgggaggggggcaaccgagcgagccctaggggagtggtctggggggacagcatccagggaaaaggttcggggtctcccccagggcagggggtgggtccagtctggggctggggccactgaggcaggcgagca

SEQ ID NO: 400601 - DNA, 201 bp, Homo sapiens
cttccctaccactccccaactttgatttctcctttttcctcctggcctgatatggtgtaccctactagtgccccaagttctgcagctcccccacaccccaytgcagggcccgacaccccaccttccttccctccctgcccatcatcaggactcaccatgtgtccctttcctgaagcgactgccagttcatctgtacttact

SEQ ID NO: 400602 - DNA, 201 bp, Homo sapiens
ccgtgcaggtgtaggttttctgcccgagtaccgacgtggcttccttggtcatctaaactcccgcgcggtgggcgggagcaagtaggggcactgggcggccyagagccagcccactgttcccgacaccgaccttaacggccgaccctggctctggcgcatccccagctgaactgaagctcaccgagccttcgtgcgccatcg

SEQ ID NO: 400603 - DNA, 201 bp, Homo sapiens
cattctgtggacacggcacaaaagacaggggaggcagggttactgaaaattggcattttttcataatattcatcagttacaaagagattgggctgcagaascaaaatggaagacatggagtgccaggatggggtcattgccctgaggcttgggtttgaccaagttccattaatgaaccaaatcaacagttgctggagggaa

SEQ ID NO: 400604 - DNA, 201 bp, Homo sapiens
ccagtcttactggatcacagacagggcttagcaaattagtgcttttgcattacttgctacccttcagatcagctacctttcaccagacacaccgacttttstaagtcctgccctggctactcacaaatgcgcctctgggcaacacacagtggtggtaaaacaccaaggtctctcccaggtccctgataagacttcatgggg

SEQ ID NO: 400605 - DNA, 201 bp, Homo sapiens
caccagggcatccttcaggcgggcattctgctcctcaagctgcttgagctgataactggatgcagcgccatctgagcctggagaagatcattaacactttsaggcatggttctcacctgaccgtttggcccccagcagctgtgggccccttacccttctcttcaatctcagccttgaggatctctaagtcagtagtgagct

SEQ ID NO: 400606 - DNA, 201 bp, Homo sapiens
tcaccagggcatccttcaggcgggcattctgctcctcaagctgcttgagctgataactggatgcagcgccatctgagcctggagaagatcattaacacttycaggcatggttctcacctgaccgtttggcccccagcagctgtgggccccttacccttctcttcaatctcagccttgaggatctctaagtcagtagtgagc

SEQ ID NO: 400607 - DNA, 201 bp, Homo sapiens
ccaccctgctcccttagctccaactcccaccagcctggtaacccccggccagagtgggtctctacctcgctgctgttcttctgtgctcgggatagcccatsggggagcaggaaaagaggagagaggagttaggtgatttgggggttacggggacacaccagaggaatcctggacacaacctgcaggaaaacccttttccta

SEQ ID NO: 400608 - DNA, 201 bp, Homo sapiens
gcaaggtggatgctgtacagatgctgaggagagataacagacagacaacttttaggccctggagcgggtggggagttcttcccaaactgtagtttgagccytggtcatcatgggtctctggaggtacaagagaatccaaagccctcaagcagctgcatcatatggagagttcatctaagagcaaaccaggcctcaagcagc

SEQ ID NO: 400609 - DNA, 201 bp, Homo sapiens
gatgtgaggaaggcagaaggaggaaagcacgtgtcagagtctctggcgatgggtgctctaacacatttggagacacaagagtaagcatcagaggcaagcastgaagaccctacctcaccagggcatccttcaggcgggcattctgctcctcaagctgcttgagctgataactggatgcagcgccatctgagcctggagaag

SEQ ID NO: 400610 - DNA, 201 bp, Homo sapiens
ggctgatgaagggaaggtggcaaagtcagtgggtactgtggctccagggcgctgagatactgtctccttgaggacctcatcctagggaaggggagaggaasacaagggttcatttatgggacccccacaggctagcacaagaccacgtggtttcacagagacactaataccaggggggcagggacttagtcctctatatca

SEQ ID NO: 400611 - DNA, 201 bp, Homo sapiens
aggtgatgctgaacgagaagtaggaaagaaggattacgtagttcttggtgttttgaacccatcccctagagcagggctctaatgcaaatacttccatcttygcttctgaactctcagcacatgccagaatgagcagtttcctattggcttggccttcagccatagtcacgcatctggtctcaccctgtaaacctatcttca

SEQ ID NO: 400612 - DNA, 201 bp, Homo sapiens
ggaagtcatcactggagtactggttctggatacaggaacgtggtcaggccgggtgctggtgtttgacatcccagcaaagggtcccaacattgtactgagcraggagctggctgggcaccagatgccaatcacagacattgccaccgagcctgcccagggacaggtgagtggacttcccctacccatctgggagccttcccc

SEQ ID NO: 400613 - DNA, 201 bp, Homo sapiens
ttagttagctgtgtgtatgagcacatgcctgctttataccagattggggttgaaatatcatgtctcatgggctccaagcaccccacagcctgtttttgtayggccagctagctaagcatggtttttatatatttaaagcattgtaaagaaggagaaagagtaggcagaagagagaaaggagaggagaaggagagaaaaaga

SEQ ID NO: 400614 - DNA, 201 bp, Homo sapiens
gtggttcaaggaagcatcaaatttctttaggatagtgtattttttaaccaggtacactggaacttaatagaaaagtacagacacccaagccccattcacayctaacacgtcaggcagctggattgtgtatttcaaaactgtcctggaggttaggaaccttgcagcatatattaaagccaccctcgtgggtctctgtggaag

SEQ ID NO: 400615 - DNA, 201 bp, Homo sapiens
gtggatctgagagcagggaacagaacagctgctgggtgtatctaggccaagaggaccccaggcaagctccctgagtgaggctgcttgaagaggtggagagrgactttgacctccacaataacctgcaggcaccaacgacccaggaccagatgggacaaggatagatgacatgaagggcaggaccctttgtaggtcactgag

SEQ ID NO: 400616 - DNA, 201 bp, Homo sapiens
tggccctcagacaatgttattccctcagtcacaccctgctcacctctaaatcaaatctctaattgtgctctctcacagaacctatctctccttgaaaacayaccatttgtaatatatattaatcggtgactttgctgtgttcctccactataccataaactctttgtgggcagagactctgttgtcttcactcagcatctt

SEQ ID NO: 400617 - DNA, 201 bp, Homo sapiens
ctgaaacttggagtgactatgatcctgccctgggagcaacagagtcaaagctggtctctgcagaatcaggtgtcagagacgggccgtcacacagacttgarggcaggcatgaggtcaggggagctgccctggtttgcagggaccacaggagagatgcacacagtggcccctgcctcacctatgatctgtggtaaggagcca

SEQ ID NO: 400618 - DNA, 201 bp, Homo sapiens
gaaggacccggatcccggcccacctgctgagtcaggtagactttgaaagcagagtccatgactcgagccagcaagtcggccaagatgtcccctacgacgtyctcgccctcctcgagggctgtaagcgccatccactcggcctcactgagccgcccaggcacaatatccacctgcggcactggcacagtgggcggccgcact

SEQ ID NO: 400619 - DNA, 201 bp, Homo sapiens
ggctccacctggctcaacagacagccagtggcatgcggcagggaccaatgggtggcggagggaggcggggcctgccacgaggccgcagtataaccgcgtgscccgcgcgcgcgcttccctcccggcgcagtcaccggcgcggtctatggctgcgacttctctaatgtctgctttggctgcccggctgctgcagcccgcgca

SEQ ID NO: 400620 - DNA, 201 bp, Homo sapiens
aggtctagaccaggcagagagaggcaccctgtcctcaggagccaggtgaaggctgctgttaaataactttaatggttgatgtgggagtcacaagggaggtrtgtttgctccaagggttcttcagtgccatcctcaaagctggttagtgcagggaggtagggcagagttggttccagttttcttccaggaagggtttaggga

SEQ ID NO: 400621 - DNA, 201 bp, Homo sapiens
gagatgtatgagtgtctccattgctaagtgtttagttactcaagataaacttgactggagagggtgtgggcaggcattcagtcaagcaacaagccactcamtgagtgccaccaatggtgtgggaaaagatgactctccttagactggtccatccaaaataaaggaggtggggagagcatacctgggtggtcttcagggtac

SEQ ID NO: 400622 - DNA, 201 bp, Homo sapiens
tcttcagggtcagggtcatggagtatgtcccaaagaaaaggatgaaggacatgagcgccaggtctgggataaacttgcaggaattcccaagcaggcgcccrccgtagctcagacactccttcttgctcagcagggaccagtccaacgctgtgaggttaaggaggttgtacttggagaccaagcacaggagagaatgggtca

SEQ ID NO: 400623 - DNA, 201 bp, Homo sapiens
aaatattttttcatttacttagatctttgatttctttcattacttttatagtttttctcatgtagatcctgtatacattttgttagatttatgtctaaaayttttggtgctagtgtatcatgtcttaaatttcaaattccaatggctggtatatagaaaagcaactgtcttttgtatcctaagactttacatcctgagacc

SEQ ID NO: 400624 - DNA, 201 bp, Homo sapiens
tgcatagtacagtcctcaggctgttcggcaaggtggatgctgtacagatgctgaggagagataacagacagacaacttttaggccctggagcgggtggggrgttcttcccaaactgtagtttgagccctggtcatcatgggtctctggaggtacaagagaatccaaagccctcaagcagctgcatcatatggagagttcat

SEQ ID NO: 400625 - DNA, 201 bp, Homo sapiens
ctgtgccttttcctctatgtgtctgtttgccctattccagaggcctcttcccccttccctaccctctcctggctaactctgacccatccttcaggtctcawtgtgaacatctcttcctcctagaagccttccttgacccctcctgcctggattagatgcccctatgctctgctttcacagtgcccccattaccaaatgccc

SEQ ID NO: 400626 - DNA, 201 bp, Homo sapiens
agagcagcctgggtttagagtgaaagttaggctcctcctgatgcatgccctgagaattcttggcagatcctgggctttgtctcccccacctatggcaatgyggccatgtcacagctgccacagcctgaataaagctgccacagagcggcagagcacacactcacacagacgtccgtaatttgcactctgccgcatccgcag

SEQ ID NO: 400627 - DNA, 201 bp, Homo sapiens
ctccacactcatgcagtccagagcactctgcgtgaactgtgaggatagaagcatgcaatcatcagcccccagcaggagcccttctgccttatcaacatctytaagaagtccccatcctctgctgacccccatacataagtaggtcctctagtttccctgatatggctttggtaactctgccctagtcttatgtgacacttc

SEQ ID NO: 400628 - DNA, 201 bp, Homo sapiens
ctgatccaagttctaggtctttgccaaccccaggaaattttcaagacacagcgggtagccacaagcctctgggtgtcttgattctcctttacccctacccyaggccttaccttggatggggaaggaagcggggggactgctccaggagaggtgaggaccggcgtggggatgatgggtgctgccagcggagtctgagccggg

SEQ ID NO: 400629 - DNA, 201 bp, Homo sapiens
agggctcaccacagctcccattgattgcaggccccacttctccccttaactcccaagccgtcttggtcccgatccccaacactcactgctttcctgagtcmtaccaatttcctggcccccagatcctgagcctacactaccctcaccttaatcttgagtgacttcttcaactccttaataactgtctctcgatcttcgagc

SEQ ID NO: 400630 - DNA, 201 bp, Homo sapiens
ggagaaaactgtggtctcaatgcccaaactcaggcatagatttttttctccctcagtcggctgagttcagggactttttgtggtgtctttggagccgtctygaagctcccataagccattattcactttccctccaccgtagttcctcttgtctggcccctcaggtgagtgaccatgcctaccagtgaccaagagggacgg

SEQ ID NO: 400631 - DNA, 201 bp, Homo sapiens
ttgggggctggtgtggactcagtggaacagtactcagtaaatgctaatcatgactactactgcctttcccttcgccagctctgaggcccctgagggcactrgggggaggatctatctccctttccctgcagtgggggttctcaaccctggctgcaggtctatgctcacctgtggacctcataaaaataccaaagtctgggt

SEQ ID NO: 400632 - DNA, 201 bp, Homo sapiens
aaatgcttgctcccttctgcttgagggtagcaagacctcactgatcactttgggtgagatctcgctatgaggaaatgactggggaaaaaaagcttaaaacycattttgtttaagtatatttaaaaatactcagaagccgggcatggtggctcacacttgtaatcccagcgctctgggaggctgaggtgggaggattgcttg

SEQ ID NO: 400633 - DNA, 201 bp, Homo sapiens
tcacactttaaaagagccctggtgaccccaatgtcctacacaacctcaaggtgcatttcccaagctcatcctaacttgatctccctgtagcaactgagatygtcaatccttttcctggaattttctcctttcctagcttcctgggcaacattctctcctacccttgcacgtcaatccttctcatctcctctgtcattattt

SEQ ID NO: 400634 - DNA, 201 bp, Homo sapiens
gagattgaacatcttttccttcatcagatttcctcttcacgtaactgtatattttgcattatctatgtttaacaccttcattccatacatttatttgagayaagttaaccaggcacctggtgggatcctggggaatcagatggacacagaatggggagatctaattagagaaggactgggaggtgaagacctgaaacatgg

SEQ ID NO: 400635 - DNA, 201 bp, Homo sapiens
gcagaagaatcaggtgtctctggggaagtagtatctgctccatcttcaaatacctggatctgaggccagattcaatatagccagatcaatagtttcaatayagccagatcaaggacggctgtaatatgggcccctccccaggctccaagcaaaccaagagtacagggcagcttccctaaggatgcatcttcaatcttccct

SEQ ID NO: 400636 - DNA, 201 bp, Homo sapiens
tcccttcgccttcgccctttccacctcgcggcagttcggtaagagggtcacagagctcggtcagcgcggaaagctgaggggaacggagggcgaggggcacrccgggcccccgagggacaccgagggaagtccttcccgaacatctccgccccggcggtggtggccgctgaggggtgtggcggggcgacgtggcaccgagcg

SEQ ID NO: 400637 - DNA, 201 bp, Homo sapiens
aggtgacctcatatacaatgataactgagtggaaggtcttcccgaagccactctgtacccactgaacactgccactgggcatccctatgtggcataacaargctggggagactaagaggacttgggtcatcaggacagagagagaagactgcagcaaatgcctgctgtgcccaaggccacaggcaggggctgcattgcccc

SEQ ID NO: 400638 - DNA, 201 bp, Homo sapiens
cccttctctggctggggtagctggcccagcatgcagctgctctcctggcctggcccctcactgcaccgtgcggaggccatgtggtctggctaaagaaatgycttctggaaagtgagaagactccacagactgccccctcctcattcctgcccagcttcttcctacctccagcctcagctgagggtcccctaaaactgctca

SEQ ID NO: 400639 - DNA, 201 bp, Homo sapiens
ggccagaaagcttagttgaagtgtggattcttatacaagtctcatgttttctggactcctaggagactcagaggagacaccataggtaacccttattgaaytggaagaagtgtgaagtactatcaaccactgagactcccatggctcaagaatatgcacagaggtctaactagatataggtctcagcccctgactttagaa

SEQ ID NO: 400640 - DNA, 201 bp, Homo sapiens
cccacagtctccctcaactcgcgcactttctcttccagattcaggttccgatctgtcagcatctccaccatctcctcagcacccagagcagcatccacctrtgttacggggaggatagggagaagggctgctggaaggtacctagaaagaggaggcatcaactgataggagagtcaggtgggggattctgggtgaggggct

SEQ ID NO: 400641 - DNA, 201 bp, Homo sapiens
gggctcaccacagctcccattgattgcaggccccacttctccccttaactcccaagccgtcttggtcccgatccccaacactcactgctttcctgagtccwaccaatttcctggcccccagatcctgagcctacactaccctcaccttaatcttgagtgacttcttcaactccttaataactgtctctcgatcttcgagct

SEQ ID NO: 400642 - DNA, 201 bp, Homo sapiens
actaaaaatacaaaaattagctgggtatggtggcgcatgcctgtagtaccagctactcgggaggctgaggcaggagaatcgcttgaacctgggaggcggargttgcagtgagccgagattattgcgccactgcgctccagcctggcaacagagcgagattccatctcagaaaaaaaaaaaaaaaaaaaaggcagggtcagg

SEQ ID NO: 400643 - DNA, 201 bp, Homo sapiens
tgtcctcttgttcaggcacaccagagctgagcaacacctgggtgctccggttccacatgctcacaccaggggccagcttcagggcttctggcagcaacacsggcttccacatcacctgggaagtggcttcaaggaccgggggtgtggttcgaggccatctgccaggatcctggccctccctgtctgccagctccagaccct

SEQ ID NO: 400644 - DNA, 201 bp, Homo sapiens
ttccctgagggctcaccacagctcccattgattgcaggccccacttctccccttaactcccaagccgtcttggtcccgatccccaacactcactgctttcstgagtcctaccaatttcctggcccccagatcctgagcctacactaccctcaccttaatcttgagtgacttcttcaactccttaataactgtctctcgatc

SEQ ID NO: 400645 - DNA, 201 bp, Homo sapiens
cagcactgtccaacttcttctccaggaggctcagccgcacattggcctcacttagctcctctccctggacaaggacagaacttctagatccctgacatccyccccacagtccctggaaactgggggctagaccatgagatagtaggttccctgagggctcaccacagctcccattgattgcaggccccacttctcccctta

SEQ ID NO: 400646 - DNA, 201 bp, Homo sapiens
agatgtttctaagcaagagactggactggaggcctcaatttactcccaacgtcatctggaggtcacaaagggcagagagccaagatggcagcccaaggcayggtacaagcctatcttagctggtgtcaatgtctactagattctgccccaggcctccaacaatggctacaggctggaatgtggaccagcctgcttagtctt

SEQ ID NO: 400647 - DNA, 201 bp, Homo sapiens
aatccaatgtgctagaacaaaactcacaaaaatttttaggggtgttaaggcaagccaactcctcccttcgacacaccactaaatgacagctaatttcctamagatgaatgatgacccattttaccctgaaaagaaacaggttgtcatggcaagaggtatctctgactatgcaagaggccctctccccttttaccacatttc

SEQ ID NO: 400648 - DNA, 201 bp, Homo sapiens
aggttgcagtgagctaagatgcaccactgcactccagcctgagtgacagagcaacacttcatctctaaataaataaataaagtgattattgagatcagtgrattaatatctaccatgtttacaacaattttgtgtttgtggcacttgtcctttttttttttttaatcttccccctttttggtcttttttttttttttttta

SEQ ID NO: 400649 - DNA, 201 bp, Homo sapiens
gaacggggcaggaagagcttaacccacgtttctacctgggggctggctgaggtggctgtgcatcgggcagagcggcaccagagggctgagggtcgaagggracagcaggggaaaggagtgcttaggagatgaggcgactgtgaagctggtgcagctgctcctgggtcagcaccagccggtgtcgctgtccaaaaccagccg

SEQ ID NO: 400650 - DNA, 201 bp, Homo sapiens
tacctgagagtggcgtggggacaggtttcaatggctctcacctggtggggacaggcacctcggtcactcctcccagcatggccgactggatgaggcgcacraacgcgatgaatggctggtctaggaagtccacctcgcccacgagcacgttggacgcttctgagtccttggggatcttcttcatgaatttgtttttccgct

SEQ ID NO: 400651 - DNA, 201 bp, Homo sapiens
tgtggtctgtgatttccttgccctagcagagcccaatttggagacgtgaggtgaagactctctggttcaagacacaataataacccttctcaaccagttckgtgagaattaatccctcatatgtaatgcattacatcctatgcatctggaatgacactggttgtgtaccatcattgagagtattgaagaaaagtcatcaaa

SEQ ID NO: 400652 - DNA, 201 bp, Homo sapiens
agataggaaatttatcatctggttggatatcctcactttcttcctagatcacgtggagttttcccttagtggaaaagcctcattcctggatctagagcctgctggtggcagacatgtaaaaaacatgtttcggaggccatgcccaagccaacacattaacccaacattatagtttctgttaataatccatggaatcaaaga

SEQ ID NO: 400653 - DNA, 201 bp, Homo sapiens
aatattagaacaatttgcagcacatctaccagcagatgctgactaaccaaccccctgctccataagccataactatagctttgattggacaaaagactgastttagtaactccctcctgataagaagatcatgaaccatggactggttctggtcagtttacagaggctgtgcacttgaacgcatttgtgtcctacaaagac

SEQ ID NO: 400654 - DNA, 201 bp, Homo sapiens
aatgattgtaggaaagacaccacaatcagtcatgtattgataattattgaagctaggttatgctacaaaagagttgtaaaaaaaaaaaaaaaaaaaaaaaraaagagttgtaaactaaaaataaaatcctaagcctccccaccaactgaacagactccctcttggccaaggggatcccagagatacattaaaaaccaaaat

SEQ ID NO: 400655 - DNA, 201 bp, Homo sapiens
ccttaccatatacactttagaatcaatatgtcagcatccaaaaaaataacttgctaagatttttattgggattatattgcatctatagatcaagttggggagaactgacaacaatgttgaattttcctacgcatgaacatgaaatttttttttttttttttgagacagagtctcactctgtcacccaggctgaagtgtagt

SEQ ID NO: 400656 - DNA, 201 bp, Homo sapiens
acctaggagaaaaggaaaagaagatccatcaggggaagccaggctcttgcaggtccctttcctatgggccctactcatgtacctctcccatgttcataacmaaagcaaactccctcccccttaatcctgcagtccccttaaactagcatcctctcactttccttctgttcaatggctgctttcctgaaagaggtgttagac

SEQ ID NO: 400657 - DNA, 201 bp, Homo sapiens
atacagccaaagcttcctcagcatcgcttctcctccactcctgctgtgagcttaatggcccaagtcccactctcaacaccacacaggaagcactgaagcaraagttgctttaatcaaggggtgaagtcctcaatcaaggggacctcacttaacctttggtggtggggtctcagcctaccccccacaagccctgaggcccct

SEQ ID NO: 400658 - DNA, 201 bp, Homo sapiens
gagagagtgggtgaatcaaacaaactgaacagtgaagccaaagaacactgctgggaagagcttctgtggtgggggaaccacctgagcaggggctaaatccytgggccaagtggagggggcagttttattcatcttgggggttggcaggtacataccagggctggtgcgagtgatgtctactacgtgcgtgtgtgtgctcaa

SEQ ID NO: 400659 - DNA, 201 bp, Homo sapiens
gtacttgagagagagtgggtgaatcaaacaaactgaacagtgaagccaaagaacactgctgggaagagcttctgtggtgggggaaccacctgagcaggggmtaaatccctgggccaagtggagggggcagttttattcatcttgggggttggcaggtacataccagggctggtgcgagtgatgtctactacgtgcgtgtgt

SEQ ID NO: 400660 - DNA, 201 bp, Homo sapiens
ttgctattggtgtttggctttgcttatgcgagttccttccatgcagatgaagtacatctcagaggcaagctgtagaagaatagatttccttgcgaagcagrtaagctggagtcaggcagtgctgactatgcggtggtgatttaaggcaactgtgccaatttctttttcagagcatattgatgagagaaggatctgcaatgc

SEQ ID NO: 400661 - DNA, 201 bp, Homo sapiens
gtcattatggtgggccctattccaacatgactggggtccatacacaaagaggaaagtgctctgtgaagacagacacacaggaggccatgtggtggagaggyagagccgggggtgatgcggctgccagccaggaacaccaaggactgctggccaccaccagaagccaggaggaggccaggaaggattccacctggagcctca

SEQ ID NO: 400662 - DNA, 201 bp, Homo sapiens
caggagccaactcactaacaccaacctttgattttcttttcctcctttccctcactctcgctgctctgagacttcaccctccaataaagtgctaacactarctttgcctcagattcggttttcttagtaacttgaatacagacagtaacctcacccaaaccatgccttcaaccaccattgatacactcccaactcactccc

SEQ ID NO: 400663 - DNA, 201 bp, Homo sapiens
atatatattaatcggtgactttgctgtgttcctccactataccataaactctttgtgggcagagactctgttgtcttcactcagcatcttcaatgcctggytcatggcaagttcactagatttctgtggaacatgtgattgattggccataccttgcaaatgagacgaggcatgagcaacagcaccagaacgcagtcatgg

SEQ ID NO: 400664 - DNA, 201 bp, Homo sapiens
acttacagattcgatgggactatgctcacatttaaccctttcccatttaggcaaaaaaaaaaagtgcagctcactgccagcactcatttaattttacataracacactctttgaggccgaagcaaatctgactgattttcaatgtgaaaatgcaatataaaaattattcttagaattatttctaaaaagaactaacattgg

SEQ ID NO: 400665 - DNA, 201 bp, Homo sapiens
ggtttgttttttcctgtgtatagatgattctcagaatggccaaagtggccaggcacggtggctcacccctgagttcccagcactttgggaggccagggcargcagatcacgaggtcaagagatcgaaaccatcctggccaaaatggtgaaaccctgtctgtactaaaaatacaaaaattagctgggtgtggtggtgcacac

SEQ ID NO: 400666 - DNA, 201 bp, Homo sapiens
cccctcccgctttcctgtagccaatgggggctgtccaacctagtgcagggactagggaaggtggggaaggatgaaaggtgtgagcctcacgtggtgacaamgacagtttggctgggggaatcctgggggccagcacccccctccattggccacacctgctgctgccaggacagtggagtggggtgtgccagaatgggggct

SEQ ID NO: 400667 - DNA, 201 bp, Homo sapiens
tatttattgaataaacatttattgaataacattgcaacatactgggaggtaactgtgggtaggcacggagtttaacatcaggcagacagagaaggacttgrtccaataataacaggaaggcagtcttgttcctgagcaggagactgcatagtgaaaactattttaggaagatcaaactgatgacacctgcaggatggagtg

SEQ ID NO: 400668 - DNA, 201 bp, Homo sapiens
tggcattctatcagcttgtcttttcatccaccctttacagtgcttggcacacagtaggcgctcatataattgttcaacgaatgaatgaatgaacttttctyttgtgttgtccggccttcggtgacactagcggcgtcaggcaggagtttgacttcctcagcctatcatggcacgttgccgaggcttcagcgccttacagga

SEQ ID NO: 400669 - DNA, 201 bp, Homo sapiens
ggcactgggcggcccagagccagcccactgttcccgacaccgaccttaacggccgaccctggctctggcgcatccccagctgaactgaagctcaccgagcyttcgtgcgccatcgccaacgcggtcgcagcaacgctggtgtttctgctgcatccgggccgcgtaagccacctaacagtcgcctgggcaaccacgggctcg

SEQ ID NO: 400670 - DNA, 201 bp, Homo sapiens
ctattgttctcaagtgatcctcccacctcggcctcccaaagtgttaggattacagacatgggccaccatgcctggccgattcgaaggtgtttttttttttkggggggggcacggagtctcactctgtcttgcccaggctggagtgcagtggtgcaatctcggctcactgcagcctccacctcccgggctcaaccaattctc

SEQ ID NO: 400671 - DNA, 201 bp, Homo sapiens
ccagaggcaacagtggaggagcagagaagtggctcccaaaccaaaagcccagagagcaatgtcaccaccaagggatcagggacgcagcaggtgcagggtgyggctaagcaggacattagccttgtccaggagggcacatgtgtatgagtgggtggacggggggaggagggggtagggatgggaagaggccaggggaaaagt

SEQ ID NO: 400672 - DNA, 201 bp, Homo sapiens
caaccacgggctcggggtcgctcgccccgcccacagttgccccggcaaccgcgccgcccgcggcacgttccggccgctcaccccgcccaagggccgtgcgyacgtgcgtcgtctctatggtggcggcggatttggagggaccctacgaaccaggagtcaggcgagccgatctggggctgcaggtgttacctctgatctagg

SEQ ID NO: 400673 - DNA, 201 bp, Homo sapiens
acttgaacgcatttgtgtcctacaaagaccttctaacgtataatgcctaatgtaatacatttaaatgttatggctccatcccaaggtgaacatgggcatgygtaatatgcatgtttgttcaatacacatgcatcaggaccaccttcatgaatattcatagatcctcctgtaacctactgaatatgcatgtttagccaaccc

SEQ ID NO: 400674 - DNA, 201 bp, Homo sapiens
gggcccctccccaggctccaagcaaaccaagagtacagggcagcttccctaaggatgcatcttcaatcttccctcccccactaccttccactctcccaacyagaggcttatgcccatgctcaggaaaacgaagtaccaacacatcagctgcacatgcgacagacatgtgcacacatgcacagacacaaaagaagggcgtga

SEQ ID NO: 400675 - DNA, 201 bp, Homo sapiens
cattctatcagcttgtcttttcatccaccctttacagtgcttggcacacagtaggcgctcatataattgttcaacgaatgaatgaatgaacttttctcttstgttgtccggccttcggtgacactagcggcgtcaggcaggagtttgacttcctcagcctatcatggcacgttgccgaggcttcagcgccttacaggacct

SEQ ID NO: 400676 - DNA, 201 bp, Homo sapiens
ttctatcagcttgtcttttcatccaccctttacagtgcttggcacacagtaggcgctcatataattgttcaacgaatgaatgaatgaacttttctcttgtsttgtccggccttcggtgacactagcggcgtcaggcaggagtttgacttcctcagcctatcatggcacgttgccgaggcttcagcgccttacaggacctcg

SEQ ID NO: 400677 - DNA, 201 bp, Homo sapiens
gtctgtgttgcctgggctggtcttggactctgtgcttcccaaagtgctgggattacaggcatgaactaccatgccctacctaaaatggtttctgaggggtraaaaggccttgttactttatacacctggttcttcatgtggatttggcttaaaggcaaaataaactcaaaagagtgaatattttattagaaatgggacaga

SEQ ID NO: 400678 - DNA, 201 bp, Homo sapiens
ggctgctaacaacagggacaaaacacgaactacaaatggcatataagcagataagaaaaactatttaacctcatggtgaggggtcaaacaattgcaaattraaactgtaaaacacttagtaatgatcagggcgcagggtggtgtagcagttaagagcccagactgatgtgagactcagcttgaccaagcgctgtcagtcac

SEQ ID NO: 400679 - DNA, 201 bp, Homo sapiens
tgcctgaaatgccttttcttttctctgccccgctctatgtctggcagattccagtttccctttcttagattctcaaaacgaggctactccctccctgtgtrctccgatattcttgcacagggtgctctgtctttgtttgcatgcctttctttccacatcctcagggattaagcatcgcacctggtagatcattgatgctta

SEQ ID NO: 400680 - DNA, 201 bp, Homo sapiens
ctttattattgaggagtgaggcctcctgctcttttaattgaaagcctttagaaacctctagataatggcaagccatggcattttgttttgttttttgagayggcatttcgctcttgttgcccaggctggagtgcaacggcgtgatctcggctctccgcaacctccgcctcccgggttcaagtaattctcctgcctcagcct

SEQ ID NO: 400681 - DNA, 201 bp, Homo sapiens
tgagacggcatttcgctcttgttgcccaggctggagtgcaacggcgtgatctcggctctccgcaacctccgcctcccgggttcaagtaattctcctgcctyagcctaccgagtagctgggattataggcatgggccaccatgcctggcgaattttgtatttttagtagagatggggtttctccatgttggtcaggctggtg

SEQ ID NO: 400682 - DNA, 201 bp, Homo sapiens
ctcccgaccttaggtgatccacctgcctcaggtgatctgcgcctgcctcagcctcccaaagtgctgggattacaggcgtgagccactgtgcctggccaagycatggcattttaagacattgggaggtagtgtggtgcagaaaaaaagaacatggattttggaaccagaaagactggctgtattattagctcgcttatttat

SEQ ID NO: 400683 - DNA, 201 bp, Homo sapiens
cagcagcccagggacatgcaggacagctggggaaggggctcatggcccccatccacccaggcacaaatagtaaacacaccaccttcttaggcttcagtccscgctgcatgaggagtaggaaagggcagagttagagaacagatgtcctgggcataggtgttaagaccaactcgggcttacacaggttagacgcgggtaggg

SEQ ID NO: 400684 - DNA, 201 bp, Homo sapiens
tcaaagcacagtgagaaaagaagaatgaaggggacaaggaaaatgatacagagaggcagagagagatagtgacaaaggacagggggaggatggaggcagakgagagagggaggaaaagataagagaaagacataagattataaggctcctcgcttggcactgactccacattcctcctagctctggcactacccttaagag

SEQ ID NO: 400685 - DNA, 201 bp, Homo sapiens
gcattattaggtgaggttccatgtgtcacttagcttggaatttgctggagggggagcagtttcacctctgtcctccatgaccggtgagagtcttcaaacaygggctggggatttaggctggcagagggaaggaaggtgggcttcccatgagaacagtgatagccaattatttgaactgcccaatagttccttcctctgtta

SEQ ID NO: 400686 - DNA, 201 bp, Homo sapiens; identical to SEQ ID NO: 88710

SEQ ID NO: 400687 - DNA, 201 bp, Homo sapiens; identical to SEQ ID NO: 88711

SEQ ID NO: 400688 - DNA, 201 bp, Homo sapiens; identical to SEQ ID NO: 88718

SEQ ID NO: 400689 - DNA, 201 bp, Homo sapiens; identical to SEQ ID NO: 88720

SEQ ID NO: 400690 - DNA, 201 bp, Homo sapiens
caactcaagtataaaatatcaggagagctctttgctcgggcaccagtagaacaatacgctgacactgctgagacagtgaaagattacagcttctactttgkaatgtggttctaggatgacactgagcaggtatagtgctttcatcggcattggcttcacagatgagggtgatgcctttgactttgataacttctgaaaaag

SEQ ID NO: 400691 - DNA, 201 bp, Homo sapiens
gtttaccttcggtcaagttctgtgtcactgaaggaagaatcagagtgagtaactccaactggaagatctttttcctggcaggaaaatgaaaaatgtcagaygtggagcaggtttgagcaccatatttctccgggcttcccccaccatttcctttcttttccttctctaaccctagagccaacactatgcaagaggaatacg

SEQ ID NO: 400692 - DNA, 201 bp, Homo sapiens
ttctgtgtcactgaaggaagaatcagagtgagtaactccaactggaagatctttttcctggcaggaaaatgaaaaatgtcagatgtggagcaggtttgagmaccatatttctccgggcttcccccaccatttcctttcttttccttctctaaccctagagccaacactatgcaagaggaatacggggcctcagagatgtgt

SEQ ID NO: 400693 - DNA, 201 bp, Homo sapiens
agaggcacagcacaaccaccacgaggacctccaattatgcctgacttataacccaagtgctatgctacctatttctctaaagggaaaagcttggttctgarccctcaaccatttcaacagccactggaaaacatgggaggcctggtgggccatgtttggactgatgtggtctgaaacaacatagaagagggccaggagatg

SEQ ID NO: 400694 - DNA, 201 bp, Homo sapiens
gcacatgcctgctttataccagattggggttgaaatatcatgtctcatgggctccaagcaccccacagcctgtttttgtatggccagctagctaagcatgktttttatatatttaaagcattgtaaagaaggagaaagagtaggcagaagagagaaaggagaggagaaggagagaaaaagagaagaggagcggggagagga

SEQ ID NO: 400695 - DNA, 201 bp, Homo sapiens
gtagtaagaagggagagacatcatgtgttttacttactggcaatgcagtggataccgttttggggatctgattggacactttccatgggaatctttataaycgagggaggagggaactggggctggagaaaaacagtgggaaaagaggataaacaccaacacaacaatttggctttctttttttttttttttgagacagag

SEQ ID NO: 400696 - DNA, 201 bp, Homo sapiens
cacaggaacccgcttgctgtgatcacggccgtaaagcccacagtgatggaaagagtgggcatggccagtcaccttttccctggacagggagtctcattcaytctggcccaccctgaggatattcacataaacagaagagccctcaacaccccagaccaagacaagcagatgccccagcccatcctggactgggccgaggca

SEQ ID NO: 400697 - DNA, 201 bp, Homo sapiens
agggactttttgtggtgtctttggagccgtctcgaagctcccataagccattattcactttccctccaccgtagttcctcttgtctggcccctcaggtgartgaccatgcctaccagtgaccaagagggacggagcctgtgacagccgaagtggggagcctcagaaaggccatgggctggagaactacagttattctttaa

SEQ ID NO: 400698 - DNA, 201 bp, Homo sapiens
cctttccacctcgcggcagttcggtaagagggtcacagagctcggtcagcgcggaaagctgaggggaacggagggcgaggggcacgccgggcccccgaggkacaccgagggaagtccttcccgaacatctccgccccggcggtggtggccgctgaggggtgtggcggggcgacgtggcaccgagcgccgccgcagctctcg

SEQ ID NO: 400699 - DNA, 201 bp, Homo sapiens
ctctcccaaccagaggcttatgcccatgctcaggaaaacgaagtaccaacacatcagctgcacatgcgacagacatgtgcacacatgcacagacacaaaakaagggcgtgaatacctgggactggcgcacaaagatgccatgcccttcatcacaagtgaagtacttcctgccttgaacagttccatcatttttgccctttg

SEQ ID NO: 400700 - DNA, 201 bp, Homo sapiens
tgtccagctgctcccgcagctccagttctgtctcacgtgcattctcctgcagctcatcgttcatctcattcatcgcttcctaggacaccacaccatagttkgggctaaagaaaggcagggtcggccagcggcggtggttcacacctgtaatcccagcactttgggaggtcaaagcaggcggatcatgaggtcgagatcgag

SEQ ID NO: 400701 - DNA, 201 bp, Homo sapiens
agttaaaacaggaagcacatcttgtataagatatttttatatgccttgcaagattatgttctgaaatattagccaatgccttctccagcctgatactcccyttacctctctcccttccctgcctcaaatagccaggccattctatgctcattgctgcagggaaggtgtgtgaaaacagaaagaagaggtaaggagcctctt

SEQ ID NO: 400702 - DNA, 201 bp, Homo sapiens
aagggactatacacaggaagagtatatttattatagaaatcagaggagatggctgtcaaaaaactattttactttctgttctgaatctaaattgtcccatyttttcttggcttctatcataatcaaaagagcatggtgatttagctggtgaactgtggggagtggcttgccctcccccaagtctacattctcctctgtggc

SEQ ID NO: 400703 - DNA, 201 bp, Homo sapiens
aacaccttaagcctgtaagaccaaggatcagagtgctatcctagcaaacagacacacaggggtccttgcccaagcagactgcatgcccaaagcagcaaggwggtggtgacacagctagctttaaagatgtatgacacgttttagtcatcagagcccttgtgatagaatcatctggtgtttaggtgcccaccccttccctat

SEQ ID NO: 400704 - DNA, 201 bp, Homo sapiens
ctctctgccccaccccacaccatctggcctggactcacaactcaaatcaggtcattctgtgccagcctccgtgacccgagggagccaggccacagctgacrggaaggcagaaggtggcaggaggggaggttgcgctgcacctctgggttgcccaggccaacctgccaggcaggagggggaagcccgtgcccactttaccat

SEQ ID NO: 400705 - DNA, 201 bp, Homo sapiens
atccacctctcgttttttctatctctgctattaacatagcccctcctctattgcctcaccaactattttcaaaccaaaaagtctttgtctattcatagccrctgtaaaagtaacattcatttttctgttttttaatctaatgtctgcgtcttcagtggttctcactggctaatctaatcagtgtgttctagggaggtttat

SEQ ID NO: 400706 - DNA, 201 bp, Homo sapiens
gactcccccactttccaaccccaataagcctctcagaaccagggggccacaacagtagctacagattctatctcagaagagaaagaaagcaagtaacaaayaacaaagcagctcttaagaaaggcttcactgtaagacctctctgagccatcatccccattctgagtccccaggatagtctggaccccctcaggagcccct

SEQ ID NO: 400707 - DNA, 201 bp, Homo sapiens
tcagcctcccaaatatctgggactataggcaggtgccacaccataccaggctactttttaattttttgtagagatgaggtctcaatatgttgcccaggctkgtcttgaactcctgggctcaagcaatcctcccacctcagcctcccaaagtgctgggattacaggagtaagccaccacgcctggctgaggtcattattaat

SEQ ID NO: 400708 - DNA, 201 bp, Homo sapiens
gagagagagagagagagagaagtgagcaagagagagagagaagtgagagggtgagagagaaatctcaggtgcactagagagagaaaggctcagtggctgcwgcagaacctcaagcaggaagccgggtctccacagcagcaggggtggtggcagctgaggacctgtgagaggactggcaaaactgcccctttacccccttcc

SEQ ID NO: 400709 - DNA, 201 bp, Homo sapiens
ctcagcctcctgagtagccggactacagggatgtaccaccatgtttggcctcctgctgcaagttttaaacttcatgagccccaaaccctggcaatgtggamacacaccccattcaggaagttcctgatctaagcagggctacaacttggcagaactttcagagggaagagtatcctccagaaaggtgagagtggccctggg

SEQ ID NO: 400710 - DNA, 201 bp, Homo sapiens
tcctgtgtatgtcctgcgggggtaaagctagcacagtcccccaatactgcccctctccagccctttcaggcagattctaggtaggcagggaggggccaaargaacgcaaggagttgggactagggctgtttctggtgggcaagtaacccatccaccctctcaaaactacttatgggatgtccccttcactggaagacagcc

SEQ ID NO: 400711 - DNA, 201 bp, Homo sapiens
ggtccctgcccggcccatcttcgctgaggccaccatcactccgcggccggagcttccatccgggcagaactccaccaactaggactcagattgctctgccytaccaatcatcatcgtcccttgacggacgggccaataggaacagatcagaggtttctccctgtgaccaatccacagcagcgcctccgccgctcacccaga

SEQ ID NO: 400712 - DNA, 201 bp, Homo sapiens
ggcagagctcaataccggagtcgccagttaaacggcgatagcggcaggaggggggtgtggaggcaggggtcacccctgccccgggctcaccctcctgatgrgggggggcactctggtgggaggaaacaccttccacatttgttccttcaaagtgggcagggcagctggatgaggaggaacagcaggtttgttcactggaag

SEQ ID NO: 400713 - DNA, 201 bp, Homo sapiens
gccttacgtagccaaaaggggggatccaggaccctcgggcccccccagccgcatctgcaggttgatgcggtagcactgaagactacagagtgcctggcctktgcgggagcaagcgtagcggcgcggatggggacagccggggacagagcagcgcggcggcgggcctgagggggatggccgctgagacactgccgtgggggc

SEQ ID NO: 400714 - DNA, 201 bp, Homo sapiens
ccagccgccccgcccctgccacctctgctgccaccgccatggtccctgcccggcccatcttcgctgaggccaccatcactccgcggccggagcttccatcygggcagaactccaccaactaggactcagattgctctgccctaccaatcatcatcgtcccttgacggacgggccaataggaacagatcagaggtttctccc

SEQ ID NO: 400715 - DNA, 201 bp, Homo sapiens; identical to SEQ ID NO: 88749

SEQ ID NO: 400716 - DNA, 201 bp, Homo sapiens
aaaggaagggacaaggaaaggggaaagagacaaatggctgtcgtgataggttttggagctattgggatacctgctgttgcggcgcccgaagtgccccccakgcctcctcgctgccgttcccgctgctggcccgagccatacctccacctacagccccctgaggaccacagcctcctctaccgccagccgccccgcccctgc

SEQ ID NO: 400717 - DNA, 201 bp, Homo sapiens; identical to SEQ ID NO: 88739

SEQ ID NO: 400718 - DNA, 201 bp, Homo sapiens; identical to SEQ ID NO: 88740

SEQ ID NO: 400719 - DNA, 201 bp, Homo sapiens; identical to SEQ ID NO: 88753

SEQ ID NO: 400720 - DNA, 201 bp, Homo sapiens
actggctcaccctcaccggaggcaggacaagggcagagctcaataccggagtcgccagttaaacggcgatagcggcaggaggggggtgtggaggcaggggwcacccctgccccgggctcaccctcctgatgagggggggcactctggtgggaggaaacaccttccacatttgttccttcaaagtgggcagggcagctggat

SEQ ID NO: 400721 - DNA, 201 bp, Homo sapiens
atgaaccaacatacctgtcgagcagtaagcagccgctcattgatctccttcttgaggtctccattgtcatccagctcccccttctccagggcatccagccmcctctgttcctcctcttcctcctgaccccctaaccctcctgataggtcccgaagtggagagggagagagattactgtcttcatctgggaaggaagttgga

SEQ ID NO: 400722 - DNA, 201 bp, Homo sapiens
agcaagcgtagcggcgcggatggggacagccggggacagagcagcgcggcggcgggcctgagggggatggccgctgagacactgccgtgggggcggggacsccaggtgggaaggaaagggtggaaccctgtgctccgctgcagtagcgcaccatgggggccggagccgcagcccgccctccccgccgctcgccccgtgcgc

SEQ ID NO: 400723 - DNA, 201 bp, Homo sapiens
gcgcagagtccgggttaagggccttacgtagccaaaaggggggatccaggaccctcgggcccccccagccgcatctgcaggttgatgcggtagcactgaaractacagagtgcctggcctgtgcgggagcaagcgtagcggcgcggatggggacagccggggacagagcagcgcggcggcgggcctgagggggatggccgc

SEQ ID NO: 400724 - DNA, 201 bp, Homo sapiens
ctcgttggtcactcaggactcaggtacttctgccctccctttggtctccctgttcttctatgtggtgacagatggcaaggaagtcctactaccagaggttrgggccaaggggcagttgaagtttatcagtgggcacaccagtgaacttggtgacttccgctttacacttttgccaccaaccagtccaggggatacagcccc

SEQ ID NO: 400725 - DNA, 201 bp, Homo sapiens
atccacaagtagctggttcacatctctttaatgagatcaaaggctcctgtgtatgtcctgcgggggtaaagctagcacagtcccccaatactgcccctctmcagccctttcaggcagattctaggtaggcagggaggggccaaaggaacgcaaggagttgggactagggctgtttctggtgggcaagtaacccatccaccc

SEQ ID NO: 400726 - DNA, 201 bp, Homo sapiens
ccaatcatcatcgtcccttgacggacgggccaataggaacagatcagaggtttctccctgtgaccaatccacagcagcgcctccgccgctcacccagacamcaagagcttgtacagacaaagagtaggtgaaggttcgacccacggccctgactgacagcggcaatagccaatacagacaacagaacaggctctggcatat

SEQ ID NO: 400727 - DNA, 201 bp, Homo sapiens
tttcttcttgtgcttcttgtgttttttcttgtgcactccatggccatgggcacccgccaggctcaactccagggcttctcctgtggaaggaaagcctgtcracagtgtttggccggagggtggcaggggaagccctgaataacctaagcccctactggatcccacccttcccgcagtactcgctgttaccataacaacagc

SEQ ID NO: 400728 - DNA, 201 bp, Homo sapiens
gatcaaaggctcctgtgtatgtcctgcgggggtaaagctagcacagtcccccaatactgcccctctccagccctttcaggcagattctaggtaggcagggrggggccaaaggaacgcaaggagttgggactagggctgtttctggtgggcaagtaacccatccaccctctcaaaactacttatgggatgtccccttcactg

SEQ ID NO: 400729 - DNA, 201 bp, Homo sapiens; identical to SEQ ID NO: 88755

SEQ ID NO: 400730 - DNA, 201 bp, Homo sapiens; identical to SEQ ID NO: 88743

SEQ ID NO: 400731 - DNA, 201 bp, Homo sapiens; identical to SEQ ID NO: 88759

SEQ ID NO: 400732 - DNA, 201 bp, Homo sapiens; identical to SEQ ID NO: 88734

SEQ ID NO: 400733 - DNA, 201 bp, Homo sapiens; identical to SEQ ID NO: 88735

SEQ ID NO: 400734 - DNA, 201 bp, Homo sapiens
gttcttctatgtggtgacagatggcaaggaagtcctactaccagaggttggggccaaggggcagttgaagtttatcagtgggcacaccagtgaacttggtracttccgctttacacttttgccaccaaccagtccaggggatacagcccccaagtatggcaggtaactgggggaaaagaatgttgggggatggaaggggtg

SEQ ID NO: 400735 - DNA, 201 bp, Homo sapiens
gggaaagagacaaatggctgtcgtgataggttttggagctattgggatacctgctgttgcggcgcccgaagtgccccccaggcctcctcgctgccgttccygctgctggcccgagccatacctccacctacagccccctgaggaccacagcctcctctaccgccagccgccccgcccctgccacctctgctgccaccgcca

SEQ ID NO: 400736 - DNA, 201 bp, Homo sapiens
gggcagagctcaataccggagtcgccagttaaacggcgatagcggcaggaggggggtgtggaggcaggggtcacccctgccccgggctcaccctcctgatkagggggggcactctggtgggaggaaacaccttccacatttgttccttcaaagtgggcagggcagctggatgaggaggaacagcaggtttgttcactggaa

SEQ ID NO: 400737 - DNA, 201 bp, Homo sapiens
cgctacgtaccaaccctgtgtcaagccgcaggcagcggttccggactctgggacttaacctaacgtggcggggcgggacttccggcgggaggcggaggcgsaggcgcaggcgctggctggcaggtgtcgctaaccggacggtggtcgccagggcgagaggcgggagccggagaggtgaggcaggacccgggctccactgcc

SEQ ID NO: 400738 - DNA, 201 bp, Homo sapiens; identical to SEQ ID NO: 88741

SEQ ID NO: 400739 - DNA, 201 bp, Homo sapiens
ggtctccctgttcttctatgtggtgacagatggcaaggaagtcctactaccagaggttggggccaaggggcagttgaagtttatcagtgggcacaccagtsaacttggtgacttccgctttacacttttgccaccaaccagtccaggggatacagcccccaagtatggcaggtaactgggggaaaagaatgttgggggatg

SEQ ID NO: 400740 - DNA, 201 bp, Homo sapiens
atgtccccttcactggaagacagccccatgggaaagatctgcggtacagactctgggggtagtgcacacggggagtagtcctccagatctggcagggtggmactaaccctcacctccttgactggctcaccctcaccggaggcaggacaagggcagagctcaataccggagtcgccagttaaacggcgatagcggcaggag

SEQ ID NO: 400741 - DNA, 201 bp, Homo sapiens
caaaggaacgcaaggagttgggactagggctgtttctggtgggcaagtaacccatccaccctctcaaaactacttatgggatgtccccttcactggaagayagccccatgggaaagatctgcggtacagactctgggggtagtgcacacggggagtagtcctccagatctggcagggtggcactaaccctcacctccttga

SEQ ID NO: 400742 - DNA, 201 bp, Homo sapiens; identical to SEQ ID NO: 88758

SEQ ID NO: 400743 - DNA, 201 bp, Homo sapiens; identical to SEQ ID NO: 88761

SEQ ID NO: 400744 - DNA, 201 bp, Homo sapiens; identical to SEQ ID NO: 88762

SEQ ID NO: 400745 - DNA, 201 bp, Homo sapiens
ggtgtgagaacagactaaaacacttatgtactattttaaacattttttttaagatttaactttaggattttaattttgtttttgtttgaaacatagttggtttttttttttttaaatattaagcttgttaatagttttccagtgatgaccttccctagctttgtttctttaaaaacattttctcaagtatctctgcacaca

SEQ ID NO: 400746 - DNA, 201 bp, Homo sapiens; identical to SEQ ID NO: 88771

SEQ ID NO: 400747 - DNA, 201 bp, Homo sapiens
tttgcttctaccacttggccattttcctctcctcagatggggcaccaataacaaggagctcacccttcccactcccagccctcctgctcctgccacccccscaggttctggttccatttttcctttgttcacaaactacctctggacagttgttttgtttttggttcaatgttccattctttgacatctgtcattgctgct

SEQ ID NO: 400748 - DNA, 201 bp, Homo sapiens
cctagatcagaggtaacacctgcagccccagatcggctcgcctgactcctggttcgtagggtccctccaaatccgccgccaccatagagacgacgcacgtrcgcacggcccttgggcggggtgagcggccggaacgtgccgcgggcggcgcggttgccggggcaactgtgggcggggcgagcgaccccgagcccgtggttg

SEQ ID NO: 400749 - DNA, 201 bp, Homo sapiens; identical to SEQ ID NO: 88767

SEQ ID NO: 400750 - DNA, 201 bp, Homo sapiens
cctatacccctggcattctagtaactgtctcccaggaccacctcttgcctcttggcacccagctgtttgctgagtggtgacccaacacactttttgtgtcrcacatcagggaagcccagctggcacaagtcagtattagaaggctgatagaagaatcattcagcccaaaatataatcagcaaggggatatgagatcccaga

SEQ ID NO: 400751 - DNA, 201 bp, Homo sapiens
gcctcttggcacccagctgtttgctgagtggtgacccaacacactttttgtgtcacacatcagggaagcccagctggcacaagtcagtattagaaggctgrtagaagaatcattcagcccaaaatataatcagcaaggggatatgagatcccagacctccttctcccatcccctagttctagccagaccagtagagtagtt

SEQ ID NO: 400752 - DNA, 201 bp, Homo sapiens
cgcctgactcctggttcgtagggtccctccaaatccgccgccaccatagagacgacgcacgtacgcacggcccttgggcggggtgagcggccggaacgtgycgcgggcggcgcggttgccggggcaactgtgggcggggcgagcgaccccgagcccgtggttgcccaggcgactgttaggtggcttacgcggcccggatgc

SEQ ID NO: 400753 - DNA, 201 bp, Homo sapiens
agtgcggccgcccactgtgccagtgccgcaggtggatattgtgcctgggcggctcagtgaggccgagtggatggcgcttacagccctcgaggagggcgagracgtcgtaggggacatcttggccgacttgctggctcgagtcatggactctgctttcaaagtctacctgactcagcaggtgggccgggatccgggtccttc

SEQ ID NO: 400754 - DNA, 201 bp, Homo sapiens; identical to SEQ ID NO: 88766

SEQ ID NO: 400755 - DNA, 201 bp, Homo sapiens; identical to SEQ ID NO: 88760

SEQ ID NO: 400756 - DNA, 201 bp, Homo sapiens
tggcaggaacattctctctgacattttctcctagattgtataatagcccctttattattattattattttttaattactcatccccttgcaatgtgatagyctccttaaaagaaaagcaatttttcttttggtcaggtaatacatatccaaagtacaaaattgaaagtgtacaaaaggatacagagggtttttttttttaa

SEQ ID NO: 400757 - DNA, 201 bp, Homo sapiens
aactctcgccttggcctcccaaagtgctgggattacaggcatcagccaccacacccagccaatccagacttttttgtatacttattgatatggtttggctytgtgtccccacccaaatctcatctccagctgtaatccccatatgtagagggagggacctggtgggaagtgattgggtcatgggggcagttcccccgtgct

SEQ ID NO: 400758 - DNA, 201 bp, Homo sapiens; identical to SEQ ID NO: 88764

SEQ ID NO: 400759 - DNA, 201 bp, Homo sapiens
ggggaaggctcccagatgggtaggggaagtccactcacctgtccctgggcaggctcggtggcaatgtctgtgattggcatctggtgcccagccagctcctygctcagtacaatgttgggaccctttgctgggatgtcaaacaccagcacccggcctgaccacgttcctgtatccagaaccagtactccagtgatgacttcc

SEQ ID NO: 400760 - DNA, 201 bp, Homo sapiens
tgttatgttgcccaggctggtctcaaattgctggcctcacaggatcctcttgccttggcctccaaagtggtgggatcacaggcatgagccatcatgcctgrcctatgttgcttcacccactgaatttatagtaatttgttatgtagcaatagaaaactaatataagatctaatataataaacttcctcagttttatttgtt

SEQ ID NO: 400761 - DNA, 201 bp, Homo sapiens; identical to SEQ ID NO: 88776

SEQ ID NO: 400762 - DNA, 201 bp, Homo sapiens; identical to SEQ ID NO: 88777

SEQ ID NO: 400763 - DNA, 201 bp, Homo sapiens; identical to SEQ ID NO: 88778

SEQ ID NO: 400764 - DNA, 201 bp, Homo sapiens
tcctcccaggttcaagtgattatcctgcctcagcctcccaagtagctaggtttacaggtgcctgccactacacctggctaatttttctatttttagtagakacagggtttcaccatcttggccaggctggtctcgaacttctgacctcgtgatccacccacctcggcctcccaaagtgctgggattacaggcatgagtcac

SEQ ID NO: 400765 - DNA, 201 bp, Homo sapiens
ctcccaggttcaagtgattatcctgcctcagcctcccaagtagctaggtttacaggtgcctgccactacacctggctaatttttctatttttagtagatamagggtttcaccatcttggccaggctggtctcgaacttctgacctcgtgatccacccacctcggcctcccaaagtgctgggattacaggcatgagtcactg

SEQ ID NO: 400766 - DNA, 201 bp, Homo sapiens
gcgatggagcacatcagccggaacaacggctgtctggttgtgctcccaggcacacacaagggctccctgaagccccacgattaccccaagtgggaggtagktctgcccggcggctgagtcttgatccgaatctccttcgcagtttctgtttcacatcagtacctctaaagagtttacaaatgagatggcatttcctttctg

SEQ ID NO: 400767 - DNA, 201 bp, Homo sapiens
gaaaaaatctgcagaaaggaggtgaaaccattaggattaacagtaatgagagatgtgaccatttcgaaatccgaatatgctccaagtgagaagatgatcaygaaggtccaggatttccaggaagataaggagctcttcagatactgcactctccccgaggtcagagaccacccttgctttgcgtcggcttaattgccagtg

SEQ ID NO: 400768 - DNA, 201 bp, Homo sapiens
gcctgccactacacctggctaatttttctatttttagtagatacagggtttcaccatcttggccaggctggtctcgaacttctgacctcgtgatccaccckcctcggcctcccaaagtgctgggattacaggcatgagtcactgcgcctggccaatgtcctacatttctgaagaatgggaccagtatctggtggtctatgc

SEQ ID NO: 400769 - DNA, 201 bp, Homo sapiens
ttggaaaaaaagaaaaaaacaaagattgaataagagaagtgagctaactgccgggcgcggtggctcatgcctgtaatcccagcactttgggaggccgaggygggcagatcacgaggtcagaagtttgagaccagcctgagacacatggtgaaacccagtctctactaaaaatacaaaaattagctgggcatggtggcgggc

SEQ ID NO: 400770 - DNA, 201 bp, Homo sapiens
atagctactgtactttgtaccagttgtcaatacttctgatttcccacaaggtttgtttttgttttttttttgctttcttagattctgaaatatgtggagtkcttcactggacctaatattatggccatgcacacaatgttgataaacaaacctccagattctggtaattgtaagggagaagaaaaaaaaatggtttcatta

SEQ ID NO: 400771 - DNA, 201 bp, Homo sapiens
attcctgataggaagacattattattactaacacaattaaaattgttactatgagtcacaaactatagtggtctttttttttttttttttttttttgagayggagttttgctcttgttgcccaggctggagtgcgatagcgcgatcttggctcactgcaacccccacctcccaggttcaaacaattcctgattctcctgcc

SEQ ID NO: 400772 - DNA, 201 bp, Homo sapiens
ggccacctcggccgcccctcggccggggctgtcgtatcctttgggctgcgcggggctcgggctggatccggcgccggcgccgccgcctgagtggtggcccyggtccgggtggaggcctcggggtcgcacgcttcgcagccccagcgcctcctcgctcagcgccgggtccccgcctgggtcgcgtctcttcccggagccggg

SEQ ID NO: 400773 - DNA, 201 bp, Homo sapiens
atgctaggtactgtgcccaatccagggtcacaaaagaataaagcacaaggccgggcgtggtggctcacgcctggaatcccagcactttgggaggccgaggygggcggatcacgaggtcaggagatcaagaccatcctggctaacacagtgaaaccccgtctctactaaaaatacaaaaaattagccgggcgtggtggcggg

SEQ ID NO: 400774 - DNA, 201 bp, Homo sapiens
gatccggcgccggcgccgccgcctgagtggtggccccggtccgggtggaggcctcggggtcgcacgcttcgcagccccagcgcctcctcgctcagcgccgsgtccccgcctgggtcgcgtctcttcccggagccggggagcggggaagaggctgcgtcccccgaggacacgcgcggccgccctggggtcggggcaattgcc

SEQ ID NO: 400775 - DNA, 201 bp, Homo sapiens
caaaagaataaagcacaaggccgggcgtggtggctcacgcctggaatcccagcactttgggaggccgaggcgggcggatcacgaggtcaggagatcaagaycatcctggctaacacagtgaaaccccgtctctactaaaaatacaaaaaattagccgggcgtggtggcgggcgcctgtagtcccagctactcgggaggctg

SEQ ID NO: 400776 - DNA, 201 bp, Homo sapiens
gtggtggctcacgcctggaatcccagcactttgggaggccgaggcgggcggatcacgaggtcaggagatcaagaccatcctggctaacacagtgaaacccmgtctctactaaaaatacaaaaaattagccgggcgtggtggcgggcgcctgtagtcccagctactcgggaggctgaggcaggagaatggcgtgaacctggg

SEQ ID NO: 400777 - DNA, 201 bp, Homo sapiens
tggtggccccggtccgggtggaggcctcggggtcgcacgcttcgcagccccagcgcctcctcgctcagcgccgggtccccgcctgggtcgcgtctcttccmggagccggggagcggggaagaggctgcgtcccccgaggacacgcgcggccgccctggggtcggggcaattgccgcgttgccctgccctccgggatccctg

SEQ ID NO: 400778 - DNA, 201 bp, Homo sapiens
ccgtcaccccctgcaccaggacctgcactatttccccttcaggcccagcgatctcatcgtttgcgcctggacggcgatggagcacatcagccggaacaacrgctgtctggttgtgctcccaggcacacacaagggctccctgaagccccacgattaccccaagtgggaggtaggtctgcccggcggctgagtcttgatccg

SEQ ID NO: 400779 - DNA, 201 bp, Homo sapiens
ggtttttgtttgtttgtttgttttctggttttcgtttttgtgtttgtttctttgtttgagatggagtttcactcgtgttgcccaagctggagtgcaatgaygctatctcggctcactgcaacctccacctcccgggttcaagcgattctcctgccccggcctcctgagtagctgggattacaggcatgtgccaccacgccc

SEQ ID NO: 400780 - DNA, 201 bp, Homo sapiens
agaccatcctggctaacacagtgaaaccccgtctctactaaaaatacaaaaaattagccgggcgtggtggcgggcgcctgtagtcccagctactcgggagrctgaggcaggagaatggcgtgaacctgggaggcggagcttgcagtgagccgagatcgcgtcactgcactccagcctgggcagcagaacaagactccgtct

SEQ ID NO: 400781 - DNA, 201 bp, Homo sapiens
ggtttcaccatgttggccaggctggtctcgaactcctgagctcaagtaatcctcttgcctcagcctcccaaagtgctggaattacaggcatgagccaccgygcctggccttctatattttactttatttgccttaattcacatcctaggtagctcatcccacttcagggactatttcctctgccagtttccatcctcaaca

SEQ ID NO: 400782 - DNA, 201 bp, Homo sapiens
cgtgagccaccgcccccggcctaatttgtatttttagtagagatggggtttcaccatgttggccaggctggtctcgaactcctgagctcaagtaatcctcytgcctcagcctcccaaagtgctggaattacaggcatgagccaccgtgcctggccttctatattttactttatttgccttaattcacatcctaggtagctc

SEQ ID NO: 400783 - DNA, 201 bp, Homo sapiens
tgtgtatgtctgcctgtaaaacccgctgatttggccgggcgcagtggctcactcctgtaatccgagcactgtgggaggctgaggcaggtggatcgcttgakcccaggaaccactgctcttagagctggatatggaaaggagttgaattgagtaaaatcagtgggttttattttgttttcttttctggagacagagtctcgc

SEQ ID NO: 400784 - DNA, 201 bp, Homo sapiens
gtggaggcctcggggtcgcacgcttcgcagccccagcgcctcctcgctcagcgccgggtccccgcctgggtcgcgtctcttcccggagccggggagcgggsaagaggctgcgtcccccgaggacacgcgcggccgccctggggtcggggcaattgccgcgttgccctgccctccgggatccctgggggcctctgctcctct

SEQ ID NO: 400785 - DNA, 201 bp, Homo sapiens
gctcagcgccgggtccccgcctgggtcgcgtctcttcccggagccggggagcggggaagaggctgcgtcccccgaggacacgcgcggccgccctggggtcsgggcaattgccgcgttgccctgccctccgggatccctgggggcctctgctcctctctttgtggagacgtcgtttcaccggcggcgcgtgaccccggcagc

SEQ ID NO: 400786 - DNA, 201 bp, Homo sapiens
actgttttactaacaagtctgcagtttatttgggggaagaatgggaactttttagttcaaacttttaggaagatcgaagaccctttttgtttttttgttgkgttttgttttgttttgtttttgaggagtctcactctgtcaccaggctagagtgtaatggcacgttctcggctcactgcaacctctgcctcctgggttcag

SEQ ID NO: 400787 - DNA, 201 bp, Homo sapiens
tcagcgccgggtccccgcctgggtcgcgtctcttcccggagccggggagcggggaagaggctgcgtcccccgaggacacgcgcggccgccctggggtcggsgcaattgccgcgttgccctgccctccgggatccctgggggcctctgctcctctctttgtggagacgtcgtttcaccggcggcgcgtgaccccggcagctg

SEQ ID NO: 400788 - DNA, 201 bp, Homo sapiens
ccacacccagctaatttttgtatttttagtagagacgggatttcactatgttggccaggatggtcctgatctctttaactcgtgatccgcccacctctgcmtcccaaagtgctaggattacaggcgtgagccaccacacctggctgaagagcttttaattaaaaaacaaacaattaaacaaataaacagtttcattgaggt

SEQ ID NO: 400789 - DNA, 201 bp, Homo sapiens
tatggtactccctcaaatgtagacttcacttgcctcttgttctaggggggagttaacaaaatgttccacgggatccaggactacgaggaaaacaaggcccrggtgcacctggtgatggagaagggcgacactgttttcttccatcctttgctcatccacggatctggtcagaataaaacccagggattccggaaggtaagc

SEQ ID NO: 400790 - DNA, 201 bp, Homo sapiens
ccgcctgggtcgcgtctcttcccggagccggggagcggggaagaggctgcgtcccccgaggacacgcgcggccgccctggggtcggggcaattgccgcgtygccctgccctccgggatccctgggggcctctgctcctctctttgtggagacgtcgtttcaccggcggcgcgtgaccccggcagctgtccagagacccaga

SEQ ID NO: 400791 - DNA, 201 bp, Homo sapiens
acatagtatagatttttttgtcccgttctggcttccttcactcagtgtagtgattttgaggttcattgatgctgttgtgtatgatagtagttttttgttgttttttttttttttttgagacagagtctcactctgtcaccaggctggagtgcagtggcacgatcttggctcactgcaacctccgactcccttgttccagca

SEQ ID NO: 400792 - DNA, 201 bp, Homo sapiens
tggattcgctcctggctttacagatgttttttaatgatttggtttgttgggaagtgtttagaagcatgggctctggtgccagactggctttttattttttrtagagaaagggtctcactctgttgtgtaggctgagtgcagtggtgcgatcatagcttactgcggcctcaagttcctgggctcaagcaatcctcttgcctc

SEQ ID NO: 400793 - DNA, 201 bp, Homo sapiens
caagttcccgtatcaaaagaaaaagaaaagatcctgggctgggcgcagtggctcatgcctgtaatcctagcacttagggaggctgaggtgggcggatcacytgaggtcgggagttcgagaccagcctgaccaacatggagcaaccctgtctctactaaaaatacaaaatcagcctggtgtggtggcgtgcgcctgtagtcc

SEQ ID NO: 400794 - DNA, 201 bp, Homo sapiens
cgtatcaaaagaaaaagaaaagatcctgggctgggcgcagtggctcatgcctgtaatcctagcacttagggaggctgaggtgggcggatcacctgaggtcrggagttcgagaccagcctgaccaacatggagcaaccctgtctctactaaaaatacaaaatcagcctggtgtggtggcgtgcgcctgtagtcccagctact

SEQ ID NO: 400795 - DNA, 201 bp, Homo sapiens
tgaggcaggagaatagcttaaacccaggaggtggagtttgcagtgagctgagatcgcgccactgcattccagcctgggcaacaaagcaagactccatctcaaaaaaaaaaaaaaaagaaaagaaaagatcctggaatcccatgatgctgcgaatggaaagagcccccattgttaaagcagggagaatgagttgtagttcga

SEQ ID NO: 400796 - DNA, 201 bp, Homo sapiens
ctccctgtcacggttccccatgttagccttttcttcataatgcagtgtccctcggccactctgacccatgtcattactgggttaacatttttcatctaackcctgggacctgctttgcttgttcactcttgcttccccatttcccgtcacctcctggttcccagatctcagtaatgagttgtcaagtgccaagcgtccccg

SEQ ID NO: 400797 - DNA, 201 bp, Homo sapiens
acaggctggcaccaccacgcccagctaatttttgcagtttttgtagagatggggttttgccatgttgcccaggctgatctcaaactcctgagcataagcarttctcccaacttggcctcccaaagagatgggattacaggcatgaaccaccatgcccggccaaaatgtgactcttaaaaaccagatatctgagaggctttt

SEQ ID NO: 400798 - DNA, 201 bp, Homo sapiens
agatctctgaggccaggagtttgagagtggcctgggcaacatagtgaggctctgtctctaaaaataaaatttaaaaatatccaggcatggtggtatgcacytgtagtccctgctattggaaggctgaggtgggaggatcacttgagcccaggagttgaaggctgcagtgaacctataatggcatgctctccagcctgcgtg

SEQ ID NO: 400799 - DNA, 201 bp, Homo sapiens
ggctggcaccaccacgcccagctaatttttgcagtttttgtagagatggggttttgccatgttgcccaggctgatctcaaactcctgagcataagcaattytcccaacttggcctcccaaagagatgggattacaggcatgaaccaccatgcccggccaaaatgtgactcttaaaaaccagatatctgagaggcttttgta

SEQ ID NO: 400800 - DNA, 201 bp, Homo sapiens
atgagagagtcccctatcctttctgccttttcttccttctgatctgcaggaggggtttatgtgatagaaggcagcttagcattaccaggtctctccctccytgaggagagcaggtgttcgggagccacactcagggagcaaaccaggggaaaatgtcagtgtggtcatgggcactccgactggacatggaatgactatagt

SEQ ID NO: 400801 - DNA, 201 bp, Homo sapiens
gctagtattagaggtgtgagccattgtgcctagcctgtaatttaaaaatgtaacttattttgggattctttttctcctttaggtatactctggataataaygttctaaccctggaacagagaaaattttatgaagaaaatgggtttctagtaatcaaaaatcttgtacctgatgccgatattcaacgctttcggtacagta

SEQ ID NO: 400802 - DNA, 201 bp, Homo sapiens
taagaagccaggtgacctcaggatcctaaccttgtcaatattgattatgggccgggcgcggtggctcatgcctataatcccagcactttgggaggccaagrcgggtggatcacgaggtcaggagatcgagactatcctggctaacacagtgaaaccccatctctactaaaaatacaaaaaattagctgggcgaggtggcgg

SEQ ID NO: 400803 - DNA, 201 bp, Homo sapiens
tgtgatagaaggcagcttagcattaccaggtctctccctccttgaggagagcaggtgttcgggagccacactcagggagcaaaccaggggaaaatgtcagygtggtcatgggcactccgactggacatggaatgactatagttgtggggggtgaggacctcttagataactttttttatttttattttttttgaaatggag

SEQ ID NO: 400804 - DNA, 201 bp, Homo sapiens
actatttccccttcaggcccagcgatctcatcgtttgcgcctggacggcgatggagcacatcagccggaacaacggctgtctggttgtgctcccaggcacrcacaagggctccctgaagccccacgattaccccaagtgggaggtaggtctgcccggcggctgagtcttgatccgaatctccttcgcagtttctgtttcac

SEQ ID NO: 400805 - DNA, 201 bp, Homo sapiens
gcccggcccactaatgcacttgttttggtgacataaagcgtaagttttcagattatttccttggtcttagaaatgctgaattgaagagcatgaacgtttcytaggttcttgtttttgtctttgtttttgttttttgagacggagtctggctctgtcgcccaggctggagtgcagtgccatgatcagagctcactgcaacct

SEQ ID NO: 400806 - DNA, 201 bp, Homo sapiens
gaaggcagcttagcattaccaggtctctccctccttgaggagagcaggtgttcgggagccacactcagggagcaaaccaggggaaaatgtcagtgtggtcwtgggcactccgactggacatggaatgactatagttgtggggggtgaggacctcttagataactttttttatttttattttttttgaaatggagtcttgct

SEQ ID NO: 400807 - DNA, 201 bp, Homo sapiens
atccgcctcggcctcccaaagtgctaggattacaaacgtgagccaccgcccccggcctaatttgtatttttagtagagatggggtttcaccatgttggccmggctggtctcgaactcctgagctcaagtaatcctcttgcctcagcctcccaaagtgctggaattacaggcatgagccaccgtgcctggccttctatattt

SEQ ID NO: 400808 - DNA, 201 bp, Homo sapiens
ccctgaagccccacgattaccccaagtgggaggtaggtctgcccggcggctgagtcttgatccgaatctccttcgcagtttctgtttcacatcagtacctmtaaagagtttacaaatgagatggcatttcctttctgagcaaaacattgtcctaagatttgcagtgaggatcagagaaagttcaaggatgtcagagaaaac

SEQ ID NO: 400809 - DNA, 201 bp, Homo sapiens
gaataacaatattaacctctgctacatagttctctgtaaagtacaaaagcacattcatattcattttcttattttcttcaccaaaacccggtggggcagtrtaaactccatgctgtcaatgacaagaaaacaaatcccagaggctgatctaagctagctaagcgacaaagcttgattttagagtcaggtcaaatctgaaaa

SEQ ID NO: 400810 - DNA, 201 bp, Homo sapiens
ctagagtgtaatggcacgttctcggctcactgcaacctctgcctcctgggttcaggtgattctcctgcctcagactcccgagtagctgggattataggcgygcaccaccacacccagctaatttttgtatttttagtagagacgggatttcactatgttggccaggatggtcctgatctctttaactcgtgatccgcccac

SEQ ID NO: 400811 - DNA, 201 bp, Homo sapiens
atggtcctgatctctttaactcgtgatccgcccacctctgcatcccaaagtgctaggattacaggcgtgagccaccacacctggctgaagagcttttaatyaaaaaacaaacaattaaacaaataaacagtttcattgaggtataattgtcatgtaaattgtacatattttgcatgtataatttgatcattttccacacac

SEQ ID NO: 400812 - DNA, 201 bp, Homo sapiens
gctggactacggcattgccactgagttatataaagacactatttggggaaggacagcgggtgaggactggcgcggcggcacacgccttgcctgttgtctcrgctcttctgggggccaaggccaggagtccagggttacagtgagccgtgatggccagtgcgttccaaaagagagaaacagagagaaagaaaggataacatg

SEQ ID NO: 400813 - DNA, 201 bp, Homo sapiens
gtcgtttcaccggcggcgcgtgaccccggcagctgtccagagacccagagatgtccaatcacaggcgcacggtgcacaggcgcgcagggctgcctggaacsggcccaggcaggcagtgaccgggacctctccggaggggagaggacggtgccctcccgggcaggagctggccaggcaggcgctgcccagggcggcctccct

SEQ ID NO: 400814 - DNA, 201 bp, Homo sapiens; identical to SEQ ID NO: 88793

SEQ ID NO: 400815 - DNA, 201 bp, Homo sapiens
ccaatgtattggctgcgcacaatgccaaaagtttaaataaaagacactattggaccccacactagcacaaccttcagagctgtgcaagtagcgaggtgcargcacaacgacacaaatcatgttgtgggttttaatatatagacttggcaattttccttttttcttttttttttttttttgaggtggagtctcactctgttg

SEQ ID NO: 400816 - DNA, 201 bp, Homo sapiens
atgttgcccaggctggtctcgagcctcttggttcaagcaatcctctgcctcgacctgccaaagtgctgacattacaggcgggagccaccatgcttggcttsaactatttatttatttatttatttatttatttaatttattattttgtttttgaaacacagtcttgctctgtcgcccaggctggagtgcagtggcacaata

SEQ ID NO: 400817 - DNA, 201 bp, Homo sapiens
ctggtctcgagcctcttggttcaagcaatcctctgcctcgacctgccaaagtgctgacattacaggcgggagccaccatgcttggcttgaactatttatttatttatttatttatttatttaatttattattttgtttttgaaacacagtcttgctctgtcgcccaggctggagtgcagtggcacaatattggctcacttc

SEQ ID NO: 400818 - DNA, 201 bp, Homo sapiens
tggtctcgagcctcttggttcaagcaatcctctgcctcgacctgccaaagtgctgacattacaggcgggagccaccatgcttggcttgaactatttatttatttatttatttatttatttaatttattattttgtttttgaaacacagtcttgctctgtcgcccaggctggagtgcagtggcacaatattggctcacttca

SEQ ID NO: 400819 - DNA, 201 bp, Homo sapiens
tagcacaaccttcagagctgtgcaagtagcgaggtgcaggcacaacgacacaaatcatgttgtgggttttaatatatagacttggcaattttccttttttyttttttttttttttttgaggtggagtctcactctgttgcccaggctggattgcagtgatgcaatctcagctgactgcaaccttggcctcccaggttcaag

SEQ ID NO: 400820 - DNA, 201 bp, Homo sapiens
gctgatgcttggaaatgttaaatgcatttgagctcatgagtgatgggatcaaatcggctcttcaaggacagtaatgtcacgttctggtgcaggacgcgttrgaggtataggcatctagaagcaaagaaaccagagagatgactattaacgcgttaggtctaaggtgaaaagaccctgtgggagccaaagtgggaggatcgc

SEQ ID NO: 400821 - DNA, 201 bp, Homo sapiens
ggagtggtggctcatacctgtaatcccagcacttgggaggctttgcaaggccaaggcggacagatcacttgaggccaggagtttgagatcagtctggccartgtagcgaaaccctgtctctactgaaaatacaaaaagttagctgggcgtggtggtgcacacctgtaatcccagctactcgggaggctgaggcaggagagt

SEQ ID NO: 400822 - DNA, 201 bp, Homo sapiens
tcgggaggctgaggcaggagagtcgcttgaacccgggaggcagaggttgcagtgagccgctgcactccagcctgggcaatggggtgagactgtgtccccaraaaatttttaaaaaagagttgagtaagtagtttaagttgagttgttttgtttactaatgaatataacttacagggattattttccctatgtaacctttca

SEQ ID NO: 400823 - DNA, 201 bp, Homo sapiens
caaaaaaaaaaaaaaaagaaaagaaaagatcctggaatcccatgatgctgcgaatggaaagagcccccattgttaaagcagggagaatgagttgtagttcrataggaaatgaggaacatggttttaggaactcctaactcgtctggacacagtggctcacgcctataatcttaacactttgggaggccgtggcgggtggat

SEQ ID NO: 400824 - DNA, 201 bp, Homo sapiens; identical to SEQ ID NO: 88784

SEQ ID NO: 400825 - DNA, 201 bp, Homo sapiens
cgagtctggctctgtcgcccaggctggagtgcagtggtgccatcttgcttcactgcaagctccgcctcccgggttcacgccattctcctgcctcagcctcyccagtagctggactacaggcgccagacaccatgccgggctaattttttgcatttttagtagaggcgggtttcaccgtgttagccaggatggtcccgatct

SEQ ID NO: 400826 - DNA, 201 bp, Homo sapiens
ccggccaaaatgtgactcttaaaaaccagatatctgagaggcttttgtatactgaaaaaaatgtaagcatttaatttagacatttatttctcttgggagaragaaatgctttctttccctgatgtttgctttccctgatgaaccattgacaatgtttttaattatggtactccctcaaatgtagacttcacttgcctcttg

SEQ ID NO: 400827 - DNA, 201 bp, Homo sapiens
agcctctccagtagctggactacaggcgccagacaccatgccgggctaattttttgcatttttagtagaggcgggtttcaccgtgttagccaggatggtcycgatctgacctcgtgatccgcccgcctcagcctcccaaagctaggattacaggcatgagccactgtgcccgccatccatactattatatggccttaattt

SEQ ID NO: 400828 - DNA, 201 bp, Homo sapiens
ggagtgcagtgatgcgatctcggctcactgcaagctccgcctcccgggttcacgccattctccttcctcagcctcccgagtagctgggactacaggcgccmgccaccacgcccggctaatttttttttattgttagtagagacggggtttcaccatgttagccaggatggtcttgatctcctgacctcatgatccgcccgc

SEQ ID NO: 400829 - DNA, 201 bp, Homo sapiens
cctctccagtagctggactacaggcgccagacaccatgccgggctaattttttgcatttttagtagaggcgggtttcaccgtgttagccaggatggtcccratctgacctcgtgatccgcccgcctcagcctcccaaagctaggattacaggcatgagccactgtgcccgccatccatactattatatggccttaattttt

SEQ ID NO: 400830 - DNA, 201 bp, Homo sapiens
ttggtgcatgcaactgcagtgggctttggctgacagaaggcaaagggaaaagtttgcagggcttccagagcgtgtggagtctcagataccctgctcagatkcagagtgggaggtatgattagcttagtgtgggtcacacattcaccctggccaggagagaagggctctgggtcagagtctcagcactgtctaagagggatg

SEQ ID NO: 400831 - DNA, 201 bp, Homo sapiens
atagttacaaacaaacacagtgttttaatttactattctttcattattctggatgtaacataagtgcctttgagctcagaaaaattgagcattttctcccycctattttggggaaatagcttctcagagacactcctgagtaagagatgaaggatttatttaaagttctgggcgaggaggagaacacactgggaacactca

SEQ ID NO: 400832 - DNA, 201 bp, Homo sapiens
ctcctacatggtcatattcccgcgcgggatgccgaagtggggcagatgaggtccggagctgctgagggatcccgggtccttctgttggtctgagaccctgrggcgggcggaatcccggagaaagccggagggactccccaggggaagcctgggagctgccgttctcctccctgcctgtgcaaacaggaaggggctggtgat

SEQ ID NO: 400833 - DNA, 201 bp, Homo sapiens
gcctgccttggcctcccaaagtgctgggattacaggcgtgagccaccgcgcccggcaaactttttgtttaaatcggagattttattctttcagctgtcagyggaaggagcagtcacgtagggttaaacagatggaagccatgacgttaggagagtgagtgaggtcccagcccagccacttgtcactgtgtgacctcggcct

SEQ ID NO: 400834 - DNA, 201 bp, Homo sapiens
ttcaattcattgaattcaaattaattgaataaaattttaattaaattgcattaacattttaaagatttgtggcttttaaccaacctggactttagtccagyttatttaccaggaaatatatttgcttaccttgggctttctgtgctcttatcagtaagaagccaggtgacctcaggatcctaaccttgtcaatattgatta

SEQ ID NO: 400835 - DNA, 201 bp, Homo sapiens
ctccctttagaacctggaaatgtgtcgcatctctgaaaatgctctgattttgcatttgcaggtcctagaaattcttgtccttcctcactttttgttcagtrcctaaaatgcctatacattttgtcaactggagctttgagctaacatcctaaattttaagggagaacaaatatatgtacattatgtttgaggtttgtcaag

SEQ ID NO: 400836 - DNA, 201 bp, Homo sapiens
cagttatgttagctggcaccaacaaatatcctgaataaaacagaactgacagcagctgggggacccactgacttaatttagttaacactgttttagaagtyggttaagtagaccaggagtggtggctcatacctgtaatcccagcacttgggaggctttgcaaggccaaggcggacagatcacttgaggccaggagtttga

SEQ ID NO: 400837 - DNA, 201 bp, Homo sapiens
caggaggtggagtttgcagtgagctgagatcgcgccactgcattccagcctgggcaacaaagcaagactccatctcaaaaaaaaaaaaaaaagaaaagaawagatcctggaatcccatgatgctgcgaatggaaagagcccccattgttaaagcagggagaatgagttgtagttcgataggaaatgaggaacatggtttta

SEQ ID NO: 400838 - DNA, 201 bp, Homo sapiens
cctcagcctcccaaagtgctggaattacaggcatgagccaccgtgcctggccttctatattttactttatttgccttaattcacatcctaggtagctcatyccacttcagggactatttcctctgccagtttccatcctcaacaattccagtaagtagtttgagttttgattttgaaatatattatgtatataaaagtttc

SEQ ID NO: 400839 - DNA, 201 bp, Homo sapiens
gttttgtttactaatgaatataacttacagggattattttccctatgtaacctttcatagaagctagaaatcaattttgtgttatggtgaaattgaaggtwaatggagggcagattgaagtgttccataaacccactctgtttgatattatttccaggatatttggatgtttcgagctcgacttgtgaaaggagaaagaac

SEQ ID NO: 400840 - DNA, 201 bp, Homo sapiens
gaccctggggcgggcggaatcccggagaaagccggagggactccccaggggaagcctgggagctgccgttctcctccctgcctgtgcaaacaggaaggggytggtgatgctggctgcgggcctccctcctggactgcgacattgtcaccaaattctataaagacgtcatgcaggaagtgataacgtgtgctgcgacgttct

SEQ ID NO: 400841 - DNA, 201 bp, Homo sapiens
tctccagtagctggactacaggcgccagacaccatgccgggctaattttttgcatttttagtagaggcgggtttcaccgtgttagccaggatggtcccgayctgacctcgtgatccgcccgcctcagcctcccaaagctaggattacaggcatgagccactgtgcccgccatccatactattatatggccttaatttttaa

SEQ ID NO: 400842 - DNA, 201 bp, Homo sapiens
ctccagtagctggactacaggcgccagacaccatgccgggctaattttttgcatttttagtagaggcgggtttcaccgtgttagccaggatggtcccgatctgacctcgtgatccgcccgcctcagcctcccaaagctaggattacaggcatgagccactgtgcccgccatccatactattatatggccttaatttttaat

SEQ ID NO: 400843 - DNA, 201 bp, Homo sapiens
ttgttctaggggggagttaacaaaatgttccacgggatccaggactacgaggaaaacaaggcccgggtgcacctggtgatggagaagggcgacactgtttycttccatcctttgctcatccacggatctggtcagaataaaacccagggattccggaaggtaagcattcacattgctgcacctgctgcagaagtgtgggtt

SEQ ID NO: 400844 - DNA, 201 bp, Homo sapiens
ggcgccagacaccatgccgggctaattttttgcatttttagtagaggcgggtttcaccgtgttagccaggatggtcccgatctgacctcgtgatccgcccrcctcagcctcccaaagctaggattacaggcatgagccactgtgcccgccatccatactattatatggccttaatttttaatgtctgagtcatattccact

SEQ ID NO: 400845 - DNA, 201 bp, Homo sapiens
ctaattttttgcatttttagtagaggcgggtttcaccgtgttagccaggatggtcccgatctgacctcgtgatccgcccgcctcagcctcccaaagctagsattacaggcatgagccactgtgcccgccatccatactattatatggccttaatttttaatgtctgagtcatattccactgagtgaacatagtgtcactag

SEQ ID NO: 400846 - DNA, 201 bp, Homo sapiens
aatttttaatgtctgagtcatattccactgagtgaacatagtgtcactagttaatttttcttccactaatgcacttttttttttttttttttttctgagayggagccttgctctgtcacccaggctggagtgcactggtgcaatcctggctcactgcaatctccacccccacaggttctagcgattctcctgcctcatcct

SEQ ID NO: 400847 - DNA, 201 bp, Homo sapiens
gtagcaggttttcttttcaggcaagaagacgtcccgtcaccccctgcaccaggacctgcactatttccccttcaggcccagcgatctcatcgtttgcgccyggacggcgatggagcacatcagccggaacaacggctgtctggttgtgctcccaggcacacacaagggctccctgaagccccacgattaccccaagtggga

SEQ ID NO: 400848 - DNA, 201 bp, Homo sapiens
gagacggagtctggctctgtcgcccaggctggagtgcagtgccatgatcagagctcactgcaacctccgcctcccaagttcaagcgattttcctgcctcarcctcccgggtagctgggattacaggtgcccactaccatgcctggctaaactttgtgttttcagtaaacatggggtttcaccatgttggtcaggttcgtct

SEQ ID NO: 400849 - DNA, 201 bp, Homo sapiens
cttttcaggcaagaagacgtcccgtcaccccctgcaccaggacctgcactatttccccttcaggcccagcgatctcatcgtttgcgcctggacggcgatgsagcacatcagccggaacaacggctgtctggttgtgctcccaggcacacacaagggctccctgaagccccacgattaccccaagtgggaggtaggtctgcc

SEQ ID NO: 400850 - DNA, 201 bp, Homo sapiens
gttatatggacatattagctagcatctttggtttatcttaaatcacctttaaaggggaagatcttgaccttcctaaatattctcatacaaccacaattccratcttaaggaataggttgggtgatttgagtttatgggtatgctgtacatttatttggattttgttactttaccttcttggaatgcatcaactggacagtt

SEQ ID NO: 400851 - DNA, 201 bp, Homo sapiens
gggctgcctggaaccggcccaggcaggcagtgaccgggacctctccggaggggagaggacggtgccctcccgggcaggagctggccaggcaggcgctgccyagggcggcctccctgctggactacggcattgccactgagttatataaagacactatttggggaaggacagcgggtgaggactggcgcggcggcacacgcc

SEQ ID NO: 400852 - DNA, 201 bp, Homo sapiens
ctggctttacagatgttttttaatgatttggtttgttgggaagtgtttagaagcatgggctctggtgccagactggctttttattttttgtagagaaaggktctcactctgttgtgtaggctgagtgcagtggtgcgatcatagcttactgcggcctcaagttcctgggctcaagcaatcctcttgcctcagcctcctgag

SEQ ID NO: 400853 - DNA, 201 bp, Homo sapiens
gtagagaaaaaatggtttcattcccagctagctcagaaaaagcccatttcattccgtgttatagatttagaatgatttccaatggctgggtttttcatgcyttgtttgcaatgttgtgaaataccgcttggttcttaaactattgccttcttggttcttgtgtggatagctactgtactttgtaccagttgtcaatacttc

SEQ ID NO: 400854 - DNA, 201 bp, Homo sapiens
ctggagacagagtctcgctctgttgcccacgctggagtgcagtggtgcgatctcggctcactgcaacctcttcctcccaggttcaagtgattatcctgccycagcctcccaagtagctaggtttacaggtgcctgccactacacctggctaatttttctatttttagtagatacagggtttcaccatcttggccaggctgg

SEQ ID NO: 400855 - DNA, 201 bp, Homo sapiens
cttccccatttcccgtcacctcctggttcccagatctcagtaatgagttgtcaagtgccaagcgtccccgattgtcaaatgtcctccaagccaccattctrctttcttccgggctattcatgacagctgtgaattgtatgggactcttcgtatgcagaggctccaatgaggaagaggaaactgccctcccactgagcaacc

SEQ ID NO: 400856 - DNA, 201 bp, Homo sapiens
cagtggtgcgatctcggctcactgcaacctcttcctcccaggttcaagtgattatcctgcctcagcctcccaagtagctaggtttacaggtgcctgccacyacacctggctaatttttctatttttagtagatacagggtttcaccatcttggccaggctggtctcgaacttctgacctcgtgatccacccacctcggcct

SEQ ID NO: 400857 - DNA, 201 bp, Homo sapiens
gggctcaagagatcctcccacctcagcctcctaagtagttgggactacagggttgcgccacgatgccaggcgaatttatgttgttgttgttattgttattrttattattattattattattattttgagacggagtcttgctctgtggccaggctggagtgcagtgccgcaatgtcggcccactgcaacctccgcctccca

SEQ ID NO: 400858 - DNA, 201 bp, Homo sapiens
tttttagtagagacggggttttaccatgttggccgggctggtcttgaactcctgacatcaagtgatccaccggccttggcctcccaaagtgctgggattasaggcgtgagccaccacgcccaacccattctaaattttaatatcactgcttccaagagtggtctcattgatcataaaacaaatcaaaagagattctgctac

SEQ ID NO: 400859 - DNA, 201 bp, Homo sapiens
cctctctttgtggagacgtcgtttcaccggcggcgcgtgaccccggcagctgtccagagacccagagatgtccaatcacaggcgcacggtgcacaggcgckcagggctgcctggaaccggcccaggcaggcagtgaccgggacctctccggaggggagaggacggtgccctcccgggcaggagctggccaggcaggcgctg

SEQ ID NO: 400860 - DNA, 201 bp, Homo sapiens
tttcatcatgtgagtcaggctggtctcgaactcccgacctcaggtgatccacctgcctcagcctcccaaaaagctgggattacaggcatgagccactgtgyccggcccactaatgcacttgttttggtgacataaagcgtaagttttcagattatttccttggtcttagaaatgctgaattgaagagcatgaacgtttcct

SEQ ID NO: 400861 - DNA, 201 bp, Homo sapiens
ccgcccctcggccggggctgtcgtatcctttgggctgcgcggggctcgggctggatccggcgccggcgccgccgcctgagtggtggccccggtccgggtgsaggcctcggggtcgcacgcttcgcagccccagcgcctcctcgctcagcgccgggtccccgcctgggtcgcgtctcttcccggagccggggagcggggaag

SEQ ID NO: 400862 - DNA, 201 bp, Homo sapiens
ccaatgttttttaatgcttttattttaaaacattttattatttgtttatatatttatttgagacagcatcttgctcttttgcccaggctggagtgcagtgstgcaatcatagctcactgcatcttggaacactgaggctcaagccatcctcccacctcaacctctcaagtagctgggactacaggcatgcatgaccacacc

SEQ ID NO: 400863 - DNA, 201 bp, Homo sapiens
tatcccaaagtgctggggttacaggcgtgagccactgcactcggcctcgagtatcctttagtagcaggttttcttttcaggcaagaagacgtcccgtcacyccctgcaccaggacctgcactatttccccttcaggcccagcgatctcatcgtttgcgcctggacggcgatggagcacatcagccggaacaacggctgtct

SEQ ID NO: 400864 - DNA, 201 bp, Homo sapiens
cgatctcatcgtttgcgcctggacggcgatggagcacatcagccggaacaacggctgtctggttgtgctcccaggcacacacaagggctccctgaagcccyacgattaccccaagtgggaggtaggtctgcccggcggctgagtcttgatccgaatctccttcgcagtttctgtttcacatcagtacctctaaagagttta

SEQ ID NO: 400865 - DNA, 201 bp, Homo sapiens
aatatcatgtgtcctggggcaatttacttcacatcccatgcctctgtttcctcatctgtaaaatggggataataatagcacttatgtcctagtgttgttaytaggactaaatacggtgaaatatatggaaaccactttgaagagagctgggcacatggtaagtgttacagaaatgtttgctgttattattattacaatgta

SEQ ID NO: 400866 - DNA, 201 bp, Homo sapiens
aggcaagaagacgtcccgtcaccccctgcaccaggacctgcactatttccccttcaggcccagcgatctcatcgtttgcgcctggacggcgatggagcacwtcagccggaacaacggctgtctggttgtgctcccaggcacacacaagggctccctgaagccccacgattaccccaagtgggaggtaggtctgcccggcgg

SEQ ID NO: 400867 - DNA, 201 bp, Homo sapiens
aacaaggcccgggtgcacctggtgatggagaagggcgacactgttttcttccatcctttgctcatccacggatctggtcagaataaaacccagggattccrgaaggtaagcattcacattgctgcacctgctgcagaagtgtgggttagaaacaaaaattgtattcaattcattgaattcaaattaattgaataaaatttt

SEQ ID NO: 400868 - DNA, 201 bp, Homo sapiens
aaacaaggcccgggtgcacctggtgatggagaagggcgacactgttttcttccatcctttgctcatccacggatctggtcagaataaaacccagggattcyggaaggtaagcattcacattgctgcacctgctgcagaagtgtgggttagaaacaaaaattgtattcaattcattgaattcaaattaattgaataaaattt

SEQ ID NO: 400869 - DNA, 201 bp, Homo sapiens
ctcccactgagcaaccttctgttgcttgggttgacaagaaagctatattaatatctcatcggaactcctatgtttcttgtagagaaaaaatggtttcattmccagctagctcagaaaaagcccatttcattccgtgttatagatttagaatgatttccaatggctgggtttttcatgccttgtttgcaatgttgtgaaata

SEQ ID NO: 400870 - DNA, 201 bp, Homo sapiens
tcactgcaacctcttcctcccaggttcaagtgattatcctgcctcagcctcccaagtagctaggtttacaggtgcctgccactacacctggctaatttttstatttttagtagatacagggtttcaccatcttggccaggctggtctcgaacttctgacctcgtgatccacccacctcggcctcccaaagtgctgggatta

SEQ ID NO: 400871 - DNA, 201 bp, Homo sapiens; identical to SEQ ID NO: 88815

SEQ ID NO: 400872 - DNA, 201 bp, Homo sapiens
tccagctgcctttaaactgtggatcagttgaactcagagagctggggctgaaagcaatgtggtttgggaagtggccatcctgtcccctatctcttcctcastctgtcctggggtctggtgggatttcctgcatcctgggattgagcagcagagaactgagggttctgggaaaattccttcattgatctgaccactcttcaa

SEQ ID NO: 400873 - DNA, 201 bp, Homo sapiens; identical to SEQ ID NO: 88818

SEQ ID NO: 400874 - DNA, 201 bp, Homo sapiens
ggccttcatcctggagaccttccgacactcttccttcgtccccttcaccatcccccacaggtaaggccccatggagccactgctgtctgttactgatcttmctccggaccacatacctgattagggttagtgggagggacacggcatgggagacagggagatttgcctgttgccctgagcctgactgagcttcctttctcc

SEQ ID NO: 400875 - DNA, 201 bp, Homo sapiens; identical to SEQ ID NO: 88823

SEQ ID NO: 400876 - DNA, 201 bp, Homo sapiens; identical to SEQ ID NO: 88825

SEQ ID NO: 400877 - DNA, 201 bp, Homo sapiens
atccctttaacacccctcctgccccagcctcctcacagctcctgcagcatctccagactcatcacaggacttgtctagggtatgactcccatctctaccayggggcaggggtttgctgtggatcttgcttgtcttccagtcccctttgcccacagccttcagcagggctcactgaaagccctaggctgatgattttgctgg

SEQ ID NO: 400878 - DNA, 201 bp, Homo sapiens
cctagacagctgggacaatagaggcagatctgtgcaggagtcccaggcctttcctatctcattgaccatcttctttgtcctttgctgggagacaatcaggktgacagattgccaactgcagggagctggaaataccagtccctaaaaactcaccagtcacatctcccttggcctcctaccatcttacaaaggctgcaggtc

SEQ ID NO: 400879 - DNA, 201 bp, Homo sapiens; identical to SEQ ID NO: 88813

SEQ ID NO: 400880 - DNA, 201 bp, Homo sapiens; identical to SEQ ID NO: 88814

SEQ ID NO: 400881 - DNA, 201 bp, Homo sapiens; identical to SEQ ID NO: 88816

SEQ ID NO: 400882 - DNA, 201 bp, Homo sapiens
gtgaagtaaataacagtactggtactatgtggaaatcacagattgacattggaagatgtcagtttagattggtacagcagttaagagaaagcgttctggamttaggcaacttggcttgggagtctgcatccaacactttctggctgtgtgaccttgggcaagttacttaccttctctgagcctcattgcaggctacttcat

SEQ ID NO: 400883 - DNA, 201 bp, Homo sapiens; identical to SEQ ID NO: 88817

SEQ ID NO: 400884 - DNA, 201 bp, Homo sapiens; identical to SEQ ID NO: 88819

SEQ ID NO: 400885 - DNA, 201 bp, Homo sapiens
acttgtactttcacatagatattgtttatgatgatatgtaggtagatttaaagttgattttaggaaaatgtgaagtaaataacagtactggtactatgtgyaaatcacagattgacattggaagatgtcagtttagattggtacagcagttaagagaaagcgttctggaattaggcaacttggcttgggagtctgcatcca

SEQ ID NO: 400886 - DNA, 201 bp, Homo sapiens
agttctacagcttcatgcagaagatggtcaaggagcactacaaaacctttgagaaggtacagtctggggaaaggcaggtgggtggtgggaagcagatggcrtcagggcctgggaggtcaaaggtaagaggaactgcatggggcttggcaagttctcaggaaggcttcaacctgggatcttgaagccagttgtggaatagtc

SEQ ID NO: 400887 - DNA, 201 bp, Homo sapiens
tacagatggcatctcattcaggacttcaggacccaggctccagctccatcccctagtgagtgtctccctgcctaccctggggcttccccatcaaggccacstggcaggctggaatatgtgcagcccctccctcaggctttctgatgacaggggcttctccttgggtggacagggtggatggagggggtgggctgggttctt

SEQ ID NO: 400888 - DNA, 201 bp, Homo sapiens
tcaatcgcgcacccgccacccttcgacagttcctctccctccaccccaaccccacgccgcgcgcgaggctggccctttaagagccccgccccgactccctyccccctcgcgtgactgcgagcccccgcgccgggccggggaatgggtcggctgggtggctgcgcgggcctccggtccttctcacgcaacgcctgggcaccg

SEQ ID NO: 400889 - DNA, 201 bp, Homo sapiens; identical to SEQ ID NO: 88820

SEQ ID NO: 400890 - DNA, 201 bp, Homo sapiens
acacagtgattggcaggtcacggcggccccggctctctgacagatcccatctgccctatatggaggccttcatcctggagaccttccgacactcttccttmgtccccttcaccatcccccacaggtaaggccccatggagccactgctgtctgttactgatcttactccggaccacatacctgattagggttagtgggagg

SEQ ID NO: 400891 - DNA, 201 bp, Homo sapiens; identical to SEQ ID NO: 88822

SEQ ID NO: 400892 - DNA, 201 bp, Homo sapiens
gtttattttaatgtgttaggggaaaaatcaaacttgtactttcacatagatattgtttatgatgatatgtaggtagatttaaagttgattttaggaaaatrtgaagtaaataacagtactggtactatgtggaaatcacagattgacattggaagatgtcagtttagattggtacagcagttaagagaaagcgttctggaa

SEQ ID NO: 400893 - DNA, 201 bp, Homo sapiens
cgacagttcctctccctccaccccaaccccacgccgcgcgcgaggctggccctttaagagccccgccccgactccctcccccctcgcgtgactgcgagccsccgcgccgggccggggaatgggtcggctgggtggctgcgcgggcctccggtccttctcacgcaacgcctgggcaccgcgcctccgggccaggtggggcgg

SEQ ID NO: 400894 - DNA, 201 bp, Homo sapiens; identical to SEQ ID NO: 88824

SEQ ID NO: 400895 - DNA, 201 bp, Homo sapiens
caaccccacgccgcgcgcgaggctggccctttaagagccccgccccgactccctcccccctcgcgtgactgcgagcccccgcgccgggccggggaatgggkcggctgggtggctgcgcgggcctccggtccttctcacgcaacgcctgggcaccgcgcctccgggccaggtggggcggggacgggccgcctgacctctgcc

SEQ ID NO: 400896 - DNA, 201 bp, Homo sapiens
ttcgacagttcctctccctccaccccaaccccacgccgcgcgcgaggctggccctttaagagccccgccccgactccctcccccctcgcgtgactgcgagsccccgcgccgggccggggaatgggtcggctgggtggctgcgcgggcctccggtccttctcacgcaacgcctgggcaccgcgcctccgggccaggtggggc

SEQ ID NO: 400897 - DNA, 201 bp, Homo sapiens
gggtctggtgggatttcctgcatcctgggattgagcagcagagaactgagggttctgggaaaattccttcattgatctgaccactcttcaaaaggaggtayatgtgacagcagctggaaatttccagggaagtgtccctaaggagtctgagtcctggctctgtcactgattgctgggggactttggacaagtcagcgctgc

SEQ ID NO: 400898 - DNA, 201 bp, Homo sapiens; identical to SEQ ID NO: 88826

SEQ ID NO: 400899 - DNA, 201 bp, Homo sapiens
tgagactccccagcacacagggaaggaggcctgctctggggctcaggtctgctgagagttagcggtctccttctgggggctcaagggcttgttgagcttakagtctgagctgggcagcaggggctccagctctgagggctgcttgaggtccatggagtgggtgagggcactctgtggtgtgcaaagcggggtgcgtgagta

SEQ ID NO: 400900 - DNA, 201 bp, Homo sapiens
gtgtcaaaggtgagcatcggccaggaggaagtgggagtggcatggaaggcatgcctgcagctgaggcaaagactggagagactgaaagttacacaaagggytctaagaatatcagttcctggccctcagcagagggagtggaggggagttggagttttgttccccttcactctcttttttcctttctcttctcccagccag

SEQ ID NO: 400901 - DNA, 201 bp, Homo sapiens
aaggagtggaggacttgctggtccatggaaggctcgggggtggctttgggctggccctggggatgtgctgtgggacagcagcaacagtgatcataaagctstcacttgtagaatgtttaacaaaggtcacatccatatacttcctattgtcttgtccttcagcagcgctgcgagacaggtactgtatttgtctccatttta

SEQ ID NO: 400902 - DNA, 201 bp, Homo sapiens
tcttttttctttcctccttccccacagctgacatatacacccagaacttctactgggaattgagacagaaaggaagtgttcaccacgattaccgtggcatsctctacagactcctgggagacagcaagatgtccttcgaggacatcaaggccaacgtcacagagatgctggcaggaggggtggacacggtgaggtggctgt

SEQ ID NO: 400903 - DNA, 201 bp, Homo sapiens
gggaggtggtggggagctgtggagagggcagaggctgggggtgaggggctgaggccaggcttgccctgtgcctcctagcagggcctctaggtgaatccccrtcattttcctgcctccctaaaacaaatgatggtgatgatgatgatgatgatgatgaattgctctgccagccttcagggaaatggccatgctgaagatcct

SEQ ID NO: 400904 - DNA, 201 bp, Homo sapiens
agtgcaatcattacagaaggatttggcctctaagggcctctggaattctttggaagaaggcattggctgtgtagctgacactctactcactgtggacatgrgtgggtttttggtgacatgagggacgagggcagggacaagtgctgccctgaatgttcctgcctggccggcaagaaagccttcttggacatttgcctttta

SEQ ID NO: 400905 - DNA, 201 bp, Homo sapiens
tcacccactgatgcccctggccatccattccccatggtggtgatgggatgggataggactgaggtttgtagacaagttaaggtctaggcctaaatcaaggraatgcagcactaagggtgcattatcaggcactgtgcagggttacaccaggagctggtggtgaactccttggaactcctcaaatcacactccacaggcact

SEQ ID NO: 400906 - DNA, 201 bp, Homo sapiens
agcataagaaagtaaggtttaagcccccagaaacatttatgagtttgctccgagcagcaccgcatgtagggatcaggaaccataggcaaaaaagatttttwaaaaaagtccctcccgctttggggcagcgcaattattccctttcattcgtagaccttcaggcagtactggtgaccccagcctcaatttccaaggagctac

SEQ ID NO: 400907 - DNA, 201 bp, Homo sapiens
cactctactcactgtggacatgagtgggtttttggtgacatgagggacgagggcagggacaagtgctgccctgaatgttcctgcctggccggcaagaaagscttcttggacatttgccttttagacaatggaatgtgttttgctcttgcagaggatggtcttggagactgggatggggttcggggagaaagaggttcttgg

SEQ ID NO: 400908 - DNA, 201 bp, Homo sapiens
agggaggtgagggtggaggagtccctgggagttgtggctctcagatggccccgtcagaaatggctcctcagcctcttcctctccctgcagccatcactaaygtcatttttggggagcgccaggggatgctggaggaagtagtgaaccccgaggcccagcgattcattgatgccatctaccagatgttccacaccagcgtcc

SEQ ID NO: 400909 - DNA, 201 bp, Homo sapiens
cggtgtgggaggggcctgagtgtaggagctcaggggccccgttaacagaatttttgggagtttaaataccccttagagcattccattggttaattccataygccttatgtaaatggagaggatgaagtaaagttacaaagtcatttacagcatacgccctatggagaggatatttcctgtcacagctcaagtgtgaattgg

SEQ ID NO: 400910 - DNA, 201 bp, Homo sapiens
agcctggaagaaagaccgggtggccctgaaccaggaggtgatggctccagaggccaccaagaactttttgcccctgttggatgcagtgtctcgggacttcrtcagtgtcctgcacaggcgcatcaagaaggcgggctccggaaattactcgggggacatcagtgatgacctgttccgctttgcctttgagtgtaagggggc

SEQ ID NO: 400911 - DNA, 201 bp, Homo sapiens
ggcacgcgcctgtattcccagctactcaggaggccgagccaggagaattgcttgagcccaggagttcaaagccagcctgggcaatgtatagagggggacarggagccacagtgtgcacccaggcagggagtgcctgggtactcattcacccttcaagttggggtgtgggggttcctctggacttacaggagtgatgaggac

SEQ ID NO: 400912 - DNA, 201 bp, Homo sapiens
acacccagaacttctactgggaattgagacagaaaggaagtgttcaccacgattaccgtggcatcctctacagactcctgggagacagcaagatgtccttygaggacatcaaggccaacgtcacagagatgctggcaggaggggtggacacggtgaggtggctgtaggggcggcaccttgttgccccctgtgcccacgtgc

SEQ ID NO: 400913 - DNA, 201 bp, Homo sapiens
tcttgtcagtgcagatgaaaaactgggaaccgtttgtattggatccagcatttgccatggacaagatgccaggacgtgtatgccttaggatgaagttctcrtcatcaaatttctccccatagatggacttgccaccagtgccattatggcatatgaagtcaccaccctgacacataaatcctggaataattatgtgaaagc

SEQ ID NO: 400914 - DNA, 201 bp, Homo sapiens
cacccagaacttctactgggaattgagacagaaaggaagtgttcaccacgattaccgtggcatcctctacagactcctgggagacagcaagatgtccttcraggacatcaaggccaacgtcacagagatgctggcaggaggggtggacacggtgaggtggctgtaggggcggcaccttgttgccccctgtgcccacgtgcc

SEQ ID NO: 400915 - DNA, 201 bp, Homo sapiens
ctcaggtggtagtgtgagactccatctcaaaaggaatacagtagacctcaaatgtcctcacgtggctcagaggggaggggtgtactggtttgctagggccrctgtaacaaaatggcattgactgggcgatttaaacaacaaacattgattttctcacagttccggaggctggaagttcaaggtcaaggtgttggcagggtt

SEQ ID NO: 400916 - DNA, 201 bp, Homo sapiens
ggatatgtcttcctccttgcctccatttccaaagcgctaatctcctaagatggtggggtcaaagtcaagtcacccagggcatgatttgaggatgatcagcyatttttctttgcctgtgagagaggagtggccgggcatggtggtgaggtccaggttccacgtagagtctccacaggaggaggtcccctctggaggcttgct

SEQ ID NO: 400917 - DNA, 201 bp, Homo sapiens
aggtggtggggagctgtggagagggcagaggctgggggtgaggggctgaggccaggcttgccctgtgcctcctagcagggcctctaggtgaatccccgtcmttttcctgcctccctaaaacaaatgatggtgatgatgatgatgatgatgatgaattgctctgccagccttcagggaaatggccatgctgaagatcctaat

SEQ ID NO: 400918 - DNA, 201 bp, Homo sapiens
acgtccatgaccctgcagtggcacttgtatgagatggcacgcaacctgaaggtgcaggatatgctgcgggcagaggtcttggctgcgcggcaccaggcccrgggagacatggccacgatgctacagctggtccccctcctcaaagccagcatcaaggagacactaaggcaagcccacaaccacccatgccgcccccaactc

SEQ ID NO: 400919 - DNA, 201 bp, Homo sapiens
cagaagaggaaactgagactcagaggggttaagggcctcgactcaggtcccacagtcagcaagttgtggaactgtgaggcagctgtgctgagcctgtatcyatagctctcctcggatccttccatcagcccctctcccccacccctccagggagaagctcggcaacgtggagtcggtttatgtcatcgaccctgaagatgt

SEQ ID NO: 400920 - DNA, 201 bp, Homo sapiens
gccatctgtaaggaagctctttaatgggtccaaaccccaggtctggccaggcatggtggctcacacccataatcccagcactttgggaggccgaggtgggyggatcacttgagatcaagagttcgagaccatcctggccaacatgatgaaaccccgtctctactaaaaatacaaaaattagctgggtgtggtggcaggcgc

SEQ ID NO: 400921 - DNA, 201 bp, Homo sapiens
gcctgctggtggcggttcttatccagctccgtccgcagcttcgcgttttctgccagcagcaccgagtaaagttcaaccggcaggttctctcccatagaacscaagggaaggccagaggctgagagcatagggaagcctagagacacggccacagatgttggtgagatgggctctcctgcttcccatgtccctgtcctgatc

SEQ ID NO: 400922 - DNA, 201 bp, Homo sapiens
  misc_feature (1)...(201): n = A,T,C or G
gaataccaagagcctgagaaactgcttgagtgatttgactaataaaggctggtctgttatcagactgtatagaggtaggaaggccaaaccgaggaattatstctgacagaagggaagaaatgatcgtggtggcctttcagacctacgggaaaggtctctacccaaccggtgaacgtgtctacctagnnnnnnnnnnnnnnn

SEQ ID NO: 400923 - DNA, 201 bp, Homo sapiens
ctcctggtcttctgtataccctactccccaccagacgtccatgaccctgcagtggcacttgtatgagatggcacgcaacctgaaggtgcaggatatgctgygggcagaggtcttggctgcgcggcaccaggcccagggagacatggccacgatgctacagctggtccccctcctcaaagccagcatcaaggagacactaag

SEQ ID NO: 400924 - DNA, 201 bp, Homo sapiens; identical to SEQ ID NO: 88848

SEQ ID NO: 400925 - DNA, 201 bp, Homo sapiens
agcttagagtctgagctgggcagcaggggctccagctctgagggctgcttgaggtccatggagtgggtgagggcactctgtggtgtgcaaagcggggtgcrtgagtaccccccattcccagggggtgacctgctcaagggcatattgcctgacaaaccaggcctcagagtatccagaatccagtgggccatgacctggcaa

SEQ ID NO: 400926 - DNA, 201 bp, Homo sapiens
cacagagatgctggcaggaggggtggacacggtgaggtggctgtaggggcggcaccttgttgccccctgtgcccacgtgccccttccccaccaggcccctygttgtctgaaaccctgttgttcaaggcgttcctactcatgtaggatatgtcttcctccttgcctccatttccaaagcgctaatctcctaagatggtgggg

SEQ ID NO: 400927 - DNA, 201 bp, Homo sapiens; identical to SEQ ID NO: 88859

SEQ ID NO: 400928 - DNA, 201 bp, Homo sapiens
acctttcttgggaccaatttacaatctctgggatccccaactatagaacctggaagctagtggggacagaaagacggggagcctgggctaggtgtaggggkcctgagttccgggctttgctacccagctcttgacttctgtttcccgattttaaatgagcagtttggactaagccatttttaaggagagcgatggggaggg

SEQ ID NO: 400929 - DNA, 201 bp, Homo sapiens
tggcaggtcaaccatgacccgtgagtacatacccctcacgaaaaaatgtgtgcaggttcagcagtcaggaaggctgtttgtccctgctaggaactgtttayataatgaaaggaggggacctcaattgctatagtctgctctaagtgacgatatttacaaaagtttcacaaactttagtgcacaggaatcaactaggatggc

SEQ ID NO: 400930 - DNA, 201 bp, Homo sapiens
ttttgagatggagtcgcgctctgtcgcccaggctggagtgcagtggtgcgatctcagctcactgcaagctctgcctcctgggttcacaccattctcctgcstcagcctcctgagtagctgggactacaggcgcccgccaccacacctggctaattttttgtatttttagtagagacgggatttcaccgtgttagccaggat

SEQ ID NO: 400931 - DNA, 201 bp, Homo sapiens
gagtcgcgctctgtcgcccaggctggagtgcagtggtgcgatctcagctcactgcaagctctgcctcctgggttcacaccattctcctgcgtcagcctccygagtagctgggactacaggcgcccgccaccacacctggctaattttttgtatttttagtagagacgggatttcaccgtgttagccaggatggtctcgatc

SEQ ID NO: 400932 - DNA, 201 bp, Homo sapiens
  misc_feature (1)...(201): n = A,T,C or G
agcctcatgtaccttgtgaccaagcctgagatacagaggaagatccagaaggagctgggtacatgggggcccccaaccctatagccaggagaagccttganacccaggttgtttgttcagtctacaaacacctgttatgtgcctgctgtgtgcaagccctgggcacacagtagtgcctgcccttgcctagaagatgtggga

SEQ ID NO: 400933 - DNA, 201 bp, Homo sapiens; identical to SEQ ID NO: 88858

SEQ ID NO: 400934 - DNA, 201 bp, Homo sapiens
agaagtggaaactgagatgatgtgtggaggagagagccagcgttcatgttgggaatcttgaggctcctttccagctctcagattctgtgatgctcaaaggrtgagctctgtgggcacaggacgcatggtagatggagcttagtctttctggtatccagctgggagccaagcacagaacacgcatcagtgtttatcaaatga

SEQ ID NO: 400935 - DNA, 201 bp, Homo sapiens
agcaagaaggggcctagagccagcggcaacctcatcccacaggagaagattgtcaaccttgtcaatgacatctttggagcaggtaggaaccagaaccttgyccctccatccaacaatgcctgctgttcacccacagccttgcccagcccctcagtccatgaaataacccaccaaccctacaccagatggtacaacatactg

SEQ ID NO: 400936 - DNA, 201 bp, Homo sapiens; identical to SEQ ID NO: 88864

SEQ ID NO: 400937 - DNA, 201 bp, Homo sapiens
  misc_feature (1)...(201): n = A,T,C or G
gatgatgtgtggaggagagagccagcgttcatgttgggaatcttgaggctcctttccagctctcagattctgtgatgctcaaagggtgagctctgtgggcncaggacgcatggtagatggagcttagtctttctggtatccagctgggagccaagcacagaacacgcatcagtgtttatcaaatgactgaggaaatgaatg

SEQ ID NO: 400938 - DNA, 201 bp, Homo sapiens; identical to SEQ ID NO: 88857

SEQ ID NO: 400939 - DNA, 201 bp, Homo sapiens; identical to SEQ ID NO: 88860

SEQ ID NO: 400940 - DNA, 201 bp, Homo sapiens
cagtttggttccttcccacctacccttcattgctttcaaagtgccctcacacttgtgttctcaacagaagtctccctcccccaggcacctcctcccagggyctctccagccctgaggtcccatctcctctgttcctcttgcagagagctgtgggaggacccctctgagttccggcctgagcggttcctcaccgccgatggc

SEQ ID NO: 400941 - DNA, 201 bp, Homo sapiens; identical to SEQ ID NO: 88863

SEQ ID NO: 400942 - DNA, 201 bp, Homo sapiens
agcggcaacctcatcccacaggagaagattgtcaaccttgtcaatgacatctttggagcaggtaggaaccagaaccttgcccctccatccaacaatgcctrctgttcacccacagccttgcccagcccctcagtccatgaaataacccaccaaccctacaccagatggtacaacatactgagatctggcttgggatcaggg

SEQ ID NO: 400943 - DNA, 201 bp, Homo sapiens
ttgcctgcttcttggctccagagaacagccaagtgcgcagccaggcgcaaagagaagtttagtaaatacttgctgaagttaaagaacaggacgcaaggaaragggaggatgtttctacctcttccctgttcctcccctcccctcccagtgtagggatggagatggcggtgggcaggctgtctggatggggtggaggtagga

SEQ ID NO: 400944 - DNA, 201 bp, Homo sapiens
gtaagaggcctgaatccccagccaggctagaaattccccggggctgccccaggctgcctgctgctttttttttttttttttttttttttcatagaaaataraaaaacatttatctgaaattgcctgcttcttggctccagagaacagccaagtgcgcagccaggcgcaaagagaagtttagtaaatacttgctgaagttaa

SEQ ID NO: 400945 - DNA, 201 bp, Homo sapiens
ggcctatgagtgagaaagctttcattctgcagaaacctaaaccccaacagaggctaatccccagctctggtgtcacgttgcttccctgtgttcacactaaycttttccttctttgaaattggacccctggtgttattgggaggaagggtcaatggggcataaaatgacactttaagccatacccagggctgctaccagctc

SEQ ID NO: 400946 - DNA, 201 bp, Homo sapiens
gcaacacatgccccagctttccagccctgagcctcacagtgccctcttccctcctcagcacaacaagggacacaacgctgaatggcttctacatccccaaraaatgctgtgtcttcgtaaaccagtggcaggtcaaccatgacccgtgagtacatacccctcacgaaaaaatgtgtgcaggttcagcagtcaggaaggctg

SEQ ID NO: 400947 - DNA, 201 bp, Homo sapiens
ggctgccccaggctgcctgctgctttttttttttttttttttttttttcatagaaaatagaaaaacatttatctgaaattgcctgcttcttggctccagaraacagccaagtgcgcagccaggcgcaaagagaagtttagtaaatacttgctgaagttaaagaacaggacgcaaggaagagggaggatgtttctacctctt

SEQ ID NO: 400948 - DNA, 201 bp, Homo sapiens
gaagtgccagaggtgcccctaagcttgtgccccctcagaacagtgtccgggacatcacgggtgccctgttcaagcacagcaagaaggggcctagagccagmggcaacctcatcccacaggagaagattgtcaaccttgtcaatgacatctttggagcaggtaggaaccagaaccttgcccctccatccaacaatgcctgct

SEQ ID NO: 400949 - DNA, 201 bp, Homo sapiens
gcacacagtagtgcctgcccttgcctagaagatgtgggaggttagtggggtcgcagacttgtgaatagacagtcttacataagagtgacatggggtataasaggggataattcatggggcagttagggcagcccctgagctctgcttgtcctctgtgttctacagacactgtgattggcagggagcggcggccccggctct

SEQ ID NO: 400950 - DNA, 201 bp, Homo sapiens
ggggctgccccaggctgcctgctgctttttttttttttttttttttttttcatagaaaatagaaaaacatttatctgaaattgcctgcttcttggctccaragaacagccaagtgcgcagccaggcgcaaagagaagtttagtaaatacttgctgaagttaaagaacaggacgcaaggaagagggaggatgtttctacctc

SEQ ID NO: 400951 - DNA, 201 bp, Homo sapiens
gtagtgcctgcccttgcctagaagatgtgggaggttagtggggtcgcagacttgtgaatagacagtcttacataagagtgacatggggtataagaggggayaattcatggggcagttagggcagcccctgagctctgcttgtcctctgtgttctacagacactgtgattggcagggagcggcggccccggctctctgacag

SEQ ID NO: 400952 - DNA, 201 bp, Homo sapiens; identical to SEQ ID NO: 88865

SEQ ID NO: 400953 - DNA, 201 bp, Homo sapiens
tctgtgtctctctagcagtgtgtctctgttctccctctctctgtcacctctctgtctgtctgtctgcctctttaccaccttctctggtgagcagttgaggygcagcccccctgactagactccctttctccctgtttctcttcttcctcaggtgcacgtgaacccaaagtatattgttttggagtctgacttcaccaacaa

SEQ ID NO: 400954 - DNA, 201 bp, Homo sapiens
catcaacctaactgttcacagcatgctgccaccacatcatgaatattaaaaatgggaacagcagcctccagttcagtgcagagattaggttcctcatgagyagaatgagatcagaattccccagggcacacagcatgtttgaaaggacgaactcctgtcccatcactggcagtttggctctttagcaggcctgggtttcca

SEQ ID NO: 400955 - DNA, 201 bp, Homo sapiens
tggtcaccgctccctggctgattcactctcctccaggggcggtgtctccacttcctgcaaagcttgggcacatgggcagccatgtccctcgaggttcgccwcctccccagggcactgccaggaggcactgtcctcgttactagcagagccagagccaccaccacaaccatagccaccacctccccagcccagggaactctc

SEQ ID NO: 400956 - DNA, 201 bp, Homo sapiens
tcaggaaactgaggagcaatgaaaggaactcaaaccttttggatctgagctgtttaatgagaaggttccttttgggagcccaggcttccagtggtcatacrgggacccaaggaagtcctattgggtggatgtacctgcaggatagagcccaggagtatggagccatgtccacagaggacagttgtggctttggctggtcca

SEQ ID NO: 400957 - DNA, 201 bp, Homo sapiens
gctgatgaccctggccaagtgccccagcctcccaggaccctgaccgtttcatcagtgagccttgcctgccccgagggagtcaggaggggaggggagcaagygggggcccagcatttctgtatactgtacctcactatacaaggaactccacttttactgtggcacttcatctttatatgagccctgaaggcatgggttacc

SEQ ID NO: 400958 - DNA, 201 bp, Homo sapiens
tttccataaagaacccagggaacctttgccccagctgtggtaatgccagaggcagtggtgatactgtctccctaagtgacagaggaccagggagagcaagraagacttggagagccatgtggtctatcttcctgtcttcggacagggcagactttgtatcatttgggagacagatgagaggccctcagctccttataggga

SEQ ID NO: 400959 - DNA, 201 bp, Homo sapiens
tcctgattccccatgtgaagtagtttgcagagggaccccttgcttacaagctcacaaggaaaccccaccacactccagatcgaagcaacccttttccattaaaaaaaaaaaaaaaattagtcctagagctttcagctttagttcatcaactgggagaaaggtggtagagatcttaaggcccagagaggtatctttccctaa

SEQ ID NO: 400960 - DNA, 201 bp, Homo sapiens; identical to SEQ ID NO: 88866

SEQ ID NO: 400961 - DNA, 201 bp, Homo sapiens
cgtttctgcaacaaactgcaaaattgtccagtaagagtttgcccaccacccttcctggctccgtccctttcctgcctggggagcaggcaaggccacctgaratacctaagatacctgcactttaggtcaccttgatggccgaacgcagctgcagcagggcccatcaaaaagagccttgtccgtgccaaccccaagctgagt

SEQ ID NO: 400962 - DNA, 201 bp, Homo sapiens
agtcacctagacagggatgcatagggaatgactttgagccttggatttggggagaccaggtgttgaatcctggctcagctcctcattactgcattccctcrggcaggatccaacctctctgaccccaaatgccccatgcggggcccacctggcataggctctagctctagggaaacatccaatcttctgataagggggatt

SEQ ID NO: 400963 - DNA, 201 bp, Homo sapiens
gctgcaggcagaacccagagaagaaaagggaccaattccaagtctcaccaccagtttgtggccaagctgggcctagaacctagacccttatggtttcccayggtgtgctgagccgaacagaagggcaggatttaaccgaacagagggaaggaggatgttttgtttcaacccagacatagacagattccaagcctcccccag

SEQ ID NO: 400964 - DNA, 201 bp, Homo sapiens
agggctgaggcctcagaggaggtgggcgtgggagttcagacctggagaatcctgcaaaactggagccctggggcaggagggccctctgagatcatttcaaktatgggccgcaggctggtgccagttcacatgctgcaggcagaacccagagaagaaaagggaccaattccaagtctcaccaccagtttgtggccaagctgg

SEQ ID NO: 400965 - DNA, 201 bp, Homo sapiens
caagtctcctgaaggccaggtgctgtgctagggcacacgcaggagcatcgtagcttctgccctcagggagcgcataaccacagggaacggggagcacgcgktgcccagtgaggcagcacctaggggttctggggagccttcacatgggagagagcctccttccaggcagggaggggagaagaggattcttggcagagagac

SEQ ID NO: 400966 - DNA, 201 bp, Homo sapiens
agggacaaggagtggggctgcagaaccagtggccaagggctgggggtggggctgagggggcccatgctgggttctggtgtcactgtgccccaacccccccycatctcccccgccgtccctgcagcacagcctatgcccctgaggccaccgactacgatgtgcgggtgctactgcgcttcccccagcgcgtgaagaaccagg

SEQ ID NO: 400967 - DNA, 201 bp, Homo sapiens
gggtctggggctttccctccaacctgatgttcatgtccaatgtccccccgttcctgaaagaagcttcagcctctgggcctgttcccttctccccagctgcmgagcagaggcagcatctgaggcatcacttgaggtttaggcttcccagccgaagatttaggtctcaggctgacatagcctctctttccataaagaacccag

SEQ ID NO: 400968 - DNA, 201 bp, Homo sapiens
agttaatccaacatttaaaagtgttgtatcccaacagctccttttcagacaaaaagcacagatcatacttgggccatcatctcagtgaatgttgggcacgwggggctccagagcaggggatcagacaggccctcgatcagtcacctagacagggatgcatagggaatgactttgagccttggatttggggagaccaggtgt

SEQ ID NO: 400969 - DNA, 201 bp, Homo sapiens; identical to SEQ ID NO: 88867

SEQ ID NO: 400970 - DNA, 201 bp, Homo sapiens; identical to SEQ ID NO: 88868

SEQ ID NO: 400971 - DNA, 201 bp, Homo sapiens
cttcctcaggtgcacgtgaacccaaagtatattgttttggagtctgacttcaccaacaacgtggtgagatgcaacattcactacacaggtcgctacgtttmtgcaacaaactgcaaaattgtccagtaagagtttgcccaccacccttcctggctccgtccctttcctgcctggggagcaggcaaggccacctgagatacc

SEQ ID NO: 400972 - DNA, 201 bp, Homo sapiens
ggcagctggcggccacatggtggaggccagaaaggaggggacagccaggatttcacggggtcagaagacagaggaagaggcctgagcctccgccacagttsgaggagacagaggagaagatcttcagggacaaggagtggggctgcagaaccagtggccaagggctgggggtggggctgagggggcccatgctgggttctg

SEQ ID NO: 400973 - DNA, 201 bp, Homo sapiens
aaaattgcagaccagcctccttactcctacactgattgtgtccactagcccccaactcaatcaacccttctttatccccttccaacatcacataatccccyagccccaagccctgcagaggggccaagagcccaagcctgcaggcctggctgctgacgaaatgtcccctgggagagctgcccagagaaggagccattgttc

SEQ ID NO: 400974 - DNA, 201 bp, Homo sapiens
aataactggacttcacccaacattggccactctgcttggagggcctgttgtaccctacaagccaaaaattgcagaccagcctccttactcctacactgatygtgtccactagcccccaactcaatcaacccttctttatccccttccaacatcacataatcccccagccccaagccctgcagaggggccaagagcccaagc

SEQ ID NO: 400975 - DNA, 201 bp, Homo sapiens
gggccagcgtgcacaggaagctggacagagcgttcccagaaaggccacgggactgacgcctgtgggtttccatcgtgtttctggaggaaaaaggaggcttaaaaaaaaaaaagtactgagttagaaaaaacaagaaagtatttccagacagtagcagctctgctaatggcctagaaaacaatctgggactagggcatgggg

SEQ ID NO: 400976 - DNA, 201 bp, Homo sapiens
gcacctccttctgggctgcacagaccaagagggtctctgctggtacactgggcactggtgtgcaggaatccacctgggctgtaagggcctcaagtcacctscccagcatccctccctgtcctcttcttgctcagccccagggctggggagctcactgcttctcgagacatttgctgttagaaacaccttgaggtgaaacag

SEQ ID NO: 400977 - DNA, 201 bp, Homo sapiens
tccaggtgatctgctcgtggagagaaggaaacatcgcaacagtctggagagcaacacgtcctattggcctgttcacccacccatatccctctttccatcakccaccctaaatatccacaaactgtccatctgtcctgtctctttttatccattctgccatccatctcgtccctcccacctggctattagatatctgtcttt

SEQ ID NO: 400978 - DNA, 201 bp, Homo sapiens
gtaaactgcatgagctctgagaaagcagaaaaaaagccacctcatgaaggtgaaccaaggactgagtcgctgacagacagagatggatgggtaaatgggcrgacagacagacagacatggagactgaaatagaaatgcctcccaaaggtcacagagagtcagtgccacgtcttcacctccacccaggactatcacttatac

SEQ ID NO: 400979 - DNA, 201 bp, Homo sapiens
ctaggcactagacacacaaaccacataagcaatgcagttcacagtccctgccctttgggagtgtaccaggatttgaaagttgcatccctgcatctgttctyagatgttctgcaaataaagctggccctaccctagttaatccaacatttaaaagtgttgtatcccaacagctccttttcagacaaaaagcacagatcatac

SEQ ID NO: 400980 - DNA, 201 bp, Homo sapiens
tccaagtctcaccaccagtttgtggccaagctgggcctagaacctagacccttatggtttcccacggtgtgctgagccgaacagaagggcaggatttaacygaacagagggaaggaggatgttttgtttcaacccagacatagacagattccaagcctcccccagacaaggctgagggcctttcatcctggcagacagtct

SEQ ID NO: 400981 - DNA, 201 bp, Homo sapiens
cccagagaagaaaagggaccaattccaagtctcaccaccagtttgtggccaagctgggcctagaacctagacccttatggtttcccacggtgtgctgagcygaacagaagggcaggatttaaccgaacagagggaaggaggatgttttgtttcaacccagacatagacagattccaagcctcccccagacaaggctgaggg

SEQ ID NO: 400982 - DNA, 201 bp, Homo sapiens
ccctgcacaaggttcaccctgagcaaggaaagatgctgaagacagataaaaacaggaaagacagaggaagtgggagtgggggtcaaccccaagagataaayccctcccttctctcacaagtcaagaggaaagaaggaaaatagtggccacatgtctggctctgtgctggggacttttcataatcctctcattccatcctct

SEQ ID NO: 400983 - DNA, 201 bp, Homo sapiens
tagctgggactacaggcataagccaccttacctggctaattttttaattttttaaaaatttctttaattaaattaattttttaaattttaatttctcactrtgttgcccaggctggtctcaaactatgggcctcaagtgatcctcctgcctcgacctccaaaaagctctgtaattacaggcatgagccaaagtgcctggcc

SEQ ID NO: 400984 - DNA, 201 bp, Homo sapiens
acgggactgacgcctgtgggtttccatcgtgtttctggaggaaaaaggaggcttaaaaaaaaaaaagtactgagttagaaaaaacaagaaagtatttccaracagtagcagctctgctaatggcctagaaaacaatctgggactagggcatggggaggggaatgtgctgagactgtgccctgggtgggtgggagtccatca

SEQ ID NO: 400985 - DNA, 201 bp, Homo sapiens
gggagccaaagcccttccttccaagagctctttacataagtgcttggaaaggccgggccttattagagtgtctcagtctctgtgaccctgaccgcaggcargcagctgggccagcgtgcacaggaagctggacagagcgttcccagaaaggccacgggactgacgcctgtgggtttccatcgtgtttctggaggaaaaagg

SEQ ID NO: 400986 - DNA, 201 bp, Homo sapiens
ggaaatgaacccagttgactgtgcgtgtgtgacttttgctgtggcttgcttagtagaaggaagccaagtaagtgggctgccattttggggatcttgtgcargctggcgatgcaggtactggtggctagtgatcttggctgtatttccttcttgctgagaaatgtgctagtaagtgaagaaggaaggatttgaacccaggtc

SEQ ID NO: 400987 - DNA, 201 bp, Homo sapiens
cataagaagataaagcggccccccagcccggggcccctcccatggacctcatggtaccgagcctccattttctcatctgttcagtgaggatgaagcctcayctcccagggtttttgcaaagacagggagactggccgggcgccgtggcttacgcctataatcccagcaccttgggaggccgaggcaggcggatcacaaggt

SEQ ID NO: 400988 - DNA, 201 bp, Homo sapiens
gtccacacggccctgactctttctgtggggcaaggagaaaataagccgtcaacccagaatgtgcacacagcccctgcctgctttctattggccagaacgtrgtcatgtgaccacacctagctgcaagggagactgggaaatgtagtctctattctgagcagttgtgtaccgaaggaaacatcaaggttctgtagggcagaa

SEQ ID NO: 400989 - DNA, 201 bp, Homo sapiens
gccaaatctgtgggattaagtaaatgttgttccttgtttattttgtctggctgtggcactttgagaaacaattttaaaagcctccttttttagaataaagrgagaaaagaaacagcccaccttttgatgtttccagaataacatctagagttgaggcagagctctctgtgacattctaaatatagtgcgaaaatggctgtt

SEQ ID NO: 400990 - DNA, 201 bp, Homo sapiens
tctctttctgcacctttcctgtgaatggtgtatccacccgggtcccctcctgcctctttgcacactctctgtggtgtaacttgcacccagggcttcagcarccatctatgcactgagacctttctgttcttggggtggcattcctcgggatttagtgccaggacacacctgtgtgcgcattcactgggaaaagtctgcaga

SEQ ID NO: 400991 - DNA, 201 bp, Homo sapiens
ttgccagcagtgaaaattgtgattcctgccatttattcagtgtcaactgcatgccaggctctctactgggcacttttctcatatgatctctaatttctcayaacaattaatcttattttccccattttataagtgaggaacgtgtggctgtatattcaagcagatccattctcattgcgcatgtgttagcaaagggaagtt

SEQ ID NO: 400992 - DNA, 201 bp, Homo sapiens
tgttattccaggaatcagctgtcttcctagcaagcctcctgccacacatctttgctgagcccctgatctatcaggaaacaaatgtcctggccttcccagcragggtcactgggaaaggggcacagcactttctgttttatggctgccttaaggtgtcctctcactctcaagaaaatctggggcaaccctgagggtacctgc

SEQ ID NO: 400993 - DNA, 201 bp, Homo sapiens
aggacctttcccccggggatgccacagctcgtgactgtgcagaaccaaaaaatgccgagaaaacaaacataaaacacccccaccatctcgtggaaacccgygttcctcccacacaatcccttctctggggcgctaggtgaatttgaaagggaatgccacgtacctagggaacgcttccctctaaagagcctgggacacgtg

SEQ ID NO: 400994 - DNA, 201 bp, Homo sapiens
tgtgggacagtaccagggttctgtcacagagtgatcgaggtcccttagcatcacaatgcccggatgtgcactacctcttcatcattgaaacgtgcgattgrggggagacatgacctactcaacatctcccgtgactatggttctaattatctaagtagaataagcaggcccagactcagcagcaggggcgttcccgctgcg

SEQ ID NO: 400995 - DNA, 201 bp, Homo sapiens
gggtggccagtgcaaaggtcctggggcaggagggtgcctgactcatgaacagtcgggagacaggaggtgaggtgagaggagagcactgtaggagaggagasagaggtcgtgtgcagctggccacacagggcccagagatcctcagttttctcctctataaaacaggaacagaagcccccaggcagctcccgtacagatttg

SEQ ID NO: 400996 - DNA, 201 bp, Homo sapiens
gaggcaggtcccccagcttcgtgacactgtcacagctttcttcattgtccccaaggttctttgggtgctttttcttttagggagttcaatgaagagtttcyttctctggtgtagtcacttcacttggagttacgattcctgctggagttggcaactgggcatctagctaatctcagtgttctttgaaagcggagagttcca

SEQ ID NO: 400997 - DNA, 201 bp, Homo sapiens
agcatgcaggcaatcacttttttcttatttatatgtatttattttatgatttctacatcagttaggaattaagtttgactgctagaaataaagactagttktaacagtcaattacacaagaaaaaggtttatttctcttctgaaaagaagtctggagataggccaggcctgtgtttgaaaatgtaggttgtattgtgattc

SEQ ID NO: 400998 - DNA, 201 bp, Homo sapiens
gagataggccaggcctgtgtttgaaaatgtaggttgtattgtgattcaggtatggtgaggccaacacatcaggagaggctgccattgaaaagatagtttgytcctctcagttcccaagagaaggggccacagcataccatgggggcatgtggggaagcaccagggctgatcggggatgggtgagatggggtgagcaggctt

SEQ ID NO: 400999 - DNA, 201 bp, Homo sapiens
gacccttgtcatagtgctgtcccacggaaggtggggagtcctagcctcctgcgcacaggtcagcctgtgggagccacttaggaaacagcatctgtaattgycttcctcatggcaaggctttcactggcagaagtgaaattcacttagaaatgatcacagggagccattaaaaccttctggatcaataaaggcatttgtgcc

SEQ ID NO: 401000 - DNA, 201 bp, Homo sapiens
tgggcagcaacccatggtaccagcgagagtctctgcaactcccgtcaacgctcactccatttgttcttctttttcacacaaatgggagcttgctccatgcrtgtcgggggtactctgtgtttgcttttgttgttttggttggtgtgtttgtttttgtgggttttgggttttatttggtggttttgcttagcaaccttttgg

SEQ ID NO: 401001 - DNA, 201 bp, Homo sapiens
tgacaaccttcctgaaagtctcacaggatctattttttaatgtaatttaaaagttttaagaataagacatttctatggttcaaaattcaaaagatatgaargaggatgcagggagagtctctctcccggttggcgtgggcagcaacccatggtaccagcgagagtctctgcaactcccgtcaacgctcactccatttgttc

SEQ ID NO: 401002 - DNA, 201 bp, Homo sapiens
acttactgaaattgactatcatgaatgaagttcagtgctgtgtgggacagtaccagggttctgtcacagagtgatcgaggtcccttagcatcacaatgccyggatgtgcactacctcttcatcattgaaacgtgcgattggggggagacatgacctactcaacatctcccgtgactatggttctaattatctaagtagaat

SEQ ID NO: 401003 - DNA, 201 bp, Homo sapiens
agggactatctgatagtttagccagagaacgatgatttacttagtttgcgagagagatggatgatatctcctttgaattttactccagtttaaggaaatcmcggacttactgaaattgactatcatgaatgaagttcagtgctgtgtgggacagtaccagggttctgtcacagagtgatcgaggtcccttagcatcacaat

SEQ ID NO: 401004 - DNA, 201 bp, Homo sapiens
ccacgtatccacaaggaatcctcagtctcaccccagtgctgggcaggggctgctgcctcctgagtcagttctggagactctcaaaggagaaagaggtgagrtagtaggtcatggggccaggtgcactgggcagccgtcacccacaggcttaccctatgaactgtgggatcatttaaataatgacattagctcttattcccc

SEQ ID NO: 401005 - DNA, 201 bp, Homo sapiens
tgattatttgccaacttcagcagaaagtgaacagtgagtggaactgcaggcactcctaactgcatgcagtatggagtcgcatccactgccgcgctcctccrccccgggcacttttgacctctgactgttagggatccgtgattttgtttttctggttggaatgacccataggaatgatataccctgtaggtactgggactc

SEQ ID NO: 401006 - DNA, 201 bp, Homo sapiens
cttatttatatctctctgaaatgtttgctcttggaaaacccagagaaaaaaacatgtataataaaataattgcagatctagtttagccaacatttgatggygcctcttccaaggtagtcctcctcagggctcttggccaggactgcagcttaagaggactgcattggtcatgtttattagaaatgtgtgcactggtgcaag

SEQ ID NO: 401007 - DNA, 201 bp, Homo sapiens
ctcctcagtgtgaccttggaagccacactcagtcttgcccttcctcagatccctccagatgactgcacagccacctagcacagtgtggaccctagcaggtragagctgttgctatcacagctctgagagaggcccactgaaggaggtgctggtgaagatacaggagcctggggagagaagcatggatgttggcgagggtgt

SEQ ID NO: 401008 - DNA, 201 bp, Homo sapiens
ggagaggctgccattgaaaagatagtttgttcctctcagttcccaagagaaggggccacagcataccatgggggcatgtggggaagcaccagggctgatcrgggatgggtgagatggggtgagcaggcttagaattagccagtttgaatgattttgtgggctctggggtgtaggggcttctggcatctggccctggggtga

SEQ ID NO: 401009 - DNA, 201 bp, Homo sapiens
atggaggcaggtctgggatctgtgacacagagtgacctccagaatatgttaaacgtgaggaaaagaaaacctggtagaaatccagaaatagacaagactgwttctagagtaggatatgtggcatactatcttttaagtaagaaaggaggaaaaataagaatagatgggtggatggataaatagattagacagagaatagat

SEQ ID NO: 401010 - DNA, 201 bp, Homo sapiens
agggagacactctgtggttggcacctgcgaaggagcaggggtgagaaatgaggagaaatgtctgtctgtgccgaacccccagtggagagcgtgtgggctcrgagttagggtaaatgaaggcacgggcgcactgcagacccctgatgggagaggcagtgggcgatgcttccatggtgaaatggaatactgggagccaggtgc

SEQ ID NO: 401011 - DNA, 201 bp, Homo sapiens
gagacactctgtggttggcacctgcgaaggagcaggggtgagaaatgaggagaaatgtctgtctgtgccgaacccccagtggagagcgtgtgggctcagarttagggtaaatgaaggcacgggcgcactgcagacccctgatgggagaggcagtgggcgatgcttccatggtgaaatggaatactgggagccaggtgccct

SEQ ID NO: 401012 - DNA, 201 bp, Homo sapiens
tgggagaggcagtgggcgatgcttccatggtgaaatggaatactgggagccaggtgccctggcgcctcatggcaacgcctccttactctaggccggcctcsctggcattcctctttgagctgatgagggaccagaccagtcccaggttagcacctggatccactttcctgcattttgggtaacacatgttgcgtctttcct

SEQ ID NO: 401013 - DNA, 201 bp, Homo sapiens
gccagcgctcagctggatgcatgcagtggaagtcaccttctgcctccactcctgagcaggatgtgctctccccacatctcctgtttgcgctttcagcaatrgatcattcacagccataggagggggaggcctcccagtccttggctttttgtacctggaaggggatggtgaggcgttcagctgccaggaatcacttccttc

SEQ ID NO: 401014 - DNA, 201 bp, Homo sapiens
tgcagtggaagtcaccttctgcctccactcctgagcaggatgtgctctccccacatctcctgtttgcgctttcagcaatagatcattcacagccataggasggggaggcctcccagtccttggctttttgtacctggaaggggatggtgaggcgttcagctgccaggaatcacttccttccctccagggaccagccccttg

SEQ ID NO: 401015 - DNA, 201 bp, Homo sapiens
ttttctaaagcaaatacttctcaggaagtggctctcctctttttttttttttcctacgaagctcttttcttaaaagcttactttaactgcaaaaagttccmctgttcatggaggaagaaaatcaggcttgctgggtgagacgacagaatagggcttgctgtaattctctcctggaggcaggctctctctctggctctctgt

SEQ ID NO: 401016 - DNA, 201 bp, Homo sapiens
catccactgccgcgctcctccgccccgggcacttttgacctctgactgttagggatccgtgattttgtttttctggttggaatgacccataggaatgatayaccctgtaggtactgggactctgggctgcttttgccaaggcaaatgaaccaacaaatgatacctagaggtggagcaggcaccttctctccccgagaaagg

SEQ ID NO: 401017 - DNA, 201 bp, Homo sapiens
ctctatttaaaagcatccaatttcagatcttttctctcctttttgcaataatgagaaattcttcggtcttactcaggatggaagcacctggtggggctccyctcctctgttcctgccccacccacagcccccatccgagccctcctgcctcgggtttctggctgcccaggtcatcagttatttagaaacactaataaatgt

SEQ ID NO: 401018 - DNA, 201 bp, Homo sapiens
gggcagcactgggaggaggtgtttgtggtgtttcatggacacacacactgccagcatcagggagtagtgacagggtactgagaacagcagaatatctagawgtgagttcttcataactgtggaacacagaagtcttccctcacagtgtggcccttgcccactgctgctggaggagagcgctaaggccctggaacactcgtc

SEQ ID NO: 401019 - DNA, 201 bp, Homo sapiens
tgcttttcgattaaaaataaatcactcctggagcttgcatccccaaagcatatgaaataattttgaggcagtagatatcttgtgttggaggagtaataatrgccatctaagtttccagcctagtacaaggggggtgattatccatctcaccccactggcactgacatattttctgcacctgtaggagattacaggaggatg

SEQ ID NO: 401020 - DNA, 201 bp, Homo sapiens
ctttgctctctgttcacagcctcccagcaactgggatgtgcatttcctccacatctgggtttctcagtgctcagtcatgtatatatttggagcagaaatasaagcacaatgttttgtgaaaccctgaaggggaagcttccacacagtgcccagcatccagtggtgaatgtgaccttccatcaggaagcctggagctggggt

SEQ ID NO: 401021 - DNA, 201 bp, Homo sapiens
gtgcagctgcgcacccagccactccatccctctgctcagaggcaaagcttctccctctgaaccctggaagtcagagcgatggctgcatagggtcctttctmcccagggaggcatggagttggtggatgaagcttttgacaagacttttctataatgatcttgtggagacagtgatataatgaggccattttttaaaaaatg

SEQ ID NO: 401022 - DNA, 201 bp, Homo sapiens
tctcaaaagaaaccaaaaataagaatcttctgcttggctaaatacaatgtaaacaaagtcaaaagacaaatgaccaactaatatacaaacagctcctaaaygttaagaagagatgcgaaacccccatagaaaaaaatgagcaaagacatgaatactcagtttaccaaaaaagaagtaatggctcttaaaatctgagatgtt

SEQ ID NO: 401023 - DNA, 201 bp, Homo sapiens
aagccgcttgggccgtcagtgcaattaaactcagaagcagagtccccgagcgcctgctgtgcccaggacacttggggtcagcggggcaaagcagcaggccygctgcaggaagaaggtggttgtaagacatcgctagcaacaggggcgagggtgtggcccccaccccacaggtcccatgggagccctggagacagcatggga

SEQ ID NO: 401024 - DNA, 201 bp, Homo sapiens
gtcagcatcttctccagagcctggaagtagaggccttgtcactttttggtataaaagttttgggttaagaggtgccagcagcagaaacatatgttcaaggrtgaaggtaagtctgtcttcacaaatgactgatcctgaagatggaccggcacctccaggcccaggtccctgcagaatcaggtgatgggtccccaaaacaca

SEQ ID NO: 401025 - DNA, 201 bp, Homo sapiens
catgcaaaaacacttagtgccgggcagacagccagagctcagatgtagctattattacttttattactcaatgagaccctgcatgtcgcagccctgcacargctggtagatggcgctgctgttggtgactccaagccccaggctcttttgcgggccctacagccctccttccctcagggctcctggctgaccctggggaag

SEQ ID NO: 401026 - DNA, 201 bp, Homo sapiens
gaactgccctgccagtcccgtgtcctctcaggctccgagcagatggcccggcccagcaggactcatgccagctcagctgcaggaagtggctaatctgtctygtgtggatttacacaaatggtctggtttttggtgctcagtccccagcatgggaaggaatccagggatggcaggggtgactgcaggacagcctctcccact

SEQ ID NO: 401027 - DNA, 201 bp, Homo sapiens
ctttaattcaagtatttatggggccctaagtttctgtcaggcccagagaacaagacaggcaaaggctctgccctgcccccccggaacctgtatcctggtgrgatgagcaaataaatgaaacggatgatgatggagaggagtcggtgcccctaaggaaactcagcagagtgtagtgtaggcatagagggggacagggggaaa

SEQ ID NO: 401028 - DNA, 201 bp, Homo sapiens
gggcagtggagcctgagctgtctttatggaggcaggaagagtgaagccagaaacccagacaggccagggagagcaaggacaggggagagagcagccccttraaaggcaagatccacagggtggtggttgaggagagaggacccacatcccgtagagggggagagttggccttgggcacagcctgtcagggcgtctgaccac

SEQ ID NO: 401029 - DNA, 201 bp, Homo sapiens
agtgccaggacaacagtaggtttgagaaagatgggtcagggagggaggggcctccctttaagacaaagcacccaggtgcaaatccaggttgtttatctgawcacctgaaaatacacgggcaaagaggaagaaaaaaacaggtactaaaaagagattccaaaccctctctatttaaaagcatccaatttcagatcttttctc

SEQ ID NO: 401030 - DNA, 201 bp, Homo sapiens
atctttgtagcggcagtgccaggacaacagtaggtttgagaaagatgggtcagggagggaggggcctccctttaagacaaagcacccaggtgcaaatccasgttgtttatctgaacacctgaaaatacacgggcaaagaggaagaaaaaaacaggtactaaaaagagattccaaaccctctctatttaaaagcatccaatt

SEQ ID NO: 401031 - DNA, 201 bp, Homo sapiens
aacaagagcaaacaaaggccctccccgtgcagcaataaagagactcaggcttgtgccaggtgtggtggctcacgcctgtaatctcagcactttggcaggcygaggcaggtggatcatttgaggccaggagttcgagaccagcctggccaacatggcaaaaccccatctctactaaaaatacaaaaataaactgggtgtgag

SEQ ID NO: 401032 - DNA, 201 bp, Homo sapiens
acccccaccccactgcttgttccttcaggcggcctggaggtgggtgcccactgccagaacaagagcaaacaaaggccctccccgtgcagcaataaagagaytcaggcttgtgccaggtgtggtggctcacgcctgtaatctcagcactttggcaggctgaggcaggtggatcatttgaggccaggagttcgagaccagcct

SEQ ID NO: 401033 - DNA, 201 bp, Homo sapiens
tggggtacactcaagagccctgagccaccccgtcctgaaagtggtggtgagctagtgcctgagaggtgcttaaaatgggtcagcacctgagtgagtctctstcttaagtactcagaggattggaatgggatgaacgagggaatgagtaatgttttcctggtacacggtgatggcatttcatgctgtgacatcaaacttccc

SEQ ID NO: 401034 - DNA, 201 bp, Homo sapiens
gatttcatcatgttagccaggctggtctcgaactcctgagctcaggtgatccacccgcctcggcctcccaaagtgctgggattacaggtgtgagccaccgygcctggccctatctacctatttatccagccatccattcattcattcacccatccatccaccaactcacccattcatccatttacccatctacccatccat

SEQ ID NO: 401035 - DNA, 201 bp, Homo sapiens
gttgaaagagaaaccagttcctggtcatgttgccagaccccttgaatcaaacctaacagtactgagcctaacaatcacataaaccaataagcatgggaatyactttctgtcacaactgaaagaatcatcatagatctggaaatggtcacattgggggctatggtcatgttggaggttgtagacaaaatttttgataagaaa

SEQ ID NO: 401036 - DNA, 201 bp, Homo sapiens
tgtcacttttctcctctgaagttgactctagaagtgtgaaccctgggcactctggcaaccattttaagactgcaagggggaagtctgaccaagaatggaayctaccttaagaaagcaaagctaagaagtgttgaaagagaaaccagttcctggtcatgttgccagaccccttgaatcaaacctaacagtactgagcctaac

SEQ ID NO: 401037 - DNA, 201 bp, Homo sapiens
tagctccatgataaaaggtaagagagagcaagatgagaagattgatctctctctctgccccaattcccctcactccctacattctgcctttgtgggcatartgcttgcagctacagtagccatcttgtagtcatgagatggcaaggctaacatgctaacagagagtgatgaagaaagctgggaaaatctgggtccttgatg

SEQ ID NO: 401038 - DNA, 201 bp, Homo sapiens
cctgggactacaggcacttgccaccatacccagacaatttttaaattttttgcagacacaggatctcactatgttgcccaggcatgtcacaaattcccagsctcaaatgatcctatctcctcagcctccaaaagtgctggtattccaggtgtgagccaccacacctggcctcatgattggtcttaatcagacatggctctc

SEQ ID NO: 401039 - DNA, 201 bp, Homo sapiens; identical to SEQ ID NO: 88870

SEQ ID NO: 401040 - DNA, 201 bp, Homo sapiens
cccctcacacatgtgtggtcagctgcaggtcgcatggcagctgtgtctgggaatcatctggctgttggctggggtgacagatgcaagagaggtgactaggwtgtgtctctgatcacccagtaggttagcttgggcttgttcacctggtggcagcagggtttcaagagaccaagcagaagacgcaagacctttcaagcccag

SEQ ID NO: 401041 - DNA, 201 bp, Homo sapiens
aatgaaaaccattcctgggagctatttctgatcttcgcttttctccatcccagggatgtctcagtggtggtggtgattgtcttgaggctgtaatccagacrcccagaaacaccactgctatggcagggcaatgccagatcagtgatcctcacctctggtccctccacacactcagctcattcattttcacatcctcaactg

SEQ ID NO: 401042 - DNA, 201 bp, Homo sapiens
aaataggcctggcttatggaagtgagccctgcccatgctgatggaaccctctccttcttcctccaggtcgacatttataactcagaccccctgatctgccrggcagggctgaaggtgtgcttcggcatccaactgctgaatgccgtctcacgggtggagcgcgccctccccaagctgactgtgcccttcctgctgctccag

SEQ ID NO: 401043 - DNA, 201 bp, Homo sapiens
gcttcggcatccaactgctgaatgccgtctcacgggtggagcgcgccctccccaagctgactgtgcccttcctgctgctccagggctctgccgatcgcctrtgtgacagcaaaggggcctacctgctcatggagttagccaagagccaggacaagactctcaaggtgagcggctgccacttgcccacttccccccaaggtg

SEQ ID NO: 401044 - DNA, 201 bp, Homo sapiens
cctgcccagccccgtgagcatttgcggttgcaacccttgcttttaagcacctttgtgcttcagcaaacaggtgaggcctctctccttcagcaccatccacrttcactcccatttttcttggaatttaaatttctaggacctttactaaaccaggaaaaagtatagtatagcaatctattattatgatcagattacccccca

SEQ ID NO: 401045 - DNA, 201 bp, Homo sapiens
aaatcggggtccttaaactggcagcccacaggccaaatctacctacagacaaagcaggctggttggctgaccaagatatattgaactgcttgaatttgaakgcctggggacatctgaccagggcaggccttgcctcctgccccatggtcactgcctggctctgtccttacatttctcttacctgcccagccccgtgagcat

SEQ ID NO: 401046 - DNA, 201 bp, Homo sapiens
gccctaaggaaagaacaagggggtgaacagcacagatatgtgacagattaaactcaagagggagagaatgtgacctagtttcactgcagcttcgtcgagaygctttctggcaagcacacccgatgactacatattattttatgtttgtcatattatcttcacctaaaactgtaagatgaggggctgagtgtaccactctac

SEQ ID NO: 401047 - DNA, 201 bp, Homo sapiens
gttgggctttctagacacctgttattccaggaatcagctgtcttcctagcaagcctcctgccacacatctttgctgagcccctgatctatcaggaaacaartgtcctggccttcccagcgagggtcactgggaaaggggcacagcactttctgttttatggctgccttaaggtgtcctctcactctcaagaaaatctgggg

SEQ ID NO: 401048 - DNA, 201 bp, Homo sapiens
tccatctctgccatgccacactcccaggtttattattaaattagcatttccccgattgtttctactttatgtattttctgggcatttcagctcactcacasgatttcctttcgtctcacccatccttgtgttctttctgaaggttttgatgtgaaggctattagtattggcatcattaataagcattggttgaagttccta

SEQ ID NO: 401049 - DNA, 201 bp, Homo sapiens
acctgaggagagatgaccaggaaaatccagagagaaggcatttgctgggctgaggggaataaactgcctgtggaaaggtggattggtccttggatctcttyacctgggggctgtcaagttgggacagagccaagataagagccctttttcaaatgtgttctttcatcttttaatggagttggtttctttggcaggctagca

SEQ ID NO: 401050 - DNA, 201 bp, Homo sapiens
atgccacactcccaggtttattattaaattagcatttccccgattgtttctactttatgtattttctgggcatttcagctcactcacacgatttcctttcrtctcacccatccttgtgttctttctgaaggttttgatgtgaaggctattagtattggcatcattaataagcattggttgaagttcctaattgggtgtttg

SEQ ID NO: 401051 - DNA, 201 bp, Homo sapiens
tttttgtcctcagggatatcactcattagtcttttttttttttattgttgttttaagagacagggctttgctctgtcacccaggctagagtgtgttggctyaatcatagctcactgcagtctccaactcctgggctcaggtgatcctcccacctcagcctcctgagtacctgggactacaggcacttgccaccatacccag

SEQ ID NO: 401052 - DNA, 201 bp, Homo sapiens
ggttggtaattgtttacagtctagtccattcagagcaacagagaaattcctgcaaaggttttatgtggctaaatgtctagaattggacaaggatctcaccytttcacatccgtacttctctgtggttccgtggtggatgccccagcctgcatgaagttgctgttggtttatcctttgccttgatgtcttttgtccaagacc

SEQ ID NO: 401053 - DNA, 201 bp, Homo sapiens
ctacctggcgaagattaaatgaatgtcttagctgctagcagagtggctgctgggcacatagtaggtgctcaacaagcccccatactgtcctcttccccaamacacagacccctgctctcctcaccacacattagtcactggctgagaagagaaactttttttttcagttccctgaaattaaatagacagcccccatctttt

SEQ ID NO: 401054 - DNA, 201 bp, Homo sapiens
agtactgtgctggacagcaaaggagggtccacaaacagcatggagacgtggcccctttcacttctgacctctccatggcactagctcttgctgaacacctygtgtatgccaggtctcattccagtttggagataaagaaatgaagttgccctgctcctgcctttgaaggcatctccatgcatttgtcagggaggcagtgcc

SEQ ID NO: 401055 - DNA, 201 bp, Homo sapiens
ctgttactacaagggccatgtgctagatccagagtgggcaggatagtctggggtatgttaggaatctattgctgttactcagcccatgattctgtgggttygcaattagtgctgggctcagctggatgggtcttctgttgctcccagctgggctcctgcatgtatcaatggtcagttgtggatcagcaggcactggcaggc

SEQ ID NO: 401056 - DNA, 201 bp, Homo sapiens
gtttggagcagggcttggagaggtaccagacccctgtctcccatgggaagccatttggccagcctccattttgctgggtctgttgacagtggttagaagtrtgtgggcacctaagtgatgcccgccgaggctgctaataagtgcagatggacctcagaagagatggccagagacctacttagagcagccaggagataggtg

SEQ ID NO: 401057 - DNA, 201 bp, Homo sapiens
tcttctagcaatgacattatttttagtcagattattgcattttagtagcaccttttaagtagtccattttaagaatttccagaagtttgtttttcttgtaygaagctgttatttctccttctgatgcttctgcctttgtgatagcgtagcaaattgttttatttttaaacagggcatttcttctgggctttttaaaaatac

SEQ ID NO: 401058 - DNA, 201 bp, Homo sapiens
cccaaatgccatgtgtttgtaattagccatttccaagatacctcccaacttctgggctctgtgcagagagtggtggggcggggagggggctttctccaatrttctctccattcaccctcactgcaaagtgttgatgctatttccatgggaagatgttcatggaaagatgttaaggaatcaaaagcaggatttaaaagaaac

SEQ ID NO: 401059 - DNA, 201 bp, Homo sapiens
tggaaagcagtcctgggatacaccctctgcagagggatggtgaaagacaactggagagacgattttgatgcggtcacacagccaacagtgacagtcatgtrtgtggcacagcatggcctctcgtgcctggggactgcacagcatcacaggcttctcctctgccaccctgtcctcaagcacaccagtggattgcaggcctcc

SEQ ID NO: 401060 - DNA, 201 bp, Homo sapiens
atggccattcagggacctaggttccttccatcttgttgccccaccaccacttagagtgtggttcaatcaccaaagctggtcattgccttctctgtgttccygaccatggggaggagaaagagcaagtctaaggcaagcagattatttcaagtaggtgttgtagaaattgcatacgtcacttctattcatattctattggca

SEQ ID NO: 401061 - DNA, 201 bp, Homo sapiens
acaagaagcctctctagccaggcaaagcaaagggatttaacctggggcattgagtgctttcaaaactactgggcactgcgggagtggtctgtaggcctccrggaatgcttcatgactgttccagcccacagttgtctctcctatctctgatgcatttcattcattcattcattcagtgttcatggagcagaggcagtgccg

SEQ ID NO: 401062 - DNA, 201 bp, Homo sapiens
agggctctgatccctaaaccacacaccagctgtacagaagcaactggcacaggaagtggcagtgtggtgtgatggttagacacacgggctttggcatcagmtatgggctcaaatcctggttcagtcatttactagctgcagggctttggtctgcagtctgttttttgttatggccttctccagttttggtaccagggatat

SEQ ID NO: 401063 - DNA, 201 bp, Homo sapiens
cctctgaccttggatcacaggccaagtggttaaagatgtttaaagactccaacagggttttgtggcctggttttgctccgtacagccctgcctcctggagwctattccatattcttagatattcactgttcatttacgggactccctctatgcagctgcacctggccctcacgccttagttctttgaccaacccatgccac

SEQ ID NO: 401064 - DNA, 201 bp, Homo sapiens
cacagaagtaggaagtcacagagcctagatctgaactcaagtcaactggctattccccatgtaaggggtcttattaatgatagtctgcatttgttaaggtrcaggctgagcacagagacctcaaaatttagtggctgaaataagagagaggtttattttgctctcacttagcagtccagaggtgagcagtccaagttggta

SEQ ID NO: 401065 - DNA, 201 bp, Homo sapiens
gcgcagggtctgaaactccagtggcagcagcatcccctgttgaaagccagatggctgggcccaccccaggattcagattcagttggtctgctgtggggccsaagaatgtgcatttctaacagcccctgggggtgctgctgctgctgctgctgctgctgaggacccctgagagagtgtgtgtaacaaaccatacacaacgcc

SEQ ID NO: 401066 - DNA, 201 bp, Homo sapiens
cttcctcaaggagatgaaattgaacagggaaatatggagaaagagcattcaggtgaaggaactcttcttccttcattctttgatattcactgaatgcccarctgcactcctaactgttctaggcacagaggtccagcagtgagccaggcagacatgagtgaataaggagaggtgttatgtcctgccaagtgcaggggaggc

SEQ ID NO: 401067 - DNA, 201 bp, Homo sapiens
ctacgaagctcttttcttaaaagcttactttaactgcaaaaagttccactgttcatggaggaagaaaatcaggcttgctgggtgagacgacagaatagggmttgctgtaattctctcctggaggcaggctctctctctggctctctgttcccccttccccaacctctgtgaaaccacttcaaggatggctcaagctgcgct

SEQ ID NO: 401068 - DNA, 201 bp, Homo sapiens
tatccttcagtccatccgtccatccatccatccatccatccattcattcgttcatccatccacccaccccatacatccacccagccacccattcatccacmcttccacccatccattcaccaatccacccatccatccatttattcattcatccacccatccacacatttacttatccatacatccgtcagtgtcattcag

SEQ ID NO: 401069 - DNA, 201 bp, Homo sapiens
tggttggttgcctccccagtatccatttccttcttccacccacagtgccttaaatttaagaggcatctctcctctactttcagcccatgtgtttctgttggtgttgactccaccctggtgagaggttgatcttgcaacaagtttagcctatcatcattttacattctccccagctacagtgattggttcagggatgggcaa

SEQ ID NO: 401070 - DNA, 201 bp, Homo sapiens
ttgcagagtaagggtactgtgcagagaactgtggccatcctcacttctttcttgctgatttttgtcctcagggatatcactcattagtcttttttttttttattgttgttttaagagacagggctttgctctgtcacccaggctagagtgtgttggctcaatcatagctcactgcagtctccaactcctgggctcaggtga

SEQ ID NO: 401071 - DNA, 201 bp, Homo sapiens
tctgtgagacaagtattattattcttactattcccattttacagatgaggaaacagaggtccaatgttacaaagtatctttctccaaatgaccctgctggcagtagtgggatttggtccgcaatcttctgacatggaccaaatccaattgttctccttacaccaccaagcaggacagatttcttctttataggtagtgttt

SEQ ID NO: 401072 - DNA, 201 bp, Homo sapiens
gcagcatgtggattccatgcagaaagactaccctgggcttcctgtcttccttctgggccactccatggtaagcagaccacagaagacccaggttaaatccwccctggcttccagccttgcagggggaagggggtggccctgacttcctgccccccactgctctctgcctggctggcatgatgtctccctttgtgcactgca

SEQ ID NO: 401073 - DNA, 201 bp, Homo sapiens
gaaccttccagactgaggcaagagagagattgaggacctgaggctggcataggcacgcagccataagaagagcagccagtgaggatgcaccagtcagggaygctggtggcggggggcaggggagccccaccacctgtgaagtctaaacttcttctcttggttagatgagaagccacatgagcatttcaagccaaggagtga

SEQ ID NO: 401074 - DNA, 201 bp, Homo sapiens
cctgcctctccctagactcatgcaagttacagagtgagacccgaatgtggcctgggagctgctgagccagccaagggccagggcggctgccattctgccaygtgcctggtcgactccgattgctttatttctctggtggagccactgtggttcgcatgttggagctgggaagggttccatctggctcacagccaaggagga

SEQ ID NO: 401075 - DNA, 201 bp, Homo sapiens
ttaggatttatgccaattggggatttttaacctgcagttttagcaattctgccaagccaggcccttccctgcctctccctagactcatgcaagttacagartgagacccgaatgtggcctgggagctgctgagccagccaagggccagggcggctgccattctgccacgtgcctggtcgactccgattgctttatttctct

SEQ ID NO: 401076 - DNA, 201 bp, Homo sapiens; identical to SEQ ID NO: 88871

SEQ ID NO: 401077 - DNA, 201 bp, Homo sapiens
gacaggagctggggtaaggaggaggtaggagacagtgacaaccaaggcaggtcaagccaggcagggtggcagagagtgagatcactgtcatgaaggacgamccctgggtttgggcttgcagtaatgaggaggctgtaatgagaccggaaacgccaggcagagagactgacgtgagcaacggctggagtccacctggagatg

SEQ ID NO: 401078 - DNA, 201 bp, Homo sapiens
cggcttgggatgagctgaggaccccgtggaggtcaggatgtgaggccgggagtggaaccccctcttttgagaaggttgcctgactcagagacacagaaacrggtccagggatggggagagatgtggagtgagggaaggtttgcatttgagaaaggaagttcgagaacacactgggacattgtaacacatttgaaccatctt

SEQ ID NO: 401079 - DNA, 201 bp, Homo sapiens; identical to SEQ ID NO: 88873

SEQ ID NO: 401080 - DNA, 201 bp, Homo sapiens
gtttttttttaactcagctggggcatgtgagaagaggaagttttgagggaatgtctgtgggcggcagttacgcgtggttctccttggcgggggggtcctayccagtcagaagaagagtatttaggaaattcagggggaataattgtatatgggtgtttttcatccagggagacagatttgagtcaaggtcgcttgctggaa

SEQ ID NO: 401081 - DNA, 201 bp, Homo sapiens; identical to SEQ ID NO: 88874

SEQ ID NO: 401082 - DNA, 201 bp, Homo sapiens
agtcagaagaagagtatttaggaaattcagggggaataattgtatatgggtgtttttcatccagggagacagatttgagtcaaggtcgcttgctggaagtwttctaaaataaactgccataggtttattttatttcttgtaagtaatatatttttgtttgaaacgtttgaaaaatgtgttaaccgtttttcttgccttagt

SEQ ID NO: 401083 - DNA, 201 bp, Homo sapiens; identical to SEQ ID NO: 88875

SEQ ID NO: 401084 - DNA, 201 bp, Homo sapiens; identical to SEQ ID NO: 88876

SEQ ID NO: 401085 - DNA, 201 bp, Homo sapiens
gagaaataaataaataaaaggaatcccaggagcctatgaatttcaagagaacacgagtcatttgctgattgttttgcatgaataagcctcaaagggaagamgaacaatcaaaagatgttataggcaagaaaggaatctgcaactgggcactgagcaaataaaatctcctgagagagagacatgtccaagctccaaggacac

SEQ ID NO: 401086 - DNA, 201 bp, Homo sapiens
gggccagtgggaaacacgggagcttggggcctgacagcaggagggtctccaagctggaggtctgggcagcctgtcagttccaggtggtgaccgttattacygcagcagcctccccagaggtggcagaggcttaatgagtgcttcaggctctcagcagggaaggtctgggcagcccctctggctgtgtggtcccagttctcc

SEQ ID NO: 401087 - DNA, 201 bp, Homo sapiens
tttatgtttgtcatattatcttcacctaaaactgtaagatgaggggctgagtgtaccactctacctagtgaaaggccaatattcaggcacagctgccaggrgcaaggaacagggaaaatgcaggaaaattctgagccttcttcgtcttactcccggctgctttgcagaacactgggcatgctgaggctctctgtgtacctg

SEQ ID NO: 401088 - DNA, 201 bp, Homo sapiens
ataggtcctggtttcaggagggtgccctggggtcatttccagttgtttgctcttatgagcctcaatgatggaacaattcctagagcccacctcctccctcyagcgttctgtttgggaaatctgtttggtggtggggctgaggggcttccctgagtgtggctgtgagtggtagcagagcacagtcaagtcccagcctcctga

SEQ ID NO: 401089 - DNA, 201 bp, Homo sapiens
cacccccaccctcctaaatctcgccaccatctggttcttatgtggatgctggttttcaacaagctgggatatatttagcctggagatgagacaatgaggawggatgggggggccccaaacattgtctctgctgagaaagtggtttcgcaaagtggtagcagcagaaattcagaaacaaaaactccatgcatctgaacaaat

SEQ ID NO: 401090 - DNA, 201 bp, Homo sapiens
ggctccctgaggggtcaacgtgaactctcttgattcctttgtccgcttcatctccctgcaccatcgttctggggactctgcggacctgtgccaggcttgtygattgcccaccgttaccccttacttccctccaccctcatggcaagcgccagtcacagaggacccagtatgaaagcaatcatgcttttgacagattccagc

SEQ ID NO: 401091 - DNA, 201 bp, Homo sapiens
tgttactacgtgcatactcataactgaagctgcagtaatgaccagaactgctctcatttgatggtccctgacagagcagtgggctgcaaggaacctgcaasgaagcctctgcccctccctttctcattgtacaagggtaggggacagacttcgaggtcccaccagttggtggcagttttggacccggatctcaggccccag

SEQ ID NO: 401092 - DNA, 201 bp, Homo sapiens
ggtgtgtgtgtgtgtgtgtcagtgtgcgtttgcccgggagtggaaatgactgaaacctgtggtttgccaacagaatggacatctgttccctgtgagtcccrggggccctggcctccacctgctgtttggggctttctcggtttcctccaccatggttctctctccctcgtttttgcactaccctctgttttttgataagct

SEQ ID NO: 401093 - DNA, 201 bp, Homo sapiens
catgttcacgaggcagcagagctaggaatcaaacccagcaatccttccctctgccacacagcctcctcatcgagctggtgctatttctacttccacccgasagaaatggacgcacactttctctgtgtggctcctgtgggcccttccgcactgccctgcttcgtgctcagttgatctgtgtgattctgcacctgccgtgta

SEQ ID NO: 401094 - DNA, 201 bp, Homo sapiens
ggaagagggaggggacctcaagtcaccagggcttcaatctttccccccaggctttttacccctcttcagcaaaactagggcctcgctttgtgcaatcctgyctcctcccagttaggaagaaagaagggaggaaaagcaaggggcaaaaaaagaggagactgaaccctcccccactactgtaccaactgtgggcaaaacctg

SEQ ID NO: 401095 - DNA, 201 bp, Homo sapiens
ggagaatggccactgtgggcatgacacgtggcaatgtgatcgctaaccccacggaaccagccacttaccgctttctgaaacccagatcgtcatcccgcagygtgatacaaaaggaagatcatcttgctagatgccaagaaccgtagttatgacactttttgtcattctgtttcctcttatttatacagtggagagtaggat

SEQ ID NO: 401096 - DNA, 201 bp, Homo sapiens
acatttcatgagagagaaaatcaacaggagaatggccactgtgggcatgacacgtggcaatgtgatcgctaaccccacggaaccagccacttaccgctttytgaaacccagatcgtcatcccgcagcgtgatacaaaaggaagatcatcttgctagatgccaagaaccgtagttatgacactttttgtcattctgtttcct

SEQ ID NO: 401097 - DNA, 201 bp, Homo sapiens
tcttccatttccaccttccttgtttctgtctgggcccccatctcccaagctgctgtcactcattctattcaaactctgttctttgcctttacttcagtaargtcaaaataacttttgttaacatggtgcacaaaaatgtaaagttccagcgccagtcttgtgaagggtcagtccgttgtgcagccttccccttccatgccc

SEQ ID NO: 401098 - DNA, 201 bp, Homo sapiens
taaagcggccccccagcccggggcccctcccatggacctcatggtaccgagcctccattttctcatctgttcagtgaggatgaagcctcatctcccagggyttttgcaaagacagggagactggccgggcgccgtggcttacgcctataatcccagcaccttgggaggccgaggcaggcggatcacaaggtcaggagtttg

SEQ ID NO: 401099 - DNA, 201 bp, Homo sapiens
gggaccgcctgggggcagttgaggcagggtggatctgtgagcccaggacaagagagtgctgtgagcagtgcaggggggactgccacctgcccaggagccaygaacagcttgaaggcagccagaaatgtaggaaggacgctgtgcagagctgccatgttagaaaactcaggagccatggccgcatgtttggggcttgttttc

SEQ ID NO: 401100 - DNA, 201 bp, Homo sapiens
gagagggaggctccctacgggagtggcagaggacaagaaggatggcgtgcatgcctctggagggagtggacgcagagggagacggaagagtggaatgtgarcctgcagttctacccccacaaagacagggggtgcagctagaggtccaggttgggaggggaacataactggttccagacaggtgggaaacataggggtggg

SEQ ID NO: 401101 - DNA, 201 bp, Homo sapiens
ttacaagagcgttgagtctagctcacgtgaacagtttcatctttggtttttcccttgttcccaggtcacagtggctaatgagaagtgaaatcatttgaatycaggttttatcttctccttttctctctggggttgagcaatgcatggggcatcccctagttgacgaggccgtgtgggcaaaaagaacagcccccgcaatgg

SEQ ID NO: 401102 - DNA, 201 bp, Homo sapiens
aggctgaggcaggagaatcacttgaacccaggaggcagaggttgcagtgagccgagattgcgccactgcactccagcctgggtgacagagcaagactctcaaaaaaaaaaaaaaaaagatagggaaactgtgcccaatgcaccagaaggtggttcctcggtgcctgtgagtgcccttgccctctgccaagggtactgagct

SEQ ID NO: 401103 - DNA, 201 bp, Homo sapiens
tagagatggggtctcaccatgttgcccaggctggtctcaaactcctggcctcaagcagtcttcccctactttggcctcccaaaatgctgggattataggcrtgagccatctcacccgccccaaaatatgccttttaaaaataagctaagattgggttgggtgtcagggatgatgagtctaattcccattgtgttcccaaat

SEQ ID NO: 401104 - DNA, 201 bp, Homo sapiens
cgccatctcagctcactgtcatctctgcctcctgggttcaagcaattctcctgcctcagcctgccgagtagctgggatgacaggcgcatgccaccactccyggctaatttttttgtatttcagtagaggtggggtttcactatgttggtcaggctggtctcaaactcctgagctcaggcaatccgcccgccccggcctccc

SEQ ID NO: 401105 - DNA, 201 bp, Homo sapiens
tggggccaggtgcactgggcagccgtcacccacaggcttaccctatgaactgtgggatcatttaaataatgacattagctcttattcccccaccgcactcycttcaacacagtacagggaatgaaaccttataacaacatcctcaaagggtttccttcagcccatgaccacagacttgctcctggctctagagacaggctt

SEQ ID NO: 401106 - DNA, 201 bp, Homo sapiens
gggaaggactgcttgagcccaggggtttgagaccagcctggacaacatgtcaaaaccctgtctcttaaaaaacacaaaaattagcagtgcttaaaggtgcrtgcctatgatctcagctacttgggagactgaggcaggagctacttgggatcgcttgaacccaggaggtcaaggctgcagtgagctgtgatttcaccactg

SEQ ID NO: 401107 - DNA, 201 bp, Homo sapiens
atggtgatagtgatggtaatattggtgagagtgatggtgatgatggagaatatgaggaaggtaagccttaaaggataatttcctaactagttttttggggktttttttgtttgtttgtttgttttttgatagagtctcactccatcactcgggctggagtgcagtggtgcaatctcggccctacctgcaatctctgcctcc

SEQ ID NO: 401108 - DNA, 201 bp, Homo sapiens
ctatggaaaggcctccaagacctgttgttaagggaaaaaaataaagtgctgtttatggaaagaaaaagaaggccataaaacaaaatgacggccgggcgtgrtggcttacgcctgtaatcccaacactttgggaggctgaggtgggtggatcacttgaggtcaggagttcgaggccagcctggccaacatggtgaaacccca

SEQ ID NO: 401109 - DNA, 201 bp, Homo sapiens
aggcctccaagacctgttgttaagggaaaaaaataaagtgctgtttatggaaagaaaaagaaggccataaaacaaaatgacggccgggcgtgatggcttaygcctgtaatcccaacactttgggaggctgaggtgggtggatcacttgaggtcaggagttcgaggccagcctggccaacatggtgaaaccccatctctact

SEQ ID NO: 401110 - DNA, 201 bp, Homo sapiens
ataaagtgctgtttatggaaagaaaaagaaggccataaaacaaaatgacggccgggcgtgatggcttacgcctgtaatcccaacactttgggaggctgagrtgggtggatcacttgaggtcaggagttcgaggccagcctggccaacatggtgaaaccccatctctactaaaaatacaaaaaaattagctgggagtggtgg

SEQ ID NO: 401111 - DNA, 201 bp, Homo sapiens
acaaaaaaattagctgggagtggtggcaggcgcctgcaatcccagctacttgggaggctgaggcaggagaatttcttgaacccaggaggcagaggttgcartgagccgacactggccattgcaccccagcctaggcaagaagagtgaaactccgtctaaaaaaaaaaaaagtgacacagagctgagacatgagtgtgagtg

SEQ ID NO: 401112 - DNA, 201 bp, Homo sapiens
actttgggaggccaaggctggtggatcacctgaggtcaggagttcaagaccagctcggccaacatggcaaaaccccatctctactaaaaatacaaaaattrcacgggcatggtggtgggcacctgtaatcccagctactcgagaggctgaggcaggagaatcacttgaactcaggaggtggaggttgcagtgagccgagat

SEQ ID NO: 401113 - DNA, 201 bp, Homo sapiens
ttacccagatttgtctgttgttataatctgcaacttacttttctttctttcattcttttccttctttctttctttcctctttctttctttctctttctttytctccctccctcccttccttccttcctctctccctccctccttctctctctctttccctcccttccttccttcctctttctttctctttccttccttctg

SEQ ID NO: 401114 - DNA, 201 bp, Homo sapiens
atccactccattttctcatttttagattgttttaacctttgaaagcacagatcccaatgcagacgagctcccaattcttggagttcacagacatttgatcmgtgtttgaaaataccccagtccttgtgcagagttcccagaattccaagttttcctttcccaggctcgttcttggagctggcccatgatactagctggact

SEQ ID NO: 401115 - DNA, 201 bp, Homo sapiens
aatctggggcaaccctgagggtacctgctgtgtcccccacatggccgtcctatgacccttgtcatagtgctgtcccacggaaggtggggagtcctagcctsctgcgcacaggtcagcctgtgggagccacttaggaaacagcatctgtaattgccttcctcatggcaaggctttcactggcagaagtgaaattcacttaga

SEQ ID NO: 401116 - DNA, 201 bp, Homo sapiens
gcgggggaggcacacgggaaggccactgaggcctgggtggagatccagcgtgaagcctacgctttcttgccctccgacaaggaaaacccatcctcctgccsgacccagcctcagaagcacacctgtaggtgcccaccgggaccaacagcctgagtggtgagaacagacctagaggctgtggatcccagcccgccagccctc

SEQ ID NO: 401117 - DNA, 201 bp, Homo sapiens
gtggagatccagcgtgaagcctacgctttcttgccctccgacaaggaaaacccatcctcctgccggacccagcctcagaagcacacctgtaggtgcccacygggaccaacagcctgagtggtgagaacagacctagaggctgtggatcccagcccgccagccctctctcctctctgtgcctcagcgtccaccctggtgaaa

SEQ ID NO: 401118 - DNA, 201 bp, Homo sapiens
ctgaggcaggagaatttcttgaacccaggaggcagaggttgcagtgagccgacactggccattgcaccccagcctaggcaagaagagtgaaactccgtctaaaaaaaaaaaaagtgacacagagctgagacatgagtgtgagtgtgtaggaaaaagtctagaatacacatcaaagtgagaggattggtcacctgagggaat

SEQ ID NO: 401119 - DNA, 201 bp, Homo sapiens
ttaggactttgccctgcagcccccatgggaagcaccacagggttcttcacagagggagacaggtacagatctgtgagtctgaaatgggacttatctctgcrtgacagggacccaatgccgtgagccctctgggggctgacagcagtggccagggtgctacaggcttgggagggaatgtgtgggagaggaagcacgccatgg

SEQ ID NO: 401120 - DNA, 201 bp, Homo sapiens
atatagtgcgaaaatggctgttggtgttcacctgtttcaagctctttgaatgactcatggaaatctctctggcaagtgcctaagggaagtgtttaattcargaaatgaacccagttgactgtgcgtgtgtgacttttgctgtggcttgcttagtagaaggaagccaagtaagtgggctgccattttggggatcttgtgcag

SEQ ID NO: 401121 - DNA, 201 bp, Homo sapiens
cccccatgggaagcaccacagggttcttcacagagggagacaggtacagatctgtgagtctgaaatgggacttatctctgcgtgacagggacccaatgccrtgagccctctgggggctgacagcagtggccagggtgctacaggcttgggagggaatgtgtgggagaggaagcacgccatggccacgccaagcacagctgt

SEQ ID NO: 401122 - DNA, 201 bp, Homo sapiens
cgctgttcagcattttaacagcaaatcctcttatttaataaggcctggagcccacagtgtggctcctgatgcattgctgaggttatgtaaggtcctgcgcygctgcattacagccacaactgtctagacttttctaagaaaaaaaaaaaaggctggttctaaagcctggccttttttattactgtacaccaatgtttccag

SEQ ID NO: 401123 - DNA, 201 bp, Homo sapiens
ttcagatgggaggaataatctgagtatcatccacctcattattgtgcccacttgaaactgttccttggagattttaagatagatgggtcttcttgcagctrggtctttgtacccatagagctgactataatttccacttgattacagctaaaatagtctttaagatgaagtttcctgaaatgatttaaaataaacacagat

SEQ ID NO: 401124 - DNA, 201 bp, Homo sapiens
gccaagtgaggcatgggagaagggttttggggcagcagagtctgtgggggtctgggaaggctgagctgaggcctgaaagcggagtagacaatgttaattargctaagagcaaggggctgaaaagctgtttgtgatgggagacagaagccatcacaggaggattctctcatccagctctttccaccacaaattatgtctccg

SEQ ID NO: 401125 - DNA, 201 bp, Homo sapiens
tactacagcacctagtaaagagtcaagggctccacgcattagttatttttcatagtattctaattaaactctgatattgcatttcatcatggaacaatttaaaaaaaaaatgggtcaagagatttgactgcaggggttgtgtctagattttgctcaaacgtaagtgtaagaaaactcccagctgaggattgcagctgtatt

SEQ ID NO: 401126 - DNA, 201 bp, Homo sapiens
tcttggctttcctgcttctaggaggagcagccagaccactccctcaagagcactgtgggaatgctttgcatgcggtagtgtgcaggacggttcacgtgacyttccttccaccagccattggacagatgtgaaacaggctcagctttagagagacagaccttggctctaatttgctgtgtggccttggcaagttacttgact

SEQ ID NO: 401127 - DNA, 201 bp, Homo sapiens
acccagatttgtctgttgttataatctgcaacttacttttctttctttcattcttttccttctttctttctttcctctttctttctttctctttctttctctccctccctcccttccttccttcctctctccctccctccttctctctctctttccctcccttccttccttcctctttctttctctttccttccttctgtc

SEQ ID NO: 401128 - DNA, 201 bp, Homo sapiens
cctcaaactaaaaagaaatgtttgcctaagaagctgagtgagcaggactatgggggatgggccactggccgggaatcgagggtgcaggggcctgggactcragagtgcacaggccccagggaagatctggaattctgtctgaagggaagcgggttagctctgttgccagaatgtcagaagcagaatgtttggtgtttgctg

SEQ ID NO: 401129 - DNA, 201 bp, Homo sapiens
tctgttgttataatctgcaacttacttttctttctttcattcttttccttctttctttctttcctctttctttctttctctttctttctctccctccctcccttccttccttcctctctccctccctccttctctctctctttccctcccttccttccttcctctttctttctctttccttccttctgtctttctttcttt

SEQ ID NO: 401130 - DNA, 201 bp, Homo sapiens
ctgttgttataatctgcaacttacttttctttctttcattcttttccttctttctttctttcctctttctttctttctctttctttctctccctccctcccttccttccttcctctctccctccctccttctctctctctttccctcccttccttccttcctctttctttctctttccttccttctgtctttctttctttc

SEQ ID NO: 401131 - DNA, 201 bp, Homo sapiens
tgttgttataatctgcaacttacttttctttctttcattcttttccttctttctttctttcctctttctttctttctctttctttctctccctccctcccttccttccttcctctctccctccctccttctctctctctttccctcccttccttccttcctctttctttctctttccttccttctgtctttctttctttct

SEQ ID NO: 401132 - DNA, 201 bp, Homo sapiens
gttgttataatctgcaacttacttttctttctttcattcttttccttctttctttctttcctctttctttctttctctttctttctctccctccctcccttccttccttcctctctccctccctccttctctctctctttccctcccttccttccttcctctttctttctctttccttccttctgtctttctttctttctt

SEQ ID NO: 401133 - DNA, 201 bp, Homo sapiens
ttccttccttcctctctccctccctccttctctctctctttccctcccttccttccttcctctttctttctctttccttccttctgtctttctttctttctttcttttctttctttctttctttctttctttctttctttctttctttctttctttctttctttctttcctgctttctttctctttcttctgtttcttctc

SEQ ID NO: 401134 - DNA, 201 bp, Homo sapiens
aaatatgtaaattgagcaaatataatcttaaaatgtaatcgagcaaatgtaatcttaaatcggggtccttaaactggcagcccacaggccaaatctacctacagacaaagcaggctggttggctgaccaagatatattgaactgcttgaatttgaaggcctggggacatctgaccagggcaggccttgcctcctgccccat

SEQ ID NO: 401135 - DNA, 201 bp, Homo sapiens
tagagagaaggacctagacatatagatttgaacttagtgagtggcctctgggggccgggatgctgcatgtttgttcgtttgttttttgagacagagtctcrctctgtcgcccaggctggagtgcagtggtgccatcttggttcactgcaacctctgcctactgggttcaagcaattctcctttctcagcctcccgaatagc

SEQ ID NO: 401136 - DNA, 201 bp, Homo sapiens
aatatgtaaattgagcaaatataatcttaaaatgtaatcgagcaaatgtaatcttaaatcggggtccttaaactggcagcccacaggccaaatctacctacagacaaagcaggctggttggctgaccaagatatattgaactgcttgaatttgaaggcctggggacatctgaccagggcaggccttgcctcctgccccatg

SEQ ID NO: 401137 - DNA, 201 bp, Homo sapiens
ccggctgttttgtattttagtagagacggggtttcaccatgttggtcaggttggtctcgaactcctgacctcaggtgatccccctacctcggcctcccaargtgctgggattacaggtttaagtcactactcccaacagatgctgcatgttaaaggactcatgctcctcttgccttgagggcagaacaaacacaaatggag

SEQ ID NO: 401138 - DNA, 201 bp, Homo sapiens
atatgtaaattgagcaaatataatcttaaaatgtaatcgagcaaatgtaatcttaaatcggggtccttaaactggcagcccacaggccaaatctacctacagacaaagcaggctggttggctgaccaagatatattgaactgcttgaatttgaaggcctggggacatctgaccagggcaggccttgcctcctgccccatgg

SEQ ID NO: 401139 - DNA, 201 bp, Homo sapiens
tttctttttgagacagggtcttgctctgccacccagagtggagtggagtgcagtggcgtgatcatgactcactgtagcctccacctcccgggctcaagtgwtcctcccacctcagccttccaagtagctgcaccaccacaccctgctaatttttaaaatgtttttgtagagatggggtctcaccatgttgcccaggctggt

SEQ ID NO: 401140 - DNA, 201 bp, Homo sapiens
tatgtaaattgagcaaatataatcttaaaatgtaatcgagcaaatgtaatcttaaatcggggtccttaaactggcagcccacaggccaaatctacctacagacaaagcaggctggttggctgaccaagatatattgaactgcttgaatttgaaggcctggggacatctgaccagggcaggccttgcctcctgccccatggt

SEQ ID NO: 401141 - DNA, 201 bp, Homo sapiens
gaagtgagttcttcataactgtggaacacagaagtcttccctcacagtgtggcccttgcccactgctgctggaggagagcgctaaggccctggaacactcrtccttacacagccagagtctagtgaaggccacagagccacagcccactgcctttatgcactgatccactccattttctcatttttagattgttttaacct

SEQ ID NO: 401142 - DNA, 201 bp, Homo sapiens
ctgtgtgggacagtaccagggttctgtcacagagtgatcgaggtcccttagcatcacaatgcccggatgtgcactacctcttcatcattgaaacgtgcgaytggggggagacatgacctactcaacatctcccgtgactatggttctaattatctaagtagaataagcaggcccagactcagcagcaggggcgttcccgct

SEQ ID NO: 401143 - DNA, 201 bp, Homo sapiens; identical to SEQ ID NO: 88877

SEQ ID NO: 401144 - DNA, 201 bp, Homo sapiens
aggtcatggggccaggtgcactgggcagccgtcacccacaggcttaccctatgaactgtgggatcatttaaataatgacattagctcttattcccccaccrcactctcttcaacacagtacagggaatgaaaccttataacaacatcctcaaagggtttccttcagcccatgaccacagacttgctcctggctctagagac

SEQ ID NO: 401145 - DNA, 201 bp, Homo sapiens
acccagagggggcaaggaggactccgggaggagggcacacatggacccacccaggaggcgctgctgcgagagacggtgggaatctgaggcccatttgcccrcaggcctgctccctgcagtcctgctggaaagggcccttccccagggagcagcctcctgacttcctaacacgcactctcggctccaggagcacttgctggg

SEQ ID NO: 401146 - DNA, 201 bp, Homo sapiens
tcagaacttgcctgaggctaaggaattctttcctgcatttataaagtgctttctctcaaaatgggccctggtttttctccaagtgccctcaaatggacatkgtgtagtcagttcaagtacagtgtaaaccctggtttaaccacacgaggtttaccaagcatttcagaccaggagaatagtagaagcctcaacaggccatat

SEQ ID NO: 401147 - DNA, 201 bp, Homo sapiens
aggtttctaaatttcacagagatcactcaggtagagtgtcatgcactctttctctattatgccagagaaggctatccgagttccctgtattggaaatggawggattaagagagatctaaacaatggaggaagaaggtgggaattccaggatgggctctaaagcccaggtggaagggtgacgcttccgtaggaaaagggagg

SEQ ID NO: 401148 - DNA, 201 bp, Homo sapiens
ggcggtaacccctgggccccaccagatcacttcaccatctgtcaggcccatctgcttatggtcctcatcagggaccattcctgccttttctgagagcactwgtgcccctgccacctgcatagctcctggctgtctatgccccagcactgaccttcaccttctcctctcgagacaggcagcagagcatggtaagtggctaag

SEQ ID NO: 401149 - DNA, 201 bp, Homo sapiens; identical to SEQ ID NO: 88878

SEQ ID NO: 401150 - DNA, 201 bp, Homo sapiens
cagagagacagtgctggaaattcagaagacccagctggtatattcctggctgtcaagctcaacaggaggccagcttgtgaaacttaaaacccaagaggagsctttggggtcccctgatggggaaactgaggcccaggaaggcgtagagccttaccatactcccaacccccaccccggggaaaaaaagacttcaactctcag

SEQ ID NO: 401151 - DNA, 201 bp, Homo sapiens
agctggcttacataaaacagtcatgtccctgagaaggctgtgtgggccccagcaggcaggtgggttgacctgggagcagcgcctgcaaggctggcacttgcacaccacaccatcccgttacacagagccttcctgcggttcctgagtgtggtggggatcctcccgccacagctggcagccccatgtctcctctggctgcac

SEQ ID NO: 401152 - DNA, 201 bp, Homo sapiens
gctggcttacataaaacagtcatgtccctgagaaggctgtgtgggccccagcaggcaggtgggttgacctgggagcagcgcctgcaaggctggcacttgcacaccacaccatcccgttacacagagccttcctgcggttcctgagtgtggtggggatcctcccgccacagctggcagccccatgtctcctctggctgcaca

SEQ ID NO: 401153 - DNA, 201 bp, Homo sapiens
ctggcttacataaaacagtcatgtccctgagaaggctgtgtgggccccagcaggcaggtgggttgacctgggagcagcgcctgcaaggctggcacttgcacaccacaccatcccgttacacagagccttcctgcggttcctgagtgtggtggggatcctcccgccacagctggcagccccatgtctcctctggctgcacac

SEQ ID NO: 401154 - DNA, 201 bp, Homo sapiens
tggcttacataaaacagtcatgtccctgagaaggctgtgtgggccccagcaggcaggtgggttgacctgggagcagcgcctgcaaggctggcacttgcacaccacaccatcccgttacacagagccttcctgcggttcctgagtgtggtggggatcctcccgccacagctggcagccccatgtctcctctggctgcacaca

SEQ ID NO: 401155 - DNA, 201 bp, Homo sapiens
ggcttacataaaacagtcatgtccctgagaaggctgtgtgggccccagcaggcaggtgggttgacctgggagcagcgcctgcaaggctggcacttgcacaccacaccatcccgttacacagagccttcctgcggttcctgagtgtggtggggatcctcccgccacagctggcagccccatgtctcctctggctgcacacag

SEQ ID NO: 401156 - DNA, 201 bp, Homo sapiens
cacttgaacccaggaggcagaggttgcagtgagccgagattgcgccactgcactccagcctgggtgacagagcaagactctcaaaaaaaaaaaaaaaaagrtagggaaactgtgcccaatgcaccagaaggtggttcctcggtgcctgtgagtgcccttgccctctgccaagggtactgagctacgtgccctgtgcccttg

SEQ ID NO: 401157 - DNA, 201 bp, Homo sapiens
cctcgcctgccgcagctctgcgtctccctctgaacgttctgctgagctttaaaaatagcaacgctgaggggaaaatgtgttgggaaaggcatctaacatcrgggtgtcttgaggcacatctttagctaagacatttcccatggaaccctgcagctataaaagcctcaaactaaaaagaaatgtttgcctaagaagctgagt

SEQ ID NO: 401158 - DNA, 201 bp, Homo sapiens
gaaaatgtgttgggaaaggcatctaacatcggggtgtcttgaggcacatctttagctaagacatttcccatggaaccctgcagctataaaagcctcaaacyaaaaagaaatgtttgcctaagaagctgagtgagcaggactatgggggatgggccactggccgggaatcgagggtgcaggggcctgggactcgagagtgca

SEQ ID NO: 401159 - DNA, 201 bp, Homo sapiens
cattggttatatgtctgtttgtgtaccagtgccatgctgttttggttactgtagtcttggaatgtagtttgaagttaggtagcatgattcctccagctttrttctttttgcctaggattgtctggcccatcgtttgctttgctcatttcctaattgggttgtttgttatttgttgttaagttgcaggagttctgtatatgt

SEQ ID NO: 401160 - DNA, 201 bp, Homo sapiens
gcctgaatccccctcactcttgttaccagaaaggggtcctgatccagaccccaagagagggttcctggatcttaagcaagaaggaatttagagggagtccrtagagtaacatgaaagcgagtttattaggaaagtagaggaatgaaagaatggctaccccatagacagagcagcctgagggctggtgggtgcccattttta

SEQ ID NO: 401161 - DNA, 201 bp, Homo sapiens
gctgcagagcggttgagtctcatgcagctctcccagcatcccttcggagttagtttaattatccctgtcttacaggtgaagaaactgagatcatagacttkctcgaggattcagaatcaaagttcaaatccaaatgtgcctgcttcgcgtctccaaatctggtttctccatttcatcgcctgtcccttccggggttggggt

SEQ ID NO: 401162 - DNA, 201 bp, Homo sapiens
ccacacagcctcctcatcgagctggtgctatttctacttccacccgagagaaatggacgcacactttctctgtgtggctcctgtgggcccttccgcactgycctgcttcgtgctcagttgatctgtgtgattctgcacctgccgtgtattttcagtaccccagagaaatggccagagctcatcccaggcaactcttgccag

SEQ ID NO: 401163 - DNA, 201 bp, Homo sapiens
tcagactggcatcttcaaatccatcttggagatgatgtaccctccggagcctttctttctggcacacctgtcccctggctgctggggcagcctgcacactyaccgcacacctgacatcctatgaatccacatcgctgcaccctgcctaggtaataaggaccttgcatggtggttgttgtttttctatctccaaatactgag

SEQ ID NO: 401164 - DNA, 201 bp, Homo sapiens
acgtgtttctgttcgtttacccactgttgaacttgtttttaaaaatttacaaagtggttgctgtggcaggtacaatgtgaaccctgagctattcacacagraattgggcacattgttcactcagcttcactgaagtgacaagaacacgtggctcttccgagggccgcagcaagtgtgccatctgaatgctgaatcgcagat

SEQ ID NO: 401165 - DNA, 201 bp, Homo sapiens
gtcaggctctgtgctcactgggggtagccgtggggagcagcattttccctgctggctggggccaggcattggtacctgcagcctgggccagtccagccccrgggaaagcttgcactgctttgggggcgttctactcccctaggccctgcctggctgaacagaacacttttcccgtgctgtgttcttgtatgaaaacagacg

SEQ ID NO: 401166 - DNA, 201 bp, Homo sapiens
gtgtgtgtctggccccaggcccacacctgcattttatgagtctctatacgtgcttcacctagacactggccagcatacagcaagtgcttagcaaaggtgcrctgggggctggctgcatgcacacttggaggatggtagaaagcatctccaggaacccccaaagcctcaaagaagcagcacagtaccactggtccacacccc

SEQ ID NO: 401167 - DNA, 201 bp, Homo sapiens
aatgggctcatgttctgggcttgggcctggtttgggaggaaggggcctggctatctccttcctgggagccacaagccacattcctaggacttttggtggaytgagatcttaagctgtcaaaaaatcaaggccattgtgcttgtgccagaactgccacttgaggggagggtttggcccctctgtgcctcagtctccccatgt

SEQ ID NO: 401168 - DNA, 201 bp, Homo sapiens
cctcagctccatcctcaccatcccaggcgttctcacaggctcctcttccccagtctccctggccggtgctgttggcttctcaatcttccatctcttccatytccaccttccttgtttctgtctgggcccccatctcccaagctgctgtcactcattctattcaaactctgttctttgcctttacttcagtaaagtcaaaat

SEQ ID NO: 401169 - DNA, 201 bp, Homo sapiens
cacttgaggggagggtttggcccctctgtgcctcagtctccccatgtggtacagccctccccaacctcctggtcccagtttccctctgcccctcacctccrgtccaggctgtggttcacatcaggggcctgctctttctctgacacatctggtggctgggccccaggcccagaataggccattgtgtaaacagggcctacg

SEQ ID NO: 401170 - DNA, 201 bp, Homo sapiens
tatgtaacaaaccaccccaaaacttaccggcttcagacaacagccatttatctatctcatgatgcttcaagccagtgcatgcgtctgggctcagctgggckgttctctcatctcagctgggcccctcacacatgtgtggtcagctgcaggtcgcatggcagctgtgtctgggaatcatctggctgttggctggggtgacag

SEQ ID NO: 401171 - DNA, 201 bp, Homo sapiens
cctttgctaggaacatgtgtccccagatgtctgaatggcttgctctgtcacctccttctggtcattactaaaatatcaccttctcagctaggcctcctctwaaacagtaaaccccctcgcataacacacatacacacgcaccacatacccgctccctccagactgccagtggtcagactcgctttagattttctgtgttta

SEQ ID NO: 401172 - DNA, 201 bp, Homo sapiens
actgaatgttttcaagggaaaataaaaaggtctgttccatgttaaacctgggagcttttagcgtgaaggaactgagccgaaagatggtttaacgcttgcaytctaagagagccaggattctaactgaaggtgcagaccagctgccccatctctttgcagagctgaacaggagaaaatccttgtaagtgggagagatgcaga

SEQ ID NO: 401173 - DNA, 201 bp, Homo sapiens
ttaaactcagaagcagagtccccgagcgcctgctgtgcccaggacacttggggtcagcggggcaaagcagcaggcctgctgcaggaagaaggtggttgtargacatcgctagcaacaggggcgagggtgtggcccccaccccacaggtcccatgggagccctggagacagcatgggatggggtggtggcccagcccagggc

SEQ ID NO: 401174 - DNA, 201 bp, Homo sapiens
cattaataagcattggttgaagttcctaattgggtgtttgttctgggtgaggtgtgaagcaaggagaaatgcatggacacagtaactgttgtcctaatgaraacatgacccgtcttccccagagaaagcaagcagcccctctctaagggcatagctttttatagcatgtattatcctgcgtgggaactattcctttaggcc

SEQ ID NO: 401175 - DNA, 201 bp, Homo sapiens
cacagaagcgaggtcagtcataccagcatctggtccttttccagaatcttgggacagctgtggagctcttcattaatggactgctctaaaagtcacaccaygtgccttccacagaccatcagtgatttcccagaagggcagttccaaatattgatctaaatgtcgcctcagaggagccctttggcataagaaccttttcaa

SEQ ID NO: 401176 - DNA, 201 bp, Homo sapiens
tttttaggtcatgtatatttcactgcaaaagaaatataagtcacagaaaatatggctgaattcctttatacccgtggagtggggaaggcctttatcaccargaatcaaaattcagaagccataaagtgaaaagattgataacttgactattcaaaaataagaatctcaaaagaaaccaaaaataagaatcttctgcttggc

SEQ ID NO: 401177 - DNA, 201 bp, Homo sapiens
gccatggcatctgtaaactgtcatggcgctgttgagactgtagcagtgaggacaaccagaggtcaccgttgttgccatcttggttttggtgggttttagcyggcttctttactgcaaccggttttatcagcaaggtctttatggcctgtatcttgtgccaagctcctatctcaccctgtgacttagaatacctcaaccgtc

SEQ ID NO: 401178 - DNA, 201 bp, Homo sapiens
acgattctctcacctcaacttcctgactagctgggactacaggtgtgcaccaccatgctaggctaatttttgtattttttgtagagatggggttttgccargttgcccaggctggtctcaaactcctgggcccaagagatctgcccaccttggcctcccaaagtgctgggattacaggcatgagccactgcgcctagccag

SEQ ID NO: 401179 - DNA, 201 bp, Homo sapiens; identical to SEQ ID NO: 88872

SEQ ID NO: 401180 - DNA, 201 bp, Homo sapiens
caccctccttccacccaccgctcctcccagctctgctcagacagccctgggctggaaaagtcactgaacctcctgagacccagtcatggtgtccgtcagtscactcggtggcctcatagacatgaggtctccagtggacattggctgccatttgttgtggttacttccagggttagcctctgcccagcccttctgttccta

SEQ ID NO: 401181 - DNA, 201 bp, Homo sapiens
cttccagggttagcctctgcccagcccttctgttcctattgtatcccacacttagaaatttgtgaagtcttcagaagaacatttcccagtggcctccctgwttgcacatctgcaggtgctggtgagtgtgaaccacctgtccctgcctgacacggaaccagatccttctcaggactcacctggggtgagcagctctaggca

SEQ ID NO: 401182 - DNA, 201 bp, Homo sapiens
cagccaatcccagaaatatcaggtgggcaggtgtcatttacacaagtacacatctgattgagtggaggtggctgggcattccatggagcagtgaagagggygtgaaaattcctctggcttctttaggaaaaaggcaggaaaaggaaaaggacagatggcaaaggtgatttgaaaaatggggctaaatgaaagcaccataaa

SEQ ID NO: 401183 - DNA, 201 bp, Homo sapiens
taagagaccacttgtttttccacatattgacttggtgctggattctcttgacaggcaattccaggcatgatggcaatgccttgtgccatttctttggttgytaaatggaaccccgaagtccttttctgctgggtggcccctggctgcgatgagaggctggagagttgcatgatccagctcaacgacctgtctgtctgcatt

SEQ ID NO: 401184 - DNA, 201 bp, Homo sapiens
gagaaatggccagagctcatcccaggcaactcttgccagtgatgcaaaattacaacccatgagcgatcatggggagggtatagagcgggcaaaattcagaygtgacttcccaccttgggcgcagcggctgcctggccagctcccccaaggtggagcagagccaggctgaatagaggctgagtcagaagggagagtccttgg

SEQ ID NO: 401185 - DNA, 201 bp, Homo sapiens
tgtaggggtggcacgcagttcttgtctaacacattgcctctccggccccttctacctgtgactttgagcctccctttgttccagtactctctgcttggactttttttttttttttttttttttttttagcattagtggaatgtgtcggctgatggccaaacatagttttgtagtggcagcaaaaagggacagacctatggc

SEQ ID NO: 401186 - DNA, 201 bp, Homo sapiens
aagcaaaaaattgaagtcactctcaatgctccacaataagtagttgagtcttgatgtatcccctgatgggatattatacagtcagtgtaagtcatgagtayaaatgatgcaataatgtgcaaaaaaatcacagattatgtatatgaagttacaagtcaactctaagcccccagcatctaaccaagacctgacacaaaacag

SEQ ID NO: 401187 - DNA, 201 bp, Homo sapiens
ccataaggtcaccagcatggccggtttgcagtataatcttccagagctttctctctgctttgatatcacgtatgagccaaaggaaacagtagtattttgtgggtttttaaaagcatcagtggtgagctacgtaggcgtcattcagcaatttaagctttttctatccacagtggctcttggaggtcttcccaggccagttca

SEQ ID NO: 401188 - DNA, 201 bp, Homo sapiens
ctgctttctttctctttcttctgtttcttctctttctttccctttctttttttttttgagatagggtctcacttttgtccaggctggagagcagtggtgcragcacagctcactgcggccccaacctcatgggctccagtgatcccaagtagctaggattacaggtgtgcaccaccacgccaccaatgtccagtttctgtt

SEQ ID NO: 401189 - DNA, 201 bp, Homo sapiens
ccccctttcaccccaaaacacacctgaaatcagcttcccttaatggagcccactcccatctgaatgtcactcatctgtttttagccatagaatccagaagscccttggggcagtgggagattgcagggagggaggggaaacaagtggaacatggccactctttcaagcttcaggtgaatttggacccaggatcccggaact

SEQ ID NO: 401190 - DNA, 201 bp, Homo sapiens
acattcactttagattaaagcaggaaaactctacctgacaagccccatgctaggtgcatttcaggctcggggaagagatggtaaggaggcagcctgagagsggtgggaggtgaaagacccagggctggggaagctcagccggttttgcagaaagggtcagttattggtctgtggattttgggaaggttccatctgccaccg

SEQ ID NO: 401191 - DNA, 201 bp, Homo sapiens
accacagactggggcctcgacaacagacatttattgtctcacagttccagaggctggaagtccaagatcagggcatcagcagggttggtttctcctgcagkctctccttgccttgtaaatggctgccatctccctgcatcctcacataatcttccctctatgtctgggttctaatcccctctccttacaggacaccagtca

SEQ ID NO: 401192 - DNA, 201 bp, Homo sapiens
acagttccagaggctggaagtccaagatcagggcatcagcagggttggtttctcctgcaggctctccttgccttgtaaatggctgccatctccctgcatcytcacataatcttccctctatgtctgggttctaatcccctctccttacaggacaccagtcatttggattagggcccaccctaaggacctcatttaacttag

SEQ ID NO: 401193 - DNA, 201 bp, Homo sapiens
tattttatgtttgtcatattatcttcacctaaaactgtaagatgaggggctgagtgtaccactctacctagtgaaaggccaatattcaggcacagctgccrggggcaaggaacagggaaaatgcaggaaaattctgagccttcttcgtcttactcccggctgctttgcagaacactgggcatgctgaggctctctgtgtac

SEQ ID NO: 401194 - DNA, 201 bp, Homo sapiens
tggcccacttggtgccatttcatagtgaggctgctaagagccacttcttggaggggggaatagctccttcatcaataagaagcacatgaaatgtccccaarccctgtgtgcttgtttcagaattgaactcagatgacaaatgttaactagggacagagggtccacatggaaacaattccttaaagcttattccaactcctt

SEQ ID NO: 401195 - DNA, 201 bp, Homo sapiens
ctgaggcttccctggtgtgctcacagctcaggatggaggttgtgggagagcaggagcagcagtcatctggtcgacctcgacaatgtgatccatctgggtgygggacctgccatgactccttccttccccactgcttcctcgtcatgccgcctcaatggcccctgctcaaccgttctgctttccttcatgcacaatcaaccc

SEQ ID NO: 401196 - DNA, 201 bp, Homo sapiens
taaagcatcaaagtacagcaaatttaaaaacatagttaatacatagagacacaaaactaaaaatatcttaaagtctgcaaagcagggttctttaaaataawaataataataataataataataataataaaagccaccaagagagcagccaggcatagtggtgtgcgcctgtagtcccagtacttgggaggttgaggcagg

SEQ ID NO: 401197 - DNA, 201 bp, Homo sapiens
tggtataaaagttttgggttaagaggtgccagcagcagaaacatatgttcaaggatgaaggtaagtctgtcttcacaaatgactgatcctgaagatggacyggcacctccaggcccaggtccctgcagaatcaggtgatgggtccccaaaacacaaatggtggcacaatgagaaatctggtggtgggcttggacgaaatgg

SEQ ID NO: 401198 - DNA, 201 bp, Homo sapiens
agcatcaaagtacagcaaatttaaaaacatagttaatacatagagacacaaaactaaaaatatcttaaagtctgcaaagcagggttctttaaaataataataataataataataataataataataaaagccaccaagagagcagccaggcatagtggtgtgcgcctgtagtcccagtacttgggaggttgaggcagggga

SEQ ID NO: 401199 - DNA, 201 bp, Homo sapiens
tactatcttttaagtaagaaaggaggaaaaataagaatagatgggtggatggataaatagattagacagagaatagatagatgatagactagatggataaatggatggatggatggatggatggatggataaacaggtagttttcttatttttgcaaaaagaaatgcttagagggaaaaaacagaaaataattagaatgat

SEQ ID NO: 401200 - DNA, 201 bp, Homo sapiens
actatcttttaagtaagaaaggaggaaaaataagaatagatgggtggatggataaatagattagacagagaatagatagatgatagactagatggataaatggatggatggatggatggatggatggataaacaggtagttttcttatttttgcaaaaagaaatgcttagagggaaaaaacagaaaataattagaatgatt

SEQ ID NO: 401201 - DNA, 201 bp, Homo sapiens
ctatcttttaagtaagaaaggaggaaaaataagaatagatgggtggatggataaatagattagacagagaatagatagatgatagactagatggataaatggatggatggatggatggatggatggataaacaggtagttttcttatttttgcaaaaagaaatgcttagagggaaaaaacagaaaataattagaatgatta

SEQ ID NO: 401202 - DNA, 201 bp, Homo sapiens
tatcttttaagtaagaaaggaggaaaaataagaatagatgggtggatggataaatagattagacagagaatagatagatgatagactagatggataaatggatggatggatggatggatggatggataaacaggtagttttcttatttttgcaaaaagaaatgcttagagggaaaaaacagaaaataattagaatgattaa

SEQ ID NO: 401203 - DNA, 201 bp, Homo sapiens
gtaggcttattattggtggcaatattggtattgtaattttgacgctatgctataagtaaatatgttaatgctattaggaaccaagattttcagtgtaaaasaaaagagataaaatacaaaatcaaagaaggtaagagaaaactttagaacattgatttcttgctctgtttttttttttttttttttttttttagccttgct

SEQ ID NO: 401204 - DNA, 201 bp, Homo sapiens
tgggatgggggacaagtgagcagaagcgatcagtggtctctgccatgtggccaggatggctttaagcagacgtgacatttgagccgggtctggtccgcccsgtggccctgcaaccctctgctcactgccggcctcctgggcgacactgctttctggctctgcggccccatcctcctcccattgatgttacctcctaactag

SEQ ID NO: 401205 - DNA, 201 bp, Homo sapiens
tgcatttctctgatgatcggtgatgttgagctttttttcatgtgtttcttggccacataaatgtcttcttttgaaaagtgtctattcatatcctttgcccrttattgatggggttgtttttttcttgcaaatttgtttaaattccttgtagattctggatattagacctttgtcaggtggatagattgtaaaaattttctc

SEQ ID NO: 401206 - DNA, 201 bp, Homo sapiens
gctgaggagctccttatgtccacttaagtggagggacagagacacagtacaagagaagggaacagagacagggacacacaaaggcagacacagaatgaccyacttgtgacctcaggtggctccatcagcaatcgagaacagggctgagtcacttgtttgcgcaggttcaggagtctgggagccaccccagggaccagcttc

SEQ ID NO: 401207 - DNA, 201 bp, Homo sapiens
ctgagtcccagaccaaatctccagatgttcccaacagcccatcaaagagcaggtagtgaagagggggctgaggagctccttatgtccacttaagtggaggracagagacacagtacaagagaagggaacagagacagggacacacaaaggcagacacagaatgacccacttgtgacctcaggtggctccatcagcaatcga

SEQ ID NO: 401208 - DNA, 201 bp, Homo sapiens
ggggagagacaagacacgcagatgttccacagggtggaggggtgtttcagatggagcaggtgtgtgtgcaaggcccaggatgtgcaggagtgcaaggatgrgtgagtggttgctgcctggaggcctgggatggtggccttgggtcacttcccctgagtcccagaccaaatctccagatgttcccaacagcccatcaaagag

SEQ ID NO: 401209 - DNA, 201 bp, Homo sapiens
tccttgggcatgcaggcttaaggacgcaggcttgggagacgaacctggctgatgttcagtttgggcatcactctccttaatgtactgtaaactgtcactgyggaagagccgggtgtggatgccacttgtgctcacagcccttgttttccctccccggctaggtccttgctgcgaaagtgctcaaccttgtgctgccaaact

SEQ ID NO: 401210 - DNA, 201 bp, Homo sapiens
tcacaaggtcaggagatcgagaccatcctggctaacatggtgaaacaccgtctctactgaaaaatagaaaaaaattagctgggcatggtggtgggcacctrtagtcccagctactcgggaggctgaggcgtgaacctgggaggtggagcttgcagtgagccgagattgcgccactgcactccagcttgggcaacagagtga

SEQ ID NO: 401211 - DNA, 201 bp, Homo sapiens
ttcttggagttcacagacatttgatccgtgtttgaaaataccccagtccttgtgcagagttcccagaattccaagttttcctttcccaggctcgttcttgragctggcccatgatactagctggactcttgaacattcctgacccatcacggccacccttcgaggcttccgattatgcagacacaccatgcccctgcacag

SEQ ID NO: 401212 - DNA, 201 bp, Homo sapiens
gaccctgcttccattcttttgggtatgtatgtacccagaagtgggattgctgggtcatattctgctggtaattttggaggaaccatgctgccattttccayggtggctgtgccatttcacattctcaccaacagtgctcaagggttccagtgtccctacatcctcgccaacactagttaggttgtgttttttgatagtagc

SEQ ID NO: 401213 - DNA, 201 bp, Homo sapiens
caaagtcggagcccagggctcagcaaagcacctggcacagtggcggctgcagaatgagatctgcttgcctggatgccaaggctggagggcagtaagcttcrgtatcctcagaggcagggggctgccacctttgcactaagaaggaattactgatttctaccatttgagaaaaggagtgttgaccacatggaactccgaata

SEQ ID NO: 401214 - DNA, 201 bp, Homo sapiens
gctgccgcatgcttctatactagacagtcaaagtcggagcccagggctcagcaaagcacctggcacagtggcggctgcagaatgagatctgcttgcctggwtgccaaggctggagggcagtaagcttcggtatcctcagaggcagggggctgccacctttgcactaagaaggaattactgatttctaccatttgagaaaag

SEQ ID NO: 401215 - DNA, 201 bp, Homo sapiens
acccctgatgggagaggcagtgggcgatgcttccatggtgaaatggaatactgggagccaggtgccctggcgcctcatggcaacgcctccttactctaggycggcctcgctggcattcctctttgagctgatgagggaccagaccagtcccaggttagcacctggatccactttcctgcattttgggtaacacatgttgcg

SEQ ID NO: 401216 - DNA, 201 bp, Homo sapiens
agatgtgggctcagttgggcttccgtgggaacatagcctgggcaaagctctctcaaagacacctctcagctgttgtgaataacgctgctgtgcccgtggcrgtgcagatatctactccagaccctgcttccattcttttgggtatgtatgtacccagaagtgggattgctgggtcatattctgctggtaattttggaggaa

SEQ ID NO: 401217 - DNA, 201 bp, Homo sapiens
tgaatgacatttgctcattcattcagtcaaccaacacctatttattgggcctctccttagggccagaagccaggaagagagttagggacctgctgcagagyggttgagtctcatgcagctctcccagcatcccttcggagttagtttaattatccctgtcttacaggtgaagaaactgagatcatagacttgctcgaggat

SEQ ID NO: 401218 - DNA, 201 bp, Homo sapiens
ccattgctctctgtacgggacccactttgacagggaaactcagtgtggggcaggggctcctgcacctgcctgcatccctcataatggctctagcttgaagktgtggtgtctggtaaaaccagtgatctttgtagcggcagtgccaggacaacagtaggtttgagaaagatgggtcagggagggaggggcctccctttaaga

SEQ ID NO: 401219 - DNA, 201 bp, Homo sapiens
caggcaactcttgccagtgatgcaaaattacaacccatgagcgatcatggggagggtatagagcgggcaaaattcagacgtgacttcccaccttgggcgcrgcggctgcctggccagctcccccaaggtggagcagagccaggctgaatagaggctgagtcagaagggagagtccttgggcatgcaggcttaaggacgcag

SEQ ID NO: 401220 - DNA, 201 bp, Homo sapiens
cctggaaggcttcatcactcttggcacattttctagtctggtctgacaaccttcctgaaagtctcacaggatctattttttaatgtaatttaaaagttttmagaataagacatttctatggttcaaaattcaaaagatatgaaggaggatgcagggagagtctctctcccggttggcgtgggcagcaacccatggtaccag

SEQ ID NO: 401221 - DNA, 201 bp, Homo sapiens
cctccctctagctagtaattatggtcattaagctctgtttcctgttttacaattgattgctggtccacgcagcccatggccatggccattgctctctgtaygggacccactttgacagggaaactcagtgtggggcaggggctcctgcacctgcctgcatccctcataatggctctagcttgaaggtgtggtgtctggtaa

SEQ ID NO: 401222 - DNA, 201 bp, Homo sapiens
cttgggcatgcaggcttaaggacgcaggcttgggagacgaacctggctgatgttcagtttgggcatcactctccttaatgtactgtaaactgtcactgcgsaagagccgggtgtggatgccacttgtgctcacagcccttgttttccctccccggctaggtccttgctgcgaaagtgctcaaccttgtgctgccaaacttg

SEQ ID NO: 401223 - DNA, 201 bp, Homo sapiens
catctcagaacttgcctgaggctaaggaattctttcctgcatttataaagtgctttctctcaaaatgggccctggtttttctccaagtgccctcaaatggrcatggtgtagtcagttcaagtacagtgtaaaccctggtttaaccacacgaggtttaccaagcatttcagaccaggagaatagtagaagcctcaacaggcc

SEQ ID NO: 401224 - DNA, 201 bp, Homo sapiens
gtgtggctttgatttctatttccctaatggttagtgatgctgagtgtcttttcatgtgatttttggatatttgtatgttgtcttcttcttcttcttcttctttttttttttttttgagatggagtttctctctcgtcgcccaggctggagtgcagtggcgcgatcttggcttaccacaacctccacctcccagattcaagc

SEQ ID NO: 401225 - DNA, 201 bp, Homo sapiens
ccaaaaagcagattcatacagtgaaagagcacaactttaggacccagaaagaccaaagccaaatatacactgtttgatttaatcctgacatgaatgagatygacattaaccccatttcacagatgaagaaactgaggcttggagaggttaaataacctgttcaagattgcacaactagtcaggggcagagatgggatttta

SEQ ID NO: 401226 - DNA, 201 bp, Homo sapiens
tctgggatgttggaagccactggagggagggctgtgagcaggggagcagtatactgtgatgtgtgtgatttctgaacgacctgaggctgctgtgcgaagayagattgcagggcgaagtcagggagtgtggggaggactttgggccgccaggctgggagggacttgctgtgtgctgtgtggcagtgtcaaccagacctctct

SEQ ID NO: 401227 - DNA, 201 bp, Homo sapiens
aaggggatccctgggggtaactcagaatagtggtagcaaaggaaggacagacccatattgcagatgagcaaactgagccccataacgtgggatgacttgcytggggtcagccagtggtgaggctagcctgggaacgtgggtaggtgtggtctccagctgtgctctgtctgggtatgggagtgggcttgcagttaatgggta

SEQ ID NO: 401228 - DNA, 201 bp, Homo sapiens
tatcctcaggcgacgacccctggggtctgggttgagctggcataattgggagctctgtggttacacaaacctggtttcaccagggtcatggggcaggtgcrgggggtctcacctcaatgggggagccatgcaggggctcctctctcctgagctggatccaaggctctctcaatgctcctgtaggactattcgaggattttg

SEQ ID NO: 401229 - DNA, 201 bp, Homo sapiens
gcttcctagaaccccaggagtctgtggtgggagcagatgctcacagaggagagtgtgtgcccctcccagggcccatctttatcatgtcagaggtgggttcytgcatctgagaggaaaggggaacacagctgggggtggtattcaggcaacttcagcatcaggcatggggtgccacccagagaggccatgtgatgggcattg

SEQ ID NO: 401230 - DNA, 201 bp, Homo sapiens
gggctctaaagcccaggtggaagggtgacgcttccgtaggaaaagggaggagattgcagggaaggaggggcaggaagagccagctgtggacagatctacagggatgaagcctgctgggttgtatttctctgtgattaggggtgcatccaggagggcacatgcctgtctgtgcccagaagggctcccctatcccctctggct

SEQ ID NO: 401231 - DNA, 201 bp, Homo sapiens
catgcttgtgagggtcccccattctactgagtcagagctggccttgagcctgaggggcccgtgctaccacagcaactgggtacagcccagtgttttctgcrtccaacctggcttcgcggggccagagggtgagaagaaaacagacatcactctaggtccccagaagaagccgtttcggtctttggcagttgttgctatcat

SEQ ID NO: 401232 - DNA, 201 bp, Homo sapiens
tcaggccccagctcccagaaccaggttctgtgcacctctccacccatttcgtaaattaaacttcaaaatcactctggctgcaagtggaccagaagaaaggrctcctcaaaggaactttaaaataggtagggtcagggctggcttcgctttgacacagcccttaagaaaggctgggggtgggaatgggcagagtctgtcttg

SEQ ID NO: 401233 - DNA, 201 bp, Homo sapiens
ggaggccctgggatgttgggatgggtgtgctgtgcccgctaccatacgccaactggattgaaggaacagaacagtacaggcggttccatcttcctgggaaracagggagttacagatcgttttaagggaatcccaggactctagaagtctccttcatgggtttctctttctgcacctttcctgtgaatggtgtatccaccc

SEQ ID NO: 401234 - DNA, 201 bp, Homo sapiens
agtgacaaccctgagtctggagttcacaccctgtactcaagtccctccctgtggctcacctactgggggctgagcgctgccctttagtctctccagggtcwgtttcctttgctagaaaatggggaaagaatccctacctcacaagcttgtggggaacaaatgaaacaaactctgggaaaagtgctttgtacgttatgaact

SEQ ID NO: 401235 - DNA, 201 bp, Homo sapiens
tgatcaactcacatgtgacaggggcaagaagtgcttcagggttatggaaggggtatgttgcctttgaacttgcagtagcttctccaatctccctgcccacsctaagctctccatgactcacctcctcttccggaagctgcacctgcatttagggaattacagtggatgccatggatgaagggatttaaagggccttaaagg

SEQ ID NO: 401236 - DNA, 201 bp, Homo sapiens
gaatccatggagacagacatgcttcaaaagcaaaagtagttggtggggggctattacggggttctggcagaagtgtgcatgggacatatgggagagggagrgagggcccagactacctttgggagtgatcatggggaaatatcttcataggacatgacatttgtgacgttggacaagctactaaacctcactttaaactgg

SEQ ID NO: 401237 - DNA, 201 bp, Homo sapiens
aggtgggtcatggagagcctggggttgggcagggagattggagaagaagctactgtaagttcaaaggcagcaacagtctccacccctaccgggatataacrtgcaaagaaggagactggatgtagaaatctagaaggacttggggaccaattgaatgtagaaatagaattaaagtcaaagacgacagccctgttttgagcc

SEQ ID NO: 401238 - DNA, 201 bp, Homo sapiens
ggttgggcagggagattggagaagaagctactgtaagttcaaaggcagcaacagtctccacccctaccgggatataacatgcaaagaaggagactggatgyagaaatctagaaggacttggggaccaattgaatgtagaaatagaattaaagtcaaagacgacagccctgttttgagcctgaataatttggaaggctcaca

SEQ ID NO: 401239 - DNA, 201 bp, Homo sapiens
tggaaaccacccccaagggagcctttgtagtaggtacaccctggctcgttgcttcctagtggtgtgatcttgggcacattcctcaaccactctgtgcctcmgtttcctaatccataaaaagtggggagaagaattccaacgttcaagagtggctggaaagggttaaatgaggtgacacattcaggcgctcaggagagagag

SEQ ID NO: 401240 - DNA, 201 bp, Homo sapiens
gggtgacagtgaacttgctgcaacttgtagagtgtgggagagtggactgtgccaccctgagacccccatagtctctgctattccccaactcattcccttcstccccttgcctcctcctcttccttcttcattcactattaagcatagtgaatgctctacctttgatgaaagcctgttgagtttatttgatgtaaatctcgg

SEQ ID NO: 401241 - DNA, 201 bp, Homo sapiens
cccttcctccccttgcctcctcctcttccttcttcattcactattaagcatagtgaatgctctacctttgatgaaagcctgttgagtttatttgatgtaartctcggatatgagtttgtgtgccctctctgatatgaggtcatttgcctctttgttgaacaaaacaaaaacctccatgtggctcagttgctcgtttgtaaa

SEQ ID NO: 401242 - DNA, 201 bp, Homo sapiens
tgaagaaggaaggatttgaacccaggtcaaaccttctttagaaggttggggagggaaaggagtgaatggatgctaaatctgacgctaactgattttactascttggatctcgttgctcaatgcattatagtatttcgctgttcagcattttaacagcaaatcctcttatttaataaggcctggagcccacagtgtggctcc

SEQ ID NO: 401243 - DNA, 201 bp, Homo sapiens; identical to SEQ ID NO: 88902

SEQ ID NO: 401244 - DNA, 201 bp, Homo sapiens; identical to SEQ ID NO: 88903

SEQ ID NO: 401245 - DNA, 201 bp, Homo sapiens
gtgactacagcatgccagacccctaaatcaggacctggggaggagccatggagttaacatttcagactgagtggtggcgagaaaacgcaaagggaaagacktgaaactctagcaacattataataaaagtagaaactcttatgtgctgaggcgatgatgaagagagtttagagaagcttgtgagaaagccacatcacctcc

SEQ ID NO: 401246 - DNA, 201 bp, Homo sapiens; identical to SEQ ID NO: 88904

SEQ ID NO: 401247 - DNA, 201 bp, Homo sapiens
atctttttatctttagcagtgctgacatggtgtcctttttgttgtgtggaatttagttgaaggcatgaagttggtgagataacaccagttataacctttckcctttcctccgtctctgacttgcctttcttttttagtcatccctcctctgtgttgccatgggaattcaaggcctggccaaactaattgctgatgtggccc

SEQ ID NO: 401248 - DNA, 201 bp, Homo sapiens
tcggctcactgcattctctgcctcctgggttcaagcgattctcctgcctcagcctcccgagtagctgggattacaggtgcacaccaccacacccagctaattttttttttttttgtatttttagtagagacagggtttcaccgtgttggccaggatggcaagatgattttaaattgcaccccctaaaaatcctttttaata

SEQ ID NO: 401249 - DNA, 201 bp, Homo sapiens; identical to SEQ ID NO: 88905

SEQ ID NO: 401250 - DNA, 201 bp, Homo sapiens; identical to SEQ ID NO: 88906

SEQ ID NO: 401251 - DNA, 201 bp, Homo sapiens; identical to SEQ ID NO: 88907

SEQ ID NO: 401252 - DNA, 201 bp, Homo sapiens
actgtggagtgcagagagcccagcccacggcaatctgaggagaaaagcattggctcaatgccttctgggaggcctatctggctcagagcagccaggcagargggcctaagagatgccttggactctggtgctccactgccatgaagaaaatgagacccagaggagttaggtcacttgccccaggtcacacagctcatgagg

SEQ ID NO: 401253 - DNA, 201 bp, Homo sapiens; identical to SEQ ID NO: 88908

SEQ ID NO: 401254 - DNA, 201 bp, Homo sapiens
gagggcacagctaaggaaaagtgggaaaaggcgggccttattccagctttctgttgagatcccagaatgtagggttaggttgggaaccagaacatgaaagrtcgtgatgccatgctgaagtgtttggactgaattagaaggaagaattgaacagtcattgatgctctagaaagaaccctgtgaagaaagagtgggaacaat

SEQ ID NO: 401255 - DNA, 201 bp, Homo sapiens
agcgaaggggtggactgtggagtgcagagagcccagcccacggcaatctgaggagaaaagcattggctcaatgccttctgggaggcctatctggctcagarcagccaggcagaggggcctaagagatgccttggactctggtgctccactgccatgaagaaaatgagacccagaggagttaggtcacttgccccaggtcac

SEQ ID NO: 401256 - DNA, 201 bp, Homo sapiens; identical to SEQ ID NO: 88910

SEQ ID NO: 401257 - DNA, 201 bp, Homo sapiens
gtgtcctttttgttgtgtggaatttagttgaaggcatgaagttggtgagataacaccagttataacctttctcctttcctccgtctctgacttgcctttcytttttagtcatccctcctctgtgttgccatgggaattcaaggcctggccaaactaattgctgatgtggcccccagtgccatccgggagaatgacatcaag

SEQ ID NO: 401258 - DNA, 201 bp, Homo sapiens
cagtgcaggagttggggacaggctggggatccaagctgcttgagggggtcaaccttggaccaaagttgccttaagcctgtggtaaaagggcttcagggaargtaagtgggccacctgctggaagctgccagctgcccggctggcaatggtgtgagtgtcttggccctgtccctgccctggggtccagcaggtcatccctcc

SEQ ID NO: 401259 - DNA, 201 bp, Homo sapiens
ttcctcagtgcaggagttggggacaggctggggatccaagctgcttgagggggtcaaccttggaccaaagttgccttaagcctgtggtaaaagggcttcasggaaggtaagtgggccacctgctggaagctgccagctgcccggctggcaatggtgtgagtgtcttggccctgtccctgccctggggtccagcaggtcatc

SEQ ID NO: 401260 - DNA, 201 bp, Homo sapiens
gggaggggttcctcagtgcaggagttggggacaggctggggatccaagctgcttgagggggtcaaccttggaccaaagttgccttaagcctgtggtaaaarggcttcagggaaggtaagtgggccacctgctggaagctgccagctgcccggctggcaatggtgtgagtgtcttggccctgtccctgccctggggtccagc

SEQ ID NO: 401261 - DNA, 201 bp, Homo sapiens
ggggaggggttcctcagtgcaggagttggggacaggctggggatccaagctgcttgagggggtcaaccttggaccaaagttgccttaagcctgtggtaaamgggcttcagggaaggtaagtgggccacctgctggaagctgccagctgcccggctggcaatggtgtgagtgtcttggccctgtccctgccctggggtccag

SEQ ID NO: 401262 - DNA, 201 bp, Homo sapiens
ggcaatggtgtgagtgtcttggccctgtccctgccctggggtccagcaggtcatccctcccttcttctctctcctttggcgtttgttcctgtagtcactgsgctaatctccccctagcttcaagctgtacatagggcctcccagtgcaaatcctcctgcccataccgtgcacccttagaagcctgcgtgtgcatagagcgc

SEQ ID NO: 401263 - DNA, 201 bp, Homo sapiens
aggcctttctatagtggaggcctttccttgaagcctatgaactgcaggcccccttttgccattgatctcaaagcacttgtcctcaggatagggaagagcasggggatgcaggaatagcagggatagcttgctcccagccccctccccaatttggttccgttgacataggaattttacgattcccaaaccatgcaggggctg

SEQ ID NO: 401264 - DNA, 201 bp, Homo sapiens
gtgggccacctgctggaagctgccagctgcccggctggcaatggtgtgagtgtcttggccctgtccctgccctggggtccagcaggtcatccctcccttcwtctctctcctttggcgtttgttcctgtagtcactgggctaatctccccctagcttcaagctgtacatagggcctcccagtgcaaatcctcctgcccatac

SEQ ID NO: 401265 - DNA, 201 bp, Homo sapiens
aaggtaagtgggccacctgctggaagctgccagctgcccggctggcaatggtgtgagtgtcttggccctgtccctgccctggggtccagcaggtcatcccwcccttcttctctctcctttggcgtttgttcctgtagtcactgggctaatctccccctagcttcaagctgtacatagggcctcccagtgcaaatcctcctg

SEQ ID NO: 401266 - DNA, 201 bp, Homo sapiens
agctaattttttttttttttgtatttttagtagagacagggtttcaccgtgttggccaggatggcaagatgattttaaattgcaccccctaaaaatccttyttaatagttatacatttaatacatattaaaatataactaatagaacacaaatattattgcttatgagttttccagtttagttttttaaaaaaaattctaa

SEQ ID NO: 401267 - DNA, 201 bp, Homo sapiens
gaccgcctgcccggggcaaccccgaaccaagctttagccgccgaggccgcgtgtcccaaaggccaggtgagaccccatgggaagcgcctccgggagcgacsgggtccgcttggcgctgggggccgtggggagccggggtctggagtgcgcgggattcgcagtcaagaggtcccgccacttttccccctgtgagccttgggc

SEQ ID NO: 401268 - DNA, 201 bp, Homo sapiens
ggaccgcctgcccggggcaaccccgaaccaagctttagccgccgaggccgcgtgtcccaaaggccaggtgagaccccatgggaagcgcctccgggagcgamggggtccgcttggcgctgggggccgtggggagccggggtctggagtgcgcgggattcgcagtcaagaggtcccgccacttttccccctgtgagccttggg

SEQ ID NO: 401269 - DNA, 201 bp, Homo sapiens; identical to SEQ ID NO: 88909

SEQ ID NO: 401270 - DNA, 201 bp, Homo sapiens
gtctagttattcagaggagtaagatggtgatgttcacctggcaatcagctgagttgagactttggaataagacactggttttcatgcgctgtttttgtttyaaagttatgaagaaaaaagtcaataaaattctaaaagtaaccaaaatgtcatgttctttgagaacatttgaaaatatcccaagtgaccatggctccaaat

SEQ ID NO: 401271 - DNA, 201 bp, Homo sapiens
tttcctgagctaaaaaaggaaaagtacctctgtggccttcttgccattaagatcaagtaaaaaagggactagcactactgaaaagggtcacgctagaaaarccttagaatcctctctccaccccgtgaaggtttctctagctgtagctcttaagggtacaagacggcaaatattctggggtgaaggaggtataatggggaa

SEQ ID NO: 401272 - DNA, 201 bp, Homo sapiens
tcctgagtgcctctgctacgagttactgttcacctctctgtgctcttaagttcttgaatcactagactcccctttgtattgggcagaggaagaaacatcasgaccctccagaaaacaccaaggcaagggtgaagtatggcaaggaagagcaaggcaaagtccttctgatgactcccgtgttcaaatgtgagattgtcaata

SEQ ID NO: 401273 - DNA, 201 bp, Homo sapiens
atccacaaactgttcctggttcaggcccagctcctgcagaatccggctcaggtggaattcctggattggcagctttttggcttcactggcagtcaggtgtygcattagcacagggctgccgaaggtgaggcagtccatgtcctcggtagccgcagcatagactttgccagccttcaccagggcagcacagctggcctctgc

SEQ ID NO: 401274 - DNA, 201 bp, Homo sapiens; identical to SEQ ID NO: 88912

SEQ ID NO: 401275 - DNA, 201 bp, Homo sapiens; identical to SEQ ID NO: 88913

SEQ ID NO: 401276 - DNA, 201 bp, Homo sapiens; identical to SEQ ID NO: 88914

SEQ ID NO: 401277 - DNA, 201 bp, Homo sapiens; identical to SEQ ID NO: 88915

SEQ ID NO: 401278 - DNA, 201 bp, Homo sapiens; identical to SEQ ID NO: 88916

SEQ ID NO: 401279 - DNA, 201 bp, Homo sapiens; identical to SEQ ID NO: 88917

SEQ ID NO: 401280 - DNA, 201 bp, Homo sapiens
cggactgcagtggcgcaatctcggctcactgcaagctctccgcttcccgggttcacgccattctcctgcctcagcctcccgagtagctgggattacaggcrcccgccaccgcgcccggctaattttttgtatttttagtagagacggggtttcaccttgttagccaggatggtctcgatctcctgacctcatgatccaccc

SEQ ID NO: 401281 - DNA, 201 bp, Homo sapiens
ggggacatgcaagaagggctggggggtgccaatgggaatggaagaaaggagcagtggcactagatactgcaggattggacccctgagaagctgaagatgastgagtctggataaccaggagaatggctgcaccatgcaaacaaagagctgctgagaggaagaggaagagttgttcgtgactgttatgctcgctgcttttct

SEQ ID NO: 401282 - DNA, 201 bp, Homo sapiens
cccatttggcaagccttctgctcatgtttcagtcctttctgtattctagatgtcagtccatcataagtcatgagcttcaggccaggtgtggtgactcatgyctgtaatcctagcactttgggaggccaaggtggccggatcacttgatctcagttcaagaccagcctggccaacgtggtgaaacctctactaaaaatacaa

SEQ ID NO: 401283 - DNA, 201 bp, Homo sapiens
ggagcagcctttttttttttttttttttttgagacggagtctccctgtcgcccaggctggagtgcagtggcgcgatctcggctcactgcaggctccgcccycccccggggttcacgccattctcctgcctcagcctcccgagtagctgggactacaggcgcccgctacctcgcccggctaattttttgtatttttagtaga

SEQ ID NO: 401284 - DNA, 201 bp, Homo sapiens
agctttgagcccaccaagaatgtaagaccctgtgtttgctatgtcgcaactattggttgttgagggggacagagagggggtggaaggagagtctagatggratcacagtcatagtaatcacagtcagtagtagctctggggagtcttgaggtccctgcttctcttgcatagtcatgaggtcacaggcccaagggagcatgg

SEQ ID NO: 401285 - DNA, 201 bp, Homo sapiens
tgaagagcaaagaacaaagcttccacagcgtggaagggtacccgagcaggttgccgctgctggacgttggggggtgtgagggggagcagcctttttttttytttttttttttgagacggagtctccctgtcgcccaggctggagtgcagtggcgcgatctcggctcactgcaggctccgccctcccccggggttcacgcca

SEQ ID NO: 401286 - DNA, 201 bp, Homo sapiens
cggggtttcaccttgttagccaggatggtctcgatctcctgacctcatgatccacccgcctcggcctcccaaagtgctgggattacaggcgtgagccaccrcgcccggcccctcaaccttatcttaaactttgtcaagatgggccaaggtaacctggtagagcccagtccaacccccagaggaacaaaggtacagatagtt

SEQ ID NO: 401287 - DNA, 201 bp, Homo sapiens
agtgcctgccctccaagcagggcagatctgaaggtatgcaggagtgagtgcaggaacatgcattctgctgtcttgacctgtctgctctttagccacatggrcatcttcatttctctcactgcctttttagctgcttctccaagggttctcttcttcctatgcggtttgttctctgccacagcccacctgtgccaggagcca

SEQ ID NO: 401288 - DNA, 201 bp, Homo sapiens
cagatttagaagcaatctacctgaatcagaaaatagagctcaaataagttgtgtggcttggtataatctgggaaaatcagtttcaaaagttacctgccctkgggatagaactttttgtcaacaccagttttcaaaaagtaccctagttatgaggccgttgctgggtaaactttatcccattccagcttcaaccagaggaac

SEQ ID NO: 401289 - DNA, 201 bp, Homo sapiens
cctgctccctctacacccgaaatcgcaggactacaagtccctcaatgccacttgcgccggaggcacttccttttccggttgtgctaggcgcctgctcctgycgacgtgttcttccggtggcggagcggcggattagccttcgcggggcaaaatggtgagagcgttgaggggagttccagacggagatgcgaggacccctcg

SEQ ID NO: 401290 - DNA, 201 bp, Homo sapiens
cccttgtggttgtctggttacctgaactaattggagtgcgatgcagacatagtcatggagtgagacagcagaactttgctgtcttgtttgtgagcccacahcaggggttctagactggctggttgacatggtggccccagcctgtctcttcagcagctcggcttataaaaaataaccaccacctactggggaaaactgctg

SEQ ID NO: 401291 - DNA, 201 bp, Homo sapiens
gccacttgcgccggaggcacttccttttccggttgtgctaggcgcctgctcctgccgacgtgttcttccggtggcggagcggcggattagccttcgcgggrcaaaatggtgagagcgttgaggggagttccagacggagatgcgaggacccctcggggtctgacccacaccgcgcttatctcctcagacgccggagatcca

SEQ ID NO: 401292 - DNA, 201 bp, Homo sapiens
gatttgatcagggcactggcatggactgagccatggtcctggcagattcatttggcggcatgctgaaggatttagattggctaggaagagctagaggcaargagaccttgtaggccttggtacttttgaaggggacatgcaagaagggctggggggtgccaatgggaatggaagaaaggagcagtggcactagatactgca

SEQ ID NO: 401293 - DNA, 201 bp, Homo sapiens; identical to SEQ ID NO: 88924

SEQ ID NO: 401294 - DNA, 201 bp, Homo sapiens
tcccatgcacattgatcatgaccggaacatggactgggtttccacccaggtaagggacagtcactcagaagactggagcataacacaactattgaaaaggrtgcgtaggtgaaaacagcaaaaacaaaaagtcccccaaacagcattttctcattagcctgaggctcttgttctgcaaccatgtgaagggagtgaccaaga

SEQ ID NO: 401295 - DNA, 201 bp, Homo sapiens
agttaattttgaccaaaagacttcatttgtaacccatgatgttcatctgtgtgtgcacaggattcctgagtgcctctgctacgagttactgttcacctctmtgtgctcttaagttcttgaatcactagactcccctttgtattgggcagaggaagaaacatcaggaccctccagaaaacaccaaggcaagggtgaagtatg

SEQ ID NO: 401296 - DNA, 201 bp, Homo sapiens
taattttgaccaaaagacttcatttgtaacccatgatgttcatctgtgtgtgcacaggattcctgagtgcctctgctacgagttactgttcacctctctgkgctcttaagttcttgaatcactagactcccctttgtattgggcagaggaagaaacatcaggaccctccagaaaacaccaaggcaagggtgaagtatggca

SEQ ID NO: 401297 - DNA, 201 bp, Homo sapiens
caaaagacttcatttgtaacccatgatgttcatctgtgtgtgcacaggattcctgagtgcctctgctacgagttactgttcacctctctgtgctcttaagwtcttgaatcactagactcccctttgtattgggcagaggaagaaacatcaggaccctccagaaaacaccaaggcaagggtgaagtatggcaaggaagagca

SEQ ID NO: 401298 - DNA, 201 bp, Homo sapiens
catattgtggaggactagtgtcaggggaagagtatggtgcttggttcagtgatgagagatttgatcagggcactggcatggactgagccatggtcctggcrgattcatttggcggcatgctgaaggatttagattggctaggaagagctagaggcaaagagaccttgtaggccttggtacttttgaaggggacatgcaaga

SEQ ID NO: 401299 - DNA, 201 bp, Homo sapiens; identical to SEQ ID NO: 88928

SEQ ID NO: 401300 - DNA, 201 bp, Homo sapiens
ctggatgaggtccacagcccgcttgggcccaataccccggatactctcacagtagtcactgcctagcaggatgcacagatccacaaactgttcctggttcwggcccagctcctgcagaatccggctcaggtggaattcctggattggcagctttttggcttcactggcagtcaggtgtcgcattagcacagggctgccgaa

SEQ ID NO: 401301 - DNA, 201 bp, Homo sapiens
atcttaaactgtggacacctgggagcaccctcaaaaggcagctgggcctagggagatggcctgtgcttctgtgtcaggagttggttccttcaggtgggctygtggtctcgctgacgtcaagaatgaagccatgaaccttcgcggtgagtgttacagctcttacaggtggcgtggacccaaagagtgagcagcagcaagatt

SEQ ID NO: 401302 - DNA, 201 bp, Homo sapiens
gattcagcaaattttttatttatttatttatttagagacagagtctggctctgtcacccaggctggagtgcagtggtgcaatctcggctcactgcaacctytgcctcctgggttcaagcgattctcctgcctcacccccacaaagtagctgggattacaggcaccccccaccacacccggctaatttttgtattttagtag

SEQ ID NO: 401303 - DNA, 201 bp, Homo sapiens
tggagcttgcagcaagctgagatcaggccactgcactccagcctgggcgacagagcgagactccatctcaaaaaaaaaaaaaatcttaaatttctatataagttgtcaaactattttttccagtttaatcaacttacacttctaccagcagtatgagagcttttatcccactgcacagtcacataggaaaaatggtttatg

SEQ ID NO: 401304 - DNA, 201 bp, Homo sapiens
gtgaaggaggtataatggggaaacacatttattttccccttttaaacttccctgctgccccagtctttgccttcttcttagtggatcccttgggttctggmtccttgcgcttagctgaagagagtgagccggtcaccttgaagaaatcatccaggcggccctgggtgctgccttggcggctcttactcagcctcttgaccc

SEQ ID NO: 401305 - DNA, 201 bp, Homo sapiens
gcaaagagaccttgtaggccttggtacttttgaaggggacatgcaagaagggctggggggtgccaatgggaatggaagaaaggagcagtggcactagataytgcaggattggacccctgagaagctgaagatgagtgagtctggataaccaggagaatggctgcaccatgcaaacaaagagctgctgagaggaagaggaag

SEQ ID NO: 401306 - DNA, 201 bp, Homo sapiens; identical to SEQ ID NO: 88918

SEQ ID NO: 401307 - DNA, 201 bp, Homo sapiens
tctgggaaaatcagtttcaaaagttacctgcccttgggatagaactttttgtcaacaccagttttcaaaaagtaccctagttatgaggccgttgctgggtraactttatcccattccagcttcaaccagaggaacctgtacatcctaaagtttcacataagattacacttgaagaataggtttctccattaaaagacttga

SEQ ID NO: 401308 - DNA, 201 bp, Homo sapiens; identical to SEQ ID NO: 88919

SEQ ID NO: 401309 - DNA, 201 bp, Homo sapiens; identical to SEQ ID NO: 88922

SEQ ID NO: 401310 - DNA, 201 bp, Homo sapiens; identical to SEQ ID NO: 88923

SEQ ID NO: 401311 - DNA, 201 bp, Homo sapiens
gagccctgactgcggccaagggcgcaggcgtgtcccggcgcatgcgcagacgaaacaggcaccaacgctggagcttcccgcagtgtgatttggggccgggratgccgcggcggggacggcgattggtccgtatgtgtggtgccaccggccgccggctccgccccggcccccgccccacacgccgcatcacttacagggccc

SEQ ID NO: 401312 - DNA, 201 bp, Homo sapiens
acacacccaggggaaaggccagcccaggcaggtgtttcttagtggttcccctcagccaatgcttcccattccttgatgcatccttctaactagagcagatrctcggtgatcttaaactgtggacacctgggagcaccctcaaaaggcagctgggcctagggagatggcctgtgcttctgtgtcaggagttggttccttcag

SEQ ID NO: 401313 - DNA, 201 bp, Homo sapiens
ggcttataaaaaataaccaccacctactggggaaaactgctggaaccttcagattgccaaattgttcttggtgtcttttccagaaatatttgccaaactcraattagccttcaggagatttgataaagctcatgtttaagtcaagagaccaaaagattttgatggggagaattaggggctggatatagagggaatacttaa

SEQ ID NO: 401314 - DNA, 201 bp, Homo sapiens; identical to SEQ ID NO: 88925

SEQ ID NO: 401315 - DNA, 201 bp, Homo sapiens
aaaaagaaatcttaccgtctttagttcctatcaccattactgcagatttagaagcaatctacctgaatcagaaaatagagctcaaataagttgtgtggctkggtataatctgggaaaatcagtttcaaaagttacctgcccttgggatagaactttttgtcaacaccagttttcaaaaagtaccctagttatgaggccgtt

SEQ ID NO: 401316 - DNA, 201 bp, Homo sapiens; identical to SEQ ID NO: 88926

SEQ ID NO: 401317 - DNA, 201 bp, Homo sapiens; identical to SEQ ID NO: 88927

SEQ ID NO: 401318 - DNA, 201 bp, Homo sapiens
ttgggcccaataccccggatactctcacagtagtcactgcctagcaggatgcacagatccacaaactgttcctggttcaggcccagctcctgcagaatccrgctcaggtggaattcctggattggcagctttttggcttcactggcagtcaggtgtcgcattagcacagggctgccgaaggtgaggcagtccatgtcctcg

SEQ ID NO: 401319 - DNA, 201 bp, Homo sapiens
ttcaccttgttagccaggatggtctcgatctcctgacctcatgatccacccgcctcggcctcccaaagtgctgggattacaggcgtgagccaccgcgcccrgcccctcaaccttatcttaaactttgtcaagatgggccaaggtaacctggtagagcccagtccaacccccagaggaacaaaggtacagatagttctggaa

SEQ ID NO: 401320 - DNA, 201 bp, Homo sapiens
cgggctccgtccttcccaacagcttctgaccctgcctctctccccaggctcagtcctggtgtctgcagcatgacctgggccatgcctccatcttcaagaaktcctggtggaaccacgtggcccagaagttcgtgatggggcagctaaaggtgagggtggggtgggtggtcagccaggtgctgggtggcgctgggtctgccc

SEQ ID NO: 401321 - DNA, 201 bp, Homo sapiens
ccccgtctcagccctgtgctcctggaggccctgctcccaaaaccgctggaaggactggggcactttctgccacagtagaacacagacagggcttcagatcrcccacgcctgttttcagctgtgggtggccatgcagacacgcgccctggcatgtggggcctgggtgggcaggcaggacctgggccctcccacccatcagag

SEQ ID NO: 401322 - DNA, 201 bp, Homo sapiens
caccacgccaagcccaacatcttccacaaagacccagacgtgacggtggcgcccgtcttcctcctgggggagtcatccgtcgaggtgggtggggagggacstggacaacctctggctgggcctgcagctgagggggagctaatgcactgggtccccactctgcccctgacctagcccctgatctggcctccactctggctg

SEQ ID NO: 401323 - DNA, 201 bp, Homo sapiens
  misc_feature (1)...(201): n = A,T,C or G
tccgtcgaggtgggtggggagggacgtggacaacctctggctgggcctgcagctgagggggagctaatgcactgggtccccactctgcccctgacctagcncctgatctggcctccactctggctgggccaagctctgcccccgtgtctttccttcccacctcccaacctgctggggacgaccagcccgcttgctagaatc

SEQ ID NO: 401324 - DNA, 201 bp, Homo sapiens
gcagcaatggagaactgggtgcaggagggacaggcccacccaggctcatgcctggacttggccttggctgccctccagctcccctacccgacacccgtcamcccggtctagattccattccagagaatgagcattcagctgttctcccaacccaccctccagcccgcatcgctgcctgcccccagggaagggaacccacag

SEQ ID NO: 401325 - DNA, 201 bp, Homo sapiens
tcattcctctttgcccacaccccttgggcctggcgatgggaggagcggctggggctccaggagaatgggggtggggaggaatttcttccttggctgatcgrcccctctgctatggcaggcgcagctggtcgaggacttccgagccctgcaccaggcagccgaggacatgaagctgtttgatgccagtcccaccttctttgc

SEQ ID NO: 401326 - DNA, 201 bp, Homo sapiens
cttccctcaccctgatttctggggcaggagagcactgggggaggtcctgttcggctcacataatctcccagacccaggagcagacagcccaaagctccctrtggcctcccggcccagggcagtgccagcagaggcctcctggtagggccagggaagcagagggtggcagccccttcagcttggttgtgagtgagatgcctg

SEQ ID NO: 401327 - DNA, 201 bp, Homo sapiens
ttctgaatgagccattgcatatatgggcacgggagccacaaaaagaatcatcagcctccagagccttcttcagcccccttttaatttaatttaattaattwatttatttatttatttgagatggagtctcactctgtcgctaggctggagtgagcgatcttggctcactgcaacctctgcctcccaggttcaagcgattct

SEQ ID NO: 401328 - DNA, 201 bp, Homo sapiens
tgggttctgaatgagccattgcatatatgggcacgggagccacaaaaagaatcatcagcctccagagccttcttcagcccccttttaatttaatttaattwattaatttatttatttatttgagatggagtctcactctgtcgctaggctggagtgagcgatcttggctcactgcaacctctgcctcccaggttcaagcga

SEQ ID NO: 401329 - DNA, 201 bp, Homo sapiens
aaaaaaacaaaacaaaaattagctgggtgtggtggcaggtgcccataatcccagctacttgggaggctgagggaggagaatcacttgaactcgcaggggcrgaggttgcagtgagctgagattgtgcctttgcagtccagcctgggcaacagagcaagactctctcaaaaacaaacaaaaaaaccatgtctcaggcagcca

SEQ ID NO: 401330 - DNA, 201 bp, Homo sapiens
atcccagcactttgggaggctgaggtgggcagatcacctgaggtcgggagtttgaggccagcctgaccaacatggagaaaccctgtctcttctaaaaaaaatacaaaattagccaggcgtggtggcgcatgcctgtaatcccagcactttgggaggctgaggcaggagaatcgcttgaacccaggagacggaggttccggt

SEQ ID NO: 401331 - DNA, 201 bp, Homo sapiens
gttttaaaaacatctcaggccgagcgcggtggctcacacctgtaatcccagcactttgggaggctgaggtgggcagatcacctgaggtcgggagtttgagrccagcctgaccaacatggagaaaccctgtctcttctaaaaaaaatacaaaattagccaggcgtggtggcgcatgcctgtaatcccagcactttgggaggc

SEQ ID NO: 401332 - DNA, 201 bp, Homo sapiens
ccaagaagttccttcttgaacagattccgatcaagcacagggccactgagccagaggctgctgccctgcagcttcatgacacttacgagcccctccacctmcctgggactcagttctcatctgtaaaaagaggacactggcccacaagggtcttgaaatggagcattagcacgggggtaccctgcaagctgaaaggattca

SEQ ID NO: 401333 - DNA, 201 bp, Homo sapiens
tgttattgccacttgacagatgagaaaacagaggctcagagaggcaaagtggcttgaaattcagtgattggtctgggatttgaatccacagccatgttctyaagggcatgctatgctgccacctatcctgtttatttccggcactcattgattcttcaatgtttgactcattaaatccatcagtgagcatcttctctgtgt

SEQ ID NO: 401334 - DNA, 201 bp, Homo sapiens
ctgtgtctcctcaagcccatggcccagggctgccatgtagtagtttgtattcggtaaatgctgctggcccctaagtgtgagcgtgccctgcaaactgcagygtatggtgggacagccctgcacggctacccctttcctgggtgaccttatttggttacggtcctatctgaagtaggaaagggacactttaggctgtctctt

SEQ ID NO: 401335 - DNA, 201 bp, Homo sapiens
gacacgtgctgcaacatggatggaccttaaggacattgtgctgagtgaaacaagccagaggcaaaggaacaaacatgtgatttctcccagatgaggtttcyggaggaggcagatctgtatggacagaaggtagcatggtggttgccggggcagggggaggagagaatggagaattagtgtttaatggggacagagtttcag

SEQ ID NO: 401336 - DNA, 201 bp, Homo sapiens
tgtctgtgcgtgccagctgcatctttgcgtaccatgtgtgcaaggctgtgtttggctgagtgttcatgtgggccgtgattgtgggcatgtttctgagtgtmtgagtgatgcctgctggtgtgggctggtgggtgtgtctgcatgtgcgtgtgtgtctggggagtttcaaaggagaaagagggactcaccatcacgctggct

SEQ ID NO: 401337 - DNA, 201 bp, Homo sapiens
ccccagtttactcatctgtaaagtggggagagctggggcagacagtgagctggctgagggcaggactgtgtctcctcaagcccatggcccagggctgccakgtagtagtttgtattcggtaaatgctgctggcccctaagtgtgagcgtgccctgcaaactgcagtgtatggtgggacagccctgcacggctacccctttc

SEQ ID NO: 401338 - DNA, 201 bp, Homo sapiens
tgagccgagatcgcgccattgcactccagcctgggcaacaagagcaaaactccgtctcaaacaaacaaacaaaaaacatctctctgctccttggggccggstgccagctctgctattggaggcactgagcgaccttgaagcaggcatgtcactcctctgtgccccagtttactcatctgtaaagtggggagagctggggca

SEQ ID NO: 401339 - DNA, 201 bp, Homo sapiens
agcgtgcaggtgtttgcatgtctgggtgagtgtggtgtgtgtgcctgcctttctgccagggcgtggcgaggtgaggggcacggcttctccccaaaggcctkgctgagccctggcctcccttcaaggagtcttgtggatgcctgctctggtctttttttaaaaaagtatctattttatttattattatttgtttaaaaatag

SEQ ID NO: 401340 - DNA, 201 bp, Homo sapiens
gtccctcttgccagggccacctgctctctgccgattgccatctccagcatgttggacaatcttcactggactctttgaggaagaaagcccctcttttcccyttccaccccatgaagctgaggagtgagaataagaatcctcctgaaattctaaaaaaagaaaaaaaaaaaaaaagaacgccttgtccgtggctgttcaggc

SEQ ID NO: 401341 - DNA, 201 bp, Homo sapiens
tacccacctgcacaataggggttggggccacgatgccctgtccttgaccctccaaatttctaggttggccacactgggtatcaggaaggtcttcaagaccygaggacatgaatcctgaatgctggctttttgggcagcagcggaggttctgtccagtcccaggactgtcggcgtccctcttgccagggccacctgctctct

SEQ ID NO: 401342 - DNA, 201 bp, Homo sapiens
tagacaggcagggatgtagcctggccccagggtactgtctggctggagtccagtggtggagcagcccgaccagccccttttccttagttacccacctgcayaataggggttggggccacgatgccctgtccttgaccctccaaatttctaggttggccacactgggtatcaggaaggtcttcaagacctgaggacatgaat

SEQ ID NO: 401343 - DNA, 201 bp, Homo sapiens
tggcagggagtggcgaggtcacacacaggcgacaggtgacccccactgcagccccccaccagagcttcccttttcccgtctgcagaatggggccagtggtrctgcctccctggcttgctggtggaatcacataaacacaagcgtggcaggagcccagggtcggtgggtttagggagcgtggcctggcttgtaagtggcccg

SEQ ID NO: 401344 - DNA, 201 bp, Homo sapiens
acttaacatttagcttgggatcctgagacttccatcacacagttttctcattgattcgcagccaataatatctgttttaaaaacatctcaggccgagcgckgtggctcacacctgtaatcccagcactttgggaggctgaggtgggcagatcacctgaggtcgggagtttgaggccagcctgaccaacatggagaaaccct

SEQ ID NO: 401345 - DNA, 201 bp, Homo sapiens
gccatcttggctcactgcaacctccacctcccaggttcaagcgattctcctgcctcagcctcccgagtagctgggattacaggcacgcgccaccacgcccrgcatattgtatttttagtagagacggggtttcaccatgttggccaagctggtctcgaactcctgacctcgtgatccacccacctcggcctcccaaagtgc

SEQ ID NO: 401346 - DNA, 201 bp, Homo sapiens
ccagactggagtgcaatggcgccatcttggctcactgcaacctccacctcccaggttcaagcgattctcctgcctcagcctcccgagtagctgggattacrggcacgcgccaccacgcccggcatattgtatttttagtagagacggggtttcaccatgttggccaagctggtctcgaactcctgacctcgtgatccaccc

SEQ ID NO: 401347 - DNA, 201 bp, Homo sapiens
atacagaaaactttactccccaccaaccgccggagacagaatcttgctctgccacccagactggagtgcaatggcgccatcttggctcactgcaacctccrcctcccaggttcaagcgattctcctgcctcagcctcccgagtagctgggattacaggcacgcgccaccacgcccggcatattgtatttttagtagagacg

SEQ ID NO: 401348 - DNA, 201 bp, Homo sapiens
caggcatgagccaccactcccggcctgctctagtcttttgtaacctagaggacagtatggatacagaaaactttactccccaccaaccgccggagacagartcttgctctgccacccagactggagtgcaatggcgccatcttggctcactgcaacctccacctcccaggttcaagcgattctcctgcctcagcctcccga

SEQ ID NO: 401349 - DNA, 201 bp, Homo sapiens
gtggcgctgggtctgcccaagtgtgtgggcacagtcgggggcacagcctgccctgagagccccctcctcctccacagggcttctccgcccactggtggaasttccgccacttccagcaccacgccaagcccaacatcttccacaaagacccagacgtgacggtggcgcccgtcttcctcctgggggagtcatccgtcgagg

SEQ ID NO: 401350 - DNA, 201 bp, Homo sapiens
ccaggctggagtgcggtggcgcaatctaggcttactgcaatctccgcctcccgggttgaagcaattctcctgccccagcctctcaagtagctgggtctacmggcatgagcccctatgcccagctaattttttgtgtgtgaatttttttttttttttcagtagagacggggttttaccatgttggccaggctggtcttgaac

SEQ ID NO: 401351 - DNA, 201 bp, Homo sapiens
gatggacccctgaatgtgagccagagccctaggagaggctcagcccctgagggagggggatggctggagggctgggagacattgccacatggccaggagcmgctccctcggcattcgcccaaggggatgcagagccaggggtgagcctgccctcccctcccagggggcaggcagttgaaagtgaagctgtagggatgccct

SEQ ID NO: 401352 - DNA, 201 bp, Homo sapiens
catccgtagtccttccgcctgtctctgctggttgccgctgtgctactcagctgtgtctgtctgtccgcctgactgtctgctctccttcaggatgccttccrtgccttccatcaagatctcaattttgtgcgcaagttcctacagcccctgttgattggagagctggctccggaagaacccagccaggatggacccctgaat

SEQ ID NO: 401353 - DNA, 201 bp, Homo sapiens
cagcccctgagggagggggatggctggagggctgggagacattgccacatggccaggagccgctccctcggcattcgcccaaggggatgcagagccagggstgagcctgccctcccctcccagggggcaggcagttgaaagtgaagctgtagggatgccctgagaagtccagggctccagatctggtttagccaggcactc

SEQ ID NO: 401354 - DNA, 201 bp, Homo sapiens; identical to SEQ ID NO: 88946

SEQ ID NO: 401355 - DNA, 201 bp, Homo sapiens
ctcccagcctgatgctctgagcccctgccatttggcacagccctttagagcgcctggcacagggcttcctagcagattgttgacatttctggctccactgmccaatatcaggcccaagatcgggtgggcaggttccacgtcctctctgtccttgggttgcagcgcccagcaggaggcagcaatggagaactgggtgcagga

SEQ ID NO: 401356 - DNA, 201 bp, Homo sapiens
tcatgacacttacgagcccctccacctccctgggactcagttctcatctgtaaaaagaggacactggcccacaagggtcttgaaatggagcattagcacgrgggtaccctgcaagctgaaaggattcactggggccccaggccctggcgggctccgtccttcccaacagcttctgaccctgcctctctccccaggctcagt

SEQ ID NO: 401357 - DNA, 201 bp, Homo sapiens
tctcaggcagccaagagttgggacatcccctcacacgccctctagaaagaaccctctatatagcaagcttttagggtgaaccccatgcaggtggttcttaygaacctggtgaccactggaggttagataagcgtctacaagaggaggttatctatgccatgagcttggcattcagggtcaagcatcggtcatcagacagtt

SEQ ID NO: 401358 - DNA, 201 bp, Homo sapiens
ctggatgatggtgatggttggacaacactgtgcatgcacttaataccactgagctggacacctaaaaatgcttacaatggtaaatttcatgtatattttaytacaatttttaaaaaattggctgggcgtggtggcttatgcctgtaatcccaacactttgggaggccaaggcgggaggattgcttgagctcaggagttcaa

SEQ ID NO: 401359 - DNA, 201 bp, Homo sapiens
  misc_feature (1)...(201): n = A,T,C or G
agcgccgcgtctacgacatcagccgctgggcacagcggcacccagggggcagccgcctcatcggccaccacggcgctgaggacgccacggtaaggaagccntaaggaagccacccaccggcgggtggagcctggagctcggtcgtgggcgtgatgtcccgctccacctgtggggccttagcatcctccctcccctcgctga

SEQ ID NO: 401360 - DNA, 201 bp, Homo sapiens
cgtgccagctgcatctttgcgtaccatgtgtgcaaggctgtgtttggctgagtgttcatgtgggccgtgattgtgggcatgtttctgagtgtctgagtgakgcctgctggtgtgggctggtgggtgtgtctgcatgtgcgtgtgtgtctggggagtttcaaaggagaaagagggactcaccatcacgctggctcagcctta

SEQ ID NO: 401361 - DNA, 201 bp, Homo sapiens; identical to SEQ ID NO: 88947

SEQ ID NO: 401362 - DNA, 201 bp, Homo sapiens
ctcacagaccgggactccgcctccggttcccgagggcgtggcgaggcgctgcgggacgcccaacaggtgcgtgttgtgtccccaggccccgcgctccgggyggagtcaagagcctggaagccggcagcccgggaaaagggggcgggacggtgccccggggcagggctgggtggcggccgctgtcctcccgggaggggcggg

SEQ ID NO: 401363 - DNA, 201 bp, Homo sapiens
ccatgtactagagtttggacttggaccgaagtctggggcagctccctaattactagggtgctgaaggcgtgattgtgccagtcgactgcgagttccttccrcagcttgtatcgttacccactcctgcaggtgctgctgctgcctccactgtactcagacccaggtagcacaggattgtccatcctccagcagctcagtgca

SEQ ID NO: 401364 - DNA, 201 bp, Homo sapiens
agggtcaggatgggagggtccaagccctgctgaatccctggctggacagccgtgtctaagagagttatcttgctgcccttagatgctgaaaccactgcagsagcctggcctaacgtggctgcagtctccattactgggcggaagcggagccgggtagcccctgccgagccccaggaggcccctgattccactgctgcagga

SEQ ID NO: 401365 - DNA, 201 bp, Homo sapiens
gaattcctccccatctctctctgcctgcagcaatccaggagtggctgaaggagggcccaccccctgccagccctgcccagctgctctccaagttgtctgtyctgctcctggagaagatgggaggctcatctggggcggtgggtgcctgggggctgaagggctgacagggaggtggctgggctggctggggtccaggccagc

SEQ ID NO: 401366 - DNA, 201 bp, Homo sapiens
gctggaagaggtggagccgcacggtcacaatacatgcagacacagagcagcaatacgaaacagaacagctcagagcggtcagctcctcagcagaagctgcrtgggccgccactccccctttctgcaatcaccccatgatgtctccaccccacctcacatccagatggggctggatggcagagcagatgaagcctgctctgt

SEQ ID NO: 401367 - DNA, 201 bp, Homo sapiens; identical to SEQ ID NO: 88963

SEQ ID NO: 401368 - DNA, 201 bp, Homo sapiens
gttcacggcggtgggcttctgggccgttaccacgtagttgtacgacatgtcgaggcttggagcggcccgtcgggactcgagcgcgacactagaaagagggrcacaagcgaaaagacaggtggcccccaacagcgcgcagcgaactccactgccgctgcctccgccccagagacacgttgcaggccagagcggccggggcgc

SEQ ID NO: 401369 - DNA, 201 bp, Homo sapiens
gagctaccacacccggcctgttgggaagattaaatgagacatgctcaaaaacacttagaactgggcctggctcttagtcactgctcagcaaatggaaccartcttattgttcttcttgctccctacagacctaggctactctgaagcaggtggcttagccctggccctggctggatgcaggacaggttggcagggaggcag

SEQ ID NO: 401370 - DNA, 201 bp, Homo sapiens
ggaagagcccaggagctgatctgttacaagtcctgaccaaagcagtcaaggtgagtgaggctgggcccagccacctggggagacaggcttctagccagcasactcctgtctccatgtgaccctgagcaagttaataaccttcctggaccgcagtttccttctctgtacaatggagatgagcacctatctcagaaggtggtt

SEQ ID NO: 401371 - DNA, 201 bp, Homo sapiens
  misc_feature (1)...(201): n = A,T,C or G
gaaactcatgctcgaccacatgacaaacaccaccaacgcgtcccatgtgcctgtgcagcccggtgggtagcctctcgcccgcgtctcccaacccctcctanacctctggggaggagacgcccagagggtctcacctggggtgtcatgtctacccgcaggctcctcagttgtgatgatggtcaacaacctgggtggcctgtc

SEQ ID NO: 401372 - DNA, 201 bp, Homo sapiens
accaggtggcggtgggagcccagccctctgagtccacgttgggccccagtctcactctgtcttcaggacaaagccaggggctgcagcccttgttcagcagmctctggcttttcacagcctgtttgaaaaagggagtagcttcatttgattgagtttccactatatcatgggcatatactctgttctagtaaatccctattt

SEQ ID NO: 401373 - DNA, 201 bp, Homo sapiens
actcaaggaagtcctgtgctcctggagttcctaggtggatgcgggagaggggtctacaccacagcagtgtggctgcgcaggatgggggtatctgtactgascacattctgacctccttctcactcctcccttgcagacctccaagaagctggtgaactcggtggctggctgtgctgatgacgctcttgctggcctggtggc

SEQ ID NO: 401374 - DNA, 201 bp, Homo sapiens
aggcccgggctgaaggcatcccggtggagatggtggtgattggggacgacagcgccttcactgtcctgaagaaggcaggccggcgggggctgtgcggcacsgtgcttatacacaaggtgggcttccaccggggacgtggagactggccagccctttccagccttcccttgcctggcagcacccagtaactggacctttcca

SEQ ID NO: 401375 - DNA, 201 bp, Homo sapiens
tctaagagagttatcttgctgcccttagatgctgaaaccactgcagcagcctggcctaacgtggctgcagtctccattactgggcggaagcggagccgggkagcccctgccgagccccaggaggcccctgattccactgctgcaggaggtaccaacccctgcctttggggaagggacaggcttcccaaaggatgcaggagt

SEQ ID NO: 401376 - DNA, 201 bp, Homo sapiens
atacatgcccacctctttgacgggccgaagcccctcggcggtgaccacatagatctctaatctcgtgtttttggcaatcaacaggtttaagtcttcggccraagtaaagtgtcctgaaagaacagaccctctaacttttgaactcaggggaagggcctcccatcccttcaaaataatcctatcacttatgtctaaatacct

SEQ ID NO: 401377 - DNA, 201 bp, Homo sapiens
tgtggcctcagacctttctccttttggccctgtaagtctaaagagcaccctcggttgcagggcccgtgctcagccccctttccttcaccttgtccagctgrattctctgtgggcagcggggcaggagctccaagcctggaagagcccaggagctgatctgttacaagtcctgaccaaagcagtcaaggtgagtgaggctgg

SEQ ID NO: 401378 - DNA, 201 bp, Homo sapiens
cccccctggggcttttacctctttgtggctgcaggtggcaggtgctctggctgaggctggtgtggggctggaggagatcgcaaagcaggtgaacgtggtcrccaaggccatgggtgagtgctggcctgggagctggggaagagagtggggaaggttggacagccctggggcgaggagcaggttcctgttggctgcctagcg

SEQ ID NO: 401379 - DNA, 201 bp, Homo sapiens
  misc_feature (1)...(201): n = A,T,C or G
caccaagcacacagtagggctcaccaaaccatgacccccggagtgtgggaagccccagtgactacaggcgcgagtcccacccagcatgctcactccactcnttccacctccaggtttcatagggaaggggatgctgactggggtcatcgcgggagctgtgttcacctccccggcagtgggcagcatcctggcagccatcag

SEQ ID NO: 401380 - DNA, 201 bp, Homo sapiens
tggggctggaggagatcgcaaagcaggtgaacgtggtcaccaaggccatgggtgagtgctggcctgggagctggggaagagagtggggaaggttggacagycctggggcgaggagcaggttcctgttggctgcctagcggtgctccccaggttattccccaggggtctagggagtgtatccctgggggagctcctggggac

SEQ ID NO: 401381 - DNA, 201 bp, Homo sapiens
gaaactgataggtgagacttggaacctggggtcacccaagccagggctccttgtaactggaaggagccagggagacttggagaccccgtcagggctgaccrtgacaatcagggctctggagcctgtgaagaaggctcttcctgggcttctccagccttctccagctctcactggactagaaggagttggtattaggatcct

SEQ ID NO: 401382 - DNA, 201 bp, Homo sapiens
ttattatcgcgatctagtggaataaccttgaaaaggccatcatagagacgcaggccaatcatccggcactcagggtcaatgatgccaataatgccggtctmtgaggggcggccaatgcggtcctgagaaacaaaatcgggattagggaagaacctcaacatccacagagcaacagaggacgctgggcaccacttgtgcaga

SEQ ID NO: 401383 - DNA, 201 bp, Homo sapiens
tcctggcagccatcagggccgtggcccaggccggcacaggtaagcctggcatgcaggaggggctgcggcagggagggcacagtaagcacactgagcccttycggctgctcccgcagtggggacgctccttatcgtgaagaactacactggggatcggctcaacttcggcctggcccgggagcaggcccgggctgaaggcat

SEQ ID NO: 401384 - DNA, 201 bp, Homo sapiens
atctggggcggtgggtgcctgggggctgaagggctgacagggaggtggctgggctggctggggtccaggccagcaccacatgctcagcgttgtcatcttcyccagctctatggcctgttcctgactgcggctgcacagcccctgaaggccaagaccagcctcccagcctggtctgctgccatggatgccggcctggaagcc

SEQ ID NO: 401385 - DNA, 201 bp, Homo sapiens
cacagaaggaatcgtgaagaatgaccatgtgaccgttcctaaccttggggcttatgtgggccggtctggagctgggatctacagtgtgggaggctggccaygtccctgggctttgctccaggcccactgatttgaaccaaaacaagccttgaacatatctggattcaaatttcagcctgccactgaccagctgcatgacct

SEQ ID NO: 401386 - DNA, 201 bp, Homo sapiens
tctggcaatgtgaggctggggtggacgttggcctgatgttgccaggagtaggatgctgatgctgccagagagtaggtgggctccaaaccccaggcttctcwcttgcttactaagcacagcagtctgaagcttgggacctggcagtgcgtctttggagaaggcaaaaaagccacagcagcaacacttaggagcaagaccctt

SEQ ID NO: 401387 - DNA, 201 bp, Homo sapiens
ctaaatgtgatgggccaggttgagtgtgaaaatcctgaggttcccccttcccaacaagaaattcatcccctgcctgtcttctaccccacatggtacagtgwtaccctcccccctggggcttttacctctttgtggctgcaggtggcaggtgctctggctgaggctggtgtggggctggaggagatcgcaaagcaggtgaac

SEQ ID NO: 401388 - DNA, 201 bp, Homo sapiens
catgctcagcgttgtcatcttccccagctctatggcctgttcctgactgcggctgcacagcccctgaaggccaagaccagcctcccagcctggtctgctgycatggatgccggcctggaagccatgcagaagtgagccagagccctgtgcatcagaccaggggtgggctgggggaggtgtttggtgacatctgcgccctgc

SEQ ID NO: 401389 - DNA, 201 bp, Homo sapiens
gcagactcctgtctccatgtgaccctgagcaagttaataaccttcctggaccgcagtttccttctctgtacaatggagatgagcacctatctcagaaggtsgttatgtggctaaggaaatatgtagagccccgcacactgcctgggatgtgacagggcctcagtgaatggtgacccttttccctgctggaagtagatgaga

SEQ ID NO: 401390 - DNA, 201 bp, Homo sapiens
ccaccacgcctggctaattgttgtgtttttagtggagacggggtctcgccatgttggccaggctggtctctaactccccacctcaagccatccgctcgccytggcctcccaaagtgctgagattacaggcatgagccaccacacccggccgacagggaccttcttaacaccacaaatgtatgaggttgttatcttagaatt

SEQ ID NO: 401391 - DNA, 201 bp, Homo sapiens
cagtgtctcctcagctgggctgcttccactgagacccccgacccatcccctttccagtacacacacctgatgcatgtaagaatggtagaggggcttttctyagcattgaattaataattcagtggctcctcgggagtcgaatgggcatttgggacaccagaaggaaaagaaatcatcatagtctaaggttcagttgtagat

SEQ ID NO: 401392 - DNA, 201 bp, Homo sapiens
ctgaggatcactgtcctttagtgatgaagtgggtgctgttcctggacataaaggcagacctgtgcttgacatggattgatctgtcttctggcagtgaagtrcaggcatgaaccttggtcagccccacactcttctccatccgtagcccatgtactagagtttggacttggaccgaagtctggggcagctccctaattacta

SEQ ID NO: 401393 - DNA, 201 bp, Homo sapiens
agcccgaggccgccaaccgaaggaggccccgcccccggaggcaccgcctcgcctctttccgccagcgcccgcaggacccggatgagagcgcacgcttcggrgtctccgggaagtcgcggcgccttcggatgtggcggatgcggccgtgagccggcgggggaggtgcgccagtgtcctccgagctcgcccgcagactcccca

SEQ ID NO: 401394 - DNA, 201 bp, Homo sapiens
gcttttctgttgttttctttccctgatgcccatttttcccttttggactgccacactctggtattgcagagggccgcggggtgaagattgcccgtgccctsgtgggcaccttcatgtcagcactggagatgcctggcatttctctcaccctcctgctggtggatgagcctctcctgaaactgataggtgagacttggaacc

SEQ ID NO: 401395 - DNA, 201 bp, Homo sapiens
ttggccatgtggagctctgtgcactgcccacctcctagcctttgcctgccattcccaggtcctcctgtccctgccagaatacacccttctttcaacggctrttcaaagatcacctggctgcaaagctttctttcctcgcctgtgcttcctccttaactatctctagttaaagctatctccaccaccaggccacaagctccc

SEQ ID NO: 401396 - DNA, 201 bp, Homo sapiens
cccagctctatggcctgttcctgactgcggctgcacagcccctgaaggccaagaccagcctcccagcctggtctgctgccatggatgccggcctggaagcsatgcagaagtgagccagagccctgtgcatcagaccaggggtgggctgggggaggtgtttggtgacatctgcgccctgccaggccctagcccaaccctcag

SEQ ID NO: 401397 - DNA, 201 bp, Homo sapiens
aaatacccacctaagatgtcgcccaactcaaggaagtcctgtgctcctggagttcctaggtggatgcgggagaggggtctacaccacagcagtgtggctgygcaggatgggggtatctgtactgaccacattctgacctccttctcactcctcccttgcagacctccaagaagctggtgaactcggtggctggctgtgctg

SEQ ID NO: 401398 - DNA, 201 bp, Homo sapiens
aggtcagagaatttctttctttttttttttttgagatggagtctcactctgtcacccaggctggagtgcaatggcacgatctcggctcatggcacctctgyctcccgggttcaacagattctcctgcctcagcctcccaagcagctgggattacaggcgcgtgccaccatgcccagctaattttttatgtttttgatagag

SEQ ID NO: 401399 - DNA, 201 bp, Homo sapiens
tggtggagagctttatagctaatggttgggagttttaattttatttaaagggcatttaggagtcataataggctcttgagaagggaatttatttatgtatktatttatttatttatttattttattgttttgagactgagtcttgctctattgcccaggctggagtgcagtgacgcagtctcggctcattgcaacctctgc

SEQ ID NO: 401400 - DNA, 201 bp, Homo sapiens
gacccttccagtgatgtgtttctggggagcagcatgtttggggtgtcgagaaagaaggatgtggcagtgtaagaaggtgctggagagcctctccagccagaaggatttgtcagctgagggtgggctctgtgctggagtctgtctgcaccaggatcgctttctgctcaggtgataagggaatgcgtggattcagagagggcg

SEQ ID NO: 401401 - DNA, 201 bp, Homo sapiens
cctagccctgccctggatgagccccagggccctcccatccggggtgctggccctgctcccctgactggtcctcctggcccacacatcactgactcagaggyagccctgtcaccggagaagcgaggagccactcgttattaagaacctattataggccagaccatttctgcatcttggacccttgatctcacaccagccttg

SEQ ID NO: 401402 - DNA, 201 bp, Homo sapiens
aggagtaggcacgaccccggcaggctagcccgccagcccgccaggccacagctcgccaagtggctgcaccggggatagggaggcgggccgggcggacatgygggctggccacctggccccacgccctctcgcccaccctgggggctatgcccactggccaagggagacttggctgcttcctccccgaatgatgccgggctc

SEQ ID NO: 401403 - DNA, 201 bp, Homo sapiens
gggtcttgctgctggggtgcagaactggcaccacacctgcagcccagagcagctggctcaagcacctggggagcaggctgtctggacccccgctgcccggmaggaattctcaccgtcccaccctcctgcactgctgtgttcggctccccgtggaccttccacgtcagctcagcactgcagccagagccacacccgtgcctg

SEQ ID NO: 401404 - DNA, 201 bp, Homo sapiens
agttgttgtcatcattgtccactgctgataataacaatggtaataacagtgaagccaagcattgcgtgtagtaagttacaagtccaccacacagctgtcawcttccccataatatgggtggagaaactgaggtacagagagatgatgggacttgcctgaggttacacagctagaaaatggtaaggctgggaactagcccag

SEQ ID NO: 401405 - DNA, 201 bp, Homo sapiens
tggtgacaggacgggcttggggcctgggaggcggggggtggggggtctgctaatggcccgctgcctctgcctttgctactgagctggctgaaagcccagcrataggaaaggccaggccggggttctaggcccttccctggcatgcaagtggcagccatccttcagccaggcctgctctccttgcagccatcctggtgatcg

SEQ ID NO: 401406 - DNA, 201 bp, Homo sapiens
gaagtgaacacgctctcatctaatttttgcacagtcctatgacataaatgttgtcactcccattttacagatgaggaaatggaggctcagagagattaggwaacttgcctaagatgtgtctgattccacagttcagacatgattctgagatcctgatagaatgaggaaatgggccaggcgcggtggctcatgcctgtaatc

SEQ ID NO: 401407 - DNA, 201 bp, Homo sapiens
gcccggaggaggtgcctgaaacatctagccccttagggcaatgacacccctgctaccattgctggacctgaccccaacactggggggagttgctgctactrtctccccatggctgaccctgagtcttttactggccgcccatgcccttctaggcattcgatgccaggtggacaatggtcttatggaggaggtgcctgctgc

SEQ ID NO: 401408 - DNA, 201 bp, Homo sapiens
agcaccaggcccactgagcctctgcagagccaccagccatgcccgggatcgtggtgttccggcggcgctggtctgtgggcagtgatgacctcgtcctaccrgccatcttcctctttctcctgcataccacctggtgagtccccaggcccggggccacaggcctgggtttggagagaaaggtctggaaggacgctttctggc

SEQ ID NO: 401409 - DNA, 201 bp, Homo sapiens
gagcctggcttttgtccccagaagcatttggggttagggaggctccaatgtccctttcttcagagcgggtgagccagagaggtgtccccagcgcccctacmtaatgcctcccactgctgcccgcaggaatggttgtctgcaactgggtagtcatcctcagtgtgtgcatcactgtcctctgcgtcttcgaccccacgggcc

SEQ ID NO: 401410 - DNA, 201 bp, Homo sapiens
gccgggggggcctctgccactgttccctggatggaacagaaagcctaagggggaaacagattccttgggaccagagcccgtttcacccacaagacgcaggstgtgtttgggtggttcaggtccagccctttgtctgtattgggttagaacttcgtttctcaaagttcacggtgctcatgactcactggggcgcttgctaaa

SEQ ID NO: 401411 - DNA, 201 bp, Homo sapiens
aggtatgccgtgcctgccctggaagccccactggtgtgggataggaagggcaggcagcgcctacccccgccccactgtggctgttagaggggaggaccctrtgccccaggggaggagagccagaagaggtgctttgtggcagccccagaccaggaagtagcctctgccctccccgctcctgagacatttcctccagatgaa

SEQ ID NO: 401412 - DNA, 201 bp, Homo sapiens
aggaacttaaggaatttttcttaagggttgtttcagtttcatacctttgaaaagaacttgcttctcctttgacaccttcgctgggactggggccagaccgkggagcagataatagttttgccacgtgtagtctcccatctccccatttattcaaggacatttattgagcacctacttgccaagccttgtgcctggagctgg

SEQ ID NO: 401413 - DNA, 201 bp, Homo sapiens; identical to SEQ ID NO: 88989

SEQ ID NO: 401414 - DNA, 201 bp, Homo sapiens
aggagcactcgccgggctgtggggcgagtcgtgaccagatgggcaagtctcaggccttggggagtggtgacctcaggaggaggagagtgggacccaagtgrctccatgaggctttgcttggcctgagaggcctgggccctggctccacatcggccccacgatggggcctgatgtccctccaccacccccagcctcctctgt

SEQ ID NO: 401415 - DNA, 201 bp, Homo sapiens
tccctccccaggattggcctctctcagctggaaggcttccgcagacagctcctggatgtcctgcagcgaagcaccaagcccaaagtgagcccccacctggkcaccctgcctctgtgcagcctcatctgtccctgcccttgacccccaccggtttcttgggacaaagcacaagaggccctgccatggaaggccagggcaggg

SEQ ID NO: 401416 - DNA, 201 bp, Homo sapiens
agcagggcttgcttgtggctgggccccccgattccggaacaccaccaccccgcccccttggccttagcttctgcttcggcttcccttgcagtgaggatgcratggagtattccaaggagttcgtgactgctgtggttctgggcaaagacctcgtccccaggtgagtccttggccccgctccatggtcccttgccaggctgt

SEQ ID NO: 401417 - DNA, 201 bp, Homo sapiens
aaaaaaagaaaataaggttttattggcacatatccattcagtaaggtattgtctccagctgctttgcccctacagcagccgagttgagtagttactacagygactgtaggactcccagagtccaagatatttgctctctggccctttacaggaaaaggtgctgaccccatcctcaaccatgtgcatctcttcaaagcatat

SEQ ID NO: 401418 - DNA, 201 bp, Homo sapiens
gcaggtagctcctgaggtgccaccagctgccctttccaaagcaaagcaggctctggcctcaggagacttcagtctagtagtgagggtagagagatggggtyaggtaaccacatgtttatagtgataaaaagctccatcccaggtacagatgcaatgactagagggagtgagccactcctggaaaatcagaagggcttcccc

SEQ ID NO: 401419 - DNA, 201 bp, Homo sapiens
ttggggactaggtggagctggctacaggggacagccatgtctgctgggctagggctgaaatctcagcccctcactcactgtggctcggtagagaagccagrggcacagatgaggactcatctccattgatgggcccccctaggtccttgtatgcaagtcccctgggctactttcaccggcccagccaccttcctgccccag

SEQ ID NO: 401420 - DNA, 201 bp, Homo sapiens
tcagggcagacggcttttaagcctcatagctgcagaaccgtttgtcagaaggaaacatggagaggctcaaaatacagagcagagagaaggggtgctgctcwacctaggggggaactgagtcctgcccactggccacggtctgtgcaggtagctcctgaggtgccaccagctgccctttccaaagcaaagcaggctctggcc

SEQ ID NO: 401421 - DNA, 201 bp, Homo sapiens
gccacaaggtaacccacgtcatggaccccagggcccctgggcttctttcctgccctgccagtgtgcagaggcgtgtatggttgggggttcctccctgctcrctgggctcactggaagagattggtcagagaggcatgaattagtctggaaggcccgttgcggcccactgctgcgaccccactgccctgcacagcccagagc

SEQ ID NO: 401422 - DNA, 201 bp, Homo sapiens
ctccaccccagcagccaataacctcctcagcatcaacagtggctgctgggcctcagacacactggctttcaaactggtgcctttctcccaagagatcccartctcccaccaacgcagcccctgcccggagccctgggagcctgcagctggctgagtcaagttgaaggctcccaatatttgcagtcaaagaacccaagggcc

SEQ ID NO: 401423 - DNA, 201 bp, Homo sapiens
gaaccacccacttcacaccggttcgacagacaaatcccctgaattcctttaccaagttcagaagtgtctggtcctggcctcttgagatgacagagcacttyaccagggtgagctgctagcatttttgctgctgctgctgctgttaatgaaacgcaatgggcgtagtacttggtttccaagcttttttagtagtggaacctt

SEQ ID NO: 401424 - DNA, 201 bp, Homo sapiens
ctgtaatcccagctacttgggaggctgacgcaggagaatcacttgaacccaggaggcagaggttgcagtgagccgagattgcgccactgcactccagcctrggtgacagagcaagtctccatctcaaaaaaaaagaaaataaggttttattggcacatatccattcagtaaggtattgtctccagctgctttgcccctaca

SEQ ID NO: 401425 - DNA, 201 bp, Homo sapiens
ggaccacttgaggtcaggagttcaagaccagcctggccaacatgacgaaaccccgtctctactaaaaatacaaaaattagctgggcctggtggtgggtgcrtgtaatcccatctaccctagggactgaagcaggagaatctcttgaacccaggaggcagaggttgcagtgagtcaagatcacaccattgcactccagcctg

SEQ ID NO: 401426 - DNA, 201 bp, Homo sapiens
cacgtcatggaccccagggcccctgggcttctttcctgccctgccagtgtgcagaggcgtgtatggttgggggttcctccctgctcgctgggctcactggaagagattggtcagagaggcatgaattagtctggaaggcccgttgcggcccactgctgcgaccccactgccctgcacagcccagagcctgaccatggaaga

SEQ ID NO: 401427 - DNA, 201 bp, Homo sapiens
caccccagtctgttctgaccacagccttgagagggatgttgttagccccattttacaagagaagaaactgaggtcccagaacagttcatctagccagaggrgggggagagggttctccctgagctgtcagggaagacactggggtgggaacccagcctgacagtcaggaagggagggacgtttccccagaagggaagggtg

SEQ ID NO: 401428 - DNA, 201 bp, Homo sapiens
agggagcttctgtggatgttgctggcttctaggagggttaggcatcttcaagatcgtgaaagagaggatctcagcccaggctccctgtggtgacacgctaytaatgctgttgtcactggggagtttgagtggggtatgtagtgaggtagaagggagcaggctggcttgggggcttgggttgtgtgtccagcacctggcagt

SEQ ID NO: 401429 - DNA, 201 bp, Homo sapiens
tcaccacagctgctgcagagcaacagggactccaccgctggaggcaggagagccagccgcaggtgactgaagtaggcacatggttgatgcctccctgcagrtttatctcctgtgagggagcttctgtggatgttgctggcttctaggagggttaggcatcttcaagatcgtgaaagagaggatctcagcccaggctccctg

SEQ ID NO: 401430 - DNA, 201 bp, Homo sapiens
tctgtcaccacagctgctgcagagcaacagggactccaccgctggaggcaggagagccagccgcaggtgactgaagtaggcacatggttgatgcctccctrcaggtttatctcctgtgagggagcttctgtggatgttgctggcttctaggagggttaggcatcttcaagatcgtgaaagagaggatctcagcccaggctc

SEQ ID NO: 401431 - DNA, 201 bp, Homo sapiens
ggcaggagtaaaatgggggcccagggaaggtggctctctggatctgtctgagagtctcctctctgtcaccacagctgctgcagagcaacagggactccacygctggaggcaggagagccagccgcaggtgactgaagtaggcacatggttgatgcctccctgcaggtttatctcctgtgagggagcttctgtggatgttgc

SEQ ID NO: 401432 - DNA, 201 bp, Homo sapiens
tactttggcaaccaggaagtgtggcgtccagtgctagttttacatatagcaaccgtgggggcccttatgtctcacatgtgtgcaatggactcatcctcccsgccctcaattttgatttactggggcctagaggggttgggactttctgtcctggggacactgctcttcattcagcaccaggcagctctaggatgtggctgg

SEQ ID NO: 401433 - DNA, 201 bp, Homo sapiens
actattttggaccaccttccaatttcaaagccctttcacataggaatcccattcgtcatggaaatgggagtcctgggctctcccttcaggacaccaagggycaaaaaaccctgcagagcgaaaaagagcccttacaaacttgccagtttccacatttactttggcaaccaggaagtgtggcgtccagtgctagttttacat

SEQ ID NO: 401434 - DNA, 201 bp, Homo sapiens
gagccttggtaataaatggagccctggtgaagccttctggggagaggcctggagcacaggccctgcaacctcaggcctggctctgccgctgaagagctgartggccttgggcaacttatttagcctctctgggcctccatttcttcatccataatacagggcataagaggttgttaaaaggattacattaaaggaggtaat

SEQ ID NO: 401435 - DNA, 201 bp, Homo sapiens
acattgcccctgcccggtctccccccggctctccagagagcctctctgctcagatcatgcccctcacgagaaccacccacttcacaccggttcgacagacraatcccctgaattcctttaccaagttcagaagtgtctggtcctggcctcttgagatgacagagcactttaccagggtgagctgctagcatttttgctgct

SEQ ID NO: 401436 - DNA, 201 bp, Homo sapiens
ttcagaagcaagaaggtctgaaatcctactaggagaagccctggtgatccagagctgactccaggtgtcctgaggtccatttcacatggatttgctagacyttgcaactggctaatttctccctctgtgacagtctgcagcctagcctccagagcttttctctggcctccccagacaggctgagattgtgctatttgggta

SEQ ID NO: 401437 - DNA, 201 bp, Homo sapiens
cccagctgcccttgcagtgccagccacattgcccctgcccggtctccccccggctctccagagagcctctctgctcagatcatgcccctcacgagaaccayccacttcacaccggttcgacagacaaatcccctgaattcctttaccaagttcagaagtgtctggtcctggcctcttgagatgacagagcactttaccagg

SEQ ID NO: 401438 - DNA, 201 bp, Homo sapiens
ggaatgtcctcaggggcttgatgttttgggtagaaggggagcatctggaaatatggggaaacctcagattttggaaaagtggctgaatcttggaagaactmgaagctgcatgctcgtttgggcttctcggcctttgggaagcaggcggacgccagggcctgggccccctttcccagccatgcagccgggcctgggccagtg

SEQ ID NO: 401439 - DNA, 201 bp, Homo sapiens
gagagccaccaagaggaggcagcgtaacctgcggacctacaacctgcggtcagtcagcgggctgggtgggcagtcccagggtgggctttgctgtctggtgrgcagaggtctccattcttcagaaggctaccccaggcctcccagactgcatgccaacctcgtgtgagccgtgggcattagtcaaagggcttaactgctccc

SEQ ID NO: 401440 - DNA, 201 bp, Homo sapiens
ctctgtgagctacttggagacagggagggggcggcaataccagctgttggcagctctgttctgccccagcccaactgccacccacggtgccccagcccccsctcctgtcctatcgtgtccaaccctaatctgaagctggtgctgtcagccacatgtcacaggcactgctgacgccccggacccctgcagtccacagaccac

SEQ ID NO: 401441 - DNA, 201 bp, Homo sapiens
tccaccagcccaggcgggaggggtggctggtccagcaaggggttccttgcactccctccgcctcgcccgccccagctaagacagctagagcctctgcagamctctcatgtgattctcaccaggactttaggaggtagggataatcgacattttacaaatcgacattttacagttgaggaaactgaggcacgactaataagt

SEQ ID NO: 401442 - DNA, 201 bp, Homo sapiens
cccacaaagcccctcaggtgtctgctaatgcaacagcagccatcagcagatccttggggtgtgcaggacctgtgcagagtcctgtagtgacatcaccccastctgttctgaccacagccttgagagggatgttgttagccccattttacaagagaagaaactgaggtcccagaacagttcatctagccagaggggggggag

SEQ ID NO: 401443 - DNA, 201 bp, Homo sapiens
catcccctccttcaggcacaacctctatcccatccccaggccaatgaccaaagccatctctggccagatgggaaatctcatgggctggaggtggcactcgygggggttcccaagctcattgtccagttccctgtggacactccagagggctgagccagtaccttcttcccccccatccccctgggagctcttggagcccca

SEQ ID NO: 401444 - DNA, 201 bp, Homo sapiens
gtggcactaagctgagcacccacatatccagaccctcttctgtgccaaatcctttctcagtggtcccacatgggcctcatcccatttaaccttcacaaagrccatgtgcggtgggcatccctggccctgaggtcctttgacttgctccaagtcacccagccaaggcgtggcccagcagagactccaggcctaggtccgcct

SEQ ID NO: 401445 - DNA, 201 bp, Homo sapiens
gaggtaaagacctgggttctgggcctaggctgtgtggctgtgggcaagtcacttcagctcatctgtcaaataaggggaagggtagtacctacctcacagarctgttatgaggactaggtgagttcatgtttgtaaagggcatagatgtgcgccgagaccttgtaggcaattcataaatgttaggagaaccgaagcagccca

SEQ ID NO: 401446 - DNA, 201 bp, Homo sapiens
tcactggggcgcttgctaaatgcaggtgcgggtttagtggtccggggtggggcccaggtatagatttcttacctgctcctgctcggctagtgccctggccyggggccacactttgagttgcagggagggagtagaagacccttgaagccccctgtgaatgagggcagccacttgcggagtcctgcctgtgtgagagatgta

SEQ ID NO: 401447 - DNA, 201 bp, Homo sapiens
tctcagtgtctcatacaaaatacctttcgcctgctgtgggccaggaatgtcctcaggggcttgatgttttgggtagaaggggagcatctggaaatatgggsaaacctcagattttggaaaagtggctgaatcttggaagaactagaagctgcatgctcgtttgggcttctcggcctttgggaagcaggcggacgccagggc

SEQ ID NO: 401448 - DNA, 201 bp, Homo sapiens
tgaggagtgttaggaggtgacatgagatgatgctggcttgtgacagactcagcatcgtgcttctttgatgggcacacagatcactggggagcttgccaacrcagattccagtttaggctggctgggcccagatgtgcatttctaacaactcccaataatgctgctgctgcaggccctggagcacacctcaccttgagtctg

SEQ ID NO: 401449 - DNA, 201 bp, Homo sapiens
accttgttactcccactgttgtccaaccgaccttcaccgaccctgtacctcgccggccgtggcaggcggctttcaggctcgcacagcatggctcctctcaycccacacgcccctgccagtgccactccagattgttctctttgctgcctgcctgctacaccatgcagtttagaacacagcctaatggagggctcggggcac

SEQ ID NO: 401450 - DNA, 201 bp, Homo sapiens
cagtcatattcccattttccttgtccatgtttctctaaaagttgctttcctcagctcctggcaattcctcagctgccccataaatcacagtgcctggctgytgtgctttaggggtgccggggagccaggcatctgtggccagaggatgctggaccagagctgacagcagcgggccagaaggctgcagctgaaggcacagct

SEQ ID NO: 401451 - DNA, 201 bp, Homo sapiens
ctgccccagcagtgcccggcctcgcccgcgcagagcatgtgacttggcagtgcctgggcctggcatgcctggcgtgccagggcagcggcagcagcagccgractgtcagtaaggagctggagaggcccccagagccctcctgttggggcactggtcctgggttgtgggggtgacgggatgcatcagtgagacttttgtatg

SEQ ID NO: 401452 - DNA, 201 bp, Homo sapiens
cacatgggcctcatcccatttaaccttcacaaaggccatgtgcggtgggcatccctggccctgaggtcctttgacttgctccaagtcacccagccaaggcrtggcccagcagagactccaggcctaggtccgcctcaccctttgcagactcatgccttgcctgttcttccctgcgctgcttctgtcacctcacagtcaggc

SEQ ID NO: 401453 - DNA, 201 bp, Homo sapiens
agctgagcacccacatatccagaccctcttctgtgccaaatcctttctcagtggtcccacatgggcctcatcccatttaaccttcacaaaggccatgtgcrgtgggcatccctggccctgaggtcctttgacttgctccaagtcacccagccaaggcgtggcccagcagagactccaggcctaggtccgcctcaccctttg

SEQ ID NO: 401454 - DNA, 201 bp, Homo sapiens
ttgtctgacatttcttgagcagctgctaggcaccaggcgtggtgctgggtgccaaggacacagagatgcagagtgtagccctgccctcctggagctcccakcccagtggggagcccggaatggagggggcactgattaggtctgcccttgggggttggcgggccctggcagcttcacagaggaggttgtgtttaggctgag

SEQ ID NO: 401455 - DNA, 201 bp, Homo sapiens
cagtgactctgatgaggctgttggctgtgcaaattcctttgtgggtagccccagggtaaggtggccctggaaaggaatgtggttggtaggcccaaccctayccagcctcctgagcttggcccgctgctgtggtcaggagcatagaagccgggccagggcgagggaaggcctggcctaaactgagatgggccctccaggcaa

SEQ ID NO: 401456 - DNA, 201 bp, Homo sapiens
agctttcaggcccctaacttgggttgcacacacccaggtacaggctggtggcgcacgtggcccccagcccacacgtgctttctctccgtcgtctcccttgycacctctcccctcctgtgctttcagaggccagcctctcggccactgggaagaaggggaaggtactgtagccccgggagcctggggtgggacctgtgggtc

SEQ ID NO: 401457 - DNA, 201 bp, Homo sapiens
ctagaagtgatggaactaagattcaaattcgggctgccctgctctggggccagaaggcaggcctcggtcagctcattggatggccaccccctccaagtcgmtgcctttgagagagtcgcgttcccgggagagtggggtaaagacgtgttagggcatgaggggactgaccaagaagaccaccggggcaggtagaaaggacga

SEQ ID NO: 401458 - DNA, 201 bp, Homo sapiens
ggggccttctgagcccctgccccttcctggaggccttgtgcttgggtccagctttgccctgcctggggtgatgggaggggatagggaggtctgaaggacaraatagtcagctgtaggcccaggtctctaagcttctgggtcagtgacttttttctgtggccccttttgccctcctggctcaggcgaggggaggaaatgctg

SEQ ID NO: 401459 - DNA, 201 bp, Homo sapiens
ctctgctggcctgactctggccttttctccatcctccaggcctccactgtcctcacatccaggccctgctgccgagggtatcctccagtgcttgttccgckctgctctctcctgtggttgcttccctctgctagtccttcagaaacagctccagctcctagttctataggcagcctccccgcctgagcacgtgtcagagga

SEQ ID NO: 401460 - DNA, 201 bp, Homo sapiens
agtagctaggactacaggcatgtgccaccatgcccagataaatttttttttttttaataaagacaggttccccgtatgttgcccaaactattctcaaactyctggcctcaagtaattctcctgcgtcagctgcctgagtagctgggactataagcatgcaccaccacatctggctaaattaaaaaaaattttttttgtaaa

SEQ ID NO: 401461 - DNA, 201 bp, Homo sapiens
aggaaccctcagtatatcttgtttgttctcacattcgagggaagttggcaaagggcagttctgtgtcacagggaagggggtggatgaggaccccgaaaacmtgccctttaccgagtctcacccccgagcctgctgaggtcacacagcggcagtcagtggggggttaggttttcttgttttgtttttagagacagggttttg

SEQ ID NO: 401462 - DNA, 201 bp, Homo sapiens
gtaaggagctggagaggcccccagagccctcctgttggggcactggtcctgggttgtgggggtgacgggatgcatcagtgagacttttgtatggcaggagrcagaggagcacataactgaatctgggagtatttatggacacgtctgcgccttccttttctgcagcagcctgtctgcaggccctcctgcaaggagagcctg

SEQ ID NO: 401463 - DNA, 201 bp, Homo sapiens
catgacctccctgggatggcatagcaggggatggtagcctctggggactggcctgccagggctgagggcacagggcgacattcaggaccctggcatggttyggtcttggcaggcagacttctcagccccctacctgctcacctggccagtgagaaatgaagcggtttctgtgccccagtgccatggacagctccagtgact

SEQ ID NO: 401464 - DNA, 201 bp, Homo sapiens
gcaaggtttgcgtgaagcacatctttgggccatcccagcctccttggcagcgagcaggcagcggcaggcactgtcagtggggtggaggtgttgcaattacsgtgtgtagggggctgggggaggactgagcagacagaaatgtggagtgtgcggcttgtgagctggcctgtgggggcagtggcagcagagctgcgtggggtg

SEQ ID NO: 401465 - DNA, 201 bp, Homo sapiens
gaccctggaaagccagatacccagagtgtggatgacaggctccgggccagagcccaggggctgtggtgaccgttctcccacctccttccccgctgatgttsaagggtgagggaccagaggcccaaagacggcagcctgcggaggcctcgctccaggactccgcccccactgagactcctccctgtccccaccaccaggctt

SEQ ID NO: 401466 - DNA, 201 bp, Homo sapiens; identical to SEQ ID NO: 88996

SEQ ID NO: 401467 - DNA, 201 bp, Homo sapiens
tgcacaggaggggtcaaactcaccctctgtgctctagggctctcttgctgtgctccagctgtcccacagcctgctgtccctgaatcctacatgagccaggkgaggcacacagacccacaaaccctgggccacaaaagcacagattcactctttttttttttttttttttttgagacgaagtctcgctcttttcccccaggc

SEQ ID NO: 401468 - DNA, 201 bp, Homo sapiens
ctggaaggagggcaggggcagggcccttcaggaatgaggtagggtgtgcatccctgcgtgccccggtgagaccctggaaagccagatacccagagtgtggrtgacaggctccgggccagagcccaggggctgtggtgaccgttctcccacctccttccccgctgatgttcaagggtgagggaccagaggcccaaagacggc

SEQ ID NO: 401469 - DNA, 201 bp, Homo sapiens
aggagaccactcctccctgaggcagacagcaaagtgccttccacggaagccaccgggaagcctcgagtggctcctgcccaccagcgtcccctggtgagccrtagagtgagtaatcaagtgtaagaaagcccccgaggttccctggtgggcggggagcacccccttgggtctctctggggcggtctgaggggtctgggctgc

SEQ ID NO: 401470 - DNA, 201 bp, Homo sapiens
aggcactgagcaggcctcgcaggctgtggaggccatgtcggggcggagtgcccaaagcaagcggggccatctggagaggaggaaatgcctgggcatggggygcactcagtggctgagcaggtggaaagacaggagctgggagtgggcgtgcccggccggcagggacagagtcagacaaggtggagggtatgggtgctggtg

SEQ ID NO: 401471 - DNA, 201 bp, Homo sapiens
  misc_feature (1)...(201): n = A,T,C or G
gtactacacctcctgcaacgacctcactgccaagaatgtcaccctcggtacgtctgggtgaggcctgctggagcctcagcagccccgggggcacaggggangagatcagtttagagaggaagaagcttgggcattgccagagggcagtgccttctgtgggggcaccagcaggttggctgggcgagactgcttccctcaccc

SEQ ID NO: 401472 - DNA, 201 bp, Homo sapiens
cgggaactttgaaccaagagacatccaatctggcagttttgattctgattaatggcaatgatctagaaagaagatccctaaactgatactgctacagttgkcccttaaagcctcccctgatctctgcccttcctgagccttgaggaattcaactcctccttgaatcccctgaggtgccccactgggtatatgcgcccactc

SEQ ID NO: 401473 - DNA, 201 bp, Homo sapiens
cctcgaagacagctgtgagcaaggtgggggctgcgccaggagagagaataggagcaggcaagtgggtagacctttcccactgtgctccttcagacggctgrgccctggctcctccctccagggtcggcttcctcccctgacacagctggtgagctgggccgtgcagcaggtggagcaggtgtggcccaggccaaaagcagg

SEQ ID NO: 401474 - DNA, 201 bp, Homo sapiens
gcttcattagccacactgcccctctgagcctcagttcccacctgtgaaatggaagtgacaggatcagcgtgtctgccagcccccacagctgggttgtcacraggcccaaagggaaaaatggatggggcagggttcctgagctgcaggtcactgtgggtttgctggtcactgggaggcctcccaccaacacctgcttctgtt

SEQ ID NO: 401475 - DNA, 201 bp, Homo sapiens
gccaagcattgcgtgtagtaagttacaagtccaccacacagctgtcaacttccccataatatgggtggagaaactgaggtacagagagatgatgggacttrcctgaggttacacagctagaaaatggtaaggctgggaactagcccaggcagtctggccttagagtcctcgcttaactagctattaaattaggctaggctg

SEQ ID NO: 401476 - DNA, 201 bp, Homo sapiens
ccctggctgacgtgtcttcttgttccaggggctaggcgtgtgcctgcccctccgcccctggccccatacctctcatagccgctgaccaggcctggctgacrgccctgtctcgttccctccccaggattggcctctctcagctggaaggcttccgcagacagctcctggatgtcctgcagcgaagcaccaagcccaaagtga

SEQ ID NO: 401477 - DNA, 201 bp, Homo sapiens
atgaacttccgtacatcttgtatgtggactactccacaataatgaggaaagatggcggtaggaaaatgtttaaggagaagtgctcaccttttagttcagtaaaaaaaaaaatggtagatgccgaatggtcccacaattagatggaggaaaaaaaagactagaaggatgttaatagttgatagttttcctagagggatcatg

SEQ ID NO: 401478 - DNA, 201 bp, Homo sapiens
gtctggaccgttcccagctttggtgccctagaccctgtggcaggcagggccctgggccaggtaccaggtgccaggcagtgagcagggcagcaaagctttgygggactttgcctgcctggaggagcctggttctggggaggtggaactgctcccaccagattagtcctgggcttttgtcaggccaggcctggcaggtccagc

SEQ ID NO: 401479 - DNA, 201 bp, Homo sapiens
tacatcttgtatgtggactactccacaataatgaggaaagatggcggtaggaaaatgtttaaggagaagtgctcaccttttagttcagtaaaaaaaaaaayggtagatgccgaatggtcccacaattagatggaggaaaaaaaagactagaaggatgttaatagttgatagttttcctagagggatcatgggtgatttata

SEQ ID NO: 401480 - DNA, 201 bp, Homo sapiens
ggcaggctcagctcagaggcccggaaggccacctggcccttaacagatgaatgggcaagcagcgacagccacagccatcccctggctgcggaaaggctgarggcaggtagggcaggagcactcgccgggctgtggggcgagtcgtgaccagatgggcaagtctcaggccttggggagtggtgacctcaggaggaggagagt

SEQ ID NO: 401481 - DNA, 201 bp, Homo sapiens; identical to SEQ ID NO: 89007

SEQ ID NO: 401482 - DNA, 201 bp, Homo sapiens; identical to SEQ ID NO: 88990

SEQ ID NO: 401483 - DNA, 201 bp, Homo sapiens
gggcgacaacaaggccttcaatgaggtgatcatctcgccagccatgctgcatgagcacctgccctatgtggtcatggaggggctcaacaaggtgaggcagytcccggcagggtaccaccagggaataaggcactgtcaccccatcagaaccccgtaagcaccatcagatcactgcccgattttacagacaagggtgctggg

SEQ ID NO: 401484 - DNA, 201 bp, Homo sapiens; identical to SEQ ID NO: 88992

SEQ ID NO: 401485 - DNA, 201 bp, Homo sapiens
tcatcctccagatgaagacactgagtctcttagaagagaagtcatttccccaggtccttccccttctcacttatagccaggccatggctgaggtgccctcygggcccccggttgggagagggcttcagtctcctggctgcatcctgagaacgtagctttctgtgctctttcctggaggtgcgccctccctcccacaggatg

SEQ ID NO: 401486 - DNA, 201 bp, Homo sapiens
ggcccccggtctccagaggacagtcctgagcatggccccggcagctgtgaagtcctgcaggagtggcccaagcaggaggaagcactttgcttgggcagcaracgtgcctcattgccagggtaggtctgggaggtgtctgtggctgacagatctagggtacctgtgtgggaggaagacttgggaagtgtgtgtgttttctct

SEQ ID NO: 401487 - DNA, 201 bp, Homo sapiens
cgaggccagacagcgacctgctggtgagcccaccctagctggggtggagcctctgaacacaacgcctctgctggggggcgggccaccagtgtcctgcgggrcaccactggggggcccagcctcactgtgctgagtcccgcagatcagatgcccacccccagaccagataagctccagtgcccaacaaggcacattcaaaat

SEQ ID NO: 401488 - DNA, 201 bp, Homo sapiens; identical to SEQ ID NO: 88993

SEQ ID NO: 401489 - DNA, 201 bp, Homo sapiens; identical to SEQ ID NO: 88994

SEQ ID NO: 401490 - DNA, 201 bp, Homo sapiens
tctcattccactgtggcctcatgagtgacctggggcaggctcatgagtgatctggggcagccagtctatcagagcctcattctcacattggtacaatgacrggggttctggtgcagagaaccccagcagcactcctgaagtcctagtgctgccagcagggccttagcccctcagggaccccgcggctcaacccagcatcaa

SEQ ID NO: 401491 - DNA, 201 bp, Homo sapiens
tataagtacacaggtcaccccctacagacatgcacatgtacaagacacacaccaagacaaaggtggagacacatatacaaggacacatgtggacaggcagstgctcatggaaatgcatgaatacacctgtgcacagacccagacacacaagccagctgacatacacagacgtctggtctacacactcatacacatgaacag

SEQ ID NO: 401492 - DNA, 201 bp, Homo sapiens
aatggcgcgaccttggctcactgcaacctccacctcccaggttcaagcgattatcctgcctcagcctcccaagtagctgggattacaggcgcctgccaccrtgcccagctaatttttgtatttttagtagagatgggatttcaccatgttggccaggctggtcttgaactcctgacctcaggtgatctgcccgcctcagcc

SEQ ID NO: 401493 - DNA, 201 bp, Homo sapiens
gccggagtgcaatggcgcgaccttggctcactgcaacctccacctcccaggttcaagcgattatcctgcctcagcctcccaagtagctgggattacaggcrcctgccaccgtgcccagctaatttttgtatttttagtagagatgggatttcaccatgttggccaggctggtcttgaactcctgacctcaggtgatctgcc

SEQ ID NO: 401494 - DNA, 201 bp, Homo sapiens
ataaggagactcccaggggcctgtccctgaggcaggctcagctcagaggcccggaaggccacctggcccttaacagatgaatgggcaagcagcgacagccrcagccatcccctggctgcggaaaggctgaaggcaggtagggcaggagcactcgccgggctgtggggcgagtcgtgaccagatgggcaagtctcaggcctt

SEQ ID NO: 401495 - DNA, 201 bp, Homo sapiens
gggtgctggggctcagagaagtaggtagctgggccagaaagccccactcaaatacttcaacctcacacccctggctctgtccacatcaccacgttgccccrtggtggggaggagataaggagactcccaggggcctgtccctgaggcaggctcagctcagaggcccggaaggccacctggcccttaacagatgaatgggca

SEQ ID NO: 401496 - DNA, 201 bp, Homo sapiens; identical to SEQ ID NO: 89011

SEQ ID NO: 401497 - DNA, 201 bp, Homo sapiens
tgcttccctggtcattcccatgttggtctgaggggtatccatggcctgtctcacccgctccctgcagtgcttcatacctcccccgaggagttgctgggcacttcagctcatgtctggaaagctctcttaagtgcagagtccattaaggaggaagcctacagcctccctgttgtgaatattcagtattcaagtctcctcagc

SEQ ID NO: 401498 - DNA, 201 bp, Homo sapiens
cctcaggtgatccacccgcctcgctcggcctcccaaagtgttgggcttacaggcatgagccaccgcgcctggccaaacaaaggcatcttgtagcactctcttatctgaatagcgctggcgcccctcagagagagcatgtgtgttcccctcactgatctgtgtcctcactgaagcataacaatcatggcgaaataacattta

SEQ ID NO: 401499 - DNA, 201 bp, Homo sapiens
tatcctcagcccaaatcgagctcctggttcttccgcccgagttcccacttcctgcctccaactgtgtctgcagagcctgcagcctttggaggtgggacccyccccaacccaacctggccctgtgctctggctctgtgcccgcagacagagtgggctgagagggaacaaacacagccacaggggcaggctccaccatgctcc

SEQ ID NO: 401500 - DNA, 201 bp, Homo sapiens
agattgttctctttgctgcctgcctgctacaccatgcagtttagaacacagcctaatggagggctcggggcacctgagcagctgcctgctccatttcttcrcccctttaatccctcccttccccaggtgaaccctattcagcaggcttccggcagcaataacaaagctgggcacccagcccaccagctgctcagtgcttta

SEQ ID NO: 401501 - DNA, 201 bp, Homo sapiens
tggcaaggctcccggggcactggctgggaatcctctgctttctcatcagctttactcggagcgcatttcagtgctgggctggggctggggaagatgacacrtgctgccagggcctgaagaaaagggcagagcccttggacttgtgggtgggggcaaggcatgcctgccatcgctcattggaaattgtggccaggctactgt

SEQ ID NO: 401502 - DNA, 201 bp, Homo sapiens; identical to SEQ ID NO: 89005

SEQ ID NO: 401503 - DNA, 201 bp, Homo sapiens
caccatgttggccaggctggtcttgaactcctgacctcaggtgatccacccgcctcgctcggcctcccaaagtgttgggcttacaggcatgagccaccgcrcctggccaaacaaaggcatcttgtagcactctcttatctgaatagcgctggcgcccctcagagagagcatgtgtgttcccctcactgatctgtgtcctca

SEQ ID NO: 401504 - DNA, 201 bp, Homo sapiens
ctacacctggagacggtcctggccagggagcctgcggctctggggtggaggtcgggacggtggccctccgctgtgtaaggtgagacaggatgctgcctcgrattcatcctgaatgggcccctcgtcattgtctctcctggagccatttaattaattgatgattgatgttcctggacttccttgaggttaatctattattga

SEQ ID NO: 401505 - DNA, 201 bp, Homo sapiens
agggagctggggttcagtcccctctcccttctgagtcttataccccctgctctcctctccctctgcaggagcaagtcccagtctgagatgagcctggaggkcttctcggaggggcggctgctgtcgccagtggttgcggcggcggcccgccaggacccggtggagctgctgctgctgtctacccaggagcggctggcggcg

SEQ ID NO: 401506 - DNA, 201 bp, Homo sapiens
cacacctcagttgtcacttggtttcaccaagggaattcctcgaagacagctgtgagcaaggtgggggctgcgccaggagagagaataggagcaggcaagtsggtagacctttcccactgtgctccttcagacggctgggccctggctcctccctccagggtcggcttcctcccctgacacagctggtgagctgggccgtgc

SEQ ID NO: 401507 - DNA, 201 bp, Homo sapiens
tagtcctgggcttttgtcaggccaggcctggcaggtccagctggactcaactccagggtgtgtttggcctcggacttgtggagtgatccagaataagtccyttcccctcactaggcctgtctccccatctactagatgaggggttggctgggcttccagccccttgccagccctgaaattcaacaattccatgtcatctgt

SEQ ID NO: 401508 - DNA, 201 bp, Homo sapiens
tctggggaggtggaactgctcccaccagattagtcctgggcttttgtcaggccaggcctggcaggtccagctggactcaactccagggtgtgtttggcctyggacttgtggagtgatccagaataagtcccttcccctcactaggcctgtctccccatctactagatgaggggttggctgggcttccagccccttgccagc

SEQ ID NO: 401509 - DNA, 201 bp, Homo sapiens
cagctttggtgccctagaccctgtggcaggcagggccctgggccaggtaccaggtgccaggcagtgagcagggcagcaaagctttgtgggactttgcctgyctggaggagcctggttctggggaggtggaactgctcccaccagattagtcctgggcttttgtcaggccaggcctggcaggtccagctggactcaactcca

SEQ ID NO: 401510 - DNA, 201 bp, Homo sapiens
ggcttttaagcctcatagctgcagaaccgtttgtcagaaggaaacatggagaggctcaaaatacagagcagagagaaggggtgctgctctacctagggggkaactgagtcctgcccactggccacggtctgtgcaggtagctcctgaggtgccaccagctgccctttccaaagcaaagcaggctctggcctcaggagactt

SEQ ID NO: 401511 - DNA, 201 bp, Homo sapiens
cggcttttaagcctcatagctgcagaaccgtttgtcagaaggaaacatggagaggctcaaaatacagagcagagagaaggggtgctgctctacctaggggrgaactgagtcctgcccactggccacggtctgtgcaggtagctcctgaggtgccaccagctgccctttccaaagcaaagcaggctctggcctcaggagact

SEQ ID NO: 401512 - DNA, 201 bp, Homo sapiens
acagggcgttgctgtagggtcttaaaaagaaaatgatgtggctcaacttatcttaaaagggccactctgttgctgagctgagagcgtaggggcaagtgcarggaggccagtcgaggccaccatgacagtcccaggcagagctgccagggcaggggtaggggaggtgagggagtgcctggagtccagctctgagtctgaagg

SEQ ID NO: 401513 - DNA, 201 bp, Homo sapiens
taggaaatggtggcacgggatgtgattgggaggaagggagccggaaggttgagggcctgtcatagggaattagaggccctgagcgcacatgctcccggtgrgggcaagtgggatctgttgacactgtgagtcagctgctgagctggaaccaggcccccggtctccagaggacagtcctgagcatggccccggcagctgtga

SEQ ID NO: 401514 - DNA, 201 bp, Homo sapiens
tgggtgctggggatacagctgtggacctctctgtggtgctcactgcccagcgaggaggcggacagcgcatagacaaggcaaatagggcacatggtggagcrgatgggcactttggacccacataaagccaggtgcctgggatggggagtgctgggggcctggggagccctggctgttagatgaggtggcaagagagacctc

SEQ ID NO: 401515 - DNA, 201 bp, Homo sapiens; identical to SEQ ID NO: 89009

SEQ ID NO: 401516 - DNA, 201 bp, Homo sapiens
tgccacgtgtagtctcccatctccccatttattcaaggacatttattgagcacctacttgccaagccttgtgcctggagctgggaataatggtatcacttygtcctgagggagttcctgggttggcataagcggacactaccactctaccagcagccacaatggcaaaagctatgtggtgagtcctctctgctacacagtg

SEQ ID NO: 401517 - DNA, 201 bp, Homo sapiens
gtggtgcagctgtctgcacaggtaggtgatgggcacggccttcggactggttatgggataggtggccagctcgtgccggcatggtggtgccgctagcatgrgtgtgaggaagtgctgccattgcttgggtgttgggatggttctggccttgggcttgacatgatctggggtgatagcactgggggcttgaagaattggtgt

SEQ ID NO: 401518 - DNA, 201 bp, Homo sapiens
ggctgccagagccagcaaggagcggggagggcagggcaggcctgtggctgggatcgggaggagatccccagtgaccctgggagcccgtcagcctttctggyggcagaggctccgtggctggtggagccagagttcctggccaggaaggagacctgcctaggtcactttccctgagtgtggccccaccagggccgctcaggc

SEQ ID NO: 401519 - DNA, 201 bp, Homo sapiens
tcatacctttgaaaagaacttgcttctcctttgacaccttcgctgggactggggccagaccgtggagcagataatagttttgccacgtgtagtctcccatytccccatttattcaaggacatttattgagcacctacttgccaagccttgtgcctggagctgggaataatggtatcacttcgtcctgagggagttcctggg

SEQ ID NO: 401520 - DNA, 201 bp, Homo sapiens
ctggctgacgtgtcttcttgttccaggggctaggcgtgtgcctgcccctccgcccctggccccatacctctcatagccgctgaccaggcctggctgacggscctgtctcgttccctccccaggattggcctctctcagctggaaggcttccgcagacagctcctggatgtcctgcagcgaagcaccaagcccaaagtgagc

SEQ ID NO: 401521 - DNA, 201 bp, Homo sapiens
gggctcggctcccacgcagctccccagtgaccacgcactctcttggaccctggaggtcacctttacctctggctccccctgccttcctgagcttgtccttyggccaggctttccgtgactactactctagggactttctgggtcgtgcatggctgcctctggggctggccctcaaaggacttctaaccacaggcttagtgg

SEQ ID NO: 401522 - DNA, 201 bp, Homo sapiens
ctcaggtgatccacccgcctcgctcggcctcccaaagtgttgggcttacaggcatgagccaccgcgcctggccaaacaaaggcatcttgtagcactctcttatctgaatagcgctggcgcccctcagagagagcatgtgtgttcccctcactgatctgtgtcctcactgaagcataacaatcatggcgaaataacatttag

SEQ ID NO: 401523 - DNA, 201 bp, Homo sapiens
tacccacttccctgcctgggaagagcgagaggcctggtcttcaggaagaaccatggagaggggaagcctggaagataaaagctgggggcctggcaaaaccyaaacatgtgcacgtctccccgccagtggaggggctctgcctggggagcaccaagcacctgtgttctggtgattccaggaagcagccccacgggccctctc

SEQ ID NO: 401524 - DNA, 201 bp, Homo sapiens
tgcctgggaagagcgagaggcctggtcttcaggaagaaccatggagaggggaagcctggaagataaaagctgggggcctggcaaaacccaaacatgtgcamgtctccccgccagtggaggggctctgcctggggagcaccaagcacctgtgttctggtgattccaggaagcagccccacgggccctctctgtgtactcgca

SEQ ID NO: 401525 - DNA, 201 bp, Homo sapiens
ggaaccctcagtatatcttgtttgttctcacattcgagggaagttggcaaagggcagttctgtgtcacagggaagggggtggatgaggaccccgaaaaccmgccctttaccgagtctcacccccgagcctgctgaggtcacacagcggcagtcagtggggggttaggttttcttgttttgtttttagagacagggttttgc

SEQ ID NO: 401526 - DNA, 201 bp, Homo sapiens
ggcagaggccaggccacagggctggcaggccaacgtaagagggagagggctttctaagtgtgatgaacagtgtagaatgactggaaatggtgagtgggtargatggaggatggaggatggatggatggatggatggatggatggatggatggatgaatggattgtaggtgcagctatggggtgatcccttttctccccatc

SEQ ID NO: 401527 - DNA, 201 bp, Homo sapiens
gcctctctgtgctgcattccttccttcagggtatggggcaggattctgagtgggggtcttatgatctactatcaaacaaagtaggtcagagaatttctttytttttttttttttgagatggagtctcactctgtcacccaggctggagtgcaatggcacgatctcggctcatggcacctctgcctcccgggttcaacagat

SEQ ID NO: 401528 - DNA, 201 bp, Homo sapiens; identical to SEQ ID NO: 89019

SEQ ID NO: 401529 - DNA, 201 bp, Homo sapiens; identical to SEQ ID NO: 89024

SEQ ID NO: 401530 - DNA, 201 bp, Homo sapiens; identical to SEQ ID NO: 89021

SEQ ID NO: 401531 - DNA, 201 bp, Homo sapiens; identical to SEQ ID NO: 89018

SEQ ID NO: 401532 - DNA, 201 bp, Homo sapiens
aagaagctaaagtcagatgttcaagggcaggaagcatccggcacaggagagaaaggtgaaggccagaagactcagcaagttgactcattccaccttcttcygcctgctttttctagccatgctagcagctgattggatggtacccacccacactgagggtgtgtctgcctctccctgtccattgactgaaatgttaatctc

SEQ ID NO: 401533 - DNA, 201 bp, Homo sapiens
ctgtgttgtggacgtgtctttcatgtacttgaccttcctcaaggatgaagacaagctcgagcagatgaggaaggtgagcagggagccccaaggacccagtyatcccatttccaaccacccactcctgcatatgggtcctggaagctccaacagctgggcattaagggtttgtaggagccttgggaactggtgcctgggcct

SEQ ID NO: 401534 - DNA, 201 bp, Homo sapiens
ttgtatacttggacatttgtataacccaactttccttagaaggttatttgggagaattgtttgagtctgggtttaagattcttttttaagaatttggagakaatttgcatttgctttgactagcatttgagggaacttacaacctgggactttaaaataagttatcagctaaagattccttgaactgcacaggtagcgtga

SEQ ID NO: 401535 - DNA, 201 bp, Homo sapiens
tctgcctcccaaagtgccgaggcaggaggatctcccaaactcctctcccaagtttcagttcaattagtgctttggctttcccaactctagtctcctgtatytctgacgatgggggagcacaaagctaatctgccccccgcctctcctgcagtgagccccatggtagctcaggctttgcaggaaggaacaatggtggggctg

SEQ ID NO: 401536 - DNA, 201 bp, Homo sapiens
gttaatttggtcttcttgggtgggtgctgtggctcacgcctgaaatcccagcactttgggaaactgaggtaggtggatcacctgagatctggagttcaagrccaacctggttaacatggcaaaaccctgtttccactaaacaatacaaaaattagccaggcaaggtggcatgcatctgtggtctcacctatttgggagtct

SEQ ID NO: 401537 - DNA, 201 bp, Homo sapiens
gctcggggagaaacaggtctgcctctggcccccagcccccgcctgcagcaccagcagatgtgatgtgttctccccagggccacgctggctgggccttgccscaggcccagtaatctctgatcattacggtagaggttgtagagacaatgagtacaggggccgctcctgtacaacctgcaccccctccccagtgacagcgct

SEQ ID NO: 401538 - DNA, 201 bp, Homo sapiens
cctctccctacccatgtgtcttgaatgccatgccacctggcatggagggatccgttgcccttcgtggatatccacggcaccccatgctggtcaggcagccrcgggtggccagaggctctgagtcaggctacccaggtctccactaatccacttctaactacatgacccggatggatcccttcatctgtgtgggcctcagtt

SEQ ID NO: 401539 - DNA, 201 bp, Homo sapiens
ctgagccccagaggtcaaggctgcagtgagcggtgatcgtaccactgtactccagcttgggtgacagagaagagaccctgcctcaaaaaaaaaaaaaaaaagaaaatttgtatgatctttgtatattagagctttctcaaatgctcattgaaagaatgttgaaggaattgtgccaatctttgctgacttttatttttccca

SEQ ID NO: 401540 - DNA, 201 bp, Homo sapiens
tttttttttcagccccgcaggcccacccaccagccagcctacatggtgccagcccctcctgcagggccttgcctgagcctctcccatgactgctgctttcyctgcctagcttctgggcagtgccctgccaagatagagacctgtgcctttgccccaacattcgtctgctccttctacacgatcccaagttatccagttaag

SEQ ID NO: 401541 - DNA, 201 bp, Homo sapiens
gtgaattaagaccacaaacctccattaggtcttgcagttacaaattcgaagatccttactctccccgtaggatctttactttagaatgacaagggacatcrcccccaggatcggatatcctaaacccgtcctgctgcattcttccttcttctctgacctgcagggcatccagaacaaaatgagtgccagtgaccccagctc

SEQ ID NO: 401542 - DNA, 201 bp, Homo sapiens
taaacatgtgctcagaaacctcgtgaacaaatcgcaaaagggcagatataaattactatttatttagtagccacacaaaacagtctcatcttactagtcaycagagaaacataagttaacatgatcaaagctgagacaattcactatagaattaccagagtttttgtgttgcccttgactgtgttttcaatgattgtaaac

SEQ ID NO: 401543 - DNA, 201 bp, Homo sapiens
gccatctctcaccatggctgtctttttgagggcaggatgacaccagcagagacatgctcactggtgacctcaagaagatgctcatagaggttctccagccygtgattacagagcaccaagcccagtgcaaggaggtcatggacgagttagtgaaagagttcactaacgaatgagttcagtcgtgctcattttatatatgct

SEQ ID NO: 401544 - DNA, 201 bp, Homo sapiens
tgtggacgtgtctttcatgtacttgaccttcctcaaggatgaagacaagctcgagcagatgaggaaggtgagcagggagccccaaggacccagtcatcccrtttccaaccacccactcctgcatatgggtcctggaagctccaacagctgggcattaagggtttgtaggagccttgggaactggtgcctgggccttaggaa

SEQ ID NO: 401545 - DNA, 201 bp, Homo sapiens
caaaactatgacaagcgaagatttactgagggctttgagaacagtcattaccgattcctcgtaagtactactgcttgtacagactgatctaacattgactrtgttatacattataccagaaaatgttaaatatcatcctggtagacatgttgagggattttactccacaatattgagtcattcatcaccttgttactggaa

SEQ ID NO: 401546 - DNA, 201 bp, Homo sapiens; identical to SEQ ID NO: 89031

SEQ ID NO: 401547 - DNA, 201 bp, Homo sapiens
ataagtttttaatgttgatgcacaagttaattttaattctgatatgcaatttaaaagagaaaagcataaaagtaacattacatttatattaattgggacasaagataaaatatataactagtgatattactaacataaagtagaaatgggagatgtaaagaaatacagttttcatatataattaaaggtttttttggttta

SEQ ID NO: 401548 - DNA, 201 bp, Homo sapiens; identical to SEQ ID NO: 89036

SEQ ID NO: 401549 - DNA, 201 bp, Homo sapiens
gtttaatactatgtaaccaacaatattcatgtcacaaccagaatcaatcttttactgaacatgttcttggcttgcataacatatactacggtttatctacstgtcttttatgaaaacaaaactacaactttctaagttctatgtgtgtttttcccttccagttataaagagaatgctatgagattatcaagaattcaccat

SEQ ID NO: 401550 - DNA, 201 bp, Homo sapiens
ggagatagaaatgatctttagtagcaatgctccatgtgctcaccttctaaagaaagtgctgtacgcttcagtgagttatctcgtaattcccatctgtagtytttaaataattttaaaagtttagaataaaatatctcaccatttctcatccaatttacatactaggtcatcccaaaaccaaagcttttatcactcatggtg

SEQ ID NO: 401551 - DNA, 201 bp, Homo sapiens
acagtggggtgttaaagtctcccattattattgtatgtctctttgtcggtctctcaggacttgctttatgaatctgggtgctcctgtattgggtgcatatmtatttaggatagttagctcttcttgttgaattgatccctttaccattatgtaatgaccttctttgtctcttttgatctttgttggtttaaagcctgtttt

SEQ ID NO: 401552 - DNA, 201 bp, Homo sapiens
atggaggtacaaaggaaaaaaaccatccacattaggagccaatactcggctgtatgattggataccccagaatgatcttcttggtaggtctatgagaaagtaaaaatatgaactagatgaggaaaaaatgaataaatgttaaacagcaagcaaattcagcaaagatctaaaattataaaactttattttacttactctttt

SEQ ID NO: 401553 - DNA, 201 bp, Homo sapiens
caaacaaccagctcctggattcattgatttgttgaagggtttttcgtgtccctatctccttcagttctgctctgatcttagttaattcttgtcttctaccwgcttttgaatgtatttgttcttgcttctctggttctattaattgtgatgttagggtgtcgattttagatttttcctgctttctcttctgggcattcagtg

SEQ ID NO: 401554 - DNA, 201 bp, Homo sapiens
gatttgaaatctaaaagcgtgtgccaatgattccaaaaaaaaattctgacatctattatttcaaaggaccagaaaaaggaaaactgatataaaaaaaaaaagaagaatcaatctcaagaatatcttctcatatttgtgtgtataaaaactgtattcagggtagttttgcttagaaataaaagctcagattaatgtagtctt

SEQ ID NO: 401555 - DNA, 201 bp, Homo sapiens
atgtaatgaccttctttgtctcttttgatctttgttggtttaaagcctgttttatcagtgactaggattgcaacctctgctttttttttttttttttttttttgctttccatttacttggtagatcttcctttatcactttattttgtgtctatgtgtgtctctgtatgtgagatgggtcccctgaatacaacatactgat

SEQ ID NO: 401556 - DNA, 201 bp, Homo sapiens
tttgtgtctacgtgacacagacatgaaaagagatgtactcattactgaaactttttgcatactgttttggttgtgcgccttttctagtatgaatgattacrtatttaagccacatgttttatacatagactgtcctttaaagagactagatagttctgtgtgtcagcatatagggacagaatataactacacattaataat

SEQ ID NO: 401557 - DNA, 201 bp, Homo sapiens
tttagtgaagaggttgccttttttctattatgtgttcttggcacctttgtcaaaagtcagttagctgctatattcctccatttgtgttgttatagaggaayacatgagactagcaaatttatatatcaaatagaattatttgaatgatagttctgcatactgtacaagaagcacagcactgacttctgcttggcctctggt

SEQ ID NO: 401558 - DNA, 201 bp, Homo sapiens
agtcctatccaaaaaaatccttgcctagaccaatgtcacaaatcattcctcctacagtttcttctagtagttgtataatgtttggccttatatttaacttkgtaattcatttttacttactttgtatatggtgagggatagaggtctagtttcattttctgcatgtggatatgcagttttcctagcaccatttagtgaaga

SEQ ID NO: 401559 - DNA, 201 bp, Homo sapiens
agattcatagtttgcaaatatttttcatgttgtgaattgtctcttcaccctgttgtttgcttcattttctctgcacaagctcaatgctttgatataacccrtttatctacttttccttttgttggctgtgcttctgaagtcctatccaaaaaaatccttgcctagaccaatgtcacaaatcattcctcctacagtttcttc

SEQ ID NO: 401560 - DNA, 201 bp, Homo sapiens
cttcttttgagaagtgtctattcaggtcttttgcttattttttaatcaaattagtaatttatttttattgactgatgtgacttctatgtatatttgagatrgtaacttattgtcagattcatagtttgcaaatatttttcatgttgtgaattgtctcttcaccctgttgtttgcttcattttctctgcacaagctcaatgc

SEQ ID NO: 401561 - DNA, 201 bp, Homo sapiens
agaaaaacaaggtttcaacctctgtggacagaaatctaaatatcgatagttatcaggacaaagtagagctcatagaaataattttgcagcctgcaggtttsttttggagtgaaaataaaattgtatactatattcctaaatcatcagaggaaaaaatttatagttcaaggaatgttgaaagaaacaatattgagaagtaaa

SEQ ID NO: 401562 - DNA, 201 bp, Homo sapiens; identical to SEQ ID NO: 89041

SEQ ID NO: 401563 - DNA, 201 bp, Homo sapiens
gtatttcattttattatacattgctttattgtccttcacaaaaattgcaatttacaaattaaaggtttttgaaaaccttgaatcaagctaatcaatttggygtaatatttccaacaacaagtgtgtacttttgactctatcacatattggcatttatcatgctttttcaaatttttcattgttatatctgttacggtgatc

SEQ ID NO: 401564 - DNA, 201 bp, Homo sapiens
gagagtttagtaaatgtctactaggtctgcttggagcagagctgagttcaagtcctggatatccgtgttaaccttctgtctccttgatctttctaataacracagtggggtgttaaagtctcccattattattgtatgtctctttgtcggtctctcaggacttgctttatgaatctgggtgctcctgtattgggtgcatat

SEQ ID NO: 401565 - DNA, 201 bp, Homo sapiens
aaatgatcatcaataactaagagattatattttgtatttcctccaaatagcgcaaatcaacatcacatatttttgagaatcactgattgttagtctgaatkttatagaatttctattgaaataaaatgctaatcattattttctctctcatcatgtatttaagaaaatcttcagaaggtcttctttgaattaatttttcaa

SEQ ID NO: 401566 - DNA, 201 bp, Homo sapiens
tgatttaaatgtgtcccagagattctagtacttcgtatctttgttctcattggtttcaaagaacatctttatttttgccttcattttattatttctctggyagtcattcaggtgcaggttactcagtttctatgtagttgtgcagttttgagtgagtttcttaatcctgagttctaatttgattacacagtggtctgagag

SEQ ID NO: 401567 - DNA, 201 bp, Homo sapiens
aatttttcaagagtcattaaattgaacattttctagaattctttaatttcttaggtgattacttcacaaaaacttgaaaaaatattataaaaagttaaaaracttacggtcttgtggggcataagatagtagaatttttactttactgatatacacctatttgacttatttttatttctttgctttactgataaaaagttg

SEQ ID NO: 401568 - DNA, 201 bp, Homo sapiens
ctgtgttgaataggagtggtgagagaaggcatctttgtcttgtgcaagttttcaaagggaatgcttccagtttttgcccactcagtatgatattggctatrggtttgtcataaatagctcttattattttgaaatgtgttccatcaattcctagtttattgagagttactagcatgaagggtgttgaattttgttgaaggt

SEQ ID NO: 401569 - DNA, 201 bp, Homo sapiens
gctgtagaaataaacttcaaaactatgacaagcgaagatttactgagggctttgagaacagtcattaccgattcctcgtaagtactactgcttgtacagastgatctaacattgactatgttatacattataccagaaaatgttaaatatcatcctggtagacatgttgagggattttactccacaatattgagtcattca

SEQ ID NO: 401570 - DNA, 201 bp, Homo sapiens
aatgctgtgttgaataggagtggtgagagaaggcatctttgtcttgtgcaagttttcaaagggaatgcttccagtttttgcccactcagtatgatattggytataggtttgtcataaatagctcttattattttgaaatgtgttccatcaattcctagtttattgagagttactagcatgaagggtgttgaattttgttga

SEQ ID NO: 401571 - DNA, 201 bp, Homo sapiens; identical to SEQ ID NO: 89037

SEQ ID NO: 401572 - DNA, 201 bp, Homo sapiens
tgtgtcctcttttatttcattgagcagtggtttgtagtactccttgaagagatctttcacatcccttgtaagttggattcctaggtattttattctgtttrtagcaattgtgaatgacagttcaatcatgatttggctgtttgtctgttattgttatataggaatgcttgtgatttttgctcattgattttgtatcctcag

SEQ ID NO: 401573 - DNA, 201 bp, Homo sapiens
tccatggtgtatatgtgctacgttttcttaatccagtctatcactgttggacatttgggttggttccaagtctttgctattgtgaatagtgctacaataamcatatgtgtgcatgtgtctttatagcaacatgatttactatcctttgtgtacatacccagtaatgggataactgggtcaaatggtatttctagttctaga

SEQ ID NO: 401574 - DNA, 201 bp, Homo sapiens
tgtggatctctattctatatagtattggtgtatgtatctgttttcatgccactgccatactgttttggtgatgatatctatgctatatatgtgtgtgtgtrtatatatattatatatatgtatatatgtgtatattatatatatgtatatatgtgtatattatatatatataatactttaagttttatatatatataaaat

SEQ ID NO: 401575 - DNA, 201 bp, Homo sapiens
gcagcagtaaatgcataaatttattttgtggatctctattctatatagtattggtgtatgtatctgttttcatgccactgccatactgttttggtgatgatatctatgctatatatgtgtgtgtgtatatatatattatatatatgtatatatgtgtatattatatatatgtatatatgtgtatattatatatatataata

SEQ ID NO: 401576 - DNA, 201 bp, Homo sapiens
ggcagcagtaaatgcataaatttattttgtggatctctattctatatagtattggtgtatgtatctgttttcatgccactgccatactgttttggtgatgatatctatgctatatatgtgtgtgtgtatatatatattatatatatgtatatatgtgtatattatatatatgtatatatgtgtatattatatatatataat

SEQ ID NO: 401577 - DNA, 201 bp, Homo sapiens
tggcagcagtaaatgcataaatttattttgtggatctctattctatatagtattggtgtatgtatctgttttcatgccactgccatactgttttggtgatgatatctatgctatatatgtgtgtgtgtatatatatattatatatatgtatatatgtgtatattatatatatgtatatatgtgtatattatatatatataa

SEQ ID NO: 401578 - DNA, 201 bp, Homo sapiens; identical to SEQ ID NO: 89029

SEQ ID NO: 401579 - DNA, 201 bp, Homo sapiens; identical to SEQ ID NO: 89030

SEQ ID NO: 401580 - DNA, 201 bp, Homo sapiens
atacaaatctcttggcctcaagtctacattcagatattaatttaaaggggtacagctatatagaggtcactggcaaattttggtaaaataggattatagtraaagccccctgacaagattgaaatttaaaataaaacaaaagtgttatcaaaggggtgaaagagcattttccaataaacaaaagtgggttctggccatgca

SEQ ID NO: 401581 - DNA, 201 bp, Homo sapiens
tgggaagagttttatagtaaggcattaggtaagacacttttgttttatttttaatttagttatcaaaagaaatatttttaaaaattgtcatacattgtctrtgacatatatatgcaggtcaatgagtttttttagaaaatgttgtagctgtttttcataaagaaagtgtatttgttctaagcgtaagataacctactttct

SEQ ID NO: 401582 - DNA, 201 bp, Homo sapiens
tattccaacgaattcttatgcatagactgtttcacagaactaatattcagaggatcccagttcaaatgtccttagccttagacatgatttgaatttacatrtattgatttgctttaaataattttccattcagtaagctgtgcctagctgcagatagcctaccaggctttatggatctaggtaaacaatacaaatctcttg

SEQ ID NO: 401583 - DNA, 201 bp, Homo sapiens
aaatatttttaaaaattgtcatacattgtctatgacatatatatgcaggtcaatgagtttttttagaaaatgttgtagctgtttttcataaagaaagtgtrtttgttctaagcgtaagataacctactttcttaataccagtaatatacttaaaaatgatcatcaataactaagagattatattttgtatttcctccaaat

SEQ ID NO: 401584 - DNA, 201 bp, Homo sapiens
tttatttgaattgtatgctaattcattctgttatttcttttattgaggaaggcccactacattatgtgagactgtgggaaaagctgagatatggctaataygaacatattgggattttgaatttcctcaaccataccaacctaactttgagtttgttggaggattgcactgtaaacctgccaaagctttgcctaaggtagg

SEQ ID NO: 401585 - DNA, 201 bp, Homo sapiens
attgtatgctaattcattctgttatttcttttattgaggaaggcccactacattatgtgagactgtgggaaaagctgagatatggctaatacgaacatatkgggattttgaatttcctcaaccataccaacctaactttgagtttgttggaggattgcactgtaaacctgccaaagctttgcctaaggtaggactattgta

SEQ ID NO: 401586 - DNA, 201 bp, Homo sapiens
agaaggtcagtaaaacctccaatcctgataagcagctattcacataatgaaacagtatggttttatttgggtcttgaatctcattttccacttagcataasaggtaccaaaatttgcaaaacattatagtagtgtacatgggcataactgatcatttgcctactgagtcttgctgttactggaaacaactttcttgattgt

SEQ ID NO: 401587 - DNA, 201 bp, Homo sapiens
ggaaatggaaaattttgtccagagttcaggggaagatggtattgtggtgttttctctggggtcactgtttcaaaatgttacagaagaaaaggctaatatcrttgcttcagcccttgcccagatcccacagaaggtcagtaaaacctccaatcctgataagcagctattcacataatgaaacagtatggttttatttgggtc

SEQ ID NO: 401588 - DNA, 201 bp, Homo sapiens; identical to SEQ ID NO: 89040

SEQ ID NO: 401589 - DNA, 201 bp, Homo sapiens
tacttcacaaaaacttgaaaaaatattataaaaagttaaaaaacttacggtcttgtggggcataagatagtagaatttttactttactgatatacacctayttgacttatttttatttctttgctttactgataaaaagttgttttgctttgcaattttcatatagttgtgatcagagctggtcaatgcaagacatgtttt

SEQ ID NO: 401590 - DNA, 201 bp, Homo sapiens
aaaatattataaaaagttaaaaaacttacggtcttgtggggcataagatagtagaatttttactttactgatatacacctatttgacttatttttatttcyttgctttactgataaaaagttgttttgctttgcaattttcatatagttgtgatcagagctggtcaatgcaagacatgtttttatccaaatatgtttgaga

SEQ ID NO: 401591 - DNA, 201 bp, Homo sapiens
ttttcatatagttgtgatcagagctggtcaatgcaagacatgtttttatccaaatatgtttgagaattatgtagaaacatgaaaaaaggtacaattatatycgacactaaaatattgtttaatgtattccaacgaattcttatgcatagactgtttcacagaactaatattcagaggatcccagttcaaatgtccttagcc

SEQ ID NO: 401592 - DNA, 201 bp, Homo sapiens
atgatatctatgctatatatgtgtgtgtgtatatatatattatatatatgtatatatgtgtatattatatatatgtatatatgtgtatattatatatatayaatactttaagttttatatatatataaaatactttaagttcaagggtacatgtgcaggatgtgcaggtcagttacataggtatacatgtgccattttggt

SEQ ID NO: 401593 - DNA, 201 bp, Homo sapiens
cctttaagaatgttgaatattggcccccactctcttctggcttgtagggtttgctgagagatccactgtttgtctgatgggctttcctttgtcggtaaccygacctttctctctggctgcttttagcattttttccttcatttcaaccttagtgaatctgacaattatgtgtcttggagttggtcttctcaaggaatatct

SEQ ID NO: 401594 - DNA, 201 bp, Homo sapiens
tattgactgatgtgacttctatgtatatttgagatagtaacttattgtcagattcatagtttgcaaatatttttcatgttgtgaattgtctcttcaccctkttgtttgcttcattttctctgcacaagctcaatgctttgatataacccatttatctacttttccttttgttggctgtgcttctgaagtcctatccaaaaa

SEQ ID NO: 401595 - DNA, 201 bp, Homo sapiens
tgtgtctcttaattgggccatttagctcatttacattttaggttaatattgttatgtgtgaatttgatcctgtcattgtgatgttagctgattattttgcycattaattgaagcagtttcttcatagcattgatggtctttacaatttggcatgtttttgcagtggctggtaccagttgttcttttccatgttaagtgctt

SEQ ID NO: 401596 - DNA, 201 bp, Homo sapiens
aaaagttaatatataatagaaataaagcttatatatatctaatggaatggatatatatatataatggaatagaaatatatatctatacatataaacacacrcaatatacatatccatttcattgcatatatatatatatagagagagagagagagagatattttcaaatgtgtgtatatatatccaatggaatggacatat

SEQ ID NO: 401597 - DNA, 201 bp, Homo sapiens
tctcccatgccattctaccctttattcccacactcccagttttacacacacacacaaacacacacacacaaacacacactcatagaaataatcatagaagwcatatttttaaaaaagttagatccatacagtaataatttattaggtaaaagcttttgtgctgataattttacaagtttaattgagatatattttagggct

SEQ ID NO: 401598 - DNA, 201 bp, Homo sapiens; identical to SEQ ID NO: 89038

SEQ ID NO: 401599 - DNA, 201 bp, Homo sapiens
ttttaaacgtgatgatattgcacagctaatagcctacaaggtatggttaacataacttttatatgtcctgggacccaaatttgtgtgaatcactttattgrcatattccttttattgagatgaactgcaacttatcttgcaatatctccaagatatgtgtgtatggcatttcaaataagatgtgaaattattttattagta

SEQ ID NO: 401600 - DNA, 201 bp, Homo sapiens
agagtttggaaaaaatttgattctaactctcctggatgattttgagggattgaagacatcatgtgaagaattaactggggatggggtggtcatgaaaaaakaaatagaattataagtgggcctgaaggtttgtctaaattgctataatatcatgataaaactaaaacctgtaaaaccggtgaggaggtgctttttaaacag

SEQ ID NO: 401601 - DNA, 201 bp, Homo sapiens
agtaaacaaatgattttcaatgtagacctaacagccttctgttggaagaagatgccatttaaaactttcatagctagagaagagaagtcaatgcttgtctytgaagctacaaaaaacaggctgaatctcttgtagtggctaatgcagctgatgacaaaggtaaagccaatgcccatttactttttgtaataattatagagg

SEQ ID NO: 401602 - DNA, 201 bp, Homo sapiens
agaaaagaaaaaaaattaaaccaaccacaacatcaccttaggttttggcattagctaaaaactaatacatagtaaagcgttaactattcaattgcatgaarcctcagagaggagaggaagatgcagaaaaaaagactgaagctagtagaggttgactaatgaggtttacaggaataaactgcctacatgatgcaaaagttc

SEQ ID NO: 401603 - DNA, 201 bp, Homo sapiens
gtttgaagtccaaggctgcagtgagctatgattgctccactgcactccaacctaggtgatagagcaaaaccactaccaaaaaaaaaaaaaaaaaaaagaaraaaaagaaaagaaaaaaaattaaaccaaccacaacatcaccttaggttttggcattagctaaaaactaatacatagtaaagcgttaactattcaattgca

SEQ ID NO: 401604 - DNA, 201 bp, Homo sapiens
agaagtttgaagtccaaggctgcagtgagctatgattgctccactgcactccaacctaggtgatagagcaaaaccactaccaaaaaaaaaaaaaaaaaaaagaagaaaaagaaaagaaaaaaaattaaaccaaccacaacatcaccttaggttttggcattagctaaaaactaatacatagtaaagcgttaactattcaat

SEQ ID NO: 401605 - DNA, 201 bp, Homo sapiens
gatgctggaggtcttctattccaccatctcgctgatgtcagtcctcaaataataattttatattttagcaaattattttggttttaggattttgtgtctaygtgacacagacatgaaaagagatgtactcattactgaaactttttgcatactgttttggttgtgcgccttttctagtatgaatgattacatatttaagcc

SEQ ID NO: 401606 - DNA, 201 bp, Homo sapiens
tatatatgtgtgtgtgtatatatatattatatatatgtatatatgtgtatattatatatatgtatatatgtgtatattatatatatataatactttaagtyttatatatatataaaatactttaagttcaagggtacatgtgcaggatgtgcaggtcagttacataggtatacatgtgccattttggtttgctgcatgcat

SEQ ID NO: 401607 - DNA, 201 bp, Homo sapiens
tatatataaaatactttaagttcaagggtacatgtgcaggatgtgcaggtcagttacataggtatacatgtgccattttggtttgctgcatgcatcaactsatcattacattaggtatttctcctaatgctatccctccaccagccacccaacccccaacaggccaggtgtgtgatgttccccgccctgtgtccatgtgtt

SEQ ID NO: 401608 - DNA, 201 bp, Homo sapiens
tctcttttgatctttgttggtttaaagcctgttttatcagtgactaggattgcaacctctgctttttttttttttttttttttttgctttccatttacttsgtagatcttcctttatcactttattttgtgtctatgtgtgtctctgtatgtgagatgggtcccctgaatacaacatactgatggttcttgactctttata

SEQ ID NO: 401609 - DNA, 201 bp, Homo sapiens
tcattcagaatggaaaatggaatattttctcaggttaaaaaaaaaggttgaagaaggtaattattaccacacccgttctacaagaaaagcaaaaaggagtyattcaagttgaaatgagggaggctaggtagcaaaatgaatgaatgtaaaagtataaatctatctggtaaagataaataaataattaaatataaagtcaca

SEQ ID NO: 401610 - DNA, 201 bp, Homo sapiens
tttgtaaaacaactagctcttctgggaactaatagagtaaaaattcgcctcccaggcaggggattaatctattcatgagggatctgcttccatgacaaagrcacattctgttagattctacccccaatattggggatcaaattttaacatgaagtgtggagggctcaaatatccatactatggcagcagtaaatgcataaa

SEQ ID NO: 401611 - DNA, 201 bp, Homo sapiens; identical to SEQ ID NO: 89032

SEQ ID NO: 401612 - DNA, 201 bp, Homo sapiens; identical to SEQ ID NO: 89034

SEQ ID NO: 401613 - DNA, 201 bp, Homo sapiens
tgggcataactgatcatttgcctactgagtcttgctgttactggaaacaactttcttgattgtcatttgtttataataaaatagatataataaataaagcyctaccttatattttaggatttgaaatctaaaagcgtgtgccaatgattccaaaaaaaaattctgacatctattatttcaaaggaccagaaaaaggaaaac

SEQ ID NO: 401614 - DNA, 201 bp, Homo sapiens
aaaaaccatccacattaggagccaatactcggctgtatgattggataccccagaatgatcttcttggtaggtctatgagaaagtaaaaatatgaactagaygaggaaaaaatgaataaatgttaaacagcaagcaaattcagcaaagatctaaaattataaaactttattttacttactcttttgaagcagatataattaa

SEQ ID NO: 401615 - DNA, 201 bp, Homo sapiens
ttatttctttgctttactgataaaaagttgttttgctttgcaattttcatatagttgtgatcagagctggtcaatgcaagacatgtttttatccaaatatrtttgagaattatgtagaaacatgaaaaaaggtacaattatatccgacactaaaatattgtttaatgtattccaacgaattcttatgcatagactgtttca

SEQ ID NO: 401616 - DNA, 201 bp, Homo sapiens
gtaggactattgtattaaggaatattatgtactttatgacatgacttgttttcccttgaaagattacaaccttagttatagaaggatgatgttgaatgtcktctgtttgcagctccatatttattttccatgccacaggggctcttataggtgattatatgtcttttcggtattatattgagaaagtaggcagaagaattt

SEQ ID NO: 401617 - DNA, 201 bp, Homo sapiens
cgtctgtttgcagctccatatttattttccatgccacaggggctcttataggtgattatatgtcttttcggtattatattgagaaagtaggcagaagaatktcatgattagaatagattttaaaatactagtattacaatagtttggataataaattgaattaatagggaattggagccatgaagatcactaaaaagaatg

SEQ ID NO: 401618 - DNA, 201 bp, Homo sapiens
ctccgtctcaaaaacaaacaaacaaacaaaaaaaaaacacaaaaacatcttgagccaggcacggtggctcacgcctgtaatcccagcactttgggaggccraggcgggtggatcacgaggtcaggagatcgagaccatcctggctaacatggtgaaaccccgtctctactaaaaaatacaaaaaattagccgggcgtggtg

SEQ ID NO: 401619 - DNA, 201 bp, Homo sapiens; identical to SEQ ID NO: 89059

SEQ ID NO: 401620 - DNA, 201 bp, Homo sapiens
gtgaatgataacatatgctcatatgtcacacagagaaagggttctcacctgatagtgccatgtttctttatagttttgttcaaatcaaccaggatcttggyggtctcacctttacaacacatactgagagttccaatcataacagctaatacagaaactgcgtatggcactaacaatgattttccttacaggtggttcacg

SEQ ID NO: 401621 - DNA, 201 bp, Homo sapiens
tacaaaggactttgtggctttgctttgacatgcgccattctcttctctggacaccctctgctctcctctatcaagctccgtcagcaactctgcagcctccsctcagcaccccagcctacctattctgcactagtatctggagctctgcagcctctctgcatgcacgtggtgaatgtgccaggatacggaaggtgcacagca

SEQ ID NO: 401622 - DNA, 201 bp, Homo sapiens
ggaggggagcatggagagaagcatggatgcaggattagaggtgacaccatggtgtgggtatgtgatcaatcttccttcccttacaaattttactttggctytatgccttgaatgccatctcaccatttttcacttagaactttgactggctcttttattacttttgggttatagaaatcaatgctgcttgtgttaacatgg

SEQ ID NO: 401623 - DNA, 201 bp, Homo sapiens
tgaatgtcccatttgaactttttcaattctgagttttgcttttttttagctctcattcttatttaagcatatgccaaacgtaatattctttgccgtagatyaaatgggttttgtctttgggttgtcccgatttttaattcatggttacttatttggtttagaaggcaattctcaagttcaactactcagtgcaggaggaga

SEQ ID NO: 401624 - DNA, 201 bp, Homo sapiens; identical to SEQ ID NO: 89064

SEQ ID NO: 401625 - DNA, 201 bp, Homo sapiens
atctgacaggaggtggagctcaggcagtaatgctcgcttgccccccactcacctcctgctgtccggcccagttcctaacaggccacgaactggtacccatyactgcctaggggttggggacccctgcattaatgtatatacacatttacataaatggacagagaaaaatgcagttatcacttaggagggctgaaggagcaa

SEQ ID NO: 401626 - DNA, 201 bp, Homo sapiens
cagagggtggagaggatggttgtgagatgattcaagctcgttacatgtgcactttatttttattattattacattgtaatatataatgaaataattatacractcatcatagtgtagaatcagtgggagccctgagcttgttttcctgtaactagacggtcccatctgggggtgatgggagacagtgacagatcatcaggc

SEQ ID NO: 401627 - DNA, 201 bp, Homo sapiens
tctgcctgaatgtcccatttgaactttttcaattctgagttttgcttttttttagctctcattcttatttaagcatatgccaaacgtaatattctttgccrtagatcaaatgggttttgtctttgggttgtcccgatttttaattcatggttacttatttggtttagaaggcaattctcaagttcaactactcagtgcagg

SEQ ID NO: 401628 - DNA, 201 bp, Homo sapiens
ctggactttctcaacatttaaactaggttactctgagtgttttgttttctcaggcttttgtgtcacctgaagaaatagtgtgaaggtgctttgtattcttyacagatggcaatcttggcaatgtttgcctgttttaaagtctagatgtttgtagtttttctggtaacaactattttgtgtgttatttacaggaagtgaata

SEQ ID NO: 401629 - DNA, 201 bp, Homo sapiens
ccgccatggtggcacaccagagctccgtgggagcagggggactgagcatctcccactctgcagatgcctgtgggtgcgtttagggcctcaagtgccattgmattcaagtggccagtagggctggcgaagaatgtttgatgaataactaataaggactcagacttatctagggaaaggaaggtggaattaataggtagtttc

SEQ ID NO: 401630 - DNA, 201 bp, Homo sapiens
tgaataactaataaggactcagacttatctagggaaaggaaggtggaattaataggtagtttctgagcattcacttacactcactgctagaattcagagtkgtgtcttggtaagccttgtaaatgctgatgagggtaaagtgatctccttcgggatgtaaaaatgtcttccaacaagtcaaggcagcctcttcagctccat

SEQ ID NO: 401631 - DNA, 201 bp, Homo sapiens
tggaggattacttgagtctaagagctcaaggctgcagctatgaatgtgccattgagctccagtctgggcaacagagtgagcctctgtctctaaaaaaaaaraaaattcaggtcattcaatacaggctctcccaagttcatctttttagaatttccatttctatcctctccaccttgcctggaaggaagaattatttccttt

SEQ ID NO: 401632 - DNA, 201 bp, Homo sapiens
tctcacacatttgctgttccttattcattgttgacacaggggataggtgatccactacttgctgtagaatgtccttactttcactaggaggcagattactraaatagtattgtggtaccagctgcataaatctgtttatttaagacaaaaagatgagattatgagtggggaaggtggtgagagacaccaaacattatgtct

SEQ ID NO: 401633 - DNA, 201 bp, Homo sapiens
ttacttctatattactactgacttcttcttttctgaaatttcctaatctttagcttctttgactctcctgggcttttctttccctcttggggttgcttttstagatcatcatcttaagtcacagaaatttcattgtttgtatttgaatataggatttgaagttattagaaatcatgctttgatcttaatttaaaataattt

SEQ ID NO: 401634 - DNA, 201 bp, Homo sapiens
atttttcacttagaactttgactggctcttttattacttttgggttatagaaatcaatgctgcttgtgttaacatgggaaatctatcacaccaccacagtyttaattctaaatcacctgggaatgagggacagggctcttttctacaaacgtgactgttcctgctgaagccatgtggagatgagcccatacccaggaaaag

SEQ ID NO: 401635 - DNA, 201 bp, Homo sapiens; identical to SEQ ID NO: 89060

SEQ ID NO: 401636 - DNA, 201 bp, Homo sapiens
ttgtttttagtagagacgagatttcaccacgttggtcaggctggtcttgaactcctgacctgaggtgatccacccacctcggcctcccaaaatgctgggaytagaggcgtgagccactgtgcccagcaactttattttcttcctgcattttcccctgttttcatgaggcgttgccttatctaacgtgccatgcctgtttgt

SEQ ID NO: 401637 - DNA, 201 bp, Homo sapiens
accagagccatccctggcctctgcagcctttgactttcttttctttctttcttttttttttttttttttttgagacagagttttgctcttgttgcccaggytgcagtgcaatggcgcaatcttggttcaccgcaacctccacctcctgagttcaagtgattctcctgcctcagcctcccaagtagctgggattacaggcat

SEQ ID NO: 401638 - DNA, 201 bp, Homo sapiens
gacatggtcagtttgtctgaattcatcgcaaaataaacaggttccattaagttaaattgctgttttgttttgttttgttagcagggaggggtcactcctgytgagccacagccatctttccgcctgcactgttgcacgcaaaaacatatcaacttaaatgataagccatatagttcccaggcccacaagagcctaaagggc

SEQ ID NO: 401639 - DNA, 201 bp, Homo sapiens
aggaaagaactggcgggggcacacagaaccaataagccatgtgggaagtgctacttttaccttctgattagtaagacatttgtggaagcaggaaaaaacawttccaaaaagaaacctagcaacaaaaagaaagctgcgttaatgtttgcaaatgcagaggaagaatttttctatgaggtaagactatcctgcttatttgtt

SEQ ID NO: 401640 - DNA, 201 bp, Homo sapiens
acatatggtaaaaattttcttatgtgctgtctaaactttgatcattaagctctatgtctaaatttcaggcaaactgagtagctcaaaaacctcactttggkaggccgaggcgggaggatcaccaggtcaggagattgagaccatcctggctaacacggtgaaaccccgtctcaactaaaaaaatacaaaaaattagccggg

SEQ ID NO: 401641 - DNA, 201 bp, Homo sapiens
tacccagggcagtatctgtttccacctttcatcccagcttaatcattaatagcattcatgcccctgtcccatgaagttcacagggacatggtcagtttgtmtgaattcatcgcaaaataaacaggttccattaagttaaattgctgttttgttttgttttgttagcagggaggggtcactcctgctgagccacagccatct

SEQ ID NO: 401642 - DNA, 201 bp, Homo sapiens
tggtcattttaaaacccatgcatttttcttcctgatttttctaggttgttctgggactgccagttccataccatggaagggagggagggaggggaacctakagatacagggatgagaaactaaaaaacttgttttggatttcttaagatacctcagttcccttatcataattcactttttccttatgctagtttgagctgg

SEQ ID NO: 401643 - DNA, 201 bp, Homo sapiens
agtacatacattattaacaactggctttttgaagagtttgtgacaataatcatgaaattttaacttaagatttaagtgatatataagtagataatttcatrtagactttgcatccccatttgattgaagtttttcaccttcacagatagctttctgcaacatgaataaaataatgaacaattacaacaataacaaaactgg

SEQ ID NO: 401644 - DNA, 201 bp, Homo sapiens
tacggaaggtgcacagcacaactctgacagtgggcacgtagaggtggctgttcttgtcttcctccaaagacccatgtacgagtctgtgtcccccgtcaccrtgccccaagcaagcttgctctgaaggctggctgagtggagtcctggagctctggaagtacaggcccgccatggtggcacaccagagctccgtgggagcag

SEQ ID NO: 401645 - DNA, 201 bp, Homo sapiens
gtttagtgtgaggggagtggaagaaacatcctgtgaagtacatacattattaacaactggctttttgaagagtttgtgacaataatcatgaaattttaacktaagatttaagtgatatataagtagataatttcatatagactttgcatccccatttgattgaagtttttcaccttcacagatagctttctgcaacatgaa

SEQ ID NO: 401646 - DNA, 201 bp, Homo sapiens
cccacagtataaattcctctgatctatgaaaatatctcatattttatttaatgataagaacaggattactaccaggttgatttgggaattaattatgttayagttaagctcatctatctaccctagctgtaacttttatcttaaaattcaggcatgtgggtgagtttgaagttagtctttctggccacctgtaattactta

SEQ ID NO: 401647 - DNA, 201 bp, Homo sapiens
ggtccgagatgtctgtctagacaaagaaaaaaacactagatgagcattatttacagaatgtatttatatctaaggaataagtttaagtcctgaataatgayagtttgttatttggtttagtttgatcctgtttggaacactcccacccgaccccttgtgttttgctgctcacataatctggctaagttagcatttgaagtc

SEQ ID NO: 401648 - DNA, 201 bp, Homo sapiens; identical to SEQ ID NO: 89061

SEQ ID NO: 401649 - DNA, 201 bp, Homo sapiens
gagggaaattacctgcgatcacacagctggtcagtgtggaagctggggcacccctgctgctctgtgtccttagtcgtggatgtcatcctgctggtgggatwtctccagcatttttttcctataaaggtagcttgtactgtgatggacagccatataccagagaatattcttaccctctcttcctctgaaaaatcttgaagt

SEQ ID NO: 401650 - DNA, 201 bp, Homo sapiens
ctgcgttaatgtttgcaaatgcagaggaagaatttttctatgaggtaagactatcctgcttatttgtttagatgtaaataaggattttcttgaaaatgatktatcaagatttattgttctcccactttaggtccaagtctttcaagtgtggctactctgtttttctgtttccccacaggacctagcagctaacatagtgcc

SEQ ID NO: 401651 - DNA, 201 bp, Homo sapiens; identical to SEQ ID NO: 89055

SEQ ID NO: 401652 - DNA, 201 bp, Homo sapiens; identical to SEQ ID NO: 89057

SEQ ID NO: 401653 - DNA, 201 bp, Homo sapiens
tcactttttccttatgctagtttgagctggattactagtgcttgcattcagaagaatttaatatatccactgcaacataatgcattctataacagagtgcwtccagagtgccactggaacttccaaatggtagggacgtagcatagggaagaacaaaaagagctatactcacatagtacctactgtgtgccaggtacatgc

SEQ ID NO: 401654 - DNA, 201 bp, Homo sapiens
acttatcaaggtctgatttagggtcctcaaggactaatcttgttagtgtttaaaagcaactaggttttgtttttggcattttagttccatcttctagattytgttgtcttgcagatagagatcagggagcccagctacacattcattcttctagtcccttgtactcattgtatttccttctgccttagggccttagtttgt

SEQ ID NO: 401655 - DNA, 201 bp, Homo sapiens
gaacccgggaggcagagcttgcggtgagccgagatcacgccactgcactccagcctgggtgacagagtgagactctgtctcaaaaaaaaaaacaaacaaamaaaaaaaacaaaaccatatgcttcaacacctcaggttgaccatttggggggagtgtgtatgggtgttttaagatggcggggtatgcagatttactctgtc

SEQ ID NO: 401656 - DNA, 201 bp, Homo sapiens
ttttttttcaaatagattcctaaatgtcatttaagtagaatatgtagatatagaaagagttctgtccttggtttaagtgggtttagtgtgaggggagtggragaaacatcctgtgaagtacatacattattaacaactggctttttgaagagtttgtgacaataatcatgaaattttaacttaagatttaagtgatatata

SEQ ID NO: 401657 - DNA, 201 bp, Homo sapiens
aaaaacataggccgggtgcggtggctcatgcctgtaatcccagcactttgggaggccaaggcgggcggatcacgaggtcaggagatcagaccatcctggcyaacacgatgaaacgctgtctttactaaaaatacaaaaaattagccaggcacaatggtgggcaccggtagtcccagctacttgggaggctgaggcaggaga

SEQ ID NO: 401658 - DNA, 201 bp, Homo sapiens
atttcctcataagggtgaggctcaaattattatttgctctcagtctgttttgagtatcttgtgctattggcactggcaaggctctggggcaggcacacatytgggacagcctcactcttggcccttctagcatggatggtctcatttatatatggagatgcacacgtaaatcaagaatcctgctctactggaaatgcactt

SEQ ID NO: 401659 - DNA, 201 bp, Homo sapiens
ggaggctgaggcaggagaatggtgtgaacccgggaggcagagcttgcggtgagccgagatcacgccactgcactccagcctgggtgacagagtgagactctgtctcaaaaaaaaaaacaaacaaaaaaaaaaaacaaaaccatatgcttcaacacctcaggttgaccatttggggggagtgtgtatgggtgttttaagatg

SEQ ID NO: 401660 - DNA, 201 bp, Homo sapiens
gggaggctgaggcaggagaatggtgtgaacccgggaggcagagcttgcggtgagccgagatcacgccactgcactccagcctgggtgacagagtgagactctgtctcaaaaaaaaaaacaaacaaaaaaaaaaaacaaaaccatatgcttcaacacctcaggttgaccatttggggggagtgtgtatgggtgttttaagat

SEQ ID NO: 401661 - DNA, 201 bp, Homo sapiens
cagaagactaaagcgctacaaatttagctgtgcccttcttttccaggaagtaaatagtaaacataatttttaaaaaacataggccgggtgcggtggctcaygcctgtaatcccagcactttgggaggccaaggcgggcggatcacgaggtcaggagatcagaccatcctggccaacacgatgaaacgctgtctttactaaa

SEQ ID NO: 401662 - DNA, 201 bp, Homo sapiens
ctctcttcctgacatcgccattagtgtcaagtatttcttcaacccccagtgatgcaacgtgagcctatttttaaaaatgtagtctggaagcaatatgtaayatagtcaggaagcagtatggatatatggttaagcatatacactatacactgaactggggttaagcagagatcatactgcctgactttaagcacctgctct

SEQ ID NO: 401663 - DNA, 201 bp, Homo sapiens
acatttcctcatttgaaaaatggaaataataaagtaaaccctcatggggtccttaagagtttaaatgaaataatccatataaagtgcttaagtgctgaacwtagcatctggtgtgcaataatcactctataaatgctaattggtaaaattatcatcattgttattgttagtccaactatagtagtagtatggaaccaggct

SEQ ID NO: 401664 - DNA, 201 bp, Homo sapiens
taaaatacaatcagatgttgcccttagaagcatatgatccctaaaggatagaaaatgactcattcactatttactcagcccgtaattattaattagtcacycactgtatttggatttaggagtggaaattaccagtgaagaaggtgtagctccaataacagtgtaagtaaagagacagaaagacatggggaaaagataatc

SEQ ID NO: 401665 - DNA, 201 bp, Homo sapiens
ttttaaaacacagtgattcagggtttgctttaaggaagctttgaggatcacaagagattattatctggtaggttgtaaaaattcaaacaaccaggagagtrtcataggttccggaacaccagaaggaggaaagaaaaatggagacgagagaaaaaggataagcaagaaagtgcaggggcattaagggtgtggggggctgca

SEQ ID NO: 401666 - DNA, 201 bp, Homo sapiens
agtgattcagggtttgctttaaggaagctttgaggatcacaagagattattatctggtaggttgtaaaaattcaaacaaccaggagagtatcataggttcyggaacaccagaaggaggaaagaaaaatggagacgagagaaaaaggataagcaagaaagtgcaggggcattaagggtgtggggggctgcaggattgatttg

SEQ ID NO: 401667 - DNA, 201 bp, Homo sapiens
attactttcctcttagggaatcattgagaggttaattgaacttgagaagcatatattctgtgatggaaactgacatttattatattcttccaaattaggtyttccccctctcagactatatggggactttttcagattaattgtcaaaacaagaaggtttatgtgtggatattgacaagcagcgtgatatatacagaacac

SEQ ID NO: 401668 - DNA, 201 bp, Homo sapiens
agagtgtaagtatattgtttatgagttcagcagatatttattgatcacatagtttgtgcacagccctgtatcttattttgcaggagttgcaaagcgggctsagaaattaatcttggctttaggaagtctaccataaacccgcaaaaggaaataagtgaaaatctaaataaatgtgttgaatatatgcagtgagtgtttgca

SEQ ID NO: 401669 - DNA, 201 bp, Homo sapiens
cagcagatatttattgatcacatagtttgtgcacagccctgtatcttattttgcaggagttgcaaagcgggctcagaaattaatcttggctttaggaagtytaccataaacccgcaaaaggaaataagtgaaaatctaaataaatgtgttgaatatatgcagtgagtgtttgcaatagtgttataagttggttccaaagat

SEQ ID NO: 401670 - DNA, 201 bp, Homo sapiens
caggagttgcaaagcgggctcagaaattaatcttggctttaggaagtctaccataaacccgcaaaaggaaataagtgaaaatctaaataaatgtgttgaayatatgcagtgagtgtttgcaatagtgttataagttggttccaaagatttcaatatagacggatgtttccttttgctgagctgctaccacaatgggacaga

SEQ ID NO: 401671 - DNA, 201 bp, Homo sapiens
gttgcaaagcgggctcagaaattaatcttggctttaggaagtctaccataaacccgcaaaaggaaataagtgaaaatctaaataaatgtgttgaatatatrcagtgagtgtttgcaatagtgttataagttggttccaaagatttcaatatagacggatgtttccttttgctgagctgctaccacaatgggacagaattaa

SEQ ID NO: 401672 - DNA, 201 bp, Homo sapiens
agcgggctcagaaattaatcttggctttaggaagtctaccataaacccgcaaaaggaaataagtgaaaatctaaataaatgtgttgaatatatgcagtgaktgtttgcaatagtgttataagttggttccaaagatttcaatatagacggatgtttccttttgctgagctgctaccacaatgggacagaattaattatttt

SEQ ID NO: 401673 - DNA, 201 bp, Homo sapiens
aagttggttccaaagatttcaatatagacggatgtttccttttgctgagctgctaccacaatgggacagaattaattatttttttggaaacggagtcttaytctgatgcccaggttggagtgcagtggcgcacttcagctcactgcaacctccgcctcccagattcaagcaattctcccacctcaacctcctgagtagctg

SEQ ID NO: 401674 - DNA, 201 bp, Homo sapiens
aattaattatttttttggaaacggagtcttactctgatgcccaggttggagtgcagtggcgcacttcagctcactgcaacctccgcctcccagattcaagyaattctcccacctcaacctcctgagtagctgagattacaggcatccgccaccatgcccagctaatttttgtatttttagtagagacggggtttcactatg

SEQ ID NO: 401675 - DNA, 201 bp, Homo sapiens
tactctgatgcccaggttggagtgcagtggcgcacttcagctcactgcaacctccgcctcccagattcaagcaattctcccacctcaacctcctgagtagytgagattacaggcatccgccaccatgcccagctaatttttgtatttttagtagagacggggtttcactatgttggccaggcagatcttgaactcctgacc

SEQ ID NO: 401676 - DNA, 201 bp, Homo sapiens
ttacatataaatatgtatattatatagtacagggtttacaaactatgagtcagatcatgagacagatttatttttgcagactaatttactgttgagtgggyttagggaaaaaaggaaaataatgcaaaatgttcaagtcaagaagtgttatttcatttttaatatttcttagaatgttttacatggaagtggatatattgg

SEQ ID NO: 401677 - DNA, 201 bp, Homo sapiens
aatactttaggtgacaagtaaaggcaactgtgaaaagcaacatttgattttaggggacagggtacctgtgaaagaagactggttaggagtggaagtcaggygtaaaggcactgaaatgtccgaggcagggacaatattcagtttctcttcctctatcaccttgtgcaatgtacctgttaaatgtttgttgaatgagtgaga

SEQ ID NO: 401678 - DNA, 201 bp, Homo sapiens
aatctcactaatgactttaagaaaattgaaggtgggtgttagaaagattataggtaatattaaagaatataaggcaggcatggtggtgtgcacctctactyctagctactcggaaagctaaggcaggaggatcacttgagcccaggagttgaatacagcctgggcaacatagactctgtccctatttctaaaatttaaaaa

SEQ ID NO: 401679 - DNA, 201 bp, Homo sapiens
ggatagaaaatgactcattcactatttactcagcccgtaattattaattagtcacccactgtatttggatttaggagtggaaattaccagtgaagaaggtrtagctccaataacagtgtaagtaaagagacagaaagacatggggaaaagataatcactagtacaaacggttcaagagtcccctcatacttgatgttgcct

SEQ ID NO: 401680 - DNA, 201 bp, Homo sapiens
tgcagtttacaagcggtcccacaaagatcagtgatctgctagagcaagcgtgatacatgccattgtctgaatctcagtgcagctttgtacttttcaacatrataactcttctgaattgatcaagaagaaagcagctttaataaatgttgaaaggagttaatttggggtttggatgtatgattcaagggacgaccaggagcc

SEQ ID NO: 401681 - DNA, 201 bp, Homo sapiens
ccagctcaaactagcataaggaaaaagtgaattatgataagggaactgaggtatcttaagaaatccaaaacaagttttttagtttctcatccctgtatctmtaggttcccctccctccctcccttccatggtatggaactggcagtcccagaacaacctagaaaaatcaggaagaaaaatgcatgggttttaaaatgacca

SEQ ID NO: 401682 - DNA, 201 bp, Homo sapiens
attagcctcacaatcacaatcctgtccctcctgttgctttccattcacagttgatcaagacgcagagcctgagatagaggtcaggcagagagcacgaggcycagtgcagaatcattttctgaaccagccaggaaataccggaacccaccaaactttaaacaccagcctaaattattcctgttcttttaagcaggcagcaga

SEQ ID NO: 401683 - DNA, 201 bp, Homo sapiens
aacttaaaggaattttggccccagtaaaaatttagagttactgatttagagaaatgaatataggaaaggcatttttcttgttaggaagttttttgcatgasttagcataagaatattctaactttaatgtttcttctttataggtattgtactgatgatatgctgcaaagagaaatgatgtccaatccttttttgggtagc

SEQ ID NO: 401684 - DNA, 201 bp, Homo sapiens
acatcattcttcggccgtggccccttcctccaccttcaaagcccacaacattgcatctctccgaccttcttccatagtcatattttcctctgactgtggcyaggagggtcctctgattgttaagactcatgtaattagattgggctcaccaggatcgtccaggataatcttccaatctcaaggttattaatttaatcacat

SEQ ID NO: 401685 - DNA, 201 bp, Homo sapiens
aaaattgaaggtgggtgttagaaagattataggtaatattaaagaatataaggcaggcatggtggtgtgcacctctacttctagctactcggaaagctaargcaggaggatcacttgagcccaggagttgaatacagcctgggcaacatagactctgtccctatttctaaaatttaaaaaaaaacacacacacaaacacat

SEQ ID NO: 401686 - DNA, 201 bp, Homo sapiens
taccatgtttttcagttttatggtatttcttccagacctctcttcctgacatcgccattagtgtcaagtatttcttcaacccccagtgatgcaacgtgagyctatttttaaaaatgtagtctggaagcaatatgtaacatagtcaggaagcagtatggatatatggttaagcatatacactatacactgaactggggttaa

SEQ ID NO: 401687 - DNA, 201 bp, Homo sapiens
ataaatccagaaacatagtgaattcctgatagaagtgtttaaactctatgcagcagtagtaaactaccttgaacttagctaagagtgaaataatgaaggaygtaactatgcaagatagactgcagtggagacactaagccctgcttcatagagctcacattccagtgaagggcaccaacagaaaacaaagagggaaaatgt

SEQ ID NO: 401688 - DNA, 201 bp, Homo sapiens
aactggggttaagcagagatcatactgcctgactttaagcacctgctctaccacagatgatcttctagaagccgtataaattaaacctctgaaggtttacwtttcctcatttgaaaaatggaaataataaagtaaaccctcatggggtccttaagagtttaaatgaaataatccatataaagtgcttaagtgctgaacata

SEQ ID NO: 401689 - DNA, 201 bp, Homo sapiens
ataaactatctacaaaagttagcttggcccactgcaggaatggctaagggagtttgggggtgaaaggcaagatggagttgtcaggtcagatctccttcacyatcataattttctcactgttacaatttctgcaaaggcagtttcacattcatccactagtgttagcatttttggtgattcttacctttgaattattacatt

SEQ ID NO: 401690 - DNA, 201 bp, Homo sapiens
agcagtcctgtgatagtcagtggagtatgggcagaaaatatagcccacccgaaaaggtcatctccctggactggggctccattcttaaaagattaaaaaamaaaaaaacaaacaaacaaacaaacaaaaaaaaaaacctttaactcagatttctttaaaacatctctttaaaagaatgactggaaatgtgcaatcaagcat

SEQ ID NO: 401691 - DNA, 201 bp, Homo sapiens
gtcctgtgatagtcagtggagtatgggcagaaaatatagcccacccgaaaaggtcatctccctggactggggctccattcttaaaagattaaaaaaaaaamaaacaaacaaacaaacaaacaaaaaaaaaaacctttaactcagatttctttaaaacatctctttaaaagaatgactggaaatgtgcaatcaagcatcatt

SEQ ID NO: 401692 - DNA, 201 bp, Homo sapiens
tgtgatagtcagtggagtatgggcagaaaatatagcccacccgaaaaggtcatctccctggactggggctccattcttaaaagattaaaaaaaaaaaaaamaaacaaacaaacaaacaaaaaaaaaaacctttaactcagatttctttaaaacatctctttaaaagaatgactggaaatgtgcaatcaagcatcatttcca

SEQ ID NO: 401693 - DNA, 201 bp, Homo sapiens
tggatgacaaggacactaaggagaattactttcctcttagggaatcattgagaggttaattgaacttgagaagcatatattctgtgatggaaactgacatwtattatattcttccaaattaggttttccccctctcagactatatggggactttttcagattaattgtcaaaacaagaaggtttatgtgtggatattgaca

SEQ ID NO: 401694 - DNA, 201 bp, Homo sapiens
aagtgcatttccagtagagcaggattcttgatttacgtgtgcatctccatatataaatgagaccatccatgctagaagggccaagagtgaggctgtcccaratgtgtgcctgccccagagccttgccagtgccaatagcacaagatactcaaaacagactgagagcaaataataatttgagcctcacccttatgaggaaat

SEQ ID NO: 401695 - DNA, 201 bp, Homo sapiens
gaattactttcctcttagggaatcattgagaggttaattgaacttgagaagcatatattctgtgatggaaactgacatttattatattcttccaaattagsttttccccctctcagactatatggggactttttcagattaattgtcaaaacaagaaggtttatgtgtggatattgacaagcagcgtgatatatacagaac

SEQ ID NO: 401696 - DNA, 201 bp, Homo sapiens
gcagattcttataggagatctccctgcagcccaccctaaagaccccaggccccagctctcccactacccagcagcccaacctctgtgtgctgcccggagtygggaatggagcatctttgcctcactgtctgaatttgtacaagttgtagaactgcagttgctaacttaggttgataaagccttgatttagattagattttg

SEQ ID NO: 401697 - DNA, 201 bp, Homo sapiens
tgctgtgcaccttccgtatcctggcacattcaccacgtgcatgcagagaggctgcagagctccagatactagtgcagaataggtaggctggggtgctgagsggaggctgcagagttgctgacggagcttgatagaggagagcagagggtgtccagagaagagaatggcgcatgtcaaagcaaagccacaaagtcctttgta

SEQ ID NO: 401698 - DNA, 201 bp, Homo sapiens
ttggaatcatcatgtcagagtttcctcttgatccacaactctcgaagtctatcttagcgtcctgtgaatttgactgtgtagatgaagtgctaacaatcgcrgccatggtaacaggtatccttaatgactattccttttctttttttgcaaatctgcactaggtatagatttagatcggatccatttgaaattatattttga

SEQ ID NO: 401699 - DNA, 201 bp, Homo sapiens
gagagaaaagcgcgaggagacgcaaaccgtatttccgtgtccgagcgttgaaacctgcggagtcgcgcgcggggcgcccacactcgttcccggggagcccyagcccggtcgcccgccccggtcccagctccagcccgggcctcccttactctggggctccatggtcggctgctccccggcctccgcgggcgaacccccgga

SEQ ID NO: 401700 - DNA, 201 bp, Homo sapiens
gatgttgtttgcattgtattttattttcatgggtttttttttctttaggatattgagaaagtctgtgaaactgtctatcaaggatctaacctaaacccagmtcttggagaactggtggttgttcctttgtatccaaaagagaaatgttcattgttcaagccactcgatgaaacagaaaaaagatgccaagtttatcaaaga

SEQ ID NO: 401701 - DNA, 201 bp, Homo sapiens
ctgcaggattgatttggtattcaggtctggagattatggcccctctattaattccaaccgctgctccagacagtacttgagggaaatggaaggaagagccrttttgggggtcatggaagtgattactaatcttgccagtagaaagatttccactccatggatgacaaggacactaaggagaattactttcctcttagggaa

SEQ ID NO: 401702 - DNA, 201 bp, Homo sapiens
ggggacactgagcgagggtagcggccaggtcaccggctgaggacactgctcctgaagcccggtcaggcggtcgcgccctccctggcggcccccgcggcccsgcaggacctgtgccccgacgtcgccgacccgcggtccccgctgtcgccgacccgcggcgtccgtcgggcgagtgggcctgcccgcgggtaaggcgccggc

SEQ ID NO: 401703 - DNA, 201 bp, Homo sapiens
gtttgctttaaggaagctttgaggatcacaagagattattatctggtaggttgtaaaaattcaaacaaccaggagagtatcataggttccggaacaccagraggaggaaagaaaaatggagacgagagaaaaaggataagcaagaaagtgcaggggcattaagggtgtggggggctgcaggattgatttggtattcaggtc

SEQ ID NO: 401704 - DNA, 201 bp, Homo sapiens
ggatcacaagagattattatctggtaggttgtaaaaattcaaacaaccaggagagtatcataggttccggaacaccagaaggaggaaagaaaaatggagasgagagaaaaaggataagcaagaaagtgcaggggcattaagggtgtggggggctgcaggattgatttggtattcaggtctggagattatggcccctctatt

SEQ ID NO: 401705 - DNA, 201 bp, Homo sapiens
ccctctattaattccaaccgctgctccagacagtacttgagggaaatggaaggaagagccgttttgggggtcatggaagtgattactaatcttgccagtakaaagatttccactccatggatgacaaggacactaaggagaattactttcctcttagggaatcattgagaggttaattgaacttgagaagcatatattctg

SEQ ID NO: 401706 - DNA, 201 bp, Homo sapiens
gggtttgctttaaggaagctttgaggatcacaagagattattatctggtaggttgtaaaaattcaaacaaccaggagagtatcataggttccggaacaccrgaaggaggaaagaaaaatggagacgagagaaaaaggataagcaagaaagtgcaggggcattaagggtgtggggggctgcaggattgatttggtattcagg

SEQ ID NO: 401707 - DNA, 201 bp, Homo sapiens
gaaactacctattaattccaccttcctttccctagataagtctgagtccttattagttattcatcaaacattcttcgccagccctactggccacttgaatkcaatggcacttgaggccctaaacgcacccacaggcatctgcagagtgggagatgctcagtccccctgctcccacggagctctggtgtgccaccatggcgg

SEQ ID NO: 401708 - DNA, 201 bp, Homo sapiens
agacataatgtttggtgtctctcaccaccttccccactcataatctcatctttttgtcttaaataaacagatttatgcagctggtaccacaatactatttyagtaatctgcctcctagtgaaagtaaggacattctacagcaagtagtggatcacctatcccctgtgtcaacaatgaataaggaacagcaaatgtgtgaga

SEQ ID NO: 401709 - DNA, 201 bp, Homo sapiens
attttagacctctcagtaacaaaaggaacagggtttaaaatatgttagataatatcggcataaacaatgtactgttaacataatattgctgacagtataaytgtaattcactgtaatacttgatgccacgtctgtagtgcttccattatggctgacagtaggaaataacttccgtctcaggtgaaatctggttggatacaa

SEQ ID NO: 401710 - DNA, 201 bp, Homo sapiens
atgcaacgtgagcctatttttaaaaatgtagtctggaagcaatatgtaacatagtcaggaagcagtatggatatatggttaagcatatacactatacactkaactggggttaagcagagatcatactgcctgactttaagcacctgctctaccacagatgatcttctagaagccgtataaattaaacctctgaaggtttac

SEQ ID NO: 401711 - DNA, 201 bp, Homo sapiens
tattgttagtccaactatagtagtagtatggaaccaggcttctcaaaagtgtggcctgcagatcagggccagtgcagacttactggtttgcagtgagatcyggagcttgtgccagaatgtaaataggcgatgtcactaaacatactgattactgttcagctgactttttaaaaatagcaagacctcttcagtgtaggaagc

SEQ ID NO: 401712 - DNA, 201 bp, Homo sapiens
ggttaagcagagatcatactgcctgactttaagcacctgctctaccacagatgatcttctagaagccgtataaattaaacctctgaaggtttacatttccycatttgaaaaatggaaataataaagtaaaccctcatggggtccttaagagtttaaatgaaataatccatataaagtgcttaagtgctgaacatagcatct

SEQ ID NO: 401713 - DNA, 201 bp, Homo sapiens
gctctaccacagatgatcttctagaagccgtataaattaaacctctgaaggtttacatttcctcatttgaaaaatggaaataataaagtaaaccctcatgrggtccttaagagtttaaatgaaataatccatataaagtgcttaagtgctgaacatagcatctggtgtgcaataatcactctataaatgctaattggtaaa

SEQ ID NO: 401714 - DNA, 201 bp, Homo sapiens
tcagatttgttatcgatgtgggtgtggaaagaagaaaggtaattattattgagtaggctaaacagactgctgatcgttgtcaagcactagtttctcagttycctaccattttactgatcaggaagtgaggatgaactatgtgacctggggattcgttgaatttggtcatgagtgcaaagaagaattattgcagccagtaac

SEQ ID NO: 401715 - DNA, 201 bp, Homo sapiens
ctgctcccacggagctctggtgtgccaccatggcgggcctgtacttccagagctccaggactccactcagccagccttcagagcaagcttgcttggggcayggtgacgggggacacagactcgtacatgggtctttggaggaagacaagaacagccacctctacgtgcccactgtcagagttgtgctgtgcaccttccgta

SEQ ID NO: 401716 - DNA, 201 bp, Homo sapiens
taagtaattacaggtggccagaaagactaacttcaaactcacccacatgcctgaattttaagataaaagttacagctagggtagatagatgagcttaactrtaacataattaattcccaaatcaacctggtagtaatcctgttcttatcattaaataaaatatgagatattttcatagatcagaggaatttatactgtggg

SEQ ID NO: 401717 - DNA, 201 bp, Homo sapiens
tttcctcttagggaatcattgagaggttaattgaacttgagaagcatatattctgtgatggaaactgacatttattatattcttccaaattaggttttccycctctcagactatatggggactttttcagattaattgtcaaaacaagaaggtttatgtgtggatattgacaagcagcgtgatatatacagaacacataat

SEQ ID NO: 401718 - DNA, 201 bp, Homo sapiens
cttagggaatcattgagaggttaattgaacttgagaagcatatattctgtgatggaaactgacatttattatattcttccaaattaggttttccccctctyagactatatggggactttttcagattaattgtcaaaacaagaaggtttatgtgtggatattgacaagcagcgtgatatatacagaacacataattcttaa

SEQ ID NO: 401719 - DNA, 201 bp, Homo sapiens
gatggaaactgacatttattatattcttccaaattaggttttccccctctcagactatatggggactttttcagattaattgtcaaaacaagaaggtttaygtgtggatattgacaagcagcgtgatatatacagaacacataattcttaagctgaagtattaaggtaataaattaagggtggaaagtaaacacttcatgg

SEQ ID NO: 401720 - DNA, 201 bp, Homo sapiens
tatacagaacacataattcttaagctgaagtattaaggtaataaattaagggtggaaagtaaacacttcatggaaccttaactccctgttcctgaaatttrgagacaggggcttcatttttagacagaaagtataaagatcagcagtactcctgtatccagtggttctcaagttctagtttacatatcattagcaaaatca

SEQ ID NO: 401721 - DNA, 201 bp, Homo sapiens
tttcagttttatggtatttcttccagacctctcttcctgacatcgccattagtgtcaagtatttcttcaacccccagtgatgcaacgtgagcctatttttwaaaatgtagtctggaagcaatatgtaacatagtcaggaagcagtatggatatatggttaagcatatacactatacactgaactggggttaagcagagatc

SEQ ID NO: 401722 - DNA, 201 bp, Homo sapiens
cccaaaacaaatgggaagtgatgtacgttttccatgttattttatacatgagctatctttccaacactgaagttggtttagcaagaaaataattaaagacktcaatgtgcaagccaagagccaaaaccactctcaacagcccaaggttgtgaacgtatttaatttgccctttccctgggaagtcatttcttggatcattga

SEQ ID NO: 401723 - DNA, 201 bp, Homo sapiens
tttctggtccaaaatccaatctaaaattgcattgtattttattgtcgttttttaatctgacacaactccccagtctctccctgtcctttatgactttgacrtttttgaagagcacaggttatatattctgcagaacctccctcagtttgaacatgtctgatgtttccttagggttaggttccggctctgcatttgtggcaa

SEQ ID NO: 401724 - DNA, 201 bp, Homo sapiens
gtgatctcagctcactgcaacctgcgcctcccgggttcaagtgattttcctgcctcagcctcccgagtagctgggattacaggcacccaccaccacgcctsgctaatttttgtatttttaatagagatggggtttcgtcacgttggccaggttagcctcaaactcctgacctctcaaataatccacccgccttggcctccc

SEQ ID NO: 401725 - DNA, 201 bp, Homo sapiens
ttaatagcaatttaatttacatgtaggctgagaacccttggaagggattctaatcagaacaaaagaaaaatagaatataaaattaaattttaacttctctkaagagtggaattttctgattcttggataccttcccagaattagcttgtgcgatgatctcaagctaccatgcttcctggagctattctgtgggtctactct

SEQ ID NO: 401726 - DNA, 201 bp, Homo sapiens; identical to SEQ ID NO: 89083

SEQ ID NO: 401727 - DNA, 201 bp, Homo sapiens
aaatggatgttaacattggtcatgaggttggctacgtgatccctttcgagaactgctgtaccaacgaaacaatcctgaggttggtttgtggggttcagtcygctccctgctgatgattcttggcttaggttctacaattctgaaggagcattattctggcattctacctgttaagcatctatgctgtgcagtagcaactgg

SEQ ID NO: 401728 - DNA, 201 bp, Homo sapiens
tggaatgcagtcaaaaaatcatcaaaataatatcacaaagcactgagtggtccagtcatttgaacttctgacaatacctttgacttagaaacttatttgtrgggagtggtatattaatactatacataaacattgattgagctcgggggggactttctgtatatacattaaaaaatatgtttttttaatagagacggggtc

SEQ ID NO: 401729 - DNA, 201 bp, Homo sapiens
ctcagcttttattgaatctcacacaaaatttttctcagatgtgtcactagactacttaaataagccagattagtatttttgcatactttattaactctgcwtctactcagagtaaattagttttcggaatggaatgcagtcaaaaaatcatcaaaataatatcacaaagcactgagtggtccagtcatttgaacttctgac

SEQ ID NO: 401730 - DNA, 201 bp, Homo sapiens
gtacttgagggaaatggaaggaagagccgttttgggggtcatggaagtgattactaatcttgccagtagaaagatttccactccatggatgacaaggacaytaaggagaattactttcctcttagggaatcattgagaggttaattgaacttgagaagcatatattctgtgatggaaactgacatttattatattcttcca

SEQ ID NO: 401731 - DNA, 201 bp, Homo sapiens
agattaattgtcaaaacaagaaggtttatgtgtggatattgacaagcagcgtgatatatacagaacacataattcttaagctgaagtattaaggtaataawttaagggtggaaagtaaacacttcatggaaccttaactccctgttcctgaaatttagagacaggggcttcatttttagacagaaagtataaagatcagca

SEQ ID NO: 401732 - DNA, 201 bp, Homo sapiens
tggttctcaagttctagtttacatatcattagcaaaatcacaaagcggtcttttcattcaagatacaaatagagtgatcagtatatcataatcaaaagtgrcaagatagtgatttaaaaaacacctggcatttattgacaaaagaaaaggtaggattaagtctgctcaaacagtaaaggattagcattagtatttttttaa

SEQ ID NO: 401733 - DNA, 201 bp, Homo sapiens
tttgtaatcatatagaatgattattttatcagcagctgttaagttgactttgaggaaattttgaattgaaatactttaggtgacaagtaaaggcaactgtkaaaagcaacatttgattttaggggacagggtacctgtgaaagaagactggttaggagtggaagtcaggcgtaaaggcactgaaatgtccgaggcagggac

SEQ ID NO: 401734 - DNA, 201 bp, Homo sapiens
attttatcagcagctgttaagttgactttgaggaaattttgaattgaaatactttaggtgacaagtaaaggcaactgtgaaaagcaacatttgattttagsggacagggtacctgtgaaagaagactggttaggagtggaagtcaggcgtaaaggcactgaaatgtccgaggcagggacaatattcagtttctcttcctct

SEQ ID NO: 401735 - DNA, 201 bp, Homo sapiens
atggagctgaagaggctgccttgacttgttggaagacatttttacatcccgaaggagatcactttaccctcatcagcatttacaaggcttaccaagacacmactctgaattctagcagtgagtgtaagtgaatgctcagaaactacctattaattccaccttcctttccctagataagtctgagtccttattagttattca

SEQ ID NO: 401736 - DNA, 201 bp, Homo sapiens
attgaaatactttaggtgacaagtaaaggcaactgtgaaaagcaacatttgattttaggggacagggtacctgtgaaagaagactggttaggagtggaagycaggcgtaaaggcactgaaatgtccgaggcagggacaatattcagtttctcttcctctatcaccttgtgcaatgtacctgttaaatgtttgttgaatgag

SEQ ID NO: 401737 - DNA, 201 bp, Homo sapiens
ttaggtgacaagtaaaggcaactgtgaaaagcaacatttgattttaggggacagggtacctgtgaaagaagactggttaggagtggaagtcaggcgtaaargcactgaaatgtccgaggcagggacaatattcagtttctcttcctctatcaccttgtgcaatgtacctgttaaatgtttgttgaatgagtgagaagggct

SEQ ID NO: 401738 - DNA, 201 bp, Homo sapiens
ccatgcttcctggagctattctgtgggtctactctcaccttatagaggcagtgaagagttctgaagtgaatccatattacaacatttctattatgcctttrtaattccattttaattttgaaacactggcttttagatgaatttttaagaactttacttgggaagagctatgaagttcttctgcctctctggttacttacc

SEQ ID NO: 401739 - DNA, 201 bp, Homo sapiens
taggtgacaagtaaaggcaactgtgaaaagcaacatttgattttaggggacagggtacctgtgaaagaagactggttaggagtggaagtcaggcgtaaagrcactgaaatgtccgaggcagggacaatattcagtttctcttcctctatcaccttgtgcaatgtacctgttaaatgtttgttgaatgagtgagaagggctt

SEQ ID NO: 401740 - DNA, 201 bp, Homo sapiens
gaggctgaggcagaaggatcacttgagcccatgaggtcaaggctgcagtgagccatgttcatgccactgtacttcagcctgggcaacagagcaagaccccrtctcaaaaaaaaaaaaaaaaaaaaaaaaaacaagaaaaggctgggcgctgtggctcatgcctgtaatctcagcactttgggaggccgagacgggcagatc

SEQ ID NO: 401741 - DNA, 201 bp, Homo sapiens
aattaactagatttgcttacttaaaatcaaagcaatcaactcgttacaagtctagaaataaggattttaaaatagattttgaattttgaccttatcttttyccagaaagactttaaattgatactggaaaccaaataggatatatttttgggagatttcaggctattaaaacaaaggcaaacaaagaagtgaccttctaaa

SEQ ID NO: 401742 - DNA, 201 bp, Homo sapiens
aattttttgtaattcagacatttttttaatagtgatgttgtttgcattgtattttattttcatgggtttttttttctttaggatattgagaaagtctgtgmaactgtctatcaaggatctaacctaaacccagatcttggagaactggtggttgttcctttgtatccaaaagagaaatgttcattgttcaagccactcgat

SEQ ID NO: 401743 - DNA, 201 bp, Homo sapiens
acaaacaggcatggcacgttagataaggcaacgcctcatgaaaacaggggaaaatgcaggaagaaaataaagttgctgggcacagtggctcacgcctctartcccagcattttgggaggccgaggtgggtggatcacctcaggtcaggagttcaagaccagcctgaccaacgtggtgaaatctcgtctctactaaaaacaa

SEQ ID NO: 401744 - DNA, 201 bp, Homo sapiens
atgcctgtaatcccagctacttgggaggctgaggcaggagaatcacttgaactcaggaggtggaggttgcggtgaaccaagattgcgccattgcactgcarcctgggcaacaagagcaaaactctgtctcaaaaaaaaaaaaaaaaaaaagaaagaaagaaaagaaagtcaaaggctgcagaggccagggatggctctggt

SEQ ID NO: 401745 - DNA, 201 bp, Homo sapiens
ggagtttgaggctgcagtgagctatgattgcaccactgcactccagcctgggtgacagagcaagaccctgtctctagaaaaaaaaaaaaaatgaaaaattaaaaaaaaaaaaccaggatatacatttctgcaagaaaaaaatgcaattaagactgataggatgggtgtaatccttcaagtcagggtaagcaaaaattccta

SEQ ID NO: 401746 - DNA, 201 bp, Homo sapiens
gccctttaggctcttgtgggcctgggaactatatggcttatcatttaagttgatatgtttttgcgtgcaacagtgcaggcggaaagatggctgtggctcarcaggagtgacccctccctgctaacaaaacaaaacaaaacagcaatttaacttaatggaacctgtttattttgcgatgaattcagacaaactgaccatgtc

SEQ ID NO: 401747 - DNA, 201 bp, Homo sapiens
taaatgctaattggtaaaattatcatcattgttattgttagtccaactatagtagtagtatggaaccaggcttctcaaaagtgtggcctgcagatcagggycagtgcagacttactggtttgcagtgagatccggagcttgtgccagaatgtaaataggcgatgtcactaaacatactgattactgttcagctgacttttt

SEQ ID NO: 401748 - DNA, 201 bp, Homo sapiens
cccggctaattttttgtatttttttagttgagacggggtttcaccgtgttagccaggatggtctcaatctcctgacctggtgatcctcccgcctcggcctmccaaagtgaggtttttgagctactcagtttgcctgaaatttagacatagagcttaatgatcaaagtttagacagcacataagaaaatttttaccatatgt

SEQ ID NO: 401749 - DNA, 201 bp, Homo sapiens
agaaatatgtttttcaaatctataaaaaagatttacaaatctatctataccatgtttttcagttttatggtatttcttccagacctctcttcctgacatckccattagtgtcaagtatttcttcaacccccagtgatgcaacgtgagcctatttttaaaaatgtagtctggaagcaatatgtaacatagtcaggaagcagt

SEQ ID NO: 401750 - DNA, 201 bp, Homo sapiens
agacctctcttcctgacatcgccattagtgtcaagtatttcttcaacccccagtgatgcaacgtgagcctatttttaaaaatgtagtctggaagcaatatrtaacatagtcaggaagcagtatggatatatggttaagcatatacactatacactgaactggggttaagcagagatcatactgcctgactttaagcacctg

SEQ ID NO: 401751 - DNA, 201 bp, Homo sapiens
aagcaatatgtaacatagtcaggaagcagtatggatatatggttaagcatatacactatacactgaactggggttaagcagagatcatactgcctgacttkaagcacctgctctaccacagatgatcttctagaagccgtataaattaaacctctgaaggtttacatttcctcatttgaaaaatggaaataataaagtaaa

SEQ ID NO: 401752 - DNA, 201 bp, Homo sapiens
agatggctgtggctcagcaggagtgacccctccctgctaacaaaacaaaacaaaacagcaatttaacttaatggaacctgtttattttgcgatgaattcakacaaactgaccatgtccctgtgaacttcatgggacaggggcatgaatgctattaatgattaagctgggatgaaaggtggaaacagatactgccctgggta

SEQ ID NO: 401753 - DNA, 201 bp, Homo sapiens
aagtcaggcgtaaaggcactgaaatgtccgaggcagggacaatattcagtttctcttcctctatcaccttgtgcaatgtacctgttaaatgtttgttgaaygagtgagaagggctttagagaaattgttttggatatagggatacactttactattggagaaaacacccgagatcagaaagttgctaatgagataggggtg

SEQ ID NO: 401754 - DNA, 201 bp, Homo sapiens
tcaggcgtaaaggcactgaaatgtccgaggcagggacaatattcagtttctcttcctctatcaccttgtgcaatgtacctgttaaatgtttgttgaatgartgagaagggctttagagaaattgttttggatatagggatacactttactattggagaaaacacccgagatcagaaagttgctaatgagataggggtgggg

SEQ ID NO: 401755 - DNA, 201 bp, Homo sapiens
gcgtaaaggcactgaaatgtccgaggcagggacaatattcagtttctcttcctctatcaccttgtgcaatgtacctgttaaatgtttgttgaatgagtgasaagggctttagagaaattgttttggatatagggatacactttactattggagaaaacacccgagatcagaaagttgctaatgagataggggtgggggatg

SEQ ID NO: 401756 - DNA, 201 bp, Homo sapiens
aaggcactgaaatgtccgaggcagggacaatattcagtttctcttcctctatcaccttgtgcaatgtacctgttaaatgtttgttgaatgagtgagaaggrctttagagaaattgttttggatatagggatacactttactattggagaaaacacccgagatcagaaagttgctaatgagataggggtgggggatgaatgg

SEQ ID NO: 401757 - DNA, 201 bp, Homo sapiens
cactgaaatgtccgaggcagggacaatattcagtttctcttcctctatcaccttgtgcaatgtacctgttaaatgtttgttgaatgagtgagaagggcttyagagaaattgttttggatatagggatacactttactattggagaaaacacccgagatcagaaagttgctaatgagataggggtgggggatgaatggtaaa

SEQ ID NO: 401758 - DNA, 201 bp, Homo sapiens
agtttctcttcctctatcaccttgtgcaatgtacctgttaaatgtttgttgaatgagtgagaagggctttagagaaattgttttggatatagggatacacwttactattggagaaaacacccgagatcagaaagttgctaatgagataggggtgggggatgaatggtaaagacactctacctttttggagttttctaccat

SEQ ID NO: 401759 - DNA, 201 bp, Homo sapiens
gaatgagtgagaagggctttagagaaattgttttggatatagggatacactttactattggagaaaacacccgagatcagaaagttgctaatgagataggkgtgggggatgaatggtaaagacactctacctttttggagttttctaccattgtgttttatttcttttcacgggcatgttcagtatgttattagtggtcaa

SEQ ID NO: 401760 - DNA, 201 bp, Homo sapiens
tcagaaagttgctaatgagataggggtgggggatgaatggtaaagacactctacctttttggagttttctaccattgtgttttatttcttttcacgggcawgttcagtatgttattagtggtcaaatgaaaaggaataaagttctatatatatttttttaagtctccaagctcattactagatagaatagttacattattg

SEQ ID NO: 401761 - DNA, 201 bp, Homo sapiens
ttgtgttttatttcttttcacgggcatgttcagtatgttattagtggtcaaatgaaaaggaataaagttctatatatatttttttaagtctccaagctcaktactagatagaatagttacattattgtttactttgctgatgtttaactaaatgtagcaaactgaagcattatggatcgggaataacaaagtaacaatgaa

SEQ ID NO: 401762 - DNA, 201 bp, Homo sapiens
ccaagctcattactagatagaatagttacattattgtttactttgctgatgtttaactaaatgtagcaaactgaagcattatggatcgggaataacaaagyaacaatgaagagacagatgtagtctttttcttatttaaatctcttgactacctcagaattcaaagtagaaataactttagtgggaggttaacattattta

SEQ ID NO: 401763 - DNA, 201 bp, Homo sapiens
agtgggctagcaggaccatgagcctgagccaggatggttattcttgtatcctttccttgaaaagtgtataattttactcaaaattctttcattgatgaatkcgagaggaaaaattgaccagggtgttttatgatactactttttatgtataaagctcagaacaaaagttagatgcaggcttttattaatatttgtaataaa

SEQ ID NO: 401764 - DNA, 201 bp, Homo sapiens
gcatgtacctggcacacagtaggtactatgtgagtatagctctttttgttcttccctatgctacgtccctaccatttggaagttccagtggcactctggawgcactctgttatagaatgcattatgttgcagtggatatattaaattcttctgaatgcaagcactagtaatccagctcaaactagcataaggaaaaagtga

SEQ ID NO: 401765 - DNA, 201 bp, Homo sapiens
aacatagtcaggaagcagtatggatatatggttaagcatatacactatacactgaactggggttaagcagagatcatactgcctgactttaagcacctgcyctaccacagatgatcttctagaagccgtataaattaaacctctgaaggtttacatttcctcatttgaaaaatggaaataataaagtaaaccctcatgggg

SEQ ID NO: 401766 - DNA, 201 bp, Homo sapiens
ctctaccacagatgatcttctagaagccgtataaattaaacctctgaaggtttacatttcctcatttgaaaaatggaaataataaagtaaaccctcatggrgtccttaagagtttaaatgaaataatccatataaagtgcttaagtgctgaacatagcatctggtgtgcaataatcactctataaatgctaattggtaaaa

SEQ ID NO: 401767 - DNA, 201 bp, Homo sapiens
taacatagtcaggaagcagtatggatatatggttaagcatatacactatacactgaactggggttaagcagagatcatactgcctgactttaagcacctghtctaccacagatgatcttctagaagccgtataaattaaacctctgaaggtttacatttcctcatttgaaaaatggaaataataaagtaaaccctcatggg

SEQ ID NO: 401768 - DNA, 201 bp, Homo sapiens
tatggttaagcatatacactatacactgaactggggttaagcagagatcatactgcctgactttaagcacctgctctaccacagatgatcttctagaagcygtataaattaaacctctgaaggtttacatttcctcatttgaaaaatggaaataataaagtaaaccctcatggggtccttaagagtttaaatgaaataatc

SEQ ID NO: 401769 - DNA, 201 bp, Homo sapiens
cgtgaaccacctgtaaggaaaatcattgttagtgccatacgcagtttctgtattagctgttatgattggaactctcagtatgtgttgtaaaggtgagaccrccaagatcctggttgatttgaacaaaactataaagaaacatggcactatcaggtgagaaccctttctctgtgtgacatatgagcatatgttatcattcac

SEQ ID NO: 401770 - DNA, 201 bp, Homo sapiens
aataataaagtaaaccctcatggggtccttaagagtttaaatgaaataatccatataaagtgcttaagtgctgaacatagcatctggtgtgcaataatcaytctataaatgctaattggtaaaattatcatcattgttattgttagtccaactatagtagtagtatggaaccaggcttctcaaaagtgtggcctgcagatc

SEQ ID NO: 401771 - DNA, 201 bp, Homo sapiens
tacaatcagatgttgcccttagaagcatatgatccctaaaggatagaaaatgactcattcactatttactcagcccgtaattattaattagtcacccactrtatttggatttaggagtggaaattaccagtgaagaaggtgtagctccaataacagtgtaagtaaagagacagaaagacatggggaaaagataatcactag

SEQ ID NO: 401772 - DNA, 201 bp, Homo sapiens
gtgtaagtaaagagacagaaagacatggggaaaagataatcactagtacaaacggttcaagagtcccctcatacttgatgttgcctcctcagcatgtgcartttacaagcggtcccacaaagatcagtgatctgctagagcaagcgtgatacatgccattgtctgaatctcagtgcagctttgtacttttcaacatgataa

SEQ ID NO: 401773 - DNA, 201 bp, Homo sapiens
ttgctccttcagccctcctaagtgataactgcatttttctctgtccatttatgtaaatgtgtatatacattaatgcaggggtccccaacccctaggcagtratgggtaccagttcgtggcctgttaggaactgggccggacagcaggaggtgagtggggggcaagcgagcattactgcctgagctccacctcctgtcagat

SEQ ID NO: 401774 - DNA, 201 bp, Homo sapiens
gcctgatgatctgtcactgtctcccatcacccccagatgggaccgtctagttacaggaaaacaagctcagggctcccactgattctacactatgatgagtygtataattatttcattatatattacaatgtaataataataaaaataaagtgcacatgtaacgagcttgaatcatctcacaaccatcctctccaccctctg

SEQ ID NO: 401775 - DNA, 201 bp, Homo sapiens
agctcattactagatagaatagttacattattgtttactttgctgatgtttaactaaatgtagcaaactgaagcattatggatcgggaataacaaagtaayaatgaagagacagatgtagtctttttcttatttaaatctcttgactacctcagaattcaaagtagaaataactttagtgggaggttaacattatttaatg

SEQ ID NO: 401776 - DNA, 201 bp, Homo sapiens
tttaactaaatgtagcaaactgaagcattatggatcgggaataacaaagtaacaatgaagagacagatgtagtctttttcttatttaaatctcttgactayctcagaattcaaagtagaaataactttagtgggaggttaacattatttaatgcaaataggttgataaaaaatgtagcaaatgaacatgttattaatagtt

SEQ ID NO: 401777 - DNA, 201 bp, Homo sapiens
ttcttcaacccccagtgatgcaacgtgagcctatttttaaaaatgtagtctggaagcaatatgtaacatagtcaggaagcagtatggatatatggttaagyatatacactatacactgaactggggttaagcagagatcatactgcctgactttaagcacctgctctaccacagatgatcttctagaagccgtataaatta

SEQ ID NO: 401778 - DNA, 201 bp, Homo sapiens
tgtagtctttttcttatttaaatctcttgactacctcagaattcaaagtagaaataactttagtgggaggttaacattatttaatgcaaataggttgatayaaaatgtagcaaatgaacatgttattaatagttctgtcttctagccttactgtggtaagttgaaggaagttttcatttttgtttttgttggttttagggt

SEQ ID NO: 401779 - DNA, 201 bp, Homo sapiens
tccctgggaagtcatttcttggatcattgacttactattattctgtaaaacagtggtagcccctgccttcctctgcttgctgccaagagtatgatccagcwgtggggtctgaagagtttatgtttattggattttaatgacttagttaacaaaggtcattcctaaaagtaatagaaaactaagggtgtggaaacagaacgg

SEQ ID NO: 401780 - DNA, 201 bp, Homo sapiens
ctacggttgccctgacaacccggaggcgaagtgggcagaactaaagggacggcgagcgggagggaccaaaagccgcaggaagtgagggagcgcgtgaggayccgcgcgtcgccggggacactgagcgagggtagcggccaggtcaccggctgaggacactgctcctgaagcccggtcaggcggtcgcgccctccctggcgg

SEQ ID NO: 401781 - DNA, 201 bp, Homo sapiens
tcattgaactctaaagaagaaaaaaattttttgaggagtttaagaagtggggtagatgtgttcagtttgagatgcctgtcatatacgttgggaggtcccayaagtagtagtagttggacatgtgggtctggaacgaaaggaaaaagtctgagatgaagatagaatttggattaagcatttagtgattgaagttaaaatgtg

SEQ ID NO: 401782 - DNA, 201 bp, Homo sapiens
gtagtagtagttggacatgtgggtctggaacgaaaggaaaaagtctgagatgaagatagaatttggattaagcatttagtgattgaagttaaaatgtgatkattttctccagggatattatgtggaataagagggtaagggatagagccctgaagtatgcacattttaccttgtggggaggggctgattgtggaagaaccc

SEQ ID NO: 401783 - DNA, 201 bp, Homo sapiens
tactggttttaaaacacagtgattcagggtttgctttaaggaagctttgaggatcacaagagattattatctggtaggttgtaaaaattcaaacaaccagsagagtatcataggttccggaacaccagaaggaggaaagaaaaatggagacgagagaaaaaggataagcaagaaagtgcaggggcattaagggtgtggggg

SEQ ID NO: 401784 - DNA, 201 bp, Homo sapiens
gacatgtgggtctggaacgaaaggaaaaagtctgagatgaagatagaatttggattaagcatttagtgattgaagttaaaatgtgatgattttctccaggratattatgtggaataagagggtaagggatagagccctgaagtatgcacattttaccttgtggggaggggctgattgtggaagaacccgtggagactaaag

SEQ ID NO: 401785 - DNA, 201 bp, Homo sapiens
acaccagaaggaggaaagaaaaatggagacgagagaaaaaggataagcaagaaagtgcaggggcattaagggtgtggggggctgcaggattgatttggtaytcaggtctggagattatggcccctctattaattccaaccgctgctccagacagtacttgagggaaatggaaggaagagccgttttgggggtcatggaagt

SEQ ID NO: 401786 - DNA, 201 bp, Homo sapiens
agtggtcagaaaagggagctgaaaatctgggaggattaatggaagagtacctactcctgaggagttcatgcattggcattccccaaaatgattatattttyctctagccaccgtagaacgcacaacacagttcatctattattgttttattaaagttcatgtaaaatgactacccattactttgttaacaacagaaatctt

SEQ ID NO: 401787 - DNA, 201 bp, Homo sapiens
ggtattcaggtctggagattatggcccctctattaattccaaccgctgctccagacagtacttgagggaaatggaaggaagagccgttttgggggtcatgsaagtgattactaatcttgccagtagaaagatttccactccatggatgacaaggacactaaggagaattactttcctcttagggaatcattgagaggttaa

SEQ ID NO: 401788 - DNA, 201 bp, Homo sapiens
gttttattaaagttcatgtaaaatgactacccattactttgttaacaacagaaatcttgatatttatgtttaaaaatattttttaaaacatttttaaacarattttttagatatagagtcttgctatgttgcctaggctggtctggaactcctgggctcctcccgcctcagccttccaaagtgctgggattccaggcatga

SEQ ID NO: 401789 - DNA, 201 bp, Homo sapiens
tgactacccattactttgttaacaacagaaatcttgatatttatgtttaaaaatattttttaaaacatttttaaacaaattttttagatatagagtcttgytatgttgcctaggctggtctggaactcctgggctcctcccgcctcagccttccaaagtgctgggattccaggcatgagccactgtgcctgtggctattta

SEQ ID NO: 401790 - DNA, 201 bp, Homo sapiens
actttgttaacaacagaaatcttgatatttatgtttaaaaatattttttaaaacatttttaaacaaattttttagatatagagtcttgctatgttgcctasgctggtctggaactcctgggctcctcccgcctcagccttccaaagtgctgggattccaggcatgagccactgtgcctgtggctatttatgggttttttgt

SEQ ID NO: 401791 - DNA, 201 bp, Homo sapiens
agtgactggctcacactaggtgcttaatagatgtttgtttacttcctttttttttttttccttgaaagaggttaattgaggactgtgtcaagatccccaaractacccccgggttcagtgatttgctagaaaggttcatgggattcagcatattatttacatataactaaggtttattgcattgaaaagatacaaagcaac

SEQ ID NO: 401792 - DNA, 201 bp, Homo sapiens
aagagtatgatccagctgtggggtctgaagagtttatgtttattggattttaatgacttagttaacaaaggtcattcctaaaagtaatagaaaactaaggstgtggaaacagaacggaaaagactgactcgagggttatttctagtagttccttggtgttgtccttagatacatgtttaatccttaaaagcaattatgaag

SEQ ID NO: 401793 - DNA, 201 bp, Homo sapiens
aacaaataagcaggatagtcttacctcatagaaaaattcttcctctgcatttgcaaacattaacgcagctttctttttgttgctaggtttctttttggaawtgttttttcctgcttccacaaatgtcttactaatcagaaggtaaaagtagcacttcccacatggcttattggttctgtgtgcccccgccagttctttcct

SEQ ID NO: 401794 - DNA, 201 bp, Homo sapiens
cttggatcattgacttactattattctgtaaaacagtggtagcccctgccttcctctgcttgctgccaagagtatgatccagctgtggggtctgaagagtytatgtttattggattttaatgacttagttaacaaaggtcattcctaaaagtaatagaaaactaagggtgtggaaacagaacggaaaagactgactcgagg

SEQ ID NO: 401795 - DNA, 201 bp, Homo sapiens
catactggttttaaaacacagtgattcagggtttgctttaaggaagctttgaggatcacaagagattattatctggtaggttgtaaaaattcaaacaaccrggagagtatcataggttccggaacaccagaaggaggaaagaaaaatggagacgagagaaaaaggataagcaagaaagtgcaggggcattaagggtgtggg

SEQ ID NO: 401796 - DNA, 201 bp, Homo sapiens
gaaacacagttgaggttgaaagtattttttttttcatttttgtccttgatttttttttttttttttttgagacggagtcttgctctgtcgcccaggctggygtgcagtggcacaatctctgctcactgcaagctccgcctcccgggttcacgccattctcctgcctcagcctcccaagtagctgagactacaggcgcccgc

SEQ ID NO: 401797 - DNA, 201 bp, Homo sapiens
aaaatttttctcagatgtgtcactagactacttaaataagccagattagtatttttgcatactttattaactctgcttctactcagagtaaattagttttyggaatggaatgcagtcaaaaaatcatcaaaataatatcacaaagcactgagtggtccagtcatttgaacttctgacaatacctttgacttagaaacttat

SEQ ID NO: 401798 - DNA, 201 bp, Homo sapiens; identical to SEQ ID NO: 89070

SEQ ID NO: 401799 - DNA, 201 bp, Homo sapiens
ttttgggagatttcaggctattaaaacaaaggcaaacaaagaagtgaccttctaaaagtcctagtaatgattaggtccattgtttcaattaaagcataccrtgcttgagagataaagtgtattaaatatttgactgtaactttgtgttagaaatatgtttttcaaatctataaaaaagatttacaaatctatctataccat

SEQ ID NO: 401800 - DNA, 201 bp, Homo sapiens
gaccttctaaaagtcctagtaatgattaggtccattgtttcaattaaagcataccatgcttgagagataaagtgtattaaatatttgactgtaactttgtrttagaaatatgtttttcaaatctataaaaaagatttacaaatctatctataccatgtttttcagttttatggtatttcttccagacctctcttcctgaca

SEQ ID NO: 401801 - DNA, 201 bp, Homo sapiens
ttatgtttaaaaatattttttaaaacatttttaaacaaattttttagatatagagtcttgctatgttgcctaggctggtctggaactcctgggctcctccmgcctcagccttccaaagtgctgggattccaggcatgagccactgtgcctgtggctatttatgggttttttgtctacatttgggacaacaaatcaagtaaa

SEQ ID NO: 401802 - DNA, 201 bp, Homo sapiens
taaggattttaaaatagattttgaattttgaccttatctttttccagaaagactttaaattgatactggaaaccaaataggatatatttttgggagatttsaggctattaaaacaaaggcaaacaaagaagtgaccttctaaaagtcctagtaatgattaggtccattgtttcaattaaagcataccatgcttgagagata

SEQ ID NO: 401803 - DNA, 201 bp, Homo sapiens
gtagtctggaagcaatatgtaacatagtcaggaagcagtatggatatatggttaagcatatacactatacactgaactggggttaagcagagatcatactscctgactttaagcacctgctctaccacagatgatcttctagaagccgtataaattaaacctctgaaggtttacatttcctcatttgaaaaatggaaataa

SEQ ID NO: 401804 - DNA, 201 bp, Homo sapiens
cctgactttaagcacctgctctaccacagatgatcttctagaagccgtataaattaaacctctgaaggtttacatttcctcatttgaaaaatggaaataawaaagtaaaccctcatggggtccttaagagtttaaatgaaataatccatataaagtgcttaagtgctgaacatagcatctggtgtgcaataatcactctat

SEQ ID NO: 401805 - DNA, 201 bp, Homo sapiens; identical to SEQ ID NO: 89067

SEQ ID NO: 401806 - DNA, 201 bp, Homo sapiens
aaagtgcttaagtgctgaacatagcatctggtgtgcaataatcactctataaatgctaattggtaaaattatcatcattgttattgttagtccaactatastagtagtatggaaccaggcttctcaaaagtgtggcctgcagatcagggccagtgcagacttactggtttgcagtgagatccggagcttgtgccagaatgt

SEQ ID NO: 401807 - DNA, 201 bp, Homo sapiens; identical to SEQ ID NO: 89068

SEQ ID NO: 401808 - DNA, 201 bp, Homo sapiens
aattatcatcattgttattgttagtccaactatagtagtagtatggaaccaggcttctcaaaagtgtggcctgcagatcagggccagtgcagacttactgrtttgcagtgagatccggagcttgtgccagaatgtaaataggcgatgtcactaaacatactgattactgttcagctgactttttaaaaatagcaagacctc

SEQ ID NO: 401809 - DNA, 201 bp, Homo sapiens
agatccggagcttgtgccagaatgtaaataggcgatgtcactaaacatactgattactgttcagctgactttttaaaaatagcaagacctcttcagtgtargaagcagttagttgatttacattctggtgcaagctctttaccttgccacaaaccagcaccagagttgacgtggagtgttggaccagtgatcccgctctcc

SEQ ID NO: 401810 - DNA, 201 bp, Homo sapiens
gatgtcactaaacatactgattactgttcagctgactttttaaaaatagcaagacctcttcagtgtaggaagcagttagttgatttacattctggtgcaarctctttaccttgccacaaaccagcaccagagttgacgtggagtgttggaccagtgatcccgctctccaaaaataatagtcctttattctgaagacgttat

SEQ ID NO: 401811 - DNA, 201 bp, Homo sapiens
acgttattattcactcataatacctcattaactttctttttttctaaacatagtaaaaatagagtgtaagtatattgtttatgagttcagcagatatttaytgatcacatagtttgtgcacagccctgtatcttattttgcaggagttgcaaagcgggctcagaaattaatcttggctttaggaagtctaccataaacccg

SEQ ID NO: 401812 - DNA, 201 bp, Homo sapiens
ctcattaactttctttttttctaaacatagtaaaaatagagtgtaagtatattgtttatgagttcagcagatatttattgatcacatagtttgtgcacagmcctgtatcttattttgcaggagttgcaaagcgggctcagaaattaatcttggctttaggaagtctaccataaacccgcaaaaggaaataagtgaaaatct

SEQ ID NO: 401813 - DNA, 201 bp, Homo sapiens
tgtcatttaaatgtggcatatctatgaattcaacagggtaatttggttcctatgttgttggaaagttatctgaatgctgaagtcaactgcactccaggctygagtaaacaagtcaggacaatgaagagaggcagttgctgttaggtttggtggggggaggggaaggtgactttcacaagtcctcttgtacaagggccaccg

SEQ ID NO: 401814 - DNA, 201 bp, Homo sapiens
actccaaaagaggaggcagggatgttgggaagtggacggggatcaggaaaatccctttcctaccctgggtgtgtacctcgacctgccttctgccctccccygagcccagccaccttttcccagtctcctgccgagctcccttcctcgggccctagtgcagtgacttcctgcagctcgccaccttgaccctggccttcctcc

SEQ ID NO: 401815 - DNA, 201 bp, Homo sapiens
agttgcatatatataggtgccaagttgacaaggggtgggcttgtgatggttaattttaggagtcgactatattaaagaatatctaaaaacctggtaaaacrttattttggggtgttgtctgagggtatttccagaggagattagcatttgagtccaagtggactagatgagaagccacactgccagcatctcagggactcc

SEQ ID NO: 401816 - DNA, 201 bp, Homo sapiens
tgccacgactgtgtggaaaatctcttgtgtactggggacccagtttctttcctgtgaagggagttgacagaaataaaaaagatcactgaatgagataatcrttgtaaaggagccagcatagcagccccttaattagggggagtgtgctgtgtcactgaaacactctttgtttccaatcagggagctctcactgatcagtca

SEQ ID NO: 401817 - DNA, 201 bp, Homo sapiens; identical to SEQ ID NO: 89093

SEQ ID NO: 401818 - DNA, 201 bp, Homo sapiens; identical to SEQ ID NO: 89096

SEQ ID NO: 401819 - DNA, 201 bp, Homo sapiens
tcatgtaaggaaatcattcctaaatgtgtagttcagagtaaaaagtgctcttgtcgatagcaacttttcataaatttgtttttctgagcgtcacagtggtrtttgttcatctctaaaaatctggattgtttcaagatgatttttaaaattatttataaggaacccccaaacttgcctggctgccagtctctcacactccct

SEQ ID NO: 401820 - DNA, 201 bp, Homo sapiens
cttaaaaacttgtcactggtcctgtctcattttataaaatatcggtctcctgtaattagggaggtgttttaggaattttacatttgctaaatcttgctcakaagttacactacatacaaatgatcaaaaaaaaattcagtcaaactcagatcattttcagcgattgttgcttcagtgctgatatgcaggggttggctgtca

SEQ ID NO: 401821 - DNA, 201 bp, Homo sapiens; identical to SEQ ID NO: 89099

SEQ ID NO: 401822 - DNA, 201 bp, Homo sapiens
cgattcctcctcaccaaatactatggctcgtgctgctaacccagcgagtacaattttaaagcctgttacaatgcatcctttttaccaaagcttcccacttygcacctgtcctccctgcctgctcactctccacgctgacaatcctggctcacgcagcgccctgtgcatagagaggcaggaaggaggcccttctacgtcccc

SEQ ID NO: 401823 - DNA, 201 bp, Homo sapiens
gctttgacgatgcagatgtttcctgctattcctagagcaggaggcggtgttggccgaggccctcgccaacagctgttcccagaggaggggggctgagagaractcggagggaggagaggccgcctccccacagcctccatctcctctgcgaccagggaccctcactctcctctgctgaagcctaaagctgctcccggccag

SEQ ID NO: 401824 - DNA, 201 bp, Homo sapiens
cacatcctgtctaatgaaaacagtaagactgtttaaactccagaggtcatgtaaggaaatcattcctaaatgtgtagttcagagtaaaaagtgctcttgtygatagcaacttttcataaatttgtttttctgagcgtcacagtggtatttgttcatctctaaaaatctggattgtttcaagatgatttttaaaattattta

SEQ ID NO: 401825 - DNA, 201 bp, Homo sapiens
cagtagcatacagagcttcccctagtctttttagggactcacagctctcattaatctgcctggtctggccaatatattctatcttcgagagcatctgtcayccaggtgtcctcccgtctcagctgtgctcttcctgaccgcagcttgcccctccatgctccctgactgagaagctgccctcagatgttgtgtggctgtcat

SEQ ID NO: 401826 - DNA, 201 bp, Homo sapiens
ccaccagccatccatgtggtgagaacctaaaactactctaaaagcatgtctatttttttagaccagtgccactatgcctggccaattttttttttttttttacttttttagagatggagtcttgctatgttgcccaggctggtgaggagacagctcagggtccagggaacagcgtgggccaggctgacggcggtgagcaga

SEQ ID NO: 401827 - DNA, 201 bp, Homo sapiens
tatctctttgatctcatggaaacaccaacactgttttcatgtgttttattcttctcttcccagctctgccagacatccacacatcctgtctaatgaaaacwgtaagactgtttaaactccagaggtcatgtaaggaaatcattcctaaatgtgtagttcagagtaaaaagtgctcttgtcgatagcaacttttcataaatt

SEQ ID NO: 401828 - DNA, 201 bp, Homo sapiens
tagatatttacacaagagacccatgcgaggagggcggatttatttttaataaaagaagattaaaatctgtgtatctgcagcatattaaggaagactgaacyaaattaaaaattctcccacaactttgaatagtgggggcctggaaaaggaagcatttcacttggaatttactaaaagttgttgctttgagtcaggaagaaa

SEQ ID NO: 401829 - DNA, 201 bp, Homo sapiens
gaggtttgggtgctgttcatcaacctgtctaaaatgaaatttttaaagtatgtttttctttaaattgtacgacatcctcgatttataaagcaaatcaactracaaagctatgcctttgtgggcactcaacttgatcctttgtctttaggttaaaaaccaaatcctacaaaatgtccatcaagggatgaatgaataaccaaa

SEQ ID NO: 401830 - DNA, 201 bp, Homo sapiens
agaaaacttacaatcatggaggaagatgaaggggaagcaagaaccttcttcacatggtggcaggaaagagagagagaaggggaaagtgtcaccttttaaaycatcagatctcgtgagaactcactcactatcatgagaacagcaagggggaaatccatcccatgatccagttacttcccaccaagcccctcctccaatttg

SEQ ID NO: 401831 - DNA, 201 bp, Homo sapiens
agtacatctgttctcctggagtctgtggattgaccagaaatgtctgtctgtgacctgaggtgtggcttgtatcatccgagcacactccaaagtacacttcrtccatcactggccccaatcacttgtactcgagactacgtgggatggtcagcagttagctgctgtgttagctatgaaaacagagtaattagtgatcgtctc

SEQ ID NO: 401832 - DNA, 201 bp, Homo sapiens
ctgagaagccttaggcagattacttaacctctctgatcctcagtgtgcacagctggaaggcaggcaccatgagagtcttgtactgtctcagagagctgctktgggatcagatgtgttctgtagagaaagcgccatgaagacatcatgccctgatcagcatccgcatcttgacttttgctcatctgtgcaacttgctcggct

SEQ ID NO: 401833 - DNA, 201 bp, Homo sapiens
tcagaagcaaagtttcaggctcaccttttccttctctggaaaactcagctccttcccatcctggccagaccgggactcaggaagggctaagctagctgttyggcatctttccacccaaaagcatttagatatttgttcactgtgtgctgagaagagcccaagtgcaatgtgttggaaagaagcagggaggtgctgaggaca

SEQ ID NO: 401834 - DNA, 201 bp, Homo sapiens
gcagtacatgttggtcctggggtgatttatctttattgaggtaaaattcacataacataaaattcaccgttttgtacattcacagtgttgggcagccatcrcctctacttagatacaacatattttcatcatccaaaatgaaacctgaacccactaagcaatcaatctccatttcccccttctcccatgctggcaaccgcc

SEQ ID NO: 401835 - DNA, 201 bp, Homo sapiens
cagtgcgtaggtaggcaggaaaagtcagtgataccagaaggatggatacaggaagggccagggcctgctcctggctgctggagccctgcgtggcacatggygcaggctcaggcagccatgtctgaatggctgaaaatgatctgatgaatgatgcaatgtcaattgtctttgcagtgtttgggagtcacatatctttttttt

SEQ ID NO: 401836 - DNA, 201 bp, Homo sapiens
gttttccaccttgattgataaaagaaataaccattcttggttttttatttacttccagatctccattcccctgctctttctacaatacaactcccaccccstccatctcactaaagctcccactgatgctcctgaagccttgatctgtacatccaggcttccttggtttgtggccacaaaccccgaatccctcactctgat

SEQ ID NO: 401837 - DNA, 201 bp, Homo sapiens
ccaggggagccaggtgggcctgagccgaggggagcaacacctatcccggccacaggggtgccctgctcaggctcagcccgctgtgggctcacaggagcacrtcttctgatttttcaagagaagctgagcacctagatttttgtgtgaaatgctacaatttaaaaatataaacaatgaatgtaaacaaatcttacaccaggt

SEQ ID NO: 401838 - DNA, 201 bp, Homo sapiens
tatgaattggttttgatacttatgatgagaacagacttcctgctgagaataaatattagatttcattctatgtggtacttcgtttaaatcagtttatcccygaaccttggtttctttcctacaaagtgaaggaggccctacaagctcttgcactgcactcagaggaagagtcgtccctggcactgtaagaattccaccaag

SEQ ID NO: 401839 - DNA, 201 bp, Homo sapiens
ttcaagttgccttcctctgggaagcccccagggacttcttttctgtcctgcactggcagagtccccctgcttcccctgcacccagcacattccttccttcwtcaggtgttgctgcacctctgctgctgggcaggcttggtgccaggcactgaacacacagctgagtcccagatggatgtcttagtgtcaggagacagagta

SEQ ID NO: 401840 - DNA, 201 bp, Homo sapiens
aatcgctttccaccatagaaataaacacctaagagagggtttgggacgtgagtggttgcgtgttgcacaccagcaaacagggtgagaaagaaggcagtggkgccatttttccagaatcatactgtgtacatgccctgttaaagttgattcaaattgctcattccttacagtaaaacctccaacctgagactccccttcaga

SEQ ID NO: 401841 - DNA, 201 bp, Homo sapiens
ttcactgatgtggccacatttgttttgttttattttgtggccatgcagcccgatgtcgcaggggctgttggtcctcctgactccctgctggaacgtaaggragagcctcattccaggtctgcactggccccaaactgggccaagactgcacatttcagttcactttgggtttctgatagcagttctctccccagcccccat

SEQ ID NO: 401842 - DNA, 201 bp, Homo sapiens
ctttcaaaaacatttctttctataaaaatattttccaaagttgtgcaattttttgaaacattttctgggggtaatacaaatccaatccatttgggaagtcrcgtgggaggtttcctaatgggaagcctggtaatatcaggtgtttccctacagtgttcgcagggtctcacccctgtccactctgatgactctgactggcct

SEQ ID NO: 401843 - DNA, 201 bp, Homo sapiens
ggcatgaacccgggaggcggagcttgcagtgagccgagatcacgccactgcactccagcctgggcgacagagcgagactccatctcaaaaaaaaaaaaaaagagagaaaatctatatggaagaaatgaaaattattgaaggagcttggggaaaaggctgaaagaatcttggctgttcatgcaaaccaagtcccagggctgg

SEQ ID NO: 401844 - DNA, 201 bp, Homo sapiens
tcaggttctcttaaggagcacgcaacctagatccctggcatgcgcagttcacaatagggctcacggtcctgtaagaatctaatgccgctgctgatctgacrgggggcggcgctcaggcgataatgcctgctcacctgccactcacctcctgctgtgtggcccagttcctaacaggccacagactgatatccatctgtgtcc

SEQ ID NO: 401845 - DNA, 201 bp, Homo sapiens
aaaaaaatatagtttctcatttctaggcatattacttctgctttttcaaaaccatttctcaagttattgataataatacgaattctgtccttaaattgctyagtgaaggagagtaaattaatgtattttaagatgatctttctgttttgaagtcctgctgcttccgtcacatttacaccagcagacacggacacttccatc

SEQ ID NO: 401846 - DNA, 201 bp, Homo sapiens
gccatgagcaacaggagtagcttttcccggctcacctggtgggtatcactgtgccgagcgctgttggctctcggggaacctagaagtgtggaaacctaacrcatcctgtgtctctaaggttcaggaagcagaggaaagctgtggtcagcaccagcgacaagaagatgcccaacggaatcttggaggagcaaggtacagaag

SEQ ID NO: 401847 - DNA, 201 bp, Homo sapiens
aatgagccttctgatgctgtgggcgtgggctgtgcagcagagggcagctgagaggctgggtggctgggcctgggagacacacagaggccaggccttagcgyggctcagccatgagcaacaggagtagcttttcccggctcacctggtgggtatcactgtgccgagcgctgttggctctcggggaacctagaagtgtggaaa

SEQ ID NO: 401848 - DNA, 201 bp, Homo sapiens
gagggggctgtgtggccagcgggggaggagcaggaacaaagtgcgacgttgggagagtgggtggggtccaaaggtggcagcgaggccaccagtgtcccttkgaatttgggctgatgagccaggggtgggtcctgagcagcaacaaagccacttagctgggcctggggctgtgggtctctttctgggtgaggaaggtcaacc

SEQ ID NO: 401849 - DNA, 201 bp, Homo sapiens
gtgccagagtcagtgccaggcctgggagggtaggggatgagggaggaaaagccacaccttccctggggagtttataacctagggtgcaaggcggaaggcawgagggtcccttttagaatccagatgaggggtgtgaggtgagcggagcctctggggctgcggagccctcccagtgcccagagcaccctcgggaggccgtgc

SEQ ID NO: 401850 - DNA, 201 bp, Homo sapiens
aattcatcttggaatcctctggtttttcatcatgctttacttttaaaacttcccgttctgctgtagcaaacttcccattctgctgtggcaaacacgagtgyatattagttttcatctttggaagatgaatgaagtatgtgacttttcaaacagggatctcacattttaagtctagttattccagaataaaaacaagccaga

SEQ ID NO: 401851 - DNA, 201 bp, Homo sapiens; identical to SEQ ID NO: 89086

SEQ ID NO: 401852 - DNA, 201 bp, Homo sapiens
ttacatttaaatagcataacatgccattgaaatccttttccagacgtttcagcaagtgaaatcatttgtggttcatgttatagctttttcagtaacatgamttgagaaatttttcttcttactaataaaagggaatcattcccgcagttaaagaattcatcttggaatcctctggtttttcatcatgctttacttttaaaa

SEQ ID NO: 401853 - DNA, 201 bp, Homo sapiens; identical to SEQ ID NO: 89087

SEQ ID NO: 401854 - DNA, 201 bp, Homo sapiens
catcagttttcacactactgtaaaaaactacctgagactgggtaatttatgaagaaaagaggtttaattgactaacagttctgcaggcttaacaggaagcmtgactgggaagcctcagaaaacttacaatcatggaggaagatgaaggggaagcaagaaccttcttcacatggtggcaggaaagagagagagaaggggaaa

SEQ ID NO: 401855 - DNA, 201 bp, Homo sapiens; identical to SEQ ID NO: 89089

SEQ ID NO: 401856 - DNA, 201 bp, Homo sapiens; identical to SEQ ID NO: 89088

SEQ ID NO: 401857 - DNA, 201 bp, Homo sapiens
agattgccagcaggcaatatcttcatcctcaggacccaggtctctcttctctgaccctgcctggaccctgacaatcccagggcgctctgcgttggaatcartttggatgtgtgttaccagatcttcgctgaagcagggcactctgcattggagtaaatttggatgtgtgttaccagatcttcgctgaagaacgcaaggaac

SEQ ID NO: 401858 - DNA, 201 bp, Homo sapiens
aaattaagataattttctctttcctgaaaacataacagcatgccacgcgttctggatgaaaatgaggaactgtttacaccatgggcccaattaaactctgygagaattctgatgtgcgataaaaatgtgctcagatgtatagcatattttaagtttcctaggactttccttgcaagcataatcacaaattaatattaaaaa

SEQ ID NO: 401859 - DNA, 201 bp, Homo sapiens
agtaccactcactcagtggctcaccgtcagagaagcctgggcctggcctggcccagctggttctctgctcatcgtctcacttgacgaagttgacgggctgcagggtcatgtgcctttccagaggctcaggatgaattcactcccaaactcattcaggtattggcagaatgcagttccttgaggttgtaggactgaggtctc

SEQ ID NO: 401860 - DNA, 201 bp, Homo sapiens; identical to SEQ ID NO: 89097

SEQ ID NO: 401861 - DNA, 201 bp, Homo sapiens
gaatcctaggttgtggggaaaatgtgaactaacatattccagaaaaatgaccccactccaccttaggaattaggagtttttttcttaatgcaggacaaaartctgattgtgtattttatcatcatttatcatgcacattttattactgtttatctccacaacaccatgggcttgatatatttttctgccttaatctccatt

SEQ ID NO: 401862 - DNA, 201 bp, Homo sapiens; identical to SEQ ID NO: 89100

SEQ ID NO: 401863 - DNA, 201 bp, Homo sapiens; identical to SEQ ID NO: 89104

SEQ ID NO: 401864 - DNA, 201 bp, Homo sapiens
aaatgcaaagttataacaccatttcactagaaattccttttaggacactcctgtcactctatgcttcctctatctgtcctgttgggctgtgagcatcctakgggctcccccctccaccccaagagggtgccatggctggtgcccagccaagctcagcaactgtgggtgcctcacacgtgccagttcacaggcggtggccta

SEQ ID NO: 401865 - DNA, 201 bp, Homo sapiens; identical to SEQ ID NO: 89108

SEQ ID NO: 401866 - DNA, 201 bp, Homo sapiens
aggctggagtgcagtggcgcgatatcggctcactgcaacttcagcctcccggattcaagcgattctcctgcctcagcctcccacgtagctgggattacgarcgcgtgccaccacactcagctaatttttgtatttttaatagggacggggtttcgccatgttggtcaggatggtctcaatctcctgacctcgtgatccacc

SEQ ID NO: 401867 - DNA, 201 bp, Homo sapiens
tttaggcctggcgtggtggctcacacctgtaatcttagcactttgggaggctgaggcaggcagatcacttgaggtcgggagttggagaccagcctggccarcatggcaaaaccccatctcttctaaaaatataaaaattaaccagatgtgatggtgtatgcctgtaatcccagctacttgggaggctgaggcaggagaatt

SEQ ID NO: 401868 - DNA, 201 bp, Homo sapiens
cagcattggaacacaaaactatcattggctgatgccagatgaagtactggcttgtattcctttaaacaccagaatcctactcaatgtggcaagacactccscatgagagggcatagtgggtaatggtggatccacttagcggggttgagttttctcagttttaatgtatgtaagatgtgggcccatattatggttagcaaa

SEQ ID NO: 401869 - DNA, 201 bp, Homo sapiens
cctccagcattggaacacaaaactatcattggctgatgccagatgaagtactggcttgtattcctttaaacaccagaatcctactcaatgtggcaagacaytccccatgagagggcatagtgggtaatggtggatccacttagcggggttgagttttctcagttttaatgtatgtaagatgtgggcccatattatggttag

SEQ ID NO: 401870 - DNA, 201 bp, Homo sapiens; identical to SEQ ID NO: 89090

SEQ ID NO: 401871 - DNA, 201 bp, Homo sapiens
tcacggtgaggaaatgttactttatagaaagctgcttgcagcctctcatgcagaatgaaaaaacaatgagtttttttccttcattttaaatctccactgtmatcaactgtcttttgcaaggagtacagattgttgaaaattttaaagagcatgtatgatttcattcttaccagcaaggctgttttaatatgagcatatttt

SEQ ID NO: 401872 - DNA, 201 bp, Homo sapiens
aaagggtggcagctgggggtctctttctttgggaatgatttgctcttagcccagcatcttgggcctcagctcggggcttcctgaagccgagcttccctggwgaagaggccccctattcagggcagctgctcaccaacgctcctgggcctcggggcactcaggaaacacccgagttaccctcagggccagaccgcaggcctg

SEQ ID NO: 401873 - DNA, 201 bp, Homo sapiens; identical to SEQ ID NO: 89092

SEQ ID NO: 401874 - DNA, 201 bp, Homo sapiens
gatttgctcttagcccagcatcttgggcctcagctcggggcttcctgaagccgagcttccctggtgaagaggccccctattcagggcagctgctcaccaaygctcctgggcctcggggcactcaggaaacacccgagttaccctcagggccagaccgcaggcctggagcctctccttttgctgatgcacctgcatcagaaa

SEQ ID NO: 401875 - DNA, 201 bp, Homo sapiens; identical to SEQ ID NO: 89095

SEQ ID NO: 401876 - DNA, 201 bp, Homo sapiens
ggagcactttggagcagcagctgataggtaaagggcacctcaccagcccacaaaggacaaaaggttaccctgtctatactgagctcaagtgtcatttttgrctacaagtatacctggtattacagtattaacatactcctgaaaagttatgttaattggaattgtgctttatatacactgggtaagcttaatacctttcag

SEQ ID NO: 401877 - DNA, 201 bp, Homo sapiens
aggaaagaatggctggctctttccaaacagtatgtatgggtgagggatcctcattcttttctgaccccgggtggattagttgtggctcctggcaatatccyggatctgactggttaacttagtgagaaagggagcttggcagacggctaccgcagagttctcagaatcaatagtgaagctggagaacaaggctcagaaaac

SEQ ID NO: 401878 - DNA, 201 bp, Homo sapiens
ctgcctgatgtctggttggtggaagctgagacccctgagggatcagaacagatccagggagagctgggagtgctacttttccatgtctggtctgggttttrgggagtgatgttcccacagaaggcttaagctggaaaatatccatgatgagtccagggtacatttggtggaggtttaaatactgtgtcaagatgcatacaa

SEQ ID NO: 401879 - DNA, 201 bp, Homo sapiens; identical to SEQ ID NO: 89102

SEQ ID NO: 401880 - DNA, 201 bp, Homo sapiens
tcacattctgtcttccctgtgtaaggagagggcgtttccctacagatcaacccagacatgagtctccttggctctgacgagccaggcttggataactggcycaacctcaaagcttcctcggtgtctggggcttgccctgttctgataatccaggcttgggccctctgtcttcccaggggccagaggtggaaacacagctcc

SEQ ID NO: 401881 - DNA, 201 bp, Homo sapiens
atgtagcgtgctgccaattttaggtactggccctagacatatcaagagtttattttggaggattaacttctcattattttgtcactaggatttttttttttcaccaaaagcagagtgctggatgatattttagatggctgggattttagatcagccatacctgaggcaataagagttggtcgaatgttaccaatccttgag

SEQ ID NO: 401882 - DNA, 201 bp, Homo sapiens
tggacagctgcagcactatagcccctttctgggatgtccctgaatgacagtggtgaagggaaatcttctcaatgggcaaaacactgggcaatgtacctggytgtgcactttgcttggaaggagaaatggccagatgtgcaattatatactgattcatgggctatagccagtgatttggccagaaggtcagggacttggaag

SEQ ID NO: 401883 - DNA, 201 bp, Homo sapiens
acaaggaacttttgaactggcaaataaagaagaaaacagagaaaaaaacagatatcccaacatccttcccagtaagattttattttatgttttgcatgatyaatggtgtttgcactaaactcagctttgccttgcagctccccgtgactgcaggccattcctggtgctcagaggccccaaatcagtctaactgctcagcat

SEQ ID NO: 401884 - DNA, 201 bp, Homo sapiens
tatgtgctctgacagactcagtcctgtggggcctccagcaaactcacattctgtcttccctgtgtaaggagagggcgtttccctacagatcaacccagacwtgagtctccttggctctgacgagccaggcttggataactggcccaacctcaaagcttcctcggtgtctggggcttgccctgttctgataatccaggcttg

SEQ ID NO: 401885 - DNA, 201 bp, Homo sapiens
agcatgaggggtctcttgctgcctctgctttgggtctggctgagggtccactttgctccctgaccccagccagggtaccagttcccagattgctggtgggygtgtgacagctcatgtggccaagcaccctgccctgcttcttcaaagctcctaggtgggggagtcccagtggcagggcagagggaccaacccccatggctg

SEQ ID NO: 401886 - DNA, 201 bp, Homo sapiens
gcaaaggcaagtctccgccttcatgcagcataggatctggctgatgagaccatcactttggccacaccactgttcaccccacatgaaagagcaccctgggsaaagccagggtctgtgtctccttcattctctgccccatgcctggtgcaaggtctgaggcagagacggactatggacagcaggtagtttgctccacgtgtt

SEQ ID NO: 401887 - DNA, 201 bp, Homo sapiens
gctgggtagaaatcagtgacatcaatcgtggttattttacttagcagtggattttttttttttccttttcagtgtagtagtaatttgtaaatgctttatgsaggttatgctttctttagtggcttggcatcttggaaattggagcagccaggctcggcgtgctgtgtccatttttagccctagcaggcaggaagtgtggcc

SEQ ID NO: 401888 - DNA, 201 bp, Homo sapiens
acaccatctcaaaaaaaaagccatataatgatggttgttgtcatcagagaagtcggctcacagggggtgatgtctcctgctcccacttacaaagtaggtgrgaatgatctcgagaagctccatgaggtgaccctcagcctctgatggggacaaacaggagtcaccctgctctctctctggctcccatgactcttatctaaa

SEQ ID NO: 401889 - DNA, 201 bp, Homo sapiens
agacaatattcctaataaaatgccatgtaggctgggcacggtggctcacacctgtaatcccagcattttgtgaggccaaggtaggtggatcacatgaggtyaggagttcacaactagccgggccaacatagtgaaaccccatctctactaaaaatacaaaaattagctgagcacgctggcacgcacctgtaatcccagcta

SEQ ID NO: 401890 - DNA, 201 bp, Homo sapiens
ttgctccgggggctaaggcaggaggatcacttgagcccaggaggtcgaggctgccatgatcatgccactgtactccagccttggtgacagagcgagaaccygtctcaaaaaaattttttttattttgaaaattgggttacactgtacattcttagggtctagacaatattcctaataaaatgccatgtaggctgggcacgg

SEQ ID NO: 401891 - DNA, 201 bp, Homo sapiens
cagttgctccgggggctaaggcaggaggatcacttgagcccaggaggtcgaggctgccatgatcatgccactgtactccagccttggtgacagagcgagamcctgtctcaaaaaaattttttttattttgaaaattgggttacactgtacattcttagggtctagacaatattcctaataaaatgccatgtaggctgggca

SEQ ID NO: 401892 - DNA, 201 bp, Homo sapiens
tacagggccaggtgcagtggctcatgcctgtaatcccaacactttgggaagctgaggttggaggattgcttgaggctaggagtttgagaccagtctgggcracatagtgatactgtctctaaaaaatattagccaggcatgatggtgcatgcctgtagtcccagttgctccgggggctaaggcaggaggatcacttgagcc

SEQ ID NO: 401893 - DNA, 201 bp, Homo sapiens
gctcttcccccttcacttcactgtgcacttcactgtgcacttctccttcctgtcgccttgtgaagaaggtgccttgcttccccttccaccatgattgtcaktttcctgaggcctccccagccatgctgaactgtgagtcaattaaacctctttcctttataaattacccagtcttaggcagttctttatagcagtatgaaa

SEQ ID NO: 401894 - DNA, 201 bp, Homo sapiens
aaaaaaaaggcacgatggcttgtgacatcctgtggatgctccaggtccacaggaagacagaactcacttccagggagtgttaaatgtgatgctggatgctyctgtggaggaggggagacatggaagggcctccccaggtagagcagtgacgtggtctggctctgtgtccccacccaaatctcatcttgaattgtaatccaa

SEQ ID NO: 401895 - DNA, 201 bp, Homo sapiens
gccccagggctcagttccaaccacgccaccccttctctctgcattctctccagggggccgtatttccctcttcaacagagacagccctattttctgcttgytatccctgtgtcctgtccactttcacatttgctccatatttttcatcttagagcaattgaaaattaaacctttatttttttgaaacagagtctctttcca

SEQ ID NO: 401896 - DNA, 201 bp, Homo sapiens
cccagggctcagttccaaccacgccaccccttctctctgcattctctccagggggccgtatttccctcttcaacagagacagccctattttctgcttgctrtccctgtgtcctgtccactttcacatttgctccatatttttcatcttagagcaattgaaaattaaacctttatttttttgaaacagagtctctttccatc

SEQ ID NO: 401897 - DNA, 201 bp, Homo sapiens
tcagttccaaccacgccaccccttctctctgcattctctccagggggccgtatttccctcttcaacagagacagccctattttctgcttgctatccctgtstcctgtccactttcacatttgctccatatttttcatcttagagcaattgaaaattaaacctttatttttttgaaacagagtctctttccatcacccaggc

SEQ ID NO: 401898 - DNA, 201 bp, Homo sapiens
caattctcctgcctcagcctcctgagtagctgggattacaggcgcctgccaccacgtctggctaatttttgtatttttagtagagatggggttataccatrttggccacagtggtcttgaactcttgacctcaggtgatccacctgccttggcctcccaaagtgctaggattacaggcatgagctaccatgcctggctgaa

SEQ ID NO: 401899 - DNA, 201 bp, Homo sapiens
ggccacagtggtcttgaactcttgacctcaggtgatccacctgccttggcctcccaaagtgctaggattacaggcatgagctaccatgcctggctgaaaaytaaacttttaatgttgaaatgatacttgcattaacagaatccaggaaggttctgtagactgtccacttgtgcctccaagcttctgctgtgctctcctcat

SEQ ID NO: 401900 - DNA, 201 bp, Homo sapiens
acttgggaagctgaggcaggagaattgcttgaatccgggaggctgaggttgcagtgagctgagattacaccactgtactccaacctgggcaacagagtgaragcgagaccccctctcaaaaaaaaaaaaaaaaaaaaaaaaagtggactttggaaatagaaggacatagactcgctgctaagtaattggctcttttttcat

SEQ ID NO: 401901 - DNA, 201 bp, Homo sapiens
tgaggttgcagtgagctgagattacaccactgtactccaacctgggcaacagagtgagagcgagaccccctctcaaaaaaaaaaaaaaaaaaaaaaaaagkggactttggaaatagaaggacatagactcgctgctaagtaattggctcttttttcattctgcttttaatatatagttatttttcttttacatatctgtta

SEQ ID NO: 401902 - DNA, 201 bp, Homo sapiens
atctagctgaaacacacagaaacatgttagaatctaagccaccaggtgctgttcaggtggccacaggcaactaccagttcataatacccatttgttgatgwcctcaggggctgacggtggccgttatggtttcagataagcgagcttcttgacctgcttgtcaggtgtgtgcctgagtgctcgtgccaactggggtctggt

SEQ ID NO: 401903 - DNA, 201 bp, Homo sapiens
aggtaatctcccaagtccctctgctgctgctggctgtgaggcatcaacatcctcccccaacctggactcaggggctgcagcctcagaggaccagcgtcgtrgagttcaagttcagttcagcacttgaatagtacatccttcaggaagccagggcactgaagactgaaaagcagaatcctaacattcatgtatattttaaag

SEQ ID NO: 401904 - DNA, 201 bp, Homo sapiens
gttgccagggcatcacctgtcatgttcttttatggaaagaatctggactggagcacatgagctcaagaaaaatctcggacttaaaattcagtctacaagasaaactgacattgtcctggacctgtgtaatgggcaaagttcagagtctctggggtacagggaagtaggtcagggagtggggaaactgaggcctgttgtggg

SEQ ID NO: 401905 - DNA, 201 bp, Homo sapiens
tctgatgcctctgacattttaccttgtctttggacaaattttcacaatgtttaaaaggtatgctttaaaaagatatgctcttacataacttttctgtgccyggctattctcccatatgttaaaggaggcctcctttccctggaccaccatgaccacccgagggacttgcaggttgccagggcatcacctgtcatgttcttt

SEQ ID NO: 401906 - DNA, 201 bp, Homo sapiens
tgatattttagatggctgggattttagatcagccatacctgaggcaataagagttggtcgaatgttaccaatccttgagcagacacagatgagcagttgcrgggtcgttcgctgctggatgtgggctaggagacccctggtttggggattatgaaggcagcctccttttcttccctgggctctggctgctgttttcccagt

SEQ ID NO: 401907 - DNA, 201 bp, Homo sapiens
aattttgcacccagaggaagttcctcattctcttctgccactgggtggcccttggctgaacattggagtccttgtgctcagtgacaggcagggtagagacrcggtggaggggaagaacactggacccaaagtcaggatcacggagcctgatcctgtgtctggggaaccctgggggagctgcttttttgtcatatttttgtt

SEQ ID NO: 401908 - DNA, 201 bp, Homo sapiens
tctcttgggtcctcagagggacatgctcccaaccccatctttcttttctcttgccgtctgatctgagctcctctccccaaaatcatgaaagggagacaccrgagtctcaaagtggccgatccagttgagttttgacatgtgtgcattgccaattcaaagtgcaggcaaacttggtggggatgaaaaggatttgatattggg

SEQ ID NO: 401909 - DNA, 201 bp, Homo sapiens
agcaattggaagcctttgcaggggcctcatggatgcccattcggatgctcccatttatatcaccccattggcaacaccccacccattcccaccccagcgcrtctgccaggaccacagagaggaagccatgtcatctacttagctgtaggacaatttacacatgagtgggtgcctcagtttccttctctgtaaaatgaaggt

SEQ ID NO: 401910 - DNA, 201 bp, Homo sapiens
cagagggacaccctgggcaggtgggacatgcttagtccgcaggtgaaggcgtgaaacacagcacgcccaggggcagatacgcaaatctggtcaagcccacyggccacccacttgcctgccttctgtgcctctgtagttctgatcctgctgcacacttctgctggcagggacctcgacacccggcaaggttcttccaagcag

SEQ ID NO: 401911 - DNA, 201 bp, Homo sapiens
gactgtaggactagtgtttaatcaagagaaatgattaatacagaaaggaacaaagtttagcaattggaagcctttgcaggggcctcatggatgcccattcrgatgctcccatttatatcaccccattggcaacaccccacccattcccaccccagcgcgtctgccaggaccacagagaggaagccatgtcatctacttagc

SEQ ID NO: 401912 - DNA, 201 bp, Homo sapiens
aaaatgcaggcttcagtgttctctagaatgggagtaatcatcgctacttcccagggctgctgctgtgagggggacataggatacatataattgacaggccrcttggctggtatgcagtaaactgtggttatctttcccctacaacatctaatgctgtgcattgcacatgtaagaatcagtgaagtttgaggccgggtgcaa

SEQ ID NO: 401913 - DNA, 201 bp, Homo sapiens
tatccaacttccagccccaagttactttctgtacccccgttttactttatattgtcattaaagcacttaccagtatttggaactgtggtatttacccattytctcacccgcaagaacgcaggccccataggatagggatcccatccctctgtccccttgcacaagtgctggcatgagagaggcacccagtgaattttaggt

SEQ ID NO: 401914 - DNA, 201 bp, Homo sapiens
aagtgccagtccccagcggtgctctctcggactgaaacgctgctcctctccaactgaaaaaacagtcggctctcattaccaccaccaaaggtgaagttcaracctgccaaaagaaaaacttttccgttatgaaaaatattatttgacagttatgcaagtgacagagaacattaacaaataagaacatatcctgtggattct

SEQ ID NO: 401915 - DNA, 201 bp, Homo sapiens
agcactgctacaaacccagacattcacagggacccctccacctgaagtccaccataaggtagaagcttccggaaggggtgatgcaaaggggtcaaacattyagactacgcctcagagctgcatgattccttcctctaactgtgaagcaaatacagcgatttctctgggtctgccatcgaggccttcttccctctgctctca

SEQ ID NO: 401916 - DNA, 201 bp, Homo sapiens
gtctactctgtaataatattttggtcttggtaagatccaaagactatcccaaacacaattatcttgtcactgcttaggtggcaatttttaatgagtaaagrattcaaccggtatcttggtattggtggtattagtggtatatattatttgaaatgacaatcagctactacaaggatgggaaaaattaattattggtaatct

SEQ ID NO: 401917 - DNA, 201 bp, Homo sapiens
atcgatggtgctttccattagagccacggcagtttctaaaggaaaaagtaacaagactgcaaaagtattgagggcagtgtccttggtgtctgtgaattgtrgtttacttttgtctgtggaggttaaccttgctgtcttcagggcacgctttcgtgatcataaatagtctactctgtaataatattttggtcttggtaagat

SEQ ID NO: 401918 - DNA, 201 bp, Homo sapiens
gggttgggcagtcctcacagggatccaggggatgtcctctggacggctcgctcccccttgcagaaggaagcacagccagccacctgccttcttctttaggrcaagcaggtttcagccttctccttcaggctgcctcggtggggatgttggcagcacagaaggctcagggagggctcccagccttggccaatccctgagagg

SEQ ID NO: 401919 - DNA, 201 bp, Homo sapiens
atggtattccctagagtctcctctctacctctccttacacacatgcacacacgacttcacttaagtacatacatgtcatcgtatcatacataagatgcatrtgtgtcatcttaacataaatgcagaatgcacttcagagggtggagttgggaaaccactcaaacacacatttccatgtgcttttgaagtcatcaaaaaatt

SEQ ID NO: 401920 - DNA, 201 bp, Homo sapiens
ttccatgacagcatattgttagaattgttctattttattattgttgttgttaatctcttacagtgcccaatttggaaaataaactttacgtaggtacatakgtataggaaaaagcatagtatagtatatctgtggcttcaggggctcttggaccgtatcccgcacagataagcggggaactgctctacataaatcgatggt

SEQ ID NO: 401921 - DNA, 201 bp, Homo sapiens
gcaccgtccttgccctctagcctgagggtcacttggagttaggtgcccagctctgaaggctacaggctcagcataactggttgatggtcagttaataaaaygtatgggattcgtgaatgaatgaagaaatgagacattgttgctgtctacatcagaaagccttggggcatcctagtcatagtttcaaggctgctgttcacc

SEQ ID NO: 401922 - DNA, 201 bp, Homo sapiens
tccatttgaagggctaccgacagaaggactatttcatcgccacccaggggccactggcacacacggttgaggacttctggaggatgatctgggaatggaartcccacactatcgtgatgctgacggaggtgcaggagagagagcaggtgaggagtgccgcccagcccggtccctccagggcagcctgtgcacctgaggcac

SEQ ID NO: 401923 - DNA, 201 bp, Homo sapiens
cacacacggttgaggacttctggaggatgatctgggaatggaaatcccacactatcgtgatgctgacggaggtgcaggagagagagcaggtgaggagtgcygcccagcccggtccctccagggcagcctgtgcacctgaggcactgtccccgttcattacaaatgtcccacctgccatcactgcaaacacatgggtgagac

SEQ ID NO: 401924 - DNA, 201 bp, Homo sapiens
accatgaagggtgcattgtagacattaccacatacaccccatgcagccatagggtgaccagccacctacttagccagggactgaggggtttgctgggatgrgggattttagttttaaaacagggatggtcctgggcaaagcaaggtaagttggtcaccccacccgccaccccaaggttaagatggacttaccttcattttg

SEQ ID NO: 401925 - DNA, 201 bp, Homo sapiens
ggatggataagtggatggatggatgggtggatagatggatggataggttagtgaggttagaaaagtaggcagaaactggatcatgaaggccctataaggaktttgcacataatagaaggtcatttgaggagattgagcaggagagtgacaaatggaactgtgtatttgaaagatctctgtggctccacgtggatagcaggc

SEQ ID NO: 401926 - DNA, 201 bp, Homo sapiens
ccagactgtgtcactggtaagggaaaaggcaaagaaaacaggcaaaatattgatgtttatctgcagagctgaatgtctttttatctcatagaaaaaaaaaataggtcagcctcccctgaaatgcagggcaagcctcctatagtccagtcaagagcatttcgagtgtcacttgccatggaaggaagctggagaccacgatgt

SEQ ID NO: 401927 - DNA, 201 bp, Homo sapiens
acactatcgtgatgctgacggaggtgcaggagagagagcaggtgaggagtgccgcccagcccggtccctccagggcagcctgtgcacctgaggcactgtcyccgttcattacaaatgtcccacctgccatcactgcaaacacatgggtgagaccaagccaggaccactagggaaggagagagattggaaatgaaaaaggtt

SEQ ID NO: 401928 - DNA, 201 bp, Homo sapiens
acacagaaattgaaagagcaacccaaggagttgggttgctcttccacatggtcaggatgagccaaggcttccgggtagggcttttagggcaagtgggcccmagctgagcccagcaggggcagggccaagatgagcagaaggaagagataggctctggaaggagaggcaggaggaggcaggtgtgggcaggtgcaggcagat

SEQ ID NO: 401929 - DNA, 201 bp, Homo sapiens
aaaaaaacatgttccagtctagttctgatacacagaaattgaaagagcaacccaaggagttgggttgctcttccacatggtcaggatgagccaaggcttcsgggtagggcttttagggcaagtgggccccagctgagcccagcaggggcagggccaagatgagcagaaggaagagataggctctggaaggagaggcaggag

SEQ ID NO: 401930 - DNA, 201 bp, Homo sapiens
atggaggaaggcagcccatgtgggccccggaatgctgctccctgctgcatttttaggactagaattgagttcatctgctctgtatgtcagagcagctatgrtctgtccgatctgtggtctgtccaaactgtgcactttttagaaataattctgtcccattttacatgcgtgggattgatatgtggttttcacaaaacccac

SEQ ID NO: 401931 - DNA, 201 bp, Homo sapiens
acaggggcctgggaggggcgctggaggcaggtgtgatgccagagcggagtcctgtgaacaagggccaggagatgacggtcgattggaaagaaaccgccatygctgctccaaagtcacccttggaattgtagtaattttgacaggctgtggcagctgaacatcttcattaatgtgaagacaatcatgaagacaatgaaaatg

SEQ ID NO: 401932 - DNA, 201 bp, Homo sapiens
tgacccttctagccatggaacggtggtcatccgtgagccacggcctcaggaggtgggttcccttaaggctccggctctgggggcagcgccccctgggagcstccatttttaagcctgtgaagaaagggctgctgacgtttggggcccccgctatgagcatagcctccactcctccccaatccctgtccgtgcctctacata

SEQ ID NO: 401933 - DNA, 201 bp, Homo sapiens
ggaaggaaggaatgacccttctagccatggaacggtggtcatccgtgagccacggcctcaggaggtgggttcccttaaggctccggctctgggggcagcgycccctgggagcgtccatttttaagcctgtgaagaaagggctgctgacgtttggggcccccgctatgagcatagcctccactcctccccaatccctgtccg

SEQ ID NO: 401934 - DNA, 201 bp, Homo sapiens
ccccattcaagaggtcgacacacgtgaacttgtttctcagctgtgggagctgtgtgactccagctggtgtgtgtgaggccttctgtagttgggtggggggrtgtcatgatgcattgcacccacagatctatttgcttctattaaattgttccgtgcaggaaaagtgccatcagtactggcccgaccaaggctgctggacct

SEQ ID NO: 401935 - DNA, 201 bp, Homo sapiens
gggtttcagagacagtggcaggcctcctgtacaattcccatctccctagctgcctacctcccatttatctctcaggagaattacattagccattagctgtragaggaagaacaaaggggactaatgaagccacaggggcctctctggggccctcctccaggtgccttctcagagccccccaactgtccccatttccactgg

SEQ ID NO: 401936 - DNA, 201 bp, Homo sapiens
tgcgtgggaacttgctggaaggaaggaatgacccttctagccatggaacggtggtcatccgtgagccacggcctcaggaggtgggttcccttaaggctccrgctctgggggcagcgccccctgggagcgtccatttttaagcctgtgaagaaagggctgctgacgtttggggcccccgctatgagcatagcctccactcct

SEQ ID NO: 401937 - DNA, 201 bp, Homo sapiens
ctcaagaaaaacatctttagcgtgttcagttaccattagcgtcaggcacccagcaagcttgtcctgaatacatttcagagtccgagcccaattggaggagygaggcaggtagaggggagtaaaacaggccttgttttcgaggactgctgctctgaagtcccactgcactacccagtgtggggagtccttgtggcaagctac

SEQ ID NO: 401938 - DNA, 201 bp, Homo sapiens
ttgatgtacagataactagtttaaaataatatgtgggatttaattattagaagagcattgttttcttgagaaagaaagccatatggtcagtgtgttatatwtgaattttatgccttaccttgcttgagcaggctcatatcacacctttttgttacatcatttgcgtgtgtgtgtgtgtgtgtgtgtgtgtgtgtgtgtgtg

SEQ ID NO: 401939 - DNA, 201 bp, Homo sapiens
gccccaggtaccactccctgaacctgcgggaaggctggcacagacggcatgtgagtgcggcacatgccaggccacggggctcctttcttgtaactctcaakgccccatgaggcaggccaggtgaccgaggctcaaagggcaaagtcacttgttctgatggctcagctgcaggacagtgactgtagggccagtgctctgtgc

SEQ ID NO: 401940 - DNA, 201 bp, Homo sapiens
atgcacgctggacacagggctgtggcgtgattgtcagatcggaggcagagtaattgtgctcaaagcaagaataattaataagcccacacttttccacagcrgaccttcttattaaagtatcagaatttaagcagcccaatgttgtacatatggatgtaaatgagatacacattgtccatttgaacagctctaactttgttt

SEQ ID NO: 401941 - DNA, 201 bp, Homo sapiens
acatgtgttccttggactcctcaaaggctttgccagagggtggaggctgtgtgtgtgtgtgtgtgtgtgtgtgcacgcgcgcacgtgtgtgtgtgtgtgtkcgtgcacatgcacgctggacacagggctgtggcgtgattgtcagatcggaggcagagtaattgtgctcaaagcaagaataattaataagcccacactttt

SEQ ID NO: 401942 - DNA, 201 bp, Homo sapiens
tccttccacaaaacgaccttctcggagctccactcggactccactcgggcatcctgcatgcttcgcatcacacacagggacaggtgagggataaagtaccyggcaggagcccacaggggctgtgacacaggagggtctggcacaaactcgctgggcttctcacgcccacaacagatccagtgcctgccctgcagagcccag

SEQ ID NO: 401943 - DNA, 201 bp, Homo sapiens
atgactcacttgtacacaggtcttgatgctgagctccaaacagtcagtatcacgtaatgcacctgccactgtctcctccatgccagccacagagccacccyggccaccagactcagatgctgctcatttgagctctgaagggaaatgcagggccctggtttcttgagaaagtgattcccttctctccagcagagctgccaa

SEQ ID NO: 401944 - DNA, 201 bp, Homo sapiens
ctagggtgcaaggcggaaggcatgagggtcccttttagaatccagatgaggggtgtgaggtgagcggagcctctggggctgcggagccctcccagtgcccrgagcaccctcgggaggccgtgccagccctcaggaggaagcgcatggaccctgcgctgggctcagggcaagtgattggtgcttctgggaacttaaagagtt

SEQ ID NO: 401945 - DNA, 201 bp, Homo sapiens
ggaggtgggtaggcctcctcccccagcctggctcagacatccactgggcgtccttccacaaaacgaccttctcggagctccactcggactccactcgggcrtcctgcatgcttcgcatcacacacagggacaggtgagggataaagtacccggcaggagcccacaggggctgtgacacaggagggtctggcacaaactcgc

SEQ ID NO: 401946 - DNA, 201 bp, Homo sapiens
aaagcatgtctatttttttagaccagtgccactatgcctggccaattttttttttttttttacttttttagagatggagtcttgctatgttgcccaggctrgtgaggagacagctcagggtccagggaacagcgtgggccaggctgacggcggtgagcagagggcagttcagtggcctgggaacagcacccaggtggccga

SEQ ID NO: 401947 - DNA, 201 bp, Homo sapiens
taaaaaaattagctgagtgtggtggcgggtgcctgtaatcccagctacttgagaggctgaggcatgagaattgcttaaaccttggaggcggaggttgcagygagccaagatcacaccactgcactccagcctgggtgaaagagcaagactctgtctcaaaaattaaaaaaaaattgacatccaaaaaaatgagtcaagtct

SEQ ID NO: 401948 - DNA, 201 bp, Homo sapiens
acttcccttgggtatacgcctaggagtgtatatactaggagcggaattgctaggtcacgtcataactctatgtcataaacttactgtttaacatttttgasgacctgccagactgttttcctcagtagctgccccattttacattcctaccagcaatatataaggttctaatttctccacatcctcaccaacattgtcatt

SEQ ID NO: 401949 - DNA, 201 bp, Homo sapiens
tcaccaacattgtcattgtctttttgattaaagccatcctagtggatatgttctttgcttttttaaaacatcttttaaaatcacatctgtttatgcctacrtagactgttgtttagttttacttgtgtttgaactttatagaaagagcatcattacagcatgttgtcttctgagacttgcttcttccactcaaaattgtgc

SEQ ID NO: 401950 - DNA, 201 bp, Homo sapiens
ggccctcctccaggtgccttctcagagccccccaactgtccccatttccactgggtccttggttctgctcatcctctctccttggcaaagaatgagaactyggggtcagctgtaggtaggatgactcacttgtacacaggtcttgatgctgagctccaaacagtcagtatcacgtaatgcacctgccactgtctcctccat

SEQ ID NO: 401951 - DNA, 201 bp, Homo sapiens
tggacatcaacaatgtataagagatatcattcatctacatacctagtatggtattctcaaggtgtcctaattattgttaattgaaaattaacaaaatattsttcattgtataattattgtataaatactatctttttgtggctctgatttgcatcattctgattccaaggtcaaccccatcacttcatatatttgtggatg

SEQ ID NO: 401952 - DNA, 201 bp, Homo sapiens
gtgcagggtgtacactgcccagttctaggaagagctgggggcactcacatcaaccctggtagggaatgagtcagggatccaatttcattttccccaggtakaaaaccaatttttccagccccacatattgaagaatctctcctttctgccatatgttaaggtttcatatatatatgtgtctgtttctagactctgttctgt

SEQ ID NO: 401953 - DNA, 201 bp, Homo sapiens
tgaaacaggactgtggagggccacccctttgcccttgcaaatcttgcccttgtcatgctttgtcatggggaagagggaagagtgacagagggaagtagggkattcccagcccaggactcttcactctgcctgcgctgtagcggccatggaggaggacacccacgcgagggaaaaggaggctgacccttcatcaggagcctc

SEQ ID NO: 401954 - DNA, 201 bp, Homo sapiens
caggactcttcactctgcctgcgctgtagcggccatggaggaggacacccacgcgagggaaaaggaggctgacccttcatcaggagcctcagggtcccccrtgacccatggcccatagggaccagtcttcctggggttggtgctccaagcatgagaccagcacagaagcagtggggctcaaggacgccctcacttccctct

SEQ ID NO: 401955 - DNA, 201 bp, Homo sapiens
cttgataaggaatgttaaataaaagtaatgattgattaagctagagaagagggatgccttcgtttgccacctaccaagttaattttgttgtctatgttctycattgcatcattataagacgttgttgattctgaatggggaactcttcttgggtaaatgtcagcggtgggatcaaagagaaggatcgttactggaatcata

SEQ ID NO: 401956 - DNA, 201 bp, Homo sapiens
aatatgaccaggtagaatacaaatatctaattatgtttcactaatcatgaaaagatgctcaactctctagaaattagagaaatgcaagttaaaatgacatkatcattttacctatcagatggaccaaaatgcaaagggttggcaaaatatcccagagaagagaaactggctccatcgcacattatgggcagcattccgcaa

SEQ ID NO: 401957 - DNA, 201 bp, Homo sapiens
atatttaaaaatcagaaaatgtttacataaaaatatgaatttcttctttaggaaagtgggaagaactaggcactgtgggcaccccttgtgcttggccccartgggctggaactcagaagtagccatccctgcaggcaggacatggggagtcccaactctcgcccccacctggcctccccacaccacccagggatgttctta

SEQ ID NO: 401958 - DNA, 201 bp, Homo sapiens
gttgtctatgttctccattgcatcattataagacgttgttgattctgaatggggaactcttcttgggtaaatgtcagcggtgggatcaaagagaaggatcrttactggaatcatattatgggatggaggattaactatatgaaatctacaatccctgatagcctcagaatcctatacaaggggtgttggctggtcgatact

SEQ ID NO: 401959 - DNA, 201 bp, Homo sapiens
caaactcctgacctcaggtgatccgcccaccttggcctcccaaagtgctgggattacaggcatgagccaccatacccggcctcctttgcttttatcaaatktaaacttctaggaatatattttcataatgtgtttctagccgtccttaagaattaatgaagttcttagttccattttttttttttcgcccttgactaactg

SEQ ID NO: 401960 - DNA, 201 bp, Homo sapiens
ggggcagggtgggggtgggagaggaaacggtaaagacccacagtggcctgggctcttctctccagcaagatgcaacaggacagggaaggagggcccccagkaggcccctggggtggcctggaacttgagaatgaactgatgctggcaggcacagccttcttcacttcttcacaagggtgggccccgccttagactgctggg

SEQ ID NO: 401961 - DNA, 201 bp, Homo sapiens; identical to SEQ ID NO: 89085

SEQ ID NO: 401962 - DNA, 201 bp, Homo sapiens
gggagctgacaaggattgcagtgcattgtgggctgcaacaaaatgcagcaagacaaccctaataaaaatcacctacagcccctacccaacaatcaataggygatgtccaggaagattgtaaacccatagtactcagcctatagggaaccgggggagggacctacacactaggggataaagtgcttgttaaaactgtgctgg

SEQ ID NO: 401963 - DNA, 201 bp, Homo sapiens
catccgtgagccacggcctcaggaggtgggttcccttaaggctccggctctgggggcagcgccccctgggagcgtccatttttaagcctgtgaagaaaggrctgctgacgtttggggcccccgctatgagcatagcctccactcctccccaatccctgtccgtgcctctacatacctctgtggcatttgcaaacccttttc

SEQ ID NO: 401964 - DNA, 201 bp, Homo sapiens
aaaaacagatatcccaacatccttcccagtaagattttattttatgttttgcatgatcaatggtgtttgcactaaactcagctttgccttgcagctccccrtgactgcaggccattcctggtgctcagaggccccaaatcagtctaactgctcagcatttgcacctaggactccagaacgttcctctttaggtgcccatct

SEQ ID NO: 401965 - DNA, 201 bp, Homo sapiens
tgagggcatctgggccctgcaactccatcctttgctcccctttcttcccgcggggaccctttcatctccctggcaggaccctgtctccacccgagggcacrttctctgacctcttctgcggagtaccctggcttgatgacgcttcctgttccttcccagggttgtgctgggggcatcagtctttgaacagtccctccctga

SEQ ID NO: 401966 - DNA, 201 bp, Homo sapiens
gtgtaaattgtcacaacctttctgggcagtttggccacaagcacaaagggtacggaactgcccgtactttacacactggcatcagcatctgggaatttgawttcaagagacagagatgatcacagaggatgttcactacagcattatgtatattcctgaccaaatagaacagggagcatgggtagttaaacagattgtggt

SEQ ID NO: 401967 - DNA, 201 bp, Homo sapiens
gcatttgcacctaggactccagaacgttcctctttaggtgcccatctccctgcacaggccctgggtaccttggttgctcgtgggtctggctgccaagcctrtgcttactgttgggacctgggctgcctggggcccagcgggtaagggtgctgcttcgtggccatgggtgccagctggcagggcccctcctgtggaactcag

SEQ ID NO: 401968 - DNA, 201 bp, Homo sapiens
cacagagcagcaaagggtgatgctgctcagcaggtcaccctcagggcccaagaagtattttcccatccccgtggagcacctggaggaggagatccgtatcwgatccgccgacgactgcaagcagtttcgggaggagttcaacgtgagtgtggggagggctctctgctgggtgccctgtggtggagacctgtgaaatccagt

SEQ ID NO: 401969 - DNA, 201 bp, Homo sapiens
tgcccagctacttaggtcataagtcaaatacttaaagagttaagtattttacttataagctcaggggagctgacaaggattgcagtgcattgtgggctgcmacaaaatgcagcaagacaaccctaataaaaatcacctacagcccctacccaacaatcaataggcgatgtccaggaagattgtaaacccatagtactcagc

SEQ ID NO: 401970 - DNA, 201 bp, Homo sapiens
agtaatgtggttctcagtgtttgagacaaggaggcatgttaatatcacttaagagagggtgtttaacctgacctaggctcttaagacacggcaagcatgaygccatcatgaatggaatgctctctagaaaaggagcctgtctcattcagctttcaaaaacatttctttctataaaaatattttccaaagttgtgcaatttt

SEQ ID NO: 401971 - DNA, 201 bp, Homo sapiens
taatctcagctactcaggaggcagaggcaggagaatcacttgaacccaggaggcggaggttgcagtgagccgagactgcaccgttgcactccagcctgggkgacagagcatgactccacctcaaaaaaaaaaaaaaaaaaaaaagaaagaaaagaaaagaaagcggagtgacttagacttgtcacttcatcactctgagtc

SEQ ID NO: 401972 - DNA, 201 bp, Homo sapiens
gacatccaaaaaaatgagtcaagtcttttttcctgttaagctggattaggaagggtctcttgagtggagtcacccattcccatgttttcctttcctttttrtttgtctttaacaatagatttatgaaaataacactgtagttcgtatcagtgatccaatatgaccaaagttccttcaactggagaaagcttgcaactctgt

SEQ ID NO: 401973 - DNA, 201 bp, Homo sapiens
tctagcacgtgcctcaaggaccatttgtcctcataaatgtgattattaggtagcaaggcagtgctacatgtggccccacccacggccaaccccacggtgcraagagcagcctttctgtccttacctgggctttaccctcctctatttccaagctcgtccacccaacattctctcactggatcattaccatgatgccgtgga

SEQ ID NO: 401974 - DNA, 201 bp, Homo sapiens
ttacgacttcagagaccacatatggtgcaaaccctggtaagaatctgaataaggatgttaccagaagagtggagaattatttcatgttgtatttgatgtaygtttcattaaaggaccttaagtacatgggggaggtgggaaggtaaaattcccaaggaaaagagccagctgcaatgtttcgcagtaaacctctgcagagcc

SEQ ID NO: 401975 - DNA, 201 bp, Homo sapiens
cctcagtcccggattctttctctgagtcaacagcaacaactaaagtcgcttctctgttacctcgtggggccttttcaggatgatggatccactttacaaamtatagtttggggttctggtgtccaggaagaagggcttatggagggagactcttttgcaaactgtgaagtgaggtcaggggttagggtctttctgcttctc

SEQ ID NO: 401976 - DNA, 201 bp, Homo sapiens
aacttgggaggcagaggttgcaatgagctgagattgggccactgcactccaccctggcaacagagcgatactctgcctaaaaagaaaaaaaaaaaggggggcggggggatgatgcagacatgagctttgtgtgtgttcttgtcatatcacacgtaaaggagacggtcagactggggctcttttctgttacaaaattatacg

SEQ ID NO: 401977 - DNA, 201 bp, Homo sapiens
caaggccactccctacaggatgccttccctgactgctgctctgggtcaggttgcatcttctcaaagaactgtatgtaatttacatcctttgttaatatgarcatgtgattaactggcttctgggtggatgcatcctggtgtcttcagagcccaacacatagtagatgcccagaaagtggtttttaaatgattatgctttgt

SEQ ID NO: 401978 - DNA, 201 bp, Homo sapiens
gaggagagctgggctgggggctctggaggtcccaagttggggtgcccttggattcctatgtagaggtggaaacctgggtctataggccttgactaggggtmtctggctgagaaacactggctgaggctgcaggaaagatgtgcctctgaggagcaggcctgtggaggccagacactgaggcagctcggtccccctggggcc

SEQ ID NO: 401979 - DNA, 201 bp, Homo sapiens
cctgggccaaagacccagactctgtcaaaaaaaaaaaaaaaaatacagaaacaagtagttcccactcacccttcctctctgctgttagtgtgcattcagaygatgccaaggaacgggcttctctgggcagagccggggctttgcgaggggtctttctcagccacacgtgtccagcatgtatgtggccttctcctggggcat

SEQ ID NO: 401980 - DNA, 201 bp, Homo sapiens
ggcgtgaacccgggaggcagagcttgcaatgagctgagatagcaccactgcagtccagcctgggccaaagacccagactctgtcaaaaaaaaaaaaaaaaatacagaaacaagtagttcccactcacccttcctctctgctgttagtgtgcattcagacgatgccaaggaacgggcttctctgggcagagccggggctttg

SEQ ID NO: 401981 - DNA, 201 bp, Homo sapiens
gagatcaagaccatcctaacatggtgaaaccccgtctctactaaaaatacaaaaaaaattagccgggcgtggtggtggtcacctgtagtcccagctactcrggaggctgaggcaggagaatggcgtgaacccgggaggcagagcttgcaatgagctgagatagcaccactgcagtccagcctgggccaaagacccagactc

SEQ ID NO: 401982 - DNA, 201 bp, Homo sapiens
agggcagatgtacctgggtacattcgagagggaggagggggaccgaggcccaagctttctggctgagtctggagtgtgagcagcagccaggccctccgtgrggctgggctccaggctgcccctccctccgtgtcaggggtcttcccactcagcctgtcggagttgctccagggccctggcagagtggagaggggtgctctc

SEQ ID NO: 401983 - DNA, 201 bp, Homo sapiens
tcctattttggtctatccaaaaagtggaatccaagcagctattaaacagaatgaggaagcttatctgggctgacatggaaactctccaagacagacagccrtaccagaaaagcaagctggagaactgccccgtggtgcatttcatctgtttctttcatatttaatgtggctatatggggacgtgtcttaaaattggtagca

SEQ ID NO: 401984 - DNA, 201 bp, Homo sapiens
attaagcggaaggcaggcagaaggttcgtgtcccaggagccacccgtcttcctgaattgccacccctgtcctaagcatgacacttcatttgtacatacttygagttatagtctccagaataattaattttaatatttatggaagaatcgattccgtgggaagaaagccaatttcctgaacatggcatgcggtttaatgggt

SEQ ID NO: 401985 - DNA, 201 bp, Homo sapiens
ggaaacaacttaaatgtccatcctattttggtctatccaaaaagtggaatccaagcagctattaaacagaatgaggaagcttatctgggctgacatggaarctctccaagacagacagccgtaccagaaaagcaagctggagaactgccccgtggtgcatttcatctgtttctttcatatttaatgtggctatatggggac

SEQ ID NO: 401986 - DNA, 201 bp, Homo sapiens
aaatccctttcctaccctgggtgtgtacctcgacctgccttctgccctcccccgagcccagccaccttttcccagtctcctgccgagctcccttcctcggkccctagtgcagtgacttcctgcagctcgccaccttgaccctggccttcctccccaataacccccacaaggagtgcctcccccacacgctgcacttgcagc

SEQ ID NO: 401987 - DNA, 201 bp, Homo sapiens
gaaaatccctttcctaccctgggtgtgtacctcgacctgccttctgccctcccccgagcccagccaccttttcccagtctcctgccgagctcccttcctckggccctagtgcagtgacttcctgcagctcgccaccttgaccctggccttcctccccaataacccccacaaggagtgcctcccccacacgctgcacttgca

SEQ ID NO: 401988 - DNA, 201 bp, Homo sapiens
tcaagtaaagggtgaggagagagaggggaccactccaaaagaggaggcagggatgttgggaagtggacggggatcaggaaaatccctttcctaccctgggtgtgtacctcgacctgccttctgccctcccccgagcccagccaccttttcccagtctcctgccgagctcccttcctcgggccctagtgcagtgacttcctg

SEQ ID NO: 401989 - DNA, 201 bp, Homo sapiens
cagagctggctcaaccatcggaggtcgcaggccaccagcccgtggcccacctggcagccttccaggtgaaggtgagacaaacaaggcatgacctgggggcygcccggctccccatcacaaacgccacaaacaccacaaacacaacccaccctgatcagagactaagcagagaaagcagggagaggacctagagttactcag

SEQ ID NO: 401990 - DNA, 201 bp, Homo sapiens
acaggcaggttagaagagaaaaagtgcccttggagaagagtgggttagaaccaactcccgttggcctcccagtgtggcgggaggaggcttcagggttgggrctcttgctggccacttgtggcaccagccagttgagctgcggcccacaccatggcctgtgagatgccatggtcatcagcacctatcagaaacatgagaaat

SEQ ID NO: 401991 - DNA, 201 bp, Homo sapiens
ccacttgtggcaccagccagttgagctgcggcccacaccatggcctgtgagatgccatggtcatcagcacctatcagaaacatgagaaattacagggtagrggattttgaaatatttgcaggaagtcagtacaacttgtaaaaaacaaacagtctgaactctcttcttccatgggcttgggcatttatcatatggtgtgaa

SEQ ID NO: 401992 - DNA, 201 bp, Homo sapiens
gctgcggcccacaccatggcctgtgagatgccatggtcatcagcacctatcagaaacatgagaaattacagggtagaggattttgaaatatttgcaggaartcagtacaacttgtaaaaaacaaacagtctgaactctcttcttccatgggcttgggcatttatcatatggtgtgaatctgcaactctatttaaattatgt

SEQ ID NO: 401993 - DNA, 201 bp, Homo sapiens
ttacagggtagaggattttgaaatatttgcaggaagtcagtacaacttgtaaaaaacaaacagtctgaactctcttcttccatgggcttgggcatttatcrtatggtgtgaatctgcaactctatttaaattatgtttcaatagaactttctgaatttgccttaaacttgtgggtcaggaataattagaaaaggcatatca

SEQ ID NO: 401994 - DNA, 201 bp, Homo sapiens
gggcgcggtggctcacgcctgtaatcccagcactttgggaggccgaggtgggcggatcactaggtcaggagatcaagaccatcctaacatggtgaaacccygtctctactaaaaatacaaaaaaaattagccgggcgtggtggtggtcacctgtagtcccagctactcaggaggctgaggcaggagaatggcgtgaacccg

SEQ ID NO: 401995 - DNA, 201 bp, Homo sapiens
tttcaatagaactttctgaatttgccttaaacttgtgggtcaggaataattagaaaaggcatatcaagcactgatttttttccagaaagttgatgataatrttggtataatttgtaatttatacaaaatacttataaacatttactaactacctcgggggctgtaatggtgtcgctgaccacgtagaagccaggaagaaat

SEQ ID NO: 401996 - DNA, 201 bp, Homo sapiens
taggtaactccagataaagaaccatgactatcatatgatgcagagaataaatacatgtgtacatacatacatacatacatacatacatacatacatatatwcatacacacataaaatcatgaccagtgaggtgcttatcgaaggcaaagagaatacagaatgggtagtagaagacggcagtttatcaataccagctatgcc

SEQ ID NO: 401997 - DNA, 201 bp, Homo sapiens
gccaggaagaaataaaaagctactaagagatcatcagtattcactaagcggctgcttgaagaaccctgcacctgaggatgataaattgaaggtgctttgcmaactgctaacaaagcgtgacttttcacttagctcaaacgactattctcagctaattttgctcatcttcaattccaggtttcactgtgtgcttacagaagg

SEQ ID NO: 401998 - DNA, 201 bp, Homo sapiens
ttaggtaactccagataaagaaccatgactatcatatgatgcagagaataaatacatgtgtacatacatacatacatacatacatacatacatacatatatacatacacacataaaatcatgaccagtgaggtgcttatcgaaggcaaagagaatacagaatgggtagtagaagacggcagtttatcaataccagctatgc

SEQ ID NO: 401999 - DNA, 201 bp, Homo sapiens
aagctactaagagatcatcagtattcactaagcggctgcttgaagaaccctgcacctgaggatgataaattgaaggtgctttgccaactgctaacaaagcrtgacttttcacttagctcaaacgactattctcagctaattttgctcatcttcaattccaggtttcactgtgtgcttacagaaggtgaagtgatagctgtt

SEQ ID NO: 402000 - DNA, 201 bp, Homo sapiens
ggtttaggtaactccagataaagaaccatgactatcatatgatgcagagaataaatacatgtgtacatacatacatacatacatacatacatacatacatmtatacatacacacataaaatcatgaccagtgaggtgcttatcgaaggcaaagagaatacagaatgggtagtagaagacggcagtttatcaataccagcta

SEQ ID NO: 402001 - DNA, 201 bp, Homo sapiens
cactgtgtgcttacagaaggtgaagtgatagctgttagtgctcccaagggtagaagaatttcacgaaccatcagatgatgccagtgttacatcagtgtcaytttcaagcaggaattttcaaacaaaatcagtccattcccatagcagttttattttatttttttattcatttcatggaatcccaatacaacttggatgttc

SEQ ID NO: 402002 - DNA, 201 bp, Homo sapiens
aaggtttaggtaactccagataaagaaccatgactatcatatgatgcagagaataaatacatgtgtacatacatacatacatacatacatacatacatacatatatacatacacacataaaatcatgaccagtgaggtgcttatcgaaggcaaagagaatacagaatgggtagtagaagacggcagtttatcaataccagc

SEQ ID NO: 402003 - DNA, 201 bp, Homo sapiens
gaaggtttaggtaactccagataaagaaccatgactatcatatgatgcagagaataaatacatgtgtacatacatacatacatacatacatacatacatacatatatacatacacacataaaatcatgaccagtgaggtgcttatcgaaggcaaagagaatacagaatgggtagtagaagacggcagtttatcaataccag

SEQ ID NO: 402004 - DNA, 201 bp, Homo sapiens
cacatttatttagtgattggaaaagaggttatattttagttttggaaaattaaataagtgtagatgtgaaaacaaaataaataaaaattctcagaggtatstttatctaaagtgagccagattcacgtgcattcaaaactcctctcctaggaaaacctcccctgattgtcttcttcaactgttaggaaatagtgttgaggt

SEQ ID NO: 402005 - DNA, 201 bp, Homo sapiens
tttataatacagtgatcacatttatttagtgattggaaaagaggttatattttagttttggaaaattaaataagtgtagatgtgaaaacaaaataaataamaattctcagaggtatgtttatctaaagtgagccagattcacgtgcattcaaaactcctctcctaggaaaacctcccctgattgtcttcttcaactgttag

SEQ ID NO: 402006 - DNA, 201 bp, Homo sapiens
aagccagaggcccaaacacaggattcttcactgtcgttagcaatttgggcacaaatctgaagggccagtttggtgcaggtgtgctggaggatacatggagraaaaaaaacatgttccagtctagttctgatacacagaaattgaaagagcaacccaaggagttgggttgctcttccacatggtcaggatgagccaaggctt

SEQ ID NO: 402007 - DNA, 201 bp, Homo sapiens
atttccctagtgactcacagtgtccagtatcttttcaggcccttatttgtatataaagttgtttatctcctttaatagtatctgttcaaatcttttgcctrtttttaaaattgggttgttaatgctatatattttattgtatgcaattaaaagcattattctgatgatatttccctaaatggcccaaaggattcgtgttcc

SEQ ID NO: 402008 - DNA, 201 bp, Homo sapiens
gagggaccccagggctccccatagggccaagactcacccaaaccgggacatgtaggcatttgcaattcccctgggctgcatcagagatggcctgtgacccrcagccccgcagccccgcccggagccaggtgtaaggagggggaagttgtcggtagccgtcataacacaatgatgctgctctctactaaataccagatgctg

SEQ ID NO: 402009 - DNA, 201 bp, Homo sapiens
gcttctaatataatttctaaagtacctaaaaatcaggctaaagaatattaccaggaaggcgtcgttaaatgaaaatttggcaagcctcttagttacctttwtccagctctgtgcaggaaatctgggatctatgcttcaggaaaccatttccagtccaccacgcctcagtcgatagtgcactggggatggcatggaggcatt

SEQ ID NO: 402010 - DNA, 201 bp, Homo sapiens
actatagttaccgccctcaagaatctgctaactgagtgtgacgtttccagagggttccctggaatacggatccccagttccctgttgggcgtaggcaggasagttgggagccacaggctgcagcgggtgggttctcttgagagtttgtgggtagagttcagaaggcctgcaaatctagacggagaaaacatttgcactttt

SEQ ID NO: 402011 - DNA, 201 bp, Homo sapiens
acacacggttgaggacttctggaggatgatctgggaatggaaatcccacactatcgtgatgctgacggaggtgcaggagagagagcaggtgaggagtgccrcccagcccggtccctccagggcagcctgtgcacctgaggcactgtccccgttcattacaaatgtcccacctgccatcactgcaaacacatgggtgagacc

SEQ ID NO: 402012 - DNA, 201 bp, Homo sapiens
taatgactcaggaaggagaccctaagcttctaccacatgccagactctgtgcccagtgcagcataaacgtcctcagaaccagcctggtcccagcctggccragccggacgttcctgggaaaggttacaggaggagcagggccaggcccacagcacttttagaagcccatgaaaatgtcttcatttctcttcaaatcacaaa

SEQ ID NO: 402013 - DNA, 201 bp, Homo sapiens
agcatctctagttgctgcccttccagaaagatcattttcagagagcatcatgcccagagttaacatccttctgcatttatgaagtgctttgctcccagccyggcactgtcgcagccctggctgagagggtgcagtggccaggctgtgataggcagacatgcaagagggccaagacaccagaggccggtgcacaagggtctg

SEQ ID NO: 402014 - DNA, 201 bp, Homo sapiens
aagttcccaggtgccaactgtgctgctggtccagggaccacactttgagaaccattgccctacacaaggaagaggggaaatggtgatacttgcttaaaaamttgtcactggtcctgtctcattttataaaatatcggtctcctgtaattagggaggtgttttaggaattttacatttgctaaatcttgctcataagttaca

SEQ ID NO: 402015 - DNA, 201 bp, Homo sapiens
ccaacaagcctgagaagggagtgaacagctgtccaggggccaacggccagggtgccggggctgggaccccaaagggacttcccttcatgccttttgacttygaaattgtcctctacacacaggtcccaaacaggaaacggttaacgacttctggagaatggtctgggagcaaaagtctgcgaccatcgtcatgttaacaaa

SEQ ID NO: 402016 - DNA, 201 bp, Homo sapiens
atgtatccattagggtaaagactggccttcttaatatttgaatatcacttgggaagaaaactacagttctaagaacatctctagtttttcttttggctttyttcctactgacccaatggctttgtcttccataaagctcccaaagctttccagatcccaagactcagctccctgctctcagcctccttcccctttatttcc

SEQ ID NO: 402017 - DNA, 201 bp, Homo sapiens
aataagttattcctacaaaaaagcagttcccctatctgcagtgatcctcaagtaatcatttcttgcccaaaaaccaatgccctctcagtcccctgccatcrtgctctatgtaatactgggttccactgcaccctggaaaccctctgtgctttaatatgttactcaacagattttccccggttgttttatatagctgcccca

SEQ ID NO: 402018 - DNA, 201 bp, Homo sapiens
attaaaataaatcagcattgcattggaagattgatcatttctatcaatcctcttgagatattggaggtataacttccattcctggcttcttcccttgcttrgccccagtcaaacatcacgagtcactctttttagcatcttttctggttcattttggggagtggaaaggatggactcttgtaataagttattcctacaaaa

SEQ ID NO: 402019 - DNA, 201 bp, Homo sapiens
aaaaatacaaaattagtgggacatggtggcgcacacctgtagtcccagctactcggggggtggctgaggcagaaagacggcttgagcccaggacatcaagsctacagtgagatatgatcgtgccactgaacttcagcctggactatagagtgggaccctctctcagtttaagaaaaaaaataaaataaaacaagcagacaa

SEQ ID NO: 402020 - DNA, 201 bp, Homo sapiens
tacttcagggtggccgtgaggatcagacaggatcctgtatgtacagtgtctagcacgtgcctcaaggaccatttgtcctcataaatgtgattattaggtarcaaggcagtgctacatgtggccccacccacggccaaccccacggtgcgaagagcagcctttctgtccttacctgggctttaccctcctctatttccaagc

SEQ ID NO: 402021 - DNA, 201 bp, Homo sapiens
cctcgcaggtactagcgcattccacttcctttagagaatgagcactggagtaaggaaggtcagatgtgtgcccatcccggcctgcagcgagtgcttgcccytcacaaggcagttcctggggaaagcctccagcgtgcgcgatttgcagtttagtttaaacggaaggaggtttattagaatcttggcagctctagaagaaga

SEQ ID NO: 402022 - DNA, 201 bp, Homo sapiens
agagacctggagtagggtggggattggcacccccctggagggcgtctccatgttctcgatgcctctgtttcctcctctggaaggcagggagggcccttctyagctctccacactatgtggaggagtcggtgagatgaagcctgcccagtgttttcactcggtgccgccctgaggtgcgagagccccatgcatggtgccctg

SEQ ID NO: 402023 - DNA, 201 bp, Homo sapiens
acgaggctaatgtgacactcacgctggggctggcgcattggaacaaatggttcacttcaaacattcacatcccaaaaaggaccccagtgggcatagggagyccagcccaagacgaagtatcagggagctgttgggagcatgggtcttacgtaagagacctggagtagggtggggattggcacccccctggagggcgtctcc

SEQ ID NO: 402024 - DNA, 201 bp, Homo sapiens
ctgtctacacacagcggcagaggtctctgtgtcctttgtcccatgcagagaccctgcctgtaagtctcactgaactgaaagttagatcgggagtctccatrtgacctgactgagagcttcatgttgtcaagtgtccatacgaggctaatgtgacactcacgctggggctggcgcattggaacaaatggttcacttcaaaca

SEQ ID NO: 402025 - DNA, 201 bp, Homo sapiens
gcggggggatgatgcagacatgagctttgtgtgtgttcttgtcatatcacacgtaaaggagacggtcagactggggctcttttctgttacaaaattatacrtctggagaatcatggtgaacgtgaactctgtgtgagatgctggcacgtgcctccggcacttcatgaaggaggctgttggttctggagcatccgtggcttt

SEQ ID NO: 402026 - DNA, 201 bp, Homo sapiens
caaagaagctgagaggcacagtgaggtgggacaccagcacgccgagggtctccacctccccaaggcaggacaggccatggcagaggcttcaggggagggtyccggctttggctgggggcgtgggagtctccagaggcagcgagcccaggacactgatggtgcagaccactggatttctggagaacactgtacttcgccagc

SEQ ID NO: 402027 - DNA, 201 bp, Homo sapiens
aaggggtcagcctccgcctcctggcctttgctttccttcctaatccagaaacatgtgggtcagcgcctgcatgaccaggatggatactggaagagtgggcyatggagcctttggaaaggtatccgggcatcatttccacaccagcattcgtgttatttctccgtgcatgaatggatgggccttgaagagcccgaaaaagca

SEQ ID NO: 402028 - DNA, 201 bp, Homo sapiens
cagggcctggtgtgtactcagtgcccagaaaggttgatttgtattattagcaattattctgagaaattaactctggccttgctggcctgtgcttcctgcastgagaggcctgatggagcccagtggtctgtgtggctgtctgcttcctagcactctccctcctcggctgcttttgtggggcctgcatggtggagggatgcc

SEQ ID NO: 402029 - DNA, 201 bp, Homo sapiens
caggacttatagtagtccctatttcctagagagggtattagcaggcaatgaggtgacgcttaggttagaagcgcttagcacagggcctggtgtgtactcaktgcccagaaaggttgatttgtattattagcaattattctgagaaattaactctggccttgctggcctgtgcttcctgcagtgagaggcctgatggagccc

SEQ ID NO: 402030 - DNA, 201 bp, Homo sapiens
aaacaggtgcagtattagatacagacgcagagagggtcaacccacagctgtggttttcatgtctgtgggcaggacttatagtagtccctatttcctagagrgggtattagcaggcaatgaggtgacgcttaggttagaagcgcttagcacagggcctggtgtgtactcagtgcccagaaaggttgatttgtattattagca

SEQ ID NO: 402031 - DNA, 201 bp, Homo sapiens
tggttttggtcgactacaccatccggaagttctgcatacagccagtaagcatctctagttgctgcccttccagaaagatcattttcagagagcatcatgcycagagttaacatccttctgcatttatgaagtgctttgctcccagcccggcactgtcgcagccctggctgagagggtgcagtggccaggctgtgataggca

SEQ ID NO: 402032 - DNA, 201 bp, Homo sapiens
tttttctccatgtgtaacaaataatcattttgccctatgaatcatattgtcctgatttcatagaaaacaggtgcagtattagatacagacgcagagagggycaacccacagctgtggttttcatgtctgtgggcaggacttatagtagtccctatttcctagagagggtattagcaggcaatgaggtgacgcttaggttag

SEQ ID NO: 402033 - DNA, 201 bp, Homo sapiens
tcaagcgattctcctgcctcagcctcccgagtagctgggattacagacaagcaccaccatgtctggctaattttgtatttttagtagagacggggtttctscatattggtcaggctggtctcgaactcccgacctcaggtgatctgcccacctcagcctcccacagcgctgggattacaagcatgagccaccgcgcctggc

SEQ ID NO: 402034 - DNA, 201 bp, Homo sapiens
tgcctttggttttggtattgagggtaatatgggcatcatacaatgagtgttccctatgcttctatcttttggaagagatcatagaaaattgatttaatttmtttcttaaatatttggtagaattcaccagtgactcatctgtgcctggtcctttctgttttagaagattattaattatttatttattttcttcaatagata

SEQ ID NO: 402035 - DNA, 201 bp, Homo sapiens
gtgcataataagagaaataaaatggattttgttgccttctcgtttggttgcctttgagccaacatattttaaagtgtttgtttacattccagaaaagggtraaacatcaacggcaggtgagcttgatgttctgttaattcctgagagatcagggatgttttcttgtgttcgtgaacaactcggggagagctgaagggtgcg

SEQ ID NO: 402036 - DNA, 201 bp, Homo sapiens; identical to SEQ ID NO: 89109

SEQ ID NO: 402037 - DNA, 201 bp, Homo sapiens
ccaaagcctccaggcatccagcctgtgtcctcatcctgccagggcccctgctcctcctgtcactgatgaatgcagccagtcagtcaatcaacaaacctgcrtgaattcagtgcccagtgctaagtcccagaagtgacagagagacagagagaggagtctctggtctggctggggctgggttactttgtttcctgcaaatct

SEQ ID NO: 402038 - DNA, 201 bp, Homo sapiens
cacatcacccatctaatttttgtatttttagtagaggcggggttttgccatgttggccaggatggtctcgaactcctgacctcaagtgatctgcctgcctyggcctcccaaaatgctgggagtacaggcataagccactgcacccagcctcacagcatttataattgtgtccaaattggacatctcatcagttaaaataga

SEQ ID NO: 402039 - DNA, 201 bp, Homo sapiens
ccctttattctagtaggtcaggggactctggagttgggggtggtatttcctgggagacagccagcctgggctagtggagcatcccgcctttgcttttggtrtgggaaggagcccgacacacctggtctttctcaactcctgcaagtcacgtcttcccagaatctactgtggtaattccggccaggactcaaggatgtaaga

SEQ ID NO: 402040 - DNA, 201 bp, Homo sapiens
aggcctgggcgtcagagccggaccctgtgcccccatcctgagctcctcccagaccctgcagcttctccatgcagcctcatgtggagggagcccagtgccaytcttcatccccccaggaactccccaaaccctggggcctccctgcctgcactggattcgggtctgagggcagcactgcccacagagccctacatgtcgggc

SEQ ID NO: 402041 - DNA, 201 bp, Homo sapiens
atttatttacttatttatttattcaagatggagtgtcgctctgtcacccaggctagagtgcagtggcacaatctcggctcattgcaacctccgcctcccgsgttcaagcgattctcctgtctcagcctcctgagcagctgggattacaggcgtgcaccacatcacccatctaatttttgtatttttagtagaggcggggtt

SEQ ID NO: 402042 - DNA, 201 bp, Homo sapiens
gactaacagttctgcaggcttaacaggaagcctgactgggaagcctcagaaaacttacaatcatggaggaagatgaaggggaagcaagaaccttcttcacrtggtggcaggaaagagagagagaaggggaaagtgtcaccttttaaatcatcagatctcgtgagaactcactcactatcatgagaacagcaagggggaaat

SEQ ID NO: 402043 - DNA, 201 bp, Homo sapiens
gtttgggtaaagctcggcatttgtagtaaatgtattgtacttggaattgattatggtgtacacatcatttatttacttatttatttattcaagatggagtstcgctctgtcacccaggctagagtgcagtggcacaatctcggctcattgcaacctccgcctcccgcgttcaagcgattctcctgtctcagcctcctgagc

SEQ ID NO: 402044 - DNA, 201 bp, Homo sapiens
cagagtgaagggggatgaagaaaccgattgaaaagcagtgtcttgctgggtgtgaagaggacagcgtggccagagaacagggcttgaatgggaggggtagrgttagcagggcgagtggagggtggatggtagagggtccaggatgccaggctaggtcacccagatgtgatttctgctaagtggttccagggagggcagggg

SEQ ID NO: 402045 - DNA, 201 bp, Homo sapiens
attatataagtttgggtaaagctcggcatttgtagtaaatgtattgtacttggaattgattatggtgtacacatcatttatttacttatttatttattcargatggagtgtcgctctgtcacccaggctagagtgcagtggcacaatctcggctcattgcaacctccgcctcccgcgttcaagcgattctcctgtctcagc

SEQ ID NO: 402046 - DNA, 201 bp, Homo sapiens
gaagggggatgaagaaaccgattgaaaagcagtgtcttgctgggtgtgaagaggacagcgtggccagagaacagggcttgaatgggaggggtagagttagsagggcgagtggagggtggatggtagagggtccaggatgccaggctaggtcacccagatgtgatttctgctaagtggttccagggagggcaggggtctggg

SEQ ID NO: 402047 - DNA, 201 bp, Homo sapiens
aatcccccaaaatccccttgtgcagaaaaccaaccatgaacatacatggatgaggcgatgtgacagttaatgataggaactaaagaattattcttaggccrggtgcggtggctcatacctgtaatcccagcactttgggaggccgaggtgggcagatcacgaggtcaagagattgagaccatcttggccaacacggtgaaa

SEQ ID NO: 402048 - DNA, 201 bp, Homo sapiens
catggatgaggcgatgtgacagttaatgataggaactaaagaattattcttaggccgggtgcggtggctcatacctgtaatcccagcactttgggaggccraggtgggcagatcacgaggtcaagagattgagaccatcttggccaacacggtgaaaccctgtctctactaaaagtacaaaaattagctgggcgtggtggt

SEQ ID NO: 402049 - DNA, 201 bp, Homo sapiens
gaggcagaggttgcaatgagctgagattgggccactgcactccaccctggcaacagagcgatactctgcctaaaaagaaaaaaaaaaaggggggcggggggatgatgcagacatgagctttgtgtgtgttcttgtcatatcacacgtaaaggagacggtcagactggggctcttttctgttacaaaattatacgtctggag

SEQ ID NO: 402050 - DNA, 201 bp, Homo sapiens
ggaggccgaggtgggcagatcacgaggtcaagagattgagaccatcttggccaacacggtgaaaccctgtctctactaaaagtacaaaaattagctgggcktggtggtgggcgcctgtagtcccagccactcgggaggctgaggcaggagaatcacttcaacctgggaggcggaggttgcagtgagctgagattgtgccac

SEQ ID NO: 402051 - DNA, 201 bp, Homo sapiens
ccatttctttcaccgtctctttttactggacatcttatgataagaacgtaaatggaaagggcaagcctggagtgacaaagggaatcctccattcactccayacagtgctgttgctgggctcgggacgtggagagggcaggggccgtgaagacatcctggtgcctttgcagggtcgtcatgaggataaaggggatgggccag

SEQ ID NO: 402052 - DNA, 201 bp, Homo sapiens
ctttgcaagccagcctttcaggggcaggtcactggtggttcaaagagttatttcaacccacaatcccgacttttcttcccaacgctaatcgactggccacrtagaaacatctgacaaactgcccggatgtaccctcacatccaggagccacaatggcagaacatccgtttgcgcaacagtggggaagaatctgcccgagct

SEQ ID NO: 402053 - DNA, 201 bp, Homo sapiens
tgaagtcagaataataataactgggtagttgtgagcattaagtttaaaaatatgttgtggcagcactttgcatgagcagaccatagtataaatgccagctycctttccctggagataagaagtgattgtgattgtgcgttaagttctgttttaagcttcctagctgacaaggcaaaaatgaaacacaatggcttatattgt

SEQ ID NO: 402054 - DNA, 201 bp, Homo sapiens
tcactggtggttcaaagagttatttcaacccacaatcccgacttttcttcccaacgctaatcgactggccacgtagaaacatctgacaaactgcccggatrtaccctcacatccaggagccacaatggcagaacatccgtttgcgcaacagtggggaagaatctgcccgagctctgcagacagtccctcgggtggcactgt

SEQ ID NO: 402055 - DNA, 201 bp, Homo sapiens
attttagttttaaaacagggatggtcctgggcaaagcaaggtaagttggtcaccccacccgccaccccaaggttaagatggacttaccttcattttgtaartagaaaacccatggctcagagagttgaggtaactgcccaggctgctctgatggcaagaggtgcagctgaggcctggaccaacacctgtcagaacccaaag

SEQ ID NO: 402056 - DNA, 201 bp, Homo sapiens
gaagaatctgcccgagctctgcagacagtccctcgggtggcactgtgggcaccggcaggatgacgtccactccacatctgaggcttttcagtttatttgaraacaaaattattgggctcacatattgccatagacatggggtgttacttgcaggaggaggacactgtcatgtgacctcagcacccagagcagaactaaatg

SEQ ID NO: 402057 - DNA, 201 bp, Homo sapiens
atctaccagatcttcactaagcctcagggcaaccctaaagagaggacaggcatgtttatcctcatttcatccatgaggaagtggaagctcaaagaggtcakatgctgcatctggggtcagtgtggttttctgcctctgggaccccctacccctgaggccagtgtccatccccctcagcaggtgtgtggagccctccggaca

SEQ ID NO: 402058 - DNA, 201 bp, Homo sapiens
gtgcttagcaaggctgctggtccacgagcaagagggaaatgggcctcgggttataaggcgcagacgggctcgtttgacctagaattgtggaggggaacctraccctgtgaagtgccctttaaatcttcatctgacccctggaagaagtatgaaggaccatttcagatgataacacgtttccacagtgtgccaaaataatag

SEQ ID NO: 402059 - DNA, 201 bp, Homo sapiens
gatctaccagatcttcactaagcctcagggcaaccctaaagagaggacaggcatgtttatcctcatttcatccatgaggaagtggaagctcaaagaggtcmgatgctgcatctggggtcagtgtggttttctgcctctgggaccccctacccctgaggccagtgtccatccccctcagcaggtgtgtggagccctccggac

SEQ ID NO: 402060 - DNA, 201 bp, Homo sapiens
tgtgccaaaataataggaagctgtttcatttgttcatcgaacaaaatatattcagtactcatgcagacaaattcttttacagaaggaattgaaggtaaatgtttacaaattatgtaataaaatgttatctataaaaaataatacgtaaaagaacacagtcgaaaaatgagtagagaatatgaccaggtagaatacaaatat

SEQ ID NO: 402061 - DNA, 201 bp, Homo sapiens
agggagttccctggaccccacggaagaagctgtctccatgaaggacagggaccgtgccgtgaaccttttattctcccactgacatggtatgaaggcatttyggttttaagcatcttttttcctaatttctcagaaccctttgaagatcttgcacttgacttctaaaattcagtccaattccttaataagtacatcattatt

SEQ ID NO: 402062 - DNA, 201 bp, Homo sapiens
ggcactgtaagaattccaccaagcctcactcacttgggcaactgcccagaagggctcagcagtgttcagacacctcatgtctcagtaggtgaccgtgcccwtggacaggaagctaccactccagggccgtgctctctccattcagagtcatggatagtaggagagtctttataaatctgaactctgcatgtaccatcatga

SEQ ID NO: 402063 - DNA, 201 bp, Homo sapiens
tgaatttttggtagagattgtggtttcaccatgttggccaggctggtctcaaactcctgacctcaggtgatccgcccaccttggcctcccaaagtgctggrattacaggcatgagccaccatacccggcctcctttgcttttatcaaatttaaacttctaggaatatattttcataatgtgtttctagccgtccttaagaa

SEQ ID NO: 402064 - DNA, 201 bp, Homo sapiens; identical to SEQ ID NO: 89105

SEQ ID NO: 402065 - DNA, 201 bp, Homo sapiens
tggcatgatcttggctcactgcaacttctgcctcccgggttccagcaattctcctgcctcagcctccagagtagctgggattacaggagcccaccaccgcrcccagctagtttttgaatttttggtagagattgtggtttcaccatgttggccaggctggtctcaaactcctgacctcaggtgatccgcccaccttggcct

SEQ ID NO: 402066 - DNA, 201 bp, Homo sapiens; identical to SEQ ID NO: 89106

SEQ ID NO: 402067 - DNA, 201 bp, Homo sapiens
tgaaaaacgtctattttccagctgaataaacaagcctttcaagaagaggaggatgaagaaaagacggcatgtgtccaagttgagctgagacggactgtaarcccaggcctgcctaaggcccccacagtgggcatcaccagggctggggtcttaggggccgccagcttcctccacccacctgcctgcacagacagctcctgg

SEQ ID NO: 402068 - DNA, 201 bp, Homo sapiens
ttccgtgattgggttctttcacttagcatcatgctttcaaggttcatctatgttgtagcatgaatcagtaaatcattcttttttactggcaaatagtattygcttgtgtggatatactacactctgcatatccattcatcagttgatggacatttaggttgtttccactttggagctattataaatagtgctgctttgctt

SEQ ID NO: 402069 - DNA, 201 bp, Homo sapiens
gttgtggtttccttggcttccacatcctgggctctgcattgcaaaacacagctgccctggcatctcatgatcgggtgggagggaggcagagggagggggtmtaaaaccagccaccaacactgagcccttgagaggctgacacatgttctcagttcctactggagagccttcaaggtgagaagctcaggagggaccccaggg

SEQ ID NO: 402070 - DNA, 201 bp, Homo sapiens
atcgacggcccagggcctggcctgccccgtgctgactcccccagtgagagggaggcacacacctccctgtgctcctcctggtcaccctcccacagtttcaytggtgctgctgctctggactctgccctgcacctccagaggcccctccagaaagtgcaagaccatgagagggccctgactcacaggagctcatgttcaagt

SEQ ID NO: 402071 - DNA, 201 bp, Homo sapiens
tttggaatcgacggcccagggcctggcctgccccgtgctgactcccccagtgagagggaggcacacacctccctgtgctcctcctggtcaccctcccacartttcactggtgctgctgctctggactctgccctgcacctccagaggcccctccagaaagtgcaagaccatgagagggccctgactcacaggagctcatgt

SEQ ID NO: 402072 - DNA, 201 bp, Homo sapiens
atgaagtcatatcaaagaaaatactttgtaacctataaagcacagatgcttgctaaacaactcctgtaaacatacattatcccccttccccccaccccccscgcacacacacacacacacacacacacacacacaactggtgattgtaactcactcatctctctttcccacagttgttttgaaaacttctgggtttctgaa

SEQ ID NO: 402073 - DNA, 201 bp, Homo sapiens
tgctgctcagaggggataggggccccgcggcattccttgcacacctgacttccctgactgggacaaaggagttggttagcgtggtgcttcccaaagacgtrtgcactgaagccctggggatcatggtaatgttcgtgctgattctgtgggtctggggtgtggacagagcatctgcatttctaacaagcaccctcccgggag

SEQ ID NO: 402074 - DNA, 201 bp, Homo sapiens
taggcacctgctctaggccagggtccatgggccctgagataccatggaaatgcaaaggcaagtctccgccttcatgcagcataggatctggctgatgagaycatcactttggccacaccactgttcaccccacatgaaagagcaccctggggaaagccagggtctgtgtctccttcattctctgccccatgcctggtgcaa

SEQ ID NO: 402075 - DNA, 201 bp, Homo sapiens
ggacagcaggtagtttgctccacgtgttttcattaattcctgtgctcagtagggaaactgacatgagcatggtgcttgaatccatcacatttcatactaaygctacattttcttccagtcattgccatctggacacatacaaggaacttttgaactggcaaataaagaagaaaacagagaaaaaaacagatatcccaacat

SEQ ID NO: 402076 - DNA, 201 bp, Homo sapiens
tggaacttgagaatgaactgatgctggcaggcacagccttcttcacttcttcacaagggtgggccccgccttagactgctgggtgacacctgtgcataagygctccaccccccagcgagagaaagcgggccgctaggactggctgtcctttactgtgtgactctccccagcgtcttgtctgtcccttcctacctgtcactg

SEQ ID NO: 402077 - DNA, 201 bp, Homo sapiens; identical to SEQ ID NO: 89091

SEQ ID NO: 402078 - DNA, 201 bp, Homo sapiens
attattaattcattcaaagggagatttactgatactctctttagtgctgtaagagatgtgacgatatcaaagctagtgcctgtcctcttggagaatgtaaytctttggggaagctaggacagatgcagattattactatgtaagatgggaagtaataaaagacctgggaaaacaagtgaatggcagacgcaggtcagaaag

SEQ ID NO: 402079 - DNA, 201 bp, Homo sapiens; identical to SEQ ID NO: 89094

SEQ ID NO: 402080 - DNA, 201 bp, Homo sapiens
aggtttaaatcccgaacctgcagcctccgcctggtccacaaagggagtccatcccaccctgccagggccttggtgggatggaggaaggcagcccatgtggrccccggaatgctgctccctgctgcatttttaggactagaattgagttcatctgctctgtatgtcagagcagctatgatctgtccgatctgtggtctgtcc

SEQ ID NO: 402081 - DNA, 201 bp, Homo sapiens
ctttccctgactgtaaagtgcaaataatatgacccaccttgcaggctgcttgtgagggtccatgagatattatgaagcttctagcacagtgcttggcaggrcactgatgggagctcttacctttattattaattcattcaaagggagatttactgatactctctttagtgctgtaagagatgtgacgatatcaaagctagt

SEQ ID NO: 402082 - DNA, 201 bp, Homo sapiens; identical to SEQ ID NO: 89098

SEQ ID NO: 402083 - DNA, 201 bp, Homo sapiens
tacatccccaataactcagactcattaatttatgtttgtaataattgttgaaataagtttgacagaaggtgacctttctgaatttgcaaagaaagtgattrccaggcaaatttaaagcagaagtccattgtggggaagatgttgtgtccaaagccacacacttttcaacgagctttaagcactttctccatagtgttgagg

SEQ ID NO: 402084 - DNA, 201 bp, Homo sapiens; identical to SEQ ID NO: 89101

SEQ ID NO: 402085 - DNA, 201 bp, Homo sapiens
ctagattcccctgtaagatctttcccctgctcctggcaggagcaccacaccatgggaaccccagggcccacgcagctgcccgggactgggggaccaggacrtggcacttctcacatgggtggaaagatgggtttacagaatggtggcatggagacgctgtggcctggcaaggatcaatggggtggcatctggcattagcca

SEQ ID NO: 402086 - DNA, 201 bp, Homo sapiens
aacccatttaccagaaataagtcctgcctcaagatgatagcatatgcctttcttatgccttcctgggcattttcttgaattacttttttgtggttgtttttaatgtgtaaatatacatccccaataactcagactcattaatttatgtttgtaataattgttgaaataagtttgacagaaggtgacctttctgaatttgca

SEQ ID NO: 402087 - DNA, 201 bp, Homo sapiens; identical to SEQ ID NO: 89103

SEQ ID NO: 402088 - DNA, 201 bp, Homo sapiens
ttgggtggttttcagagttttccttcaaaaagaaaaatacccctgagccactttaattatcgtctctcataacgtaaactttccaaagagttggctttacstagtgattttattaataggatctatattttgcaagcttgtagcaatggattaaagttagcaaggtgggaccctttttgtaataactaaaggaagataatg

SEQ ID NO: 402089 - DNA, 201 bp, Homo sapiens
ctcacatgggtggaaagatgggtttacagaatggtggcatggagacgctgtggcctggcaaggatcaatggggtggcatctggcattagccatcaggaagwcttaaggctgaagggacattgggcagggagctctcagggctgctccacccgcccccagggtgacagcccatagtatcacttagggtgggactgagagtca

SEQ ID NO: 402090 - DNA, 201 bp, Homo sapiens
ataattctattcaacttgcctttttttttttttttttttcctgagacggagtttcactcttgttgcccaggctggagtgcaatggcacgatctcagctcastacaacctcctcctcctgggttcaagcgattctcccatctcggcctcccgaatagctgggattacaggcatgcgccaccacaccccgctaatttcgtatt

SEQ ID NO: 402091 - DNA, 201 bp, Homo sapiens
atgagattcaaactctatctgattccagaagggaaaggcttaactagtactgtatgctgccagatctaacatttggcagggagattttggcaaaaaaaaaacacaggcacaaaaatattattgagtaaagagatgattgctgacctgcaggttgatttagccctgcaggtgagcacagtggcccaagaaccagtttccaat

SEQ ID NO: 402092 - DNA, 201 bp, Homo sapiens
ccacccaggtcatgggagagggaaggaggacctggcaggtgtgggaggagtggaggcaaagctggcaagaagacagggccacatgcagtgggcaggggagygggaatcgggaggctcaccaagtgggaaaaagagaaacttgagaaacccggccccaaagcagactccacagggatccgaggaactagggagggaggtggg

SEQ ID NO: 402093 - DNA, 201 bp, Homo sapiens
gactccctggccaccctgtgtgggctgtgactgtctctcagagctatacccgccctttctctgctggcagcccgacagagctggctcaaccatcggaggtygcaggccaccagcccgtggcccacctggcagccttccaggtgaaggtgagacaaacaaggcatgacctgggggccgcccggctccccatcacaaacgcca

SEQ ID NO: 402094 - DNA, 201 bp, Homo sapiens
ggagacacaacaatgattccactcaagcagaagataaggatgccacttggccccttggggttcctcatgcctctgagtcaacaggctaagcagggagttayggtgttggctgcggtgactgatccagactaccaatgggaaattggactactactccatagtggaggcaaggaagatcttctggaatacagaagatcccct

SEQ ID NO: 402095 - DNA, 201 bp, Homo sapiens
attattgccttatgcctccagctaaaaatcatccttatccccaccctagagcccccattgtccttgtctcagctaatgaatgatgctccctcccaccccarctcccaagatggaaaccccgatacctttgttgccccacttatcacccacatcccactgaccaccactgccagggaccctacctttgaaatccttctaaac

SEQ ID NO: 402096 - DNA, 201 bp, Homo sapiens
tgcacctgtcctgctccttcacctagtcccattggctatgaatggccaatgggtttcagagacagtggcaggcctcctgtacaattcccatctccctagcygcctacctcccatttatctctcaggagaattacattagccattagctgtgagaggaagaacaaaggggactaatgaagccacaggggcctctctggggcc

SEQ ID NO: 402097 - DNA, 201 bp, Homo sapiens; identical to SEQ ID NO: 89137

SEQ ID NO: 402098 - DNA, 201 bp, Homo sapiens
ccttctaccccggaaaactgcttgtgcaacaggctggatctaccagacgctcctcactgtgctcgccttccagctctggggcagactccggtggtgggackgagggtcagagtccccaatcctagacccccacatccacttgtcctcatggggctggtgctcatttccctgggaagcctgggagagtggacccagttctcc

SEQ ID NO: 402099 - DNA, 201 bp, Homo sapiens
aagacaaccctaataaaaatcacctacagcccctacccaacaatcaataggcgatgtccaggaagattgtaaacccatagtactcagcctatagggaaccrggggagggacctacacactaggggataaagtgcttgttaaaactgtgctgggtgtgcctgcttatcagacactcaatcttgcaagactgtcattaaaagt

SEQ ID NO: 402100 - DNA, 201 bp, Homo sapiens
ctcctggtcgcccgcgtcctattcaggttctgtgggttcccagggccctgtgctctctgtcccctgcaggcctccctcacctccccagcctccttggaccrgctgactccctttctccccaggcagccctccagacccctctagacaggggcaggcaccctgcagggcgcccctaccacatcgtgtgcttcccccgcctaa

SEQ ID NO: 402101 - DNA, 201 bp, Homo sapiens
tatgttaaggtttcatatatatatgtgtctgtttctagactctgttctgttccctgggtcaacaagcattaacaggcatttatattcatattcatatgttwttttttttggtcagatgaaatacattaactggtttgagaacaattctgtgttataaactcaaaatcgccagcagcaaattatttattacaagacttaaat

SEQ ID NO: 402102 - DNA, 201 bp, Homo sapiens
gggagtgccagcatccctgaagagctccgcgattgctcttctctgtaggctggactttacagtgggaacctcagtcactcaattaggaaacttaaatgctrtggggataattggatcctggggtggcaggggccaagtggcagcactcaactgtcaaaggcaaggtggatgtagttactgtaaggtacagcagagcaaagc

SEQ ID NO: 402103 - DNA, 201 bp, Homo sapiens
tgaacactgagggttggcgttgccaggggagactcctggtcgcccgcgtcctattcaggttctgtgggttcccagggccctgtgctctctgtcccctgcargcctccctcacctccccagcctccttggaccggctgactccctttctccccaggcagccctccagacccctctagacaggggcaggcaccctgcagggcg

SEQ ID NO: 402104 - DNA, 201 bp, Homo sapiens
gtgaggcctgctctgctctcctgggtagttgcagcgggacccctcacattctcctacatttgaagaagtgaacatcctcctggtagtctgggtgccgctcyaggctcctgccccttgcttgctgggtgaccctggacaaatctataacacctcgctttggctttcagtttcctcacccataaaacggggaccatcctagta

SEQ ID NO: 402105 - DNA, 201 bp, Homo sapiens
cgcttgaacctgggaggcagaggttgcattgagctgagatcgcgccattgcactccagcctgggggacagaacaagactctgtctcaaaaaaaaaaaaaaagtttcttgaacattcaggtagtagtttttgtatggacatgctttttcacttcccttgggtatacgcctaggagtgtatatactaggagcggaattgctag

SEQ ID NO: 402106 - DNA, 201 bp, Homo sapiens
agtgtctttttttcaggtgggatggtggtgaactcaataagagataattttgcacatcaggctagaccctgcatctgaagtggcagagggcattcattctscaggtgccacacaggcctctgaagggactgtgacctcctgggggcaggggtgtgctccccgacctcctgcgagcctccttagcactgagcaaaccgcccc

SEQ ID NO: 402107 - DNA, 201 bp, Homo sapiens
tcgcttgaacctgggaggcagaggttgcattgagctgagatcgcgccattgcactccagcctgggggacagaacaagactctgtctcaaaaaaaaaaaaaaagtttcttgaacattcaggtagtagtttttgtatggacatgctttttcacttcccttgggtatacgcctaggagtgtatatactaggagcggaattgcta

SEQ ID NO: 402108 - DNA, 201 bp, Homo sapiens
ggcaaatagtatttgcttgtgtggatatactacactctgcatatccattcatcagttgatggacatttaggttgtttccactttggagctattataaatartgctgctttgcttggtgcggttgctcacacctgtaatcccagccctttgggagtccaaggcgggcagatcacctgaggtcaggagttcgcggccagcctg

SEQ ID NO: 402109 - DNA, 201 bp, Homo sapiens
aagtctgcgaccatcgtcatgttaacaaacttgaaagaaaggaaagaggtgagttccaggcatctggccccggtatcacttcctttcagctgctgctgccrggctggggatgttcttaccacttccttttcctacttccctcccttcctcccactatcactgcagaaaaaaacccaaacacatgcagtggcttacagcatt

SEQ ID NO: 402110 - DNA, 201 bp, Homo sapiens
gcttcttgacctgcttgtcaggtgtgtgcctgagtgctcgtgccaactggggtctggtgcagaccatggaggatgagagagttttcctcattaggccttargctgtcctaaacttagggagcaggtaatggagccaggatggaaggaagtcagactctaacctctgcgcctccatttgaagggctaccgacagaaggacta

SEQ ID NO: 402111 - DNA, 201 bp, Homo sapiens
tgtactccaacctgggcaacagagtgagagcgagaccccctctcaaaaaaaaaaaaaaaaaaaaaaaaagtggactttggaaatagaaggacatagactcsctgctaagtaattggctcttttttcattctgcttttaatatatagttatttttcttttacatatctgttacacaccaattatatatccactgcctctgtg

SEQ ID NO: 402112 - DNA, 201 bp, Homo sapiens
acgggtttctatccaagccacagcgacaaattattctcctggtgactgaattagaagttgacagtaagttggaagaatgcctttggatctgacatgacaarcagattaatccttcatttatttccatttccagtcctccctccccccggaaagtttccacattctttcaagaagtgcctcctaaaagagcctagtaggtaa

SEQ ID NO: 402113 - DNA, 201 bp, Homo sapiens
atgagcagtaagcactttcttgtctggtgcccggagtgtaaattgtcacaacctttctgggcagtttggccacaagcacaaagggtacggaactgcccgtrctttacacactggcatcagcatctgggaatttgatttcaagagacagagatgatcacagaggatgttcactacagcattatgtatattcctgaccaaata

SEQ ID NO: 402114 - DNA, 201 bp, Homo sapiens
aattcagtcaaactcagatcattttcagcgattgttgcttcagtgctgatatgcaggggttggctgtcagctctccatttctcatccccaagtgcaagtcrgatgatctgcattaagcgctttttctctgcagtgccggagctgggcgaacaggtacattcatagccctcagcaacattttggagcgagtaaaagccgagg

SEQ ID NO: 402115 - DNA, 201 bp, Homo sapiens
atgttcacccaattagaggacagaaatgtctgcatgtctgcttgtgggtgagtctgggaaaggtttggcagaaaaacagactagagaggggacgtatgaartaggatttgttatttctggaattgctggtgagttttctttccttcttaaccttttcctgtgttttgcaaattttccatggtgaatatgtactgctttcct

SEQ ID NO: 402116 - DNA, 201 bp, Homo sapiens
ttcagcaaagataattctgaaaaaatataaatctgatgttattttttctagggttacaaagagaagaataaattcatagcagctcaaggtaagctttttaytaatttctcaacgtatttttggtaacgtgaatagctcttatttccttctctgtatgccaacaagaccaaggacttatactggatttgtgtgtgtgtgttt

SEQ ID NO: 402117 - DNA, 201 bp, Homo sapiens
ataaaaggcaaataatttagagactttatacctgatacgtttgaacatttgaggaaaaccaaagaatatgccacgttcattggttgctcctagcacggctraaccaagtgatgagagaaaggggtgagctccggtattcacataaatgacctgagtttctacatgtgccctgggtcagaatcttctctcccgtagccacag

SEQ ID NO: 402118 - DNA, 201 bp, Homo sapiens
cagctctgagaaggcaccagggtagagacctgcatgagagttggcctctgctttgagcagtgccgcgtgcatggataatcctgccggcaaggtcttcctgracatctctgaacactgagggttggcgttgccaggggagactcctggtcgcccgcgtcctattcaggttctgtgggttcccagggccctgtgctctctgtc

SEQ ID NO: 402119 - DNA, 201 bp, Homo sapiens
tttttggttttggagtttctggaattggctctctaacctgtttagaactaaaaatgctggagactctacttctaatagcgcagagagcactgatagatcaygtgcttactgtttgtaaatatgcaaaataaatacatccatactcctaattcaccacttataaaaggcaaataatttagagactttatacctgatacgttt

SEQ ID NO: 402120 - DNA, 201 bp, Homo sapiens
tacagcagatgagaaggacactgtgggagaaccgagtcaggatgcccaaactggatgacttccctgagggcggtgcactgctgaaggcccgtgggtctccrttctctgggataatgccagactccagcagaagctttagtctatttctgaatagagaaaatctgctgaaaaacgtctattttccagctgaataaacaagcc

SEQ ID NO: 402121 - DNA, 201 bp, Homo sapiens
cacacatgcacattcacacatgtgcacacacatacatccacacacattcacacacgcacacgtgcacacatgcacacattcacacatgtgcacacacacayacacgcacatgggtgcacacgtgtacgcacccacattcacacatgcacacacatgcatacatgtgcacacattcacacgtgcgcacatacacacattcac

SEQ ID NO: 402122 - DNA, 201 bp, Homo sapiens
ctaacagacacgttagatatccattcacacaacggatatgtgtagtcagagaaacacacacttattcccacacctatatggtgtgaacacagggcacgcartggccccggctgccattccagcttgttaatacttgcatcagataaccttgaatttctctcagctggctgagccctacatggcaccccaagtttgggcgag

SEQ ID NO: 402123 - DNA, 201 bp, Homo sapiens
gagtccatagtctgtgttggggctcactcttggtgttgtacattctatgcatttggacagatatatgacatgtatccaccatggccgtgtcatatagaatrgttttactgccctaagcatcctctgtgatccatccatttattctccctccctgtgaacctggcaaccactgatttttttactgtctccatagttttgcct

SEQ ID NO: 402124 - DNA, 201 bp, Homo sapiens
gagtgggtggctttcatcttccagctcccaactcccagcccactgggctgctgtgctgtggtgcacgtgagtcatcagatgccccaggcggaaggctcgtkggggctcagggccccagctgggggcagagcacctcaagaatcctctcaactggctgcaggctcctagttcttggtgacttagtggatggaagacccacct

SEQ ID NO: 402125 - DNA, 201 bp, Homo sapiens
gatgcacacatgcacattcacacatgtgcacacacatacatccacacacattcacacacgcacacgtgcacacatgcacacattcacacatgtgcacacayacatacacgcacatgggtgcacacgtgtacgcacccacattcacacatgcacacacatgcatacatgtgcacacattcacacgtgcgcacatacacacat

SEQ ID NO: 402126 - DNA, 201 bp, Homo sapiens
atgtgtagtcagagaaacacacacttattcccacacctatatggtgtgaacacagggcacgcagtggccccggctgccattccagcttgttaatacttgcrtcagataaccttgaatttctctcagctggctgagccctacatggcaccccaagtttgggcgaggggttagtggggtgaatagcttttcagatcaaggcca

SEQ ID NO: 402127 - DNA, 201 bp, Homo sapiens
ggacaggccatggcagaggcttcaggggagggttccggctttggctgggggcgtgggagtctccagaggcagcgagcccaggacactgatggtgcagaccrctggatttctggagaacactgtacttcgccagcctgcggcagacacattattcacagaactttctccaaaggaggttagccatgtttgtcaggctcaggg

SEQ ID NO: 402128 - DNA, 201 bp, Homo sapiens
acacacaccccactcacatgcacacatgcacacattcacacatgtgcacacacatacacccacacacattcacatgcacacacatgcacacacgcacacayattcatgcacatgcatacatgtgcacacacacgcacccacacacgcacagatgcacacatgcacattcacacatgtgcacacacatacatccacacacat

SEQ ID NO: 402129 - DNA, 201 bp, Homo sapiens
acatgtgcacacacaccccactcacatgcacacatgcacacattcacacatgtgcacacacatacacccacacacattcacatgcacacacatgcacacaygcacacacattcatgcacatgcatacatgtgcacacacacgcacccacacacgcacagatgcacacatgcacattcacacatgtgcacacacatacatcc

SEQ ID NO: 402130 - DNA, 201 bp, Homo sapiens
tctcttgccagcagacacccacagggagctagcccacggcaggacagcagcagggccaggggcttccttatctccccgcccatccccctcagcacgtagcrcttagctcgggactgcaaaatagccgcagctcagacaggaagtggataggggcagaggactttctcctagtgacactttgtctgttgttcacatccccct

SEQ ID NO: 402131 - DNA, 201 bp, Homo sapiens
accgggacatgtaggcatttgcaattcccctgggctgcatcagagatggcctgtgacccgcagccccgcagccccgcccggagccaggtgtaaggagggggaagttgtcggtagccgtcataacacaatgatgctgctctctactaaataccagatgctgtttgtttcataagactgttaatcctggaggcttgaccacga

SEQ ID NO: 402132 - DNA, 201 bp, Homo sapiens
agaggtgagttccaggcatctggccccggtatcacttcctttcagctgctgctgccgggctggggatgttcttaccacttccttttcctacttccctcccytcctcccactatcactgcagaaaaaaacccaaacacatgcagtggcttacagcattttcttcacgaaacaaatcccctgtgtccccagcatctcactgtt

SEQ ID NO: 402133 - DNA, 201 bp, Homo sapiens
ttaattcttttgaaaaaaatgattaaaatcagaaaattattttcagataaagtttatgccaaaagatacaaaggcttgctctgtaagagataaagcgtttkgtggcaaacaaacaaacacttcaagggcaaagtcaggccaaccgtcctgctctctgccatccggtaagtctctccatgctcatggtcatttgtcgcccag

SEQ ID NO: 402134 - DNA, 201 bp, Homo sapiens
cacaggtggggcgaagttaggaggctgtgcttctggcgtgttctggcatgaaggcccggttcagtgggagccgtgtgtcctgcccggccctgctcagggcmtgctgtgtcctgagctcctcagtcatctgctggcctggccccagcagttcccaggcattgtagcgaggactgtggggaagggctgccatttttagatggg

SEQ ID NO: 402135 - DNA, 201 bp, Homo sapiens
aattcctcatttctctcaatcactaaaccttcatcccttaaaggtaacatcacattgttaattaagactatttagctgggacctctgtggaagcagaatcatggccaagtgtgggcattacctacacccagtccccttctcaaagtgtgatggcccagggcagagcagtggcctcacctgggagtcccccacctggaagag

SEQ ID NO: 402136 - DNA, 201 bp, Homo sapiens
gtcacaaagactgcatagaggcatagagtgaaagtgggtacagaaaaggggaggagtaggaagaaaagaaacaaggaatcacaggacacggcagctcgtgyctgtaatcccagcactctgagaggctgaggtgggaggatcacttgagcccaggagttcgagaccaacctgggcaacatcgtgagaccctggctctgctaa

SEQ ID NO: 402137 - DNA, 201 bp, Homo sapiens
tggggagctcagctggggcagaagatgggtggcaggagcccacaggaagggcaggctgggaggtgctctggtccccgcagtgccagcttactaattgccayccaaaacacaggaagcagcctccagccaccgtttctggtcaggaataggatggaggctttcattctgctctggggggagctgaaacaggactgtggaggg

SEQ ID NO: 402138 - DNA, 201 bp, Homo sapiens
gggaggccgaggcaggtggatcacctgaagtcaggagttcaagaccagcctggccaagatggtgaaaccccgtctctactaaaaatacaaaatattagccsggcatggtggtggacgcctgtaattccagctacgtgggagactgaggcaggagaatctcttgaacctgggagacagaggttgccatgagccgagatcgcg

SEQ ID NO: 402139 - DNA, 201 bp, Homo sapiens
aagcccaaggcaacatgccagccagactttgggctccttgcctgtggacacctgtgtcttactgtctgctctgggctctcctttgaggaggcctctgtctcagaacaaatgtcacaaacaatgaatgccatgcttcaaaggaagctgatgtatggagcgtgtgtcaccttcctctacaggaatggggtttggcagtgatcc

SEQ ID NO: 402140 - DNA, 201 bp, Homo sapiens
ctctgctgggtgccctgtggtggagacctgtgaaatccagtgttagagttcaggatgaattatcccaaagactcagaacccttgcatcagttatgacactrtcccatgaatgggcgtgtgaggaaacctggtgtgtggtgcagtgccctttgccaatgcttatttcctcatttataagatgagacagttgagttagaggtt

SEQ ID NO: 402141 - DNA, 201 bp, Homo sapiens
tggggctgccatcttggcaattgtgttaaaatgtaacaggcgtacaggctaacacagaagctgtcctacagaaacacttgcgagacacaaagatatatatrtgtgtgtgtgtgtgttgcagaattgtaggtaatagcagaaaagttggaaacaacttaaatgtccatcctattttggtctatccaaaaagtggaatccaag

SEQ ID NO: 402142 - DNA, 201 bp, Homo sapiens
tcattacctgtccccaggtacagaccttcccctcacaccattggtaactcatctgttgcgttttttcatgtatcctgaagcacctacacagtgggcattcrataaatatctgctgagccgtggattacacagtagagccaccgatgaaatgatgcctacgaacctcctacaaaactcctgttttattatatcaaactctga

SEQ ID NO: 402143 - DNA, 201 bp, Homo sapiens
ttcacgaaccatcagatgatgccagtgttacatcagtgtcattttcaagcaggaattttcaaacaaaatcagtccattcccatagcagttttattttattyttttattcatttcatggaatcccaatacaacttggatgttcctcctgtcaaaggcaagaccttgacttaattactaatgtcacaggaaaggcagtggaag

SEQ ID NO: 402144 - DNA, 201 bp, Homo sapiens
cttcaaggttgctactcgtttaaaagactagcttggagatacgcatgctacacaagccactcagcaacctacattctgcccactcgaatgcttgtggcgcyttaagccaaggttgtgtgtaaaaggcattttccttttgtccgagtttggaaagattggccagttctgttcatctcagaagtaatttgaatgtttccctta

SEQ ID NO: 402145 - DNA, 201 bp, Homo sapiens
cacttccaaaaaattcttcaaggttgctactcgtttaaaagactagcttggagatacgcatgctacacaagccactcagcaacctacattctgcccactcraatgcttgtggcgccttaagccaaggttgtgtgtaaaaggcattttccttttgtccgagtttggaaagattggccagttctgttcatctcagaagtaatt

SEQ ID NO: 402146 - DNA, 201 bp, Homo sapiens
tgtctttggggagggtctgcacctgccttcgtcatctgtaaaatgtggatcatacctccccacctcatagggcagctgaaatggcagcaaatatccttaaygttaatccagagtcctactgtactgtgttgttgtagagacgtgaagacacataaagatggaaggggcgggcggggaacagctaggcaccaggagggatac

SEQ ID NO: 402147 - DNA, 201 bp, Homo sapiens
ttgatattttatccttttagcttgggtgttgtcttttaaaaaagagagagtgcccgggcactgtggctcatgcctgttattctaacactttggaaggctgwagtggaggattgcttgagcccgagttcgagaccggcctgggcaacataggagaccccatctctgcaaaagaagagagagaataagagatagtaaaaggaa

SEQ ID NO: 402148 - DNA, 201 bp, Homo sapiens
gtagaataaaatataatttgatgtgttcattttatgttttttttataagtacagtatctatattcactaaaattattttcacatatgtaatttgtatgaaktagaagggttattgtctaatgtgatgttctcttttaaatctagttttattgtccatatgttctctactttgtgatcctaatccagatgaccccttagtac

SEQ ID NO: 402149 - DNA, 201 bp, Homo sapiens
tcggccagtggtcccgagagacatgcggggagagcaagggatggaagggtgggccggggtgcgggcagggagctgaaggctcgggccgggccagcgggcaycggacaggtgaggtgggagcagggtcaggtcccaggcggccggaggagcttgaaggctgggggcccgcgcgcgttcgcgccggagccgctcccggagccc

SEQ ID NO: 402150 - DNA, 201 bp, Homo sapiens
tacaattctaaagttttagttttctatacttacttataatcatgtcagctgcagatagagatgattttattcaaatctttatgccacatttcttttttttkccctttgttgcattagcctgagctccaatatcatgctgaatagaaatagtaatagcaaacatcctttcttgatttccaagggaaagctcttacatgtcag

SEQ ID NO: 402151 - DNA, 201 bp, Homo sapiens
cttggtctcccaaagtgctgggattataggtgtgagcaaccttgcccagcttattatttttatttttttattttttgagatgcagttgctgtgttgcccargctggtctcgaactcctaagctcaaggattcttccacctcagcctcccaagtagctggcattataggcacataccaccattgcctggagcttttccatat

SEQ ID NO: 402152 - DNA, 201 bp, Homo sapiens
ggttccatgaacctcctcagaagtggtggcatgcaattgaagcagacaaatgaggaaccagagtccttgttccctcttatttcagatacttagatcgttaktgtgtgtgtgtgtgtgtgttagtgtagctatttgcattagaattttgacatactggagtaacaactactttttcaattttcatttcttttttaaaatatg

SEQ ID NO: 402153 - DNA, 201 bp, Homo sapiens
tatgagcacagtatccaaaatggtttggactgttaactgtaatttgattgttctgtagagaactctcaagtttaaaggttgttaatagctactttggaggstcacatttttttaaataaatgggaactcggaatttaaaacttcaaaagctaaaataattttatattttatgcatcctatggtaattttataactttaaaa

SEQ ID NO: 402154 - DNA, 201 bp, Homo sapiens
aggagctgtgcttttagaagattttttttattgcaagtaatgcctagagtatcggaagcagttacaattgaactgtaattgatatttgaggtaactgtggkaagcaacgtaatgggttttgaggaagaatataaatatagtacatctgattaaatacaaaggacagacaaagaggaaagtcaaaacagtgctaagattttg

SEQ ID NO: 402155 - DNA, 201 bp, Homo sapiens
gctttttctttttctttttttttttaaatgcggtcttgctctgtcacccaggctggagtgcagaggcccaatcatagtttactgcagcctcgaactcctgkgttcaggcgaccctcctgcctcagcctcccaagtaattggaattacaggcatgaatcagcctgcttggtccgttattgcttaactgtaacatggaccaaa

SEQ ID NO: 402156 - DNA, 201 bp, Homo sapiens
tgacattttggataagccacctagtcaggctaagactcattttctttctctgtaaaatgaaggagtaaacgatatcagagtactacttgccttattctgtytttacattcaggttctagaaaccagaccatgggcagagcattttcctccttgttcagcagagcaaatttgtgggcttttaaagatggtaacattgtttct

SEQ ID NO: 402157 - DNA, 201 bp, Homo sapiens
gtttgaattactagaacgaataaatgcatttttactgtaagccttcataaaacagattcaaatacagcttttacttggctactttggatttgtctaaaatmgatttttatttatgtaattcctctgatggaaatattatatgtagagagtgtgatcaagagtccgccatctaaacaggaagccatgtttgaaagtagaggc

SEQ ID NO: 402158 - DNA, 201 bp, Homo sapiens
cccaatcatagtttactgcagcctcgaactcctgggttcaggcgaccctcctgcctcagcctcccaagtaattggaattacaggcatgaatcagcctgctyggtccgttattgcttaactgtaacatggaccaaagaagcagctaaccctgttagttaattcttactaggaagagaaaccgcaccagctatttaaaaaaaa

SEQ ID NO: 402159 - DNA, 201 bp, Homo sapiens
aaccccctcagccatacttcattcttgccatttcacctttgatcagatgtttgtgatgaaggttgaatattcttgtactttgaatcacctaggaagcaaartattattaaggatttacaatgattttccaaagcattggtggcaaatatttcctgggatcactattatgttttcctttgctgaatcctagatcattacaca

SEQ ID NO: 402160 - DNA, 201 bp, Homo sapiens
tatagattctcatattcttttaagaatctttcacacagtgtaactgtcatgcattagatatatgaaagattctgtgttgaagggttaattcaagttcataygctgtttcctggaatggtgtcacaaaatggatctcacttggcatataaactgccaagtccttatacatataaaagaaatggcaaactgccagatattgag

SEQ ID NO: 402161 - DNA, 201 bp, Homo sapiens
gaatatcttttacatattctgaatgagccttttgtcagatacatgtaatattgcaaatattttctctcactttgtggcttgtctcttcacacttttaatgkgccttttggtgaacagatgttcttaattttaatcaagtccaaatttttcattttttcttttattgttagtgctctttgtgtcctgttaaatctctgcctt

SEQ ID NO: 402162 - DNA, 201 bp, Homo sapiens
gtgttattaccagaatgctaatataacatgatatatttaattaaatatgaaagaattaaaatagaattgtaggtatagtttgctagcattttctttttttwaaatttttttgcttgtaatgttatattttctaatggctataaagaaacatggtcaaatttaaatttctctagtaaagttgattcccaatttgatagtagc

SEQ ID NO: 402163 - DNA, 201 bp, Homo sapiens
acaccttcttggcctttcaagtcaagtatcacaggctccctggtctaggcaatctcttcagattcctccttctgttatccagtctggtcccagatattaakattgtctgcctggctggaacctttgggttcttatcctaaactacctctcctctggcttatatcagactcttctacacgttggacctcagctgtcctattt

SEQ ID NO: 402164 - DNA, 201 bp, Homo sapiens
aggctcgggccgggccagcgggcatcggacaggtgaggtgggagcagggtcaggtcccaggcggccggaggagcttgaaggctgggggcccgcgcgcgttygcgccggagccgctcccggagccccagggtagagagcctcttgcgcgtccagaccgtcccgaaatctgtgcttcacggtcacggccgggttttgccctcc

SEQ ID NO: 402165 - DNA, 201 bp, Homo sapiens
acattttcatataggttgcagagaaatccatgagttaaaaaattatttttcctgttttatttctgcatgaacctaagtcacattgacccagtaattgatayatgtgtgattattgcaattaagtataagaaggtagaatatatagttttattagacagatgcttctgaaatattaattttgtatgtttttactatatcctt

SEQ ID NO: 402166 - DNA, 201 bp, Homo sapiens
ttgaatagaactgctttaaatgtttttaaagctaatagtttgcatcttaatggatcattacccttgtttcattgggaaaagaaggaattaaccttacatayttttgatttccttcaggaattgagtgatctacagcgcgatccacctgctcactgttcagctggacctgtgggagatgactgtaagccttgctctatttct

SEQ ID NO: 402167 - DNA, 201 bp, Homo sapiens
gcctgcttggtccgttattgcttaactgtaacatggaccaaagaagcagctaaccctgttagttaattcttactaggaagagaaaccgcaccagctatttaaaaaaaaaaaaaaaaaaagcaaaacaaaaatgaaaataccaaggtatactggaaaataacattgagcttagaaggagacctgagtttgtacctggctcag

SEQ ID NO: 402168 - DNA, 201 bp, Homo sapiens
tttgttttgttttaaattttatgatgtcggcatagttgttggaaaatcctccttcgtacctgcagagaaacctgttctcaaagtaaatgatttgaacttakgacaaaatggttgcatttttttcatattggtaatatttaatgaaattattttaaacatgatggcatttttttcaaactgataatatttgggggaaataat

SEQ ID NO: 402169 - DNA, 201 bp, Homo sapiens
ctggggctgcggggcagcggccccctgcccacgctgactcggccagtggtcccgagagacatgcggggagagcaagggatggaagggtgggccggggtgckggcagggagctgaaggctcgggccgggccagcgggcatcggacaggtgaggtgggagcagggtcaggtcccaggcggccggaggagcttgaaggctgggg

SEQ ID NO: 402170 - DNA, 201 bp, Homo sapiens
tcacgacagcctcttcagttcatctccattcttggtcatcaagtgaacatcagaacttaagttttactatcctcaaccctttttcaaaaaaaatactgatkacggctgcagaaaatgatcttttcccacagcagtcgtgtgtatactgatctttaacaatttgtactcataaccagatttgtttggacaagtcacagcact

SEQ ID NO: 402171 - DNA, 201 bp, Homo sapiens
tgactcggccagtggtcccgagagacatgcggggagagcaagggatggaagggtgggccggggtgcgggcagggagctgaaggctcgggccgggccagcgrgcatcggacaggtgaggtgggagcagggtcaggtcccaggcggccggaggagcttgaaggctgggggcccgcgcgcgttcgcgccggagccgctcccgga

SEQ ID NO: 402172 - DNA, 201 bp, Homo sapiens
accagatattgcacaaatctataaatcagacaaagaaaagtaagtgtttacttattttagtttctgtatggatacattcctatatagtatgccaaaacacraatattatcaatatgttttaagtcaatttgattatggttgttatatgtatattgtttatctttttccaatggagtaaacctttctttgagaactctgtta

SEQ ID NO: 402173 - DNA, 201 bp, Homo sapiens
ataatcaaattaagaaaaggattacttctacatatgatggaagccatggttaattactttagatgctgctcaaccagtcataccggctactagagacttayttattacactgtccaaaatactcttcagttcctttgagggcaaaagaaggaagctgacttgtttgtgttcacattctcactagctagaactgtgtgtagc

SEQ ID NO: 402174 - DNA, 201 bp, Homo sapiens
gagtttgagaccagcttggccaacatggtaaaaccccgtctctactaaaaatacaaaaagtagccagtcgtggtggtgtgtggctgcaattccagctgctygagaggctgagtcaggagaatcgcttgaacccaggaggcaaaggttgcagtgagccgagaccatgccattgcaccacagcctgggcaacaagagcgaaac

SEQ ID NO: 402175 - DNA, 201 bp, Homo sapiens
ggaagaagtggctttttgctaagctttgaaaagtagaggcattggcgcaggcggagatgaggaaggaaaaaggcctgtgaggctgggctgcgaaaacatgmagcacttctgcgtctgtcacagattctcctcctctctgatccatcaacaattgaggcatcaaattttcaaatggacagaaagacccggttcatcatccat

SEQ ID NO: 402176 - DNA, 201 bp, Homo sapiens
gagagaaagcaaggtggatgctggagtcctatatgccaggctggcaacaaggggagagatgaagaatgacaggttagagcctgcctattctggctcacgaragccagcatgagtatcccttcccaactccaaattcagagacatcatgttggtagcctgaaactggccacagtcagagtatttacaccactgaaaatggta

SEQ ID NO: 402177 - DNA, 201 bp, Homo sapiens
tgtgtttatatacgtatgtatatgagtctgtatgtttatgtatatgtatgtgcatgtgtatgtatatttgtatgtgggtgtctatgtatgtgcgtggttawatgtgtgtaggtttgtgtgtgtgtgcacatacacatgcatgtttgtgtagatgtatttgtgtgtgtgcacatgcacatgttgtgtatatgtatttgtgta

SEQ ID NO: 402178 - DNA, 201 bp, Homo sapiens
tccagcatggtgcctgggacatgagatggcactaaggttagagggatgggccgaagacaagatgggcatgggtttaattaccagctttcccacctattagytaagctgtaaatctgaggctacactctgtagtcctttctgtaacataggaatgagatgataatgcataaataaggatgatatggtacccacctcctagga

SEQ ID NO: 402179 - DNA, 201 bp, Homo sapiens
gagtttgggcttgatcctgaaggcaatgagaggcatggaaggttttcagcagaggagtaatatccattaggctggcattttagaaaaaccacagcaaaaawtgtcctgaaaatacaatcttccctctccagacagagtatagctaccccccttccaaagttcacctcattggccacagcctgggagcccacgtggctggag

SEQ ID NO: 402180 - DNA, 201 bp, Homo sapiens
ttaggctggcattttagaaaaaccacagcaaaaaatgtcctgaaaatacaatcttccctctccagacagagtatagctaccccccttccaaagttcacctsattggccacagcctgggagcccacgtggctggagaggcaggaagcaagactccaggcctgagcaggattacaggtaaggccccagaggcagggccccagt

SEQ ID NO: 402181 - DNA, 201 bp, Homo sapiens
taacaaccatatcaaatagatgccattatcaccccattttgtaaaatgaagaacctgaagcacaaaaaggtagagtgacatgctcaaggtcatgcatcttkccccaaaagcagctgagtaggaatttggagccaggcaacctagacccagaacctgtgttcttaactatgataccacattgcttcacccctttctttctac

SEQ ID NO: 402182 - DNA, 201 bp, Homo sapiens
aagaagaaagatacacaagtaaatgggagactctggtgtggaaaaaatccttgcttaaacaaaatctaaatttctttgctcatttgtcctcctccatccaygccactgggaacccttttgcaatgagccacattcagactctatgtcctcatatttagcacccaaggccatggcactgcatcactctggtgcatggtaccc

SEQ ID NO: 402183 - DNA, 201 bp, Homo sapiens
ctccagccctagtgccccctcgtgcctcctgaatcactcatcaactgtgacctgggcttaaccccttaagaaaaaccaaaccaaaccaaaccaaaccaaamcaaaacaaaacacctggcttttgctaaggtgacccaaactcttacaaagcttccttttctccccaggtacaacttctgtagcgaagacacagtgcgggaa

SEQ ID NO: 402184 - DNA, 201 bp, Homo sapiens
tttgtgggtacattttaattatcttagaaatggacacatttaccgaaactattgcagttacaagtaaactgaggatttagacagagtgtgcatttcttccrttctatttctgcggcatgaaatgagagcaagcaactagtataattaatgggatgaggccagtttgcacatccttgtgaccagctaccctgaatttttacc

SEQ ID NO: 402185 - DNA, 201 bp, Homo sapiens
tgcagctccagccctagtgccccctcgtgcctcctgaatcactcatcaactgtgacctgggcttaaccccttaagaaaaaccaaaccaaaccaaaccaaamcaaaacaaaacaaaacacctggcttttgctaaggtgacccaaactcttacaaagcttccttttctccccaggtacaacttctgtagcgaagacacagtgc

SEQ ID NO: 402186 - DNA, 201 bp, Homo sapiens
cttccgttctatttctgcggcatgaaatgagagcaagcaactagtataattaatgggatgaggccagtttgcacatccttgtgaccagctaccctgaattyttaccactccacagttcattgtttctttcctttttaaggccgcatcagacacacctgttctcttcattcagcaaagacgtaattggtaccagctctttgc

SEQ ID NO: 402187 - DNA, 201 bp, Homo sapiens
ggtcgggagccctgtgcaagctggaggtgcaaccaaatcctttcctccctgaccccatcagaggatactcagcctctaaattcagctccccaaggccccawtagcaagcatcccatggcctggatcctgggactgtgtggttaaaaacatgtcaggtggtggcatcattggaatcttaaaaattagaggtgttcccaggag

SEQ ID NO: 402188 - DNA, 201 bp, Homo sapiens
ctggctggataaggtttcccctgctcccattatctccccaaccccactatctccccaacaccagaaactgttcgaggtggaggaggtgaactgcatctgcrtggactggaagaagggctcccaagccacctacacacaggctgccaacaacgtgcgagtggtgggcgcccaggtggcccagatgctcgacatcctcttggt

SEQ ID NO: 402189 - DNA, 201 bp, Homo sapiens
ctgggctatgtcccttaagaagcccaactccattctctgctttcccctctgtctgtgcatccctgatgcccaggggctgcctcgctggtggagtgcaggcrggaatcagggggaaggatgatttctctccaaaacctgctgaatggactaagacacagggtagagactgggcatgtttgggccactttgtaccaacctgcc

SEQ ID NO: 402190 - DNA, 201 bp, Homo sapiens
ttctgcagtgctgatcatctcttttagggttggatcctgtagaagcaagtttcgagagtactcctgaagaggtgcgacttgatccctctgatgctgacttygttgatgtgattcacacggatgcagctcccctgatcccattcttgggtgagacctatgatgctccagctgtgagcatgcacaactgtgttttaaccatga

SEQ ID NO: 402191 - DNA, 201 bp, Homo sapiens
ttgggccactttgtaccaacctgccccatgacagttccataggaggtgacccagtaaagacagaggttacatattcatataaatgtataacacatcttacrtagtttttaaagtcagatttattgaggtataatttatatttggcaaaatgcacgctgtttagcatacacttgtatgagtttggacaaatgaatagttgtg

SEQ ID NO: 402192 - DNA, 201 bp, Homo sapiens
gacttgatccctctgatgctgactttgttgatgtgattcacacggatgcagctcccctgatcccattcttgggtgagacctatgatgctccagctgtgagyatgcacaactgtgttttaaccatgaaagtcctgcatgacaaaaagctcattgtttttctaagcatttcaggttttggaacgaaccaacagatgggtcatc

SEQ ID NO: 402193 - DNA, 201 bp, Homo sapiens
aaagttacccgaaggctgtaggcatgcagagctttggggtccctgctaggtagcaatgcttgttaaggttggctccaagccccccaatccacaccctgcayacaactccaaggtgcacgaagccaaaacacaatcaagacatgccacttgttctccatcctggctgcaaaccagagtcacctgggagttaaaaaaaaaaaa

SEQ ID NO: 402194 - DNA, 201 bp, Homo sapiens
gcagtgacaccccagagcacaccttgagagcaaatccttgagcagattcaacctttctctgtaggaaaagaagtttgctatgaggacctcgggtgcttttytgacactgagccctggggcgggacagcaatcaggcccctgaaaattctcccctggagccctgagaagatcggcacccgcttcctgctgtacaccaatgaa

SEQ ID NO: 402195 - DNA, 201 bp, Homo sapiens
tgatctcagctccactgcaacctccacctcctgggttcaagagattcttgtgcctcagcctcccaagtagctgggattacaggcatgcaccaccacgcccrgctaatttttgtatttttagtagagacagggtctcaccatgttggccaggctggtctcaaactcccggcctcaagtgatccacctgcctcgacctcccaa

SEQ ID NO: 402196 - DNA, 201 bp, Homo sapiens
aatgcagttctagagggggatactgctaaatacatacttctccataaggccttgtttgatttgtagattaacaaatagaatttcttatactttggctgggygtggtggctcacgcctgtattcccatcactttgggaggcggacacgggcggatcacttgaggtcaggagttggagaccagcttgaccaacatggcgaaac

SEQ ID NO: 402197 - DNA, 201 bp, Homo sapiens
cagagtatagctaccccccttccaaagttcacctcattggccacagcctgggagcccacgtggctggagaggcaggaagcaagactccaggcctgagcagrattacaggtaaggccccagaggcagggccccagttttgtccccagaaaccccagaatgaggtctcaagaatgcagcccagttcagagctcccctgaagga

SEQ ID NO: 402198 - DNA, 201 bp, Homo sapiens
cctccaaatcaagatacagaacacttctatcaccatatatatcactctgtaatttttttttttttttttgagacggagtctcgctctgtcgcccaggctgsagtgcagtggcgcaatcttggctcactacaacctccccctcccgggttcacgccattctcctgcctcagcctcccgagtagctgggactacaggcgcccg

SEQ ID NO: 402199 - DNA, 201 bp, Homo sapiens
atagttgtgtaaacacctccaaatcaagatacagaacacttctatcaccatatatatcactctgtaatttttttttttttttttgagacggagtctcgctstgtcgcccaggctggagtgcagtggcgcaatcttggctcactacaacctccccctcccgggttcacgccattctcctgcctcagcctcccgagtagctgg

SEQ ID NO: 402200 - DNA, 201 bp, Homo sapiens
tccccttccgagagtgactggaagacagcatccctctgtaagccaggctgctgggcctatggaggccgccaggcgcctgtggggacaaggaggtgagagtmcctgccttcggaggccaccgtcctgtgtgacactccagaaccatagcagaccttgtcctagagcctccaggcagcaagcgctgtaggcgctggttgcagc

SEQ ID NO: 402201 - DNA, 201 bp, Homo sapiens
atgatctcagctccactgcaacctccacctcctgggttcaagagattcttgtgcctcagcctcccaagtagctgggattacaggcatgcaccaccacgccyggctaatttttgtatttttagtagagacagggtctcaccatgttggccaggctggtctcaaactcccggcctcaagtgatccacctgcctcgacctccca

SEQ ID NO: 402202 - DNA, 201 bp, Homo sapiens
attgttttttgttaattgtaagactttttacatttaccatcatgggatgttacgttcttatcatggaattctcaacagtcgtgggagaatgactgagatggaatctcgctctgttgcccaggctagagtacagtggcatgatctcagctccactgcaacctccacctcctgggttcaagagattcttgtgcctcagcctcc

SEQ ID NO: 402203 - DNA, 201 bp, Homo sapiens
gttagggcttcttggcagaaaaaatgaaacacagaagagaaggtgggaaggggccaaggaacaccagtgaggaaatggggcaaagcttccgagctcacagstggtgaggcctgagagaagtccgtggttcttgaacaaccacaaaaataactgcttacatctgcattgttttttgttaattgtaagactttttacatttac

SEQ ID NO: 402204 - DNA, 201 bp, Homo sapiens
tgcatgaggggcgacagggcccaagtgcagggaatatgatcggaggcctccgatgccaagttagggcttcttggcagaaaaaatgaaacacagaagagaargtgggaaggggccaaggaacaccagtgaggaaatggggcaaagcttccgagctcacaggtggtgaggcctgagagaagtccgtggttcttgaacaaccac

SEQ ID NO: 402205 - DNA, 201 bp, Homo sapiens
agtatccaaagagaaaggcagccctccccctctttatttctccgtccccctctctttattaagtacctttggtaaatgtacccttgcaaatgactttattmagtacctattgtatggcctggcaaacagtaagggatgcaaacactgagcctacactcaaggagcttacagttcagctgttgagaaaaatcagacttatgg

SEQ ID NO: 402206 - DNA, 201 bp, Homo sapiens
tacagtaacatgtagtacaggtttgtaacctaggagcaataggctgtaccatacagcctaggtatgtagtaggctgtgccatctacgtttgtgtgagtacrtgctatgatgtccacacaatgattaaattacctaaggacacatttctcagaacatatctccattgttaagcaacgcaggactatataactttatgtactg

SEQ ID NO: 402207 - DNA, 201 bp, Homo sapiens
taaaaaccatagtttgaggtgctagcatatagctggcttttccatttctccatcctttatttggaaattaattcggaaaaataatcctgttaatctagaakagaaaacagcagcctggcattgtatggtaattagaactcatttccgtgaacagggatgtttatgtttctctatttcaagggggattctcaaaccaggctc

SEQ ID NO: 402208 - DNA, 201 bp, Homo sapiens
cagatgggtcatcttgacttcttccccaatggaggagagagcatgccgggatgcaagaagaatgccctgtctcagatcgtggatctagatggcatctgggygggtaaagtcatggtggggtgaggggagcagggcgggtactttcctggagtgaccaatacctttctgcagcaaatcttaagaataaaaatgaaactgtct

SEQ ID NO: 402209 - DNA, 201 bp, Homo sapiens
aacagggatgtttatgtttctctatttcaagggggattctcaaaccaggctcaacccattcctatgagtttgatgcaaagctggatgttggaacaattgasaaagtcaagtttctttggaataacaatgtgataaatccaaccctccccaaagtgggtgccaccaagatcactgtgcaaaagggagaagagaagacagtgt

SEQ ID NO: 402210 - DNA, 201 bp, Homo sapiens
tacaagtattacttggaaagcatcctcaatcccgatgggtttgctgcatatccctgcacttcctacaagtcctttgagtctgtaagctattgtcctgcctygagcaacaagcatcacccctctgagggactgctgtcctgctgcgtttgggatttgcaatgccttctcactacacgttttgcattgaccctcagagttcat

SEQ ID NO: 402211 - DNA, 201 bp, Homo sapiens
agtttctgaaaatacggtcctactttggaaccatcccatttggagagagaggcagagaagctgttacaggcccccaaccacctgttcaggtctccttattygttttcccaggaacccgggactttgtggcttgcaatcacctaagaagctacaagtattacttggaaagcatcctcaatcccgatgggtttgctgcatatc

SEQ ID NO: 402212 - DNA, 201 bp, Homo sapiens
  misc_feature (1)...(201): n = A,T,C or G
aaacacctggcttttgctaaggtgacccaaactcttacaaagcttccttttctccccaggtacaacttctgtagcgaagacacagtgcgggaagacacgcngctcaccctcacgccctgctaagctcccggggcgacgaggctgctgcgttcacactaataaaatccactggtgcatctgtatgctctgggtctatctcct

SEQ ID NO: 402213 - DNA, 201 bp, Homo sapiens
cttggcatatatggatgccatcaaagcaaatattaagaatgaggacaggccagctgtggtggctcacgcctataatcccagcactttgggaggccgaggcsggcaaatcacttgaggtcaggagtttgagaccagcttggccaacatggtaaaaccccgtctctactaaaaatacaaaaagtagccagtcgtggtggtgtg

SEQ ID NO: 402214 - DNA, 201 bp, Homo sapiens
gatccgcctgcctcggcctcccaaagtgccgggattacaggcgtgagccaccgcacccggcccactctgtgtattttttttgtaagaagacattgattaawcaatccttccactgatgttgtgatgcatgaaatacttgccaatatttcaacaacaaattaaacactcaaaaaccaggtattcattcctcaatcaacattt

SEQ ID NO: 402215 - DNA, 201 bp, Homo sapiens
cacgcacatgcatatgtttgtgtatatgtatttgtatttgtgtgcgtgtgcatgcaggccctgggacagcatttcaggtagaagcctaagtgacagctgcycgtgcacctgctctgtgctagagactgcccagggccctggggagcagagaggaaacacagtccccgccctcgaggtgcttgccaggctgcactcccgagc

SEQ ID NO: 402216 - DNA, 201 bp, Homo sapiens
ccattctggggcagagctggctaacagaactttctgcaatgaggggcatattctgtgtagccattagcctcatgtggcaacttaacatttgcaacacagckaatgagtttgagaaactaaatttttaattgtatttaatttggatttaaatgtaagcagccacatgtggctggtgacctcctccctgggcaatgcagttct

SEQ ID NO: 402217 - DNA, 201 bp, Homo sapiens
gctggagatatggggtttccatcacactgtctggaagaacagccactggtcagatcaaagttgctttgtttggaaataagggaaacactcaccagtacagyatcttcaggtaatttcctattttaacactacgtctcatttgatgatatacacagccttcaaaccacacacttaatttgaacacttatcatctctttatat

SEQ ID NO: 402218 - DNA, 201 bp, Homo sapiens
gcatatagctggcttttccatttctccatcctttatttggaaattaattcggaaaaataatcctgttaatctagaatagaaaacagcagcctggcattgtrtggtaattagaactcatttccgtgaacagggatgtttatgtttctctatttcaagggggattctcaaaccaggctcaacccattcctatgagtttgatgc

SEQ ID NO: 402219 - DNA, 201 bp, Homo sapiens
ttttagtaacctcattggggtttcaattcctactaaggaatctgccgactaggattccctccaatgacacagtatccaaagagaaaggcagccctcccccyctttatttctccgtccccctctctttattaagtacctttggtaaatgtacccttgcaaatgactttattcagtacctattgtatggcctggcaaacagta

SEQ ID NO: 402220 - DNA, 201 bp, Homo sapiens
agtaaaaacactgaattagttgaattactcaaacattttcctgttatgaaaatggccagtaacatttaataataataataataataataataatgaagaagctaaagaaaatcaagattttggtccaagctcttctcagaatcccctcatattttttagtaacctcattggggtttcaattcctactaaggaatctgccga

SEQ ID NO: 402221 - DNA, 201 bp, Homo sapiens
aagtaaaaacactgaattagttgaattactcaaacattttcctgttatgaaaatggccagtaacatttaataataataataataataataataatgaagaagctaaagaaaatcaagattttggtccaagctcttctcagaatcccctcatattttttagtaacctcattggggtttcaattcctactaaggaatctgccg

SEQ ID NO: 402222 - DNA, 201 bp, Homo sapiens
gaagtaaaaacactgaattagttgaattactcaaacattttcctgttatgaaaatggccagtaacatttaataataataataataataataataatgaagaagctaaagaaaatcaagattttggtccaagctcttctcagaatcccctcatattttttagtaacctcattggggtttcaattcctactaaggaatctgcc

SEQ ID NO: 402223 - DNA, 201 bp, Homo sapiens
tagtttgggaagtaaaaacactgaattagttgaattactcaaacattttcctgttatgaaaatggccagtaacatttaataataataataataataataataatgaagaagctaaagaaaatcaagattttggtccaagctcttctcagaatcccctcatattttttagtaacctcattggggtttcaattcctactaagg

SEQ ID NO: 402224 - DNA, 201 bp, Homo sapiens
caaggagaacaaagaggttggccctgccaggtggtgggtggaaccaggaggcctcataagctagagcatagtacagaggaggctgggccgggctggtcggsagccctgtgcaagctggaggtgcaaccaaatcctttcctccctgaccccatcagaggatactcagcctctaaattcagctccccaaggccccattagcaa

SEQ ID NO: 402225 - DNA, 201 bp, Homo sapiens
cttcaggtaatttcctattttaacactacgtctcatttgatgatatacacagccttcaaaccacacacttaatttgaacacttatcatctctttatatgtcactggtttttaattatagtcatgcaacatgtaacaacattttagttgatggaccacatacacaacagttgctttataagcttgtaataccatatttttac

SEQ ID NO: 402226 - DNA, 201 bp, Homo sapiens
cttgatccctctgatgctgactttgttgatgtgattcacacggatgcagctcccctgatcccattcttgggtgagacctatgatgctccagctgtgagcaygcacaactgtgttttaaccatgaaagtcctgcatgacaaaaagctcattgtttttctaagcatttcaggttttggaacgaaccaacagatgggtcatctt

SEQ ID NO: 402227 - DNA, 201 bp, Homo sapiens
tacatctgtgcacatgtgtgggtgtatgaatgcatgtgtgagtgtgtttgtgtatgtacctttgtgtgtatgcatgtgtttatatacgtatgtatatgagyctgtatgtttatgtatatgtatgtgcatgtgtatgtatatttgtatgtgggtgtctatgtatgtgcgtggttatatgtgtgtaggtttgtgtgtgtgtgc

SEQ ID NO: 402228 - DNA, 201 bp, Homo sapiens
gggtttcaccatgttagccaggatggtctcgatctcctgaccttgtgatccgcctgcctcggcctcccaaagtgccgggattacaggcgtgagccaccgcrcccggcccactctgtgtattttttttgtaagaagacattgattaatcaatccttccactgatgttgtgatgcatgaaatacttgccaatatttcaacaac

SEQ ID NO: 402229 - DNA, 201 bp, Homo sapiens
ttggacaaatgaatagttgtgtaaacacctccaaatcaagatacagaacacttctatcaccatatatatcactctgtaatttttttttttttttttgagayggagtctcgctctgtcgcccaggctggagtgcagtggcgcaatcttggctcactacaacctccccctcccgggttcacgccattctcctgcctcagcctc

SEQ ID NO: 402230 - DNA, 201 bp, Homo sapiens
caagaatgcactaggattgcaatacttgtgagatcctgacctgtggtctccctggctttgggcctgaataagcacagggccgtgggtaggaaaaagggacrgctggaggaaagttggagtggtgacctgagagggcagagcgactgtctctcaaacctcagaccccaagtctggctagtagaacatgtggctttgtgggaa

SEQ ID NO: 402231 - DNA, 201 bp, Homo sapiens
gtcatatttccagacttgtgggaagacttgacagctattattaatcttgttttgtgtatttgggcagattaaagtattaagtgcgcacagcatgggctatmatcacctgctgttttcttgaagtagtgtccaaatgataaggctggaatatatatttttagaaagggctggacactcgatccggtgggagggaacatctgg

SEQ ID NO: 402232 - DNA, 201 bp, Homo sapiens
gctggaatatatatttttagaaagggctggacactcgatccggtgggagggaacatctggaacattagacagggtaagccacctttgcaactcctttcccyctgctgtgacgtacaggtgaggtaaacagtactgaagtccagggcgtcggtgctcactgctctggcaatgcccggtgagactgaattatgtttaaattta

SEQ ID NO: 402233 - DNA, 201 bp, Homo sapiens
gccctagtgccccctcgtgcctcctgaatcactcatcaactgtgacctgggcttaaccccttaagaaaaaccaaaccaaaccaaaccaaaccaaaacaaamcaaaacacctggcttttgctaaggtgacccaaactcttacaaagcttccttttctccccaggtacaacttctgtagcgaagacacagtgcgggaagacac

SEQ ID NO: 402234 - DNA, 201 bp, Homo sapiens
ggggaaggatgatttctctccaaaacctgctgaatggactaagacacagggtagagactgggcatgtttgggccactttgtaccaacctgccccatgacasttccataggaggtgacccagtaaagacagaggttacatattcatataaatgtataacacatcttacatagtttttaaagtcagatttattgaggtataat

SEQ ID NO: 402235 - DNA, 201 bp, Homo sapiens
cactgcttctactagtagaagaaacccagtcgccattatggccaaaagcattcttttaacccaatcaaagcatttgaattataacagcaacagcaagatayatctacataatatgatggtgataataataataataatgctattataattattatgataagcatagattaagtgcctgcttatcccaaatactgcacaaaa

SEQ ID NO: 402236 - DNA, 201 bp, Homo sapiens
gtgaggagggaagcagtgcctgctggtctctgtttggtagagatgcagctgagagttatggattaaagaaggacaaagaattgatatccagaccttacttytaaaactctgaaatttgccttcataatgacacgccagtggaagcaaaaataagaatcgctaacacttagaaagtggttttttaaaaatcatcttcaattt

SEQ ID NO: 402237 - DNA, 201 bp, Homo sapiens
gtgtggtcgcaggcgcctgtagtcctagctactcaggaggctgaggcaggagaattgcttaaattcggaggcagaggttgcagtgagctgagatcgcgccwctgcactccagcctgggcgacagaatgaggctgtctcaaaaaaaaaaaaaaaaaagaaagaaaaaaagaaaagaaaagaaaagtcctgaggagaaaactc

SEQ ID NO: 402238 - DNA, 201 bp, Homo sapiens
agatcgcgccactgcactccagcctgggcgacagaatgaggctgtctcaaaaaaaaaaaaaaaaaagaaagaaaaaaagaaaagaaaagaaaagtcctgargagaaaactcccactatctctgtgcatgtgatcacacatattagtatactatatgtggaatgattccaagtgcattttaaatttatagtaccattttaaa

SEQ ID NO: 402239 - DNA, 201 bp, Homo sapiens
tggcaagtgcttgggggatagacaacaacaagaagagaagaacaaaccaggcccagaggtgagaggctatgatgtattcgagggtctgaaagttcaacaargggtttggctgaagagtctagaaaaatagatgatgagttaggaaagctcggaggccttcagaatgagtttgggcttgatcctgaaggcaatgagaggcat

SEQ ID NO: 402240 - DNA, 201 bp, Homo sapiens
gtttcctcaggattgcttgaaaatgaaagtcctggccaggtgcgcagtggctcatgcctgtaatcccagcactttgagaggccgaggcgggtggatcaccygaggtcaggagttcaagaccagcgtagccaacatggtgaaaccctgtctctactaaaagtacaaaaattagccaggtgtggtcgcaggcgcctgtagtcc

SEQ ID NO: 402241 - DNA, 201 bp, Homo sapiens
tgcatatttatttactatccatcatctccttggcctagcacgatgaccaggaagatatcagtcctagtcttgctgagcagcagtgggacaagaagcttccwgaacctttgtcttggagaagtgatgaagaagatgaagacagtgactttggggaggaacagcgagattgctacctgaaggtacttgggtgaagaattctgg

SEQ ID NO: 402242 - DNA, 201 bp, Homo sapiens
acagccccaatgatcctggctttttcactgaacgtatcagaatacatggatgaattggggtaaataaggttttaattcagatctagaagaaagtattgtaygtttgaatgcagatttttatccacagatagttgtagtgtttagacatgacaggacctatcgttgaggtttctaagacttactatgggctgtaaacctgtt

SEQ ID NO: 402243 - DNA, 201 bp, Homo sapiens
ccaagtcatgaagttagttagtgagtaaattaggatttgagcccagatttttctgacttcaagtcagctgttatccttctactacaccttcgttttaatayggtgaataccagcaagaagagtgaagtagagttgtagttataatagactgtaggtgggagcaagtaaaggaatatggaaatgggagatcccgtagaacta

SEQ ID NO: 402244 - DNA, 201 bp, Homo sapiens
atattttcttttgtatgaatgtgtcttgagatgttgacgagatgagtgcatgtgttaggagtaccgccccctccatgccatgctttgtgtgaggtgtgctygtggtcctgttggggaatctgttttgcatgaaccttgggtggtgggatggaagggatgagggcagataagacttccaagattgaccttgtcctttctctg

SEQ ID NO: 402245 - DNA, 201 bp, Homo sapiens
aaaaatgcgcacattcttattttcacttcttaagtaacttttctcttagtccaataagggatattgagatgacatgttttcatattagtttggaagttttyaattatttgcttataactttttgattttgtgactcatataggagttcctaattgatttatgctttttgaatgcttgaactgagtttttttggtagtaggt

SEQ ID NO: 402246 - DNA, 201 bp, Homo sapiens
ctgttcaacagcttcttttggaacattcaaattcacaaaggtcaacttgagatggttaaagctgcaactgaggcaagaatttctgtgaatctattaccccrttttcccctcaattgtagagtggttttagggttcttgtggaaatgttttcttgtgtactgtgatgtatttcaacccatttggaagatttccctcatttat

SEQ ID NO: 402247 - DNA, 201 bp, Homo sapiens
ctgctggcagtgggctacctgtgacaggtgattagagtaaatgagtggacaaacgcaatttccagccctctgggaaaacatctttcctcttttgtcttgcrggttggtggacaatcagaaaggaaagaacgcaagtggacacaccctcaaccacctgctgaaagttcccaacctacatagccaagatacatcgtacagaac

SEQ ID NO: 402248 - DNA, 201 bp, Homo sapiens
gtatgtgttggctttatttctcaccatgttattctcactattggaatttagggcaaacctaagaagaatgagagcctgtggagtgtagcaagaggtgttaytagaatgttacgaaaaaactatggttgtgtccgagtggattttgcacagccattttccttaaaggtgagtgtctgttgaaatgaaaccatgttgaagcat

SEQ ID NO: 402249 - DNA, 201 bp, Homo sapiens
ttagggacattgtgttggttatcacagtggaaggaaaaatgactcttttgagttgagatttttaaaaactgctctttgagtaactggagtgattattgctkgagtttggtaatttgttgttgttgttgttgttgttattaccaaaatatagcattggaggagctgttttattagtgtgaataagatactttgtcagtagtg

SEQ ID NO: 402250 - DNA, 201 bp, Homo sapiens
atctatactatcatttttacgggtaatatgtcatgcaaactccttttggcttggaacagatataatagaggctcattatacacagtgatatcccaaagackgatgaacaatgtaaatgactgaaacatgtcgataatatggaaaatgaaaaaaatgcctgcatttttactgtcagctgctcaaacggcacatatggcttgt

SEQ ID NO: 402251 - DNA, 201 bp, Homo sapiens
gtaatttgttgttgttgttgttgttgttattaccaaaatatagcattggaggagctgttttattagtgtgaataagatactttgtcagtagtgaagttatygttttttctgttttgcttttaaagatttaatttttctgagctcattctaagttgagtggtcttgaatgtatgttttactttcttcttatatcccagcata

SEQ ID NO: 402252 - DNA, 201 bp, Homo sapiens
aatttggagagtgcaaaaatgcattaagactatcatcattatttatatattttatatgggatacttggtgaactgtgactacctaaactttatgggcattrtttatcaaatagataaaaggcaattagaaaggcaagatagcaaattaccataccaggctcagcagtagggagttgtttggtggaggagggggcagtgaag

SEQ ID NO: 402253 - DNA, 201 bp, Homo sapiens
gttattagagtgaactatgactgtagtctataataaatggatacttctgtaagtagtatatatatatataattagctctagttcagcaattcagacatacrtgcatgcatgtgcacacacactaagtcatttacaagtactttgaggttgtaggtccataaatttaagtagacagaagtcaactgtatgtgcttgtatgta

SEQ ID NO: 402254 - DNA, 201 bp, Homo sapiens
atgttttatgatttggatccttatatgtgcatcaagacttgttttatgatccagaatatgacctatcttggtggatgttctgtgcacacttgaatgtttaytttcctgttattgggtggcatgttctataaatgtcaattagatcaagttgggttgatagtattgtacaagccttttacatccttattaattttttaccca

SEQ ID NO: 402255 - DNA, 201 bp, Homo sapiens
caggaagtcttagaatacaaatgctgattttttttttttctagtcagggaagcctaactgtgttcatataaacacatcaaagtcagtttttaccttgtgamtcaacatggtagaagtctgtcagttcatgtgatatcccattgtggagcaaagtaatgtagaaatcagaattttgagttctagtatttactctctcgattc

SEQ ID NO: 402256 - DNA, 201 bp, Homo sapiens
aatgaggactatgataaaggtggtgttgtctaaatttttccacaaaatttgcctattgacaaaggagagtgagtatctgtttttgggagatatcaggctcracatttattgctattattatttttttttaattcatgaccatctaaggggaacaaaaaacaggtagaaggaataagttttagtatttgatagtacagtagg

SEQ ID NO: 402257 - DNA, 201 bp, Homo sapiens
ccaatgacatgattacatctttgaatactaaacgttttctgacaggccgcagttaatgattacctcctttccttcttcattcattgttcttcttcaagatraacttacagtttccataaaacaagttattctgtggataatagaatgtttgtgtatgtgttggctttatttctcaccatgttattctcactattggaattt

SEQ ID NO: 402258 - DNA, 201 bp, Homo sapiens
ttagttttgcatatttttgcacttacgtaaattggataacatgtggtctgtacgcatctggtttcctttgcttaagcaggtgtttgtgagattcatccacrttgttgcatgtagtctattccttctcatagctgtgtagtattccagtgtatggtataccataatttattctactgttaacaaaatgtttggctgtaatca

SEQ ID NO: 402259 - DNA, 201 bp, Homo sapiens
ttcagttttagctgagagtacatgaataaaattggctgcacaacattctgaactactaaggagaatttgctgtaggagaaccctaaatctcagaaagagakgacattaggctttgtttttatgggcggaaaattagtttatgatttaagcaacttgttttaggggtacctctaatacttctctgctaaatcattttcacag

SEQ ID NO: 402260 - DNA, 201 bp, Homo sapiens
gagttctgtagctaaccagactcttgtgacccaactgaagagaagccatggattcatgcagtcagtgatatttatccagctgtgctttagacaagagagarcaaaatatatagtccttgccttcacatagcttaatggataatgtagacagacagctagctgtaatagcgtgtgatatgattctacagggtagatgtgctt

SEQ ID NO: 402261 - DNA, 201 bp, Homo sapiens
tcttatattcttattcagctttcgtgcaaagtagcactgtggtaggcttgaaggtgccttcatatctgttaattgatagcagccaatgtattactactaayatctgctcacctagactgcttgtgaatcaactttcacgtatctgagtcataaaaggagtggtttgtgtacatcagagggatcattctgctcactaaatat

SEQ ID NO: 402262 - DNA, 201 bp, Homo sapiens
tggggggcatcagtgtcctgtggtattggtctttttgtattagtgaattatggggctatgtggaattttgctgtacttcactagtccaaaatcagcaccastgggataaaacacaattatgtgaaattcttagattattatatattctgttttcttgttaaaaccttcaagtacatttatttcatccagatgttttgacta

SEQ ID NO: 402263 - DNA, 201 bp, Homo sapiens
gactggcattttagaacccaccctttatcctcccaaaatacatttgtctgagctttatgatggaagagaccacaccagtcttgttcagtcatattctcaayaccaaacagtgccaatatatataggcaccaaataaatatttgccagataaatatttaaaatgaaggaaattttgctaaaaaataagcactccttacttgc

SEQ ID NO: 402264 - DNA, 201 bp, Homo sapiens
gaaaaagagaatggcaggaaggagaggtgaagaaataggtgattcataaacagttctctttcaagttactttttctctattgagggtattctgggtctttkcagagttactgaattgataataataatgtgatatcatgtaatcattacaaatgttttcaaagtattacataatgaaagcttgtagcattcttattctgaa

SEQ ID NO: 402265 - DNA, 201 bp, Homo sapiens
taatttgccccaagtcatgaagttagttagtgagtaaattaggatttgagcccagatttttctgacttcaagtcagctgttatccttctactacaccttckttttaatatggtgaataccagcaagaagagtgaagtagagttgtagttataatagactgtaggtgggagcaagtaaaggaatatggaaatgggagatccc

SEQ ID NO: 402266 - DNA, 201 bp, Homo sapiens
gcattacagtgcagtctttgagaagagccaagtgggtgagaggtatattttcggtggtagttgaagagaaggacaaattagcacaggaacaagaacttcaygtagttgtgtttgaaggcagtagaattgccttttaaaagtcatatctggatgttaagctctctctgggatccagttattaggatgaagaaattctgccgt

SEQ ID NO: 402267 - DNA, 201 bp, Homo sapiens
acattgttgcatgtagtctattccttctcatagctgtgtagtattccagtgtatggtataccataatttattctactgttaacaaaatgtttggctgtaaycattcttggatattttttcttgatgaccatatatattcattttgttgggtatgtgcctaggagaagaactgatgggtcttaaaaaatatgtattttcagc

SEQ ID NO: 402268 - DNA, 201 bp, Homo sapiens
aggtaggattttcattttatcagcaaggaaggtgaggccaggaatttaagtaatttgccccaagtcatgaagttagttagtgagtaaattaggatttgagyccagatttttctgacttcaagtcagctgttatccttctactacaccttcgttttaatatggtgaataccagcaagaagagtgaagtagagttgtagttat

SEQ ID NO: 402269 - DNA, 201 bp, Homo sapiens
attgtctctttttccattttcataccagagtacaagaggcaattgcagaagtggctgctgaattaaaccctgatggttctgcccagcagcaatcaaaagcmgttaacaaagtgaaaaagaaagctaaaaggattcttcaagaaatggttgccactgtctcaccggcaatgatcaggtattaaaaggcaaggcagaaagctt

SEQ ID NO: 402270 - DNA, 201 bp, Homo sapiens
attggggtaggtgtccaccatttatggtataaaagctatctcaacttctgttctctttagatctagtctgtttgagctacctttgtggtggggtggacccygagagaagcagtttctgctggcttaatgataaaggcatttttgggaacggggcatgtaggatgggttgggctatgttgaaggtgaagcccatcagtgtag

SEQ ID NO: 402271 - DNA, 201 bp, Homo sapiens
aagagcgagatgtgcataagggcatgtttgccaccaatgtgactgaaaatgtgctgaacagcagtaggtaagggcggggcaaggtgtaaaggtgggaagargcagggatgggcggtaggagtgggagggggaagtaattcttagtaacctttagtttctctgggactgtgtctcaagaagtgttcacatttccaaacatta

SEQ ID NO: 402272 - DNA, 201 bp, Homo sapiens
agtattaaatgttttgtttttcattgactgaattccatctcccaatgacatgattacatctttgaatactaaacgttttctgacaggccgcagttaatgawtacctcctttccttcttcattcattgttcttcttcaagatgaacttacagtttccataaaacaagttattctgtggataatagaatgtttgtgtatgtgt

SEQ ID NO: 402273 - DNA, 201 bp, Homo sapiens
tattaaatgttttgtttttcattgactgaattccatctcccaatgacatgattacatctttgaatactaaacgttttctgacaggccgcagttaatgattrcctcctttccttcttcattcattgttcttcttcaagatgaacttacagtttccataaaacaagttattctgtggataatagaatgtttgtgtatgtgttg

SEQ ID NO: 402274 - DNA, 201 bp, Homo sapiens
ttaagcaacttgttttaggggtacctctaatacttctctgctaaatcattttcacagacaccgcggatggcttgcaagacgcctttcttacgttctttttrttcaagagcgagatgtgcataagggcatgtttgccaccaatgtgactgaaaatgtgctgaacagcagtaggtaagggcggggcaaggtgtaaaggtggga

SEQ ID NO: 402275 - DNA, 201 bp, Homo sapiens
caggaggctccagtgctgactcttaacagcacctctctgtgtgacttggggctgcagtttgctctcctgtaaaatgaggactatgataaaggtggtgttgyctaaatttttccacaaaatttgcctattgacaaaggagagtgagtatctgtttttgggagatatcaggctcaacatttattgctattattattttttttt

SEQ ID NO: 402276 - DNA, 201 bp, Homo sapiens
ttaatttggtagtagacttttggatacctctgaattatatgcctaaagggataacctttctttttctctcttctgctagagtacaatttcgtgtccctcayactttaatgggaacattcaaattcacccagtaaatttgaattaaattcttagtctgctttccagattcctcagagattcattgatttaggaatatagtat

SEQ ID NO: 402277 - DNA, 201 bp, Homo sapiens
tttcacagacaccgcggatggcttgcaagacgcctttcttacgttctttttattcaagagcgagatgtgcataagggcatgtttgccaccaatgtgactgraaatgtgctgaacagcagtaggtaagggcggggcaaggtgtaaaggtgggaagaggcagggatgggcggtaggagtgggagggggaagtaattcttagta

SEQ ID NO: 402278 - DNA, 201 bp, Homo sapiens
gagaacaggtgctttggtgacagtgccatgtgggaatagcagccttgttttatggattaataattgaatgggtttctaaaacatgaaaggcaaataagagktcagagatgcacatatttccagagttctctgctttctgtaatataaatgttggagacattgtatttcctattttatagccgaaagagaattgagtttgat

SEQ ID NO: 402279 - DNA, 201 bp, Homo sapiens
ctttagattttgagatcaagtagacaagtattctcttgccatttagaaactatatttttttcttaatatttgtcagggtgagtgtggctttagacccaccrtcttcagatctgcaactttaaaatggaaagaaagcctaatgagtcggaaaaggccatttgttggaagatgttgttactcctgcactccccagagctgggt

SEQ ID NO: 402280 - DNA, 201 bp, Homo sapiens
caagtactttgaggttgtaggtccataaatttaagtagacagaagtcaactgtatgtgcttgtatgtaaaaataacgtgtgttcatttatgttgttttttktgtttgtactttgtttcagactgactgggtgggtgctgctaaaactgttcaacagcttcttttggaacattcaaattcacaaaggtcaacttgagatggt

SEQ ID NO: 402281 - DNA, 201 bp, Homo sapiens
atgttatatctgtataacagagatgtgagcaactgagctcaaagttaagcatttttagaatagaagagcaaggtttgaccctaattgaatagtatagctayaatttaagttctggtctttaagttcccttgataagataaaggaatgttatataagtttacctgttttttatttaaagtaaaattataaaaacttgctcac

SEQ ID NO: 402282 - DNA, 201 bp, Homo sapiens
ggaaggttatctgcggtttgttctccccagggcttaatgaatatgtgcatattttaaattgggcttgaagaacttgtggggtcatgttggcaaaaacaccwacagattaatttgagaggtagcaatgactttttcagtatacctttttattgaagtataatagttacaaaagagtatataaatcataggcatgtagcttga

SEQ ID NO: 402283 - DNA, 201 bp, Homo sapiens
gtccaataagggatattgagatgacatgttttcatattagtttggaagtttttaattatttgcttataactttttgattttgtgactcatataggagttcytaattgatttatgctttttgaatgcttgaactgagtttttttggtagtaggttatgcatattgtatgtaagtgaaccatatgaaagaattttgctgtttg

SEQ ID NO: 402284 - DNA, 201 bp, Homo sapiens
ggattatttaatattttggttcctatttgtaagttgtgttgtctaaaacatatcctgacttgattccgtgacatccagaagtttgtatgctaagttgagaygttacacctatcagtatgcttgcagcttgcacatctgcagttttcatttttgagattctattttaattttggtagatttagtgtagaggagatggcctgg

SEQ ID NO: 402285 - DNA, 201 bp, Homo sapiens; identical to SEQ ID NO: 89208

SEQ ID NO: 402286 - DNA, 201 bp, Homo sapiens
ttgtggtttaaatttaaaatatatagtaatttaaagtatctaattcatttaaagatcagttccacatggtttgccttgtaaaagagtgcggttgtgtgttsatttttgaaacactttttagacccagtgatgctgctgatgaaggtagagacacgtccattaatgagtccagaaatgcaacagatgaatccctacgaagga

SEQ ID NO: 402287 - DNA, 201 bp, Homo sapiens
gagtcctggtgatgtcttcttatctaaagaatcccccaactagctctggtaccttctgtgtggtaaagacactcaaactgtttgagttgaattaatagcaktttaagtagaaaaggaaaggagagtctgaaaagtcaggaagatgaatgtcataggtgagactttcaccatccttttatgaaatacacaggtgcatacctg

SEQ ID NO: 402288 - DNA, 201 bp, Homo sapiens
tcaagatggggcagtgatcttgctttcacactccagaggggcttgaccgaaccagtgtgttttgggtaggtacagtgagagcctctcggccataaagcacygccgtcacagtggccatcattccccacagtgctggactgtgggcaaaggccatttaggggaggcagggaataggtgctgcagaaggagtgagataatctt

SEQ ID NO: 402289 - DNA, 201 bp, Homo sapiens
ttctttggtgctcagcctagttgtgatttctttcttgctgctctctgggccaggaccctgatgatactctccgcaccccctgccaatgctactggggaggycttcctccctcaccttgctcctcccattctggaggcccctattcctgcttgactttgggtcagaggattctttctcaagcacatttgattatgtctctat

SEQ ID NO: 402290 - DNA, 201 bp, Homo sapiens
aaacttttttcttccctaagatttttgaggcaatatctgtttttatgcttgatattaaagttatcaagaactcataatgagagctcttcaccgtcaatctrgttgtgtatttatgtctacatttactttgttttatataggacaaatttttcaaccccagtatcccgtctttgggtttgcggaatgttatttatatcaatg

SEQ ID NO: 402291 - DNA, 201 bp, Homo sapiens
ggcagtgatcttgctttcacactccagaggggcttgaccgaaccagtgtgttttgggtaggtacagtgagagcctctcggccataaagcaccgccgtcacrgtggccatcattccccacagtgctggactgtgggcaaaggccatttaggggaggcagggaataggtgctgcagaaggagtgagataatcttggtggtctc

SEQ ID NO: 402292 - DNA, 201 bp, Homo sapiens
gtcactgtcacactcatgcacatgtgcgcacacacacacaatgctttcagtcagttgcaaagggatttcatagagagcttggactttgtacataccaatartatttctgaaaatgttgactgaaggaggagtttaggattaacatttaatatattgggccaaatttttggaagatttagacaaaggaagggaggaagaaaa

SEQ ID NO: 402293 - DNA, 201 bp, Homo sapiens
aattaggatttgagcccagatttttctgacttcaagtcagctgttatccttctactacaccttcgttttaatatggtgaataccagcaagaagagtgaagyagagttgtagttataatagactgtaggtgggagcaagtaaaggaatatggaaatgggagatcccgtagaactaaaacagccttgtactttgggtcttgat

SEQ ID NO: 402294 - DNA, 201 bp, Homo sapiens
gttttaatatggtgaataccagcaagaagagtgaagtagagttgtagttataatagactgtaggtgggagcaagtaaaggaatatggaaatgggagatccygtagaactaaaacagccttgtactttgggtcttgatatttcaataaaagtgtctcttcgtcattcagtaactaaattccactggcctggattgaagttgg

SEQ ID NO: 402295 - DNA, 201 bp, Homo sapiens
taaatattcattcgccttggtcatttgcttctgcagtataaaatgttattagagtgaactatgactgtagtctataataaatggatacttctgtaagtagwatatatatatataattagctctagttcagcaattcagacatacgtgcatgcatgtgcacacacactaagtcatttacaagtactttgaggttgtaggtcc

SEQ ID NO: 402296 - DNA, 201 bp, Homo sapiens
caaagtaggtttaacagcaagtcatctgagaactcacaggttgccagtggtggaagtggggccccacccttgtctgctgacttgccctcattctcttcctmgctccccatactttcttactgtggctgctgggattgtcatgatttgttgagcgtaaccatttgacagggttttattctctctcttcagctgagagtgcca

SEQ ID NO: 402297 - DNA, 201 bp, Homo sapiens
gataccgtgaggatttgagataattggagttaaacatcttatacagtgtctggtaattagtaggtgttcatgtggtagttgttgtactttttaaaaatagwtattaaaatgatttgttgcctctgttgctcattaatgtgttttatttgaactacttgaactaatttgtggtacaacgtctagatttatagttgcatgtcc

SEQ ID NO: 402298 - DNA, 201 bp, Homo sapiens
agcctgttgtatgatgaatagtgatctctaatgaggttccattataccagaacactgtagtattataacttccttttggtaaatcacacttatgggaaatrtgatagaagactttcacagttttaaatactcctgtttaaaatttaggtatttcaaaaaagttcagctatgtttgtaaaaagtgcaactaaaaaaagcttt

SEQ ID NO: 402299 - DNA, 201 bp, Homo sapiens
gtggctaaacagagaagagccaggaagggtcagagaagaggactgccttgtcctggctccactgggcagttgtttgtgtgccagtgcatatttatttactrtccatcatctccttggcctagcacgatgaccaggaagatatcagtcctagtcttgctgagcagcagtgggacaagaagcttcctgaacctttgtcttgga

SEQ ID NO: 402300 - DNA, 201 bp, Homo sapiens
gcttgcctgctcctctacagacacaggcaggtatgtctgcaatgtcacctgcagttaagtaggaagcaggagaatgttttgtcagctgctcagatacataytcaggggcagatttggcccactcatggctagtactatgaggtaaacagtaaaataagctgaggaccctgcccaaaggagcttatcaacttggtggaggaa

SEQ ID NO: 402301 - DNA, 201 bp, Homo sapiens
attctaagtcattttagagtatagttatgttggttgaaattttagaatatagttaatgttggttgaactccatcaaaacaaaaaaaaaaaatagaaaaagraaaccttgtttgcattggaaactcccacctcatgctcacacacacccaggcatacatttacttaaagccaggatatggttttttgtgcctttactgcctt

SEQ ID NO: 402302 - DNA, 201 bp, Homo sapiens
actccatcaaaacaaaaaaaaaaaatagaaaaagaaaaccttgtttgcattggaaactcccacctcatgctcacacacacccaggcatacatttacttaawgccaggatatggttttttgtgcctttactgccttctgaggtctaggacaccacaggtcaggttggtaatggaaattttttttattttttattttttgcct

SEQ ID NO: 402303 - DNA, 201 bp, Homo sapiens
gaggaagaatctacatttaaaaacaaaacaaaacagactgcttaatatatatagtactaagctattgcttgattaatactgttaatgtaaataaggtctawctcattaacatgtggtatatattctgaaagcaaatgctttccaaatgaattgactggcattttagaacccaccctttatcctcccaaaatacatttgtct

SEQ ID NO: 402304 - DNA, 201 bp, Homo sapiens
  misc_feature (1)...(201): n = A,T,C or G
ttctctatgtgctagcagtgagctgcaggaaagccaaggcaagaagaaagtcttggaatgttggcctctcagctttttggaaagtaggttttccaccatcntgataccgtttccatctttctttagggaattgatctctccacattggtcgaagacttctttgtgatgaaagaggaagtcctggctcgtgattttgacctg

SEQ ID NO: 402305 - DNA, 201 bp, Homo sapiens
caattaggatttcttggaactgcttaataaacactgataattttttgtaatccaacttccctttcatggactctatgccagtgactgtgtagctcacctgkccttcagacacagcaggctgtagttagcccagcctgtttttgtgcagctttcttttgttacatgacagtctacccattcacaaaccacttctcaggtgtt

SEQ ID NO: 402306 - DNA, 201 bp, Homo sapiens
gccactgcgcctggctagttttaagattttaaagatgaattttgagtttatgacattctttgaaggctaaaaagtacttttcaataaaacttttttcttcmctaagatttttgaggcaatatctgtttttatgcttgatattaaagttatcaagaactcataatgagagctcttcaccgtcaatctagttgtgtatttatg

SEQ ID NO: 402307 - DNA, 201 bp, Homo sapiens
ttcacaataggatttgcgctcctatcctatgagaatctaatgctgttgctgatctgacaggaggcggagctcagagggtaatgcaagtgatggggaatggytgtaaatatagatgaagctttgcttgcttgcctgccactcatctcctgctgtgtggcccgcttcctaacaggccggggaccggtattggtccgtggcccc

SEQ ID NO: 402308 - DNA, 201 bp, Homo sapiens
taggagtgggagggggaagtaattcttagtaacctttagtttctctgggactgtgtctcaagaagtgttcacatttccaaacattaaatgttaagctccamaggaaactaaagaaaggcaggagaacaggtgctttggtgacagtgccatgtgggaatagcagccttgttttatggattaataattgaatgggtttctaaa

SEQ ID NO: 402309 - DNA, 201 bp, Homo sapiens
aacctcgaggcctgtgctttctctggttccactgatgtacaatcatctgtgtaccactgggtagcttaaagaatatttatacactatctcatttgattctmacaacagtcctggaaaatggatgttttaggtatttctacttccctctgttctccctatttctctctctacaccctcttttctttccccttccctttctta

SEQ ID NO: 402310 - DNA, 201 bp, Homo sapiens
tgaggcaggaggatcacttgaacctgggaggcggaggatgcagtgagctgagattgcgccactgttttccagcctgagtgacagagcgagactccatctcaaaaaaaaaaaaaaaaaaaaaagaaaatcatctgctcaacacctctcaatttacaaatgaggaaaaccaagcccagcagtactaatgagcatttatattat

SEQ ID NO: 402311 - DNA, 201 bp, Homo sapiens
ttatgctttttgaatgcttgaactgagtttttttggtagtaggttatgcatattgtatgtaagtgaaccatatgaaagaattttgctgtttgaatttttcrgaattcaaattgaattcaaattgaattttaacttagagaaattgaatatgaagcctttcctttaatatgtggaagtgttgaattttcagaaatgttttaa

SEQ ID NO: 402312 - DNA, 201 bp, Homo sapiens
cttggatatatagtaaacttttaaaaatagaacttaagtctaagtacatgagcagatcattcccaggctgctggtctctctctctctctcttttaaatttrcatttaaatttaaatttaaaaaagaggggagagactttggtccgttgaattttttttgataagatgataagatcctaagaaaagggatctcagagtcttc

SEQ ID NO: 402313 - DNA, 201 bp, Homo sapiens; identical to SEQ ID NO: 89210

SEQ ID NO: 402314 - DNA, 201 bp, Homo sapiens
gctgaggcgggcagatcacgaggtcaggagatcgagaccatcctggctaacgtggagaaaccccgtctctactaaaaatacaaaaaaaaattagccaggtrtagtagcacctgcctgtagtcccagctactttggaggctgaggcaggaggatcacttgaacctgggaggcggaggatgcagtgagctgagattgcgccac

SEQ ID NO: 402315 - DNA, 201 bp, Homo sapiens
ttggaatttagggcaaacctaagaagaatgagagcctgtggagtgtagcaagaggtgttattagaatgttacgaaaaaactatggttgtgtccgagtggaytttgcacagccattttccttaaaggtgagtgtctgttgaaatgaaaccatgttgaagcatctacctggagtcaggaggctccagtgctgactcttaacag

SEQ ID NO: 402316 - DNA, 201 bp, Homo sapiens
gcagatcacgaggtcaggagatcgagaccatcctggctaacgtggagaaaccccgtctctactaaaaatacaaaaaaaaattagccaggtgtagtagcacmtgcctgtagtcccagctactttggaggctgaggcaggaggatcacttgaacctgggaggcggaggatgcagtgagctgagattgcgccactgttttccag

SEQ ID NO: 402317 - DNA, 201 bp, Homo sapiens
aggcggagctcagagggtaatgcaagtgatggggaatggctgtaaatatagatgaagctttgcttgcttgcctgccactcatctcctgctgtgtggcccgsttcctaacaggccggggaccggtattggtccgtggccccggggtttgggaccactgctgtagaggataccaaaaatatatattaatgtttatgttagtat

SEQ ID NO: 402318 - DNA, 201 bp, Homo sapiens
cagatcacgaggtcaggagatcgagaccatcctggctaacgtggagaaaccccgtctctactaaaaatacaaaaaaaaattagccaggtgtagtagcaccygcctgtagtcccagctactttggaggctgaggcaggaggatcacttgaacctgggaggcggaggatgcagtgagctgagattgcgccactgttttccagc

SEQ ID NO: 402319 - DNA, 201 bp, Homo sapiens
tatttgtctttatacttactcttcattcccttaccttttctacaacttatttaaaccaataattggccagccatggtggcatgtgcctgtaatcccagcamtttgggaggtgaaggcgggtggatcacctgaggtcaggagtacgagagcagcctggccaacatggcacaaccctgtctttcctaaaaatacaaaaattag

SEQ ID NO: 402320 - DNA, 201 bp, Homo sapiens
agcacctgcctgtagtcccagctactttggaggctgaggcaggaggatcacttgaacctgggaggcggaggatgcagtgagctgagattgcgccactgttytccagcctgagtgacagagcgagactccatctcaaaaaaaaaaaaaaaaaaaaaagaaaatcatctgctcaacacctctcaatttacaaatgaggaaaac

SEQ ID NO: 402321 - DNA, 201 bp, Homo sapiens
attttggaatatgtgcattagacttacaggttgagcgtctctaatccaaaacccaaaatgctctgatgagcatgtcttttgagcatcatattgatgttcamaatctttcagattttggagtacttcagatttttgattttgggattaggaccacaatcttggctcttaattattccatatgatttttagttactttcttgt

SEQ ID NO: 402322 - DNA, 201 bp, Homo sapiens
ggttttattctctctcttcagctgagagtgccacatattgtcttgtgaagaatgctgtgaaaatgtttaaggatattggggtaggtgtccaccatttatgktataaaagctatctcaacttctgttctctttagatctagtctgtttgagctacctttgtggtggggtggaccccgagagaagcagtttctgctggcttaa

SEQ ID NO: 402323 - DNA, 201 bp, Homo sapiens
ttgtgactttattctaagtcattttagagtatagttatgttggttgaaattttagaatatagttaatgttggttgaactccatcaaaacaaaaaaaaaaamtagaaaaagaaaaccttgtttgcattggaaactcccacctcatgctcacacacacccaggcatacatttacttaaagccaggatatggttttttgtgcct

SEQ ID NO: 402324 - DNA, 201 bp, Homo sapiens
cttctctccaatgaaggcaccatctcactggtgagtgaagacccttcagtgttgcctggtctcttttcttgagcgttttcatgaaaacgtaaccccccgtdtttttctgttagataatgtttgacccattgttgatactttatattccactcctggatttcagtgaccaccaaaccaatatgtcatttactatcttggttt

SEQ ID NO: 402325 - DNA, 201 bp, Homo sapiens
agcctgttttagatagttccttaataccctccaggttattgcctctctgatccagcaattccattataggaattatatactatagatgtatttggaaatamatgtacaaggatgttcactgagatgtcatttataataagtaaaaactgaaaatcacctaaaattcataaataaaaaactgtttaagtccgggtgcggtgg

SEQ ID NO: 402326 - DNA, 201 bp, Homo sapiens
gaacatccagtgatttagaaaaccttacagtctatcattattttgttctgaacaaagctcaattgttataattttctagtatttgtgaaataaatgacacrttcatattcaaagtaggaaactagttttttctttcttctttctcacaggataggtattctggagaaaatggagacaattttaacaggactccagcttcat

SEQ ID NO: 402327 - DNA, 201 bp, Homo sapiens
taaaatgaagggtaatcagagaagggataagataaaatgtgtaacttgctgatggaggaaatccaatagaaggacagagctttgtaggaaggaaggtagaktgaaaatagtttatttcctaaatattcgtggtgaaaattggtaaaaataaaatacatagctttaccatttggggaaaacaggacagaaaggagaacaaaa

SEQ ID NO: 402328 - DNA, 201 bp, Homo sapiens
atattcgtggtgaaaattggtaaaaataaaatacatagctttaccatttggggaaaacaggacagaaaggagaacaaaaagcatcgaaaaaactctgtaargagaaaacacaaagattgtagaaataaaagacctatgtatcagtaatcataatataggtaagcatatttcaatatggagttgaaagtaaagaggtcaggc

SEQ ID NO: 402329 - DNA, 201 bp, Homo sapiens
ccagggctaggctgttttgtttgggagagcaggatcctctagtctctgagatttaagtttttgtaactgtatatgctagttccagcctttccttcctcccrctctgtcctcactatattgtacagcttctatgttgcttttgctgatttctttattactcatgtttgatttgaaacaagctgtttgtgggaggaagtttta

SEQ ID NO: 402330 - DNA, 201 bp, Homo sapiens
ggttttctagatatacagtcatgtcatctgcaaacagagacaatttgacttcctcttttcctaattgaataccctttatttccttctcctgcctaattgcyctggccagaacttccaacactatgttgaataggagtggtgagagagggcatccctgtcttgtgccagttttcaaagggaatgcttccagtttttgcccat

SEQ ID NO: 402331 - DNA, 201 bp, Homo sapiens
cactgaataacaacattgctaaagctggttatactaagcttactcctgtgcaaaaatacagtattcctatcatacttgcaggacgagatttgatggcttgygctcaaacagggtctgggaagactgtaagtctttccccacatgtccaaactgttaggttttttgagctttggttcttccttagtaacttggtttcttctt

SEQ ID NO: 402332 - DNA, 201 bp, Homo sapiens
ccctgtcttgtgccagttttcaaagggaatgcttccagtttttgcccattcagtatgatattggctgtgggtttgtcatagatagctcttattattttgaratacgtcccatcaatacctaatttattgagagtttttagcatgaagagttgttgaattttgtcaaaggccttttctgcatctgttgagatgatcatgtgg

SEQ ID NO: 402333 - DNA, 201 bp, Homo sapiens
tagagtccatgaggtcataccattttagtcttaatcagccttcatagtagaattgtagggaaaaacaggtattgtatagcagctgatgagagtgttaaacrtggttttggaggtggattttagcaagtgtcttatttgcttaaatgagaaaactgtagcacaaaatttctgttgccagatgtaacttcaataagggtaatg

SEQ ID NO: 402334 - DNA, 201 bp, Homo sapiens
tgtatttctgtgggattggtggtgatatcccctttatcattttttatgcatctatttgattcttctctcttttcttctttattagtcttgctagcagtctrtcaattttgttgatcttttcaaaaaaccagctcctggattcattgattttttgaagggttttttttgtctcttatttccttcagttctgctctgatctta

SEQ ID NO: 402335 - DNA, 201 bp, Homo sapiens
atgtgtttgctcttgcttctctagttcttttaattgtgatattagggtgtcagttttagatctttcctgctttctcttgtgggcatttagtgctgtaaatytccctctacacactgctttgaatgtctcccagaaattctggtatgttgtgtctttgttctcattggtttcaaagaacatctttatttctgccttcatttt

SEQ ID NO: 402336 - DNA, 201 bp, Homo sapiens
gaatgtctcccagaaattctggtatgttgtgtctttgttctcattggtttcaaagaacatctttatttctgccttcattttgttatgtacccagtagtcaytcaggagcaggttgttcaggttccatgtagttgagtggttttgagtgagtttcttaatcctgagttctagtttgattgcactgtggtctgagagacagtt

SEQ ID NO: 402337 - DNA, 201 bp, Homo sapiens
gtaatggccttctttgtctcttttgttcttttttggtttaaagtctgttttatcagagactaggattgcaacccctgcctttttttgttttccatttgctyggtagatcttcctccatccctttattttgagcctatgtgtggctctgcacatgagctgggtctcctgaatacagcacactgatgggtcttgactctttat

SEQ ID NO: 402338 - DNA, 201 bp, Homo sapiens
gtctgttttatcagagactaggattgcaacccctgcctttttttgttttccatttgcttggtagatcttcctccatccctttattttgagcctatgtgtgkctctgcacatgagctgggtctcctgaatacagcacactgatgggtcttgactctttatccagtttgccagtctttgtcttttaattggagcatttagccc

SEQ ID NO: 402339 - DNA, 201 bp, Homo sapiens
tacatttaaggttaatattgttatgtgtgaatttgatcctgtcattatgatgttggctggttattttgctcgttagttgatgcagtttcttcctagccttratggtctttacaatttggcatgtttttgcagtggctggtaccggttattcctttccatgtttattgcttccttcaggagctcttttagggaaggcctggt

SEQ ID NO: 402340 - DNA, 201 bp, Homo sapiens
tgaggcttgtgcattcatcctgtagttctcatgccttggttttcagctccatcaggtcctttaaggacttctctgcattggttattctagttagccattcrtctaattttttttcaaggtttttaacttctttgccatggctttgtattcctcctttagctctgagtagtttgatcatctgatgccttcttctctcaactc

SEQ ID NO: 402341 - DNA, 201 bp, Homo sapiens
agttctcatgccttggttttcagctccatcaggtcctttaaggacttctctgcattggttattctagttagccattcgtctaattttttttcaaggttttwaacttctttgccatggctttgtattcctcctttagctctgagtagtttgatcatctgatgccttcttctctcaactcgtcaaagtcattctccgtccagc

SEQ ID NO: 402342 - DNA, 201 bp, Homo sapiens
gacagagcactgacctaagatctggtttgcttgaaatcattcatttgaagtagagtaatttaataggtaatattttcagaaaacaactaataatagcatamataaaagcaatgagtggagaacagaatttgtgtctcaggcttacatttcaggttttactaaaaaataattcctgcttattgcagtttatttcttttagtt

SEQ ID NO: 402343 - DNA, 201 bp, Homo sapiens
atataccttttcattgtagttgtagtgcagtggcaggttgcatatataaattgtttccagtccataagtgaatttactttacagtgaatccttttttttctttttttttgagatggtgtgagacagtgttttgctcttgttgcccaggctggagtgcagtggcacgatctcggctcaccacaacctctgcctcctgggttc

SEQ ID NO: 402344 - DNA, 201 bp, Homo sapiens
ggaatgaaagtttaggtctatagtatattaacgcataacactgttttgtattggaattttcaagaaactagactgaaataaccaccaactaaaagctaagtttttttttttagcattagacctatgaatgtttaggctaatgaaatgaaatcattaatgaaaatcactaatgaaaaatattgattgcctgcttaccttctt

SEQ ID NO: 402345 - DNA, 201 bp, Homo sapiens
actcatgtttgatttgaaacaagctgtttgtgggaggaagttttagggattttttgccctccccttccccaaaggagcaattcttttgtatgtgtgtgtcttttttttttttttttcccagaaaactttttgcaagttgttttatttgcaatgccctttgaaaggccacgaaagttaactggattacaaactaggcagaaa

SEQ ID NO: 402346 - DNA, 201 bp, Homo sapiens
taactggattacaaactaggcagaaattgctttacaaaaggagggaaataccaaaatgtcagtttctgtagagaatccacagttcagttttattcagagcaaaaaaaaaaaaaacttttaatcacactagaaaaaactcagcaatagatttggaatctgtactcaaactacacatgcaatgacagtattctgctaatgcag

SEQ ID NO: 402347 - DNA, 201 bp, Homo sapiens
tgtggacaattttgtctcccttataaaatttgtgcaatgtgaattatttattctgtgttatctaccagttaatttgaggtgtgaattattaactagaggartaaaggattctgagttaggggaaaaggatttgtgtgagttgaagtgaaaatgaaaacacaattgatgaaaaatgttcaaatgaggttaaggttaaagtta

SEQ ID NO: 402348 - DNA, 201 bp, Homo sapiens
gtgtctgttcatgtcctttgcccactttttgatgggattgtttgtttttttcttgtaaatttgtttgagttcattgtagattctggatattagccctttaycagatgagtaggttgcgaaaattttctcccattctgtaggttgcctgttcactctgatggtagtttcttttgctgtgcagaagctctttagtttaattag

SEQ ID NO: 402349 - DNA, 201 bp, Homo sapiens
cattatgtagtttgtaaagctgatatcaacacatagatttcacctttcgtatataaggtcttaggttggaaatttagaatgatgtcttaccatctataatrgaattaattgctatgtcaaaagagagtaatagatttcatccccactccccataccaggatgagaattttatttaaacttacttaaaaaatgcttttccta

SEQ ID NO: 402350 - DNA, 201 bp, Homo sapiens
aaattattttcatgttttaggttgaaatacacataaaatttccgatcagaactctcagttgttaatactttaaacaattagctttatattacctgggacattgtagacccatgagtataacttattttccatatgattcttctaacattttatatagtttccttttttttttctttttcttttttgagacagttttgctct

SEQ ID NO: 402351 - DNA, 201 bp, Homo sapiens
taatactttaaacaattagctttatattacctgggacattgtagacccatgagtataacttattttccatatgattcttctaacattttatatagtttccttttttttttctttttcttttttgagacagttttgctcttgttgcctaggctggagtacaatggcacaatctcggcttactgcaaccttcacctcccaggt

SEQ ID NO: 402352 - DNA, 201 bp, Homo sapiens
aaaggttagtagaaaggaaaacttgagaacttgtcttctagttactctttgtaaatgttgtgcttaatattgtgaagtaactataatatttaataatcaarccattgttttcgtgcctggaaggtagctactttattatttcattaacattttatgtatatacatatttttggttttaaaggtcaggaattaactttgaga

SEQ ID NO: 402353 - DNA, 201 bp, Homo sapiens
gctcggattacaggtgtgagccactgcatctggcctgcaaatgtttaataacctcctgtgggttgtcttttccctttcttgatagtaccctttgaaacacyaaaatttaacatttttatcaaacccagtttatctttttatgttcttttggtgttataactagaaaactgttgcctaatccagagtcatgcagactttttc

SEQ ID NO: 402354 - DNA, 201 bp, Homo sapiens
gagggctctactgttgtgtggttacatcacatttgtttattcttcagctgatgaatgtttgagttgtttccacttttgggctatcatggctaatgctgccrtattcatttgtgtacaagtttttatgtgaacctgtgttttcatttttctggagtatatacttaggagtggaattgctgtgtcatgtgctaactcttaatg

SEQ ID NO: 402355 - DNA, 201 bp, Homo sapiens
agtatagtaatctctcatactactattttaaaactctgggaatgttacttactaatatcaaaaatggagaagctaggatatccccaaattatttcattagsatgaatgggggaaagtttgcatatatttaagaaagcacaaatgtcttgagtttattaagaatggtaaattggccgggtgtagtggctcacgcctgtaatc

SEQ ID NO: 402356 - DNA, 201 bp, Homo sapiens
ttttctagtagttatgtattttgcaaaatcctaatattttatactgatctttcacaatagtacttgggtgatataagtaaccaaccatcttatagctgttrtaatctgctgtctgattaatattgagataacacctacaggaattcagtggatattatggatactgatggagaggaggataagttaaagaataatcttttg

SEQ ID NO: 402357 - DNA, 201 bp, Homo sapiens
ttttggaatcttctggaaagcctgatgtcatagtaataacatagaacttttacatttcgaaaaatcattcctttcagaataaacatttctgggaatggggyctaggaatttatttttaaccaactctccaggtagttttcaggcagccttcagtatagtaatctctcatactactattttaaaactctgggaatgttactt

SEQ ID NO: 402358 - DNA, 201 bp, Homo sapiens
gtgactttttttggaatcttctggaaagcctgatgtcatagtaataacatagaacttttacatttcgaaaaatcattcctttcagaataaacatttctggraatggggtctaggaatttatttttaaccaactctccaggtagttttcaggcagccttcagtatagtaatctctcatactactattttaaaactctgggaa

SEQ ID NO: 402359 - DNA, 201 bp, Homo sapiens
tgctacctgctagttgaagtagaacaagttgcttaatttttctaagccagttttctgttccatagaatggaaggtattcattttataggtggttaggcagrctaagtgagaatgcgtgtaaaagcacacagctgaataccagacacattcatgacaaacactcagatgtcatccatctatcttcattaaatatttgaagct

SEQ ID NO: 402360 - DNA, 201 bp, Homo sapiens
gggtgccaaacttggcttcatgtctctgccttgctacctgctagttgaagtagaacaagttgcttaatttttctaagccagttttctgttccatagaatgraaggtattcattttataggtggttaggcaggctaagtgagaatgcgtgtaaaagcacacagctgaataccagacacattcatgacaaacactcagatgtc

SEQ ID NO: 402361 - DNA, 201 bp, Homo sapiens
tgacactctacaggaatacagagaatgatgagaatgatgaaaataatgataccagaagatggactacgataaaccagtgcattcccaaatctgattgagtygatttgggtgaggtcttagaacctgtatttaaaagcatccatggtgatcctgatacctcctgtgtttggtaatcattgatgtatgaaatctttataacat

SEQ ID NO: 402362 - DNA, 201 bp, Homo sapiens
ggaaaacagtcctgtgtctttgacatccattctggaattagagtccctcttatgtaccaggcttggctgtggtgctggtagtaaatacagtggtggacaamgtttcatattcaagcactgcctcctatccctgctttatttttcatttcctgattttgaagtttgaatattaataatttcattgtcttgtaggggatgaaa

SEQ ID NO: 402363 - DNA, 201 bp, Homo sapiens
taatttagttgtattgtccttagcagatgaagagattgagtttgtaaaattttgagaattttgatggttttaaatagaaaacatatagtggttacactgayatattcctctgttttgcccatgtgcatacagaggagtatatgacaattgaggtaatacagaattggctgaaaagaaagttgtttttaaccttaagagaat

SEQ ID NO: 402364 - DNA, 201 bp, Homo sapiens
  misc_feature (1)...(201): n = A,T,C or G
ttcccatccttggaagtctctttacgccagaaattcatttaattcttagtttttgatgatgacacacttaattttatatgttaaagagtttaactgtccancctttttcagatgctggtgagtgtaataagcgagataatacatccacaatgggtggttttggagttggaaagagttttggaaacagaggtaattacttgg

SEQ ID NO: 402365 - DNA, 201 bp, Homo sapiens
ttttctggctgaatagtattccatggtgtatatatacaccactcattgattgatgggcatttgggctggttccatatttttgaaattgcgaattgtgctgytataaacatgcgtttgcaagtatcttttcatataatgacttcttttccaactagtgagaggtaggattcccaagaataattgttaccctgtgactttatt

SEQ ID NO: 402366 - DNA, 201 bp, Homo sapiens
ttcaaggcagcgacaacagagcattaaatgaaacacgggattcttctgaacttgggactctgtgtgactggacaggttgcacactcatgaggccagccttrcccacactgaagggggaaggtagaatccatatttgaaggaaggaatatattgaagaatttgtatatgtatgttaaaaccaccacaggtgattttattctt

SEQ ID NO: 402367 - DNA, 201 bp, Homo sapiens
tcagctcacgctcagtgtgctgcaccaagtgtcctgcacccagtttctgacactccccagtgagatgaacccggcacctcagttggaaatgcagaaatcasccgtcttctgcgtcacttatgctgggagctgtagactggagctgttcctatttggccatcttggctccacccctgattaagcttattttcaaagaagaaa

SEQ ID NO: 402368 - DNA, 201 bp, Homo sapiens
ggggtttcaccacattggccaggctggtctagaactcctgacctcaggtgatccgcccgccttggcctcccaaagtgctggaattacaggtatgagccacmatgcctagccatgtttcggattttttttaattaacttttggaatatttgcagtacgtttatcacttgatcatccctaatccaaaactctgaaatgctcca

SEQ ID NO: 402369 - DNA, 201 bp, Homo sapiens
acatagaaagtgacatggttgtaaataaccacagctctttcataaatagggaaccttttctctttagtctttttttcttctttttttcccttctttagtctttttttttttttaaacagacctaataaagtcaacagaatctctgctgtctaggctgattacaaggaaggtaaagaataactttttatccagtgtaatggc

SEQ ID NO: 402370 - DNA, 201 bp, Homo sapiens
ttaagtattttacttaaaaacaaagttatcttttaaaaatttgaacagtgaaaactttaaaggtaagcagtgggaagttccatagtatttaaaatttgatsttgtcaatttttgtctattttctcttatattttcttgtagtctctgtaacgtacattatgtttttaatttaaattccaaggaccaaaagtgacctacata

SEQ ID NO: 402371 - DNA, 201 bp, Homo sapiens
atgtcaaaagagagtaatagatttcatccccactccccataccaggatgagaattttatttaaacttacttaaaaaatgcttttcctagtgattcaagatrttttcccaagattgtgagaaagtgtgtcttagggcagtgatttttctgagagggggagccctctgtctcctattgataattatacttagaacaagccatt

SEQ ID NO: 402372 - DNA, 201 bp, Homo sapiens
gataacatttctcttttattcatctttataaacaaatttgaatagaattcctttaagagactttgtaatttaatgtgttaatacttccgtaggggccgggygcggtggttcacgcctgtaatcccagcactttgggaggccgaggcgggcggatcacgaggttaggagattgagaccatcctggctaacacggtgaaaccc

SEQ ID NO: 402373 - DNA, 201 bp, Homo sapiens
agtgcaatggcacgatctcagctcacctctgcttccccggttcaagtgattctcctacttcagcctccctagtagctggaattacaggtgcatgccaccaygcccagctaattttttgtatctttaatagagatggtgtttcatcatgttggccagactggtctcgatctcctcaccttgtgatccacctgcttcagcctc

SEQ ID NO: 402374 - DNA, 201 bp, Homo sapiens
cctcccaggttcaaacaattctcatgcctcagcctccagtgtatctgggattacaggcatgtgccaccatcttagctggttttttttttttttttttttgwatttttaatagagacagggtttcaccatgttggccaggctggtctcaaactcctggcctcaagtgatccacctgcttcaacctcccaaagtgctgagatt

SEQ ID NO: 402375 - DNA, 201 bp, Homo sapiens
tgattatttggggaagacatggtagatactttgagtccttgctctcagtctgagtgatgtaactttaaagctgtcataaaattaaatgtttgtttgtttctttttttttttttttaaataattaccagggcaagagcactttgaacacagctgggttttcttcttcacaagctcccaatccagtagatgatgagtcatggg

SEQ ID NO: 402376 - DNA, 201 bp, Homo sapiens
gaacagagggttttccaagagaggcggtaaggaccacattttggaacaatttgtacttaacacagagacactaaactggtaaaactgattttgaaggagcyggatgaaaaacactgatcgtgaaaacctttgaagaaaaatactttggtatatgttttctgcttttaatatttgagtgagtattcagtgggtgcccctcct

SEQ ID NO: 402377 - DNA, 201 bp, Homo sapiens
gtagaaatataataactatctggtaagtatttttttaaaaagtaataaaagatgttccattttcttttatacaaaggttagaggatttataaggtaatttctttctgaagatattgtcaccaaacatctttaagagttagattgtcagctgtcccttatgaaatgcagactataccttctgggaggactcaggttacttta

SEQ ID NO: 402378 - DNA, 201 bp, Homo sapiens
taaaacaatatgctttttcttatggaatagttgatttggtctgaaggataaagttagctcaatatataattttttactcttaaagttttttcttttctttytttttttttttgagacagagtctcactctgtcacccaggttggagtgcagtggtgtgatctcggctcactgcaactatcgcctccagagttcaagccatt

SEQ ID NO: 402379 - DNA, 201 bp, Homo sapiens
caaagttgaaaatcactgtggtgagagttctaaattatacagtctgtgtcagtgtttatctccatgtgattgttattaactattatatggggaataagagdcaacctaagcctcgtataggatacaatagcttgaggcaatttgataattaaaagctaaaatagatgtaaaaatattaatgacctaatttaaatctcaatg

SEQ ID NO: 402380 - DNA, 201 bp, Homo sapiens
tctcagaaatcaccactaaataacttatccatgtaacgaaataccacctgttcccccaaaagtattgtaattaaaaaaaaaaatcaagtaaaatatcaccttttttttttttttttttttttttaagatggagactcgctgtgttgcccaggctggagtagagtggtgggatctcggctcactgcaacctctgcctcctgg

SEQ ID NO: 402381 - DNA, 201 bp, Homo sapiens
ccagctacttgggaggctgaggcaggagaatcacttgaacccaggaggcagaggttgcagtgagctgagcttgtgccactgcactccagcctgggcaacasagcaagactccttctcaaaaaaaaaaaaaaaaaaaaaaaagcgcagttaatagaacttttaagtaattgcagaaagttttattgcacagtgttgatctag

SEQ ID NO: 402382 - DNA, 201 bp, Homo sapiens
aaaactttaaaggtaagcagtgggaagttccatagtatttaaaatttgatcttgtcaatttttgtctattttctcttatattttcttgtagtctctgtaaygtacattatgtttttaatttaaattccaaggaccaaaagtgacctacataccccctcctccacctgaggatgaggactccatctttgcacattatcagac

SEQ ID NO: 402383 - DNA, 201 bp, Homo sapiens
tgaggcaggagaatcacttgaacccaggaggcagaggttgcagtgagctgagcttgtgccactgcactccagcctgggcaacacagcaagactccttctcaaaaaaaaaaaaaaaaaaaaaaaagcgcagttaatagaacttttaagtaattgcagaaagttttattgcacagtgttgatctagacatttggtttctttta

SEQ ID NO: 402384 - DNA, 201 bp, Homo sapiens
aacagttaaacaggacacgagtgtaagattttcaatagcagtgactttcacacagggcagagcgtaatagctggctctatcaggatgagaattcaacatayagaaaactatggagcagaattttcctgcttgaaggtctccaatataataccaactagtagaaagctgtgtttcaccggtagtagatttgtttttaccttg

SEQ ID NO: 402385 - DNA, 201 bp, Homo sapiens
agtttaaaaagtagatgtatttctaaaacgtttgccacattttccattgtttcttacctttattcctggctttgtgttaacatcacattttatttaaaaaktgtgtgtgtgtgtgtgtgtgtgtgtgtgtgtgtgtgtgtgtgttgttgttgttgttgcatagaatccagctagggtttaataagtgcttactaaattaag

SEQ ID NO: 402386 - DNA, 201 bp, Homo sapiens
gaatgccatcaaaggaacagcgccaaacccttatgttcagtgcaacttttccagaggaaattcaaaggttaagtttttttcttaaaaataatttaattatmtatatatacatacttttatcaaagtggaagcactgtgaatatcctatttttagagatttgtcgttaagattttaatataggtagtttaaaaagtagatgt

SEQ ID NO: 402387 - DNA, 201 bp, Homo sapiens
gtagatgtatttctaaaacgtttgccacattttccattgtttcttacctttattcctggctttgtgttaacatcacattttatttaaaaagtgtgtgtgtktgtgtgtgtgtgtgtgtgtgtgtgtgtgtgtgttgttgttgttgttgcatagaatccagctagggtttaataagtgcttactaaattaagttatttttat

SEQ ID NO: 402388 - DNA, 201 bp, Homo sapiens
cacattttccattgtttcttacctttattcctggctttgtgttaacatcacattttatttaaaaagtgtgtgtgtgtgtgtgtgtgtgtgtgtgtgtgtgtgtgtgtgttgttgttgttgttgcatagaatccagctagggtttaataagtgcttactaaattaagttatttttattattatgccttcttttcaaacctaa

SEQ ID NO: 402389 - DNA, 201 bp, Homo sapiens
ccattgtttcttacctttattcctggctttgtgttaacatcacattttatttaaaaagtgtgtgtgtgtgtgtgtgtgtgtgtgtgtgtgtgtgtgtgtgttgttgttgttgttgcatagaatccagctagggtttaataagtgcttactaaattaagttatttttattattatgccttcttttcaaacctaaatctatag

SEQ ID NO: 402390 - DNA, 201 bp, Homo sapiens
aacaaggtgtttgatttttatagtgagagttcttttacctttcaattttaaaaaacatgtatctcttttttatttgatcctcttcaagattcttggaagtyagaagcagaaggaggagaaagtagtgatactcaaggtatattaacatttgtgtgactcacatagaagtatgttgtgttttaataatgcttaagtatttta

SEQ ID NO: 402391 - DNA, 201 bp, Homo sapiens
attgtcattaatgtttacatcttacttgttttaatttggtaatttttttcaaaaatggaattacttgttcagaggacattttttatcattctttttcctcsttgttctcaatagatttgttataacacaaagtttaattcacagatagatactttattccccctggtcttaatagccatctgtccaatttcttttttctta

SEQ ID NO: 402392 - DNA, 201 bp, Homo sapiens
gatttctattatttctcccttatatctattaatgtagtaaatgaatttttaaatgaactttgtgttcctgggctaagccttacgtgactcttttattgtastattggatgaaattagatattttatttagcacttctgaattaatgtaagattggcgtatagttttcttctgtcatgtcgtcctcacttggttttggtttc

SEQ ID NO: 402393 - DNA, 201 bp, Homo sapiens
caattttatttctgtccctataacaacctagttttttccagcaccatctaagcattctgtcttttccttgttgatgtgtgatgcaaatttcatttcttaawcgattttgttctttgttgtcttaaagcattggataaaatctacagttcattgacgagtagtagaaataacaaacatctaggcttttcctcacttcaatgg

SEQ ID NO: 402394 - DNA, 201 bp, Homo sapiens
ttctcctgagggtaaaagtatactttggatggtgagagaacttacaaatcatgagggactcccgtaaagcatacacacacacacacaaaaaatagaggccragtatcacttatccaaaatacttgagaccagaagtgcttcatattttttttttctttttttggagacggagtttcgctcttgtcgcccaggctagagtgt

SEQ ID NO: 402395 - DNA, 201 bp, Homo sapiens
attttcaggaattcctggtcccaaacaggatttttatctcttcatttttcttctcattattctcaggaggaggaggagggtcatctttatgggggggtgcrccactgaatgaccttttaaaatactgcttcattatttggtagaggactgggtcatcatatccttcaatcattcattcccaaatcttccaacgtgatcttg

SEQ ID NO: 402396 - DNA, 201 bp, Homo sapiens
gcctctagtccgagctactcaggaggctgaggcaggagaattgcttgaacctgggggtcagaggtcgcagtgagcggaaattgtgccactgcactccaacytgggtgacagagcaagactccatctcaaacaagacaaaacaaaaaaattctcatgcacatttgggttgtttccttttttgctgttatgaacaaactctca

SEQ ID NO: 402397 - DNA, 201 bp, Homo sapiens
tgatcttattggcagcagtcttgcatgtaacaaacctttgataatagcttgcagctagaataaggtcaaagagagttccttggtgaattttcaggaattcytggtcccaaacaggatttttatctcttcatttttcttctcattattctcaggaggaggaggagggtcatctttatgggggggtgcaccactgaatgacct

SEQ ID NO: 402398 - DNA, 201 bp, Homo sapiens
tttacagagtggatgtagatgggaagatgggtggaagtggtaggactaggctgggaaattgaactcatggcagtagtttttcacattgttgaagtccaaarcaggatgaaatgcaattgttactatattaaaataattttgaccggactctggctcatgcctgtaatcccagcactttgggaagccgaagtaggaagacca

SEQ ID NO: 402399 - DNA, 201 bp, Homo sapiens
gttgatttattcatgtattacttgtcagattttataatgatattttattatattttcttttctatttttattttttgagacggtcttattctgttacccakgctggagtgagtggtgtgatctcagctcacttcaacttctgcctcccaggcgaagtgaacctcccatctcagcctcccgagtagctgggactacaggctc

SEQ ID NO: 402400 - DNA, 201 bp, Homo sapiens
taaccgacctttggccaaagtgtggatggagtaggaggagttttgaagccgtccttcgaagcctttctgcctcggggtctcagagtcccacgggtgcccaragtctgggcttgaggcctgcagaggaggcgaaggggccttattcctggcttcttcactgcgttttctctgaacagacatggtccgagtaccatttgtgta

SEQ ID NO: 402401 - DNA, 201 bp, Homo sapiens
gggtggagcatgtagagatgttcagcagaccgttctccaagttggccagttctcaaaaagagaaaagctcgttgaaattctgcgaaacataggtatcttaygttgatacatttttttgtcatgattttgattttttttaatgaataatttaaaaaatcactaaagaattgtttggtctgacttttcataagtttgttttaa

SEQ ID NO: 402402 - DNA, 201 bp, Homo sapiens
ttcaagtatttgtaagaagggaatttaaagttttttggaacttgttctctttgaagacaagcaacgaaaataaagatgtgcacagccttacatcttgaccrattgtcacttatgaatttctttaataggtggttacaaaggtttaaatgaagaagtaataacaggctctggaaagagtaagttttccttaaacaaggtgtt

SEQ ID NO: 402403 - DNA, 201 bp, Homo sapiens
tgggtgtggtggcaggtgcctgtagtcccagctactcaggaggctgaggcaggagaatggcgtgaacccgggaggcggaggttgcagtgagccgagattgygccactgcactccagcaagccgagattgcgccactgcactccagcctgggcaacagagcgagactgcgtctcaaaaaaaaaaaaatgcatttctcagagg

SEQ ID NO: 402404 - DNA, 201 bp, Homo sapiens
actcctgacctcaggtgatctgcccacctcagcctcccagagtgctgggattacaggcatgagccaccacacccagccctatatagtattttcaggtggaratggggtatttgcattcccaccatttgctttggtaactatctaattagcagcctgactctttttagattcaccctgaaatgggaaagtatttgtatgttg

SEQ ID NO: 402405 - DNA, 201 bp, Homo sapiens
ggatgaggactccatctttgcacattatcagacaggcataaacttcgacaaatacgacactattcttgtggaagtgtctggacatgatgcaccaccagcarttctggtcagtgtattaattgtttctgtattagctatgtagcacactttgcctttaaaatacattatgtagtttgtaaagctgatatcaacacatagatt

SEQ ID NO: 402406 - DNA, 201 bp, Homo sapiens
ccccctcctccacctgaggatgaggactccatctttgcacattatcagacaggcataaacttcgacaaatacgacactattcttgtggaagtgtctggacrtgatgcaccaccagcaattctggtcagtgtattaattgtttctgtattagctatgtagcacactttgcctttaaaatacattatgtagtttgtaaagctg

SEQ ID NO: 402407 - DNA, 201 bp, Homo sapiens
aattttaggtttctgtgctactcttttcccatccttggaagtctctttacgccagaaattcatttaattcttagtttttgatgatgacacacttaattttrtatgttaaagagtttaactgtccaccctttttcagatgctggtgagtgtaataagcgagataatacatccacaatgggtggttttggagttggaaagagt

SEQ ID NO: 402408 - DNA, 201 bp, Homo sapiens
cagttttctgggtaaattatataaaaatatggtcgtttctccaccattaagtttgaaaataggaaggatttgagacttcattttaactattccaccagaartgtatctattttttgttttaggaaactagaaaggcttagtagtgacacatatttacatcacactattactccatcaaaagcagattgtttttctgtttct

SEQ ID NO: 402409 - DNA, 201 bp, Homo sapiens
gattacatctatcatattcctctataaatatgctaatgttgttgatctgtttagaattcgtgggtatgcttttgaaaatacactgaaaaactttgataggktagattaattttaccaaattttatattgtataataagagcataaagacataaatgttaagaacaccttgaaatgaaagttgttttcatttctcatcttaa

SEQ ID NO: 402410 - DNA, 201 bp, Homo sapiens
cttgtcaatttttgtctattttctcttatattttcttgtagtctctgtaacgtacattatgtttttaatttaaattccaaggaccaaaagtgacctacatmccccctcctccacctgaggatgaggactccatctttgcacattatcagacaggcataaacttcgacaaatacgacactattcttgtggaagtgtctggac

SEQ ID NO: 402411 - DNA, 201 bp, Homo sapiens
gatttctttgttgttgttttgtgttgttcttgtgtgtgttttaacattataggctatcgagatggaaataattcagaagcttcagggccatacagaagagrtggaagaggtagtttccgaggttgccgtggaggatttggtctaggaagtccaagttagtactggatttgcaaatgatgtgcttcattaactgttaaaaag

SEQ ID NO: 402412 - DNA, 201 bp, Homo sapiens
  misc_feature (1)...(201): n = A,T,C or G
ttcatgcttttttttaagtgttatacacatattttatatagttttgcgtggatagcaaatccacttgtaattaccatatccatactttgacaaactttttntctagtagttatgtattttgcaaaatcctaatattttatactgatctttcacaatagtacttgggtgatataagtaaccaaccatcttatagctgttata

SEQ ID NO: 402413 - DNA, 201 bp, Homo sapiens
ttgtttcttacctttattcctggctttgtgttaacatcacattttatttaaaaagtgtgtgtgtgtgtgtgtgtgtgtgtgtgtgtgtgtgtgtgtgttgttgttgttgttgcatagaatccagctagggtttaataagtgcttactaaattaagttatttttattattatgccttcttttcaaacctaaatctataggat

SEQ ID NO: 402414 - DNA, 201 bp, Homo sapiens
agtatgactatattctgagtctggtgagtcttcctagcaactactgaactgggaatggtcttggggacacccctccaacacaggttcttttagaaaatacmttcctttgctgattaggaaagaaatataacagtttaaacaaagtgtagtaatatgtaatagtctcctctacgtaaaatcatcttgaatactacagaaact

SEQ ID NO: 402415 - DNA, 201 bp, Homo sapiens
agggtgacacatccctactggaatggtgactctttttcctgccagccccttgtctcaaggagccagaagtgcccaggcaacagcagaagcttatacagatgggtcctatggttcaacataagattttatgatttttttactttataatggtttatcataggtattaattgcatttttgacttaagatattttggacttaaa

SEQ ID NO: 402416 - DNA, 201 bp, Homo sapiens
accaatgttgaattcacagccaattcctggtgactttcctcctatttgaaagctataatccttcagtcttgggagaggtagacaaaaagagattcattccyggccaaggttcatggacagggtctggtcactgcttctcctcctagggtactatgctttcctagtgactcttcactaaattccatagttcactggtcaaac

SEQ ID NO: 402417 - DNA, 201 bp, Homo sapiens
agaactcataagacagcattaggtcaattggcaggatatttttctttcttagtggtacataaaacaatcatttcttaacaattgaatagtattttctttctttttttttttttttgtgatgaagtcttgctcttgctcttgtcccccaggctggagtgcaatggcgcgatcttggctcactgcaacctcaatctcccgggt

SEQ ID NO: 402418 - DNA, 201 bp, Homo sapiens
ttagggattttttgccctccccttccccaaaggagcaattcttttgtatgtgtgtgtcttttttttttttttttcccagaaaactttttgcaagttgtttwatttgcaatgccctttgaaaggccacgaaagttaactggattacaaactaggcagaaattgctttacaaaaggagggaaataccaaaatgtcagtttctg

SEQ ID NO: 402419 - DNA, 201 bp, Homo sapiens
ggctcgagtgatccactcacattggcctcccaaactgctgggattacaggtgtaagccaccattcctggcccaatttttatttttgaagtcattttttttrgttcggttgtttagccttattttgagactggaagcaaaaattttaaatatgttcattttaataccttctcattacctcataggctaggtctacttacatg

SEQ ID NO: 402420 - DNA, 201 bp, Homo sapiens
tgggctcaagtgatcctcctgccttaacctcctaaatagctgggtctacaggtgtgcaccaccacacccagctacttaaattttttttttggtagagatastgtcttgctatgttgcccaggctggtctcaaatttctgacctcaagcatctcttcccactttggtctcccaaagctgtttcctattttattaattttcgt

SEQ ID NO: 402421 - DNA, 201 bp, Homo sapiens
ctgtttccctgtgtccttgttctggctattagcaaatttaagactgttttccattttttaaaaatttatttattttgttattttctttcagggaatagaarggacttttccattcaattatgaggttaaaaattgctgtcttttgatttctagttctttatgaatcagatttagtcacaatttatttttctttaggagaac

SEQ ID NO: 402422 - DNA, 201 bp, Homo sapiens
taaccttaagagaatggagttgataaactgacacaaagcagaaattgttgtacagcctgagtgaatttgcatgtgatagctatgtatacaattgtgtatckcttatcttagaaggcatcataactagtagttcctgtgtggttatcatttttaccacagaggtacaggaaattgtttcattttatattttgtataggtttt

SEQ ID NO: 402423 - DNA, 201 bp, Homo sapiens
catccctttgatgtggatagctttgaatgtggctcaacgcaaattcgtaacctttcttaaaacatgatggggtgttttttttttttttttttgcgattaamaaaacatttttttaaagctcatcagctatcagtagtgttacggtattttatgtgtggcccaagacaattctcctaatgtggcccaaggaagccaaaagat

SEQ ID NO: 402424 - DNA, 201 bp, Homo sapiens
gtccccagagtgtgatgttccccttcctgtgtccatgtgttctcattgttcaattcccacctatgagtgagaatatgcggtgtttggttttttgttcttgygatagtttacttgagaatgatgatttccaatttcatccatgtccctacaaaggacatgaactcatcattttttatggatgcacagtattccatggtgtat

SEQ ID NO: 402425 - DNA, 201 bp, Homo sapiens
atgaagctggttgtcctttgtcggcaggatttgggcaaccatacccttcttcccttccccactaaaatccaaggcctccctcttcaccgagtcgccgcccycctacccagtcgactcccgtacccctgtccccgcccccacgcacgccacaaacaccccaaagcaaacatcctatccaccttggatgttaatcatgcgaag

SEQ ID NO: 402426 - DNA, 201 bp, Homo sapiens
ggtgtatatgtgccacattttcttaatccagtctatcattgttggacatttgggttggttccaagtctttgctattgtgaatagtgcctcaataaacataygtgtgcatgtgtctttatagcagcatgatttatagtcctttgggtatgtacccagtaatgggatggctgggtcaaatggtatttctagttctagatccct

SEQ ID NO: 402427 - DNA, 201 bp, Homo sapiens
cgggtgcccaaagtctgggcttgaggcctgcagaggaggcgaaggggccttattcctggcttcttcactgcgttttctctgaacagacatggtccgagtaycatttgtgtacaaatccttcttgatgaagctggttgtcctttgtcggcaggatttgggcaaccatacccttcttcccttccccactaaaatccaaggcct

SEQ ID NO: 402428 - DNA, 201 bp, Homo sapiens
aaccatacccttcttcccttccccactaaaatccaaggcctccctcttcaccgagtcgccgcccccctacccagtcgactcccgtacccctgtccccgccyccacgcacgccacaaacaccccaaagcaaacatcctatccaccttggatgttaatcatgcgaagggagaaatcttaagtagtttctgaaaaaagttgcct

SEQ ID NO: 402429 - DNA, 201 bp, Homo sapiens
taggttagattaattttaccaaattttatattgtataataagagcataaagacataaatgttaagaacaccttgaaatgaaagttgttttcatttctcatsttaaatttaccagtaagatggaagtagagtctaaaggctataaggacatgaggattagctttccatagggataaaagtgttgtgctataagtttgtaaac

SEQ ID NO: 402430 - DNA, 201 bp, Homo sapiens
atagaaatgtttttaaaaatacgtcaccaaatgggattttaaacaatttttttcatatttaatagcttttgatttgattgcattgtgataagagaatctcrtgtatatgaattgattattgaactcttgttgaatttgcattatggcccttctacatggccagtttataaacactctccattgttgaagaatgtgagctct

SEQ ID NO: 402431 - DNA, 201 bp, Homo sapiens
ccatgctgttttggttactgtggccttgtagtatagtttgaagtcaggtagtgtgatgcctccagctttgttcttttggcttaggattgacttggcgatgygggctcttttttggttccatatgaactttaaagttggtttttccaattctgtgaagaaaggcattggtagcttgatggggatggcattgaatctgtaaat

SEQ ID NO: 402432 - DNA, 201 bp, Homo sapiens
ctttgttcttttggcttaggattgacttggcgatgcgggctcttttttggttccatatgaactttaaagttggtttttccaattctgtgaagaaaggcatyggtagcttgatggggatggcattgaatctgtaaattaccttgggcagtatggccattttcacgatattgattcttcctacccatgagcatggaatgttct

SEQ ID NO: 402433 - DNA, 201 bp, Homo sapiens
tttaaagttggtttttccaattctgtgaagaaaggcattggtagcttgatggggatggcattgaatctgtaaattaccttgggcagtatggccattttcaygatattgattcttcctacccatgagcatggaatgttcttccatttgtttgtatcctcttttatttcgttgagcagtggtttgtagttctccttgaagagg

SEQ ID NO: 402434 - DNA, 201 bp, Homo sapiens
cataataatctcagagatagtcttgatgacaagaagtttggtcttatgtttggcttgcttattggcatgggtgcagcaagattgttcattaacaataaatrggcctccttaagtttgctgaacagtattgacttactaaagtcacaaaattaacttttgtctggaagttttcataaggaatgtcagattgaactttaaaaa

SEQ ID NO: 402435 - DNA, 201 bp, Homo sapiens
ttggaaacagaggtaattacttggttatgatatcttacaatcaaaacttgagtgattttttaataattgagtttaaatactgattgacagacattccataytgacatttaatttcaaggtatatattctgtgagtgcctttgcactaaagattatcttattaaaacttattaaaaacattttttaattttatgaaagatta

SEQ ID NO: 402436 - DNA, 201 bp, Homo sapiens
taaaatctccaaggctgggccatgtaagccaagcaccaggtcagcttatatgggaggtctttgtaggcattggttccataaggaaagccaacctttgttcyttaaaaaaaagtatctggtcctacctaccattccattttcaaatacgaaatccaggtgagatgttagttggacaggtaacttgtccacttatatcttggt

SEQ ID NO: 402437 - DNA, 201 bp, Homo sapiens
tgtgtaaatgacagctagcttaagaggaaaaaagccttcttcatatatccagaaaatagaatattaaaataatattaacagtattgcaaacaaatggccayagagagatattctccataagctcattcagtccttatgtaattcttatttcattgtatatgttagggatcagcttgcatgattctgtctgtttctagaagg

SEQ ID NO: 402438 - DNA, 201 bp, Homo sapiens
gccacagagagatattctccataagctcattcagtccttatgtaattcttatttcattgtatatgttagggatcagcttgcatgattctgtctgtttctaraaggactagtcctggaaatctcactcagtccagtgatagggtctaaaagttgtcaaagcagtcaactttagaaccttctacccaagactctattctttga

SEQ ID NO: 402439 - DNA, 201 bp, Homo sapiens
cactgaagaagatgttagattcaagttaggaaagaggtaaggttagagacgttttaaaaagtgaaattatgactggcaacactgtactattgcatcaggcmgcataccttcaagactttgataaatatagggaaactctatagaattactttatagaattttgagcagtgtttctcctgagggtaaaagtatactttggat

SEQ ID NO: 402440 - DNA, 201 bp, Homo sapiens
caggctagagtgtgactgcgtgatcttggctcactgcagcctctgtctcctgggttcaagcgattctcctccctcagcctccccagtagctgggatttcakgcacctgccatcacgcctggctaatttttgtatttttagtagagatggggtttcaccacattggccaggctggtctagaactcctgacctcaggtgatcc

SEQ ID NO: 402441 - DNA, 201 bp, Homo sapiens
ccttaacctttggggcaggcacacctatcctgattccgctatgtccctgggcctttcatctcgtctcacttgttttgcccaattgtgctatgcaaatactmctttctatgtgtgtcgtgacagacagagcactgacctaagatctggtttgcttgaaatcattcatttgaagtagagtaatttaataggtaatattttcag

SEQ ID NO: 402442 - DNA, 201 bp, Homo sapiens
gactcatgcaccatatatggatatttgatttgaggaattaccgtgtcatgttggataatgccctgtcttcataaagagttgcctccaaactcacccttgarctgttttttctgcagacagttccaatgttccaatgttctctcaggttggcagcttctgagtggtgcagtatatatattacctgtgaatcctatggttatg

SEQ ID NO: 402443 - DNA, 201 bp, Homo sapiens
gccaagatgggcagatagcttgagcccaggagttcaagaccagcctggaaaacatggtgaaaacccatctctacaaaaaagaacaaaaactagctaggtgyagtggtgcacccctgtagtcccagctacttgggagcctgagagattacctgagcctgggaggtcgaggctgcagtgagctgtgattgcgccactgcattc

SEQ ID NO: 402444 - DNA, 201 bp, Homo sapiens
cagtttaaacaaagtgtagtaatatgtaatagtctcctctacgtaaaatcatcttgaatactacagaaactaaaaatgtacaaggttctatttaattgttycaagtatttgtaagaagggaatttaaagttttttggaacttgttctctttgaagacaagcaacgaaaataaagatgtgcacagccttacatcttgaccga

SEQ ID NO: 402445 - DNA, 201 bp, Homo sapiens
aatgcagtcatagtacctaaaagtggaacaacagattactcgttatctaaaaaccagaaaggtaatatatagaaaggagttaacaggcctgattgttcatmaaaaattcatcagtaaacgaaattgaaaatcttacttaaaaggctgttccttggctagtgtatattagttagggttctccacaaagacagaccaaaagga

SEQ ID NO: 402446 - DNA, 201 bp, Homo sapiens
gttgatggtgtaactctcagttcaaggccaaagacctgagaacctcttggtggggcggagtcagggggcgggggattgctggtacaagtcctagagtccawaggccagagaacctggagttctgatgtccaaggacaagagaagaagggtgtcccagctccagaagagagagaaaatttgcctttcctctgcctttttgtt

SEQ ID NO: 402447 - DNA, 201 bp, Homo sapiens
tttaaatactgattgacagacattccatattgacatttaatttcaaggtatatattctgtgagtgcctttgcactaaagattatcttattaaaacttattwaaaacattttttaattttatgaaagattactgatgaatgcttttaaaattaattctagagacatgtctgtatgcttcagagatgcataactcttagacat

SEQ ID NO: 402448 - DNA, 201 bp, Homo sapiens
caggtgtgcaccaccatgcctggctaactttaaacaatttttgtagagaccaggtctcattacattgcccaggctggtttcaaacttctaggctcaagcartcctcccgccttggtctctcaaagtcctgggattacatttgtgaaccactgtgcccaggccattatttctttgaatatttttctacttctttttctaaac

SEQ ID NO: 402449 - DNA, 201 bp, Homo sapiens
taagccatctggaaggtcaggacttaaatattaactacctaatcctccttgcttggcaccctacaaataaacaccttcctttctcccactacaaacctcartgtagatatctggtcttactgcagcaggcaagcgggccccagtttggttctctaacagtagcaactctgtaaatcggaattttcctgcacccccagagtt

SEQ ID NO: 402450 - DNA, 201 bp, Homo sapiens
tataattattagtataatagatatggtgttactgttcttcagagtccattcaagataaataattagggaaaatttggacacaatttaaatattaacagaayttttaaagtcataatttaaaggaaaagttgtatgattatttgttttcacatttgtaggtatgccattgcattggccttaagggaaaagcagcgtgtaata

SEQ ID NO: 402451 - DNA, 201 bp, Homo sapiens
taactataaataaggctaaaactcccacagttaggcatatactctttgtccccaaagggcctttaggagttgttgcaagttggaatagcaaatatgtgccacacatctcaacattctccctttctcatggcagacattgatagtaagtcatagcactcttacactgaaagctcagattcttccaagaaaattatataggca

SEQ ID NO: 402452 - DNA, 201 bp, Homo sapiens
aactcacagacagaggctctgaattttggaagcccgtcttagaaccaaaggtgttttccttgcaagaaataggtaactgttagtaatctattgctattagkgactaagttgcattaactctgagtgaccggagttaaaatgattttagatcactctatttcatatttattataattattagtataatagatatggtgttac

SEQ ID NO: 402453 - DNA, 201 bp, Homo sapiens
tcctctagtaattttcctcacttcggtaaatagactttgaaactctaaaatttgcttttggtttctttttgtactttctgtttcttcatcgatatgttctrtttgatacaacattgttattgtaccttttacttcattaattgtgatttcccttgattctttgaatatatttatagtggcaacttttaagtctctttagcc

SEQ ID NO: 402454 - DNA, 201 bp, Homo sapiens
cccaggagttccaggctctacagtaagctgtgatcacatcactgcactctagcatgtgcaacagagtgagaccttgtctcttttaagaaaaaaaaaaaaamacaaggaagtgattttaacgaagttatttagttaatagtttgaagagcatttactgtgcagtgaaggctctgtactaaaatctgagaaagcaaagataag

SEQ ID NO: 402455 - DNA, 201 bp, Homo sapiens
ttgcataatctccatcaatagtctatcttcagattcactgttgatattatctgctagttcagatctactgttgggctcctctagtaattttcctcacttcrgtaaatagactttgaaactctaaaatttgcttttggtttctttttgtactttctgtttcttcatcgatatgttctgtttgatacaacattgttattgtac

SEQ ID NO: 402456 - DNA, 201 bp, Homo sapiens
tatatcaaaataatttttgtctttgttatactatagataactggcttacatagtctttgagattttaagtcccacctacttaagaacttgaacctgagctmatacagtttcatcaaggttaaaccttggcttttggccatttgtggtggcttaggcttataatcacagcactttgggaggccaaggtgggaggatgattta

SEQ ID NO: 402457 - DNA, 201 bp, Homo sapiens
gggcaccatggagaaagaaatgtcttggctgggaggtaggggactgtttggatctagccaggggctacgagtccagtcaaggcataagctttgtgtttacytgggcctcccactggagcataatcttaaggatcaagatgccttggaatgtagagagtcagggaagaaggctctgtggaggaatggggggtagttctagaa

SEQ ID NO: 402458 - DNA, 201 bp, Homo sapiens
aggaggccaaggcaggaggttcacttgatcccaggagttccaggctctacagtaagctgtgatcacatcactgcactctagcatgtgcaacagagtgagamcttgtctcttttaagaaaaaaaaaaaaacacaaggaagtgattttaacgaagttatttagttaatagtttgaagagcatttactgtgcagtgaaggctct

SEQ ID NO: 402459 - DNA, 201 bp, Homo sapiens
tcgtttgtattgttgcactctttgcttgacttaactcttaagcttaacactagagacccaaatttagtttttgacttttatttataaatattttaactgtyagtaaagattataatagttcatggctttattcttttttaaagactttgcaaaaaataaaggcaaagtttacttttttaataatacagtacagttattgta

SEQ ID NO: 402460 - DNA, 201 bp, Homo sapiens
agaccccatctctactataatataaaaactttaaaaaattaaaacataaaaataaaaaaatgtggttcttcttatgagtacattctaattaagatttctartaaaattgtttttcattatctttattctacagattatttgtaaaataactgaaaaataattaaaagagtcctttggccctagaaaataaatgacagtgat

SEQ ID NO: 402461 - DNA, 201 bp, Homo sapiens
cattttaaaaataatatttaaaaggttatgtaaatctttataatataaagatcaagtgcatacaaaaatttattaagcacccaatgtgggcagtgtacagrtctaagcaccagagatgcagcagaaatgtttgctttcctgatacttacatgttagtggatgaagataaagaaatacagtacacatacattctgtcaaata

SEQ ID NO: 402462 - DNA, 201 bp, Homo sapiens
ggggtgaaggtttttggagaaaagtgagaagaatcaaagatcactggggagatggtgttactattttaaataagatgattagaaaaggcctcactaatgamgtgaaacttatattgaggcctataggagtgatgagggaacaaactgtacatacctggtgggagaacattgttaaaatcacaattaacctcctcatatcag

SEQ ID NO: 402463 - DNA, 201 bp, Homo sapiens
agaatcaaagatcactggggagatggtgttactattttaaataagatgattagaaaaggcctcactaatgacgtgaaacttatattgaggcctataggagwgatgagggaacaaactgtacatacctggtgggagaacattgttaaaatcacaattaacctcctcatatcaggactggtgccttccacctatagtgaatag

SEQ ID NO: 402464 - DNA, 201 bp, Homo sapiens
aatgacgtgaaacttatattgaggcctataggagtgatgagggaacaaactgtacatacctggtgggagaacattgttaaaatcacaattaacctcctcayatcaggactggtgccttccacctatagtgaatagcagagaggaatgtgatgagtagctgttgaccatgaatagacataatatcaaagacatttcgcagtc

SEQ ID NO: 402465 - DNA, 201 bp, Homo sapiens
aacttttcagtttctacagattgaaagttgcctagaaactaaaactgtttcaaagttaaactatgataaaaccctttaatgttgatgtaactaaactactrtgtatgtttacaatatttaccctccctcagttccatatgtaatcacaaaaaggagctagttagcacactttgcaaatttagcggtgtattttcctctgaa

SEQ ID NO: 402466 - DNA, 201 bp, Homo sapiens
ttgcctgtgtaaactgaattgattagaaactctaaatgctgatgactaaggtcttataatttgatatgtgactatcttacaagctttaatttgttaaaacrggtagtgtgaaaaaccagtaactttaaacgtgggtttttatatcttgttttccttttcttttatagtctagtgagatgcccaaattaacagaacaattag

SEQ ID NO: 402467 - DNA, 201 bp, Homo sapiens
gcatttatctttttaaacagttctagacacctctttcctggccagcccccatggagtatttcagagtcaaaagaacaggggtctggcttgtatgttttccmcctcacagaggtggctgcaaattcctctaggtgttcagcaaggtgtttgactttctaggctgctcgcttaccagttgaatcagggttggtatactggctt

SEQ ID NO: 402468 - DNA, 201 bp, Homo sapiens
atgttattattggttttatcaaaataaaaccatttctataatttctgaaattactaaataaacatactagttacttagagtacataaagtgctcatttcartagtgtgatacttctagtcagtggtgtgttcttttcaacaatgaatcaaattttcctgaattgaaggaaaaataattttgaccttactggttatttaaat

SEQ ID NO: 402469 - DNA, 201 bp, Homo sapiens
tacctgaagagaagcagtaataaattctgccatgaggaattaatttttggaatacacccggctaatttttgtatttttagtagagatggggttttgccatrttggccaagctggtcttgaactcctaacctcaggtgatccacctgcctcggcctcccaaagtgctgggattacaggtgtgagccaccgcaccaagccagt

SEQ ID NO: 402470 - DNA, 201 bp, Homo sapiens
caagccaggtgggtcagccattgtactgttggctggtaatgcaagtttgagtttctgcagctcacgctcttgcatgtgactcagcttggagcctgtcaagyggctttaacacgtggactgggcatatttggtgctctggcagtgtgaggaggcacatttgaggaggttttgggagatgaactggtgcagattcttcgtgga

SEQ ID NO: 402471 - DNA, 201 bp, Homo sapiens
gatatacaataaaatgttatgctgtaaacactcttgagaagtatgttcagggatatagcataagaaaggaagtcatttgggggtcagggaatgcttcattsaaaggcagtccttaaaataagtaacagcagatgagaatttgctaagcagacagtagaatattggcgggggtgaaaggaaagtgatggaacaaagatttct

SEQ ID NO: 402472 - DNA, 201 bp, Homo sapiens
tattagttcttccatttagatctgtgattcttctcaagttagtttttctgtaagatgtgaggaaagggtctaaatttagctttttgtatttggatatccarttgttccaattcaaagtactatcttttcccattgaattgaattcccgtaaattactcgtaaattgtgtaggatcgtttctggactttgttatatctttac

SEQ ID NO: 402473 - DNA, 201 bp, Homo sapiens
cactcaaatattctaaattttaacactttaccacgtttactttatcctcccttcctctttcttcccataatgcatatgtatatgtgtatgtttgtggatayataattttttctgaactgtttagagtaagttgcagatatgttgcccatttacctctagatttctaagttgcttagtctgtattttctgaaaatgagagca

SEQ ID NO: 402474 - DNA, 201 bp, Homo sapiens
gatagaggaattgtaattcttatggtagatgaaaagatgagcccaacaattggaaaacaattacttaaggtaactacattaagattgtgtacctttaccargaattccagaaatatacttcaggagccatttcagaattggttgtgtcagtcagacacctaagtgaaatgagttaatatactgaaactatctgggcttggg

SEQ ID NO: 402475 - DNA, 201 bp, Homo sapiens
ctgaggcatgattgttgtccccaaagggcatagtgctactcagcaggatgtagacgatgatgcctgggacccacacgtgcactgaatggtgtagtacttgmaggccaaaacctctggggcacggtatgctggtgtgccataggtggtcttcatcaggcctttgtagttgttgctgttcttgcaggcactgaccagattgaa

SEQ ID NO: 402476 - DNA, 201 bp, Homo sapiens
tacttttgttaatatttgttaaatagtaagttctgtaaccccttaaaattattttaatatttccatttaataaagaatatccaaaattccttgttggaaaraacaacttttctctaactattagctgttatgtcagaatccaactaaatacattttttacttttttctttagattttgagaagtatgctttacagaggttc

SEQ ID NO: 402477 - DNA, 201 bp, Homo sapiens
ccttaaaatcactaagaaatttaaatttctagaaccagcaaagtcttcataggcctaggagtttttggccttttagattgccaagtaaagaagaatgaagyttctcaacttagaggaaaacaatatgaagatatgtacatttttaagcattgttgtggaaaaatgtattttgctctaggatttgtatttctctaaatctgt

SEQ ID NO: 402478 - DNA, 201 bp, Homo sapiens
ttaaatttaatgagcaggattttaagagactgaagaataattgttactcaactgaagagaaattttaaatgaaaaaattaaggcaaaagaaatataaggamtaagtgaataataagaagcaaaaaaataagtagactgtttaaacgaaaccatattttaaaatgctgcattcagtaggaaaagattggcttgtgtgtttat

SEQ ID NO: 402479 - DNA, 201 bp, Homo sapiens
gcctcctctaaatgatcatttagtcaaacagtcccaaagcatcctttgaattctgtattctgttactgggaaagtcattgcccagtaagtactatatgccraacactgtgctaagagctctgtataatttacatgtaatcaccaaatagcaattcagggtagatattatctccactttgcacaaggagactatggtaaaca

SEQ ID NO: 402480 - DNA, 201 bp, Homo sapiens
gccctaaggaagtttcaatggtgaccaacatgggtgtatgattatgtttcgtttctgggtaaatgagtggatttttatatatttactcctttgcacttatttcttcttctttttttttttaatcttattggggtataactgaagtgcagtaaaccaccacaatcaagataaacatttccatcaccctcaggagtttttttg

SEQ ID NO: 402481 - DNA, 201 bp, Homo sapiens
taccagcattcctgaagtctgttctgtcctctttcagttactcaggggctatttctacatcacagtttgcttgaaatttcagtttgaaaatttgagaaatycagttttttagctctaacttgaaattagatctaacatctgcataatttttatgtttttctggtgtgtgagccagtagatgagcttaaacctttctaaaaa

SEQ ID NO: 402482 - DNA, 201 bp, Homo sapiens
acagtttgcttgaaatttcagtttgaaaatttgagaaattcagttttttagctctaacttgaaattagatctaacatctgcataatttttatgtttttctkgtgtgtgagccagtagatgagcttaaacctttctaaaaattgggatatactatgtattcgcccttaaaactattttttgatttaagtagcaaaaaatgag

SEQ ID NO: 402483 - DNA, 201 bp, Homo sapiens
attaattcacacatcatgtagttaatagtgttatggctatattatcaaatattactaatatttacatattataaggtaatgttaattggaaatcacagcarctttaacacaaatgtactaagaaaattaaatgattaaatacgtattattagaaaggagaataaaataagatttgttaacaatcaccattaattagatttt

SEQ ID NO: 402484 - DNA, 201 bp, Homo sapiens
ttcattttcttaggatagtatttctctcttttgtttttacagtgttacatagtgcttccatttcaagaatagccattccttcctcatctcgttattgtatrtggttgttttttattttttgcaacagggtctggctctgtcacccaggctggagtgcagtggcgtgatcttggctcactgcaccctccatctcccgggctt

SEQ ID NO: 402485 - DNA, 201 bp, Homo sapiens
agtttattctttatcttagtaatttacttcgtatggtttggtctctgataactttcacagattctggttaacacgagttactaaaatttgtgaaataatartatcacattgtgtttcttggtacacatttgaagtcagtcaaaacaatgtttgagaatgtgtctggctctttaatgccctatgcagcagaggactttgtaa

SEQ ID NO: 402486 - DNA, 201 bp, Homo sapiens
cctgggcaactggagctacatttgcccatatctgcaaaatgacagatgtctttgaaggtatggttaaattttacacatatatatttacagtataagaaatmcagttaggatggtattgttttaattaaacaagtataatatgtatttttaatatttggtaactaaatgaaatcttctccctattatatagattaaaaaata

SEQ ID NO: 402487 - DNA, 201 bp, Homo sapiens
ctaaaatttgtgaaataatagtatcacattgtgtttcttggtacacatttgaagtcagtcaaaacaatgtttgagaatgtgtctggctctttaatgccctrtgcagcagaggactttgtaaaggatttcatttcaatcctaaatgacctgtgagaatctggtctcaggtaaaaatctagttacattttgagccactaccta

SEQ ID NO: 402488 - DNA, 201 bp, Homo sapiens
  misc_feature (1)...(201): n = A,T,C or G
gcagtttgccaggcttttctgcattgtcgtggtggtccttcccttgttgctgctgcctgagagatactgcctggttcttacagacacagattatgtcatcnttgcagccttcacccaaagttgctccctccttctagggcattttgttttcctacttaataccaagtgtcagcatgttagtaataaacaggtgtctctacc

SEQ ID NO: 402489 - DNA, 201 bp, Homo sapiens
ttttgtgcttcaaaactgctcagggtgggtaattagtaaagctttataaaggaagtagtgagattttaacaaacttgtaggaacatgagtacctttacagmcaagaattatattcctagcaagggaagccatatgtacagagcatgaaaccccctctttagaaagaacttcacatttttctgttccttgtggttaatgaca

SEQ ID NO: 402490 - DNA, 201 bp, Homo sapiens
cactgttgagccttcacgagacgtcactgtcttcggtcgcggggcatcgtgggtaggagggagattcgctctcactgctcccaaaaatggcggacgcattyggagatgagctgttcagcgtgttcgagggcgactcgaccactgcggcgggaaccaaaaaagacaaggaaaaggacaaggggaaatggaaggggcctccag

SEQ ID NO: 402491 - DNA, 201 bp, Homo sapiens
acaccaagttatgtttggtacattaggtgttcatgtattaaatacatttttgacctaacgatattttctacttacaactagtttatcagaacataacccarttttaaggaggaggctctgtaatgactgaagcattattttaacaatgaaaaatttctacccaagtttccttagttaaaatcatttaatttacatgtgctt

SEQ ID NO: 402492 - DNA, 201 bp, Homo sapiens
ggaaggtaaacaaaaaccgcaactacacttgcaccaacctaatagaaaaaatcctatgtcttgggtataatttaaataagatgtataaccttttaattttrtacatgtgttctatttacagaggtaaagaattcagaagaacagtataataaaatagtaattcccaatgaagaaagtgtggttatctattataagattaga

SEQ ID NO: 402493 - DNA, 201 bp, Homo sapiens
cgggatcagaggggcaaagtcacaattttccgaaaagtctattaaaataccctgtccttttttagttacatatctgtgtaaggctagatttttcttcataygctttgaccaaaacaacatgtcatagcaagttgaatacagaaacaggtgaatcctgctgtttctgttaagccagacatgagagatttggaaaaatataaa

SEQ ID NO: 402494 - DNA, 201 bp, Homo sapiens
aacattgtggccaattctgatgtcccttccatagattttttttaaaaagaagggagggtatttaaaaactatagattttataggtcgggtgtggtggctcrcgcctgtaattctagcactttgggaggccaaggcaggtggatcacttgaggtcaggagttcaaaaccagcctggccaacatggtgaaacccccgtctcta

SEQ ID NO: 402495 - DNA, 201 bp, Homo sapiens
tcttctagatatttttaagaaaaaaatcctggccgggcgtggtggctcacgcctctaatcccactttgggaggcggaggctggcagatcacctgaggtcargagttcgagaccagcttcaccaacatggcgaaaccccatctctactaaaaatacaaaatttagccatgcctggtggcaggcgcctgtaatcccagctagt

SEQ ID NO: 402496 - DNA, 201 bp, Homo sapiens
ttggtttgatgactggtgatgttactattaatcctacggcatcttgtcttgttatgaccacagaggtaattcatgtagtgcctcatctgacttttcgtttytaattaaattaatgtgactattcagttagaacctgggaagttttattggttgctctacttaggtaaagtatagtactttattttctgattagacttaggc

SEQ ID NO: 402497 - DNA, 201 bp, Homo sapiens
ccctaaggaagtttcaatggtgaccaacatgggtgtatgattatgtttcgtttctgggtaaatgagtggatttttatatatttactcctttgcacttatttcttcttctttttttttttaatcttattggggtataactgaagtgcagtaaaccaccacaatcaagataaacatttccatcaccctcaggagtttttttgt

SEQ ID NO: 402498 - DNA, 201 bp, Homo sapiens
cctaaggaagtttcaatggtgaccaacatgggtgtatgattatgtttcgtttctgggtaaatgagtggatttttatatatttactcctttgcacttatttcttcttctttttttttttaatcttattggggtataactgaagtgcagtaaaccaccacaatcaagataaacatttccatcaccctcaggagtttttttgtg

SEQ ID NO: 402499 - DNA, 201 bp, Homo sapiens
gctcgagcccaagatttcaaggctgcagtgagcagccttgcagtgggggaccacaaagagcaatcctgtcatatgcttagagggcagagagctacacattyggcaaacagtattttaaatactttcatactgatttttttttcccttcactttcccaaagacctgtggttttattttatattggttaactaaagggtagaa

SEQ ID NO: 402500 - DNA, 201 bp, Homo sapiens
cccagctagtagggaggctggggccaccctggatgatacagctgggacccaacttgaaaaaaaaaaaaaaaaacctgtggaacgctcacatcattgttttrtaccccggcagaaatcaaataaacacagttagaagttacaacggaaatgttactactgactccacagaaataaaaacaaccatcagaaactattatgaac

SEQ ID NO: 402501 - DNA, 201 bp, Homo sapiens
gttcaagaccagtctgggtaatacaatgagacctctatctctacaaaataataaaaaattagccggggatggtggcacatgcttgtaatcacggctgctcrggaggctaagactggagggttgctcgagcccaagatttcaaggctgcagtgagcagccttgcagtgggggaccacaaagagcaatcctgtcatatgctta

SEQ ID NO: 402502 - DNA, 201 bp, Homo sapiens
tggccaggaacacttctataaataatagcaacaaatgaattgggctagtttactttatactttctattgtgtaatggtttataaccagcttatgttttgargtggtgacagtgcttggtagaggcactttttattcaaaatagttattggaactaagctgacataattatttgaataatcactcggcagtctgttctgtat

SEQ ID NO: 402503 - DNA, 201 bp, Homo sapiens
ggataaataagttgtagtatatccagacagtggaatattactctgccataaaaaggaataaagtgctgatacatgcttgaaaacattatgcgtactaaaasaagttggagtcaaaagattgctttatgattccatttatgtgaaatatccagaataggtaaatccatagagaaagacagcatattggtgagggacagggac

SEQ ID NO: 402504 - DNA, 201 bp, Homo sapiens
tagtcaaaggtgggagttaagcctttcatctttgtagctttctccagtacctaaccatgatttacttcatgggaagtccctcaaagtactattaattatcstgtgttctcctgccttgcctcttaacaaaaattctgctgttcctgattatttccattttaccagtgttttgttccttttctatccaggcagcataattcg

SEQ ID NO: 402505 - DNA, 201 bp, Homo sapiens
tgagcaagttattgttaaactttgcttctagtttttgtgtggctagggttctaataaactgttgtttctttatttttatttacctatttatttttgaaacagagtttcactctgttgcctaggttgaagtgcatgatcctaggtaggatcctaggtaggatcatggttcgctgcagccttgatctccatctcagtccccca

SEQ ID NO: 402506 - DNA, 201 bp, Homo sapiens
gagcaagttattgttaaactttgcttctagtttttgtgtggctagggttctaataaactgttgtttctttatttttatttacctatttatttttgaaacagagtttcactctgttgcctaggttgaagtgcatgatcctaggtaggatcctaggtaggatcatggttcgctgcagccttgatctccatctcagtcccccaa

SEQ ID NO: 402507 - DNA, 201 bp, Homo sapiens
tgttggccagcctggtctcgaactcctgacctcaggtgatctgcctgcctcggccccccagagtgctgggattacaggcgtgagccactgcatccagcccttttttttttttttaatagagacagggtctccctttgttgcccaggctgatctcgatcttctgggctcaagggatcctcctgtcgcagcctcccaaggtgc

SEQ ID NO: 402508 - DNA, 201 bp, Homo sapiens
gccatgcccagctaatttttgtatttttagtagagatgggatttcgccatgttagccaggctggtcttgaactcctgacctcaggtgatccacccaccttsgcctcccaaagtgctagtatttcaggcatgagccaccacgcccagccaagacagcagttcttttgatacatttttgattacttgatatgagctataaaaa

SEQ ID NO: 402509 - DNA, 201 bp, Homo sapiens
tgtttctacatgtatcgtccgagaatttggtcattctcttatttaaataactacacaaccattttcatacttctgaagcatttttattaaaatatacttckgaaggcccgggcgcggtggctcatgcctgtaatcccagcattttgggagactgaggtgggcggagaggtcaagagatcgagactatcctggctaacacag

SEQ ID NO: 402510 - DNA, 201 bp, Homo sapiens
cagcctttgaaataggacagtttttgtcttctttctgaatctcgtcttcacaaaatagtgttactctgttttgaaggaaattcacagatacctgtgcataytgaattcaactacaggtatataaaaatactctttctaaagccaagtgaattatttttaatttttctacctttttagatgtagttaagtgcatacaaattg

SEQ ID NO: 402511 - DNA, 201 bp, Homo sapiens
gcaataagttgtgccacgttcaggactatgatcaaattgtgacttgtagatttattaacaaatcataatacatctgtaaatcatagtatagcgttgaaaargagttttcaaaaataaatgcaatggaaaaatgccctataatttaaattggcaaaagacaaaattatatatgtagtatactttttatgtccatgtgcatag

SEQ ID NO: 402512 - DNA, 201 bp, Homo sapiens
ctgtattcttgaccaatttacttagtaatctctccgtgcctcagttttctcatctgtaaaatgcagatttaatattagttccctaccttttaggattgctrtaagaatgaaataatgtaaagcactagaaatagaggacattggtagtctctgaataaatatcagttgctgatcaccttcataatttttcctccttagtag

SEQ ID NO: 402513 - DNA, 201 bp, Homo sapiens
actgagtgattttacagtttgaatccattcatgctgtttatttcccattcccatggaaatagaggcagtcctgatttaggatttttagactttacagtagwgcaaaagtaatacattaatgagatatttaacatttattacaaaatagggtttgtgttagatgattttgcccaaatgtaagccagtgtaagtgttcttagc

SEQ ID NO: 402514 - DNA, 201 bp, Homo sapiens
tgcaccaccacgcccagctaattttgtatttttagtagagacggggtttctccatgttggtcaagctggtctcaaactcccaacctcaggtgatccacccrccttgacctcccaaagtgctgggattataggcatgagccactgtgcctggccctgattatccctttttctttagaaattggagcccctcttttgtctcta

SEQ ID NO: 402515 - DNA, 201 bp, Homo sapiens
  misc_feature (1)...(201): n = A,T,C or G
taatgttaattggaaatcacagcaactttaacacaaatgtactaagaaaattaaatgattaaatacgtattattagaaaggagaataaaataagatttgtnaacaatcaccattaattagattttaagttttaaatttgttctgtaacccaattcattgaacatttggccaagtcctagacagtcctagaaataaaaagat

SEQ ID NO: 402516 - DNA, 201 bp, Homo sapiens
agtgaatataagatccttgttggtttggcagcagtttttttcatatgagtaattagttcactttcaacagttcttaagaaatcaaaaaatgaagtgctggrtggaacacataagaacactaattatccttgtactgcattccaaaaaccagtttgattcatttttaaaagtaagatatattgttttgcatttcaaatttaa

SEQ ID NO: 402517 - DNA, 201 bp, Homo sapiens
ccacagctcttaaatcttggggcaagatgtccgtatatgcagttaagatgtattcagtgaaaccacacttaattggtctgtttacctgttaactgtttccmtatttattaatcagatcaaatatattacttcttgaagtagatgggtacttttctcaggtccctgattactgattagaatcacagctgttagtggcaatga

SEQ ID NO: 402518 - DNA, 201 bp, Homo sapiens
tagaggaagttttcatatagatatgctgaaacctgctctaaaacttgggctaggaagtcgtaaagggaatttaagaaattcaccaggattgtagatactasaaaacctgatgaggttggctgtggaaaacagtctggcaattcttcaaaaagttataatgtagaattgtcatatgacccagcaattctactcctagatttg

SEQ ID NO: 402519 - DNA, 201 bp, Homo sapiens
ttataatgtagaatttgttataatgtagaatgttataatgtagaatgtaatgtgtttgttataatgttagaattatcatatgacccagcatttctactccyagatttgtacccccaaagaattgataacaggtacctaaacaaatcttcacagcagcgctattcacaatagccaaaaggtagaaacaatccagatgtccat

SEQ ID NO: 402520 - DNA, 201 bp, Homo sapiens
gcgtactaaaagaagttggagtcaaaagattgctttatgattccatttatgtgaaatatccagaataggtaaatccatagagaaagacagcatattggtgrgggacagggactagtgagaggaggggagtaaagaataactgcttagtgagtacagagttttttgggaggtgatgaaaatactagaattagatggaggtac

SEQ ID NO: 402521 - DNA, 201 bp, Homo sapiens
ggttagggtgtatgactcagtgacatttagtatatttgcagatatgtgcaaccatcaccacagtcaattgtagaacattttcatcatctcaaaaagaaacmtatgtcattcacctgtccttccatatcccccagaaatagagaaaatttctttctgttcctggtgtgttgagtgtttttctcatgaaagataaatattatg

SEQ ID NO: 402522 - DNA, 201 bp, Homo sapiens
ttgcctaacgttatgaatgtactaaatgccactgaaatatacactttaaaatggttaattttatgttatgtgaatttcacttcagtaaaaagtaaacctgrtgaagtacctaattgtatatgcacaccagatgttgcacaccagatctcacatattttccctagtgataaaggactttaggtaaactcctacttcacctgt

SEQ ID NO: 402523 - DNA, 201 bp, Homo sapiens
gacatatggagagtaggggtgataattctctctgtggattgtatctgattagtaactgtttagaagccatttactttgctttttatgagaaaaggaatatmcaatataatatacaacaatgtaatattgaatattacttttgttaatatttgttaaatagtaagttctgtaaccccttaaaattattttaatatttccatt

SEQ ID NO: 402524 - DNA, 201 bp, Homo sapiens
tgccaggactggagtgtagtggtgcgatcatggctcactgcagcctcagcctcctgggctcaggtagtcctcctgtctcagcctcccaggtagctgggacyacaggtgcacgccgcaatgcctggctaatttttttgtattttttgtagagacagggcttcgccatgttgcccatgctgttctcaaacttctggcctcaag

SEQ ID NO: 402525 - DNA, 201 bp, Homo sapiens
ctgcaactccgcctcgcagttttaagttattttaaaaataaccattatctttaggaaaaaagagctttcttaaaaatataaagtttgtacaatatcttccmcactaaatacagttttgaaccatgaaattgagaaattagaaaaatcttagatctcagtaattaacacaagcgctcctagcatttgtatgtatttcctttg

SEQ ID NO: 402526 - DNA, 201 bp, Homo sapiens
gaggtgggcggagaggtcaagagatcgagactatcctggctaacacagtgaaatcccgtctctactaaaaatacaaaaaattagctgggcctggtggcacrctcctgtagtcccagctacttgggaggctgaggcaggagaattgcttgaacccgggaggcagaggttgcagtgagctgagatcacgccattgcactccag

SEQ ID NO: 402527 - DNA, 201 bp, Homo sapiens
ttggggtccctgtcttcccgcaacatctctccctttcttgttatataaatgtgccatggcgatgaagccttgttcgttctctcgattttgacacaggattmcttgactggtctggcacactaaaaacaagccgattaaacagagaaacatagttccaaaatttactatagtggagcccccagtagacttaatccaagtcgt

SEQ ID NO: 402528 - DNA, 201 bp, Homo sapiens
cgcaccaagccagtcctttatattttctgtgtatcacctcaaccatgagaaaactattaaatggtggtggtgctttccttccactccccaaatctccctgmcacacacacacacacacacacacacacacacacacactcagagagacacatgcattgttttcatgtagctgtgatcttccttgcaggagatgaggttaac

SEQ ID NO: 402529 - DNA, 201 bp, Homo sapiens
cactcgctgctcacttcctgctatgcagcctggtttcctaacaggccatgaactgcccaggggttgggggcccattttaagccactgggtttgtggtaatytgttacagcagcaatagaaagttgatacaaacagtaatgtgtgagagtactttatggcctttttcacagtgtattgaacttggatttttgtcagtgagat

SEQ ID NO: 402530 - DNA, 201 bp, Homo sapiens
aagcctaaattttaggctttaaatttagattaaaagcataaattttcgatccaaaatgataataagtctaaaatttagttttgttatgtcagtgtgatgtsggtttgaaacattattctcacatgttttgcatttttgtgctttgactttaactcttctcaaacttcatgttgtttttaatcatgtttcctttcttagggt

SEQ ID NO: 402531 - DNA, 201 bp, Homo sapiens
tcacagacagaggctctgaattttggaagcccgtcttagaaccaaaggtgttttccttgcaagaaataggtaactgttagtaatctattgctattagtgaytaagttgcattaactctgagtgaccggagttaaaatgattttagatcactctatttcatatttattataattattagtataatagatatggtgttactgt

SEQ ID NO: 402532 - DNA, 201 bp, Homo sapiens
ctagcagttagactgttttggagactgaataaccaagtgaaacagaagtgtgtattggtgcacctacctttgttttgtttctttttctttttacattctgrtaagcagtaaattactttttaaaagcatccctggtacagtggaggatagagggaaaactcccaaatattatcccatttttttaaagcctgttttctgact

SEQ ID NO: 402533 - DNA, 201 bp, Homo sapiens
ggcctggttcttaacaggccacagactggtaccatcccggggcttggggacccctgaattagacagtttggaagtaaaaataaaaatgatagtaaagggcygggcgtggtggctcacacctgtaatcccagcattttgggaggcaaaggcgggcagatcacctgaggtcaggagtttaagaccagcctgtctaacatggtg

SEQ ID NO: 402534 - DNA, 201 bp, Homo sapiens
gatcagtggagtagaattgtgagtccagaagtaaacctgtacatctgttgtcaattgatttttcaacaagtagtgctgaaacaaaaggattgcaacatgcrtaataaagttgcacccttacctcacgccatatacaaaaagtaactcagataaagagctaaaaatttaaaactcaggaaaaaacataggtgtgaatttacg

SEQ ID NO: 402535 - DNA, 201 bp, Homo sapiens
tgctgtctttcagttagcatgtcttcagggtttatgcctgtcatagcataaatcagtacttcattccttttaaggccaaatcttgtgtgtgtgcgtgcgtscgtgcatgcgtgtgtgtgtgtgagacagagtcctgctccgtcacccaggcttcagtccagtggcatgattatggctcactgcaacctctgcctcccgggt

SEQ ID NO: 402536 - DNA, 201 bp, Homo sapiens
gattacaggcacgcaccaccatgcccagctaatttttgtatttttattagagacggggtttcgccatgttggccaggctggtcttgaactcctgacctcakattatccgcttgcctcagcctcccaaagtgccgggattacaggcatgagccaccgcacctggcctggctaaattatattttgttatgtggatatgccata

SEQ ID NO: 402537 - DNA, 201 bp, Homo sapiens
gcacgcaccaccatgcccagctaatttttgtatttttattagagacggggtttcgccatgttggccaggctggtcttgaactcctgacctcagattatccrcttgcctcagcctcccaaagtgccgggattacaggcatgagccaccgcacctggcctggctaaattatattttgttatgtggatatgccatattttgttt

SEQ ID NO: 402538 - DNA, 201 bp, Homo sapiens
attagttaatggtgtttagccgagtcagtgagaagagggatgttgcgtactcactgatgaaaattgcttaaaacaggagcacaggttggtgtatgacaatkgtgtttcagcagcactagggcgatcacatagagcaccaccagtcttcagtctgacatctttttggaacataaggatgaaactagtaactgttcaatgcct

SEQ ID NO: 402539 - DNA, 201 bp, Homo sapiens
gaagataaagctaaaagaaaagaataaagaaaaaaatagtttatttaacataacgcaaaacttttatattaaggaagggttggcatttgaaatgattatcmaagtattattatatagggaacaggacttctaggcaaacattcacgtacgcattattacctaaatgttaatcctttaaagaaacaaaactattgccctact

SEQ ID NO: 402540 - DNA, 201 bp, Homo sapiens
agtagtgcaaaagtaatacattaatgagatatttaacatttattacaaaatagggtttgtgttagatgattttgcccaaatgtaagccagtgtaagtgttyttagcacatttaaggtaaactacaccaagttatgtttggtacattaggtgttcatgtattaaatacatttttgacctaacgatattttctacttacaact

SEQ ID NO: 402541 - DNA, 201 bp, Homo sapiens
gaaaggaaaactataagtggttgtgttacagcaataagattatagtggtcttttttttttcttttcctgccccctccccatcattgtctataatgtgcttrtatgtatataagcacatgatatataaatataagcacattatatgtgtgtgtgtgtgtgtgtgtgtatgtgtatgtatgtgtgtgtgtgtgtgtgtgtgtg

SEQ ID NO: 402542 - DNA, 201 bp, Homo sapiens
actcttaactatgaaggatgacaaaggatttgctttccactgagcaagtgtcattaggaaagcttctatgatgaattatctcttgaaactatttactgtayctctgcctgccatatgctttttattttttttcagtcctgctccctctgtatgccacatgttttgaaagcaaatactgtgaattgcattcctcaactctgt

SEQ ID NO: 402543 - DNA, 201 bp, Homo sapiens
acattctctcacatgcctttcaagtagcagtttaaccctttcttagcatcatcagtgtcatgagtggttttccagtggatttgtcttttaaaagtattctygctgataataatagagtaacaatttattagtaattgtttctgtctttacattttggcacagttttagtacctgatacttactcgtttaatgaataattct

SEQ ID NO: 402544 - DNA, 201 bp, Homo sapiens
aaagacaataactagaaagaattggatttctctttctactctggcaggaccaaaaaaaaaattttgtaacaaaccagtaggttaatgtggttttgttttgyttcggttttggtcagcttcatttagcctatgatgggtcatggctttgaaacttttgtctagcacttagtcaggctgatgaggcaggatgacttataaagg

SEQ ID NO: 402545 - DNA, 201 bp, Homo sapiens
tattcctaatgtatttcatatattaaaaatgaagtcaagcgttttagatttaggcaggtagcacttagagaaaggatctcacaatctctgctcctctttgsacaagtctagcaaaagtgaaactatgtttatagcttcagctttgatacaaacacttttctcaaacagattctagacccatgggaaaaggcttctttcctt

SEQ ID NO: 402546 - DNA, 201 bp, Homo sapiens
atataggttgaaaatccaagtctttggattttacatttctttagacagtttagtccttccctataattttttttatttttatttttatttatttatttagkgtgtggagacagagtttcgctcttgttgccccaggctggagtgcaatggcgcaatctcggctcactgcaacctccacatccacctcccaggttcaagcga

SEQ ID NO: 402547 - DNA, 201 bp, Homo sapiens
agacactgtacaagaaggcagtgcaatggttaagaaagagcatgggctttggaattgtttttctcacagttaatagtggtgctaattattaaaaactaagyttcactttacttagtagtaaaatgtagataataatagttcctgtgtcctgtaattgttagacttaaatgttgtatgtaaagcaccagatgtggttattgt

SEQ ID NO: 402548 - DNA, 201 bp, Homo sapiens
gtgtggttatctattataagattagacagcagcttgccaaattgggtaaagaaattgaagaatatattcacaaaccaaaatactgcttaccttttctacarccaggtcgtttggtaaaggtatgtcattgtttcttcataaaatacttgaataattcaatatttaaacatatttttgttaaagattctaatttatttttta

SEQ ID NO: 402549 - DNA, 201 bp, Homo sapiens
gaaatataaggactaagtgaataataagaagcaaaaaaataagtagactgtttaaacgaaaccatattttaaaatgctgcattcagtaggaaaagattggyttgtgtgtttataaatggccagttgtatttactgaatgagataatttacattgaactttcctaaaaatgaaaataaatgagtttgttctgtatagagatt

SEQ ID NO: 402550 - DNA, 201 bp, Homo sapiens
gagtttctgaaaaatgatcagagaaatcaaggaatcctgctcaacattcactgggccacgttcacttttgccaagtaaagtgcataagatttatgacagcyactttccttattgcctggagacttttacaatttttggttttgtgtttaagatggtggaagttactggaaatctgactggaagtaaggatgttagtatgca

SEQ ID NO: 402551 - DNA, 201 bp, Homo sapiens
gaaataggacagtttttgtcttctttctgaatctcgtcttcacaaaatagtgttactctgttttgaaggaaattcacagatacctgtgcatattgaattcractacaggtatataaaaatactctttctaaagccaagtgaattatttttaatttttctacctttttagatgtagttaagtgcatacaaattgtgcatctt

SEQ ID NO: 402552 - DNA, 201 bp, Homo sapiens
gcagcttacagaatgttgtttctaaaatgaattagaccagcagtccccagtctttttggcacaagaaactggttttgtggaagatagtttttccatggacsagtgtggagcaggggtggtttggggatgaaactgtcccacctcaggtcatcagaccttagattctcataacgaccaggcgacctagatcccttgcatgcg

SEQ ID NO: 402553 - DNA, 201 bp, Homo sapiens
gtttacactgactgaattccagtgtgatatagaggtgttatttctgtatagctctattctattttctctctttttatggttatacatattacatctataartgttacaaatccagcaatacattattatgattaatactttatgtactttttattgctttttgaaaattttttattactttttgaaaatcatttatggttt

SEQ ID NO: 402554 - DNA, 201 bp, Homo sapiens
actgttcttcagagtccattcaagataaataattagggaaaatttggacacaatttaaatattaacagaatttttaaagtcataatttaaaggaaaagttktatgattatttgttttcacatttgtaggtatgccattgcattggccttaagggaaaagcagcgtgtaatatttaccagcccaattaaggctctgagtaac

SEQ ID NO: 402555 - DNA, 201 bp, Homo sapiens
aatatagaaattaatttcctttagatatctacaactagattttgtgttgaaagaatggaaattgattttattccaagatacatttttcatttatagtaataacaatattatatcaaagtttgttaactttcccccaaatttgcaaaaactggggcatcatcctagactccttctctcacccattttgcctttttaaacatt

SEQ ID NO: 402556 - DNA, 201 bp, Homo sapiens
atatagaaattaatttcctttagatatctacaactagattttgtgttgaaagaatggaaattgattttattccaagatacatttttcatttatagtaataacaatattatatcaaagtttgttaactttcccccaaatttgcaaaaactggggcatcatcctagactccttctctcacccattttgcctttttaaacattg

SEQ ID NO: 402557 - DNA, 201 bp, Homo sapiens
cgagtgtggagcaggggtggtttggggatgaaactgtcccacctcaggtcatcagaccttagattctcataacgaccaggcgacctagatcccttgcatgygccatgtttgcactggtatgagaatctaatgctgctgctgatctgacaagagggggagttcaggcagtaatgctctctcccccaccactcttgctgcatg

SEQ ID NO: 402558 - DNA, 201 bp, Homo sapiens
tatagaaattaatttcctttagatatctacaactagattttgtgttgaaagaatggaaattgattttattccaagatacatttttcatttatagtaataacaatattatatcaaagtttgttaactttcccccaaatttgcaaaaactggggcatcatcctagactccttctctcacccattttgcctttttaaacattgc

SEQ ID NO: 402559 - DNA, 201 bp, Homo sapiens
actacatttttccagcagggggagatggcctgcatcttgtggttgatgaaaatgtaagagagtaattgtcctttttaaatctataatgtcatactttattrttaatatcttgttgttgttgtttttaaattttgaattagagaagaatggaaaagatacatttgtttgtcttagttttaatcaatcgatcttgattttttt

SEQ ID NO: 402560 - DNA, 201 bp, Homo sapiens
gcactgtagtcaaagtgataatggtgagattgattatataagcaaagtctcagaccctaggtaaattctcagacataataactagtgcatgaacaatatttttttatttatttatttatttatttatttatttattttgagacaaggtctagctctgtcacccaggctggaatgcagtggcaagatcatggctcagtgcag

SEQ ID NO: 402561 - DNA, 201 bp, Homo sapiens
ctcagctcactgcaactccgcctcgcagttttaagttattttaaaaataaccattatctttaggaaaaaagagctttcttaaaaatataaagtttgtacartatcttccacactaaatacagttttgaaccatgaaattgagaaattagaaaaatcttagatctcagtaattaacacaagcgctcctagcatttgtatgta

SEQ ID NO: 402562 - DNA, 201 bp, Homo sapiens
cactgtagtcaaagtgataatggtgagattgattatataagcaaagtctcagaccctaggtaaattctcagacataataactagtgcatgaacaatatttttttatttatttatttatttatttatttatttattttgagacaaggtctagctctgtcacccaggctggaatgcagtggcaagatcatggctcagtgcagt

SEQ ID NO: 402563 - DNA, 201 bp, Homo sapiens
tatgtatgaaaaatgtttgaattatgattaagtattagtgaagttacacagaaaaaatttgtgattccagggtgacttcagagaagataattttaatactscaatgcaagtgcttcgagatgcaggtgatttggccaaaggagaccagaaagggcggaaaggaggaacaaaaggtaatttggaactttgctttgagagaat

SEQ ID NO: 402564 - DNA, 201 bp, Homo sapiens
actgtagtcaaagtgataatggtgagattgattatataagcaaagtctcagaccctaggtaaattctcagacataataactagtgcatgaacaatattttwttatttatttatttatttatttatttatttattttgagacaaggtctagctctgtcacccaggctggaatgcagtggcaagatcatggctcagtgcagtc

SEQ ID NO: 402565 - DNA, 201 bp, Homo sapiens
agatcatggctcagtgcagtcttgacctcctgggcttaagtgatcctcccacctcagcctcctgagtagctgggactacaggcgtgtgccaccacgctcarcttatttttgtattgctttgtagagacagggttttgccatgttgctaggctagtcttgaactcctgggctcaagagatctacctgtttcagcttcccaaa

SEQ ID NO: 402566 - DNA, 201 bp, Homo sapiens
cctggagtgcagtggcgtgatctgggctcactgcaacctccaccttccacgttcaaatgattctcctgcctcagcctcctgagtagctgggattacaggcrcccgccaccacactcagctaatttttgtatttttagtagagacgaggtttcaccatgttggccaggctggtctcgaactcctgagctcatgtgatcctcc

SEQ ID NO: 402567 - DNA, 201 bp, Homo sapiens
aatcgagaccatcctggctaacacggtgaaaccccgtctctacaaaaaatacaaaaaattagctgggtgtggtggcaggagcctgtagtcccagctactcrggaggctgaggcaggagaatggcgtgaacctgggaggcagagcttgcagtgagctgagattgtgccactgcactccagcctgggtgacagagcgagacac

SEQ ID NO: 402568 - DNA, 201 bp, Homo sapiens
aaattagctgggtgtggtggcaggagcctgtagtcccagctactcgggaggctgaggcaggagaatggcgtgaacctgggaggcagagcttgcagtgagcygagattgtgccactgcactccagcctgggtgacagagcgagacaccatctcaaaaaaaaaaaaaagaaaaaaagaaaagtaaaaagcaagggcagtagac

SEQ ID NO: 402569 - DNA, 201 bp, Homo sapiens
ccctatgcagcagaggactttgtaaaggatttcatttcaatcctaaatgacctgtgagaatctggtctcaggtaaaaatctagttacattttgagccactrcctaatttaattatctttggatatacttgtttgcataaacatttaatatctgattgcataggtaatatgacattaccctctctatcccaattcctaccct

SEQ ID NO: 402570 - DNA, 201 bp, Homo sapiens
acagtgctatttttgaaggttacatgctatttcatgtcttgctccaatgactgataaattgcagtttctttgttctgccacaagatggtggtcagagatarcttgtatccatttagaagtgagaatttatacacattagggacatgatggaactataacactatttccttctcaaaattttttattataaacattatagca

SEQ ID NO: 402571 - DNA, 201 bp, Homo sapiens
aaagtatgatggtaatagtaatgtataaaggtcattagtgggtcagtggggaaatctgaatagggattgtatatgatatttccttagatcttacaacattrtagctttgcaggagaatgtgcttgttcttaacatgtacatgtatttgctggtcaagtgaagtgatgtctgcaagttaatttcaaatgattaaaaaaggaa

SEQ ID NO: 402572 - DNA, 201 bp, Homo sapiens
tagtgggtcagtggggaaatctgaatagggattgtatatgatatttccttagatcttacaacattgtagctttgcaggagaatgtgcttgttcttaacatrtacatgtatttgctggtcaagtgaagtgatgtctgcaagttaatttcaaatgattaaaaaaggaagaggaggaagaggcaggcaggaagaaagaaaaaac

SEQ ID NO: 402573 - DNA, 201 bp, Homo sapiens
gccagtgaaaattgtgttttcatcagtgatcagtgtaaaagtagccatggaagacagatttggacctgtggaaacattaactttgcctcagtttatagagsctctctggattcaagagcagttgaaaggaagcaaaatttgatgtcgataatgtgccattttgacaagagaaaacatggaagaaagtttgcagataggtgt

SEQ ID NO: 402574 - DNA, 201 bp, Homo sapiens
ctgttaacaagagtctttcattcttagtactatagtacctttatgtattaatatttttgaactgccaaatatctgagaccataaaaatgagtaaagtgtgsattctgtattgaggggagctcttatttttatgtaccatttatttacctgttatttagaagtttgaactggtttttattttttaaatacagtctctaataa

SEQ ID NO: 402575 - DNA, 201 bp, Homo sapiens
acattttgaactaatgtatgatgagaaaaagtttttctttcgtattggaaaaatagagtgtatgctttctttgaggaaatttgaactcaatgatttaaaayaattgtgatttcttttttcttcagcatttggaaatatgttttattcttgttaaacagttggtagtttattgcagaaatagattgtagaaatggattcgtt

SEQ ID NO: 402576 - DNA, 201 bp, Homo sapiens
gaaagtgatggaacaaagatttctagtttgaattcacatagcctggctttggggaaaatagtcctttatttaaccttttttctttgaaattggtgattctstctgcttggagaagtttctgaaaggaattacaaatcatcaaaatgctgaaaagtaccctcgctgaaactgtaaataaaggcgaaacatttttcatgatgt

SEQ ID NO: 402577 - DNA, 201 bp, Homo sapiens
ctggcctttagattcttattctttgtaatgtgtgaagtttggtatcactaactcattttgatatttctgtacccttgaattttctcctagatgaagaaaaraagatggttgaagaagtattcagtaatgcaattgattgcttatccgatgaagataaaaaactccctcaggtgagttttcagtatcagtagataaaagtgt

SEQ ID NO: 402578 - DNA, 201 bp, Homo sapiens
ctgcgcgactcgactacttttgtctcctgcgggccactgttgagccttcacgagacgtcactgtcttcggtcgcggggcatcgtgggtaggagggagattygctctcactgctcccaaaaatggcggacgcattcggagatgagctgttcagcgtgttcgagggcgactcgaccactgcggcgggaaccaaaaaagacaag

SEQ ID NO: 402579 - DNA, 201 bp, Homo sapiens
gatttaaaaaagaagttctaacaggtttgcacacatgtccaaggcagaagcaaagagagaaagttgggagcataggtgaaacaatgaactggggtaaaaakcaaatccttaatcccaaggcaagtactccatttagtaaacaattaccaaacttaaaatatgaatttagaactctgtaggtgactgggatgctgaagtaga

SEQ ID NO: 402580 - DNA, 201 bp, Homo sapiens
ggctaatttttgtatttttagtagagatggggttttgccatgttggccaagctggtcttgaactcctaacctcaggtgatccacctgcctcggcctcccaragtgctgggattacaggtgtgagccaccgcaccaagccagtcctttatattttctgtgtatcacctcaaccatgagaaaactattaaatggtggtggtgc

SEQ ID NO: 402581 - DNA, 201 bp, Homo sapiens
tcagctacagaagctgcaaaaccagctaaacctgatgagaaaggagagatgcaggtttgtacataactttctgtcttctgatttcagatattctgtaactyatttgtcatcaccaaagttctccaatgtgatggtaatgaacatactatcatgatttctaaattagaagttttcaaggtattttaaggtatattagtaaag

SEQ ID NO: 402582 - DNA, 201 bp, Homo sapiens
ggcatcgtgggtaggagggagattcgctctcactgctcccaaaaatggcggacgcattcggagatgagctgttcagcgtgttcgagggcgactcgaccackgcggcgggaaccaaaaaagacaaggaaaaggacaaggggaaatggaaggggcctccagggtctgcagacaaggcagggtaaggaagaagttccagttgtt

SEQ ID NO: 402583 - DNA, 201 bp, Homo sapiens
ccaccacgcccggctgattttgtatttctagtagagacggggtttctccatgttggtcgggctgctcttgaactcctgacctcaggtgatccgctcgcctyggcctcccagagtgctgggattacaggcatgagctactgcgcccgacctagcatttatctttttaaacagttctagacacctctttcctggccagccccc

SEQ ID NO: 402584 - DNA, 201 bp, Homo sapiens
tgaatattattttctccagatttcttccccaacatgccagtgaaaagaattaacatttacttaacattatcaataatcaactaagctccaacacttttttggggggggggatgtgggagggggaagcagggaacagttttcctcttgttgcccaggctggagtgcagtggtgcgatctcggctcactgcaacctccgcctc

SEQ ID NO: 402585 - DNA, 201 bp, Homo sapiens
aggcagtaatgctctctcccccaccactcttgctgcatggcctggttcttaacaggccacagactggtaccatcccggggcttggggacccctgaattagmcagtttggaagtaaaaataaaaatgatagtaaagggctgggcgtggtggctcacacctgtaatcccagcattttgggaggcaaaggcgggcagatcacct

SEQ ID NO: 402586 - DNA, 201 bp, Homo sapiens
tgggattacaggcactcaccaccactcccaggtaattgtctgtatttttagtagggacgatgtttcactgtgttggccaggctggtctcaaactcctgacmtcaggtgatccacccacctcagcctcccaaagtgctgggattacaggcatgagccaccacacccagctcgctccaacacttctaagtgaagtctttcccc

SEQ ID NO: 402587 - DNA, 201 bp, Homo sapiens
tgttaattaataattttatatataaaatacgaaataggtttgagaacatattgtttgttatttttgtaggatctcattaactaattttaaagattaataaygcatttacttaaaaattataaaaccagattttcagcttaaaatacatgtttaattatagaattacttatttacttaggccttatttgccacggagacctt

SEQ ID NO: 402588 - DNA, 201 bp, Homo sapiens
  misc_feature (1)...(201): n = A,T,C or G
gctatcagcagtgttaggctttacattcctaaagaccttcggccggtggacaatagacagagtgttttaaaatcaatacaggtatgtgttaatttcataanttaagtataaattttatgtaaatacagatagtgtttataaagaggcaactgaaatgcttttaaatatattgctttctttcagaatacctataaatactac

SEQ ID NO: 402589 - DNA, 201 bp, Homo sapiens
ttggcgtttcctggtgtctgcaggcagcgtgatcttctgcttcaattcccttacgtcgatgttactgattctgtccccatcttcgcggttgtctcctgcaycagcacaacacctggcacatagtcgttaataaacaaacgaatgattagttgagtaaaaggtgaaaaggtttagaaaaaatgatatgaattgatttggagg

SEQ ID NO: 402590 - DNA, 201 bp, Homo sapiens
  misc_feature (1)...(201): n = A,T,C or G
ctaaagaccttcggccggtggacaatagacagagtgttttaaaatcaatacaggtatgtgttaatttcataaattaagtataaattttatgtaaatacagntagtgtttataaagaggcaactgaaatgcttttaaatatattgctttctttcagaatacctataaatactaccaatagtggcaattatttttcataaaaa

SEQ ID NO: 402591 - DNA, 201 bp, Homo sapiens
aaattttatgtaaatacagatagtgtttataaagaggcaactgaaatgcttttaaatatattgctttctttcagaatacctataaatactaccaatagtgrcaattatttttcataaaaataaaggcagcagatcttcatgtggatttatactctctttgaatctaccaacaaagtgagttagtaaaggaggactcacaag

SEQ ID NO: 402592 - DNA, 201 bp, Homo sapiens
gaggcaactgaaatgcttttaaatatattgctttctttcagaatacctataaatactaccaatagtggcaattatttttcataaaaataaaggcagcagaycttcatgtggatttatactctctttgaatctaccaacaaagtgagttagtaaaggaggactcacaaggaaaaccattctgctttattcattatgagtgaa

SEQ ID NO: 402593 - DNA, 201 bp, Homo sapiens
ggtctgtactttgggtaatacagtttatatagtttcgtgagactctctttttcttaaaattcttatttcaaatgagatttttatatttcccacaacatgtrtatgtatgtatcaagaacaagccaactaaagacaaatataatgagaactgaatcagttaacaactatgctggaaaccagccattacatgatgagatttta

SEQ ID NO: 402594 - DNA, 201 bp, Homo sapiens
cttttaaatatattgctttctttcagaatacctataaatactaccaatagtggcaattatttttcataaaaataaaggcagcagatcttcatgtggatttrtactctctttgaatctaccaacaaagtgagttagtaaaggaggactcacaaggaaaaccattctgctttattcattatgagtgaaagctatagactttat

SEQ ID NO: 402595 - DNA, 201 bp, Homo sapiens
tttatactctctttgaatctaccaacaaagtgagttagtaaaggaggactcacaaggaaaaccattctgctttattcattatgagtgaaagctatagactktattacaagttttatgtataaaatcatgtactgacaggacatttaaccattttttaatatagttaataaatacatgaaattgttttattttcaataggga

SEQ ID NO: 402596 - DNA, 201 bp, Homo sapiens; identical to SEQ ID NO: 89242

SEQ ID NO: 402597 - DNA, 201 bp, Homo sapiens
aacctcacaccagtgactcagtttctttatatataaaacttggccaggctcgtgtaggatttttgtgctgacactagcctgctttgattagggcagacatrtatcctgaaactgtaccatatgcacttaccagagatatcagtcttttgaaagagcttgccttatttgctcatttaggacataatgtgcaaatgtctttga

SEQ ID NO: 402598 - DNA, 201 bp, Homo sapiens
gttctgttttttcttcttttttaaatttgagatataatttacacagcatagcattcacccttttaaaatgtccaactcactggtttttagtgtattcacaratacttgcaaccatcaccactatgtaacttcagaacattcttctcaccctctgaaggaactttatacccattagcagccactctctgtttctcccatcct

SEQ ID NO: 402599 - DNA, 201 bp, Homo sapiens
aaggatttccgatgggtaagtaaagcaattcatatatcaaaataatttttgtctttgttatactatagataactggcttacatagtctttgagattttaastcccacctacttaagaacttgaacctgagctaatacagtttcatcaaggttaaaccttggcttttggccatttgtggtggcttaggcttataatcacagc

SEQ ID NO: 402600 - DNA, 201 bp, Homo sapiens
tctgatttaattgatctgatgtacattctggacatcagaatcttttaaaggccccccaggtgattctgctgtgcatccagagctgagaaatagtgctttaractggtatgaaagttttgttgagtggaaagaaacattgggagatcatcatactctcctttacagatgaatgccttgatttgtaagggattttccataaga

SEQ ID NO: 402601 - DNA, 201 bp, Homo sapiens; identical to SEQ ID NO: 89243

SEQ ID NO: 402602 - DNA, 201 bp, Homo sapiens
gtaggattgatggatcatatggtaactctatatttacctttattctcagaaactaccagactgtttccaaaatggctacaccactttatgttctcactagyaatttgcaagataactgctttctctacatcttcgccagcatgtgttattgcctgtggtttttgctgtagccatcttaatagcgtcaaatgttagtagttc

SEQ ID NO: 402603 - DNA, 201 bp, Homo sapiens; identical to SEQ ID NO: 89247

SEQ ID NO: 402604 - DNA, 201 bp, Homo sapiens
actaccagactgtttccaaaatggctacaccactttatgttctcactagtaatttgcaagataactgctttctctacatcttcgccagcatgtgttattgyctgtggtttttgctgtagccatcttaatagcgtcaaatgttagtagttcagctttttagcataattagctgtaatatctaaccagtaaaaccattattat

SEQ ID NO: 402605 - DNA, 201 bp, Homo sapiens
ctcacaaactagattttaagctccttagagtcagatgtttcattttaactttacattttctcataatggtctgtctttataaagtaaatgcccagtgtttrttggataaatacatgagtagaaactcctttaatagagtaatgtgttcagttcatagttttaaagcactctcccttctagctttttgtgaacttacatcat

SEQ ID NO: 402606 - DNA, 201 bp, Homo sapiens
accaggaccattgcagcagctctctccctgctgtcagtccctccatggccaccagggtcggccttatgttttcacaacacaagaacaggtagacttgagcrtgattgaatgattggaaagcatccttggaggtggtttgaaggcattatctgagctgctcaaatatactgaaaaagaccttgtctggctgaagggactggc

SEQ ID NO: 402607 - DNA, 201 bp, Homo sapiens
gcataagcataacatgaaaaaaggatctgaaattgaagtggactatgattactatttagcaaaaatataaaatacaccagaaaagactgaaaggaaaactwtaagtggttgtgttacagcaataagattatagtggtcttttttttttcttttcctgccccctccccatcattgtctataatgtgcttatatgtatataag

SEQ ID NO: 402608 - DNA, 201 bp, Homo sapiens
taagtgatcctcccacctcagcctcctgagtagctgggactacaggcgtgtgccaccacgctcaacttatttttgtattgctttgtagagacagggttttkccatgttgctaggctagtcttgaactcctgggctcaagagatctacctgtttcagcttcccaaatgagccaggagccactgtgctctgctgaacaatata

SEQ ID NO: 402609 - DNA, 201 bp, Homo sapiens
tgctctgcctcaaatttttcaaatggacattttgtattttccatgtacttaatattttaggtagtatttaataactttacagatacatcattactcttgtrtaatgttccgggaatgtatctaagaagctccagtttccccagtctccccagcactgaagctttaacccagaagtatactgtaagatgttctttaaaaata

SEQ ID NO: 402610 - DNA, 201 bp, Homo sapiens
  misc_feature (1)...(201): n = A,T,C or G
tttttgtttattttttttgagatggagtctcactgttgcccaggctggagtgcactggcgcaatctcagctcactgcaactccgcctcgcagttttaagtnattttaaaaataaccattatctttaggaaaaaagagctttcttaaaaatataaagtttgtacaatatcttccacactaaatacagttttgaaccatgaaa

SEQ ID NO: 402611 - DNA, 201 bp, Homo sapiens
gaaggttagtgttacaaatgggatttttctttggactatctagtatgatgatcagcaaacagtttagccatgaggaccttggaaacaataaatagtttccmtggggtacctagtggaagagttggggctttgtaattaaacttgggttcagatcctcccccagcatttttcttaactataatcttgggtaaatttcttatt

SEQ ID NO: 402612 - DNA, 201 bp, Homo sapiens
tggctattgttcagtatggctttctgtgataattggattgttctgtgtctacactgttcagtatagtagccactatttagcatttgatgtgtgcttagacraaggaactgaattttataatttatatcattttaattgaaattgaaatttccacgtatgcacatggcagtctttatagatcagtgcaattctagaagaacg

SEQ ID NO: 402613 - DNA, 201 bp, Homo sapiens
cgaaggaactgaattttataatttatatcattttaattgaaattgaaatttccacgtatgcacatggcagtctttatagatcagtgcaattctagaagaaygtggtataggagatgctgttgtggccatctttagaaaatacaatttatgatactgttctaaaaaatgtgttcgttatttcccaccacgaggaatgtctcc

SEQ ID NO: 402614 - DNA, 201 bp, Homo sapiens
gcttgcctctgtcctccttaactggaaagtcataaactggtagctcaagcaatatccagtctgaagatatatcttgttttgtccatatagtgatgatcatmattctcagtgaatatataaaagacacttttgaaacagttttttatgtactcagcatggccaggatggacaggactagagaattacaggccttgtaaatga

SEQ ID NO: 402615 - DNA, 201 bp, Homo sapiens
agttgaccttgaggtggagagagaattctggatcatccagttgggaccgaagtaataacaagggtttataaaagtgaaagaaggaagctgaagggagagawccagaaagacagcaacattagaagggctctggctgactttaaaggtggaggaacagggtcataagccggaaaatgtgggtgatctctagaagtggaagtg

SEQ ID NO: 402616 - DNA, 201 bp, Homo sapiens
gtggaattgctggttcaagtacttttttatttcaaattagatattgacaatttggggcaagatggcttgcccagaagggttgtggtaattcatatttccascaaccaggtatgagaggacccacttccccacatccttgctggccctgaatatgttctctctgtagttttacctatctaataaatgaaaactagtactgtc

SEQ ID NO: 402617 - DNA, 201 bp, Homo sapiens
tcggccaggcgcggtggctcatgcctgtaatcccagcacttcaggacgccgaggcaggcaggtcaggagttcgagaccagcctgaccaacatggagaaacsccatctctactaaaaatacaaaacattagctgggtgtggtggcacatgcctgtaatcccagatacttgggaggctgaggtaggagaatcgcttgaaccca

SEQ ID NO: 402618 - DNA, 201 bp, Homo sapiens
gctgaagaactacaaaaggacccctgcccactctttacctcctcccagtgcagcctctggaggggattgtgatctgtctcagtcacttgctccctcttccmccaacagccacctcctccaggatcagacgacagggggtggcttcaaggaggcagagatctttttaaaagactggacatcttctggtgtgaggaggggaag

SEQ ID NO: 402619 - DNA, 201 bp, Homo sapiens
ttttttcaaaatgtttttaggtgttcatagtttttaatcttttaatttgttaataaggtgaattacatgaatagattttctcatattagactagccttacwtccctaaaataatcccaacttggtcttttaaaatttctgtttatgtgtatatgtttatcttcatttcttttctttactattttggcttataacttggtct

SEQ ID NO: 402620 - DNA, 201 bp, Homo sapiens
gccccacagccaccatagccgggtccccatgtactgccatagccccattccagggctgccccctgacccggctgcctgcccccatgggttccagggcagtsccttcctttttaatgctgaatgatattctattgtatgaatacatcatattttgtttatccattcatcagttgatggacattgagttattttcacttttgg

SEQ ID NO: 402621 - DNA, 201 bp, Homo sapiens
ggacattggctagttaaatcaatgaattaacccataaagttcccacactatctacaaactctgaaggcaggaaatggtctatttccctgagagcacagaamgtgcccagaatgggtagccccattccctccagcaggccccttagtggagaaactccctcttgttcccacaggtgtttgaagggacatcagggatcgatgc

SEQ ID NO: 402622 - DNA, 201 bp, Homo sapiens
gggctggcaagcatagggacgagcacattaggtgtgctttgagcagtgaaagggacagtgagaggagcagtgagagggacgaaaccatccagaggacatgsagtgagggtgctccagctgacccaagtgtgggtgccctaggataagacagagctaaagcaggtgcccccaactcatctacagtgtgatatgccagagtcc

SEQ ID NO: 402623 - DNA, 201 bp, Homo sapiens
gcactcctggccctgcctggcttttcccacccaacttgcctcctggcctcagcccctgtcccctttcctaccttggacagtaggcgaggtgtgtgttggartctgcctactcccaggaaccatggccctggcctaggggatgggggcaagggctcatcttatccattcctctgccactatgcacaacaccagcttcccagt

SEQ ID NO: 402624 - DNA, 201 bp, Homo sapiens
tcagggacacagaacgcaccactctcctctccactctcctctcctgccaccctccctctctcacccacataaactcacatgaaaatgatcactttttttttttctttttgagacggagtcttgctctgtcgccaggctgaagtgcaatggcacgatctctgctcactgcatccttcttctcccgggttcaagcgattttcc

SEQ ID NO: 402625 - DNA, 201 bp, Homo sapiens
ggagaagagggtccgggggctggtaggtcctctagtttccgaagctgaaggcctgagccccatctgaaggacaagcttttctcctggcaaaattcctttcygaacggggtcccagtgtggccaggttgggggctactggactcccgtggtaagcccgcagcggccaccgacgccttgcccctcccccagtacgcctgctat

SEQ ID NO: 402626 - DNA, 201 bp, Homo sapiens
ttcagggacacagaacgcaccactctcctctccactctcctctcctgccaccctccctctctcacccacataaactcacatgaaaatgatcactttttttttttctttttgagacggagtcttgctctgtcgccaggctgaagtgcaatggcacgatctctgctcactgcatccttcttctcccgggttcaagcgattttc

SEQ ID NO: 402627 - DNA, 201 bp, Homo sapiens
ggaacgtgttagaaatacaaattcttgggctccacctcagactgacagaatcagaagctctgggggtagggcccagaagtctgtcctcacaagccttccargtgaactgatgctcaagttagagaaccatcaatctcggattgtaaatcccagtttcctcatctattaaataataataggattattgtgaggttcacatca

SEQ ID NO: 402628 - DNA, 201 bp, Homo sapiens
agaggcagttgctctttgggactgttactctgtcctgcctctcgtgtcaggcacccccagcccactagcagcccacaataactcccaccccccaccccaaraaagactagcacctggggcagccccctcacctctctgggcttggatccctcccaccaaaggccatgagccagtggtgctcagtgggacaggggtcagctc

SEQ ID NO: 402629 - DNA, 201 bp, Homo sapiens
tgtaattttgtgcacagatttttccctctgcctcctagactacacttccccctattccctccctctgactcatccccagggttgagaggtcaccttctccwggatgcctctccctcttctctactttttgtggttttattagtggcatccactgaggtatttggtcaagatctggccatgtatctcctccctacccttccc

SEQ ID NO: 402630 - DNA, 201 bp, Homo sapiens
aagactagcacctggggcagccccctcacctctctgggcttggatccctcccaccaaaggccatgagccagtggtgctcagtgggacaggggtcagctccractctgacgtcctcctgcccaatccactctgccctagattgccgctcagatctgccgccaggcggggctggtgaagaagtccaaggctgtgctggattac

SEQ ID NO: 402631 - DNA, 201 bp, Homo sapiens
tattgcaggtctctgctgctagagaggaggtgcctgggcgccgagggtttcctggatatatgtacacagacctggccaccatctacgagcgggcgggccgygtggagggtcggggaggatccatcacacagatccccatcctcaccatgcccaacgacggtagcctcctcacagcccactaccctccagagctcccctgtc

SEQ ID NO: 402632 - DNA, 201 bp, Homo sapiens
ctccagcatcctttctttgtgttgggaatattagtatcctctttctggctatttgaagagatatatatatatatatatatatatatatatatatatatatwtagttgttaactacagtcatcctattgtggtatagaacactagaacttattgctcctggctagctgtaattttgtgcacagatttttccctctgcctcct

SEQ ID NO: 402633 - DNA, 201 bp, Homo sapiens
atgcatagtgatcaggtcagggcaattagcatatccatcatctccagcatcctttctttgtgttgggaatattagtatcctctttctggctatttgaagakatatatatatatatatatatatatatatatatatatatatatagttgttaactacagtcatcctattgtggtatagaacactagaacttattgctcctgg

SEQ ID NO: 402634 - DNA, 201 bp, Homo sapiens
gtctccatcctccagcccttcagacctgacccttgcatcaaatttgcccagggctctccagtgccctcagcttacaggtcttttcttttttttttttttttttgagacggagtctcactctgtcccccaggctggagtgcagtggcgcaatctcggctcactgcaagctccgccctccaggttcacgctattctcctgcct

SEQ ID NO: 402635 - DNA, 201 bp, Homo sapiens
tggggagtccaggaaccttgtgatgagagcagaggccccgtctggtttttctcactgacgtctgcaccccctacacaccacatacacacacacacacacamtgctcaatcagtgtggggtgaatggagggaaatgcagtcctggtgagggcagaggagggcacttttcggccacagccgggggccaggagcttttggaaaa

SEQ ID NO: 402636 - DNA, 201 bp, Homo sapiens
gtatcctcacaggatgcaccgggccagcctcagcccagcccagatgccctcccacccccaggggaaggctgggattccttggtgtgtcccttcatccacagtgtctcccaatcccctccccgcctcactcacttcctcctcaggctctgggagtgggagggatgaggggggtggttctccctggggcctgtggacaggcgc

SEQ ID NO: 402637 - DNA, 201 bp, Homo sapiens
agtatcctcacaggatgcaccgggccagcctcagcccagcccagatgccctcccacccccaggggaaggctgggattccttggtgtgtcccttcatccacagtgtctcccaatcccctccccgcctcactcacttcctcctcaggctctgggagtgggagggatgaggggggtggttctccctggggcctgtggacaggcg

SEQ ID NO: 402638 - DNA, 201 bp, Homo sapiens
tttgcctccagtctcactgtcacgtggctgctctcccctcctgccagtttgcccagtatgcggagatcgtccacttcaccctcccagatgggactcagagkagcgggcaggtgcttgaggtggctggcaccaaggcgattgttcaggtgagtggggtcaatgggacattggctagttaaatcaatgaattaacccataaag

SEQ ID NO: 402639 - DNA, 201 bp, Homo sapiens
cattttcatttgtcactttcatttgcctagcttagtacatagaaggcatccatgcagtagatatgcttgaagaaaggaagcagggagggaaggaagaaggmagatctcagaggaaaggagaggaagaagtggagagccaggccaaacctcgaagtcctccagcacccaaaggtctgagagcgaggagtgtgagtcttcaga

SEQ ID NO: 402640 - DNA, 201 bp, Homo sapiens
gagccagagccccaggcttccttgtttactgtcaacctagaggaggaggagagggaggggagggggagaggggaggggtggctgcaggggaaggctgagcrgctctctccagctccagctggacctgaagtctcagagctgccaccagcagcaggctcagacactgggctcccagctggggactgctccatggccatggag

SEQ ID NO: 402641 - DNA, 201 bp, Homo sapiens
gaaggaggggaagccaggggattgggggaaaaaagatagcttcaggaacgggaggcctgggaggccagggaggtgggcagagcagcagctggcgacaggasgggcagggatggcactgagcagagctggacttaaagaagtctcagcctctccagggggatctgacaaggccctatgaggactggggcagcaaacccagtg

SEQ ID NO: 402642 - DNA, 201 bp, Homo sapiens
aaggctgagcagctctctccagctccagctggacctgaagtctcagagctgccaccagcagcaggctcagacactgggctcccagctggggactgctccayggccatggagatagacagcaggcctggggggctccccggcagtagctgcaacctaggtgcagcccgagaacacatgcaggcggtcacccgaaactacatc

SEQ ID NO: 402643 - DNA, 201 bp, Homo sapiens
ccccggcagtagctgcaacctaggtgcagcccgagaacacatgcaggcggtcacccgaaactacatcacccacccccgtgtcagtgagtagcccctccacygtgatgggtgaggtcagggtggggagctggggtgggctgccaggttcccgggccccgcttcttgcctcagaaaaggaggaggacccaagacctggggaga

SEQ ID NO: 402644 - DNA, 201 bp, Homo sapiens
tgactagctatgcacctgtcaaaacctgagccaacaatattaaataaatcagacccattctttgctaacaaacagattctgagttcatacggacattaccrcttgaccccccagtgtaagggacgccccaggaggaagtgtggctgagtagttaagtgcagcacactgggtttggattttaatcccagatccatcccactc

SEQ ID NO: 402645 - DNA, 201 bp, Homo sapiens
gcagtagctgcaacctaggtgcagcccgagaacacatgcaggcggtcacccgaaactacatcacccacccccgtgtcagtgagtagcccctccaccgtgaygggtgaggtcagggtggggagctggggtgggctgccaggttcccgggccccgcttcttgcctcagaaaaggaggaggacccaagacctggggagacctgg

SEQ ID NO: 402646 - DNA, 201 bp, Homo sapiens; identical to SEQ ID NO: 89263

SEQ ID NO: 402647 - DNA, 201 bp, Homo sapiens
aaactacatcacccacccccgtgtcagtgagtagcccctccaccgtgatgggtgaggtcagggtggggagctggggtgggctgccaggttcccgggccccrcttcttgcctcagaaaaggaggaggacccaagacctggggagacctggagggctctctgtccagcagagtgacgcagtggggccacctggaccagaggcc

SEQ ID NO: 402648 - DNA, 201 bp, Homo sapiens
gggctgccaggttcccgggccccgcttcttgcctcagaaaaggaggaggacccaagacctggggagacctggagggctctctgtccagcagagtgacgcastggggccacctggaccagaggccacctctgcaggtgaagggttgcaggtccccagcccagcccaccccagaagagagggctggggagtagctgtcatcag

SEQ ID NO: 402649 - DNA, 201 bp, Homo sapiens
ctgaggaaataggtgccccgtgtgcgtcacatcaatgggtgcatgtcgtatgtgtgttctgaggagggtgcctgtgtgcataagcaggtaggagcatgtgyctagggggtgctcccaccttcacttggggtaaggaaatgtgtgactgcatgcttatgcactcagggcaaaggtgtgtgtgtgtgcacttaggtgtgatgt

SEQ ID NO: 402650 - DNA, 201 bp, Homo sapiens
acctcctgaggcctgaggcaggtgctgagggtggagcacattccagctaagaagaaatggtgagaatggggtgggtcagatttctcaagcaaggcctgtargccctgccccatggagctcgggggaggataggaggtccggatactccctaggccaaagctagggtcaccaaggcccagaaatatgcagtgactgggcccc

SEQ ID NO: 402651 - DNA, 201 bp, Homo sapiens
aggtgctgagggtggagcacattccagctaagaagaaatggtgagaatggggtgggtcagatttctcaagcaaggcctgtaggccctgccccatggagctsgggggaggataggaggtccggatactccctaggccaaagctagggtcaccaaggcccagaaatatgcagtgactgggcccccttgggtccagagcccagg

SEQ ID NO: 402652 - DNA, 201 bp, Homo sapiens
agtagttaagtgcagcacactgggtttggattttaatcccagatccatcccactcttttctgctagctacatgccaaccctagatcaacagcattagcacygcccaggaacgtgttagaaatacaaattcttgggctccacctcagactgacagaatcagaagctctgggggtagggcccagaagtctgtcctcacaagcc

SEQ ID NO: 402653 - DNA, 201 bp, Homo sapiens
agcctcctcacagcccactaccctccagagctcccctgtcctcccttttccaaccagatacttaaagggcccacgttgctttgcacagatgtgcagcagcrcttttcctccatcgagatagacactgccctttcctccaccatccatgccccccacacatccctatcactcccatgagggaaacagaccccaggtggccct

SEQ ID NO: 402654 - DNA, 201 bp, Homo sapiens
tttgccacctccaacattctgcggctgctggagcagggccggctgctctctgtgcccagggcccctagcctcctggcgctgacccctagcctgccaggccyacctgccagccacaggggcacctccttaggtgaccccaggaactcctccccacgcctcaacccgctgtcctcggcctcagcgtcccccccactgccgccc

SEQ ID NO: 402655 - DNA, 201 bp, Homo sapiens
cttgggctcccagcctggcaccctcctatcctgtctccatcctccagcccttcagacctgacccttgcatcaaatttgcccagggctctccagtgccctcwgcttacaggtcttttcttttttttttttttttttgagacggagtctcactctgtcccccaggctggagtgcagtggcgcaatctcggctcactgcaagct

SEQ ID NO: 402656 - DNA, 201 bp, Homo sapiens
tactttactttttattttgaaacaatttcaattttataaaaatttgcaaagataaaaatagtagtaggaacatccatgtcaccaacggttaatatattatytcatttgctctatcatttgctctccatgtgtgactgtgtgtgcataattttttcctgatttttttttttttttttttttttttttgagacggagtttcac

SEQ ID NO: 402657 - DNA, 201 bp, Homo sapiens
attccagctaagaagaaatggtgagaatggggtgggtcagatttctcaagcaaggcctgtaggccctgccccatggagctcgggggaggataggaggtccrgatactccctaggccaaagctagggtcaccaaggcccagaaatatgcagtgactgggcccccttgggtccagagcccaggcctggagccctgagctggca

SEQ ID NO: 402658 - DNA, 201 bp, Homo sapiens
gcccagatgccctcccacccccaggggaaggctgggattccttggtgtgtcccttcatccacagtgtctcccaatcccctccccgcctcactcacttcctyctcaggctctgggagtgggagggatgaggggggtggttctccctggggcctgtggacaggcgcagggctggcaagggtttggaaatttagggctgcaccc

SEQ ID NO: 402659 - DNA, 201 bp, Homo sapiens
ctccctcctctaatccctccagcgggatcagggaggaggtgcgggacctgctgccccgggcttgcccccatcccggcctcacgcatgggcgcctgtctcakccctctcccaggacgctgcaggtgtggctgggccagcgctaattagtgggccgcgcgggggccccgctgagcctttgacagaaaaggcggtagggaggtg

SEQ ID NO: 402660 - DNA, 201 bp, Homo sapiens
aattctggaggttttggtgacatccccaaggggaagagccacagctccagagctgggaactgagagtgtctgaagctgaggtacggtattcaggagcactycacgtgggaagggttcatagggctggcaagcatagggacgagcacattaggtgtgctttgagcagtgaaagggacagtgagaggagcagtgagagggacg

SEQ ID NO: 402661 - DNA, 201 bp, Homo sapiens
gtcttgaactgtggtgcgtcctgccagaaactagcccactttctgggcctcgttttgccactccatgcaagggacacacggaggtaggggcggcagtgtayaaacaaaaggaccggcttgcggtcaaggacacctctgttgctcagcccccattttggctgtgtccaaaccaaacagcctagaagaaaagatcaggctggc

SEQ ID NO: 402662 - DNA, 201 bp, Homo sapiens
tgccagaaactagcccactttctgggcctcgttttgccactccatgcaagggacacacggaggtaggggcggcagtgtacaaacaaaaggaccggcttgcrgtcaaggacacctctgttgctcagcccccattttggctgtgtccaaaccaaacagcctagaagaaaagatcaggctggcttaacaggggagaggcagagc

SEQ ID NO: 402663 - DNA, 201 bp, Homo sapiens
caggctggcttaacaggggagaggcagagctctaagacgtctgacgggagagacatccctctagggtcccagtctgtagtaccgtgggacagcagtggggagaggacccagtgggctgcagtagtcagtcaagggcaaggccttgaaggatgggcatagtccaatgctgaacagaaacagccgcctaagtggattatctgc

SEQ ID NO: 402664 - DNA, 201 bp, Homo sapiens
aagctaacacttaagactcccaccctgtgacactgagtcccgagcacagcaccttcccagtctcctgtgccccagcggacagcactgagcaggccccggasaggaggggctgcagccacacactcttccccacctgccccccagctcagagactcgtgaccaaatggccttggtcccgcagcttgtgtgcgtgagtgcagt

SEQ ID NO: 402665 - DNA, 201 bp, Homo sapiens
cccagtgggctgcagtagtcagtcaagggcaaggccttgaaggatgggcatagtccaatgctgaacagaaacagccgcctaagtggattatctgcaatgawgggtccaggccatgaagcgatgtgttcacccagagccaggcctggaggctgcgagaagcccaggaaggcaactcacagctgaggctgatgtgctaagatg

SEQ ID NO: 402666 - DNA, 201 bp, Homo sapiens
gtcagtcaagggcaaggccttgaaggatgggcatagtccaatgctgaacagaaacagccgcctaagtggattatctgcaatgatgggtccaggccatgaarcgatgtgttcacccagagccaggcctggaggctgcgagaagcccaggaaggcaactcacagctgaggctgatgtgctaagatgttgagcttcgatatctc

SEQ ID NO: 402667 - DNA, 201 bp, Homo sapiens
tgttcacccagagccaggcctggaggctgcgagaagcccaggaaggcaactcacagctgaggctgatgtgctaagatgttgagcttcgatatctcaccccrgtcacccgagcggcctggccggggaaggcatctgactcccagaggacctgcagcaagcactttgcagctgcctctaggccccttccagcccagcccttcc

SEQ ID NO: 402668 - DNA, 201 bp, Homo sapiens
gagccaggcctggaggctgcgagaagcccaggaaggcaactcacagctgaggctgatgtgctaagatgttgagcttcgatatctcaccccggtcacccgakcggcctggccggggaaggcatctgactcccagaggacctgcagcaagcactttgcagctgcctctaggccccttccagcccagcccttcctcctgaggga

SEQ ID NO: 402669 - DNA, 201 bp, Homo sapiens
tattattattttattttatttttttgagacggagtctttctctgttggccaggctggagtacagttgcatgatcttggctcactgcaacctctgccttccyggctcaagggattctcctgcctcagcctcccaagcaggtgcccgccaccatgcctgactaatttttgtatttttgtagagacagggtttcaccatgttcc

SEQ ID NO: 402670 - DNA, 201 bp, Homo sapiens
agtacagttgcatgatcttggctcactgcaacctctgccttcctggctcaagggattctcctgcctcagcctcccaagcaggtgcccgccaccatgcctgrctaatttttgtatttttgtagagacagggtttcaccatgttccccaggctgatctcaaactccttatgtgatccacatgcctcagcctcccaaagtgctg

SEQ ID NO: 402671 - DNA, 201 bp, Homo sapiens
tttatgttattccataatttttttttgtacctttcttgttatatttatttctagctattttatgagttttggccctattgcagatgggatggttttctccrttgcctcttctaactggttactactaaaatagaaaaaaaaggagggggggaatgatttttaaatatttatcttataaacagccaaattatcttattcatt

SEQ ID NO: 402672 - DNA, 201 bp, Homo sapiens
caggtgcccgccaccatgcctgactaatttttgtatttttgtagagacagggtttcaccatgttccccaggctgatctcaaactccttatgtgatccacaygcctcagcctcccaaagtgctgggattacaggcatgaaccaccttgcctggcctatcttttttattatagccatcctagagtgtgtgaagtggcatctat

SEQ ID NO: 402673 - DNA, 201 bp, Homo sapiens
tttggctattctcagacatttatgtgaactttaaaataattttattaaattttaaaataaacaataatccattagggttggatcaaatttatatacttttyaaaaggattaatgtttttatgctagtaactaagaacattaagacaataatgttcttcattgtttaggacttgttttatgttattccataatttttttttg

SEQ ID NO: 402674 - DNA, 201 bp, Homo sapiens
tgacctcattggttttgttctcagcaaactgatctgggccattcaacatagtttttattgtgcctggtgttgatgcctgttctctttttacaatacattcrtgaccattggatgatatcaatttgacatacatggcatcagggacttcatagccaccataggttttctcctctccatccattttgttcttatgaaatcctc

SEQ ID NO: 402675 - DNA, 201 bp, Homo sapiens
atattagtatcctctttctggctatttgaagagatatatatatatatatatatatatatatatatatatatatatagttgttaactacagtcatcctattrtggtatagaacactagaacttattgctcctggctagctgtaattttgtgcacagatttttccctctgcctcctagactacacttccccctattccctccc

SEQ ID NO: 402676 - DNA, 201 bp, Homo sapiens
aatgaattggcatatttgtttatttctcaattcgtgaaaatgtccttaatttgttgatgtagcaaacaaatttcaactctgctaggcaaaaaaacaaatcygctttgcagtgaacttcatataattcaactgcatacaggcaacacactatatatgaaaaaagttactaactgaattatgggtattaactactgaaaagag

SEQ ID NO: 402677 - DNA, 201 bp, Homo sapiens
agtcatcctattgtggtatagaacactagaacttattgctcctggctagctgtaattttgtgcacagatttttccctctgcctcctagactacacttcccyctattccctccctctgactcatccccagggttgagaggtcaccttctcctggatgcctctccctcttctctactttttgtggttttattagtggcatcca

SEQ ID NO: 402678 - DNA, 201 bp, Homo sapiens
ttattgtgaggttcacatcagacaaatgtagtattattctcccttgagaatagccagcaatgtttctgcctggaatgcagaaatgctaataagcctgattmaacagttggtgccacctcctgccccctctccacctccaccacactctccaccagacctgccattctccatgggacccagtgtggcatggagtcggaacct

SEQ ID NO: 402679 - DNA, 201 bp, Homo sapiens
cccagggcccctagcctcctggcgctgacccctagcctgccaggcctacctgccagccacaggggcacctccttaggtgaccccaggaactcctccccacrcctcaacccgctgtcctcggcctcagcgtcccccccactgccgccccctctgccagctgtctgcttttcctcggccccgctcctggatctgcctgccggc

SEQ ID NO: 402680 - DNA, 201 bp, Homo sapiens
cgccccctctgccagctgtctgcttttcctcggccccgctcctggatctgcctgccggctacgaactgggttcctcggccttcgagccatacagctggctrgaacggaaagtgggcagcgccagcagctgcaagaaagctaacacttaagactcccaccctgtgacactgagtcccgagcacagcaccttcccagtctcct

SEQ ID NO: 402681 - DNA, 201 bp, Homo sapiens
accacacatatccagactgggaaggggagggacttttggtttttctttggcatggggtggctcggggccaggcttgcccaaagcaagagggtaagtgaacygagaaccagtgtggtccagcaagaagcacagggtgggttcccagccccagctctgctacagatgtgctgtgtggccctgggcaaggcttctcacacttct

SEQ ID NO: 402682 - DNA, 201 bp, Homo sapiens
aagggaaggcagaggatgcctctgtgtgtgtgagcagggtgtttggggtgagacccctactcacccccgcccctcccccagcctacaggactgtgtgcagygtgaacgggcccctggtggtgctggaccgggtcaaggtaagactcttctgctgcctccctggcactaaggccaaatcccagggcgcctctcccctgccct

SEQ ID NO: 402683 - DNA, 201 bp, Homo sapiens
gtgctcctgggctccctcttgtggttgagaacccaagacgcctgggtgttcggagctcctcccacctcggagccctcctccccggccggcctagtgctgargcccccactccgcaaggctgaggggtggtttggggaaccacaggtcaccttcctggcatcctcttcacaggacaagggaggactcaaggtagcgctccct

SEQ ID NO: 402684 - DNA, 201 bp, Homo sapiens
tggctctgtgatcgccctctcccaggccagcccatcaacccgcactcccgcatctaccccgaggagatgattcagacgggcatttctcctattgacgtcakgaacagcattgcccgcggccagaagatccccatcttctcagcagccgggctcccccacaatgaggtgaggcctgcagggccagcaggcatggctggggga

SEQ ID NO: 402685 - DNA, 201 bp, Homo sapiens
taagggacgccccaggaggaagtgtggctgagtagttaagtgcagcacactgggtttggattttaatcccagatccatcccactcttttctgctagctacmtgccaaccctagatcaacagcattagcactgcccaggaacgtgttagaaatacaaattcttgggctccacctcagactgacagaatcagaagctctgggg

SEQ ID NO: 402686 - DNA, 201 bp, Homo sapiens
ccacctcagactgacagaatcagaagctctgggggtagggcccagaagtctgtcctcacaagccttccaggtgaactgatgctcaagttagagaaccatcratctcggattgtaaatcccagtttcctcatctattaaataataataggattattgtgaggttcacatcagacaaatgtagtattattctcccttgagaat

SEQ ID NO: 402687 - DNA, 201 bp, Homo sapiens
cgatctaggaaaccagaactaggtccccagacctgtggttttgcgactatcggatgcatctgtagctttggcagagaaaaataattgggtggtggaggcayctctccccatccctctccgttgcccctacccctttccctctaccaggatttggcaaatgctacaattctgtttctacagcgccaccttctgcccacattg

SEQ ID NO: 402688 - DNA, 201 bp, Homo sapiens
ggaggctgcgagaagcccaggaaggcaactcacagctgaggctgatgtgctaagatgttgagcttcgatatctcaccccggtcacccgagcggcctggccrgggaaggcatctgactcccagaggacctgcagcaagcactttgcagctgcctctaggccccttccagcccagcccttcctcctgagggaagggctgtgtg

SEQ ID NO: 402689 - DNA, 201 bp, Homo sapiens
ttcatttgcctagcttagtacatagaaggcatccatgcagtagatatgcttgaagaaaggaagcagggagggaaggaagaaggcagatctcagaggaaagragaggaagaagtggagagccaggccaaacctcgaagtcctccagcacccaaaggtctgagagcgaggagtgtgagtcttcagaggaggctgacaggcggc

SEQ ID NO: 402690 - DNA, 201 bp, Homo sapiens
agagcttcatgggaagacaagagagggagagagagacagagagagaggcaaggaggctctggtccttcaccccatggagtcatctctagggcctgtttccyggtgcaggggaaggacccactatgaaggaagcagggacacctccttagtgggaataggaaggaagaagagggtggctcaggtgcaggccaggcaggtctg

SEQ ID NO: 402691 - DNA, 201 bp, Homo sapiens
gcccctggcatgacctgatctgatggggaagccatcagtgtcccggccagccaggaggggtgaggatgggagcagtgaccacggccatgtgtccctcaggrtgtcccaaaggcaatcacagtggtaggatgggccctgggtggcctgaaggaggggaagccaggggattgggggaaaaaagatagcttcaggaacgggagg

SEQ ID NO: 402692 - DNA, 201 bp, Homo sapiens
ataggattattgtgaggttcacatcagacaaatgtagtattattctcccttgagaatagccagcaatgtttctgcctggaatgcagaaatgctaataagcytgattcaacagttggtgccacctcctgccccctctccacctccaccacactctccaccagacctgccattctccatgggacccagtgtggcatggagtcg

SEQ ID NO: 402693 - DNA, 201 bp, Homo sapiens
gaccccaggaactcctccccacgcctcaacccgctgtcctcggcctcagcgtcccccccactgccgccccctctgccagctgtctgcttttcctcggcccsgctcctggatctgcctgccggctacgaactgggttcctcggccttcgagccatacagctggctagaacggaaagtgggcagcgccagcagctgcaagaaa

SEQ ID NO: 402694 - DNA, 201 bp, Homo sapiens
catgggacccagtgtggcatggagtcggaacctatacaggtgtccattttctccactgtaaaatgaggccgatctaggaaaccagaactaggtccccagayctgtggttttgcgactatcggatgcatctgtagctttggcagagaaaaataattgggtggtggaggcacctctccccatccctctccgttgcccctaccc

SEQ ID NO: 402695 - DNA, 201 bp, Homo sapiens
ctgcttgacttcagtagctttataacaagttttaatatctgaaaaggcaagtcctctatctctgatctttttcataactactttggctattctcagacatktatgtgaactttaaaataattttattaaattttaaaataaacaataatccattagggttggatcaaatttatatacttttcaaaaggattaatgttttta

SEQ ID NO: 402696 - DNA, 201 bp, Homo sapiens
catgcctggggtaggaggcccaagaatgtacatttctatcaagttcctaggtgatgctgctggtatggggaccacacggagaacctctgttctagagaatsttctgactcctgtagtctgtgattcaaattggtccctgtttgagaattggagtaagcactcaccttaaccaccagactccatccccaatgtctgtggctg

SEQ ID NO: 402697 - DNA, 201 bp, Homo sapiens
tcccagaagtggaattgctggttcaagtacttttttatttcaaattagatattgacaatttggggcaagatggcttgcccagaagggttgtggtaattcayatttccaccaaccaggtatgagaggacccacttccccacatccttgctggccctgaatatgttctctctgtagttttacctatctaataaatgaaaacta

SEQ ID NO: 402698 - DNA, 201 bp, Homo sapiens
ctctgcctcctgggttcagtgattctcctgcctcatccttccaagtagctgggactacaggtgtgcaccaccacacctggcaatatatatatatatatatagcattttcagtagaaacggggtttcaccatgttgcccaggctggtctcaaactcctgatctcaagtgatccgcccacctcggcctcccaaattgctggga

SEQ ID NO: 402699 - DNA, 201 bp, Homo sapiens
cctctgcctcctgggttcagtgattctcctgcctcatccttccaagtagctgggactacaggtgtgcaccaccacacctggcaatatatatatatatatatagcattttcagtagaaacggggtttcaccatgttgcccaggctggtctcaaactcctgatctcaagtgatccgcccacctcggcctcccaaattgctggg

SEQ ID NO: 402700 - DNA, 201 bp, Homo sapiens
aaatcctcctttgcttcccaaggaacttgagaagtttttcattagccccacagccaccatagccgggtccccatgtactgccatagccccattccagggcygccccctgacccggctgcctgcccccatgggttccagggcagtcccttcctttttaatgctgaatgatattctattgtatgaatacatcatattttgttt

SEQ ID NO: 402701 - DNA, 201 bp, Homo sapiens
tcaaaaggattaatgtttttatgctagtaactaagaacattaagacaataatgttcttcattgtttaggacttgttttatgttattccataatttttttttgtacctttcttgttatatttatttctagctattttatgagttttggccctattgcagatgggatggttttctccgttgcctcttctaactggttactact

SEQ ID NO: 402702 - DNA, 201 bp, Homo sapiens
tctcccgggttcaagcgattttcctgcctcagcctcccgagtagctaggactacagaaaatgatcacttttaaatcactccaccgcctgatttctttggggcacactctggcctgtgttctgtacagcaacttttcccctgaggttgaaacagccctccgtcacctccagggagatgacaaataatgaggcagggcccgtt

SEQ ID NO: 402703 - DNA, 201 bp, Homo sapiens
ctgaagtgcaatggcacgatctctgctcactgcatccttcttctcccgggttcaagcgattttcctgcctcagcctcccgagtagctaggactacagaaaatgatcacttttaaatcactccaccgcctgatttctttggggcacactctggcctgtgttctgtacagcaacttttcccctgaggttgaaacagccctccg

SEQ ID NO: 402704 - DNA, 201 bp, Homo sapiens
agggacacagaacgcaccactctcctctccactctcctctcctgccaccctccctctctcacccacataaactcacatgaaaatgatcactttttttttttctttttgagacggagtcttgctctgtcgccaggctgaagtgcaatggcacgatctctgctcactgcatccttcttctcccgggttcaagcgattttcctg

SEQ ID NO: 402705 - DNA, 201 bp, Homo sapiens
cagggacacagaacgcaccactctcctctccactctcctctcctgccaccctccctctctcacccacataaactcacatgaaaatgatcactttttttttttctttttgagacggagtcttgctctgtcgccaggctgaagtgcaatggcacgatctctgctcactgcatccttcttctcccgggttcaagcgattttcct

SEQ ID NO: 402706 - DNA, 201 bp, Homo sapiens
gaggactctgcaaagccaaggggtctcgcctgccagaagcctgtgcccacctttgagaccacccatccctgccaacaaagtgtccagtttcagaattcccygccaaatggccctgagccacatccggcacctgcctgggcctctccagggtcagtcttcccaagggcagaccacagacattattcagcactccaggcccaa

SEQ ID NO: 402707 - DNA, 201 bp, Homo sapiens
ccagcctctagcagaaccaaaactaggcttgcctcccgcaagtccacagcttcttctatgggagttaggaagtattttttggcatctaacccaattccctmtgcaagctgagctcatttgccatgtgtgggtctctgcagctgccacatctgcaggcatttccctccttcccttgccttttcactccctcccctcccatgc

SEQ ID NO: 402708 - DNA, 201 bp, Homo sapiens
atatatattctataaatgaatacatgatacagagtctatcatgtagtgatttactttttacttttgtgaattacaacgtggtagggtaggaaatgagaaascttaaaaagcctaattttctcactaaagcataaccagacacagcagcctattaggggtttctccagaagatggcaggcagtcaagggggacagagttcga

SEQ ID NO: 402709 - DNA, 201 bp, Homo sapiens
cagggtctgggcgtccttgtctgtcttccttcctggccccagtacaggttgctgttctcctcttatctctgtccttgtgttcttccctccaggttttcttytggcgctgacccagggcagagagatccaggctcagaacttcttctccagcttcaccctgatgaagctgaggcactcctccgctctgggtggggccagcct

SEQ ID NO: 402710 - DNA, 201 bp, Homo sapiens
tctcctcttatctctgtccttgtgttcttccctccaggttttcttttggcgctgacccagggcagagagatccaggctcagaacttcttctccagcttcaycctgatgaagctgaggcactcctccgctctgggtggggccagcctaggggccaggcacatcgggcacctcctccccatggactatagcgccaatgccatt

SEQ ID NO: 402711 - DNA, 201 bp, Homo sapiens
cttggcctgtatttgcacccctagggatcccattccctttcccgacgcagcgcaaggaaggggagcggaatgggggctgaaaggcaataaaaaacttgtamagccgtatctgctagttctcccagtgggctatgtccctgcaaatatcctccacaagaagtaaactgggtgggtaggaagaggtgaaggctccctcctcag

SEQ ID NO: 402712 - DNA, 201 bp, Homo sapiens
agacaagtgtgtggagaggatcaatgagatggtgaacagggccaaacggaaagcaggggtggatcctctggtaccgctgcgaagcttggtgagtctggggyggagcctgggaattcagccatctgtgacactgagacagctagcaagtttggactagatgagtttgatgactgcagagggaaagacctccaagacttagtc

SEQ ID NO: 402713 - DNA, 201 bp, Homo sapiens; identical to SEQ ID NO: 89268

SEQ ID NO: 402714 - DNA, 201 bp, Homo sapiens
ccatggctcattgcagtagtacaggacagaaacaattatttcaaaatccacctacaatctagtctccaaaaatcctgcccagtttaattgcaccacaatcyactaactctgtaattctaaaaatgtgtatgttggataatcttccagctctaaagtgctgtgaattaaaaaaatgccataggcaggcataaaaaaatccta

SEQ ID NO: 402715 - DNA, 201 bp, Homo sapiens
atctccctgtgaactactgtgacccccagtaatcaacatttgaaggtttagttgcttaagtatgtatgaagtcaccctgccatctggtcagcatttctagyaaaggtgtcttgaagaccttggcagctggatcttgaaatgcagtctttagctattgtgagggaagcagagagatgtgccatttttcttaggagtgtttgc

SEQ ID NO: 402716 - DNA, 201 bp, Homo sapiens
tcattttggactaaccacatttcaagtgctcagtattcacatatggatactgtgcaggacagcacacactaattggtaatgtaaatacaagttagttaagrtctgtgaagtactttatggtttccaaaactcttttggcatttaaatcttgcgtcagccccagcaggtagatgtttatcatttccattttgtagaggagag

SEQ ID NO: 402717 - DNA, 201 bp, Homo sapiens
taactacccacacataataagccacatctattatttgtgtgagcctatgctttttacttttattttagagcctctcgtttcctcatttgtaatatgtgatyagaaatctgtcattctcggcctgccgcggtggctcaccgctataatcccagcattttgggaggccaaggcaggcagatcacttgaggtcaggagttcaag

SEQ ID NO: 402718 - DNA, 201 bp, Homo sapiens
gaggccgaggcaggtggatcacgaggtcaggagattgagaccatcctggctaacacggtgaaactccatctctactaaaaaatacaaaaaattaaccgggygtggtgtcgcgcgcctgtagtcccagctactggggaggctgaggcaggagaatggcatgaacccaggaggtggagcttgcagtgagccgaggtcgcacca

SEQ ID NO: 402719 - DNA, 201 bp, Homo sapiens
gactgtggcttgcagattcttaaagaactttattaaccttgtgagtgtcatagaagcagctactgggatgttgcaagcccagtgcaaactggtataccttrctatattgcaacatcttgaatttccttccctttatattaactacccacacataataagccacatctattatttgtgtgagcctatgctttttacttttat

SEQ ID NO: 402720 - DNA, 201 bp, Homo sapiens
actatttccaggtactcctcctgctcccagtaaacatgcgcacctggggtagggcagtgaaacactccaagtaagagtggatgcaggggagggcctgggcrgaccggcaggaaatagggtgagttgtgggtctgagttgcagggtgaagtcataggtgaggacagggtgcattctaggaggtgcattctaggacagggcag

SEQ ID NO: 402721 - DNA, 201 bp, Homo sapiens
ctctccacccaggtcttgttccagggcaagattggactccccatcctgtgcgtgggctctgtgtggaagagctgggagctgctgaaggaaggtgagcctgsggggaggctggaagggcaagggcaggggacggggctggaaaggaggtggcccaggaaagctttttgccccagagagaacctgcttcctggaccctgaggc

SEQ ID NO: 402722 - DNA, 201 bp, Homo sapiens
tcaattgtgggaaagtgaactccagcctctctctccttcctcatcccagatcaacagcagatgttagtatgacccccctcctggctccctccgtgactccrgctctgccccccacctccacctccacctccaccacttgcttgttcatctctcacctgggccaatgtccagccttctaagtgtttcccttctccaaactct

SEQ ID NO: 402723 - DNA, 201 bp, Homo sapiens
ttgggaggccgaggcaggtggatcacgaggtcaggagattgagaccatcctggctaacacggtgaaactccatctctactaaaaaatacaaaaaattaacygggcgtggtgtcgcgcgcctgtagtcccagctactggggaggctgaggcaggagaatggcatgaacccaggaggtggagcttgcagtgagccgaggtcgc

SEQ ID NO: 402724 - DNA, 201 bp, Homo sapiens
ttctaccggacattctgaagtagctcaaggactcccattgctaccatggaattcctggcattgggtcctttggagctgagaggagagcaggccccctatgytgctggctccaatactcgagtacccagtgcaccctgtgtgctgggcacttggcatgtaggcccctccagcatctctacaggagtacctcagggtctgggc

SEQ ID NO: 402725 - DNA, 201 bp, Homo sapiens
ggagcactgactggcatgtgataacctgggggacatccctagtcaacataattctagctagaagaaaagaggcctggcttcttagccctggcagccttatrccaggcagttggatggtttctaccggacattctgaagtagctcaaggactcccattgctaccatggaattcctggcattgggtcctttggagctgagagg

SEQ ID NO: 402726 - DNA, 201 bp, Homo sapiens
gcggtgcccagacagctggagggaaggaggtgtcaggcggggagagacgcaaacggcgggaccagcagcgacggtagcagcagcatggccgcgatctatgrgggtgtagaggggtgagtgcggcccggcggagggagcctgggcccgaaggcggggcggaaggccgtggccagcctggcaagctggtggccttgatcctcg

SEQ ID NO: 402727 - DNA, 201 bp, Homo sapiens
tgggtcgtgttgacagttttgtattacctgtgtttttttctttaatagctatcatggcttgcttaggctgtatgcctgtttctgaggaatttatgaagcarttgtcctttggacaaatctataactttcttttcctagccaattatactcaaagaactaggggattatagagaggttaggcatattttgttgggtgtcagg

SEQ ID NO: 402728 - DNA, 201 bp, Homo sapiens
tctctgccaccactggccttggtggtggtgggccttggggtggaggcagaagggcacgtgggtcgtgttgacagttttgtattacctgtgtttttttcttwaatagctatcatggcttgcttaggctgtatgcctgtttctgaggaatttatgaagcagttgtcctttggacaaatctataactttcttttcctagccaat

SEQ ID NO: 402729 - DNA, 201 bp, Homo sapiens
actggagaggctaggttggcccccatatccattttctgctctccacccaggtcttgttccagggcaagattggactccccatcctgtgcgtgggctctgtrtggaagagctgggagctgctgaaggaaggtgagcctggggggaggctggaagggcaagggcaggggacggggctggaaaggaggtggcccaggaaagctt

SEQ ID NO: 402730 - DNA, 201 bp, Homo sapiens
tactttgtaaccctatttggaaagaaaaccgcaactaagattatgacccatcctgacacaaaaagtttcacacatatacaccacacataccgcacaccccygccccccacagtatgatggcacagtgacccaaccttaggcaaaagggtaccactgccaacaaatgcacttaacattttattgagattctcaacagctgcc

SEQ ID NO: 402731 - DNA, 201 bp, Homo sapiens
cttcttcccttgattggggccagctgatcgggacagacaagtgtgtggagaggatcaatgagatggtgaacagggccaaacggaaagcaggggtggatccwctggtaccgctgcgaagcttggtgagtctggggtggagcctgggaattcagccatctgtgacactgagacagctagcaagtttggactagatgagtttga

SEQ ID NO: 402732 - DNA, 201 bp, Homo sapiens
cccagtttaattgcaccacaatctactaactctgtaattctaaaaatgtgtatgttggataatcttccagctctaaagtgctgtgaattaaaaaaatgccrtaggcaggcataaaaaaatcctaccctctattatattctccatctgatatagaatatatgatatatattctataaatgaatacatgatacagagtctatc

SEQ ID NO: 402733 - DNA, 201 bp, Homo sapiens
cctgtaatctgtatttatgtatagtaaattagtttaatgtacgtgtgtgtgtgtgctgtcccctttctattttattttttatttttttgagacacagtctyactctgtcagccaggctggagtgcagtagcgtgatctcagctcactgcagcctccacctcccactctacctcccaggttcaagtgattctcgtatctcag

SEQ ID NO: 402734 - DNA, 201 bp, Homo sapiens
tccccaagggaagaggagtgagaattatgtttcagttaaagagcactcaaacactgaaccacagaggcgggtttgggagtggtgattgagtttgtcgaagytgtctcctccatcatactgggctctgccagtgtggacagcacaagcttagctctctctgtgggtttttccgagcaagatcaagtgccctcttgtgttctg

SEQ ID NO: 402735 - DNA, 201 bp, Homo sapiens
cacactgagcctcctattccctttccccaggtggagttgtgctcatatctggaacaggctccaactgcaggctcatcaaccctgatggctccgagagtggstgcggcggctggggccatatgatgggtgatgagggttcaggtgagctcactgactggcccagctccaggtcctggatctgctccttccttcactccctgt

SEQ ID NO: 402736 - DNA, 201 bp, Homo sapiens
cccctatgttgctggctccaatactcgagtacccagtgcaccctgtgtgctgggcacttggcatgtaggcccctccagcatctctacaggagtacctcagrgtctgggcgtccttgtctgtcttccttcctggccccagtacaggttgctgttctcctcttatctctgtccttgtgttcttccctccaggttttcttttgg

SEQ ID NO: 402737 - DNA, 201 bp, Homo sapiens
tatctgtacattgctctttctccactgtgaggtccatcctgccttaatttgggttcctgcagcctcagggcattctagggctctcttagatcctgctggaytgagtcccctctagaaaagaagcaggaacaggctaaccaacagcagactgttagaagttggtggagggcactgacaggagtaccagccagctgttcagct

SEQ ID NO: 402738 - DNA, 201 bp, Homo sapiens
gggattggtgtttgaatcccagttcctgttttgcctgctataccatgttggcgaagttccaaaactctgagtttcagttttctcatctataaaatagaggwagttgtattcataagatggtttagggtatgagtgaatatcactgtgagaacgggtctagcacaatcccagtaaagcaggtagagtcactggaagaccggc

SEQ ID NO: 402739 - DNA, 201 bp, Homo sapiens
tatttatataacattcctgaaatgactaaagtttggatatggggagcaaattagttgctgccagggttcagggcagaaagggagtgtgagtataaaaggargagaactggaggaatactgctggagatggattccagctcggtatctcaactgcggtggtggatacatgaacctacatgtgtgataaaactagaattaaac

SEQ ID NO: 402740 - DNA, 201 bp, Homo sapiens
acactgagcctcctattccctttccccaggtggagttgtgctcatatctggaacaggctccaactgcaggctcatcaaccctgatggctccgagagtggcwgcggcggctggggccatatgatgggtgatgagggttcaggtgagctcactgactggcccagctccaggtcctggatctgctccttccttcactccctgtc

SEQ ID NO: 402741 - DNA, 201 bp, Homo sapiens
gaccaggcagcaggaggaagggcaagaaaggtctcttgatgggaatccaggagtggggtcaaacataactcccctgcagatgagggaccacctgggggcgktgtagtgaggaaggcaggctggggaagctgtcagtgctgaggaggaagtggggtggccttgtgatagtgtaaagagttttggtgtcatgggattggtgtt

SEQ ID NO: 402742 - DNA, 201 bp, Homo sapiens
gctattatttactcctggttcagatctttctcccaagttgcggtagctccagctactccctggacatatatgtgagatgttctgcagacacaggcaaaccycgtgtataccaaaccaagcttacctctctccatctcccctcaccttgccccgctgcctgatctttctgttaagagcactactgcccttccaagctccaaa

SEQ ID NO: 402743 - DNA, 201 bp, Homo sapiens
cctgacctcggacagagttttgcagaacaggtgtcaggtgtgaaattgctgagcgcgggcagggtggggagtgggagtggggagaagcgggacaaagatcktggctgaggttatccgggagctggagcagctgcgagccagagtactaggttgtcctgatgtctgaaaaccgctccatccctgttggccttccatgctgct

SEQ ID NO: 402744 - DNA, 201 bp, Homo sapiens
taggttactcaccttctctaagcctcagtttcctcatttggaaaatgtgaatagtagctacctcagagttgttgggaaagtaaaatggcatgatacattgyaaagtggttagtatagagcctgacccataagcactcattaaatgttagctattatttactcctggttcagatctttctcccaagttgcggtagctccagc

SEQ ID NO: 402745 - DNA, 201 bp, Homo sapiens
ttccgagcaagatcaagtgccctcttgtgttctgtaggggaggcacacgatccgaggtccttttagtctcagaggatgggaagatcctggcagaagcagayggactgagcacaaaccactgggtaaaaaccacactgaggggatcagagggcttggttctgattttattctctgtaattcctgttgaggtggtggctggga

SEQ ID NO: 402746 - DNA, 201 bp, Homo sapiens
agtgattctcctgcctcagcctcccaagtagctgggattacaggcgcctgtcaccacgcccaactaacttttgtatttttagtagagacagggtctcgccmtgttggccaggctggtcttgaactcctgatcttgggtgatccaccccctcggcctcccaaagtgctgggattacaggaatgagccaccacgcccggctac

SEQ ID NO: 402747 - DNA, 201 bp, Homo sapiens
acatggtgaaaccccgtctgtactaaaaatacaaaaattagccaggcgtggtggcgggtgcctgtaatcccaggtactcaggaggctgaggcagagagaaytgcttgaacctgggaggcggaggttgcagtgaggtgagagcacaccactgtactccagcttgggtgacagagcgagactctgcctcaaaaaaaataaaaa

SEQ ID NO: 402748 - DNA, 201 bp, Homo sapiens
cttcccttgattggggccagctgatcgggacagacaagtgtgtggagaggatcaatgagatggtgaacagggccaaacggaaagcaggggtggatcctctrgtaccgctgcgaagcttggtgagtctggggtggagcctgggaattcagccatctgtgacactgagacagctagcaagtttggactagatgagtttgatga

SEQ ID NO: 402749 - DNA, 201 bp, Homo sapiens
gctttggagagctgctgagaccttggtttgaatcccagctttgctgctcagtatctgcgtaaccctgtgtaggttactcaccttctctaagcctcagtttyctcatttggaaaatgtgaatagtagctacctcagagttgttgggaaagtaaaatggcatgatacattgcaaagtggttagtatagagcctgacccataag

SEQ ID NO: 402750 - DNA, 201 bp, Homo sapiens
gtactcaggaggctgaggcagagagaattgcttgaacctgggaggcggaggttgcagtgaggtgagagcacaccactgtactccagcttgggtgacagagygagactctgcctcaaaaaaaataaaaaaaatattctggggaaccattggttcctcaggaccttagaggtgttaaagatgtataagtttgttgggattgga

SEQ ID NO: 402751 - DNA, 201 bp, Homo sapiens
gccccctgtgggtggggactcggtcagggctaggcaagccccggccccctcccctccccctcccacctccaccggcccagacctttggtgcgcaggtgcckgttcagcgtgccgtgctcggcgaagccacggccgcacttgtagcacttgaacggcttctcgcctgtgtggtgtcgcacgtgccgcaccagtgagcccttc

SEQ ID NO: 402752 - DNA, 201 bp, Homo sapiens
cagtgccacttgtccctgcccgggcggcaagcacagtgccctcgctgatggccgaggccagcgtcatggccacctgctctgtcaggctctcgggggtggcratggtgatggtgtcggcggcagccgcctctgggcccagcgccgtctcctcgtccatggtgacgttctgcacgatgatctggtggccggcgctagcctggt

SEQ ID NO: 402753 - DNA, 201 bp, Homo sapiens
tcaccccactgcccctgaaagtgggatttcagtggcacgtcccattctctttagaccatgctcgacagctgaccaaggccatgatgcgaaaggccacggcyagccgcctggtcacgcagcgcgatgcggacgtgcagaacttcgtcagcttcatctccaaagactccatccagaagtccctgcagatgtacttagagaggc

SEQ ID NO: 402754 - DNA, 201 bp, Homo sapiens
gcccgcccctcacctgtacacgaacaggtacatctccttgtactggtcccggcccaggggctggctgctcacaaagctgtactcgtgctcggacacgctgyggagacaggggcccgctcagggtcggggcgccgcgccggggcgagatcccggcggggggtcgcgacgaggggccctgcccaccacacctgttgatctgct

SEQ ID NO: 402755 - DNA, 201 bp, Homo sapiens
cggcgcgcgttctgctccgcgcgggtgcgaaacccggggtgggcagggatcgggccggggccggggccaggaccgggaactaacgggctcccccacgctgmcttcgcaggggcccggctcccgggcgcggccctcgggcggacggagcgggcggccggcggcggagacggcgcgcggcgcttcgggagccagcgggtgctg

SEQ ID NO: 402756 - DNA, 201 bp, Homo sapiens
cccggggtgggcagggatcgggccggggccggggccaggaccgggaactaacgggctcccccacgctgccttcgcaggggcccggctcccgggcgcggccytcgggcggacggagcgggcggccggcggcggagacggcgcgcggcgcttcgggagccagcgggtgctggtggagccggacgcgggcgcaggtgagcgggc

SEQ ID NO: 402757 - DNA, 201 bp, Homo sapiens
ctcaaaaagtaaaactatggggaattgcccagaaagaagctagcttgcccctacagcctgagctactctgatgtggtttctcctcttcccgcaggtcccgstccccgaggcgcaggtcccccgtgcgccggagatcacggtccccgggccgccgccgccacaggagccgctccagctccaactcctcccgataaacaggcc

SEQ ID NO: 402758 - DNA, 201 bp, Homo sapiens
gcctcctgggttcaagcgattctccctcctcagcctcccaaatagctgggattacagggacccaccactatgcccactaatttttgtaaaaactgagtttytgaagggatcatttctgtagcatatttgaatatatctcaacaaaatgcaaaaaaaaaaattattatttttttttttttgagacagaggctccctctgtca

SEQ ID NO: 402759 - DNA, 201 bp, Homo sapiens
cttgaaaatttttaaaatttttgggagagacagtgcctttattgcccacgttggtcttgaactcctgggctcaagcactcctcccacctcggctccccagtgtgctaggattacaggtgcgagccattgcacctggttaatttttttgcttaatttttacttttttgtacaggcggggtcttgctatgttgcccaggctgg

SEQ ID NO: 402760 - DNA, 201 bp, Homo sapiens
ggcagcggcgatagttgcacaacacagtcagtatactgaattgtgtaagtgcctgacttgtttacttaaaaatggctaatttaggctgggcacagtggctyatacctataatcacatcactttgggaggccgaggcaggaggatcacctgaggtcagaagttcatgaccagcctggccaacctggtgaaaccccgtctcta

SEQ ID NO: 402761 - DNA, 201 bp, Homo sapiens
gagcctgccaacgtgtggcacaggccagccggcagccccaccaccctggactccaggcgccttcacgggaggcttccaggagcaccgtctgggtgtgcccyagcagggacccaaactgccatgggcctcaagcagatcattcccaaaggtgaaggtggaccagtctcagagacagccttcccaggagacagctttcccaag

SEQ ID NO: 402762 - DNA, 201 bp, Homo sapiens
  misc_feature (1)...(201): n = A,T,C or G
acagcctgagcctggagtttctgacggagctggtcatcagcctggagaagctggagaatgacaagagcttccgcggtgtcattctgacctcggtaggtgcnagttcagctccctaccccagcccgagttcttggcctgagttctctgatgtgagcccaggcctgttgcacatggaagaggcagagcctgccaacgtgtggc

SEQ ID NO: 402763 - DNA, 201 bp, Homo sapiens
aattagctggatgtagcggcacgcacctgtaatcctagctactcgggaggctgaggcagtcgaatcgcttgaacccaagaggcagaggttgcggtgagccragatcgctccattgcacttgaacctgggcaacaagagcaaaactccgtctcaaaaaagtaaataaaaataggaccaggcgcgggggctcacgcctgtaat

SEQ ID NO: 402764 - DNA, 201 bp, Homo sapiens; identical to SEQ ID NO: 89286

SEQ ID NO: 402765 - DNA, 201 bp, Homo sapiens
acctgggcaacaagagcaaaactccgtctcaaaaaagtaaataaaaataggaccaggcgcgggggctcacgcctgtaatcccagcactttgggaggccgasgtgggcagatcgcgaggtcaagagatcgagcccatcctggctaacacggtgaaaccctgtctctacttaaaagaaaaaaattatccgggcgtggtggtgg

SEQ ID NO: 402766 - DNA, 201 bp, Homo sapiens
ccagggtgggttctccactcctccccgagcccgcctccctggccggcagccctgactgggagtctgaggctcctgtgctggcgcccgctactccagccgtrggagggtcccttccacctgtgctcacccctcgcccttccttggtagctgctgagaaacccacacattccagatcattctcccaccctagcacttcctggt

SEQ ID NO: 402767 - DNA, 201 bp, Homo sapiens
tggtgaaaccccatctctactaaaaatacagaaatgggccaggcgcggtggctcacacctgtaatcccaacattttaagaggccgaggcgggcggatcacraggtcaggagatcaagaccatcctggctaacacggtgaaaccctgtctctactaaaaatacaaaaattagccaggtgtggcggcgggcgcctgtagtccc

SEQ ID NO: 402768 - DNA, 201 bp, Homo sapiens
gggcaggtacctgtaatcccagctacttgggaaggctgaggccggagaatcacttgaacctgggaggcggaggttgcagtgagccaagatcatgctactgygctccagccaggacgacagagtgagactcctctcaaaaaaagtaaaaactattcatagcttcagggccttgagaagccagatttgccaaccctgatacaa

SEQ ID NO: 402769 - DNA, 201 bp, Homo sapiens
cacccacaccctgagcgtgacctggccctgctgtgcgtcgtgcacctgggctccccagccctcctgctgtgatgccagctgggaggtggactctgatgggyatgtggccccggctccccctgcaggaccgcccgggtgtcttctcggccggcctggacctgacggagatgtgtgggaggagccccgcccactacgctgggt

SEQ ID NO: 402770 - DNA, 201 bp, Homo sapiens
cagtgagtcgtgatcactagtgcactccagtatgggcgacagagaatatcctgtctctttaaaaacaaaacaaaacaaaaaaaaattagggccgggcgtgstggctcatgcctggaatcccagcacttggggaggccgagatgggtggatcacctgaggtcaggagttcgggaccagcctggccaacatgaggaaatccca

SEQ ID NO: 402771 - DNA, 201 bp, Homo sapiens
tggcgatggtgatggtgtcggcggcagccgcctctgggcccagcgccgtctcctcgtccatggtgacgttctgcacgatgatctggtggccggcgctagcstggtgcacgatctgctgcaccaccttcatgatgtggctgtccacctgcagggccacggctcagcaagagcggctgtgccagggagcctccccgcccccgc

SEQ ID NO: 402772 - DNA, 201 bp, Homo sapiens
aaattagccaggatgtgtgtgcacgcctgtagtcccagctactcaggaggctgaggtgagaggatcacctgagcccagggattcaaggctgcagtgagtcrtgatcactagtgcactccagtatgggcgacagagaatatcctgtctctttaaaaacaaaacaaaacaaaaaaaaattagggccgggcgtggtggctcatg

SEQ ID NO: 402773 - DNA, 201 bp, Homo sapiens
aggagaatcacttgaactcgggaggcggaggttgcagtgagccaagatcccaccattgcactccagcctgggcgacagagcaagactccgtctcaaaaaawaaaaataaaaaataagttgggaatcaccccactgcccctgaaagtgggatttcagtggcacgtcccattctctttagaccatgctcgacagctgaccaag

SEQ ID NO: 402774 - DNA, 201 bp, Homo sapiens
cagacctcatgctagacgatgaccgtctgcacctccagctggccctccggcgaggcgatgaccagctcgcctgcatgctccaggatctcgatgtcctctgwtgacaccatggtcacagtggcctgttcagtgccacttgtccctgcccgggcggcaagcacagtgccctcgctgatggccgaggccagcgtcatggccacc

SEQ ID NO: 402775 - DNA, 201 bp, Homo sapiens
cctctcaaaaaaagtaaaaactattcatagcttcagggccttgagaagccagatttgccaaccctgatacaaatgactgaaggctgtgctgccatttcctrtgctgtaagacagtatttaatatagtgccatggaaatttttttatttttattttatttatttattttttttgagatggagtctccctcttgctcaggctg

SEQ ID NO: 402776 - DNA, 201 bp, Homo sapiens
  misc_feature (1)...(201): n = A,T,C or G
ctaccgcatcctggcggacaaccccaggtactgcataggactcaatgagacccagctgggcatcatcgcccctttctggtaaggccctgggctgcagccangctccatgcttgttgtggagggaacagacccgcctggggccatgtggtgagtgggtgtctgcatttccaggttgaaagacaccctggagaacaccatcgg

SEQ ID NO: 402777 - DNA, 201 bp, Homo sapiens
tgtgggctctgtaggtaagacctttgtagcagaaagcagccacagaggagacgtaaactgacaggtatagctgtgttccggcaaagctttatggacagtgrgccaggtgcggtggctcacgcctgtaatctcagcactttgggaggctgaggcaggcagatcacttgagatcaggagttcaagaccagcctggccaacatg

SEQ ID NO: 402778 - DNA, 201 bp, Homo sapiens
caggtggcttgtgggctctgtaggtaagacctttgtagcagaaagcagccacagaggagacgtaaactgacaggtatagctgtgttccggcaaagctttayggacagtgggccaggtgcggtggctcacgcctgtaatctcagcactttgggaggctgaggcaggcagatcacttgagatcaggagttcaagaccagcctg

SEQ ID NO: 402779 - DNA, 201 bp, Homo sapiens
caaaaaaaaaataaagatagaaaatggttaatttggccgggcatggtggctcacacctgtaatcccagcactttgggaggccgaggcgaggtgttcacgargtcaagagatcgagaccatcctggccaaccaacatggtgaaaccccatctctactaaaaatacaaaaattagctgggcatagtggcgcatacctgtagtc

SEQ ID NO: 402780 - DNA, 201 bp, Homo sapiens
atcacagccatgtgggtgtcaggaggctgctgtaacaacgcagcacagaccgggtggcccagaccgcagaagctcatctcacggtgctggagaccagaggkgcaaaatcaaagtgtgggcaggactgcacttcctccctgcgttccagggaggctccttcctgccccgcccacttctgctggctccaggcctccctgggct

SEQ ID NO: 402781 - DNA, 201 bp, Homo sapiens
gtggctgcggttgtaccagtccaacctggtgctggtctccgccatcaacgtgagtgtccccactcccaggtggcctcgctggctgttctgggccagcgccrgggggtgggacagacactgtcctgcccttggaatctctcacaggggaaggggacggttggagaggccctgagatgtgcacaggtgagcgccatcgcagac

SEQ ID NO: 402782 - DNA, 201 bp, Homo sapiens
cctagcacttcctggtccacacgggggtccctggcttgcttggccctttgcgggtaaatgattcagaacgtgcagctcctctggattctcaggagtcttcmccacacctctgggttcttctgcccgagccaggcgtgcagagccagagggccggcgcacttatgtccctgagaggtgcctggcgctgcctgtcctctccta

SEQ ID NO: 402783 - DNA, 201 bp, Homo sapiens
agaggggaaggtacccttgtcatttgctcagggggctgtgaccatgcagggtccccagggtgggttctccactcctccccgagcccgcctccctggccggyagccctgactgggagtctgaggctcctgtgctggcgcccgctactccagccgtgggagggtcccttccacctgtgctcacccctcgcccttccttggtag

SEQ ID NO: 402784 - DNA, 201 bp, Homo sapiens
gttgctgctcgtggttctgtctgtccgtgcaccgatgcacacaccgcaccccaccactgtactctgaaattggcgagtgagtggagagccagctctgcggrgtcatcacgcagccatggttgtgcctgccgttcatggtggtctttcaggttatcttggcaacatgtacattgcttttattttttttcttttttgctttca

SEQ ID NO: 402785 - DNA, 201 bp, Homo sapiens
gttcaggagctgtggctgcggttgtaccagtccaacctggtgctggtctccgccatcaacgtgagtgtccccactcccaggtggcctcgctggctgttctsggccagcgccagggggtgggacagacactgtcctgcccttggaatctctcacaggggaaggggacggttggagaggccctgagatgtgcacaggtgagcg

SEQ ID NO: 402786 - DNA, 201 bp, Homo sapiens
tgtgagcccaggcctgttgcacatggaagaggcagagcctgccaacgtgtggcacaggccagccggcagccccaccaccctggactccaggcgccttcacrggaggcttccaggagcaccgtctgggtgtgccccagcagggacccaaactgccatgggcctcaagcagatcattcccaaaggtgaaggtggaccagtctc

SEQ ID NO: 402787 - DNA, 201 bp, Homo sapiens
cgtgtctgagccgccgcaggagccgtcgaggtcccgccctcatgaaccagacccccggggcgcgcctgcagggaccccgggaccgaggggtgggcttacgkcggtgccccacttgtcgatcacgtccaggtacacgtcgtagagcgcgtcgatctccgccacggcttgatgcggcgccgcgtgcagcgggatcagcaccag

SEQ ID NO: 402788 - DNA, 201 bp, Homo sapiens
ctctgaacttggttccgtcctctctgtctgggctgagggagctgcctgggctctctctacaaacttgagagggacaaactaagaccaacttcaaactgactttttttttttttttttttttttttggagatgtagtcttgctctccagtcgccagactggagtgcagtggcgcaatctccgatcactgcaacctgtgcctc

SEQ ID NO: 402789 - DNA, 201 bp, Homo sapiens
tctgaacttggttccgtcctctctgtctgggctgagggagctgcctgggctctctctacaaacttgagagggacaaactaagaccaacttcaaactgactttttttttttttttttttttttttggagatgtagtcttgctctccagtcgccagactggagtgcagtggcgcaatctccgatcactgcaacctgtgcctcc

SEQ ID NO: 402790 - DNA, 201 bp, Homo sapiens
ctgaacttggttccgtcctctctgtctgggctgagggagctgcctgggctctctctacaaacttgagagggacaaactaagaccaacttcaaactgactttttttttttttttttttttttttggagatgtagtcttgctctccagtcgccagactggagtgcagtggcgcaatctccgatcactgcaacctgtgcctcct

SEQ ID NO: 402791 - DNA, 201 bp, Homo sapiens
tgaacttggttccgtcctctctgtctgggctgagggagctgcctgggctctctctacaaacttgagagggacaaactaagaccaacttcaaactgactttttttttttttttttttttttttggagatgtagtcttgctctccagtcgccagactggagtgcagtggcgcaatctccgatcactgcaacctgtgcctcctg

SEQ ID NO: 402792 - DNA, 201 bp, Homo sapiens
tctactttgtctttttttttttttttttttttttttttttttttgagacggagtcttgctctgtcgccaggctggagtgcagtggcacgatctccgctcaytgcaagctccgcctcccgggttcacaccattcttctacctcagccgcccaagtagctgggactacaggcgcccgccaccacgcccggctaattttttttt

SEQ ID NO: 402793 - DNA, 201 bp, Homo sapiens
ccggaggtggagcttgcagtaagccgagatcgcgccactgcactccagcctgggcaacagagcaagaatctgtctcaaaaataaattaattaattaaataaaataaataaataaataaataggaatgacaaccacatggatgaaccttgaacacatgatactaagtggacaaagccgacaacaaagcccggcggtatccca

SEQ ID NO: 402794 - DNA, 201 bp, Homo sapiens
tatgagctgttatctaagttattcaattggaagtggaaaagaattggaatcttttggaataaaattacgtttgttaacactcccatgtggcacagaacctygtacctacccgcccgtcagaacccttggtaaaacccactggaaaggatagaaaaagtacttttggaagagaagcctgtgcgctccctccagacaggaggc

SEQ ID NO: 402795 - DNA, 201 bp, Homo sapiens
cggaggtggagcttgcagtaagccgagatcgcgccactgcactccagcctgggcaacagagcaagaatctgtctcaaaaataaattaattaattaaataaaataaataaataaataaataggaatgacaaccacatggatgaaccttgaacacatgatactaagtggacaaagccgacaacaaagcccggcggtatcccag

SEQ ID NO: 402796 - DNA, 201 bp, Homo sapiens
ggaggtggagcttgcagtaagccgagatcgcgccactgcactccagcctgggcaacagagcaagaatctgtctcaaaaataaattaattaattaaataaaataaataaataaataaataggaatgacaaccacatggatgaaccttgaacacatgatactaagtggacaaagccgacaacaaagcccggcggtatcccagt

SEQ ID NO: 402797 - DNA, 201 bp, Homo sapiens
agtaaacagatcaatggacaaagtcactgcagaaagccacttcagggaggcgaaggccagcgtggggacagcccctgggatccagccctgggaggagcccrcaggtggtgctggcacctactgtctccagcggctgcacttccagtaccggcagctgcggggctgccactgccaggggctggggactggacccggcagcag

SEQ ID NO: 402798 - DNA, 201 bp, Homo sapiens
gaggtggagcttgcagtaagccgagatcgcgccactgcactccagcctgggcaacagagcaagaatctgtctcaaaaataaattaattaattaaataaaataaataaataaataaataggaatgacaaccacatggatgaaccttgaacacatgatactaagtggacaaagccgacaacaaagcccggcggtatcccagtg

SEQ ID NO: 402799 - DNA, 201 bp, Homo sapiens
ccagggcactgctgggctctcagggaccgctgccttctcactgcgcgggaagctgcagccggaatggagggtccggcccatccagccccagctcagggcarccgagagactcaccttggatgtgggtgcagaggcccgaggctcagagatcctagggggatggggatcccgggtccaggctgcgggcgtgtccgacacagg

SEQ ID NO: 402800 - DNA, 201 bp, Homo sapiens
ccgtgtctgtgtagaaagaggtagacatgggagacttttcattttgttctgtactaagaaaaattcttctgccttgggatcctgttgatctgtgaccttayccccaaccctgtgctctctgaaacatgtgctgtgtccactcagggttgaatggattaagggcggtgcaagatgtgctttgttaaacagatgcttgaaggc

SEQ ID NO: 402801 - DNA, 201 bp, Homo sapiens
cgattggcgctgagctcccgcagcccgcgggaggcgggggcggattggcgaaggtgcaggccaatgggcggcgggcgcgaggcgctgggccaatgagcgcsccgggggcggggagggcgccgcggcgggcggctgcgaggagcggccggcgggcggcggcggccggcgggcggcgatggcggcggcggaggccggtggcga

SEQ ID NO: 402802 - DNA, 201 bp, Homo sapiens
cggagcccttggagattcacggcaccctcgccacagggccccggagacagcggctgatttatctctgcatcgacatctgcttcccgagcaacatctgcgtstcggtctgcttttattacctcccagactgagcccccgacctggcccagcctggcccgtccccaatccagtgggctggccaggccacctgcaccagggagg

SEQ ID NO: 402803 - DNA, 201 bp, Homo sapiens
gtgcaggccaagcaggcggccccagcagaggggaagctgcagccgaggtgggctggctctggaggccagcgccgggggccagggatgggggaggccagggyggggctcaccagtgacgatgtactgggagtcccccgagaaggcgcagccccacatccagccgcgggaggactccccggggttgccgctcttgatgctcag

SEQ ID NO: 402804 - DNA, 201 bp, Homo sapiens
gccaacactgggggccaactgtgcatggggaccccgggtgaggggcaggcaggcccctctggtcctgcctgcagaaggcacctgggaagcctggccccaascaagggccacacctggcaagccaagaacaggaggccacgcctggccaaggactcaaattctccttcctggaggatgccgatggccaacggaagtagacag

SEQ ID NO: 402805 - DNA, 201 bp, Homo sapiens
aagggaagccagggaagcaaagggccctggagtgaagctggtgggctgccgtgtcagagcgcccagggcagggagcagagctcagaagtaatgctggcccrggcgcagtggctcacacccgtaatcccaacactttggaaggctgaggcaggtggatcacttgagatcaggagttcaagaccagcctggccaaaatggtga

SEQ ID NO: 402806 - DNA, 201 bp, Homo sapiens
cactgtcattgaaggccaggcagacaacagccttctggtggccgccatactctctcttgatctctccagtctccacacaccagagccgggccaggttgtcygaggaagctggagggggagattgtgcagggctaagagcgcaggtgcaggccaagcaggcggccccagcagaggggaagctgcagccgaggtgggctggct

SEQ ID NO: 402807 - DNA, 201 bp, Homo sapiens
aggacagctgctggcagggactaataaacccttccacctggccatggtggtggtgttctctatggaccgaggccctgaaacgcgggcagggaggggcagaraacacactagcttgggggtgggcaccagcctcagacccctcagcagctttgggccctcggccgactttcccaggcagtgcaggctagcccagtccaggag

SEQ ID NO: 402808 - DNA, 201 bp, Homo sapiens
cagcccacttgctccctgatgtctaaccctcatgacccttctgaccctgatgcacgcccaggtgaagaccaagccctcctgcgggggctggagagccgtgrgcctgctcctgctgctgctgctgctggtgctggccgctgtgggggttgtggctggagggcttcttggctctgctcagggccctcccaaggtgagcccctc

SEQ ID NO: 402809 - DNA, 201 bp, Homo sapiens
cctgatgcacgcccaggtgaagaccaagccctcctgcgggggctggagagccgtgggcctgctcctgctgctgctgctgctggtgctggccgctgtggggrttgtggctggagggcttcttggctctgctcagggccctcccaaggtgagcccctcctcagcaccagggacatggacagtggaaagggagaagggaagctg

SEQ ID NO: 402810 - DNA, 201 bp, Homo sapiens
ggttgcagtcagctgagatggcaccactgcccgccagcctgggtaacaaagtgagaccgtatctcaaaaagaaaagggcatcctgatcaggtgacctcagrccctgctttgcccagagcccaggccactggcaagcatgggagtggatagacccttggaaggcagagaggccaggcacaggcagcaagactagaccctccc

SEQ ID NO: 402811 - DNA, 201 bp, Homo sapiens
cctctaaactcatgctgaaactttatccccaatgtaacagcattaagaggtgaggccttcagccgccccatccgggagggaggtgggggggtcagcccccygcccagccagccgccccgtccgggaggtgaggggcgcctctgcccggccacccctactgggaagtgaggaacccctctgcccggccaccaccccgtctgg

SEQ ID NO: 402812 - DNA, 201 bp, Homo sapiens
cagctgctggcagggactaataaacccttccacctggccatggtggtggtgttctctatggaccgaggccctgaaacgcgggcagggaggggcagagaacrcactagcttgggggtgggcaccagcctcagacccctcagcagctttgggccctcggccgactttcccaggcagtgcaggctagcccagtccaggagtgtg

SEQ ID NO: 402813 - DNA, 201 bp, Homo sapiens
gccaggcagacaacagccttctggtggccgccatactctctcttgatctctccagtctccacacaccagagccgggccaggttgtccgaggaagctggagrgggagattgtgcagggctaagagcgcaggtgcaggccaagcaggcggccccagcagaggggaagctgcagccgaggtgggctggctctggaggccagcgc

SEQ ID NO: 402814 - DNA, 201 bp, Homo sapiens; identical to SEQ ID NO: 89290

SEQ ID NO: 402815 - DNA, 201 bp, Homo sapiens; identical to SEQ ID NO: 89291

SEQ ID NO: 402816 - DNA, 201 bp, Homo sapiens
gtggatacctccaaggtgagccgtcctgctgggcgcaggcccgggccaggggctagacaaagggtcctgtgtgcagcccagtacgggacaggctggagctstggtttcagggaacaggaagctctctccgccctaagcccaggctgctgacaagagctgagggtggggacatcactgggggttggagggtacccggccctg

SEQ ID NO: 402817 - DNA, 201 bp, Homo sapiens
tcatggggttgagatatttgattcaggctttatattttctgaggcccggaataagtatttcttccacactttaggaagtgtggtcctcttcactactctaygtaaacaagaggaaactaacaggttgtggtgggattagaatttagtttattattagaactcagtttattttgccaggttttctggcaactttacctcttt

SEQ ID NO: 402818 - DNA, 201 bp, Homo sapiens
catcttaaacaggtttatttgttctttttacacataccaaactcttaatattagctgttgtccccaggtccgaatgttaagtcaacatatatttgagagamcttcaacttatcaagtattgcaggtctctgattgctttggaaccacttctgatacctgtggacttagttcaaggccagttactaccacttttttttttct

SEQ ID NO: 402819 - DNA, 201 bp, Homo sapiens
gaatgacctgccagtattaggtgggtatacttgttatgttgagtttcattttctatgtcctactactttaacaataatgaccaacataaattatatacttrccgaattctaggcattaaactaaatatttcatatgagttttctcggttaatcctcacaactgtcctgtgacttgggactgttactatttatttgtaccaa

SEQ ID NO: 402820 - DNA, 201 bp, Homo sapiens
accataaggtgttgtgccacggaaaatattttgattggaaaaaatttcactttgctacttctgcgaaggtaagcagttttacatttatataccattctgtytgtcttctacctttttatgtgcttgtctatttagaaattttgatgtacttagattttatgataaaggtgttgaagagagttatccttatgtggagattct

SEQ ID NO: 402821 - DNA, 201 bp, Homo sapiens
gtaatcctttccaccaacatatcatgttactaggttaatataacctattactgtagtaaaagagcagggcccatccaacaaaagaaatatctataaactayagggtttcaaagtttgaagtcagtgggaaaaattttaaaacctgatgtaagtaaaaacccaaaactgtaatcatccatgtctatcatacatttgtgtctg

SEQ ID NO: 402822 - DNA, 201 bp, Homo sapiens
actaatggggtagaattaaaaagaaaattactctttggagcttccaggtttagaaagagataaatttctttaaaactagcttaaaggcggttttctttgtrtttttattgcagacttttaaatatgataggtatcttgatgaaaacgggaagacaaagactaccttctattgtaatggactcaagttaaagtattactaca

SEQ ID NO: 402823 - DNA, 201 bp, Homo sapiens
ctacccagaccctttggtaagtgcctgcccattgaaattcaatatccaggtgatagctacctagatctaaataaagaggaaatttacaatggtagaattgmttttatcattgtagtcacaggaattgtctgcttaattgtgttaaatattcatatattttggaaaatttagatagtggtctgaatttttcattttagtcct

SEQ ID NO: 402824 - DNA, 201 bp, Homo sapiens
accgaattctaggcattaaactaaatatttcatatgagttttctcggttaatcctcacaactgtcctgtgacttgggactgttactatttatttgtaccargtgaggaaactgacacctagaggttaagctgcagccagggtagaatcaaatacatcattatgtggcatcctattctctcaactaccaccctgcactgcca

SEQ ID NO: 402825 - DNA, 201 bp, Homo sapiens
tataaactatagggtttcaaagtttgaagtcagtgggaaaaattttaaaacctgatgtaagtaaaaacccaaaactgtaatcatccatgtctatcatacayttgtgtctgacaggcaaacgggtgaaccacctctagagaatggattaattccatacctgggctgtgctctgcaatttggtgccaatcctcttgagttcct

SEQ ID NO: 402826 - DNA, 201 bp, Homo sapiens
ctctactgagacaggtggcactgtacgaataagatagataaaaattcatcacatcagcaatgtctatgcaagaatgcaagtgacggaaacctaacattcarcagttgtctcaccacacttgtgccacacagtgtttcattttgataaggaattggcaagatattttaacatcatttagatgtaataaaagaagatctgtta

SEQ ID NO: 402827 - DNA, 201 bp, Homo sapiens
tcccgtgtttaccaagtaaggaactatgaaagtatctaatccgtttttcagtcatttactatgactaggtcaggtttaacttctttttctgcatgttttayttgctatcaggcatttgggcacagaagcattgacccgatggatggaaataccactgaaaacataaacgacactttcatcaaaaccctgcagggccatgcc

SEQ ID NO: 402828 - DNA, 201 bp, Homo sapiens
tcttgagttcctcagagcaaatcaaaggaaacatggtcatgtttttacctgcaaactaatgggaaaatatgtccatttcatcacaaatcccttgtcatacmataaggtgttgtgccacggaaaatattttgattggaaaaaatttcactttgctacttctgcgaaggtaagcagttttacatttatataccattctgtttg

SEQ ID NO: 402829 - DNA, 201 bp, Homo sapiens
tgttctcttttaagctcattcttgtgcatcgcatagactcagcctaagcctgaacaagagcatagagcctgagctgatcattctattactgtttttaaatmaatgttaatcaactgtggtgaattgggaaagtttgctgagtgtatgtgacatcgatttcatttatttacaactggttcaagaatgcaagaaaaataaata

SEQ ID NO: 402830 - DNA, 201 bp, Homo sapiens
agtgcagtggtgcgatctcggctcactgtaactgccacctcctgagttcaagtgattctcatgcctcagcctaccgagtagctgggactacaggcacgtgycaccatgcctagctaattttcatatccttagtagagacggggtttcaccatgttgggcaggctggtctcaaactcctgacctggggtgatctgcccgcct

SEQ ID NO: 402831 - DNA, 201 bp, Homo sapiens
tgggctgtgctctgcaatttggtgccaatcctcttgagttcctcagagcaaatcaaaggaaacatggtcatgtttttacctgcaaactaatgggaaaataygtccatttcatcacaaatcccttgtcataccataaggtgttgtgccacggaaaatattttgattggaaaaaatttcactttgctacttctgcgaaggtaa

SEQ ID NO: 402832 - DNA, 201 bp, Homo sapiens
taaatcaatgttaatcaactgtggtgaattgggaaagtttgctgagtgtatgtgacatcgatttcatttatttacaactggttcaagaatgcaagaaaaayaaatacagtcagatccagaaccatagtttatttaacttctaattggctcaaggagtaattgtggggaggcatatagatattctctgctatgtcaatctca

SEQ ID NO: 402833 - DNA, 201 bp, Homo sapiens
ttgtctatttagaaattttgatgtacttagattttatgataaaggtgttgaagagagttatccttatgtggagattcttagaaacataaataaattatacrtagcttcttagtaataatcatttagaaagtcaaaataggtatagatttgtcatttgttgacgagctaatgagggtgaaatacagattaaatgctctactg

SEQ ID NO: 402834 - DNA, 201 bp, Homo sapiens
atgtacttagattttatgataaaggtgttgaagagagttatccttatgtggagattcttagaaacataaataaattatacatagcttcttagtaataatcrtttagaaagtcaaaataggtatagatttgtcatttgttgacgagctaatgagggtgaaatacagattaaatgctctactgagacaggtggcactgtacga

SEQ ID NO: 402835 - DNA, 201 bp, Homo sapiens
ttcaggccaggcacggtgactcacacctgtaatcaaagcacttttggaggctgagatgggcacattgcttaagcctaggagctcaagagcaacctgggcawcatagcaaaaccctgtctctgcaaacaataaaaagaagaaaattagctgggtatggtggcacatgcctatagtcgcagctactcgagaggttgaggtggg

SEQ ID NO: 402836 - DNA, 201 bp, Homo sapiens
ttttagttagaaactgatatttggtgaaacagaggtgatttttgtttaaagggttgcatagcaagttataagacaggccccaatctagaaacctcctatckgcacatgaaatgctgtatccactgaactaaactaatgcatatgttaggacctaccttccaaatacaggcataggtttcatagactccacaaagtccattt

SEQ ID NO: 402837 - DNA, 201 bp, Homo sapiens
gggtgacaatgtgagaccccatctctaaaagaaaaagaaaaagaaatctacaaataatataaaagataactaatgattttaaaacattatcaattagtttrtgtgcaatagctgtaaataagtgcagtagcataagaaataagacatagatgacttgagtgatccaggggagtgccactgaagttggctttaaaggaaagg

SEQ ID NO: 402838 - DNA, 201 bp, Homo sapiens
ctatattttatggaactataacaatatgatatttttatttttatttatttatttatttttgacaaagtcttgttctgttgcccaggctggagtgcaatggygcgatcttggcttactgcaacctctgcctcctgggttcaagccattctcctgcctcagcctcccaagtagctaggattacaggtgcacgccaccacccct

SEQ ID NO: 402839 - DNA, 201 bp, Homo sapiens
aggaaaggtacagtttggtcatttatttgtaaagtgctatgaacttgtacaagggaaagccaatttcccgtgtttaccaagtaaggaactatgaaagtatytaatccgtttttcagtcatttactatgactaggtcaggtttaacttctttttctgcatgttttatttgctatcaggcatttgggcacagaagcattgacc

SEQ ID NO: 402840 - DNA, 201 bp, Homo sapiens
aggaaactgacacctagaggttaagctgcagccagggtagaatcaaatacatcattatgtggcatcctattctctcaactaccaccctgcactgccacacyatgtttctcatattcctcttaccactaatctgatggttaatggaagcatattagtcattttcataaaataaaggagggaaaagaaccattaagaaaccac

SEQ ID NO: 402841 - DNA, 201 bp, Homo sapiens
ggtgcacgccaccacccctggctaatttttgtatttttagtagagacggggtttcaccatgttgtccagactggtctcgaactcctgacctcaagtgatcygcccgcctcggcctcccaaagtgctgggattacaggcatgagccaccgcacccggccaacaatatgatatgtttatagtaataaagttttctttttttgg

SEQ ID NO: 402842 - DNA, 201 bp, Homo sapiens
tcaggctggacctctcgcgagctctctatatttcagccattttcaggttggttctttttgtccctttatgcctttaccgggcagcggtgatcgccacgcarcatcagatagtatatggataaaaataggttcttgtaaatgttgaactgaagctgcattaaacacctagaaaaaacatatgtatgtgtcagtgctatcagt

SEQ ID NO: 402843 - DNA, 201 bp, Homo sapiens
ttcaagcaggataggaggtatcacaaggcttccttagctcattaagctcctgttccttattactttctgattcaatgtggagtatttgctaaatcactaayggggtagaattaaaaagaaaattactctttggagcttccaggtttagaaagagataaatttctttaaaactagcttaaaggcggttttctttgtattttt

SEQ ID NO: 402844 - DNA, 201 bp, Homo sapiens
ccaagtgagtgatgtgggagatgattgaaaaactttcctctgtagaaaaagaattgtcccttatatatttaatatgcttattcaatatccaaacttgagakagtttagcaaatgaattaagagattaatatttattttaaaatctgctatgaaaatcatccttgtgactaagaagtcctagatcattttggtaattaaaac

SEQ ID NO: 402845 - DNA, 201 bp, Homo sapiens
aagtgcctgggagcctttatgagcgtccctaaacctaaaagaatccagaggcggggctcggatgaaccctcgagataagcaagtgagccgcttctcccctstaaaggatgtttacacgtgggtggcactcgctggaatccagcgctcgggcagccctgggaggacgcgctcagctgcgtggaggtgaccggcggcggcgcg

SEQ ID NO: 402846 - DNA, 201 bp, Homo sapiens
aaagaatccagaggcggggctcggatgaaccctcgagataagcaagtgagccgcttctcccctctaaaggatgtttacacgtgggtggcactcgctggaakccagcgctcgggcagccctgggaggacgcgctcagctgcgtggaggtgaccggcggcggcgcgggcagtccggaggggcgggacggggcggggcaaggcg

SEQ ID NO: 402847 - DNA, 201 bp, Homo sapiens
tgggtaggttataatgttataatgtttaattcctgtctcttactcttctttgttataactgaacaaactgatgtttgctgtagcttcctcactctaggtgwgctgatatcataatcgttcccccttatccgtggtggacacgttccaagaccctcggtggatgcctaaaacctcggatagtactgaaccctatacatgcta

SEQ ID NO: 402848 - DNA, 201 bp, Homo sapiens; identical to SEQ ID NO: 89313

SEQ ID NO: 402849 - DNA, 201 bp, Homo sapiens
gaagctagatggctcaagatttcatcatgctacttaaaacttacgaactattttcttctgaaattttccatgtaatgtttttggaccacagctgaccttgrataactgaaaccgtggataaagggggactactgtgtagggcagatgttcattatccaaggataagatgtactggaaaaagctattagagtggattcactt

SEQ ID NO: 402850 - DNA, 201 bp, Homo sapiens; identical to SEQ ID NO: 89310

SEQ ID NO: 402851 - DNA, 201 bp, Homo sapiens; identical to SEQ ID NO: 89315

SEQ ID NO: 402852 - DNA, 201 bp, Homo sapiens
cgctggtgcctatatggttggaccttagatatttgttcaaattcccacctacttgctcctcctagtggctgctactataatagcactttcattcatttacrtctaacactttcaatcaatattttcaaagtacttaacgttatgtatgtgaattttactttataactattcaattacatgaggatttccatgtaaattcta

SEQ ID NO: 402853 - DNA, 201 bp, Homo sapiens; identical to SEQ ID NO: 89317

SEQ ID NO: 402854 - DNA, 201 bp, Homo sapiens
caaaacaaaagtgtaagtttttctattaaaccatcaccaacagactaaagagatcaacacttttaaaagccaaatgataaaaactgagtgtgtactgaacrgcattttacagtaacattctccccatgaacttcatccacaagctataaatacacattaataatgtgaagatatcaaaaaagaagagataaaccaaagcta

SEQ ID NO: 402855 - DNA, 201 bp, Homo sapiens; identical to SEQ ID NO: 89319

SEQ ID NO: 402856 - DNA, 201 bp, Homo sapiens; identical to SEQ ID NO: 89316

SEQ ID NO: 402857 - DNA, 201 bp, Homo sapiens; identical to SEQ ID NO: 89318

SEQ ID NO: 402858 - DNA, 201 bp, Homo sapiens
tatataatttatcacataaaagcaaaatctctaagcttctccctaccttaggtttttagtcaaaatgaatgcaaacaatcacgtgggattcagccaagcagtgacgttaaattctgctctgtcagagagagcatctgtcaagcccacatttaaactgctgcctgcctgtgcagcagctgaggaaccgtggatttcatatta

SEQ ID NO: 402859 - DNA, 201 bp, Homo sapiens
cctgttataaggcaggtgtgagctgctgactaggctggctggattcccatcctactttctccttcctcttctagttcctggccattttctatccaagatgyggtacaacctcttaccctgcaagttcagagacccctggtctctgtggtgagtgtgtgttgaacagggaatctctggggcttgaaggggaaatttcccatc

SEQ ID NO: 402860 - DNA, 201 bp, Homo sapiens
atcatcaccccaatgtagcgccgctgggacccactgattccggaggaggaatctgtgacagagggacaaatgagccccacccagctacatccttccttccytgccctcttctcccagtagaccaccctccaggaagtcccactgaatgcccttcccctatttccaccacattaaaggaacccgtttccccataaggcaggc

SEQ ID NO: 402861 - DNA, 201 bp, Homo sapiens
cagctgtgaccttcatggtgttcactccaatcacctccccatcctgcagggatacagcccccagttccctagcctaaacaaatagtaggggatgggggcayccgaacaaaagtaccagcaagtgttggggagatctggttggatattgagagatagccaacaaagaactgctcagaaacttgaccaaacatccttgaatta

SEQ ID NO: 402862 - DNA, 201 bp, Homo sapiens
gccgctttgggctggcgatcgtggtgcgccttctggcctctcctgtaggtccccccagccctgttcatgcgcaccggtaattggtgtcctgtgtttcctaraatttcgattttccaaaatccgtgtaaaacggaccatggctcaacccgggccaaatcaggccggcgggttcttggggctggcacttacccccggacccca

SEQ ID NO: 402863 - DNA, 201 bp, Homo sapiens; identical to SEQ ID NO: 89321

SEQ ID NO: 402864 - DNA, 201 bp, Homo sapiens
ctagagcccctcagagccccagctcccgaccacccgccggagaatttcgagtccctcaggaaagcagctcccattggccagcccggccccctccccgcacmtcattggctactgtcctgcaggtcccgccctctcggcgcctcaggttccagcgagggcgtaacggcagtgaagtgaaaaatggcgggaaaggccgcctct

SEQ ID NO: 402865 - DNA, 201 bp, Homo sapiens
gggagtgcgtgaactctgcgtccttcccggggatgggacccccgcgggcgggcccctgagccttagacccgcccccgccgccgccctgcccggtgcaggcmgcggtaatcgggttagctgggccggaattacattaccttccccggcccgccccggcccccgggggggccctggcgcctctgagccggtgagactgggctc

SEQ ID NO: 402866 - DNA, 201 bp, Homo sapiens
aggctctgacccctcctacccgcccgccctccagcctgtggcttcagtgcctcccggtctacccccaccattaccggtccaggatctcgatatagaccacsgcaggtgctgtcttctccaccacatctgcgatgaagttgtactgactccggggagaagcgggcggcgggctagggacggcggcgaggacggccggaggac

SEQ ID NO: 402867 - DNA, 201 bp, Homo sapiens
ccggaggtcaggggtcaaacggggtctcctcccccagcgaatgccccccaaagcccgccatgcccgaaggctccagcctgcaccccgccccgccctcggcrcagccatcagctccgccttggctgcctcctcgcccgccctactcagaggcggcacccaggacgcgagcaggcggacagtaggacgcggggcacgccggta

SEQ ID NO: 402868 - DNA, 201 bp, Homo sapiens
atttttttctactgcctgcctcttcccttttatttattccgtcaatatttctgcctttcaataaggtggccagagacacagacgggactggaaattacctwctcctaacccataagcatgtggcccagctctcctcatactgctgctaccgaagccgcagagctcctgccagacccccaccatgggtgctctaccacaatt

SEQ ID NO: 402869 - DNA, 201 bp, Homo sapiens
attcaaccacagatgtgagttccctgacatccctcctatactgcctattcctctccctggggccaaaattatggctggggagttagagagacagaggaagrgatcttagtggttagtaaaaacatgatctgaggagacaggatttgtggaagggctggtgagaagtttaaaagtctgcattataagagaagatgcactttt

SEQ ID NO: 402870 - DNA, 201 bp, Homo sapiens
ggttctggaaccacgttttgacctgtgcgtcggtcatgcgcaaggccttggccagcgccgccctctccgcagaggccaggtacttctggcgcaggaagcgscgctccaactccagcacctgtgagcgggagaaggacgtgcgcggcttcttccgcttcggaggggtccggttttggtaggggtggcctatgcggcgcgtcc

SEQ ID NO: 402871 - DNA, 201 bp, Homo sapiens
ggagagtggcctcaggggcccgcggggctggccaaggcagggcgccggggtccccgaaacagcagcatccctgtgcacccggagcagccgcgcccgtgccrgccgctgccgggcgtcagcgcagggacttgcatcccgggggagcacggccagctggggcccctggagcttccttgctggctcttaagcgcaaatagacgc

SEQ ID NO: 402872 - DNA, 201 bp, Homo sapiens
gatctccctgggagcactgatcttcaaactgattctccaggatcccctgggaaagactctgccccctcctttctccccagcagatgggctggcagcctggygcctggggcagggtgaaggggtcttttctcccctgggaaccaggaatgatatttgggcatctgggcagaaagataaagaagagaaagaagggtgagctct

SEQ ID NO: 402873 - DNA, 201 bp, Homo sapiens
ccgctccaactccagcacctgtgagcgggagaaggacgtgcgcggcttcttccgcttcggaggggtccggttttggtaggggtggcctatgcggcgcgtcscagagaagggcgagagcgcagctaccgggaggaagaaagaccagggcaggatttgcagggtggcccgaggtgccactgagaaggccgcgcggctgtccag

SEQ ID NO: 402874 - DNA, 201 bp, Homo sapiens
aggactggagctccgaagtgtgagtgagagagagagatagcggtggggtagtaaagacagaaatggcccactctgatctgtcttggccttggttgggggaygggcaacaggtttacaatcctaggatccgagcagaattccaagtgttgaggccaatcagcaagtgtcaggcagaggcaagacgattgcgagcaagagggt

SEQ ID NO: 402875 - DNA, 201 bp, Homo sapiens
ccacttcgcctctcgcccccaggcttccgggtgactgcttcctactgctcgtgctgctgctctacgcgccagtcgggttctgcctcctcgtcctgcgcctstttctcgggatccacgtcttcctggtcagctgcgcgctgccagacagcgtccttcgcaggttccgacgcgggcgttcggggagtgtcagagctgggtctg

SEQ ID NO: 402876 - DNA, 201 bp, Homo sapiens
gcttgtggggctggtcagtgtccacactgattcctctgcccactaccaatgtcaacaggttctgctgggacaggctgcttctgcaggaggtggcctcgacscgaggcactggagcctggggcgtgctggtactagatgaggctcaggagcggtcggtggcatcagattcactccaggggctactgcaagatgccaggctgg

SEQ ID NO: 402877 - DNA, 201 bp, Homo sapiens
ccttggcaaagcggcggccgctgtccatccaggggaaggtgagtcccgctaggcctccggcgccgcccaaacccgagggcccaggcactgcaggcgccccmccagcgggcggcggcacaggcagcgggcggtgcgcagggacgcggatcacgccgcctgggcccactccggagctgccgggcagcggggcaagtgagccgg

SEQ ID NO: 402878 - DNA, 201 bp, Homo sapiens
gttcctgactaggttaaataaggtggagcaaatagccccaccccaaaagcaggcttcaggatttgaagtttgagcccatccctgaggtagagccggaattyacctttgtacttcacacggtcagggttggtggtgactacgtgggtctggagctgactgccgtcctgacacgtcctagagctgcaagcaggtttgaatcca

SEQ ID NO: 402879 - DNA, 201 bp, Homo sapiens
gtgaaccgaaatgctttgtaagtctactagctggatctccctgggagcactgatcttcaaactgattctccaggatcccctgggaaagactctgccccctmctttctccccagcagatgggctggcagcctggtgcctggggcagggtgaaggggtcttttctcccctgggaaccaggaatgatatttgggcatctgggca

SEQ ID NO: 402880 - DNA, 201 bp, Homo sapiens
acatagggaaggactctttccttagccttctcttattgattggagagggactgacatgctcctcattctcttaactttgccaaacccattcttgtactccsttgtgatctataaaagatttttctatgatgccaagttttagtttggtcctgcagtgccatatacaacatccataaatcagtgatgatattacagtaaata

SEQ ID NO: 402881 - DNA, 201 bp, Homo sapiens
tgcagtgagtcgagattgcgccactctactccagcctgggtgacagggtgagactcagcctcaaaacaacaacaacaacaacaacaacaacaacaacaacaacaaaattagccagacatggtggcacgtgcctgaaagtcccagctgctcaggaggctgaggtgggaggatcacctgaggctggctgagatctcatcactg

SEQ ID NO: 402882 - DNA, 201 bp, Homo sapiens
aagttttaaaactacttttctttagaaatggtaatctctttataaaaaaacataaaatacaattaatgggatgataaaagcataaccctccagtgtatatscttcttctagacttcctaccaaaatattttcaagtagatactatcttaacttttcatgccaacaggttatatatttatttatatatttgccagggaaacc

SEQ ID NO: 402883 - DNA, 201 bp, Homo sapiens
ttgcagtgagtcgagattgcgccactctactccagcctgggtgacagggtgagactcagcctcaaaacaacaacaacaacaacaacaacaacaacaacaacaacaaaattagccagacatggtggcacgtgcctgaaagtcccagctgctcaggaggctgaggtgggaggatcacctgaggctggctgagatctcatcact

SEQ ID NO: 402884 - DNA, 201 bp, Homo sapiens
ggccttgggtcttgagcaggctgcttcctggaggcctgggtttcctctcggaaaggtaaccttggaatcccttccacatctcagtcctgggcctcctcctygctggggctcatcctagttagtggcagcaggcccatgtgcctcctctaagacacaggttctttctcaaacacccagaaatgggccttttgtcaaaaagaa

SEQ ID NO: 402885 - DNA, 201 bp, Homo sapiens; identical to SEQ ID NO: 89329

SEQ ID NO: 402886 - DNA, 201 bp, Homo sapiens
gtttttgtctgtttatctaattgcttcttgtgctgtcactttctgtggctagtaattgcattgttccctgttgtgggggatgtggttgccttttcttcccrttgcctcgatctcctgccttgggccacatcccccagatgataaatgtttaagaaccaagtaaactagataagacaaaacaaaacaaacaaaataacatct

SEQ ID NO: 402887 - DNA, 201 bp, Homo sapiens
aaaccccagatctagagggagccaatttttaaatccatagctttctaacttttctgggctatatcttcacagcaagaaacacatgcatataaatatttatwtgaaaggaaataaatttggggaccagaatttattcttaaacatgatgaagttgggtttgtcttctattctttaagaaagttgctagtcagaacctgctaa

SEQ ID NO: 402888 - DNA, 201 bp, Homo sapiens
gtaactagttcagagaagagggtggagggcagccccgaataccccagcatttaccaatagagcaaacagggactcaggagcctggggagtgaggttagccrgaaaccctcagagtggagcactggtgctcttactgagagaggaaggtgtgtccagatggaggatgtgattaactgtcctcaacatccctgagagaaggag

SEQ ID NO: 402889 - DNA, 201 bp, Homo sapiens
aagtcagcgcgggcggggcggcaggctgggctctggcaaagtggtctggcctccatcagtctcttcctcgaccctgcggggacccgcttcctccctactcsgggcctgggagcggaaaaagtttgggcagccgggacactcctgggcgccaggagccacgtccgctaagcacagccggcgagtgcgcgcgggcggggagcc

SEQ ID NO: 402890 - DNA, 201 bp, Homo sapiens
taaagttaaacaaacttgacgaagctccaagcttcctgacagtcaaggcaaaaaggatagttagttctctttgagtcagtcgttttcatcccatcggcctmtaacaggtagcacagtgtgtctgggcagccagactttctcctgacactaacccttactggggactgaatggctagggaagcattagtgaaagacacagca

SEQ ID NO: 402891 - DNA, 201 bp, Homo sapiens
tgtcttactcactgaaacaaaggaagtggcccctggaataatggagaccagattgcaggaaacccacacctaatccctccctccgcatttgcagggggtcyataggttagctcctcacctccatactctctgggactcagcctttgcttttgtaaagtaaagaggttggacctagcagttctagtctgttctgcacatcta

SEQ ID NO: 402892 - DNA, 201 bp, Homo sapiens
ctgacagtcaaggcaaaaaggatagttagttctctttgagtcagtcgttttcatcccatcggcctataacaggtagcacagtgtgtctgggcagccagacyttctcctgacactaacccttactggggactgaatggctagggaagcattagtgaaagacacagcagctttacctggtgcagtggtctttatagtctttcc

SEQ ID NO: 402893 - DNA, 201 bp, Homo sapiens
gcgcccggaactgaggctcggcgaggggcgtcccccattaacccccgcccctccaaatcagcctcgggaccgcccagcctcgtgtcctcaggatctgcctytgagtaaggggaggactttggttgttactttctggtttgccctaaaagttactcggagaggccaacgcgccgcgttcctggattacttgagattcttgag

SEQ ID NO: 402894 - DNA, 201 bp, Homo sapiens
tcatttacttttcaaaaacctttatggtaagtacaaattttatccacaatttttagatgaggaatttgaggttcaaatgtcaaacaagttgtccaaaatcmtacagccagtgggaggccgagttaggaatcaagcttgtgtaagccaaagttcaggcatcggtactgcacgtgatgtgttatatgtgttcatgtatgtgtt

SEQ ID NO: 402895 - DNA, 201 bp, Homo sapiens
aaagtcctagagagcagggctgttgatttcttaaaatttttaagaattgtaataaaatattaatcacaaaatttaccattttaaccattttaagtgtacartttagtggcattaagtgtgttattcacattgctgtgcaactaccaccactattcatttccagaattaatttcttgtaaaattatgtttctgtacactagt

SEQ ID NO: 402896 - DNA, 201 bp, Homo sapiens
tgtccatgcccatcacagaaagagaaggaatagtttggggaaacagcctctgctttgtgactaaggagggttgagaaatgtctgtgattgcctgaaggtgmccctgggtggagagaagctttagaagaaagaaggggtggaaggaaagggggggtgatagagaactcttttgtccccacagttatgctaatgactctgtca

SEQ ID NO: 402897 - DNA, 201 bp, Homo sapiens
agcaggctggatcaacacaggattacttcacagggtcacacctggcctaatatcttaaccaccgactctcaaagattccaggcagaaaagtgatatgcagygttgatcagaacagggccaaccacgatcacgttattggcatattggaaacctcccagaggagaggggaaggtgtttgagccccagccttagaggtgtcat

SEQ ID NO: 402898 - DNA, 201 bp, Homo sapiens
ctaaaagccctcacttcaccattgtgcagtatatccatgtaacaaaattatgtttgcacctcataaatttaaacaactaaaaaaaacctccatcaagatayagaacattaccatcaccccagaaagttaccttgagccccttcccagtcaatccctgtacctgatccccccagaggcaatcacattctactattttccaca

SEQ ID NO: 402899 - DNA, 201 bp, Homo sapiens
aagtggcagcattgggattggaacttggccagccaaattgctaatgcctgggcttttaagcacaccaccagtggcacattggtgctgtgctgctagcacartgtgtggattcttctcttactaacctaggcctagctgttcagctcattcaacagtcctctccgaggcttggtcctctgtgcagcagcagtgtgctaagct

SEQ ID NO: 402900 - DNA, 201 bp, Homo sapiens
tcttactaacctaggcctagctgttcagctcattcaacagtcctctccgaggcttggtcctctgtgcagcagcagtgtgctaagctgcctcgtgccctttraagagtgaaagttgtgctggggagataaggcccatgtagacaaaacaattagagatatcgggccatataatgcaagcacatgatgtgataaagggagacc

SEQ ID NO: 402901 - DNA, 201 bp, Homo sapiens; identical to SEQ ID NO: 89341

SEQ ID NO: 402902 - DNA, 201 bp, Homo sapiens
acagggttatcttgacagcagtttagaaaaatggcttaagtagaggacaatatttagtgggcaaaaactaatgttaagcctttatgtattgactcatgtastccttttcataactccatgaggacaggtccagttataattccctttttgtaggtgagcaaatgaagatatcagaggagatatgggttttgcacacattca

SEQ ID NO: 402903 - DNA, 201 bp, Homo sapiens
tttttgtaggtgagcaaatgaagatatcagaggagatatgggttttgcacacattcagctagttacgtgctgagcctgaagtgcatgcccttaatctctaygctgttcgacctctctgctcaccaccctgtgtcatgtatccttagctgtttgaccacattgccgaatgcctggctaacttcatggataagctacaaatca

SEQ ID NO: 402904 - DNA, 201 bp, Homo sapiens
agatggtgacagttgggatgtaagcatagatagtcctgactccacggccataagattcacagtttacattggcttgtactgctgaaccaaagtttctaggraaaatcagatgattatctttttaaatggatcctaaatacgagttggctttgtatcattccaataagaagctcaagtacaacccaactgaaaatgtgccag

SEQ ID NO: 402905 - DNA, 201 bp, Homo sapiens
ctccaggggcacctgttcagtgccacctttctcagaacattcgtttctcagcccgttcatggctagtattcttttcaaacctgagaaaccaaaccccagayctagagggagccaatttttaaatccatagctttctaacttttctgggctatatcttcacagcaagaaacacatgcatataaatatttatatgaaaggaaa

SEQ ID NO: 402906 - DNA, 201 bp, Homo sapiens
gcggctcaagacaaggggcatctttgaaaccaagttcttgtctcagattgagaggtgagagcttagggctcagggtagcaggggggccatgtccttttttytcactggcagacaaactgaaggatttccataactcagggcatgactcatacaaaagtcagtttagtggcaaacacattcatgtctatagtgtttactaaa

SEQ ID NO: 402907 - DNA, 201 bp, Homo sapiens; identical to SEQ ID NO: 89328

SEQ ID NO: 402908 - DNA, 201 bp, Homo sapiens
agtcctgtcaaatcggttcctactaatggtctttaataataactttctgtacataacagattttgttcttttgaagagctgagtggtgttccatgacgtayacctatgccataatttatttaaccagtggtttctgctcttgtcttcctcctttttcaggttgaccagtatctctaccacatgcgcctctctgatgagacc

SEQ ID NO: 402909 - DNA, 201 bp, Homo sapiens
ccattttaagtgtacaatttagtggcattaagtgtgttattcacattgctgtgcaactaccaccactattcatttccagaattaatttcttgtaaaattatgtttctgtacactagtgctttgtatttaatagctgttccataaatgccataacatggaagatgctggggttgcaacagtagtcaggattcagggattgaa

SEQ ID NO: 402910 - DNA, 201 bp, Homo sapiens
accattttaagtgtacaatttagtggcattaagtgtgttattcacattgctgtgcaactaccaccactattcatttccagaattaatttcttgtaaaattatgtttctgtacactagtgctttgtatttaatagctgttccataaatgccataacatggaagatgctggggttgcaacagtagtcaggattcagggattga

SEQ ID NO: 402911 - DNA, 201 bp, Homo sapiens
tttaccattttaaccattttaagtgtacaatttagtggcattaagtgtgttattcacattgctgtgcaactaccaccactattcatttccagaattaatttcttgtaaaattatgtttctgtacactagtgctttgtatttaatagctgttccataaatgccataacatggaagatgctggggttgcaacagtagtcagga

SEQ ID NO: 402912 - DNA, 201 bp, Homo sapiens
gatagcttgagtccaggagtttgagaccagcctagacaacatggtgaaaccctgtctctgctaaaaatacaaaaattagctgggtgtggtggtgcaccgcygtaatcccagctactcgggaggctgaggcactagaattgcttgaacccgggaggcagaggttgcagtgagtcgagattgcgccactctactccagcctgg

SEQ ID NO: 402913 - DNA, 201 bp, Homo sapiens
atttaccattttaaccattttaagtgtacaatttagtggcattaagtgtgttattcacattgctgtgcaactaccaccactattcatttccagaattaatttcttgtaaaattatgtttctgtacactagtgctttgtatttaatagctgttccataaatgccataacatggaagatgctggggttgcaacagtagtcagg

SEQ ID NO: 402914 - DNA, 201 bp, Homo sapiens
aaatttaccattttaaccattttaagtgtacaatttagtggcattaagtgtgttattcacattgctgtgcaactaccaccactattcatttccagaattaatttcttgtaaaattatgtttctgtacactagtgctttgtatttaatagctgttccataaatgccataacatggaagatgctggggttgcaacagtagtca

SEQ ID NO: 402915 - DNA, 201 bp, Homo sapiens
aaaatttaccattttaaccattttaagtgtacaatttagtggcattaagtgtgttattcacattgctgtgcaactaccaccactattcatttccagaattaatttcttgtaaaattatgtttctgtacactagtgctttgtatttaatagctgttccataaatgccataacatggaagatgctggggttgcaacagtagtc

SEQ ID NO: 402916 - DNA, 201 bp, Homo sapiens
cagtgagtacaagagtaaaggaggagacctttctggagaaagaagctaaaccagggctgcaggaagtggaggagctgggcagggccagctagtcttaggcyaaagggatggtatatgggtggacacttggaggggtagttcgcagttatctcttcatccaaagcatgacctgaggccaaagcatgacctgaggccggtcct

SEQ ID NO: 402917 - DNA, 201 bp, Homo sapiens
ccttggaaaggaaatgagttcctttccctgtgggttcctttccaaggcttatttccccaggagccccacgggcctcgggcactgtggtcagtgttgctgarggttgtgaattagcatgcaaagacaccagggatcctgcccaagtgaatcaagtagcaattcctttcccatcaggggagtctgcctgtctgccactgctga

SEQ ID NO: 402918 - DNA, 201 bp, Homo sapiens
gggagataaggcccatgtagacaaaacaattagagatatcgggccatataatgcaagcacatgatgtgataaagggagaccgggctggtgatacgttgcayggaagctggttaaacctgaaggaagcccttatcttggttgctctgcattatattaacaactgtacagcggagacatacatccagagctagcacacagcaa

SEQ ID NO: 402919 - DNA, 201 bp, Homo sapiens
aaagcatgacctgaggccggtcctgaggagggagagagaaagggaggagagtttcctgtccttcagcaatcaagactgtgtgtcctgcctatggagagatrgaagattctttctatttttttttttttttttttgagacggagtctcgctctgtcgcccaggctggagtgcagtggcgcaatctcagctcactgcaaactc

SEQ ID NO: 402920 - DNA, 201 bp, Homo sapiens
aaacctgaaggaagcccttatcttggttgctctgcattatattaacaactgtacagcggagacatacatccagagctagcacacagcaagttaattggggkacttacgtagtccaggcgatataaattgaagattgtactgatagatagcctcagtacagcagatggcacttacattgtcaggcgttgtgccaaacgcctt

SEQ ID NO: 402921 - DNA, 201 bp, Homo sapiens
ccggcattgcattgtaatggagtaattggaatcctggggtttaaaaagaggctgccaggtgtggtagtgatcatggcgattccgggtacatggaaaatacrtgccttgagacctgtgtcttgctacattacctgcttaggacttggagatgtatcttttcggtcctcgtttcatttggagtatatgccatacattctcaga

SEQ ID NO: 402922 - DNA, 201 bp, Homo sapiens
gtgatcatggcgattccgggtacatggaaaatacgtgccttgagacctgtgtcttgctacattacctgcttaggacttggagatgtatcttttcggtcctygtttcatttggagtatatgccatacattctcagagcagtccactgttgtgtgctagcaggtgcttgaaaactaaaggaaaaaaacaagatcccctcaacc

SEQ ID NO: 402923 - DNA, 201 bp, Homo sapiens
gagagaaagggaggagagtttcctgtccttcagcaatcaagactgtgtgtcctgcctatggagagatagaagattctttctatttttttttttttttttttgagacggagtctcgctctgtcgcccaggctggagtgcagtggcgcaatctcagctcactgcaaactccgcctcccgggttcacgccattctcctgcctca

SEQ ID NO: 402924 - DNA, 201 bp, Homo sapiens
agcacctgtgacgacagcatcattgttaaggaggtgtgcactgtggtggcccggcgggcagcccagctctgtggcgcaggcatggccgctgtggtggacargatacgagaaaaccgtgggctggacgctctcaaagtgacagtgggtgtggatgggaccctctacaagctacatcctcagtgagtgcctgatcccagcccc

SEQ ID NO: 402925 - DNA, 201 bp, Homo sapiens
gtattattagtagagacagggtttcaccatgttgaccaggctggtctcaaactccagacctcaagtaatctgcccgccttggcctcccaaagtgctgggawtacaagcatgagccaccacacccagcctgtgtgtttctatatgttcacatacaacatagtccatgtttcacgtaagcatcacaaccgctgggagatgtca

SEQ ID NO: 402926 - DNA, 201 bp, Homo sapiens
catacatgctctggggtcagcattctcttgcattctgataagcctgagatcctttgagggggcacctgcttgccttattcaccaggcctcaatgtgttggwcctcattccactccatcacatgacccctctggtcttgctgcaggacatggccctcataatatgcaaacattagaaagtaaatttagtactgcaattgcaa

SEQ ID NO: 402927 - DNA, 201 bp, Homo sapiens
ttctgataagcctgagatcctttgagggggcacctgcttgccttattcaccaggcctcaatgtgttggtcctcattccactccatcacatgacccctctgrtcttgctgcaggacatggccctcataatatgcaaacattagaaagtaaatttagtactgcaattgcaatatgcaaacataatatgcaaacattagaaagt

SEQ ID NO: 402928 - DNA, 201 bp, Homo sapiens
gtgttccaggtttctctgaggagcacgtgttaggtctagagccgtaaaaattaagagcaaataaagcagaagtcatttcttcctgtgggctctggcaagaycctcctgtgatggggaaatcccaccagtgcagaggcccctggggttagagaccccagggctctgtggcccccagctgtgtttcccagctgttgggcctcc

SEQ ID NO: 402929 - DNA, 201 bp, Homo sapiens
atcgccttttttctcttgtaaataaatattgggctatgtaagatattaattttaaaaatgatttcctggctagagaagaattttaaagattaccaccctaygcataactttacctaaaatacaggctgttccagaatgttccatactccctgtgtgtttcatttggctgcttaagtttcatttattcttctccataggtca

SEQ ID NO: 402930 - DNA, 201 bp, Homo sapiens
gtgcctgaaagtcccagctgctcaggaggctgaggtgggaggatcacctgaggctggctgagatctcatcactgcactccagcctggacaactggagcgayaccctgtcaaaaaaaaaaaagataaaaagattaggaggtggctagaggcccgatcatgtggggccctgaaaggattttgagctttgttccaatggaaagc

SEQ ID NO: 402931 - DNA, 201 bp, Homo sapiens
acttaaaccctctagagagcagggaaccatgatgctgatggtgacggtgatgatgatgatgataaaaattgtagacatcgttagtgccaggtactgtgctraacgctgtgtttgagctatctcatcatttcttacagtcatccagtggtaggtacgctgaacttcactttacagaaaaaggcaatagatttggagcaatta

SEQ ID NO: 402932 - DNA, 201 bp, Homo sapiens
caagggtggggcccggctgttgagcccagctgcctgggaatggcaacatcccagagaaggggaccgaacaaagttgtgtcagagcttttatttaatcctcrtaataggtgcctccattttagagatgaggtgcttgtgaggcccatgacgggtggtgggtggggggtaggtactcacatctagaggacaggagagagaacc

SEQ ID NO: 402933 - DNA, 201 bp, Homo sapiens
taaaacatttaatctctgcagtagcattggggagtaaatgcaaggttttgaggggtgtcttggtaatgttacatcattggcagtataggtagagtggaggrggagcgaggcccagctggtagagcacaagacatggctctggtgggtgggcaaaaagagtattcaagggtggggcccggctgttgagcccagctgcctggg

SEQ ID NO: 402934 - DNA, 201 bp, Homo sapiens
ggctgcagcctaggagtttgaggctgcagtgaaccatgattgcgtcattgcactccagcctgggcagccgagcaagactctgtctctaaagttaaacaaacttgacgaagctccaagcttcctgacagtcaaggcaaaaaggatagttagttctctttgagtcagtcgttttcatcccatcggcctataacaggtagcaca

SEQ ID NO: 402935 - DNA, 201 bp, Homo sapiens
agaggagatatgggttttgcacacattcagctagttacgtgctgagcctgaagtgcatgcccttaatctctatgctgttcgacctctctgctcaccacccygtgtcatgtatccttagctgtttgaccacattgccgaatgcctggctaacttcatggataagctacaaatcaaagacaagaagctcccactgggttttac

SEQ ID NO: 402936 - DNA, 201 bp, Homo sapiens
tgtaaaagacttgtaacgtgatggtgacttgttaggtggatttttaagttttacaagaacaacaccctccctgttgcttgtatcctgacaacatgcagggsccaggcaccttgcagtccctgcagcgtcatccctagagcctggcaaggacaatgaagtgcgtctctgccaattgagaaaaaaaatccattttaaacattc

SEQ ID NO: 402937 - DNA, 201 bp, Homo sapiens
aggctgcagcctaggagtttgaggctgcagtgaaccatgattgcgtcattgcactccagcctgggcagccgagcaagactctgtctctaaagttaaacaaacttgacgaagctccaagcttcctgacagtcaaggcaaaaaggatagttagttctctttgagtcagtcgttttcatcccatcggcctataacaggtagcac

SEQ ID NO: 402938 - DNA, 201 bp, Homo sapiens
ccagccatcctggccgggcagtctcgggacagtagtataagagggaagaggggtgggaaggggccggagcaggcgtgtgcatagccgtcccttgttttggyaggcacgggcagcaacgcctgctacatggaagagatgcgccacatcgacatggtggaaggcgatgaggggcggatgtgtatcaatatggagtggggggcc

SEQ ID NO: 402939 - DNA, 201 bp, Homo sapiens
aaggctgcagcctaggagtttgaggctgcagtgaaccatgattgcgtcattgcactccagcctgggcagccgagcaagactctgtctctaaagttaaacaaacttgacgaagctccaagcttcctgacagtcaaggcaaaaaggatagttagttctctttgagtcagtcgttttcatcccatcggcctataacaggtagca

SEQ ID NO: 402940 - DNA, 201 bp, Homo sapiens
  misc_feature (1)...(201): n = A,T,C or G
gcccccagagtctgcagtgagaaatcccagccatcctggccgggcagtctcgggacagtagtataagagggaagaggggtgggaaggggccggagcaggcntgtgcatagccgtcccttgttttggcaggcacgggcagcaacgcctgctacatggaagagatgcgccacatcgacatggtggaaggcgatgaggggcgga

SEQ ID NO: 402941 - DNA, 201 bp, Homo sapiens
taaggctgcagcctaggagtttgaggctgcagtgaaccatgattgcgtcattgcactccagcctgggcagccgagcaagactctgtctctaaagttaaacaaacttgacgaagctccaagcttcctgacagtcaaggcaaaaaggatagttagttctctttgagtcagtcgttttcatcccatcggcctataacaggtagc

SEQ ID NO: 402942 - DNA, 201 bp, Homo sapiens
tctatgctgttcgacctctctgctcaccaccctgtgtcatgtatccttagctgtttgaccacattgccgaatgcctggctaacttcatggataagctacawatcaaagacaagaagctcccactgggttttaccttctcgttcccctgccaccagactaaactagacgaggtaagatgggctcctcagacacttgttgctt

SEQ ID NO: 402943 - DNA, 201 bp, Homo sapiens
ctgttcctggaattggtaatttcccagggtcttaggggcttgcccatgcctcctgagccttttcacactgctgtctctaggtaagcatttatctgctaagrtggctgagctccaaaagtatcccctttgattgccagtctctcaggccacttaaatctgtgacacttcccatgggctgccttgtattgtgcccgacattct

SEQ ID NO: 402944 - DNA, 201 bp, Homo sapiens
agtaggcagtgctggatctgctgatgactggtagccctaagcattaggtatctggagactgtttttaagcagttgtgtctctgtctcagtcatgtaggagygcacgtgcacgctgccggtgtgtggtatgttgcacatgccactgctaggtataaaaggcatggctcctacctttagatgcttacaaacaagctgggctga

SEQ ID NO: 402945 - DNA, 201 bp, Homo sapiens
cacttaaatctgtgacacttcccatgggctgccttgtattgtgcccgacattcttattagacaagactcatctctccacgcattctagagacactcattgrtctataatatgagccagcttctttgatataaagtcctagagagcagggctgttgatttcttaaaatttttaagaattgtaataaaatattaatcacaaaa

SEQ ID NO: 402946 - DNA, 201 bp, Homo sapiens
gaagtggaggagaactgagtaggcagtgctggatctgctgatgactggtagccctaagcattaggtatctggagactgtttttaagcagttgtgtctctgwctcagtcatgtaggagtgcacgtgcacgctgccggtgtgtggtatgttgcacatgccactgctaggtataaaaggcatggctcctacctttagatgctta

SEQ ID NO: 402947 - DNA, 201 bp, Homo sapiens
gagggggcacctgcttgccttattcaccaggcctcaatgtgttggtcctcattccactccatcacatgacccctctggtcttgctgcaggacatggccctyataatatgcaaacattagaaagtaaatttagtactgcaattgcaatatgcaaacataatatgcaaacattagaaagtaaatttaataccgtgcttgcaat

SEQ ID NO: 402948 - DNA, 201 bp, Homo sapiens
gacatggccctcataatatgcaaacattagaaagtaaatttagtactgcaattgcaatatgcaaacataatatgcaaacattagaaagtaaatttaatacygtgcttgcaatttggtgttctgggggtatgaggaacaggatggaggcatgcacccctggcatggggcttgctgaaagcactgaggaggtagtcggctctc

SEQ ID NO: 402949 - DNA, 201 bp, Homo sapiens
gaacaggatggaggcatgcacccctggcatggggcttgctgaaagcactgaggaggtagtcggctctcaggagggggtgagcacatcgttggatgcgaaaytgtcttatattgttgattgaattataaaagtaatgtatatgcgacagaatactacttagccataaaaaggaacaaattaatggcattcgtagcaacctgg

SEQ ID NO: 402950 - DNA, 201 bp, Homo sapiens
cactgaggaggtagtcggctctcaggagggggtgagcacatcgttggatgcgaaactgtcttatattgttgattgaattataaaagtaatgtatatgcgasagaatactacttagccataaaaaggaacaaattaatggcattcgtagcaacctggatgggattggagaccattattctaagtgaagtaactctggaatgg

SEQ ID NO: 402951 - DNA, 201 bp, Homo sapiens
agtcggctctcaggagggggtgagcacatcgttggatgcgaaactgtcttatattgttgattgaattataaaagtaatgtatatgcgacagaatactactyagccataaaaaggaacaaattaatggcattcgtagcaacctggatgggattggagaccattattctaagtgaagtaactctggaatggaaaaccaaacat

SEQ ID NO: 402952 - DNA, 201 bp, Homo sapiens
taaaaaggaacaaattaatggcattcgtagcaacctggatgggattggagaccattattctaagtgaagtaactctggaatggaaaaccaaacatcatatrttctcactcataattgggaactaagctatgaggatgcaaaagcataagaataatacaattgactttggagactcagaggaaaggatgggaagggagtgag

SEQ ID NO: 402953 - DNA, 201 bp, Homo sapiens
cagccctgtgagtttccagttttaataaagctctgagaattaaaaaaataataatgtaaaggtgtatagcatgaaattagactatatgtaatgtctgtagrggagtgaatcccactggccgccccttacccacagatattcctggagggacttggagttttaagtctcggttggttcctggaagaattttgcccaaaatta

SEQ ID NO: 402954 - DNA, 201 bp, Homo sapiens
tcttaaaaacaaatgcagagtttgtcttcccaactcccagcaggctggatcaacacaggattacttcacagggtcacacctggcctaatatcttaaccacygactctcaaagattccaggcagaaaagtgatatgcagtgttgatcagaacagggccaaccacgatcacgttattggcatattggaaacctcccagaggag

SEQ ID NO: 402955 - DNA, 201 bp, Homo sapiens
ttctgatgccagagcactcctttcaccaccaccagctacaaatcaagggttgacctgaatgagtctgctttgatagtatccagaaacttacatctcttaamaacaaatgcagagtttgtcttcccaactcccagcaggctggatcaacacaggattacttcacagggtcacacctggcctaatatcttaaccaccgactct

SEQ ID NO: 402956 - DNA, 201 bp, Homo sapiens
gtcaaaagagtgaattaccatgggtggggctggagttagagcctcaaggaaccttggcacattttggacacctaccacgtgccattagtccgcacgtatgrgattagagtatcaagagtaaattgctgattgaaaccttaataatattatttttgtctatgttaattttgattggacaaactgacattgacaggtacaatt

SEQ ID NO: 402957 - DNA, 201 bp, Homo sapiens
ggatacgagaaaaccgtgggctggacgctctcaaagtgacagtgggtgtggatgggaccctctacaagctacatcctcagtgagtgcctgatcccagcccyccctgcctaccttctttctgtctttgttctttcccttttctttctctctttcctttgttactttatagtgaattatcagccattccaaatagtgtatata

SEQ ID NO: 402958 - DNA, 201 bp, Homo sapiens
tgctcttgcaatcaccacattggtctgagtcagggttggcaaactatggcccatgggctgaatctggcccaccacctgtttttgtacataaggttttattwcacagccatgcccatgcgtctgcacgttgcttatggttgttttgcactgtcttggcaaagttgagtggtggcagcaaagactgcatgacccacagggcct

SEQ ID NO: 402959 - DNA, 201 bp, Homo sapiens
tttctcagtttaaaagatttcccttcagcttccttcagggagctggactcttctgttccttctgtattctagaatgtaatataaagtggcatttgatggarcaggaatggtgtatttggatcgttttaagtgtactgtctccacattccccatgttctgccccaacttatcacttccctgggcttattttccagagaaagg

SEQ ID NO: 402960 - DNA, 201 bp, Homo sapiens
ctcatcctcacatctctcccagacctggctttccacaggggaaatcatttgcagtgccctgtgctgaagagtcacaggacccgccatgataggtttggccmcaccgacccctggaatttcacagaagggaatggccattctcacattctttcggcagattgggtgaggttccctgggcatcctgggatttggcagtcagct

SEQ ID NO: 402961 - DNA, 201 bp, Homo sapiens
atgaatgttacttgcattgcaggttcgagaaaatgatcagtggaatgtacctgggtgagattgtccgtaacattctcatcgatttcaccaagcgtggactrctcttccgaggccgcatctcagagcggctcaagacaaggggcatctttgaaaccaagttcttgtctcagattgagaggtgagagcttagggctcagggta

SEQ ID NO: 402962 - DNA, 201 bp, Homo sapiens
ctacctttagatgcttacaaacaagctgggctgatgaagcaagctcagaaaaggaagagctgctgtttggaatgtggccctcgtgggatggatactgaagyccccaggacaggtagtgagacagatgttaatccgagtgcatacctgggggatgtcaggaggacttggaacaagtcagaagaatgagttgatgggaaagaa

SEQ ID NO: 402963 - DNA, 201 bp, Homo sapiens; identical to SEQ ID NO: 89334

SEQ ID NO: 402964 - DNA, 201 bp, Homo sapiens
tcagtgagtacaagagtaaaggaggagacctttctggagaaagaagctaaaccagggctgcaggaagtggaggagctgggcagggccagctagtcttaggycaaagggatggtatatgggtggacacttggaggggtagttcgcagttatctcttcatccaaagcatgacctgaggccaaagcatgacctgaggccggtcc

SEQ ID NO: 402965 - DNA, 201 bp, Homo sapiens
ggtttgttttccaacactgtacgtagtctgtctttgccttttcaaagctgtgggggttatgccgggcgcggtggctcacgcctgtaatcccagcactttgrgaggccaaggcgggcggatcacgaggtcaggatatcaagaccatcctggctaacacggtgaaaccccgtctctactaaaaatacaaaaaaaaaaaaaaaa

SEQ ID NO: 402966 - DNA, 201 bp, Homo sapiens
taaggagtctgaagccctgaggcttgtttcctggtgggctgtggcagcagagagggcatcagggaataaaacccaaagcatttctcccaggttcaaagccrtcaagcatctgctcccagaggaccacattgaaggcaaggggccactgaggatgctgaggaggagcctggagttgttttcctcactgaaagacatggggtg

SEQ ID NO: 402967 - DNA, 201 bp, Homo sapiens
tgatcatggcgattccgggtacatggaaaatacgtgccttgagacctgtgtcttgctacattacctgcttaggacttggagatgtatcttttcggtcctcrtttcatttggagtatatgccatacattctcagagcagtccactgttgtgtgctagcaggtgcttgaaaactaaaggaaaaaaacaagatcccctcaaccc

SEQ ID NO: 402968 - DNA, 201 bp, Homo sapiens
gcaccaagaacagggccttgtttttacatagcacatgcataagaaatacttgtgtttctcaactccgtgtgtctctgtgtgtgtgtgtgtgtgtgtgtgtgcgcacgcacatgcgtgtgcgtgtgtgtgtggtgtctgggagaggagcctcagggtggctgtgctatattttgcacccccttcctcctcctcctgcccctg

SEQ ID NO: 402969 - DNA, 201 bp, Homo sapiens
tgtgaagaaacacagttggcataattaaaagtgcaatagacataaacggtccaggaatgtcttactcaatgactgaatttggtgtcagccagaatacattraaaatggtctctatttgtcgttttgcttctttcccaaacagttttaagaagttgaaagaattctatagtggtcatctatattttacttggtttgctttat

SEQ ID NO: 402970 - DNA, 201 bp, Homo sapiens
agcaccaagaacagggccttgtttttacatagcacatgcataagaaatacttgtgtttctcaactccgtgtgtctctgtgtgtgtgtgtgtgtgtgtgtgtgcgcacgcacatgcgtgtgcgtgtgtgtgtggtgtctgggagaggagcctcagggtggctgtgctatattttgcacccccttcctcctcctcctgcccct

SEQ ID NO: 402971 - DNA, 201 bp, Homo sapiens
catgaggacatctcaggcttttcctggatgtggcctcgcattggcttctggtctgggtagccccagactttgcacattagccctgagatgtgaaagttgtratgtagcattcctgggccagtcagtgtctcattggatctggagtgggaagcctccagggtggtcagagttacccttgaactagggtcactggagatggct

SEQ ID NO: 402972 - DNA, 201 bp, Homo sapiens
aagcaccaagaacagggccttgtttttacatagcacatgcataagaaatacttgtgtttctcaactccgtgtgtctctgtgtgtgtgtgtgtgtgtgtgtgtgcgcacgcacatgcgtgtgcgtgtgtgtgtggtgtctgggagaggagcctcagggtggctgtgctatattttgcacccccttcctcctcctcctgcccc

SEQ ID NO: 402973 - DNA, 201 bp, Homo sapiens
atagtgagatagtagttaaataaattatgacccacttattagctagtatcagccactagttatttgtaataaattttaatcacatgaaaaattactggtgrtatgactaaaaagttttaaaactacttttctttagaaatggtaatctctttataaaaaaacataaaatacaattaatgggatgataaaagcataaccctc

SEQ ID NO: 402974 - DNA, 201 bp, Homo sapiens
aaagcaccaagaacagggccttgtttttacatagcacatgcataagaaatacttgtgtttctcaactccgtgtgtctctgtgtgtgtgtgtgtgtgtgtgtgtgcgcacgcacatgcgtgtgcgtgtgtgtgtggtgtctgggagaggagcctcagggtggctgtgctatattttgcacccccttcctcctcctcctgccc

SEQ ID NO: 402975 - DNA, 201 bp, Homo sapiens
gcttcataatagaaagctaggtctttgaattggccagagatatagctacccaattaattctaataagcagagctggggcctgcattttcacagcccagcargggcaagagtgaggatggcttgatttttgttgttgttaacaatatcccaagagtcaggcgggcctcgtttactgttcttgagatttccacttgtagattg

SEQ ID NO: 402976 - DNA, 201 bp, Homo sapiens
tagccagacttaaaccctctagagagcagggaaccatgatgctgatggtgacggtgatgatgatgatgataaaaattgtagacatcgttagtgccaggtamtgtgctgaacgctgtgtttgagctatctcatcatttcttacagtcatccagtggtaggtacgctgaacttcactttacagaaaaaggcaatagatttgga

SEQ ID NO: 402977 - DNA, 201 bp, Homo sapiens
ttaatgccaacttatagttataccaaacctctgtcctgccttactggacaccagagcatgccacaaacctccatggccttgacagggagaaagggaacaastaccttgataggatctattaacggaggaataatttactgtgtttcttctttgttgttgttgtcatttgtttgttttttttttgagacagagtctggctct

SEQ ID NO: 402978 - DNA, 201 bp, Homo sapiens
ggttgtgtggcctacacagtgtgaagaaacacagttggcataattaaaagtgcaatagacataaacggtccaggaatgtcttactcaatgactgaatttgrtgtcagccagaatacattaaaaatggtctctatttgtcgttttgcttctttcccaaacagttttaagaagttgaaagaattctatagtggtcatctatat

SEQ ID NO: 402979 - DNA, 201 bp, Homo sapiens
acatgactatcaattgggtggagagagacaaactagataaattcgaatactatgtttagtgggattttcgaactagttaccctaagggcctttcctttctrtggatgaatacttttcagctgcagtcccactgctgtgtgtacatctgctatcacctgcttggctttctcctttgactttgggcctggtgctccctcccac

SEQ ID NO: 402980 - DNA, 201 bp, Homo sapiens
gtgtgtgtgtgtgtgtgtgcgcacgcacatgcgtgtgcgtgtgtgtgtggtgtctgggagaggagcctcagggtggctgtgctatattttgcacccccttyctcctcctcctgcccctgcacaggtggactaagcaatgaagagggattctgtccccactgggtggtgaatttgctggaactaaagggcttccttgccacc

SEQ ID NO: 402981 - DNA, 201 bp, Homo sapiens
aaaatgaagtatatactcctttctctgaccattgaccaaattgttttaatacgcatagactggtgacatttgcactggaatcctgtaatagacatagctcwtgtagattccttgttgtatgagcaaggggtgaccttcaatgctgggcttgagaggaatatcttggaagcgaaaagattgaacagagaccccaagagtcaa

SEQ ID NO: 402982 - DNA, 201 bp, Homo sapiens
caacccataccctccatcccacctcttgaacagccgttgccttatccacgtcaggagtcaggagtcttggccctgttcctgtgaacagagaatctcatttyccctaaaatgctgccctcttttaggggtggtcactcattttgtttgcagatggatctctaagcatttcccggacattctttcctgccttggttaaatctt

SEQ ID NO: 402983 - DNA, 201 bp, Homo sapiens; identical to SEQ ID NO: 89343

SEQ ID NO: 402984 - DNA, 201 bp, Homo sapiens
ggactacaggcgcctgccaccatgcccgggtatttttttgtatttttagtagagacgaggtttcaccgtgttatccaggatggtctcaatctcctgacctygtgatctgcctgactccgcctcccaaagtggtgggattacaggagtgagccaccgcgcctggctgattctttctattgattgagataagttagtatacaa

SEQ ID NO: 402985 - DNA, 201 bp, Homo sapiens
tgtgtgtgaacatggaatggggggccttcggggacaatggatgcctagatgacttccgcacagaatttgatgtggctgtggatgagctttcactcaacccsggcaagcagaggtaggcacccaactggggccctgttaagtgtatcccaggactggatggcaacaagtgatcagagcttccacaatggcatctcccaggac

SEQ ID NO: 402986 - DNA, 201 bp, Homo sapiens
attgaagtatacagttggtagttcattaattttcagagctgtatagcgtacctttgagtatgttgttttttctatcgttgaggtgatatttaggttacttytagattttgaccattacaaacagtgctactgtgaacattctggcaaatgtaatgctagaactctggagcaagattttttttcaacattctagagcagggg

SEQ ID NO: 402987 - DNA, 201 bp, Homo sapiens
ttgctggatcaccacacgagttgacgggtagttggggaatgaggagggggctgtaccttttgactcttcaagtatagactgcaagagggtctcacatgacrtggaccatggcgggcctgtggcttcacttcacttaccagtctccactcttgtcgatttcgattgtgattgctaccagtgactcatggtactgggaacggt

SEQ ID NO: 402988 - DNA, 201 bp, Homo sapiens
cggagcaggcgtgtgcatagccgtcccttgttttggcaggcacgggcagcaacgcctgctacatggaagagatgcgccacatcgacatggtggaaggcgaygaggggcggatgtgtatcaatatggagtggggggccttcggggacgatggctcgctcaacgacattcgcactgagtttgaccaggagattgacatgggct

SEQ ID NO: 402989 - DNA, 201 bp, Homo sapiens
tcctgctgcagctgcaggcagacccatggcccctggagacattggctgaggagcttccttggcctccttcacttggaccttggcccaactatgtcctgggrtggattggaggaggggcgtctagcattttggatcctgaatattgtattctccagcctggcctgcctttgtttttagttgcttttatctcttacaaaacct

SEQ ID NO: 402990 - DNA, 201 bp, Homo sapiens
tttactcttagaattcttggtgattcctgcaggtgctatgtcctctgccagggaccaccccagcccagtgagggttaccagcttctctggctgaccttggyattaaattgatcctgccctgtccacattttgatccctcaggtcataggtaccagaatattcacatgtcagctgagacctggaagatgtctctttattgtg

SEQ ID NO: 402991 - DNA, 201 bp, Homo sapiens
gctactggcctggacatttttcactgtttcatatccacagctgtttcatatcttctctcttagtctcctcatgtgatggagaggaaaataaggtcccaggktcatccaagaaaccacagggcaggctgggagtgcccatccacactaagaggggcccacaggacaggcgagggtggctgtcctgacggcctggcagtgggg

SEQ ID NO: 402992 - DNA, 201 bp, Homo sapiens
catccctgtttaactgaggcccaggggtaacttgcccaaggtctccagcttttctgtacgagctgggaatcgaagccatgcatttggctttagagcaccaygctcttgagcacatacttgcctgtctctggggaatgtgagcgggctcctggcccgggcctctgcccactcctggctgctggtagcacccccacccatcat

SEQ ID NO: 402993 - DNA, 201 bp, Homo sapiens
tttaattttgggtctttcccagacagcagctagtgaaatgagtgatagaacaagacagataggtggcatcagaaccacctaataccacagggctgctccakcaaagaggctgatggtaccatgttgggcaagggagcagtggccagggggccttcttcagtgaggaagaggaggtcttgtgtggctgcatgtaggggacag

SEQ ID NO: 402994 - DNA, 201 bp, Homo sapiens
aggcagtcacccaagacactcatggatgccagcacagctgtaagggctccctctcagccggagctcaggctgttctggttgtattttatacccaacatgtwctcagtattaaaaggagtgactagagaagaagcatgaaatccaagtaagacgctgttcagtgttgtcacatctcgggcctcagggcttggaagaggtcaa

SEQ ID NO: 402995 - DNA, 201 bp, Homo sapiens
cagtggcttattaaaaggtcttttcctttcattggcgggggtgaaccaatcctgggtggtcatagttgatatggttcttgtagtggttcctaacttgggasagtggagagaggatgtttagggcagcacccactcctgcaggtgccttttggcatttggattaaggcggtgggcaactgtctaactatttgcaccattgac

SEQ ID NO: 402996 - DNA, 201 bp, Homo sapiens
tcggagctgggattcaaacccaggaattcaggttctagaatctgctcttgcaatcaccacattggtctgagtcagggttggcaaactatggcccatgggcwgaatctggcccaccacctgtttttgtacataaggttttattacacagccatgcccatgcgtctgcacgttgcttatggttgttttgcactgtcttggcaa

SEQ ID NO: 402997 - DNA, 201 bp, Homo sapiens
aagattctttctatttttttttttttttttttgagacggagtctcgctctgtcgcccaggctggagtgcagtggcgcaatctcagctcactgcaaactccrcctcccgggttcacgccattctcctgcctcagcctcccgagtagctgggactacaggcgcctgccaccatgcccgggtatttttttgtatttttagtaga

SEQ ID NO: 402998 - DNA, 201 bp, Homo sapiens
tgtgtcctgcctatggagagatagaagattctttctatttttttttttttttttttgagacggagtctcgctctgtcgcccaggctggagtgcagtggcgsaatctcagctcactgcaaactccgcctcccgggttcacgccattctcctgcctcagcctcccgagtagctgggactacaggcgcctgccaccatgcccgg

SEQ ID NO: 402999 - DNA, 201 bp, Homo sapiens
gctggagtgcagtggcgctatctctgcttagtgcaacctctgcctcccaggttcaagcgattctcctgcctcagcctcctgagtagttgggattacaggcrtgcgccaccatgcccagctattttttgtatttttagtagagacagggtttcaccatgttggccaggatggtctcgatctccttaccttgtgatccacctg

SEQ ID NO: 403000 - DNA, 201 bp, Homo sapiens
gtgtcttccggcaggtttgagaagatgatcagtgggatgtacatgggggagctggtgaggcttatcctggtgaagatggccaaggaggagctgctctttgrggggaagctcagcccagagcttctcaacaccggtcgctttgagaccaaagacatctcagacattgaagggtgagcttctggccagccccctctatttgct

SEQ ID NO: 403001 - DNA, 201 bp, Homo sapiens
tgggatgtacatgggggagctggtgaggcttatcctggtgaagatggccaaggaggagctgctctttggggggaagctcagcccagagcttctcaacaccrgtcgctttgagaccaaagacatctcagacattgaagggtgagcttctggccagccccctctatttgctggatcaccacacgagttgacgggtagttgggg

SEQ ID NO: 403002 - DNA, 201 bp, Homo sapiens
cacccccttcctcctcctcctgcccctgcacaggtggactaagcaatgaagagggattctgtccccactgggtggtgaatttgctggaactaaagggcttycttgccaccccccgacacacacactggccacagtgggtcagacacaggcccacatgctgtctttctgtttcccagggagaaggatggcatccggaaggcc

SEQ ID NO: 403003 - DNA, 201 bp, Homo sapiens
tgtccccactgggtggtgaatttgctggaactaaagggcttccttgccaccccccgacacacacactggccacagtgggtcagacacaggcccacatgctrtctttctgtttcccagggagaaggatggcatccggaaggcccgtgaggtcctgatgcggttgggcctggacccgactcaggaggactgcgtggccactca

SEQ ID NO: 403004 - DNA, 201 bp, Homo sapiens
aatttaccattttaaccattttaagtgtacaatttagtggcattaagtgtgttattcacattgctgtgcaactaccaccactattcatttccagaattaawttcttgtaaaattatgtttctgtacactagtgctttgtatttaatagctgttccataaatgccataacatggaagatgctggggttgcaacagtagtcag

SEQ ID NO: 403005 - DNA, 201 bp, Homo sapiens
  misc_feature (1)...(201): n = A,T,C or G
ggcagcacccactcctgcaggtgccttttggcatttggattaaggcggtgggcaactgtctaactatttgcaccattgaccctaaccatggacacctgtcncttacccgccctggggaactgcagttttgccaagcgtctacataagaccgtgcggcggctggtgcccggctgcgatgtccgcttcctccgctccgaggat

SEQ ID NO: 403006 - DNA, 201 bp, Homo sapiens
tgaggagcttccttggcctccttcacttggaccttggcccaactatgtcctgggatggattggaggaggggcgtctagcattttggatcctgaatattgtrttctccagcctggcctgcctttgtttttagttgcttttatctcttacaaaaccttatttcaccctcacaaacatttgccaaatgtgcgtgtgaaagatct

SEQ ID NO: 403007 - DNA, 201 bp, Homo sapiens
gtgaggtgctcagtgagtacaagagtaaaggaggagacctttctggagaaagaagctaaaccagggctgcaggaagtggaggagctgggcagggccagctmgtcttaggccaaagggatggtatatgggtggacacttggaggggtagttcgcagttatctcttcatccaaagcatgacctgaggccaaagcatgacctga

SEQ ID NO: 403008 - DNA, 201 bp, Homo sapiens
acttccttcgtaaatagcatataaatacagttcagaccacccagagcagcagagcagaaataaagcacgagtctaatgctgcttggttagttcctgccctrcaaacccatgaacagcagcgagaaaatggacatgaaagagctttgtaactgaccactgtgataaacagtgaatttgctttgttttgagtatctactttgt

SEQ ID NO: 403009 - DNA, 201 bp, Homo sapiens
caaaagtcagtttagtggcaaacacattcatgtctatagtgtttactaaaagcacattatgggcagttgtcattttaagggcaaacagagcattctcatgmaagtttgtgctaagcctggcctgaggtcatgcaaagtgatattgttgggttttagaccatgtatcaaaggtagaaagatacctgctcatagcatgtaaat

SEQ ID NO: 403010 - DNA, 201 bp, Homo sapiens; identical to SEQ ID NO: 89347

SEQ ID NO: 403011 - DNA, 201 bp, Homo sapiens
taagagcaaataaagcagaagtcatttcttcctgtgggctctggcaagaccctcctgtgatggggaaatcccaccagtgcagaggcccctggggttagagrccccagggctctgtggcccccagctgtgtttcccagctgttgggcctccacttgcctcatcagtaaggatcacctgaaattatgttatttgaacatcccg

SEQ ID NO: 403012 - DNA, 201 bp, Homo sapiens
tcaaagccgtcaagcatctgctcccagaggaccacattgaaggcaaggggccactgaggatgctgaggaggagcctggagttgttttcctcactgaaagayatggggtggtggtgaagcctagctgtcacccagctgtgggcaaagcacttgttcgccagatgctggagtttgaaaattaggagacatacactgacccttc

SEQ ID NO: 403013 - DNA, 201 bp, Homo sapiens
caggtgctgttaagagctgtgaaacacacacacacacacacacacacacacacacacacacacagtaaaggaataaaagaatggccactccataagcaaarcagccatgagggctgctggttgcacatttttatggttatttcttgattatatgctaaacaaggggtgtattattcatgccttccctttttagaccatata

SEQ ID NO: 403014 - DNA, 201 bp, Homo sapiens
  misc_feature (1)...(201): n = A,T,C or G
atgacctgtggctttgaagaccctcactgtgaagttggcctcattgttggtaaggacccagactgtcctttccacatggggatgcacagccttgggtgtgnaggggttggtgctgagtgaggccctggtatcctgtgattggcaggcacgggcagcaatgcctgctacatggaggagatgcgcaacgtggaactggtggaa

SEQ ID NO: 403015 - DNA, 201 bp, Homo sapiens
acagccttgggtgtggaggggttggtgctgagtgaggccctggtatcctgtgattggcaggcacgggcagcaatgcctgctacatggaggagatgcgcaaygtggaactggtggaaggagaagaggggcggatgtgtgtgaacatggaatggggggccttcggggacaatggatgcctagatgacttccgcacagaatttg

SEQ ID NO: 403016 - DNA, 201 bp, Homo sapiens
cagggagaaagggaacaagtaccttgataggatctattaacggaggaataatttactgtgtttcttctttgttgttgttgtcatttgtttgttttttttttgagacagagtctggctctattgcccaggctggggtacagtggcgagatctcagttcactgcaacctccacttcctgggttctagtgattctcttgcctca

SEQ ID NO: 403017 - DNA, 201 bp, Homo sapiens
gctaagagacaatagcttaagatctaacacacttctcattaagatgttgtctgtagtgtttcctaactagattaatcaaacaccctagtcctgcagaataygctttgcaaaacatgtgtctagaatagaagttacagactaaaatgcctctaggggccaggcaggcaacattaatgaaggaagcaggctgggtcaagataa

SEQ ID NO: 403018 - DNA, 201 bp, Homo sapiens
catacaaaagtcagtttagtggcaaacacattcatgtctatagtgtttactaaaagcacattatgggcagttgtcattttaagggcaaacagagcattctyatgaaagtttgtgctaagcctggcctgaggtcatgcaaagtgatattgttgggttttagaccatgtatcaaaggtagaaagatacctgctcatagcatgt

SEQ ID NO: 403019 - DNA, 201 bp, Homo sapiens
gctcattagagcaaagcctccctcctacagtcaaatggtggaaaatctccaaattagaacagtgaatttcagagccctttaaaaattaatgctgtgccatyactctcagggcagagaagaacaggaactagacaactgatgtgagtagacccctcgggcatctgcaccagtgaatagaaagatatattctagcttataggt

SEQ ID NO: 403020 - DNA, 201 bp, Homo sapiens
ctctgctcaccaccctgtgtcatgtatccttagctgtttgaccacattgccgaatgcctggctaacttcatggataagctacaaatcaaagacaagaagcycccactgggttttaccttctcgttcccctgccaccagactaaactagacgaggtaagatgggctcctcagacacttgttgcttcactcttggggctggga

SEQ ID NO: 403021 - DNA, 201 bp, Homo sapiens
tgttaagagctgtgaaacacacacacacacacacacacacacacacacacacacacagtaaaggaataaaagaatggccactccataagcaaaacagccaygagggctgctggttgcacatttttatggttatttcttgattatatgctaaacaaggggtgtattattcatgccttccctttttagaccatatagagttta

SEQ ID NO: 403022 - DNA, 201 bp, Homo sapiens
ttctggccagccccctctatttgctggatcaccacacgagttgacgggtagttggggaatgaggagggggctgtaccttttgactcttcaagtatagactscaagagggtctcacatgacgtggaccatggcgggcctgtggcttcacttcacttaccagtctccactcttgtcgatttcgattgtgattgctaccagtga

SEQ ID NO: 403023 - DNA, 201 bp, Homo sapiens
ttggttgaaactagggacctcgtttttttttcaaggcaggattcaggaccaaaagaccctcaagccactgcataataacgtttagttccagtggccaggawgggggccctacagctggcagtagttacttgagtaatgatggttaggtccaagagaatgtatactgaatgcctagtgaggttaaagattaagactcagcat

SEQ ID NO: 403024 - DNA, 201 bp, Homo sapiens
cagtggccaggatgggggccctacagctggcagtagttacttgagtaatgatggttaggtccaagagaatgtatactgaatgcctagtgaggttaaagatkaagactcagcattctcccctgctccgagaagtccagtggggttatggtgtgttccttctcgagttgcttcttgaaatttcgaaataagccttggaaagga

SEQ ID NO: 403025 - DNA, 201 bp, Homo sapiens
tcactgcaacctccacttcctgggttctagtgattctcttgcctcagcctcccaagtaactgggattacagggctacgccaccatgcccggcaaatttttrtattattagtagagacagggtttcaccatgttgaccaggctggtctcaaactccagacctcaagtaatctgcccgccttggcctcccaaagtgctgggaa

SEQ ID NO: 403026 - DNA, 201 bp, Homo sapiens
aggaataatttactgtgtttcttctttgttgttgttgtcatttgtttgttttttttttgagacagagtctggctctattgcccaggctggggtacagtggygagatctcagttcactgcaacctccacttcctgggttctagtgattctcttgcctcagcctcccaagtaactgggattacagggctacgccaccatgccc

SEQ ID NO: 403027 - DNA, 201 bp, Homo sapiens
cctcagtacagcagatggcacttacattgtcaggcgttgtgccaaacgccttacacttccttgcactgaatcttgacaaggtgcgtgtgtgtatgtgtgcrtgtatatgtgtgtgttttcctgtgttcttgttctgggttgtggagggaggtgctgactagaaggaggttatcgttacccttttaaaacagatgatgaaat

SEQ ID NO: 403028 - DNA, 201 bp, Homo sapiens
ttccacttaccttctgccatgattgtaagtttcctgaggcctccccagccatgcttcctgtgcatcttgcagaacgattagtcaattaaacctcttttctyataaattacccaatctcaggcagttctttgtagcaatggaaggatggataaacacactttttttagtgtataatttaacgcaggtatttgcactagaatg

SEQ ID NO: 403029 - DNA, 201 bp, Homo sapiens; identical to SEQ ID NO: 89332

SEQ ID NO: 403030 - DNA, 201 bp, Homo sapiens
tcgatctcctgatctcatgatccgcccacctcggcctctcaaagtgctgggattacaggcatgagccactgtgcctggcctataacaatactgattccaamcacctcccaggattactgggaactttgtaagagataacatgtacttaaagttccttatgattattatccggttcacatgaaatgggaccacagaggggag

SEQ ID NO: 403031 - DNA, 201 bp, Homo sapiens; identical to SEQ ID NO: 89333

SEQ ID NO: 403032 - DNA, 201 bp, Homo sapiens
aggggcgcgctcagaattgagtttctgaaatgcccgggattaggggattggctcctggcccgggcctgggctacgatttgaggtaggggacaagttgggargggattagctggagggaggttgttttaagagctgtgaggcaacggagcgttgctcagttacatacttggaatttcaatatctgatgggaacacatttttg

SEQ ID NO: 403033 - DNA, 201 bp, Homo sapiens
tgcctagtgaggttaaagattaagactcagcattctcccctgctccgagaagtccagtggggttatggtgtgttccttctcgagttgcttcttgaaatttygaaataagccttggaaaggaaatgagttcctttccctgtgggttcctttccaaggcttatttccccaggagccccacgggcctcgggcactgtggtcagt

SEQ ID NO: 403034 - DNA, 201 bp, Homo sapiens; identical to SEQ ID NO: 89342

SEQ ID NO: 403035 - DNA, 201 bp, Homo sapiens
gggactttatgtttttggtttgtgtcttccggcaggtttgagaagatgatcagtgggatgtacatgggggagctggtgaggcttatcctggtgaagatggycaaggaggagctgctctttggggggaagctcagcccagagcttctcaacaccggtcgctttgagaccaaagacatctcagacattgaagggtgagcttct

SEQ ID NO: 403036 - DNA, 201 bp, Homo sapiens
gccgatcaacaccgtgcccgccagaagacattagagcatctgcagctgagccatgaccagctgctggaggtcaagaggaggatgaaggtagaaatggagcraggtctgagcaaggagactcatgccagtgcccccgtcaagatgctgcccacctacgtgtgtgctaccccggacggcacaggtacacggcagggttgccac

SEQ ID NO: 403037 - DNA, 201 bp, Homo sapiens
tctatttgctggatcaccacacgagttgacgggtagttggggaatgaggagggggctgtaccttttgactcttcaagtatagactgcaagagggtctcacrtgacgtggaccatggcgggcctgtggcttcacttcacttaccagtctccactcttgtcgatttcgattgtgattgctaccagtgactcatggtactggga

SEQ ID NO: 403038 - DNA, 201 bp, Homo sapiens
ttctgccccaacttatcacttccctgggcttattttccagagaaaggggacttcttggccttggaccttggaggaacaaatttccgggtcctgctggtccrtgttcggaatgggaagtggggtggagtggagatgcacaacaagatctacgccatcccgcaggaggtcatgcacggcaccggggacgaggtgagcagggcg

SEQ ID NO: 403039 - DNA, 201 bp, Homo sapiens
tttagtagagatggggtttctcatgttggtcaggttggtctcgaactcctgacctcaggtgatccgcccgcttcagcctcccaaagtgctaggattacagstaccgcgcccgctgccacagtgcatattaaggaattaaaggctcagaagtcctgcaatacaaacctattaagctttgtttaatcatcttatttggataca

SEQ ID NO: 403040 - DNA, 201 bp, Homo sapiens
ggacaactggagcgataccctgtcaaaaaaaaaaaagataaaaagattaggaggtggctagaggcccgatcatgtggggccctgaaaggattttgagctttgttccaatggaaagccctgaaagccggggatcagcggagtctggctgggtgtggaaagtggatggaagaggtaaaagcggaactggggattgtaggcgtc

SEQ ID NO: 403041 - DNA, 201 bp, Homo sapiens
taagatgaggtctacagttcacagcagtctgcagatgcccacagttccttgctggggggcaggtttccagggaacgggagctagttgctgtttctgtattytcaaccagagaaatgtgggcaatacaagtgctccagaaagccagcaagaggagtttagtcagttgcccttggaagatgctcaccctggtgctgctgtagt

SEQ ID NO: 403042 - DNA, 201 bp, Homo sapiens
atttcatattcttctgctgtggagtttgtcagttaaatacttgctcactcatcctcacatctctcccagacctggctttccacaggggaaatcatttgcartgccctgtgctgaagagtcacaggacccgccatgataggtttggccccaccgacccctggaatttcacagaagggaatggccattctcacattctttcgg

SEQ ID NO: 403043 - DNA, 201 bp, Homo sapiens
agggcattcgaaactgccacttttccttctttcccatttgagggacttcctcttcctgcttcctgtttcctcccaaacttttctgtctcagtcccctccaygaagtcctgtagcctcttcccatcagctctgtgtgtagtaactcaggccaccctcaagctgccctccaggtaggtcctgttattatctattattcaaatg

SEQ ID NO: 403044 - DNA, 201 bp, Homo sapiens
gggtgtgatcttggggtggatggggcagactgggacagacccagaggtatttgatccagcaagtggaccgctggcagcagacaggagtggggagttcagaygccactgtggggcaagaggctcagaggcagattctggtccctggcctggggctgtcgaggggtaggcagagtctgacttctagggacctagcatcctagg

SEQ ID NO: 403045 - DNA, 201 bp, Homo sapiens
gaggctcagaggcagattctggtccctggcctggggctgtcgaggggtaggcagagtctgacttctagggacctagcatcctaggcagggcagacaggtgkactgggaggaaaccatgctgctgcggggatcccatgcagtgtgggcgccagcctgaagagcaaggcccgacacagagcacctggtcagtcgggagtagcc

SEQ ID NO: 403046 - DNA, 201 bp, Homo sapiens
aaatatgtagtttcaggacagtgtggggtgagaggtgagaatcagaattataggttcaaatgggtttgaattcaagctgtgtgcttcagagcgatttatgmtgtgatcctctatttcctcatttgtgaaaaggggaaacttcagggggatcggttttctgagaattaagggagaatcagatatgtgactttctcacatgtg

SEQ ID NO: 403047 - DNA, 201 bp, Homo sapiens
cacatgggaaactgaaagcagcaggtaaccaccatccagatccagtaacagatcattacctgaaccagccccgtgttctcctacccaccaccaccatcaartgtaatcactgtcctgactaacagcataggtctgtttttgtacttaatataaatagactcatacaggatataaaagatgccatttgtgtctggcattttt

SEQ ID NO: 403048 - DNA, 201 bp, Homo sapiens
acagaaggctcgaggccttttctccaggggcacctgttcagtgccacctttctcagaacattcgtttctcagcccgttcatggctagtattcttttcaaayctgagaaaccaaaccccagatctagagggagccaatttttaaatccatagctttctaacttttctgggctatatcttcacagcaagaaacacatgcatat

SEQ ID NO: 403049 - DNA, 201 bp, Homo sapiens
gtaatgggagataaacccttggtgttcattggatggtgtcttagttcatttttgtgttgctgtaaagtgggacatatgtatatatgacaactcagcaattmcacttccaactatatgccctgaacagactcctgtatgaatccaaggagacatggctgaataatgttcattacagtgttgcttaatcgcacctataatccc

SEQ ID NO: 403050 - DNA, 201 bp, Homo sapiens
aatggagaccagattgcaggaaacccacacctaatccctccctccgcatttgcagggggtccataggttagctcctcacctccatactctctgggactcakcctttgcttttgtaaagtaaagaggttggacctagcagttctagtctgttctgcacatctactagaactattgtgctagtctattcacacaaacacttct

SEQ ID NO: 403051 - DNA, 201 bp, Homo sapiens
gagaaaatgatcagtggaatgtacctgggtgagattgtccgtaacattctcatcgatttcaccaagcgtggactgctcttccgaggccgcatctcagagcrgctcaagacaaggggcatctttgaaaccaagttcttgtctcagattgagaggtgagagcttagggctcagggtagcaggggggccatgtccttttttctc

SEQ ID NO: 403052 - DNA, 201 bp, Homo sapiens
atcgcggacttcctcgagtacatgggcatgaagggcgtgtccctgcctctgggttttaccttctccttcccctgccagcagaacagcctggacgaggtaayagcaccttcctggagggctctcctgtgggctttattgactctaaacaaaaccagccaggtatggagcaggggagaaagttgagctaagactaaggaaagg

SEQ ID NO: 403053 - DNA, 201 bp, Homo sapiens
tgatgtgtcagctcctcaatgattggcctggtctgtgtgttcagaaagtgaaggcaacagtaagtgtggctgcatgggttgggaggaagattaactcaagygtcgttcagcagtttagtgtgcactgtgtgtcaagcaatgctctcagcactggcggttcaggagtgaccacaacaaagctttgttctataaagtccatga

SEQ ID NO: 403054 - DNA, 201 bp, Homo sapiens
ctcctgaagctctgcctgtgtgggtgcactaacatttaaaatgcgcgctgtcatcttcacaattttgccagctctcagttagccctgatgctgctgtactyggccttgggtcttgagcaggctgcttcctggaggcctgggtttcctctcggaaaggtaaccttggaatcccttccacatctcagtcctgggcctcctcct

SEQ ID NO: 403055 - DNA, 201 bp, Homo sapiens
caggggggccatgtccttttttctcactggcagacaaactgaaggatttccataactcagggcatgactcatacaaaagtcagtttagtggcaaacacatkcatgtctatagtgtttactaaaagcacattatgggcagttgtcattttaagggcaaacagagcattctcatgaaagtttgtgctaagcctggcctgaggt

SEQ ID NO: 403056 - DNA, 201 bp, Homo sapiens
gtgtcagatttctaataaattgcccaaagccacatggctaatgcatgttagagtgggatttgaacccaggtctgcctgcctaaaaagctgaacatgctcaragcttacacaatattgaaacataatcatgttttaaccctttgaagagtggtttcacatctgtggggctaattacacctctctgtgactggcacgtatttt

SEQ ID NO: 403057 - DNA, 201 bp, Homo sapiens
gcagtgagtcgagattgcgccactctactccagcctgggtgacagggtgagactcagcctcaaaacaacaacaacaacaacaacaacaacaacaacaacaacaaaattagccagacatggtggcacgtgcctgaaagtcccagctgctcaggaggctgaggtgggaggatcacctgaggctggctgagatctcatcactgc

SEQ ID NO: 403058 - DNA, 201 bp, Homo sapiens
cctgacagtctccggttccagctggagacgtcactgaagcggctgcagtgtccccgagtggacctcttctacctgcatatgccagaccacagcaccccggkggaagagacactgcgtgcctgccaccagctgcaccaggaggtgaggggacccctgagctctgggaggtggtccactgctgctctccttatcctgatccta

SEQ ID NO: 403059 - DNA, 201 bp, Homo sapiens
aggttctatgccttcaaccctctggctggtacgtggagcattcctggccctgtctcagcctattcccgacccacagatgcccagcccaggacctgggaagmaaggagggtttgacaaactttgacctctcaggtcaaagacgtaaaggctgcatcttcagccctcctgggtccctgcccctcccctagaccagagccctga

SEQ ID NO: 403060 - DNA, 201 bp, Homo sapiens
tcccaaatctcagcagggaggtggctgggacggctgtgagtggagtcgctgtgcagcagaagagggttgaagtctggccgtctcccttgcagggtgcccayggggacgcggtcatcctgggcatgtccagcctggagcagctggagcagaacttggcagcggcagaggaagggcccctggagccggctgtcgtggacgcct

SEQ ID NO: 403061 - DNA, 201 bp, Homo sapiens; identical to SEQ ID NO: 89397

SEQ ID NO: 403062 - DNA, 201 bp, Homo sapiens; identical to SEQ ID NO: 89400

SEQ ID NO: 403063 - DNA, 201 bp, Homo sapiens; identical to SEQ ID NO: 89402

SEQ ID NO: 403064 - DNA, 201 bp, Homo sapiens
gagcttcattgcagggatttcattattccttcagctttatgaaatgactatcccagtgttattgacgaggaaactgagtttcacccagctatgaaaggggmagacattttaacacaggtttaactgtaaagcccactagtctcatccttttggtgggagctggagtttccctctctcagtgcctcatgtcttcctcactta

SEQ ID NO: 403065 - DNA, 201 bp, Homo sapiens
ctttgatggtatctgagtgccaggctttgtaatgagagcttcattgcagggatttcattattccttcagctttatgaaatgactatcccagtgttattgaygaggaaactgagtttcacccagctatgaaaggggcagacattttaacacaggtttaactgtaaagcccactagtctcatccttttggtgggagctggagt

SEQ ID NO: 403066 - DNA, 201 bp, Homo sapiens
aaatgtgttttggcaatgccgcgggtgctggaggaggcaggtgtggccggaggggaggatgtgtgtataggggcaggaggagccgccctcagtctgatgcsatttgcagtgcttaggccgatgcctggcaggcacatagtgagggctgggaaatgttagctgtttgtttgttcttagtattagcaccatttgcctccttcc

SEQ ID NO: 403067 - DNA, 201 bp, Homo sapiens
ggggtcagctttatgtggaatgaagtcctgggctgctcctggggtaaggcctttcctcgctgctgcacctactcccctgaatttcttcgggaatttccaarccctccatcggttttcttgttgtcttgggacctccaggaggaaaggagactccctggacctcggggtcttgaagtcgttgctctttcctgagcaatcacc

SEQ ID NO: 403068 - DNA, 201 bp, Homo sapiens
ggggtggggtcagctttatgtggaatgaagtcctgggctgctcctggggtaaggcctttcctcgctgctgcacctactcccctgaatttcttcgggaattyccaaaccctccatcggttttcttgttgtcttgggacctccaggaggaaaggagactccctggacctcggggtcttgaagtcgttgctctttcctgagcaa

SEQ ID NO: 403069 - DNA, 201 bp, Homo sapiens
gatggctggggtggggtcagctttatgtggaatgaagtcctgggctgctcctggggtaaggcctttcctcgctgctgcacctactcccctgaatttcttcrggaatttccaaaccctccatcggttttcttgttgtcttgggacctccaggaggaaaggagactccctggacctcggggtcttgaagtcgttgctctttcc

SEQ ID NO: 403070 - DNA, 201 bp, Homo sapiens
cttggtgtggatggctggggtggggtcagctttatgtggaatgaagtcctgggctgctcctggggtaaggcctttcctcgctgctgcacctactcccctgmatttcttcgggaatttccaaaccctccatcggttttcttgttgtcttgggacctccaggaggaaaggagactccctggacctcggggtcttgaagtcgtt

SEQ ID NO: 403071 - DNA, 201 bp, Homo sapiens
agggatgtggcagcttctggggcactctaggccccggggctgattgctgctttccctcagggggcctgctgaccggcaagtacaagtatgaggacaaggaygggaaacagcccgtgggccgcttctttgggaatacctgggcagagatgtacaggaatcggtaagctgtgggtgcttggtgtggatggctggggtggggtc

SEQ ID NO: 403072 - DNA, 201 bp, Homo sapiens
gtttacctcctcatgattcattgcacaaatatttgcacacctgcttggtgccaggcactggtcacagaactttctagtctattatgattgcctcatgactygattataactgtttatacttgaccttattataaaaccttgagggaagggaccctgtccttttggcttaagaatctaaatctgacaaccagcccatagttg

SEQ ID NO: 403073 - DNA, 201 bp, Homo sapiens
gtgagagagggagcaagagacagacaggggaggaaattccaggctcttttaaacaaccagatcctgtgtgaactcatagagctggaactcactcattactrtacagatggcaccaagccattcatgtgggatttgcccccataccctaacccctcccaccaggctcacctctaacattggggatcacattgcaacatgaga

SEQ ID NO: 403074 - DNA, 201 bp, Homo sapiens
tgaagcctgacagtctccggttccagctggagacgtcactgaagcggctgcagtgtccccgagtggacctcttctacctgcatatgccagaccacagcacyccggtggaagagacactgcgtgcctgccaccagctgcaccaggaggtgaggggacccctgagctctgggaggtggtccactgctgctctccttatcctga

SEQ ID NO: 403075 - DNA, 201 bp, Homo sapiens
atgaaggctgaaacatttgtttatcgattcctctgaaatttctctttctttcaactctcacaaacattcttcccactggtctttttctatgtttttttttkggggggacagagtctcactctgtcacccaggctggagtgcagtggcatgatctcgggtcactgcaacttctgcctcttgggccgaagcaactctcttgtc

SEQ ID NO: 403076 - DNA, 201 bp, Homo sapiens
cctttcctcgctgctgcacctactcccctgaatttcttcgggaatttccaaaccctccatcggttttcttgttgtcttgggacctccaggaggaaaggagwctccctggacctcggggtcttgaagtcgttgctctttcctgagcaatcacctgctaggaaggaaagaaggagctctggagggaggtccaggaggcctggg

SEQ ID NO: 403077 - DNA, 201 bp, Homo sapiens
catgggtacagctatccaaggcaccttaagttctttctggacatatgggatacaagagatcccaaatctcagcagggaggtggctgggacggctgtgagtrgagtcgctgtgcagcagaagagggttgaagtctggccgtctcccttgcagggtgcccacggggacgcggtcatcctgggcatgtccagcctggagcagct

SEQ ID NO: 403078 - DNA, 201 bp, Homo sapiens
cggcaggtggaaacggagctcttcccctgcctcaggcactttggactgaggttctatgccttcaaccctctggctggtacgtggagcattcctggccctgwctcagcctattcccgacccacagatgcccagcccaggacctgggaagcaaggagggtttgacaaactttgacctctcaggtcaaagacgtaaaggctgca

SEQ ID NO: 403079 - DNA, 201 bp, Homo sapiens
tgagggatgtggcagcttctggggcactctaggccccggggctgattgctgctttccctcagggggcctgctgaccggcaagtacaagtatgaggacaagratgggaaacagcccgtgggccgcttctttgggaatacctgggcagagatgtacaggaatcggtaagctgtgggtgcttggtgtggatggctggggtgggg

SEQ ID NO: 403080 - DNA, 201 bp, Homo sapiens; identical to SEQ ID NO: 89404

SEQ ID NO: 403081 - DNA, 201 bp, Homo sapiens; identical to SEQ ID NO: 89405

SEQ ID NO: 403082 - DNA, 201 bp, Homo sapiens
tacgtggagcattcctggccctgtctcagcctattcccgacccacagatgcccagcccaggacctgggaagcaaggagggtttgacaaactttgacctctsaggtcaaagacgtaaaggctgcatcttcagccctcctgggtccctgcccctcccctagaccagagccctgagggatgtggcagcttctggggcactctag

SEQ ID NO: 403083 - DNA, 201 bp, Homo sapiens
ctggggtaaggcctttcctcgctgctgcacctactcccctgaatttcttcgggaatttccaaaccctccatcggttttcttgttgtcttgggacctccagkaggaaaggagactccctggacctcggggtcttgaagtcgttgctctttcctgagcaatcacctgctaggaaggaaagaaggagctctggagggaggtcca

SEQ ID NO: 403084 - DNA, 201 bp, Homo sapiens; identical to SEQ ID NO: 89406

SEQ ID NO: 403085 - DNA, 201 bp, Homo sapiens; identical to SEQ ID NO: 89393

SEQ ID NO: 403086 - DNA, 201 bp, Homo sapiens
tgcctggcccttatttctgatttttttttctttccttttttaatccttctttgtcttctgtctgagtccaaggttggctggcgaaagtcctcagatctgayctgaagttaaattcaattgagaagcagaggggtggtggtggaatggaaaaattccatatgaatagttcctcaaacctgctctttgctaggcctcaagggc

SEQ ID NO: 403087 - DNA, 201 bp, Homo sapiens; identical to SEQ ID NO: 89394

SEQ ID NO: 403088 - DNA, 201 bp, Homo sapiens
acccggctaattttttgtattattcattgaaactggagtctcactttgttgcccaggctggtcttaaacccctgagctcaagtgatcctcctgctctggcytcccaaagtgctgagattacaggtgtgagccaccacagatctgtaccctctgcctggcccttatttctgatttttttttctttccttttttaatccttct

SEQ ID NO: 403089 - DNA, 201 bp, Homo sapiens
acctggcctgtgcgtgcatcccagtgccacgctctttctagatcacccggctgccactcagtgagagctctaaccatatttctgattttttttttttttttgagacagggtcttgcttttttgcccaggctggagtggagtggtgcgatatggctcattgcagctttgacctctcagggctcaagccatcctcccacctca

SEQ ID NO: 403090 - DNA, 201 bp, Homo sapiens
cattattccttcagctttatgaaatgactatcccagtgttattgacgaggaaactgagtttcacccagctatgaaaggggcagacattttaacacaggttyaactgtaaagcccactagtctcatccttttggtgggagctggagtttccctctctcagtgcctcatgtcttcctcacttatatccaactccagccttaga

SEQ ID NO: 403091 - DNA, 201 bp, Homo sapiens
ctcttcccctgcctcaggcactttggactgaggttctatgccttcaaccctctggctggtacgtggagcattcctggccctgtctcagcctattcccgacmcacagatgcccagcccaggacctgggaagcaaggagggtttgacaaactttgacctctcaggtcaaagacgtaaaggctgcatcttcagccctcctgggt

SEQ ID NO: 403092 - DNA, 201 bp, Homo sapiens
gacttaagcaatcctcccttctcaggctcccaaagtgctaacattacaggtgtgggctagtatgtcacccactgtgtgggccagtattctttgttttgcartctactttgtctgatattcacttagccattccaacttcttaaaatttagttttgtcagtgtatgtcttttcccatctttttgctcttaaactatctctgc

SEQ ID NO: 403093 - DNA, 201 bp, Homo sapiens
gctggggggcagaactgggctgtgaatgtaggtctgtctggaagcgtcgtgtggcagtaggggaagggatacaggttttgcgtcacatgggtacagctatycaaggcaccttaagttctttctggacatatgggatacaagagatcccaaatctcagcagggaggtggctgggacggctgtgagtggagtcgctgtgcagc

SEQ ID NO: 403094 - DNA, 201 bp, Homo sapiens
ctgccactcagtgagagctctaaccatatttctgattttttttttttttttgagacagggtcttgcttttttgcccaggctggagtggagtggtgcgatakggctcattgcagctttgacctctcagggctcaagccatcctcccacctcagtctcctgagtagctgggactactacagtagcaccacacccggctaattt

SEQ ID NO: 403095 - DNA, 201 bp, Homo sapiens
gcttctggggcactctaggccccggggctgattgctgctttccctcagggggcctgctgaccggcaagtacaagtatgaggacaaggatgggaaacagccygtgggccgcttctttgggaatacctgggcagagatgtacaggaatcggtaagctgtgggtgcttggtgtggatggctggggtggggtcagctttatgtgg

SEQ ID NO: 403096 - DNA, 201 bp, Homo sapiens
cacctactcccctgcattccttcaggaattcccaagccctctgtgggttttcttgttgtcttgggacctccaggaggaaaggagactccctggacctcggkgtcttgaagtcgtagctctttcctgagcaatcacccgctacaaaggaaagaaagagccctggaaggaggtccaggaggcctggggctgagtcctgacctg

SEQ ID NO: 403097 - DNA, 201 bp, Homo sapiens
tcagccctcctgggtccctgcccctcccctagaccagagccctgagggatgtggcagcttctggggcactctgggcctgggggctgattgctgccttccckcagggggcctgctgaccggcaagtacaagtatgaggacaaggacgggaaacagcccgtgggccgcttctttgggactcagtgggcagagatctacaggaa

SEQ ID NO: 403098 - DNA, 201 bp, Homo sapiens
aggcgcccgtcaccatgcccagctaattttttgtatttttagtagagacggggtttcaccgtgttagccaggatggtctccatctcctgacctcgtgatcygcctgcctcggcctcccaaagggctgggattacaggcatgagccaccgtgcccggcctgagcctgggctgatcttgagtctttgggctcaagcaatccgc

SEQ ID NO: 403099 - DNA, 201 bp, Homo sapiens
catccttcagccctcctgggtccctgcccctcccctagaccagagccctgagggatgtggcagcttctggggcactctgggcctgggggctgattgctgcyttcccgcagggggcctgctgaccggcaagtacaagtatgaggacaaggacgggaaacagcccgtgggccgcttctttgggactcagtgggcagagatcta

SEQ ID NO: 403100 - DNA, 201 bp, Homo sapiens
acaagaggctgggctgcatccttcagccctcctgggtccctgcccctcccctagaccagagccctgagggatgtggcagcttctggggcactctgggcctsggggctgattgctgccttcccgcagggggcctgctgaccggcaagtacaagtatgaggacaaggacgggaaacagcccgtgggccgcttctttgggactc

SEQ ID NO: 403101 - DNA, 201 bp, Homo sapiens
gtcccttcttttgacacatccaccctctccccggggcccttctccttacagggcatgtacagcgccaccacccggcaggtggaaacggagctcttcccctrcctcaggcactttggactgaggttctatgcctacaaccctctggctggtacgtggagcattcctggccctgactcagcctattcccgacccacagatgcc

SEQ ID NO: 403102 - DNA, 201 bp, Homo sapiens
cactgggcatctgcttccttcctgcctatctgtgcaccttggacccttccttccctaccttcccctgcactcagcctggaacaagcccttcccccaccacygccccttctgtgagagaatggttcaggtctcacatacgtgtctcttcctctggaagcctttctagatgggcccagaagaccctgagacctcaggtccttg

SEQ ID NO: 403103 - DNA, 201 bp, Homo sapiens; identical to SEQ ID NO: 89426

SEQ ID NO: 403104 - DNA, 201 bp, Homo sapiens
agttccacttgtgggtatgtagccaagagaaatgaaaacatatctccccacaaaaaaacttgggtatgagatttcacattatcattgctcataatagccartaagtaaaaacaacccaaatgtccaagaatgaataaatggataaacaaaatatggtatatttatacaacagactattattcggccattaaaaaaaaaaaa

SEQ ID NO: 403105 - DNA, 201 bp, Homo sapiens
tcccaaatctcagcagggaggtggctgggacagctgtgagtggagtcgctgtgcagcagaagagggttgaagtctggccgtctcccttgcagggtgcccayggggacgcggtcatcctgggcatgtccagcctggagcagctggagcagaacttggcagcggcagaggaagggcccctggagccggctgtcgtggacgcct

SEQ ID NO: 403106 - DNA, 201 bp, Homo sapiens
ctctagatgctcagctgcttctctcaaattctgtgggggtggggagactggggaagctgcgagggctatgcagtcatttggtcactttgaccaagaggagwtaagtccttttcttcctatgaaggctctccatggcccagttcttttgggtggggtaaacctgttcttacacaaattacttaagcggccaggtaaccaaca

SEQ ID NO: 403107 - DNA, 201 bp, Homo sapiens
gcttggcctctccaactatgccgcctgggaagtggccgagatctgtaccctctgcaagagcaacggctggatcctgcccactgtgtaccaggtgagggccrgggctgcagaggccaaggtctccagaactcctgctcatcctgggctgtctttgcccctctgactgcccccatgccctctgcatagcagccactcccctgc

SEQ ID NO: 403108 - DNA, 201 bp, Homo sapiens
cctgatggtactgacccctgtgccaccatccccactgaacagcttctggaaggagcaccacttcgagggcattgccctggtggagaaggccctgcaggccrcgtatggcgccagcgctcccagcatgacctcggccgccctccggtggatgtaccaccactcacagctgcaggtaaccagcgaccctgggtgctcagcttc

SEQ ID NO: 403109 - DNA, 201 bp, Homo sapiens
tggagcttggcctctccaactatgccgcctgggaagtggccgagatctgtaccctctgcaagagcaacggctggatcctgcccactgtgtaccaggtgagrgccggggctgcagaggccaaggtctccagaactcctgctcatcctgggctgtctttgcccctctgactgcccccatgccctctgcatagcagccactccc

SEQ ID NO: 403110 - DNA, 201 bp, Homo sapiens
gggattacaagtttgagccactgaacccagcctccaactaggattcttaatacggggcagggagaagagtgttaagcttacttcttcttttttttttttttgacagtcttgctctgtcacccaggcttcactgcaatggcacgatctgggctcactgcaacctctacctcccaggttcatgcaattctttttttttttctt

SEQ ID NO: 403111 - DNA, 201 bp, Homo sapiens
atccctgggctcaagagatccaccctcctgggcctctctcagtgctcggcttatgggggtgagccactgtgcctaatctccaactaagattttttttttttgcgggggggacagagtcttgttctggcacacaggctggagtgtagtgaaagatctcggctcactgcaacctctgcctcctgggttcaagcgattcttgtg

SEQ ID NO: 403112 - DNA, 201 bp, Homo sapiens
ctcctaggctcatgtgatcctctcaactcagcctccccagtagctgagattacaggcatgtaccaccatgcctggccaaattttgtgttttttgtagagayggggtttcaccattttgcccaggctggtctcaaatccctgggctcaagagatccaccctcctgggcctctctcagtgctcggcttatgggggtgagccac

SEQ ID NO: 403113 - DNA, 201 bp, Homo sapiens; identical to SEQ ID NO: 89423

SEQ ID NO: 403114 - DNA, 201 bp, Homo sapiens
atgggtgtggaaaggcaaatgcgacttggcaatgccgccggtgctgggggaagcaggtgtagcccgaggggaagatgtgtgtaaaggggcaggaggagccrccctcagtctgatgccatttgcagtgcttaggccgatgcctggcaggcacatagtgagggctgggaaatgttagctgtttctttgttcttaatattagca

SEQ ID NO: 403115 - DNA, 201 bp, Homo sapiens; identical to SEQ ID NO: 89424

SEQ ID NO: 403116 - DNA, 201 bp, Homo sapiens
aaacctgttcttacacaaattacttaagcggccaggtaaccaacactagttattgcgatggccatgttaagtatggtcatctcagttttacatgaggcaaytggctcagaggcaatttcacttgtgtagggtcccacagctacacatggtagggaacgaacgtgggtttgactgaaactaatgtttttctttttgggggga

SEQ ID NO: 403117 - DNA, 201 bp, Homo sapiens
ctaagtgactttctaagtgtgaaaagtgggaagaggactctccactcacctgttattccagcccactaggatctaggattttttatttttatttttatttygaaatagggtctcattctgtcatccgggctggagtacagtggcataatatttgctcactatagccttgatctcctaggctcatgtgatcctctcaactca

SEQ ID NO: 403118 - DNA, 201 bp, Homo sapiens
cttgccagcctaagtgactttctaagtgtgaaaagtgggaagaggactctccactcacctgttattccagcccactaggatctaggattttttatttttakttttattttgaaatagggtctcattctgtcatccgggctggagtacagtggcataatatttgctcactatagccttgatctcctaggctcatgtgatcct

SEQ ID NO: 403119 - DNA, 201 bp, Homo sapiens
ttgaggtctctgctgaggggcccagcatcctgggtggttctgatgcccagaaaagtgagagacctatgactagagaggacacccgcccctcagggctgcarggtgtggggtggggcagtggccttggatggctctttggttgtggcttccagtgtgaccctgatggtactgacccctgtgccaccatccccactgaacagc

SEQ ID NO: 403120 - DNA, 201 bp, Homo sapiens
ggatttcattattccttcagctttatgaaatgactatcccagtgttattgatgaggaaactgagtttcacccagctatgaaaggggaagacattttaacayaggttcaactgtaaagcccactagcctcatccttttggtgggagctggagtttccctctctcagtgcctcatgtcttcctcacttatatccaactccagc

SEQ ID NO: 403121 - DNA, 201 bp, Homo sapiens
gccaggcatggtgtcataggcctgtagttccagccttaggaggccaagataggaggattgcttgagcttaggagtttggcctggatattaaagcaagaccrccatctcttattaaaaaaaaagctacacactttatcgctattccttaatatatcaaatttagatgtcgtgtgtgggctgctggaaagttcctgatcttag

SEQ ID NO: 403122 - DNA, 201 bp, Homo sapiens
aaagcgtgcagggtaagtggtgtctggtgggagccccgggtcctagcccaggctcttctgcctccacggctgcagctttggagcgatggtgtattcaccayggacaggcatcatcctcaacaacgagctcctggacttatgcgagcgatgcccccggggttccggcaccaccccctcacctggtgagaacaaagcttccca

SEQ ID NO: 403123 - DNA, 201 bp, Homo sapiens
atatatataatatatataatatatatatataaatatatatatatataatatatattatatatatataaatatataatatatattatatatatatatatatattccatatatatacacacacatatatatatattccactttcactttttttttttttttgagacggtgtcttgctctgtcgcccaggctggagtatagtgg

SEQ ID NO: 403124 - DNA, 201 bp, Homo sapiens
taatatatataatatatatatatataaaatatataatatatattatatatattatatatataatatatataatatatatatataaatatatatatatataatatatattatatatatataaatatataatatatattatatatatatatatatattccatatatatacacacacatatatatatattccactttcactttt

SEQ ID NO: 403125 - DNA, 201 bp, Homo sapiens
tataatatatataatatatatatatataaaatatataatatatattatatatattatatatataatatatataatatatatatataaatatatatatatataatatatattatatatatataaatatataatatatattatatatatatatatatattccatatatatacacacacatatatatatattccactttcactt

SEQ ID NO: 403126 - DNA, 201 bp, Homo sapiens
atggtcaaggatctcctgaggactgtgtcatgggctatatatatattatatatatatatatatattatataatatatattatatatataatatatataatatatatatatataaaatatataatatatattatatatattatatatataatatatataatatatatatataaatatatatatatataatatatattatata

SEQ ID NO: 403127 - DNA, 201 bp, Homo sapiens
tgggaccactggtgtgcaccactatgcccggctaatttttgtattcttttttagtagagacagggtttcaccatgttggccaggctggtcttgaactcctsaccttaagagatctgcttacctcggcgtcctaaagtgttgggattacaggcgtgagccaccacgcccagcctatgagttagtacttctatcctcttccta

SEQ ID NO: 403128 - DNA, 201 bp, Homo sapiens
aactcccgacctcaggtgatctgcccgctttggcctcccaaagtgctgggattacaggcatgaactactgcacccgtctcctagtaatttcttcttttccrtgatgtgtctcttatctctaataatacttttcttcttaaagtctacttcattaaaaatagttatgctgggcatggtggctcatgcctgtaattggcactt

SEQ ID NO: 403129 - DNA, 201 bp, Homo sapiens
gccagtccccaaaatcatgtgagccaattcctaaataaatctctatgtataacctattggtttagtttctctaaaaaaacttctatatccagtttcctggwtgttaagtaatactgaaactagctagtaacctcgtgttttttttttttttttttttgagatggagttttgttcttgttgcacaggctggagtacaatagc

SEQ ID NO: 403130 - DNA, 201 bp, Homo sapiens
cttgccctacagattttaaacttgccagtccccaaaatcatgtgagccaattcctaaataaatctctatgtataacctattggtttagtttctctaaaaaracttctatatccagtttcctggatgttaagtaatactgaaactagctagtaacctcgtgttttttttttttttttttttgagatggagttttgttcttgt

SEQ ID NO: 403131 - DNA, 201 bp, Homo sapiens
ccaaagcctggcagggtgggcgaggtgggtgcagggacctggcccattccctcttggggctttggtttccccatctgtaaccatttaccccattttgcccyggaagccaagacaactgactaggctggaagcagacaggttggggaagcaagggtgcactccatttagttaggaagtgaggcctttgtctgggatgggagt

SEQ ID NO: 403132 - DNA, 201 bp, Homo sapiens
ggcctcaggaagaggcctgctgcagcgtcatcctggccaagatccctccttgcagaggcccctggccacactgccacagggtctgctggggccaccagaarcccatgctcctgactccatcatctctcccctctgtgctcacctctcaccaggaggccctcccagagtccagtctcctgctcttttttctgttttgttttt

SEQ ID NO: 403133 - DNA, 201 bp, Homo sapiens
tgctgccatagccagtctgccccaacacccagcctggggccacatctcgggtctctcagtcctgaggagcccggtgccccacccctcacatcctctctccmtgagtcagggcctgggtctcgtgagctgagtgactgatacttggtgtcctggatgagggcgtggtggagaggggccacagcgggtgtttcctgaccctct

SEQ ID NO: 403134 - DNA, 201 bp, Homo sapiens
ctacttgggaggctgagacaggagaattgcttgaacccaggaggtgaaggttgcagtgagccgagatcgaggcactgcactccagcctggacaacagagtragatgctgtctcaaataaataaataaataaatataaaataatttgaggcctagggatctgaaattctgggatctcctttatgcatttgagtgactgagat

SEQ ID NO: 403135 - DNA, 201 bp, Homo sapiens
gccacctgagtagctgggattccaggcatgagccaccacgcctggctaatttttgtattttttttttttgagatggggtctcactgtgtcgcccaggctgragtgcaatggcacgatatctgctcactgcaacctccacctccctggttcaagcagttcccctgcctcagtctcccaagtagctgggattacaacaggcgc

SEQ ID NO: 403136 - DNA, 201 bp, Homo sapiens; identical to SEQ ID NO: 89429

SEQ ID NO: 403137 - DNA, 201 bp, Homo sapiens; identical to SEQ ID NO: 89430

SEQ ID NO: 403138 - DNA, 201 bp, Homo sapiens; identical to SEQ ID NO: 89433

SEQ ID NO: 403139 - DNA, 201 bp, Homo sapiens
gctcggatattggacggtgagtgagacgtgggaggaagctgggtggcccttggcagccagcccctcctggagaaggcgtgtgtgtgtgtgtgtgtgtgagwgaatgtatgtgtgggtgtgtgtgtgagtgtctgggtatgtgtgattgcatgcatgtgtgggtgtgtgtgagtgtatgtgagtgtgagtgtggggagtgtg

SEQ ID NO: 403140 - DNA, 201 bp, Homo sapiens
ggtggcggggaccagctgggcagatgagaggctgagcctcatccctaaccccctttcccagagcccctggtggtcctgaaccggcccctctatccctccgyaggcctcttgcctggggccactctcccaccctctcgatctgtatatcctccagtccaagattaaagaggcggactgtggcctgattccatggttctaagt

SEQ ID NO: 403141 - DNA, 201 bp, Homo sapiens
agcagaggggcgttaccgatggtcacggcaggtctgggtagccgagctgaccattctcacaggctctcataagccagctccctctcccatcttccctttcytttccccagcctccctgcctctggtctctgtccacccctccacgcctggccccaaggggccagtcctgaggccactgcctacagacctaccatcatcctg

SEQ ID NO: 403142 - DNA, 201 bp, Homo sapiens
agacccggcaccatcacacccagatcgcatccactttcatcgctgtggtgcaagccatcgtccacacggctggtggctgggcagctgcctcggactccagraaaggcggggagcctgctggctactgagtgctccaggcggacaaggctgacaagcaatctagggacaagatactcactaggaccaggaaggggactctgg

SEQ ID NO: 403143 - DNA, 201 bp, Homo sapiens
ttttctccctggccgtgcccaccctgcacagcccccaagccacgctgatcacactcccatgccccaggccatcatctacaacctctggttcggctatgacrtgaagcgggccgtggaggagccccggctgcacaaccagcttctgcccaacgtcacgacagtggagagaaacattgaccaggtgggccgggggttggagaa

SEQ ID NO: 403144 - DNA, 201 bp, Homo sapiens
cgcatccactttcatcgctgtggtgcaagccatcgtccacacggctggtggctgggcagctgcctcggactccaggaaaggcggggagcctgctggctacwgagtgctccaggcggacaaggctgacaagcaatctagggacaagatactcactaggaccaggaaggggactctgggggaccggcttcccctgtgagcagc

SEQ ID NO: 403145 - DNA, 201 bp, Homo sapiens
gggacctaggaggtcctgtgggatgggccccagcctgcatcttcatcctcttctccccaccccactccattcactctctgcctatcgctcaccagcctatrccacctgcctcagggcctttgcactgaccatttaggccacattccaggctcttttcacacgttgcctcctctgagaagccctccctgaccactctgccca

SEQ ID NO: 403146 - DNA, 201 bp, Homo sapiens
tcatgatcaaagctcactgcagcctcaaactcctagcctcaagggatcctcctgcttcagcctcctgagtagctgggactataagcacagggccaccacayccgactaattttttcttttttcttttcttttattttttaataaagacgtgatcttgctacattgcccaggctggtcttgaactcctgagctcaaaagatc

SEQ ID NO: 403147 - DNA, 201 bp, Homo sapiens
ttgctgttttgcccaggctggagtgcagtgtcatgatcaaagctcactgcagcctcaaactcctagcctcaagggatcctcctgcttcagcctcctgagtrgctgggactataagcacagggccaccacatccgactaattttttcttttttcttttcttttattttttaataaagacgtgatcttgctacattgcccagg

SEQ ID NO: 403148 - DNA, 201 bp, Homo sapiens
acaaggacaactgggaggttagaagcaagatggagtcgattaagttagatctctttccctgtctcagtcataattttgcaaaggcggtttcagtcttgctsttttgcccaggctggagtgcagtgtcatgatcaaagctcactgcagcctcaaactcctagcctcaagggatcctcctgcttcagcctcctgagtagctgg

SEQ ID NO: 403149 - DNA, 201 bp, Homo sapiens
ctctcctcccacccccaggcagtgactgcagccctggagacccggcaccatcacacccagatcgcatccactttcatcgctgtggtgcaagccatcgtccrcacggctggtggctgggcagctgcctcggactccaggaaaggcggggagcctgctggctactgagtgctccaggcggacaaggctgacaagcaatctagg

SEQ ID NO: 403150 - DNA, 201 bp, Homo sapiens
gcaaaatttctcaagcactgatcttaagagcagtttagggagggtcagaatctttagccttcagctgcgtgactcctaaaccataatttctaatcttgtgkctaatgtgagtcctacgaaggcagtctggtgcccaggcaagaaggaagtctgctttgggaaagggctgttaccgtctttgttttaaactataaactaagt

SEQ ID NO: 403151 - DNA, 201 bp, Homo sapiens
ttctctgctgcccagatgggggggcccggcttccaggtgtagacatctggagcaggcagtgttcagctggggaggaagcggggaggactgtgggggccacrtgggaagaagtccagcccacatcacctgcacccctgctgagcctggtcaacagagcccctcagtgggtcctcactctcctggctgcctcccatttaggca

SEQ ID NO: 403152 - DNA, 201 bp, Homo sapiens
tggtgccagctgatccatcaagtgcagggtctgcaaaatttctcaagcactgatcttaagagcagtttagggagggtcagaatctttagccttcagctgcrtgactcctaaaccataatttctaatcttgtggctaatgtgagtcctacgaaggcagtctggtgcccaggcaagaaggaagtctgctttgggaaagggctg

SEQ ID NO: 403153 - DNA, 201 bp, Homo sapiens
atcccagatatataactttacccatacatatttcagtatgttttattttaagccccacaagatatcattttctatactactataattttataccaataacrttcatttagatttacccacacgtttacctcttctgttacccttttttttttgagacagagtctcgctctgtcgcccaggctggagtgcagtggcacaatc

SEQ ID NO: 403154 - DNA, 201 bp, Homo sapiens
cttgagctgagtccgttcctgggtgggggccacaaggtcagatgagccagttaatcgatctggatggtgccagctgatccatcaagtgcagggtctgcaawatttctcaagcactgatcttaagagcagtttagggagggtcagaatctttagccttcagctgcgtgactcctaaaccataatttctaatcttgtggctaa

SEQ ID NO: 403155 - DNA, 201 bp, Homo sapiens
aaaacccctggaaatcatagaatcatagggagttgaagctttcttcttgagctgagtccgttcctgggtgggggccacaaggtcagatgagccagttaatygatctggatggtgccagctgatccatcaagtgcagggtctgcaaaatttctcaagcactgatcttaagagcagtttagggagggtcagaatctttagcct

SEQ ID NO: 403156 - DNA, 201 bp, Homo sapiens
tgccactgggcacaggtgacgccccatggaggtcccccactcccaccccccaggccactaggactaatcagaacacccccgcaaaggagcagcgcctcacrgacaggctgtgactccctggcacggggggacacggagcctgtggggaacccccagccccaacctgcagggattgagaaggtcccccttgggaacgggctc

SEQ ID NO: 403157 - DNA, 201 bp, Homo sapiens
caaaaaacccctggaaatcatagaatcatagggagttgaagctttcttcttgagctgagtccgttcctgggtgggggccacaaggtcagatgagccagttwatcgatctggatggtgccagctgatccatcaagtgcagggtctgcaaaatttctcaagcactgatcttaagagcagtttagggagggtcagaatctttag

SEQ ID NO: 403158 - DNA, 201 bp, Homo sapiens
cccagctactggggaggctgaggcaagagaatcacttgaacctgggaggggaagttgcagtgagccaaggtcgtgccattgcacgccagcatgggtgacasagcgggactccatctcagaaacagacacacacaaaaaacccctggaaatcatagaatcatagggagttgaagctttcttcttgagctgagtccgttcctg

SEQ ID NO: 403159 - DNA, 201 bp, Homo sapiens
gcctggaagccacagggttgagagctgggatgtgccatgcaggggcccagtggatcggggtgcccggggagctccgtggctatgccgaggcccaccgccgycatggccgcctgccctgggcgcagctgttccagcccaccatcgcgctgctccgaggggggcatgtggtggcccctgtcctcagccgtttcctgcacaaca

SEQ ID NO: 403160 - DNA, 201 bp, Homo sapiens
tgtttgctcagcagtgagtggagacagggtgggtggagctcccggaaggtgctggcccccagttccaggcgagcgttccccatcctccatggtgccctccrtcttgatcaacaaagcccaggggtcgaagctagtgattggcggggctggcggggagctcatcatctctgctgtggcccaggtgagtctggggctcctggc

SEQ ID NO: 403161 - DNA, 201 bp, Homo sapiens
tttgcaaactgagaagcaccttgtatatggcaaaggtcagtgtaaatggcatcacactttgcaaccgtagtgtgttgtggacctgtgagcagctggatttkatggggaagcctggttgtgttctgcaacctaatctgcggtttggtggcagccgacgtgccgcctccgtcaccattctccaatgagtgccagctgagcaag

SEQ ID NO: 403162 - DNA, 201 bp, Homo sapiens
tctcaccaggaggccctcccagagtccagtctcctgctcttttttctgttttgtttttgagatgctgtttcgctctgtcaccaggctggagtgcagtggcrtgatctcggctcgctgcaacctctgcctccttggttcaaatgattctcctgcctcagcctcctgagtagctgggactacaggtgctagccaccacgccca

SEQ ID NO: 403163 - DNA, 201 bp, Homo sapiens
ccaggctggagtgcagtggagcaatcttggttcactgcaacctccacctcttgggttcaagcaattctcctgtctcagtctcctgagtagctgggaccacwggtgtgcaccactatgcccggctaatttttgtattcttttttagtagagacagggtttcaccatgttggccaggctggtcttgaactcctcaccttaaga

SEQ ID NO: 403164 - DNA, 201 bp, Homo sapiens
tgttgccgccgactccaaggtctgctcggatattggacggtgagtgagacgtgggaggaagctgggtggcccttggcagccagcccctcctggagaaggcrtgtgtgtgtgtgtgtgtgtgagtgaatgtatgtgtgggtgtgtgtgtgagtgtctgggtatgtgtgattgcatgcatgtgtgggtgtgtgtgagtgtatg

SEQ ID NO: 403165 - DNA, 201 bp, Homo sapiens
ggaggggagccccacagcgactctgtgccatgtcccctagagccatcctccagcagcagggctcacccgtggatgccaccatcgcggctctggtctgcacyagcgtcgtcaaccctcagagcatgggcctgggcggaggggtcatcttcaccatctacaatgtgacaacaggtgggcccacatgtgaactgccatggggaa

SEQ ID NO: 403166 - DNA, 201 bp, Homo sapiens
ggctggagtgcagtggagcaatcttggttcactgcaacctccacctcttgggttcaagcaattctcctgtctcagtctcctgagtagctgggaccactggwgtgcaccactatgcccggctaatttttgtattcttttttagtagagacagggtttcaccatgttggccaggctggtcttgaactcctcaccttaagagat

SEQ ID NO: 403167 - DNA, 201 bp, Homo sapiens
gggagctccgtggctatgccgaggcccaccgccgccatggccgcctgccctgggcgcagctgttccagcccaccatcgcgctgctccgaggggggcatgtkgtggcccctgtcctcagccgtttcctgcacaacagcatcctgcggccttccttgcaggcgtcaaccctgcggtgagccccacatggtggccctgggttcc

SEQ ID NO: 403168 - DNA, 201 bp, Homo sapiens
agagctgggatgtgccatgcaggggcccagtggatcggggtgcccggggagctccgtggctatgccgaggcccaccgccgccatggccgcctgccctgggygcagctgttccagcccaccatcgcgctgctccgaggggggcatgtggtggcccctgtcctcagccgtttcctgcacaacagcatcctgcggccttccttg

SEQ ID NO: 403169 - DNA, 201 bp, Homo sapiens
tgggtagccgagctgaccattctcacaggctctcataagccagctccctctcccatcttccctttcctttccccagcctccctgcctctggtctctgtccmcccctccacgcctggccccaaggggccagtcctgaggccactgcctacagacctaccatcatcctgtgtccacaaggcaaaagcatgagtggaatcccat

SEQ ID NO: 403170 - DNA, 201 bp, Homo sapiens
tggtggtcctgaaccggcccctctatccctccgcaggcctcttgcctggggccactctcccaccctctcgatctgtatatcctccagtccaagattaaagrggcggactgtggcctgattccatggttctaagtggggaggggaccctcggacagtgcacagaggggtgcatgcaccaggctcctatggctctccacattc

SEQ ID NO: 403171 - DNA, 201 bp, Homo sapiens
ggaacagagtgtagtcccaagagccttagttttcagaccttgagactaaggacctcagcctgttaggctcaaactcttggagtttgcaggcctccctccgyatgtagggtccttcgcatgacaggaagaccctctcagggctctcgggttccagggatcttagatatggaggatttcaagatccagggcacatcctttgga

SEQ ID NO: 403172 - DNA, 201 bp, Homo sapiens
aacctctctccagggttcaacttctcaacagagtctatggccaggcctgaagggagggtgaacgtgtaccaccaccttgtagagacgctcaagtttgccarggggcagaggtggaggctgggggaccctcgaagccacccgaagctccaggtgaggttgctgaggttgctgggctggtgggccgtcctcctccctggctca

SEQ ID NO: 403173 - DNA, 201 bp, Homo sapiens
tctccaaaaaacacaaaaaaggcggggcatgatggcttacgcctgtaatcctagcactttgggaggccaaggcaggcagatcacttgaggccaggagttcrataccagcctgaacaacatggcgaaatcctgtctactaaaaatacaaaaataattagctgtacgtggtggcgaacacatgtagtctcagctactcaggag

SEQ ID NO: 403174 - DNA, 201 bp, Homo sapiens
ggaaggaaaatcaaaagtacagtttaggtcatggtatgtttgaaatgtttcttagacacccagagtgggtaccttgtgcatagctgggtataagtgtctcragtgtagggagaggactggcggagttaaagtcggggagttaccatcacacaggttgcatctcatgccatgagcctggatggactcacccagggagaagat

SEQ ID NO: 403175 - DNA, 201 bp, Homo sapiens
tcccaaagtgctggaattacaggcatgagccaccgcatctggtctttagtggtgatttctgagatcttgatgcacccatcacacaagcagtgtacactgtwcctagtgtgtagtcttttatccctcattcccctcccacccttccccttgagttcccagagtccattagagcatttttcttttcctctgagacagagtctc

SEQ ID NO: 403176 - DNA, 201 bp, Homo sapiens
agcccttgtgtcaactcctgtccctgtgttagcccagagtccatctcataatgcagagatggaaactgaggcctagagcaggccaggggctgtctgcaggrtccatgaccactcacctgccctgccctactccagggaaggtggaggtcatcaatgcccgggagacggtgccggccagccacgccccgagcctgctggacc

SEQ ID NO: 403177 - DNA, 201 bp, Homo sapiens
ctgaggactccacccatgagagccccggaagagtgtggctgcctctgggacctggccccaccctgaggctccccccaccccccagccagctcttcttcaaygggacagaacccctgaggcctcaggacccactcccatggcctgcactggccaccaccctggagaccgtggccacagagggcgtggaggtcttctacacgg

SEQ ID NO: 403178 - DNA, 201 bp, Homo sapiens
cccggggtccacaagggccccccaccaggggagaggagggagggggctgggctggggttgcatgctaacccctggatgggtcactgcacttgccaagacgytgtttgctcagcagtgagtggagacagggtgggtggagctcccggaaggtgctggcccccagttccaggcgagcgttccccatcctccatggtgccctcc

SEQ ID NO: 403179 - DNA, 201 bp, Homo sapiens
caggcatcatcctcaacaacgagctcctggacttatgcgagcgatgcccccggggttccggcaccaccccctcacctggtgagaacaaagcttcccacccrgggtccacaagggccccccaccaggggagaggagggagggggctgggctggggttgcatgctaacccctggatgggtcactgcacttgccaagacgctgt

SEQ ID NO: 403180 - DNA, 201 bp, Homo sapiens
ccaggaggcagagattgcagtgagctgagactgcgccattgcactccagcctgggcaatagagtgagactctgtctaaaaaaaaaaaaaaaaaaaaaaaaatccttaacttacttttccacttaaggtattagtcactcttgtgctgtataaggtaatatccacaggttttgggaattaggatgtgggtggatctttctgt

SEQ ID NO: 403181 - DNA, 201 bp, Homo sapiens
gcaacctctgcctctgaggttcaagcaattctccagtctcagcctcctgagtagctgggattacaggtgcacgctaccaagcctggttaattaattaattwatttatttattttatttttttagtagagatggggtttcaccatgttggccaggctggtcttaaactcctgacttcaagtgatctgcctgcctcagcctcc

SEQ ID NO: 403182 - DNA, 201 bp, Homo sapiens
tggtggcccctgtcctcagccgtttcctgcacaacagcatcctgcggccttccttgcaggcgtcaaccctgcggtgagccccacatggtggccctgggttmctgggttcaaggccatatcctgtctgggcccagtccacaccccagctctgcctcagtccctcttacactggaggattgaccctcggggtgctggccagga

SEQ ID NO: 403183 - DNA, 201 bp, Homo sapiens
gggccgtcctcctccctggctcaggacttggcatgaaatgagggtcaggcctggtagggggaagttggagggatatgtatgtggttctaggccagggcagkactgaaagggatcccggggtggcaggtacaggggtcaggtgcaggagtggcaccatatctcaaaggacctggagggtgagcagagtctagacctagctgg

SEQ ID NO: 403184 - DNA, 201 bp, Homo sapiens
ccattaccaggaagtctgatttacgtttaacagattttttttttttttttgagatggagtctctctccgttgcccaggctggagtgcagtggtacaacctyggctcactgcaagctccgacttccaggttcacaccattctcctgcctcagcctcctgagtagctgggactacaggcacccgccaccatgcccagctaatt

SEQ ID NO: 403185 - DNA, 201 bp, Homo sapiens
tgtgccccaacctctctccagggttcaacttctcaacagagtctatggccaggcctgaagggagggtgaacgtgtaccaccaccttgtagagacgctcaartttgccaaggggcagaggtggaggctgggggaccctcgaagccacccgaagctccaggtgaggttgctgaggttgctgggctggtgggccgtcctcctcc

SEQ ID NO: 403186 - DNA, 201 bp, Homo sapiens
aggaggtgaaggttgcagtgagccgagatcgaggcactgcactccagcctggacaacagagtgagatgctgtctcaaataaataaataaataaatataaaataatttgaggcctagggatctgaaattctgggatctcctttatgcatttgagtgactgagatgatttgaagctggatccagtgctcctgagggctgctct

SEQ ID NO: 403187 - DNA, 201 bp, Homo sapiens
acccaggaggtgaaggttgcagtgagccgagatcgaggcactgcactccagcctggacaacagagtgagatgctgtctcaaataaataaataaataaatataaaataatttgaggcctagggatctgaaattctgggatctcctttatgcatttgagtgactgagatgatttgaagctggatccagtgctcctgagggctg

SEQ ID NO: 403188 - DNA, 201 bp, Homo sapiens
tgaacccaggaggtgaaggttgcagtgagccgagatcgaggcactgcactccagcctggacaacagagtgagatgctgtctcaaataaataaataaataaatataaaataatttgaggcctagggatctgaaattctgggatctcctttatgcatttgagtgactgagatgatttgaagctggatccagtgctcctgaggg

SEQ ID NO: 403189 - DNA, 201 bp, Homo sapiens
ttgaacccaggaggtgaaggttgcagtgagccgagatcgaggcactgcactccagcctggacaacagagtgagatgctgtctcaaataaataaataaataaatataaaataatttgaggcctagggatctgaaattctgggatctcctttatgcatttgagtgactgagatgatttgaagctggatccagtgctcctgagg

SEQ ID NO: 403190 - DNA, 201 bp, Homo sapiens
aggcgcatgacaccatgccctgctaatttttttgtatttgtagtagagacagagtttcaccatattcgccagactggtctcaaactcctgacctcaagcartttgcctgccttggcctcccaaagtgctgagattacaggcgtgagtcaccgcgcctggcctttttttttttttttttttgagacggagcctcactctgtc

SEQ ID NO: 403191 - DNA, 201 bp, Homo sapiens
tatatataatatatataatatatatatataaatatatatatatataatatatattatatatatataaatatataatatatattatatatatatatatatattccatatatatacacacacatatatatatattccactttcactttttttttttttttgagacggtgtcttgctctgtcgcccaggctggagtatagtggc

SEQ ID NO: 403192 - DNA, 201 bp, Homo sapiens
cgtgcacctgggggagcgaagccagcctagcccaaggcagcctgcaggggggttctggcagtgctgaggcctggggctgcctgcgctggcttaatattagwgtcctgtgtctgccattacaaatcaccacaagcttggtggcttaaaataacagaaatgtgtcctctcacagttctggaagccagaagcccgatatctagg

SEQ ID NO: 403193 - DNA, 201 bp, Homo sapiens
agccaaaggagggtgctagggccagaggtcccacggggtgggtgcagggacccaggtccattccctctttgggccttggtttccccatctgcaactggggyttaaatgctggcttctggccgggcacagtggctcacgcctgtaatcccagcactttgggaggccgaggtgagcagatcatctgatgtcgggagtttgaga

SEQ ID NO: 403194 - DNA, 201 bp, Homo sapiens
ggtgggcgaggtgggtgcagggacctggcccattccctcttggggctttggtttccccatctgtaaccatttaccccattttgccctggaagccaagacarctgactaggctggaagcagacaggttggggaagcaagggtgcactccatttagttaggaagtgaggcctttgtctgggatgggagtttaaagtgtttttt

SEQ ID NO: 403195 - DNA, 201 bp, Homo sapiens
tgcctgggcctcccaaagtgctgggattacaggcatgagccaccgcgcccggccttaacagattatttttttaaaatgtaagggagcaaggccaacgctgrggcctgggtaggaggccattgcaataacccagctgagagaggttggtggcttggaccagtgtggtggagatggaggtagaacctgcatccagagtcactg

SEQ ID NO: 403196 - DNA, 201 bp, Homo sapiens
ctcctggctcgagtgtctcctctctgggcagcatactgtctgactgtctctggagtggggatgtgagggctgatgtagggtagcagggtgccccctttctmcctgaaaccctcatctctcccccaggccatcatgagcaagctgtggcttggctttgacctgagagcggccattgcagcccccatcctgcatgtcaacagc

SEQ ID NO: 403197 - DNA, 201 bp, Homo sapiens; identical to SEQ ID NO: 89441

SEQ ID NO: 403198 - DNA, 201 bp, Homo sapiens
agtgtaaatggcatcacactttgcaaccgtagtgtgttgtggacctgtgagcagctggatttgatggggaagcctggttgtgttctgcaacctaatctgckgtttggtggcagccgacgtgccgcctccgtcaccattctccaatgagtgccagctgagcaagcctggtggggaggcagggggaggggagccccacagcga

SEQ ID NO: 403199 - DNA, 201 bp, Homo sapiens
gagggtcaggcctggtagggggaagttggagggatatgtatgtggttctaggccagggcaggactgaaagggatcccggggtggcaggtacaggggtcagstgcaggagtggcaccatatctcaaaggacctggagggtgagcagagtctagacctagctgggcttgagggagacctggccacaaggtagaggacagactg

SEQ ID NO: 403200 - DNA, 201 bp, Homo sapiens
cccaggaggcggagcttgcagtgtgctgagatcgcgccactgcactccagcctgggcgacagagctagactccgtctcaaaaaggccgggcgcggtggttyacgcctgtaatcccagcactttgggaggccgaggtgggcggatcacgaggtcaggagatcgagaccatcctggctaacacggtgaaaccctgtctctact

SEQ ID NO: 403201 - DNA, 201 bp, Homo sapiens
aatgcagagaagcccccgggccccactggcagatgggagcagttaggggtaaatgcctggtgccagtgtccttatagccactgcccatttgttcccagctyggccatcctgatttacctgagctgtaagtaccagacgccggaccactggtatccatctgacctgcaggctcgtgcccgtgttcatgagtacctgggctgg

SEQ ID NO: 403202 - DNA, 201 bp, Homo sapiens
tctcaaaaaggccgggcgcggtggtttacgcctgtaatcccagcactttgggaggccgaggtgggcggatcacgaggtcaggagatcgagaccatcctggstaacacggtgaaaccctgtctctactaaaaatacaaaacattagcagggcgtggtggcggccgcctgtagtcccagctactggggaggctgaggcaggag

SEQ ID NO: 403203 - DNA, 201 bp, Homo sapiens
accctgtctctactaaaaatacaaaacattagcagggcgtggtggcggccgcctgtagtcccagctactggggaggctgaggcaggagaatggcgtgaacycaggaggcggagcttgcaatgagcagagatcgcgccactgcactccagcctgggtgacagagggagcccactccagcctgggcgacagagggagactccg

SEQ ID NO: 403204 - DNA, 201 bp, Homo sapiens
tagcagggcgtggtggcggccgcctgtagtcccagctactggggaggctgaggcaggagaatggcgtgaacccaggaggcggagcttgcaatgagcagagrtcgcgccactgcactccagcctgggtgacagagggagcccactccagcctgggcgacagagggagactccgtctcaaaaaaaaaaggaaagaaagaaagg

SEQ ID NO: 403205 - DNA, 201 bp, Homo sapiens
aagttgtatgcccacaactttttcatccttgtccctacagccggtggctctcggctatgaactgtttgagggacggccacgactggcagcatggcgtggaygagtggaggctttcctgggtgctgagctatgccaggaggcccacagcatcatcttgagcatcctggaacaggcggccaagaaaaccctcccaacaccctc

SEQ ID NO: 403206 - DNA, 201 bp, Homo sapiens
ctcctgcagcgtctgccaccagagaatgctgtggactgagtggccttgaagggatcacagcctctctgaaccttagcttgccttctgaaaaggaggataaygttaccttctgctctgtagggatggaaagaaaatactgaatggagttgacagagttcttgcgtggaatgcacgcatataaattcacaaagcccagaagac

SEQ ID NO: 403207 - DNA, 201 bp, Homo sapiens
aggagagccatctggagagtgattggccatcagagagtagttggcagtaggccggggccatagactgacccactgtctgcccccatcaggtgttggggccmctcattggggtccaggtgcccgaggagaaggtggaacgcaacaggactgccatggaccaggccctgcaatggctggaggacaagttcctgggggacaggc

SEQ ID NO: 403208 - DNA, 201 bp, Homo sapiens
aagtcacttgaccattctgaccttgagttttctcttgtgctaaaaggctaacaggagtctctacctcacagggcggctgctggcatatcacagagatgagrttctcaaaatgcaaagcagaaggtccagccaagagtcggtgcccaaggcaacaaagacaggaggagactcgtaggaggagggggtggtgttggggagctg

SEQ ID NO: 403209 - DNA, 201 bp, Homo sapiens
agggaagggctcgggctagcgctggaggcatgaagatggggtgtgttcagggctctccagcagtccaggcatgggaaggggacgctgagggccaaaggctraggtgacactgggaaaggaactataggaaggtaaggactggctttcggccatgtgactgaattgcctgtgtgtggtgtgtgtgtatgtgtgcgaatgtca

SEQ ID NO: 403210 - DNA, 201 bp, Homo sapiens
actgcacccaccctggcccgttgctctccagtctgaaccccatgcattgtcccacctggagccttcgccctcactcttccctccagtgagaacacccttcycctcatgccttgcacattcctacagctctctgctcagatgccacctccttcagggagtcttccctcagcatcctactcataatgacacacacccccactc

SEQ ID NO: 403211 - DNA, 201 bp, Homo sapiens
attgtcccacctggagccttcgccctcactcttccctccagtgagaacacccttcccctcatgccttgcacattcctacagctctctgctcagatgccacytccttcagggagtcttccctcagcatcctactcataatgacacacacccccactcttaccctgtttattttttccatggcatccatcaacatccgatatg

SEQ ID NO: 403212 - DNA, 201 bp, Homo sapiens
cccacctggagccttcgccctcactcttccctccagtgagaacacccttcccctcatgccttgcacattcctacagctctctgctcagatgccacctcctycagggagtcttccctcagcatcctactcataatgacacacacccccactcttaccctgtttattttttccatggcatccatcaacatccgatatgttcca

SEQ ID NO: 403213 - DNA, 201 bp, Homo sapiens
cacagttctcctctgctcaaaactctccaacgactcaatccacctgcggtaagagccaaagccttcccagtgtcccatgctcccctctgtcgtgacctccygctcttcctgctcactgcacccaccctggcccgttgctctccagtctgaaccccatgcattgtcccacctggagccttcgccctcactcttccctccagt

SEQ ID NO: 403214 - DNA, 201 bp, Homo sapiens
cctcctccagcctcagtttcctcacttgtacaatgcaggaggggacttctataacccttgtcaacactgggcacctctgcctgcctccacccattcttcamcctggggctggtgcagggcccacagtccatgatccaagccatcaacagtgaacagacagccgactggccccacaaggcccggcagcagcccacggaccgg

SEQ ID NO: 403215 - DNA, 201 bp, Homo sapiens
gggccatagactgacccactgtctgcccccatcaggtgttggggccactcattggggtccaggtgcccgaggagaaggtggaacgcaacaggactgccatrgaccaggccctgcaatggctggaggacaagttcctgggggacaggcccttcctcgctggccagcaggtgacactggctgatctcatggccctggaggagc

SEQ ID NO: 403216 - DNA, 201 bp, Homo sapiens
caggccgggcctagaggccaatgccatggcccaagggcacagctcatggtgaggtccagctgctgggcaggaaaaggacaagaggtcaggtggctgcagargtgatggctgggggcctgtcagacgggggccaaagacattcctcccctcgtgatccctgacccaagcgcgtggacatgcaagggactccacggagcatcc

SEQ ID NO: 403217 - DNA, 201 bp, Homo sapiens
gcccactccagcctgggcgacagagggagactccgtctcaaaaaaaaaaggaaagaaagaaaggagaggtatctggggagaaggtacagcttggggtgtgwccgggatgagcaggggctgacagaacatgtccccccacctctcatcttcagccttttctgagccgcagggcctctccactcccagactgaagggtattag

SEQ ID NO: 403218 - DNA, 201 bp, Homo sapiens
caaaaaaaaaaggaaagaaagaaaggagaggtatctggggagaaggtacagcttggggtgtgtccgggatgagcaggggctgacagaacatgtccccccasctctcatcttcagccttttctgagccgcagggcctctccactcccagactgaagggtattagaagagaagacaagggaacatttttccactgttgcgcat

SEQ ID NO: 403219 - DNA, 201 bp, Homo sapiens
gggtccaggtgaggagagccatctggagagtgattggccatcagagagtagttggcagtaggccggggccatagactgacccactgtctgcccccatcagrtgttggggccactcattggggtccaggtgcccgaggagaaggtggaacgcaacaggactgccatggaccaggccctgcaatggctggaggacaagttcct

SEQ ID NO: 403220 - DNA, 201 bp, Homo sapiens
tgacttcttcctcttcagggcagcacaagagcaaggagttcttgcagatcaacagcctggggaaactgccgacgctcaaggatggtgatttcatcttgacygaaaggtgccctccttccctcacccctcaccgcatccggagcccatgtgaccttggctctccccactggccccgggccccagtggccctcccatacccca

SEQ ID NO: 403221 - DNA, 201 bp, Homo sapiens
caggggtccagggagcctattctgagctgcaccgcctcggacaagtcacttgaccattctgaccttgagttttctcttgtgctaaaaggctaacaggagtstctacctcacagggcggctgctggcatatcacagagatgaggttctcaaaatgcaaagcagaaggtccagccaagagtcggtgcccaaggcaacaaagac

SEQ ID NO: 403222 - DNA, 201 bp, Homo sapiens
agggatggaaagaaaatactgaatggagttgacagagttcttgcgtggaatgcacgcatataaattcacaaagcccagaagacctcgggaagaaggacatrctgttgtgagaattaagagatgggaagagatgagccaccccagtttgcctcccctcccctggcccaccagagtccggctagaaaacttctctttatccac

SEQ ID NO: 403223 - DNA, 201 bp, Homo sapiens
ggcatatcacagagatgaggttctcaaaatgcaaagcagaaggtccagccaagagtcggtgcccaaggcaacaaagacaggaggagactcgtaggaggagkgggtggtgttggggagctggagatggagggcgaggctggagggcagtccttcaaatgcagagaagcccccgggccccactggcagatgggagcagttagg

SEQ ID NO: 403224 - DNA, 201 bp, Homo sapiens
tgagtacctgggctggcatgccgactgcatccgtggcacctttggtatacccctgtgggtccaggtgaggagagccatctggagagtgattggccatcagrgagtagttggcagtaggccggggccatagactgacccactgtctgcccccatcaggtgttggggccactcattggggtccaggtgcccgaggagaaggtg

SEQ ID NO: 403225 - DNA, 201 bp, Homo sapiens
tgccgactgcatccgtggcacctttggtatacccctgtgggtccaggtgaggagagccatctggagagtgattggccatcagagagtagttggcagtaggycggggccatagactgacccactgtctgcccccatcaggtgttggggccactcattggggtccaggtgcccgaggagaaggtggaacgcaacaggactgcc

SEQ ID NO: 403226 - DNA, 201 bp, Homo sapiens
taccttctgctctgtagggatggaaagaaaatactgaatggagttgacagagttcttgcgtggaatgcacgcatataaattcacaaagcccagaagacctygggaagaaggacatgctgttgtgagaattaagagatgggaagagatgagccaccccagtttgcctcccctcccctggcccaccagagtccggctagaaaa

SEQ ID NO: 403227 - DNA, 201 bp, Homo sapiens
ttggtatacccctgtgggtccaggtgaggagagccatctggagagtgattggccatcagagagtagttggcagtaggccggggccatagactgacccactstctgcccccatcaggtgttggggccactcattggggtccaggtgcccgaggagaaggtggaacgcaacaggactgccatggaccaggccctgcaatggct

SEQ ID NO: 403228 - DNA, 201 bp, Homo sapiens
agatgagccaccccagtttgcctcccctcccctggcccaccagagtccggctagaaaacttctctttatccacctgctgcacctggccccacccaccaaarccccccagctgccccggaatgtggcagggcagggaggcccagccagggagtgaggctgatccaggcctctagtcccagaccttgctgtttctcagggctg

SEQ ID NO: 403229 - DNA, 201 bp, Homo sapiens
ttggccatcagagagtagttggcagtaggccggggccatagactgacccactgtctgcccccatcaggtgttggggccactcattggggtccaggtgcccraggagaaggtggaacgcaacaggactgccatggaccaggccctgcaatggctggaggacaagttcctgggggacaggcccttcctcgctggccagcaggt

SEQ ID NO: 403230 - DNA, 201 bp, Homo sapiens; identical to SEQ ID NO: 89464

SEQ ID NO: 403231 - DNA, 201 bp, Homo sapiens; identical to SEQ ID NO: 89465

SEQ ID NO: 403232 - DNA, 201 bp, Homo sapiens
aacccaggaggcggagcttgcagtgtgctgagatcgcgccactgcactccagcctgggcgacagagctagactccgtctcaaaaaggccgggcgcggtggyttacgcctgtaatcccagcactttgggaggccgaggtgggcggatcacgaggtcaggagatcgagaccatcctggctaacacggtgaaaccctgtctcta

SEQ ID NO: 403233 - DNA, 201 bp, Homo sapiens
ttgaggagtattttctgcaggataagatgttcatcaccgggaaccaaatctcactggctgacctggtggccgtggtggagatgatgcaggtgtggagtggrttggaggagggttagaccctgggcagaggtaggactcctctgtgaccaatggggccatcacttgaggataggctggtgaggcgggaaaggcaggcagagc

SEQ ID NO: 403234 - DNA, 201 bp, Homo sapiens
tcccaaagataacaggggaggaagtttcagctgagaagatggagcatgcagtggaagaggtgaagaacagcctgcagctctttgaggagtattttctgcasgataagatgttcatcaccgggaaccaaatctcactggctgacctggtggccgtggtggagatgatgcaggtgtggagtggattggaggagggttagaccc

SEQ ID NO: 403235 - DNA, 201 bp, Homo sapiens
agaccagcaccaggaaaaatcattctggcctgccccaagggttcagccatatacttcgtccccaccccttacatttcaccaacgacccaccccttctttgscttcccaaagatcttgggtgcaaacggaactacagggtagactgtcttagtgagccagccaaactgcagggtagactgcccgccaggtctcccatcttag

SEQ ID NO: 403236 - DNA, 201 bp, Homo sapiens
tcctgacctcaagtgatctgcccacctcagcctccagagtgctgggattacaggcgtgagccaccgcgcacagcctgataggggcgtttctgaggagcagrgacagagacaagggaatcaccccagaggtccacagggaaggaaaagatgccacgcggcttgtaggctgcatccttgtccagcctaccttagtcagtgctc

SEQ ID NO: 403237 - DNA, 201 bp, Homo sapiens
aggctggtctcaaactcctgacctcaagtgatctgcccacctcagcctccagagtgctgggattacaggcgtgagccaccgcgcacagcctgataggggcrtttctgaggagcagagacagagacaagggaatcaccccagaggtccacagggaaggaaaagatgccacgcggcttgtaggctgcatccttgtccagccta

SEQ ID NO: 403238 - DNA, 201 bp, Homo sapiens; identical to SEQ ID NO: 89473

SEQ ID NO: 403239 - DNA, 201 bp, Homo sapiens
ccagttgctgatcccaaagataacaggggaggaagtttcagctgagaagatggagcatgcagtggaagaggtgaagaacagcctgcagctctttgaggagwattttctgcaggataagatgttcatcaccgggaaccaaatctcactggctgacctggtggccgtggtggagatgatgcaggtgtggagtggattggagga

SEQ ID NO: 403240 - DNA, 201 bp, Homo sapiens
gatgcaggtgtggagtggattggaggagggttagaccctgggcagaggtaggactcctctgtgaccaatggggccatcacttgaggataggctggtgaggygggaaaggcaggcagagctgccatgggggctgcgggaaccaggcctgggggcctggactcaatcggggcaacaggaagcacagaatgttatgaatcagga

SEQ ID NO: 403241 - DNA, 201 bp, Homo sapiens
ttctgcaggataagatgttcatcaccgggaaccaaatctcactggctgacctggtggccgtggtggagatgatgcaggtgtggagtggattggaggagggktagaccctgggcagaggtaggactcctctgtgaccaatggggccatcacttgaggataggctggtgaggcgggaaaggcaggcagagctgccatgggggc

SEQ ID NO: 403242 - DNA, 201 bp, Homo sapiens
atggagtctcgctctgttgcccagcatggagtacggtggtgctatctcggctcactgcaacctctgctgggttcaagtgcgtctcctgcctcagcctcccragtagctgggattagaggtgcatgccaccacgcccagctaattttttgtatttttaacaggggtttcaccatgttggccaggctggtctcaaactcctga

SEQ ID NO: 403243 - DNA, 201 bp, Homo sapiens
ggaggagggttagaccctgggcagaggtaggactcctctgtgaccaatggggccatcacttgaggataggctggtgaggcgggaaaggcaggcagagctgycatgggggctgcgggaaccaggcctgggggcctggactcaatcggggcaacaggaagcacagaatgttatgaatcaggaaggatcacagttctccacact

SEQ ID NO: 403244 - DNA, 201 bp, Homo sapiens
ggagtggattggaggagggttagaccctgggcagaggtaggactcctctgtgaccaatggggccatcacttgaggataggctggtgaggcgggaaaggcargcagagctgccatgggggctgcgggaaccaggcctgggggcctggactcaatcggggcaacaggaagcacagaatgttatgaatcaggaaggatcacagt

SEQ ID NO: 403245 - DNA, 201 bp, Homo sapiens
agcccagtctctcctgccccacttctccggacagcctgcagatgctgcacagctggagcggctgttggggaggctgatgccagccctgcagcacctggatkggggggtgctggtggccaggcccttcctggcaatggagcagatctccctggaagacttggtgctgacggaggtgatgcaggtgaagctttcctacccacc

SEQ ID NO: 403246 - DNA, 201 bp, Homo sapiens
aacatggaggaaaaaacctgagttctctccctcatccgcatatacacacctgggataaggggtttccctggaagaaggcaggattcatgcgaggtcgcagsctggagaagtgggagctgcctgggccaggagccctctcagtgtggttcagaaggcttggagcaagaagaccagtgactgaggactctgagggattctgga

SEQ ID NO: 403247 - DNA, 201 bp, Homo sapiens
gcagccgggaagggatggagaggaggcccaagaggcttccaagagtctgggttaagttgctcctctcctcccagcccagtctctcctgccccacttctccrgacagcctgcagatgctgcacagctggagcggctgttggggaggctgatgccagccctgcagcacctggattggggggtgctggtggccaggcccttcct

SEQ ID NO: 403248 - DNA, 201 bp, Homo sapiens
gagtctaaacatggaggaaaaaacctgagttctctccctcatccgcatatacacacctgggataaggggtttccctggaagaaggcaggattcatgcgagrtcgcaggctggagaagtgggagctgcctgggccaggagccctctcagtgtggttcagaaggcttggagcaagaagaccagtgactgaggactctgaggga

SEQ ID NO: 403249 - DNA, 201 bp, Homo sapiens
ttggcttcccaaagatcttgggtgcaaacggaactacagggtagactgtcttagtgagccagccaaactgcagggtagactgcccgccaggtctcccatcytagcccctgagcttgatcatagtgggagtctaaacatggaggaaaaaacctgagttctctccctcatccgcatatacacacctgggataaggggtttccc

SEQ ID NO: 403250 - DNA, 201 bp, Homo sapiens
cagagccccagaggacatcactaatgagtggcagccgggaagggatggagaggaggcccaagaggcttccaagagtctgggttaagttgctcctctcctcmcagcccagtctctcctgccccacttctccggacagcctgcagatgctgcacagctggagcggctgttggggaggctgatgccagccctgcagcacctgga

SEQ ID NO: 403251 - DNA, 201 bp, Homo sapiens
tctcaactggccatcctgcacaccagctagggcactgcacactgaccaaagagactaatttgcatatcagccagagatatgccaggaggaggcacctgggrtcctggtggattgaccaggaaatacagtgttcttttccctattgcagagatctctggttgatacgaaaattagtctctttggtctgtttgcagggcagac

SEQ ID NO: 403252 - DNA, 201 bp, Homo sapiens
aggtgaagaacagcctgcagctctttgaggagtattttctgcaggataagatgttcatcaccgggaaccaaatctcactggctgacctggtggccgtggtrgagatgatgcaggtgtggagtggattggaggagggttagaccctgggcagaggtaggactcctctgtgaccaatggggccatcacttgaggataggctgg

SEQ ID NO: 403253 - DNA, 201 bp, Homo sapiens
ttgagctgtggatggtggagttggcttggggtgagccaggtggctgggctgggccccatggagtgggtgccaaggaccaggccctacactgagccttctckcctttctgcccaccaagggagcacctgaagcctgagttcctgaaggtgaaccccctggggaaggtgcctgccctcagagatggcgacttcctactagcaa

SEQ ID NO: 403254 - DNA, 201 bp, Homo sapiens
ggccagggtctcaactggccatcctgcacaccagctagggcactgcacactgaccaaagagactaatttgcatatcagccagagatatgccaggaggaggsacctgggatcctggtggattgaccaggaaatacagtgttcttttccctattgcagagatctctggttgatacgaaaattagtctctttggtctgtttgca

SEQ ID NO: 403255 - DNA, 201 bp, Homo sapiens; identical to SEQ ID NO: 89470

SEQ ID NO: 403256 - DNA, 201 bp, Homo sapiens
caagacactggccagggtctcaactggccatcctgcacaccagctagggcactgcacactgaccaaagagactaatttgcatatcagccagagatatgccmggaggaggcacctgggatcctggtggattgaccaggaaatacagtgttcttttccctattgcagagatctctggttgatacgaaaattagtctctttggt

SEQ ID NO: 403257 - DNA, 201 bp, Homo sapiens
gtctttgtctatccacagcccatggcagccaactataatgtcttcctcaacagctccaagctagctgagtggcgtatgcgggtggagctgaatattggctstggcctctttagggaggcccatgatcgactaatgcagttggccgactgggacttttcaacattggatccaatggtcacgaggaaaatctgtgagtttcgg

SEQ ID NO: 403258 - DNA, 201 bp, Homo sapiens
accctggccagttgctgatcccaaagataacaggggaggaagtttcagctgagaagatggagcatgcagtggaagaggtgaagaacagcctgcagctcttygaggagtattttctgcaggataagatgttcatcaccgggaaccaaatctcactggctgacctggtggccgtggtggagatgatgcaggtgtggagtggat

SEQ ID NO: 403259 - DNA, 201 bp, Homo sapiens
ctttccataggtagatgttagggacgtgggccagaggctgtgggagaggacccaggtggggctggtccccaggctgaccacatcttcgtctttgtctatcyacagcccatggcagccaactataatgtcttcctcaacagctccaagctagctgagtggcgtatgcgggtggagctgaatattggctgtggcctctttagg

SEQ ID NO: 403260 - DNA, 201 bp, Homo sapiens
agagtacagagacctggcagggcaggtggccctggagtacagcctcctcttccctcctcttcccaaccctggccagttgctgatcccaaagataacagggraggaagtttcagctgagaagatggagcatgcagtggaagaggtgaagaacagcctgcagctctttgaggagtattttctgcaggataagatgttcatcac

SEQ ID NO: 403261 - DNA, 201 bp, Homo sapiens
gcccccagaaatgtttccaactggaggcggctggtccaggaagagtttcagttcctgcccccacctcaggttccctgttaagatgaccctgattgtgtccragaagcttccctttggatgtccagctgtgtgctgggcctggcttccttaaagtggagacagagtgagagcgatgggattgcggatgggacccaggccctc

SEQ ID NO: 403262 - DNA, 201 bp, Homo sapiens
acacacagattgcggcttttctttttttcttgttttttgatggagtctcgctctgttgcccagcatggagtacggtggtgctatctcggctcactgcaacytctgctgggttcaagtgcgtctcctgcctcagcctcccgagtagctgggattagaggtgcatgccaccacgcccagctaattttttgtatttttaacagg

SEQ ID NO: 403263 - DNA, 201 bp, Homo sapiens
gtgccccctgacttcctggtggtggtgtccccattgctcccaaagctcacagtttcctgtgtctctttctcccagttcctttctagtcatagttcaggctygattcacctgtgtctctttctcccaattcctttctagtcatagttcaggctcgatttacctgtggatactcccagcctctacttctagaatcctccaggg

SEQ ID NO: 403264 - DNA, 201 bp, Homo sapiens
cacccaggacagcattcgaggcatttcattctgaactagagaatctcagcgtcaaaaggcccacagaaggccaggagcagtgctcacgcctgtaatcccartactttgggaggccgaggcaggtggatcacttgaggtcaggagttcaagacctacctgtccaacattgtgaaacactgtctgtactaaaaatacaaaaaa

SEQ ID NO: 403265 - DNA, 201 bp, Homo sapiens
gctgatgtgactcacccaggacagcattcgaggcatttcattctgaactagagaatctcagcgtcaaaaggcccacagaaggccaggagcagtgctcacgmctgtaatcccaatactttgggaggccgaggcaggtggatcacttgaggtcaggagttcaagacctacctgtccaacattgtgaaacactgtctgtactaa

SEQ ID NO: 403266 - DNA, 201 bp, Homo sapiens
ggcctgccccaagggttcagccatatacttcgtccccaccccttacatttcaccaacgacccaccccttctttggcttcccaaagatcttgggtgcaaacsgaactacagggtagactgtcttagtgagccagccaaactgcagggtagactgcccgccaggtctcccatcttagcccctgagcttgatcatagtgggagt

SEQ ID NO: 403267 - DNA, 201 bp, Homo sapiens
catgttggccaggctggtctccaactcctggcctcaagggatctgcccccattggcctcccaaagtgccgggattacaggtgtgagccatcgtgccccccsgtttttgtttttgaaaaaggatcttgatctttcacccaagctggagtgcagtggtgtgatcttggctcacagtagccccaaattcctgggatcaagtgat

SEQ ID NO: 403268 - DNA, 201 bp, Homo sapiens
tgcagggcagaccagcaccaggaaaaatcattctggcctgccccaagggttcagccatatacttcgtccccaccccttacatttcaccaacgacccacccmttctttggcttcccaaagatcttgggtgcaaacggaactacagggtagactgtcttagtgagccagccaaactgcagggtagactgcccgccaggtctcc

SEQ ID NO: 403269 - DNA, 201 bp, Homo sapiens
tccagcaccagagagatggatcctttcatgccctggcttatataatgcctaatcttaagcattaagtccataacctccctgcacctccaggggctaccctmcgtggactccacagtgtctctggctgcctcatcactccccaatcacccccacccttcttccagttgcaaccccctactctcttttcttcagatttacctt

SEQ ID NO: 403270 - DNA, 201 bp, Homo sapiens
aggttcccacaccagccatcaatcagcaaggcctaggacatcccctccgaagcatgtctcccctccatccccttccctctgtccccatggcctccaacatycccagacaccacaaccttcccgatagttgctggccccctcattgtccattctgccccctcgggctcaccctccatccagcaccagagagatggatccttt

SEQ ID NO: 403271 - DNA, 201 bp, Homo sapiens; identical to SEQ ID NO: 148538

SEQ ID NO: 403272 - DNA, 201 bp, Homo sapiens
ccagcctgggctaggatagagcgtagcatcactacgataccattaagatacctcataaaattaacaataattcctggatttcatctaatatgtggctcctsttcaaaactctatgattatctcctaaacattttcttggcagtttgtttggatcaggatccaaagaagtttttttttttttttttttttgagacggagtct

SEQ ID NO: 403273 - DNA, 201 bp, Homo sapiens
atcaataaatgtttaggaacatacttttcagagataagagttcttaaaacaaacaaaaaaaaagcaacaggctgggtgtggtggctcatgcctataatccsagcacttccagaggctgacacgggaggatcgcttgaggccaggaagttcagaactgcagtgaactctgattgcgccactgcactccagcctgggctagga

SEQ ID NO: 403274 - DNA, 201 bp, Homo sapiens
ggctggtgaggcgggaaaggcaggcagagctgccatgggggctgcgggaaccaggcctgggggcctggactcaatcggggcaacaggaagcacagaatgtyatgaatcaggaaggatcacagttctccacacttgacaaagattcttcggtgtgggaggacccggagggtgagcctgggatagagaagaacactgcatttc

SEQ ID NO: 403275 - DNA, 201 bp, Homo sapiens
gagccaggaggcagaggatgcagtgagccaagactgcgtcgttgcacttcagcgtgggcaacagagtgagatcccatctcaaaaataaaaataaataagtmaataaatcaataaatgtttaggaacatacttttcagagataagagttcttaaaacaaacaaaaaaaaagcaacaggctgggtgtggtggctcatgcctat

SEQ ID NO: 403276 - DNA, 201 bp, Homo sapiens
tggccgtggtggagatgatgcaggtgtggagtggattggaggagggttagaccctgggcagaggtaggactcctctgtgaccaatggggccatcacttgargataggctggtgaggcgggaaaggcaggcagagctgccatgggggctgcgggaaccaggcctgggggcctggactcaatcggggcaacaggaagcacaga

SEQ ID NO: 403277 - DNA, 201 bp, Homo sapiens
cttgtgggattctaggaccttgtgaactcagcacctgcccaccaggttggcaaagggggcagaagtgcacagtccgtctacacccatcctccccagtgttsagaaaggctcagggctccactaaccctgagtgagggtcagaggggtgggctccaactccatccccagcacagagggactccaaaagctcagcctgcaaaa

SEQ ID NO: 403278 - DNA, 201 bp, Homo sapiens
gttcagccatatacttcgtccccaccccttacatttcaccaacgacccaccccttctttggcttcccaaagatcttgggtgcaaacggaactacagggtasactgtcttagtgagccagccaaactgcagggtagactgcccgccaggtctcccatcttagcccctgagcttgatcatagtgggagtctaaacatggagga

SEQ ID NO: 403279 - DNA, 201 bp, Homo sapiens
gcatgcagtggaagaggtgaagaacagcctgcagctctttgaggagtattttctgcaggataagatgttcatcaccgggaaccaaatctcactggctgacytggtggccgtggtggagatgatgcaggtgtggagtggattggaggagggttagaccctgggcagaggtaggactcctctgtgaccaatggggccatcact

SEQ ID NO: 403280 - DNA, 201 bp, Homo sapiens
agtagagacagggtttcaccgtgttagccaggatggtctcgatctcctgacctcgtgatccgcccacctcggcctcccaaagtgctgggattacaggcgtraaccaccgcgcccggcctttttgagacggagtctagctctgtcgcccaggctggagtgcagtggcgcgatctcagcacactgcaagctccgcctcctggg

SEQ ID NO: 403281 - DNA, 201 bp, Homo sapiens
agttcgaggagtagacgagactgagagagaaaagctgactcagagaaagggagtgataacagggcatgctggcccacacctgcaatcccagttactctcaygggatctgtttctctgatgtctgggtatgaaaggactttctaagcctcagaacagtgggagaactcaacaaagaaaaaaccaatacatatacaaggttac

SEQ ID NO: 403282 - DNA, 201 bp, Homo sapiens
ccagcccaggtactcatgaacacgggcacgagcctgcaggtcagatggataccagtggtccggcgtctggtacttacagctcaggtaaatcaggatggccragctgggaacaaatgggcagtggctataaggacactggcaccaggcatttacccctaactgctcccatctgccagtggggcccgggggcttctctgcatt

SEQ ID NO: 403283 - DNA, 201 bp, Homo sapiens
tttctctgatgtctgggtatgaaaggactttctaagcctcagaacagtgggagaactcaacaaagaaaaaaccaatacatatacaaggttactttgtggargaaaaaatggattaaccttaagcaaaaaactgggaaggatctcggtaaaagatacgtcagaaggaagtaatgtcctttaagatgttcttagaaacccatc

SEQ ID NO: 403284 - DNA, 201 bp, Homo sapiens
gttttgaaactggaactggagagaggagctccctatggggaggtaaacgggagctggggccacctgtagtgacatttcctgagttcgaggagtagacgagwctgagagagaaaagctgactcagagaaagggagtgataacagggcatgctggcccacacctgcaatcccagttactctcacgggatctgtttctctgatg

SEQ ID NO: 403285 - DNA, 201 bp, Homo sapiens
cctcagtacacaaactgatggagatgatagagtgtacggcacacacaccgaggctactgtattgtgtgtctgtcctagctgggtcatgatgtgcggctacmtcccacacctgagtgtcccactgccctgctgggggttggggaaaatcattattgggatgagcaggtttgcaaaatgcctggtggactgaggcaggctgtc

SEQ ID NO: 403286 - DNA, 201 bp, Homo sapiens
gtatgaaaggactttctaagcctcagaacagtgggagaactcaacaaagaaaaaaccaatacatatacaaggttactttgtggaggaaaaaatggattaamcttaagcaaaaaactgggaaggatctcggtaaaagatacgtcagaaggaagtaatgtcctttaagatgttcttagaaacccatcagacaggtggggtgtg

SEQ ID NO: 403287 - DNA, 201 bp, Homo sapiens
gaatgggatcctctaaaagggatcttagagtttcacccagtgggatgtgacacttgcaggtgtcccaaactggtgggaaccttgactggaaggctggggtyaaggatgaactttctgccgtccagactgtcccctgcagagcagctgctgccagacagcgggagctgccagacagcgggagctcccacttcgtgcacagga

SEQ ID NO: 403288 - DNA, 201 bp, Homo sapiens
gagggtgttgggagggttttcttggccgcctgttccaggatgctcaagatgatgctgtgggcctcctggcatagctcagcacccaggaaagcctccactcrtccacgccatgctgccagtcgtggccgtccctcaaacagttcatagccgagagccaccggctgtagggacaaggatgaaaaagttgtgggcatacaactt

SEQ ID NO: 403289 - DNA, 201 bp, Homo sapiens
gctcctccagggccatgagatcagccagtgtcacctgctggccagcgaggaagggcctgtcccccaggaacttgtcctccagccattgcagggcctggtcyatggcagtcctgttgcgttccaccttctcctcgggcacctggaccccaatgagtggccccaacacctgatgggggcagacagtgggtcagtctatggccc

SEQ ID NO: 403290 - DNA, 201 bp, Homo sapiens
atgtacagagcacttacccagtgcccagcacaggggtggcaccctgtgtgtgagacagcatgaaacaggtagacacgcgccctgctgaaagtaagggaccrcctctctggaggatccatcgggcaataaggaggtttccacaccttaactgtgtctgccttgacctctggggcctgggagcagagccccctccagctggtg

SEQ ID NO: 403291 - DNA, 201 bp, Homo sapiens
ggattaaccttaagcaaaaaactgggaaggatctcggtaaaagatacgtcagaaggaagtaatgtcctttaagatgttcttagaaacccatcagacaggtrgggtgtggtggttcacgcctgtaatccctgtactttgggaggcagagatgggcggatcagttgaggtcaggagtttgagaccagcctgggcaacacggtg

SEQ ID NO: 403292 - DNA, 201 bp, Homo sapiens
aggaacttgtcctccagccattgcagggcctggtccatggcagtcctgttgcgttccaccttctcctcgggcacctggaccccaatgagtggccccaacayctgatgggggcagacagtgggtcagtctatggccccggcctactgccaactactctctgatggccaatcactctccagatggctctcctcacctggaccc

SEQ ID NO: 403293 - DNA, 201 bp, Homo sapiens
cctaactgctcccatctgccagtggggcccgggggcttctctgcatttgaaggactgccctccagcctcgccctccatctccagctccccaacaccacccmctcctcctacgagtctcctcctgtctttgttgccttgggcaccgactcttggctggaccttctgctttgcattttgagaacctcatctctgtgatatgcc

SEQ ID NO: 403294 - DNA, 201 bp, Homo sapiens
gtgggcaccgccgaggacaaccgcagccacagcgcccacttctttgagtttctcaccaaggagctagccctgggccaggaccggtgcgtaggggtagtagkggatccatgtgggactgccgcagactggagccactgatcctgcctcagggggaaaaacccatttcttgccctgcccagtaaggacacatcagggtctgga

SEQ ID NO: 403295 - DNA, 201 bp, Homo sapiens
gcctgtcccccaggaacttgtcctccagccattgcagggcctggtccatggcagtcctgttgcgttccaccttctcctcgggcacctggaccccaatgagkggccccaacacctgatgggggcagacagtgggtcagtctatggccccggcctactgccaactactctctgatggccaatcactctccagatggctctcct

SEQ ID NO: 403296 - DNA, 201 bp, Homo sapiens
cagccctgagaaacagcaaggtctgggactagaggcctggatcagcctcactccctggctgggcctccctgccctgccacattccggggcagctggggggytttggtgggtggggccaggtgcagcaggtggataaagagaagttttctagccggactctggtgggccaggggaggggaggcaaactggggtggctcatct

SEQ ID NO: 403297 - DNA, 201 bp, Homo sapiens
cactccagccgggccactgagcgagactgtctcaaaacaaacaaacgaacaaacaaaaagaagagaaactcatcagacgaagacacaggaaaaaaatgagygaaggaaatcagcagaggtttcattgaaggacaaagagaaatggtcaatacatggatgaaaacatgtttaacttcagtaataatcaaggaagcacacacc

SEQ ID NO: 403298 - DNA, 201 bp, Homo sapiens
tgccaccacgcccggctaatttttgtatctttagtagagacggggtttcgtcatgttggccaggctggtctcaaactcctgacctcaggtgatccgcccgyctggacctcgcaaagtgctgggattacaggcgtgagctaccgtgcccggcctttccatgttttaaagaacatattttgccaccccctggtggacagtggc

SEQ ID NO: 403299 - DNA, 201 bp, Homo sapiens
acctgctggccagcgaggaagggcctgtcccccaggaacttgtcctccagccattgcagggcctggtccatggcagtcctgttgcgttccaccttctcctygggcacctggaccccaatgagtggccccaacacctgatgggggcagacagtgggtcagtctatggccccggcctactgccaactactctctgatggccaa

SEQ ID NO: 403300 - DNA, 201 bp, Homo sapiens
tggggcaagagggaaagataaaaaggggcaagtaagtaacagaatgaatccttgttgctaatctcctggcccccatcccagacccttcaggggatcctggygattcgaagcagcatagcctgataggcctctggtgagggtgttgggagggttttcttggccgcctgttccaggatgctcaagatgatgctgtgggcctcc

SEQ ID NO: 403301 - DNA, 201 bp, Homo sapiens
cgtcctggaaaggccccagcgcacggacatctgagggttcgttcagagctctgtttctcggcgctgcatggtggcggaagggagggagcgaatgggatccyctaaaagggatcttagagtttcacccagtgggatgtgacacttgcaggtgtcccaaactggtgggaaccttgactggaaggctggggtcaaggatgaact

SEQ ID NO: 403302 - DNA, 201 bp, Homo sapiens
ccgactgcaaggggaaggggaaccggctggacagggagaagcaggtctgcttttcgggatcccggtgccagggaccctgcccagttccaggcgtcgccctracccagaaacgactgggcgccgccgtcctggaaaggccccagcgcacggacatctgagggttcgttcagagctctgtttctcggcgctgcatggtggcgg

SEQ ID NO: 403303 - DNA, 201 bp, Homo sapiens; identical to SEQ ID NO: 89487

SEQ ID NO: 403304 - DNA, 201 bp, Homo sapiens
tagagacagggtttcaccgtgttagccaggatggtctcgatctcctgacctcgtgatccgcccacctcggcctcccaaagtgctgggattacaggcgtaarccaccgcgcccggcctttttgagacggagtctagctctgtcgcccaggctggagtgcagtggcgcgatctcagcacactgcaagctccgcctcctgggtt

SEQ ID NO: 403305 - DNA, 201 bp, Homo sapiens
accccccactcacacacacacacacacacacacacacacactttctataaaacttgaaaatagcaaaaaccctcaactgttgtaaatcatgcaattaaagktgattacttataaatatgaactttggatcactgtatagactgttaaatttgatttcttattacctattgttaaataaactgtgtgagacagacaccctga

SEQ ID NO: 403306 - DNA, 201 bp, Homo sapiens
ctttctaggattactttgatattgtgaagagccccatggatctttctaccattaagaggaagttagacactggacagtatcaggagccctggcagtatgtygatgatatttggcttatgttcaataatgcctggttatataaccggaaaacatcacgggtatacaaatactgctccaagctctctgaggtctttgaacaag

SEQ ID NO: 403307 - DNA, 201 bp, Homo sapiens
cttcactgataatcccactttagccttccaattagctgggactataggcttgcgccaccatgtccagatttttgtattttttagtagagatggggttttgycacgttgcccaagctgtagtgtcttttctaatagaagctgagaatttcctttgaaactgtctttgtgaacttggaagtgaaatcagaaaaggaataataa

SEQ ID NO: 403308 - DNA, 201 bp, Homo sapiens
tgatggatatgtttaataccttaattgtggtgatggtgtctgtatgtacaaagtcaccaaaatgtatacattagaccaggtgtggtgtctcacacttacartcccagcactttggtaggccaaatggggaggattgcttgaggccaggagtttgagaccagcctggacaacatagcaagacctcgccgggcatgatgatgc

SEQ ID NO: 403309 - DNA, 201 bp, Homo sapiens
gtggttcaggaggtgcaggcaggtggtgacattactactacagctgtcttccaaaagtctgacctatggtgatttataggaagaaacttggatcatactgscttttaccccaatctttagattcagcataaactaatcaaagccagaatgttttaagttacttttgtttttgagacaggatctcttcctatcacccaggct

SEQ ID NO: 403310 - DNA, 201 bp, Homo sapiens
tctcggctcactgcaaactccaccttccaggttcatgccattctcccgcctcagcctcccaagtaactgggactacaggcaggcgcctaccaccatgcccrgctaattttttgtatttttagtggagacggggttttaccgtgttggccaggatcgtctcaatctcctgaccttgtggtccacccgccttggcctcccaaa

SEQ ID NO: 403311 - DNA, 201 bp, Homo sapiens
tctttgggaggctgaggctgcagatcacttgagcttaggagttcagaaccagcctgggcaacatggtgaaactctgtctctataaaaaatacaaaaattasccaggcatggaggtgtgtgcctgtagtcccagctactcaggaggatgaggcaggaacatcacttgagcccaggaggtcaaggctgcagtgagctgtgatt

SEQ ID NO: 403312 - DNA, 201 bp, Homo sapiens
caattctgccatttttctgcggtggctgaggccattctgctgaatggtttgaagtctctttagttaagtactatcttgatggtgctgtccaaagatacatscccagtaatagggtattttacacattttgaaatagacacattgctactctttgtttaatcagtttgtgtcctaaatttatatatcatgcctatgtaagta

SEQ ID NO: 403313 - DNA, 201 bp, Homo sapiens
tcacaaagttttggatttctgtatttgggatgccaaccaacccatactgctattttttactttcttcctattttccactgctgtgttctgttgctcccatktttggtttttgaattaatcttcaggacatttttttctttctgtttttctttactatataataacagtattttcaaaccagtgatctgcttttaagcacat

SEQ ID NO: 403314 - DNA, 201 bp, Homo sapiens
tgttttatatcttctgtcttggaatgagcattgcttttttctttctttctttctttttctttttgagacaacatctcactctgtcgcccaggctggagtgyagtggcgccatctcggctcactgcaacctccgcctcctgggttcaagcgatgctcctgcctcagcctccaagagtagctgggactaggcgcacaccacca

SEQ ID NO: 403315 - DNA, 201 bp, Homo sapiens; identical to SEQ ID NO: 89491

SEQ ID NO: 403316 - DNA, 201 bp, Homo sapiens
tttttaattgtaaccagtctgggtttgggggaggggagaagtgagtataaagaaaatactgtccctctgttaacttacttcaagttgggtaccattgtaattttttttttttttttttttttttttgagatggagtctcattctgtcacccaggctggagtgcagtggtgcgatctcactacaacctctgcctcctgggtt

SEQ ID NO: 403317 - DNA, 201 bp, Homo sapiens
tccagcctgtacaacagagaccctatctctaaaaaaatagaaactttattaaaactattttcagttctttggtcatgaccttggctgtctttgtcagaagycatgggaaatattgcaagttttcatttggttaaggtttggggttaattttggaattggctctgctcttccaggtttgttgaatgtacagagtgcggaaga

SEQ ID NO: 403318 - DNA, 201 bp, Homo sapiens
gatttataccctgggtcacattacaaatactactggttaacaattcattgtttgacttttgaacttagtttcctcggtttgaggatgtctttgaatacagrtagatgtttgagtccattctttcttttttcgctctgtagcccaggctagagtgcagtggcatgatctcagctcactgcaacctctgcctcctggttctgg

SEQ ID NO: 403319 - DNA, 201 bp, Homo sapiens
ttttaattgtaaccagtctgggtttgggggaggggagaagtgagtataaagaaaatactgtccctctgttaacttacttcaagttgggtaccattgtaattttttttttttttttttttttttttgagatggagtctcattctgtcacccaggctggagtgcagtggtgcgatctcactacaacctctgcctcctgggtta

SEQ ID NO: 403320 - DNA, 201 bp, Homo sapiens
agcaattagaagtgattgttttttttgagacggagtctcgctctgtcgcccaggctggagtgcagtggcgcgatctcgggtcactgcaagctccgcctccygggttcaagccattctcctgcctcagcctcccgagtagctgggactacaggcgcccgccaccacacccggctaattttttgtatttttagtagagacggg

SEQ ID NO: 403321 - DNA, 201 bp, Homo sapiens
agccttatcctgatgttaagaattagtccaccagcctgggcaatatgtcaagacgtcttctctacaagaaaatacaaaaaagttaacggggcatggtggcrtgcacctgtagtcccagctactgatgaggctgaggtgggaggagcacttgaggctgggaggtcgaggctctggtgagccgtgattacaccactgcaccct

SEQ ID NO: 403322 - DNA, 201 bp, Homo sapiens
cttgtagcactagagactctgtttcaaagaatgcacaagaatacttacccttattacttgtaatatactctcatattttctgttgcttttttttcttttctttttttttttttttttagtactggttgcagcctactatattgatttttatgacccactgttggcttttgagccataatttgaagaatactggcgtagaag

SEQ ID NO: 403323 - DNA, 201 bp, Homo sapiens
gagtacattatttacctcttttgaaatgagtttgtcatttgccttggaagtttttggtacattgtaattaacaaagtgaattgtttattttgttcaagatccatgcttggtttgccagttgttataaatgtagaaaatataccagataccaacttagaaaccattcactctccttgttatttacagatatgcaaggttttt

SEQ ID NO: 403324 - DNA, 201 bp, Homo sapiens
ccaccacagccggctaatttttgtatttttagtagagatggggtttcactatgttggccaggctggtcttgaactcctgacctcatgatccacccacctcsgcctcccaaagtgttgggattacaggcgtgagccaccacccctggcgtgttggggtttaaaaagaataaacttcaagttaatctcttcccaaagtataag

SEQ ID NO: 403325 - DNA, 201 bp, Homo sapiens
ggacatattcccaaaccatcagttttctactttttatacaaacaaaatacaggaataattattcaaatgaggccaagcatggtggttcacgcctataatcscagcactttgggaagctgtggtgggaggattgctagagcccgggaatttgagaccagcctgggcaacatggcaagaccctgtctctattttttaatagtc

SEQ ID NO: 403326 - DNA, 201 bp, Homo sapiens
gttactaataatttttctttcttttttttttttttaatattcacttgcagcaaccaatgagttaagtcattcccctcatttcttcagggttccctgtgttrgtacaccctaaaaattgtctcatttttcaggagagagaaatgtttgtaaatagccttgactaaaatgcaggaaagaatagcaatagtaatagcatttgtc

SEQ ID NO: 403327 - DNA, 201 bp, Homo sapiens
atgccaccatgcccgtctaatttttgtatttttagtagagacaggatttcaccgtgttggccaggatggtctcgatctcttgacctggtgatccacccgcytcgagctcccaaagtgctgggattacaggcatgagctaccacacccggcctcatttaataatttcacaacagctctgaggttattggcctgaagcttagc

SEQ ID NO: 403328 - DNA, 201 bp, Homo sapiens
cagctaaatatgagtgacaagcatcttcgtagtctggtttccccccactccatggcaaccccccagaggtgaaaattatctgaagtaacaaatatactctmccgatgatgaaattttttttgccaattaagaaaaaataaggcccttgctgaaattgaaagctttttaaatcactggcttctcaaagaactgtttgattcc

SEQ ID NO: 403329 - DNA, 201 bp, Homo sapiens
ttttttaaagttcttctgcttaattggtaactaatttcaaatgcactttttttttttaagttttcaaaccagaagaactacgacaggcactgatgccaacwttggaggcactttaccgtcaggatccagaatcccttccctttcgtcaacctgtggaccctcagcttttaggaatccctgtaagtatttggtggtactttt

SEQ ID NO: 403330 - DNA, 201 bp, Homo sapiens
caggcagattgcttgatcttagaagctcaagaccagcctgggcaacatggcgaaatcctgtctctgctagaaataagaaaattagccgggcatggtggcayccacctgtaatcccagctactcaggaggctgaggcaggagaatcgcttgaaccccggaggcagaggttgcagtgagctgagatcatgccactgcactcca

SEQ ID NO: 403331 - DNA, 201 bp, Homo sapiens
ctcccaggtgccagtgattctcctgtctcagccgcccaggtagctgggactacaggcacgtgccacctcacctggctaatttttgtatttttagtagagayggggtttcactgtgttggtcacgctgacttcaaattcctgacatcaagtgatccgcctgcctcagcttcccaaagtgctaggattacaggtgtgagccac

SEQ ID NO: 403332 - DNA, 201 bp, Homo sapiens
catctagaaagcaatagcctacatacagatgttcacagatttctctgagactggcttgtgtggtaagtagccagtaaatgtttgtaggctgaccaggttcrggagccctgtaacacacataatatcatattacactgtcacactttctacttgacataaaatattctaagtctaggaactctttttttttttttctttttc

SEQ ID NO: 403333 - DNA, 201 bp, Homo sapiens
tgacattttgtagaatgagattcttaccttaacctgatacacagaaaataatagaagcataaaagtggtcgggcatggtggtggctcacgcctgtaatccsagctctttgggaggctgaggctgcagatcacttgagcttaggagttcagaaccagcctgggcaacatggtgaaactctgtctctataaaaaatacaaaaa

SEQ ID NO: 403334 - DNA, 201 bp, Homo sapiens
aactcctgggctcaagcagcctgccttggcctcccaaagtgccatgattacagttgtgagccacctaccaggtctggcctaaaagcatttttttatttttrttttttgaggtgggatctcgcactgtcacccaggctggagtgcagtagcgtgatctcggcttactgcaacctccgcctccaaggttcgggtgattctcaa

SEQ ID NO: 403335 - DNA, 201 bp, Homo sapiens
aatactaatctctgaacatgggcttctgatgggggcagtggaattccaggatacttgtgttgtgtgataaagggtttttgattatttgacttaatgcatayagtttgcattaagggcatatatattgaaatgtgaaagatggacatttttgtttgtgtatattttctttacctctaaatatttatatatatacatttttga

SEQ ID NO: 403336 - DNA, 201 bp, Homo sapiens
ctcgctgcaacctcaacctcctgggctcaagcaatcctcccatctcagcctcccaagtagctgggactacagatgtgcaccaccatgcctggctaattttygtatttttttgttgacactggtgtccttctacattccaggctggccttgaactcctgcgttcaagcaaccctccagccttggccttccaaagtggtagga

SEQ ID NO: 403337 - DNA, 201 bp, Homo sapiens
gcagacttgaccccctttctcctacagtgacacctgtctatagctgcactcatggctgactctagaagagctgtgttttctctccacttcagtcctcaccrttctctattgttttgggtacttaaaacagttttacttggtattagctgcttggcacttgccatttagcttggaacacctatccatattgttgacttgaaa

SEQ ID NO: 403338 - DNA, 201 bp, Homo sapiens
atccagctaattttttttttttttttttttttttttttttttttttttgagacaaagtctcactctgttgcccaagctggagtgcagtggtgtcattgcarcctccacctctcgggttcaactgattctcctgcctcagcctcccgactagctgggactacaggcatgctccaccattcccggctgatttttttattttta

SEQ ID NO: 403339 - DNA, 201 bp, Homo sapiens
agcaggtcttcctctcctatgcctgaggcttgaatgtacagcccttgatggagggtatggccagggtggagccaggtcactacagacatctgtcctttccsagggtgctgtaaaaatattttctctgtgcactatgttgaaagtactacactagagcatgtgcagataatccaggaaaaagaccttagaatttatgtattt

SEQ ID NO: 403340 - DNA, 201 bp, Homo sapiens
tgaacgcctgccttggcctgctaaagtgctgggattacaggtgagaaccaccatgcccggacttttttctctttttttttcttttttagaacttgtaaccttttttttttttttttttttttttttgagacagagtctcactctgtcgcccaggctggagtgcagtggcgcgatgtccactcactgcaagctccgcctccc

SEQ ID NO: 403341 - DNA, 201 bp, Homo sapiens
acgggtttcaccgtgctatctaggatggtctcgatctcctgacctcgtgatccgcccgcctcggcctcccaaagtgctgggattacaggatattttatttytttaagaattatttctgtttttgtatttaagaggtacatgatatgtagtgtggtataatatgcatattatttaaaatcaatgttcacagtttatgtgcat

SEQ ID NO: 403342 - DNA, 201 bp, Homo sapiens
agacagagtctcactctgtcgcccaggctggagtgcagtggcgcgatgtccactcactgcaagctccgcctcccgggttcacgccatcctcctgcctcagyctcccgagtagctgggactacaggcatccgccaccgcgcccagctaattttttgtattttttagtagagacggggtttcactgtgttagccaggatggtc

SEQ ID NO: 403343 - DNA, 201 bp, Homo sapiens
caagcgattccttgcttcagcctcccaagtagctgggactacaggcgcctgccaccacacccagctaattttttgttttgttttgtttttagtagagatgkggtttcgctatattggccaggctggtctcaagctcctgacctcaagtgatctgcccaccttggcctcccaaagtgctgggattacaggcgtgagccactg

SEQ ID NO: 403344 - DNA, 201 bp, Homo sapiens
tgatttcttaatatcacccatttctcagtctgtacctaaatatgtcttactctcatttcaaaatgtgtgtttatagttggcttgtttgaatcaggattccmccccccccccaacttatgctatggatttgttggagaaactgggacattccatatcctatatgatttcttttttattaaggtttgagtattttctccggaa

SEQ ID NO: 403345 - DNA, 201 bp, Homo sapiens
gtcacaagggatggcaaggggaggagaggaggcaaacccagagataatttcagtgacatgataaaatgctaaaagatacagaaggagcaggattgggaagaaaaaaaaaaactacaagaagaggaagggcacatacaggaagagttatacttaggaactaagattaattggatcaagtagaccattaaggcaatattttgt

SEQ ID NO: 403346 - DNA, 201 bp, Homo sapiens
aggcttcatccttgtccctgcaaaggacatgaactcatccttttttatggctgcatagtattccatggtgtatatgtgccacattttctttatccagtctrtcattgatggggggtgttgtactttcaatcccttttttccttggtcttattttaggtatagttcttaagtgtttaagtttgttgatataaccaaatatcc

SEQ ID NO: 403347 - DNA, 201 bp, Homo sapiens
ctcggcctcccaacgtgctagggttacaggcgtgagccaccgcgcccggcctgaaatcttcactttttaatttaaaaaactaaatttatcccagagtttaraaaaactagtttttcaccaacccgaaagacccctctgctgagtctcttgaggagttcttcattgctctttaaaacctaatttgggtgtgcttttaactac

SEQ ID NO: 403348 - DNA, 201 bp, Homo sapiens
ctggtgctgctcatcttcagattgcacttggagtagcaagacaggccattcaggaaaatgctattaacagagatgaatgaatctctaggccataactagtrtaagaaacggttttcaatgtggacatgtcctcatttttgtaaggaagtataacagaagtccaagttggtccccctaatgttgattctagttggagaatgt

SEQ ID NO: 403349 - DNA, 201 bp, Homo sapiens
attttcagcaccaggaatctgtcttaaaaattagccaggttttggccgggcacggtggctcacgcctgtaatcccagcactttgggaggccgaggcgggcrgatcacgaggtcaggagatcgagaccatcccggctaaaacggtgaaaccccgtctctactaaaaatacaaaaaattagccgggcgtagtggcgggcgcct

SEQ ID NO: 403350 - DNA, 201 bp, Homo sapiens
aagaacaattttccaagagaaaaaatgacacactggatcctgaactgtaagtacgatccccttgaatagtcagtacgctttggcttttctttttccctttsattctcttgaagtttgcatgaccaatcagatgatcctatattcttgggctaaatctacataacatacatctaatggatagtaaaaccatggaaaacactg

SEQ ID NO: 403351 - DNA, 201 bp, Homo sapiens
ttttctgcggtggctgaggccattctgctgaatggtttgaagtctctttagttaagtactatcttgatggtgctgtccaaagatacatccccagtaatagrgtattttacacattttgaaatagacacattgctactctttgtttaatcagtttgtgtcctaaatttatatatcatgcctatgtaagtatttccttaattc

SEQ ID NO: 403352 - DNA, 201 bp, Homo sapiens
tccttaacagatttcgtaagaatgattaagagacttcttgtggttcttctaatttaggatcagtcaactgaatgaaaataatctgttattactgtgttaarcttgctttttcttaaaagtaatttatgttcattataaaatttgaatagtatgacagtttatgaagtaaaaagcgacggtctcagcttctctcttcccacc

SEQ ID NO: 403353 - DNA, 201 bp, Homo sapiens
ggccaatcatggagggcttataatacaggaatttagactttccattttacccatttaatggatggggcagaattgtgctttaggcagttaagtaaaaggargaatagtttgggaagaacagggaaaaacaggaggcagggagaccagtgaaacagctgttttagggttccagccacccttaccacagaagatggaaagaag

SEQ ID NO: 403354 - DNA, 201 bp, Homo sapiens
tctgtaattcttctgtatttaactctactagaaagctgaccaaaaaacgaaaacagccagtcccttgtccctggagtgtcagtgtttagtggcctgcatgygttttcacggtcacttctcttccctgatgtctgtcttccctcctccaggcagagaactgtcttgcaaggttgatggtgcgtttttgcctggttcttgaac

SEQ ID NO: 403355 - DNA, 201 bp, Homo sapiens
ctgacttctcattaagagatttcttatgacaagccttaggataaagatagggaatgccagtttatctcattagaatctagcgattcaaaacagccactctstgggacatcattatatttattgtctccttttctgtacctttgaaactttctctggtgagaaggtaaaaacaagccagtctttcttattttctttcactca

SEQ ID NO: 403356 - DNA, 201 bp, Homo sapiens
gtaattcctctcagggtttgtccaatggtagtaatctcgattgttcagtcagactcctcattttactatctcggttctcagacatataatcaagttcttayaggaagtggtaattaagttgagagggaaatgaaggcttgatttcaggttgtaattccgtacctaaaaattggttaaacagtctctttgggagagaaatag

SEQ ID NO: 403357 - DNA, 201 bp, Homo sapiens
caatcatacattttctttttttctttttttgagacagagtttcgctcttgttgcccaggctggagtgcagtggcgcgatctcggctcactgcaacctctgyctcccaggttcaagtgattctcctgcctcagcctccctagtagctgggattataggtgtgtgccaccatgcccggctaatttttgtattttggtagagac

SEQ ID NO: 403358 - DNA, 201 bp, Homo sapiens
gaaaatgatatttagaaattattgagtactgtgtctgctttaatagcacatgtattaaaattagaatgatatgaagattagcatgttccctgcactcataygacatgtaaatctgcaaagtagtgactactttgctatgattttttaaaatttcaccaagttatcctgtttgtattgaaaaaagtacaaatgagatttgag

SEQ ID NO: 403359 - DNA, 201 bp, Homo sapiens
ttctcaggccattgctgagaagcagccttcccaggaagtgaagatggaggccaaaatggaagtggatcaaccagaaccagcagatactcagccggaggatrtttcagaggtgagagtagggcaattactgtttgatttggttaggacctcagtataggaacccaagttttaaaaaatattgcagaaaaatattttgataat

SEQ ID NO: 403360 - DNA, 201 bp, Homo sapiens
ggtgtgatctcagctcaccgcaagctccgcctcctgggttcatgccattctcctgcctcagcctcccgagtagatgggactacaggcgcccgccaccatgscggctaattttttttgtatttttggtagagacggggtttcactgtgttagccaggatggtctctatctcctgacctcgtgatccgcccgcctcggcctcc

SEQ ID NO: 403361 - DNA, 201 bp, Homo sapiens
tgcatagaattgaactgcttagggagtttgaggctgcagtgagctatggtcatgttactgcgctccagcctgagtgatggagtgagaacctgcctcaattaaaaaaaaaaaaaaaagaaagaaaaaacagtgcagtggctcatgcctgtcatcccaacagttttggaagccaaggcaagaggattcccaggagttcaagac

SEQ ID NO: 403362 - DNA, 201 bp, Homo sapiens
tgaggcaggagaatcgcttgaacccagaaggcagagattgcagtgatctgggattgcaccactacagtccagcctgggcaacagagcaagactttgtctcaaaaaaaaaaaaaaaaaaaaggcattacagacaaaacccagaaaatgaagtcttatgatatcttgtgttaggacatcatcctgccctccaaagaaatacaa

SEQ ID NO: 403363 - DNA, 201 bp, Homo sapiens
tggtgttgacctgtgcttctttggcatgcatgttcaagagtatggctctgactgccctccacccaaccagaggtatgactagctcacagtggctagctccrgatttgtgtgggagttccaacttataataggtggaaaagcataacaggcaagaaaatgtttagtgtgtttggtttggaaatgcaaaatctcaagtgtcca

SEQ ID NO: 403364 - DNA, 201 bp, Homo sapiens
ggagtgcagtggcacgatcttggttcactgcagacttcgcctcccaggtgccagtgattctcctgtctcagccgcccaggtagctgggactacaggcacgygccacctcacctggctaatttttgtatttttagtagagacggggtttcactgtgttggtcacgctgacttcaaattcctgacatcaagtgatccgcctgc

SEQ ID NO: 403365 - DNA, 201 bp, Homo sapiens
gtttctgtatgttgcccagactagtctcgaactcctgagctcaagatatccacccacctcggcctcccaaaatgctgaaattacaggtgtgacccactgcrcccagcctttaaatatttatcttaaaaaatagtatcaagatgttcctttaaataattcatcaagtttccttaaaatgacaagagctgcctcatggagcaa

SEQ ID NO: 403366 - DNA, 201 bp, Homo sapiens
acatgattcatagctattatccatggagatactctgttgcatgccaaccagactcagactttgttaaacaataacatattaaatgctatgatggcctcaattttttttttttttttttgagacagagtcttgctccatcgcccaggctggagtgcagtcgtgtgatcttggctcactgcaacctccgccttccaggttcat

SEQ ID NO: 403367 - DNA, 201 bp, Homo sapiens
gctgaggctggagaatcacttgaacccaggaggcggagtttgcagtgaggcgagatcgcgccactggaccccagcctgagtgacagcaagacttcgtctcaaaaaaaaaaaaaaaagcagattgtaaaatttgtaaaattcagtttggagatcctgttagttgataatgtctgtttactgctactgtgaatgagacagatt

SEQ ID NO: 403368 - DNA, 201 bp, Homo sapiens
gtggctaattctgctatcctgttgcttaccttacattctgattgtatcgttggcagactctgcgtgtgtctcacctacttcccttttttttctgcccagctttcccagccagctgtaagcattgaaggacaggtatcaaatcctccatctactagtagcacagaagtgaattctcaggccattgctgagaagcagccttcc

SEQ ID NO: 403369 - DNA, 201 bp, Homo sapiens
cattgctactctttgtttaatcagtttgtgtcctaaatttatatatcatgcctatgtaagtatttccttaattctgttctgaattgctgtcttgttatgtyttttattttaacaggcacaaatgtctagttcttcctgcccggtgaactctcctataatgcctccagggtctcaggggagccacattcactgtccccagct

SEQ ID NO: 403370 - DNA, 201 bp, Homo sapiens; identical to SEQ ID NO: 89494

SEQ ID NO: 403371 - DNA, 201 bp, Homo sapiens
gtggatttttcacttatttttgattcttgaaacttctcttgatgtaggtttttataggagagagtggcagcaaatagtgggtgaaaacagatgattttttwaaaaataacaattttggacttagggtattctgaacatgagattattctgtgacatagcaatggtgttaattgttacaaagtaggaaataatttaaatgga

SEQ ID NO: 403372 - DNA, 201 bp, Homo sapiens
cgggatgcccaatgtatctaacgacctctcacagaaactatatgccaccatggagaagcataaagaggtaagatgcagccacccagagttggggaaaaacrgcaagatttctggccaggcatggtggctcacacctgtaatcccagcactttgggaggccaaggcgggtggatcacctgaggtcaggagttcaagaccagc

SEQ ID NO: 403373 - DNA, 201 bp, Homo sapiens
  misc_feature (1)...(201): n = A,T,C or G
ctagtcatttcacttttcttctcctcgtggatccaaaattgctcatacatggttactattggtgattccagtctgaatgagttatgttgtggttcccccancatctcaattgtataggtttgtggacagtggagagatggcagaatcctttccataccgaaccaaagccctctttgcctttgaagaaattgatggtgttga

SEQ ID NO: 403374 - DNA, 201 bp, Homo sapiens
tgagcttaaatctggattaagtagctatgtgaaaatatatcatacaaatcgggtgggaatttcttttctccaaaaatagtataaaggcaataataaaaacrtatagggatcaccaaatactgattgatgtgtatgtgccaggcactgctagttactacaaatagaaggaaaccacaggctcactgaacttccctgaagggt

SEQ ID NO: 403375 - DNA, 201 bp, Homo sapiens
cccaagcccaagcgactgcaggaatggtacaaaaaaatgcttgacaaggctgtatcagagcgtattgtccatgactacaaggtcagttgggacataggggycaggtgctgacaatagatctggaaatgcactaatgttgctgctctttgttctgtcatttaacttttttttttttttttttttttttttgagacggagtct

SEQ ID NO: 403376 - DNA, 201 bp, Homo sapiens
ttttttcttttttagaacttgtaaccttttttttttttttttttttttttttgagacagagtctcactctgtcgcccaggctggagtgcagtggcgcgatstccactcactgcaagctccgcctcccgggttcacgccatcctcctgcctcagcctcccgagtagctgggactacaggcatccgccaccgcgcccagctaa

SEQ ID NO: 403377 - DNA, 201 bp, Homo sapiens
tgacacgattttggctcacttcaagctccgcctcctgggttcatgccattctcctgcctcagcctcctgagtagctgggactacaggctcctgccatcacrcccggctaaatttttttgtatttttagtagagacggggtttcactgtgttagccaggatggtctcgatctcctgaccttgtgatccgcccgccttggcct

SEQ ID NO: 403378 - DNA, 201 bp, Homo sapiens
gcagtgcaaccttccccactgtcgcacaatgaagaatgtcctaaaccacatgacacactgccagtcaggcaagtcttgccaaggtaagtggacccacaggrttactgtacttagcaatttttacagccagggagaagaaggaaaatgtgatcaagtctattttgtggtgatggatatgtttaataccttaattgtggtgat

SEQ ID NO: 403379 - DNA, 201 bp, Homo sapiens
tgggtgtgaggagggcatgcttcataccacatattctgtgataaggagtggtaggggccatggcatgcatgatggtgctaccaccctgacgttgatcctgkcaggataattgccacttggttatataaaggcagataagctccctgtttttgtgggtagaagaaatagaaaaccggaaatattgactttaggccaggcctt

SEQ ID NO: 403380 - DNA, 201 bp, Homo sapiens
  misc_feature (1)...(201): n = A,T,C or G
aagtctctgccagctttcaagacattttaagctttcatgtttcttgtcagccatgattattctgtataatcaatgctttaaaagaacatagaaattcctanatgtacatgcatgttttcacaggatatttttaaacaagctactgaagatagattaacaagtgcaaaggaattgccttatttcgagggtgatttctggccc

SEQ ID NO: 403381 - DNA, 201 bp, Homo sapiens; identical to SEQ ID NO: 89492

SEQ ID NO: 403382 - DNA, 201 bp, Homo sapiens
ttacttatctgaaggactaggttatgaatattataggccttgtgggtcacatatctctggcatattttctgtcttttaaaaacacactctttttaaatgtraaaaaccattcttagctatacaaaataggcctgagccagaatttaagttactaagcctggcttagtaacctcaccagttatttccccatagcatatctcg

SEQ ID NO: 403383 - DNA, 201 bp, Homo sapiens
tttatgttttttgttgtcttgcaatccctcatttcttcgtttgttttgtgtttttttttctccctcatgcttgtcgttgtctgcacttggctttgattgcaaaaaaaaaaacaaaaaaaaacaaaaaaacaaacaaaaaaaccaaaacccaaactgtggggcccatatatctgcatcattgaatgtccttgtcgccgttga

SEQ ID NO: 403384 - DNA, 201 bp, Homo sapiens
ttagttcttacgtaacaattctcttaactttgttggagcccctttgaagttaatgtcagtagagagaaatggatatgttggccctagtttcacccatccarcattagttttgtttgtaagctaagccattgggtccactttgctttgaagtttgatttgtgcccctcatttgagggcagaattttaactgcatttgatcct

SEQ ID NO: 403385 - DNA, 201 bp, Homo sapiens
attgtccatgactacaaggtcagttgggacataggggccaggtgctgacaatagatctggaaatgcactaatgttgctgctctttgttctgtcatttaacttttttttttttttttttttttttttgagacggagtctcgctctgtcacgcaggctggagtgcagtgacacgattttggctcacttcaagctccgcctcct

SEQ ID NO: 403386 - DNA, 201 bp, Homo sapiens
ttgtccatgactacaaggtcagttgggacataggggccaggtgctgacaatagatctggaaatgcactaatgttgctgctctttgttctgtcatttaacttttttttttttttttttttttttttgagacggagtctcgctctgtcacgcaggctggagtgcagtgacacgattttggctcacttcaagctccgcctcctg

SEQ ID NO: 403387 - DNA, 201 bp, Homo sapiens
ccattctcctgcctcagcctcctgagtagctgggactacaggctcctgccatcacgcccggctaaatttttttgtatttttagtagagacggggtttcacygtgttagccaggatggtctcgatctcctgaccttgtgatccgcccgccttggcctcccaaagtgctgggattacaggcatgagccaccgtgcccagcctt

SEQ ID NO: 403388 - DNA, 201 bp, Homo sapiens
aggtaagatgcagccacccagagttggggaaaaacggcaagatttctggccaggcatggtggctcacacctgtaatcccagcactttgggaggccaaggcrggtggatcacctgaggtcaggagttcaagaccagcctgaccaacacggtgaaaccttgctctactaaaaatacaaaattagctgggcatggtggcacatg

SEQ ID NO: 403389 - DNA, 201 bp, Homo sapiens
cgtggtggctcatgcctgtaatcccagcactttggaggttgaggcaggcggatcacttgaggtcaggagttggagaccagcctggccaacatggcgaaccraaaccccgtctctactaaaaatacaaaaattagcctggcgtggtggcacacacctgtaatccttgggatgctggggtgggaggatcacttgaacctggga

SEQ ID NO: 403390 - DNA, 201 bp, Homo sapiens
tcctatgcaatttaagtttcattttttttgttcttggcaaatgaatttcgaatcctttctccttactgtacttactgtgtttcctctactttccactcttmgaaattttctctcctttgcagaatattttctgttgaggaatagggtgtaaaaaaatcttgattttgtgtgtgcgaggtccaagatttcaggttagaggtg

SEQ ID NO: 403391 - DNA, 201 bp, Homo sapiens
aaattgtggacacattccatggctgtttaaatttaggttgtaaatccaagtattggcctggttgtagggtgacagaagcagcgaacattgctggccagagacactgtgagtgtggctgccagtgtgcacagatgttgaataatctgttatcagtacagcagtttctcacaagttcctaatttcttaaggggatgttttaca

SEQ ID NO: 403392 - DNA, 201 bp, Homo sapiens
ggttttttccttcagaattcatacacatacacaaacgtcgttgtattcctttgcacctactaaagtgccattcagaaacattttttagatcatctttagasacttaatcacctgtagatttttgtggtgtttctttcgtatttgtgtaatgtggtagtttttgctttttagttttggtgtaacgtggtagtcgattttaca

SEQ ID NO: 403393 - DNA, 201 bp, Homo sapiens
aattgtggacacattccatggctgtttaaatttaggttgtaaatccaagtattggcctggttgtagggtgacagaagcagcgaacattgctggccagagacactgtgagtgtggctgccagtgtgcacagatgttgaataatctgttatcagtacagcagtttctcacaagttcctaatttcttaaggggatgttttacat

SEQ ID NO: 403394 - DNA, 201 bp, Homo sapiens; identical to SEQ ID NO: 89499

SEQ ID NO: 403395 - DNA, 201 bp, Homo sapiens
tcttccttctcctcttcagccctcttcacctatactcctgtctttggcttttctctacttaataagcctgacgttaggagcatttgatgattttagttatmgtagaataactataatgaagcagtttggtgatttgtgttttttttttttttcagcctatgggctatgggcctcgtatgcaacagccttccaaccagggcc

SEQ ID NO: 403396 - DNA, 201 bp, Homo sapiens
agtggatttttcacttatttttgattcttgaaacttctcttgatgtaggtttttataggagagagtggcagcaaatagtgggtgaaaacagatgatttttwaaaaaataacaattttggacttagggtattctgaacatgagattattctgtgacatagcaatggtgttaattgttacaaagtaggaaataatttaaatgg

SEQ ID NO: 403397 - DNA, 201 bp, Homo sapiens; identical to SEQ ID NO: 89495

SEQ ID NO: 403398 - DNA, 201 bp, Homo sapiens
ttgtaccccggcaaacccctcctcttcagcaccatggacagttggctcaacctggagctctcaacccggttagtttgacgtctttggtaatctctttggcstttacctggtattttgaaaatcctgtttgttcctactttataaattctcacagtcatttaaacagaccataactcctagttcttctgtaattcttctgta

SEQ ID NO: 403399 - DNA, 201 bp, Homo sapiens
gtgagtataaagaaaatactgtccctctgttaacttacttcaagttgggtaccattgtaattttttttttttttttttttttttttgagatggagtctcaytctgtcacccaggctggagtgcagtggtgcgatctcactacaacctctgcctcctgggttaaagcagttctgtctcagcctccctagtagctaggactac

SEQ ID NO: 403400 - DNA, 201 bp, Homo sapiens
tttgaccagtagattaatgtacacagtggagaagtggtaaggctttttaaaatgtcagctctactttttttttttttttttttttttgagacagaggtttrctctcgttgcccaggctggagtgcagtagctcgatcttggctcactgcaatctcaacctcccaggttcaagcgattctctgcttcaccctcctcagtagc

SEQ ID NO: 403401 - DNA, 201 bp, Homo sapiens
ggaggaaagggtttctgccttggtggccttttggcattattttgtgtttttctttgcttttctctctcttctttatttaataaaaacaaaaaaatggaaayagttgaaaattaatgcaaagtggtatttgtagggacattaagtggtaaataggaaagagaaaaagagtaggaagagtgttgcagatacaagtgggagtgt

SEQ ID NO: 403402 - DNA, 201 bp, Homo sapiens
taacctggctcaacctcctcacatttattcctaaccacagccctgtaaggtgggtgcgcaccttataggaatccaccttacttacccaccttacaggattrtggttaggaataaatgagaattctctttatcagatgcttaggactatgcttgcttctgtgtagtatgtgttcattgttaactgtttttaactttactgct

SEQ ID NO: 403403 - DNA, 201 bp, Homo sapiens
ggctaatttttgtatttttagtagagacagggagtcctgacctcgtgatccacccacctcggcctcccaaaatgttgggattacaggcatgagccaccgcrcccggcctgtttttgtttttcgtggatatacagtagtccccccttatccttgcgggatacattccaagatctccagtggatacctgaaaccctgtatagt

SEQ ID NO: 403404 - DNA, 201 bp, Homo sapiens
atttgatctttgtaacctccgcatacaattttttttcattccttattaagtcaagaactttcaccttcaagcaatttacagcttctctttggcatatccawatagctgtcattgctacttttggacttagggactgtcattaagtaaaataagggttacttaaaactcaagcattgccctgccccatagtcagtctgacaa

SEQ ID NO: 403405 - DNA, 201 bp, Homo sapiens
tcatttacattgtttagttgttcttgcagtcatttgggaaaataactgggtaaggttttttttttctctctttaatatcatataattgataacgaaagccrggagaattgaagagtaattcctctcagggtttgtccaatggtagtaatctcgattgttcagtcagactcctcattttactatctcggttctcagacatat

SEQ ID NO: 403406 - DNA, 201 bp, Homo sapiens
aaagtatatgggtgggtgtgtgtaggttatatgcaaatactacatgtcccctttatatcagggactggagcatcctcagattttggtatctgcagtggagrgagtggattctggaaccaattcccagcagataccaagggacaaccatatatatatagtatcatgacatcttgtatcatgtcacgtatatatatatcatat

SEQ ID NO: 403407 - DNA, 201 bp, Homo sapiens; identical to SEQ ID NO: 89500

SEQ ID NO: 403408 - DNA, 201 bp, Homo sapiens
agtggtgcaatcctggctcactgtagcctccatctcctgggttcaagctattctcctgcctcaacctcccaagtagctgggattacaggcacctgctaccrtgcctggctaatgtttgtatttttagtagagatagggtttcaccgtgttggccaggctggtctcgaactcctgacctcagtctgcccacctcggcctccc

SEQ ID NO: 403409 - DNA, 201 bp, Homo sapiens
gattacaggggtaagccaccgtgcccagccacctgggtcttaaagaataaattttcttgagatggagtcttgctgtgttgcccaggctgaagttatcctcytgcttcggcctcctgagtagctgggattgcagatgtgagccactatgcctgcctctaagaaactttcttataaaggaggaagaagaaaagtagcagtgca

SEQ ID NO: 403410 - DNA, 201 bp, Homo sapiens; identical to SEQ ID NO: 89493

SEQ ID NO: 403411 - DNA, 201 bp, Homo sapiens
ggcacaagagtcagttgttctacaactttcttccttctcctcttcagccctcttcacctatactcctgtctttggcttttctctacttaataagcctgacrttaggagcatttgatgattttagttatagtagaataactataatgaagcagtttggtgatttgtgttttttttttttttcagcctatgggctatgggcct

SEQ ID NO: 403412 - DNA, 201 bp, Homo sapiens
tgcgccactgcactccagcctgggcgacagagcaagactccgtctcaaaaaaaaaaaaagatacagaatcagacataagaattctatcttttattattcartttcacaaaggcattcagatctaacattttgctcatattcacaggtttgaatcaatttggccagatgagcatggcccagccccctattgtaccccggcaa

SEQ ID NO: 403413 - DNA, 201 bp, Homo sapiens
cttcagacgggggacacgctgtagctatcccgtcttattgtccccaagcatagttaggataccaaagcagtttcttaagtgtatgtcatcaagaatcttaygtttttcctcctaatacagtgcactcatgtggcactttatctggttgtcctgtcaacctaaaaagtggctgagctggccgagtgcagtggctcggtgcct

SEQ ID NO: 403414 - DNA, 201 bp, Homo sapiens
attttgataattagatctcatggcatagattttgcatgagaaagggtgttcagattactgattcccaactagatatctttggaatactaaaaattcttacrttttcttttagtctaaagtggaagactgtaaaatggaatctaccgaaacagaagagagaagcactgagttaaaaactgaaataaaagaggaggaagacca

SEQ ID NO: 403415 - DNA, 201 bp, Homo sapiens
agtggtcccctttaccaatcagttctgcatctagaaatttcttccaggaaataatggaagacaagatccacatactcagatgtttcataatcacgtaacartaattttgtggggttttttattagacatgttagtcttttttttctcaccagcattaatttgtaatactatatcttttgtcttctctagcaattttgactg

SEQ ID NO: 403416 - DNA, 201 bp, Homo sapiens
agtgcaaccttccccactgtcgcacaatgaagaatgtcctaaaccacatgacacactgccagtcaggcaagtcttgccaaggtaagtggacccacagggtyactgtacttagcaatttttacagccagggagaagaaggaaaatgtgatcaagtctattttgtggtgatggatatgtttaataccttaattgtggtgatgg

SEQ ID NO: 403417 - DNA, 201 bp, Homo sapiens
ttacaggcatgagcagctgtgcccagctggataattatttaataaattggggagcataggaagcatagtatttgtgaagtgggtaggcaggtgtgatgggrgtagtgatgttacatttggggcattttgaagttggtggttcttctgagttgagcagtcagtcactcttcatttgctgcacctttatctcattttagccaa

SEQ ID NO: 403418 - DNA, 201 bp, Homo sapiens
ctcccacctcagcctgtagctgcaccaccatgcctggctaatttttaaattttttttgtagaggcagggtcttgctatgttgctcaggcttgtctaaaackcctgggctcaagcagcctgccttggcctcccaaagtgccatgattacagttgtgagccacctaccaggtctggcctaaaagcatttttttatttttattt

SEQ ID NO: 403419 - DNA, 201 bp, Homo sapiens
tttgtaaccatttgttgctggcatacagaaattcactttgatacgtttatatttatggtataaccagtcatcttgctaacctctcacaatttccagttgtrtgtatttctttaaaattgacaacagttgtgtatattcatgggttatagtgtgatgatatatgtatttgctttgaactttctatgtcaacagttatattat

SEQ ID NO: 403420 - DNA, 201 bp, Homo sapiens
agcagaacatgctaccaaatgctgcaggcatggttccagtttccatgaatccagggcctaacatgggacagccgcaaccaggaatgacttctagtaagtgktttttgttatatttctgtttgagagaaattgataataaaatagtttctatctaaagtcattaatttctgtaagcttgtgtaactattctagagtttttta

SEQ ID NO: 403421 - DNA, 201 bp, Homo sapiens
agcttcagtttctgattatagcatcattgttgacctgatgaattaaccagatagccaagactatgataaatagtcttactcaatcgttgacttattggtasgatcaaagtagtgaaatatggagcaggcacaccattttcaggaatggcacaggctgtaagtgctgtgagcaaggctgtgataggaaaaacctgcatttac

SEQ ID NO: 403422 - DNA, 201 bp, Homo sapiens
ggagattgcagtgagccgaggtcactccattgcactccagcctgggcaacaagagcgaaactccacctcagaaaaagaaataagaaatgaataaaaacactgactgttcgctgggcgtggtggctcatgcctgtaatcccagcactttggaggttgaggcaggcggatcacttgaggtcaggagttggagaccagcctggc

SEQ ID NO: 403423 - DNA, 201 bp, Homo sapiens
ttgctctctgtgtattatacatacttatatcacttcgtaatgtcattttttttcttattaaattgagcttcttaaaggtaggagccatggtttatgcattycctgtgtcaaaaaatggagtctggcttatagtagactaaccataaaggttttcattgaaaatatccacatctctatttattaagaaatagcacattatga

SEQ ID NO: 403424 - DNA, 201 bp, Homo sapiens
gctgcacacgcagagccaggaccgctttgtctacacctgcaatgaatgcaagcaccatgtggagacacgctggcactgtactgtctgtgaggtaggcaccrggttgtgggaaggaggaggtgagctccgcagggttgttctgaggggccatgcagccacgtattttatagaggcctgtgggatgctaggggcttggcctcg

SEQ ID NO: 403425 - DNA, 201 bp, Homo sapiens
gggcatggtggcacatgcctgtaatcccagctactcaggaggctgaggcaggagaattgcttgaacctgagaagcggagattgcagtgagccgaggtcacyccattgcactccagcctgggcaacaagagcgaaactccacctcagaaaaagaaataagaaatgaataaaaacactgactgttcgctgggcgtggtggctc

SEQ ID NO: 403426 - DNA, 201 bp, Homo sapiens
aaaaacatggagtgaggttgggaaatgacatttaatgcttattgagaacaatatagagcagttttttattttggttttgtcatactttgacctttgtcttytccctttgcttttagattttggctctctatttgacttggagcacgacttaccagatgaattaatcaactctacagaattgggactaaccaatggtggtga

SEQ ID NO: 403427 - DNA, 201 bp, Homo sapiens
ttttgattttgacttttaataatttaagatctaaaatgctagatagtgacatggagcttcttgtattcaagtttgtaagtcagattttgcagtcactggcrtgactattttagacagttgtgctaatgctcattgtaccagaccatttctattttaatattctttagattcttcattcctgccctgttgttattgtttatt

SEQ ID NO: 403428 - DNA, 201 bp, Homo sapiens
gctgtcaagcagttcaaatatctaagctattttgtttgagtagttagacatccagcattgtagagaccaggtcttgtccaggttggtcttgaactcctggkcttaagcaatcctcctgccttggcctcccagagtgctgggattacaggcatgagccaccgcacctggcctaagattatccccccccccacccccaccccg

SEQ ID NO: 403429 - DNA, 201 bp, Homo sapiens
tctctatttattaagaaatagcacattatgactcctaccattaaatatattgttatatctctcagggtcaacagccagccccgcaggtccagcagccaggyctggtgactccagttgcccaagggatgggttctggagcacatacagctgatccagagaagcgcaagctcatccagcagcagcttgttctccttttgcatg

SEQ ID NO: 403430 - DNA, 201 bp, Homo sapiens
  misc_feature (1)...(201): n = A,T,C or G
aataagttacaggcataagattatgatatctagtttcaaagaagggagatattctgtgctattcccaaattacttaacaaaaaccttattttcttgtctcntttgtgctactctgcaggtgaccaagggagacagcaaaaatgctaaaaagaagaataataagaaaaccagcaaaaataagagcagcctgagtaggggcaa

SEQ ID NO: 403431 - DNA, 201 bp, Homo sapiens
ctggcacaagtattggaatgtttttatctcatttccaagtccagtttagccttgtagcctccttataaaattacagttttgagatggctggcattacactrtcttcagatggatactccatttgttcctattgctttgaatgtccctggttttcaagagatacatttattctgagaaatgtattaactgttatttttcttt

SEQ ID NO: 403432 - DNA, 201 bp, Homo sapiens
ttgattagtctcaaatacttaaaaatcagaagattttgcatttaaaaagtctgaatttctggctgctttaaaaaaaaaaggacatgtctggcagacttgascccctttctcctacagtgacacctgtctatagctgcactcatggctgactctagaagagctgtgttttctctccacttcagtcctcaccgttctctattg

SEQ ID NO: 403433 - DNA, 201 bp, Homo sapiens
taaaaaggatttattttaaaataatgccattgttatagtcaataaagttaatgatttcttaatatcacccatttctcagtctgtacctaaatatgtcttaytctcatttcaaaatgtgtgtttatagttggcttgtttgaatcaggattccaccccccccccaacttatgctatggatttgttggagaaactgggacattc

SEQ ID NO: 403434 - DNA, 201 bp, Homo sapiens
aactttatttattattattatttttttgagacggagtctcgctctgtcgcccaggctggagtgaagtggcgtgatctcggctcactgcaaactctgtctcscgggttcatgccattctcctgcctcagcctcctgagtagctgggactataggcgcccgccaccacgccctgctaattttttgtatttttagtagagatgg

SEQ ID NO: 403435 - DNA, 201 bp, Homo sapiens
acgtaagtataaggaaataatgaaggaactatatcagtatattaagcaggcatttttgaatagtggttttaggtcagttttgttacacatttgggtatttkttgttgttgttgttgttgttgtttgagataggatctcgctctgtcacccaggctagagtgcagtggtacattcacggctcactgcagcctcaacttccca

SEQ ID NO: 403436 - DNA, 201 bp, Homo sapiens
actgcagcctcaacttcccaagctgccgctatcctccttcctcagcctccctagtagctgagaccacaggtacaggccactaggcctggctaagttttgtrtttttttgtgcagtttggttttctccatgttgcccaggctggtctgctgagctcgagccgtctgccctccttggcctcacaaagtgttgggattacaggt

SEQ ID NO: 403437 - DNA, 201 bp, Homo sapiens
tggactatagatgtgtaccactatgcccaacacccagtaatgcctttttaatgtgaaaactactttagagaattgaaaggaaagaaaactcaaataatttytataataggttaatactgtcaataggtcaatcaggagtaattttcttcccccaggggatgtttggtgatgtctggagacagttttgattgtcacaattgg

SEQ ID NO: 403438 - DNA, 201 bp, Homo sapiens
tatagatgtgtaccactatgcccaacacccagtaatgcctttttaatgtgaaaactactttagagaattgaaaggaaagaaaactcaaataatttctatartaggttaatactgtcaataggtcaatcaggagtaattttcttcccccaggggatgtttggtgatgtctggagacagttttgattgtcacaattgggatat

SEQ ID NO: 403439 - DNA, 201 bp, Homo sapiens
tagaggttacagtaagccaagatcgcgcaccactgcactccagcctgtgcaacagagtaagaccctgtctcaaataaatagaaaaacatggagtgaggttkggaaatgacatttaatgcttattgagaacaatatagagcagttttttattttggttttgtcatactttgacctttgtcttttccctttgcttttagattt

SEQ ID NO: 403440 - DNA, 201 bp, Homo sapiens
aggatagtctctatctcctgacctcatgatcctcccgcttcggcctcccaaagtgctgagattacaggtgtgagccactgcgcccggctgttttttggggktttttttttgtattttggtaccgatgggttttcaccatgttccccaggctgttgtcaaactcctgacctcaagaaaccctcctgccttggcctcgcaaag

SEQ ID NO: 403441 - DNA, 201 bp, Homo sapiens
atgggttttcaccatgttccccaggctgttgtcaaactcctgacctcaagaaaccctcctgccttggcctcgcaaagtggtgggattacaggtatgagtcrccaggcccggccacttggttttttgccatcatggctccctacaacctctacctcccaggcttcactgataatcccactttagccttccaattagctggga

SEQ ID NO: 403442 - DNA, 201 bp, Homo sapiens
ttgttgattcagataataggactcttgagggcataatttattgtcttagtcttttattgtttgtcatgcgggttctgtgatagaatgactttcatactatrtctatcatgaattttcatgctaataagaaacaggttaaacaactcccccatgtataggtatggatattattggagccacataggataaatactagtagtt

SEQ ID NO: 403443 - DNA, 201 bp, Homo sapiens
acttgtctttctaggattactttgatattgtgaagagccccatggatctttctaccattaagaggaagttagacactggacagtatcaggagccctggcartatgtcgatgatatttggcttatgttcaataatgcctggttatataaccggaaaacatcacgggtatacaaatactgctccaagctctctgaggtctttg

SEQ ID NO: 403444 - DNA, 201 bp, Homo sapiens
atttttgtaaggaagtataacagaagtccaagttggtccccctaatgttgattctagttggagaatgtggatcctagttggagaatggtaagactgttagsttttgtatgtagtgaggctatgagcagtgtgttatgctgggtttcaggatgggaagccatgatacctaacaccaagaatagtaacagacaagattttaaa

SEQ ID NO: 403445 - DNA, 201 bp, Homo sapiens
tcttaattaacagtattatgttattcataaatataggttgtctcatgatacagacttgtcttcctcaatttagtagttcaactaaataaagaagttttccyaagcagcccagcaaatcattctgcagcagatactatttccagtatttgtagttttggtcattttgaacaaagctgtcagtaaaagctgctgaaattccaa

SEQ ID NO: 403446 - DNA, 201 bp, Homo sapiens
gtgatggatgtgaaccacgagaagtatgacaacagcctcaagatcgtcagcaatgcctcctgcatcaccaactgcttagcgcccctggccaacgtcatccrcaactttggtatcgtggaaggacccatgaccacagtccatgctatcactgccacccagaagattgtggatggcccctccgggaaactggcataacggccg

SEQ ID NO: 403447 - DNA, 201 bp, Homo sapiens; identical to SEQ ID NO: 89502

SEQ ID NO: 403448 - DNA, 201 bp, Homo sapiens
atacacccacaagaacaatccacaggagttctctgctcctcccgttcgacagacagccacatcttctcatgcatcaccagccgcatccctgagacaccacrgtgaaggtgaaggctggagtcaatggatttggtcgtattgaacacctggtaaccaagcctgcttttaactctggtaaagtggatattgtcaccatcaatg

SEQ ID NO: 403449 - DNA, 201 bp, Homo sapiens
ccatttgatgagaaatgcagtaagtgtggggattttacatggcccacagaggggaagggcctgacctccaggcaccaggggagtcagggctgaacccaggrctgacacgcagcctcacccccttgcctgggccatgccccgtgctttccagggctggagcctgggcatggtcttacctgcagcactgagacccagaaagag

SEQ ID NO: 403450 - DNA, 201 bp, Homo sapiens; identical to SEQ ID NO: 89505

SEQ ID NO: 403451 - DNA, 201 bp, Homo sapiens
cagtaagtgtggggattttacatggcccacagaggggaagggcctgacctccaggcaccaggggagtcagggctgaacccagggctgacacgcagcctcamccccttgcctgggccatgccccgtgctttccagggctggagcctgggcatggtcttacctgcagcactgagacccagaaagagatatggcctgtctgggc

SEQ ID NO: 403452 - DNA, 201 bp, Homo sapiens
tggccactttgtcaagctcgtttcctggtatgacaatgcatttggctacagcaacagggtggtgaacctcagggcccacatggccgccaaggagtaagacmccctgaccaccagccccagcgagagcaccagaggaagagagagaccctcactgctggggagtccctgccacactcagtcccccaccacactaactaagaa

SEQ ID NO: 403453 - DNA, 201 bp, Homo sapiens; identical to SEQ ID NO: 89507

SEQ ID NO: 403454 - DNA, 201 bp, Homo sapiens
tgcttggctgccattcagtccctcgctgtctcctgtgtctctgtacctgccttttgcacacataattaattgtgtgttttcaaaaatggcacatcattcckccatatacaacaacaaactcagtccagagacaaattgaatcaagttctctgggtgtttttttttctcacttcaattaacacgaagactggcatatatcag

SEQ ID NO: 403455 - DNA, 201 bp, Homo sapiens
taatcccagcactatgggaggccgaagcgggtggattgcttgagctcaggagtttgggaccagcctgagcaacatggcaaaaccctgtctctactaacaayaccaaaaattatccagacgtagtggtgtgtgcacctgtggtcccagctacttgggaggctgagctggaaggattgcttgagcctgggaggtggaggttgc

SEQ ID NO: 403456 - DNA, 201 bp, Homo sapiens; identical to SEQ ID NO: 89503

SEQ ID NO: 403457 - DNA, 201 bp, Homo sapiens
ggcactgccaaagctgtgggcaaggtcatccctgagctgaacaggaagcttactggcatgggattctgtgtcctcactgccaatgtgttggtcatggaccygacatgccatctggaaaaacctgccaaatacaatgacatcaagaaggtagtaaagcaggcatccaacgccccctcaagggcatcctgggctacacgagca

SEQ ID NO: 403458 - DNA, 201 bp, Homo sapiens
aatgcagtaagtgtggggattttacatggcccacagaggggaagggcctgacctccaggcaccaggggagtcagggctgaacccagggctgacacgcagcstcacccccttgcctgggccatgccccgtgctttccagggctggagcctgggcatggtcttacctgcagcactgagacccagaaagagatatggcctgtct

SEQ ID NO: 403459 - DNA, 201 bp, Homo sapiens
ccacgagaagtatgacaacagcctcaagatcgtcagcaatgcctcctgcatcaccaactgcttagcgcccctggccaacgtcatccacaactttggtatcrtggaaggacccatgaccacagtccatgctatcactgccacccagaagattgtggatggcccctccgggaaactggcataacggccgtggagctctccaga

SEQ ID NO: 403460 - DNA, 201 bp, Homo sapiens
agcctactgatataggctccatttttagctccgttttacagatgaaaaaaagaggcaccaagaggtgagacgcctgcccaaggcctcactgccagagggartgggtgccaggaccagaagacagtctgatcacaaaacacgtgctctgaatcagctttgctttgtggcagaagtaacacactggagtgcacctgcaaatgt

SEQ ID NO: 403461 - DNA, 201 bp, Homo sapiens; identical to SEQ ID NO: 89509

SEQ ID NO: 403462 - DNA, 201 bp, Homo sapiens; identical to SEQ ID NO: 89524

SEQ ID NO: 403463 - DNA, 201 bp, Homo sapiens
gcacaatctcagctcactgcaacctccgcctcccgggttcaagcagttctcctgcctcaggctctcgagtagctgggactacaggcgcccgccaccacgcscggctaatttttgtatttttagtagagatggggtatcaccatgttggccaggctggtctcgaactcctgacctcaggtgatccgcctgccttggcctccc

SEQ ID NO: 403464 - DNA, 201 bp, Homo sapiens
aaagttccaaccctctaatcatgccttggtctttctgagaccccttcccctaatcctgaagctatctagggacccccagccattagtcatgtcattagcaygcaaaagatacgttttgttttttttttgtttttgtttttgtttttttgatacctagtctccctctgtcacccaggctggagtgcagtggcatgatcttgg

SEQ ID NO: 403465 - DNA, 201 bp, Homo sapiens
agtttggggagctatgtgccaggaactggggacaatgaacaaatatttattattataccacagctgaaatgccatcttgtagagtcctttcctggccaccrtttttgaagtagcacagatactgatcactcatagcagcctgtcatattgcccaagtttgacattttcttgcatctgtgtgtgttcagtaggctttttctt

SEQ ID NO: 403466 - DNA, 201 bp, Homo sapiens
caaggctacacagccaccaagggacagaattcctcccaggtttgcttttagtgaatgattttaagtgcacatttatccatccatattctactaaggggtcsggaaagggattttttgaacttggtaattcaaagatttaagatctccaggtttaactcccttcagcccctgttttcttcatctggagaatgggcattcatc

SEQ ID NO: 403467 - DNA, 201 bp, Homo sapiens
ttactccaaagagacttatgccttctccctccagtttgtaatatagaggttgtaccaatgagttgagcaattaggtgcatcttaaaagtagaaatggcacrtggactggcttgtagagctgtgagggtttagtgaagttacacacctggaatgttcagcacagtgtctggctcatagtgggggtgctgccaaaggacacca

SEQ ID NO: 403468 - DNA, 201 bp, Homo sapiens
agaaaaagcaagtgtagatggctcccctccaaactaatcaacagcagttacatcttagaaaagggggaagaacataggattggatcttttactccaaagasacttatgccttctccctccagtttgtaatatagaggttgtaccaatgagttgagcaattaggtgcatcttaaaagtagaaatggcacatggactggcttg

SEQ ID NO: 403469 - DNA, 201 bp, Homo sapiens
tgggattacaggcatgagccaccgtgcctggccaggagtttattaaccttcatgcccaccacgtcaaccacaaaccacgtgtggctgcagagccctcgaartgtggctgctgtggctgaggaactgaatttcaagtctttatctattttaatttcagaacagatactcattcccattcttggaaaacttttaagtgtgtgt

SEQ ID NO: 403470 - DNA, 201 bp, Homo sapiens
gcccagctgatttttgtatttttttttctttttctttttctttgtctttttctttttttttgagacagagtcttgctctgtcaccaagttggagttcagtsgcgcgatctcagcttactgcaacctctgcctcccaggttcaagtgattctcctgcctcagcctcccgggagtagctgggactacaggtgcgtgtcactac

SEQ ID NO: 403471 - DNA, 201 bp, Homo sapiens
atcaggcactggacaggtacctgggagatggaaagaatcggcttagtctcaccccctcttaccccgcaatagaccagtgttcttgatggggatgactgcasccccagggggcagtcagcaatgcctggggacatttttggttgtcaggactcagggaggggatgctactggcatctccttggtagaggccggggatgcggc

SEQ ID NO: 403472 - DNA, 201 bp, Homo sapiens
gatgtttggggaaagggcatccgggcagcgggcacagccagggcactggcccagaggagggagggtgcttgtgtgtttgagtgacagcaagggggccagcrtggctggagaagaggcaagggccagtggggttgggggcagaaaggtaaggggtggggtcaaacctgtaaggcaaatgaggactggtttttcctgagtaaa

SEQ ID NO: 403473 - DNA, 201 bp, Homo sapiens
ctttgcaggtggtgactagagatggccccacacctccagccctataccctacttgcttagcctccccgcagaattctgtaaaagtctccagttgagtttcmttgacctagattgggtcaaacgtccatctttgaaccaacactgcagtctgggaatgaaatgctgtgattggccaggcctaggttatgtgtctgcaccagg

SEQ ID NO: 403474 - DNA, 201 bp, Homo sapiens
ttcaggccgggcacggaggctcacacctgtaatcccagcactttgggagctaaggtgggcaggtcacctgaggtcaggagttcgagaccagcctatccaayatggtgaaaccccgtctctactaaaaatacaaaaattagccaggtgtggtggtgcgtgcctgtaaccccagctacttgggaggctgaggcaggggaatcg

SEQ ID NO: 403475 - DNA, 201 bp, Homo sapiens
agccagtgaatagttagctggtgcaaaagtaattgcggtctttggtattactttcagtggcaaaaactgcattacttttgcaccagcctactagaacgctsagttcagtgccttaagcggtgtttcacagagagggagcaaggggcagcgcttgttaaaatgcaaattccctcagctccacgttaaaatgcaaattccctc

SEQ ID NO: 403476 - DNA, 201 bp, Homo sapiens
ccgtctcaaaaaaaaaaaaaaaagaaagaaagaaatagggtccagctttttcttttcacagatggggaaactgaggcccagagagttgaggtaacttgttytggatcatgcaaatagcttggaaataatggggtctgggtcttccatgcctcagaaactgggaacagtgcacccctgtgttgagctggtggctgctttgac

SEQ ID NO: 403477 - DNA, 201 bp, Homo sapiens
aatcttacacagccttacatttcaatttttttctttaaaaggagtgagttgtgtacaggggggttaaatgctttatagacaagaaaaaaaaaactgcgctrgaaccaacttattcatcatcttcttcatcttcatcttcttcatcttcctcctcctcatcctcttcgtcttcctcatcttcctcctcttccttctttttct

SEQ ID NO: 403478 - DNA, 201 bp, Homo sapiens; identical to SEQ ID NO: 89511

SEQ ID NO: 403479 - DNA, 201 bp, Homo sapiens
cttaatctagtcggggtattcagggaaggcttcctgaagaaggagatactttagctgaggagataagcagcccaagataaggtgggaagagggtatggacmcatctattagctaggactcttgataaacagagacagaaacccagcttccatagcattgagcaaaaaggtaaatttattggattatgtaagaggtgagcct

SEQ ID NO: 403480 - DNA, 201 bp, Homo sapiens
ggcaaattctgctcttaaaacccccacctagagccaactgctgcccctaataatatgcccaaaatattaccaggacgaaggcctcatgcttcctggatgarccacaaaaaaaaaggttgaggccatcttgttgaggaacattacatccagcaagtatttatttattgcttgctttgttcttggtcaagccttttcactttt

SEQ ID NO: 403481 - DNA, 201 bp, Homo sapiens
atgctgagaggggccggtcaggattctgtggccttaggagaaggggtgcagagtgacaactctatctagtaaatattaattgaccacctactgagctgcartgctccggaaacagagcattcaaggctcccagacaatgaatgcagaatatgtaagtcaatcatatgatgtgttagaaggtggtgagtgctgggggaaaaa

SEQ ID NO: 403482 - DNA, 201 bp, Homo sapiens
ccaggtgtggtggtgtgtacctgtggtcctctctactcgaggggctgaggtgggaagattgcttgagcagtccctggaggaagaaggtagagccaggaackatcattaattaaacacttaaccagctctaatatggtagtaaagcccttatgtgtatttagctgctctcccgattcacagatgagaaaaatgaggcccaga

SEQ ID NO: 403483 - DNA, 201 bp, Homo sapiens
gtcagtgactggccccagctgtcaccccgagccttcagataagacggtggaactaggcagggcgccgtggctcacgcctgtcatcttagcactttgggagrccaaggagggtggatcactttagcccaggagtttgagaccagcctggacaacatagtgagacctcatctcgacaaaaaataaaattagccaggtgtggtg

SEQ ID NO: 403484 - DNA, 201 bp, Homo sapiens
cttctgacatgttaataaagatactctagagtcacatcttgtgtggaaactcaaatccgcattgttggggcggaagtcggagtcagtgactggccccagcygtcaccccgagccttcagataagacggtggaactaggcagggcgccgtggctcacgcctgtcatcttagcactttgggaggccaaggagggtggatcact

SEQ ID NO: 403485 - DNA, 201 bp, Homo sapiens
cctggtaatggccaggcaagtttgcagatggaaatactttccataaaacccaggtcccccaaagccctgcaccattaggaaaaggctgttccccaattgtraatctgtcccccaaaacagtgaaccatgagatcatgccccttctctctcgtgggtttctccctgtgatgttttaagtgttcatactctgagcagctctta

SEQ ID NO: 403486 - DNA, 201 bp, Homo sapiens
agaggtgcagcagacgaagcacacgggcgctaaaacctgctgtgagatctcaggcaacgacttcacctttctgtgccttggcttcctcagctgtaaaatgsaatgacagagcactgtcctcatagattagttgtgaggattaaatgagcgattgggaggcggagatgcgcggatcacctgaggtcaggagttcaagaccag

SEQ ID NO: 403487 - DNA, 201 bp, Homo sapiens
cttggaatttggagagccccacaacaggtgagagggctggagggggctgggccagtagtcacctctctctcaacattccccttcttccctggatacccagrggccttgactgaagggcgggatggctgtgtagctaagatgtgggtgcagggatgtaggtgcccgttgatggtgtaggagctgaggttcctgttccaggct

SEQ ID NO: 403488 - DNA, 201 bp, Homo sapiens
ccttcgattttatttttgcattaattttttaattagggcatgttttaaatttaatccagtggattatagtttcccttgaaaatatgttttaaaaatattgratccattgaacaaaaatgaatacgattaaagggggttctggatgtaattaacattgggaaggtagtgttcagaagcttggaatttggagagccccacaac

SEQ ID NO: 403489 - DNA, 201 bp, Homo sapiens
caagaagtcactggctcaaggccactggtgagtggccacaccaagatcgcctgggtctgtccaactttaggtctacactcctgacccctgcactccacgaygattgcattcctgagcctggcccaggtgggcagccagtgaatagttagctggtgcaaaagtaattgcggtctttggtattactttcagtggcaaaaactg

SEQ ID NO: 403490 - DNA, 201 bp, Homo sapiens
ggatccagaatctttcttttttttttgttttgggtttttttgtttgtttgttttgagacagggtcttgctctgttgcctaggctggagtgctgtggcacartcatagctcactataaccttgaacttctgggctcaagcgatcatcccaccttggcctctcaagtgctggggttacaggcgtgagccaccacacccagccc

SEQ ID NO: 403491 - DNA, 201 bp, Homo sapiens
agcgtgccctgaacgtgttcccaccgcctcctgcacaccccagtctgtctgggcatccatcccactgggttgattgtctgccggctcaatggccgtgacaytcattatgggcaggactgtgtccgtcctaataaataatggtacagaattgtagctgatgcctctgagctcacactctttgccagcttcacaacagctcca

SEQ ID NO: 403492 - DNA, 201 bp, Homo sapiens; identical to SEQ ID NO: 89532

SEQ ID NO: 403493 - DNA, 201 bp, Homo sapiens
caaggcaaggcttcaggtggtggctgctgtttgttgactgatctgtgcataagtgttcactgcagccttctgcagtgagtggtaggagcccatttttaggrgaggaaactgaggctaagatgtgcaactggtgagagcaaagttggggactcatctggcttcttggccctggagcactttccctcctctgctcggccctcc

SEQ ID NO: 403494 - DNA, 201 bp, Homo sapiens
tgatagggagctagggggcactggcctgtattagaatccaggtgctccacatctttctggggctgttggctgtttctctatgctttggttttctcatctgytgaatgcaggtataagtaggacctatcttccaggggtgctggatggaagggaatggtggtaaagcacttatcttggtaccaggcaaaagctgaggccctg

SEQ ID NO: 403495 - DNA, 201 bp, Homo sapiens
ttgtttgtttgttttgagacagggtcttgctctgttgcctaggctggagtgctgtggcacaatcatagctcactataaccttgaacttctgggctcaagcratcatcccaccttggcctctcaagtgctggggttacaggcgtgagccaccacacccagcccagactctacactctgaattctcattcttactcctccttg

SEQ ID NO: 403496 - DNA, 201 bp, Homo sapiens; identical to SEQ ID NO: 89510

SEQ ID NO: 403497 - DNA, 201 bp, Homo sapiens
tatctgtgtttatttttcttgtatgttatctggtgccccctctagaatggtagctccaggggaacaggaatttccattatctggttaacatcatgtcaacmagacacaatgcttagaataatgcctagaagaagaggagcttaagcaatgtttgttggatggagggatgggtgggtggcgaggtggatgggtggatgactg

SEQ ID NO: 403498 - DNA, 201 bp, Homo sapiens
gaccttctcattgacaaaagcagatttgttacttgttttactgtttaaatgagataccatatagaggtgctttagctgaatcctgggtacagagttggccktgaacaaacatgagtccttctcttgcctccaagaattcatcagtatttatcacataatcactgtcatttgctctgtgtccataagaaaagtgtatatttg

SEQ ID NO: 403499 - DNA, 201 bp, Homo sapiens
ctcccagacaatgaatgcagaatatgtaagtcaatcatatgatgtgttagaaggtggtgagtgctgggggaaaaaaaaaatcacgcagggtgagggcttcyggagtgccgtgttggcggggcaggttgcagcactaactggttgatcagaagaggccttgaagaagtgcgatgtgagagaggacaggagggtgagagagtg

SEQ ID NO: 403500 - DNA, 201 bp, Homo sapiens; identical to SEQ ID NO: 89513

SEQ ID NO: 403501 - DNA, 201 bp, Homo sapiens
tcgcctggagcgacgctgtcctccaccatgaagacctcattggcaagcccggtggtgtctccctgtccaagtgagtggagcccctgatgcttccactcagmctctggccctggagtcagaggcgccaggcaagaaaatcagcactgcctttcttgagctgtgtggccttgggcaagtcactatatctctctgagcctccgt

SEQ ID NO: 403502 - DNA, 201 bp, Homo sapiens
cccagcctctcaatgtgtttaccaaccaggaagctttccaaattctgtcatttagagatttcatcatagaggcatgactgattaaatcatgggtcatgggygattgcccaatctccagctcctagcccctagaccctctcccctctcccctcccaggaggtcagggaggggagaaggcaggtggggcttaaagttccaacc

SEQ ID NO: 403503 - DNA, 201 bp, Homo sapiens
caaaagccatggtccctagctctcagatcgcattaattttttttttttaaattcaaggccaacacagtgagaccccatctccctacaaaaaagagaaagcsttagctgggtatggcacatgtggcacatgttcgtgccactgcactctggcctgggtggcagagtgagaccctgtctcataaaaaagaatacaactcaggt

SEQ ID NO: 403504 - DNA, 201 bp, Homo sapiens
accccaggcgctcactcaagctcatcctcgacttcctcggcatcgcctggagcgacgctgtcctccaccatgaagacctcattggcaagcccggtggtgtytccctgtccaagtgagtggagcccctgatgcttccactcagactctggccctggagtcagaggcgccaggcaagaaaatcagcactgcctttcttgagct

SEQ ID NO: 403505 - DNA, 201 bp, Homo sapiens; identical to SEQ ID NO: 89514

SEQ ID NO: 403506 - DNA, 201 bp, Homo sapiens
tcccaagtagctgggattacagtcgcatgccaccacgcccagctaatttttgtatttttagtagagacagggtttcaccatattggccaggctggtctcgwactccgcctgccttggcctcccaaagtgctgggattacaggtgtgagccatcgcgcatggcacaatttttttttttttttgacacgctccaagagccctt

SEQ ID NO: 403507 - DNA, 201 bp, Homo sapiens
gaggctcagagaggtgaagcagtttgcccagggccacacagctccacagaggcagaattcagatgagtaatgctgactttgcaggtccaaggatacccctyccatggctataactcagtgttcgatcaagggcagagcactgcacctctctgggcctcaatttccccatttgtcaaatggggagaataacagtgccagtca

SEQ ID NO: 403508 - DNA, 201 bp, Homo sapiens
acattgggcaaggagcttcccctctctgagccccagtttccgtacatgttaaatgggtgagttcaccctgctgcatgttttttgttgagctcccatgctaygtgtgtgtttttaaaattgagtcaacattcaaacatttctagagaaaaattctgatttctcatttctcttggaaacccaggagcttaggccaaactggag

SEQ ID NO: 403509 - DNA, 201 bp, Homo sapiens
cagagaggtgaagcagtttgcccagggccacacagctccacagaggcagaattcagatgagtaatgctgactttgcaggtccaaggataccccttccatgrctataactcagtgttcgatcaagggcagagcactgcacctctctgggcctcaatttccccatttgtcaaatggggagaataacagtgccagtcagctgct

SEQ ID NO: 403510 - DNA, 201 bp, Homo sapiens
gctggagtgcagtggcgtgatctcggctcactgcaagctctacctcccgggttcacgccattctcctgcctcagcctcccgagtagctggaactacaggcrtatgcctgactaatttttttgtatttttagtggagacagggtttccccgtgttagccaggatggtctcgatctcctgaccttgtgatccgcccgcctcgg

SEQ ID NO: 403511 - DNA, 201 bp, Homo sapiens
aatgtattattatgattattattattattatttttgagacggagtttcgctgtgttgtccaggctggagtgcagtggcgtgatctcggctcactgcaagcyctacctcccgggttcacgccattctcctgcctcagcctcccgagtagctggaactacaggcatatgcctgactaatttttttgtatttttagtggagaca

SEQ ID NO: 403512 - DNA, 201 bp, Homo sapiens; identical to SEQ ID NO: 89517

SEQ ID NO: 403513 - DNA, 201 bp, Homo sapiens
tgaagacagtatgttctgcaatcacatgtataaatataaatgatctatttcagaattgttactctgagcctaacacagtcttccccactttcagatctccrcaaatgacttcattgccaagaagagaagaaaatgcatttaagtggaaatcggacctctaatccaagcatattgcttgctattaatcgccaaaacaggact

SEQ ID NO: 403514 - DNA, 201 bp, Homo sapiens
gggtgggaaggctccctaggcaaggaactgccgctctctgggtgtcagtgtaccctactgaggaatgggcatagaccattcagaactaagatgtggtggtrccttgggatcggttaggctgttgaaatgtattattatgattattattattattatttttgagacggagtttcgctgtgttgtccaggctggagtgcagtg

SEQ ID NO: 403515 - DNA, 201 bp, Homo sapiens
aggggtcgggaaagggattttttgaacttggtaattcaaagatttaagatctccaggtttaactcccttcagcccctgttttcttcatctggagaatgggsattcatcattgcccacctctgaggttggccatgagatggcgtgagctggcccaggtgggagtgcttggaaaccgtgaagtgctgggccctcgctgtggac

SEQ ID NO: 403516 - DNA, 201 bp, Homo sapiens
  misc_feature (1)...(201): n = A,T,C or G
atttatagaatcaaggcttagttttctagctctggatcaaggacagggagagggattaacgctgaaccaaccagaaaaaggtttgtctgacactggggacngggcaggaagcaccactatgatgggggagggggagattctggaaccatttttgcacagaatgctgtctgccagtctggcttctaaaaacagcatcagcgt

SEQ ID NO: 403517 - DNA, 201 bp, Homo sapiens
  misc_feature (1)...(201): n = A,T,C or G
ctgtgtattgtctttctccaggtgaaccagaacagcacctcctcccacttaggaagctcgtgatttccaggtaagcctgtggacttcactgggggttcccnctgcttctgggtggccccggagccacttttctgaaaagccacttttctgtccttccagagcctccctggggtagacatgtccactagggtgggctgaccc

SEQ ID NO: 403518 - DNA, 201 bp, Homo sapiens
tagagtcctttcctggccaccgtttttgaagtagcacagatactgatcactcatagcagcctgtcatattgcccaagtttgacattttcttgcatctgtgygtgttcagtaggctttttcttcaactcgaacgtaagttccgtgatcctaggtttgggtctgtcccgctcaccacgctatcccagcacctggcacatagta

SEQ ID NO: 403519 - DNA, 201 bp, Homo sapiens
caactatttgttttcccgaattgtacatttttctcttaccaaaggctggccacctgggtcctcccacagtccctactgagaaaagtcccagaaccaaaackggcttccacctcggctcactgtatttgtgctttgtgagtttgcccaggttgcactgagggcaggtgctgctgatagtgtctttttttttttttttttttt

SEQ ID NO: 403520 - DNA, 201 bp, Homo sapiens
tgggattacaggcatgagccaccacacctacccaagatcccatagttctattccaaagaaaagaaccctctcatgaaaaacagctttcctccctgttcctyactaactgttccctcgctgcctttctgcagatcattagtagaatcctggaccttctcattgacaaaagcagatttgttacttgttttactgtttaaatga

SEQ ID NO: 403521 - DNA, 201 bp, Homo sapiens
ggatcgctggagcccctgtctcttaaaaacaacagcagcaacaacaacaacaaaaacgaaggcaacgtgcaaaaatgagaagtttcagtttgtggataatyctcctcatccccactgtgttgttctgcctacatcatctttttggttaaaacaaatactaaattagtgctcactaattctggctactttcttgacgtcagc

SEQ ID NO: 403522 - DNA, 201 bp, Homo sapiens; identical to SEQ ID NO: 89508

SEQ ID NO: 403523 - DNA, 201 bp, Homo sapiens
actaatgtaaaaatgcatattcaggtggacaaaaaaaggcaacacgcaggagttgggtgcagtggcatgcctgcagtcccaggttctcaggaggctgaggygggaggatcgctggagcccctgtctcttaaaaacaacagcagcaacaacaacaacaaaaacgaaggcaacgtgcaaaaatgagaagtttcagtttgtgga

SEQ ID NO: 403524 - DNA, 201 bp, Homo sapiens
aaaagggggatgtgagctggctgcctgtaatcccagcactttgggaggccaaggcaggcagatcacgaggtcaggagttcaagaccagcctgaccaaaacrgtgaaaccccgtctctactaaaaatacaaaaattatccgggcgtagtggcacacacctgtaatcccagctacttgggaggctgaggcaggagaatcgctt

SEQ ID NO: 403525 - DNA, 201 bp, Homo sapiens
aatgctttatagacaagaaaaaaaaaactgcgctagaaccaacttattcatcatcttcttcatcttcatcttcttcatcttcctcctcctcatcctcttcrtcttcctcatcttcctcctcttccttctttttcttgcttttttcagccttgacaactcccttttttgctgcatcaggctttcctttagctcgatatgcag

SEQ ID NO: 403526 - DNA, 201 bp, Homo sapiens
ccaggtgcttctcagaagcagaggcgagggccggctggggacactgcagtagtgggctggatgttgcttacttcactgttctcagccaagggcccagcagyggctcctctggggtctccttaaaaggtggctcgctgcccctggcttgccccaggctatgggtcggacgttcctggagtaaagcctgactttatgtatttt

SEQ ID NO: 403527 - DNA, 201 bp, Homo sapiens
gaaaagccacttttctgtccttccagagcctccctggggtagacatgtccactagggtgggctgacccagccccatcagaggtttccatggtgacagactrggggtgctatttatagaatcaaggcttagttttctagctctggatcaaggacagggagagggattaacgctgaaccaaccagaaaaaggtttgtctgaca

SEQ ID NO: 403528 - DNA, 201 bp, Homo sapiens
catactaatcagttcagcatccatactccaaaatgctctgatgagcttgcttgcttgcttccttccttcctttttctttctctttcttctctctttctctytttctttctccttccttgcttttcttctttttcttccttttttccttccttcctttcttctttctttctttttccttttctttctcctttccttaccttt

SEQ ID NO: 403529 - DNA, 201 bp, Homo sapiens
cgaggaaggaccttggcaaagatgttccctgtaggtgggtactggactggcggccagccctatgcagcttcaaagtcatgctgctcacccactgctcaaayatctgccgtggctccctagtacctaagcctaaattttccttcctgtgcctgctgggatagcattccatgtcctacaaaggactctccgtgagatgctaga

SEQ ID NO: 403530 - DNA, 201 bp, Homo sapiens
tctttctccaggtgaaccagaacagcacctcctcccacttaggaagctcgtgatttccaggtaagcctgtggacttcactgggggttcccgctgcttctgsgtggccccggagccacttttctgaaaagccacttttctgtccttccagagcctccctggggtagacatgtccactagggtgggctgacccagccccatca

SEQ ID NO: 403531 - DNA, 201 bp, Homo sapiens
tgaattttttccgagtttggaatatttgcatcatactaatcagttcagcatccatactccaaaatgctctgatgagcttgcttgcttgcttccttccttcytttttctttctctttcttctctctttctctctttctttctccttccttgcttttcttctttttcttccttttttccttccttcctttcttctttctttct

SEQ ID NO: 403532 - DNA, 201 bp, Homo sapiens
gaccttggcaaagatgttccctgtaggtgggtactggactggcggccagccctatgcagcttcaaagtcatgctgctcacccactgctcaaacatctgccrtggctccctagtacctaagcctaaattttccttcctgtgcctgctgggatagcattccatgtcctacaaaggactctccgtgagatgctagattccagat

SEQ ID NO: 403533 - DNA, 201 bp, Homo sapiens
tggctaattaaaaaaaaatttttttttgtagtgatggggtctcactttgttgcccaggctggtctcaaactcctgggctcaagcgagcctcctgcctcagccctcaaagtgctgggattacaggcatgagctaccacacctagcttgaattttttccgagtttggaatatttgcatcatactaatcagttcagcatccata

SEQ ID NO: 403534 - DNA, 201 bp, Homo sapiens
ctggctaattaaaaaaaaatttttttttgtagtgatggggtctcactttgttgcccaggctggtctcaaactcctgggctcaagcgagcctcctgcctcagccctcaaagtgctgggattacaggcatgagctaccacacctagcttgaattttttccgagtttggaatatttgcatcatactaatcagttcagcatccat

SEQ ID NO: 403535 - DNA, 201 bp, Homo sapiens
cctggctaattaaaaaaaaatttttttttgtagtgatggggtctcactttgttgcccaggctggtctcaaactcctgggctcaagcgagcctcctgcctcagccctcaaagtgctgggattacaggcatgagctaccacacctagcttgaattttttccgagtttggaatatttgcatcatactaatcagttcagcatcca

SEQ ID NO: 403536 - DNA, 201 bp, Homo sapiens
agtttcaccggcaccattttggatggctacgtagtgttctgtggaatgcatgtgctaccatttactaaacagcttcttcaagaccatttccagtttttacracatccagaatgacattatgtgcacagtggaggacagtagggagatgagggttggaaatagaggcttgacaaaacttatctgcagggcagccctcctgag

SEQ ID NO: 403537 - DNA, 201 bp, Homo sapiens
acatgcaatatcttttttttctaataaaaaaattgtatttacttagaagcattcagaatgtcaacaaaacagctgcaactttttcttgcaacaaaacactytgcaattacagagtggtattcagttaacagaataattatttcatataagctgcatcagagacaactgaagatgaaaaaactatcatccccatatataact

SEQ ID NO: 403538 - DNA, 201 bp, Homo sapiens
ttagccttgacctctggggttcaagtgatcctcctgcctcagcatcccaattagctgggactacaggcaagcaccaccacacctggctaattaaaaaaaaatttttttttgtagtgatggggtctcactttgttgcccaggctggtctcaaactcctgggctcaagcgagcctcctgcctcagccctcaaagtgctgggat

SEQ ID NO: 403539 - DNA, 201 bp, Homo sapiens
tagaagcattcagaatgtcaacaaaacagctgcaactttttcttgcaacaaaacactctgcaattacagagtggtattcagttaacagaataattatttcrtataagctgcatcagagacaactgaagatgaaaaaactatcatccccatatataactaatttgtgctgtgcaccaacaagaacccgctttaaatttccat

SEQ ID NO: 403540 - DNA, 201 bp, Homo sapiens
tgcaacctctgcctcccaggctcaagccatcctcccacttcagcctcccaagtagctgggactatgggtgtattatcatcaagcccagctaatttttgtaragagagggttttgtcttattttccaggctggtcgcaaactcctttgctgtagcaatccatccccctcagcctcccaaagtgccgggattataggcatgag

SEQ ID NO: 403541 - DNA, 201 bp, Homo sapiens
cttggcctcccaaagtgctgggattataggcgtgaaccactgctcctggctgatagtgtcttttcgtgatatagaccagggggttggcaaactatgcccaygggacaaatctagctgaccgcctgttttcgtaactagtcttatggaaacgcagccacttgccttcatgtatgtgtcatcttggttgtttgcattacagtt

SEQ ID NO: 403542 - DNA, 201 bp, Homo sapiens
tgtttgtcatggatttttttccactaatctaaaaaagattgcattgaaacattattgatcttggttactgagttttttggcacccccttgagtttttgtgytcaaggacaatgccctgcttgcctcaccctgttcctgccctgccaggcaaggcttttgctctccctagggtggccagggtctcccccaccactctgtccc

SEQ ID NO: 403543 - DNA, 201 bp, Homo sapiens
attgaccctagtttaacatttcctccaggtgacaacataggtgataaatcacagtagtagtggcagcactcgcatcaccagtagaaaccacactttttttytgagatggagtttcgctcttgtcgcccaggctagggtgcaatgacgcgatctcggctcactgcaacctctgcctcccagattcaagtgattcacctgctt

SEQ ID NO: 403544 - DNA, 201 bp, Homo sapiens
atgatgaaaccctgtctttactaaaaatacaaaaaaattagccagtgttgtggcccagtgcctgtaatcccagctactcaggaggctgaggcaggagaatsacttgaacctgggagatggtggttgcagtgagctgtgattgctccattgcactccagcctgggcgacatatatatatgtgtgtgtgtgtgtgtgtgtgtg

SEQ ID NO: 403545 - DNA, 201 bp, Homo sapiens
tccatggctataactcagtgttcgatcaagggcagagcactgcacctctctgggcctcaatttccccatttgtcaaatggggagaataacagtgccagtcrgctgctgtgaggctatagtaagttgaataaaagtaacagagcaccggcccaaggcaaggcttcaggtggtggctgctgtttgttgactgatctgtgcata

SEQ ID NO: 403546 - DNA, 201 bp, Homo sapiens
gcacctctctgggcctcaatttccccatttgtcaaatggggagaataacagtgccagtcagctgctgtgaggctatagtaagttgaataaaagtaacagakcaccggcccaaggcaaggcttcaggtggtggctgctgtttgttgactgatctgtgcataagtgttcactgcagccttctgcagtgagtggtaggagccca

SEQ ID NO: 403547 - DNA, 201 bp, Homo sapiens
gaagttacatagttcccatgacactcttccaggtgttattcccatttctcagatgagaacactgaggctcagagagctgcccaagattgacccaggacacscagcctttgagtgggggagccaggatgtgacccccagcctcatcagtccccacccctggctagtccctaacagagtgctgaactgggcctctgaacggga

SEQ ID NO: 403548 - DNA, 201 bp, Homo sapiens
ggacatctatgctgatgaaatcgtctctgcctgcagtgtcccatacggtagccactagccatgtgtggcccctgattctgtaacaggaggctagtccaaartgagaggtcctgttaggtgtaaaatacacactagattttgaaggcttaggacaaaaaagtatgtaacgtttcttattagtcacttttatataaattacat

SEQ ID NO: 403549 - DNA, 201 bp, Homo sapiens
ttgcatgcatgcctgtgtgcttctgtgagtgctgtggaccctgtgtgttccaataatggatcctggggctcagtaaacacagtggctaaaaggacatctaygctgatgaaatcgtctctgcctgcagtgtcccatacggtagccactagccatgtgtggcccctgattctgtaacaggaggctagtccaaagtgagaggtc

SEQ ID NO: 403550 - DNA, 201 bp, Homo sapiens
gattacaggtgtgagccaccacgcctggcctgaaatgtattattgatgtgactttgtgggtgtatttgtagtaagagtggcagatcagatgtagcttcacrgcctggggttggtgaccagaatgtactttcttggaaaaatgcatgtggcttgtgtggctttgatgccccacgtggcaccagggaagcttctctgggtagc

SEQ ID NO: 403551 - DNA, 201 bp, Homo sapiens
tatttgaaaatgggacccaggcctgaggaagagctttcacagcccttacttcattaagacccagagtctttaatttaagctaagctcagcatttctgagcrtgtgctgattttaggaaataaacagttatcgtattgaatcacaacggaaaaaagttaatcgtctcttagttccgtaactcttcagttggctcaagaagaa

SEQ ID NO: 403552 - DNA, 201 bp, Homo sapiens
agtgcagtggcacgatcccagctaactgcagcctcgacctcttgggctcaagcaattctcccacctcagtctcccgagtagttgggactacaggcgagcakctccacacccagctcattttttttttttttttcctagtagagatgagatctcagtatgtcttccaggctggtctccaacccctgagctcaagccttcctc

SEQ ID NO: 403553 - DNA, 201 bp, Homo sapiens
atcaaataggttaataaatgttaggtgctattattactattttagtgttgatactgcttttattgatggagtacccatcctcaccattgtcatttaatgartgcctactgtatggcaagtattgggttaagcccccaacaagtttatctcctttaatcctcacagcaacctgaggacataggaacacctcttatccacatt

SEQ ID NO: 403554 - DNA, 201 bp, Homo sapiens
tttgtccagatcaccagctggcaagtggcagcagaagtgagatttgaaccttggagtgtagtactccaagttagaagccctcacctatcatcctcactgcraggatgccaggatacctcccttgccagggtccagcagggtgatgagggtgttgggcaggcctagttccctgggctgggccctctagctccttccacagtg

SEQ ID NO: 403555 - DNA, 201 bp, Homo sapiens
ctcctgagaccgccctccaaaagtcccctccatgcccccagcctccatgattgggtgcctgggcaaactcccctggctggttttcacctttctgttcagcyagcaggttggaaatctggtactagaaaaagctgcatcccagcaagcatcatagagagatgagcatcttccttgtctattaggaagacgattctccaggtg

SEQ ID NO: 403556 - DNA, 201 bp, Homo sapiens
gaaggtcttacagatctggatggtgaaactctttccatccattccttgggtaagttgctcttcgtcttggtgtcatgctttctcatctgtaaaattgggaycatcacactttccttttattggggtttaaatgacacaggtatttgcgtggtcagcatttggtcagtgttaggtggtgacagtaggatgttgtgttcaatt

SEQ ID NO: 403557 - DNA, 201 bp, Homo sapiens
agcctcgttcctgtaaccatgggagattaagtgttaggaaggtcttacagatctggatggtgaaactctttccatccattccttgggtaagttgctcttcstcttggtgtcatgctttctcatctgtaaaattgggatcatcacactttccttttattggggtttaaatgacacaggtatttgcgtggtcagcatttggtc

SEQ ID NO: 403558 - DNA, 201 bp, Homo sapiens
tccccatattgcccaggctggtctctaactcctgggctcaagcgatcctcctgcctctgcctcccaaagtgctgggatcacaggcgtgagccaccaccccmggcctggctgagatttaaaaagctgacattttaaagtgttgttaccctggttaaaatctcctgtttacagaataggaaaagtctgagaggagtgatatgt

SEQ ID NO: 403559 - DNA, 201 bp, Homo sapiens
aaagccagtggcatgcagcccctccaagagtgggtaggaaaggatggctcctcctggaccccttctagttgggttctcctggttggtggcaagtccctggyggggctggagttgtgggaggtgataggcacagtgcagcccatggttgggagcctacattctgggtggtgaggatgctggtgagtgctccttcattgcaag

SEQ ID NO: 403560 - DNA, 201 bp, Homo sapiens
ggggaccatgctgggttctgagaggatgtggggactaggatggggtcccagccctgcacattccatggggttggcagggaagcaacaccagaagccacacrggatgctaagcaccttgggggatactggtacagggacaggaggcagtcagggaagacttcctggaggaaggggtgcaaatgatgccagtaggagttagct

SEQ ID NO: 403561 - DNA, 201 bp, Homo sapiens
tgatcaggttaaaggaaacctcaagagaggttattttacatggaaacaccttccagcttggactcttatttttagtctctgtatctatttttaaacaatcrgcatatgttttagtttttctttcaatttactttgctccaacctgcaaggactctgtcattattagggttcccatcttgagttgcactaagatcccagagt

SEQ ID NO: 403562 - DNA, 201 bp, Homo sapiens
ctgggattacaggcatgagccactgcaagtttatttatttagtcttcacaagtgttaatggcctccccatttcacagatgaggaaagtgaggcacaaagtwgttagataacacctccccactgacccccaacccagggctgcattgctaggaatcagccaggtgtggaggattcctgcccctatgctcagtcccctacctc

SEQ ID NO: 403563 - DNA, 201 bp, Homo sapiens
gcgcccgccaccacgcccggctaatttttgtatttttagtagagatggggtatcaccatgttggccaggctggtctcgaactcctgacctcaggtgatcckcctgccttggcctcccaaagtgctgggattataggcgtgaaccactgctcctggctgatagtgtcttttcgtgatatagaccagggggttggcaaactat

SEQ ID NO: 403564 - DNA, 201 bp, Homo sapiens
cgggggacttgcccagtgtcacggagcagattcaagccagaacccaaacgctgttgtgtcccgttctcctaatgttagtgttttaggtatgctttctcagyaccccacaggagttccttggccttctgaatagcttccttgagaaaagggtattattattccttttttggagaagaaagtagaagctcagagaagtgatac

SEQ ID NO: 403565 - DNA, 201 bp, Homo sapiens
ccacacccctctggtctttcccttattaagcccctatctcacttaatcctcacagcagcatcgctagtaagaattattgggcccattttacagatgaggaractcaggcccagagagtggaggtgatgctgccaagggtctggggtagatgcaggtgcacgcccagtctggctggcagcatgggactctgaccacctgcct

SEQ ID NO: 403566 - DNA, 201 bp, Homo sapiens
atggcacaatctcagctcactgcaacctccgcctcccgggttcaagcagttctcctgcctcaggctctcgagtagctgggactacaggcgcccgccaccaygcccggctaatttttgtatttttagtagagatggggtatcaccatgttggccaggctggtctcgaactcctgacctcaggtgatccgcctgccttggcct

SEQ ID NO: 403567 - DNA, 201 bp, Homo sapiens; identical to SEQ ID NO: 89530

SEQ ID NO: 403568 - DNA, 201 bp, Homo sapiens
ggtacagagttggccttgaacaaacatgagtccttctcttgcctccaagaattcatcagtatttatcacataatcactgtcatttgctctgtgtccataaraaaagtgtatatttgaggtcaagtggatgcaagatgagatgtggggaagaacccaggaaacgtttttaaatttaaactctctctggccatctgggatgca

SEQ ID NO: 403569 - DNA, 201 bp, Homo sapiens
ctctgggtaaccaggaagctactttctgctttgtgggttccaggctgctttctgtgtcccaagtcaccctgctttttcttcttaagccatcgtgcaggtcrttgctgtcttctgctcacttctgacttgcctgctttgagctgttttcttcagccttggcctggtctgatccaggattcctgccctggccatgcaaccttg

SEQ ID NO: 403570 - DNA, 201 bp, Homo sapiens
ggacaagcttcacatgtgtgagcctcagtttccctctctaaatcctgtggatattagctcattgactggtgtatagatggaactgtgactgatattagcaycttttgctgggatgaggaagccctgaattaaaatgggcaaaactggccttgcatggctttcaacctaagtcatccctgtttctcaggtctgtataccaac

SEQ ID NO: 403571 - DNA, 201 bp, Homo sapiens; identical to SEQ ID NO: 89526

SEQ ID NO: 403572 - DNA, 201 bp, Homo sapiens
ttaagactatttttattcaagtctaacgtgtatacagaaaaatgcatatttcatacgcatacagctcaatgaattttcaaaagacgaatgtgtctgtgtgmccagcacctggatcaatagctgaacgtacatagcacccctccctgccccaggacaccttgctccccctgcagttaccccttgccccaccggggtaaccac

SEQ ID NO: 403573 - DNA, 201 bp, Homo sapiens
tccctgtgatgttttaagtgttcatactctgagcagctcttaaagcctttgcaattcttccggttcttcctgcttctaggagtgagtgaaaacgaagaagrtatcacagtctgtccaggaaggaaacagaggagcaggtgaatgctcaggaaaccggattcgtagtatgcactaccccagaattggggctggcaaattctg

SEQ ID NO: 403574 - DNA, 201 bp, Homo sapiens
ggactataggcaggtaccatcacctggataactttttattttttgtagagactgggtctccccatattgcccaggctggtctctaactcctgggctcaagygatcctcctgcctctgcctcccaaagtgctgggatcacaggcgtgagccaccaccccaggcctggctgagatttaaaaagctgacattttaaagtgttgt

SEQ ID NO: 403575 - DNA, 201 bp, Homo sapiens
gatgagaacactgaggctcagagagctgcccaagattgacccaggacacccagcctttgagtgggggagccaggatgtgacccccagcctcatcagtcccyacccctggctagtccctaacagagtgctgaactgggcctctgaacgggagactgggacagtgtgtgggaccctgctttgatggttttaggtaaaaaaaaa

SEQ ID NO: 403576 - DNA, 201 bp, Homo sapiens
ttaattgtatttaatgttgcataaggtgagttcaaatagttacatgtggctggtagctgcatgttggatgcacagctccaaatgactgacagccctgacarccctgttccattgctctgaaagggcctgtgttccctggagggggatggctgggctcgtgggccatgggagctgcctggctggcaggcctcttgggctcgc

SEQ ID NO: 403577 - DNA, 201 bp, Homo sapiens
acagtggctcgatcatagttcactgcagccttgatctcctgggctcaagcaatcccccaacctcggcctcccgagtagctgggactacaggcgtgcaccaycccctgcttggttaactggtagcagttgagtcatatttccttcttgtcttttttcttaagtgtggtttctatttgttggcgattttgctgtgtggtagag

SEQ ID NO: 403578 - DNA, 201 bp, Homo sapiens
gaacctgggagatggtggttgcagtgagctgtgattgctccattgcactccagcctgggcgacatatatatatgtgtgtgtgtgtgtgtgtgtgtgtgtgtattatatatatttttatataataatttttatataatatatatatataaattttatataaaatatatatttttttgagacggagtctccctctgtcaacca

SEQ ID NO: 403579 - DNA, 201 bp, Homo sapiens
tgaacctgggagatggtggttgcagtgagctgtgattgctccattgcactccagcctgggcgacatatatatatgtgtgtgtgtgtgtgtgtgtgtgtgtgtattatatatatttttatataataatttttatataatatatatatataaattttatataaaatatatatttttttgagacggagtctccctctgtcaacc

SEQ ID NO: 403580 - DNA, 201 bp, Homo sapiens
tgtttagttatttttcctcagcgaggcacagtcgcccagtgcccgtccggctctcacttgccccggcgctgtctctgtggagctcagtgtactgcaatgcrcaatatcttatttaatccttacaaaagtcatatggcactgctgcaatatgattctcattttacaaatgaggaacctgatgaccacagaggttaagtgtct

SEQ ID NO: 403581 - DNA, 201 bp, Homo sapiens
tgggaggctgaggcgggcggatcacgaagtcaggagatcgagaccatcctggctaacacagtgaaagcccgtctctactgaaaatacgaaaaattagctgrgcgtggtggtgggcgcctgtagtcccagctactcgggaggctgaggcaggagaatggcgtgaacccaggaggcggagcttgcagtgagccgagatcgggc

SEQ ID NO: 403582 - DNA, 201 bp, Homo sapiens
ggatggtctcgatctcctgacttcgtgatccacctgcctcggcctcccaaagtgctgggattataggtgtgagtcaccacacctgctgaaatgaaaccccrctgtttccaacaaccgattctggcttaatctgattattttttttttcttttttctttttcttttttttttttttttttgagacggagtcttgctctgtcg

SEQ ID NO: 403583 - DNA, 201 bp, Homo sapiens
ccaccacgcccggctaattttttgtatttttagtagagacggggtttcactgtgttagccaggatggtctcaatctcctgaccttgtgatccacccgcctyggcctcccaaagtactgggattacaggtgtgagccaccgcgcccggcctttttttttagagacagggtcttgctatgttgcccaggctggtcttgaactc

SEQ ID NO: 403584 - DNA, 201 bp, Homo sapiens
caggcctctcagatcttaacatgcatatgatccccttggggaacttgttaaagtgcagattctgtgtttttggttgtttttgtttttgtttctgtttagayggagtttcgatcttgttgcccaggctggagtgcaatggtacaacctcggctcactgcaacctctgcctcccgggttcaagcgattctcctgccccagcct

SEQ ID NO: 403585 - DNA, 201 bp, Homo sapiens
tcgcagtggagctcttgtggcccacagagccaaaaacatgggttttatgacttcacagaagcttgcctacccccaagagagatgataaagcagggtcgtcraaagttggggaaacagtttgggttctggcatcagatagcctgagtttcagttcaggctcaaccaattaccatctgtgtgacctccaacaaagcatttcac

SEQ ID NO: 403586 - DNA, 201 bp, Homo sapiens
actaccatgcccagctaatttttgtatttttttggtagagacggggtttcaccctgttggccaggctggtcttgaactcctcacctcaagtgatctgcccrtgtcagcctcccaaagtactgggattacaggtgtgagccactgtgcctggccttttatttgttttgttctttttttttttttttttcctttttgagatgg

SEQ ID NO: 403587 - DNA, 201 bp, Homo sapiens
aaacctgtaaggcaaatgaggactggtttttcctgagtaaagtgggagccatgggaggatgcggagcagaggagggccatagcctgacttccgttttcctraggtcactgtggctgcttgctgaaaatcaactgatgagacaagggcagaatcagggaagctagtgatgaggtggcttggaccagagtggtaagaagtgaa

SEQ ID NO: 403588 - DNA, 201 bp, Homo sapiens
ttctgcagtgagtggtaggagcccatttttaggggaggaaactgaggctaagatgtgcaactggtgagagcaaagttggggactcatctggcttcttggcyctggagcactttccctcctctgctcggccctccggcgttacctgttattcatgacggggcaaggcttgcgctgtccccagcctggtcctccgtcctgcat

SEQ ID NO: 403589 - DNA, 201 bp, Homo sapiens
gtgtcagtgtaccctactgaggaatgggcatagaccattcagaactaagatgtggtggtgccttgggatcggttaggctgttgaaatgtattattatgatkattattattattatttttgagacggagtttcgctgtgttgtccaggctggagtgcagtggcgtgatctcggctcactgcaagctctacctcccgggttca

SEQ ID NO: 403590 - DNA, 201 bp, Homo sapiens
gctgatggatgtttgggttgtttctaacttttgactattatgaataatactgctatgaacattcatgtacaggtctttggacatacattttcagttctctcaggtatatttctaggagtggaatgattgggtcgtaaggtaactttaggtttcacctttaaatatttttttaatttattttattatttatttattttgtag

SEQ ID NO: 403591 - DNA, 201 bp, Homo sapiens
ctgcagtgagtggtaggagcccatttttaggggaggaaactgaggctaagatgtgcaactggtgagagcaaagttggggactcatctggcttcttggcccyggagcactttccctcctctgctcggccctccggcgttacctgttattcatgacggggcaaggcttgcgctgtccccagcctggtcctccgtcctgcatga

SEQ ID NO: 403592 - DNA, 201 bp, Homo sapiens
caaagttggggactcatctggcttcttggccctggagcactttccctcctctgctcggccctccggcgttacctgttattcatgacggggcaaggcttgcrctgtccccagcctggtcctccgtcctgcatgactggacatgaaggggcatagcagcagccttgccagtggcgctcacagatgtccagcccactaagcctg

SEQ ID NO: 403593 - DNA, 201 bp, Homo sapiens
tagaatggtagctccaggggaacaggaatttccattatctggttaacatcatgtcaaccagacacaatgcttagaataatgcctagaagaagaggagcttmagcaatgtttgttggatggagggatgggtgggtggcgaggtggatgggtggatgactggatgtgttgggaatgactaaattttattttttggccattttc

SEQ ID NO: 403594 - DNA, 201 bp, Homo sapiens
atggtagctccaggggaacaggaatttccattatctggttaacatcatgtcaaccagacacaatgcttagaataatgcctagaagaagaggagcttaagcmatgtttgttggatggagggatgggtgggtggcgaggtggatgggtggatgactggatgtgttgggaatgactaaattttattttttggccattttcataa

SEQ ID NO: 403595 - DNA, 201 bp, Homo sapiens
gtccttgtttatctgtgtttatttttcttgtatgttatctggtgccccctctagaatggtagctccaggggaacaggaatttccattatctggttaacatmatgtcaaccagacacaatgcttagaataatgcctagaagaagaggagcttaagcaatgtttgttggatggagggatgggtgggtggcgaggtggatgggt

SEQ ID NO: 403596 - DNA, 201 bp, Homo sapiens
aaatctagctgaccgcctgttttcgtaactagtcttatggaaacgcagccacttgccttcatgtatgtgtcatcttggttgtttgcattacagttgcaaastcgcagtggagctcttgtggcccacagagccaaaaacatgggttttatgacttcacagaagcttgcctacccccaagagagatgataaagcagggtcgtc

SEQ ID NO: 403597 - DNA, 201 bp, Homo sapiens
cacctctctaagcctcagtttccccttctgtaaaacgtggctaataataatagtgcctaccctccaagcctgtcatgagggtcaaaatatattgttggctstccgtcttcttgggttctgcatgcggggattcagccgacagtggatcaaaaatattcgggaaaaaatgggtggttgcatctgtactgaacatgaacagag

SEQ ID NO: 403598 - DNA, 201 bp, Homo sapiens
cgcgatctcggctcactgcaacctctgcctcccagattcaagtgattcacctgcttcagcctcccaagtagctgggattacaggtggctgccaccacgccyggctaatttttttgtattttagtagagacggggtttcaccatgttggccaggctggtcttgaactcctgacctcaggtgatccgcccacctcggcctccc

SEQ ID NO: 403599 - DNA, 201 bp, Homo sapiens
agctgatggatgtttgggttgtttctaacttttgactattatgaataatactgctatgaacattcatgtacaggtctttggacatacattttcagttctctcaggtatatttctaggagtggaatgattgggtcgtaaggtaactttaggtttcacctttaaatatttttttaatttattttattatttatttattttgta

SEQ ID NO: 403600 - DNA, 201 bp, Homo sapiens
aatcacagtagtagtggcagcactcgcatcaccagtagaaaccacactttttttttgagatggagtttcgctcttgtcgcccaggctagggtgcaatgacrcgatctcggctcactgcaacctctgcctcccagattcaagtgattcacctgcttcagcctcccaagtagctgggattacaggtggctgccaccacgcctg

SEQ ID NO: 403601 - DNA, 201 bp, Homo sapiens
tatgtggcctttggtatctgatgcttttcacttcagagaatgtttctaaggttcagccccttgcagcctgtatcagtacttcattccttttttttttttttaagtacttcgttcctttttatggctgcataatattctattatgtggatataccacattctatccatttgtcagctgatggatgtttgggttgtttctaac

SEQ ID NO: 403602 - DNA, 201 bp, Homo sapiens
attttagtacggaggagatttcactgtgttggccaggatggtctcgatctcctaacctcgtgatctgtccaccttggcctcacaaagtgccgggattacargcgtgagcccctgtgcctggctgctgcccctgttttatgagccgcatgacaccacgctagggttggcaccttggaggcagaaccgcatttggaaactggc

SEQ ID NO: 403603 - DNA, 201 bp, Homo sapiens
ctatgtggcctttggtatctgatgcttttcacttcagagaatgtttctaaggttcagccccttgcagcctgtatcagtacttcattccttttttttttttttaagtacttcgttcctttttatggctgcataatattctattatgtggatataccacattctatccatttgtcagctgatggatgtttgggttgtttctaa

SEQ ID NO: 403604 - DNA, 201 bp, Homo sapiens
ttagtacggaggagatttcactgtgttggccaggatggtctcgatctcctaacctcgtgatctgtccaccttggcctcacaaagtgccgggattacaggcrtgagcccctgtgcctggctgctgcccctgttttatgagccgcatgacaccacgctagggttggcaccttggaggcagaaccgcatttggaaactggcctt

SEQ ID NO: 403605 - DNA, 201 bp, Homo sapiens
ccaagttcaagcgattctcctgcctcagcctcctgagcagctgggattacaggcatctgccactgcaccctgctaatttgtgtatttttagtagagacagrgtttcaccatgttggccaggctggtcacgaactcctgacctcaggtgatcgcctgcctcggcctcccgtagtgttgggattacaggcgtgggccaccgcg

SEQ ID NO: 403606 - DNA, 201 bp, Homo sapiens
ggagtttcgctctgttgtccaggctggagcgcagtggcgcgattttggctcactgcagcctctgcctcccaagttcaagcgattctcctgcctcagcctcytgagcagctgggattacaggcatctgccactgcaccctgctaatttgtgtatttttagtagagacagagtttcaccatgttggccaggctggtcacgaac

SEQ ID NO: 403607 - DNA, 201 bp, Homo sapiens
ctcggccctccggcgttacctgttattcatgacggggcaaggcttgcgctgtccccagcctggtcctccgtcctgcatgactggacatgaaggggcatagsagcagccttgccagtggcgctcacagatgtccagcccactaagcctgctccctccctcaggaactctgcttcctttgctgggtgagctgtaacctttcct

SEQ ID NO: 403608 - DNA, 201 bp, Homo sapiens
tgctttggctggtggctgacatcctgccacagaaccatccggacccttgcagagcccgggggctcagccagaaacctttggaggtgtgagaaagtggtagyagctacttcccaggtggaagacagaggccctgtggagtcaggcacctggcaaggccgccctacaaggccatggtttcctctcaacccacaccctttccac

SEQ ID NO: 403609 - DNA, 201 bp, Homo sapiens
ttcaactcgaacgtaagttccgtgatcctaggtttgggtctgtcccgctcaccacgctatcccagcacctggcacatagtagatgtacagtaaatactacrtgaataagcatgtgcatgactcagtgatgctgaggggtgaccctcaatacagcaaggcatccctcacctggccgtgaccccttcttctgtgtattgtctt

SEQ ID NO: 403610 - DNA, 201 bp, Homo sapiens
atcctaggtttgggtctgtcccgctcaccacgctatcccagcacctggcacatagtagatgtacagtaaatactacgtgaataagcatgtgcatgactcartgatgctgaggggtgaccctcaatacagcaaggcatccctcacctggccgtgaccccttcttctgtgtattgtctttctccaggtgaaccagaacagcac

SEQ ID NO: 403611 - DNA, 201 bp, Homo sapiens
tctgattcccacaaagggagtgggacctctccccaaacaaccaggaaatgctcaaaagccatggtccctagctctcagatcgcattaattttttttttttwaattcaaggccaacacagtgagaccccatctccctacaaaaaagagaaagccttagctgggtatggcacatgtggcacatgttcgtgccactgcactctg

SEQ ID NO: 403612 - DNA, 201 bp, Homo sapiens
ctttaaatttccatgccaatttacagcccccatactgtaccaggcaaggttagcggctattgaaaataccatcaggacagggctatctaaagacacattckgtagtgtgttaactatacaaaaaaagacactgtacagtttaaaaacaaatcttacacagccttacatttcaatttttttctttaaaaggagtgagttgtg

SEQ ID NO: 403613 - DNA, 201 bp, Homo sapiens
cagcaggcaggtagcacttgctctgggccaggtgctgttccgacatgccctaatttatttatacctcccagcactcctgcaagactagtttctcatttgcrctaggcacatttcaaagtgcccttctaggaggtgttacaggctgcgtatccctttatctgaaattcttgggactagaaaggttttggatttcagattttt

SEQ ID NO: 403614 - DNA, 201 bp, Homo sapiens
ggtcttgaactcctgaccccaggtgatccgcccaccttggcctcccaaagtgctgggattacaggcatgagccactgcaagtttatttatttagtcttcayaagtgttaatggcctccccatttcacagatgaggaaagtgaggcacaaagtagttagataacacctccccactgacccccaacccagggctgcattgcta

SEQ ID NO: 403615 - DNA, 201 bp, Homo sapiens
aggaaggctacatagctggcaaaaagagtgaggtattgagtggggaaaaaaaactagcgtatttgttttacagctgcagacgcgcgtttgtgtgtgtgtgwgagagagagagcgtgtgcacaggagagagagcatgctaacccttattaaaaatttacaatgtgttggccaggcacagtggcttatgtctggaatcccagc

SEQ ID NO: 403616 - DNA, 201 bp, Homo sapiens
tatctgctgaaatataaagggagagtggcccctgagcccgccgaccccctacaggtagctacctagagctgtgcttctcaaatcgtattgtgcatggaaaygcctggggtctggttaaaaagccggttaagtaccttctaaggcatgggactagcagcctcccaggtggccttactgcttgcaagaccctagtgaggccct

SEQ ID NO: 403617 - DNA, 201 bp, Homo sapiens
gagcccgccgaccccctacaggtagctacctagagctgtgcttctcaaatcgtattgtgcatggaaacgcctggggtctggttaaaaagccggttaagtaycttctaaggcatgggactagcagcctcccaggtggccttactgcttgcaagaccctagtgaggccctagggcacctttcatgcatgggcacaaggaggca

SEQ ID NO: 403618 - DNA, 201 bp, Homo sapiens
tgcctccacctctcatcatgggcatttgcttctgagcctttatcactggtgtcattgtctcacatactggtttcttggctccccactggaatgtcagctcyatgaaggcaggaacctttgtctgttgcccttgatgtatcccagtatcttgagcagggccccgcacatggtacttgctcagtaaacattggtggaatgaat

SEQ ID NO: 403619 - DNA, 201 bp, Homo sapiens
cctgtgattatactaaagaccattgaactgtacactttatttttttattttttttgagatggagtttcgctctgttgtccaggctggagcgcagtggcgcrattttggctcactgcagcctctgcctcccaagttcaagcgattctcctgcctcagcctcctgagcagctgggattacaggcatctgccactgcaccctgc

SEQ ID NO: 403620 - DNA, 201 bp, Homo sapiens
gatgaaaatgtagcaaaattgactatgactatacgaaaactctgtgagtgtactactctgcacatactagaaacctgtgaatatattaaaccctgtgattwtactaaagaccattgaactgtacactttatttttttattttttttgagatggagtttcgctctgttgtccaggctggagcgcagtggcgcgattttggct

SEQ ID NO: 403621 - DNA, 201 bp, Homo sapiens
tatgtatatgatacatatacattgatatgatatgcttctatacccggtctgtcacaccgtgtggatttcctcagaggctcctagaaggccctgctgtccasgctaggaggtttctggcagccccaagctccctggcttctgcgtgaaggtgtgaatagaaccatgctgttaagtgggggtttgcagaaaccagggtttgac

SEQ ID NO: 403622 - DNA, 201 bp, Homo sapiens
agaaatcatcttctcttattttatatcgtattacagcattgatatgtatatgatacatatacattgatatgatatgcttctatacccggtctgtcacaccrtgtggatttcctcagaggctcctagaaggccctgctgtccaggctaggaggtttctggcagccccaagctccctggcttctgcgtgaaggtgtgaataga

SEQ ID NO: 403623 - DNA, 201 bp, Homo sapiens
ccatcctaccgtatcttgttaggagagcaagccagcatgatgccagcagagaaggcctctgggtacatgggaagaacccagccaggtgttcaggcctggcygtgccattaacttgctgtgtgaccttggccacactctcctttctgagctcgcccaggctttctccgaggccactgctggctctgcattcccgagctcaag

SEQ ID NO: 403624 - DNA, 201 bp, Homo sapiens
gaagcatctgggtgcttcttcttatgcgcctcccgacaagtttgcccaaaaaatgcatgtgatgacattttgcctctcagcttcttaggatctcctttgcycatgtttagttatttttcctcagcgaggcacagtcgcccagtgcccgtccggctctcacttgccccggcgctgtctctgtggagctcagtgtactgcaat

SEQ ID NO: 403625 - DNA, 201 bp, Homo sapiens; identical to SEQ ID NO: 89533

SEQ ID NO: 403626 - DNA, 201 bp, Homo sapiens
tgggcatctgatttttaaaaaccagacatctgatgtgcagtcaacactgagaacccctgccagcttcatctcctcttctaagtgccagacccaagtttccractgtctgcccacctgtctccccacctgggcacccgccagcgtctcaccctcaggagactccagctgaactaatcctctctccctgcttttccagaacag

SEQ ID NO: 403627 - DNA, 201 bp, Homo sapiens; identical to SEQ ID NO: 89539

SEQ ID NO: 403628 - DNA, 201 bp, Homo sapiens
attctgtcacccagcacccaggctggaatgtagtggcacgatcactatcacggctcactacagcctctacctcccgggctcaagtgatcctcctacctcarcctcctgagtaactgggactacaggcacatgccaccacacccagctattttttttttttttttttgctagagatgggggtctctaccaggttggtctcat

SEQ ID NO: 403629 - DNA, 201 bp, Homo sapiens
accagacatctgatgtgcagtcaacactgagaacccctgccagcttcatctcctcttctaagtgccagacccaagtttccaactgtctgcccacctgtctycccacctgggcacccgccagcgtctcaccctcaggagactccagctgaactaatcctctctccctgcttttccagaacaggtcccaccctccctccactc

SEQ ID NO: 403630 - DNA, 201 bp, Homo sapiens; identical to SEQ ID NO: 89534

SEQ ID NO: 403631 - DNA, 201 bp, Homo sapiens
caccctccctccactcagtctctcctgctgggaaccctggtcatctgcactgtgccttcatcttccatcctgccagtgctgcccggtgtgtctcttaaacscatgcctcctctgtgtgcaccacctgcactttggtaaaagccttcatttcctgcttgggttactacaacgccccctaactcatctcactgtctctatttc

SEQ ID NO: 403632 - DNA, 201 bp, Homo sapiens
gagtgtagcagagaacagggagaaggcacttcagggagaaggcgtagcacatgcaaagccccagaaggcagggacagaagccttagggatgtctgtggggraggatggaggaagagggtaacaggagaccaggtggggagatgagggaggtggtctggaagggccatgagacacccctcacgctccctgagaccccctcca

SEQ ID NO: 403633 - DNA, 201 bp, Homo sapiens
cttctccttcatacacattgtgccaacatttaaagaggagggttgacatgtcgacagtgaaagcaaacgtgccagaatggggcatagaacagcatgcaatstcccctcttcactgaggaacagcactaataatacaaatgaagaggtgcacatgaagggtgaccattcctggtacagcagaggctcttagtaaatattaga

SEQ ID NO: 403634 - DNA, 201 bp, Homo sapiens
agcaaacgtgccagaatggggcatagaacagcatgcaatctcccctcttcactgaggaacagcactaataatacaaatgaagaggtgcacatgaagggtgmccattcctggtacagcagaggctcttagtaaatattagacgtgattattttctttcctttatttgagacagggttttgctctgtcacccaggctggagcg

SEQ ID NO: 403635 - DNA, 201 bp, Homo sapiens
tttgagacatggtctcattctgtcacccagcacccaggctggaatgtagtggcacgatcactatcacggctcactacagcctctacctcccgggctcaagygatcctcctacctcagcctcctgagtaactgggactacaggcacatgccaccacacccagctattttttttttttttttttgctagagatgggggtctct

SEQ ID NO: 403636 - DNA, 201 bp, Homo sapiens
ctcatcttacagatctattttgttaatctccttatatttgctgttttgacttcccagccagcttgctaatcagtttgcctatttgactcacagggtttgcrtttgtcacggggactgaaacacacgcttgttttgatttctttttgtaaaattagaagcgtttgatgtaatgactctacctagacacagctggtaaagtga

SEQ ID NO: 403637 - DNA, 201 bp, Homo sapiens
gctggggataccgatgaataaaactgagtttctgtcttcaagaagctccaagtctactgagtgtagcagagaacagggagaaggcacttcagggagaaggsgtagcacatgcaaagccccagaaggcagggacagaagccttagggatgtctgtgggggaggatggaggaagagggtaacaggagaccaggtggggagatg

SEQ ID NO: 403638 - DNA, 201 bp, Homo sapiens
taatgactctacctagacacagctggtaaagtgagaataatgctcaagtttgcacagtttaaacacaatgtagacaataattagaaatgctatctttagawgtttaggataagctttttctcagaattgcactgattttttttttctgagtggggctttttagtgcatatatacagaaatactaaaaacgtaagaaaatag

SEQ ID NO: 403639 - DNA, 201 bp, Homo sapiens; identical to SEQ ID NO: 89535

SEQ ID NO: 403640 - DNA, 201 bp, Homo sapiens
tctcataggtatgacagcacagctctggagcaaatgccacgcacatttgcaaggtgcccatttccatgcagcaaaaataagtcaataagttattgacttasagaaaagcaaagggcctctcaataaagaggtcattgtacacctctccaaacaggcgattttctttctcatttttattcccctgctgtgtgctgaaggtca

SEQ ID NO: 403641 - DNA, 201 bp, Homo sapiens; identical to SEQ ID NO: 89537

SEQ ID NO: 403642 - DNA, 201 bp, Homo sapiens
cacattttttaaaaagactccttcatctctttaataataacggtaacgacaatgacaatgatgattacttatgagtgcggctagtgccagccactgtgttktcactgggcgagtaatgatctcattggatcttcacggtgggcgtgcggggtggacagcctcacacccccattttacagatgatgaaaaggaggtgcaggg

SEQ ID NO: 403643 - DNA, 201 bp, Homo sapiens
ggaacaaattggatcatcttcttgggaaggaaatgtactttccctggctgctctgaggggttagtggggaggtggagtgagcggggaggaaggcaaggagrggaggaagaaaccgttcctcctgtggatctgcaaagaccagtccaagaggattttagtgttaggaaaaggaatctggagtgacgagaaagggggcctttc

SEQ ID NO: 403644 - DNA, 201 bp, Homo sapiens; identical to SEQ ID NO: 89538

SEQ ID NO: 403645 - DNA, 201 bp, Homo sapiens
gagtaatgatctcattggatcttcacggtgggcgtgcggggtggacagcctcacacccccattttacagatgatgaaaaggaggtgcagggagtggtgcakctgcttcaggcgtacacagataggaagtgacaaggctgggactctgcagcctgagtgtgtcatcacgacccacccgctgctctgctctcataggtatgac

SEQ ID NO: 403646 - DNA, 201 bp, Homo sapiens
aagtgacaaggctgggactctgcagcctgagtgtgtcatcacgacccacccgctgctctgctctcataggtatgacagcacagctctggagcaaatgccaygcacatttgcaaggtgcccatttccatgcagcaaaaataagtcaataagttattgacttagagaaaagcaaagggcctctcaataaagaggtcattgtac

SEQ ID NO: 403647 - DNA, 201 bp, Homo sapiens; identical to SEQ ID NO: 89541

SEQ ID NO: 403648 - DNA, 201 bp, Homo sapiens; identical to SEQ ID NO: 89540

SEQ ID NO: 403649 - DNA, 201 bp, Homo sapiens
agtctttatttattttaactatttcttcaacattccacatttgatgatgatacctctttcttccctgagtgtatatgttctaatacaaatctttttgtttwttgtatatagtgctcctgtcattctttccaagagcaggcagtccccctcccaagcctcaccacatgctgtgaccacctccctggctcagtattctcctgg

SEQ ID NO: 403650 - DNA, 201 bp, Homo sapiens
gacgtagtcccatggaatttcagttcctattttcccagttgccagcttttggagtcaggggaacctggttgtactggaggctaggtggtaccactgcctasaagagggcagtgaaggctctccacatacagggctggggagcaggggctgatcttggatcttaggttctttttgctgtagaaaatagtggttgactggtcc

SEQ ID NO: 403651 - DNA, 201 bp, Homo sapiens
aattgaacacactcttatacattagaaagtaagcagatgattattctcatgttattacattttaaagcatgtttttgtttttttaaattatgtttttgccyatttgtgtaccatataataaaagtaataagaagtagttgtgttttacagtatattctggtggcaaggaaatgtccttctctccaaaaattgagtttagag

SEQ ID NO: 403652 - DNA, 201 bp, Homo sapiens
tcccacatggcatactcagcctctctttgtttaattgactctggttagatcatgccagtttgggcaaacagctgcactggcagctgtaagagattcactcactcttctatgactgctctgtgctaggctgtgttctggagatgtagcagtgactaagagaggagccatccttttacctcaggttgttcaccagtggtgggg

SEQ ID NO: 403653 - DNA, 201 bp, Homo sapiens; identical to SEQ ID NO: 89544

SEQ ID NO: 403654 - DNA, 201 bp, Homo sapiens
tgcttcccgggttcacgccattctcctgcctcagcctcctgagttgctgggactataggcccctgccaccatgcctggctaatttttttttttttttttttgtatttttagtagagatggggtttcaccgtgttagccaggttggtcttgatctcctgacctcgtgatccacccgcctgggcctcccaaagtgctgggatt

SEQ ID NO: 403655 - DNA, 201 bp, Homo sapiens
tgaaacattcagaaaactgaaaagcgggcaatcatgatcttaccacctagtatagggcaggttttgtggtgtctgaagcttatataaaataatataaatayatgtaacataaatacataatttgtaattatacatgtaattataaatgccatctttaaacaaaataatgtacaattatgataacaaaattaggtaagaaag

SEQ ID NO: 403656 - DNA, 201 bp, Homo sapiens
gtgaacctgggaagcggagcttgcagtgagccgagatcgcgccactgcactctagcctgggagacagagcaagactctgtctcaaaaaaaaaaaaaaaaawttttttttttgtagagacagggtctcgcttttttttacccaggctggtcttgaactcctggcattaagcaatcctcctgcttcagcatccacaagcgcca

SEQ ID NO: 403657 - DNA, 201 bp, Homo sapiens
catcagttctacgagaccctccctgctgagatgcgcaaattcactccccagtacaaaggtaagtcccagctgctggaggggttgccacactggcgaggagrtgtgagagatcgtggccatggaaggccctggcagccatccctggagccctcactccctcccactctgtgctttccctccctctcctccttctcctcctcc

SEQ ID NO: 403658 - DNA, 201 bp, Homo sapiens
cgattctcctgcctcagcctccctagtagctgggactacaggcatgtgccaccgcacctggctaatttttgtatttttagtagagacggggtttcaccatkttggccaggctggcctcgaactcctgaccttaggtgatccacccacctcggcctcccaaagtgttgggattacaggcgtgagccactgcaccgcacctgg

SEQ ID NO: 403659 - DNA, 201 bp, Homo sapiens
aattaggtaggccggggagcagcgttgagtcagatggaatgcaggagtgggaggcctgtgctgattagcccaagccctttgctgttacagaatgtccccaraattgctatatgaaagcaacccttcgattcacatatgataattttttatttctttttataatgtattttataggggacatcagcagccaccagcatggtg

SEQ ID NO: 403660 - DNA, 201 bp, Homo sapiens
ccagggggtggagattgcagtgagccaaaatcacaccactgcactcccgcctgggcgacagagtgagactccatctcaaaaaaacacacacacacacacamaaaaaaaaggaaaaagaaagggccgagcgtggtggctcacgccagtaacaccaacgcttcgggaggccgaggtgggcagatcacttgaggtcaggagttt

SEQ ID NO: 403661 - DNA, 201 bp, Homo sapiens
tttaactttagccactatcagagttagaaagggccaaatgaatactttatcacatttgacataataggcaaattgatggcctagtaactttttttttttttgagaaaaagttaaactgttaactgtcatttaaaattttttttctattttctgtggtcttgtctgacattgtcatttcgatagatttacctgctttgtgac

SEQ ID NO: 403662 - DNA, 201 bp, Homo sapiens
ctggttagatcatgccagtttgggcaaacagctgcactggcagctgtaagagattcactcactcttctatgactgctctgtgctaggctgtgttctggagrtgtagcagtgactaagagaggagccatccttttacctcaggttgttcaccagtggtgggggatgaaatgagcagttgggcatccctgaaactcagcaatc

SEQ ID NO: 403663 - DNA, 201 bp, Homo sapiens
aattctgttttgttgtgtggatttgagtttgattttggtagaagtgtagttgtgttttatgttcaggtgtctcttgatcacagtaacccatagtcccccaytggggggacggtgggggaagactttgggaggattttacccagaatacttgccgcctgctttttgtcctccaggaaaccagaagcccgggtaattaggtag

SEQ ID NO: 403664 - DNA, 201 bp, Homo sapiens
acctcaagtaatccacccgcctcggcctcccaaagtgccaggactacaggcgtgagccaccgcgcccagccacgttgtcattccacttagttaaacacctrggagtgggattgctatgtatataataagtatatgtttaactttataagaaactgccagactgttttccaaagtggctttgcattgctaccagcaatgtat

SEQ ID NO: 403665 - DNA, 201 bp, Homo sapiens
ccttgagagtgccaaggacccatgcagtagcacttccttttgggggtattattcttaactactcagaatttatcttactggaaaacctgacttcccgctaygaggtgccttgtgtccttgacctcaagatgggcacacgacaacatggtgatgatgcttcagaggagaaggcagccaaccagatccgaaaatgtcagcaga

SEQ ID NO: 403666 - DNA, 201 bp, Homo sapiens
tactgaggtgaaaattttccattgtttggctcataaagaggatgcactggggaagaattttccctttaagtgaagttatttcacctagtgggataatcttrggtaacaaattgaacacactcttatacattagaaagtaagcagatgattattctcatgttattacattttaaagcatgtttttgtttttttaaattatgt

SEQ ID NO: 403667 - DNA, 201 bp, Homo sapiens
tggatggctgcatcccaggtgggggctgatcagagagcatagtggacagtggctcatgtgcaactggtgtactttatctgatctgggctgtcacatgccgscaccaccacaccaccccacccccgcccggggtccagggtttgagatggccctcagcccctgacttgctggtctctctcctacaggtgtaccaagcaggca

SEQ ID NO: 403668 - DNA, 201 bp, Homo sapiens
aagccctttgctgttacagaatgtccccaaaattgctatatgaaagcaacccttcgattcacatatgataattttttatttctttttataatgtattttayaggggacatcagcagccaccagcatggtggggtctttgttggggagtgggggagtcttttgtaaatcaagtaagaatccattaaagaaattaattttaaa

SEQ ID NO: 403669 - DNA, 201 bp, Homo sapiens
ggcattgttagaaatcaaatggagaatcacttgagcccagcagttcaagatcaacctgggcaacatagcaacaccctgtctctacaaaaaaaaaaaaaaaragagagagagagaaagaaatgaaatggataagaacactgactagagttaatacaattgtagaaactagctttttgtttgtttggtttgttttttatgcag

SEQ ID NO: 403670 - DNA, 201 bp, Homo sapiens
gtggcctggttcagtggttcatgcccgtaatcctggcacttcaggaggctgaggtaggcggatcatttaatcccaggagttcgacaccagcctgggcaacrtggcgaaaccttgtctctactaaaaataacaaaaaattagctcgacatggtggcatgtgcctgtagtcccagctacttgggaggctgagatgggagaatt

SEQ ID NO: 403671 - DNA, 201 bp, Homo sapiens
tgggtgccttatgagttctctgctgatctgtatgcgttaggtattcatgacacagtagtgatttgaggcacattttgtggagtgcctactttatgctggtkctcttgtagatcctggagattcagcagtgaatactgcagtcaaaaatctgaccttatggaacttgttttcaagtggaaattgggtgggaggagacaatta

SEQ ID NO: 403672 - DNA, 201 bp, Homo sapiens
cagcaggtctcagatgaatgttcaggcgtgggtccttaatttatactccccagttaatgcagacttataaggtggaaaataataaatgcaaagtaaactartattagccagtgcttggaatgcattttgtaaagtgtgcagcaggccacattttaataattgtactcaccatatgattggtgtggatttggatgatgattg

SEQ ID NO: 403673 - DNA, 201 bp, Homo sapiens
gacttgccccccagatctgtggtctattccttcatcgttttcagctctgtgcatctttcccttaagttctgagctatttcttccattagacccaagtggcyttttcatattccctcaaaatatcaaacttcttctttcctcggggtctttgtacttgctgtgcttttgtcagaaatggcttcctctagatctttccatgct

SEQ ID NO: 403674 - DNA, 201 bp, Homo sapiens
catctattatgaatggaagttttacttgtaaggcagtaaaaggtgtcattccttgaacagtatctgttcttccaggcaagtgcctctaaaggagagagagmccagttgattacaaacccactactgaagggcttgggtttttcttgctttgtgtttgtatctgagcatgaggataaaagtgtctgtctcttcctcaggtct

SEQ ID NO: 403675 - DNA, 201 bp, Homo sapiens
ctgatgcccatttgtttagatgtgctttaaacttggtgtctgtggactgtgccatggttccttcctcctcatcagcagggggtggtggtaagttcagtttrcgtgcttttatggggtgccctgtggagttatatgcttggctctggtgctgaagagtcatcatatttcttgagaacttgcctagttactcaaggaagaaag

SEQ ID NO: 403676 - DNA, 201 bp, Homo sapiens
ggagtctcactctgttgcccaggttggagtgcagtggcgcgatctcggctcattgcaacctctgcctcctgggtttaagcgattgtcttgcctcagcctcytaagtagctgggcctacaggcatctgccaccacgcctgggtaattgtatttttgtagtgatgggttttcaccatgttgtccaggctggtctcgaactcct

SEQ ID NO: 403677 - DNA, 201 bp, Homo sapiens; identical to SEQ ID NO: 89546

SEQ ID NO: 403678 - DNA, 201 bp, Homo sapiens
ttttacccaggctggtcttgaactcctggcattaagcaatcctcctgcttcagcatccacaagcgccaggattacaggtgtgagccactgcatttggcaargatcccttttctacatggtattgctgaggctgcagccacatttgtttggggattaacctaactccaagcctgcccactttcactctgatgcccatttgtt

SEQ ID NO: 403679 - DNA, 201 bp, Homo sapiens
agccctgtaagtaatgctagtagagactgtctaatttgtaaattagacaaaacagataatgagtgtgagatggcctgaactggttaacagggtgcatccaraaatgtgcttcgttgatgcggcatccagtgcatggctgagtgagtggatgcgagctctgattgccccaagagcataactttggtttaaaggtgtgtacca

SEQ ID NO: 403680 - DNA, 201 bp, Homo sapiens; identical to SEQ ID NO: 89547

SEQ ID NO: 403681 - DNA, 201 bp, Homo sapiens
cctaggcctctgttgagtccgggtgcaggctgcttccacgtcagttccctgacaagaagtaaaggtgtctcttagctttatagtcagctctggactccctstgtcggggatggcaggactaatggagtctcctgtgggttcaggcttctctgggtcactgcatcaaggcactgtaccttgagagtgccaaggacccatgca

SEQ ID NO: 403682 - DNA, 201 bp, Homo sapiens
cacatggcatactcagcctctctttgtttaattgactctggttagatcatgccagtttgggcaaacagctgcactggcagctgtaagagattcactcactcttctatgactgctctgtgctaggctgtgttctggagatgtagcagtgactaagagaggagccatccttttacctcaggttgttcaccagtggtgggggat

SEQ ID NO: 403683 - DNA, 201 bp, Homo sapiens
ccacatggcatactcagcctctctttgtttaattgactctggttagatcatgccagtttgggcaaacagctgcactggcagctgtaagagattcactcactcttctatgactgctctgtgctaggctgtgttctggagatgtagcagtgactaagagaggagccatccttttacctcaggttgttcaccagtggtggggga

SEQ ID NO: 403684 - DNA, 201 bp, Homo sapiens
cccacatggcatactcagcctctctttgtttaattgactctggttagatcatgccagtttgggcaaacagctgcactggcagctgtaagagattcactcactcttctatgactgctctgtgctaggctgtgttctggagatgtagcagtgactaagagaggagccatccttttacctcaggttgttcaccagtggtggggg

SEQ ID NO: 403685 - DNA, 201 bp, Homo sapiens
ttgaggcttcatccagaggctcaaggggtccactcaggagtgatgcggcccagagccatagtcctgcccacagccagggctcagggcccgagcctcgctgrcgctctagatgtcagtctgtcctccaagatcctacttccatcttccagatcccacttccatcttcccagatcccaccacagcctcgccgagcagcaccca

SEQ ID NO: 403686 - DNA, 201 bp, Homo sapiens
tgaggcttcatccagaggctcaaggggtccactcaggagtgatgcggcccagagccatagtcctgcccacagccagggctcagggcccgagcctcgctggygctctagatgtcagtctgtcctccaagatcctacttccatcttccagatcccacttccatcttcccagatcccaccacagcctcgccgagcagcacccac

SEQ ID NO: 403687 - DNA, 201 bp, Homo sapiens
tctctactgggtggggtgattcacgcctgtaatcccagcactttgggaggctgaggcagcggatcacgaggtcaagagattgagaccatcctggctaacayggtgaaaccgcatctctactaaaaaaatacaaaaaattagccgggtgtggtggcagacgcctgtagacccagctactcgggaggctgaggcaggagaatg

SEQ ID NO: 403688 - DNA, 201 bp, Homo sapiens
aaggtcttttcagtagactagtgtcaaccagtctgcatagacctagagaaaaggcttgtgtggccagacttctcagagctccatcttctggatagagcctrgaatggttagaatgtactcatatttacagttccattgcctgtgttgagtttctggactcttctcaatacgtgccttcctggaggcttttgtggtgatgag

SEQ ID NO: 403689 - DNA, 201 bp, Homo sapiens
cactgcagcctcaatgtcctgggctcaagtgatcctcttgtttcagcctcctgaatagctgggactccaggcatgcaccactacacctagctgagtttttwaaaaattttgggctgggcacggtggctcatgcccataatcccagcactttgggaggccaaggcgggcagatcaattaaggtcaggatttcgagaccagcc

SEQ ID NO: 403690 - DNA, 201 bp, Homo sapiens
tttgtctttctgctgaaggagcagggtgagcagctctaaggcacttcccacgctacttcgaacccccatgtcatcattttgtttgcttccagcagagcatyctggccagaacaagccaaggagccaagacgagagggacacacggacaaacaacagacagaagacgtactggccgctggactccgctgcctcccccatctc

SEQ ID NO: 403691 - DNA, 201 bp, Homo sapiens
atccgcccgcctcagcctcccagggtgctaggactataggcatgagccaccactcctggccagcataatcttttctgattattaaaataatacatacttaygggccaggcgcagtggcctgtaattttttgtattgttagtagagatggggtttcaccatgttgaccaggctggtttcaaactcctgacctcaagtaatcc

SEQ ID NO: 403692 - DNA, 201 bp, Homo sapiens
aagcgattcttgtgcctcagcctcccaagcaggtgggactacaggcgcctgccaccacgcctagctaattttttgtattattagtagagacggggtttcaycatgttggccaggctagtctcgaactcctgacctcaagtgatcacctgcctcggcctcccaaagtgctggaattacaggtatgagtcagcgcacccagca

SEQ ID NO: 403693 - DNA, 201 bp, Homo sapiens
tcctcctcttcccccagtattttctctctcagttataaaggtaatgtgtgctcagagttggaggatattataagtttgaaacattcagaaaactgaaaagygggcaatcatgatcttaccacctagtatagggcaggttttgtggtgtctgaagcttatataaaataatataaatacatgtaacataaatacataatttgt

SEQ ID NO: 403694 - DNA, 201 bp, Homo sapiens
agagactgcagcggcggcggcgggagcgggcggacgcgcaggcaagaccaggactcgggctggaggggcgctgggctcggacctgccaaggccacgggggwgcaagggacagaggcgggggtcctagctgacggcttttactgcctaggatgacgctgcggcttctggtggccgcgctctgcgccgggatcctggcagagg

SEQ ID NO: 403695 - DNA, 201 bp, Homo sapiens
tgacttcttcttcttcgtcaatgacttcagcatcttgaggacactactgcccctcgtttcccggagagtgtgcacgactgctggtggcgtgcctgtgaccygacctcgtgagttcctgcccacacggtgtaccctgacctagaccccggaccccaatccccacttggcagtgctgattccatcctatgtgctcctgacccc

SEQ ID NO: 403696 - DNA, 201 bp, Homo sapiens
caagggacagaggcgggggtcctagctgacggcttttactgcctaggatgacgctgcggcttctggtggccgcgctctgcgccgggatcctggcagaggcsccccgagtgcgagcccagcacagggagagaggtgggcaccgcaagggaggacccggcccggggcactgcaccgtgccaccctccgctccactcggccttc

SEQ ID NO: 403697 - DNA, 201 bp, Homo sapiens
caccactgggactggttacacaggatgctgtccctctggtacaggtctgtcttagccccacctggttctaggatactgagttcatgggctggtaggggatrtaagctcctggccttgttccttgtggccttgcccttgggagagccagccattagttgtgtgttgatgcatgcctgataacaaaccaagaagtgccttgaa

SEQ ID NO: 403698 - DNA, 201 bp, Homo sapiens
acaaggcccctcgaatggtgctggcagcagctggaggtgagtgatggaatcactgaagtcctgggtagtggggtcccagccttggttatcaaagccgaggkcctggttcccaccataggggacctttcaccccaggggactctgctcccaccctaaccttgaggggaatgaccttcctcctgtgctctctgaggtgggata

SEQ ID NO: 403699 - DNA, 201 bp, Homo sapiens
aaagccgaggtcctggttcccaccataggggacctttcaccccaggggactctgctcccaccctaaccttgaggggaatgaccttcctcctgtgctctctraggtgggataggattctaccctgccgccaccactgggactggttacacaggatgctgtccctctggtacaggtctgtcttagccccacctggttctagga

SEQ ID NO: 403700 - DNA, 201 bp, Homo sapiens
ggaagaggcggggacagagggcagggaagcagaggacagctacctaggagcccctggctgaccacagaatcatattacccttagcgtatggctttgcagcygggcaactaggggtgggcagcaggagatgccaggcctggggattttgtgctgtcgttggtctgcagtggtccacctggcacctaaacatgtcctccttgc

SEQ ID NO: 403701 - DNA, 201 bp, Homo sapiens
tatgagcctgtcctgaagtcaggcatgaggcaagggcagacaagggttgccctctgggccctggaggggtgggtggcagagacaggggaagggggttgggsagtgtgctagggcccactcttcggagaaaccatgcctctcctagtctgcctcctcagtcccattcatgcatgtaccccaactcactccagtgtggtagag

SEQ ID NO: 403702 - DNA, 201 bp, Homo sapiens
tccagagatacctcagcagttgggaaggggttctgtggctgctgcatcacaggcacacatgttcacacacatacaccctctacccacacctgccaccttttctgttcccctggcagtctggctgttcctcagccttgtcatgtactgtttcagatccgccaccgtgatgatgctctaccttttgcccacgtggccattgca

SEQ ID NO: 403703 - DNA, 201 bp, Homo sapiens
acagtctaaaccaatagtcccttccttaatgatgaaaggataaaatcattgccagaacaaaggcagcgtgtaatttttagaaaggaaaaaataagttgttrtttgcaaatgatatgttgtatgcttagacaaaaacaaataattaactgaaaattgagagtgaatttaaggatttgtatgctggtgagaccaggtaaatgt

SEQ ID NO: 403704 - DNA, 201 bp, Homo sapiens
ggcgtggacccgggaggtggagcttgcagttagctgagattgcaccactgtgctccagcctgggcaacagagcgagactccgtctcaaaaaaaaaaaaaaaggccaatgcaactggtggcaccacagagccctcctcttgtggaggtgaggaggcaagatccaaggagtcctagggtatacgtttgtaacattatttgcaa

SEQ ID NO: 403705 - DNA, 201 bp, Homo sapiens
gccaggctggtctcgaactgctgacctcgtaatccacctgccttggcctcccaaagtgctgggattacaggtataagccaccgcgcccagcctgtggtgcrtgtttcacagcaaccaggaggctgtcaagaaaattaatattaccttattgggtgccaaggcaacactgtttggtgttcagagctgattaaaaacaacaac

SEQ ID NO: 403706 - DNA, 201 bp, Homo sapiens
gtgggggcagtcagagagcatgtgggtgactgagtcctgatgggtcgtcacttcagggatcaagaatgctgaccctgaggagctgaagcgagttgcctcayagcccaccagtgacttcttcttcttcgtcaatgacttcagcatcttgaggacactactgcccctcgtttcccggagagtgtgcacgactgctggtggcgt

SEQ ID NO: 403707 - DNA, 201 bp, Homo sapiens
aaagtacttaggaaagtagatgtgaaaaacttaaatcagctgtgaacaaatagtaaattaaaagactagaccgtgtgaccaagtggggtgagtggtacgtrtttcttttacattttttttttttttttgagatggagtctctctgtcacccaggctggagtgcagtggcacgatcttggctcactacatcctctgcctctt

SEQ ID NO: 403708 - DNA, 201 bp, Homo sapiens
ctctactaaaaatacaaaaattaggctagacgcggtggctcacgcctgtaatcccagcactttgggaggccgaggcgggcgaatcacaaggtcaggagatygagaccatcctggctaacacggtgaaaccccgtctctactaaaaatacaaaaaattagccgggcgtggtggcgggcgcctgtagttccagctactcggga

SEQ ID NO: 403709 - DNA, 201 bp, Homo sapiens
gaatgggaaagccggattgcggtaacatggacccctgggagaggttctggagtcttggcctggcagacacctgggaggtgtagggttggggcctggcatarcgcagcctgctcctataggcatccctggtgtcctaggcagctgtcacctgcaggggtagcatagtgggagggcagggcataggtgctgatggctgtggag

SEQ ID NO: 403710 - DNA, 201 bp, Homo sapiens
cctgcaacttccttgttatatgtcacttgttatagtaaagaatgctatattacatgaactctaaaatgtgctagattgtaaggagctgtctgtgctccagygccagagaaagaatctcaagaatcttgccaattttaatcaaaggatactatagattgtaaaatgcctcttgcattccaagatgttagatgtgaaatacat

SEQ ID NO: 403711 - DNA, 201 bp, Homo sapiens
cccagactacaaccggatccgtagcggcatgttctggctgcgcttctaggcgggaagcctatgtaagcaagagggcagggccggggtttgtggtccccccyccaccacaaacacagcacttcggctcctctaacctgtgccacaggtgaccaccaataaaatcctctgctgagaagtgtgtcatccctcttttggcattgg

SEQ ID NO: 403712 - DNA, 201 bp, Homo sapiens
ccctgacgctccaccctatccccacaggccccattgagcagctcccagactacaaccggatccgtagcggcatgttctggctgcgcttctaggcgggaagyctatgtaagcaagagggcagggccggggtttgtggtcccccccccaccacaaacacagcacttcggctcctctaacctgtgccacaggtgaccaccaata

SEQ ID NO: 403713 - DNA, 201 bp, Homo sapiens
cagactacaaccggatccgtagcggcatgttctggctgcgcttctaggcgggaagcctatgtaagcaagagggcagggccggggtttgtggtccccccccmaccacaaacacagcacttcggctcctctaacctgtgccacaggtgaccaccaataaaatcctctgctgagaagtgtgtcatccctcttttggcattggca

SEQ ID NO: 403714 - DNA, 201 bp, Homo sapiens
ggagtggagcaccagcaactgttagacctcgcccagaagcacctcggtggcatcccatggacatatgcagaggacgctgtgcccactcttactccatgccrcttcactggcagtgaggtatgctgccttttgggcaggagtagtgctcagctgggggcctgtgggaggacccccatgtgcatggttatcctggtgactcca

SEQ ID NO: 403715 - DNA, 201 bp, Homo sapiens
ccaggtaccccaccctgacgctccaccctatccccacaggccccattgagcagctcccagactacaaccggatccgtagcggcatgttctggctgcgcttytaggcgggaagcctatgtaagcaagagggcagggccggggtttgtggtcccccccccaccacaaacacagcacttcggctcctctaacctgtgccacagg

SEQ ID NO: 403716 - DNA, 201 bp, Homo sapiens
tgtgctcatacatgggcccagggaatactcacacaggtacactcacagatttacatgtacacacttgggcacaacacacacataaccacccacacgtgtgkattcatgcacatatgcatctcttcaccccatttgcactctcttatacacacacacacacacgcacacacacaggctcccaggctcttccctcagcatctc

SEQ ID NO: 403717 - DNA, 201 bp, Homo sapiens
agaagtctcatgtcattctgatttgctgatcttcctaaaagcttcatctcttagagggagctgagagtttctcatgccccttccgcttgggaggcctttarggtcttcaaggtgatgtggtttgtggtgggtcttctctccaccatacatggtcctagggggccccttttcatcataacactcttgttctccaggtcaggg

SEQ ID NO: 403718 - DNA, 201 bp, Homo sapiens
cacacacacacaaacttatacacatgggtgcatgcacacacatcctgtgtgcacacatgtgggcacactcactcatacctgtgcccatttagtcacatacygcacacaggggttgtgcacgctcgtgtgtgtgcacctgtgctcatacatgggcccagggaatactcacacaggtacactcacagatttacatgtacacac

SEQ ID NO: 403719 - DNA, 201 bp, Homo sapiens
ccccaggataagctctctcctgtgtatttggagcatgttcttggtgtgtgattgctggtgcgattggctttgcattgacatctcctagatgctgctgggtragtcgttcacacttctgctgttactctggagatagaaatatgtatatgctaccgccccaccctcaacaactttcagacttgaactgagtcctttcttcaa

SEQ ID NO: 403720 - DNA, 201 bp, Homo sapiens; identical to SEQ ID NO: 89575

SEQ ID NO: 403721 - DNA, 201 bp, Homo sapiens
tgggttttctctggagtctagtccccagctcctcagggcactaggggctggtggactgagggatgtactgcacctcctccactcccacaggcacgcccccrcttgataaaatttaaagccacacctgagggcttgggaggcttttacctttcccatcattggcctccgagctcagacctggaggaactctgagggcaggtg

SEQ ID NO: 403722 - DNA, 201 bp, Homo sapiens
tctgagtcagggattgatgcatcagctccaagccaacccccgttacaggtgagaggaagctgaggcccaatgggaaggtctcatagctcctgaggcagggmttgtgtttctccaggctctaagtgtggaactgaaatgtggctctggcctgagctgaggggctcgtgccatcacggtgtctcagggtgttggggtaggctg

SEQ ID NO: 403723 - DNA, 201 bp, Homo sapiens
ggcgggagacagatggggaaccggggacaggtgaggttgccgtgactggggaggctgctggggacaggtgaggcggtcgtgacagtggtgggccagagacrggtgtggcagagcagggggcggggacaggtgtgtgggggcatatcggcttggcggtggctaggtctggccaccatcacctcggggagggctctggccccc

SEQ ID NO: 403724 - DNA, 201 bp, Homo sapiens; identical to SEQ ID NO: 89573

SEQ ID NO: 403725 - DNA, 201 bp, Homo sapiens; identical to SEQ ID NO: 89576

SEQ ID NO: 403726 - DNA, 201 bp, Homo sapiens
gtgtattctaccatcctgtttgctcagtgtcagggtcctgtgggctcagagccacaggtgcagccgtgcacccagcccgcttagtccacgtgctctgtttygagagctgcaatgtgttccctccttgttgtgcctcagttggcaatttcttatggctggaatttcccagtgttttgctatggtaagcagagctgttgtgat

SEQ ID NO: 403727 - DNA, 201 bp, Homo sapiens
cctaaagggctcagataccacagggcttcttctgctgtaagtgatcagtctagagagaagagtgtcattagtgaggtgaccaggattgagggtgaggggtkttcccggtggccatggagatgccttggggaaaggactcattgaggaagtgactttttagctgggctttgtatgatgaaaagaagttcaccacagggaggg

SEQ ID NO: 403728 - DNA, 201 bp, Homo sapiens
gagataggtaatttattgccttgttttgcacccaggcctgatttgctgccctgcctgcccaccttgtgctgcgcatgtgggtggaaggcgggaagggaaawgccaccaaatgccatgggaggaggctggagctgtctctgggaaaataggagatgtggagagggggtgcagatccccagtcctgaggttttgggagtccct

SEQ ID NO: 403729 - DNA, 201 bp, Homo sapiens
atgacgaagagaatagagaaggcctattctctattatttggcctggggttgggtcaaggtcagggttggtaggggttgctgttgctgtgaaagctgagcckctccttccctccagagttcaatgttggccagtatcgccgggacgtggtcaagacctacaaatcttttgaattttttctccccgacaatgaagagggcctg

SEQ ID NO: 403730 - DNA, 201 bp, Homo sapiens
cccgccaggggcaagacctacatctccaagaagctgactcgatacctgaactggattggtgtgcccactcggggtgaggcttggccccagctgtctaaggrgagctttgtggggcatgacgaagagaatagagaaggcctattctctattatttggcctggggttgggtcaaggtcagggttggtaggggttgctgttgct

SEQ ID NO: 403731 - DNA, 201 bp, Homo sapiens
tttgatgccacaaacaccacccgagaacggagagcgaccatctttaattttggagaacagaatggctacaaggtgaggcctccttggctcctctccttggyggaactgtggcatgtcccctgccctccagggctcctttcaccgcctgcttatgcatgaggggcatggggctggcatggctcctgagtgtaatttgggatg

SEQ ID NO: 403732 - DNA, 201 bp, Homo sapiens; identical to SEQ ID NO: 89572

SEQ ID NO: 403733 - DNA, 201 bp, Homo sapiens
ccaggctgtgatgcgctgcctgctggcctacttcctcgacaaggcagcaggtgtgggctgtgccccgggggaggtgggaaggttgtgtgagaaggtaggcmctgtcaccaggcatttctggtgtgctagccatccccctctgtgtctacagaacagctgccctacctcaagtgtccgctgcacacagtcctgaagctgact

SEQ ID NO: 403734 - DNA, 201 bp, Homo sapiens
accacctttcccaatttgctttttttctttgagacggagtctcgctttgtcacccaggctggagtgcaatggcgtgatctaggctcactacaacctccacytcccgggttcagatgattctcttgcctctgcctcccgagtagctaggattacaggcgcctgccaccatgcccagctaatttttgtatttttagtagagac

SEQ ID NO: 403735 - DNA, 201 bp, Homo sapiens
ccatcatagctgttttgaagtgtacgtttcaggagtatgaagtacatttacattgttatgcaactctcaccaccatgcatctccagaactcttttaatctkgtaaaacagaaactctgtacccactgaacaataactcaagccagatgtgctggctcacacctatagtcccaggtacttgggaggctgaggtgggaggatt

SEQ ID NO: 403736 - DNA, 201 bp, Homo sapiens
atgtccccatctttttttttttttttttgagacagagtctcattctcttccccaggctggagtgcagtggcgtaatcttggctcactgcaatctccacctyttgggtacatgcgattctcctgcttcagcctcctgagtagctgggactacaggcgtgcgccaccacgcccaactaatttttgtatttttagtagagacgg

SEQ ID NO: 403737 - DNA, 201 bp, Homo sapiens
ctgaatggcacctgccacctgggcctctctatggctttcatggtcccccagcacagcatttctcttcatggttctgtgatgtgatccatttgtctggagcrgcttctgttggatttgtcagtaagcgttgctcttgcttttattggtggtgtcatcgtgacacccccaaaccaaggtcccaaggtccagacagtgagagct

SEQ ID NO: 403738 - DNA, 201 bp, Homo sapiens
acacaagcaactctgagatgaatgcttttggggtgtgcatagagcagggtcctcagctgggttctagagccagcccaggccgggcctgagctgaatggcayctgccacctgggcctctctatggctttcatggtcccccagcacagcatttctcttcatggttctgtgatgtgatccatttgtctggagcggcttctgttg

SEQ ID NO: 403739 - DNA, 201 bp, Homo sapiens
ggggctgtctccacttggggtttgctttccagagggaagggggttttcgtgggagagtctaggagagggcagcacctgctttagctctggactccttgacyccgcctccagccctctgaagcagggtttcagggcctggctgcttgtcagcatgggcctcaggggatggagagctccgaggagcaaggcgggaggccctga

SEQ ID NO: 403740 - DNA, 201 bp, Homo sapiens
atgtctttttttaatcctcacatttgatggttgggtatagaatttctaggtggaaagtgcttttcccttagaacttctacaacatcactctgatgtcttayggcttctagtgtggctgtggagaagtctcatgtcattctgatttgctgatcttcctaaaagcttcatctcttagagggagctgagagtttctcatgcccc

SEQ ID NO: 403741 - DNA, 201 bp, Homo sapiens
ctggattaaggggattccacctgtgtgttggcccttctagtcagacggaagagcagaacagggctaaactggggtgtctgtgggaaacggctctaccccarccttatatagtcaaacacaggggctgttctttcccttccttcttcttcctggagtcatgccttctggagttctctgtccccagctacaatctgtgcctgt

SEQ ID NO: 403742 - DNA, 201 bp, Homo sapiens
gtggccctggccagtttggttgcaggatggacagaggctcgttaggaggcagctccctgaccgacctggggccggggagcagcaggcggggtaggcacggsacagcgtggggagggtggagggttagggaaagacctggatgaagtcagggtggtgctggaggggtgcgagagtgttggggggtctctcctggtttagggg

SEQ ID NO: 403743 - DNA, 201 bp, Homo sapiens
tttccatgttggtcaggcttgtcttgaactcccaaccttaggtgatgcacccgccttggcctcccaaagtgctgggattacaggcgtgaaccactgcaccyggcctattctggtattgtctttgtcacctgcatctggggtcgggaaggtggagacaaggggctgggtgttctctttcccatgcctcagaacatcatgggc

SEQ ID NO: 403744 - DNA, 201 bp, Homo sapiens
catcctggcccgtgtcggccactgctgagcctgagagagggggtcacagtgatagggccaccctggatgggaagacctggagggcagccacacagctggayggatgctgccacatctgggcatacagtgtctggacgctgccacatctgggcatacagtgtctggacactgccacatggagccactgtcatgcaggtcata

SEQ ID NO: 403745 - DNA, 201 bp, Homo sapiens
gaacgctctgtgtttttattgtacagaacgtggacatctcaagacctccagaggaagcccttgtcacggtgcctgctcaccagtgaccatgttcatccacygtgaccactaggcaggcactgctctctgcagagggggtcattccaggccctccagtgtgtgtgatagtcaccatgccatgcagggatattcttgaagcca

SEQ ID NO: 403746 - DNA, 201 bp, Homo sapiens
gcccactcggggtgaggcttggccccagctgtctaaggggagctttgtggggcatgacgaagagaatagagaaggcctattctctattatttggcctgggrttgggtcaaggtcagggttggtaggggttgctgttgctgtgaaagctgagcctctccttccctccagagttcaatgttggccagtatcgccgggacgtgg

SEQ ID NO: 403747 - DNA, 201 bp, Homo sapiens
gcctccagccctctgaagcagggtttcagggcctggctgcttgtcagcatgggcctcaggggatggagagctccgaggagcaaggcgggaggccctgaacrtgtccgtgttcctccctcccaccaccccggcgcttctggtcctgccgcagaccttttttgtcgagtccatctgtgtggatcctgaggtcatagctgccaa

SEQ ID NO: 403748 - DNA, 201 bp, Homo sapiens
gaacccaggaggaggaggttgcagtgagccaagatatgtcactacactccagcctgggtgacagagcaagactctgtctcaaaaacaaaagaaaagaaaasaaaacaaaacaaaacaaaagcatatacttgctttgagttttagcctagcccaagagcttttttcatcaaggcatctgcaaccacttaggtttattattat

SEQ ID NO: 403749 - DNA, 201 bp, Homo sapiens
gttggaagtgcaaggcctcgcagctagattccgtggctagccagatgtgctctgtgagaaccctggccacgctcacaggcctctttctactttctctctgsacagggacctgtcctatatcaagatcatggatgtgggccagagctacgtggtgaaccgtgtggctgaccacatccagagccgcatcgtatattacctcat

SEQ ID NO: 403750 - DNA, 201 bp, Homo sapiens
tctttatgactttgactactttatatacctcatataagtgaaatcatatagtatttgtctttttgtaactggttactttagttagcataatatcctcaagsttcatccatgttgtagcttgtgcaagagtttccttcctgtttattttttaagacagcatctcactctgtcacccaggctacagtgcaatgtggaaatcac

SEQ ID NO: 403751 - DNA, 201 bp, Homo sapiens
cctgggtaaccatttaaaaaacataaagaagaaagataactagttattatgctagaatttactgctgtctttgttttaaggatttctggttgttattttastttttataactgctctcttaatatgttctgcaggaagcacaaattcttgacaccaaaaggtgaatttcaactgacaattttcaatattattgaaagtcaa

SEQ ID NO: 403752 - DNA, 201 bp, Homo sapiens
ttgcatgtctaataaaataggcagcacatataaatccctaatttattttgttttaatacctcaaaaatactataagttgaacaaatgaacagatccaagayggtagaaatgctgaattctattttaagtctgattagagcactaggcttctcagcatggttactgtgatttgggaacacttttagatggctttaaaaatta

SEQ ID NO: 403753 - DNA, 201 bp, Homo sapiens
atggttgtgattcatgttgagagacatgcttgagtttgtccttttactgcctttttgttcctgttagctatagttggagttagactgggcagcttggtagrctagaatctaaatggtgtctgtcaagtaatatgagtgtctatcaggacatacaggagttaggtagggttgggaaaactgctgtcctccccacgtgctttg

SEQ ID NO: 403754 - DNA, 201 bp, Homo sapiens
cctgagaaagtagacaatctcaactggggaccagtggttttcattcattataggaataccatagaaacatgttttcttaaattaataaatttgacttaaarcaaacaaaaaatttatattcagtttcttccaaaagccttgccacctgtattttaatcaacattaatttttgggttgactgttttgactgatagcataaag

SEQ ID NO: 403755 - DNA, 201 bp, Homo sapiens
ttcttcagacctatcctggaaccatttaccttctctcacagaattgttgcaatcattaatttagcaaatgcatacaaaagggctctaagttgtaaagggcratgcaaatagaaatgtactattactgttatgattaataagcaataagtatcatttatatgttgactgttgggtttgtcccacaagtgatgccattatcaa

SEQ ID NO: 403756 - DNA, 201 bp, Homo sapiens
acagattagactcttaattttagaagcttcctttttaaagtgaaggacccatggaaggaatggccactgaagattaattgctgtggcagaaaggacagtgytatggcattctgttagaatttttattcagcatttgtaattggatttttttttgaattgttacttttgtgtgtgtgtggggagggagttgttgtcgaccat

SEQ ID NO: 403757 - DNA, 201 bp, Homo sapiens
ggaaaccatcattctcagcaaactatcacaaagacagaaaaccaaacaccacatattctcactcataggtgggaattaaacaatagaacacttggacaccrggtggggaacatcacacaccggggcctgtcagggtgtggggggctgggggagggatagcattaggagaaatacctaatataaatgatgagttgatgggtg

SEQ ID NO: 403758 - DNA, 201 bp, Homo sapiens
gaaatcaattcaggaaagaagggaagggggaaaatgaaagaaatttacctggaaatctgagcatagatcaagtggcactgtcaagaatataccccttacaygcactgtaggtaaaaggagaactaagaacaaattaagaacaaaaatgattaactgcaatattaatttaggcaaataaacatgttaaaccaaatatagagc

SEQ ID NO: 403759 - DNA, 201 bp, Homo sapiens
tcaccttgttggccaggatggtctcgatctcttgacctcatgatccgcccgccttggcctcccaaagtgctaggattacaggcgtgagccaccgtgcccgkcccaaagatccctttttaaacatgcattttggagtctgtatggtgaccttttatttttccctaggcactgaaaatgaagatgctggaagtgactatcaaa

SEQ ID NO: 403760 - DNA, 201 bp, Homo sapiens
ttttcatatcagttttttaaatttttatttttaattatttatggatgcagaatacttgtacatatttatggggtacatgtcaaatttgatacaatcatatktggaaagatcaattagggtaattgggatatctatccccttaagcatttatcacctctttgtgttagtaacattccaattccattcttttagttattttga

SEQ ID NO: 403761 - DNA, 201 bp, Homo sapiens
ttctcaggaagacaaagaaagaattgataggagtgaagattattgtgaagcatatagttcagcataggagaaggtggaaatctgacatttttagttatcasacactagagcacatgaaacccagtgaattttctatcactgtgaattctcaaggagaggctcactgagcagttggcatgtgtaggggatttccatggcata

SEQ ID NO: 403762 - DNA, 201 bp, Homo sapiens
gttacttcccttaagataggtttccagaagtagaattattaggccaaaaggaatctatgttctaattatttttgaacattccatattgctaatatgccaartttgaatactgcttaattgctttttaacaaacttatattcccaaaatggatgcatgagaatattagtgttatttttcctttctaggactagaaaataagt

SEQ ID NO: 403763 - DNA, 201 bp, Homo sapiens
agtagaattattaggccaaaaggaatctatgttctaattatttttgaacattccatattgctaatatgccaaatttgaatactgcttaattgctttttaamaaacttatattcccaaaatggatgcatgagaatattagtgttatttttcctttctaggactagaaaataagtatttaaaatattttaatatcaattattt

SEQ ID NO: 403764 - DNA, 201 bp, Homo sapiens
acagtatcatttaaattcactagtgaaattaaacttttttgttattaattctgctttctcttttgtgaggtacctatatttgtcctttgggaagtagtaawtaaactattatttgtaatggtcaaatatagccataaagaacatagctcagaggcttggtctctttctgtattttacaaggaaaaaatatactgaactaac

SEQ ID NO: 403765 - DNA, 201 bp, Homo sapiens
cccacaagtttacggtagtggtgttacgtgccaccaaagtgacaaagggggcctttggtgacatgcgtaagtgccctttttttctttgctgttaaacatgyaattatggttcagcctttaattgcttgagttccttgacaaatcggaggttctgccttcttcaaatgtggttatgtttgtctagatctttgaatgataaca

SEQ ID NO: 403766 - DNA, 201 bp, Homo sapiens
ctgtcacctttactgatatctttgggatgttaataggagaaacactaattcataatgtaagttacagttcaatctacactgcttttataacaagtagacaraacatattataatattatattttaaataaaagaaaatgtaatacattttataaaagtcagtggactctacttatttgtccaactatgcgtactgagccca

SEQ ID NO: 403767 - DNA, 201 bp, Homo sapiens
gtgctagtgtagcaggacaagccacagacaaaaacccctcagacaccgagttaaagaaggaaggggtttgtttggccgggagcatcggcaagactcctgtytcaagagccgagctccctgagtgagtaattcctatcccttttaagggctcacaactctaagggggtcagcttgagagggtcgtgatcatttgagcaagca

SEQ ID NO: 403768 - DNA, 201 bp, Homo sapiens
tattgtggacaacattcatttcctctcctctgtcatttcctatggctagatgtgtaatccctagggctctaaaaaggctttccacattcctgaatttaaagaagattatgtaactattttttttagtgtgcctgagaaaatagttgtccaagcaggcttttcttcattactctgttttcagacttctttgtagttttatct

SEQ ID NO: 403769 - DNA, 201 bp, Homo sapiens
taggctccgcagcaggaggtgagagttggacgaaggagcaaagcttcatctgtatttacagtagctccccatcactcgcattgctgctccgcctcctgtargatcagcggtggcattacattctcacaggagcatgaaccctattgtgaactacaagtgtgaaggatctaggttcatgctgcttatgagaatataatgcct

SEQ ID NO: 403770 - DNA, 201 bp, Homo sapiens
gcagcaggaggtgagagttggacgaaggagcaaagcttcatctgtatttacagtagctccccatcactcgcattgctgctccgcctcctgtaagatcagcrgtggcattacattctcacaggagcatgaaccctattgtgaactacaagtgtgaaggatctaggttcatgctgcttatgagaatataatgcctgaggatct

SEQ ID NO: 403771 - DNA, 201 bp, Homo sapiens
tttcaaagcattttctcatttggttcttataacaatctacaattacatttttcatagctaacgccagggataatattgaaaaggcctttctgtacaacagatttacagtctctggaaagacaactcttaatatcttaagtggatattaatcattttctttcctttacacaaaaattgtctctctggcaggatgtcctcctt

SEQ ID NO: 403772 - DNA, 201 bp, Homo sapiens
tttgcttaaaggaaactaaggaaaccttcattaaagtttattttaaaaagagaggcttctcttcaatcctgcatcttttgttttgttttgtttttttgtgtttttttttgagacagggttttgctttgttgcccaggcaggagtgcagtagcacaatcatagctcactgcatcatcaaactcctgggcttaagtgatcctc

SEQ ID NO: 403773 - DNA, 201 bp, Homo sapiens
tttagacacagctcaagtgttatctttcttgacttccacatatatggttaaagtgcataggactcagtcaattcgtctaatacagcaattatcatagtatrttgtatgtttttgcttacatatatattgctttcactgtctgtgagctccttgtgactagaactctgttctctgtctgtgtttattttgttttaatcattt

SEQ ID NO: 403774 - DNA, 201 bp, Homo sapiens
ggaaccattttccaaacatggccccaggatcaaatccatgccacacttgcacgggcatgtgtgccagttttgtcatatctctaactatgtcttcaactacktgcccttgatcatctatgtgtagacagcaattagtaaggttaaatttcccacagacccctccttcagctgctagcaagtagtcaagggccaatctatttt

SEQ ID NO: 403775 - DNA, 201 bp, Homo sapiens
tacggggtgagtgaatttttttccttctctagctatgcaatattgtccagtaattgagggttttaggacccagaaattatcagggtaattcttttgagccrggaattcatcaggaactgggtctacaggtactaattctcgggctttccatggccattgatatcccgttacggttcctccacagacataacatgaagtgac

SEQ ID NO: 403776 - DNA, 201 bp, Homo sapiens
tgaatcccatgataattttcctcatgcttcggctgtgcatagaccagtcagcttctgggtgtgactggagcagggcttgtcgtcctcctcagagtcacttygcaggggttgtccgggctcggttttgccttccaggtttcagcggctgcaggtttcacacggctgtggtggatccagggtgggattccttctacctttaca

SEQ ID NO: 403777 - DNA, 201 bp, Homo sapiens
tgtatttgttgaatgaatgaatgatgtttgccatttgcatgcctccccttcccacacactcttgtattccacgttggtttttgcttggctttgtttttttyctattacttcttggaaaatggttaaaaaaagagcattggccttatgagaaaaatctggccctatgagatgatgtagggctatgttttgtaacacataatt

SEQ ID NO: 403778 - DNA, 201 bp, Homo sapiens
agtgttcaagtagctttacttgagttactgggaaaaaaagaatagagacacgtctgtaatttattcttccaatatatgcttagattgaaagtggctgtgtrgaagaaaaagttgagatagtctctgaattatatttttaaaagtcaaataatcaaattagcttacagaagctttattaacaattttacttcaacaataccg

SEQ ID NO: 403779 - DNA, 201 bp, Homo sapiens
gttaacactttggcattgaaagacaggctgtttggtgtttaaattccagttctgttccttgccatctgttttattctgggaaaataacacttaactcttcygttcctcagtttaatcatctgtaaaatggaaataatattttctaagggaatcattatgattaagcaagttaattttatttatgtatatataatacatgca

SEQ ID NO: 403780 - DNA, 201 bp, Homo sapiens
caggcgcctgccaccacgcccggctaatttttttgtgtttgtagtgaagacggggtttcaccgtgttagtctccatctcctgacctcgttacccgcccgcytcggccttcctaagtgctgggattacaggcgtgagccaccgcacccggccagcctttccaatttttagcctttgagatgtcaagtatgctttgctttaga

SEQ ID NO: 403781 - DNA, 201 bp, Homo sapiens
aattttccgaactccagtggaagtatacatgctctcttctggtcaataaacagaagggagatttccttactgaattcaacatttgagactcaggtttatawgaagtagataaaggttttatggatatttaaggagtaatccatagcctcatttttacttgaaataaaatgctgttttcttactctgcatccatttctagat

SEQ ID NO: 403782 - DNA, 201 bp, Homo sapiens
tgtattgtaatccaaccataggataatgaagtactactgcaccagagtgggtgactatgaatttgatgacctatgagaaacaatggggaggtgggtttcartggatgactctaagatgatagcttagaagctggtctagtggtggaagacactgtattattcatttcaccaatgggggtataaaatgtcaaagccatcatt

SEQ ID NO: 403783 - DNA, 201 bp, Homo sapiens
ctttccaccatgtgtctgtcctcatctaccccagtatattgcttctctctcaggggcatttggattccagtcttgggccataagcaagctgtcaacggagragtttctcctgtggcttcacttcctcttctgtctactctgtgtgatctaggggtgtggttatctggtggaggtgtaggtgctgtggcctcaggagtgggg

SEQ ID NO: 403784 - DNA, 201 bp, Homo sapiens
tgtgatctaggggtgtggttatctggtggaggtgtaggtgctgtggcctcaggagtggggagcccttccttttgataaggagggggtactgctgataccarttcctgccatgattcttctggagttgggtcggacaggacttttggtgccgacttccctcggtgggtggagggagaaccttccttaactaactgtcccttt

SEQ ID NO: 403785 - DNA, 201 bp, Homo sapiens
ctcaggagtggggagcccttccttttgataaggagggggtactgctgataccaattcctgccatgattcttctggagttgggtcggacaggacttttggtsccgacttccctcggtgggtggagggagaaccttccttaactaactgtccctttgctactagtactgctgctgcctgtcctcttgaccactgtggggggtc

SEQ ID NO: 403786 - DNA, 201 bp, Homo sapiens
gttgtttccttcatcgagaatatttcctcgcctctttccaccttcattctgacaatggcactttgtgctatcaatctttattcttctttcagttggtaaargtcgaaaggcaggcagtggagggctccctttagtggagtataggaacatgaactgagcaggcctgggcttgcaaaggtcaggtttcaggaatcaagaggt

SEQ ID NO: 403787 - DNA, 201 bp, Homo sapiens
aatcatatgaagtatgagaaatatttattgacatcatttatatctaaatactggtgatattaggtccaaatataaccccagaccttctcagcagcacttayttgattctcttagaattagagccatgactaacagctgaaccttataactttcgtgttatttctttgaacattatttcagaatgagcaagactattaaaac

SEQ ID NO: 403788 - DNA, 201 bp, Homo sapiens
gtaataagacttatttttattataaagttataagattttgattggaagtactattttgaatagcattctttctgtgtctgtttataaatttaaagtcatcyttttctttcttctgtggacagagaatgaatactactctgagcagtttgaaggaaaaagttaatactgcacaatgccctttacctcttttcacctgtcttc

SEQ ID NO: 403789 - DNA, 201 bp, Homo sapiens
gatgaactggatgcagctgtagcaggtaagtgtacaaatataattagtgggagctaatgcaggagatctttattccttctctggagagaagcattttaatyattattaacacttactcatttattatcagttattacaacctgcatttaatgtgtgaagggcttcaaatgactagggtttttttgttgttgttgtttgttt

SEQ ID NO: 403790 - DNA, 201 bp, Homo sapiens
ttgtgatatgtgattttattcacattttatagattagggacctaagacagagagaataataccaaagtcagtaagcacagctcataagcagcaaaataggwtttgatcccagacagtccagctccagagcccccgcgcttagacagtatacatctctggcactattaccatgtttttctaaggcattcaacctaaaaactt

SEQ ID NO: 403791 - DNA, 201 bp, Homo sapiens
ggttgtccgggctcggttttgccttccaggtttcagcggctgcaggtttcacacggctgtggtggatccagggtgggattccttctacctttacagctgtgggggtgttcaggatgatggtctgaggtcctttccaccgtggccgcaaaggggctacattccagtccttgattcatacgcgatcacctggagagaaagggt

SEQ ID NO: 403792 - DNA, 201 bp, Homo sapiens
ttcatttttctgcatgtggatattcagttttcccggaaccattttttgaagagactatcccttctccagtatatattctgggcaactttgttgcaaatgarttgaactgcaatgggtggatttatttctgggttctctattctgtttcattggtctatatgtccgtttttgtgccagtatcatgctgttttggttactgta

SEQ ID NO: 403793 - DNA, 201 bp, Homo sapiens
ctgtgggggtgttcaggatgatggtctgaggtcctttccaccgtggccgcaaaggggctacattccagtccttgattcatacgcgatcacctggagagaamgggtgaactggggagaataagctgatgggacacctctcatttacccaagttgagattgtttgtgtaatttttcctaaagcctgtagctgtcgctgtaatt

SEQ ID NO: 403794 - DNA, 201 bp, Homo sapiens
ccccacagtctgggttaaaactccaactgccattttttctctttctgacacatagagtgtaaagggctttgtcaaatctggtagtcctagggctggggccracataagtttttcctttaacttacaaaaggcttgctgttgtagaggcccccattcaaaaggctcccaatcgcccctctttgtaaccccgtacaaaggttt

SEQ ID NO: 403795 - DNA, 201 bp, Homo sapiens
ttacagtaggcgcattggttaggttgcaagcgtgggtgattagactgggtattcttcccagaaccccccttttcctctcctttcaggggaattcccctaawggccgtggccagtaagtcggcgtttcgcctagcctggcattcaccttctttatggctttctctgcggcttgttgcatctctattcacaaatacttgattg

SEQ ID NO: 403796 - DNA, 201 bp, Homo sapiens
agcctggcattcaccttctttatggctttctctgcggcttgttgcatctctattcacaaatacttgattggctatttccagtaactgtgaggtattcataygcgcaaacccagcctgtttctgcaattttctcctgatatcttccgcgctttgactaactaaggccatgttaatcatgtgctgattttcagggctatttgg

SEQ ID NO: 403797 - DNA, 201 bp, Homo sapiens
ctaactaaggccatgttaatcatgtgctgattttcagggctatttggatcaaaaggagtgtacatagggtaagcctcacacagtctttcatagaattgtgstggactctcctcttttccttgggtgacctcagagaccttatttacatttgtagtcttttgagcccctttctttagaccttctattaatgcctcacggtac

SEQ ID NO: 403798 - DNA, 201 bp, Homo sapiens
cttcatctggacatctaaggttcagcactgggaccttttcttgaaaattttgttaactatagcaacatatttaggctatagtaattacctatgtggtaatrttatattataccatattacaaaacatgaataaaccatatattggtatcatgtttttcgttagtttctccaacatcaggcttagacagcaactagcattct

SEQ ID NO: 403799 - DNA, 201 bp, Homo sapiens
gcgctgctctggtgaggcattccactggggcagttgcctacctaggagtgctctcaggatctgctttgctcaagctggccagagtcccctgcagggatgcrccacagggcaggcctaagccacctaaggagctgcctcgaccgtctgttaatcaccttgcttcccagtcagggaaccaagaaatgtagcaggacaagcctc

SEQ ID NO: 403800 - DNA, 201 bp, Homo sapiens
ttcttatctgaggaagtggtgggatataaacagccaaggaataaaacagagctggaaactggcctaactggtctagagagcaggttagatatccaagggayccagactgcactcagcaaggtggtgcactctgaggggcccaaagctcttgaccgctgagaaatataagctgtgagggaaacagggtcagggagaggcaag

SEQ ID NO: 403801 - DNA, 201 bp, Homo sapiens
gcccagaactgagcacatagcaatgttaaatgtttgcttttattgttatcattattgttattatactgcctgtaaactcaaccccctttcaagactgaatycaaatccctcctcttcattctaactttatatctagcttccttacaactactgctgcacctaatactttattgtactctactcatcctctgtataacctac

SEQ ID NO: 403802 - DNA, 201 bp, Homo sapiens
aggaatttagtcctaggtgttctactgttcacttctctaactctaataagatctggcctctgcagatttatctttcccaatttaaagcaaaaatgtttgctattattattattattattattattattattattattattacactgcctatatactcaaccccctttcaaggcttaattcaaatccttcctctttgttcta

SEQ ID NO: 403803 - DNA, 201 bp, Homo sapiens
atcttctcagccattttttatactcccagttccatatagtcatatttcaatttgactttcttttccttgaacatcgtaagtatagtatagctgattaatgratgggtttatttctgtgcctgttgattaattatgctagtttgtagtcttggtgacatgactcgttatattcccagttatctttgattttgtgttgaacat

SEQ ID NO: 403804 - DNA, 201 bp, Homo sapiens
gtctctccattctctcctcttccggatcagcaaatgcccctatggcaaaactgagctcacctctctgggtttttgtgctctttttcacctttgctctctgycttggtagttaatgctttcctatctagttagttctttcctacttttaggaaaatgtttatttttaaaaaactttgtccagtttatagttacttttagtgg

SEQ ID NO: 403805 - DNA, 201 bp, Homo sapiens
attgtccagtaattgagggttttaggacccagaaattatcagggtaattcttttgagccaggaattcatcaggaactgggtctacaggtactaattctcgkgctttccatggccattgatatcccgttacggttcctccacagacataacatgaagtgacattgagaggctgggctacacactcggctagttgcaaaaaca

SEQ ID NO: 403806 - DNA, 201 bp, Homo sapiens
ttgtgctctttttcacctttgctctctgtcttggtagttaatgctttcctatctagttagttctttcctacttttaggaaaatgtttatttttaaaaaacwttgtccagtttatagttacttttagtgggcaatggtcacccagattacttaatctgctgttatcatgagtggaattccctcattacttctttcacagtca

SEQ ID NO: 403807 - DNA, 201 bp, Homo sapiens
acaggtactaattctcgggctttccatggccattgatatcccgttacggttcctccacagacataacatgaagtgacattgagaggctgggctacacactyggctagttgcaaaaacaaatttcttgtttttcctggaatttctggtactggcacatttagttcatcatagaaagtttgaaacactggctcaggagagcgt

SEQ ID NO: 403808 - DNA, 201 bp, Homo sapiens
cttggctcattgcagcctctgcctcccgggttcaagcgattctcttgcctcagtctcccaagtagctgggattacaggcgtgggctaccacgctcagctamttttttgtatttttaatagcgatggtcaccatgttggccaggctggtctgaaactcctgaccttaagtaatccaccttcctcagtttcccaaagtgctgg

SEQ ID NO: 403809 - DNA, 201 bp, Homo sapiens
gccatcgcgcctggcctgaaccttttatttgttgcttaatgaaaagaacaagtaaagcagggaggtttttaagaagttcctcaaaatagggataaaatatmtaaaatagtatttgttagcatatccatattttcaagtgtattggatctattagccttaaggttcacatttgaaaaccatctgtgcaaagacatcttagat

SEQ ID NO: 403810 - DNA, 201 bp, Homo sapiens
tgtgtaattttacagggggtcctagagaaggccataatatgaaggtgacatcgcagcaaagaggtgaagagctgagggagcaagacctgaggctatccaayggagaagcactgcgggcagaggaaataacaaatcaaagttccctgaggtagagcaccaagcatattccggaaacagagaagggaccaacgtgcctaaggc

SEQ ID NO: 403811 - DNA, 201 bp, Homo sapiens
ctacttgcccactaattataaagaacataaattatagatttagtaattacttgtttcttccctgttatcccccttttggcaaagagcagaaccaatataaytttaccatgctaccactttattcccaaatttatcagcataaaatctagaacatttccagaatccttctttccctggtgagggaaggaacagtagctgaat

SEQ ID NO: 403812 - DNA, 201 bp, Homo sapiens
agtgagtttgttttcaatttctttgaaattaatgaacttcctgagaacagggtcgtgattcatcctagcaaggagtacattgctggcacacagtagacacstagtgaacactgaattatggtcagaccaactgaatcaatgaaaactgaaaatttccaaattcatctttccatctttcccataggaacttctacttgcaga

SEQ ID NO: 403813 - DNA, 201 bp, Homo sapiens
aagtaaaagaatttctgagtttagggctatgttatggtttgcattttcagggcaattaattctataaactttcccttagttagatatgtttaaataaattsttctatgggtgcttaattttagtgaagagttaagtaattcaaattttagtacataattttccgaactccagtggaagtatacatgctctcttctggtcaa

SEQ ID NO: 403814 - DNA, 201 bp, Homo sapiens
gaagtgctagttaagaaatggtgagatgggaccagactccaaagctacagaatgagaatttcttaccctttaccagctgccttctttgtgcacactgttcrtgaactcttttctgtgtagtgtgctgtgtgcagcagttagtgggaaaatacagttcctgatctcccataacattttggttttttggggcaaagactttta

SEQ ID NO: 403815 - DNA, 201 bp, Homo sapiens
tttttctacttgcccactaattataaagaacataaattatagatttagtaattacttgtttcttccctgttatcccccttttggcaaagagcagaaccaayataactttaccatgctaccactttattcccaaatttatcagcataaaatctagaacatttccagaatccttctttccctggtgagggaaggaacagtagc

SEQ ID NO: 403816 - DNA, 201 bp, Homo sapiens
aagaatagatggatatgagaggcctaaaggttatcggtgtgatgcaatgatggatttgatagagtgatagcatggtttactgaaataggtaagctggcccrggaagaagggtgatgagttcttatctaggtaagtatagtgggaggagatgacagaatatctgagtgtaagggccccaaaggaagttgaaagtacatggaa

SEQ ID NO: 403817 - DNA, 201 bp, Homo sapiens
aaactgagcacaaagtacagagttcccatatgtcccctgtccaccttccaccacccctgcctctcccactataaacattccacaccagagtggtacatttsttacaagtgatgaacttaaattgacattattatcagtcaaagtccatagtttacagtaggactcactgttggtgtatattctatgggttttgacaaatat

SEQ ID NO: 403818 - DNA, 201 bp, Homo sapiens
aaggagtgctatgtctttaaacccaagaatcctgatatggagaaagattgcccaaccatcatccactttgttctggccaacatcaacttcagaaagtacarggctccaggtaagtagggagtaagctgtattccataaaatagaaattaagtaggggacgaaactgacattaaactgtttcactctgtcactgctgtacca

SEQ ID NO: 403819 - DNA, 201 bp, Homo sapiens
taaacattccacaccagagtggtacatttcttacaagtgatgaacttaaattgacattattatcagtcaaagtccatagtttacagtaggactcactgttrgtgtatattctatgggttttgacaaatatgtaatgacatatattcatcattatacatgtcacacacactagtttcactgctctaaaaatcctgtctcctg

SEQ ID NO: 403820 - DNA, 201 bp, Homo sapiens
ttgggaggccaaggtgggtggatcccttgagcccaggagtttaagaccatcctgggcaacatggcaaaaccccgtctctatgccagtacactccaacctgrgtgacagagactccagcttgggtgagagagagagagaccctatctcaaaaacaaaacaaacaaacaaacaaacggagtaatagtatgtactgacaggtta

SEQ ID NO: 403821 - DNA, 201 bp, Homo sapiens
ctccatagttttgccttttccagaatgtcatgtagtcagaatcaaacaataatgtagccttttcagatctttcacttagtagtgtgcatttaaagttcctytatgttttttcttggcttcatagcttatttttttagcactgaataatattacattgtcaggttgtgccacagtttagttattcattcacctgctgaggaa

SEQ ID NO: 403822 - DNA, 201 bp, Homo sapiens
tgtgatgatattacattaagttgacattaatttccctttacgtattttgtgagtttatggtaacatccctgtgaataactaaccagaattaaaaagtgctstgtaaactctatacaacattagatatagaaaattattttcatgcctattgcattataaagctcttgaagcctaatactagcatgccttttattaaaagta

SEQ ID NO: 403823 - DNA, 201 bp, Homo sapiens
tattcttccataacggcatttatccaatactctatgacatttaatagatgttatacagtaaattgggtttaagttcaaataaatttcggaacatttacaaytcaatctccttcttcaaatacaatgagataccctactgagtttaagtcctacttaaagctgcttgaggatagtactttaaaaggagactagcttatattt

SEQ ID NO: 403824 - DNA, 201 bp, Homo sapiens
tcttccataacggcatttatccaatactctatgacatttaatagatgttatacagtaaattgggtttaagttcaaataaatttcggaacatttacaactcratctccttcttcaaatacaatgagataccctactgagtttaagtcctacttaaagctgcttgaggatagtactttaaaaggagactagcttatatttgaa

SEQ ID NO: 403825 - DNA, 201 bp, Homo sapiens
agatggtcataaagcaagaaagcagcggttttgccaattttaaataatacagtcagggaagactccactggaaagatgatattggaataaaatcctgaaasttactaacaatagcagccaggtccaatcaaaataacagaaatgtgaaagctgagtgccttagtctgtttcatgctgctataacagaatgtgacccactgg

SEQ ID NO: 403826 - DNA, 201 bp, Homo sapiens
atgaataggacctgctgtgtctgcttcacagagcttttataaatagtaaattgttatgtgcacaaaattattcctttgaaataatgaaataagatattttyagaaaagttagatgatgagatgtcgctactagaaaatcataaatatgaaagtggtagaactattattacaaaagcacaggactgtaaatgagttaataat

SEQ ID NO: 403827 - DNA, 201 bp, Homo sapiens
ttactgtgcctaatttatagattaacctgtatcatgggtatgcatgtgtaagaaaaaacatagtatatgtagagatttgtactatgcacagtttcgcacayccactggggggtcttgtggcatatccccccaagtaagtagggactaccatactcccattattgtgtttttaaatgttaggttgaattgcgataaaataca

SEQ ID NO: 403828 - DNA, 201 bp, Homo sapiens
atttatttatttatttatttatttttgagacggagtcttgctctgtcgcccaggctgcagtgcagcggcgcgatctcggctctctgcaagctccgtctccygagttcacgccattctcctgcctcagcctcagagtagctgggactacaggcgcccgccaccgcgcccggctaaatttttgtatttttagtagagacgggg

SEQ ID NO: 403829 - DNA, 201 bp, Homo sapiens
tgcaaaaatataacatgaattttaataaatacatttatgattttacatattttctttttgtgaatttgagagcagcatcacaaaacgtaacagcatttccytttttttttttttttttttttgagatggagtctcgctctgtcgcccaggctggagtgcagtggcgcaatgtcggctcactgcaagctccgcctcccaggt

SEQ ID NO: 403830 - DNA, 201 bp, Homo sapiens
ggaatttagtcctaggtgttctactgttcacttctctaactctaataagatctggcctctgcagatttatctttcccaatttaaagcaaaaatgtttgctattattattattattattattattattattattattattacactgcctatatactcaaccccctttcaaggcttaattcaaatccttcctctttgttctaa

SEQ ID NO: 403831 - DNA, 201 bp, Homo sapiens
gaatttagtcctaggtgttctactgttcacttctctaactctaataagatctggcctctgcagatttatctttcccaatttaaagcaaaaatgtttgctattattattattattattattattattattattattattacactgcctatatactcaaccccctttcaaggcttaattcaaatccttcctctttgttctaag

SEQ ID NO: 403832 - DNA, 201 bp, Homo sapiens
tcgaactcctgacttcaggtgatgcacccgcctcggcctcccaaagtgctggaattacagatgtgagccactgcacccggccttattttcttcttttaaaaaattaggcattactaaagtatgaagttaacttacacttctttgtgacaaaatatgggatgtataacataaagattgagactaaagggaactgtattttat

SEQ ID NO: 403833 - DNA, 201 bp, Homo sapiens
ccctaaggtggtaacttagattattgattttagttatttcttcttttttaatatatgcattcagtgctataaatttcccattcagtactgctttcaaggcwtcattcaaattttgacaaggtgtactgtcaatttcatttagtttcaaatattcttatgattgatcatttatgtataataaaactttggctactcaactct

SEQ ID NO: 403834 - DNA, 201 bp, Homo sapiens
cataaaagccatctattatttcaagtactttgtttggaaagggaaggaaggagctcggtcattgtttgaagggaacatagggcccagggaagggtttttattttttttttttcagaatttaagagagttgagcattttctagatgtctgagatgtaggaaataatgtagaggcatagatggaagataaagaaatagaagat

SEQ ID NO: 403835 - DNA, 201 bp, Homo sapiens
agcagagaccattaatccaatgccaatggttgaagtattctaggtttttctgtttctcgccagggtttgtatttccaagccaactgcttcatgagacgggraaagagagagagagagagagagagagaacaccagattacttcaatcttcagagagtacattgtgcatttattaaaagtatgagaaggtccagaatatcat

SEQ ID NO: 403836 - DNA, 201 bp, Homo sapiens
taatccaatgccaatggttgaagtattctaggtttttctgtttctcgccagggtttgtatttccaagccaactgcttcatgagacgggaaaagagagagasagagagagagagagaacaccagattacttcaatcttcagagagtacattgtgcatttattaaaagtatgagaaggtccagaatatcatatcttttttgat

SEQ ID NO: 403837 - DNA, 201 bp, Homo sapiens
atatcttttttgatttggatgaatcacatggtagactttggaataactataggaataaatgaactgtgtatctttcaagtattcaaagctgcatttttatvgatatttcgtgattatactaagttgagttgagcaagtctatttgatttatcattatcacatgttgagggaactgtttcaaattcaatttgttgtacaaaa

SEQ ID NO: 403838 - DNA, 201 bp, Homo sapiens
ttccagacagaaatatttttatttgattttgatgataatggaaatagttaatgcttttgtgcagggcaataaaattatttatgtagtgtttttgaaaaagkcactttggtgaccaataaaaacagaatggaaaggaatgaaactggaagcagagatatcactgtgcttttgtgataaggccctggaactagggacatactg

SEQ ID NO: 403839 - DNA, 201 bp, Homo sapiens
tataggccaggtgtggtggctcatgcctgtaatcccagcactttgggaggctgaggtgggcagattgcttgagcctaggagtttgacactagcctggcaarcaaggcaaaatcccatctctacaaaaacaaaaacaaaaaacaaaaattagctgggtttggtggtgtgtgcttgtaatccaagctacttgggaggctgagg

SEQ ID NO: 403840 - DNA, 201 bp, Homo sapiens
agccttttcagatctttcacttagtagtgtgcatttaaagttcctttatgttttttcttggcttcatagcttatttttttagcactgaataatattacatygtcaggttgtgccacagtttagttattcattcacctgctgaggaaggtgaacttggaaaacttgaagtttgcttccaagttttggacattatgaataaaa

SEQ ID NO: 403841 - DNA, 201 bp, Homo sapiens
gaaaacttgaagtttgcttccaagttttggacattatgaataaaactgctagaaaaatctatgtacatgttttggtgtagacacagatttttcaatttatktgggtaaataccatggagcacaattgctggatcatatggtaagagtatatttagttttgtaagaaactgccaaatggtcttccaaagtggctgtaccatt

SEQ ID NO: 403842 - DNA, 201 bp, Homo sapiens
tgacagttggtgtctagtagaatgtatgacatatggttcacattcaatgagtccttataataaaaacaatctttttgtacatgttattaataacatttagwatatgaatatatttgcagcaacttcaaaaatcaaatattaaataatggataaaaaatattgctcatagtttttatgatacaaggaaggttcctaggtatt

SEQ ID NO: 403843 - DNA, 201 bp, Homo sapiens
caccacacataaatgtgaagagtaatgtgttatcagtattattttttcataaaattgatgatctctaggtcctctttttcttcagaccccttgccatctcrtctgttctcctcccatactgtcctcagactgcaggctccttgctgtcctcaaacacacccagcctgattctgccttgggacccttgctctagctcctccc

SEQ ID NO: 403844 - DNA, 201 bp, Homo sapiens
tttgggaggggagcatcattatgtataataattattattgagatggttccttttgtggagaaagctaatttttaagttagattttcaagagcattttctcrttgtatttcaggcccagttatcatctgtgtagattcattttctgcatgtggatgtccagttgttccagcaacatttgttgaaaagactatctttgcttca

SEQ ID NO: 403845 - DNA, 201 bp, Homo sapiens
ctggattttctgtgtgtaagttatatgtgtgcatgcaagtgcgtgcacttgaagccagagaaaaggaagaaatcaattcaggaaagaagggaagggggaamatgaaagaaatttacctggaaatctgagcatagatcaagtggcactgtcaagaatataccccttacacgcactgtaggtaaaaggagaactaagaacaaa

SEQ ID NO: 403846 - DNA, 201 bp, Homo sapiens
ttaagttagattttcaagagcattttctcattgtatttcaggcccagttatcatctgtgtagattcattttctgcatgtggatgtccagttgttccagcawcatttgttgaaaagactatctttgcttcattttattgtcttttctcctttgtcaaagatcagttgactttatttatgtgcgtctgttttctgttccattg

SEQ ID NO: 403847 - DNA, 201 bp, Homo sapiens
ccttcaaatttgtgtttactattctgggtcttttgcctcttcatatgaattttagaatcagttacttgttttcacagaatattttgtgatttttattgggwctttgttgaatctatagatcacattggaaagaaatgacatctttacattattgagtcttcccatccatgaatatggaatatctctccatttatttagttc

SEQ ID NO: 403848 - DNA, 201 bp, Homo sapiens
tttcttcattctcaatctatatgccttttatttccttttcttatcttattgcatcaaataggacttccagtacaatgttgaaaagggtgatgacagggaamctccttgccttgctcctgatcttttcggggaagcttccattttgtcatcattaaatatgacattaattataggttttttgtagatgtcctttatcaagtt

SEQ ID NO: 403849 - DNA, 201 bp, Homo sapiens
gtggcctccaagaaagatttaagaagcattccctctgcttttatcttctggaaagattgtagataatcgatacaagaattgatatagtttcctcttaaacrtgtggtagaatttaacagtgaaaccatgtgaacatggtgctttctgttttgtaaggttattaattgttgattcaatttctttaatagatatgcacctatt

SEQ ID NO: 403850 - DNA, 201 bp, Homo sapiens
aattaaatgtataatgtaaatgcatgcttaacaaatgaaggtaattataatctgcacagccaattatttgattattcaactttacgtacaaatatctgaayattttccttcccctgatgacaacagaagtatctgaattaaaaccctgacctgaaaacctccttcagaattccttcaaagcaataatgagaacagcaggtt

SEQ ID NO: 403851 - DNA, 201 bp, Homo sapiens
ctttaggaggtttatcagtgaagaaatggaggaagagaaggggaaagtaactagaaaatagtggagagagggttgagacccaaggattctgattctggagscagtgctataaatgaccatacaatataatttcccaggagtaatggtgtatgcataggtggtaaggaaaaagtcatttaaaactgcttctttggggtgatt

SEQ ID NO: 403852 - DNA, 201 bp, Homo sapiens
  misc_feature (1)...(201): n = A,T,C or G
aatagtgagtttgttttcaatttctttgaaattaatgaacttcctgagaacagggtcgtgattcatcctagcaaggagtacattgctggcacacagtaganacctagtgaacactgaattatggtcagaccaactgaatcaatgaaaactgaaaatttccaaattcatctttccatctttcccataggaacttctacttgc

SEQ ID NO: 403853 - DNA, 201 bp, Homo sapiens
gacaacagaagtatctgaattaaaaccctgacctgaaaacctccttcagaattccttcaaagcaataatgagaacagcaggttacctaacatatgaattcyagtttaataggaggctgtttccagaaaattccaagcaacataccataagcatcttcagtatgtgtcgggctgttggcatttggagaaggacatctgggaa

SEQ ID NO: 403854 - DNA, 201 bp, Homo sapiens
gtttattaagaatttaatatgagccaggcatttttctaagaacattacatagatgcacaaacacagttaattctcacaactttaggaggtttatcagtgargaaatggaggaagagaaggggaaagtaactagaaaatagtggagagagggttgagacccaaggattctgattctggagccagtgctataaatgaccatac

SEQ ID NO: 403855 - DNA, 201 bp, Homo sapiens
gaacaaatgaacagatccaagatggtagaaatgctgaattctattttaagtctgattagagcactaggcttctcagcatggttactgtgatttgggaacayttttagatggctttaaaaattaacattttgtctttcagaattttgttattaagtaacatgaaaaattatattctcactccattcctgacccttatcccac

SEQ ID NO: 403856 - DNA, 201 bp, Homo sapiens
ataactttttgttgcaaatttacttcttttaagccactttgtaacttaaaatgtagttaaaacatgaaataaaaaagactaattgaaaatagttctagatraaaatagaagtggaacaacatactccacccataattaatttaatcttcttataatttgctgatttgtagtccttcagtgaacatgtctaagtctacatga

SEQ ID NO: 403857 - DNA, 201 bp, Homo sapiens
tttggaaagggaaggaaggagctcggtcattgtttgaagggaacatagggcccagggaagggtttttattttttttttttcagaatttaagagagttgagmattttctagatgtctgagatgtaggaaataatgtagaggcatagatggaagataaagaaatagaagatagtagaagataaaaagaagatagaaggtaaag

SEQ ID NO: 403858 - DNA, 201 bp, Homo sapiens
cttttatagcattgtaaggggctattggatgttgactgccaagtttgtacagtattaccatctaaaaagaaatcagaacagctctgcatctataaacagtrtggtccaatttattgaactaactaaaatagaatttgagagtgagaattttcagtttaacagtacaaaaaattcttagaacaatgaaaaaagaaacaatat

SEQ ID NO: 403859 - DNA, 201 bp, Homo sapiens
agtttgtacagtattaccatctaaaaagaaatcagaacagctctgcatctataaacagtgtggtccaatttattgaactaactaaaatagaatttgagagygagaattttcagtttaacagtacaaaaaattcttagaacaatgaaaaaagaaacaatattaacagaaattgtcacataaggtgtgacaggatcaaaggtc

SEQ ID NO: 403860 - DNA, 201 bp, Homo sapiens
gtccaatttattgaactaactaaaatagaatttgagagtgagaattttcagtttaacagtacaaaaaattcttagaacaatgaaaaaagaaacaatattarcagaaattgtcacataaggtgtgacaggatcaaaggtcaagatatgtgttagagaaaatttgttgtttaacagctaagtttgtcttcttccctaatgaat

SEQ ID NO: 403861 - DNA, 201 bp, Homo sapiens
aagcacatttctttttaaattttgcaacccccatgccaaaaaaaagatttttatctaatctagatattaggttggaaaaatgttacatttgtttaacctaygatgattttgtttatataaattaaaatgtgggtgttttagaattaaagcaatctctcaacctaaaatcagtaaaagtgcgctatttttgtgcctactact

SEQ ID NO: 403862 - DNA, 201 bp, Homo sapiens
ttttttaagcacaaaaattctaaatgtttaaccctaaatgtttaccccgaaggtttggattcagcaagtcctggtagttagctactgatattttaaaacaytgaccatttgatttggagacaagcattgaactgaacatcacttcctctctggcatgatttagatttaaaatgtcacaaaatctaaaatgcatatagataa

SEQ ID NO: 403863 - DNA, 201 bp, Homo sapiens
acacacatttacaaatatattctttccctcatacatataaagataccttccacaaatagtttaatatataattctctttcagcttaattggtgattgtgtratatttgactgtgtgatatttgattgtgtgatatttgtgatccatctaagaacccaggcagcgtcactctaggtaccctgcttttaaccactgcagcatg

SEQ ID NO: 403864 - DNA, 201 bp, Homo sapiens
acttgtagaaactaaagaaaacccaaatgcataacattttcccgaagggtaaccctctttccttcagctttatctctccaatgttgcagcctcagtcctctcacctgtagggcgacctgcttaatcctcttcagaggtcccacctctcaatacaaagtgttaatcattcccttggaaaaaggagcttagaactcaatcttc

SEQ ID NO: 403865 - DNA, 201 bp, Homo sapiens
cttatttttgaccttcatatacatttctgcattcaacgttgtgtctatgagattcattcatgttgttgtgagtagcacacttccacacttttacattgccwtgtggtttttcatcatttgaatgtcacaagctatttatttaatctactgataaccatcatattctttttgaatggcaatggtgatttcctataaatcagg

SEQ ID NO: 403866 - DNA, 201 bp, Homo sapiens
tttattgtataccaactctcagttagctattcattaatgtactaaatcaattgctagtacgaaatgtaccaagttgatcatgagtggatactattgtgctrtcttgctgacatccatttgactgatggcactttctgatagtgtcatgctgccttacactcccttacaaaaggaaatgtgactttagaaagcactattata

SEQ ID NO: 403867 - DNA, 201 bp, Homo sapiens
acctgctttaaggaaatgttacataattctaaaacagagttatgtttccacaaccgcattaattcattcacacgtttagaaaccttgtacgttttaaattrtaggaggatattcttccataacggcatttatccaatactctatgacatttaatagatgttatacagtaaattgggtttaagttcaaataaatttcggaac

SEQ ID NO: 403868 - DNA, 201 bp, Homo sapiens
tttctgatagtgtcatgctgccttacactcccttacaaaaggaaatgtgactttagaaagcactattatacatattcagcctatgagaaaaaaggaaatgwaatgtacagcttaacttggagactgcctaataaagggatttcaacatagtgttaataaaactgcattgtaatttcaaatgagggaaaggcattccacatt

SEQ ID NO: 403869 - DNA, 201 bp, Homo sapiens
ttctcactcataggtgggaattaaacaatagaacacttggacaccgggtggggaacatcacacaccggggcctgtcagggtgtggggggctgggggagggrtagcattaggagaaatacctaatataaatgatgagttgatgggtgcagcaaaccaacatgacacatgtatacctatgtatcaaacctgcacattgtgcac

SEQ ID NO: 403870 - DNA, 201 bp, Homo sapiens
tacataaagaactaggagcaatactgaacaattaagtgaaagacattgattacgttttttgatgaccatagctgttgttgacagacaacatctatttaaatttttttgggggggaaacccaatcaataggtcagaaactattatttttgcttttcctttattttcaactgttggatctttttgtttagacctcctctgtac

SEQ ID NO: 403871 - DNA, 201 bp, Homo sapiens
tagaaaccctaagtctgaccacccaccttcctctcttttactgctaacatcagatcggtcaccagatgttaaagatgctctctgtaaatgtaacctgaagkcaaggtgcttactcaactatgaattaccagctggtagatcttacacaagaaacatcatcattatataactttcatttgcaaaaccagcaaatactttcct

SEQ ID NO: 403872 - DNA, 201 bp, Homo sapiens
tttctgttctaatttttattagtttttgtttaccttggatttaatttgctcttttttttccagtaccctaaggtggtaacttagattattgattttagttmtttcttcttttttaatatatgcattcagtgctataaatttcccattcagtactgctttcaaggcatcattcaaattttgacaaggtgtactgtcaatttc

SEQ ID NO: 403873 - DNA, 201 bp, Homo sapiens
cttccaagaacaggtgtaggattgcaggtggatctaactttacttaagtattcagatgacaacagtgtttaatgctcacatttatactctaataaaaaatrcatatgcttgggaaaattttgaactcattgtattcaagccaattttataagatcgtattaatatcttaacatacttctttaagattttcttaataacctc

SEQ ID NO: 403874 - DNA, 201 bp, Homo sapiens
ttggctggtactttttaacactttggtggagatgatacaggtaaaaatccagtaacaggattcttctctgcatcatcagattccttttttactcctaaggkttaaaaaaactttcacatggttataaattctctgaacccataattttttttctctagcagcttcttcaacataattttgctcagttcagtttatcaataa

SEQ ID NO: 403875 - DNA, 201 bp, Homo sapiens
ccatgaggaaaggatatgaacactctgtctgattttctcactcaagatgctgatggtaatcttcacttcagacacggaagtgataaaattgtagctttctrttgagagagaggattgcatgttgcatgtctaataaaataggcagcacatataaatccctaatttattttgttttaatacctcaaaaatactataagttga

SEQ ID NO: 403876 - DNA, 201 bp, Homo sapiens
aagatacacacacatacacacacatgtacacatatatacacatacagattcaaagccatttagatccttccattgcactgcacttgtagagtgtgctttcrttatgaggtttcaagtttgcatgtagtttgatgcctagtgttttttgatttaagaccacttgttagagtacagctctgggttaggaatttagtcctaggt

SEQ ID NO: 403877 - DNA, 201 bp, Homo sapiens
tgtgatatttgtgatccatctaagaacccaggcagcgtcactctaggtaccctgcttttaaccactgcagcatggtaaaatactgttttattctctcctgyaaagagctttggttccgatgtggcatcctcatggtgtaatatgtttccactgtatgaagtttaggtaaatccttgctgctagtgaaaatatggctgttct

SEQ ID NO: 403878 - DNA, 201 bp, Homo sapiens
tatcttgggagatattgagatatagaacgagttgacgtatgcaaagtacttatatgcctaacacacagtaagtgctcaataaatgtgacccattattatcwcaattgtttcgaacacaattatgaaaagacatctatttcttcaacgtcatctttgtatgaaccaagaatattcttttgggtagtctgtgcatttgactaa

SEQ ID NO: 403879 - DNA, 201 bp, Homo sapiens
actcaaccccctttcaagactgaattcaaatccctcctcttcattctaactttatatctagcttccttacaactactgctgcacctaatactttattgtaytctactcatcctctgtataacctactttagtttcctaccttaactttatttccccctccagacaagcttttaaggacttacatattttactttatttaca

SEQ ID NO: 403880 - DNA, 201 bp, Homo sapiens
acattaggtatatctcctaatgctatccctccctcctcctcccaccccacaacaggccctgtgtaagaactttggttaaagtttagttaacatagtccagratcacagagctgttatgttttggggctggaactcaaacttgcctcacttcaatgtttacttgtgcagcagctttgcctgtgagcagtgtgtggggtaagt

SEQ ID NO: 403881 - DNA, 201 bp, Homo sapiens
gattcagcaagtcctggtagttagctactgatattttaaaacactgaccatttgatttggagacaagcattgaactgaacatcacttcctctctggcatgwtttagatttaaaatgtcacaaaatctaaaatgcatatagataaaaagaatgaggtgtcttatcatataaatatgttgaaaaattcgaggcaaatatttcc

SEQ ID NO: 403882 - DNA, 201 bp, Homo sapiens
taactggtctagagagcaggttagatatccaagggacccagactgcactcagcaaggtggtgcactctgaggggcccaaagctcttgaccgctgagaaatrtaagctgtgagggaaacagggtcagggagaggcaagcaaatgtcccatatcagaagcaatggagaagcatataagaccaagtgctatattggctgccggt

SEQ ID NO: 403883 - DNA, 201 bp, Homo sapiens
gatacataaagtgtgtgctaatggagaagacaaatttgactataaatgcagcattgttgattttccttttattcaatggagctgtcagaacaaacaggcakggatatatatatatatattttttttgagacagaattttcactcttgttgcctaggctggagtacagtggcgcgatctcagctcactgcaacctccgcctg

SEQ ID NO: 403884 - DNA, 201 bp, Homo sapiens
caaagaaagactgggagggagaccgggaggagataaggtcagagaggtgaagacagggctgggggagcaggatcattgcgggtgacagtggacatcaatgkcttaggcatgtccttaaagaaagggtgtggttgaggtggttgggtctctaaaggggcagaaggtagtcctggtgaagagaacagcctatctgaaggcact

SEQ ID NO: 403885 - DNA, 201 bp, Homo sapiens
ctttgtttttttcctattacttcttggaaaatggttaaaaaaagagcattggccttatgagaaaaatctggccctatgagatgatgtagggctatgttttktaacacataatttgaagcattaattgaatactttccttaaaattacatatttttcttgataattttctaccaactgctattctaaatatggagttttact

SEQ ID NO: 403886 - DNA, 201 bp, Homo sapiens
acaggagggacttcagcctgttgaaatggcaatgaaaatgccagtaaagagggaggagttagatactaagaaaagaaagaatgtgagcttaaggctcataycatcagtgaatgaggagagtccaggaagttggtaaatgtctgaagcaaggagaggattgttaggtagaatctaacagcaagagttttggctgagcagtgg

SEQ ID NO: 403887 - DNA, 201 bp, Homo sapiens
atatttcaataatgtcaattgatcaaaaaccatatgccacttctgtagagaaagtatgtgattaaaatctaatggaattaaatttaaacagagactaaatrtttcttaaattaccaaggacaagtatgttcttaaagtgtttatgtctaagagaatacctctgctgctctaaaaatttaaacatttatgtgaaaatgctta

SEQ ID NO: 403888 - DNA, 201 bp, Homo sapiens
aatctaatggaattaaatttaaacagagactaaatgtttcttaaattaccaaggacaagtatgttcttaaagtgtttatgtctaagagaatacctctgctrctctaaaaatttaaacatttatgtgaaaatgcttactatatgttattttagtatatcttaatattataaaatctttcttaaaaataaaaattaggtaatg

SEQ ID NO: 403889 - DNA, 201 bp, Homo sapiens
tgcagggacaccatgaaaagattatccaactctccttgtgaattctaaggaatatgtgtcataaatgctgaacaagcagagaccattaatccaatgccaayggttgaagtattctaggtttttctgtttctcgccagggtttgtatttccaagccaactgcttcatgagacgggaaaagagagagagagagagagagagag

SEQ ID NO: 403890 - DNA, 201 bp, Homo sapiens
atgtaggaatcaatatgaaaataaatgatctgtttggtagctattcttgagtttcacagtgatcagaagctccaggaaagatggagagggcagactactcrcgtgtcctgtgtccttgggcagattacttctcctgtctctgccttccactatcttgggagatattgagatatagaacgagttgacgtatgcaaagtactt

SEQ ID NO: 403891 - DNA, 201 bp, Homo sapiens
gcacttacaggaggtgctataaacctgggaagtgcttagacaggagtagtgaaagtaatgaagtttaaaagagaaaagttagacagtctgagaaaaaagargtaatagagtggtttggtagtaatgctttaggaactctggtttcattgtatgaaagctaatggttacccagatcttcagaatttccactgatgtccatgt

SEQ ID NO: 403892 - DNA, 201 bp, Homo sapiens
ctgtctcttttagttatgaacttttttttttttttttttttttgagacagggtctcacactgtcacccaggctggagtgcagtggtgagatcttggctcaytgcagcctctgcctcccgggttcaagcgattctcttgcctcagtctcccaagtagctgggattacaggcgtgggctaccacgctcagctaattttttgta

SEQ ID NO: 403893 - DNA, 201 bp, Homo sapiens
atgataataggtacattgggtttaggcatttgtttattgtattttgatccctggaacatgtggatttgacttagcaagtgattggcataaatgtccacaacctgttaatataagtcagcaaatatcaaaggatagtccaagttattgtgttgcattattttgtattaagttcattcttgcttaaaagtggtatattttggc

SEQ ID NO: 403894 - DNA, 201 bp, Homo sapiens
cattatcgaacaagaagaaaatgccataaatcttgttaatgataatggaattaataaatgcaggcaaatgtgatggggagaaaaaagaaaatattccaaatctttatattttgtagtagagttaaacaatatttaaaattgaccaaattgaaggatcgtactttcaatatttgtttataatatatttgtattctatatttc

SEQ ID NO: 403895 - DNA, 201 bp, Homo sapiens
agtttttacttcttctttctttggaggtagaaattgggcataagacaatatgaggggtggtctcctcccttatatcctccccatttgagactctcactcartagtgggagttctcactttcatttttactacccatgtcttcttgcaagacggatcaatagtgattcatatagtacacttgtgctgaagcattttggtgaa

SEQ ID NO: 403896 - DNA, 201 bp, Homo sapiens
aactggggaccagtggttttcattcattataggaataccatagaaacatgttttcttaaattaataaatttgacttaaaacaaacaaaaaatttatattcrgtttcttccaaaagccttgccacctgtattttaatcaacattaatttttgggttgactgttttgactgatagcataaagaaatggtggcatgctaaatct

SEQ ID NO: 403897 - DNA, 201 bp, Homo sapiens
aaacaggttggggacaaacaccaggagggttgagacctattaccaaagagtaaaatgaagtttgagtggagactgttgtgcctatgataaaggtgacctgytccacagtatcggttagggtcagtccatcatcctttcttttagtaatgtgtatcatgttcctatatctcagactttatgtgagactcttggacacaggag

SEQ ID NO: 403898 - DNA, 201 bp, Homo sapiens
aaaagaggtagaagttattagtactggaatatttgactgagcaagaactctggtttcagaaagactgggttaaaaccccaactctgaatgaacttgctcarctcactaaatgcctctgagtctcaatttcttcacctctgatggaaataataatacctaatcagcaggttgaagctttatgtggaattatttttattttat

SEQ ID NO: 403899 - DNA, 201 bp, Homo sapiens
aaattaaaaggggcctaataaatacccttgactttaagttgggagccttagagtgggagtgaacaagaggtagactaaccttacaaagaatgaaatcaatycatttgttaaaatgcaatagaggctatcagtcctactttctctgcctgccagagaataaagtgggtcatctgtggaggtagatctagctcttccataatt

SEQ ID NO: 403900 - DNA, 201 bp, Homo sapiens
gaaaattttaaactgaaaaacacaagaaattaagaactcagtagatggttttactgtagtttgaaaacagttaaagagagaattactgaactgaaaaatargtctatagaaaatatccagactgaaacacaaaagacaaataaggaaataaaatatagaataaaaagctaaggaatatctggggtatgacaaaaagcattg

SEQ ID NO: 403901 - DNA, 201 bp, Homo sapiens
ataatggctgggtattttctgtagccaataaaatatattgaaaagcaaatgaccaagagtggatttctcaacaaaacagagaggaaccataagatattagytgacatctttgaggtgtggaaataaagcaactgccagtataatcctgaagatattgaacaaagttccaggacttagactacctgatattacaattaatat

SEQ ID NO: 403902 - DNA, 201 bp, Homo sapiens
aaatgtctgaataataatcacctggtcaattgtcaaaatgcagatttccaggcccatgctggagaatatgattgaaggtgctaaggttctgcatttttaayggcactgcagatgaatccgtgaaggtcatggtatttcaatggactacatttggggaaacactgttttaagctcactgtcattgaaccataggtattcaga

SEQ ID NO: 403903 - DNA, 201 bp, Homo sapiens
taaggttctgcatttttaacggcactgcagatgaatccgtgaaggtcatggtatttcaatggactacatttggggaaacactgttttaagctcactgtcaytgaaccataggtattcagaatgggccatattttgactacacatttgggaggactttcccctttgggattttttttttcctatttatcacaagaattgtaa

SEQ ID NO: 403904 - DNA, 201 bp, Homo sapiens
ttggtagactagaatctaaatggtgtctgtcaagtaatatgagtgtctatcaggacatacaggagttaggtagggttgggaaaactgctgtcctccccacrtgctttggagaaaacatattttctgctatcaaggagagaatcccagtataacagaataaaaatattttaaattgcctttttaaaaagtgaaaattaattt

SEQ ID NO: 403905 - DNA, 201 bp, Homo sapiens
atctacaaacttacttgatttctttacgtgtattcctgccagcatctcaaacttagcctatctaaatctgaacacaaagttttgtctctttctgtgccttktatagagaggacttacatatgtttgtgtattgagaggacttgtacttgtcttccctcttcccactttctttttacaatgaattcagagtgaatgtttcaa

SEQ ID NO: 403906 - DNA, 201 bp, Homo sapiens
gtgcatttattaaaagtatgagaaggtccagaatatcatatcttttttgatttggatgaatcacatggtagactttggaataactataggaataaatgaaytgtgtatctttcaagtattcaaagctgcatttttatagatatttcgtgattatactaagttgagttgagcaagtctatttgatttatcattatcacatgt

SEQ ID NO: 403907 - DNA, 201 bp, Homo sapiens
tttgtttagcggggaatagtcttcactgaggtaattaggacatatttttataatattaaaaatttctttttttgtatgttaatttatgtcagctctagaayagaaattgttttcaaagaaaaattcaatttattcaaagaaaaattttccatgtcatgccttctattaaaaataacataaaagcaagaaagaattaattag

SEQ ID NO: 403908 - DNA, 201 bp, Homo sapiens
atttcgtgattatactaagttgagttgagcaagtctatttgatttatcattatcacatgttgagggaactgtttcaaattcaatttgttgtacaaaaatcrtttaaagttttttttttctgcacatgtgatccattgtgggtctgttaccctccatttattaactgattattattctcagcttgtctccaaggaactcaaa

SEQ ID NO: 403909 - DNA, 201 bp, Homo sapiens
ccataactaaatatttattatctagatatcaaatatcaaggctcatggtgatttccagttttaccagaagtggccaaatggctggcagacaagaggcttcrtaagaaagcatttactttaaagactttatttctctttaggattttgccttcagattcatatgttcagaaatttagagacctacagttgacaagatttgag

SEQ ID NO: 403910 - DNA, 201 bp, Homo sapiens
gcactttatagaaatgatctccaatccccacaaaaccccaaattagtacattatttccattttaaagaagaagaaatgggctcaagtattgacactaattsccctccatctcacacagccaagaagtgtttgtgcctggtagcctttggtccaagtctccttcatagatctgaagcatcttttgtcatcacagaattatgt

SEQ ID NO: 403911 - DNA, 201 bp, Homo sapiens
atcaatctctaatactctgatagagatactccattcctggcacaccagacaatggacactagtcctagtagggcaccttctctcttggactgtggatgaamgttcagtgtttcctctgacacctctttttttctttaccttcatggtagactagctcctgtctgattgacacattcttttcttaaatgttttaatatctgc

SEQ ID NO: 403912 - DNA, 201 bp, Homo sapiens
cagaagaaccctacaaaactgacaaataaggaaactcattttatgctattattttattgaatgattggttaatactcagtttctttcccgaagtatctatrtatttattatatgatataacaaattataagtaaggaagaaaagtgatgaaaaggaaatatgagtaaaggaaatatgagtatgaaagtgaatggaaccaga

SEQ ID NO: 403913 - DNA, 201 bp, Homo sapiens
aagaagaaaagctctggacaacctgtcacctttactgatatctttgggatgttaataggagaaacactaattcataatgtaagttacagttcaatctacaytgcttttataacaagtagacagaacatattataatattatattttaaataaaagaaaatgtaatacattttataaaagtcagtggactctacttatttgt

SEQ ID NO: 403914 - DNA, 201 bp, Homo sapiens
aacaagtagacagaacatattataatattatattttaaataaaagaaaatgtaatacattttataaaagtcagtggactctacttatttgtccaactatgygtactgagcccattctccccaccagagattataattcttctacctttcaaactagtgcttactaattcatttcaatgatgtaaagattttgaatgtgtga

SEQ ID NO: 403915 - DNA, 201 bp, Homo sapiens
tcagtggatcttcaaaacaatcctacacactatctacttgtgatatgtgattttattcacattttatagattagggacctaagacagagagaataataccmaagtcagtaagcacagctcataagcagcaaaataggatttgatcccagacagtccagctccagagcccccgcgcttagacagtatacatctctggcacta

SEQ ID NO: 403916 - DNA, 201 bp, Homo sapiens
ctattaaaaatacaaaaatttgctggatgtggtggcgcttgcttgtaatcccagctactcaggaggctgaggcaggagattcgcttgaatctgggaggtgraggttgcagtgagccgagatcccgccactgcactccagcctggtgagtgagaccctgtctcaaaaaaaaaaaaaaaaaggaaaagataaaagtattgtta

SEQ ID NO: 403917 - DNA, 201 bp, Homo sapiens
aactttggttgaggtattataccaaacactactaaggctttaatctcctttgttgctccaaatgatgacattgggattcagcaatgcctttggactctaayggcaaaatttaatacaaaaaattggggaggataaaaagacatgcaaaatctgagagctgggggcagagagagagagagagagaacaagtaaacaaactca

SEQ ID NO: 403918 - DNA, 201 bp, Homo sapiens
aacccctacagtactagctgagtcttaaggctgagaagttcaaggactgttgaatatggctgctttggttttaggatcagccttgcttacagcatgatatktagtatgtggttaaggttttcttttcggctcttagtatttattttttctcttttacatagagtttttagagcagttttaggctcaaagcaaaactgagca

SEQ ID NO: 403919 - DNA, 201 bp, Homo sapiens
attttgaattctgtaagaaactaatttagtagtttgtagtaagaaatgtaaacaactggtgggcctgtatgtgtaaggctggttaccatactaatttcttkttgttgggagagacaatgtgtctctgcgcatctttagaatgactttccaagtccctacattcacctcaacctacctctcccttaactctcagcttctcca

SEQ ID NO: 403920 - DNA, 201 bp, Homo sapiens
ccttaactaactgtccctttgctactagtactgctgctgcctgtcctcttgaccactgtggggggtccaaaactagctgtagccaataatttacatatggraactcatctgggtgccctgacttacaggttaccctgtgccatacctttgacacagggacctgtccaggcttccttctgatggccaacccacctctaatgc

SEQ ID NO: 403921 - DNA, 201 bp, Homo sapiens
tgtgcctatgataaaggtgacctgttccacagtatcggttagggtcagtccatcatcctttcttttagtaatgtgtatcatgttcctatatctcagacttyatgtgagactcttggacacaggagtgaataggaaggctgtgctcactgctatcatggagtttacagtttcatagagacaaaaagaggtagaagttattag

SEQ ID NO: 403922 - DNA, 201 bp, Homo sapiens
attacaggcacccgccagcacacccagctactttttattttgtgttttttgtagagatggggtttcaccatgttggtcaggctggtctcgaactcctgacytcaggtgatgcacccgcctcggcctcccaaagtgctggaattacagatgtgagccactgcacccggccttattttcttcttttaaaaaattaggcattac

SEQ ID NO: 403923 - DNA, 201 bp, Homo sapiens
caagtagtgaacatggtatccaataggtagtttttcaactcttgctcctctccttctctccttacttttggagtctccagtgtctatttttctcatcattrtgttcctgtgtacccaatgtttagcttgcacttataagtacaataccttattttcatttggccttcttcacccaaaagcttccaattcctctcattttac

SEQ ID NO: 403924 - DNA, 201 bp, Homo sapiens
ggacacaattatcctgaaatcttgggtaatggattagatgattcatggtaggaaaagctaatttgttttactaaaaatattatgtgtagctatatgttgcktaacaatggggatacatgctgagaaatgcatccttaggtgacttcattattgtgtgaacatcataaagtatgcttacacaaacctagatggtacagcctg

SEQ ID NO: 403925 - DNA, 201 bp, Homo sapiens
ttacttacagtagtgggttatggaaggttcgtgaccaggtaatggggaactgagagggaacttctggctttttcctcagaagcattagcaagcaatgttarcaggtagagataccaagaatgttgatactgaaaatgaaaaggtgggtgcagcttaccacagactgcttctgtggaaagtgactagaatggcgagtgcagg

SEQ ID NO: 403926 - DNA, 201 bp, Homo sapiens
attgctgtttgtttctacctagaaaaaaaaaagagtaaattagggatcagaattcaaaataatgttttattgaaagtaaatgttgtaaatattggagtacrtaagggaagtcatagcatatttgaagaaccctttactaataggatagattctcaagtttgaaattattttgctatatgcatcttttttgtaataatcatt

SEQ ID NO: 403927 - DNA, 201 bp, Homo sapiens
ctattgtgaactacaagtgtgaaggatctaggttcatgctgcttatgagaatataatgcctgaggatctgtcactgtcccccttcacccccacatggaagkcttagttgcaggaaacaagctcagggctcccactgattctatgttatggtgagttgtataattatttcattatatattacaatgtaataataatataaat

SEQ ID NO: 403928 - DNA, 201 bp, Homo sapiens
ctatgtctaagctactctctttttgaaacttgatggtataattgggaaacattattggtaaagagatgaaaattaaggcttaactatagagttaaaaactgggggtgatatgtttttttttttattttttgagataatctcactcagttagatgtaactgcagggacaccatgaaaagattatccaactctccttgtgaat

SEQ ID NO: 403929 - DNA, 201 bp, Homo sapiens
ctatgttatggtgagttgtataattatttcattatatattacaatgtaataataatataaataaagtgcacaataaatgtaatgcacttgaatcacaaaaycatccctgctcctaccccgccaccctggtccatgttaaaattgtcttccacaaaaccggtccctggtgccaaaaatgttggggactgctgttttaaagca

SEQ ID NO: 403930 - DNA, 201 bp, Homo sapiens
tactctctttttgaaacttgatggtataattgggaaacattattggtaaagagatgaaaattaaggcttaactatagagttaaaaactgggggtgatatgtttttttttttattttttgagataatctcactcagttagatgtaactgcagggacaccatgaaaagattatccaactctccttgtgaattctaaggaatat

SEQ ID NO: 403931 - DNA, 201 bp, Homo sapiens
gagaccattaatccaatgccaatggttgaagtattctaggtttttctgtttctcgccagggtttgtatttccaagccaactgcttcatgagacgggaaaagagagagagagagagagagagagaacaccagattacttcaatcttcagagagtacattgtgcatttattaaaagtatgagaaggtccagaatatcatatct

SEQ ID NO: 403932 - DNA, 201 bp, Homo sapiens
ggggctatttgtttggagagacaaagtagagcatagtgaaataatagctttgttatgtggcagacccaactttgactccaaataccactttctagctttgwgacattggaaaaaaaatcttctttatgtttaaattgctttatttttaaaaatggggttataggcccagtgtggtagcccatgcttataatcccagcaagt

SEQ ID NO: 403933 - DNA, 201 bp, Homo sapiens
tccacaatggttgaactagtttacagtcccaccaacagtgtaaaagcattcctatttctccacatcctctccagaatctgttgtttcctgagttttttatkattgtcattctaactggcgtgagatggtttctcattgtggttttgatttgtatttctctgatgaccagtgatgatgagcattttttcatgtgtctgttgg

SEQ ID NO: 403934 - DNA, 201 bp, Homo sapiens
tagttcagaagccactttttaaacttttcttgttctaaaatagtttctggtcagataaaattttcagattacagttgtgtctgtgaaatgaaatgttactrtccagtctctatgtcccctaaaaactagccataccataacgcggttggttgggggagtaaaatctggaattagagtagtaaagaaatgagagaagaaaag

SEQ ID NO: 403935 - DNA, 201 bp, Homo sapiens
tactctctacttctatggcatcaacttctttagattccacatatgggtagatgttgtgctatttgtttttctgtgcaaatatataattttttttttttttktggggacagagtctccctcttttgcccagactggagggcagtggcatgatctcagctcactgtaacctccgcctcccgggttcaagccattatcctgtct

SEQ ID NO: 403936 - DNA, 201 bp, Homo sapiens
actctctacttctatggcatcaacttctttagattccacatatgggtagatgttgtgctatttgtttttctgtgcaaatatataatttttttttttttttkggggacagagtctccctcttttgcccagactggagggcagtggcatgatctcagctcactgtaacctccgcctcccgggttcaagccattatcctgtctc

SEQ ID NO: 403937 - DNA, 201 bp, Homo sapiens
acttgggaggctgaggtcggaagatcatctgatccactgaactctagcctgggtgatagaatgagactctgtctaaataaaataaaataaaaatatatacwtatatatatatataaaatataatatattgccaaacttaatgtatatacttgtgcaggtgataaatttcttgttcaaggggagaagaatctcaagtcatat

SEQ ID NO: 403938 - DNA, 201 bp, Homo sapiens
gtgtggggagggagttgttgtcgaccatttatatcaccttaatgagtgcacaagagtcgggaagagacaaaaagaacatgaaggagtgttagagaaataaatatagtgataaagttactaaggaaaagtgaatagatgatatatagtgccaaccactttatttttgaaaagttgtgggagactctggtgagaaaaggcaca

SEQ ID NO: 403939 - DNA, 201 bp, Homo sapiens
tgtggggagggagttgttgtcgaccatttatatcaccttaatgagtgcacaagagtcgggaagagacaaaaagaacatgaaggagtgttagagaaataaatatagtgataaagttactaaggaaaagtgaatagatgatatatagtgccaaccactttatttttgaaaagttgtgggagactctggtgagaaaaggcacag

SEQ ID NO: 403940 - DNA, 201 bp, Homo sapiens
agataccttccacaaatagtttaatatataattctctttcagcttaattggtgattgtgtgatatttgactgtgtgatatttgattgtgtgatatttgtgwtccatctaagaacccaggcagcgtcactctaggtaccctgcttttaaccactgcagcatggtaaaatactgttttattctctcctgcaaagagctttggt

SEQ ID NO: 403941 - DNA, 201 bp, Homo sapiens
tccctgtgctccctcagcagctgtctagatttctttgtaacacttgtcacatgggagtataatcatgcacttttaagactaaggcctgaggcttactcacaaaaaaaaaaaaaaaaaaaaaaaaagaagcttaattctgattctggcatagcagtaagatctcagggaatattggatgaatgagtaaaatatatgaaagtg

SEQ ID NO: 403942 - DNA, 201 bp, Homo sapiens
catttaacctgccgtatcccttgatactgagacctcagagaggggttgatctcataatctcctttgacttttctgcaaggccaagtgactctagtcctccrttcaaggtaaggatacataatacagcattccattctctaccacattctcttgcttgccttatagatctcttagtccctttgactccagtttcttattcct

SEQ ID NO: 403943 - DNA, 201 bp, Homo sapiens
aaattcacattttaacccttaactgcccattccctccaagaatggtaacatttttagatgaggaagaatgaagtttgcctgaatagagtcaagaaaggaargggatcgcatagaacagactcgcttgatgcatgattgcattgatgtttcgttgaagataaagcagaggagcgcctgtgacagggagtccaggggctaagt

SEQ ID NO: 403944 - DNA, 201 bp, Homo sapiens
catagaacagactcgcttgatgcatgattgcattgatgtttcgttgaagataaagcagaggagcgcctgtgacagggagtccaggggctaagtttcttccrggctccacagttgctaattcattctccagttcagatgtagacatataatctagagttatgattattttttaaatgaagatagttacttccatagagctta

SEQ ID NO: 403945 - DNA, 201 bp, Homo sapiens
acataacaatagtgagtttgttttcaatttctttgaaattaatgaacttcctgagaacagggtcgtgattcatcctagcaaggagtacattgctggcacayagtagacacctagtgaacactgaattatggtcagaccaactgaatcaatgaaaactgaaaatttccaaattcatctttccatctttcccataggaacttc

SEQ ID NO: 403946 - DNA, 201 bp, Homo sapiens; identical to SEQ ID NO: 89577

SEQ ID NO: 403947 - DNA, 201 bp, Homo sapiens
caatcaatcaatacagtcaattaattatccactcctcagtaacttttgacaaaataatatgcctagtgcttttaggtagtgcaaattgttttacttgttgrttatcttttcattaattgggtaatatgatctacagtcctcccttggtactcatgggggattggttccaggcccccctgtggataccaaattcagtggctg

SEQ ID NO: 403948 - DNA, 201 bp, Homo sapiens
aattttgaatagtttacaaaaattagcacacatgggatccattcattcaaatgtttattaaaatattggctaaaatgtttgtcatgcttatggttcagaaygcacttatcacatttgctattttattccatgtttcctacaaccggggagtaggtatttttagctctgttcaacagaagaaaaacgaaaacctcataaaga

SEQ ID NO: 403949 - DNA, 201 bp, Homo sapiens
tgttgactgctttgaacctgtcctctctagatagatggaggaattctgaataaatcacttaataaacaattccctctcacaggactattatgaaggacagygacatatgtaaaaagtatctaccctatgatgtttttctattatgtgtatattatcttgtctcagacatttaaatacatcactacagattcattgagaata

SEQ ID NO: 403950 - DNA, 201 bp, Homo sapiens
gatgtgtacatagtgattaccgtctatatagattgcagcagtctgccgggcgctaaggatgaattcctctttcctcaccacaatatattgtccctaccctrtaagaccttatagtctgtttggaaaatttacaataattattaaagaagttaaggcacaagagagtacagaactgttactatacactgtcattttgaccaa

SEQ ID NO: 403951 - DNA, 201 bp, Homo sapiens
gaagcccttccaagtctttgttataatattcaacttatcagaggctgtttgtttgctcgtttattttatctaaagcattggaaagtcctttttctctgaamacatgctgtggaaaatgctgctttaagatagccatcattttatcctcttattttaggtcccttcttaggaaatggcttgagggaagcagtcagcatatat

SEQ ID NO: 403952 - DNA, 201 bp, Homo sapiens
ttttgaccaagttatataatctacgttagacccagttttctcatctgttaagtgaagatgagacttctcacaatgttttgccaaaaaatgagacaaagtaygtaaacaatggcaggccctaataataagtttccagtacattttaacaatttagaatgttctgtgaaagctgtataagaaaagtcagaggtctagatctta

SEQ ID NO: 403953 - DNA, 201 bp, Homo sapiens
cctagtagggcaccttctctcttggactgtggatgaaagttcagtgtttcctctgacacctctttttttctttaccttcatggtagactagctcctgtctsattgacacattcttttcttaaatgttttaatatctgcaatcagataatgaagttaaccaaatatgtccaccatgctttatttacagagtgtgccttcttt

SEQ ID NO: 403954 - DNA, 201 bp, Homo sapiens
gttttatattcagttagtagtctttggacctggatgtgtcttcttttgacatctgcttcactgcagtactgctactgagatgagtggtgcatcattaaccytcattgttaagcttctgtcataaggcgggttgagctgtgtcttccaacagatttagacaaaatcattaaacattaattatatgaatcttgtacccagata

SEQ ID NO: 403955 - DNA, 201 bp, Homo sapiens
aatggacactagtcctagtagggcaccttctctcttggactgtggatgaaagttcagtgtttcctctgacacctctttttttctttaccttcatggtagamtagctcctgtctgattgacacattcttttcttaaatgttttaatatctgcaatcagataatgaagttaaccaaatatgtccaccatgctttatttacaga

SEQ ID NO: 403956 - DNA, 201 bp, Homo sapiens
gttataatcctattgaaagagacaaaaataaagcatggaaaaattcctataatatacctagacctgacataagtgtgtagacctgacataagggtgagatrtcatagagatttagtatagttgtaagaaagggtgatgaaacttggatttaagtcgaatgtagaaggatctatcaagtacgggtaaaaagatacctttgtg

SEQ ID NO: 403957 - DNA, 201 bp, Homo sapiens
ttgggcaggggtggatgatgttgggattttaaaatggaccatcagcaaagaccctaaaataaagattaagtaggagcaagcattataactgcagaagggartagcaagtgtaaggtgctgaagtgggaatgaacttgacttctttgaggaacagcaagaagatctgtgccgtgtggctgaagtgaagtgggatacgcaaga

SEQ ID NO: 403958 - DNA, 201 bp, Homo sapiens
gagattataaatatcaagcttatcatgcatagcatgtctgaacatagtgcaccaagcaagaggattttaaatttcctcctggttgtgggtgacccacttgkgcaatgaggaagtgaggatcctaatccgtgtgacaagaaccttggcagcacagcctgtaacattcaaaatggcagaaaaatcctgtgccttctcttccgt

SEQ ID NO: 403959 - DNA, 201 bp, Homo sapiens
tgagacttcatttctaccaaaaaaaaaaaaattaaaaaaattagccaagcatgatggtccatgcctataatcccagctactcaagaggctaaggtggaacrtttgcttgagcccagaggcagaggttgaaatgagcagagatcatgccactgcaggccagcctgggtaaccatttaaaaaacataaagaagaaagataact

SEQ ID NO: 403960 - DNA, 201 bp, Homo sapiens
tgctaatggagaagacaaatttgactataaatgcagcattgttgattttccttttattcaatggagctgtcagaacaaacaggcatggatatatatatatwtattttttttgagacagaattttcactcttgttgcctaggctggagtacagtggcgcgatctcagctcactgcaacctccgcctgctgggttcaagtgat

SEQ ID NO: 403961 - DNA, 201 bp, Homo sapiens
ctgtcatgagacggcacaatgaaagaggccttgaatctttccatttattagaaaactctacatagagttgtaattgttaatgttatttccatccactcacratggctttacactctggtgataaaaacattaaatctagtatcattttaagggcaatttttatgtatttcttgaaaaaaaaagaccatgctttacccatat

SEQ ID NO: 403962 - DNA, 201 bp, Homo sapiens
gaccattaatccaatgccaatggttgaagtattctaggtttttctgtttctcgccagggtttgtatttccaagccaactgcttcatgagacgggaaaagagagagagagagagagagagagaacaccagattacttcaatcttcagagagtacattgtgcatttattaaaagtatgagaaggtccagaatatcatatcttt

SEQ ID NO: 403963 - DNA, 201 bp, Homo sapiens
gccttatttcttagtgttccccaaacacagccttcattctagccaggccagaatgaattcccagatgtctctgacgaatgccacagcctcccatcctcagycttttcatatggttattcttctacagagaatgcccagtcttctgctccacttaaaaaccctgcctgtcctttaactcaactggtctcactgttcctctga

SEQ ID NO: 403964 - DNA, 201 bp, Homo sapiens
caatggactagtaataggaacctatataagacagagcttacagtttagtgagagaggcaaatttttgtatagatgttttcaataccttttgcttactcatraaattcagcactgagaatcaatcatctatgaacttattttaacctttttggaaacctccttctagtctgtgtttttcccttccttgaaactcaagagggt

SEQ ID NO: 403965 - DNA, 201 bp, Homo sapiens
catatcttttttgatttggatgaatcacatggtagactttggaataactataggaataaatgaactgtgtatctttcaagtattcaaagctgcatttttayagatatttcgtgattatactaagttgagttgagcaagtctatttgatttatcattatcacatgttgagggaactgtttcaaattcaatttgttgtacaaa

SEQ ID NO: 403966 - DNA, 201 bp, Homo sapiens
tgaaaaggcctttctgtacaacagatttacagtctctggaaagacaactcttaatatcttaagtggatattaatcattttctttcctttacacaaaaattktctctctggcaggatgtcctccttcaatatgtttgataggctcaaatagtgttgaaataaataaaaaccagaggctccagatctcattagtagatgtttc

SEQ ID NO: 403967 - DNA, 201 bp, Homo sapiens
tgacatcaggtgatccacctgccttggtctcccaaagtgctgggattacaggtgtgagccaccacacccagccaaacattggatatgtaattaataaattrcttggagacctgccagctgggaaaccagcattttcttgagcactttctgtcatgagacggcacaatgaaagaggccttgaatctttccatttattagaaa

SEQ ID NO: 403968 - DNA, 201 bp, Homo sapiens
acaataggaaattttcatacacgtataccacatgttaataatggtgctgcttgtaatagtttacaaaacattggaaattatttcaatatttatggataaawagattatagtatactaatataatgaaatactacataatagtaaaagtgtttgaattacttttatttatataagcacagatgattctcaaaaaaaagtgtt

SEQ ID NO: 403969 - DNA, 201 bp, Homo sapiens
ttttactatagaaatgattttaaatgcagaaagacactcaaagtaatccaaaacctgaaggcaaagcttaatctttgtgactaagtcggattgagcttagrtttgacatctcaattgaaatatgacatctctctctgccaactaccagccaccattgtcctgagtcattagtttcccttggagaatattggttgtgaattc

SEQ ID NO: 403970 - DNA, 201 bp, Homo sapiens
aggtgtcatagaggcaactgtacaggtaagattttaatttcttttcttttctttttttttttttttttttttttgagacggagtcttgccctgtcacccargctggagtgcagtggcgcgatctcggctcactgcaagctctgcctcccaggttcacgccattctcctgcctcagcctcccgagtagctgggactacaggc

SEQ ID NO: 403971 - DNA, 201 bp, Homo sapiens
atatattttatatatatctatataaatatatcttttctgatatattttatatatatctatataaatatatcttttctgatatattttatatatatctatataaatatatcttttctgatatattttatatatatctatataaatatatcttttctgatatattttatatatatctatataaatatatcttttctgatatat

SEQ ID NO: 403972 - DNA, 201 bp, Homo sapiens
ttatatatatctatataaatatatcttttctgatatattttatatatatctatataaatatatcttttctgatatattttatatatatctatataaatatrtcttttctgatatattttatatatatctatataaatatatcttttctgatatattttatatatatctatataaatatatcttttctgatatattttatat

SEQ ID NO: 403973 - DNA, 201 bp, Homo sapiens
agaatgttactagttgctaaaagcttcaggatcaatatttttatatatcaatatatcaagatcaatattcttatatataagtaaactgagcccacagagtrttttcttggccttaggacacagcattagttggggaaaagcaggggctatttgtttggagagacaaagtagagcatagtgaaataatagctttgttatgtg

SEQ ID NO: 403974 - DNA, 201 bp, Homo sapiens
ataaatatatcttttctgatatattttatatatatctatataaatatatcttttctgatatattttatatatatctatataaatatatcttttctgatatattttatatatatctatataaatatatcttttctgatatttttatatatatctatataaatatatcttttctgatatattttatatatatatataaatata

SEQ ID NO: 403975 - DNA, 201 bp, Homo sapiens
tttatcattttgtcagaattagaatttgttaaaaatatgacccattgagaatctaaaatggctgagaagatgggtagataatggtttgactcatggtgcttctcaatttgtcctttccttttcccatctggtgccttccaaggaacttcacttgcagcttgctccttcttgtttgggccaagtagacctcaccctcctctt

SEQ ID NO: 403976 - DNA, 201 bp, Homo sapiens
aaattataggaggatattcttccataacggcatttatccaatactctatgacatttaatagatgttatacagtaaattgggtttaagttcaaataaatttsggaacatttacaactcaatctccttcttcaaatacaatgagataccctactgagtttaagtcctacttaaagctgcttgaggatagtactttaaaaggag

SEQ ID NO: 403977 - DNA, 201 bp, Homo sapiens
ttatcattttgtcagaattagaatttgttaaaaatatgacccattgagaatctaaaatggctgagaagatgggtagataatggtttgactcatggtgcttctcaatttgtcctttccttttcccatctggtgccttccaaggaacttcacttgcagcttgctccttcttgtttgggccaagtagacctcaccctcctcttt

SEQ ID NO: 403978 - DNA, 201 bp, Homo sapiens
aatgtctacgctgggggaaaatggcagcagatgaagatttatcattaggtatggaaaaaggaagttaaggaagtattcatgtgatgacttcgaagttttayaggaattaggagtcaaggttaacttgtgaggataaaaatatggaggtagtggagtcaggcatgtggggtaaataaaagtccgcctgtgttgaagaaaaga

SEQ ID NO: 403979 - DNA, 201 bp, Homo sapiens
gctgaggcacgaaaattgcttgaaccaggaggccgaggttgcagtgagctgagattgtgccactgcactccagcctggcaacagagcaagactctgtctcaaaaaaaaaaaaaaaaggaaaagaaaaaaattgttgcttcatagagacacctcatttccatctgaatattgccataataaatacatgttgatttttaatat

SEQ ID NO: 403980 - DNA, 201 bp, Homo sapiens
ctgaggcacgaaaattgcttgaaccaggaggccgaggttgcagtgagctgagattgtgccactgcactccagcctggcaacagagcaagactctgtctcaaaaaaaaaaaaaaaaggaaaagaaaaaaattgttgcttcatagagacacctcatttccatctgaatattgccataataaatacatgttgatttttaatatg

SEQ ID NO: 403981 - DNA, 201 bp, Homo sapiens
agatattgtggacaacattcatttcctctcctctgtcatttcctatggctagatgtgtaatccctagggctctaaaaaggctttccacattcctgaatttaaagaagattatgtaactattttttttagtgtgcctgagaaaatagttgtccaagcaggcttttcttcattactctgttttcagacttctttgtagtttta

SEQ ID NO: 403982 - DNA, 201 bp, Homo sapiens
cttattttcatttggccttcttcacccaaaagcttccaattcctctcattttacagatatggaagctaaatgataataatgcaagaataaaaatctatcakttatatagtattatataatttaaagatactaacttgtaaatagattgtgttattaatatgagaagaatataagcctctattgtgctcctaaaatgttgct

SEQ ID NO: 403983 - DNA, 201 bp, Homo sapiens
gatattgtggacaacattcatttcctctcctctgtcatttcctatggctagatgtgtaatccctagggctctaaaaaggctttccacattcctgaatttaaagaagattatgtaactattttttttagtgtgcctgagaaaatagttgtccaagcaggcttttcttcattactctgttttcagacttctttgtagttttat

SEQ ID NO: 403984 - DNA, 201 bp, Homo sapiens
agtttgcctgaatagagtcaagaaaggaaggggatcgcatagaacagactcgcttgatgcatgattgcattgatgtttcgttgaagataaagcagaggagygcctgtgacagggagtccaggggctaagtttcttccaggctccacagttgctaattcattctccagttcagatgtagacatataatctagagttatgatt

SEQ ID NO: 403985 - DNA, 201 bp, Homo sapiens
agagttatgattattttttaaatgaagatagttacttccatagagcttattttttgttgttcattcaggacctagtaatttctagaagtaataagacttayttttattataaagttataagattttgattggaagtactattttgaatagcattctttctgtgtctgtttataaatttaaagtcatctttttctttcttct

SEQ ID NO: 403986 - DNA, 201 bp, Homo sapiens
aagtatactttcatgtgtaaacagacagataataataagcagtatcatggggtatctattcattgatttacttgagaagtttttattaaacaactgttatsttccagacagtattctaggtgatagacagtatcctgtgaactctctagggagcttgcattctaatagggaaagtaaacaggcaatgatgagcaaaagaat

SEQ ID NO: 403987 - DNA, 201 bp, Homo sapiens
ctagtaatttctagaagtaataagacttatttttattataaagttataagattttgattggaagtactattttgaatagcattctttctgtgtctgtttayaaatttaaagtcatctttttctttcttctgtggacagagaatgaatactactctgagcagtttgaaggaaaaagttaatactgcacaatgccctttacct

SEQ ID NO: 403988 - DNA, 201 bp, Homo sapiens
gcgagacatggcacgcacgcgcggctcactcacctggcagtcaacggcttcctgctcttcggggtgctgcatgcccaggccctgcaggctgcgtggcaacrgctgcaagtcggcctccaggcctctgcacaaatgggcctcctgagggcactgggtgcccggagcctgctgtccagccccaggtcctatctccttctcctc

SEQ ID NO: 403989 - DNA, 201 bp, Homo sapiens
cccgtatcaggaaagtgaggactcaggagaccagcactggaactattgcattcaagaacacagcactttaattatgactcagggttagaaagccattgccmaaccaccacagccgcctgtcagcagcacccaacgaagccggtgaatgagcatggaatactacttcagaaactgtatccatctcctataccttactcgcta

SEQ ID NO: 403990 - DNA, 201 bp, Homo sapiens
gatagcagagtagggtaactatagttaacaacgttttctttttaaaaaaaactttttattgattgattgagacagagtcttgctctgtcctccaggctagrgtgctgtggtgtgatctcagctcaccacaacctccacctcctgggtccaagcaattctcatgccttagccacccgagtagctgggattacaggtgcacac

SEQ ID NO: 403991 - DNA, 201 bp, Homo sapiens
ggccagtcaagtggacacataaaatgaaccatcagactccttagcaaatatgatcagcaagtaaccaagttactcagcagaggcctccgtttccccatctstacaacagggatcctaagacccactgctccagactgtggaaaggattaaatgaaatatgcatgccacgtgcctggcagttagtgggcatagagtatgaag

SEQ ID NO: 403992 - DNA, 201 bp, Homo sapiens
ccaagttactcagcagaggcctccgtttccccatctgtacaacagggatcctaagacccactgctccagactgtggaaaggattaaatgaaatatgcatgycacgtgcctggcagttagtgggcatagagtatgaagtagctattattattattgtcatttttattaaatgacagatccattttcagtttgttcagacagt

SEQ ID NO: 403993 - DNA, 201 bp, Homo sapiens
atataagctacagtacaaactacagttagaagatttaatttctaatgtttgatagcagagtagggtaactatagttaacaacgttttctttttaaaaaaaactttttattgattgattgagacagagtcttgctctgtcctccaggctagagtgctgtggtgtgatctcagctcaccacaacctccacctcctgggtccaa

SEQ ID NO: 403994 - DNA, 201 bp, Homo sapiens
tgtaatcatgagcctgccctcatgaatttacatgaccaggcactatcccccttcctaaaagataaacacatacacacacacacacacacacacacacacacaaaacctggagccaaaaatttgattagaaatggtcctaggcttgtaatgcccacagttacctgagagaagcaagtgtaaatcccttcaagaggaactaag

SEQ ID NO: 403995 - DNA, 201 bp, Homo sapiens
ctttgctgtggtccccctctacctctggggcactcgtggagccacaaaccctggtttgaagtctctgacccgggaggccctggtgctgctccctggggcgrccctcacagcagcggtgtttgtggccacggacagctggtatttctccagccccgctacatccaggaaccttgtcctgacacctgtcaacttcttgcacta

SEQ ID NO: 403996 - DNA, 201 bp, Homo sapiens
caggtgcacaccaccacgcccagctaatttttgtcattttagtagagacagggtttcaccatgttggccaggctggtctcaaactcttgacctcaggtgawccacccgcctcggcctcccaaaatgctgggattaaaagtgtgagccaccgctcccagccgttattttcttttagcaaatgaatattgtcatccttaaggg

SEQ ID NO: 403997 - DNA, 201 bp, Homo sapiens
gcagtggagcagggcagtggagtcaaacagaccgggtccatcttccagctccaccaacttagtagttccgttaccttttgcaaaaagcctgttcatttgtstgtaagacagggataagaataggttcatagaggctgaggtgggaggattgctagagcctgggaggcagaggttgcaatgagctgagatcatgccactgcg

SEQ ID NO: 403998 - DNA, 201 bp, Homo sapiens
aattccctcagtatttattgatcattatctctactatctcagtgagggggatgtggcaggactatagggtaatggtggagagagggtcaacaggaaaacaygtgaacaaaagactctgtgtcataaataagtttaaggaaaggtgctatgcctgaatgtgcacgtaggctagatttatgtttaactttacataaacatctc

SEQ ID NO: 403999 - DNA, 201 bp, Homo sapiens
cgaggcaggtgggtcatgaggtaggagtttgagaccagcctggccaagatggtgaaaccccatctctactaaaaatacaaaaattagccaggcgtggtgaygcgtgcctgtagtcccagctacttaggaggctgaggcagaagaatcgcttgaacctgggagacaaaggttgcagtgagccaagatcgtgccactgcacct

SEQ ID NO: 404000 - DNA, 201 bp, Homo sapiens
atacagacacttctcagtttgtcatgtctggacgagatggctggaactgaggattatgtccacacaaagagaaaggcagcatcaaggctgacctgagaagmggcaagggaccctggcagtaccaagtctggttgtttttttatgtgacatgatcaattgtttcctgctttttcttttaagagatgggggtctcgctgtgtt

SEQ ID NO: 404001 - DNA, 201 bp, Homo sapiens
aggttgcaatgagctgagatcatgccactgcgctccagcctgggtgacagagtgagaccctgtcttaaaaaacaaaaaaaaggatagggttatagacttcycataattaaataagataaggtacaaagcctggaaggtaatatgtatctaataaatggcagtgctagactgggcacggtggcacacgcctgtaatcccagc

SEQ ID NO: 404002 - DNA, 201 bp, Homo sapiens
gataaagaaagcaaccacttatgtctgcatattttcttcatttcatcttcacaacagccctgagataggtacttgttttaaagctgaggtataaattggggttcagagagattgagtgctttcaccatgaacaagtgacagagagcaacgacttgaaccgggttacctgatgccaccgctggtcttaacctccatgttatt

SEQ ID NO: 404003 - DNA, 201 bp, Homo sapiens
aagagaacagagggaaggagtagatgcatgatggaaggagaacttgcagctggtgggaggggatgctcatgatatatggaaagatggtcatactttcctawgtgacaaaacaaattttaaagcaaacattgtatgatccccttccatttacaaatatataatagatacattgaaaatactcactgaatggtcagacatccc

SEQ ID NO: 404004 - DNA, 201 bp, Homo sapiens
atttctggtgggaatgtaaaatgatacagccactttggaaaacaacctggaagtttccccaaatgattaaacataaagttaccataggatgcagggacttyacgtatataccaagagaaatgaagacatatgtccacgaataaacttgtacacaaaagtttatagtagcactgtttacaatagccaaaacatggaaacaac

SEQ ID NO: 404005 - DNA, 201 bp, Homo sapiens
tttttgtttgtttgttttttgttgttttttgtttttgacgaagtctcgctcttgtcccccaggctggagtgcagtggcgcgatcttggccaactgcaaackccgcctcccaggttcaagcgattctcctgcctcagcttccccagtagctgggatgacaggcgcccgccaccacgccctgctaatttttgtatttttagga

SEQ ID NO: 404006 - DNA, 201 bp, Homo sapiens
atggaaacaactcagaggttcatcaatggatgaatgggcacacaaaatatggtatatccacacaatgggatatcacttggccataaaaagtaaggacgtastgatacctgctacaacacggacgaaccacgaaaacattctgctaagtgaaagaagccagccacaaaggcctccagagactgaagggggcctgcccctcca

SEQ ID NO: 404007 - DNA, 201 bp, Homo sapiens
gattgcttgagcgcaggaggtcaagaccagcctgggcaacatagcaagactttgtctctacaaaaaatttaaaaattaaccaaggatggtggcacataccygtcttcctagctactcaggaggctgaggtcagaggatcgcttgatcccaggaggtcgaggctacagtaagccatgatcgtgccactgcactccagactgg

SEQ ID NO: 404008 - DNA, 201 bp, Homo sapiens
aaagagtaaaaggaaagaaaaaataaagatgagcaaagaaattaaaaacaagggcaaaagttgatgttttgaagaaattcgcaaaatcaacacaattctgstgacgattataaagaaagaaaaaagaatgcacaagtaaaccaatattaggaataaaaatcagtttagaatataagctacagtacaaactacagttagaag

SEQ ID NO: 404009 - DNA, 201 bp, Homo sapiens
ccacatgcccatgagactggcttgctccatagcggaagtcatgatgccaacttgcccaccttcccatacgctgaggaacagcctgccatccgttcttctgragcccagctcagagacctaggtatagcatcctccgttcccactcaccctcagcagatgccttcagcagttgtggagatatacaagttcccgcatagtagt

SEQ ID NO: 404010 - DNA, 201 bp, Homo sapiens
gtgcagtagtgtgatcatagctctctgcagcctcaaattcctgggttcaagtgatcctcttgtctcagcctcctgaatagctgggattaccagcacacacyactgtgtccagctattttttcgtagaaatggggatctcactttgctgcccaggctggtctgacctcctggtttcaagcgatcctttcatctcagcctccc

SEQ ID NO: 404011 - DNA, 201 bp, Homo sapiens
cctaacagtgtttttttgagtgacaggaactgcatgtaatttccattttccctttttggcttattgcactttttactttttctacaacaattttgtattaygtttatgaatagaaaaaaaaaataaaggttgttaaacaggacacaagtggaaagttgtccttgaattataaaaggaataaagtgctgaaaataactaaaa

SEQ ID NO: 404012 - DNA, 201 bp, Homo sapiens
aggagcctacagtgtaactcccagtcctagtccgacggcctgagagcttgattcagggaggtgggttggggcacactggtgtgagacatagagtctgaagrcccaagaaccaggagcaccgatgtctgaggcaggagaagatggctatcccagctgaagagagtgcaaattcacccttcctccacctttctgttttattca

SEQ ID NO: 404013 - DNA, 201 bp, Homo sapiens
tttgagagcctccttggcttcctcattatccaaaccactggccacttcaggcctctatattgcatgccatttgacagcagggaccccttccactatttctrtctccttctagggtgtcttattgtactgtaaagactaggaaacaaaaagctattttttgtagataccctcaaagttgggttatgcaaattaggttttcag

SEQ ID NO: 404014 - DNA, 201 bp, Homo sapiens
aaaatcaataaattaagaatataaaagatttgggccaggcaaggtggctcatgcatgtaatccgagcactttgggaggccaaggtgggaggattgcttgarcgcaggaggtcaagaccagcctgggcaacatagcaagactttgtctctacaaaaaatttaaaaattaaccaaggatggtggcacatacccgtcttcctag

SEQ ID NO: 404015 - DNA, 201 bp, Homo sapiens
gtaaggaatgtggacctggtcctcagggtggtgaggggatggccccccatccagaggtttctcacaggggagtgattcggcctgtctctgccgcagtcagraggaaggatgcagtgagagagggaaagtggagaggcggatggcggtgcagtctcctccaggtcatgcttcttaccatctccctcattattcatccacaga

SEQ ID NO: 404016 - DNA, 201 bp, Homo sapiens
tgaagtctctgacccgggaggccctggtgctgctccctggggcgaccctcacagcagcggtgtttgtggccacggacagctggtatttctccagccccgckacatccaggaaccttgtcctgacacctgtcaacttcttgcactacaacctgaatccccaaaacctggcgagacatggcacgcacgcgcggctcactcacc

SEQ ID NO: 404017 - DNA, 201 bp, Homo sapiens
cggtgtttgtggccacggacagctggtatttctccagccccgctacatccaggaaccttgtcctgacacctgtcaacttcttgcactacaacctgaatccscaaaacctggcgagacatggcacgcacgcgcggctcactcacctggcagtcaacggcttcctgctcttcggggtgctgcatgcccaggccctgcaggctg

SEQ ID NO: 404018 - DNA, 201 bp, Homo sapiens
acaagctgcagcagagtctgcttgagaagctgacgggagactttgtggggagggagtagcatgtctgggtagatgagtagtaaatccacaagcagagcagmagcctctctctctggggtaagaacttggaagtggggacttcatatctccttcccgagtggtgacactgaccttctgggtaatgctaataaaccaccagtc

SEQ ID NO: 404019 - DNA, 201 bp, Homo sapiens
ggcatcagctttctttgccacagggctcaacaggtgaatttgttttttaagttaaaaggctcatcttctttccctcacgtcgttttttaaccagaaaagcrgccagatagatttgatcctggattttgcttccctttcaacatctaacatagatagataaaacagctgaaagtctggagaaataagtagcagaatcaaaga

SEQ ID NO: 404020 - DNA, 201 bp, Homo sapiens
tcatgctttgaatctcactgccacttctgcgtccagctggtgaaaactctgttattaaaagattgttgtgattaggtccggcccactgcatagtctccctrttttacagtcagtgctcctgtataagtaacctaatctcaggatacagtccatcctgcgggccaggtgcagtggctcaaacctgtaatcccagcacattag

SEQ ID NO: 404021 - DNA, 201 bp, Homo sapiens
cctcacgtcgttttttaaccagaaaagcagccagatagatttgatcctggattttgcttccctttcaacatctaacatagatagataaaacagctgaaagkctggagaaataagtagcagaatcaaagagcccgaatgatccgcaggctgtatgatcagctcgaaacagccagcaggtgatcaagcaagagacgctgtgaa

SEQ ID NO: 404022 - DNA, 201 bp, Homo sapiens
cagcccaggattaaatgtttgcgccagggcccctctggctacctggtggtggccccgagcggcctcggaggccgcggcgtagctcctgggtgaaggcgtcyctaaatcgctcagcgcggcggcacagggagcccacgggcccagccgcgaggtcctgcaggcggcgggccgcgtcctggccccgcagctgggcctgcagca

SEQ ID NO: 404023 - DNA, 201 bp, Homo sapiens
aagtattgtaaacaaaactaacataaatcacctctgacataaccctgatggctcatcacctacccctcttctctccccccatctcctgataacaatcattrtcagagatgcggctctgtcaagcttgacaggtgtaaggacaagggtgcttgtccttggcttttgagatcttggaaccctgagaagaggttaggcctcccc

SEQ ID NO: 404024 - DNA, 201 bp, Homo sapiens
cctttgctgtggtccccctctacctctggggcactcgtggagccacaaaccctggtttgaagtctctgacccgggaggccctggtgctgctccctggggcraccctcacagcagcggtgtttgtggccacggacagctggtatttctccagccccgctacatccaggaaccttgtcctgacacctgtcaacttcttgcact

SEQ ID NO: 404025 - DNA, 201 bp, Homo sapiens
cctctgcactctgagctcccctgcacttgcttctgctgctcctgacaaatcctcaaaatcctacgagcagctcaaactgcacccgtctgtgagttcacagytctgtccatcagaagggcagcacgggctctctgctcacaaggtggacatcagcgtatggactgggctgagttcttgtctggaagctctctaattctagca

SEQ ID NO: 404026 - DNA, 201 bp, Homo sapiens
atttctccagccccgctacatccaggaaccttgtcctgacacctgtcaacttcttgcactacaacctgaatccccaaaacctggcgagacatggcacgcaygcgcggctcactcacctggcagtcaacggcttcctgctcttcggggtgctgcatgcccaggccctgcaggctgcgtggcaacggctgcaagtcggcctcc

SEQ ID NO: 404027 - DNA, 201 bp, Homo sapiens
gcggcaacccagcagctttgccaggaagtttacatgtgaaggtacggacctttcttggaatgagccacacctgatggccctgccactccggacggcgctcrttcacggctgtccctggagcagacacggttctgcgcacacacctgggcgccggagaaacagggcacccaaagcgggcccaggccctcggactcagcgagc

SEQ ID NO: 404028 - DNA, 201 bp, Homo sapiens
tcttcacattgtggagctgggggaagaaacctgacaatatgacagagcacccactgcccaagactcagccatagaagatgccgccccaccttctacttggrtagctgggctgggacgctgggacaggaccccgtcctccttcatgactcccactgctgcctctcctgggcatggctgttagctgttctgccttctgggtga

SEQ ID NO: 404029 - DNA, 201 bp, Homo sapiens
acgttccaccagctgcgggctgtgcagcagggcggccagcagccgccgcagcaccatcttctccaagcgcccggaacccgacctcgccgccctcgtcttcmgccccgcggcgcccgacccggacgtctatgcccccgcgcagcttgatgacgacactgccgccctcggattgggtccaatgagatgctcgcctccgcgcgt

SEQ ID NO: 404030 - DNA, 201 bp, Homo sapiens
cacccacccactacacactcctcttcactcacacctacatgcccccccggcacctcctacacctcccaggcctgggggcaccagtggaggtggtggacatrggggggactgaggactgggccctgtgccaaaccctgaaaagcttcaccagacaaccagcctgccaagtggctggtgggccatggctctgccgcctctttg

SEQ ID NO: 404031 - DNA, 201 bp, Homo sapiens
actaaataaaataattcactaactatacaaataaacagggcactatgagtgagatccagcagaaacaagacagcagattcagatccagactttagatgctrgagttatcaaacctagtatatccaacaagtatgtttgatatcatttaataaataaaagagagtcttgaaaatatcacaaaagagcaagcagatgtggaaa

SEQ ID NO: 404032 - DNA, 201 bp, Homo sapiens
tagtatatccaacaagtatgtttgatatcatttaataaataaaagagagtcttgaaaatatcacaaaagagcaagcagatgtggaaaaaaatcaaacaacytgtagaaatgaaaaatataacaactgaaatttaaaactccatagacaggtttaacatctagatacagctgaaaggatgattagagacatggaagatagaa

SEQ ID NO: 404033 - DNA, 201 bp, Homo sapiens
tagtggcgtgtgcctatcatcccagctactcagaaggctgaggtgggaggatcacttgagcccaggagttcgagattgcatttagctacaattataccacygcactgcagcctgggagacagcatgagaccctgtctcatggaaaaaaagaaaatgaaaagacaaaccatagaatgctatgggctctcatgcattgctggt

SEQ ID NO: 404034 - DNA, 201 bp, Homo sapiens
gcgggcggtctggcctaggctcttatgcgtgggatgtctgcaggccaacaatcccagtcgggattcgaagccgcgcgcagtgcccggaatgacccctccayattgatgccactgtagagcccggaaggaaaagcaagcggcctcggccccgcacagcccaggattaaatgtttgcgccagggcccctctggctacctggtg

SEQ ID NO: 404035 - DNA, 201 bp, Homo sapiens
cttcactcaaatctcatcttgaattatagctcccataattcccacatgctgtgggagggacctggtgggagataattgaattatgggggtggtttccctcmtactgttcttgtggtagtgaataggtctcacgagatctgatggttttataaggggaaaccccctttgcttgcgtctcattcgcttgcttctcattcgttt

SEQ ID NO: 404036 - DNA, 201 bp, Homo sapiens
catcagactccttagcaaatatgatcagcaagtaaccaagttactcagcagaggcctccgtttccccatctgtacaacagggatcctaagacccactgctycagactgtggaaaggattaaatgaaatatgcatgccacgtgcctggcagttagtgggcatagagtatgaagtagctattattattattgtcatttttatt

SEQ ID NO: 404037 - DNA, 201 bp, Homo sapiens
tggggcgaccctcacagcagcggtgtttgtggccacggacagctggtatttctccagccccgctacatccaggaaccttgtcctgacacctgtcaacttcytgcactacaacctgaatccccaaaacctggcgagacatggcacgcacgcgcggctcactcacctggcagtcaacggcttcctgctcttcggggtgctgca

SEQ ID NO: 404038 - DNA, 201 bp, Homo sapiens
tttagccaccaggaggctcggttcctgattcccctcctggtccccctggtcctgctttgtagtccacagacgcagcctgtgccttggaagggcactgtggycctcttcaacgccctcggtgccctcctcttcggctgcctgcatcaggggggcctggtgcctggcctggagtacctggagcaggtggtccatgcccctgtg

SEQ ID NO: 404039 - DNA, 201 bp, Homo sapiens
aggtttctcacaggggagtgattcggcctgtctctgccgcagtcaggaggaaggatgcagtgagagagggaaagtggagaggcggatggcggtgcagtctmctccaggtcatgcttcttaccatctccctcattattcatccacagaaaatgattgctgttatatgacacactggttaacaaaggagggggctgtttgcaa

SEQ ID NO: 404040 - DNA, 201 bp, Homo sapiens
tgatggttttataaggggaaaccccctttgcttgcgtctcattcgcttgcttctcattcgtttgcttctcattcgctttttgcctgctgccatgtaagacrtgcctttgccttccaccatgattgtgaggcctccccagccatgtggaactgtgagtccattaaacctcttttcctttataaattacccagtttcgggtat

SEQ ID NO: 404041 - DNA, 201 bp, Homo sapiens
gcatcagatcttcccgtgcttcaaggtggagcaccctgcagggcttactgcagcgctcagggtcaaagtgaggatgcagtgcggcaccaaaaggcaaatgsactctggagagccactctcaccttgtacccctggagtagaccccgaggactggaggactggaacaagatcttagtcctgagggcgggagaagcagccttt

SEQ ID NO: 404042 - DNA, 201 bp, Homo sapiens
ccaccgcactccagcctgggtgacagagatgaacgaagcgaaggaaggggaaggaagggaagggaaggaaggaagggaaggaagggaagggaggggagggraagagaagtaaagggaaggaagggaagggaggggaggggaagggaaggaagggaggggaggggaaggaggggaagctaagggaaggaagggaagggaggg

SEQ ID NO: 404043 - DNA, 201 bp, Homo sapiens
ctgggtccaagcaattctcatgccttagccacccgagtagctgggattacaggtgcacaccaccacacctggctaaattttgtatttttttggtaaagacrggtttttgccatgttggccaggctggtctcaaactcctgacttaaagcaatctgcctgcctcagcctcccaaagggctgggattccaggtgtgagccacc

SEQ ID NO: 404044 - DNA, 201 bp, Homo sapiens
ttgaacccaggaggtggaggttgtagtgagccaagattgtgccactgcacttcagcctgggcaacagagcgagactccatctcaaaaaaagaaaaaaaaaagtctaatgaaggaggagggaatagatattttggaggcatcagctttctttgccacagggctcaacaggtgaatttgttttttaagttaaaaggctcatct

SEQ ID NO: 404045 - DNA, 201 bp, Homo sapiens
aggctggtctcaaactcctgacttaaagcaatctgcctgcctcagcctcccaaagggctgggattccaggtgtgagccaccgcacctggctttttttttttgacagggtcttgctctgtcacctaggcagaagtgcagtagtgtgatcatagctctctgcagcctcaaattcctgggttcaagtgatcctcttgtctcagc

SEQ ID NO: 404046 - DNA, 201 bp, Homo sapiens
taagcggcaacccagcagctttgccaggaagtttacatgtgaaggtacggacctttcttggaatgagccacacctgatggccctgccactccggacggcgmtcattcacggctgtccctggagcagacacggttctgcgcacacacctgggcgccggagaaacagggcacccaaagcgggcccaggccctcggactcagcg

SEQ ID NO: 404047 - DNA, 201 bp, Homo sapiens
ccctgtgtttgaagcaggtacagaagcctaacgggcagtggagcagggcagtggagtcaaacagaccgggtccatcttccagctccaccaacttagtagtyccgttaccttttgcaaaaagcctgttcatttgtgtgtaagacagggataagaataggttcatagaggctgaggtgggaggattgctagagcctgggaggc

SEQ ID NO: 404048 - DNA, 201 bp, Homo sapiens
gacacagtaacagtctgatctctctttcttttccccatacagaccttacgatttcattcatatggaagttcaggatagggaattctatagagacagaaagwagattagtggtttccagagtctggggtggtggacaaggatgggaggtgataactaaatgatatggggttcttcttgagtgatgaaaatttgtaaaactga

SEQ ID NO: 404049 - DNA, 201 bp, Homo sapiens
cataccgtctcgcccaaaggccttgaggcctttcagatgtgatgggcatgtggggtcatcctcatagttcaagacggctgcttgagctccagccatcaagyctacaggcagtctttccagccaacaaaggagaagggcattacttctctctttaaggtcatattttgaagggcgcatgctttttgctcatttctatcacac

SEQ ID NO: 404050 - DNA, 201 bp, Homo sapiens
  misc_feature (1)...(201): n = A,T,C or G
cagtcaggctactgtaaagccacctgtagaacttagctgggttttgtaacacagtactgtggccaccataactgcaactgtgtcctccattcccacaaagnggggactggatagtggaaagctgatgcacgaacatcccatgtcttcaatgatcttgtttcccaggagaaaacaaagaaaactgcaaaaaatatggcctgt

SEQ ID NO: 404051 - DNA, 201 bp, Homo sapiens
cgcttctctgcactatgtcgggtggcctcctgaaggcgctgcgcagcgactcctacgtggagctgagccagtaccgggaccagcacttccgggtgagggargccgggccgcgagacgggaaggccctgggcaagaacgctgagaaacggtttgctcttgtctcattgtgtcgcctcccattcagctgaaatccgcaaacgc

SEQ ID NO: 404052 - DNA, 201 bp, Homo sapiens
acaaggaccttctccaacaccattgagggactcctcttcacgtggctgctggtgctggtatcctcccatgtaacgtggggccctacacgcaaggagccggygccgggtccacggtggcgcagctggcttcttggaggcattgtggctgctggcttcttcaaccggcccacctttctggcctttgctgtggtccccctctac

SEQ ID NO: 404053 - DNA, 201 bp, Homo sapiens
ccatcagactccttagcaaatatgatcagcaagtaaccaagttactcagcagaggcctccgtttccccatctgtacaacagggatcctaagacccactgcyccagactgtggaaaggattaaatgaaatatgcatgccacgtgcctggcagttagtgggcatagagtatgaagtagctattattattattgtcatttttat

SEQ ID NO: 404054 - DNA, 201 bp, Homo sapiens
ttgctgtggtccccctctacctctggggcactcgtggagccacaaaccctggtttgaagtctctgacccgggaggccctggtgctgctccctggggcgacyctcacagcagcggtgtttgtggccacggacagctggtatttctccagccccgctacatccaggaaccttgtcctgacacctgtcaacttcttgcactaca

SEQ ID NO: 404055 - DNA, 201 bp, Homo sapiens
ctctgcatggcagggcagctgtgaggtgtgtctatgctgggtggcaggggtcagatgccctgtaatgagccacagaaacttgggcccatgggtaggcaggwggtggtggtatcatcaaccactgggcacaggggcatatgcagcacttccaggagagaggggcctggaggggtcctcagccctgggggattggggtcagct

SEQ ID NO: 404056 - DNA, 201 bp, Homo sapiens
  misc_feature (1)...(201): n = A,T,C or G
cacttaattgcccggtgagtacagaccattccagctcaccttaactgtttcctggctgactcgcctctcggcctgattgccctgctcatctggctgagtgngctggaatgagtgtagtggtagtgccacctataggttcctcttaccttggtcttatttcacaggagcacttcccgaacgagtttacctcgggagatggaa

SEQ ID NO: 404057 - DNA, 201 bp, Homo sapiens
tgcctggaaagtcggcaacctggttcctcttggtcctctcttacagcgagtccctgtggcccatcgaggccagaaacgcagccattgccaatcactgcttyacctgcgccatcaatcgagtgggcaccgtaagtcccgaggtctggctggggagaggagccaccacctggtggctctggtggggacaccccgttccctctg

SEQ ID NO: 404058 - DNA, 201 bp, Homo sapiens
ctccctaggcagcagggagagacagcaagtgagtaaacacatggacatatgtggaacactgtccctctttctctttcttcctcaccttctctcccccctakctcccttctgtttttcaacgggagagactctttaacagcttcagtgatggatgtggaggtctgtaggtactagtggagaaagatgtccaagctatgtgta

SEQ ID NO: 404059 - DNA, 201 bp, Homo sapiens
  misc_feature (1)...(201): n = A,T,C or G
ctgccttcaaacaattgtgtattctctccatgttgccaagagtgtctgctgcctgacttttaaagaatctcctttgtttcctcatccatggaaagttctcngtccacatcaccaggaaccccggcctccctgctgttacgcaccgagctgttgtctgattccttcagttttcccacatcgttctgaatccattcgctcctc

SEQ ID NO: 404060 - DNA, 201 bp, Homo sapiens
ggcagggttcaccaggacactctgaaagagctgtctggctcccaggcccacaggccttcgagggaatagacacataagccttgctcctttttctcctggtrtctgcccacacccatatcctggaaagctgcgtgatttatgtccaccagaggggatttgctctgaggctgtggcctgcaggagcgcccttccgctggaggg

SEQ ID NO: 404061 - DNA, 201 bp, Homo sapiens
ctggcacctaggaggaggcgccaattcctctctgctttattgcctgcagtgtgggaatcgggctgtggctggggtgtggataggcagtcctgagcttgagragtgggttggactccatccattccccgggactggtgtgaagatgaaccaagaggatgtgggggatcctctgtgagctctctgaaagggagaggtgctctc

SEQ ID NO: 404062 - DNA, 201 bp, Homo sapiens
tcaggatctgccacacagatcacatctgcatgcctggcacctaggaggaggcgccaattcctctctgctttattgcctgcagtgtgggaatcgggctgtgrctggggtgtggataggcagtcctgagcttgaggagtgggttggactccatccattccccgggactggtgtgaagatgaaccaagaggatgtgggggatcc

SEQ ID NO: 404063 - DNA, 201 bp, Homo sapiens
caccaggactttggctacttttatggctcgagctatgtggcagcccctgacagcagccggactcctgggctgtcccgtagccgggatggactgctagttgmtaagctcgacctaaacctctgccagcaggtgaatgatgtctggaacttcaaggtaggtccccaggacccctgttgttgcctgctcctctgctttggccct

SEQ ID NO: 404064 - DNA, 201 bp, Homo sapiens
cacgtggcttatgcctgcagcaggcccttcccaaaggctgttcaggccagggcaaggtgctgaggacaggctggcctggttgcaggtttggggtgtgaccrgtgagtctcctggttgtccccaccactggcccaggaaagcctgcagccaggccaggctctgtccccaccactggcccaggaaagcctgcagccaggccag

SEQ ID NO: 404065 - DNA, 201 bp, Homo sapiens
accaaatatagaacctccccaccctactcctcatacctgcccaggtgggcattgatttttccatatgcattaggatgagatcctaaaaattgccttaccartagaactaaatggattctaatcctttttaaattctcaggtctctgcccttcatagacgcataaaggctatcgtagaggtggctgcaatgtgtggagtcaa

SEQ ID NO: 404066 - DNA, 201 bp, Homo sapiens
accttacacaagtggaatcatacagtatttgtctttttgggactggcttatttcatttagcatagtatcatcaaggttcatccatgtgtagcgtagaaccrtggcatctaaggctgaatgatactccattgtatggatgtgccatgtttcatttatccattcacccattgatgggcacttggttggctcccacctctttgc

SEQ ID NO: 404067 - DNA, 201 bp, Homo sapiens
cccctgggtgggtaagatgggagcggtggatgtttgaaggagggaaatgacctctgcctaatgcctaagatgttaaatctgaacttgatttgccattaatrcagttgttcaggatgtgatgtccccagttctctctccatgaatgtgggggtcctggccgttctcaggctggtcaggcagataagaaatggcctgcagagc

SEQ ID NO: 404068 - DNA, 201 bp, Homo sapiens
gttgcctctgagttttgggactaggggtggggtagaaaggggaatgtatgtttcattttataccctttcccactatttgattcacccccgccatgagcacrtgtctcttttgtaacagagctctagtttaatgatttaaagtgctggtggtaaagagccatcagacatggaaagatgaagttccagaagtgagaggttgct

SEQ ID NO: 404069 - DNA, 201 bp, Homo sapiens
actggtcatccagctaccaggcctgggcagaactttggggccaccccctaaagcagccccctctgctggctctgggtaagacacttggcaagctccatctycccactggggtccctagaggaacccgaagcactagggcatctggcttctgggccagggcagacaaagttgtggctgtggactcagatggctcctcgcctt

SEQ ID NO: 404070 - DNA, 201 bp, Homo sapiens
aaagctgacagcgggggaagtgtctgagctaagcacattacagcccacctcttccacaggttattgtacagccactataaagagtcatgatgaaggtaatkcaaagtgatgaaagcctgtgagcaagaaaaagacgtgttcaggctgtggtcagaactcttggaaaaaaaaggaaaaaaaagtttgcctatggatgaggat

SEQ ID NO: 404071 - DNA, 201 bp, Homo sapiens
aggtggaagagccgcggtcgcatcattgcactccagcctgggcaacaaaaatgaaactccgtctccaaaataaataaataattaaataaataaatagaaargaaacctgatgttttagttagcctatgtaaccccatcacaggttgatgtacagtttccattaggttctggaggaaatactgaaagcagtgtgtgtacctg

SEQ ID NO: 404072 - DNA, 201 bp, Homo sapiens
aagggcaagcgccggatcctttcgccccctccccacgtgaggccctggaggctgattggccgtgtgctgcggaggcggcaagaggaacgtgtcctggcacrtgccgaaggagcgctaaaggccaggggcggtcccacccgcgaagccctggaaggcggattggctgcgcgaggaagtggcgtgtcctcacttgagctgtct

SEQ ID NO: 404073 - DNA, 201 bp, Homo sapiens
  misc_feature (1)...(201): n = A,T,C or G
cccactgctcgccagctcccttgggccctggcactgagcgccttctagccaggacatcctcacctctttggctgataaatagctacaagaaatgggagagngattttaagtggagcagactgcatcaaaatccccttccctcttttttcctgcccatctaggaagcttgatctgcccagggaagctttcgaagctgcctcc

SEQ ID NO: 404074 - DNA, 201 bp, Homo sapiens
aggtctccctgccaattgcaggtaaagtccaggttcagtgtagtgttctgtcatggctggaccccactgctcgccagctcccttgggccctggcactgagygccttctagccaggacatcctcacctctttggctgataaatagctacaagaaatgggagagagattttaagtggagcagactgcatcaaaatccccttcc

SEQ ID NO: 404075 - DNA, 201 bp, Homo sapiens
tgggcccaccaccagattctgtcagaaggtaggacattaacggtgcctctggcagcagctgccaaatatgtgcaagtcacagagcatgaccacagctgccrggtttggcctttcaccatggaaaatgcacccatttggtgcttgttttgccagataagattagataagactatctgccactttttttttagcgtactctta

SEQ ID NO: 404076 - DNA, 201 bp, Homo sapiens
tttgaactgcagggatatgcctttgaagcagcggaggagcagctgagacgaccccgcattgtgcacgtggggctggttcagaacagaatccccctccccgmaaatgcccctgtggcagaacaggtgcagactcttttgaccataataaatacacaaacagggttgtggcctgcccttggagcacacctgcaggccctggct

SEQ ID NO: 404077 - DNA, 201 bp, Homo sapiens
tgaggcgggaggatcacttgagcttgggaggtcgaggctgcagtgagccaaaatctctcctctgcactccagcctgggagtcagagtgaggccctgtctcaaacacacacacacacacacacacacacacatacacacacacacacacacacacacgtctttggatttggagcttacttggataatcccggatgatcttat

SEQ ID NO: 404078 - DNA, 201 bp, Homo sapiens
tcgaggctgcagtgagccaaaatctctcctctgcactccagcctgggagtcagagtgaggccctgtctcaaacacacacacacacacacacacacacacayacacacacacacacacacacacacgtctttggatttggagcttacttggataatcccggatgatcttatcttgagatcctgaccttaattacgtctgtga

SEQ ID NO: 404079 - DNA, 201 bp, Homo sapiens
gaagctccctaggcagcagggagagacagcaagtgagtaaacacatggacatatgtggaacactgtccctctttctctttcttcctcaccttctctccccsctatctcccttctgtttttcaacgggagagactctttaacagcttcagtgatggatgtggaggtctgtaggtactagtggagaaagatgtccaagctatg

SEQ ID NO: 404080 - DNA, 201 bp, Homo sapiens
aggctggtctcgaactcctgacctcaggtgatccacccacctcagcctcccaaagttctgggattacaggcgtgagccaccgtgcctggccctaactgcattttttttttttttttcagacggaatcttgttctgtcacccaggctggcatgcagtggcgcattctcagctcactgcaacctctgcctcctgggttcaaaa

SEQ ID NO: 404081 - DNA, 201 bp, Homo sapiens
aacccaggaggtggaggttgcaatgagccaagatcgtgccactgcactccagcctgggcaacgagagcgagactccgtctcaaaaaagaaaaaaaaagaaagaaagaaatggacttgggctgggtgtggtagctcatgtctgtaatcccagcactttgggaggccgaggcagctggatcacctgaggtcaggagtttgaga

SEQ ID NO: 404082 - DNA, 201 bp, Homo sapiens
acccaggaggtggaggttgcaatgagccaagatcgtgccactgcactccagcctgggcaacgagagcgagactccgtctcaaaaaagaaaaaaaaagaaagaaagaaatggacttgggctgggtgtggtagctcatgtctgtaatcccagcactttgggaggccgaggcagctggatcacctgaggtcaggagtttgagac

SEQ ID NO: 404083 - DNA, 201 bp, Homo sapiens
ctcacacctgtaatcccagcactttgggaggctgaggtgggcggatcacctgaggtcgggagttcaagaccagcctgaccaacatggagaaaccccatctytactaaaaatacaaaattagccaggcatggtggcgcatacctgtaatcccatctactcgggaaggctgaggcaggagaattgcttgaacctgggaggggg

SEQ ID NO: 404084 - DNA, 201 bp, Homo sapiens
gcctatgtaaccccatcacaggttgatgtacagtttccattaggttctggaggaaatactgaaagcagtgtgtgtacctgcccactgccttcacacacccmggcctggggttttaattacttcaagcaggccagcctcaggtgcccacagccctgagaaccagtctgtgcccagtttctttctcttctctcagattatgaa

SEQ ID NO: 404085 - DNA, 201 bp, Homo sapiens
aaaaaaaaaaaaaaaaaaaatgccagaaggggctgagcgagtctgttttccaggaaaacacttcctgaaagggtcccagatgccgccatttcaggtccccygacttctagagtccctgatcctagttaacttactgcaaatagagatgcagaaagggcaggggaatgagcgtccactgggtgcctgctgcatctgggccat

SEQ ID NO: 404086 - DNA, 201 bp, Homo sapiens
gaaaagatagtctagaacaaaggccttcatagttttagctgacaagacacatacagaaatgtgagagacctgtggacaattatctcccaataatatccacscctcatttccacattgtcttggcttctggcaattttcttatgggtatgccattttatcagtcactgattaatctgacaataggcatagagcaaatcagtt

SEQ ID NO: 404087 - DNA, 201 bp, Homo sapiens
tcgcagccgaggcgcgacgactccgcgcagtcccgcctgtggaggggcgtgcctcatcgcttgctaaccgagaggcgaagggcaaggggcgaagggcaagsgccggatcctttcgccccctccccacgtgaggccctggaggctgattggccgtgtgctgcggaggcggcaagaggaacgtgtcctggcacgtgccgaagg

SEQ ID NO: 404088 - DNA, 201 bp, Homo sapiens
gacttctggtaaggttaatgggaatggtgagcaaaccaaatggtggccaaagccatctgttgttggggcaaggcagaacccacagtcgttaaatttgtttwatttgagacaggttctcagtcttgcccaggctggagtgcagtggtgccatcacagctccctgcagccttgaattccttgcctcaagcgatcctcccctgc

SEQ ID NO: 404089 - DNA, 201 bp, Homo sapiens
tcaaggggtcagagaaagagactttgtgggagattctggaggtgaggactctggggcaggacagggaaagaagcatcagatggctcagaaatgtctagcgkgtgaggacagcaggaagtctgctggatttagccatgataaggctgttggcagttcctgagatggggccaggaggtaaggcctgagctgaggggaagcatg

SEQ ID NO: 404090 - DNA, 201 bp, Homo sapiens
tagtcaggcagggacaggtcaggcaagagctgccacacagcatgtgccagtataaacaagtttcacgtatgagggaccccctggtcacgggttggacagasaggcattaggctgtccaccatgtacaagatgtatcctgtgaaaggcacactgtagagaccacatccagctcccttcatttcctgttagtgctgggttgcc

SEQ ID NO: 404091 - DNA, 201 bp, Homo sapiens
cccagagctggttgataggactgcaacaatccaataacctgaaaaagtgtcaacagtggtaaggcaccaccaatagccccaagaggtcaaaggtctaatgragttgatctgccatgagtaggctgaggccacgccctgtgcaagatgacctcctcctatgcaagagaaatgggccaacctttggtaggaatcacagcctgg

SEQ ID NO: 404092 - DNA, 201 bp, Homo sapiens
ggggcaggtgaggggtggaacctggaggcacccgcgccagggcccctgagggaggcgggagggggacagcctcagtcctgactcgcagccgaggcgcgacractccgcgcagtcccgcctgtggaggggcgtgcctcatcgcttgctaaccgagaggcgaagggcaaggggcgaagggcaagcgccggatcctttcgcccc

SEQ ID NO: 404093 - DNA, 201 bp, Homo sapiens
tcccaaagtgctgagattacaggcatgagccaccgcacccggcccagtttttgaggaagccattccaatactcaacaatgccagaatctcatgatggcagkagtgtggaagatcttttgaataccactattgttgagtggcttttatgataaaaggtgcaccattgtcacactgcagatggtccagagagccaaaacatga

SEQ ID NO: 404094 - DNA, 201 bp, Homo sapiens
agagcatgaccacagctgccgggtttggcctttcaccatggaaaatgcacccatttggtgcttgttttgccagataagattagataagactatctgccactttttttttagcgtactcttagaattggggcgtgtaaggctccagaagggccattagctttttcaggcaagggagctgcagcccagggagggtggtcggag

SEQ ID NO: 404095 - DNA, 201 bp, Homo sapiens
tgagatggggccaggaggtaaggcctgagctgaggggaagcatgtgtggaagctccctaggcagcagggagagacagcaagtgagtaaacacatggacatrtgtggaacactgtccctctttctctttcttcctcaccttctctcccccctatctcccttctgtttttcaacgggagagactctttaacagcttcagtgat

SEQ ID NO: 404096 - DNA, 201 bp, Homo sapiens
caaaagagtgactccttgttctgctgtttcccacctctcgctactgtacttgaccaatcttaaagtgaatcttatgctctgtgaattatatatatatatayattttttttttttttttttttgagatggagtctcactctgttgcccaggttggagtgcagtggcacgatctcggttcactgcaagctctgcctcctgggt

SEQ ID NO: 404097 - DNA, 201 bp, Homo sapiens
tctccagaatttttgcatcttgcaaatctgactctgtcccattaaacaatagctccccattcccccagcccctggcaaccaccgttctattaatattatastttccatttctgtgagtttgactactctagataccttacacaagtggaatcatacagtatttgtctttttgggactggcttatttcatttagcatagtat

SEQ ID NO: 404098 - DNA, 201 bp, Homo sapiens
ttcccccctttccctgtagtcagcagggggcttcaaaaagccccacattgggctgagctcggtggctcacacctgtaatcccagcactttgggaggccgargcaggtggatcacttgaggtcaggagtttgagaccagcctagccaacgtggtgaaaccctgtctctactaaaaatacaaaaatcagccaggcgtggtggt

SEQ ID NO: 404099 - DNA, 201 bp, Homo sapiens
tgtcctcattcttgactaaatttcagttgaatttcttcttttttttttttctttgagacggagtcttgctctgtcacccaggctggagcgcagtggcgcartcttggctcactgcaagctccgcctcctgggttcacgccattctcctgcctcagcctcccaagtagctgggactgcaggcgcccgccaccatacctggct

SEQ ID NO: 404100 - DNA, 201 bp, Homo sapiens
ggccaaggctggcggatcacttgaggtcaggagtttgagaccatcctggccaacatggtgaaacctcatctctactaaaaatacaaaaattagccgggcayggtggcaggcacctgtagtcccagctacttgggaggctgaggcaggagaatcgcttgaacctagcaggtggaggttgcagtgagctgatattgcaccact

SEQ ID NO: 404101 - DNA, 201 bp, Homo sapiens
cctgtctctactgaaaatacaaaaaattagccgggcgcggtggtaggcgcctgtaatcccagctactagggaggctgaggcaggagaattgcttgaacccrggaggtggaagagccgcggtcgcatcattgcactccagcctgggcaacaaaaatgaaactccgtctccaaaataaataaataattaaataaataaataga

SEQ ID NO: 404102 - DNA, 201 bp, Homo sapiens; identical to SEQ ID NO: 89612

SEQ ID NO: 404103 - DNA, 201 bp, Homo sapiens
agcagcaccatcctcatccctgcctctcagcaaccccacaggtcaggtggcagcctccccattaccaggtgaggaaactgaggcagtgtccaagtgtctgwccccagagcctctgcacctccagcttttcatgcagattttggacatcaggagataaccaaatatagaacctccccaccctactcctcatacctgcccagg

SEQ ID NO: 404104 - DNA, 201 bp, Homo sapiens
gaggtatgagaattgcttgaatctgggaggcaaaggctgcagtgagctgagatcacgccactgtgctccagcctggacaacagagtgagagcctatctccaaaaaaaaaaaggggtggggaccatattcctgctttatgtcaagacactggtaagagacagactagatgggccagggagccccttggcagttatcagtgca

SEQ ID NO: 404105 - DNA, 201 bp, Homo sapiens
atcagttcagcttgtctcacagaatttaatttaatgaacagcatttcaacagaatgagtccaacctgcaatattaaccccaatcctgaccccagggttttytttttttcctttatttctttttttgagacggagtctcactctgtcgcccaggctggagtgcagtggtgcgatttcggctcactgcaagctccgcctcccg

SEQ ID NO: 404106 - DNA, 201 bp, Homo sapiens
cgcctccacagggacctgaggctgcccttagcatggctcctagtgttgccttctgagcatgcctctcccctatcctgttgttaaggccagagatcatgacrgctaattagagtagaggacaaatgacccgctgggctgctcatcctgtggtcaccagggactgatgttcttacttgagacaaaaggaatttgatgccaaag

SEQ ID NO: 404107 - DNA, 201 bp, Homo sapiens
ggaatttgatgccaaagaaatttatttttggcatagataagtcgtttgattattatttttattcttttttcaagtggtaaaatatacatataaaatgtacyattttaaccacttttaagtgcacagttcagtagtgtaaagtatattcacactgtgcggatctccagaatttttgcatcttgcaaatctgactctgtccca

SEQ ID NO: 404108 - DNA, 201 bp, Homo sapiens
catggtggcaggcacctgtagtcccagctacttgggaggctgaggcaggagaatcgcttgaacctagcaggtggaggttgcagtgagctgatattgcaccmctgcgctccagcctgggtgacagaacaagacagaaaaaaaaaacagggaaaggcaatgcatgtgaaggtgctcacaacagcttacttacaataagggaaa

SEQ ID NO: 404109 - DNA, 201 bp, Homo sapiens
cagggtcccggcccgacaccaaggggcaggtgaggggtggaacctggaggcacccgcgccagggcccctgagggaggcgggagggggacagcctcagtccygactcgcagccgaggcgcgacgactccgcgcagtcccgcctgtggaggggcgtgcctcatcgcttgctaaccgagaggcgaagggcaaggggcgaagggc

SEQ ID NO: 404110 - DNA, 201 bp, Homo sapiens
gaggccaggcatggtgtctcatgcctgtaatcccagtactttgggaggctgaggcgggcggatcacctgaggttgggagtttgaggccagcctgaccaacrtggagaaacccagtctctactaaaaaaaaaaaaaaaatacaaaaaattagccgggcatggtggcccatacctataatcccagctactcaggaggctgagg

SEQ ID NO: 404111 - DNA, 201 bp, Homo sapiens
ggatttgctctgaggctgtggcctgcaggagcgcccttccgctggagggtgggaggactgtctaaggcagtcacagcaaggagaggcacggtgtgggcacygctgctatttctaacctgctggagtgaagggaaccttgactacttgaaaagcaggctgattgtcaggggcggaaccgaactcagagctgtcagggccgtc

SEQ ID NO: 404112 - DNA, 201 bp, Homo sapiens
cctcacgacctctccagggtcccggcccgacaccaaggggcaggtgaggggtggaacctggaggcacccgcgccagggcccctgagggaggcgggaggggkacagcctcagtcctgactcgcagccgaggcgcgacgactccgcgcagtcccgcctgtggaggggcgtgcctcatcgcttgctaaccgagaggcgaagggc

SEQ ID NO: 404113 - DNA, 201 bp, Homo sapiens
tttcataatcatcttgcgcttagatggtaagcccttcctggctaggggccgtgtcccatcccatgcctctgtggctttcaccttcgggtgtgcaacaggtrtcaggaggtatttgctgtttggctaatggtcacttcagtggaaggttttataactaattctctagccttggttaataaactacaaatgtggatgagcact

SEQ ID NO: 404114 - DNA, 201 bp, Homo sapiens
agtagagacaggatttcaccatgttggccaagctggtctcaaactcctgtcctcaggtgatccacccaccttggcctcccaaagtgctaggattacaggcrtgagtcactgcacccaaccagacaagacactcttgggtcagacacaaaggacagtttattacagcaatagcagtagccagagtaccagcattttcttaca

SEQ ID NO: 404115 - DNA, 201 bp, Homo sapiens
cctccagtggcaagaggtggtggcgtgtaagtgatggggatttataaaaccagaacctctaaagtacatctgtgttttgctttcagatgacgggcaggtaygagatgtacgcacgggagctcgccgaagctgtcaagtccaactacagccccaccatcgtgaaagagtagccggcttcagtgcctgccttggggtgaggaa

SEQ ID NO: 404116 - DNA, 201 bp, Homo sapiens
cctctctgctttattgcctgcagtgtgggaatcgggctgtggctggggtgtggataggcagtcctgagcttgaggagtgggttggactccatccattcccygggactggtgtgaagatgaaccaagaggatgtgggggatcctctgtgagctctctgaaagggagaggtgctctcatccagcccatagatctccctttcca

SEQ ID NO: 404117 - DNA, 201 bp, Homo sapiens
ggcccagggctggctgctcagcaggagtgtttaataagcacttaattgcccggtgagtacagaccattccagctcaccttaactgtttcctggctgactcrcctctcggcctgattgccctgctcatctggctgagtgagctggaatgagtgtagtggtagtgccacctataggttcctcttaccttggtcttatttcaca

SEQ ID NO: 404118 - DNA, 201 bp, Homo sapiens
cggctcccttctggcattcaccaggagaggttctgcccagcccagcaggtgggttccaggagaagggatggaggtgggaagtggtggttatggaactcctrccacttggatcttcacctgcatggtcattcagtcttcatagtcttcttttgaggacatttcagaaaaggaaactgaggctcaggatgaggatttgatcca

SEQ ID NO: 404119 - DNA, 201 bp, Homo sapiens
gggatttataaaaccagaacctctaaagtacatctgtgttttgctttcagatgacgggcaggtatgagatgtacgcacgggagctcgccgaagctgtcaartccaactacagccccaccatcgtgaaagagtagccggcttcagtgcctgccttggggtgaggaagacacctctgccccagtggattagcaagtgtggcag

SEQ ID NO: 404120 - DNA, 201 bp, Homo sapiens
gggagcgagagtaagagataaaggcaagggcgcctgagcgggcctgggcacctcctcccactgcgggcaaagggcaggcagttcgtgcgcggacacaagcwctggcggaccgtggccatggcgggcgctgagtggaagtcgctggaggaatgcttggagaagcacctgccgctccccgacttgcaggaagtgaagcgcgtt

SEQ ID NO: 404121 - DNA, 201 bp, Homo sapiens
agcttgtctcacagaatttaatttaatgaacagcatttcaacagaatgagtccaacctgcaatattaaccccaatcctgaccccagggttttctttttttmctttatttctttttttgagacggagtctcactctgtcgcccaggctggagtgcagtggtgcgatttcggctcactgcaagctccgcctcccgggttcata

SEQ ID NO: 404122 - DNA, 201 bp, Homo sapiens
gcctgcagtgtgggaatcgggctgtggctggggtgtggataggcagtcctgagcttgaggagtgggttggactccatccattccccgggactggtgtgaaratgaaccaagaggatgtgggggatcctctgtgagctctctgaaagggagaggtgctctcatccagcccatagatctccctttccactttcctttgtcctt

SEQ ID NO: 404123 - DNA, 201 bp, Homo sapiens
ggcaaggcagatgaaggcagagcctccagctcactgtgagggcccccataggaagcccccagagtgtgactttctgttttccttaggctgtgggtagaagygacacctctcagaagggtgacatttagacatttccccaggggcaaagggaagcagcataagggggccatttgcagcaatttgctgggccttcaggcctga

SEQ ID NO: 404124 - DNA, 201 bp, Homo sapiens
gagaggcgaggcattccatgataagatgcacacaggataagtaggataagtgtggaaccaggcttgcctctgaaggcaggagagtggggagcggagtcccrggccaagggggtggctgacctgggagatgggtgtgaacgtgggccctggaccggaagcagcaccatcctcatccctgcctctcagcaaccccacaggtca

SEQ ID NO: 404125 - DNA, 201 bp, Homo sapiens
ccaaagatgggtgtctttaatctgccagttgaggttttctaagtgtcagaccgaacacctaggccattggcaacaccccaagagtcagtaaaaatataacaagggttaccaagaggagtattggctcagggcctactgagcagagttactcatcaattttctgttctgcgcagctgtttctgagggtgaacagccacagca

SEQ ID NO: 404126 - DNA, 201 bp, Homo sapiens
catccttgttgggtatatgcctttgcatgaacattgctttcctgtcatgttaatggggtttcaggaaagaacacgtgtctgtgtcccagaagttcatgtcrttttcctatttttgttacctttgtactctcactcttcattagactatgagctccatgaggatagtatctgtgtttgtttttcccaactctccacccaccc

SEQ ID NO: 404127 - DNA, 201 bp, Homo sapiens
caaagatgggtgtctttaatctgccagttgaggttttctaagtgtcagaccgaacacctaggccattggcaacaccccaagagtcagtaaaaatataacaagggttaccaagaggagtattggctcagggcctactgagcagagttactcatcaattttctgttctgcgcagctgtttctgagggtgaacagccacagcag

SEQ ID NO: 404128 - DNA, 201 bp, Homo sapiens
ggggttcgagaccagcctggccaacatggcgaagcctggtctctactaaaaatacaaaaaaattagccgggcatggtggcatgtgcctgtagtcccagctrgtggggggctgaggcaggaggatcgcttgaacccaggaggcggaggttgtagtaagccaagatcgtgccactgcactccagtctgggcaacagagtgagt

SEQ ID NO: 404129 - DNA, 201 bp, Homo sapiens; identical to SEQ ID NO: 89609

SEQ ID NO: 404130 - DNA, 201 bp, Homo sapiens
acttgtctttaaccagagaagggttttatttttataacacataacaagtgtttcggtgttagcctcacccctaaacagatagaactgcccttgtcaaggcrgggctgggggatgaggggagggtggccccggaagcccgagaactgggcagtaccccacccctggggcccctcatttaggaggggcatccagcgagctgat

SEQ ID NO: 404131 - DNA, 201 bp, Homo sapiens
cagttaaatttgaggtgcttgcaaaagcttgggagagctgcacagatcttttttatgttcataaggaagtcttcaggggcaattatgaaggacaaagatcrtaaatgcctccccctctttatctcctggaatccaaagtattttctgtctaggtgccagaattgctgctccccctcccaaatcggtgtctcatttcaatac

SEQ ID NO: 404132 - DNA, 201 bp, Homo sapiens
gagatcagtcgaggaaacttgtctttaaccagagaagggttttatttttataacacataacaagtgtttcggtgttagcctcacccctaaacagatagaaytgcccttgtcaaggcagggctgggggatgaggggagggtggccccggaagcccgagaactgggcagtaccccacccctggggcccctcatttaggagggg

SEQ ID NO: 404133 - DNA, 201 bp, Homo sapiens
cagctttctggcctgggccctgctctaaagggtgctggttggcaagttagcagatgtaaaggaccaagtaggatgcccaaagtgaggcatatgctgtctgmaatacccaaggagtctgagaaggtgcagggccttctttttttggtggtggtggaaggactaccagcagcttttccttgactcctggaaggattaaacatt

SEQ ID NO: 404134 - DNA, 201 bp, Homo sapiens
gccgggtgtcactttttggtggaggctactgcatctccaagtatggcgtggaagccttctctgactccctcaggtatgggtctgggatggggcccaccctmgtcttcctgctcctgtccttgtggggaagtcttttccagggagttccttgaatcccagcctgtaagttcctttcatgagatcactctctgtcttcatgtg

SEQ ID NO: 404135 - DNA, 201 bp, Homo sapiens; identical to SEQ ID NO: 89617

SEQ ID NO: 404136 - DNA, 201 bp, Homo sapiens
taggagtaagtccttacccatcaataataacattgaatgtaagtatcctagactgaccaatcaaaagacatagactggctgaatggatgaaaaaccaagasccattgatctgttgcctgcagaagaaacacttcacctatgaagacaaacatagactgaaaataaagggatggaaaaagatatttcttgccaatggaaacc

SEQ ID NO: 404137 - DNA, 201 bp, Homo sapiens; identical to SEQ ID NO: 89618

SEQ ID NO: 404138 - DNA, 201 bp, Homo sapiens
cccatttccatgatgggtgctgtgtggtcaactggtcatgaaaagcaagtgtccaggcttctcagaacttgggaccagtgtctatctgaacccatcgttaytgaggaacaaagggaagccagaaagggaagacattggtggctgatcacaagctggcattagagacagcttgtttttatgtgctgagacttctactgtggg

SEQ ID NO: 404139 - DNA, 201 bp, Homo sapiens
cttacaacaggccttgagtgagacccagcactgtggtggcttcacgtctgacccaatgcagtcatagtggtggtgacacaggggtgcttgtgtcactccamccccagctttagctatctcagaacaaacacacacagagttactctgtatgtatgggagaaagtaagggaagagaacaagagtctctgcctgataatccag

SEQ ID NO: 404140 - DNA, 201 bp, Homo sapiens
cccaaagcctgtgcattggaattcccctgtgctttctataaaaatgttactgatgcaggatgtttcaagaccagtgccctgagttcaaacacttgggaaasaggatgtttcccaagttcccccaagcctaggatttcaggtctgtctctttctctctttcctgtctccctcactctccctctttcttgtctcttattccat

SEQ ID NO: 404141 - DNA, 201 bp, Homo sapiens
actccatgtggcttggggtggtggtgactatgaggtcaggctcctctgtctttggacaaggaagagaaaagcaggaaggatttgttgtgtggagtgagtgycagctcagctgcaatccaacaggacaccaggtacatttctaaggtttttgactctagtccttgattcctgcacagcacttctggaaccacacggagactg

SEQ ID NO: 404142 - DNA, 201 bp, Homo sapiens
atggattgtttctgattcttaacagataagaaatcagctgaacaaatggagcagaagtgcacacaggatctgtcgttggtgaccaactgcatggagcatgygctgattgcctgccacccccgtactcgctactcagctggctgggatgccaagcttctctacctccccatgagctacatgcccaccttcctggtggatgcc

SEQ ID NO: 404143 - DNA, 201 bp, Homo sapiens; identical to SEQ ID NO: 89616

SEQ ID NO: 404144 - DNA, 201 bp, Homo sapiens
tgggggatgctgggcaggtggtcataggtgggctccttgagggcctgtgggccctggacaggagttgtggcttatgctgttggcagtggaaccccctccaraaaagggatttgctcaggggagctccttggtccagtcagcttctagactcccactgactgcaggaagcccagtggttgtaagtgtggggagccagactga

SEQ ID NO: 404145 - DNA, 201 bp, Homo sapiens
gtttaacaaagcacatcttgcacggcccttaatccatttaaccctgagtggacacagcacatgtttcagagagcacagggttgggggtaaggtcacagatyaacaggataagaatttttcttagtacagaacaaaatgaaaagtctcccatgtctacctctttctacacagacatggcaaccatccgatttctcaatcttt

SEQ ID NO: 404146 - DNA, 201 bp, Homo sapiens
  misc_feature (1)...(201): n = A,T,C or G
attaaatattccaagctttctattttacccattgtcctcatatgttgtgatatcatagttttacttttattgtttgtgttttaccttccaagacccccgangtttttcccctctgcttctctgtcttgcaggagggaactctcctactttggggtgaaggtggctatgattgaacctggctatttcaagactgctgtgacc

SEQ ID NO: 404147 - DNA, 201 bp, Homo sapiens
ggttttgtggcccaccagctgctgaatgctcagcccccacccctgtgatactgtggtgtttgttataccctcctccccatcccacacctgtcagtctgccytcactttattgggatgtgatttgcaccctaactctgtccacctgcacaggcacaacacagtgatgctctctcatcttcccactgtcccaggactctgggg

SEQ ID NO: 404148 - DNA, 201 bp, Homo sapiens
ggcttcgggaaactgctggccagacagctggatgcacgaggcttgcgggtgctggctgcatgtctgacggagaaaggagccgagcagctgaggggccagasttcagacaggctggagacggtgaccctggatgttaccaagacagagagcgttgctgcagccgcccagtgggtgaaggagtgcgtgagagacaaaggtaac

SEQ ID NO: 404149 - DNA, 201 bp, Homo sapiens
  misc_feature (1)...(201): n = A,T,C or G
ttatgaccccttgattgctggaaattaaatattccaagctttctattttacccattgtcctcatatgttgtgatatcatagttttacttttattgtttgtnttttaccttccaagacccccgaagtttttcccctctgcttctctgtcttgcaggagggaactctcctactttggggtgaaggtggctatgattgaacctg

SEQ ID NO: 404150 - DNA, 201 bp, Homo sapiens
gaggctactcactggtatcaggtaagccagcaggtgatgggtgagggcctctgtagcttcaggcagaggcccaggactcaccactccccatttcttacccrccttaggtggtactgacaaccacctggtgctggtggacctgcggcccaagggcctggatggagctcgggctgagcgggtgctagagcttgtatccatcac

SEQ ID NO: 404151 - DNA, 201 bp, Homo sapiens
tgtttcctcaccctctctctctagccaagctccaggatttcaaatccttcctgcttaaggactcagaaacaagtcagcgtctggccaacctcaggcaacgkgtggagcagtttgccagggccttccccatgcctggttttgatgagcattgaaggcacctgggaaatgaggcccacagactcaaagttactctccttcccc

SEQ ID NO: 404152 - DNA, 201 bp, Homo sapiens
ggcacgctccctgcccgctgcgggactgcgtgattccatttggtctcctagcggctgtggaaagggactggcgtcgatagggctctggcaggatggcgggrgacaaccccagcgtctctctctcctctttcttcgtgcacaggccgtcagtgcccagataccagagtccggaaggccgcagtacctggggctgcgccccgc

SEQ ID NO: 404153 - DNA, 201 bp, Homo sapiens
atccatcactgccaacaagaacacctgtcctggagaccgaagtgccatcacaccgggcggcctgcggcttggtgagacctggggtttgaggagggaagggrctcccatgctggatgactgccaggtgaccttgggctatgctcatccctccccttgtgcctcgttccaggggccccagccttaacttctcgacagttccgt

SEQ ID NO: 404154 - DNA, 201 bp, Homo sapiens
ctgctgcttcctctcggtgatattttttctacgccaaaacagacgggaaagggaacaaaataaagtgaaatccaatacacgcctgtgtgagacctttgtarggaatggggaggtggcgtggggcttctatgtggtagagacctggccaaggccttctccctcagcggctcttggggaaaccaagacaaagactgacagagc

SEQ ID NO: 404155 - DNA, 201 bp, Homo sapiens
ctggacctgagaggaattcattcccacctgcagcccttaagactcctgcccagtctgtgagagttctccttctcttgcccatggtggccatgccctggcaggggatttgtggatgggattgaggggctgattccctctaccactggaatccagtgtaccaagcccacgtgagctgtgcccttggggcccaggtccgccagc

SEQ ID NO: 404156 - DNA, 201 bp, Homo sapiens
tcttctaccggaaaggggtgaaggctgtggaccccaagactggccgggagatcccttacacatttgaggaccgaatcaactttgccgtgttcccatccctkcaggggggcccccacaatcatgccattgctgcagtagctgtggccctaaagcaggttggggatcctgtctttgtagggtgtgggggggcaatggcctgga

SEQ ID NO: 404157 - DNA, 201 bp, Homo sapiens
acgctgggtaatcagtggaaaggaagctcttctcctaccttagttcctagtcacaaactctggggttctcttggcttttccatgcacgtggattggggccycagggagcggacgtgtaactggggaatccccaagacccctgggcgcgcgtggagttaactgcgagcctgtcctcattctggcgatcagacgccccagggc

SEQ ID NO: 404158 - DNA, 201 bp, Homo sapiens
gtctcagccagttccctacattcagccttgagccacttgccttaatacctcacttagcatgtgagtttcctgttgctattgtaacaaataacacaactgtrgggtctgaagacaatacaaacatattatcttgtagttgtggaggagtaatgtctaaaataggcctcactgatctaaaatcaaagtcagcagagctgtgtt

SEQ ID NO: 404159 - DNA, 201 bp, Homo sapiens
atagtcttataaatgtgtgtttgtataagggaccacctggagggtgtggcggacctgcctgaaatgttagatcagggatctgatggaaagggaacttggayggaattcggaagaagccatcttttatgaagaataacagagcctttttcccctctctgccctcaaacagatactgacaagttaaaaaacataatgcaggtg

SEQ ID NO: 404160 - DNA, 201 bp, Homo sapiens
aacagaacaactcctcacatttgtgagggccccacgaggtgcttgtctatgccttagattatttgagtgacagtggccttatgactgaggtaggggcagtwttactatttttaaataatattttctcctgcatgtttttgtttaaatgtgggaactctaggaagtacatagaagaaaaaaaaaagggctgttttcccatca

SEQ ID NO: 404161 - DNA, 201 bp, Homo sapiens
  misc_feature (1)...(201): n = A,T,C or G
gtacatccttagtacctagaataatgtctggcacctagtaaggtactgaataaatagatttgagtgagctaattaattaataattcagcaagagtgagccnctgtcttcagcaggctgtctcagccagttccctacattcagccttgagccacttgccttaatacctcacttagcatgtgagtttcctgttgctattgtaa

SEQ ID NO: 404162 - DNA, 201 bp, Homo sapiens
tgtggaggagtaatgtctaaaataggcctcactgatctaaaatcaaagtcagcagagctgtgttccttctagaggctgtagaggagaatccgtctcatcgmcttttccagcttccagaggcagctggcatcccctggctcctggcctgctacctccatcttcaaggcccgcaaggttgggcccagtctttttcacactttt

SEQ ID NO: 404163 - DNA, 201 bp, Homo sapiens
tggggaagggatctaaacattaattcattggtatgaaaatgaaactcttatcccaaagctgatagctgaaatgctgtcacctaacacctcgattgtagctrgtacagagcgccagctagccggcagactttatgtgaatcaggaaaaagtgtcccttcagggaaaacgagttagtaaaagacacaccttccttttatgtta

SEQ ID NO: 404164 - DNA, 201 bp, Homo sapiens
ttgctaatgggagggacctggtgggaggcaaggctttggcctagattctctattgacttcttcccgctggttgtgcctaatgcaaattgcccagagactgytgggccagttttggaaagggctgagtccctaaggaagggcttatttgcacaaaggcaatgccagggccaagtacaggggtgagagaagcatctctaggtt

SEQ ID NO: 404165 - DNA, 201 bp, Homo sapiens
ccaataacaaaaacattttcccaggtgcccagctccaaagcctatgtccttcctcactgtgaaggagagtgacaaagctggatgggtccttccgtctcccrtcctactccatgcctagcagggtgcccagcactgaatggcagctaatatctatttgagaaaacaatgaaagcaagtgcctcataccattccccatgtctg

SEQ ID NO: 404166 - DNA, 201 bp, Homo sapiens
aatttttgtatttttagtagagacaaggtgtcaccatgttggccaggctggtctcaaactcctgacctcaggtgattggcctggcttggcatcccaaagtrctgggattacaggcctgagccactatgcccaaactttaggaaagatagtattatctccattttatagacaataaaagtttaagctcaaagtcatataact

SEQ ID NO: 404167 - DNA, 201 bp, Homo sapiens
tctaagaaacactgggaactggggtgggtagggggatgggagaggaagttctttcatgctttctcattgctcctgaatggagaaaggcagggagactgggyaggggcatggcttgggtggggaccccagccctagagggaggggtggactaggatttatgtttgtgttgagacctgccctcaggagacagtgggatgcgcc

SEQ ID NO: 404168 - DNA, 201 bp, Homo sapiens
gggtggactaggatttatgtttgtgttgagacctgccctcaggagacagtgggatgcgcctgcagagtatcttggggctgctgaggctggggctgtggtgsgaatcaccaggcagtaggacttggggaatccttgcatgaaggagctggaaggggtccttgaggagtgtttagaggggtttacagtagaaccccaatatgt

SEQ ID NO: 404169 - DNA, 201 bp, Homo sapiens
aacctgctggccaaacagctggttgatcggggcatgcaggtgctggctgcttgcttcactgaggagggatcccagaaacttcagcgggatacctcctatcrgctgcagaccaccctactggatgtcaccaagagcgaaagcatcaaggcggcggcccagtgggtgagggacaaagtgggcgaacaaggtggggcgaattac

SEQ ID NO: 404170 - DNA, 201 bp, Homo sapiens
tgtgaatcataggtgtttttggagggtagaggtgggacacggcagctgtttaccctgctgccccaaaactttctgccacgaaagttgtctgctggatgtcrtacgtcaacagagcacaaagccaagtcagccatttttttcacttaatacatacacactttattgcatttttgttttttgtttttgttttgaatcagtaat

SEQ ID NO: 404171 - DNA, 201 bp, Homo sapiens
atgtcccaagcctgtgtggggctggagagctggagcggacacagcagtatgcctgcccttcactgcctgtagcttatggcccagtaggggagacaaacatwaatcaaaacacatgtgtttatggtagatgtggataagtgctacagaggagaaacagggttgtgaaagaagaatggagcaggaagttgcggtcccaattca

SEQ ID NO: 404172 - DNA, 201 bp, Homo sapiens
ttattgggattcagagatgagacactctccaggaaactagcagggaagatgtgaaagcaaatacaccaccacatgaagaatcttgctataatggacatgcrtacaaaacaaagcagcaatgcagacttcattctgctgtcacagaagccttacagaggtgacagttaatgccttagtgagttttgaaggatgaataggagt

SEQ ID NO: 404173 - DNA, 201 bp, Homo sapiens
aagaatcttgctataatggacatgcatacaaaacaaagcagcaatgcagacttcattctgctgtcacagaagccttacagaggtgacagttaatgccttaktgagttttgaaggatgaataggagtacaccaaaagggaaagagatggcggatgtttcacacaagaggaagggtgtgagcaacgttttagtgacctgacat

SEQ ID NO: 404174 - DNA, 201 bp, Homo sapiens
catacaaaacaaagcagcaatgcagacttcattctgctgtcacagaagccttacagaggtgacagttaatgccttagtgagttttgaaggatgaataggastacaccaaaagggaaagagatggcggatgtttcacacaagaggaagggtgtgagcaacgttttagtgacctgacatagcattgtatgcttttggaggcag

SEQ ID NO: 404175 - DNA, 201 bp, Homo sapiens
agtgtggctcttgttgagatcccaaaatatagtttggcttttcccctgcatcagttttctttccaggaaacagaaaatggagtttctcggagtctggggtkaaggggactgaagtgatgctgccccattctcaccaaccacccacaagggtcctggccccaagcgggtgaattccttgcctgcctggaccattctcaaagt

SEQ ID NO: 404176 - DNA, 201 bp, Homo sapiens
gatccgctgagtcccgctgcctttgaccctctgtgcagccagcgcgcggattgggatcctggtgcgggttagcgcttggagtccagtcccagcgggatccygggccgtgcctaatctgcggctaatgactcctgcggtccctcaccccgctgggccagcgtggcctgagtcctcgtggtgggaaagtgtggggagcgagga

SEQ ID NO: 404177 - DNA, 201 bp, Homo sapiens
ggggaaggagagtaactttgagtctgtgggcctcatttcccaggtgccttcaatgctcatcaaaaccaggcatggggaaggccctggcaaactgctccacmcgttgcctgaggttggccagacgctgacttgtttctgagtccttaagcaggaaggatttgaaatcctggagcttggctagagagagagggtgaggaaaca

SEQ ID NO: 404178 - DNA, 201 bp, Homo sapiens
gcatctgaggatgcccaaccccagaagaggaacccgcctgaaccctgggtgccgattgtggctggagagataggagcttccgcgtcccctctccgccctcsggtcccatctcacaccagaagagtggaggctgcaggacccactgtcttggaggcgggagtggcggagtgacgggctgggcgtggacggacactccaggca

SEQ ID NO: 404179 - DNA, 201 bp, Homo sapiens
acggaactgtcgagaagttaaggctggggcccctggaacgaggcacaaggggagggatgagcatagcccaaggtcacctggcagtcatccagcatgggagycccttccctcctcaaaccccaggtctcaccaagccgcaggccgcccggtgtgatggcacttcggtctccaggacaggtgttcttgttggcagtgatggat

SEQ ID NO: 404180 - DNA, 201 bp, Homo sapiens
cacctgagatggttgaggacaggagggaatcgcttgcatttctgtgtctgtgtcttgttctctttcagcatctgtccgatctttcctgtttcccccactccattcccttcctatccatcccacagccagaggaagtggatggcctccttgggcggccccacctttaccctaccccaggtaggcagagcaagcaagtctctc

SEQ ID NO: 404181 - DNA, 201 bp, Homo sapiens
taatcttctagatcgtggtgcagaaaggagacgaagcgggcggctacgtcaaggtctacaccggccgcaaggtggggctgtttcccaccgactttctagargaaatttaggcgtgcgggcgcctgcaagcgggagacacccacaccccattctgggcgggcccagtggagtttggggaggggggcgaaagcaacgggactg

SEQ ID NO: 404182 - DNA, 201 bp, Homo sapiens
gccctggggcgtctgatcgccagaatgaggacaggctcgcagttaactccacgcgcgcccaggggtcttggggattccccagttacacgtccgctccctgrggccccaatccacgtgcatggaaaagccaagagaaccccagagtttgtgactaggaactaaggtaggagaagagcttcctttccactgattacccagcgt

SEQ ID NO: 404183 - DNA, 201 bp, Homo sapiens
atcgtggtgcagaaaggagacgaagcgggcggctacgtcaaggtctacaccggccgcaaggtggggctgtttcccaccgactttctagaggaaatttaggygtgcgggcgcctgcaagcgggagacacccacaccccattctgggcgggcccagtggagtttggggaggggggcgaaagcaacgggactgctgggagagga

SEQ ID NO: 404184 - DNA, 201 bp, Homo sapiens
gtgatggatacaagctctagcacccgctcagcccgagctccatccaggcccttgggccgcaggtccaccagcaccaggtggttgtcagtaccacctaaggygggtaagaaatggggagtggtgagtcctgggcctctgcctgaagctacagaggccctcacccatcacctgctggcttacctgataccagtgagtagcctc

SEQ ID NO: 404185 - DNA, 201 bp, Homo sapiens
gtcctccgagaaccgagctagctaggccgggggcctaaccccacccgcgcggcccctgccctaaccctttccgacaggtaccgagtgagaacggagggcaracagctaaccggctctcgcggagacacccctgcggagcaccgtatgcaaatgttattatttgcatatgcaaatatgcaaatacgccggccctggtcaggg

SEQ ID NO: 404186 - DNA, 201 bp, Homo sapiens; identical to SEQ ID NO: 89629

SEQ ID NO: 404187 - DNA, 201 bp, Homo sapiens; identical to SEQ ID NO: 89630

SEQ ID NO: 404188 - DNA, 201 bp, Homo sapiens
ccccggctcccctgctgtcctctcctaccttttcctttgattcctctcctacttctgatcctttaatcttctagatcgtggtgcagaaaggagacgaagcsggcggctacgtcaaggtctacaccggccgcaaggtggggctgtttcccaccgactttctagaggaaatttaggcgtgcgggcgcctgcaagcgggagaca

SEQ ID NO: 404189 - DNA, 201 bp, Homo sapiens
tccaggccattgcccccccacaccctacaaagacaggatccccaacctgctttagggccacagctactgcagcaatggcatgattgtgggggcccccctgmagggatgggaacacggcaaagttgattcggtcctcaaatgtgtaagggatctcccggccagtcttggggtccacagccttcacccctttccggtagaaga

SEQ ID NO: 404190 - DNA, 201 bp, Homo sapiens
gagtgtactggtgtgagctcggctcactgcaacctccgcctgccaggttcaagccattctcctgcctcagcttcctaagtagctgggattacgggtgcgcrtcaccatgcccggctaatttttgtatttttagtagagatgggggtttcaccatgttggccaggctggtctcgaactcctgacctatctttttgcttttaa

SEQ ID NO: 404191 - DNA, 201 bp, Homo sapiens
ggacccagctccgaggctgatgacgtctccccctctggctcggcggcgcctggcctggcagggcgggtgacgtcaccgccccgtcacgtgatcaccattcaacaaacaccccccctccccctgcgcgcgggtctggcccgccccgtcccccagaggccgcatataaacgcgctccccgggccaggctcgctgcgaaggaca

SEQ ID NO: 404192 - DNA, 201 bp, Homo sapiens
tgagtggattatttctcctctcaaaccctcagttttgacatctctaaaaagggagttggaccctcgtgtggggtggggcggaggagtggcgagcacccccsccccgctctgctggcctctgcgcgcaaagcagcctctccttccgccggggccgccgggcctcatggaagccccggagggcggcggaggggggcctgcagc

SEQ ID NO: 404193 - DNA, 201 bp, Homo sapiens
ggagaatatagaaagtgacctgcagcattatttataacggaggggacacagggatatgatttattccacagttaagtggtctgacggagccgagtctccarttgtaggctctacggaaatgaacttgctggtcctgcccaggcaaatgggcttagttccctatttatttatcctccagcaacagaactgagttcactcggt

SEQ ID NO: 404194 - DNA, 201 bp, Homo sapiens; identical to SEQ ID NO: 89637

SEQ ID NO: 404195 - DNA, 201 bp, Homo sapiens
ctagggccttcgctttctgcttggcaggcactggctgaaccaaaattaatctccagtgtgatccacgcagtggaaaaatacagcggctgcctaagggagcygccagtgaaaacaagtcactcacttctcccggctcaagccactctgcctcatgccagccctgagagccaggaatgatgacccctgatccccatgtaccgg

SEQ ID NO: 404196 - DNA, 201 bp, Homo sapiens
cactggccttggctttgagcaagcttgatgaatgttggatatttctggatttcagggtggcccggtggaaatcctgccctttctgtacctgggcagtgcgyatcacgcttcccgcaaggacatgctggatgccttgggcataactgccttgatcaacgtctcagccaattgtcccaaccattttgagggtcactaccagta

SEQ ID NO: 404197 - DNA, 201 bp, Homo sapiens
ctgagtttaaatcctgtgccatcctttgcacagtgcccacgttgcctccatgaacagtatccatgtgatggcatgtggtgatgttgaccatttctagacargacacacatgacctttctcagatacactgtacctgggcttggggtggttctcctgaactctcaagtaaccagccgctcctttggttttccagactccatc

SEQ ID NO: 404198 - DNA, 201 bp, Homo sapiens
aatgggcttagttccctatttatttatcctccagcaacagaactgagttcactcggtatctgaaattgacttttccagcagaaagtttttgtgggtatggscactggccttggctttgagcaagcttgatgaatgttggatatttctggatttcagggtggcccggtggaaatcctgccctttctgtacctgggcagtgcg

SEQ ID NO: 404199 - DNA, 201 bp, Homo sapiens; identical to SEQ ID NO: 89635

SEQ ID NO: 404200 - DNA, 201 bp, Homo sapiens; identical to SEQ ID NO: 89634

SEQ ID NO: 404201 - DNA, 201 bp, Homo sapiens
gaagaagtaagaactggcaaaggcatggaagagtagtgccagggagaatatagaaagtgacctgcagcattatttataacggaggggacacagggatatgrtttattccacagttaagtggtctgacggagccgagtctccaattgtaggctctacggaaatgaacttgctggtcctgcccaggcaaatgggcttagttcc

SEQ ID NO: 404202 - DNA, 201 bp, Homo sapiens
tttctggatttcagggtggcccggtggaaatcctgccctttctgtacctgggcagtgcgtatcacgcttcccgcaaggacatgctggatgccttgggcatmactgccttgatcaacgtctcagccaattgtcccaaccattttgagggtcactaccagtacaagagcatccctgtggaggacaaccacaaggcagacatca

SEQ ID NO: 404203 - DNA, 201 bp, Homo sapiens; identical to SEQ ID NO: 89638

SEQ ID NO: 404204 - DNA, 201 bp, Homo sapiens
tggcttcgagtgatccttatcctcccaaagtgcgggattataggcatgagccaccgcacccaacctgtttttcacttttaaccctgaagtcggctgggcgmggtggctcacgtctgtaatcccagcactttgggaggccgaggcgggcacatcacgaggtcaggagatggagaccatcctggctaacacggtgaaaaccca

SEQ ID NO: 404205 - DNA, 201 bp, Homo sapiens
aaatttgatgtcaaagacatgaagagtagaatgatagatatgagagactgggaaggaaggaaagttgtgggaataaagagtagcacaatgggtacaaacatgtggggtacccgtaaaatgggcacaaacattaaacagaggaaataagtttcttctatgtttgattgcaaaatagggtgactatactcagcaacagtactt

SEQ ID NO: 404206 - DNA, 201 bp, Homo sapiens
atatgtgggagctaaaaaatttgatgtcaaagacatgaagagtagaatgatagatatgagagactgggaaggaaggaaagttgtgggaataaagagtagcacaatgggtacaaacatgtggggtacccgtaaaatgggcacaaacattaaacagaggaaataagtttcttctatgtttgattgcaaaatagggtgactata

SEQ ID NO: 404207 - DNA, 201 bp, Homo sapiens
tatatgtgggagctaaaaaatttgatgtcaaagacatgaagagtagaatgatagatatgagagactgggaaggaaggaaagttgtgggaataaagagtagcacaatgggtacaaacatgtggggtacccgtaaaatgggcacaaacattaaacagaggaaataagtttcttctatgtttgattgcaaaatagggtgactat

SEQ ID NO: 404208 - DNA, 201 bp, Homo sapiens
gtgcagtggtgtgatcatagctcactgctgccttgaattcctgggctcccgagatcgacctgtcttagcctccctaacagctgcaggcacgcagcaccacrtgtgacttttgttttgttttgtggaaatgaggtctcaccatcttgcctaagttggtctcaaactcctgggctcaagtgatcctcccactttggccttcca

SEQ ID NO: 404209 - DNA, 201 bp, Homo sapiens
ggattacaggcgtgagccactgcgcctggcctctttttttttttttttttagatggagtcttgctctgttgcccaggctggagtgcagtggcacaatctgrgctcactgcaacctctgcctcccgggttcaggcgattctcctgcctcagcctcctgagtagctgggattacaggcacgtgccaccacgcctggccaattt

SEQ ID NO: 404210 - DNA, 201 bp, Homo sapiens
tgtagataactacactctttgtctaaaagggccaagttctcatcagaacactttgctgagccccgggtgaccgaatccctagctctggggtgagcgacatrcctccaaggagctgcagccaggagacagccaggcgaaggcggggctctgcctctgggctccccgaggggcggaggccggcgcgcgggtcacgtgggggcg

SEQ ID NO: 404211 - DNA, 201 bp, Homo sapiens
tctttctgaacatatttagctctccagtttttgccattcatttggtacattgccttgaattgttaaatacatgcttaactccttgtatttaatctcctacmatatatagccttacatatcatagtaaagaaggaattattttgcaaatttatctaaaatttttaaacagataaaaattaagcctaatatatcgtttaagaa

SEQ ID NO: 404212 - DNA, 201 bp, Homo sapiens
gcctgcgtccgtttgttttgtgttgctataaaggaatacatgagactgggtaatttatatttggctcgcagttctgcaggctgtataaacatgacacccgyatctgtttggcttctggtgaggcctcaggaggtttttacttatggcagaaagcaaaaggggggcagccgtgtcatatggccagagagggagcaagagaga

SEQ ID NO: 404213 - DNA, 201 bp, Homo sapiens
tgccgggtcaccagcggtcccatgagccacaacagataagaacggctaacctgcaggtcatgtccagctctgacttgactgtcaaggccttccctccccartctgccttccttctcactactttcccctccaggccctagtggtgtgggcccttgttcttgacctcattagctttacttggtttttcctgactctcactac

SEQ ID NO: 404214 - DNA, 201 bp, Homo sapiens
gatccgccccgcctcccagagtgctgagattacaggtgtgagccactgcacctggcccattggcaggtttttgtttgtttgtttgtttgagatggaatctygctctgtcacccagactggagtgcagtggcgcaatcttggctcattgcaacattgacctcccaggttcaagtgattctcctgcctcagcctcccgtatag

SEQ ID NO: 404215 - DNA, 201 bp, Homo sapiens
atgccttgactagatttaggttcaagttttttggctctttaggtgttactgtaaactgtgtattgcctcccatctggagaaacaggatgtctggctctggstctcctatgtttagtaaggctgatgtgatcactgggttcaggtaatgacagcctggttccttcatttgtaaagtcctttttatcaagtgattttatccat

SEQ ID NO: 404216 - DNA, 201 bp, Homo sapiens
aaaatttgatgtcaaagacatgaagagtagaatgatagatatgagagactgggaaggaaggaaagttgtgggaataaagagtagcacaatgggtacaaacrtgtggggtacccgtaaaatgggcacaaacattaaacagaggaaataagtttcttctatgtttgattgcaaaatagggtgactatactcagcaacagtact

SEQ ID NO: 404217 - DNA, 201 bp, Homo sapiens
gcgggtcacgtgggggcgcgggaggcggggcttgcacacgctggtcacgcggtcagctattgacacttcctggtgggatccgagtgaggcgacggggtagrggttggcgctcaggcggcgaccatggcgtatcacggcctcactgtgcctctcattgtgatgagcgtgttctggggcttcgtcggcttcttggtgccttgg

SEQ ID NO: 404218 - DNA, 201 bp, Homo sapiens
gcgaaggcggggctctgcctctgggctccccgaggggcggaggccggcgcgcgggtcacgtgggggcgcgggaggcggggcttgcacacgctggtcacgckgtcagctattgacacttcctggtgggatccgagtgaggcgacggggtaggggttggcgctcaggcggcgaccatggcgtatcacggcctcactgtgcctc

SEQ ID NO: 404219 - DNA, 201 bp, Homo sapiens
ggagagtcctgttcctttttttttcttttcttttcttttttttttttttttgagacagagtcttgctctgtcaccaggctggagtgcagtggctcaatctyggctcactgcaacgctccgcctcctgggttcaagcaagtcttctgcctcagcctctctagtagctgggactacaggtgcgtgccacactgcccagctaat

SEQ ID NO: 404220 - DNA, 201 bp, Homo sapiens
tctccagcaatctctccattggtgatcagaatcagccttttgatcctctgattggaaaagctctaaaaatgacagtaaatgaaagaaaaaagatccacccrgataatggcctagttggggcttggctagttccccgcttatagggaaatttaaagtcctgaaagcgtgaaaggagactgctgtagtgatatatccacttac

SEQ ID NO: 404221 - DNA, 201 bp, Homo sapiens
cagtctggagtgtggtggcacaatctcggctcactgaaacctccacctcccaggttcaagcgcttctcgtgcctcaacctcccgagtatctcggactacaggcgcacgtcaccatgcttgactaatttttgtatttttagtagaggcagggtttcaccatgttggccaggctgttaccagacttttggcctcaagtgatcc

SEQ ID NO: 404222 - DNA, 201 bp, Homo sapiens
tgtctctcaaatttctctttataggcttcttctccatatctttctcttttttcttggaaattttaatagaaaaactgggttgtttgccctttaatgttgcmgtctggtctttgttaattgcatactcatggtggtaacacgttcttctgtattttctatgaattggtagccatatctagaggctgatcagatttagcttca

SEQ ID NO: 404223 - DNA, 201 bp, Homo sapiens
ctgtaatcccagcactttgggaggccaaggcgggcggatcacgaggtcaggagatcgagaccatcctggctaacacggtgaaacccgtctctactaaaaayacaaaaaattagccgggcgtggtggcgggcgcctgtaatcccagctactcgggaggctgaggcaggagaatggcgtgaacccaggaggcagagcttgcag

SEQ ID NO: 404224 - DNA, 201 bp, Homo sapiens
tcccccagtctctttcatcccagcagagagatcccttagaattggaatcagattttgtcagtcctctcctcaaatccctccaaataactgcccttttcttwccttctttctttatttttctttctttccttctttcttctttctgtctgtctttctgtctttctttctctctctctcttttctttctttcttttttatttt

SEQ ID NO: 404225 - DNA, 201 bp, Homo sapiens
agcttcattcttcctgctttctgtaacatagagtgttacttgtgctcctcatttcagcagtgtccttggttactggaccttttgccacagccctgcaaaayctggccaaacttgcaccaagttgattatcctgtgtttcatattttgttgagcatctgtgcattttaaagtgttggcttggttaactttctcgatgttaac

SEQ ID NO: 404226 - DNA, 201 bp, Homo sapiens
tggaatcagattttgtcagtcctctcctcaaatccctccaaataactgcccttttctttccttctttctttatttttctttctttccttctttcttctttbtgtctgtctttctgtctttctttctctctctctcttttctttctttcttttttattttttttgagacggagtctcgctctgtcgcccaggctggagtgca

SEQ ID NO: 404227 - DNA, 201 bp, Homo sapiens
caagtagcagataattgagcaagagttacagagaacacagtggaaggatttggaagaaaggggaagatttggaagaaaagaaagggatgcaccattgttayatcaaatagtgagatgagtgcggagcagtctggggatggggtcataatagatggtcctgggaggtttcaaatgccggtaaaaattgagataaggaaagat

SEQ ID NO: 404228 - DNA, 201 bp, Homo sapiens
tggcctgatgttgttttcctagtacattgtaaatatagtctgtttagggcatgatggctcatgcctgtaatcccagcactttgggaggcgaggatgggcasaacgcttgagcccaggagttagagcccaacctgggcagcatggtgaaaccctgtctctacaaaaaaatataaaaattagccgaatgtgttggcgtgcacc

SEQ ID NO: 404229 - DNA, 201 bp, Homo sapiens
tctttctgtctttctttctctctctctcttttctttctttcttttttattttttttgagacggagtctcgctctgtcgcccaggctggagtgcagtggcgsgatctcggctcactgcaagctccgcctcccgggttcacgccattctcctgcctcagcctcccgagtagctgggactacaggcgcccgccaccacgcccgg

SEQ ID NO: 404230 - DNA, 201 bp, Homo sapiens; identical to SEQ ID NO: 89658

SEQ ID NO: 404231 - DNA, 201 bp, Homo sapiens
tctctttcatcccagcagagagatcccttagaattggaatcagattttgtcagtcctctcctcaaatccctccaaataactgcccttttctttccttcttyctttatttttctttctttccttctttcttctttctgtctgtctttctgtctttctttctctctctctcttttctttctttcttttttattttttttgaga

SEQ ID NO: 404232 - DNA, 201 bp, Homo sapiens
caggcgaaggcggggctctgcctctgggctccccgaggggcggaggccggcgcgcgggtcacgtgggggcgcgggaggcggggcttgcacacgctggtcasgcggtcagctattgacacttcctggtgggatccgagtgaggcgacggggtaggggttggcgctcaggcggcgaccatggcgtatcacggcctcactgtgc

SEQ ID NO: 404233 - DNA, 201 bp, Homo sapiens
gctggagtgcaatagcgcaatctcggctcactgcaacgtctgcctcccaagttcaagtgattcttctgcctcagcctcctgagcagctgggattacaggckagcaccaccacgcccagctaatttttttgtatttttagtagagatggggtttcatcatattggtcaggctggtctcgaactcctgacctcttgatccgcc

SEQ ID NO: 404234 - DNA, 201 bp, Homo sapiens
aaatcagaaagtgtgagtcctccatctttgtgcttcaagattgttttggttattctaaaatagccacatatattttaaaatcaactaggcagtttctacgaaaaaaaaaaaaacctgttgggattttaattgggattgtgttgaatatatcaatttgaagagaactgacatcttaatgatgttgagttttctaatctcact

SEQ ID NO: 404235 - DNA, 201 bp, Homo sapiens; identical to SEQ ID NO: 89660

SEQ ID NO: 404236 - DNA, 201 bp, Homo sapiens
cccaccaccatgcctggctaatttttgtattttcagtagagaaggggtttcaccatgttggacaggctggtcttgaactcctgacctcaggtgatccgtcygcctcggcctcccaaagtgctgagattacaggtgtgagctgccacacccggccccctgctataacatcttttgccacctatacttagaatgaagtgttgt

SEQ ID NO: 404237 - DNA, 201 bp, Homo sapiens; identical to SEQ ID NO: 89662

SEQ ID NO: 404238 - DNA, 201 bp, Homo sapiens; identical to SEQ ID NO: 89649

SEQ ID NO: 404239 - DNA, 201 bp, Homo sapiens; identical to SEQ ID NO: 89663

SEQ ID NO: 404240 - DNA, 201 bp, Homo sapiens; identical to SEQ ID NO: 89650

SEQ ID NO: 404241 - DNA, 201 bp, Homo sapiens
tttttggttacttttagtagagatgggttttcaccatgttggccaggctggtctcaaactcctgacctcaggtgatccacccgcctaggcctcccaaaatrctgggattataggcgtaagccaccattcccgtctgatttttcaattgtattattacctctgcatttgatgagctgaaatgcttctataaagataactttc

SEQ ID NO: 404242 - DNA, 201 bp, Homo sapiens
ataaataaataaataaaaataaaaatttattccaaaatcaaaccgcatgcctttgccatgtaacataatgcacatttacttttattttattttatttatttatttatttatttatttatttatttatttatttatttatttattttgagatggggtcttgctctgtcacccaggctggagtccaatggtgtgatctcagct

SEQ ID NO: 404243 - DNA, 201 bp, Homo sapiens
aataaataaataaataaaaataaaaatttattccaaaatcaaaccgcatgcctttgccatgtaacataatgcacatttacttttattttattttatttatttatttatttatttatttatttatttatttatttatttatttattttgagatggggtcttgctctgtcacccaggctggagtccaatggtgtgatctcagc

SEQ ID NO: 404244 - DNA, 201 bp, Homo sapiens
aaaaaaaaatagtgtatgagtttctgttttgccacaacctgaattttgccaatttaatttccccttaaatatatatattttatatatatgtttatacgtaygtgtgggtttttgtttttgtttttgttttaatagatgggggtctcactctgttacccaagctggtcttgatctcctggcctcaagcgatcctcccacctt

SEQ ID NO: 404245 - DNA, 201 bp, Homo sapiens
agaataaataaataaataaaaataaaaatttattccaaaatcaaaccgcatgcctttgccatgtaacataatgcacatttacttttattttattttatttatttatttatttatttatttatttatttatttatttatttatttattttgagatggggtcttgctctgtcacccaggctggagtccaatggtgtgatctca

SEQ ID NO: 404246 - DNA, 201 bp, Homo sapiens
tcaactaggcagtttctacgaaaaaaaaaaaaacctgttgggattttaattgggattgtgttgaatatatcaatttgaagagaactgacatcttaatgatrttgagttttctaatctcactggtatctccatgtccagcctcatgggatctcttcatttatttaggttttcttttgtttctttcacaaatgttttgtaatt

SEQ ID NO: 404247 - DNA, 201 bp, Homo sapiens
aagaataaataaataaataaaaataaaaatttattccaaaatcaaaccgcatgcctttgccatgtaacataatgcacatttacttttattttattttatttatttatttatttatttatttatttatttatttatttatttatttattttgagatggggtcttgctctgtcacccaggctggagtccaatggtgtgatctc

SEQ ID NO: 404248 - DNA, 201 bp, Homo sapiens
tatagtggaaagatttattcactggccgagagtcaggaaacctcttatttaatctgttcgttgttttcattattttgttaaatggaagttagctttaaatrccttgactagatttaggttcaagttttttggctctttaggtgttactgtaaactgtgtattgcctcccatctggagaaacaggatgtctggctctggctc

SEQ ID NO: 404249 - DNA, 201 bp, Homo sapiens
attgtcactgcggcctttcctgttcagtttcagataaatttggattggacagctacactgtggcatcagcacatatctctttaaatacaaatgtttaattrcataaacttttcccaggtgtaccctgggcacaccgcagtttgctggatatttgagcaaatacagatccaatttcttggtgtgcaatccatgccagtttga

SEQ ID NO: 404250 - DNA, 201 bp, Homo sapiens
atttttgtagagatggagtcttactgtgttacccaggctggtcttgaactcctggcctcagtgatccttccatcttaagcctcccaaagtgctaggattayaggcatgagtcactacacccagccaggatttctttctagagtttagaaccagtgattctctttttttgaagagaactttctagcttcctgagacttcaga

SEQ ID NO: 404251 - DNA, 201 bp, Homo sapiens
acgcggtcagctattgacacttcctggtgggatccgagtgaggcgacggggtaggggttggcgctcaggcggcgaccatggcgtatcacggcctcactgtrcctctcattgtgatgagcgtgttctggggcttcgtcggcttcttggtgccttggttcatccctaagggtcctaaccgggggtaagtgcgtgaggcccgcc

SEQ ID NO: 404252 - DNA, 201 bp, Homo sapiens
atgtattgtgaagacacagttgtttcttggaaaacatgctgtgtcttagcacctgactaactgtaaatcttactggcatcatgatataggaaaataaataytatctaagaatcacgagacctaggttcttttaggcaaaaggatacttggcacgattatgttgtagggtggttttgtgagttttaagtaagatgctgtgtg

SEQ ID NO: 404253 - DNA, 201 bp, Homo sapiens
acgttcagagggaagagccatctcaacagaatcgcaccaaactatactttcaggatgaatttcttctttctgccatcttttggaataaatattttcctcchttctatggaaatctgggctcggtgtttgtaaagttcatttttataagcttttctatcgctacataatgcctttttaaaaaatgattttgtagtctaaact

SEQ ID NO: 404254 - DNA, 201 bp, Homo sapiens
gagggaagagccatctcaacagaatcgcaccaaactatactttcaggatgaatttcttctttctgccatcttttggaataaatattttcctcctttctatsgaaatctgggctcggtgtttgtaaagttcatttttataagcttttctatcgctacataatgcctttttaaaaaatgattttgtagtctaaacttaggttg

SEQ ID NO: 404255 - DNA, 201 bp, Homo sapiens
gccttcaaggcatgtatgccgggcaggggctttgcttaacatgtggagagggttctgaagttattgccaggccaaggctacaagatcaaagaggtaccacrttctggcctcgagccatagtaggcttcaccagaggttctcacacccactccgcgacctccggcctacgcctgaaatgtccctccagcttcctctactgag

SEQ ID NO: 404256 - DNA, 201 bp, Homo sapiens
agggaagagccatctcaacagaatcgcaccaaactatactttcaggatgaatttcttctttctgccatcttttggaataaatattttcctcctttctatgbaaatctgggctcggtgtttgtaaagttcatttttataagcttttctatcgctacataatgcctttttaaaaaatgattttgtagtctaaacttaggttga

SEQ ID NO: 404257 - DNA, 201 bp, Homo sapiens; identical to SEQ ID NO: 89655

SEQ ID NO: 404258 - DNA, 201 bp, Homo sapiens; identical to SEQ ID NO: 89657

SEQ ID NO: 404259 - DNA, 201 bp, Homo sapiens
tgtggtggctcacaccagtaatcccaacactttgggaggctgaggcaggagtatcacttgaggccaggagttcaagtacaacctggtcaacatattgagaccccccccccccgaccccacctctccaaaaaaaattaaaaatattagccaggcctggttgtgtacaccagtagtcctagctgctcaggaagctgaggcaga

SEQ ID NO: 404260 - DNA, 201 bp, Homo sapiens
ttgcaacattgacctcccaggttcaagtgattctcctgcctcagcctcccgtatagctgggactacaggcatgcaccaccatgcttggctaatttttgatttatttatttatttatttatttatttatttatttatttatttgagacggagtcttgctctgtcgcccagactggagtgcagtggtgcgatctccgctcacc

SEQ ID NO: 404261 - DNA, 201 bp, Homo sapiens
aatactatctaagaatcacgagacctaggttcttttaggcaaaaggatacttggcacgattatgttgtagggtggttttgtgagttttaagtaagatgctrtgtgtgaaaacttagagtaaagcacaataaaaatcaaagtaatattatcagtgatttttttttttttttttgagatagagtctcactctgtcgaccaggc

SEQ ID NO: 404262 - DNA, 201 bp, Homo sapiens
attgcaacattgacctcccaggttcaagtgattctcctgcctcagcctcccgtatagctgggactacaggcatgcaccaccatgcttggctaatttttgatttatttatttatttatttatttatttatttatttatttatttgagacggagtcttgctctgtcgcccagactggagtgcagtggtgcgatctccgctcac

SEQ ID NO: 404263 - DNA, 201 bp, Homo sapiens
agaggatattgataattaggcctctgccctgtgggagctgtttttctatgcattcctaaaatacttgagtgcttgtgaggtgtatagtactgaagtagggsaagactgggctccaaaggggtttgtgatctgttggggtgttgaattaagccatacttgggagaagttcaatagtgcaaggtgtcgtgtggttaaaaagta

SEQ ID NO: 404264 - DNA, 201 bp, Homo sapiens
acgattatgttgtagggtggttttgtgagttttaagtaagatgctgtgtgtgaaaacttagagtaaagcacaataaaaatcaaagtaatattatcagtgatttttttttttttttttgagatagagtctcactctgtcgaccaggctggagtgcagtggcgagatctcagctcactgcaacctccacctcccaggttcaag

SEQ ID NO: 404265 - DNA, 201 bp, Homo sapiens
cattgcaacattgacctcccaggttcaagtgattctcctgcctcagcctcccgtatagctgggactacaggcatgcaccaccatgcttggctaatttttgatttatttatttatttatttatttatttatttatttatttatttgagacggagtcttgctctgtcgcccagactggagtgcagtggtgcgatctccgctca

SEQ ID NO: 404266 - DNA, 201 bp, Homo sapiens
accaaagtgctcggattacaggtatgagccaccatgcctggcctgaaaattactgttccttaataacagtaacttttattattctacaatgtatataaaawactttttttttttttttttttttttttttggagacatggtctctgtcacccaggctggagtgcatcaccacaacctctgcctcctgggctcaagtgatcc

SEQ ID NO: 404267 - DNA, 201 bp, Homo sapiens
gagtccagcaggggccaggaagaagcgagcagcagggcagagtggagtccctggtggagggcaccagcgagagaagagaggatggaccatgcctggcacastgtggtgtggagttggagattctgctgggaactcctcggagctgggtgagccatgaggggtgtgtgggctggggggtccgatcggggaagcaaggtttct

SEQ ID NO: 404268 - DNA, 201 bp, Homo sapiens
cagaatcagcacgactccatctcggacatcgtgggcgtggccttcttcaacgtgctggagatcccctgctttgtgctggaggagcaggaggcgtgtgtggygtggtactggtggggcgggtacgtggccaccccctcatgtccctttccagacagagagggagcccaggctccaagcctggtgagggagagctatctgtct

SEQ ID NO: 404269 - DNA, 201 bp, Homo sapiens; identical to SEQ ID NO: 89668

SEQ ID NO: 404270 - DNA, 201 bp, Homo sapiens
cggacatcgtgggcgtggccttcttcaacgtgctggagatcccctgctttgtgctggaggagcaggaggcgtgtgtggcgtggtactggtggggcgggtaygtggccaccccctcatgtccctttccagacagagagggagcccaggctccaagcctggtgagggagagctatctgtctgtctgtcttccagggaatgatg

SEQ ID NO: 404271 - DNA, 201 bp, Homo sapiens
agagagggagcccaggctccaagcctggtgagggagagctatctgtctgtctgtcttccagggaatgatgtcccatcctgcatgtcctctcctgagggccygggatgcagaccctccttgggtgtcccccacaacccagcgggatgggggatgggactggcagagcattgatctccatggagacgaccctgggggcttctg

SEQ ID NO: 404272 - DNA, 201 bp, Homo sapiens; identical to SEQ ID NO: 89670

SEQ ID NO: 404273 - DNA, 201 bp, Homo sapiens; identical to SEQ ID NO: 89671
  misc_feature (1)...(201): n = A,T,C or G

SEQ ID NO: 404274 - DNA, 201 bp, Homo sapiens
gcaggtgactggatggtgctgagaaggcaggcagaatgggggcgtgggccctggcaagtgcactcctcagccaatcagcgtcctgcccggctggtggattyggttacaagcccaagatcaccccatactccagcctctttcctcctcctcccgcagctccattcattggtcccgccgcaccgggcctgctgggctccgctt

SEQ ID NO: 404275 - DNA, 201 bp, Homo sapiens
caagggcggcacactgagggcacaaagactcagaaggcatgaaatggagggaatctgtgtgtgtgactgagcacacgtgctggtgtttctcccggatggcrcaggcattggtggggcctccctggtggattgggctcccatcaacaccacatccacccctcaggtgcccgctgggtctgccgcagcttccgccgccacctg

SEQ ID NO: 404276 - DNA, 201 bp, Homo sapiens
tccttgtcttctctcccaccctcagtttagcagcctatgcctcctggaagcctttcttgactaccgtcagtactctgggtgtcccccatagcagtactacygtgtttggcggcttgggggtagggaggcactgccacaagggcggcacactgagggcacaaagactcagaaggcatgaaatggagggaatctgtgtgtgtg

SEQ ID NO: 404277 - DNA, 201 bp, Homo sapiens
ttgggctcccatcaacaccacatccacccctcaggtgcccgctgggtctgccgcagcttccgccgccacctggaccagtgtgagcaccagattgggccccrggaaatcgagttccagctgctcaacagcgcccaagagcccctcttccactgcaactgcacgcgccggtgaggcccctttgaaccctcgcggggtgggctg

SEQ ID NO: 404278 - DNA, 201 bp, Homo sapiens; identical to SEQ ID NO: 89675

SEQ ID NO: 404279 - DNA, 201 bp, Homo sapiens
tagcagtactaccgtgtttggcggcttgggggtagggaggcactgccacaagggcggcacactgagggcacaaagactcagaaggcatgaaatggagggartctgtgtgtgtgactgagcacacgtgctggtgtttctcccggatggcgcaggcattggtggggcctccctggtggattgggctcccatcaacaccacatc

SEQ ID NO: 404280 - DNA, 201 bp, Homo sapiens
tggtggcaggcatctgtagtcccggctacgcagaaggctgaggcaggagaatggtgtgaacccgggaggcggagcttgcagtgagccaagattgcgccacygcactccagcctgggcaacagagcgagacttcgtctcaaaacaaaacaaaacaaaacaaaacaaaagaatatgcaactctatggagacataaagtagatt

SEQ ID NO: 404281 - DNA, 201 bp, Homo sapiens; identical to SEQ ID NO: 89676

SEQ ID NO: 404282 - DNA, 201 bp, Homo sapiens; identical to SEQ ID NO: 89677

SEQ ID NO: 404283 - DNA, 201 bp, Homo sapiens
  misc_feature (1)...(201): n = A,T,C or G
tcaagctggcccctccactggactgtgtggaaggcaaaaagtaagtgatgtcagagccaggagggatggggggttttctcaaagggtgggttgcctatacncactttgaatgcttgggccaaggggtaggggaagggatcgggagacctctgagctcctatccatagcctcatccctctaccccctgctgccccaggtcca

SEQ ID NO: 404284 - DNA, 201 bp, Homo sapiens; identical to SEQ ID NO: 89678

SEQ ID NO: 404285 - DNA, 201 bp, Homo sapiens; identical to SEQ ID NO: 89680

SEQ ID NO: 404286 - DNA, 201 bp, Homo sapiens
gtaagtgatgtcagagccaggagggatggggggttttctcaaagggtgggttgcctatacccactttgaatgcttgggccaaggggtaggggaagggatcsggagacctctgagctcctatccatagcctcatccctctaccccctgctgccccaggtccagctctgcagttggcctctatgggtcgcatcttggctttgt

SEQ ID NO: 404287 - DNA, 201 bp, Homo sapiens; identical to SEQ ID NO: 89669

SEQ ID NO: 404288 - DNA, 201 bp, Homo sapiens
cagagcattgatctccatggagacgaccctgggggcttctggaagggggattcccagtcaccaatttccaccaactgccaccacccaggtgtaggatgtayggcacagtgcccctcgctcgcctgcagcccaggaccttctacaatgcctcctggagctcccgggccacctccccaactcccagctcccggagcccagccc

SEQ ID NO: 404289 - DNA, 201 bp, Homo sapiens
ccagggtggtagcttcagagccccagcccttccttcacccagccctggcagaggcccatggccccctgccagcctgatggaggtggatgtggcagccaccrctgtggtaagggtgagaagggtgggttctaagggactcctccaagctcctgaacccttttccttcccttcaaggagatgtgaaagccccagcctggtccc

SEQ ID NO: 404290 - DNA, 201 bp, Homo sapiens; identical to SEQ ID NO: 89679

SEQ ID NO: 404291 - DNA, 201 bp, Homo sapiens
gcaggatgcacataggtcatgccccgcctggcacacagcaaaatgtgtacttaactcactcctaatccacaatctcatttggtcttgaacttctggactcragcgatcctcccacctcggcctcctaaagtgctgggattacaggcgtgagccactgtgctctgctttcatctggattccgattctcaaagccagctcctt

SEQ ID NO: 404292 - DNA, 201 bp, Homo sapiens
ccccgcctggcacacagcaaaatgtgtacttaactcactcctaatccacaatctcatttggtcttgaacttctggactcaagcgatcctcccacctcggcytcctaaagtgctgggattacaggcgtgagccactgtgctctgctttcatctggattccgattctcaaagccagctccttcttaactttcccatttcatag

SEQ ID NO: 404293 - DNA, 201 bp, Homo sapiens
agaaaccttgcttccccgatcggaccccccagcccacacacccctcatggctcacccagctccgaggagttcccagcagaatctccaactccacaccacastgtgccaggcatggtccatcctctcttctctcgctggtgccctccaccagggactccactctgccctgctgctcgcttcttcctggcccctgctggactc

SEQ ID NO: 404294 - DNA, 201 bp, Homo sapiens
aagcgattctcccgtctcagcctcccaagtagctgggattacaggcacccgccgtcatgcccggctaatttttgtattttagtagagacagggtttcaccrtgttggccaggctggtcttgaactgctgacctcaggtgatccacccacctcagcctcccaaagtgctaagattacaggcatgagccactgtgcccggcgc

SEQ ID NO: 404295 - DNA, 201 bp, Homo sapiens
agacagatagctctccctcaccaggcttggagcctgggctccctctctgtctggaaagggacatgagggggtggccacgtacccgccccaccagtaccacrccacacacgcctcctgctcctccagcacaaagcaggggatctccagcacgttgaagaaggccacgcccacgatgtccgagatggagtcgtgctgattctg

SEQ ID NO: 404296 - DNA, 201 bp, Homo sapiens
acccgggaggtggaggttgcagtgagccgagattgcaccactgcactccagcctgggtgacagagcgagactccatctcagaaaaagaaaaaaaaaaaaaagagtctctgagtttacagatgagggccctggcattcagagaggctgaggaactcacccagcctgtcaacggcagaaccagagccaaatccaggatttgct

SEQ ID NO: 404297 - DNA, 201 bp, Homo sapiens
aagctatgttctcactcactccctaaggaggctgtgggcagaaggaaccctgggctgggaggcagcacagggcttggtatttatactagacctgttctgcytcagtttcccagtctgtaaagtggccctttgtctcaggcaatttgtgctaagacccaagagccttaagtgtgtgggatactagagggtctcccctgatgt

SEQ ID NO: 404298 - DNA, 201 bp, Homo sapiens
tccagagacagccgtctccaggggggcggttctccctgacagctgcccccagcctgccgccctgagccccagagcctgttatcaacctccttagtcatcayaccaggagctcaaatatagctccaactcactcccttttcagctggggtccgccccctacccccttctcctgacaagaccaggcttgggtctcagagcccc

SEQ ID NO: 404299 - DNA, 201 bp, Homo sapiens
aagcggagcccagcaggcccggtgcggcgggaccaatgaatggagctgcgggaggaggaggaaagaggctggagtatggggtgatcttgggcttgtaaccraatccaccagccgggcaggacgctgattggctgaggagtgcacttgccagggcccacgcccccattctgcctgccttctcagcaccatccagtcacctgc

SEQ ID NO: 404300 - DNA, 201 bp, Homo sapiens
caggtggcggcggaagctgcggcagacccagcgggcacctgaggggtggatgtggtgttgatgggagcccaatccaccagggaggccccaccaatgcctgygccatccgggagaaacaccagcacgtgtgctcagtcacacacacagattccctccatttcatgccttctgagtctttgtgccctcagtgtgccgcccttg

SEQ ID NO: 404301 - DNA, 201 bp, Homo sapiens
cagcccaccccgcgagggttcaaaggggcctcaccggcgcgtgcagttgcagtggaagaggggctcttgggcgctgttgagcagctggaactcgatttccyggggcccaatctggtgctcacactggtccaggtggcggcggaagctgcggcagacccagcgggcacctgaggggtggatgtggtgttgatgggagcccaa

SEQ ID NO: 404302 - DNA, 201 bp, Homo sapiens
gggagagcaaagatataaaaaatacaaagctgaactcttaagtagttactataatttatattgtatttaggattgaggttcctggttgccgacatcaaaaygggaaatcctagaatctcagaaccagacctgtgagaccaatttggcccactccctttttttctgtggcgggatctgaggctcctcatggggtaggcacat

SEQ ID NO: 404303 - DNA, 201 bp, Homo sapiens
cccccacccctccaggttgcaggaagtgaactccatgctcaacaagcgactcaaggacgccctcttcacggaccagtggagtgagctgttcatggatgcgmtagggcccttcaacttcgtgctggtaacgcacccctcaccccctggacagccagagaccctgctgaattcctggctccagctgtaccctggctcactgtg

SEQ ID NO: 404304 - DNA, 201 bp, Homo sapiens
acccctgggcctaccaggtaacattcagtgaggaatcactgcccaagggccatggagacttcatcctgggctactatagtcacaaccacagcatcctcatyggcatcactgaacccttccaggtaagtaggccagactgctgggctgggggtgcctaaagacttttgtcaaatgccacagcctctacattctgctccttga

SEQ ID NO: 404305 - DNA, 201 bp, Homo sapiens
actcagggaagaaaggggcctggaggagcagctgaacagcatggtggggtcactggcttgtccagatcttgatgccacactgggagactgctgggatcagmcattatagggtcacaacactgattccacaacactgatcccccaggtgggtttccgccattgcaaggactatgtggcttatgtctgggccaaacatgaaga

SEQ ID NO: 404306 - DNA, 201 bp, Homo sapiens; identical to SEQ ID NO: 89690

SEQ ID NO: 404307 - DNA, 201 bp, Homo sapiens
ctctgggaatgggtaagagaacagagagggctgtaaccaagggatttggatgtttagggggcggtggggaactgagggtttctgggcattatgaaggaagrgagaggtatttaacaagctgcacctgtaggtctgtatcttgacaatagaaaaagaaaagaaacaggctgtccccagtgtgcccagacctgggatgtcagg

SEQ ID NO: 404308 - DNA, 201 bp, Homo sapiens
tagacagacagcctccttcctgctgccagttgggacctgggccaggcagatgggtacactctcccctccccactccatggctgttccagcctcagcagccwgtttgaaggattcccagggggtagccaccttgcttcggcctcttccaggctgggaagtgggagcctgtgcctttaaattctcagcaggttgaaatggctg

SEQ ID NO: 404309 - DNA, 201 bp, Homo sapiens
agtggagtgagctgttcatggatgcgctagggcccttcaacttcgtgctggtaacgcacccctcaccccctggacagccagagaccctgctgaattcctgkctccagctgtaccctggctcactgtggggcccgctgggcctctgtggctgggtccgtgacatgggtgggtggaggagcagacctgaaggtgggcgcgagg

SEQ ID NO: 404310 - DNA, 201 bp, Homo sapiens
tcccctgcagggtctgagctcagggagcgggtggtgggaaatcctgggttgccctcctgaggcagaggagccctctgcagacacatttgcatgacatttgyctggcttccaaagggcactgatgcccctgtcccagccctagatggctgagccttaggactggtcccagaggcctggatctgcccatcattccctctagga

SEQ ID NO: 404311 - DNA, 201 bp, Homo sapiens
agggttaaaaggttagtctgactcttctgccagagtcagtctaaaaggttagtctgggctggggctagaattcagtctgtgactaaggctcagtcttagaraaggataagggcttgatctgggcccagaactaaggtctcaagttgggatcagcctaattcaggcttagatcagtatgtgactagagtcagggttcattct

SEQ ID NO: 404312 - DNA, 201 bp, Homo sapiens
agtgtcttaaaaataacaaagaaaagatataaaaattcacatatataataagaccagcaaaatcaaactccatgtaacattcattcatattcattcattcrttatttactgagtacttaactgtcttaccatatgccaagcattatgagagtgtgtagtgatggggagggagagcaaagatataaaaaatacaaagctgaa

SEQ ID NO: 404313 - DNA, 201 bp, Homo sapiens
ctcttctctcgctggtgccctccaccagggactccactctgccctgctgctcgcttcttcctggcccctgctggactctcctcaagcgctcggcatgcctsccactgactctgaagagtggccagtgctctctgcagctcgggtccgggggtgtggatgaaggagccccaggcagtctcatgagcacagagagcaccgtag

SEQ ID NO: 404314 - DNA, 201 bp, Homo sapiens
cagggtgttgcccaaactggggcaccctccaaggtaagacccctgagacccagtgccccccgctttcctgatccctggttccacacaccccccccacatayactgcaggctccctggtgctcctgactgaggggctggtactttcctctgctcagcgagcaggggctaggtgaagagagcaccctgggggctgaggggcag

SEQ ID NO: 404315 - DNA, 201 bp, Homo sapiens
tcctcatcggcatcactgaacccttccaggtaagtaggccagactgctgggctgggggtgcctaaagacttttgtcaaatgccacagcctctacattctgytccttgagttcagacaaataacctgacctcccaagatctgccaacgagagaggcagacctcgggaggtcaggcctcagtggctgggttggggagcagggc

SEQ ID NO: 404316 - DNA, 201 bp, Homo sapiens
catcattccctggaagacagacagacagatagctctccctcaccaggcttggagcctgggctccctctctgtctggaaagggacatgagggggtggccacrtacccgccccaccagtaccacgccacacacgcctcctgctcctccagcacaaagcaggggatctccagcacgttgaagaaggccacgcccacgatgtccg

SEQ ID NO: 404317 - DNA, 201 bp, Homo sapiens
tcagcagcatgagaagcccaagatctcccaagacagatctctgcccataatccatgcctcttatgtggcagcatgtaatttaggccagcagtcttcctcargtggggccaaggttggggattagtctgtgatggggtcaggctcagacagggtctaggtcagcccttagttgagtagtctgtagcctagggctagatacag

SEQ ID NO: 404318 - DNA, 201 bp, Homo sapiens
gagccaaatccaggatttgctagcttcaaagctatgttctcactcactccctaaggaggctgtgggcagaaggaaccctgggctgggaggcagcacagggsttggtatttatactagacctgttctgcctcagtttcccagtctgtaaagtggccctttgtctcaggcaatttgtgctaagacccaagagccttaagtgtg

SEQ ID NO: 404319 - DNA, 201 bp, Homo sapiens
  misc_feature (1)...(201): n = A,T,C or G
tcgggtccgggggtgtggatgaaggagccccaggcagtctcatgagcacagagagcaccgtaggctgcggtgagctccggctcatcctcccagctacatgnctgcagcctcctatgcgcatcccagcgggcatggatcagggccagtccctgagcatccttggccaggaagctcaggtaccccagtgggttgccagggacg

SEQ ID NO: 404320 - DNA, 201 bp, Homo sapiens
cctgcagcctcctatgcgcatcccagcgggcatggatcagggccagtccctgagcatccttggccaggaagctcaggtaccccagtgggttgccagggacsgccttggtcaagtggcaggaggtcctgtaccagcggagggcaggggagccccccagggccacccccaggaagcccagcatcccaaacagccctgcctgaa

SEQ ID NO: 404321 - DNA, 201 bp, Homo sapiens
tctcccctgatgtggccccctgcccctgccttgcctggacagtttgccttcagggacgacatgccactggtgcggctggaggtggcagatgagtgggtgcrgcccgagcaggcggtggtgaggtaccgcatggaaacagtgttcgcccgcagctcctgggactggatcggcttataccgggtgagaggggcagtggtggtc

SEQ ID NO: 404322 - DNA, 201 bp, Homo sapiens
acactgattccacaacactgatcccccaggtgggtttccgccattgcaaggactatgtggcttatgtctgggccaaacatgaagatgtggatgggaatacmtaccaggtacttaaaaggagtgggagagtcagggcaagtccttgttgcctttgggacctcagaactcaccttgggggctctcaggtggcctccctgaccc

SEQ ID NO: 404323 - DNA, 201 bp, Homo sapiens; identical to SEQ ID NO: 89692

SEQ ID NO: 404324 - DNA, 201 bp, Homo sapiens
acctgttctgcctcagtttcccagtctgtaaagtggccctttgtctcaggcaatttgtgctaagacccaagagccttaagtgtgtgggatactagagggtmtcccctgatgtggccccctgcccctgccttgcctggacagtttgccttcagggacgacatgccactggtgcggctggaggtggcagatgagtgggtgcgg

SEQ ID NO: 404325 - DNA, 201 bp, Homo sapiens
caccttgcttcggcctcttccaggctgggaagtgggagcctgtgcctttaaattctcagcaggttgaaatggctgatgacatcactggttcccgggagcgrtagagctggagccggagccaagggagtccaggctgccgggggctgcagacatggagggccagagcagcaggggcagcaggaggccagggacccgggctgg

SEQ ID NO: 404326 - DNA, 201 bp, Homo sapiens
aatccaggatttgctagcttcaaagctatgttctcactcactccctaaggaggctgtgggcagaaggaaccctgggctgggaggcagcacagggcttggtwtttatactagacctgttctgcctcagtttcccagtctgtaaagtggccctttgtctcaggcaatttgtgctaagacccaagagccttaagtgtgtgggat

SEQ ID NO: 404327 - DNA, 201 bp, Homo sapiens
ccctggactgctgaggccgggtgtcctagagcctctaacctacatggctctgctgcttgagatcccctcgcaccagaataaaaatagccactcacttcagmgcagctgacagcgggtgctgggctgcctaggaggagggggagccgaagagaaggaggagagaggcctgagctcagccccagctgtgtgaccttgggaaag

SEQ ID NO: 404328 - DNA, 201 bp, Homo sapiens
gtggagtgagctgttcatggatgcgctagggcccttcaacttcgtgctggtaacgcacccctcaccccctggacagccagagaccctgctgaattcctggytccagctgtaccctggctcactgtggggcccgctgggcctctgtggctgggtccgtgacatgggtgggtggaggagcagacctgaaggtgggcgcgaggg

SEQ ID NO: 404329 - DNA, 201 bp, Homo sapiens
atcctgtcttctggagacaggggacatcagagagaatagatggggaaggaggataggtctctacaggactccgtgactccccacccctcccacctgccggwcataaatgggatacctgcttgcctgtcctttcaggtaggggagaaagtggaggatgtaagagggcacaacctgggcacagagagatgtgacaccaggatc

SEQ ID NO: 404330 - DNA, 201 bp, Homo sapiens
ggaagaaaggggcctggaggagcagctgaacagcatggtggggtcactggcttgtccagatcttgatgccacactgggagactgctgggatcagacattayagggtcacaacactgattccacaacactgatcccccaggtgggtttccgccattgcaaggactatgtggcttatgtctgggccaaacatgaagatgtgga

SEQ ID NO: 404331 - DNA, 201 bp, Homo sapiens
gtaccgcatggaaacagtgttcgcccgcagctcctgggactggatcggcttataccgggtgagaggggcagtggtggtcagcgactcagggaagaaagggscctggaggagcagctgaacagcatggtggggtcactggcttgtccagatcttgatgccacactgggagactgctgggatcagacattatagggtcacaac

SEQ ID NO: 404332 - DNA, 201 bp, Homo sapiens
gaattgcttgaacccaggaggctgaggttgcagtgagccgagattgagccattgcactccagcctgggtgacagagtgagaccctgtctccaaaaaaaacytgcccatggcggaaaatccacttggtgttgcatccaacttgcgagtttttcttccaggttgtatgtaaactggaggtttatgagaggaatcgaagcccag

SEQ ID NO: 404333 - DNA, 201 bp, Homo sapiens
tttgaagattttcctgttattttttcacattgctttctagtttaattccattatggtcaggaacatacatcgtatgactctagtccctttcagtttgctamgatttctattataaatgttccattttgtacttgaaaagaatatgtacactgttgtggttgaatggagtattctataaatgtcagtttgatcccgttagtt

SEQ ID NO: 404334 - DNA, 201 bp, Homo sapiens
tgatttaggcgtcctggtcatttgtaggtgaaagttgttcacagtagaccaaggtttgagattttcttggtcactcagctgaggtgaagctgggctgctgyctgaacttgtaccctcaaggtgctgcccctttgaaggttagcccacactgataggtaatgccccaggaccccattcttggaagttaaaggactccagccc

SEQ ID NO: 404335 - DNA, 201 bp, Homo sapiens
cattacctccactggggggtgggcatggccaagcaatgaggattccaagcgcagctgctgtggccacacgccctgcccgaggcatcactctagtggcctcytctgggcctcagcttcccggcttcccacctgggcatcccccaagggttggtcccacctcctgtagtggcagttgcctgagggtggctgtgtcatctgtca

SEQ ID NO: 404336 - DNA, 201 bp, Homo sapiens
aaattataagactagggtagaagccagagggggctagaatgagaataaagctttagctaggaaccatctggaaagagggtctgggcaaggaacattttgtwtgtgagggaggtggtgaattagaggctccttggtttcagatactcccgtccaccatctttctagctgtccacaccttcccttttcccctcttaactgttg

SEQ ID NO: 404337 - DNA, 201 bp, Homo sapiens
gaatggaacattcttttttgttgttgttctttttgagacagggtcttgttctatcacccatgctggagtgcagtggtgcaatcatagctcactacagcctygagctcctgggctcaagtgatcctcccacctcagcctcctgagtagctgggactacaggcacacaccactgcacccagctaatttctgtatttttttgta

SEQ ID NO: 404338 - DNA, 201 bp, Homo sapiens
ttgctcttcaggagtcttaccgccagataatgaagatgcgaccgaaagacttgaaaaaacggctgatggtgaaattccgtggggaagaaggtttggattayggtggtgtggccaggtgagctgcttgttcattcaccttctctgctgtgtggatctcagtcttttcaagagaagtcatttgcccttctccagtgctcatca

SEQ ID NO: 404339 - DNA, 201 bp, Homo sapiens
ggagtgcggtggcgtgatctcagctcactgcaacctccgcctcccgggtacaagtgattctcctacctcagcctcccaagtagctgggattatggacatakgccaccatgcccagctaatttttgtattttttagtagagatggggtttcaccatgttggccaggctggtcttgaactcctgacctcaagtgatctgccca

SEQ ID NO: 404340 - DNA, 201 bp, Homo sapiens
acagctgctgctttgcttgggaatcgacttttcactgttgtgtgtcgggtacctaggaggcgcatcctgacgtgggtttatgcattttggaagtaattcayctttctgcacctcctcagctgatcataggcggcctggataaaatagacttgaacgactggaagtcgaacacgcggctgaagcactgtgtggccgacagca

SEQ ID NO: 404341 - DNA, 201 bp, Homo sapiens; identical to SEQ ID NO: 89693

SEQ ID NO: 404342 - DNA, 201 bp, Homo sapiens; identical to SEQ ID NO: 89696

SEQ ID NO: 404343 - DNA, 201 bp, Homo sapiens; identical to SEQ ID NO: 89697

SEQ ID NO: 404344 - DNA, 201 bp, Homo sapiens
tgttgattgggcacagtggctcccagcacgttgagagggcaaggcaggaggttcacttgaggccaggagtttgagagcagcctgggcaacctagcgagacmctgtctctaccaaaaagcaaaaacaaattacaaatctttgtattagaagcagaaaaacacaggggacatggagaactcatcaccaaccctgccccacccc

SEQ ID NO: 404345 - DNA, 201 bp, Homo sapiens
attttgtcacagttactcccagtgtttcatttcaagcagtatgagtcaaggatttggtgtttctcatactagaataaattggactttattcaggaaaaaamcccaacttgttaatttgaagtgcatgtctcaaagcctaaacattattttagttagtatttctaagtagataatacatacatatggtataaaagggtgatt

SEQ ID NO: 404346 - DNA, 201 bp, Homo sapiens
tctgtttgagtggcacatggtgaattttacaaaactaggcccttggaacactggacgttgttaaaggaaagcaaatcaatttatgtgacggtgtcccctargacactagccctaaggcgctggtcttgtgactcctccatggtgacaccatgcctgcctgctctcgtccctttcagaacggtgtatgaagactccgggcct

SEQ ID NO: 404347 - DNA, 201 bp, Homo sapiens; identical to SEQ ID NO: 89700

SEQ ID NO: 404348 - DNA, 201 bp, Homo sapiens; identical to SEQ ID NO: 89694

SEQ ID NO: 404349 - DNA, 201 bp, Homo sapiens
cacgcacacacacaaatacagtttcaaataatttcttttaattgatttcagtcttgttaatcttgtgcgtaaatttcaactgagctattaatgacacctaygactgactttcattatttgttagttttgaaaattcaaattaatatattacaacatagaaagtctatcaaatcttgaacatttagattgtaaagctttttg

SEQ ID NO: 404350 - DNA, 201 bp, Homo sapiens
gcgccacggctgtaactctgaagtacattaactagaatgttgtcttgtaaggttctacaggcgcggcagggccccggctgttcaccatccacctgatagaygcgaacacagacaaccttccgaaggcccatacctggtaagcaccgcggccaggaagtcacggcgtcctgggagccccagaggatgctgacgttcacgttt

SEQ ID NO: 404351 - DNA, 201 bp, Homo sapiens
agactgttaaaaatgagggatatttcaaccagtcaatgaatagacacagagcgaaattcagtgcaaagatagtgaagatggcctggcgccgtggctcacgyctgaatcccagcactttgggaggctgaggcagatcacgaggtcaggaggttgagaccatcctggctaacacggtgaaaccccgtctctactagaaataca

SEQ ID NO: 404352 - DNA, 201 bp, Homo sapiens
actttgggagaccgaggcgggcggatcacctgaggtcaggagctcgagaccagccatggccaacatggtgaaaccccatctccactaaaaatacaaaaatyagccaggtgtggtggtgggtgcctgtaatcctagctactggggagggtgaggcagaagaattgcttgaacccaggaggctgaggttgcagtgagccgaga

SEQ ID NO: 404353 - DNA, 201 bp, Homo sapiens
gtcccagagccaggcttccatactctgtcttgcagatggagaacgagcctggtcattacctccactggggggtgggcatggccaagcaatgaggattccargcgcagctgctgtggccacacgccctgcccgaggcatcactctagtggcctcttctgggcctcagcttcccggcttcccacctgggcatcccccaagggt

SEQ ID NO: 404354 - DNA, 201 bp, Homo sapiens
gacagaaataggaaactaggaaggaagtccctttttctctcctgtcatcttccatcctctctctaggacttcctgttggcagaagttaacagggagtcagycaacaggggtctggaaaacctaggtaagttggtgaaactctagccccagcgttatagagagagtatagcagagtaggcttggagaggaaagaacgtgggt

SEQ ID NO: 404355 - DNA, 201 bp, Homo sapiens
aacagaagtggaaatgatgtgtgcaaagaaaccacatggccagagagagaaaccaaggaagccagactcttctgaacaacccaccctcttgggaatgaatmcattccgtgagagtgagaactcactcccgtgggaaggcattaatctattcatgagagctccacccccatgacccagacacctcccagtaggcccataggc

SEQ ID NO: 404356 - DNA, 201 bp, Homo sapiens
aatagataagaatttcttagagcaactagtaagtacactaactgccaattgttttgaaatgtagacattctgaaaaatcaaaatgattgtgccgaatgtaytttaaaaggctaaaatattatagcatttcaaagtacatactcatatttataaggacttcctcactaggaagattcctgggttctacagaataaaattctt

SEQ ID NO: 404357 - DNA, 201 bp, Homo sapiens
ttcacgcctggcctttgccttcaagttctcttccccagaggcaatccactggtaacaattccttgtatattttagcaaagatacgctagataaaaatactygtacatatattctttctctacctccccatccccctttaagaagaagcacactatacactgttctttactttgcttttttcctcaatatatcctggagatc

SEQ ID NO: 404358 - DNA, 201 bp, Homo sapiens
aggaagattcctgggttctacagaataaaattcttggctacttgtcttatagctctgaacagacttattttcccagagagtatgtttattatgtaatagckagttgcctgaccccccaaaaagcttgttctatcatattaaaataaggcaaaatgattactttcagattaagaaatttggactctagatcttgtttatata

SEQ ID NO: 404359 - DNA, 201 bp, Homo sapiens
aaaggttaatttctttgtggggagggaaggtgatatatacacagtgtaatatttaaactgtacaagatggcttatttggaaaggaaatctcttcacgcctkgcctttgccttcaagttctcttccccagaggcaatccactggtaacaattccttgtatattttagcaaagatacgctagataaaaatactcgtacatata

SEQ ID NO: 404360 - DNA, 201 bp, Homo sapiens
ccaagtatttatagtcaatgtgtttgccatgaacttttttaagggattgtttttaattttagaagtgctttaaaaagcaatattggcatctggctctgtakaagtagaaaacatggtaacttcaatgtgatatatttgcttttttcccctcttaggtctttggggtaaaaaaaatccaaagtttactcaattttatttcta

SEQ ID NO: 404361 - DNA, 201 bp, Homo sapiens
agtgttttgtataactgtggcatgtcaaaaccaggaacttgttcatgggttctaacgatagggaaaaagtaagggcaaaataatgcaagcaaaaagacccrggaaactaactgtttacattggtgcaatccagagcttagtcagatttcactagctccgcgtgcactgcgtgtgggtggggtgtgtgtgtgtgtagcagtc

SEQ ID NO: 404362 - DNA, 201 bp, Homo sapiens
cctgttattagtggggaagccatttggtctttcaccagtaaatatgatgttaagcagtgggtttttcatagatgtcccttatctagttgagggagtttctrttccaaggatgttgaatatttttatcatgaatgttggaatctgtcaaaaaaaatgttctgcatcaatttggatgatattgtggttttccccctttattcg

SEQ ID NO: 404363 - DNA, 201 bp, Homo sapiens
ggatggagtgcagtggcacgatctcggctcactgcaacctctgcctcctgggttcaagcaattctcatgcctcagcctcctgagtagctgggactacaggygcacgccaccacacttggctaatttttgtatttttagtagagatggggttttgccatgttggccaggctagtctggaactcctggcctcaggtgatctgc

SEQ ID NO: 404364 - DNA, 201 bp, Homo sapiens
gccatgttgcccaggctggccttgaactcctgggctcaagtgatctgcccaacttcggcccccacaaagtgctgggactacaggcgtgagccactgcacccagcaggggttgaactttttaagccaattgcggaaacatgccctatcggccccagccccacctaactcttgctgaattctcctctcttcagacttgaaact

SEQ ID NO: 404365 - DNA, 201 bp, Homo sapiens
ggatggagcagtagttctggggtgaacttttgtggttttttttttttttttttttgagacacggtctcgctctgttgctcaggctggagtgcagtggtgcratcatggctcactgcagcctcgacctcccaggctgaagccatcctcccacctccgcctcccgagtagctgaggctacaggtgcacgtcatcatgcctggc

SEQ ID NO: 404366 - DNA, 201 bp, Homo sapiens
ctatcgtatgtatgcgcgtgcgcgcgcgcgcgcgtgtgtgtgtattttggggatgtgtgtgaagccattgtattataacctgaaacaaaaaaaggggattytttggaaggcggaggcgggcagatcaattcagtccaggagttcgacaccagcctgggcaacacagtgagaccccgttactgcaaaaaaatacaaaaaaac

SEQ ID NO: 404367 - DNA, 201 bp, Homo sapiens
cacgtctatcgtatgtatgcgcgtgcgcgcgcgcgcgcgtgtgtgtgtattttggggatgtgtgtgaagccattgtattataacctgaaacaaaaaaaggrgattttttggaaggcggaggcgggcagatcaattcagtccaggagttcgacaccagcctgggcaacacagtgagaccccgttactgcaaaaaaatacaaa

SEQ ID NO: 404368 - DNA, 201 bp, Homo sapiens
caccacgtctatcgtatgtatgcgcgtgcgcgcgcgcgcgcgtgtgtgtgtattttggggatgtgtgtgaagccattgtattataacctgaaacaaaaaaaggggattttttggaaggcggaggcgggcagatcaattcagtccaggagttcgacaccagcctgggcaacacagtgagaccccgttactgcaaaaaaatac

SEQ ID NO: 404369 - DNA, 201 bp, Homo sapiens
agcttggtgtggatcctgtaagtattgactgacggccggtcacctggcttagggcccaccaccacgtctatcgtatgtatgcgcgtgcgcgcgcgcgcgcgtgtgtgtgtattttggggatgtgtgtgaagccattgtattataacctgaaacaaaaaaaggggattttttggaaggcggaggcgggcagatcaattcagt

SEQ ID NO: 404370 - DNA, 201 bp, Homo sapiens
cttgaattggaatggatgcgtgttcttaaccgggctccattatcaatgacctttcataactttaagaataagaatgttcttctctctgaaactgtgatgttgctcttcaggagtcttaccgccagataatgaagatgcgaccgaaagacttgaaaaaacggctgatggtgaaattccgtggggaagaaggtttggattacg

SEQ ID NO: 404371 - DNA, 201 bp, Homo sapiens
gaggcggacggaagcatgtgccacaggcctcctgtttgtagctttcttcctgtctcaacatctgcctagtacacagctgctgctttgcttgggaatcgacktttcactgttgtgtgtcgggtacctaggaggcgcatcctgacgtgggtttatgcattttggaagtaattcacctttctgcacctcctcagctgatcatag

SEQ ID NO: 404372 - DNA, 201 bp, Homo sapiens
gcattttattgactttttagtgataaattccaggagaatctttattttccaggataaaactcaatgtggcgttaatcctttccattttctcacctcctttstgtagctagagctgaaagcaaagtaggagagtggctttgaaaaggaaggaaaataaatttgacaatgatcaaaaacgccaggctgaaggcagcttttaat

SEQ ID NO: 404373 - DNA, 201 bp, Homo sapiens
ttctctcctccgtttttggagcagcgtgagattattgcaatgctacatttcctccctctgcgccctcctaccccatcaatgtctcatgggtggtgtgatakaggctatgggagtgaagaccactggtgttagtctgtgtatagttcctggggtgtggcgagtaccagctctgacagcggaagagaactatactgttgattc

SEQ ID NO: 404374 - DNA, 201 bp, Homo sapiens
ttgtcttcgactgattaatatgtaaccttgttttatgtgtgcttctgtttaaagataccttactcactatatatcgtggattcattaacattgaactcacracgaacagcactgccactcgtgcctgaacaaaatttccctaatccatgcattttctttgcaaggcacactggatagcacttcaccactttgcttggggac

SEQ ID NO: 404375 - DNA, 201 bp, Homo sapiens
ccggagtcctgtcctgccactgaccttggcccagcttgaaaggagtatctgtgaatacacaggagcaaggggcagcagagccaaggcccgtgccctctgcsccctcctttcccagcacctggcacccctgtcagctagccgtctttgcagcagcagtggtggctgctggccagcctggtgctcacttggggctgagtttgg

SEQ ID NO: 404376 - DNA, 201 bp, Homo sapiens
ctgaaacgagaaggcgcgttgttgcctggtttgacctcagctgggaacatgcacgttcgatgactcaatttttttgttgtcgttgttgctctgcaaacatstgtgaatgaccagggaggtgccacgagtattgatttttggggttacaaatacattttagcaagtaggtgaattcacaaatacagaatccaggaataatga

SEQ ID NO: 404377 - DNA, 201 bp, Homo sapiens
ggagacattagggcagagtaatccaactgactaatcttgggatgaaaagacgtttaaaaaaaaattataagactagggtagaagccagagggggctagaaygagaataaagctttagctaggaaccatctggaaagagggtctgggcaaggaacattttgtatgtgagggaggtggtgaattagaggctccttggtttcag

SEQ ID NO: 404378 - DNA, 201 bp, Homo sapiens
gtgatccgctcactttggcctcccaaagtactgggattacaggcggagccaccgcgcccggctgggttgctggagtttgaattgcgttaaatttaaagcaygaaaaatttcttaagtgcctcgttactgaatctacatctataaacacgtagcggcttctgcttcaagtgctgagtgtgagggaatagcaggctgatcaca

SEQ ID NO: 404379 - DNA, 201 bp, Homo sapiens
aatcattcttagagtggaaaatacttgttgagcaaaaagcccatttgaaaatgagaatgcctcgtcctgctgcaactgtttagaattgcgagtttctgaaygcatgttcctgtacctcccttagccctgaaaagcttggtgctgtctgggaactttccaatgaagaaacccttctggccgggaacatttaatgacacttgt

SEQ ID NO: 404380 - DNA, 201 bp, Homo sapiens
tggagtgcagtggcatgatcatggctcacggcagccttgacctccctagctcaagcgatcctcgcgagtagctgggcttataggcatacaccatcatgccyggctaatttttgtattttttgtagagaatgggtctcgccatgttgcccaggctggtctcaaactcctgggctcaagtgatccacctgcctcagccgccca

SEQ ID NO: 404381 - DNA, 201 bp, Homo sapiens
aaaccctaaacctagttgtagtttctacctaaaaaatgcattttttttttttttgagatggagtcttgctttgtcgcccaggctagagtgtgcagtggcgygatctcggctcactgtgacctccacctcctggattcaagtgattctcctgcctcagcctcccaagtagctggaattacaggcatccgccagcatgcccaa

SEQ ID NO: 404382 - DNA, 201 bp, Homo sapiens
agtcatttaatgtgcgcggcagaagcgatcagccttgcactatcgttgcttttcttgctgatgcatttttgtctatctagctaaactctaaactcttatgyccagacactaccttttatactccttttacaataggtgccattgtcgttttattcttgtttaaataatttatttaaaatgtattgttccgcagagcatggc

SEQ ID NO: 404383 - DNA, 201 bp, Homo sapiens
atagacaattatttgatcttcgagatattttgaacagttcccaagtgcaacaccagtggttgtccaaaagacacagagaagtgatgtgaaattttaattaygtaaaaaaaaaaaaaaaaaaaaaaaagaaagaaagaaaaaagccctgtggcatggttgatgtcagtgctatggagtgagccttttagtagtgcggtcaag

SEQ ID NO: 404384 - DNA, 201 bp, Homo sapiens
aaacatcaggctctgacagatggagggaatgtgggtgagtcggagtcggggctcctggttgtgtcccatgtgtcacatgttccaacttgaacaggggactytggggatcaggtagaaaatcttccactcagctgggtgcggtggctcatgcctattatcccagcactttgtggggccgaggtgggtggatcacttgctctt

SEQ ID NO: 404385 - DNA, 201 bp, Homo sapiens
gcatggcccaacttttgtcttaagagaaggttttgtttttttgtataaagatatcaaataatgatttggacccaaacccagaccctggttttgtaacgtargaggtagtttcctctgggatctttgcttctggggaaatacatttctttatgccagggctgataggaaacgcttctcactttgtagatacaatgtagatac

SEQ ID NO: 404386 - DNA, 201 bp, Homo sapiens
gctggttttagagatgaagaagtcagtgcagtgtttgcacgcccagctcaagggtgggcagccggccagcaggggactcctcctgtggcaccacggccttmaccagcgtcctgcacaggccactgaggcgaagtcgggacaggctccgcttgtgcattcaaatgtggaagaaccttttaccaacatggaagcagagttttg

SEQ ID NO: 404387 - DNA, 201 bp, Homo sapiens
atattttcaacatattatgggtttatcagaatgtaaccccattgtacatcaaggagcatctgtacttgttaatgaatgaacaaaatgcctttcagaaaccyccagaagcaacctcctgactcaaagattaaggaaacagtcaagccaacgaagaaccagccgtcggggcggggagaaaaacaacaaaattaagcaatgaaa

SEQ ID NO: 404388 - DNA, 201 bp, Homo sapiens
aagggtggagatgctaagaaggtaacgtatttgagattcagaggaaaaagggagaacatgtagtcttctcgcttgtgcctttttttttttttgagacggartctcactgtgtcatcaggctggagtacagtggcgcgatctcagttcactgcaacctccgcctcctgggttcaagcgattctcctgcctcaacctcccaag

SEQ ID NO: 404389 - DNA, 201 bp, Homo sapiens
agcttggacaagggtggagatgctaagaaggtaacgtatttgagattcagaggaaaaagggagaacatgtagtcttctcgcttgtgcctttttttttttttgagacggaatctcactgtgtcatcaggctggagtacagtggcgcgatctcagttcactgcaacctccgcctcctgggttcaagcgattctcctgcctcaa

SEQ ID NO: 404390 - DNA, 201 bp, Homo sapiens
ggtcaaaagttcaagaccagcctgaccaatatggtgaaaccccgtctctactaaaaataaaaaaattagccgggcatggtggtgtgtgtgcctgtaatccsagctactcaggaagctgaggcaggagaatcacttgaacccaggaggtggaggttgcagtgagccgagatcatgccactgcactccagtctgggtgacaga

SEQ ID NO: 404391 - DNA, 201 bp, Homo sapiens
gcttgatcccaggagttcgaggctgcagtgagctatgatcatgccactgcactccagcctgggcaacagagcaagaccctgtctctgaaaaaaaaaaaaaagtatattgataaacccatcttaatgtgtttaagattgttagtttaaactgggtatggcctttctttttgggatgataaaaatgttctaaaattgattgta

SEQ ID NO: 404392 - DNA, 201 bp, Homo sapiens
ggcgtgagccactgtgtctggttgattttttttttttttaagttttaaatgatcttatgaatctattgttagctacatcgactggaaacgtttaatgttgygacaaattttttcttttttttttttttgagatggagtctcactcgttgcccaggctggagtgcagttgcgtgatctggactcactgcaacccacgcctcc

SEQ ID NO: 404393 - DNA, 201 bp, Homo sapiens
gtctcgaactcctgacctcatgtgatccacctgccttggcctcccaaagtgctgggattacaggcgtgagccactgtgtctggttgattttttttttttttaagttttaaatgatcttatgaatctattgttagctacatcgactggaaacgtttaatgttgtgacaaattttttcttttttttttttttgagatggagtc

SEQ ID NO: 404394 - DNA, 201 bp, Homo sapiens
ccccctgttagaaatgacaggcttttgtgttaattagaaacacatcttggtcagtaaagctgtgctcccttctgactgtagattgtgttgaaattattaatcaggagaataattaatcattcttagagtggaaaatacttgttgagcaaaaagcccatttgaaaatgagaatgcctcgtcctgctgcaactgtttagaatt

SEQ ID NO: 404395 - DNA, 201 bp, Homo sapiens
actttgcagatactgaaagtactctctgtgtctttattcattttttttttgacacggagtcttgctctgtcgcccaggctggagtgcagtggcatgatctyagctcactgcaacctccgcctcccgcgtttaagcgattctcctgcctcagcctcctgagtagctggagttacagctgcttgccaccacgcctgggtaatt

SEQ ID NO: 404396 - DNA, 201 bp, Homo sapiens
tagtttttattattttatctaattcccttctcctggcttttttttttttttggtttttttttttttgagatggagtgcagtggtgagatctcagctcacckcaacctccgcctcccaggttccagcgattctcctgcctcagcctcccgagtacttgggaccacaggtgtgtgccaccacgcctggctaatttttgtattt

SEQ ID NO: 404397 - DNA, 201 bp, Homo sapiens
gtagtttttattattttatctaattcccttctcctggcttttttttttttttggtttttttttttttgagatggagtgcagtggtgagatctcagctcacytcaacctccgcctcccaggttccagcgattctcctgcctcagcctcccgagtacttgggaccacaggtgtgtgccaccacgcctggctaatttttgtatt

SEQ ID NO: 404398 - DNA, 201 bp, Homo sapiens
gccttctcttcagtactaggaagttttgtcttgtgtagtttttattattttatctaattcccttctcctggcttttttttttttttggtttttttttttttgagatggagtgcagtggtgagatctcagctcacctcaacctccgcctcccaggttccagcgattctcctgcctcagcctcccgagtacttgggaccacag

SEQ ID NO: 404399 - DNA, 201 bp, Homo sapiens
cactatgatctgtgagttgaatgttctgtaagccccatgcggagcggcaggaaagcaggtgtctaccttttacgagaaacatccaagagaaaaaaaaaaaaggatgactttttattgataacaaaagcggatggccaaatgaatgtctacattgcctaattttagaattcatgtacttggaagttcttgcattttgttact

SEQ ID NO: 404400 - DNA, 201 bp, Homo sapiens
atggcttgatctcgactcactgcactctccacctcctgggttcaagcgattctcctgccctagcctcctgagtagctgggattacaggcacccaccaccaygcccagctaatttttttgtatttttagtagagacggggtttagccatgttggccaggctggtctcgaactcctgacctcaggtgatccacccacctcggc

SEQ ID NO: 404401 - DNA, 201 bp, Homo sapiens
cagtcgagatccttgaaaaatcaagatggattttaataatgtattaagaataaattggatttgaatcaacacaggaaacagggattttacttagagactayttcagtaattttgaaatcattgcccaagattgtagttggtttgtttataatgggtaggttatttatttgtgaatcccaaatgtactccatcaacattcca

SEQ ID NO: 404402 - DNA, 201 bp, Homo sapiens
tgagggtggctgtgtcatctgtcaatagcgaagatttccctctgctcctttgctttccatcttttagggcagtgatccccagcctttttggcaccagggascagtttcatggaagacaatttttccgtggacaggggtgggggagatggttttgggatgattcaagcgcattccatttatagtgcactttatttctattat

SEQ ID NO: 404403 - DNA, 201 bp, Homo sapiens
accccatcgctataaaaaataaaaaattagccaggataaggtaatgacctgcaggacacatgaagaaggtgactggggaactggccatgctctatttcctsacctgggtgctaattatatacgtgtgttcagtttgtgagaattcagtgagctgtacactcagatatttataaatcaatcataaacatcaatagacagaat

SEQ ID NO: 404404 - DNA, 201 bp, Homo sapiens
agtaagaccttgtccctacaagaaattgaaaaattagtcaggggtggtggtgcatgccctgtagtcccaggtactcaggaggctgtggtgggagcatcacyggagcccaggagttcgagactgcagtgagctgtgttcgtgccactgcattctagcctgggtgacagagcgaaacgctggcccagaaaatgaatgaatgaa

SEQ ID NO: 404405 - DNA, 201 bp, Homo sapiens
agtgccttttttttggcttgactgtttttaactttggggtttttaaaataataaaatgatgcaaacattaaagaaattcagaaaataacaacttaggctgrgcgtggtggctcacgcctgtaatcctggcactttgggaggccgagatgggtggatcatttgaggtcaggagttcgaggccaccctggccaacatggtgaa

SEQ ID NO: 404406 - DNA, 201 bp, Homo sapiens
agcacctaacacacagcggaacacttgtctctgtaaatatgtgccaaatgaatgaattttactttttgttaatttcttcgcacattttctttctttggtcrttctgaaatgcctgttactcagctgtcggactccctggtttggtctggtaggagttacattccttctgcgttttccgtagtcatccagtcttctgcgtgg

SEQ ID NO: 404407 - DNA, 201 bp, Homo sapiens
atgatattaaaaaacagaatagaatgatgaaaaactgctatttcatgtcctgcttcttttcagcttcaagacaattttttttttttggtcttttttgagayggggtcttgctctgttgcccaggctggagtgcagtggcacaatcatagctcactgcagcctcaacctcctgggctcaagcgatcctcctacctcagcctc

SEQ ID NO: 404408 - DNA, 201 bp, Homo sapiens
tgaagaattccatgtaatatgatttgtacagtcaggggactgcattatttagaatgaaaaattaaagtgtgctaatgttacaaagtgttggctagaggcartctgttggaagtgatttagctgttaaataactcatcctattatccacccacttgtattagtgttttagggtaactcagatattgacttggaagcactgct

SEQ ID NO: 404409 - DNA, 201 bp, Homo sapiens
cttaatatcagcgtgacttgtcactgttgatgttgaccttgatcacctggctgagatggtgttcgtcaggtttctccactgtaaagttacttttttttccyctctttccatactggactctttggaaggaagtcactacacacagctcacacttaaggagtaggggctgggtgtgggggcccacgcctgtaatcccagcac

SEQ ID NO: 404410 - DNA, 201 bp, Homo sapiens
tttttacctactgacatgttctgtttcaggatcccatccaggatatgacatcacatttagttgtcatatttccttaggttgctcttggctgtgacagtttsttagactttccttgcttttgatgatcttgacagctttgagaagcactggtcaggtatttgtagaatgttcctccactggaagtgtttgatgtttgtgtca

SEQ ID NO: 404411 - DNA, 201 bp, Homo sapiens
tgaacccgggaggcagaggttgcactgagctgagattgcgccactgtactccagcctggcaacagagcgagactccatctcaaaaaaaaaataaaaaaaaataaaaaaaataaaaaaaaagaagtggattaagaatcctagctactgtcagtttaatccttttttaaagtcactaatattttaatataaaaagtaagcttt

SEQ ID NO: 404412 - DNA, 201 bp, Homo sapiens
ttacaggcgtgagccacctgcccggcctaacatttcaaaatgctaaaaacaggttcttgtagtcttttccttgggtccagcatcgtttgttgctgactatrtcaagcagctaccaagatggcgcagtgaaggtgatgcgcagtggagactgttcccctcgccgctccctggttcctgcagagagtcctgttggcagctcgt

SEQ ID NO: 404413 - DNA, 201 bp, Homo sapiens
gagaataacttgaacccgggaggcagaggttgcactgagctgagattgcgccactgtactccagcctggcaacagagcgagactccatctcaaaaaaaaaataaaaaaaaataaaaaaaataaaaaaaaagaagtggattaagaatcctagctactgtcagtttaatccttttttaaagtcactaatattttaatataaaa

SEQ ID NO: 404414 - DNA, 201 bp, Homo sapiens
gtctagtgatggaattgaagaaatggctctggaaaatgctctgctcatctaatgggcaatgctcctgtgtccttttctttttttctttctttctttctttwtttttttttttttttttttttgagacagagtttctctctattgcccaggctggagtgcagtggtgcgatcttggctcactgcaaccttcacctcctgggt

SEQ ID NO: 404415 - DNA, 201 bp, Homo sapiens
tttttgtatttttggtagaaatggggtttcaccatgtttgccaggatggtctcaatctcttgaccttgtgatctgcccgcctcagcctcccatagtgctargattacaggcgtgagccagcgcacccagcctttttttgtgtgtgtgtttttagtagagatagggtttcaccatgttggccaggctgatctcaaactcctg

SEQ ID NO: 404416 - DNA, 201 bp, Homo sapiens
tagtagagatggggtttcaccatggtggccaggtgggtgttgaactactgacctcaggtgatcctcccgccttggcttccctccccagtagctttcactgyctctactgccccttgaacttcaagtcctccaggatggttacacatcataccttctgacagcccccgtgtctcctgcaaggcctctgtgcagcctgatggc

SEQ ID NO: 404417 - DNA, 201 bp, Homo sapiens
tattccttttttaaatttgcctatatattttcctttattagtgttctttatttctcaggttactgtctaatgttcctttttttttttttttttttttttttagacggagtctcactttgtcacccaggctggagtgcagtggcatgatctcggctcactgcaagctccgcctcccgggttcacgccattctcctgcctcag

SEQ ID NO: 404418 - DNA, 201 bp, Homo sapiens
ttagatccatgctaaggcatgcaagcaattgacacacggaccctgggatatgcggtgtcctgtctgactgattgattgatttctttcttttttttttttttgacagagtctcactaggtcaccaggctggagtgcagtggcacgatcttggctcactgcaacctccgcctcccaggttcaagcgattctcctgcctcagcc

SEQ ID NO: 404419 - DNA, 201 bp, Homo sapiens
tccttagagaaatgtccaataatttttgtatttttagtagagacaggtttcagcatgttggtcaggctggtcttgaactcctgacctcaggtggtccgccygccttggcctcccaaagtgctgggattacaggcgtgagccaccacgctcagcatatatattcttgatattagactcatcagatatatgatttccaaatat

SEQ ID NO: 404420 - DNA, 201 bp, Homo sapiens
aatatgattttgatgaatggtgtaacattgtgaaaggctttttgaagacaaaaccactaacccgttgtattgttttgttttgttttgttttgttttgttttaagagacagggtctcgctctgttgcccaggctggagggcaatggtatgatcatggctgactgcagcctggaactcctgggctcaagtgattctcccacct

SEQ ID NO: 404421 - DNA, 201 bp, Homo sapiens
ctggaaacagagctgtggtctcagggtcctccagcacctgttgctgtgccacccccacgcaggttctgtgtctgcccgaggctgtcctgtcttgcagcccygggtttggcagtcgtaaatgttttctgtctacccaatggccccgcgtggtggcagagttctaacctacatccttctgtcttatttcaacagagagaacga

SEQ ID NO: 404422 - DNA, 201 bp, Homo sapiens
tttattgaggatgccttctacatgattagttgtttctctcttgctgttttcaggattctctctttgtctttgtcgtataacaatttgattataatgtgttmctgtgtgtatccctttgaatttatcttacttaaaagtttgtttagcttcttgaatgtgtagattcatgtttttcatcaagtttgggacacttgcagtcat

SEQ ID NO: 404423 - DNA, 201 bp, Homo sapiens
ggcgtctcgctctgtcgcccaggctggagtgcaatggcgcaatctcagctcactgcaacctccatctcctgggttcaagcaattctcctgcctcaacctcygagtagctgggactacaggcacatgccaccatgcccggctgatctttacatttttaatagagacagggtttcaccatgttggccaggctggtctcgaaca

SEQ ID NO: 404424 - DNA, 201 bp, Homo sapiens
gatcgtgatcactgggtgtgctgtgttgaaggagatgaagggtgaaactgagctgttcatacactcacactttgtgatcatttgagggaactctggtgtgrtgatcgtatgtgttaatggtgtcattctaaggagtaggttccgaagtccagcctcctcccggtcaaaactggaatctttccagaactagctttttaagcc

SEQ ID NO: 404425 - DNA, 201 bp, Homo sapiens
ctgccttccaagtagctgggactacagtcgcctaccaccttgcctggctaatttttgtattttttgtagagatgggatcttgccatgttgcccaggctggkctcgaactcctgagctcaagcgatcccacctgcctcagtctcccaaagtactgggattacaggaatgagccattgtgtctggccaaagcaaaattttctt

SEQ ID NO: 404426 - DNA, 201 bp, Homo sapiens
acactcacactttgtgatcatttgagggaactctggtgtgatgatcgtatgtgttaatggtgtcattctaaggagtaggttccgaagtccagcctcctccyggtcaaaactggaatctttccagaactagctttttaagccacaaatgctgccacccttagcgtgctggttttagagatgaagaagtcagtgcagtgtttg

SEQ ID NO: 404427 - DNA, 201 bp, Homo sapiens
tgtagagatgggatcttgccatgttgcccaggctgggctcgaactcctgagctcaagcgatcccacctgcctcagtctcccaaagtactgggattacaggmatgagccattgtgtctggccaaagcaaaattttctttgtgctaacactgctgagacctttccgcactttatgatataaccaaattccactggaatgagcc

SEQ ID NO: 404428 - DNA, 201 bp, Homo sapiens
aagtatgtattttgtaattagagtaacaagaaatgaaacatcagcaggaggtgtaattaatagtgatctatccactaaaaagactgaggtggaaaggaagkatataaagattacattactctgaagaagaaatattactattgactatacagaaatattatcaaggaatactgattatcaaggaatattacaaacaagtgt

SEQ ID NO: 404429 - DNA, 201 bp, Homo sapiens
tcccctttcttggcgtcctcccttgtcatgctgtgaccaccgcatggttgtgtggtgtgatgtttctctttctcatctgcatcttccaagagagtcaaacwacatgcagtcaggaacttgtcttgttcacagctgatccccggttcctagaacagcacctaacacacagcggaacacttgtctctgtaaatatgtgccaaa

SEQ ID NO: 404430 - DNA, 201 bp, Homo sapiens
ctggaattacaggcatccgccagcatgcccaactaatttttgtatttttagttgagacggggtttcaccatcttggccaggctggtctcgaactcctgacytcatgatccacccgcctcagcctcccaaagttctgggattacaggcgtgagccactgtaccaggcctaaaaaattcattattatgactgtatgtttctgt

SEQ ID NO: 404431 - DNA, 201 bp, Homo sapiens
caatatgattttgatgaatggtgtaacattgtgaaaggctttttgaagacaaaaccactaacccgttgtattgttttgttttgttttgttttgttttgttttaagagacagggtctcgctctgttgcccaggctggagggcaatggtatgatcatggctgactgcagcctggaactcctgggctcaagtgattctcccacc

SEQ ID NO: 404432 - DNA, 201 bp, Homo sapiens
gggaggtgccacgagtattgatttttggggttacaaatacattttagcaagtaggtgaattcacaaatacagaatccaggaataatgagaatcagccatastcgaaagactagaattggagtctgtctcagtttccatatttataaaatgggtataaatatgacacacactggaagtttgtgaatatcaatatggaaaggt

SEQ ID NO: 404433 - DNA, 201 bp, Homo sapiens
ccaatatgattttgatgaatggtgtaacattgtgaaaggctttttgaagacaaaaccactaacccgttgtattgttttgttttgttttgttttgttttgttttaagagacagggtctcgctctgttgcccaggctggagggcaatggtatgatcatggctgactgcagcctggaactcctgggctcaagtgattctcccac

SEQ ID NO: 404434 - DNA, 201 bp, Homo sapiens
tccaatatgattttgatgaatggtgtaacattgtgaaaggctttttgaagacaaaaccactaacccgttgtattgttttgttttgttttgttttgttttgttttaagagacagggtctcgctctgttgcccaggctggagggcaatggtatgatcatggctgactgcagcctggaactcctgggctcaagtgattctccca

SEQ ID NO: 404435 - DNA, 201 bp, Homo sapiens
ttccaatatgattttgatgaatggtgtaacattgtgaaaggctttttgaagacaaaaccactaacccgttgtattgttttgttttgttttgttttgttttgttttaagagacagggtctcgctctgttgcccaggctggagggcaatggtatgatcatggctgactgcagcctggaactcctgggctcaagtgattctccc

SEQ ID NO: 404436 - DNA, 201 bp, Homo sapiens
agacaattatttgatcttcgagatattttgaacagttcccaagtgcaacaccagtggttgtccaaaagacacagagaagtgatgtgaaattttaattatgtaaaaaaaaaaaaaaaaaaaaaaaagaaagaaagaaaaaagccctgtggcatggttgatgtcagtgctatggagtgagccttttagtagtgcggtcaagga

SEQ ID NO: 404437 - DNA, 201 bp, Homo sapiens
ggagtttgaggctgcagtgagccatgatggtgcttctgaactccagcctggacaacagagtaagaccctgtctcgaatgaatgaatgaatgaatgaatgadtgaatgaaaatttttattgaataactactatgctctaggttgtctggcaagtggagtactggatataataaacagggtagagaccagaggaagtaaatac

SEQ ID NO: 404438 - DNA, 201 bp, Homo sapiens
tgaaggcagcttttaatgtgattaaccagtttgtaattcatttttgggaaacatttccagaatataacaatttcagagaacacgaaaccttcttataattytggaagtgggaaggagagaggaacagtgtgtgtttttgtgtgtggcttgcattctctcctccgtttttggagcagcgtgagattattgcaatgctacatt

SEQ ID NO: 404439 - DNA, 201 bp, Homo sapiens
acgccaggctgaaggcagcttttaatgtgattaaccagtttgtaattcatttttgggaaacatttccagaatataacaatttcagagaacacgaaaccttyttataattctggaagtgggaaggagagaggaacagtgtgtgtttttgtgtgtggcttgcattctctcctccgtttttggagcagcgtgagattattgcaa

SEQ ID NO: 404440 - DNA, 201 bp, Homo sapiens
tttttttttgcatggaaattataggcgtaaaactgcaaaaattgcttaggacttgggtgccatttctataggactctggcaatttggcaataatgtaatgkcattatagagtggttgctttgttgcattttattgactttttagtgataaattccaggagaatctttattttccaggataaaactcaatgtggcgttaatc

SEQ ID NO: 404441 - DNA, 201 bp, Homo sapiens
acaatttggcaatgatttaatgtcattatagggtggttgctttgttcttaaaatacagcttcttgctaaggccaagttaggtgacagttttttttttttttccttttcttgcctaagattttcatttcactccctccacttttttgcttaggaaactctcaaatgaatcagtgtgacttccatgctataagatgtcactgc

SEQ ID NO: 404442 - DNA, 201 bp, Homo sapiens
gcactgtctatcagatcataaatgtttatgctctttgatctagcaattctgcatgtaggacttttttcttatgggtgttttcacacatttatgtaaagtcyggtgtgtaaaatcattgcagcattgtttgaaattataaaagactgaaatcaatgtgaatgtgtatcagcagggactagttaagtaaattatcgtgtattc

SEQ ID NO: 404443 - DNA, 201 bp, Homo sapiens
ctttccatactggactctttggaaggaagtcactacacacagctcacacttaaggagtaggggctgggtgtgggggcccacgcctgtaatcccagcacttyggtaggctgtggctggaggatcgcttgagcccaggatttgagaccaggctgggcaacattgcgagaccccatcgctataaaaaataaaaaattagccagg

SEQ ID NO: 404444 - DNA, 201 bp, Homo sapiens
tttctgatgcgatgtcagatgtgacttttattgaggatgccttctacatgattagttgtttctctcttgctgttttcaggattctctctttgtctttgtcrtataacaatttgattataatgtgttcctgtgtgtatccctttgaatttatcttacttaaaagtttgtttagcttcttgaatgtgtagattcatgtttttc

SEQ ID NO: 404445 - DNA, 201 bp, Homo sapiens
ttacaaaactaggcccttggaacactggacgttgttaaaggaaagcaaatcaatttatgtgacggtgtcccctaggacactagccctaaggcgctggtctkgtgactcctccatggtgacaccatgcctgcctgctctcgtccctttcagaacggtgtatgaagactccgggcctgggaggccgctcagctgcttcatgga

SEQ ID NO: 404446 - DNA, 201 bp, Homo sapiens
cagagattttttaaaaataggaaaattagctgagcatagtggtgcatgcctatagtcccagctactcaggaggccgaggtgggaggatcacttgagcccargagtctgaggctgcagtcagccatgattgtgcccctgcactctagactgggcagagagtgagatcttacctctacagatacaaaaaagattgatgtagtg

SEQ ID NO: 404447 - DNA, 201 bp, Homo sapiens
gtgcaatggcacaatctcggctcactgcaacctccgcctccctgttcaaatgattctcctgcctcagccttcccaatagcttacaggcgcacaccaccacrcctggctaatttttgtgttttcagtagagatggggtttcactacagtggccaggctggtttccaactcctgacctcaggcgatccgcctgcctcggcctc

SEQ ID NO: 404448 - DNA, 201 bp, Homo sapiens
tgcagtgagccgagatcgcgccattgcactctagcctgggtgacagagtgagactccatctcaaaagtaaaataaaataaaataaaataaaataaaataaacaaaaacagcaacatggaaacctggcaatgcttgaattggtacatgggcggtggatgttgagacagtgcacacagaagtggaactctgagccctgggcct

SEQ ID NO: 404449 - DNA, 201 bp, Homo sapiens
ttgcagtgagccgagatcgcgccattgcactctagcctgggtgacagagtgagactccatctcaaaagtaaaataaaataaaataaaataaaataaaataaacaaaaacagcaacatggaaacctggcaatgcttgaattggtacatgggcggtggatgttgagacagtgcacacagaagtggaactctgagccctgggcc

SEQ ID NO: 404450 - DNA, 201 bp, Homo sapiens
gttgcagtgagccgagatcgcgccattgcactctagcctgggtgacagagtgagactccatctcaaaagtaaaataaaataaaataaaataaaataaaataaacaaaaacagcaacatggaaacctggcaatgcttgaattggtacatgggcggtggatgttgagacagtgcacacagaagtggaactctgagccctgggc

SEQ ID NO: 404451 - DNA, 201 bp, Homo sapiens
gaaatgacaggcttttgtgttaattagaaacacatcttggtcagtaaagctgtgctcccttctgactgtagattgtgttgaaattattaatcaggagaatmattaatcattcttagagtggaaaatacttgttgagcaaaaagcccatttgaaaatgagaatgcctcgtcctgctgcaactgtttagaattgcgagtttct

SEQ ID NO: 404452 - DNA, 201 bp, Homo sapiens
gccaccacacccagctactgttttgtatttttagtagtgacagggtttcaccgtgttagccaggatgatctcgatctcctgaccttgtgatctgcccgccktggactcccaaagtgctgggattacaggtgtgagccaccgctcccagccgtctaatgttcttttgtttcagcttgaaagactcccctcagcatttcttgt

SEQ ID NO: 404453 - DNA, 201 bp, Homo sapiens
ggttgcagtgagccgagatcgcgccattgcactctagcctgggtgacagagtgagactccatctcaaaagtaaaataaaataaaataaaataaaataaaataaacaaaaacagcaacatggaaacctggcaatgcttgaattggtacatgggcggtggatgttgagacagtgcacacagaagtggaactctgagccctggg

SEQ ID NO: 404454 - DNA, 201 bp, Homo sapiens
cggcaacatcgtttatcactgagcaggaacctatcctcctggctgctgggtgatgcatttcagatgttttaagctccggagcccaacttgcagcttgcttwcaggagtctggaggagcatgtcacgaagctgcagattgtagatggcagcctgcgttctttgtatgttgggcatccgctgagttctctaaagggcatgatg

SEQ ID NO: 404455 - DNA, 201 bp, Homo sapiens
ttgccaccacgcctgggtaattttttgtatttgtagtggagacggggttttgccatgttggccagactggtctggaactcccagcctcaggtgatccgccygccttagcctcccagagtgctggtattacaggtgtgagccactgtgcccggcctctctgtgtctttattaaacttaagtcagaatgttcttaagaaataa

SEQ ID NO: 404456 - DNA, 201 bp, Homo sapiens
aggttgcagtgagccgagatcgcgccattgcactctagcctgggtgacagagtgagactccatctcaaaagtaaaataaaataaaataaaataaaataaaataaacaaaaacagcaacatggaaacctggcaatgcttgaattggtacatgggcggtggatgttgagacagtgcacacagaagtggaactctgagccctgg

SEQ ID NO: 404457 - DNA, 201 bp, Homo sapiens; identical to SEQ ID NO: 89699

SEQ ID NO: 404458 - DNA, 201 bp, Homo sapiens
ggagacgttcgatgaagaaaggagggccaggctcctgcagtttgtgactgggtccacgcgagtcccgctccaaggcttcaaggctttgcaaggtgactgaygtggaggcagggctattcgatgacgcgtctatgtgcgctgtgggcaggaagagctggaaggtggctgggatgtttttctgagatgtgtgctagaaaatgg

SEQ ID NO: 404459 - DNA, 201 bp, Homo sapiens
tctcattcttctcaaagtattttctaatttctcttgtcatttttttcttgacctattgattaacagtgtataagttcacatttttgtaaattccaaatttycttctgttattgatttctaattttattccagtatggatgcagaagatactgtgtattacttcattcttttaaaatttattaagacttgttttgtggccta

SEQ ID NO: 404460 - DNA, 201 bp, Homo sapiens
accagggtcacagtcccgaacagggagtgctggtgctgtgggagggcactgaatggtggcccgggcagagtggccagggccctgcaggaggtctctgaagrccctcacctggcccagcctgtcctgactccccaggaggctggggcttggagggtgtggcctgtgagggggaggagccagcttcctgtcccaggaccccag

SEQ ID NO: 404461 - DNA, 201 bp, Homo sapiens
tccaatccagataccttatttggcaattgcagtctagtcttgttcctgttattagtggggaagccatttggtctttcaccagtaaatatgatgttaagcartgggtttttcatagatgtcccttatctagttgagggagtttctgttccaaggatgttgaatatttttatcatgaatgttggaatctgtcaaaaaaaatgt

SEQ ID NO: 404462 - DNA, 201 bp, Homo sapiens
cctgtcctgactccccaggaggctggggcttggagggtgtggcctgtgagggggaggagccagcttcctgtcccaggaccccagaaaccaggggctgcacwctgagaccctctgcccaacataaagatggtgtctctgctggtcctcattgctcccggagtcctgtcctgccactgaccttggcccagcttgaaaggagta

SEQ ID NO: 404463 - DNA, 201 bp, Homo sapiens
gagcttggtgtggatcctgtaagtattgactgacggccggtcacctggcttagggcccaccaccacgtctatcgtatgtatgcgcgtgcgcgcgcgcgcgygtgtgtgtgtattttggggatgtgtgtgaagccattgtattataacctgaaacaaaaaaaggggattttttggaaggcggaggcgggcagatcaattcag

SEQ ID NO: 404464 - DNA, 201 bp, Homo sapiens
caattttttataatttcaaaaccattttagaggctaatttttttttaaacaaggaatatacaatttttttttttgtcactgaacaagttttaaattactgktttgttattttgtaagtgaatttgtaagtgaaagcctccaacttaaattagcttcttgtccagggaactcattctgactgactaaagtccctaaggcctt

SEQ ID NO: 404465 - DNA, 201 bp, Homo sapiens
caacctgggagtgaggctccagaaccaggcacttagccatttcactgtcctttccctgataaagacagaaaggctctagaggaaaaagtagtaatagcagktatagctgggtagtgagatcatggatacttttattactatttatttcttctgatttctatgagcatatgttacctctatagtgaccaaaatgattcttaa

SEQ ID NO: 404466 - DNA, 201 bp, Homo sapiens
cacacgtttgggatacttgtcacctagtttctgggtcaggtgtgtatatatgccaacaggctggctgtttaggtgaacaataagatgtctccatatgctgktggtgttactaatggtcaaaagatcgatcacgtgtgaggttgcattaagagcaacttcttttctccgggaatgccacttaataccaccctgggactggct

SEQ ID NO: 404467 - DNA, 201 bp, Homo sapiens
attgcagcccttaaacattttatgtgagaatatctaatgacatggaaaccgttcacacattctattaagtgacagtggcaggtagcaaaaccgtatgggcrggataattacattaaaaatccgatcaagtaggtattactactattcctattttacagatgatgcatagagattttgactcttgcccaagatcacgtgggt

SEQ ID NO: 404468 - DNA, 201 bp, Homo sapiens
ttgatttttgtatgttgaacccttgcattcctgggataaatcccttgatcatggtgtataatccttttaatatgctctatgttaaatttgtgcatatttcrttgaggattatttgcatctgtactcataaaggatattggtctgtaacatctttgtctgactttggtatctgggtgatactggcctcacagaatgagttag

SEQ ID NO: 404469 - DNA, 201 bp, Homo sapiens
gctgattggactgtaaatgctgatagacacacagacacattgtaaacacagaatattccctctgcctcgctgagtaaaatgaggttaattccatttcagtyggctttggccatcagggcacctgcatcttttccattgtgacctctgcctatagatttgctgctgggggcccagcatggataaaaaggggtttgaggctga

SEQ ID NO: 404470 - DNA, 201 bp, Homo sapiens
ggcttcctgggtgcgcgtccagcatggtgccgaggccctgcagtgtcaaggccctgggcttggttcgattctctgttgtcacgaaggtgaaattctcagtsattgctgaacacggggctcctctgccagttatatggcccttctgaggaggtgttggccctgagagcatacaaaacgctgtccagcgaatctaggcaaatt

SEQ ID NO: 404471 - DNA, 201 bp, Homo sapiens
accaacctaatatttatctatctatctattttgaaatatttgaggcagagtctctctctgtcacccaggctagagtgcagcggtgcaatcatagctcactrtagcctcaacctcctgggctcaagcagatcctcccacgttggcctcctgagtagctgggactacaggtgtgcactaccatgcccggctaattgtttaatt

SEQ ID NO: 404472 - DNA, 201 bp, Homo sapiens
gccctttggcctttttaaatggaaactgggcgaggctggtaagctataccttactattctaaggtgaccaccacttggagtgtgggtttaagactgctgcyaacctggatttccagtacagctctgctgcttgctagtggggtgactttggacaataataataaagctatttgtcaattattgaagctctttactatttgc

SEQ ID NO: 404473 - DNA, 201 bp, Homo sapiens
tattgggactttggagtgccccttctgccctttggcctttttaaatggaaactgggcgaggctggtaagctataccttactattctaaggtgaccaccacktggagtgtgggtttaagactgctgccaacctggatttccagtacagctctgctgcttgctagtggggtgactttggacaataataataaagctatttgtc

SEQ ID NO: 404474 - DNA, 201 bp, Homo sapiens
ccctgaagttgtgtgcagctagctctctcctctgaccctgtcgcgtacgtgggtgcttgcagctcccctggccggggcttcggagtgactttctgcatctyttcttctcaagtcaccagtgccaactcaaggagcccagccagccgctgccactgcccagtgagggctctctggaggacgaggagcttcctgcccagagat

SEQ ID NO: 404475 - DNA, 201 bp, Homo sapiens
gacacagctagctaggtacctggttacgtcatcagggaaacaaattctccctgaagttgtgtgcagctagctctctcctctgaccctgtcgcgtacgtggstgcttgcagctcccctggccggggcttcggagtgactttctgcatctcttcttctcaagtcaccagtgccaactcaaggagcccagccagccgctgccac

SEQ ID NO: 404476 - DNA, 201 bp, Homo sapiens
cactgattttatgtatatatgcactcactactactgtacatctggagtagaggctggcaagcttctgaaatgctcagatagtaaatattttatgctttgcrggccatgtggcctctattacaactactcaactctgctgttgttgtagccatggatactgagtaaactgattagtgtggctgtgttccaataaaactttat

SEQ ID NO: 404477 - DNA, 201 bp, Homo sapiens
  misc_feature (1)...(201): n = A,T,C or G
tcataataaccgaacaacccagtttacagacccaaggttacaccacatcatgaagtaagactttaaaaatattttttgctgacctctttcattggtaatcnaatgctttcttggactggtatttttgtgaatttattgactgtcttgctggttggataataagcatggtcaaaatgatgttaaatatctggcggataattg

SEQ ID NO: 404478 - DNA, 201 bp, Homo sapiens
agctaactattctaagtggtctacgatccaaagcatttcctgggctgagtgtttatcaaagctgagctttacttccaaactaagcttgggaaggatctggkagtgtttcccagctgactgggggcggggagaagaggaggatgcgagtgttaaagaacagagaaaatatcactctcttttcttttacacagttatctgctg

SEQ ID NO: 404479 - DNA, 201 bp, Homo sapiens
cactatgcaatgactatccctgtgctcgtcaacgttcccgtgtgaccttgcagttaggtgggaccatgtaactacttctggctagcaaactgtgagaagtragttgtcccacttcggggctgaagcactaggaacctccagctctgccacagaagctgtgtgtcatgtggtggagcctctatcagcctagatccctgagtg

SEQ ID NO: 404480 - DNA, 201 bp, Homo sapiens
actgcacggaccttagaaagcagataaaccactctgtaagaaattaggtattttcttcttagaatcaattcagttcagtgttactgttctcttttatgtgwtagaccctgtgttagatactgtggagtgacagcaaagcaatgtaaaacctccctcgactattgaaacagccaccaaagaggtcaacttcctgcctcctgc

SEQ ID NO: 404481 - DNA, 201 bp, Homo sapiens
agaatagcattactacctaatatgatttttggtaatatttagttcctttttattcatgatttgtttcatctgagaataaacttcctgtctgattttccaasactatgtttaatgtatgactcagtacctataatgagactggaaatatattacctgcaaatgaatgaggtgtctcttttgtaccccctgttagaaatgaca

SEQ ID NO: 404482 - DNA, 201 bp, Homo sapiens
cccctaggacactagccctaaggcgctggtcttgtgactcctccatggtgacaccatgcctgcctgctctcgtccctttcagaacggtgtatgaagactcsgggcctgggaggccgctcagctgcttcatggaggaaccagccccttacacagatagcaccggtgctgctgctggaggagggaattgcaggttcgtggagt

SEQ ID NO: 404483 - DNA, 201 bp, Homo sapiens
attacaagcgtgagccaccatgcctggctgagaattgcttgaacccaggtggcggaggttgcagtgagccaagatcgcgccactgcactccagcctgggcracagagcgagactccgtatcaaaacaaaattgcaagtctttagtgcaagggcgtaacagggaatgcctggtatggaccagttgttaaggctctgcacagc

SEQ ID NO: 404484 - DNA, 201 bp, Homo sapiens
  misc_feature (1)...(201): n = A,T,C or G
aacactggacgttgttaaaggaaagcaaatcaatttatgtgacggtgtcccctaggacactagccctaaggcgctggtcttgtgactcctccatggtgacnccatgcctgcctgctctcgtccctttcagaacggtgtatgaagactccgggcctgggaggccgctcagctgcttcatggaggaaccagccccttacacag

SEQ ID NO: 404485 - DNA, 201 bp, Homo sapiens
ttctagacttcagaactgtgagacgatacatttctgttgtttaagccactgagcagatggtactttgttatggcagccctagcaaactaatgctaagtgcscaattctcatctcccccaggcccccgtggctaagttgagatctttaagaaaacatattcttttaggtccttaaatttaacttcgagtacctagtccattg

SEQ ID NO: 404486 - DNA, 201 bp, Homo sapiens
gggaggccaaggtggccagagactttggtctcgagtttgagaccagccagggcaacatagcgagactttgtctctaccaaaaaataaaaaataacaaattwgctgggcatggtggcacgcacctataatcccagctgctagggaagctgaggtgggaggattgctttgagtccaggagtttgaagttgcagtgaaccctga

SEQ ID NO: 404487 - DNA, 201 bp, Homo sapiens
ttttagtagaggcggagtttcaccatgttggccaggctggtctcgatttcctgacctcgagtgatctgcccgccttggcctcccaaagtgctgggcttacrggcgtgagccaccatgcccggcccccttctcttggcttttaaagttgagtaaaaatgactcgggtacagaaagatttagggttagaattttaaatgtaat

SEQ ID NO: 404488 - DNA, 201 bp, Homo sapiens
gggctgggcttaatgcaacctgagtgtagccactgaaccatacaatttctatttaaagtgccttttttttggcttgactgtttttaactttggggtttttmaaataataaaatgatgcaaacattaaagaaattcagaaaataacaacttaggctgggcgtggtggctcacgcctgtaatcctggcactttgggaggccga

SEQ ID NO: 404489 - DNA, 201 bp, Homo sapiens; identical to SEQ ID NO: 89939

SEQ ID NO: 404490 - DNA, 201 bp, Homo sapiens
ctctctctgaagagcctcgtggtttgttttttcctcttcctgctgggggggagatgggaggtggcgtgctcaggcagcacctggaacagctccggctcccrggcttcttccacgcctgatgcctcactcggtgcgggaggtaggcagggtggcacttgagggcacgtgatcctagaatctgctgttccaggaaagcagccc

SEQ ID NO: 404491 - DNA, 201 bp, Homo sapiens
ctgcatacctgtgggctatggggtggcctttgccctccctccctgtgtgccaccggcctcccaagccatactatgtcccctcagcgacgagctccgtgagrcctggcgtattttcaccccactgctgcaccagattgagctggagaagcccaagcccatcccctatatttatggcaggtgaggaaagggtgggggctgggg

SEQ ID NO: 404492 - DNA, 201 bp, Homo sapiens
agggtgggcggcctgggcccgggggactccacatggtggcaggcagtggcatcagcaagacactctctccctcacagaacgtgaagctccctgacgcctaygagcgcctcatcctggacgtcttctgcgggagccagatgcacttcgtgcgcaggtgaggcccagctgccggcccctgcatacctgtgggctatggggtgg

SEQ ID NO: 404493 - DNA, 201 bp, Homo sapiens
gcgcaaggccgaggtgaggctgcagttccatgatgtggccggcgacatcttccaccagcagtgcaagcgcaacgagctggtgatccgcgtgcagcccaacraggccgtgtacaccaagatgatgaccaagaagccgggcatgttcttcaaccccgaggagtcggagctggacctgacctacggcaacagatacaaggtgcc

SEQ ID NO: 404494 - DNA, 201 bp, Homo sapiens
agttccatgatgtggccggcgacatcttccaccagcagtgcaagcgcaacgagctggtgatccgcgtgcagcccaacgaggccgtgtacaccaagatgatraccaagaagccgggcatgttcttcaaccccgaggagtcggagctggacctgacctacggcaacagatacaaggtgccctacagagaaggagcagtgtgga

SEQ ID NO: 404495 - DNA, 201 bp, Homo sapiens
tgatcctcactccccgaagaggggttcaagggggtaacgcagctccgggctcccagcagaggctggaaccgcatcatcgtggagaagcccttcgggagggrcctgcagagctctgaccggctgtccaaccacatctcctccctgttccgtgaggaccagatctaccgcatcgaccactacctgggcaaggagatggtgcag

SEQ ID NO: 404496 - DNA, 201 bp, Homo sapiens
ccagcagtgcaagcgcaacgagctggtgatccgcgtgcagcccaacgaggccgtgtacaccaagatgatgaccaagaagccgggcatgttcttcaaccccraggagtcggagctggacctgacctacggcaacagatacaaggtgccctacagagaaggagcagtgtggagggtgggcggcctgggcccgggggactccac

SEQ ID NO: 404497 - DNA, 201 bp, Homo sapiens
ggcctcttccgtccccagggacgtgatgcagaaccacctactgcagatgctgtgtctggtggccatggagaagcccgcctccaccaactcagatgacgtcygtgatgagaaggtagggggtgcaccccagtccccaggagcatgccctgtcgcaggcccatctgtgacgaggcactgagctggggtgtgcatgcagagcag

SEQ ID NO: 404498 - DNA, 201 bp, Homo sapiens
cccaactcaacacccaaggagcccattctctcccttggctttctctcaggtcaaggtgttgaaatgcatctcagaggtgcaggccaacaatgtggtcctgrgccagtacgtggggaaccccgatggagagggcgaggccaccaaagggtacctggacgaccccacggtgccccgcgggtccaccaccgccacttttgcagc

SEQ ID NO: 404499 - DNA, 201 bp, Homo sapiens
gcctcttccgtccccagggacgtgatgcagaaccacctactgcagatgctgtgtctggtggccatggagaagcccgcctccaccaactcagatgacgtccrtgatgagaaggtagggggtgcaccccagtccccaggagcatgccctgtcgcaggcccatctgtgacgaggcactgagctggggtgtgcatgcagagcagg

SEQ ID NO: 404500 - DNA, 201 bp, Homo sapiens
cctgccctgagggctgcacatctgtggccacagtcatccctgcaccccaactcaacacccaaggagcccattctctcccttggctttctctcaggtcaagrtgttgaaatgcatctcagaggtgcaggccaacaatgtggtcctgggccagtacgtggggaaccccgatggagagggcgaggccaccaaagggtacctgga

SEQ ID NO: 404501 - DNA, 201 bp, Homo sapiens
ggccaccaaagggtacctggacgaccccacggtgccccgcgggtccaccaccgccacttttgcagccgtcgtcctctatgtggagaatgagaggtgggatkgtaggtgatgccttcgaggcccagcaaggcagaactgggcatgccctgtgtgcgggcactggagctcccactgagacactcacgcactggtccacaccct

SEQ ID NO: 404502 - DNA, 201 bp, Homo sapiens; identical to SEQ ID NO: 89749

SEQ ID NO: 404503 - DNA, 201 bp, Homo sapiens
catgccctgtgtgcgggcactggagctcccactgagacactcacgcactggtccacaccctgagagagctggtgctgaggctgccctttccgccacgtagkggtgcccttcatcctgcgctgcggcaaggccctgaacgagcgcaaggccgaggtgaggctgcagttccatgatgtggccggcgacatcttccaccagcag

SEQ ID NO: 404504 - DNA, 201 bp, Homo sapiens
agggacaggcctggtcctgccctgcccgcactggttacagctgtgccctgccctcaggtggctgttccgggatggccttctgcccgaaaacaccttcatcrtgggctatgcccgttcccgcctcacagtggctgacatccgcaaacagagtgagcccttcttcaaggtgggtggtgtcagggcctcccccagcctggttct

SEQ ID NO: 404505 - DNA, 201 bp, Homo sapiens
cctgtgtgcgggcactggagctcccactgagacactcacgcactggtccacaccctgagagagctggtgctgaggctgccctttccgccacgtaggggtgyccttcatcctgcgctgcggcaaggccctgaacgagcgcaaggccgaggtgaggctgcagttccatgatgtggccggcgacatcttccaccagcagtgcaa

SEQ ID NO: 404506 - DNA, 201 bp, Homo sapiens
aggcctggtcctgccctgcccgcactggttacagctgtgccctgccctcaggtggctgttccgggatggccttctgcccgaaaacaccttcatcgtgggcyatgcccgttcccgcctcacagtggctgacatccgcaaacagagtgagcccttcttcaaggtgggtggtgtcagggcctcccccagcctggttctgccctc

SEQ ID NO: 404507 - DNA, 201 bp, Homo sapiens
ggcctggtcctgccctgcccgcactggttacagctgtgccctgccctcaggtggctgttccgggatggccttctgcccgaaaacaccttcatcgtgggctrtgcccgttcccgcctcacagtggctgacatccgcaaacagagtgagcccttcttcaaggtgggtggtgtcagggcctcccccagcctggttctgccctct

SEQ ID NO: 404508 - DNA, 201 bp, Homo sapiens
tgcccgcactggttacagctgtgccctgccctcaggtggctgttccgggatggccttctgcccgaaaacaccttcatcgtgggctatgcccgttcccgccycacagtggctgacatccgcaaacagagtgagcccttcttcaaggtgggtggtgtcagggcctcccccagcctggttctgccctctctaccagcccccagc

SEQ ID NO: 404509 - DNA, 201 bp, Homo sapiens
agcccaacgaggccgtgtacaccaagatgatgaccaagaagccgggcatgttcttcaaccccgaggagtcggagctggacctgacctacggcaacagatamaaggtgccctacagagaaggagcagtgtggagggtgggcggcctgggcccgggggactccacatggtggcaggcagtggcatcagcaagacactctctcc

SEQ ID NO: 404510 - DNA, 201 bp, Homo sapiens
cagagaaggagcagtgtggagggtgggcggcctgggcccgggggactccacatggtggcaggcagtggcatcagcaagacactctctccctcacagaacgkgaagctccctgacgcctacgagcgcctcatcctggacgtcttctgcgggagccagatgcacttcgtgcgcaggtgaggcccagctgccggcccctgcata

SEQ ID NO: 404511 - DNA, 201 bp, Homo sapiens
acagagaaggagcagtgtggagggtgggcggcctgggcccgggggactccacatggtggcaggcagtggcatcagcaagacactctctccctcacagaacrtgaagctccctgacgcctacgagcgcctcatcctggacgtcttctgcgggagccagatgcacttcgtgcgcaggtgaggcccagctgccggcccctgcat

SEQ ID NO: 404512 - DNA, 201 bp, Homo sapiens
catggtggcaggcagtggcatcagcaagacactctctccctcacagaacgtgaagctccctgacgcctacgagcgcctcatcctggacgtcttctgcgggrgccagatgcacttcgtgcgcaggtgaggcccagctgccggcccctgcatacctgtgggctatggggtggcctttgccctccctccctgtgtgccaccggc

SEQ ID NO: 404513 - DNA, 201 bp, Homo sapiens
gtgcgcaggtgaggcccagctgccggcccctgcatacctgtgggctatggggtggcctttgccctccctccctgtgtgccaccggcctcccaagccatacyatgtcccctcagcgacgagctccgtgaggcctggcgtattttcaccccactgctgcaccagattgagctggagaagcccaagcccatcccctatatttat

SEQ ID NO: 404514 - DNA, 201 bp, Homo sapiens
ttacaggagtaagccactgtgcccggcctatgcccttttaaaaaagcaaccatgccagggggttgtctgtttctattcgtctttttcaaacaccaatttcyagctttgttcatcttttctttgggttagcttttaattttattaattttacttgtcattatttcctattttcttcctggtaatttggcttgcagttctatc

SEQ ID NO: 404515 - DNA, 201 bp, Homo sapiens
ttttgttctttgttttttggtggtggtttttttttttgagacgacgtctagctctgttgctcaggctacagtggtgtgatctcggctcactccagtctctscctcctggttcaagcgattctcctgcctcagtctcctgaatagctgggattacaggcatacaccaccatgttcagctaagttttgtatttttagtagaaa

SEQ ID NO: 404516 - DNA, 201 bp, Homo sapiens
aggggctgacatctgtctgtgtgtctgtctgtccgtgtctcccaggccaccccagaggagaagctcaagctggaggacttctttgcccgcaactcctatgwggctggccagtacgatgatgcagcctcctaccagcgcctcaacagccacatgaatgccctccacctggggtcacaggccaaccgcctcttctacctggcc

SEQ ID NO: 404517 - DNA, 201 bp, Homo sapiens; identical to SEQ ID NO: 89862

SEQ ID NO: 404518 - DNA, 201 bp, Homo sapiens
gagaaagtcccagtttcgcggtcgcccttccctaccacgcttccggcttccggtgtcatagctgtgggatccggaagtaaaaacacaagccccgcccccgrgaactcgggaagccggcgagaagtgtgaggccgcggtagggccgcatcccgctccggagagaagtctgagtccgccaggctctgcaggcccgcggaagct

SEQ ID NO: 404519 - DNA, 201 bp, Homo sapiens
caggcccaggaaacgcagaggtgcaggtggggagaagacgccttcccctcagcagggctggatcccctgactctttcctcacctcggagctcttgattctyctccaggcagcgctggagggtctcaggagcgccctgttctgaaggcaggtgcagcatggctggcttccccagaggagactcttcgcccagtacgtcctga

SEQ ID NO: 404520 - DNA, 201 bp, Homo sapiens
agcacatccccaccccaggcccaggaaacgcagaggtgcaggtggggagaagacgccttcccctcagcagggctggatcccctgactctttcctcacctcrgagctcttgattctcctccaggcagcgctggagggtctcaggagcgccctgttctgaaggcaggtgcagcatggctggcttccccagaggagactcttcg

SEQ ID NO: 404521 - DNA, 201 bp, Homo sapiens
caaagcagaaataggaagtgccagctccagcactgtgggtaggggacaaggggtcctctctctgaagagcctcgtggtttgttttttcctcttcctgctgkgggggagatgggaggtggcgtgctcaggcagcacctggaacagctccggctcccaggcttcttccacgcctgatgcctcactcggtgcgggaggtaggca

SEQ ID NO: 404522 - DNA, 201 bp, Homo sapiens
tccctgcaccccaactcaacacccaaggagcccattctctcccttggctttctctcaggtcaaggtgttgaaatgcatctcagaggtgcaggccaacaatktggtcctgggccagtacgtggggaaccccgatggagagggcgaggccaccaaagggtacctggacgaccccacggtgccccgcgggtccaccaccgccac

SEQ ID NO: 404523 - DNA, 201 bp, Homo sapiens
ctgcaccccaactcaacacccaaggagcccattctctcccttggctttctctcaggtcaaggtgttgaaatgcatctcagaggtgcaggccaacaatgtgktcctgggccagtacgtggggaaccccgatggagagggcgaggccaccaaagggtacctggacgaccccacggtgccccgcgggtccaccaccgccacttt

SEQ ID NO: 404524 - DNA, 201 bp, Homo sapiens
cttggctttctctcaggtcaaggtgttgaaatgcatctcagaggtgcaggccaacaatgtggtcctgggccagtacgtggggaaccccgatggagagggcraggccaccaaagggtacctggacgaccccacggtgccccgcgggtccaccaccgccacttttgcagccgtcgtcctctatgtggagaatgagaggtggga

SEQ ID NO: 404525 - DNA, 201 bp, Homo sapiens
agagctggtgctgaggctgccctttccgccacgtaggggtgcccttcatcctgcgctgcggcaaggccctgaacgagcgcaaggccgaggtgaggctgcarttccatgatgtggccggcgacatcttccaccagcagtgcaagcgcaacgagctggtgatccgcgtgcagcccaacgaggccgtgtacaccaagatgatga

SEQ ID NO: 404526 - DNA, 201 bp, Homo sapiens
aaggtgttgaaatgcatctcagaggtgcaggccaacaatgtggtcctgggccagtacgtggggaaccccgatggagagggcgaggccaccaaagggtaccyggacgaccccacggtgccccgcgggtccaccaccgccacttttgcagccgtcgtcctctatgtggagaatgagaggtgggatggtaggtgatgccttcga

SEQ ID NO: 404527 - DNA, 201 bp, Homo sapiens
aaatgcatctcagaggtgcaggccaacaatgtggtcctgggccagtacgtggggaaccccgatggagagggcgaggccaccaaagggtacctggacgaccmcacggtgccccgcgggtccaccaccgccacttttgcagccgtcgtcctctatgtggagaatgagaggtgggatggtaggtgatgccttcgaggcccagca

SEQ ID NO: 404528 - DNA, 201 bp, Homo sapiens; identical to SEQ ID NO: 89767

SEQ ID NO: 404529 - DNA, 201 bp, Homo sapiens
ctatcttgggggagctcctcctcaccctgcagttcaaaacctaagtgtctgagctatcagaccgggctggaaagggctggacccctacacagccaagcacyccacggttttatgattcagtgatagcatcaccatgtccttccttgatttaaggggacctggaagacaagggggatcaggaagtgagtcttgcagcttgtc

SEQ ID NO: 404530 - DNA, 201 bp, Homo sapiens
gccagagggtcatctgggaacacaaggcacgggaggtggccacgggggcgaggaggttctggcctctactcccctgggagggcgtctgaatgatgcagctstgatcctcactccccgaagaggggttcaagggggtaacgcagctccgggctcccagcagaggctggaaccgcatcatcgtggagaagcccttcgggaggg

SEQ ID NO: 404531 - DNA, 201 bp, Homo sapiens
gcttgctgtgtgagttggagcaagtgtcttccttttcctgaacctcagcatttcgtgtagcaaatgacagcttttgaaacgagggcccagggtccttaggyttttccaagctgattttgtcatttcactgcctccgcctgtggccagcttcgggttgggcaactttgttttgttgaaatcagtagggttcccctttgctct

SEQ ID NO: 404532 - DNA, 201 bp, Homo sapiens
aaagagaggggctgacatctgtctgtgtgtctgtctgtccgtgtctcccaggccaccccagaggagaagctcaagctggaggacttctttgcccgcaactsctatgtggctggccagtacgatgatgcagcctcctaccagcgcctcaacagccacatgaatgccctccacctggggtcacaggccaaccgcctcttctac

SEQ ID NO: 404533 - DNA, 201 bp, Homo sapiens
tggcaggcagtggcatcagcaagacactctctccctcacagaacgtgaagctccctgacgcctacgagcgcctcatcctggacgtcttctgcgggagccasatgcacttcgtgcgcaggtgaggcccagctgccggcccctgcatacctgtgggctatggggtggcctttgccctccctccctgtgtgccaccggcctccc

SEQ ID NO: 404534 - DNA, 201 bp, Homo sapiens
gtctgtgtgtctgtctgtccgtgtctcccaggccaccccagaggagaagctcaagctggaggacttctttgcccgcaactcctatgtggctggccagtacratgatgcagcctcctaccagcgcctcaacagccacatgaatgccctccacctggggtcacaggccaaccgcctcttctacctggccttgcccccgaccgt

SEQ ID NO: 404535 - DNA, 201 bp, Homo sapiens
ggcatcagcaagacactctctccctcacagaacgtgaagctccctgacgcctacgagcgcctcatcctggacgtcttctgcgggagccagatgcacttcgwgcgcaggtgaggcccagctgccggcccctgcatacctgtgggctatggggtggcctttgccctccctccctgtgtgccaccggcctcccaagccatacta

SEQ ID NO: 404536 - DNA, 201 bp, Homo sapiens; identical to SEQ ID NO: 89773

SEQ ID NO: 404537 - DNA, 201 bp, Homo sapiens
catcagcaagacactctctccctcacagaacgtgaagctccctgacgcctacgagcgcctcatcctggacgtcttctgcgggagccagatgcacttcgtgygcaggtgaggcccagctgccggcccctgcatacctgtgggctatggggtggcctttgccctccctccctgtgtgccaccggcctcccaagccatactatg

SEQ ID NO: 404538 - DNA, 201 bp, Homo sapiens; identical to SEQ ID NO: 89776

SEQ ID NO: 404539 - DNA, 201 bp, Homo sapiens
tttgcccgcaactcctatgtggctggccagtacgatgatgcagcctcctaccagcgcctcaacagccacatgaatgccctccacctggggtcacaggccamccgcctcttctacctggccttgcccccgaccgtctacgaggccgtcaccaagaacattcacgagtcctgcatgagccagatgtaaggcttgccgttgccc

SEQ ID NO: 404540 - DNA, 201 bp, Homo sapiens
atcagcaagacactctctccctcacagaacgtgaagctccctgacgcctacgagcgcctcatcctggacgtcttctgcgggagccagatgcacttcgtgcrcaggtgaggcccagctgccggcccctgcatacctgtgggctatggggtggcctttgccctccctccctgtgtgccaccggcctcccaagccatactatgt

SEQ ID NO: 404541 - DNA, 201 bp, Homo sapiens
ggtcagttcctccaccttgcccctccctgcagatttgccaacaggatcttcggccccatctggaaccgggacaacatcgcctgcgttatcctcaccttcarggagccctttggcactgagggtcgcgggggctatttcgatgaatttgggatcatccggtgagagctcttcctctctcctgggaggctggcacagggtggc

SEQ ID NO: 404542 - DNA, 201 bp, Homo sapiens
ctggaggacttctttgcccgcaactcctatgtggctggccagtacgatgatgcagcctcctaccagcgcctcaacagccacatgaatgccctccacctggkgtcacaggccaaccgcctcttctacctggccttgcccccgaccgtctacgaggccgtcaccaagaacattcacgagtcctgcatgagccagatgtaaggc

SEQ ID NO: 404543 - DNA, 201 bp, Homo sapiens
ggcccctgcatacctgtgggctatggggtggcctttgccctccctccctgtgtgccaccggcctcccaagccatactatgtcccctcagcgacgagctccbtgaggcctggcgtattttcaccccactgctgcaccagattgagctggagaagcccaagcccatcccctatatttatggcaggtgaggaaagggtgggggc

SEQ ID NO: 404544 - DNA, 201 bp, Homo sapiens
tgcccgcaactcctatgtggctggccagtacgatgatgcagcctcctaccagcgcctcaacagccacatgaatgccctccacctggggtcacaggccaacygcctcttctacctggccttgcccccgaccgtctacgaggccgtcaccaagaacattcacgagtcctgcatgagccagatgtaaggcttgccgttgccctc

SEQ ID NO: 404545 - DNA, 201 bp, Homo sapiens; identical to SEQ ID NO: 89975

SEQ ID NO: 404546 - DNA, 201 bp, Homo sapiens
ctcaacacccaaggagcccattctctcccttggctttctctcaggtcaaggtgttgaaatgcatctcagaggtgcaggccaacaatgtggtcctgggccastacgtggggaaccccgatggagagggcgaggccaccaaagggtacctggacgaccccacggtgccccgcgggtccaccaccgccacttttgcagccgtcg

SEQ ID NO: 404547 - DNA, 201 bp, Homo sapiens; identical to SEQ ID NO: 89977

SEQ ID NO: 404548 - DNA, 201 bp, Homo sapiens
ccaaggagcccattctctcccttggctttctctcaggtcaaggtgttgaaatgcatctcagaggtgcaggccaacaatgtggtcctgggccagtacgtggrgaaccccgatggagagggcgaggccaccaaagggtacctggacgaccccacggtgccccgcgggtccaccaccgccacttttgcagccgtcgtcctctat

SEQ ID NO: 404549 - DNA, 201 bp, Homo sapiens; identical to SEQ ID NO: 89978

SEQ ID NO: 404550 - DNA, 201 bp, Homo sapiens
caggtcaaggtgttgaaatgcatctcagaggtgcaggccaacaatgtggtcctgggccagtacgtggggaaccccgatggagagggcgaggccaccaaagrgtacctggacgaccccacggtgccccgcgggtccaccaccgccacttttgcagccgtcgtcctctatgtggagaatgagaggtgggatggtaggtgatgc

SEQ ID NO: 404551 - DNA, 201 bp, Homo sapiens; identical to SEQ ID NO: 89787

SEQ ID NO: 404552 - DNA, 201 bp, Homo sapiens; identical to SEQ ID NO: 89788

SEQ ID NO: 404553 - DNA, 201 bp, Homo sapiens
cgcaaggccgaggtgaggctgcagttccatgatgtggccggcgacatcttccaccagcagtgcaagcgcaacgagctggtgatccgcgtgcagcccaacgrggccgtgtacaccaagatgatgaccaagaagccgggcatgttcttcaaccccgaggagtcggagctggacctgacctacggcaacagatacaaggtgccc

SEQ ID NO: 404554 - DNA, 201 bp, Homo sapiens
catgatgtggccggcgacatcttccaccagcagtgcaagcgcaacgagctggtgatccgcgtgcagcccaacgaggccgtgtacaccaagatgatgaccamgaagccgggcatgttcttcaaccccgaggagtcggagctggacctgacctacggcaacagatacaaggtgccctacagagaaggagcagtgtggagggtg

SEQ ID NO: 404555 - DNA, 201 bp, Homo sapiens; identical to SEQ ID NO: 89983

SEQ ID NO: 404556 - DNA, 201 bp, Homo sapiens; identical to SEQ ID NO: 89984

SEQ ID NO: 404557 - DNA, 201 bp, Homo sapiens
caatgtggtcctgggccagtacgtggggaaccccgatggagagggcgaggccaccaaagggtacctggacgaccccacggtgccccgcgggtccaccaccrccacttttgcagccgtcgtcctctatgtggagaatgagaggtgggatggtaggtgatgccttcgaggcccagcaaggcagaactgggcatgccctgtgtg

SEQ ID NO: 404558 - DNA, 201 bp, Homo sapiens
aatgtggtcctgggccagtacgtggggaaccccgatggagagggcgaggccaccaaagggtacctggacgaccccacggtgccccgcgggtccaccaccgmcacttttgcagccgtcgtcctctatgtggagaatgagaggtgggatggtaggtgatgccttcgaggcccagcaaggcagaactgggcatgccctgtgtgc

SEQ ID NO: 404559 - DNA, 201 bp, Homo sapiens; identical to SEQ ID NO: 89894

SEQ ID NO: 404560 - DNA, 201 bp, Homo sapiens
actccccgaagaggggttcaagggggtaacgcagctccgggctcccagcagaggctggaaccgcatcatcgtggagaagcccttcgggagggacctgcagwgctctgaccggctgtccaaccacatctcctccctgttccgtgaggaccagatctaccgcatcgaccactacctgggcaaggagatggtgcagaacctcat

SEQ ID NO: 404561 - DNA, 201 bp, Homo sapiens
tttccgccacgtaggggtgcccttcatcctgcgctgcggcaaggccctgaacgagcgcaaggccgaggtgaggctgcagttccatgatgtggccggcgacrtcttccaccagcagtgcaagcgcaacgagctggtgatccgcgtgcagcccaacgaggccgtgtacaccaagatgatgaccaagaagccgggcatgttctt

SEQ ID NO: 404562 - DNA, 201 bp, Homo sapiens
ttccgccacgtaggggtgcccttcatcctgcgctgcggcaaggccctgaacgagcgcaaggccgaggtgaggctgcagttccatgatgtggccggcgacaycttccaccagcagtgcaagcgcaacgagctggtgatccgcgtgcagcccaacgaggccgtgtacaccaagatgatgaccaagaagccgggcatgttcttc

SEQ ID NO: 404563 - DNA, 201 bp, Homo sapiens
ccgccacgtaggggtgcccttcatcctgcgctgcggcaaggccctgaacgagcgcaaggccgaggtgaggctgcagttccatgatgtggccggcgacatcytccaccagcagtgcaagcgcaacgagctggtgatccgcgtgcagcccaacgaggccgtgtacaccaagatgatgaccaagaagccgggcatgttcttcaa

SEQ ID NO: 404564 - DNA, 201 bp, Homo sapiens
ggtcaaggtgttgaaatgcatctcagaggtgcaggccaacaatgtggtcctgggccagtacgtggggaaccccgatggagagggcgaggccaccaaagggyacctggacgaccccacggtgccccgcgggtccaccaccgccacttttgcagccgtcgtcctctatgtggagaatgagaggtgggatggtaggtgatgcct

SEQ ID NO: 404565 - DNA, 201 bp, Homo sapiens; identical to SEQ ID NO: 89799

SEQ ID NO: 404566 - DNA, 201 bp, Homo sapiens; identical to SEQ ID NO: 89800

SEQ ID NO: 404567 - DNA, 201 bp, Homo sapiens
tgtgtcccaccactgcccctgtgacctcccgccagggacaggcctggtcctgccctgcccgcactggttacagctgtgccctgccctcaggtggctgttcygggatggccttctgcccgaaaacaccttcatcgtgggctatgcccgttcccgcctcacagtggctgacatccgcaaacagagtgagcccttcttcaaggt

SEQ ID NO: 404568 - DNA, 201 bp, Homo sapiens; identical to SEQ ID NO: 89801

SEQ ID NO: 404569 - DNA, 201 bp, Homo sapiens
gtcccaccactgcccctgtgacctcccgccagggacaggcctggtcctgccctgcccgcactggttacagctgtgccctgccctcaggtggctgttccggratggccttctgcccgaaaacaccttcatcgtgggctatgcccgttcccgcctcacagtggctgacatccgcaaacagagtgagcccttcttcaaggtggg

SEQ ID NO: 404570 - DNA, 201 bp, Homo sapiens
cagccacatgaatgccctccacctggggtcacaggccaaccgcctcttctacctggccttgcccccgaccgtctacgaggccgtcaccaagaacattcacragtcctgcatgagccagatgtaaggcttgccgttgccctcccttcccgcctgccaggctggcccaggcagtgctcccaccactctatgagcgtgtccggg

SEQ ID NO: 404571 - DNA, 201 bp, Homo sapiens; identical to SEQ ID NO: 89805

SEQ ID NO: 404572 - DNA, 201 bp, Homo sapiens
gccggcgacatcttccaccagcagtgcaagcgcaacgagctggtgatccgcgtgcagcccaacgaggccgtgtacaccaagatgatgaccaagaagccggvcatgttcttcaaccccgaggagtcggagctggacctgacctacggcaacagatacaaggtgccctacagagaaggagcagtgtggagggtgggcggcctg

SEQ ID NO: 404573 - DNA, 201 bp, Homo sapiens
gttggtggctagagatcttcatcatgccctgcttctactaagtcaccttgtgtccttgggcagatccctcccctgctgtggtcctcaggaaagaggagggygtggggaagatgagaagctcccaactgcttttcactaaggaccccttgaattgcccccacccacatggcacgagtagactcttgaccaagctgtcaggtt

SEQ ID NO: 404574 - DNA, 201 bp, Homo sapiens
tgtggtcctgggccagtacgtggggaaccccgatggagagggcgaggccaccaaagggtacctggacgaccccacggtgccccgcgggtccaccaccgccrcttttgcagccgtcgtcctctatgtggagaatgagaggtgggatggtaggtgatgccttcgaggcccagcaaggcagaactgggcatgccctgtgtgcgg

SEQ ID NO: 404575 - DNA, 201 bp, Homo sapiens
aggtgaacagggcggggagctaaggcgagctctggcctcttccgtccccagggacgtgatgcagaaccacctactgcagatgctgtgtctggtggccatgragaagcccgcctccaccaactcagatgacgtccgtgatgagaaggtagggggtgcaccccagtccccaggagcatgccctgtcgcaggcccatctgtgac

SEQ ID NO: 404576 - DNA, 201 bp, Homo sapiens
cgaggccaccaaagggtacctggacgaccccacggtgccccgcgggtccaccaccgccacttttgcagccgtcgtcctctatgtggagaatgagaggtggsatggtaggtgatgccttcgaggcccagcaaggcagaactgggcatgccctgtgtgcgggcactggagctcccactgagacactcacgcactggtccacac

SEQ ID NO: 404577 - DNA, 201 bp, Homo sapiens
tgcaccacagaggcccaaggtcagttcctccaccttgcccctccctgcagatttgccaacaggatcttcggccccatctggaaccgggacaacatcgcctrcgttatcctcaccttcaaggagccctttggcactgagggtcgcgggggctatttcgatgaatttgggatcatccggtgagagctcttcctctctcctggg

SEQ ID NO: 404578 - DNA, 201 bp, Homo sapiens
gaagaggggttcaagggggtaacgcagctccgggctcccagcagaggctggaaccgcatcatcgtggagaagcccttcgggagggacctgcagagctctgwccggctgtccaaccacatctcctccctgttccgtgaggaccagatctaccgcatcgaccactacctgggcaaggagatggtgcagaacctcatggtgctg

SEQ ID NO: 404579 - DNA, 201 bp, Homo sapiens
agaggggttcaagggggtaacgcagctccgggctcccagcagaggctggaaccgcatcatcgtggagaagcccttcgggagggacctgcagagctctgacyggctgtccaaccacatctcctccctgttccgtgaggaccagatctaccgcatcgaccactacctgggcaaggagatggtgcagaacctcatggtgctgag

SEQ ID NO: 404580 - DNA, 201 bp, Homo sapiens; identical to SEQ ID NO: 89813

SEQ ID NO: 404581 - DNA, 201 bp, Homo sapiens; identical to SEQ ID NO: 90003

SEQ ID NO: 404582 - DNA, 201 bp, Homo sapiens; identical to SEQ ID NO: 89815

SEQ ID NO: 404583 - DNA, 201 bp, Homo sapiens; identical to SEQ ID NO: 90005

SEQ ID NO: 404584 - DNA, 201 bp, Homo sapiens; identical to SEQ ID NO: 89817

SEQ ID NO: 404585 - DNA, 201 bp, Homo sapiens; identical to SEQ ID NO: 89818

SEQ ID NO: 404586 - DNA, 201 bp, Homo sapiens; identical to SEQ ID NO: 89819

SEQ ID NO: 404587 - DNA, 201 bp, Homo sapiens
cctctactcccctgggagggcgtctgaatgatgcagctctgatcctcactccccgaagaggggttcaagggggtaacgcagctccgggctcccagcagagrctggaaccgcatcatcgtggagaagcccttcgggagggacctgcagagctctgaccggctgtccaaccacatctcctccctgttccgtgaggaccagatc

SEQ ID NO: 404588 - DNA, 201 bp, Homo sapiens; identical to SEQ ID NO: 89821

SEQ ID NO: 404589 - DNA, 201 bp, Homo sapiens; identical to SEQ ID NO: 89822

SEQ ID NO: 404590 - DNA, 201 bp, Homo sapiens; identical to SEQ ID NO: 89924

SEQ ID NO: 404591 - DNA, 201 bp, Homo sapiens
gcctctactcccctgggagggcgtctgaatgatgcagctctgatcctcactccccgaagaggggttcaagggggtaacgcagctccgggctcccagcagargctggaaccgcatcatcgtggagaagcccttcgggagggacctgcagagctctgaccggctgtccaaccacatctcctccctgttccgtgaggaccagat

SEQ ID NO: 404592 - DNA, 201 bp, Homo sapiens; identical to SEQ ID NO: 89824

SEQ ID NO: 404593 - DNA, 201 bp, Homo sapiens
actcccctgggagggcgtctgaatgatgcagctctgatcctcactccccgaagaggggttcaagggggtaacgcagctccgggctcccagcagaggctggraccgcatcatcgtggagaagcccttcgggagggacctgcagagctctgaccggctgtccaaccacatctcctccctgttccgtgaggaccagatctaccg

SEQ ID NO: 404594 - DNA, 201 bp, Homo sapiens
caggtgatctgcctgcctcagcctcccaaagtgctgggattacaggtgtgagccaccgcatctggccctttttctcacttcttaagtggaatgcttagctycttatttttgaaccactcttttttgctaatgtaagcacttgaggtcacgtctcacaaatgtggctacatggtacttctgtcgtcccttggttctactgaa

SEQ ID NO: 404595 - DNA, 201 bp, Homo sapiens; identical to SEQ ID NO: 89826

SEQ ID NO: 404596 - DNA, 201 bp, Homo sapiens
ccctgggagggcgtctgaatgatgcagctctgatcctcactccccgaagaggggttcaagggggtaacgcagctccgggctcccagcagaggctggaaccrcatcatcgtggagaagcccttcgggagggacctgcagagctctgaccggctgtccaaccacatctcctccctgttccgtgaggaccagatctaccgcatc

SEQ ID NO: 404597 - DNA, 201 bp, Homo sapiens
ttctcacttcttaagtggaatgcttagctccttatttttgaaccactcttttttgctaatgtaagcacttgaggtcacgtctcacaaatgtggctacatgrtacttctgtcgtcccttggttctactgaattgaattttcaggttttctcctggaacgcaggagatgcgtttatgtcttctgggtcagggatggagggctg

SEQ ID NO: 404598 - DNA, 201 bp, Homo sapiens; identical to SEQ ID NO: 90018

SEQ ID NO: 404599 - DNA, 201 bp, Homo sapiens
ttttcaggttttctcctggaacgcaggagatgcgtttatgtcttctgggtcagggatggagggctggcacaggcttgaatctcggggctcttctgtctgtrtatcaggcaagacagacatgcttgtggcccagtagtgatcctgagtagtgcccagatcaccaagggtggaggatgatgtatgtaggtcgtgtccccagcc

SEQ ID NO: 404600 - DNA, 201 bp, Homo sapiens; identical to SEQ ID NO: 90019

SEQ ID NO: 404601 - DNA, 201 bp, Homo sapiens; identical to SEQ ID NO: 90020

SEQ ID NO: 404602 - DNA, 201 bp, Homo sapiens
catctggaaccgggacaacatcgcctgcgttatcctcaccttcaaggagccctttggcactgagggtcgcgggggctatttcgatgaatttgggatcatcsggtgagagctcttcctctctcctgggaggctggcacagggtggcagagccagtcaccctgcagggctactcttccctatcttgggggagctcctcctcac

SEQ ID NO: 404603 - DNA, 201 bp, Homo sapiens
ttctcaatgctctcctgttcttctgccttgttaacgagcctttcttccaccagacagcgtcatggcagagcaggtggccctgagccggacccaggtgtgcrggatcctgcgggaagagcttttccagggcgatgccttccatcagtcggatacacacatattcatcatcatgggtgcatcggtgagtatctcccaggcccc

SEQ ID NO: 404604 - DNA, 201 bp, Homo sapiens
gcgagctctggcctcttccgtccccagggacgtgatgcagaaccacctactgcagatgctgtgtctggtggccatggagaagcccgcctccaccaactcasatgacgtccgtgatgagaaggtagggggtgcaccccagtccccaggagcatgccctgtcgcaggcccatctgtgacgaggcactgagctggggtgtgcat

SEQ ID NO: 404605 - DNA, 201 bp, Homo sapiens
ggccggcgacatcttccaccagcagtgcaagcgcaacgagctggtgatccgcgtgcagcccaacgaggccgtgtacaccaagatgatgaccaagaagccgkgcatgttcttcaaccccgaggagtcggagctggacctgacctacggcaacagatacaaggtgccctacagagaaggagcagtgtggagggtgggcggcct

SEQ ID NO: 404606 - DNA, 201 bp, Homo sapiens
ctctggcctcttccgtccccagggacgtgatgcagaaccacctactgcagatgctgtgtctggtggccatggagaagcccgcctccaccaactcagatgamgtccgtgatgagaaggtagggggtgcaccccagtccccaggagcatgccctgtcgcaggcccatctgtgacgaggcactgagctggggtgtgcatgcaga

SEQ ID NO: 404607 - DNA, 201 bp, Homo sapiens
ggctaacttctcaatgctctcctgttcttctgccttgttaacgagcctttcttccaccagacagcgtcatggcagagcaggtggccctgagccggacccasgtgtgcgggatcctgcgggaagagcttttccagggcgatgccttccatcagtcggatacacacatattcatcatcatgggtgcatcggtgagtatctccc

SEQ ID NO: 404608 - DNA, 201 bp, Homo sapiens
gctaacttctcaatgctctcctgttcttctgccttgttaacgagcctttcttccaccagacagcgtcatggcagagcaggtggccctgagccggacccagktgtgcgggatcctgcgggaagagcttttccagggcgatgccttccatcagtcggatacacacatattcatcatcatgggtgcatcggtgagtatctccca

SEQ ID NO: 404609 - DNA, 201 bp, Homo sapiens
cctgggcagggacagtggatgtcttcgtcaccttagtcacctgagtttccagcccaggctgagccctgggcttgacccattttccacttgtaacgttgatyggaagcttggggtgcatatgggtgtggggaagaggaattcacccagcagggcgggaggggctgttcggatgggacgctgctacagagctgacaggagcag

SEQ ID NO: 404610 - DNA, 201 bp, Homo sapiens
cactttgggagactgaggtgggtggatcactggaggccaggagtccgagaccagcctggtcaacatagcaaaactccgtctccacttaaaaaaaaaaaaaattagctaggcatggtagcacatgcctctaatcccagcttttcgggaggctgaggcacaagaattgtttgaagctgggaggcagaggttacagtgagccga

SEQ ID NO: 404611 - DNA, 201 bp, Homo sapiens
gtactatcagcaatggttcttaagctacagggaaacctatacagaggggaagtggagaataattccagatgcctccgatgggtagctttggaggcaacaawctatgaaagaagcccaggaactctgtctttgcttgcagaatagtacgttgtcgagagcgagggctttgatgtcagccccgcctggctgtgggtcccagcc

SEQ ID NO: 404612 - DNA, 201 bp, Homo sapiens; identical to SEQ ID NO: 90323

SEQ ID NO: 404613 - DNA, 201 bp, Homo sapiens
cgcccttccaacctgtgagccctgcattccttacccttggttggattcttcccgggctgggagaaatgaccgcttctatgaggagaccatgtgccgaggtygtgtgctaggaagccagttgctgtgagaaatgaccagtgtcatgtctgtctttcagccaccctacatcatgtagcagttcttctgagatcatgtctgtgc

SEQ ID NO: 404614 - DNA, 201 bp, Homo sapiens; identical to SEQ ID NO: 90325

SEQ ID NO: 404615 - DNA, 201 bp, Homo sapiens; identical to SEQ ID NO: 90326

SEQ ID NO: 404616 - DNA, 201 bp, Homo sapiens; identical to SEQ ID NO: 90327

SEQ ID NO: 404617 - DNA, 201 bp, Homo sapiens; identical to SEQ ID NO: 90329

SEQ ID NO: 404618 - DNA, 201 bp, Homo sapiens
aagagcgagaccgtgcctcaaagaaaaaaaagttaaacccagctgagggcggtggctcacgcctgcagtctcagtacgtggggcctgaggagggaggatcrcttgagcccaggagttcgcattcagcttggcaaacagtgagaccctgtctctaaaaaaataaagtaaaagaaaccgggaattgagtacgaattggaacaa

SEQ ID NO: 404619 - DNA, 201 bp, Homo sapiens
agcctgggtgacaagagtaagaccctatctctaaaaacaagacaaaaaataatagaaatcacttgaaatgaataatctgttaggttcagattttacagatstaaggccaggaataaaagggaacatgatctctggtattctcacaaaagccctgagaagttcagattatcagtcctatctgtagatgaggattggagaaag

SEQ ID NO: 404620 - DNA, 201 bp, Homo sapiens
ctgctcatcacctagggagtggggcttgtagacattttggcatgcttccttcctgtctttgttctaggcatacatgtatattttacacagttgagatcatmctgaatagaaaggtttgcccatagccactcttgaaagagcagcaggtaacatccaatttggttgctaaggactaggctgctccagaattcacagttgcaa

SEQ ID NO: 404621 - DNA, 201 bp, Homo sapiens
aaaagaggacatggatatgtgtgcatgcgtgtataagtattttaagaggccaggacatccttaaagaatggggtggctcagaaaccctttctgtactatcrgcaatggttcttaagctacagggaaacctatacagaggggaagtggagaataattccagatgcctccgatgggtagctttggaggcaacaatctatgaaa

SEQ ID NO: 404622 - DNA, 201 bp, Homo sapiens; identical to SEQ ID NO: 90331

SEQ ID NO: 404623 - DNA, 201 bp, Homo sapiens
gaggggtggtgagcttaccgggctttaaagcgcccttccaacctgtgagccctgcattccttacccttggttggattcttcccgggctgggagaaatgacsgcttctatgaggagaccatgtgccgaggtcgtgtgctaggaagccagttgctgtgagaaatgaccagtgtcatgtctgtctttcagccaccctacatcat

SEQ ID NO: 404624 - DNA, 201 bp, Homo sapiens
attgcaggagagaagatgagaatgggactattttcaataactgtgcacatgcaagtcacaaacattccagatcccttgacttgcttgcggagggagcggcyggcggagggagcggcaggtggagggagtggcacgaggcatgcggagggagctgcaccgacatcacataaacgcactgggcagctcgcaggcgccattcgc

SEQ ID NO: 404625 - DNA, 201 bp, Homo sapiens
tccacttgtaacgttgatcggaagcttggggtgcatatgggtgtggggaagaggaattcacccagcagggcgggaggggctgttcggatgggacgctgctrcagagctgacaggagcagcctgcactcagtgcgtgagtccacctgataccatgtcctgcagctgcgtctgggctcactgggtcccttctcttacagagac

SEQ ID NO: 404626 - DNA, 201 bp, Homo sapiens
gatccccctgtaagagtcaggtggctgagagcatgccctttggggatcaggttgctagaaggtgattgttaaaagagacagttgggagacccaggggcagyggctcacgcccgtaatcccagaactttgggaggccggccgaggtgggtggatcacctgtcagttcgagaccagcctgaccaatatggtgaaacctcgtcc

SEQ ID NO: 404627 - DNA, 201 bp, Homo sapiens
atgggcccactggcctcacacttcacagccagagggaagcagagttggtctgactgctgagcccaggctcggtccattatgttataggacttccaagggcrtgcaaggcgactgggagccagagcttgttacgtgagtgtggtgggtgccatagggagggagatgtggctagaggcatagtcaaaagagacttgagttgag

SEQ ID NO: 404628 - DNA, 201 bp, Homo sapiens
agaatccggacaacgaccgatttgtcctcgcaaaggtatgccggtggggagcccagggctgctgtggcgcctgctggttaagcccagtttgaacagccacygtgtgggaacaaggcctgaaatgggcctcgtttattattttggttcttctttctttgcatcttaaagctcgagtgttctagtgagggccacttggagccc

SEQ ID NO: 404629 - DNA, 201 bp, Homo sapiens; identical to SEQ ID NO: 90330

SEQ ID NO: 404630 - DNA, 201 bp, Homo sapiens
atgtgaaccgcctgggacacagtggtgcattgcccgccgagcactgcataaacatctatcagaggcgctgcgaagcctttgggtaactgtattctcttgtrcttgatttccattctgtcctgcccccttcatctcttgtaacccagcctgctcctctgttggcaggtggaacacttatgtggtggacggccgggacgtgga

SEQ ID NO: 404631 - DNA, 201 bp, Homo sapiens
ctttatttataacaagtagtatttttaaaaaaaatttttttagacgaagtctcgctctgtcgcccaggctggagtggagtgctcagctcactgcaagctcygcctcctgggttcacgacattctcctgcctcagcctcccaagtagctaggactacaggtgcccaccaccacacccggctaattttttgtattttttagta

SEQ ID NO: 404632 - DNA, 201 bp, Homo sapiens
ttttttttttgtcttgagacggagtcttgctctgtcgcccaggctggagggcagtggcgcaatgttggctcactgcaacctctgctgtccgggttcaagcrattctcgtgccttagcctcccgagtagctgggactacaggcacacgccaccactgccagctaatttttgtatttttagtagagacggggtttcaccatgt

SEQ ID NO: 404633 - DNA, 201 bp, Homo sapiens
ccggaaggtggaggttgcagtgagccgagagagtgccactgtactccagcctgggcaacagagtgagactgtgtctcaaaaaataaataaataaatcttgytccagagcctgggctagatagtaagaggacagtgtggatgcagttaagaaccatatatgtctgaattttttgtacatgttcattttgttcccttcacctt

SEQ ID NO: 404634 - DNA, 201 bp, Homo sapiens
tgagggagattgtgggaagcgaatggtctggagcagcagctccagttgcgtccgtttctcctcctgaaatgcatttgtttggttggcccagatgatccccsacagggtcctaaacctctcttgtcttgctccagctaccgggtgttctgcctcatgagtgatggcgagtcctcagaaggctctgtctgggaggcaatggcc

SEQ ID NO: 404635 - DNA, 201 bp, Homo sapiens
cagcagttactttggcagcattcagaaagggcctcagttactctaccatgacaaatttctcagtctgtcaccgttcacttcctaaaagaaattcattgtasaaggtagaatgggatcttcatggcatttctgattcacaatgctcctgaaagttcctcggcatgtggaaaggccacagatgaatttaagcatgtgaaagaa

SEQ ID NO: 404636 - DNA, 201 bp, Homo sapiens
cagtggctcggtctcagctcaatgcacccctgacctcctggcctcaagcgatcttcccatttcagcctcttgagtagatggcattacaggcatgtgccacyacgaccggctaatttttgtattttttgtagagacatggtctcactatgttgcccaggctggcctcaaactcctgggcccaagcgcccacctctgcctccc

SEQ ID NO: 404637 - DNA, 201 bp, Homo sapiens
gagtgtgcctaacagatggagcactctgcaatggcgtgaagagcaaaacacacgagtctccgggattcctcacttgggaaacgtcagagagtcattttcgygaatgacagaaatgacatgggaaagatgagccagctggcgtgcctgtggcaggcagatgggcttactagatgtggctgcacacacttgcttctagaatgc

SEQ ID NO: 404638 - DNA, 201 bp, Homo sapiens
agggcctggctggactcacatgcaggccgctttctaagagcagcagttactttggcagcattcagaaagggcctcagttactctaccatgacaaatttctyagtctgtcaccgttcacttcctaaaagaaattcattgtagaaggtagaatgggatcttcatggcatttctgattcacaatgctcctgaaagttcctcggc

SEQ ID NO: 404639 - DNA, 201 bp, Homo sapiens
tgagtagtgagcccagtctccccaggtctgcccaccacgctgaccatcccctgctcagcctgcctgtcagggccatgcatagagaaaagcagaaacgtctrtggagaaaataagtgactctgctcatcacctagggagtggggcttgtagacattttggcatgcttccttcctgtctttgttctaggcatacatgtatatt

SEQ ID NO: 404640 - DNA, 201 bp, Homo sapiens
gaatagaaaggtttgcccatagccactcttgaaagagcagcaggtaacatccaatttggttgctaaggactaggctgctccagaattcacagttgcaagtrctcagaatggccagagtgctgccataaagcaggtgtttccagaactgtccactgtgtgccataacgtagctggaaaacgccaccaaatggaaaagttagt

SEQ ID NO: 404641 - DNA, 201 bp, Homo sapiens
aaagcaggaacaggacagattcaggatgtcctgtcggggcatggaccctggaaagctgcggacaccaggagggcaggcaagagagtctcatctcttgctcyctaggagctatgagttgagggcgccgtctgagcaggagggacggacgggtgcccagggtttgaggaaagaggggtgtgggaaggacgcatgctagaactt

SEQ ID NO: 404642 - DNA, 201 bp, Homo sapiens
tagaaggtggcaatgctttaaaagggaacttaccagaaaaatgaatgtgtaaatgtttggggaacttaaggatgctgctttcttccccttcccctctggcyctgtttgcttattgataaggaaatgtggcagaagaacctaaaagttgctttacagctagaacagaaaactagccagaggtaaagcctgcttgtgagcccc

SEQ ID NO: 404643 - DNA, 201 bp, Homo sapiens
tacaacaattatcctggagtggtggtgcacacctgtagtcccagctacccaggacgctgagacgggaggatcgcttgatcccggggatgtcgaggctgccrtgatcgcaccactgccctccagccagggtggcagactgagaccccatctcaaaaaataaataaataaaagcaaacaagaaaaaaaaaggcttgaaacata

SEQ ID NO: 404644 - DNA, 201 bp, Homo sapiens
gagggcagatggggttgcggcaatcaactccctgcaggggtggggaatcagagaagattcatccaggcagcaaacttgtggctggagcctcaggcaggacraggagctgcctaacaagaggtggaaggggttacgtacgttgcgaaagactccaaccctcctggtgagtcagatctgtcatctcgggctccagtatctcac

SEQ ID NO: 404645 - DNA, 201 bp, Homo sapiens
gtcttccagacccgctgacctttgctgggtggcagagtggctatcaacagcacactgcttggcaactgtgttgaaaaccgacatatgttaacactgccttyatttataagttttaacactttataacgtgttatggtttgttttaaaatttctacttgagtttatattgtaatgtatatattagtacatatacctataagt

SEQ ID NO: 404646 - DNA, 201 bp, Homo sapiens
tattagtacatatacctataagtaaatacattggggctatgtgcttcctacgcttttactgttaaagatacaggatccagctaggcgtggtggctcacgcrtttaatcccagcactttgggaggctgagatgggcgcatcacctgaggtcgggagtttgagaccagcctgaccaacatggagaaaccctgtctctactaaa

SEQ ID NO: 404647 - DNA, 201 bp, Homo sapiens
ctctcaccctcacacattttctcaggtgtcctcccatcccccaagaatggtcaacaactccattagacaaatactgatttaatttttgagaccgggtctcrctctgtcatccaggctggagtgcagtggcacaatcatagctcactgcggccttaaactcctgggcttggctgggcatggtggttcatgcctgcagtccca
